United States Patent Application Publication US 2025/0235561 A1 - sequence listing, part 2

SEQ ID NO: 21514 - DNA, 20 bp, synthetic construct
  misc_feature 1..20: note = chemically synthesized
  source 1..20: mol_type = other DNA
gaaatgactattgtcacaat

SEQ ID NO: 21515 - DNA, 20 bp, synthetic construct
  misc_feature 1..20: note = chemically synthesized
  source 1..20: mol_type = other DNA
aaatgactattgtcacaatc

SEQ ID NO: 21516 - DNA, 20 bp, synthetic construct
  misc_feature 1..20: note = chemically synthesized
  source 1..20: mol_type = other DNA
tcacaatcaggaatgaccta

SEQ ID NO: 21517 - DNA, 20 bp, synthetic construct
  misc_feature 1..20: note = chemically synthesized
  source 1..20: mol_type = other DNA
atgacctaaagaataatttt

SEQ ID NO: 21518 - DNA, 20 bp, synthetic construct
  misc_feature 1..20: note = chemically synthesized
  source 1..20: mol_type = other DNA
ttttgagtttatgtatttac

SEQ ID NO: 21519 - DNA, 20 bp, synthetic construct
  misc_feature 1..20: note = chemically synthesized
  source 1..20: mol_type = other DNA
attgttgatctctccctttt

SEQ ID NO: 21520 - DNA, 20 bp, synthetic construct
  misc_feature 1..20: note = chemically synthesized
  source 1..20: mol_type = other DNA
ttgttgatctctcccttttt

SEQ ID NO: 21521 - DNA, 20 bp, synthetic construct
  misc_feature 1..20: note = chemically synthesized
  source 1..20: mol_type = other DNA
ttataataatcactctattc

SEQ ID NO: 21522 - DNA, 20 bp, synthetic construct
  misc_feature 1..20: note = chemically synthesized
  source 1..20: mol_type = other DNA
tctaactcctgttatccatc

SEQ ID NO: 21523 - DNA, 20 bp, synthetic construct
  misc_feature 1..20: note = chemically synthesized
  source 1..20: mol_type = other DNA
ttaactcctgttcctctcca

SEQ ID NO: 21524 - DNA, 20 bp, synthetic construct
  misc_feature 1..20: note = chemically synthesized
  source 1..20: mol_type = other DNA
ctccatggcccttaaatgtc

SEQ ID NO: 21525 - DNA, 20 bp, synthetic construct
  misc_feature 1..20: note = chemically synthesized
  source 1..20: mol_type = other DNA
tccatggcccttaaatgtcc

SEQ ID NO: 21526 - DNA, 20 bp, synthetic construct
  misc_feature 1..20: note = chemically synthesized
  source 1..20: mol_type = other DNA
ccatggcccttaaatgtcca

SEQ ID NO: 21527 - DNA, 20 bp, synthetic construct
  misc_feature 1..20: note = chemically synthesized
  source 1..20: mol_type = other DNA
ttaaatgtccagggttctcc

SEQ ID NO: 21528 - DNA, 20 bp, synthetic construct
  misc_feature 1..20: note = chemically synthesized
  source 1..20: mol_type = other DNA
taaatgtccagggttctccc

SEQ ID NO: 21529 - DNA, 20 bp, synthetic construct
  misc_feature 1..20: note = chemically synthesized
  source 1..20: mol_type = other DNA
tccagggttctcccaggctc

SEQ ID NO: 21530 - DNA, 20 bp, synthetic construct
  misc_feature 1..20: note = chemically synthesized
  source 1..20: mol_type = other DNA
gttctcccaggctccagcct

SEQ ID NO: 21531 - DNA, 20 bp, synthetic construct
  misc_feature 1..20: note = chemically synthesized
  source 1..20: mol_type = other DNA
ttcaccttatatatacttgc

SEQ ID NO: 21532 - DNA, 20 bp, synthetic construct
  misc_feature 1..20: note = chemically synthesized
  source 1..20: mol_type = other DNA
tcaccttatatatacttgct

SEQ ID NO: 21533 - DNA, 20 bp, synthetic construct
  misc_feature 1..20: note = chemically synthesized
  source 1..20: mol_type = other DNA
caccttatatatacttgcta

SEQ ID NO: 21534 - DNA, 20 bp, synthetic construct
  misc_feature 1..20: note = chemically synthesized
  source 1..20: mol_type = other DNA
ttatatatacttgctagggc

SEQ ID NO: 21535 - DNA, 20 bp, synthetic construct
  misc_feature 1..20: note = chemically synthesized
  source 1..20: mol_type = other DNA
tatatatacttgctagggct

SEQ ID NO: 21536 - DNA, 20 bp, synthetic construct
  misc_feature 1..20: note = chemically synthesized
  source 1..20: mol_type = other DNA
atacttgctagggctgggac

SEQ ID NO: 21537 - DNA, 20 bp, synthetic construct
  misc_feature 1..20: note = chemically synthesized
  source 1..20: mol_type = other DNA
acttgctagggctgggacaa

SEQ ID NO: 21538 - DNA, 20 bp, synthetic construct
  misc_feature 1..20: note = chemically synthesized
  source 1..20: mol_type = other DNA
gggacaagagtgaaccaaac

SEQ ID NO: 21539 - DNA, 20 bp, synthetic construct
  misc_feature 1..20: note = chemically synthesized
  source 1..20: mol_type = other DNA
ggacaagagtgaaccaaaca

SEQ ID NO: 21540 - DNA, 20 bp, synthetic construct
  misc_feature 1..20: note = chemically synthesized
  source 1..20: mol_type = other DNA
agtgaaccaaacaaggcatg

SEQ ID NO: 21541 - DNA, 20 bp, synthetic construct
  misc_feature 1..20: note = chemically synthesized
  source 1..20: mol_type = other DNA
gtgaaccaaacaaggcatgt

SEQ ID NO: 21542 - DNA, 20 bp, synthetic construct
  misc_feature 1..20: note = chemically synthesized
  source 1..20: mol_type = other DNA
tgaaccaaacaaggcatgta

SEQ ID NO: 21543 - DNA, 20 bp, synthetic construct
  misc_feature 1..20: note = chemically synthesized
  source 1..20: mol_type = other DNA
gcatgtagggcacaatattt

SEQ ID NO: 21544 - DNA, 20 bp, synthetic construct
  misc_feature 1..20: note = chemically synthesized
  source 1..20: mol_type = other DNA
atgtagggcacaatatttaa

SEQ ID NO: 21545 - DNA, 20 bp, synthetic construct
  misc_feature 1..20: note = chemically synthesized
  source 1..20: mol_type = other DNA
tgtagggcacaatatttaag

SEQ ID NO: 21546 - DNA, 20 bp, synthetic construct
  misc_feature 1..20: note = chemically synthesized
  source 1..20: mol_type = other DNA
tttaagaggtcctcacttct

SEQ ID NO: 21547 - DNA, 20 bp, synthetic construct
  misc_feature 1..20: note = chemically synthesized
  source 1..20: mol_type = other DNA
ttaagaggtcctcacttctc

SEQ ID NO: 21548 - DNA, 20 bp, synthetic construct
  misc_feature 1..20: note = chemically synthesized
  source 1..20: mol_type = other DNA
taagaggtcctcacttctcg

SEQ ID NO: 21549 - DNA, 20 bp, synthetic construct
  misc_feature 1..20: note = chemically synthesized
  source 1..20: mol_type = other DNA
cctcacttctcggggcatac

SEQ ID NO: 21550 - DNA, 20 bp, synthetic construct
  misc_feature 1..20: note = chemically synthesized
  source 1..20: mol_type = other DNA
acaagtatatttatgcccta

SEQ ID NO: 21551 - DNA, 20 bp, synthetic construct
  misc_feature 1..20: note = chemically synthesized
  source 1..20: mol_type = other DNA
caagtatatttatgccctac

SEQ ID NO: 21552 - DNA, 20 bp, synthetic construct
  misc_feature 1..20: note = chemically synthesized
  source 1..20: mol_type = other DNA
cctacaggccttgcttacca

SEQ ID NO: 21553 - DNA, 20 bp, synthetic construct
  misc_feature 1..20: note = chemically synthesized
  source 1..20: mol_type = other DNA
aggccttgcttaccacagtc

SEQ ID NO: 21554 - DNA, 20 bp, synthetic construct
  misc_feature 1..20: note = chemically synthesized
  source 1..20: mol_type = other DNA
ttgcttaccacagtctagtc

SEQ ID NO: 21555 - DNA, 20 bp, synthetic construct
  misc_feature 1..20: note = chemically synthesized
  source 1..20: mol_type = other DNA
ccctgtcaacaaaatttact

SEQ ID NO: 21556 - DNA, 20 bp, synthetic construct
  misc_feature 1..20: note = chemically synthesized
  source 1..20: mol_type = other DNA
gagcatacaaccactactgc

SEQ ID NO: 21557 - DNA, 20 bp, synthetic construct
  misc_feature 1..20: note = chemically synthesized
  source 1..20: mol_type = other DNA
agcatacaaccactactgcc

SEQ ID NO: 21558 - DNA, 20 bp, synthetic construct
  misc_feature 1..20: note = chemically synthesized
  source 1..20: mol_type = other DNA
actactgccaggcactgtac

SEQ ID NO: 21559 - DNA, 20 bp, synthetic construct
  misc_feature 1..20: note = chemically synthesized
  source 1..20: mol_type = other DNA
ctactgccaggcactgtact

SEQ ID NO: 21560 - DNA, 20 bp, synthetic construct
  misc_feature 1..20: note = chemically synthesized
  source 1..20: mol_type = other DNA
caatatccatgctcactctc

SEQ ID NO: 21561 - DNA, 20 bp, synthetic construct
  misc_feature 1..20: note = chemically synthesized
  source 1..20: mol_type = other DNA
tctccagatgcccacacacg

SEQ ID NO: 21562 - DNA, 20 bp, synthetic construct
  misc_feature 1..20: note = chemically synthesized
  source 1..20: mol_type = other DNA
gtggctgtaactactgttta

SEQ ID NO: 21563 - DNA, 20 bp, synthetic construct
  misc_feature 1..20: note = chemically synthesized
  source 1..20: mol_type = other DNA
actactgtttacagaacaat

SEQ ID NO: 21564 - DNA, 20 bp, synthetic construct
  misc_feature 1..20: note = chemically synthesized
  source 1..20: mol_type = other DNA
gagttccaaatactcaccta

SEQ ID NO: 21565 - DNA, 20 bp, synthetic construct
  misc_feature 1..20: note = chemically synthesized
  source 1..20: mol_type = other DNA
tccaaatactcacctatagt

SEQ ID NO: 21566 - DNA, 20 bp, synthetic construct
  misc_feature 1..20: note = chemically synthesized
  source 1..20: mol_type = other DNA
cagatacgtctcctgaattt

SEQ ID NO: 21567 - DNA, 20 bp, synthetic construct
  misc_feature 1..20: note = chemically synthesized
  source 1..20: mol_type = other DNA
cctaactgtatatcataatg

SEQ ID NO: 21568 - DNA, 20 bp, synthetic construct
  misc_feature 1..20: note = chemically synthesized
  source 1..20: mol_type = other DNA
actgtatatcataatgtagc

SEQ ID NO: 21569 - DNA, 20 bp, synthetic construct
  misc_feature 1..20: note = chemically synthesized
  source 1..20: mol_type = other DNA
tatcataatgtagccagtaa

SEQ ID NO: 21570 - DNA, 20 bp, synthetic construct
  misc_feature 1..20: note = chemically synthesized
  source 1..20: mol_type = other DNA
atgtaatgcttctgctgtgt

SEQ ID NO: 21571 - DNA, 20 bp, synthetic construct
  misc_feature 1..20: note = chemically synthesized
  source 1..20: mol_type = other DNA
gctgtgttggacactgtgct

SEQ ID NO: 21572 - DNA, 20 bp, synthetic construct
  misc_feature 1..20: note = chemically synthesized
  source 1..20: mol_type = other DNA
atctcacttcatcctcacaa

SEQ ID NO: 21573 - DNA, 20 bp, synthetic construct
  misc_feature 1..20: note = chemically synthesized
  source 1..20: mol_type = other DNA
catcctcacaaaagtcccac

SEQ ID NO: 21574 - DNA, 20 bp, synthetic construct
  misc_feature 1..20: note = chemically synthesized
  source 1..20: mol_type = other DNA
ctcacaaaagtcccacgaga

SEQ ID NO: 21575 - DNA, 20 bp, synthetic construct
  misc_feature 1..20: note = chemically synthesized
  source 1..20: mol_type = other DNA
tcacaaaagtcccacgagat

SEQ ID NO: 21576 - DNA, 20 bp, synthetic construct
  misc_feature 1..20: note = chemically synthesized
  source 1..20: mol_type = other DNA
gtcatcttatttttatgaat

SEQ ID NO: 21577 - DNA, 20 bp, synthetic construct
  misc_feature 1..20: note = chemically synthesized
  source 1..20: mol_type = other DNA
tcatcttatttttatgaatg

SEQ ID NO: 21578 - DNA, 20 bp, synthetic construct
  misc_feature 1..20: note = chemically synthesized
  source 1..20: mol_type = other DNA
tcttatttttatgaatgagg

SEQ ID NO: 21579 - DNA, 20 bp, synthetic construct
  misc_feature 1..20: note = chemically synthesized
  source 1..20: mol_type = other DNA
atttttatgaatgaggaaga

SEQ ID NO: 21580 - DNA, 20 bp, synthetic construct
  misc_feature 1..20: note = chemically synthesized
  source 1..20: mol_type = other DNA
gaatgaggaagatagattca

SEQ ID NO: 21581 - DNA, 20 bp, synthetic construct
  misc_feature 1..20: note = chemically synthesized
  source 1..20: mol_type = other DNA
atgaggaagatagattcata

SEQ ID NO: 21582 - DNA, 20 bp, synthetic construct
  misc_feature 1..20: note = chemically synthesized
  source 1..20: mol_type = other DNA
tgaggaagatagattcatag

SEQ ID NO: 21583 - DNA, 20 bp, synthetic construct
  misc_feature 1..20: note = chemically synthesized
  source 1..20: mol_type = other DNA
aagatagattcatagaggct

SEQ ID NO: 21584 - DNA, 20 bp, synthetic construct
  misc_feature 1..20: note = chemically synthesized
  source 1..20: mol_type = other DNA
agatagattcatagaggcta

SEQ ID NO: 21585 - DNA, 20 bp, synthetic construct
  misc_feature 1..20: note = chemically synthesized
  source 1..20: mol_type = other DNA
gatagattcatagaggctaa

SEQ ID NO: 21586 - DNA, 20 bp, synthetic construct
  misc_feature 1..20: note = chemically synthesized
  source 1..20: mol_type = other DNA
agaggctaagggctttgccc

SEQ ID NO: 21587 - DNA, 20 bp, synthetic construct
  misc_feature 1..20: note = chemically synthesized
  source 1..20: mol_type = other DNA
gaggctaagggctttgccca

SEQ ID NO: 21588 - DNA, 20 bp, synthetic construct
  misc_feature 1..20: note = chemically synthesized
  source 1..20: mol_type = other DNA
aggtaacatactaaaacatt

SEQ ID NO: 21589 - DNA, 20 bp, synthetic construct
  misc_feature 1..20: note = chemically synthesized
  source 1..20: mol_type = other DNA
ggtaacatactaaaacattc

SEQ ID NO: 21590 - DNA, 20 bp, synthetic construct
  misc_feature 1..20: note = chemically synthesized
  source 1..20: mol_type = other DNA
atactaaaacattcaggatt

SEQ ID NO: 21591 - DNA, 20 bp, synthetic construct
  misc_feature 1..20: note = chemically synthesized
  source 1..20: mol_type = other DNA
aacattcaggattcagactc

SEQ ID NO: 21592 - DNA, 20 bp, synthetic construct
  misc_feature 1..20: note = chemically synthesized
  source 1..20: mol_type = other DNA
attcaggattcagactctgg

SEQ ID NO: 21593 - DNA, 20 bp, synthetic construct
  misc_feature 1..20: note = chemically synthesized
  source 1..20: mol_type = other DNA
aggattcagactctggcagt

SEQ ID NO: 21594 - DNA, 20 bp, synthetic construct
  misc_feature 1..20: note = chemically synthesized
  source 1..20: mol_type = other DNA
agactctggcagtcagacta

SEQ ID NO: 21595 - DNA, 20 bp, synthetic construct
  misc_feature 1..20: note = chemically synthesized
  source 1..20: mol_type = other DNA
actctggcagtcagactaaa

SEQ ID NO: 21596 - DNA, 20 bp, synthetic construct
  misc_feature 1..20: note = chemically synthesized
  source 1..20: mol_type = other DNA
tggcagtcagactaaagagc

SEQ ID NO: 21597 - DNA, 20 bp, synthetic construct
  misc_feature 1..20: note = chemically synthesized
  source 1..20: mol_type = other DNA
gactaaagagccagttctct

SEQ ID NO: 21598 - DNA, 20 bp, synthetic construct
  misc_feature 1..20: note = chemically synthesized
  source 1..20: mol_type = other DNA
ttctcttagacattattctg

SEQ ID NO: 21599 - DNA, 20 bp, synthetic construct
  misc_feature 1..20: note = chemically synthesized
  source 1..20: mol_type = other DNA
ccataatcacatcaaacaca

SEQ ID NO: 21600 - DNA, 20 bp, synthetic construct
  misc_feature 1..20: note = chemically synthesized
  source 1..20: mol_type = other DNA
acatcaaacacaaagtcccc

SEQ ID NO: 21601 - DNA, 20 bp, synthetic construct
  misc_feature 1..20: note = chemically synthesized
  source 1..20: mol_type = other DNA
acacaaagtccccaagactc

SEQ ID NO: 21602 - DNA, 20 bp, synthetic construct
  misc_feature 1..20: note = chemically synthesized
  source 1..20: mol_type = other DNA
gccatttccccttccatacc

SEQ ID NO: 21603 - DNA, 20 bp, synthetic construct
  misc_feature 1..20: note = chemically synthesized
  source 1..20: mol_type = other DNA
tttccccttccatacccaga

SEQ ID NO: 21604 - DNA, 20 bp, synthetic construct
  misc_feature 1..20: note = chemically synthesized
  source 1..20: mol_type = other DNA
ccttccatacccagatggtt

SEQ ID NO: 21605 - DNA, 20 bp, synthetic construct
  misc_feature 1..20: note = chemically synthesized
  source 1..20: mol_type = other DNA
ttttttgtactgctactgtt

SEQ ID NO: 21606 - DNA, 20 bp, synthetic construct
  misc_feature 1..20: note = chemically synthesized
  source 1..20: mol_type = other DNA
tttttgtactgctactgttc

SEQ ID NO: 21607 - DNA, 20 bp, synthetic construct
  misc_feature 1..20: note = chemically synthesized
  source 1..20: mol_type = other DNA
tactgctactgttcaggttc

SEQ ID NO: 21608 - DNA, 20 bp, synthetic construct
  misc_feature 1..20: note = chemically synthesized
  source 1..20: mol_type = other DNA
tctagcctttatgtctcccg

SEQ ID NO: 21609 - DNA, 20 bp, synthetic construct
  misc_feature 1..20: note = chemically synthesized
  source 1..20: mol_type = other DNA
tctcccgcagataattgcaa

SEQ ID NO: 21610 - DNA, 20 bp, synthetic construct
  misc_feature 1..20: note = chemically synthesized
  source 1..20: mol_type = other DNA
gcagataattgcaatagtct

SEQ ID NO: 21611 - DNA, 20 bp, synthetic construct
  misc_feature 1..20: note = chemically synthesized
  source 1..20: mol_type = other DNA
cagataattgcaatagtctc

SEQ ID NO: 21612 - DNA, 20 bp, synthetic construct
  misc_feature 1..20: note = chemically synthesized
  source 1..20: mol_type = other DNA
gtctcaggactgctctctcc

SEQ ID NO: 21613 - DNA, 20 bp, synthetic construct
  misc_feature 1..20: note = chemically synthesized
  source 1..20: mol_type = other DNA
ggactgctctctcctagtct

SEQ ID NO: 21614 - DNA, 20 bp, synthetic construct
  misc_feature 1..20: note = chemically synthesized
  source 1..20: mol_type = other DNA
gctctctcctagtcttggta

SEQ ID NO: 21615 - DNA, 20 bp, synthetic construct
  misc_feature 1..20: note = chemically synthesized
  source 1..20: mol_type = other DNA
ctcccccactatcatttcat

SEQ ID NO: 21616 - DNA, 20 bp, synthetic construct
  misc_feature 1..20: note = chemically synthesized
  source 1..20: mol_type = other DNA
tcatttcattagcgtgttgc

SEQ ID NO: 21617 - DNA, 20 bp, synthetic construct
  misc_feature 1..20: note = chemically synthesized
  source 1..20: mol_type = other DNA
tcattagcgtgttgccagac

SEQ ID NO: 21618 - DNA, 20 bp, synthetic construct
  misc_feature 1..20: note = chemically synthesized
  source 1..20: mol_type = other DNA
cattagcgtgttgccagact

SEQ ID NO: 21619 - DNA, 20 bp, synthetic construct
  misc_feature 1..20: note = chemically synthesized
  source 1..20: mol_type = other DNA
ccagactgggcatcctaaat

SEQ ID NO: 21620 - DNA, 20 bp, synthetic construct
  misc_feature 1..20: note = chemically synthesized
  source 1..20: mol_type = other DNA
gggcatcctaaatcagccat

SEQ ID NO: 21621 - DNA, 20 bp, synthetic construct
  misc_feature 1..20: note = chemically synthesized
  source 1..20: mol_type = other DNA
catcctaaatcagccatcag

SEQ ID NO: 21622 - DNA, 20 bp, synthetic construct
  misc_feature 1..20: note = chemically synthesized
  source 1..20: mol_type = other DNA
attttattgtccaatctcct

SEQ ID NO: 21623 - DNA, 20 bp, synthetic construct
  misc_feature 1..20: note = chemically synthesized
  source 1..20: mol_type = other DNA
ttttattgtccaatctcctt

SEQ ID NO: 21624 - DNA, 20 bp, synthetic construct
  misc_feature 1..20: note = chemically synthesized
  source 1..20: mol_type = other DNA
tgacttcattatctgatgac

SEQ ID NO: 21625 - DNA, 20 bp, synthetic construct
  misc_feature 1..20: note = chemically synthesized
  source 1..20: mol_type = other DNA
atctgatgaccagctctgcc

SEQ ID NO: 21626 - DNA, 20 bp, synthetic construct
  misc_feature 1..20: note = chemically synthesized
  source 1..20: mol_type = other DNA
tttacctgtctcacttgtca

SEQ ID NO: 21627 - DNA, 20 bp, synthetic construct
  misc_feature 1..20: note = chemically synthesized
  source 1..20: mol_type = other DNA
ctcacttgtcatagtccata

SEQ ID NO: 21628 - DNA, 20 bp, synthetic construct
  misc_feature 1..20: note = chemically synthesized
  source 1..20: mol_type = other DNA
cctcacgttcttgcaaatct

SEQ ID NO: 21629 - DNA, 20 bp, synthetic construct
  misc_feature 1..20: note = chemically synthesized
  source 1..20: mol_type = other DNA
gcaaatctgagtctttgcac

SEQ ID NO: 21630 - DNA, 20 bp, synthetic construct
  misc_feature 1..20: note = chemically synthesized
  source 1..20: mol_type = other DNA
tgcataaaatgcccttatat

SEQ ID NO: 21631 - DNA, 20 bp, synthetic construct
  misc_feature 1..20: note = chemically synthesized
  source 1..20: mol_type = other DNA
gcccttatatcagacattta

SEQ ID NO: 21632 - DNA, 20 bp, synthetic construct
  misc_feature 1..20: note = chemically synthesized
  source 1..20: mol_type = other DNA
ccttatatcagacatttaaa

SEQ ID NO: 21633 - DNA, 20 bp, synthetic construct
  misc_feature 1..20: note = chemically synthesized
  source 1..20: mol_type = other DNA
ttatatcagacatttaaaga

SEQ ID NO: 21634 - DNA, 20 bp, synthetic construct
  misc_feature 1..20: note = chemically synthesized
  source 1..20: mol_type = other DNA
atatcagacatttaaagaga

SEQ ID NO: 21635 - DNA, 20 bp, synthetic construct
  misc_feature 1..20: note = chemically synthesized
  source 1..20: mol_type = other DNA
agaacgcctactcatctttt

SEQ ID NO: 21636 - DNA, 20 bp, synthetic construct
  misc_feature 1..20: note = chemically synthesized
  source 1..20: mol_type = other DNA
cctactcatcttttaagacc

SEQ ID NO: 21637 - DNA, 20 bp, synthetic construct
  misc_feature 1..20: note = chemically synthesized
  source 1..20: mol_type = other DNA
ttcctttctctatgatccct

SEQ ID NO: 21638 - DNA, 20 bp, synthetic construct
  misc_feature 1..20: note = chemically synthesized
  source 1..20: mol_type = other DNA
ctctatgatcccttagtacc

SEQ ID NO: 21639 - DNA, 20 bp, synthetic construct
  misc_feature 1..20: note = chemically synthesized
  source 1..20: mol_type = other DNA
ttatattgaaacctctcacc

SEQ ID NO: 21640 - DNA, 20 bp, synthetic construct
  misc_feature 1..20: note = chemically synthesized
  source 1..20: mol_type = other DNA
cacctggcctcatgctgctt

SEQ ID NO: 21641 - DNA, 20 bp, synthetic construct
  misc_feature 1..20: note = chemically synthesized
  source 1..20: mol_type = other DNA
cctcatgctgctttagatca

SEQ ID NO: 21642 - DNA, 20 bp, synthetic construct
  misc_feature 1..20: note = chemically synthesized
  source 1..20: mol_type = other DNA
tcatgctgctttagatcaaa

SEQ ID NO: 21643 - DNA, 20 bp, synthetic construct
  misc_feature 1..20: note = chemically synthesized
  source 1..20: mol_type = other DNA
catgctgctttagatcaaag

SEQ ID NO: 21644 - DNA, 20 bp, synthetic construct
  misc_feature 1..20: note = chemically synthesized
  source 1..20: mol_type = other DNA
atgctgctttagatcaaaga

SEQ ID NO: 21645 - DNA, 20 bp, synthetic construct
  misc_feature 1..20: note = chemically synthesized
  source 1..20: mol_type = other DNA
gctgctttagatcaaagagg

SEQ ID NO: 21646 - DNA, 20 bp, synthetic construct
  misc_feature 1..20: note = chemically synthesized
  source 1..20: mol_type = other DNA
tttagatcaaagagggagtc

SEQ ID NO: 21647 - DNA, 20 bp, synthetic construct
  misc_feature 1..20: note = chemically synthesized
  source 1..20: mol_type = other DNA
ctggtttatccccatacccc

SEQ ID NO: 21648 - DNA, 20 bp, synthetic construct
  misc_feature 1..20: note = chemically synthesized
  source 1..20: mol_type = other DNA
atacccctagtaccctgaca

SEQ ID NO: 21649 - DNA, 20 bp, synthetic construct
  misc_feature 1..20: note = chemically synthesized
  source 1..20: mol_type = other DNA
tagtaccctgacacagtacc

SEQ ID NO: 21650 - DNA, 20 bp, synthetic construct
  misc_feature 1..20: note = chemically synthesized
  source 1..20: mol_type = other DNA
tgacacagtacctggcacca

SEQ ID NO: 21651 - DNA, 20 bp, synthetic construct
  misc_feature 1..20: note = chemically synthesized
  source 1..20: mol_type = other DNA
ctggcaccatagttgtaact

SEQ ID NO: 21652 - DNA, 20 bp, synthetic construct
  misc_feature 1..20: note = chemically synthesized
  source 1..20: mol_type = other DNA
aactcagtaatgtctgaatg

SEQ ID NO: 21653 - DNA, 20 bp, synthetic construct
  misc_feature 1..20: note = chemically synthesized
  source 1..20: mol_type = other DNA
actcagtaatgtctgaatga

SEQ ID NO: 21654 - DNA, 20 bp, synthetic construct
  misc_feature 1..20: note = chemically synthesized
  source 1..20: mol_type = other DNA
tacactttacaaaactaaac

SEQ ID NO: 21655 - DNA, 20 bp, synthetic construct
  misc_feature 1..20: note = chemically synthesized
  source 1..20: mol_type = other DNA
acaaaactaaactggtttta

SEQ ID NO: 21656 - DNA, 20 bp, synthetic construct
  misc_feature 1..20: note = chemically synthesized
  source 1..20: mol_type = other DNA
aactgttgcaataataccta

SEQ ID NO: 21657 - DNA, 20 bp, synthetic construct
  misc_feature 1..20: note = chemically synthesized
  source 1..20: mol_type = other DNA
actgttgcaataatacctaa

SEQ ID NO: 21658 - DNA, 20 bp, synthetic construct
  misc_feature 1..20: note = chemically synthesized
  source 1..20: mol_type = other DNA
gttgcaataatacctaaagg

SEQ ID NO: 21659 - DNA, 20 bp, synthetic construct
  misc_feature 1..20: note = chemically synthesized
  source 1..20: mol_type = other DNA
gcaataatacctaaaggcag

SEQ ID NO: 21660 - DNA, 20 bp, synthetic construct
  misc_feature 1..20: note = chemically synthesized
  source 1..20: mol_type = other DNA
gccatgaaaatgcaacatct

SEQ ID NO: 21661 - DNA, 20 bp, synthetic construct
  misc_feature 1..20: note = chemically synthesized
  source 1..20: mol_type = other DNA
tcactcaccgaaactccttt

SEQ ID NO: 21662 - DNA, 20 bp, synthetic construct
  misc_feature 1..20: note = chemically synthesized
  source 1..20: mol_type = other DNA
ctcaccgaaactccttttag

SEQ ID NO: 21663 - DNA, 20 bp, synthetic construct
  misc_feature 1..20: note = chemically synthesized
  source 1..20: mol_type = other DNA
aactccttttagaagccaat

SEQ ID NO: 21664 - DNA, 20 bp, synthetic construct
  misc_feature 1..20: note = chemically synthesized
  source 1..20: mol_type = other DNA
ctccttttagaagccaatga

SEQ ID NO: 21665 - DNA, 20 bp, synthetic construct
  misc_feature 1..20: note = chemically synthesized
  source 1..20: mol_type = other DNA
agaagccaatgagagtttaa

SEQ ID NO: 21666 - DNA, 20 bp, synthetic construct
  misc_feature 1..20: note = chemically synthesized
  source 1..20: mol_type = other DNA
agccaatgagagtttaatag

SEQ ID NO: 21667 - DNA, 20 bp, synthetic construct
  misc_feature 1..20: note = chemically synthesized
  source 1..20: mol_type = other DNA
caatgagagtttaatagcag

SEQ ID NO: 21668 - DNA, 20 bp, synthetic construct
  misc_feature 1..20: note = chemically synthesized
  source 1..20: mol_type = other DNA
atgagagtttaatagcagaa

SEQ ID NO: 21669 - DNA, 20 bp, synthetic construct
  misc_feature 1..20: note = chemically synthesized
  source 1..20: mol_type = other DNA
gagagtttaatagcagaaga

SEQ ID NO: 21670 - DNA, 20 bp, synthetic construct
  misc_feature 1..20: note = chemically synthesized
  source 1..20: mol_type = other DNA
gcattaatactgtctatcct

SEQ ID NO: 21671 - DNA, 20 bp, synthetic construct
  misc_feature 1..20: note = chemically synthesized
  source 1..20: mol_type = other DNA
tatccttagaaaaattcccc

SEQ ID NO: 21672 - DNA, 20 bp, synthetic construct
  misc_feature 1..20: note = chemically synthesized
  source 1..20: mol_type = other DNA
attcccctggccccttcctc

SEQ ID NO: 21673 - DNA, 20 bp, synthetic construct
  misc_feature 1..20: note = chemically synthesized
  source 1..20: mol_type = other DNA
ttcccctggccccttcctca

SEQ ID NO: 21674 - DNA, 20 bp, synthetic construct
  misc_feature 1..20: note = chemically synthesized
  source 1..20: mol_type = other DNA
tcccctggccccttcctcaa

SEQ ID NO: 21675 - DNA, 20 bp, synthetic construct
  misc_feature 1..20: note = chemically synthesized
  source 1..20: mol_type = other DNA
cctcaagggcttattatctc

SEQ ID NO: 21676 - DNA, 20 bp, synthetic construct
  misc_feature 1..20: note = chemically synthesized
  source 1..20: mol_type = other DNA
cttattatctctggctacaa

SEQ ID NO: 21677 - DNA, 20 bp, synthetic construct
  misc_feature 1..20: note = chemically synthesized
  source 1..20: mol_type = other DNA
atctctggctacaatggctg

SEQ ID NO: 21678 - DNA, 20 bp, synthetic construct
  misc_feature 1..20: note = chemically synthesized
  source 1..20: mol_type = other DNA
aatcacattgcctttctcct

SEQ ID NO: 21679 - DNA, 20 bp, synthetic construct
  misc_feature 1..20: note = chemically synthesized
  source 1..20: mol_type = other DNA
cctttctccttagtattatc

SEQ ID NO: 21680 - DNA, 20 bp, synthetic construct
  misc_feature 1..20: note = chemically synthesized
  source 1..20: mol_type = other DNA
ctttctccttagtattatct

SEQ ID NO: 21681 - DNA, 20 bp, synthetic construct
  misc_feature 1..20: note = chemically synthesized
  source 1..20: mol_type = other DNA
tttctccttagtattatctg

SEQ ID NO: 21682 - DNA, 20 bp, synthetic construct
  misc_feature 1..20: note = chemically synthesized
  source 1..20: mol_type = other DNA
tcgtatacttaacttccctt

SEQ ID NO: 21683 - DNA, 20 bp, synthetic construct
  misc_feature 1..20: note = chemically synthesized
  source 1..20: mol_type = other DNA
cgtatacttaacttcccttc

SEQ ID NO: 21684 - DNA, 20 bp, synthetic construct
  misc_feature 1..20: note = chemically synthesized
  source 1..20: mol_type = other DNA
cttcccttcaggtttatcgc

SEQ ID NO: 21685 - DNA, 20 bp, synthetic construct
  misc_feature 1..20: note = chemically synthesized
  source 1..20: mol_type = other DNA
tatcgctagtcattatttcc

SEQ ID NO: 21686 - DNA, 20 bp, synthetic construct
  misc_feature 1..20: note = chemically synthesized
  source 1..20: mol_type = other DNA
atcgctagtcattatttccc

SEQ ID NO: 21687 - DNA, 20 bp, synthetic construct
  misc_feature 1..20: note = chemically synthesized
  source 1..20: mol_type = other DNA
cattatttcccaggctccaa

SEQ ID NO: 21688 - DNA, 20 bp, synthetic construct
  misc_feature 1..20: note = chemically synthesized
  source 1..20: mol_type = other DNA
tttcccaggctccaaaagcc

SEQ ID NO: 21689 - DNA, 20 bp, synthetic construct
  misc_feature 1..20: note = chemically synthesized
  source 1..20: mol_type = other DNA
attcttatctatcctttccc

SEQ ID NO: 21690 - DNA, 20 bp, synthetic construct
  misc_feature 1..20: note = chemically synthesized
  source 1..20: mol_type = other DNA
tatcctttccccagcatctg

SEQ ID NO: 21691 - DNA, 20 bp, synthetic construct
  misc_feature 1..20: note = chemically synthesized
  source 1..20: mol_type = other DNA
ccccagcatctgaagtcttc

SEQ ID NO: 21692 - DNA, 20 bp, synthetic construct
  misc_feature 1..20: note = chemically synthesized
  source 1..20: mol_type = other DNA
cccagcatctgaagtcttca

SEQ ID NO: 21693 - DNA, 20 bp, synthetic construct
  misc_feature 1..20: note = chemically synthesized
  source 1..20: mol_type = other DNA
ccagcatctgaagtcttcaa

SEQ ID NO: 21694 - DNA, 20 bp, synthetic construct
  misc_feature 1..20: note = chemically synthesized
  source 1..20: mol_type = other DNA
cagcatctgaagtcttcaag

SEQ ID NO: 21695 - DNA, 20 bp, synthetic construct
  misc_feature 1..20: note = chemically synthesized
  source 1..20: mol_type = other DNA
agcatctgaagtcttcaagg

SEQ ID NO: 21696 - DNA, 20 bp, synthetic construct
  misc_feature 1..20: note = chemically synthesized
  source 1..20: mol_type = other DNA
atctgaagtcttcaaggggg

SEQ ID NO: 21697 - DNA, 20 bp, synthetic construct
  misc_feature 1..20: note = chemically synthesized
  source 1..20: mol_type = other DNA
tgaagtcttcaagggggcag

SEQ ID NO: 21698 - DNA, 20 bp, synthetic construct
  misc_feature 1..20: note = chemically synthesized
  source 1..20: mol_type = other DNA
tcatcatctcaccacttata

SEQ ID NO: 21699 - DNA, 20 bp, synthetic construct
  misc_feature 1..20: note = chemically synthesized
  source 1..20: mol_type = other DNA
tcatctcaccacttatatag

SEQ ID NO: 21700 - DNA, 20 bp, synthetic construct
  misc_feature 1..20: note = chemically synthesized
  source 1..20: mol_type = other DNA
ctcaccacttatatagaaga

SEQ ID NO: 21701 - DNA, 20 bp, synthetic construct
  misc_feature 1..20: note = chemically synthesized
  source 1..20: mol_type = other DNA
tcaccacttatatagaagaa

SEQ ID NO: 21702 - DNA, 20 bp, synthetic construct
  misc_feature 1..20: note = chemically synthesized
  source 1..20: mol_type = other DNA
caccacttatatagaagaaa

SEQ ID NO: 21703 - DNA, 20 bp, synthetic construct
  misc_feature 1..20: note = chemically synthesized
  source 1..20: mol_type = other DNA
cttatatagaagaaagggtt

SEQ ID NO: 21704 - DNA, 20 bp, synthetic construct
  misc_feature 1..20: note = chemically synthesized
  source 1..20: mol_type = other DNA
gtttggatgctttgtcctcc

SEQ ID NO: 21705 - DNA, 20 bp, synthetic construct
  misc_feature 1..20: note = chemically synthesized
  source 1..20: mol_type = other DNA
ctcccagatgtcacactaat

SEQ ID NO: 21706 - DNA, 20 bp, synthetic construct
  misc_feature 1..20: note = chemically synthesized
  source 1..20: mol_type = other DNA
cactaatgagatatatctaa

SEQ ID NO: 21707 - DNA, 20 bp, synthetic construct
  misc_feature 1..20: note = chemically synthesized
  source 1..20: mol_type = other DNA
tgctttatgtcctgctttgt

SEQ ID NO: 21708 - DNA, 20 bp, synthetic construct
  misc_feature 1..20: note = chemically synthesized
  source 1..20: mol_type = other DNA
cttgactttactcactttgc

SEQ ID NO: 21709 - DNA, 20 bp, synthetic construct
  misc_feature 1..20: note = chemically synthesized
  source 1..20: mol_type = other DNA
atttttttttatcgttattt

SEQ ID NO: 21710 - DNA, 20 bp, synthetic construct
  misc_feature 1..20: note = chemically synthesized
  source 1..20: mol_type = other DNA
ttatcgttatttcagcattt

SEQ ID NO: 21711 - DNA, 20 bp, synthetic construct
  misc_feature 1..20: note = chemically synthesized
  source 1..20: mol_type = other DNA
agcatttcagtctgatttca

SEQ ID NO: 21712 - DNA, 20 bp, synthetic construct
  misc_feature 1..20: note = chemically synthesized
  source 1..20: mol_type = other DNA
ttcacagctgacatcatgtc

SEQ ID NO: 21713 - DNA, 20 bp, synthetic construct
  misc_feature 1..20: note = chemically synthesized
  source 1..20: mol_type = other DNA
cacagctgacatcatgtctg

SEQ ID NO: 21714 - DNA, 20 bp, synthetic construct
  misc_feature 1..20: note = chemically synthesized
  source 1..20: mol_type = other DNA
agctgacatcatgtctggag

SEQ ID NO: 21715 - DNA, 20 bp, synthetic construct
  misc_feature 1..20: note = chemically synthesized
  source 1..20: mol_type = other DNA
gctgacatcatgtctggagt

SEQ ID NO: 21716 - DNA, 20 bp, synthetic construct
  misc_feature 1..20: note = chemically synthesized
  source 1..20: mol_type = other DNA
catgtctggagtgggaacca

SEQ ID NO: 21717 - DNA, 20 bp, synthetic construct
  misc_feature 1..20: note = chemically synthesized
  source 1..20: mol_type = other DNA
atgtctggagtgggaaccac

SEQ ID NO: 21718 - DNA, 20 bp, synthetic construct
  misc_feature 1..20: note = chemically synthesized
  source 1..20: mol_type = other DNA
tgtctggagtgggaaccaca

SEQ ID NO: 21719 - DNA, 20 bp, synthetic construct
  misc_feature 1..20: note = chemically synthesized
  source 1..20: mol_type = other DNA
tggagtgggaaccacagggc

SEQ ID NO: 21720 - DNA, 20 bp, synthetic construct
  misc_feature 1..20: note = chemically synthesized
  source 1..20: mol_type = other DNA
gtgggaaccacagggccagt

SEQ ID NO: 21721 - DNA, 20 bp, synthetic construct
  misc_feature 1..20: note = chemically synthesized
  source 1..20: mol_type = other DNA
cacagggccagtcagctttc

SEQ ID NO: 21722 - DNA, 20 bp, synthetic construct
  misc_feature 1..20: note = chemically synthesized
  source 1..20: mol_type = other DNA
acagggccagtcagctttct

SEQ ID NO: 21723 - DNA, 20 bp, synthetic construct
  misc_feature 1..20: note = chemically synthesized
  source 1..20: mol_type = other DNA
cagggccagtcagctttctg

SEQ ID NO: 21724 - DNA, 20 bp, synthetic construct
  misc_feature 1..20: note = chemically synthesized
  source 1..20: mol_type = other DNA
agggccagtcagctttctgg

SEQ ID NO: 21725 - DNA, 20 bp, synthetic construct
  misc_feature 1..20: note = chemically synthesized
  source 1..20: mol_type = other DNA
gtcagctttctgggggtgct

SEQ ID NO: 21726 - DNA, 20 bp, synthetic construct
  misc_feature 1..20: note = chemically synthesized
  source 1..20: mol_type = other DNA
tcagctttctgggggtgctt

SEQ ID NO: 21727 - DNA, 20 bp, synthetic construct
  misc_feature 1..20: note = chemically synthesized
  source 1..20: mol_type = other DNA
cagctttctgggggtgctta

SEQ ID NO: 21728 - DNA, 20 bp, synthetic construct
  misc_feature 1..20: note = chemically synthesized
  source 1..20: mol_type = other DNA
tttctgggggtgcttagggt

SEQ ID NO: 21729 - DNA, 20 bp, synthetic construct
  misc_feature 1..20: note = chemically synthesized
  source 1..20: mol_type = other DNA
agggttggcacccctgatcc

SEQ ID NO: 21730 - DNA, 20 bp, synthetic construct
  misc_feature 1..20: note = chemically synthesized
  source 1..20: mol_type = other DNA
acccctgatcctggtactgt

SEQ ID NO: 21731 - DNA, 20 bp, synthetic construct
  misc_feature 1..20: note = chemically synthesized
  source 1..20: mol_type = other DNA
atcctggtactgtcagctac

SEQ ID NO: 21732 - DNA, 20 bp, synthetic construct
  misc_feature 1..20: note = chemically synthesized
  source 1..20: mol_type = other DNA
tcagctactagatttgattc

SEQ ID NO: 21733 - DNA, 20 bp, synthetic construct
  misc_feature 1..20: note = chemically synthesized
  source 1..20: mol_type = other DNA
ctactagatttgattctaga

SEQ ID NO: 21734 - DNA, 20 bp, synthetic construct
  misc_feature 1..20: note = chemically synthesized
  source 1..20: mol_type = other DNA
tttgattctagaaagttgac

SEQ ID NO: 21735 - DNA, 20 bp, synthetic construct
  misc_feature 1..20: note = chemically synthesized
  source 1..20: mol_type = other DNA
attctagaaagttgacaagt

SEQ ID NO: 21736 - DNA, 20 bp, synthetic construct
  misc_feature 1..20: note = chemically synthesized
  source 1..20: mol_type = other DNA
gtgtgataaatgcttcctgt

SEQ ID NO: 21737 - DNA, 20 bp, synthetic construct
  misc_feature 1..20: note = chemically synthesized
  source 1..20: mol_type = other DNA
gaacatgctgtttgtccaaa

SEQ ID NO: 21738 - DNA, 20 bp, synthetic construct
  misc_feature 1..20: note = chemically synthesized
  source 1..20: mol_type = other DNA
aacatgctgtttgtccaaat

SEQ ID NO: 21739 - DNA, 20 bp, synthetic construct
  misc_feature 1..20: note = chemically synthesized
  source 1..20: mol_type = other DNA
cttccctgtatgccttcctc

SEQ ID NO: 21740 - DNA, 20 bp, synthetic construct
  misc_feature 1..20: note = chemically synthesized
  source 1..20: mol_type = other DNA
ttccctgtatgccttcctct

SEQ ID NO: 21741 - DNA, 20 bp, synthetic construct
  misc_feature 1..20: note = chemically synthesized
  source 1..20: mol_type = other DNA
cttcctctgggaaatacata

SEQ ID NO: 21742 - DNA, 20 bp, synthetic construct
  misc_feature 1..20: note = chemically synthesized
  source 1..20: mol_type = other DNA
ggaaatacataaagtcactg

SEQ ID NO: 21743 - DNA, 20 bp, synthetic construct
  misc_feature 1..20: note = chemically synthesized
  source 1..20: mol_type = other DNA
actgtagttgtgaaaaaaca

SEQ ID NO: 21744 - DNA, 20 bp, synthetic construct
  misc_feature 1..20: note = chemically synthesized
  source 1..20: mol_type = other DNA
caaagtgatatatgttgcat

SEQ ID NO: 21745 - DNA, 20 bp, synthetic construct
  misc_feature 1..20: note = chemically synthesized
  source 1..20: mol_type = other DNA
tactctttatgtcaattctt

SEQ ID NO: 21746 - DNA, 20 bp, synthetic construct
  misc_feature 1..20: note = chemically synthesized
  source 1..20: mol_type = other DNA
ttaagcttgcttttctcccc

SEQ ID NO: 21747 - DNA, 20 bp, synthetic construct
  misc_feature 1..20: note = chemically synthesized
  source 1..20: mol_type = other DNA
taagcttgcttttctcccct

SEQ ID NO: 21748 - DNA, 20 bp, synthetic construct
  misc_feature 1..20: note = chemically synthesized
  source 1..20: mol_type = other DNA
aagcttgcttttctccccta

SEQ ID NO: 21749 - DNA, 20 bp, synthetic construct
  misc_feature 1..20: note = chemically synthesized
  source 1..20: mol_type = other DNA
ctcccctagggaactcaact

SEQ ID NO: 21750 - DNA, 20 bp, synthetic construct
  misc_feature 1..20: note = chemically synthesized
  source 1..20: mol_type = other DNA
tttccccaaatatcaactcc

SEQ ID NO: 21751 - DNA, 20 bp, synthetic construct
  misc_feature 1..20: note = chemically synthesized
  source 1..20: mol_type = other DNA
caactccaagatgtttgaca

SEQ ID NO: 21752 - DNA, 20 bp, synthetic construct
  misc_feature 1..20: note = chemically synthesized
  source 1..20: mol_type = other DNA
actccaagatgtttgacata

SEQ ID NO: 21753 - DNA, 20 bp, synthetic construct
  misc_feature 1..20: note = chemically synthesized
  source 1..20: mol_type = other DNA
attttttcctaatccatgaa

SEQ ID NO: 21754 - DNA, 20 bp, synthetic construct
  misc_feature 1..20: note = chemically synthesized
  source 1..20: mol_type = other DNA
tcctaatccatgaaaagctt

SEQ ID NO: 21755 - DNA, 20 bp, synthetic construct
  misc_feature 1..20: note = chemically synthesized
  source 1..20: mol_type = other DNA
aaagctttggtgataactaa

SEQ ID NO: 21756 - DNA, 20 bp, synthetic construct
  misc_feature 1..20: note = chemically synthesized
  source 1..20: mol_type = other DNA
aactaacagcttgctaatga

SEQ ID NO: 21757 - DNA, 20 bp, synthetic construct
  misc_feature 1..20: note = chemically synthesized
  source 1..20: mol_type = other DNA
actaacagcttgctaatgaa

SEQ ID NO: 21758 - DNA, 20 bp, synthetic construct
  misc_feature 1..20: note = chemically synthesized
  source 1..20: mol_type = other DNA
ttaactaaaactttaaattg

SEQ ID NO: 21759 - DNA, 20 bp, synthetic construct
  misc_feature 1..20: note = chemically synthesized
  source 1..20: mol_type = other DNA
agatatataatttaaaaaat

SEQ ID NO: 21760 - DNA, 20 bp, synthetic construct
  misc_feature 1..20: note = chemically synthesized
  source 1..20: mol_type = other DNA
atatataatttaaaaaatta

SEQ ID NO: 21761 - DNA, 20 bp, synthetic construct
  misc_feature 1..20: note = chemically synthesized
  source 1..20: mol_type = other DNA
aatgtcatatatcttaaaat

SEQ ID NO: 21762 - DNA, 20 bp, synthetic construct
  misc_feature 1..20: note = chemically synthesized
  source 1..20: mol_type = other DNA
atcagactttttgtgtaaat

SEQ ID NO: 21763 - DNA, 20 bp, synthetic construct
  misc_feature 1..20: note = chemically synthesized
  source 1..20: mol_type = other DNA
tcagactttttgtgtaaata

SEQ ID NO: 21764 - DNA, 20 bp, synthetic construct
  misc_feature 1..20: note = chemically synthesized
  source 1..20: mol_type = other DNA
tgtttcccattttgatttca

SEQ ID NO: 21765 - DNA, 20 bp, synthetic construct
  misc_feature 1..20: note = chemically synthesized
  source 1..20: mol_type = other DNA
ttcccattttgatttcaaag

SEQ ID NO: 21766 - DNA, 20 bp, synthetic construct
  misc_feature 1..20: note = chemically synthesized
  source 1..20: mol_type = other DNA
cattttgatttcaaagtggt

SEQ ID NO: 21767 - DNA, 20 bp, synthetic construct
  misc_feature 1..20: note = chemically synthesized
  source 1..20: mol_type = other DNA
aagtccaaacaaaaataatg

SEQ ID NO: 21768 - DNA, 20 bp, synthetic construct
  misc_feature 1..20: note = chemically synthesized
  source 1..20: mol_type = other DNA
acttttaatttttttaaacc

SEQ ID NO: 21769 - DNA, 20 bp, synthetic construct
  misc_feature 1..20: note = chemically synthesized
  source 1..20: mol_type = other DNA
cttttaatttttttaaacca

SEQ ID NO: 21770 - DNA, 20 bp, synthetic construct
  misc_feature 1..20: note = chemically synthesized
  source 1..20: mol_type = other DNA
tttaatttttttaaaccaag

SEQ ID NO: 21771 - DNA, 20 bp, synthetic construct
  misc_feature 1..20: note = chemically synthesized
  source 1..20: mol_type = other DNA
aggagatgaatgttttctaa

SEQ ID NO: 21772 - DNA, 20 bp, synthetic construct
  misc_feature 1..20: note = chemically synthesized
  source 1..20: mol_type = other DNA
ggagatgaatgttttctaac

SEQ ID NO: 21773 - DNA, 20 bp, synthetic construct
  misc_feature 1..20: note = chemically synthesized
  source 1..20: mol_type = other DNA
tgaccaaatcatgaactgaa

SEQ ID NO: 21774 - DNA, 20 bp, synthetic construct
  misc_feature 1..20: note = chemically synthesized
  source 1..20: mol_type = other DNA
attaaacataaatgcatcat

SEQ ID NO: 21775 - DNA, 20 bp, synthetic construct
  misc_feature 1..20: note = chemically synthesized
  source 1..20: mol_type = other DNA
ataagcattgtcgatctatt

SEQ ID NO: 21776 - DNA, 20 bp, synthetic construct
  misc_feature 1..20: note = chemically synthesized
  source 1..20: mol_type = other DNA
tctatttagttttaaaaatg

SEQ ID NO: 21777 - DNA, 20 bp, synthetic construct
  misc_feature 1..20: note = chemically synthesized
  source 1..20: mol_type = other DNA
atttagttttaaaaatgaag

SEQ ID NO: 21778 - DNA, 20 bp, synthetic construct
  misc_feature 1..20: note = chemically synthesized
  source 1..20: mol_type = other DNA
tagttttaaaaatgaagaag

SEQ ID NO: 21779 - DNA, 20 bp, synthetic construct
  misc_feature 1..20: note = chemically synthesized
  source 1..20: mol_type = other DNA
aaatgaagaagaagaaaacc

SEQ ID NO: 21780 - DNA, 20 bp, synthetic construct
  misc_feature 1..20: note = chemically synthesized
  source 1..20: mol_type = other DNA
agaagaaaacctagctaaca

SEQ ID NO: 21781 - DNA, 20 bp, synthetic construct
  misc_feature 1..20: note = chemically synthesized
  source 1..20: mol_type = other DNA
aaacctagctaacaaagaac

SEQ ID NO: 21782 - DNA, 20 bp, synthetic construct
  misc_feature 1..20: note = chemically synthesized
  source 1..20: mol_type = other DNA
gtacttaccaacctgcgtgc

SEQ ID NO: 21783 - DNA, 20 bp, synthetic construct
  misc_feature 1..20: note = chemically synthesized
  source 1..20: mol_type = other DNA
ccaacctgcgtgctggctgt

SEQ ID NO: 21784 - DNA, 20 bp, synthetic construct
  misc_feature 1..20: note = chemically synthesized
  source 1..20: mol_type = other DNA
caaatcatgtaatcaaaatt

SEQ ID NO: 21785 - DNA, 20 bp, synthetic construct
  misc_feature 1..20: note = chemically synthesized
  source 1..20: mol_type = other DNA
catgtaatcaaaatttagtg

SEQ ID NO: 21786 - DNA, 20 bp, synthetic construct
  misc_feature 1..20: note = chemically synthesized
  source 1..20: mol_type = other DNA
gtaatcaaaatttagtgaag

SEQ ID NO: 21787 - DNA, 20 bp, synthetic construct
  misc_feature 1..20: note = chemically synthesized
  source 1..20: mol_type = other DNA
tcaaaatttagtgaagaaga

SEQ ID NO: 21788 - DNA, 20 bp, synthetic construct
  misc_feature 1..20: note = chemically synthesized
  source 1..20: mol_type = other DNA
tttagtgaagaagacagcat

SEQ ID NO: 21789 - DNA, 20 bp, synthetic construct
  misc_feature 1..20: note = chemically synthesized
  source 1..20: mol_type = other DNA
tcagatatttctatatctaa

SEQ ID NO: 21790 - DNA, 20 bp, synthetic construct
  misc_feature 1..20: note = chemically synthesized
  source 1..20: mol_type = other DNA
cagatatttctatatctaaa

SEQ ID NO: 21791 - DNA, 20 bp, synthetic construct
  misc_feature 1..20: note = chemically synthesized
  source 1..20: mol_type = other DNA
tatttctatatctaaaaggc

SEQ ID NO: 21792 - DNA, 20 bp, synthetic construct
  misc_feature 1..20: note = chemically synthesized
  source 1..20: mol_type = other DNA
atactcaatgtattttaaaa

SEQ ID NO: 21793 - DNA, 20 bp, synthetic construct
  misc_feature 1..20: note = chemically synthesized
  source 1..20: mol_type = other DNA
tactcaatgtattttaaaaa

SEQ ID NO: 21794 - DNA, 20 bp, synthetic construct
  misc_feature 1..20: note = chemically synthesized
  source 1..20: mol_type = other DNA
aggaaacaaacctgtacatt

SEQ ID NO: 21795 - DNA, 20 bp, synthetic construct
  misc_feature 1..20: note = chemically synthesized
  source 1..20: mol_type = other DNA
aaacctgtacattcagcact

SEQ ID NO: 21796 - DNA, 20 bp, synthetic construct
  misc_feature 1..20: note = chemically synthesized
  source 1..20: mol_type = other DNA
cctgtacattcagcactgag

SEQ ID NO: 21797 - DNA, 20 bp, synthetic construct
  misc_feature 1..20: note = chemically synthesized
  source 1..20: mol_type = other DNA
gcactgagtagatatcctaa

SEQ ID NO: 21798 - DNA, 20 bp, synthetic construct
  misc_feature 1..20: note = chemically synthesized
  source 1..20: mol_type = other DNA
cactgagtagatatcctaaa

SEQ ID NO: 21799 - DNA, 20 bp, synthetic construct
  misc_feature 1..20: note = chemically synthesized
  source 1..20: mol_type = other DNA
tgagtagatatcctaaaagg

SEQ ID NO: 21800 - DNA, 20 bp, synthetic construct
  misc_feature 1..20: note = chemically synthesized
  source 1..20: mol_type = other DNA
tagatatcctaaaaggcaga

SEQ ID NO: 21801 - DNA, 20 bp, synthetic construct
  misc_feature 1..20: note = chemically synthesized
  source 1..20: mol_type = other DNA
cctaaaaggcagatggtgat

SEQ ID NO: 21802 - DNA, 20 bp, synthetic construct
  misc_feature 1..20: note = chemically synthesized
  source 1..20: mol_type = other DNA
ctaaaaggcagatggtgatg

SEQ ID NO: 21803 - DNA, 20 bp, synthetic construct
  misc_feature 1..20: note = chemically synthesized
  source 1..20: mol_type = other DNA
aggcagatggtgatgaggcc

SEQ ID NO: 21804 - DNA, 20 bp, synthetic construct
  misc_feature 1..20: note = chemically synthesized
  source 1..20: mol_type = other DNA
acgcgctgcataacctttgc

SEQ ID NO: 21805 - DNA, 20 bp, synthetic construct
  misc_feature 1..20: note = chemically synthesized
  source 1..20: mol_type = other DNA
cgctgcataacctttgctag

SEQ ID NO: 21806 - DNA, 20 bp, synthetic construct
  misc_feature 1..20: note = chemically synthesized
  source 1..20: mol_type = other DNA
cctttgctagcagattgtga

SEQ ID NO: 21807 - DNA, 20 bp, synthetic construct
  misc_feature 1..20: note = chemically synthesized
  source 1..20: mol_type = other DNA
ttgctagcagattgtgaaag

SEQ ID NO: 21808 - DNA, 20 bp, synthetic construct
  misc_feature 1..20: note = chemically synthesized
  source 1..20: mol_type = other DNA
gcgcgtgaacatgatcatgg

SEQ ID NO: 21809 - DNA, 20 bp, synthetic construct
  misc_feature 1..20: note = chemically synthesized
  source 1..20: mol_type = other DNA
cctcatcaccatctgccttt

SEQ ID NO: 21810 - DNA, 20 bp, synthetic construct
  misc_feature 1..20: note = chemically synthesized
  source 1..20: mol_type = other DNA
tttaggatatctactcagtg

SEQ ID NO: 21811 - DNA, 20 bp, synthetic construct
  misc_feature 1..20: note = chemically synthesized
  source 1..20: mol_type = other DNA
gtttccttttttaaaataca

SEQ ID NO: 21812 - DNA, 20 bp, synthetic construct
  misc_feature 1..20: note = chemically synthesized
  source 1..20: mol_type = other DNA
atgatttgacagcaatattg

SEQ ID NO: 21813 - DNA, 20 bp, synthetic construct
  misc_feature 1..20: note = chemically synthesized
  source 1..20: mol_type = other DNA
gtgggaaaacaaagaaatag

SEQ ID NO: 21814 - DNA, 20 bp, synthetic construct
  misc_feature 1..20: note = chemically synthesized
  source 1..20: mol_type = other DNA
agttatcaccaaagcttttc

SEQ ID NO: 21815 - DNA, 20 bp, synthetic construct
  misc_feature 1..20: note = chemically synthesized
  source 1..20: mol_type = other DNA
tgtctctatgtcaaacatct

SEQ ID NO: 21816 - DNA, 20 bp, synthetic construct
  misc_feature 1..20: note = chemically synthesized
  source 1..20: mol_type = other DNA
tggggaaacacaatactcag

SEQ ID NO: 21817 - DNA, 20 bp, synthetic construct
  misc_feature 1..20: note = chemically synthesized
  source 1..20: mol_type = other DNA
taggggagaaaagcaagctt

SEQ ID NO: 21818 - DNA, 20 bp, synthetic construct
  misc_feature 1..20: note = chemically synthesized
  source 1..20: mol_type = other DNA
caagcttaagaattgacata

SEQ ID NO: 21819 - DNA, 20 bp, synthetic construct
  misc_feature 1..20: note = chemically synthesized
  source 1..20: mol_type = other DNA
acacttacttgtcaactttc

SEQ ID NO: 21820 - DNA, 20 bp, synthetic construct
  misc_feature 1..20: note = chemically synthesized
  source 1..20: mol_type = other DNA
aatctagtagctgacagtac

SEQ ID NO: 21821 - DNA, 20 bp, synthetic construct
  misc_feature 1..20: note = chemically synthesized
  source 1..20: mol_type = other DNA
tagctgacagtaccaggatc

SEQ ID NO: 21822 - DNA, 20 bp, synthetic construct
  misc_feature 1..20: note = chemically synthesized
  source 1..20: mol_type = other DNA
acagaggttaaactagcaaa

SEQ ID NO: 21823 - DNA, 20 bp, synthetic construct
  misc_feature 1..20: note = chemically synthesized
  source 1..20: mol_type = other DNA
tagcaaagtgagtaaagtca

SEQ ID NO: 21824 - DNA, 20 bp, synthetic construct
  misc_feature 1..20: note = chemically synthesized
  source 1..20: mol_type = other DNA
aagacttcagatgctgggga

SEQ ID NO: 21825 - DNA, 20 bp, synthetic construct
  misc_feature 1..20: note = chemically synthesized
  source 1..20: mol_type = other DNA
atgctggggaaaggatagat

SEQ ID NO: 21826 - DNA, 20 bp, synthetic construct
  misc_feature 1..20: note = chemically synthesized
  source 1..20: mol_type = other DNA
gggaaaggatagataagaat

SEQ ID NO: 21827 - DNA, 20 bp, synthetic construct
  misc_feature 1..20: note = chemically synthesized
  source 1..20: mol_type = other DNA
gcccttgaggaaggggccag

SEQ ID NO: 21828 - DNA, 20 bp, synthetic construct
  misc_feature 1..20: note = chemically synthesized
  source 1..20: mol_type = other DNA
ggggccaggggaatttttct

SEQ ID NO: 21829 - DNA, 20 bp, synthetic construct
  misc_feature 1..20: note = chemically synthesized
  source 1..20: mol_type = other DNA
aactctcattggcttctaaa

SEQ ID NO: 21830 - DNA, 20 bp, synthetic construct
  misc_feature 1..20: note = chemically synthesized
  source 1..20: mol_type = other DNA
ggcttctaaaaggagtttcg

SEQ ID NO: 21831 - DNA, 20 bp, synthetic construct
  misc_feature 1..20: note = chemically synthesized
  source 1..20: mol_type = other DNA
taggtattattgcaacagtt

SEQ ID NO: 21832 - DNA, 20 bp, synthetic construct
  misc_feature 1..20: note = chemically synthesized
  source 1..20: mol_type = other DNA
tgtccttcattcagacatta

SEQ ID NO: 21833 - DNA, 20 bp, synthetic construct
  misc_feature 1..20: note = chemically synthesized
  source 1..20: mol_type = other DNA
tatggtgccaggtactgtgt

SEQ ID NO: 21834 - DNA, 20 bp, synthetic construct
  misc_feature 1..20: note = chemically synthesized
  source 1..20: mol_type = other DNA
aggtactgtgtcagggtact

SEQ ID NO: 21835 - DNA, 20 bp, synthetic construct
  misc_feature 1..20: note = chemically synthesized
  source 1..20: mol_type = other DNA
tgtcagggtactaggggtat

SEQ ID NO: 21836 - DNA, 20 bp, synthetic construct
  misc_feature 1..20: note = chemically synthesized
  source 1..20: mol_type = other DNA
aaaatgtgcactaggtacta

SEQ ID NO: 21837 - DNA, 20 bp, synthetic construct
  misc_feature 1..20: note = chemically synthesized
  source 1..20: mol_type = other DNA
ggggaaacaattgatagaga

SEQ ID NO: 21838 - DNA, 20 bp, synthetic construct
  misc_feature 1..20: note = chemically synthesized
  source 1..20: mol_type = other DNA
tagagagagaatattttcat

SEQ ID NO: 21839 - DNA, 20 bp, synthetic construct
  misc_feature 1..20: note = chemically synthesized
  source 1..20: mol_type = other DNA
tttcatctgggtcttaaaag

SEQ ID NO: 21840 - DNA, 20 bp, synthetic construct
  misc_feature 1..20: note = chemically synthesized
  source 1..20: mol_type = other DNA
ataagggcattttatgcaaa

SEQ ID NO: 21841 - DNA, 20 bp, synthetic construct
  misc_feature 1..20: note = chemically synthesized
  source 1..20: mol_type = other DNA
gcaagaacgtgaggtatttc

SEQ ID NO: 21842 - DNA, 20 bp, synthetic construct
  misc_feature 1..20: note = chemically synthesized
  source 1..20: mol_type = other DNA
ggtatcgaagtataaacata

SEQ ID NO: 21843 - DNA, 20 bp, synthetic construct
  misc_feature 1..20: note = chemically synthesized
  source 1..20: mol_type = other DNA
agtaccactgatggctgatt

SEQ ID NO: 21844 - DNA, 20 bp, synthetic construct
  misc_feature 1..20: note = chemically synthesized
  source 1..20: mol_type = other DNA
gtagcagtacaaaaaaagag

SEQ ID NO: 21845 - DNA, 20 bp, synthetic construct
  misc_feature 1..20: note = chemically synthesized
  source 1..20: mol_type = other DNA
aagtggtatgacttaaccat

SEQ ID NO: 21846 - DNA, 20 bp, synthetic construct
  misc_feature 1..20: note = chemically synthesized
  source 1..20: mol_type = other DNA
ggtatggaaggggaaatggc

SEQ ID NO: 21847 - DNA, 20 bp, synthetic construct
  misc_feature 1..20: note = chemically synthesized
  source 1..20: mol_type = other DNA
tttgatgtgattatggacca

SEQ ID NO: 21848 - DNA, 20 bp, synthetic construct
  misc_feature 1..20: note = chemically synthesized
  source 1..20: mol_type = other DNA
tggctctttagtctgactgc

SEQ ID NO: 21849 - DNA, 20 bp, synthetic construct
  misc_feature 1..20: note = chemically synthesized
  source 1..20: mol_type = other DNA
tttagtctgactgccagagt

SEQ ID NO: 21850 - DNA, 20 bp, synthetic construct
  misc_feature 1..20: note = chemically synthesized
  source 1..20: mol_type = other DNA
tgactgccagagtctgaatc

SEQ ID NO: 21851 - DNA, 20 bp, synthetic construct
  misc_feature 1..20: note = chemically synthesized
  source 1..20: mol_type = other DNA
gggcaaagcccttagcctct

SEQ ID NO: 21852 - DNA, 20 bp, synthetic construct
  misc_feature 1..20: note = chemically synthesized
  source 1..20: mol_type = other DNA
ctatctcgtgggacttttgt

SEQ ID NO: 21853 - DNA, 20 bp, synthetic construct
  misc_feature 1..20: note = chemically synthesized
  source 1..20: mol_type = other DNA
tgtgaggatgaagtgagata

SEQ ID NO: 21854 - DNA, 20 bp, synthetic construct
  misc_feature 1..20: note = chemically synthesized
  source 1..20: mol_type = other DNA
tacattatgatatacagtta

SEQ ID NO: 21855 - DNA, 20 bp, synthetic construct
  misc_feature 1..20: note = chemically synthesized
  source 1..20: mol_type = other DNA
ggagacgtatctgactatag

SEQ ID NO: 21856 - DNA, 20 bp, synthetic construct
  misc_feature 1..20: note = chemically synthesized
  source 1..20: mol_type = other DNA
gccacgtgtgtgggcatctg

SEQ ID NO: 21857 - DNA, 20 bp, synthetic construct
  misc_feature 1..20: note = chemically synthesized
  source 1..20: mol_type = other DNA
tgggcatctggagagtgagc

SEQ ID NO: 21858 - DNA, 20 bp, synthetic construct
  misc_feature 1..20: note = chemically synthesized
  source 1..20: mol_type = other DNA
tgctcagtaaattttgttga

SEQ ID NO: 21859 - DNA, 20 bp, synthetic construct
  misc_feature 1..20: note = chemically synthesized
  source 1..20: mol_type = other DNA
taagggccatggagaggaac

SEQ ID NO: 21860 - DNA, 20 bp, synthetic construct
  misc_feature 1..20: note = chemically synthesized
  source 1..20: mol_type = other DNA
ggagttaatcaattcaagtg

SEQ ID NO: 21861 - DNA, 20 bp, synthetic construct
  misc_feature 1..20: note = chemically synthesized
  source 1..20: mol_type = other DNA
ttaatcaattcaagtgctgg

SEQ ID NO: 21862 - DNA, 20 bp, synthetic construct
  misc_feature 1..20: note = chemically synthesized
  source 1..20: mol_type = other DNA
tcaagtgctggatggataac

SEQ ID NO: 21863 - DNA, 20 bp, synthetic construct
  misc_feature 1..20: note = chemically synthesized
  source 1..20: mol_type = other DNA
gttagagcaaagcggggaac

SEQ ID NO: 21864 - DNA, 20 bp, synthetic construct
  misc_feature 1..20: note = chemically synthesized
  source 1..20: mol_type = other DNA
agcaaagcggggaaccagaa

SEQ ID NO: 21865 - DNA, 20 bp, synthetic construct
  misc_feature 1..20: note = chemically synthesized
  source 1..20: mol_type = other DNA
aatagagtgattattataaa

SEQ ID NO: 21866 - DNA, 20 bp, synthetic construct
  misc_feature 1..20: note = chemically synthesized
  source 1..20: mol_type = other DNA
gaagttattaaagagctaaa

SEQ ID NO: 21867 - DNA, 20 bp, synthetic construct
  misc_feature 1..20: note = chemically synthesized
  source 1..20: mol_type = other DNA
gaaagtagggccaacatgaa

SEQ ID NO: 21868 - DNA, 20 bp, synthetic construct
  misc_feature 1..20: note = chemically synthesized
  source 1..20: mol_type = other DNA
ctgtacagtcagctctcctt

SEQ ID NO: 21869 - DNA, 20 bp, synthetic construct
  misc_feature 1..20: note = chemically synthesized
  source 1..20: mol_type = other DNA
caaaaatattcaagaaaaaa

SEQ ID NO: 21870 - DNA, 20 bp, synthetic construct
  misc_feature 1..20: note = chemically synthesized
  source 1..20: mol_type = other DNA
agatgatttaaagtacaaag

SEQ ID NO: 21871 - DNA, 20 bp, synthetic construct
  misc_feature 1..20: note = chemically synthesized
  source 1..20: mol_type = other DNA
cacagatcttgatatttgca

SEQ ID NO: 21872 - DNA, 20 bp, synthetic construct
  misc_feature 1..20: note = chemically synthesized
  source 1..20: mol_type = other DNA
ggtcttgccaccaattttcc

SEQ ID NO: 21873 - DNA, 20 bp, synthetic construct
  misc_feature 1..20: note = chemically synthesized
  source 1..20: mol_type = other DNA
atactgaggaacgactgtaa

SEQ ID NO: 21874 - DNA, 20 bp, synthetic construct
  misc_feature 1..20: note = chemically synthesized
  source 1..20: mol_type = other DNA
gactgtaaatggatgcaggc

SEQ ID NO: 21875 - DNA, 20 bp, synthetic construct
  misc_feature 1..20: note = chemically synthesized
  source 1..20: mol_type = other DNA
tgcaggcatggatgctattt

SEQ ID NO: 21876 - DNA, 20 bp, synthetic construct
  misc_feature 1..20: note = chemically synthesized
  source 1..20: mol_type = other DNA
gagtgtccagggccaagtaa

SEQ ID NO: 21877 - DNA, 20 bp, synthetic construct
  misc_feature 1..20: note = chemically synthesized
  source 1..20: mol_type = other DNA
atgagttgctgagcagagag

SEQ ID NO: 21878 - DNA, 20 bp, synthetic construct
  misc_feature 1..20: note = chemically synthesized
  source 1..20: mol_type = other DNA
cctcggctgtctgggaagag

SEQ ID NO: 21879 - DNA, 20 bp, synthetic construct
  misc_feature 1..20: note = chemically synthesized
  source 1..20: mol_type = other DNA
ggctgctccaatttaggggc

SEQ ID NO: 21880 - DNA, 20 bp, synthetic construct
  misc_feature 1..20: note = chemically synthesized
  source 1..20: mol_type = other DNA
caatttaggggctaggattg

SEQ ID NO: 21881 - DNA, 20 bp, synthetic construct
  misc_feature 1..20: note = chemically synthesized
  source 1..20: mol_type = other DNA
gggtgggcacagcattgcaa

SEQ ID NO: 21882 - DNA, 20 bp, synthetic construct
  misc_feature 1..20: note = chemically synthesized
  source 1..20: mol_type = other DNA
attgagaaatatggccaatg

SEQ ID NO: 21883 - DNA, 20 bp, synthetic construct
  misc_feature 1..20: note = chemically synthesized
  source 1..20: mol_type = other DNA
caggcagatcacttgaggtc

SEQ ID NO: 21884 - DNA, 20 bp, synthetic construct
  misc_feature 1..20: note = chemically synthesized
  source 1..20: mol_type = other DNA
aaaattagctgggcatggtg

SEQ ID NO: 21885 - DNA, 20 bp, synthetic construct
  misc_feature 1..20: note = chemically synthesized
  source 1..20: mol_type = other DNA
tacttgggaggctgaggcag

SEQ ID NO: 21886 - DNA, 20 bp, synthetic construct
  misc_feature 1..20: note = chemically synthesized
  source 1..20: mol_type = other DNA
caagactctgtcaaaaaaaa

SEQ ID NO: 21887 - DNA, 20 bp, synthetic construct
  misc_feature 1..20: note = chemically synthesized
  source 1..20: mol_type = other DNA
ttgcagagcaagggaaaagc

SEQ ID NO: 21888 - DNA, 20 bp, synthetic construct
  misc_feature 1..20: note = chemically synthesized
  source 1..20: mol_type = other DNA
ctttcctttctcttcctttt

SEQ ID NO: 21889 - DNA, 20 bp, synthetic construct
  misc_feature 1..20: note = chemically synthesized
  source 1..20: mol_type = other DNA
gaacaactccaggcaacttc

SEQ ID NO: 21890 - DNA, 20 bp, synthetic construct
  misc_feature 1..20: note = chemically synthesized
  source 1..20: mol_type = other DNA
gccatgcattccttaacaat

SEQ ID NO: 21891 - DNA, 20 bp, synthetic construct
  misc_feature 1..20: note = chemically synthesized
  source 1..20: mol_type = other DNA
tcatcattgtgcgaacataa

SEQ ID NO: 21892 - DNA, 20 bp, synthetic construct
  misc_feature 1..20: note = chemically synthesized
  source 1..20: mol_type = other DNA
agatagagacatctatcctc

SEQ ID NO: 21893 - DNA, 20 bp, synthetic construct
  misc_feature 1..20: note = chemically synthesized
  source 1..20: mol_type = other DNA
acatctatcctccagagttc

SEQ ID NO: 21894 - DNA, 20 bp, synthetic construct
  misc_feature 1..20: note = chemically synthesized
  source 1..20: mol_type = other DNA
tagcttaaaaaaaacatatc

SEQ ID NO: 21895 - DNA, 20 bp, synthetic construct
  misc_feature 1..20: note = chemically synthesized
  source 1..20: mol_type = other DNA
taacatctagtgacagacac

SEQ ID NO: 21896 - DNA, 20 bp, synthetic construct
  misc_feature 1..20: note = chemically synthesized
  source 1..20: mol_type = other DNA
tattctgaaaacagcccagc

SEQ ID NO: 21897 - DNA, 20 bp, synthetic construct
  misc_feature 1..20: note = chemically synthesized
  source 1..20: mol_type = other DNA
aaaacagcccagccagggtg

SEQ ID NO: 21898 - DNA, 20 bp, synthetic construct
  misc_feature 1..20: note = chemically synthesized
  source 1..20: mol_type = other DNA
gaaatctgaccttttattac

SEQ ID NO: 21899 - DNA, 20 bp, synthetic construct
  misc_feature 1..20: note = chemically synthesized
  source 1..20: mol_type = other DNA
tctcttgactaaaagtaaaa

SEQ ID NO: 21900 - DNA, 20 bp, synthetic construct
  misc_feature 1..20: note = chemically synthesized
  source 1..20: mol_type = other DNA
gaaattggctttcagattat

SEQ ID NO: 21901 - DNA, 20 bp, synthetic construct
  misc_feature 1..20: note = chemically synthesized
  source 1..20: mol_type = other DNA
tttcttttttgctaaaacta

SEQ ID NO: 21902 - DNA, 20 bp, synthetic construct
  misc_feature 1..20: note = chemically synthesized
  source 1..20: mol_type = other DNA
atgaaaacgccaacaaaatt

SEQ ID NO: 21903 - DNA, 20 bp, synthetic construct
  misc_feature 1..20: note = chemically synthesized
  source 1..20: mol_type = other DNA
gtataattcaggtaaattgg

SEQ ID NO: 21904 - DNA, 20 bp, synthetic construct
  misc_feature 1..20: note = chemically synthesized
  source 1..20: mol_type = other DNA
tgttcaagggaaccttgaga

SEQ ID NO: 21905 - DNA, 20 bp, synthetic construct
  misc_feature 1..20: note = chemically synthesized
  source 1..20: mol_type = other DNA
aacaaactcttccaatttac

SEQ ID NO: 21906 - DNA, 20 bp, synthetic construct
  misc_feature 1..20: note = chemically synthesized
  source 1..20: mol_type = other DNA
ttatacctctttggccgatt

SEQ ID NO: 21907 - DNA, 20 bp, synthetic construct
  misc_feature 1..20: note = chemically synthesized
  source 1..20: mol_type = other DNA
caagaaaaactgaaatgtaa

SEQ ID NO: 21908 - DNA, 20 bp, synthetic construct
  misc_feature 1..20: note = chemically synthesized
  source 1..20: mol_type = other DNA
ctgtatacacatggagattt

SEQ ID NO: 21909 - DNA, 20 bp, synthetic construct
  misc_feature 1..20: note = chemically synthesized
  source 1..20: mol_type = other DNA
tcaattttacttttagtcaa

SEQ ID NO: 21910 - DNA, 20 bp, synthetic construct
  misc_feature 1..20: note = chemically synthesized
  source 1..20: mol_type = other DNA
ggtcagatttctaatcatat

SEQ ID NO: 21911 - DNA, 20 bp, synthetic construct
  misc_feature 1..20: note = chemically synthesized
  source 1..20: mol_type = other DNA
taatcatatttgaatttact

SEQ ID NO: 21912 - DNA, 20 bp, synthetic construct
  misc_feature 1..20: note = chemically synthesized
  source 1..20: mol_type = other DNA
tcacttgaaaatagctcatt

SEQ ID NO: 21913 - DNA, 20 bp, synthetic construct
  misc_feature 1..20: note = chemically synthesized
  source 1..20: mol_type = other DNA
caccctggctgggctgtttt

SEQ ID NO: 21914 - DNA, 20 bp, synthetic construct
  misc_feature 1..20: note = chemically synthesized
  source 1..20: mol_type = other DNA
ctttggttggcaagtgttat

SEQ ID NO: 21915 - DNA, 20 bp, synthetic construct
  misc_feature 1..20: note = chemically synthesized
  source 1..20: mol_type = other DNA
cagtgatttaagcatctctc

SEQ ID NO: 21916 - DNA, 20 bp, synthetic construct
  misc_feature 1..20: note = chemically synthesized
  source 1..20: mol_type = other DNA
ttaagcatctctctagaatt

SEQ ID NO: 21917 - DNA, 20 bp, synthetic construct
  misc_feature 1..20: note = chemically synthesized
  source 1..20: mol_type = other DNA
agagacactcctgaactctg

SEQ ID NO: 21918 - DNA, 20 bp, synthetic construct
  misc_feature 1..20: note = chemically synthesized
  source 1..20: mol_type = other DNA
tggaggatagatgtctctat

SEQ ID NO: 21919 - DNA, 20 bp, synthetic construct
  misc_feature 1..20: note = chemically synthesized
  source 1..20: mol_type = other DNA
ttgcttaatgacacatttct

SEQ ID NO: 21920 - DNA, 20 bp, synthetic construct
  misc_feature 1..20: note = chemically synthesized
  source 1..20: mol_type = other DNA
agaatatatccccattgtta

SEQ ID NO: 21921 - DNA, 20 bp, synthetic construct
  misc_feature 1..20: note = chemically synthesized
  source 1..20: mol_type = other DNA
cagggactcaagaagttgcc

SEQ ID NO: 21922 - DNA, 20 bp, synthetic construct
  misc_feature 1..20: note = chemically synthesized
  source 1..20: mol_type = other DNA
ctggagttgttcctttcttc

SEQ ID NO: 21923 - DNA, 20 bp, synthetic construct
  misc_feature 1..20: note = chemically synthesized
  source 1..20: mol_type = other DNA
ggcttataagatgaactttc

SEQ ID NO: 21924 - DNA, 20 bp, synthetic construct
  misc_feature 1..20: note = chemically synthesized
  source 1..20: mol_type = other DNA
cattgcagctgttcacttta

SEQ ID NO: 21925 - DNA, 20 bp, synthetic construct
  misc_feature 1..20: note = chemically synthesized
  source 1..20: mol_type = other DNA
tttgggctcactttttttct

SEQ ID NO: 21926 - DNA, 20 bp, synthetic construct
  misc_feature 1..20: note = chemically synthesized
  source 1..20: mol_type = other DNA
ttcaactcttttttttttga

SEQ ID NO: 21927 - DNA, 20 bp, synthetic construct
  misc_feature 1..20: note = chemically synthesized
  source 1..20: mol_type = other DNA
tcttgctctgtcgcccaggc

SEQ ID NO: 21928 - DNA, 20 bp, synthetic construct
  misc_feature 1..20: note = chemically synthesized
  source 1..20: mol_type = other DNA
gcctcagcctcccaagtagc

SEQ ID NO: 21929 - DNA, 20 bp, synthetic construct
  misc_feature 1..20: note = chemically synthesized
  source 1..20: mol_type = other DNA
ttttgtatttttagtaaagc

SEQ ID NO: 21930 - DNA, 20 bp, synthetic construct
  misc_feature 1..20: note = chemically synthesized
  source 1..20: mol_type = other DNA
gcctgggcctctgaaagtgc

SEQ ID NO: 21931 - DNA, 20 bp, synthetic construct
  misc_feature 1..20: note = chemically synthesized
  source 1..20: mol_type = other DNA
aaaaaatcaccaaaatgcag

SEQ ID NO: 21932 - DNA, 20 bp, synthetic construct
  misc_feature 1..20: note = chemically synthesized
  source 1..20: mol_type = other DNA
ccctgcaaatatcaagatct

SEQ ID NO: 21933 - DNA, 20 bp, synthetic construct
  misc_feature 1..20: note = chemically synthesized
  source 1..20: mol_type = other DNA
ttgttatgctgtattgttta

SEQ ID NO: 21934 - DNA, 20 bp, synthetic construct
  misc_feature 1..20: note = chemically synthesized
  source 1..20: mol_type = other DNA
tagggaataatgaaagataa

SEQ ID NO: 21935 - DNA, 20 bp, synthetic construct
  misc_feature 1..20: note = chemically synthesized
  source 1..20: mol_type = other DNA
tgcaaccatccatttttttc

SEQ ID NO: 21936 - DNA, 20 bp, synthetic construct
  misc_feature 1..20: note = chemically synthesized
  source 1..20: mol_type = other DNA
tatttttgatctgcagttaa

SEQ ID NO: 21937 - DNA, 20 bp, synthetic construct
  misc_feature 1..20: note = chemically synthesized
  source 1..20: mol_type = other DNA
gagctgactgtacagtgtgg

SEQ ID NO: 21938 - DNA, 20 bp, synthetic construct
  misc_feature 1..20: note = chemically synthesized
  source 1..20: mol_type = other DNA
ttgagtgaaaaaacagactt

SEQ ID NO: 21939 - DNA, 20 bp, synthetic construct
  misc_feature 1..20: note = chemically synthesized
  source 1..20: mol_type = other DNA
cagatcagacagaaataggt

SEQ ID NO: 21940 - DNA, 20 bp, synthetic construct
  misc_feature 1..20: note = chemically synthesized
  source 1..20: mol_type = other DNA
aggtttaacagtagtataat

SEQ ID NO: 21941 - DNA, 20 bp, synthetic construct
  misc_feature 1..20: note = chemically synthesized
  source 1..20: mol_type = other DNA
atctatctcacaggtgttgg

SEQ ID NO: 21942 - DNA, 20 bp, synthetic construct
  misc_feature 1..20: note = chemically synthesized
  source 1..20: mol_type = other DNA
aaatgactattgtcacaatc

SEQ ID NO: 21943 - DNA, 20 bp, synthetic construct
  misc_feature 1..20: note = chemically synthesized
  source 1..20: mol_type = other DNA
tcacaatcaggaatgaccta

SEQ ID NO: 21944 - DNA, 20 bp, synthetic construct
  misc_feature 1..20: note = chemically synthesized
  source 1..20: mol_type = other DNA
gaatgacctaaagaataatt

SEQ ID NO: 21945 - DNA, 20 bp, synthetic construct
  misc_feature 1..20: note = chemically synthesized
  source 1..20: mol_type = other DNA
tcctgttatccatccagcac

SEQ ID NO: 21946 - DNA, 20 bp, synthetic construct
  misc_feature 1..20: note = chemically synthesized
  source 1..20: mol_type = other DNA
ctccatggcccttaaatgtc

SEQ ID NO: 21947 - DNA, 20 bp, synthetic construct
  misc_feature 1..20: note = chemically synthesized
  source 1..20: mol_type = other DNA
atacttgctagggctgggac

SEQ ID NO: 21948 - DNA, 20 bp, synthetic construct
  misc_feature 1..20: note = chemically synthesized
  source 1..20: mol_type = other DNA
taactactgtttacagaaca

SEQ ID NO: 21949 - DNA, 20 bp, synthetic construct
  misc_feature 1..20: note = chemically synthesized
  source 1..20: mol_type = other DNA
cctatagtcagatacgtctc

SEQ ID NO: 21950 - DNA, 20 bp, synthetic construct
  misc_feature 1..20: note = chemically synthesized
  source 1..20: mol_type = other DNA
ggcactgtcatcttattttt

SEQ ID NO: 21951 - DNA, 20 bp, synthetic construct
  misc_feature 1..20: note = chemically synthesized
  source 1..20: mol_type = other DNA
aggtaacatactaaaacatt

SEQ ID NO: 21952 - DNA, 20 bp, synthetic construct
  misc_feature 1..20: note = chemically synthesized
  source 1..20: mol_type = other DNA
tacctcacgttcttgcaaat

SEQ ID NO: 21953 - DNA, 20 bp, synthetic construct
  misc_feature 1..20: note = chemically synthesized
  source 1..20: mol_type = other DNA
ttgcaaatctgagtctttgc

SEQ ID NO: 21954 - DNA, 20 bp, synthetic construct
  misc_feature 1..20: note = chemically synthesized
  source 1..20: mol_type = other DNA
atgctgctttagatcaaaga

SEQ ID NO: 21955 - DNA, 20 bp, synthetic construct
  misc_feature 1..20: note = chemically synthesized
  source 1..20: mol_type = other DNA
tagttgtaactcagtaatgt

SEQ ID NO: 21956 - DNA, 20 bp, synthetic construct
  misc_feature 1..20: note = chemically synthesized
  source 1..20: mol_type = other DNA
aactccttttagaagccaat

SEQ ID NO: 21957 - DNA, 20 bp, synthetic construct
  misc_feature 1..20: note = chemically synthesized
  source 1..20: mol_type = other DNA
atgagagtttaatagcagaa

SEQ ID NO: 21958 - DNA, 20 bp, synthetic construct
  misc_feature 1..20: note = chemically synthesized
  source 1..20: mol_type = other DNA
atctctggctacaatggctg

SEQ ID NO: 21959 - DNA, 20 bp, synthetic construct
  misc_feature 1..20: note = chemically synthesized
  source 1..20: mol_type = other DNA
ctttctccttagtattatct

SEQ ID NO: 21960 - DNA, 20 bp, synthetic construct
  misc_feature 1..20: note = chemically synthesized
  source 1..20: mol_type = other DNA
ctcaccacttatatagaaga

SEQ ID NO: 21961 - DNA, 20 bp, synthetic construct
  misc_feature 1..20: note = chemically synthesized
  source 1..20: mol_type = other DNA
acttatatagaagaaagggt

SEQ ID NO: 21962 - DNA, 20 bp, synthetic construct
  misc_feature 1..20: note = chemically synthesized
  source 1..20: mol_type = other DNA
cttgctttatgtcctgcttt

SEQ ID NO: 21963 - DNA, 20 bp, synthetic construct
  misc_feature 1..20: note = chemically synthesized
  source 1..20: mol_type = other DNA
ttcacagctgacatcatgtc

SEQ ID NO: 21964 - DNA, 20 bp, synthetic construct
  misc_feature 1..20: note = chemically synthesized
  source 1..20: mol_type = other DNA
acagggccagtcagctttct

SEQ ID NO: 21965 - DNA, 20 bp, synthetic construct
  misc_feature 1..20: note = chemically synthesized
  source 1..20: mol_type = other DNA
gtcagctttctgggggtgct

SEQ ID NO: 21966 - DNA, 20 bp, synthetic construct
  misc_feature 1..20: note = chemically synthesized
  source 1..20: mol_type = other DNA
gaacatgctgtttgtccaaa

SEQ ID NO: 21967 - DNA, 20 bp, synthetic construct
  misc_feature 1..20: note = chemically synthesized
  source 1..20: mol_type = other DNA
ttctcccctagggaactcaa

SEQ ID NO: 21968 - DNA, 20 bp, synthetic construct
  misc_feature 1..20: note = chemically synthesized
  source 1..20: mol_type = other DNA
aatttttttaaaccaaggag

SEQ ID NO: 21969 - DNA, 20 bp, synthetic construct
  misc_feature 1..20: note = chemically synthesized
  source 1..20: mol_type = other DNA
ggagatgaatgttttctaac

SEQ ID NO: 21970 - DNA, 20 bp, synthetic construct
  misc_feature 1..20: note = chemically synthesized
  source 1..20: mol_type = other DNA
acaaacctgtacattcagca

SEQ ID NO: 21971 - DNA, 20 bp, synthetic construct
  misc_feature 1..20: note = chemically synthesized
  source 1..20: mol_type = other DNA
agcgcgtgaacatgatcatg

SEQ ID NO: 21972 - DNA, 20 bp, synthetic construct
  misc_feature 1..20: note = chemically synthesized
  source 1..20: mol_type = other DNA
agtatgcttgccttttagat

SEQ ID NO: 21973 - DNA, 20 bp, synthetic construct
  misc_feature 1..20: note = chemically synthesized
  source 1..20: mol_type = other DNA
atttggtcatgtaattcctg

SEQ ID NO: 21974 - DNA, 20 bp, synthetic construct
  misc_feature 1..20: note = chemically synthesized
  source 1..20: mol_type = other DNA
aaaattaaaagtgggaaaac

SEQ ID NO: 21975 - DNA, 20 bp, synthetic construct
  misc_feature 1..20: note = chemically synthesized
  source 1..20: mol_type = other DNA
agtgggaaaacaaagaaata

SEQ ID NO: 21976 - DNA, 20 bp, synthetic construct
  misc_feature 1..20: note = chemically synthesized
  source 1..20: mol_type = other DNA
actcagttgagttccctagg

SEQ ID NO: 21977 - DNA, 20 bp, synthetic construct
  misc_feature 1..20: note = chemically synthesized
  source 1..20: mol_type = other DNA
ctaggggagaaaagcaagct

SEQ ID NO: 21978 - DNA, 20 bp, synthetic construct
  misc_feature 1..20: note = chemically synthesized
  source 1..20: mol_type = other DNA
cccagaggaaggcatacagg

SEQ ID NO: 21979 - DNA, 20 bp, synthetic construct
  misc_feature 1..20: note = chemically synthesized
  source 1..20: mol_type = other DNA
cacacttacttgtcaacttt

SEQ ID NO: 21980 - DNA, 20 bp, synthetic construct
  misc_feature 1..20: note = chemically synthesized
  source 1..20: mol_type = other DNA
ggtgccaaccctaagcaccc

SEQ ID NO: 21981 - DNA, 20 bp, synthetic construct
  misc_feature 1..20: note = chemically synthesized
  source 1..20: mol_type = other DNA
agtgagtaaagtcaagggat

SEQ ID NO: 21982 - DNA, 20 bp, synthetic construct
  misc_feature 1..20: note = chemically synthesized
  source 1..20: mol_type = other DNA
gatgctggggaaaggataga

SEQ ID NO: 21983 - DNA, 20 bp, synthetic construct
  misc_feature 1..20: note = chemically synthesized
  source 1..20: mol_type = other DNA
cgatccccagataatactaa

SEQ ID NO: 21984 - DNA, 20 bp, synthetic construct
  misc_feature 1..20: note = chemically synthesized
  source 1..20: mol_type = other DNA
actaggtactaagggatcat

SEQ ID NO: 21985 - DNA, 20 bp, synthetic construct
  misc_feature 1..20: note = chemically synthesized
  source 1..20: mol_type = other DNA
tggggaaacaattgatagag

SEQ ID NO: 21986 - DNA, 20 bp, synthetic construct
  misc_feature 1..20: note = chemically synthesized
  source 1..20: mol_type = other DNA
gtttgatgtgattatggacc

SEQ ID NO: 21987 - DNA, 20 bp, synthetic construct
  misc_feature 1..20: note = chemically synthesized
  source 1..20: mol_type = other DNA
agttagagcaaagcggggaa

SEQ ID NO: 21988 - DNA, 20 bp, synthetic construct
  misc_feature 1..20: note = chemically synthesized
  source 1..20: mol_type = other DNA
aaaaagggagagatcaacaa

SEQ ID NO: 21989 - DNA, 20 bp, synthetic construct
  misc_feature 1..20: note = chemically synthesized
  source 1..20: mol_type = other DNA
agaagttattaaagagctaa

SEQ ID NO: 21990 - DNA, 20 bp, synthetic construct
  misc_feature 1..20: note = chemically synthesized
  source 1..20: mol_type = other DNA
attaaagagctaaagagaat

SEQ ID NO: 21991 - DNA, 20 bp, synthetic construct
  misc_feature 1..20: note = chemically synthesized
  source 1..20: mol_type = other DNA
gaattgagaaatttaaaaca

SEQ ID NO: 21992 - DNA, 20 bp, synthetic construct
  misc_feature 1..20: note = chemically synthesized
  source 1..20: mol_type = other DNA
ggccaacatgaaaggagtag

SEQ ID NO: 21993 - DNA, 20 bp, synthetic construct
  misc_feature 1..20: note = chemically synthesized
  source 1..20: mol_type = other DNA
aactgcagatcaaaaatatt

SEQ ID NO: 21994 - DNA, 20 bp, synthetic construct
  misc_feature 1..20: note = chemically synthesized
  source 1..20: mol_type = other DNA
ttacattgtattagctatta

SEQ ID NO: 21995 - DNA, 20 bp, synthetic construct
  misc_feature 1..20: note = chemically synthesized
  source 1..20: mol_type = other DNA
tgcaaacgagtgaaggaaat

SEQ ID NO: 21996 - DNA, 20 bp, synthetic construct
  misc_feature 1..20: note = chemically synthesized
  source 1..20: mol_type = other DNA
ctacttgggaggctgaggca

SEQ ID NO: 21997 - DNA, 20 bp, synthetic construct
  misc_feature 1..20: note = chemically synthesized
  source 1..20: mol_type = other DNA
gtcaaaaaaaaaagagttga

SEQ ID NO: 21998 - DNA, 20 bp, synthetic construct
  misc_feature 1..20: note = chemically synthesized
  source 1..20: mol_type = other DNA
aaaaagtctaggctaaattc

SEQ ID NO: 21999 - DNA, 20 bp, synthetic construct
  misc_feature 1..20: note = chemically synthesized
  source 1..20: mol_type = other DNA
cagctgcaatgaaaataagg

SEQ ID NO: 22000 - DNA, 20 bp, synthetic construct
  misc_feature 1..20: note = chemically synthesized
  source 1..20: mol_type = other DNA
aggaagtagtcccaaatacc

SEQ ID NO: 22001 - DNA, 20 bp, synthetic construct
  misc_feature 1..20: note = chemically synthesized
  source 1..20: mol_type = other DNA
agatatattgctagaccctt

SEQ ID NO: 22002 - DNA, 20 bp, synthetic construct
  misc_feature 1..20: note = chemically synthesized
  source 1..20: mol_type = other DNA
ttaacaatggggatatattc

SEQ ID NO: 22003 - DNA, 20 bp, synthetic construct
  misc_feature 1..20: note = chemically synthesized
  source 1..20: mol_type = other DNA
tggtatttgtgtatctaaac

SEQ ID NO: 22004 - DNA, 20 bp, synthetic construct
  misc_feature 1..20: note = chemically synthesized
  source 1..20: mol_type = other DNA
gagaggaaggagggagggaa

SEQ ID NO: 22005 - DNA, 20 bp, synthetic construct
  misc_feature 1..20: note = chemically synthesized
  source 1..20: mol_type = other DNA
caaagtaaattcaaatatga

SEQ ID NO: 22006 - DNA, 20 bp, synthetic construct
  misc_feature 1..20: note = chemically synthesized
  source 1..20: mol_type = other DNA
attttggctccatgccctaa

SEQ ID NO: 22007 - DNA, 20 bp, synthetic construct
  misc_feature 1..20: note = chemically synthesized
  source 1..20: mol_type = other DNA
ttttcttttttgctaaaact

SEQ ID NO: 22008 - DNA, 20 bp, synthetic construct
  misc_feature 1..20: note = chemically synthesized
  source 1..20: mol_type = other DNA
ttgttcaagggaaccttgag

SEQ ID NO: 22009 - DNA, 20 bp, synthetic construct
  misc_feature 1..20: note = chemically synthesized
  source 1..20: mol_type = other DNA
accttgagagagaatgtatg

SEQ ID NO: 22010 - DNA, 20 bp, synthetic construct
  misc_feature 1..20: note = chemically synthesized
  source 1..20: mol_type = other DNA
attatacctctttggccgat

SEQ ID NO: 22011 - DNA, 20 bp, synthetic construct
  misc_feature 1..20: note = chemically synthesized
  source 1..20: mol_type = other DNA
tttgttggcgttttcatgat

SEQ ID NO: 22012 - DNA, 20 bp, synthetic construct
  misc_feature 1..20: note = chemically synthesized
  source 1..20: mol_type = other DNA
tcaagaaaaactgaaatgta

SEQ ID NO: 22013 - DNA, 20 bp, synthetic construct
  misc_feature 1..20: note = chemically synthesized
  source 1..20: mol_type = other DNA
aattctttagttttagcaaa

SEQ ID NO: 22014 - DNA, 20 bp, synthetic construct
  misc_feature 1..20: note = chemically synthesized
  source 1..20: mol_type = other DNA
catgaaaattttacatctct

SEQ ID NO: 22015 - DNA, 20 bp, synthetic construct
  misc_feature 1..20: note = chemically synthesized
  source 1..20: mol_type = other DNA
ttcaattttacttttagtca

SEQ ID NO: 22016 - DNA, 20 bp, synthetic construct
  misc_feature 1..20: note = chemically synthesized
  source 1..20: mol_type = other DNA
ttgaatttactttggatgaa

SEQ ID NO: 22017 - DNA, 20 bp, synthetic construct
  misc_feature 1..20: note = chemically synthesized
  source 1..20: mol_type = other DNA
tcaccctggctgggctgttt

SEQ ID NO: 22018 - DNA, 20 bp, synthetic construct
  misc_feature 1..20: note = chemically synthesized
  source 1..20: mol_type = other DNA
agtgtctgtcactagatgtt

SEQ ID NO: 22019 - DNA, 20 bp, synthetic construct
  misc_feature 1..20: note = chemically synthesized
  source 1..20: mol_type = other DNA
gcagtgatttaagcatctct

SEQ ID NO: 22020 - DNA, 20 bp, synthetic construct
  misc_feature 1..20: note = chemically synthesized
  source 1..20: mol_type = other DNA
attgcttaatgacacatttc

SEQ ID NO: 22021 - DNA, 20 bp, synthetic construct
  misc_feature 1..20: note = chemically synthesized
  source 1..20: mol_type = other DNA
ctgattaactccaaaaagga

SEQ ID NO: 22022 - DNA, 20 bp, synthetic construct
  misc_feature 1..20: note = chemically synthesized
  source 1..20: mol_type = other DNA
aggaaagtaaaaaggaaagg

SEQ ID NO: 22023 - DNA, 20 bp, synthetic construct
  misc_feature 1..20: note = chemically synthesized
  source 1..20: mol_type = other DNA
gttgagtgaaaaaacagact

SEQ ID NO: 22024 - DNA, 20 bp, synthetic construct
  misc_feature 1..20: note = chemically synthesized
  source 1..20: mol_type = other DNA
agactttagaatcagatcag

SEQ ID NO: 22025 - DNA, 20 bp, synthetic construct
  misc_feature 1..20: note = chemically synthesized
  source 1..20: mol_type = other DNA
taggtttaacagtagtataa

SEQ ID NO: 22026 - DNA, 20 bp, synthetic construct
  misc_feature 1..20: note = chemically synthesized
  source 1..20: mol_type = other DNA
gtcacaatcaggaatgacct

SEQ ID NO: 22027 - DNA, 20 bp, synthetic construct
  misc_feature 1..20: note = chemically synthesized
  source 1..20: mol_type = other DNA
tgcattaatactgtctatcc

SEQ ID NO: 22028 - DNA, 20 bp, synthetic construct
  misc_feature 1..20: note = chemically synthesized
  source 1..20: mol_type = other DNA
tatctctggctacaatggct

SEQ ID NO: 22029 - DNA, 20 bp, synthetic construct
  misc_feature 1..20: note = chemically synthesized
  source 1..20: mol_type = other DNA
atcatctcaccacttatata

SEQ ID NO: 22030 - DNA, 20 bp, synthetic construct
  misc_feature 1..20: note = chemically synthesized
  source 1..20: mol_type = other DNA
gtcagctactagatttgatt

SEQ ID NO: 22031 - DNA, 20 bp, synthetic construct
  misc_feature 1..20: note = chemically synthesized
  source 1..20: mol_type = other DNA
ttagttttaaaaatgaagaa

SEQ ID NO: 22032 - DNA, 20 bp, synthetic construct
  misc_feature 1..20: note = chemically synthesized
  source 1..20: mol_type = other DNA
gttttcttcttcttcatttt

SEQ ID NO: 22033 - DNA, 20 bp, synthetic construct
  misc_feature 1..20: note = chemically synthesized
  source 1..20: mol_type = other DNA
tggtcatgtaattcctgtta

SEQ ID NO: 22034 - DNA, 20 bp, synthetic construct
  misc_feature 1..20: note = chemically synthesized
  source 1..20: mol_type = other DNA
tttaaaaaaattaaaagtgg

SEQ ID NO: 22035 - DNA, 20 bp, synthetic construct
  misc_feature 1..20: note = chemically synthesized
  source 1..20: mol_type = other DNA
cttcaatttaaagttttagt

SEQ ID NO: 22036 - DNA, 20 bp, synthetic construct
  misc_feature 1..20: note = chemically synthesized
  source 1..20: mol_type = other DNA
gggataaagaaaatttgttg

SEQ ID NO: 22037 - DNA, 20 bp, synthetic construct
  misc_feature 1..20: note = chemically synthesized
  source 1..20: mol_type = other DNA
acagtttggaattttgaaat

SEQ ID NO: 22038 - DNA, 20 bp, synthetic construct
  misc_feature 1..20: note = chemically synthesized
  source 1..20: mol_type = other DNA
ttgaaattaaaacagttctg

SEQ ID NO: 22039 - DNA, 20 bp, synthetic construct
  misc_feature 1..20: note = chemically synthesized
  source 1..20: mol_type = other DNA
ctaaagagaattgagaaatt

SEQ ID NO: 22040 - DNA, 20 bp, synthetic construct
  misc_feature 1..20: note = chemically synthesized
  source 1..20: mol_type = other DNA
acacatatatgtatatacat

SEQ ID NO: 22041 - DNA, 20 bp, synthetic construct
  misc_feature 1..20: note = chemically synthesized
  source 1..20: mol_type = other DNA
ctaggtagatgtagcttaaa

SEQ ID NO: 22042 - DNA, 20 bp, synthetic construct
  misc_feature 1..20: note = chemically synthesized
  source 1..20: mol_type = other DNA
catttgggcaaccatattct

SEQ ID NO: 22043 - DNA, 20 bp, synthetic construct
  misc_feature 1..20: note = chemically synthesized
  source 1..20: mol_type = other DNA
gctttcagattatttggatt

SEQ ID NO: 22044 - DNA, 20 bp, synthetic construct
  misc_feature 1..20: note = chemically synthesized
  source 1..20: mol_type = other DNA
catgatgttttcttttttgc

SEQ ID NO: 22045 - DNA, 20 bp, synthetic construct
  misc_feature 1..20: note = chemically synthesized
  source 1..20: mol_type = other DNA
tttcagtttttcttgatcat

SEQ ID NO: 22046 - DNA, 20 bp, synthetic construct
  misc_feature 1..20: note = chemically synthesized
  source 1..20: mol_type = other DNA
aagaagcacgagaagttttt

SEQ ID NO: 22047 - DNA, 20 bp, synthetic construct
  misc_feature 1..20: note = chemically synthesized
  source 1..20: mol_type = other DNA
aaaaacttctcgtgcttctt

SEQ ID NO: 22048 - DNA, 20 bp, synthetic construct
  misc_feature 1..20: note = chemically synthesized
  source 1..20: mol_type = other DNA
ttggcgttttcatgatcaag

SEQ ID NO: 22049 - DNA, 20 bp, synthetic construct
  misc_feature 1..20: note = chemically synthesized
  source 1..20: mol_type = other DNA
tctttagttttagcaaaaaa

SEQ ID NO: 22050 - DNA, 20 bp, synthetic construct
  misc_feature 1..20: note = chemically synthesized
  source 1..20: mol_type = other DNA
tgtacagtgtggttgagtga

SEQ ID NO: 22051 - DNA, 20 bp, synthetic construct
  misc_feature 1..20: note = chemically synthesized
  source 1..20: mol_type = other DNA
ctttgcccaaggtaacatac

SEQ ID NO: 22052 - DNA, 20 bp, synthetic construct
  misc_feature 1..20: note = chemically synthesized
  source 1..20: mol_type = other DNA
atagtccatatggaaccata

SEQ ID NO: 22053 - DNA, 20 bp, synthetic construct
  misc_feature 1..20: note = chemically synthesized
  source 1..20: mol_type = other DNA
tctttgatgcatacacttta

SEQ ID NO: 22054 - DNA, 20 bp, synthetic construct
  misc_feature 1..20: note = chemically synthesized
  source 1..20: mol_type = other DNA
taaagtcactgtagttgtga

SEQ ID NO: 22055 - DNA, 20 bp, synthetic construct
  misc_feature 1..20: note = chemically synthesized
  source 1..20: mol_type = other DNA
gttaatctttatgttttaac

SEQ ID NO: 22056 - DNA, 20 bp, synthetic construct
  misc_feature 1..20: note = chemically synthesized
  source 1..20: mol_type = other DNA
gttttaaaaatgaagaagaa

SEQ ID NO: 22057 - DNA, 20 bp, synthetic construct
  misc_feature 1..20: note = chemically synthesized
  source 1..20: mol_type = other DNA
atctactcagtgctgaatgt

SEQ ID NO: 22058 - DNA, 20 bp, synthetic construct
  misc_feature 1..20: note = chemically synthesized
  source 1..20: mol_type = other DNA
actcagtgctgaatgtacag

SEQ ID NO: 22059 - DNA, 20 bp, synthetic construct
  misc_feature 1..20: note = chemically synthesized
  source 1..20: mol_type = other DNA
ccttttttaaaatacattga

SEQ ID NO: 22060 - DNA, 20 bp, synthetic construct
  misc_feature 1..20: note = chemically synthesized
  source 1..20: mol_type = other DNA
atgctgtcttcttcactaaa

SEQ ID NO: 22061 - DNA, 20 bp, synthetic construct
  misc_feature 1..20: note = chemically synthesized
  source 1..20: mol_type = other DNA
ttcttcactaaattttgatt

SEQ ID NO: 22062 - DNA, 20 bp, synthetic construct
  misc_feature 1..20: note = chemically synthesized
  source 1..20: mol_type = other DNA
aagtactggttctttgttag

SEQ ID NO: 22063 - DNA, 20 bp, synthetic construct
  misc_feature 1..20: note = chemically synthesized
  source 1..20: mol_type = other DNA
tttaaaactaaatagatcga

SEQ ID NO: 22064 - DNA, 20 bp, synthetic construct
  misc_feature 1..20: note = chemically synthesized
  source 1..20: mol_type = other DNA
cgacaatgcttatgatgcat

SEQ ID NO: 22065 - DNA, 20 bp, synthetic construct
  misc_feature 1..20: note = chemically synthesized
  source 1..20: mol_type = other DNA
tttaataaacactgttcagt

SEQ ID NO: 22066 - DNA, 20 bp, synthetic construct
  misc_feature 1..20: note = chemically synthesized
  source 1..20: mol_type = other DNA
tgttagaaaacattcatctc

SEQ ID NO: 22067 - DNA, 20 bp, synthetic construct
  misc_feature 1..20: note = chemically synthesized
  source 1..20: mol_type = other DNA
aaaaaaaataaccacattat

SEQ ID NO: 22068 - DNA, 20 bp, synthetic construct
  misc_feature 1..20: note = chemically synthesized
  source 1..20: mol_type = other DNA
tggccttatttacacaaaaa

SEQ ID NO: 22069 - DNA, 20 bp, synthetic construct
  misc_feature 1..20: note = chemically synthesized
  source 1..20: mol_type = other DNA
ttttaagatatatgacattt

SEQ ID NO: 22070 - DNA, 20 bp, synthetic construct
  misc_feature 1..20: note = chemically synthesized
  source 1..20: mol_type = other DNA
taaattatatatcttcaatt

SEQ ID NO: 22071 - DNA, 20 bp, synthetic construct
  misc_feature 1..20: note = chemically synthesized
  source 1..20: mol_type = other DNA
ttaaagttttagttaaaaca

SEQ ID NO: 22072 - DNA, 20 bp, synthetic construct
  misc_feature 1..20: note = chemically synthesized
  source 1..20: mol_type = other DNA
agcaagctgttagttatcac

SEQ ID NO: 22073 - DNA, 20 bp, synthetic construct
  misc_feature 1..20: note = chemically synthesized
  source 1..20: mol_type = other DNA
tagttatcaccaaagctttt

SEQ ID NO: 22074 - DNA, 20 bp, synthetic construct
  misc_feature 1..20: note = chemically synthesized
  source 1..20: mol_type = other DNA
gagttccctaggggagaaaa

SEQ ID NO: 22075 - DNA, 20 bp, synthetic construct
  misc_feature 1..20: note = chemically synthesized
  source 1..20: mol_type = other DNA
agctaatgcaacatatatca

SEQ ID NO: 22076 - DNA, 20 bp, synthetic construct
  misc_feature 1..20: note = chemically synthesized
  source 1..20: mol_type = other DNA
tgagatgatgaaggttgtaa

SEQ ID NO: 22077 - DNA, 20 bp, synthetic construct
  misc_feature 1..20: note = chemically synthesized
  source 1..20: mol_type = other DNA
tagataagaataaggatgaa

SEQ ID NO: 22078 - DNA, 20 bp, synthetic construct
  misc_feature 1..20: note = chemically synthesized
  source 1..20: mol_type = other DNA
taatactaaggagaaaggca

SEQ ID NO: 22079 - DNA, 20 bp, synthetic construct
  misc_feature 1..20: note = chemically synthesized
  source 1..20: mol_type = other DNA
tcttctgctattaaactctc

SEQ ID NO: 22080 - DNA, 20 bp, synthetic construct
  misc_feature 1..20: note = chemically synthesized
  source 1..20: mol_type = other DNA
aactctcattggcttctaaa

SEQ ID NO: 22081 - DNA, 20 bp, synthetic construct
  misc_feature 1..20: note = chemically synthesized
  source 1..20: mol_type = other DNA
cttctaaaaggagtttcggt

SEQ ID NO: 22082 - DNA, 20 bp, synthetic construct
  misc_feature 1..20: note = chemically synthesized
  source 1..20: mol_type = other DNA
ctgcctttaggtattattgc

SEQ ID NO: 22083 - DNA, 20 bp, synthetic construct
  misc_feature 1..20: note = chemically synthesized
  source 1..20: mol_type = other DNA
aattaaaacagttctgtaaa

SEQ ID NO: 22084 - DNA, 20 bp, synthetic construct
  misc_feature 1..20: note = chemically synthesized
  source 1..20: mol_type = other DNA
aaacagttctgtaaaaccag

SEQ ID NO: 22085 - DNA, 20 bp, synthetic construct
  misc_feature 1..20: note = chemically synthesized
  source 1..20: mol_type = other DNA
aagcagcatgaggccaggtg

SEQ ID NO: 22086 - DNA, 20 bp, synthetic construct
  misc_feature 1..20: note = chemically synthesized
  source 1..20: mol_type = other DNA
gaggatcactcgtgcaaaga

SEQ ID NO: 22087 - DNA, 20 bp, synthetic construct
  misc_feature 1..20: note = chemically synthesized
  source 1..20: mol_type = other DNA
gcaagaacgtgaggtatttc

SEQ ID NO: 22088 - DNA, 20 bp, synthetic construct
  misc_feature 1..20: note = chemically synthesized
  source 1..20: mol_type = other DNA
ataatgaagtcattaaccta

SEQ ID NO: 22089 - DNA, 20 bp, synthetic construct
  misc_feature 1..20: note = chemically synthesized
  source 1..20: mol_type = other DNA
acataaggagtaccactgat

SEQ ID NO: 22090 - DNA, 20 bp, synthetic construct
  misc_feature 1..20: note = chemically synthesized
  source 1..20: mol_type = other DNA
tggctagagtcttggggact

SEQ ID NO: 22091 - DNA, 20 bp, synthetic construct
  misc_feature 1..20: note = chemically synthesized
  source 1..20: mol_type = other DNA
tcttggggactttgtgtttg

SEQ ID NO: 22092 - DNA, 20 bp, synthetic construct
  misc_feature 1..20: note = chemically synthesized
  source 1..20: mol_type = other DNA
actgccagagtctgaatcct

SEQ ID NO: 22093 - DNA, 20 bp, synthetic construct
  misc_feature 1..20: note = chemically synthesized
  source 1..20: mol_type = other DNA
taaatattgtgccctacatg

SEQ ID NO: 22094 - DNA, 20 bp, synthetic construct
  misc_feature 1..20: note = chemically synthesized
  source 1..20: mol_type = other DNA
caaagcggggaaccagaata

SEQ ID NO: 22095 - DNA, 20 bp, synthetic construct
  misc_feature 1..20: note = chemically synthesized
  source 1..20: mol_type = other DNA
aatagagtgattattataaa

SEQ ID NO: 22096 - DNA, 20 bp, synthetic construct
  misc_feature 1..20: note = chemically synthesized
  source 1..20: mol_type = other DNA
aaaattattctttaggtcat

SEQ ID NO: 22097 - DNA, 20 bp, synthetic construct
  misc_feature 1..20: note = chemically synthesized
  source 1..20: mol_type = other DNA
atagtcatttcattatataa

SEQ ID NO: 22098 - DNA, 20 bp, synthetic construct
  misc_feature 1..20: note = chemically synthesized
  source 1..20: mol_type = other DNA
catttgacaaagttaaggtt

SEQ ID NO: 22099 - DNA, 20 bp, synthetic construct
  misc_feature 1..20: note = chemically synthesized
  source 1..20: mol_type = other DNA
caggtctagaggaggcagat

SEQ ID NO: 22100 - DNA, 20 bp, synthetic construct
  misc_feature 1..20: note = chemically synthesized
  source 1..20: mol_type = other DNA
ttcaaacctatttctgtctg

SEQ ID NO: 22101 - DNA, 20 bp, synthetic construct
  misc_feature 1..20: note = chemically synthesized
  source 1..20: mol_type = other DNA
ctgtctgatctgattctaaa

SEQ ID NO: 22102 - DNA, 20 bp, synthetic construct
  misc_feature 1..20: note = chemically synthesized
  source 1..20: mol_type = other DNA
ctccttgtgagttccacagc

SEQ ID NO: 22103 - DNA, 20 bp, synthetic construct
  misc_feature 1..20: note = chemically synthesized
  source 1..20: mol_type = other DNA
agctattaagagaaacctag

SEQ ID NO: 22104 - DNA, 20 bp, synthetic construct
  misc_feature 1..20: note = chemically synthesized
  source 1..20: mol_type = other DNA
gatttaaagtacaaaggagg

SEQ ID NO: 22105 - DNA, 20 bp, synthetic construct
  misc_feature 1..20: note = chemically synthesized
  source 1..20: mol_type = other DNA
ggtggcatccatctgcattt

SEQ ID NO: 22106 - DNA, 20 bp, synthetic construct
  misc_feature 1..20: note = chemically synthesized
  source 1..20: mol_type = other DNA
tggctgctccaatttagggg

SEQ ID NO: 22107 - DNA, 20 bp, synthetic construct
  misc_feature 1..20: note = chemically synthesized
  source 1..20: mol_type = other DNA
acaaggtgaaatggtgaaac

SEQ ID NO: 22108 - DNA, 20 bp, synthetic construct
  misc_feature 1..20: note = chemically synthesized
  source 1..20: mol_type = other DNA
ttgggaggctgaggcaggag

SEQ ID NO: 22109 - DNA, 20 bp, synthetic construct
  misc_feature 1..20: note = chemically synthesized
  source 1..20: mol_type = other DNA
ctgcaatgaaaataagggaa

SEQ ID NO: 22110 - DNA, 20 bp, synthetic construct
  misc_feature 1..20: note = chemically synthesized
  source 1..20: mol_type = other DNA
gggaagaaagtttagttcat

SEQ ID NO: 22111 - DNA, 20 bp, synthetic construct
  misc_feature 1..20: note = chemically synthesized
  source 1..20: mol_type = other DNA
acttacctaaacctaaatgg

SEQ ID NO: 22112 - DNA, 20 bp, synthetic construct
  misc_feature 1..20: note = chemically synthesized
  source 1..20: mol_type = other DNA
ccaaaatgtcattgtgcagc

SEQ ID NO: 22113 - DNA, 20 bp, synthetic construct
  misc_feature 1..20: note = chemically synthesized
  source 1..20: mol_type = other DNA
aaggagggagggaaggagaa

SEQ ID NO: 22114 - DNA, 20 bp, synthetic construct
  misc_feature 1..20: note = chemically synthesized
  source 1..20: mol_type = other DNA
gtctcttcagactaggtaga

SEQ ID NO: 22115 - DNA, 20 bp, synthetic construct
  misc_feature 1..20: note = chemically synthesized
  source 1..20: mol_type = other DNA
acatatcctgaattctagag

SEQ ID NO: 22116 - DNA, 20 bp, synthetic construct
  misc_feature 1..20: note = chemically synthesized
  source 1..20: mol_type = other DNA
caaaggtgctgttgatctga

SEQ ID NO: 22117 - DNA, 20 bp, synthetic construct
  misc_feature 1..20: note = chemically synthesized
  source 1..20: mol_type = other DNA
attgcttttttaaattaatg

SEQ ID NO: 22118 - DNA, 20 bp, synthetic construct
  misc_feature 1..20: note = chemically synthesized
  source 1..20: mol_type = other DNA
catttgcagctggaccataa

SEQ ID NO: 22119 - DNA, 20 bp, synthetic construct
  misc_feature 1..20: note = chemically synthesized
  source 1..20: mol_type = other DNA
ttcatccaaagtaaattcaa

SEQ ID NO: 22120 - DNA, 20 bp, synthetic construct
  misc_feature 1..20: note = chemically synthesized
  source 1..20: mol_type = other DNA
atacagtactgtgggaacat

SEQ ID NO: 22121 - DNA, 20 bp, synthetic construct
  misc_feature 1..20: note = chemically synthesized
  source 1..20: mol_type = other DNA
gctccatgccctaaagagaa

SEQ ID NO: 22122 - DNA, 20 bp, synthetic construct
  misc_feature 1..20: note = chemically synthesized
  source 1..20: mol_type = other DNA
gccctaaagagaaattggct

SEQ ID NO: 22123 - DNA, 20 bp, synthetic construct
  misc_feature 1..20: note = chemically synthesized
  source 1..20: mol_type = other DNA
agaaattggctttcagatta

SEQ ID NO: 22124 - DNA, 20 bp, synthetic construct
  misc_feature 1..20: note = chemically synthesized
  source 1..20: mol_type = other DNA
taagagatgtaaaattttca

SEQ ID NO: 22125 - DNA, 20 bp, synthetic construct
  misc_feature 1..20: note = chemically synthesized
  source 1..20: mol_type = other DNA
aaagaattattcttttacat

SEQ ID NO: 22126 - DNA, 20 bp, synthetic construct
  misc_feature 1..20: note = chemically synthesized
  source 1..20: mol_type = other DNA
gtataattcaggtaaattgg

SEQ ID NO: 22127 - DNA, 20 bp, synthetic construct
  misc_feature 1..20: note = chemically synthesized
  source 1..20: mol_type = other DNA
gagaatgtatggaagaaaag

SEQ ID NO: 22128 - DNA, 20 bp, synthetic construct
  misc_feature 1..20: note = chemically synthesized
  source 1..20: mol_type = other DNA
tgtagttttgaagaagcacg

SEQ ID NO: 22129 - DNA, 20 bp, synthetic construct
  misc_feature 1..20: note = chemically synthesized
  source 1..20: mol_type = other DNA
tcagtgttttcaaaaacttc

SEQ ID NO: 22130 - DNA, 20 bp, synthetic construct
  misc_feature 1..20: note = chemically synthesized
  source 1..20: mol_type = other DNA
tacctgaattatacctcttt

SEQ ID NO: 22131 - DNA, 20 bp, synthetic construct
  misc_feature 1..20: note = chemically synthesized
  source 1..20: mol_type = other DNA
tggccgattcagaattttgt

SEQ ID NO: 22132 - DNA, 20 bp, synthetic construct
  misc_feature 1..20: note = chemically synthesized
  source 1..20: mol_type = other DNA
gaaatgtaaaagaataattc

SEQ ID NO: 22133 - DNA, 20 bp, synthetic construct
  misc_feature 1..20: note = chemically synthesized
  source 1..20: mol_type = other DNA
tttacatctcttaagaaagt

SEQ ID NO: 22134 - DNA, 20 bp, synthetic construct
  misc_feature 1..20: note = chemically synthesized
  source 1..20: mol_type = other DNA
cccacagtactgtatacaca

SEQ ID NO: 22135 - DNA, 20 bp, synthetic construct
  misc_feature 1..20: note = chemically synthesized
  source 1..20: mol_type = other DNA
gagaattccagtaataaaag

SEQ ID NO: 22136 - DNA, 20 bp, synthetic construct
  misc_feature 1..20: note = chemically synthesized
  source 1..20: mol_type = other DNA
gtgatccatcaccctggctg

SEQ ID NO: 22137 - DNA, 20 bp, synthetic construct
  misc_feature 1..20: note = chemically synthesized
  source 1..20: mol_type = other DNA
ggcaagtgttataggaattg

SEQ ID NO: 22138 - DNA, 20 bp, synthetic construct
  misc_feature 1..20: note = chemically synthesized
  source 1..20: mol_type = other DNA
gcatctctctagaattcagg

SEQ ID NO: 22139 - DNA, 20 bp, synthetic construct
  misc_feature 1..20: note = chemically synthesized
  source 1..20: mol_type = other DNA
gtattttcactgtacctttt

SEQ ID NO: 22140 - DNA, 20 bp, synthetic construct
  misc_feature 1..20: note = chemically synthesized
  source 1..20: mol_type = other DNA
tcagtacagtcacatgctgt

SEQ ID NO: 22141 - DNA, 20 bp, synthetic construct
  misc_feature 1..20: note = chemically synthesized
  source 1..20: mol_type = other DNA
tatgtagtaagctataccat

SEQ ID NO: 22142 - DNA, 20 bp, synthetic construct
  misc_feature 1..20: note = chemically synthesized
  source 1..20: mol_type = other DNA
ttatgttcgcacaatgatga

SEQ ID NO: 22143 - DNA, 20 bp, synthetic construct
  misc_feature 1..20: note = chemically synthesized
  source 1..20: mol_type = other DNA
gcatggctgtatacacacac

SEQ ID NO: 22144 - DNA, 20 bp, synthetic construct
  misc_feature 1..20: note = chemically synthesized
  source 1..20: mol_type = other DNA
gtatacacacacatgtgttt

SEQ ID NO: 22145 - DNA, 20 bp, synthetic construct
  misc_feature 1..20: note = chemically synthesized
  source 1..20: mol_type = other DNA
gataccatctcaagaggacc

SEQ ID NO: 22146 - DNA, 20 bp, synthetic construct
  misc_feature 1..20: note = chemically synthesized
  source 1..20: mol_type = other DNA
ctggggtatttgggactact

SEQ ID NO: 22147 - DNA, 20 bp, synthetic construct
  misc_feature 1..20: note = chemically synthesized
  source 1..20: mol_type = other DNA
gtgttctagtcccttgacat

SEQ ID NO: 22148 - DNA, 20 bp, synthetic construct
  misc_feature 1..20: note = chemically synthesized
  source 1..20: mol_type = other DNA
tgcctcagcctcccaagtag

SEQ ID NO: 22149 - DNA, 20 bp, synthetic construct
  misc_feature 1..20: note = chemically synthesized
  source 1..20: mol_type = other DNA
ttttgtatttttagtaaagc

SEQ ID NO: 22150 - DNA, 20 bp, synthetic construct
  misc_feature 1..20: note = chemically synthesized
  source 1..20: mol_type = other DNA
tgcctgggcctctgaaagtg

SEQ ID NO: 22151 - DNA, 20 bp, synthetic construct
  misc_feature 1..20: note = chemically synthesized
  source 1..20: mol_type = other DNA
catatttctcaatttccttc

SEQ ID NO: 22152 - DNA, 20 bp, synthetic construct
  misc_feature 1..20: note = chemically synthesized
  source 1..20: mol_type = other DNA
gctcaagtctccgatataaa

SEQ ID NO: 22153 - DNA, 20 bp, synthetic construct
  misc_feature 1..20: note = chemically synthesized
  source 1..20: mol_type = other DNA
ctttgtactttaaatcatct

SEQ ID NO: 22154 - DNA, 20 bp, synthetic construct
  misc_feature 1..20: note = chemically synthesized
  source 1..20: mol_type = other DNA
tgtaaatagttgttatgctg

SEQ ID NO: 22155 - DNA, 20 bp, synthetic construct
  misc_feature 1..20: note = chemically synthesized
  source 1..20: mol_type = other DNA
tagaatcagatcagacagaa

SEQ ID NO: 22156 - DNA, 20 bp, synthetic construct
  misc_feature 1..20: note = chemically synthesized
  source 1..20: mol_type = other DNA
ttaactttgtcaaatgtaaa

SEQ ID NO: 22157 - DNA, 20 bp, synthetic construct
  misc_feature 1..20: note = chemically synthesized
  source 1..20: mol_type = other DNA
ttcatgttggccctactttc

SEQ ID NO: 22158 - DNA, 20 bp, synthetic construct
  misc_feature 1..20: note = chemically synthesized
  source 1..20: mol_type = other DNA
gaatgacctaaagaataatt

SEQ ID NO: 22159 - DNA, 20 bp, synthetic construct
  misc_feature 1..20: note = chemically synthesized
  source 1..20: mol_type = other DNA
ataatcactctattctggtt

SEQ ID NO: 22160 - DNA, 20 bp, synthetic construct
  misc_feature 1..20: note = chemically synthesized
  source 1..20: mol_type = other DNA
tgttatccatccagcacttg

SEQ ID NO: 22161 - DNA, 20 bp, synthetic construct
  misc_feature 1..20: note = chemically synthesized
  source 1..20: mol_type = other DNA
gggttctcccaggctccagc

SEQ ID NO: 22162 - DNA, 20 bp, synthetic construct
  misc_feature 1..20: note = chemically synthesized
  source 1..20: mol_type = other DNA
gtatatttatgccctacagg

SEQ ID NO: 22163 - DNA, 20 bp, synthetic construct
  misc_feature 1..20: note = chemically synthesized
  source 1..20: mol_type = other DNA
cccacacacgtggctgtaac

SEQ ID NO: 22164 - DNA, 20 bp, synthetic construct
  misc_feature 1..20: note = chemically synthesized
  source 1..20: mol_type = other DNA
gtcagatacgtctcctgaat

SEQ ID NO: 22165 - DNA, 20 bp, synthetic construct
  misc_feature 1..20: note = chemically synthesized
  source 1..20: mol_type = other DNA
agtaatagctaatgtatatg

SEQ ID NO: 22166 - DNA, 20 bp, synthetic construct
  misc_feature 1..20: note = chemically synthesized
  source 1..20: mol_type = other DNA
ttatttttatgaatgaggaa

SEQ ID NO: 22167 - DNA, 20 bp, synthetic construct
  misc_feature 1..20: note = chemically synthesized
  source 1..20: mol_type = other DNA
aagatagattcatagaggct

SEQ ID NO: 22168 - DNA, 20 bp, synthetic construct
  misc_feature 1..20: note = chemically synthesized
  source 1..20: mol_type = other DNA
aaggtaacatactaaaacat

SEQ ID NO: 22169 - DNA, 20 bp, synthetic construct
  misc_feature 1..20: note = chemically synthesized
  source 1..20: mol_type = other DNA
tcagccatcagtggtactcc

SEQ ID NO: 22170 - DNA, 20 bp, synthetic construct
  misc_feature 1..20: note = chemically synthesized
  source 1..20: mol_type = other DNA
ttatctgatgaccagctctg

SEQ ID NO: 22171 - DNA, 20 bp, synthetic construct
  misc_feature 1..20: note = chemically synthesized
  source 1..20: mol_type = other DNA
gaaaatattctctctctatc

SEQ ID NO: 22172 - DNA, 20 bp, synthetic construct
  misc_feature 1..20: note = chemically synthesized
  source 1..20: mol_type = other DNA
aaacctctcacctggcctca

SEQ ID NO: 22173 - DNA, 20 bp, synthetic construct
  misc_feature 1..20: note = chemically synthesized
  source 1..20: mol_type = other DNA
gctttagatcaaagagggag

SEQ ID NO: 22174 - DNA, 20 bp, synthetic construct
  misc_feature 1..20: note = chemically synthesized
  source 1..20: mol_type = other DNA
catacactttacaaaactaa

SEQ ID NO: 22175 - DNA, 20 bp, synthetic construct
  misc_feature 1..20: note = chemically synthesized
  source 1..20: mol_type = other DNA
aaactaaactggttttacag

SEQ ID NO: 22176 - DNA, 20 bp, synthetic construct
  misc_feature 1..20: note = chemically synthesized
  source 1..20: mol_type = other DNA
aactccttttagaagccaat

SEQ ID NO: 22177 - DNA, 20 bp, synthetic construct
  misc_feature 1..20: note = chemically synthesized
  source 1..20: mol_type = other DNA
attcccctggccccttcctc

SEQ ID NO: 22178 - DNA, 20 bp, synthetic construct
  misc_feature 1..20: note = chemically synthesized
  source 1..20: mol_type = other DNA
atcgtatacttaacttccct

SEQ ID NO: 22179 - DNA, 20 bp, synthetic construct
  misc_feature 1..20: note = chemically synthesized
  source 1..20: mol_type = other DNA
ctcaccacttatatagaaga

SEQ ID NO: 22180 - DNA, 20 bp, synthetic construct
  misc_feature 1..20: note = chemically synthesized
  source 1..20: mol_type = other DNA
ttatatagaagaaagggttt

SEQ ID NO: 22181 - DNA, 20 bp, synthetic construct
  misc_feature 1..20: note = chemically synthesized
  source 1..20: mol_type = other DNA
taatgagatatatctaatgg

SEQ ID NO: 22182 - DNA, 20 bp, synthetic construct
  misc_feature 1..20: note = chemically synthesized
  source 1..20: mol_type = other DNA
tctaatggccttgctttatg

SEQ ID NO: 22183 - DNA, 20 bp, synthetic construct
  misc_feature 1..20: note = chemically synthesized
  source 1..20: mol_type = other DNA
cttgctttatgtcctgcttt

SEQ ID NO: 22184 - DNA, 20 bp, synthetic construct
  misc_feature 1..20: note = chemically synthesized
  source 1..20: mol_type = other DNA
cccttgactttactcacttt

SEQ ID NO: 22185 - DNA, 20 bp, synthetic construct
  misc_feature 1..20: note = chemically synthesized
  source 1..20: mol_type = other DNA
atcgttatttcagcatttca

SEQ ID NO: 22186 - DNA, 20 bp, synthetic construct
  misc_feature 1..20: note = chemically synthesized
  source 1..20: mol_type = other DNA
gagtgggaaccacagggcca

SEQ ID NO: 22187 - DNA, 20 bp, synthetic construct
  misc_feature 1..20: note = chemically synthesized
  source 1..20: mol_type = other DNA
agggccagtcagctttctgg

SEQ ID NO: 22188 - DNA, 20 bp, synthetic construct
  misc_feature 1..20: note = chemically synthesized
  source 1..20: mol_type = other DNA
tgatcctggtactgtcagct

SEQ ID NO: 22189 - DNA, 20 bp, synthetic construct
  misc_feature 1..20: note = chemically synthesized
  source 1..20: mol_type = other DNA
ctggtactgtcagctactag

SEQ ID NO: 22190 - DNA, 20 bp, synthetic construct
  misc_feature 1..20: note = chemically synthesized
  source 1..20: mol_type = other DNA
agttgacaagtaagtgtgat

SEQ ID NO: 22191 - DNA, 20 bp, synthetic construct
  misc_feature 1..20: note = chemically synthesized
  source 1..20: mol_type = other DNA
aaatgcttcctgtgagaaca

SEQ ID NO: 22192 - DNA, 20 bp, synthetic construct
  misc_feature 1..20: note = chemically synthesized
  source 1..20: mol_type = other DNA
cctactctttatgtcaattc

SEQ ID NO: 22193 - DNA, 20 bp, synthetic construct
  misc_feature 1..20: note = chemically synthesized
  source 1..20: mol_type = other DNA
ctctttatgtcaattcttaa

SEQ ID NO: 22194 - DNA, 20 bp, synthetic construct
  misc_feature 1..20: note = chemically synthesized
  source 1..20: mol_type = other DNA
ctagggaactcaactgagta

SEQ ID NO: 22195 - DNA, 20 bp, synthetic construct
  misc_feature 1..20: note = chemically synthesized
  source 1..20: mol_type = other DNA
ttccccaaatatcaactcca

SEQ ID NO: 22196 - DNA, 20 bp, synthetic construct
  misc_feature 1..20: note = chemically synthesized
  source 1..20: mol_type = other DNA
agatgtttgacatagagaca

SEQ ID NO: 22197 - DNA, 20 bp, synthetic construct
  misc_feature 1..20: note = chemically synthesized
  source 1..20: mol_type = other DNA
tgattttttcctaatccatg

SEQ ID NO: 22198 - DNA, 20 bp, synthetic construct
  misc_feature 1..20: note = chemically synthesized
  source 1..20: mol_type = other DNA
gaaaagctttggtgataact

SEQ ID NO: 22199 - DNA, 20 bp, synthetic construct
  misc_feature 1..20: note = chemically synthesized
  source 1..20: mol_type = other DNA
tgctaatgaaaggttaatct

SEQ ID NO: 22200 - DNA, 20 bp, synthetic construct
  misc_feature 1..20: note = chemically synthesized
  source 1..20: mol_type = other DNA
actttttgtgtaaataaggc

SEQ ID NO: 22201 - DNA, 20 bp, synthetic construct
  misc_feature 1..20: note = chemically synthesized
  source 1..20: mol_type = other DNA
tgtgtaaataaggccattgt

SEQ ID NO: 22202 - DNA, 20 bp, synthetic construct
  misc_feature 1..20: note = chemically synthesized
  source 1..20: mol_type = other DNA
aataaggccattgtttgtgc

SEQ ID NO: 22203 - DNA, 20 bp, synthetic construct
  misc_feature 1..20: note = chemically synthesized
  source 1..20: mol_type = other DNA
gtttgtgcttttgtttccca

SEQ ID NO: 22204 - DNA, 20 bp, synthetic construct
  misc_feature 1..20: note = chemically synthesized
  source 1..20: mol_type = other DNA
ttcactatattctgctattt

SEQ ID NO: 22205 - DNA, 20 bp, synthetic construct
  misc_feature 1..20: note = chemically synthesized
  source 1..20: mol_type = other DNA
tttttttaaaccaaggagat

SEQ ID NO: 22206 - DNA, 20 bp, synthetic construct
  misc_feature 1..20: note = chemically synthesized
  source 1..20: mol_type = other DNA
tgaccaaatcatgaactgaa

SEQ ID NO: 22207 - DNA, 20 bp, synthetic construct
  misc_feature 1..20: note = chemically synthesized
  source 1..20: mol_type = other DNA
tcataagcattgtcgatcta

SEQ ID NO: 22208 - DNA, 20 bp, synthetic construct
  misc_feature 1..20: note = chemically synthesized
  source 1..20: mol_type = other DNA
aggcagatggtgatgaggcc

SEQ ID NO: 22209 - DNA, 20 bp, synthetic construct
  misc_feature 1..20: note = chemically synthesized
  source 1..20: mol_type = other DNA
cgcgctgcataacctttgct

SEQ ID NO: 22210 - DNA, 22 bp, synthetic construct
  misc_feature 1..22: note = chemically synthesized
  source 1..22: mol_type = other DNA
tcacaatctgctagcaaaggtt

SEQ ID NO: 22211 - DNA, 22 bp, synthetic construct
  misc_feature 1..22: note = chemically synthesized
  source 1..22: mol_type = other DNA
cacaatctgctagcaaaggtta

SEQ ID NO: 22212 - DNA, 22 bp, synthetic construct
  misc_feature 1..22: note = chemically synthesized
  source 1..22: mol_type = other DNA
acaatctgctagcaaaggttat

SEQ ID NO: 22213 - DNA, 22 bp, synthetic construct
  misc_feature 1..22: note = chemically synthesized
  source 1..22: mol_type = other DNA
ctagcaaaggttatgcagcgcg

SEQ ID NO: 22214 - DNA, 22 bp, synthetic construct
  misc_feature 1..22: note = chemically synthesized
  source 1..22: mol_type = other DNA
gcaaaggttatgcagcgcgtga

SEQ ID NO: 22215 - DNA, 22 bp, synthetic construct
  misc_feature 1..22: note = chemically synthesized
  source 1..22: mol_type = other DNA
tgcagcgcgtgaacatgatcat

SEQ ID NO: 22216 - DNA, 22 bp, synthetic construct
  misc_feature 1..22: note = chemically synthesized
  source 1..22: mol_type = other DNA
atcaccatctgccttttaggat

SEQ ID NO: 22217 - DNA, 22 bp, synthetic construct
  misc_feature 1..22: note = chemically synthesized
  source 1..22: mol_type = other DNA
ccttttaggatatctactcagt

SEQ ID NO: 22218 - DNA, 22 bp, synthetic construct
  misc_feature 1..22: note = chemically synthesized
  source 1..22: mol_type = other DNA
ttaggatatctactcagtgctg

SEQ ID NO: 22219 - DNA, 22 bp, synthetic construct
  misc_feature 1..22: note = chemically synthesized
  source 1..22: mol_type = other DNA
taggatatctactcagtgctga

SEQ ID NO: 22220 - DNA, 22 bp, synthetic construct
  misc_feature 1..22: note = chemically synthesized
  source 1..22: mol_type = other DNA
aggatatctactcagtgctgaa

SEQ ID NO: 22221 - DNA, 22 bp, synthetic construct
  misc_feature 1..22: note = chemically synthesized
  source 1..22: mol_type = other DNA
ggatatctactcagtgctgaat

SEQ ID NO: 22222 - DNA, 22 bp, synthetic construct
  misc_feature 1..22: note = chemically synthesized
  source 1..22: mol_type = other DNA
ctcagtgctgaatgtacaggtt

SEQ ID NO: 22223 - DNA, 22 bp, synthetic construct
  misc_feature 1..22: note = chemically synthesized
  source 1..22: mol_type = other DNA
agtgctgaatgtacaggtttgt

SEQ ID NO: 22224 - DNA, 22 bp, synthetic construct
  misc_feature 1..22: note = chemically synthesized
  source 1..22: mol_type = other DNA
aatgtacaggtttgtttccttt

SEQ ID NO: 22225 - DNA, 22 bp, synthetic construct
  misc_feature 1..22: note = chemically synthesized
  source 1..22: mol_type = other DNA
gtttccttttttaaaatacatt

SEQ ID NO: 22226 - DNA, 22 bp, synthetic construct
  misc_feature 1..22: note = chemically synthesized
  source 1..22: mol_type = other DNA
tttccttttttaaaatacattg

SEQ ID NO: 22227 - DNA, 22 bp, synthetic construct
  misc_feature 1..22: note = chemically synthesized
  source 1..22: mol_type = other DNA
ccttttttaaaatacattgagt

SEQ ID NO: 22228 - DNA, 22 bp, synthetic construct
  misc_feature 1..22: note = chemically synthesized
  source 1..22: mol_type = other DNA
cttttttaaaatacattgagta

SEQ ID NO: 22229 - DNA, 22 bp, synthetic construct
  misc_feature 1..22: note = chemically synthesized
  source 1..22: mol_type = other DNA
ttttaaaatacattgagtatgc

SEQ ID NO: 22230 - DNA, 22 bp, synthetic construct
  misc_feature 1..22: note = chemically synthesized
  source 1..22: mol_type = other DNA
tttaaaatacattgagtatgct

SEQ ID NO: 22231 - DNA, 22 bp, synthetic construct
  misc_feature 1..22: note = chemically synthesized
  source 1..22: mol_type = other DNA
ttaaaatacattgagtatgctt

SEQ ID NO: 22232 - DNA, 22 bp, synthetic construct
  misc_feature 1..22: note = chemically synthesized
  source 1..22: mol_type = other DNA
taaaatacattgagtatgcttg

SEQ ID NO: 22233 - DNA, 22 bp, synthetic construct
  misc_feature 1..22: note = chemically synthesized
  source 1..22: mol_type = other DNA
aaaatacattgagtatgcttgc

SEQ ID NO: 22234 - DNA, 22 bp, synthetic construct
  misc_feature 1..22: note = chemically synthesized
  source 1..22: mol_type = other DNA
aaatacattgagtatgcttgcc

SEQ ID NO: 22235 - DNA, 22 bp, synthetic construct
  misc_feature 1..22: note = chemically synthesized
  source 1..22: mol_type = other DNA
agtatgcttgccttttagatat

SEQ ID NO: 22236 - DNA, 22 bp, synthetic construct
  misc_feature 1..22: note = chemically synthesized
  source 1..22: mol_type = other DNA
gccttttagatatagaaatatc

SEQ ID NO: 22237 - DNA, 22 bp, synthetic construct
  misc_feature 1..22: note = chemically synthesized
  source 1..22: mol_type = other DNA
ccttttagatatagaaatatct

SEQ ID NO: 22238 - DNA, 22 bp, synthetic construct
  misc_feature 1..22: note = chemically synthesized
  source 1..22: mol_type = other DNA
ttagatatagaaatatctgatg

SEQ ID NO: 22239 - DNA, 22 bp, synthetic construct
  misc_feature 1..22: note = chemically synthesized
  source 1..22: mol_type = other DNA
tagatatagaaatatctgatgc

SEQ ID NO: 22240 - DNA, 22 bp, synthetic construct
  misc_feature 1..22: note = chemically synthesized
  source 1..22: mol_type = other DNA
agatatagaaatatctgatgct

SEQ ID NO: 22241 - DNA, 22 bp, synthetic construct
  misc_feature 1..22: note = chemically synthesized
  source 1..22: mol_type = other DNA
gatatagaaatatctgatgctg

SEQ ID NO: 22242 - DNA, 22 bp, synthetic construct
  misc_feature 1..22: note = chemically synthesized
  source 1..22: mol_type = other DNA
atgctgtcttcttcactaaatt

SEQ ID NO: 22243 - DNA, 22 bp, synthetic construct
  misc_feature 1..22: note = chemically synthesized
  source 1..22: mol_type = other DNA
tcttcttcactaaattttgatt

SEQ ID NO: 22244 - DNA, 22 bp, synthetic construct
  misc_feature 1..22: note = chemically synthesized
  source 1..22: mol_type = other DNA
cttcactaaattttgattacat

SEQ ID NO: 22245 - DNA, 22 bp, synthetic construct
  misc_feature 1..22: note = chemically synthesized
  source 1..22: mol_type = other DNA
ttcactaaattttgattacatg

SEQ ID NO: 22246 - DNA, 22 bp, synthetic construct
  misc_feature 1..22: note = chemically synthesized
  source 1..22: mol_type = other DNA
cactaaattttgattacatgat

SEQ ID NO: 22247 - DNA, 22 bp, synthetic construct
  misc_feature 1..22: note = chemically synthesized
  source 1..22: mol_type = other DNA
actaaattttgattacatgatt

SEQ ID NO: 22248 - DNA, 22 bp, synthetic construct
  misc_feature 1..22: note = chemically synthesized
  source 1..22: mol_type = other DNA
aattttgattacatgatttgac

SEQ ID NO: 22249 - DNA, 22 bp, synthetic construct
  misc_feature 1..22: note = chemically synthesized
  source 1..22: mol_type = other DNA
tgattacatgatttgacagcaa

SEQ ID NO: 22250 - DNA, 22 bp, synthetic construct
  misc_feature 1..22: note = chemically synthesized
  source 1..22: mol_type = other DNA
gattacatgatttgacagcaat

SEQ ID NO: 22251 - DNA, 22 bp, synthetic construct
  misc_feature 1..22: note = chemically synthesized
  source 1..22: mol_type = other DNA
attacatgatttgacagcaata

SEQ ID NO: 22252 - DNA, 22 bp, synthetic construct
  misc_feature 1..22: note = chemically synthesized
  source 1..22: mol_type = other DNA
catgatttgacagcaatattga

SEQ ID NO: 22253 - DNA, 22 bp, synthetic construct
  misc_feature 1..22: note = chemically synthesized
  source 1..22: mol_type = other DNA
gacagcaatattgaagagtcta

SEQ ID NO: 22254 - DNA, 22 bp, synthetic construct
  misc_feature 1..22: note = chemically synthesized
  source 1..22: mol_type = other DNA
acagcaatattgaagagtctaa

SEQ ID NO: 22255 - DNA, 22 bp, synthetic construct
  misc_feature 1..22: note = chemically synthesized
  source 1..22: mol_type = other DNA
aagagtctaacagccagcacgc

SEQ ID NO: 22256 - DNA, 22 bp, synthetic construct
  misc_feature 1..22: note = chemically synthesized
  source 1..22: mol_type = other DNA
acagccagcacgcaggttggta

SEQ ID NO: 22257 - DNA, 22 bp, synthetic construct
  misc_feature 1..22: note = chemically synthesized
  source 1..22: mol_type = other DNA
gtaagtactggttctttgttag

SEQ ID NO: 22258 - DNA, 22 bp, synthetic construct
  misc_feature 1..22: note = chemically synthesized
  source 1..22: mol_type = other DNA
gttctttgttagctaggttttc

SEQ ID NO: 22259 - DNA, 22 bp, synthetic construct
  misc_feature 1..22: note = chemically synthesized
  source 1..22: mol_type = other DNA
tttgttagctaggttttcttct

SEQ ID NO: 22260 - DNA, 22 bp, synthetic construct
  misc_feature 1..22: note = chemically synthesized
  source 1..22: mol_type = other DNA
tgttagctaggttttcttcttc

SEQ ID NO: 22261 - DNA, 22 bp, synthetic construct
  misc_feature 1..22: note = chemically synthesized
  source 1..22: mol_type = other DNA
gttagctaggttttcttcttct

SEQ ID NO: 22262 - DNA, 22 bp, synthetic construct
  misc_feature 1..22: note = chemically synthesized
  source 1..22: mol_type = other DNA
ttagctaggttttcttcttctt

SEQ ID NO: 22263 - DNA, 22 bp, synthetic construct
  misc_feature 1..22: note = chemically synthesized
  source 1..22: mol_type = other DNA
gctaggttttcttcttcttcat

SEQ ID NO: 22264 - DNA, 22 bp, synthetic construct
  misc_feature 1..22: note = chemically synthesized
  source 1..22: mol_type = other DNA
ggttttcttcttcttcattttt

SEQ ID NO: 22265 - DNA, 22 bp, synthetic construct
  misc_feature 1..22: note = chemically synthesized
  source 1..22: mol_type = other DNA
tcttcttcttcatttttaaaac

SEQ ID NO: 22266 - DNA, 22 bp, synthetic construct
  misc_feature 1..22: note = chemically synthesized
  source 1..22: mol_type = other DNA
cttcttcttcatttttaaaact

SEQ ID NO: 22267 - DNA, 22 bp, synthetic construct
  misc_feature 1..22: note = chemically synthesized
  source 1..22: mol_type = other DNA
ttcttcttcatttttaaaacta

SEQ ID NO: 22268 - DNA, 22 bp, synthetic construct
  misc_feature 1..22: note = chemically synthesized
  source 1..22: mol_type = other DNA
cttcttcatttttaaaactaaa

SEQ ID NO: 22269 - DNA, 22 bp, synthetic construct
  misc_feature 1..22: note = chemically synthesized
  source 1..22: mol_type = other DNA
ttcttcatttttaaaactaaat

SEQ ID NO: 22270 - DNA, 22 bp, synthetic construct
  misc_feature 1..22: note = chemically synthesized
  source 1..22: mol_type = other DNA
cttcatttttaaaactaaatag

SEQ ID NO: 22271 - DNA, 22 bp, synthetic construct
  misc_feature 1..22: note = chemically synthesized
  source 1..22: mol_type = other DNA
ttcatttttaaaactaaataga

SEQ ID NO: 22272 - DNA, 22 bp, synthetic construct
  misc_feature 1..22: note = chemically synthesized
  source 1..22: mol_type = other DNA
catttttaaaactaaatagatc

SEQ ID NO: 22273 - DNA, 22 bp, synthetic construct
  misc_feature 1..22: note = chemically synthesized
  source 1..22: mol_type = other DNA
atttttaaaactaaatagatcg

SEQ ID NO: 22274 - DNA, 22 bp, synthetic construct
  misc_feature 1..22: note = chemically synthesized
  source 1..22: mol_type = other DNA
ttaaaactaaatagatcgacaa

SEQ ID NO: 22275 - DNA, 22 bp, synthetic construct
  misc_feature 1..22: note = chemically synthesized
  source 1..22: mol_type = other DNA
taaaactaaatagatcgacaat

SEQ ID NO: 22276 - DNA, 22 bp, synthetic construct
  misc_feature 1..22: note = chemically synthesized
  source 1..22: mol_type = other DNA
aaaactaaatagatcgacaatg

SEQ ID NO: 22277 - DNA, 22 bp, synthetic construct
  misc_feature 1..22: note = chemically synthesized
  source 1..22: mol_type = other DNA
aaactaaatagatcgacaatgc

SEQ ID NO: 22278 - DNA, 22 bp, synthetic construct
  misc_feature 1..22: note = chemically synthesized
  source 1..22: mol_type = other DNA
aatagatcgacaatgcttatga

SEQ ID NO: 22279 - DNA, 22 bp, synthetic construct
  misc_feature 1..22: note = chemically synthesized
  source 1..22: mol_type = other DNA
atgatgcatttatgtttaataa

SEQ ID NO: 22280 - DNA, 22 bp, synthetic construct
  misc_feature 1..22: note = chemically synthesized
  source 1..22: mol_type = other DNA
tgatgcatttatgtttaataaa

SEQ ID NO: 22281 - DNA, 22 bp, synthetic construct
  misc_feature 1..22: note = chemically synthesized
  source 1..22: mol_type = other DNA
atgtttaataaacactgttcag

SEQ ID NO: 22282 - DNA, 22 bp, synthetic construct
  misc_feature 1..22: note = chemically synthesized
  source 1..22: mol_type = other DNA
tgtttaataaacactgttcagt

SEQ ID NO: 22283 - DNA, 22 bp, synthetic construct
  misc_feature 1..22: note = chemically synthesized
  source 1..22: mol_type = other DNA
aataaacactgttcagttcatg

SEQ ID NO: 22284 - DNA, 22 bp, synthetic construct
  misc_feature 1..22: note = chemically synthesized
  source 1..22: mol_type = other DNA
ataaacactgttcagttcatga

SEQ ID NO: 22285 - DNA, 22 bp, synthetic construct
  misc_feature 1..22: note = chemically synthesized
  source 1..22: mol_type = other DNA
ttcagttcatgatttggtcatg

SEQ ID NO: 22286 - DNA, 22 bp, synthetic construct
  misc_feature 1..22: note = chemically synthesized
  source 1..22: mol_type = other DNA
agttcatgatttggtcatgtaa

SEQ ID NO: 22287 - DNA, 22 bp, synthetic construct
  misc_feature 1..22: note = chemically synthesized
  source 1..22: mol_type = other DNA
atgatttggtcatgtaattcct

SEQ ID NO: 22288 - DNA, 22 bp, synthetic construct
  misc_feature 1..22: note = chemically synthesized
  source 1..22: mol_type = other DNA
ggtcatgtaattcctgttagaa

SEQ ID NO: 22289 - DNA, 22 bp, synthetic construct
  misc_feature 1..22: note = chemically synthesized
  source 1..22: mol_type = other DNA
gtcatgtaattcctgttagaaa

SEQ ID NO: 22290 - DNA, 22 bp, synthetic construct
  misc_feature 1..22: note = chemically synthesized
  source 1..22: mol_type = other DNA
ctgttagaaaacattcatctcc

SEQ ID NO: 22291 - DNA, 22 bp, synthetic construct
  misc_feature 1..22: note = chemically synthesized
  source 1..22: mol_type = other DNA
ttagaaaacattcatctccttg

SEQ ID NO: 22292 - DNA, 22 bp, synthetic construct
  misc_feature 1..22: note = chemically synthesized
  source 1..22: mol_type = other DNA
gaaaacattcatctccttggtt

SEQ ID NO: 22293 - DNA, 22 bp, synthetic construct
  misc_feature 1..22: note = chemically synthesized
  source 1..22: mol_type = other DNA
atctccttggtttaaaaaaatt

SEQ ID NO: 22294 - DNA, 22 bp, synthetic construct
  misc_feature 1..22: note = chemically synthesized
  source 1..22: mol_type = other DNA
cttggtttaaaaaaattaaaag

SEQ ID NO: 22295 - DNA, 22 bp, synthetic construct
  misc_feature 1..22: note = chemically synthesized
  source 1..22: mol_type = other DNA
ggtttaaaaaaattaaaagtgg

SEQ ID NO: 22296 - DNA, 22 bp, synthetic construct
  misc_feature 1..22: note = chemically synthesized
  source 1..22: mol_type = other DNA
gtttaaaaaaattaaaagtggg

SEQ ID NO: 22297 - DNA, 22 bp, synthetic construct
  misc_feature 1..22: note = chemically synthesized
  source 1..22: mol_type = other DNA
aaaaaaattaaaagtgggaaaa

SEQ ID NO: 22298 - DNA, 22 bp, synthetic construct
  misc_feature 1..22: note = chemically synthesized
  source 1..22: mol_type = other DNA
aaaaaattaaaagtgggaaaac

SEQ ID NO: 22299 - DNA, 22 bp, synthetic construct
  misc_feature 1..22: note = chemically synthesized
  source 1..22: mol_type = other DNA
aaagtgggaaaacaaagaaata

SEQ ID NO: 22300 - DNA, 22 bp, synthetic construct
  misc_feature 1..22: note = chemically synthesized
  source 1..22: mol_type = other DNA
tttttgtttggacttaccactt

SEQ ID NO: 22301 - DNA, 22 bp, synthetic construct
  misc_feature 1..22: note = chemically synthesized
  source 1..22: mol_type = other DNA
ttgtttggacttaccactttga

SEQ ID NO: 22302 - DNA, 22 bp, synthetic construct
  misc_feature 1..22: note = chemically synthesized
  source 1..22: mol_type = other DNA
tgtttggacttaccactttgaa

SEQ ID NO: 22303 - DNA, 22 bp, synthetic construct
  misc_feature 1..22: note = chemically synthesized
  source 1..22: mol_type = other DNA
gtttggacttaccactttgaaa

SEQ ID NO: 22304 - DNA, 22 bp, synthetic construct
  misc_feature 1..22: note = chemically synthesized
  source 1..22: mol_type = other DNA
tttggacttaccactttgaaat

SEQ ID NO: 22305 - DNA, 22 bp, synthetic construct
  misc_feature 1..22: note = chemically synthesized
  source 1..22: mol_type = other DNA
ggacttaccactttgaaatcaa

SEQ ID NO: 22306 - DNA, 22 bp, synthetic construct
  misc_feature 1..22: note = chemically synthesized
  source 1..22: mol_type = other DNA
gacttaccactttgaaatcaaa

SEQ ID NO: 22307 - DNA, 22 bp, synthetic construct
  misc_feature 1..22: note = chemically synthesized
  source 1..22: mol_type = other DNA
accactttgaaatcaaaatggg

SEQ ID NO: 22308 - DNA, 22 bp, synthetic construct
  misc_feature 1..22: note = chemically synthesized
  source 1..22: mol_type = other DNA
ccactttgaaatcaaaatggga

SEQ ID NO: 22309 - DNA, 22 bp, synthetic construct
  misc_feature 1..22: note = chemically synthesized
  source 1..22: mol_type = other DNA
tgaaatcaaaatgggaaacaaa

SEQ ID NO: 22310 - DNA, 22 bp, synthetic construct
  misc_feature 1..22: note = chemically synthesized
  source 1..22: mol_type = other DNA
gaaatcaaaatgggaaacaaaa

SEQ ID NO: 22311 - DNA, 22 bp, synthetic construct
  misc_feature 1..22: note = chemically synthesized
  source 1..22: mol_type = other DNA
aaatcaaaatgggaaacaaaag

SEQ ID NO: 22312 - DNA, 22 bp, synthetic construct
  misc_feature 1..22: note = chemically synthesized
  source 1..22: mol_type = other DNA
atttacacaaaaagtctgattt

SEQ ID NO: 22313 - DNA, 22 bp, synthetic construct
  misc_feature 1..22: note = chemically synthesized
  source 1..22: mol_type = other DNA
tttacacaaaaagtctgatttt

SEQ ID NO: 22314 - DNA, 22 bp, synthetic construct
  misc_feature 1..22: note = chemically synthesized
  source 1..22: mol_type = other DNA
acacaaaaagtctgattttaag

SEQ ID NO: 22315 - DNA, 22 bp, synthetic construct
  misc_feature 1..22: note = chemically synthesized
  source 1..22: mol_type = other DNA
cacaaaaagtctgattttaaga

SEQ ID NO: 22316 - DNA, 22 bp, synthetic construct
  misc_feature 1..22: note = chemically synthesized
  source 1..22: mol_type = other DNA
attttaagatatatgacatttc

SEQ ID NO: 22317 - DNA, 22 bp, synthetic construct
  misc_feature 1..22: note = chemically synthesized
  source 1..22: mol_type = other DNA
taagatatatgacatttcaagg

SEQ ID NO: 22318 - DNA, 22 bp, synthetic construct
  misc_feature 1..22: note = chemically synthesized
  source 1..22: mol_type = other DNA
aagatatatgacatttcaaggt

SEQ ID NO: 22319 - DNA, 22 bp, synthetic construct
  misc_feature 1..22: note = chemically synthesized
  source 1..22: mol_type = other DNA
agatatatgacatttcaaggtt

SEQ ID NO: 22320 - DNA, 22 bp, synthetic construct
  misc_feature 1..22: note = chemically synthesized
  source 1..22: mol_type = other DNA
caaggtttcagaagtatgtaat

SEQ ID NO: 22321 - DNA, 22 bp, synthetic construct
  misc_feature 1..22: note = chemically synthesized
  source 1..22: mol_type = other DNA
aaggtttcagaagtatgtaatg

SEQ ID NO: 22322 - DNA, 22 bp, synthetic construct
  misc_feature 1..22: note = chemically synthesized
  source 1..22: mol_type = other DNA
cagaagtatgtaatgaggtgtg

SEQ ID NO: 22323 - DNA, 22 bp, synthetic construct
  misc_feature 1..22: note = chemically synthesized
  source 1..22: mol_type = other DNA
agaagtatgtaatgaggtgtgt

SEQ ID NO: 22324 - DNA, 22 bp, synthetic construct
  misc_feature 1..22: note = chemically synthesized
  source 1..22: mol_type = other DNA
taattttttaaattatatatct

SEQ ID NO: 22325 - DNA, 22 bp, synthetic construct
  misc_feature 1..22: note = chemically synthesized
  source 1..22: mol_type = other DNA
attttttaaattatatatcttc

SEQ ID NO: 22326 - DNA, 22 bp, synthetic construct
  misc_feature 1..22: note = chemically synthesized
  source 1..22: mol_type = other DNA
tttaaattatatatcttcaatt

SEQ ID NO: 22327 - DNA, 22 bp, synthetic construct
  misc_feature 1..22: note = chemically synthesized
  source 1..22: mol_type = other DNA
ttaaattatatatcttcaattt

SEQ ID NO: 22328 - DNA, 22 bp, synthetic construct
  misc_feature 1..22: note = chemically synthesized
  source 1..22: mol_type = other DNA
taaattatatatcttcaattta

SEQ ID NO: 22329 - DNA, 22 bp, synthetic construct
  misc_feature 1..22: note = chemically synthesized
  source 1..22: mol_type = other DNA
aaattatatatcttcaatttaa

SEQ ID NO: 22330 - DNA, 22 bp, synthetic construct
  misc_feature 1..22: note = chemically synthesized
  source 1..22: mol_type = other DNA
aattatatatcttcaatttaaa

SEQ ID NO: 22331 - DNA, 22 bp, synthetic construct
  misc_feature 1..22: note = chemically synthesized
  source 1..22: mol_type = other DNA
tatatcttcaatttaaagtttt

SEQ ID NO: 22332 - DNA, 22 bp, synthetic construct
  misc_feature 1..22: note = chemically synthesized
  source 1..22: mol_type = other DNA
caatttaaagttttagttaaaa

SEQ ID NO: 22333 - DNA, 22 bp, synthetic construct
  misc_feature 1..22: note = chemically synthesized
  source 1..22: mol_type = other DNA
aatttaaagttttagttaaaac

SEQ ID NO: 22334 - DNA, 22 bp, synthetic construct
  misc_feature 1..22: note = chemically synthesized
  source 1..22: mol_type = other DNA
aaagttttagttaaaacataaa

SEQ ID NO: 22335 - DNA, 22 bp, synthetic construct
  misc_feature 1..22: note = chemically synthesized
  source 1..22: mol_type = other DNA
aagttttagttaaaacataaag

SEQ ID NO: 22336 - DNA, 22 bp, synthetic construct
  misc_feature 1..22: note = chemically synthesized
  source 1..22: mol_type = other DNA
tagttaaaacataaagattaac

SEQ ID NO: 22337 - DNA, 22 bp, synthetic construct
  misc_feature 1..22: note = chemically synthesized
  source 1..22: mol_type = other DNA
agttaaaacataaagattaacc

SEQ ID NO: 22338 - DNA, 22 bp, synthetic construct
  misc_feature 1..22: note = chemically synthesized
  source 1..22: mol_type = other DNA
gttaaaacataaagattaacct

SEQ ID NO: 22339 - DNA, 22 bp, synthetic construct
  misc_feature 1..22: note = chemically synthesized
  source 1..22: mol_type = other DNA
aaacataaagattaacctttca

SEQ ID NO: 22340 - DNA, 22 bp, synthetic construct
  misc_feature 1..22: note = chemically synthesized
  source 1..22: mol_type = other DNA
acctttcattagcaagctgtta

SEQ ID NO: 22341 - DNA, 22 bp, synthetic construct
  misc_feature 1..22: note = chemically synthesized
  source 1..22: mol_type = other DNA
tcattagcaagctgttagttat

SEQ ID NO: 22342 - DNA, 22 bp, synthetic construct
  misc_feature 1..22: note = chemically synthesized
  source 1..22: mol_type = other DNA
cattagcaagctgttagttatc

SEQ ID NO: 22343 - DNA, 22 bp, synthetic construct
  misc_feature 1..22: note = chemically synthesized
  source 1..22: mol_type = other DNA
attagcaagctgttagttatca

SEQ ID NO: 22344 - DNA, 22 bp, synthetic construct
  misc_feature 1..22: note = chemically synthesized
  source 1..22: mol_type = other DNA
gcaagctgttagttatcaccaa

SEQ ID NO: 22345 - DNA, 22 bp, synthetic construct
  misc_feature 1..22: note = chemically synthesized
  source 1..22: mol_type = other DNA
ttagttatcaccaaagcttttc

SEQ ID NO: 22346 - DNA, 22 bp, synthetic construct
  misc_feature 1..22: note = chemically synthesized
  source 1..22: mol_type = other DNA
gttatcaccaaagcttttcatg

SEQ ID NO: 22347 - DNA, 22 bp, synthetic construct
  misc_feature 1..22: note = chemically synthesized
  source 1..22: mol_type = other DNA
tcaccaaagcttttcatggatt

SEQ ID NO: 22348 - DNA, 22 bp, synthetic construct
  misc_feature 1..22: note = chemically synthesized
  source 1..22: mol_type = other DNA
ttcatggattaggaaaaaatca

SEQ ID NO: 22349 - DNA, 22 bp, synthetic construct
  misc_feature 1..22: note = chemically synthesized
  source 1..22: mol_type = other DNA
tcatggattaggaaaaaatcat

SEQ ID NO: 22350 - DNA, 22 bp, synthetic construct
  misc_feature 1..22: note = chemically synthesized
  source 1..22: mol_type = other DNA
catggattaggaaaaaatcatt

SEQ ID NO: 22351 - DNA, 22 bp, synthetic construct
  misc_feature 1..22: note = chemically synthesized
  source 1..22: mol_type = other DNA
atggattaggaaaaaatcattt

SEQ ID NO: 22352 - DNA, 22 bp, synthetic construct
  misc_feature 1..22: note = chemically synthesized
  source 1..22: mol_type = other DNA
ggaaaaaatcattttgtctcta

SEQ ID NO: 22353 - DNA, 22 bp, synthetic construct
  misc_feature 1..22: note = chemically synthesized
  source 1..22: mol_type = other DNA
tgtctctatgtcaaacatcttg

SEQ ID NO: 22354 - DNA, 22 bp, synthetic construct
  misc_feature 1..22: note = chemically synthesized
  source 1..22: mol_type = other DNA
gtctctatgtcaaacatcttgg

SEQ ID NO: 22355 - DNA, 22 bp, synthetic construct
  misc_feature 1..22: note = chemically synthesized
  source 1..22: mol_type = other DNA
tctctatgtcaaacatcttgga

SEQ ID NO: 22356 - DNA, 22 bp, synthetic construct
  misc_feature 1..22: note = chemically synthesized
  source 1..22: mol_type = other DNA
tatgtcaaacatcttggagttg

SEQ ID NO: 22357 - DNA, 22 bp, synthetic construct
  misc_feature 1..22: note = chemically synthesized
  source 1..22: mol_type = other DNA
tgtcaaacatcttggagttgat

SEQ ID NO: 22358 - DNA, 22 bp, synthetic construct
  misc_feature 1..22: note = chemically synthesized
  source 1..22: mol_type = other DNA
ggagttgatatttggggaaaca

SEQ ID NO: 22359 - DNA, 22 bp, synthetic construct
  misc_feature 1..22: note = chemically synthesized
  source 1..22: mol_type = other DNA
gagttgatatttggggaaacac

SEQ ID NO: 22360 - DNA, 22 bp, synthetic construct
  misc_feature 1..22: note = chemically synthesized
  source 1..22: mol_type = other DNA
atatttggggaaacacaatact

SEQ ID NO: 22361 - DNA, 22 bp, synthetic construct
  misc_feature 1..22: note = chemically synthesized
  source 1..22: mol_type = other DNA
ggggaaacacaatactcagttg

SEQ ID NO: 22362 - DNA, 22 bp, synthetic construct
  misc_feature 1..22: note = chemically synthesized
  source 1..22: mol_type = other DNA
gggaaacacaatactcagttga

SEQ ID NO: 22363 - DNA, 22 bp, synthetic construct
  misc_feature 1..22: note = chemically synthesized
  source 1..22: mol_type = other DNA
agttgagttccctaggggagaa

SEQ ID NO: 22364 - DNA, 22 bp, synthetic construct
  misc_feature 1..22: note = chemically synthesized
  source 1..22: mol_type = other DNA
agttccctaggggagaaaagca

SEQ ID NO: 22365 - DNA, 22 bp, synthetic construct
  misc_feature 1..22: note = chemically synthesized
  source 1..22: mol_type = other DNA
cctaggggagaaaagcaagctt

SEQ ID NO: 22366 - DNA, 22 bp, synthetic construct
  misc_feature 1..22: note = chemically synthesized
  source 1..22: mol_type = other DNA
ggggagaaaagcaagcttaaga

SEQ ID NO: 22367 - DNA, 22 bp, synthetic construct
  misc_feature 1..22: note = chemically synthesized
  source 1..22: mol_type = other DNA
aagaattgacataaagagtagg

SEQ ID NO: 22368 - DNA, 22 bp, synthetic construct
  misc_feature 1..22: note = chemically synthesized
  source 1..22: mol_type = other DNA
agaattgacataaagagtagga

SEQ ID NO: 22369 - DNA, 22 bp, synthetic construct
  misc_feature 1..22: note = chemically synthesized
  source 1..22: mol_type = other DNA
acataaagagtaggaagttagc

SEQ ID NO: 22370 - DNA, 22 bp, synthetic construct
  misc_feature 1..22: note = chemically synthesized
  source 1..22: mol_type = other DNA
gctaatgcaacatatatcactt

SEQ ID NO: 22371 - DNA, 22 bp, synthetic construct
  misc_feature 1..22: note = chemically synthesized
  source 1..22: mol_type = other DNA
atgcaacatatatcactttgtt

SEQ ID NO: 22372 - DNA, 22 bp, synthetic construct
  misc_feature 1..22: note = chemically synthesized
  source 1..22: mol_type = other DNA
tgttttttcacaactacagtga

SEQ ID NO: 22373 - DNA, 22 bp, synthetic construct
  misc_feature 1..22: note = chemically synthesized
  source 1..22: mol_type = other DNA
gttttttcacaactacagtgac

SEQ ID NO: 22374 - DNA, 22 bp, synthetic construct
  misc_feature 1..22: note = chemically synthesized
  source 1..22: mol_type = other DNA
ttttttcacaactacagtgact

SEQ ID NO: 22375 - DNA, 22 bp, synthetic construct
  misc_feature 1..22: note = chemically synthesized
  source 1..22: mol_type = other DNA
tttcacaactacagtgacttta

SEQ ID NO: 22376 - DNA, 22 bp, synthetic construct
  misc_feature 1..22: note = chemically synthesized
  source 1..22: mol_type = other DNA
ttcacaactacagtgactttat

SEQ ID NO: 22377 - DNA, 22 bp, synthetic construct
  misc_feature 1..22: note = chemically synthesized
  source 1..22: mol_type = other DNA
tcacaactacagtgactttatg

SEQ ID NO: 22378 - DNA, 22 bp, synthetic construct
  misc_feature 1..22: note = chemically synthesized
  source 1..22: mol_type = other DNA
cacaactacagtgactttatgt

SEQ ID NO: 22379 - DNA, 22 bp, synthetic construct
  misc_feature 1..22: note = chemically synthesized
  source 1..22: mol_type = other DNA
acaactacagtgactttatgta

SEQ ID NO: 22380 - DNA, 22 bp, synthetic construct
  misc_feature 1..22: note = chemically synthesized
  source 1..22: mol_type = other DNA
cagtgactttatgtatttccca

SEQ ID NO: 22381 - DNA, 22 bp, synthetic construct
  misc_feature 1..22: note = chemically synthesized
  source 1..22: mol_type = other DNA
tatgtatttcccagaggaaggc

SEQ ID NO: 22382 - DNA, 22 bp, synthetic construct
  misc_feature 1..22: note = chemically synthesized
  source 1..22: mol_type = other DNA
atgtatttcccagaggaaggca

SEQ ID NO: 22383 - DNA, 22 bp, synthetic construct
  misc_feature 1..22: note = chemically synthesized
  source 1..22: mol_type = other DNA
tgtatttcccagaggaaggcat

SEQ ID NO: 22384 - DNA, 22 bp, synthetic construct
  misc_feature 1..22: note = chemically synthesized
  source 1..22: mol_type = other DNA
cccagaggaaggcatacaggga

SEQ ID NO: 22385 - DNA, 22 bp, synthetic construct
  misc_feature 1..22: note = chemically synthesized
  source 1..22: mol_type = other DNA
ccagaggaaggcatacagggaa

SEQ ID NO: 22386 - DNA, 22 bp, synthetic construct
  misc_feature 1..22: note = chemically synthesized
  source 1..22: mol_type = other DNA
tcccatttggacaaacagcatg

SEQ ID NO: 22387 - DNA, 22 bp, synthetic construct
  misc_feature 1..22: note = chemically synthesized
  source 1..22: mol_type = other DNA
ggacaaacagcatgttctcaca

SEQ ID NO: 22388 - DNA, 22 bp, synthetic construct
  misc_feature 1..22: note = chemically synthesized
  source 1..22: mol_type = other DNA
gacaaacagcatgttctcacag

SEQ ID NO: 22389 - DNA, 22 bp, synthetic construct
  misc_feature 1..22: note = chemically synthesized
  source 1..22: mol_type = other DNA
tcacaggaagcatttatcacac

SEQ ID NO: 22390 - DNA, 22 bp, synthetic construct
  misc_feature 1..22: note = chemically synthesized
  source 1..22: mol_type = other DNA
acaggaagcatttatcacactt

SEQ ID NO: 22391 - DNA, 22 bp, synthetic construct
  misc_feature 1..22: note = chemically synthesized
  source 1..22: mol_type = other DNA
atcacacttacttgtcaacttt

SEQ ID NO: 22392 - DNA, 22 bp, synthetic construct
  misc_feature 1..22: note = chemically synthesized
  source 1..22: mol_type = other DNA
tcacacttacttgtcaactttc

SEQ ID NO: 22393 - DNA, 22 bp, synthetic construct
  misc_feature 1..22: note = chemically synthesized
  source 1..22: mol_type = other DNA
acttgtcaactttctagaatca

SEQ ID NO: 22394 - DNA, 22 bp, synthetic construct
  misc_feature 1..22: note = chemically synthesized
  source 1..22: mol_type = other DNA
cttgtcaactttctagaatcaa

SEQ ID NO: 22395 - DNA, 22 bp, synthetic construct
  misc_feature 1..22: note = chemically synthesized
  source 1..22: mol_type = other DNA
gtcaactttctagaatcaaatc

SEQ ID NO: 22396 - DNA, 22 bp, synthetic construct
  misc_feature 1..22: note = chemically synthesized
  source 1..22: mol_type = other DNA
tcaactttctagaatcaaatct

SEQ ID NO: 22397 - DNA, 22 bp, synthetic construct
  misc_feature 1..22: note = chemically synthesized
  source 1..22: mol_type = other DNA
tctagaatcaaatctagtagct

SEQ ID NO: 22398 - DNA, 22 bp, synthetic construct
  misc_feature 1..22: note = chemically synthesized
  source 1..22: mol_type = other DNA
ctagaatcaaatctagtagctg

SEQ ID NO: 22399 - DNA, 22 bp, synthetic construct
  misc_feature 1..22: note = chemically synthesized
  source 1..22: mol_type = other DNA
tagaatcaaatctagtagctga

SEQ ID NO: 22400 - DNA, 22 bp, synthetic construct
  misc_feature 1..22: note = chemically synthesized
  source 1..22: mol_type = other DNA
gaatcaaatctagtagctgaca

SEQ ID NO: 22401 - DNA, 22 bp, synthetic construct
  misc_feature 1..22: note = chemically synthesized
  source 1..22: mol_type = other DNA
gtagctgacagtaccaggatca

SEQ ID NO: 22402 - DNA, 22 bp, synthetic construct
  misc_feature 1..22: note = chemically synthesized
  source 1..22: mol_type = other DNA
acagtaccaggatcaggggtgc

SEQ ID NO: 22403 - DNA, 22 bp, synthetic construct
  misc_feature 1..22: note = chemically synthesized
  source 1..22: mol_type = other DNA
agcacccccagaaagctgactg

SEQ ID NO: 22404 - DNA, 22 bp, synthetic construct
  misc_feature 1..22: note = chemically synthesized
  source 1..22: mol_type = other DNA
actggccctgtggttcccactc

SEQ ID NO: 22405 - DNA, 22 bp, synthetic construct
  misc_feature 1..22: note = chemically synthesized
  source 1..22: mol_type = other DNA
gccctgtggttcccactccaga

SEQ ID NO: 22406 - DNA, 22 bp, synthetic construct
  misc_feature 1..22: note = chemically synthesized
  source 1..22: mol_type = other DNA
tggttcccactccagacatgat

SEQ ID NO: 22407 - DNA, 22 bp, synthetic construct
  misc_feature 1..22: note = chemically synthesized
  source 1..22: mol_type = other DNA
ccactccagacatgatgtcagc

SEQ ID NO: 22408 - DNA, 22 bp, synthetic construct
  misc_feature 1..22: note = chemically synthesized
  source 1..22: mol_type = other DNA
cagacatgatgtcagctgtgaa

SEQ ID NO: 22409 - DNA, 22 bp, synthetic construct
  misc_feature 1..22: note = chemically synthesized
  source 1..22: mol_type = other DNA
tgaaatcagactgaaatgctga

SEQ ID NO: 22410 - DNA, 22 bp, synthetic construct
  misc_feature 1..22: note = chemically synthesized
  source 1..22: mol_type = other DNA
aaatgctgaaataacgataaaa

SEQ ID NO: 22411 - DNA, 22 bp, synthetic construct
  misc_feature 1..22: note = chemically synthesized
  source 1..22: mol_type = other DNA
aaataacgataaaaaaaaatac

SEQ ID NO: 22412 - DNA, 22 bp, synthetic construct
  misc_feature 1..22: note = chemically synthesized
  source 1..22: mol_type = other DNA
aactagcaaagtgagtaaagtc

SEQ ID NO: 22413 - DNA, 22 bp, synthetic construct
  misc_feature 1..22: note = chemically synthesized
  source 1..22: mol_type = other DNA
gcaaagtgagtaaagtcaaggg

SEQ ID NO: 22414 - DNA, 22 bp, synthetic construct
  misc_feature 1..22: note = chemically synthesized
  source 1..22: mol_type = other DNA
gttggaaaactcacaaagcagg

SEQ ID NO: 22415 - DNA, 22 bp, synthetic construct
  misc_feature 1..22: note = chemically synthesized
  source 1..22: mol_type = other DNA
ttggaaaactcacaaagcagga

SEQ ID NO: 22416 - DNA, 22 bp, synthetic construct
  misc_feature 1..22: note = chemically synthesized
  source 1..22: mol_type = other DNA
gaaaactcacaaagcaggacat

SEQ ID NO: 22417 - DNA, 22 bp, synthetic construct
  misc_feature 1..22: note = chemically synthesized
  source 1..22: mol_type = other DNA
acaaagcaggacataaagcaag

SEQ ID NO: 22418 - DNA, 22 bp, synthetic construct
  misc_feature 1..22: note = chemically synthesized
  source 1..22: mol_type = other DNA
gatatatctcattagtgtgaca

SEQ ID NO: 22419 - DNA, 22 bp, synthetic construct
  misc_feature 1..22: note = chemically synthesized
  source 1..22: mol_type = other DNA
attagtgtgacatctgggagga

SEQ ID NO: 22420 - DNA, 22 bp, synthetic construct
  misc_feature 1..22: note = chemically synthesized
  source 1..22: mol_type = other DNA
gtgtgacatctgggaggacaaa

SEQ ID NO: 22421 - DNA, 22 bp, synthetic construct
  misc_feature 1..22: note = chemically synthesized
  source 1..22: mol_type = other DNA
ggaggacaaagcatccaaaccc

SEQ ID NO: 22422 - DNA, 22 bp, synthetic construct
  misc_feature 1..22: note = chemically synthesized
  source 1..22: mol_type = other DNA
tcttctatataagtggtgagat

SEQ ID NO: 22423 - DNA, 22 bp, synthetic construct
  misc_feature 1..22: note = chemically synthesized
  source 1..22: mol_type = other DNA
cttctatataagtggtgagatg

SEQ ID NO: 22424 - DNA, 22 bp, synthetic construct
  misc_feature 1..22: note = chemically synthesized
  source 1..22: mol_type = other DNA
ttctatataagtggtgagatga

SEQ ID NO: 22425 - DNA, 22 bp, synthetic construct
  misc_feature 1..22: note = chemically synthesized
  source 1..22: mol_type = other DNA
ctatataagtggtgagatgatg

SEQ ID NO: 22426 - DNA, 22 bp, synthetic construct
  misc_feature 1..22: note = chemically synthesized
  source 1..22: mol_type = other DNA
tatataagtggtgagatgatga

SEQ ID NO: 22427 - DNA, 22 bp, synthetic construct
  misc_feature 1..22: note = chemically synthesized
  source 1..22: mol_type = other DNA
tataagtggtgagatgatgaag

SEQ ID NO: 22428 - DNA, 22 bp, synthetic construct
  misc_feature 1..22: note = chemically synthesized
  source 1..22: mol_type = other DNA
taagagggcttctgcccccttg

SEQ ID NO: 22429 - DNA, 22 bp, synthetic construct
  misc_feature 1..22: note = chemically synthesized
  source 1..22: mol_type = other DNA
ctgcccccttgaagacttcaga

SEQ ID NO: 22430 - DNA, 22 bp, synthetic construct
  misc_feature 1..22: note = chemically synthesized
  source 1..22: mol_type = other DNA
tgcccccttgaagacttcagat

SEQ ID NO: 22431 - DNA, 22 bp, synthetic construct
  misc_feature 1..22: note = chemically synthesized
  source 1..22: mol_type = other DNA
cccccttgaagacttcagatgc

SEQ ID NO: 22432 - DNA, 22 bp, synthetic construct
  misc_feature 1..22: note = chemically synthesized
  source 1..22: mol_type = other DNA
gaagacttcagatgctggggaa

SEQ ID NO: 22433 - DNA, 22 bp, synthetic construct
  misc_feature 1..22: note = chemically synthesized
  source 1..22: mol_type = other DNA
aagacttcagatgctggggaaa

SEQ ID NO: 22434 - DNA, 22 bp, synthetic construct
  misc_feature 1..22: note = chemically synthesized
  source 1..22: mol_type = other DNA
cagatgctggggaaaggataga

SEQ ID NO: 22435 - DNA, 22 bp, synthetic construct
  misc_feature 1..22: note = chemically synthesized
  source 1..22: mol_type = other DNA
agatgctggggaaaggatagat

SEQ ID NO: 22436 - DNA, 22 bp, synthetic construct
  misc_feature 1..22: note = chemically synthesized
  source 1..22: mol_type = other DNA
gggaaaggatagataagaataa

SEQ ID NO: 22437 - DNA, 22 bp, synthetic construct
  misc_feature 1..22: note = chemically synthesized
  source 1..22: mol_type = other DNA
ttggagcctgggaaataatgac

SEQ ID NO: 22438 - DNA, 22 bp, synthetic construct
  misc_feature 1..22: note = chemically synthesized
  source 1..22: mol_type = other DNA
tggagcctgggaaataatgact

SEQ ID NO: 22439 - DNA, 22 bp, synthetic construct
  misc_feature 1..22: note = chemically synthesized
  source 1..22: mol_type = other DNA
ggagcctgggaaataatgacta

SEQ ID NO: 22440 - DNA, 22 bp, synthetic construct
  misc_feature 1..22: note = chemically synthesized
  source 1..22: mol_type = other DNA
gagcctgggaaataatgactag

SEQ ID NO: 22441 - DNA, 22 bp, synthetic construct
  misc_feature 1..22: note = chemically synthesized
  source 1..22: mol_type = other DNA
ggaaataatgactagcgataaa

SEQ ID NO: 22442 - DNA, 22 bp, synthetic construct
  misc_feature 1..22: note = chemically synthesized
  source 1..22: mol_type = other DNA
gcgataaacctgaagggaagtt

SEQ ID NO: 22443 - DNA, 22 bp, synthetic construct
  misc_feature 1..22: note = chemically synthesized
  source 1..22: mol_type = other DNA
aagggaagttaagtatacgatc

SEQ ID NO: 22444 - DNA, 22 bp, synthetic construct
  misc_feature 1..22: note = chemically synthesized
  source 1..22: mol_type = other DNA
agtatacgatccccagataata

SEQ ID NO: 22445 - DNA, 22 bp, synthetic construct
  misc_feature 1..22: note = chemically synthesized
  source 1..22: mol_type = other DNA
aggagaaaggcaatgtgattct

SEQ ID NO: 22446 - DNA, 22 bp, synthetic construct
  misc_feature 1..22: note = chemically synthesized
  source 1..22: mol_type = other DNA
tgcagccattgtagccagagat

SEQ ID NO: 22447 - DNA, 22 bp, synthetic construct
  misc_feature 1..22: note = chemically synthesized
  source 1..22: mol_type = other DNA
cagccattgtagccagagataa

SEQ ID NO: 22448 - DNA, 22 bp, synthetic construct
  misc_feature 1..22: note = chemically synthesized
  source 1..22: mol_type = other DNA
tagccagagataataagccctt

SEQ ID NO: 22449 - DNA, 22 bp, synthetic construct
  misc_feature 1..22: note = chemically synthesized
  source 1..22: mol_type = other DNA
gaggaaggggccaggggaattt

SEQ ID NO: 22450 - DNA, 22 bp, synthetic construct
  misc_feature 1..22: note = chemically synthesized
  source 1..22: mol_type = other DNA
aggaaggggccaggggaatttt

SEQ ID NO: 22451 - DNA, 22 bp, synthetic construct
  misc_feature 1..22: note = chemically synthesized
  source 1..22: mol_type = other DNA
ttctaaggatagacagtattaa

SEQ ID NO: 22452 - DNA, 22 bp, synthetic construct
  misc_feature 1..22: note = chemically synthesized
  source 1..22: mol_type = other DNA
tctaaggatagacagtattaat

SEQ ID NO: 22453 - DNA, 22 bp, synthetic construct
  misc_feature 1..22: note = chemically synthesized
  source 1..22: mol_type = other DNA
ctaaggatagacagtattaatg

SEQ ID NO: 22454 - DNA, 22 bp, synthetic construct
  misc_feature 1..22: note = chemically synthesized
  source 1..22: mol_type = other DNA
taaggatagacagtattaatgc

SEQ ID NO: 22455 - DNA, 22 bp, synthetic construct
  misc_feature 1..22: note = chemically synthesized
  source 1..22: mol_type = other DNA
aggatagacagtattaatgcag

SEQ ID NO: 22456 - DNA, 22 bp, synthetic construct
  misc_feature 1..22: note = chemically synthesized
  source 1..22: mol_type = other DNA
atgcagcactctcttctgctat

SEQ ID NO: 22457 - DNA, 22 bp, synthetic construct
  misc_feature 1..22: note = chemically synthesized
  source 1..22: mol_type = other DNA
tcttctgctattaaactctcat

SEQ ID NO: 22458 - DNA, 22 bp, synthetic construct
  misc_feature 1..22: note = chemically synthesized
  source 1..22: mol_type = other DNA
ttctgctattaaactctcattg

SEQ ID NO: 22459 - DNA, 22 bp, synthetic construct
  misc_feature 1..22: note = chemically synthesized
  source 1..22: mol_type = other DNA
ctgctattaaactctcattggc

SEQ ID NO: 22460 - DNA, 22 bp, synthetic construct
  misc_feature 1..22: note = chemically synthesized
  source 1..22: mol_type = other DNA
tgctattaaactctcattggct

SEQ ID NO: 22461 - DNA, 22 bp, synthetic construct
  misc_feature 1..22: note = chemically synthesized
  source 1..22: mol_type = other DNA
ctattaaactctcattggcttc

SEQ ID NO: 22462 - DNA, 22 bp, synthetic construct
  misc_feature 1..22: note = chemically synthesized
  source 1..22: mol_type = other DNA
ttaaactctcattggcttctaa

SEQ ID NO: 22463 - DNA, 22 bp, synthetic construct
  misc_feature 1..22: note = chemically synthesized
  source 1..22: mol_type = other DNA
aactctcattggcttctaaaag

SEQ ID NO: 22464 - DNA, 22 bp, synthetic construct
  misc_feature 1..22: note = chemically synthesized
  source 1..22: mol_type = other DNA
tcattggcttctaaaaggagtt

SEQ ID NO: 22465 - DNA, 22 bp, synthetic construct
  misc_feature 1..22: note = chemically synthesized
  source 1..22: mol_type = other DNA
attggcttctaaaaggagtttc

SEQ ID NO: 22466 - DNA, 22 bp, synthetic construct
  misc_feature 1..22: note = chemically synthesized
  source 1..22: mol_type = other DNA
gcttctaaaaggagtttcggtg

SEQ ID NO: 22467 - DNA, 22 bp, synthetic construct
  misc_feature 1..22: note = chemically synthesized
  source 1..22: mol_type = other DNA
ctaaaaggagtttcggtgagtg

SEQ ID NO: 22468 - DNA, 22 bp, synthetic construct
  misc_feature 1..22: note = chemically synthesized
  source 1..22: mol_type = other DNA
taaaaggagtttcggtgagtga

SEQ ID NO: 22469 - DNA, 22 bp, synthetic construct
  misc_feature 1..22: note = chemically synthesized
  source 1..22: mol_type = other DNA
aaaggagtttcggtgagtgatt

SEQ ID NO: 22470 - DNA, 22 bp, synthetic construct
  misc_feature 1..22: note = chemically synthesized
  source 1..22: mol_type = other DNA
cggtgagtgatttgctgagatg

SEQ ID NO: 22471 - DNA, 22 bp, synthetic construct
  misc_feature 1..22: note = chemically synthesized
  source 1..22: mol_type = other DNA
ggtgagtgatttgctgagatgt

SEQ ID NO: 22472 - DNA, 22 bp, synthetic construct
  misc_feature 1..22: note = chemically synthesized
  source 1..22: mol_type = other DNA
gctgagatgttgcattttcatg

SEQ ID NO: 22473 - DNA, 22 bp, synthetic construct
  misc_feature 1..22: note = chemically synthesized
  source 1..22: mol_type = other DNA
ctgagatgttgcattttcatgg

SEQ ID NO: 22474 - DNA, 22 bp, synthetic construct
  misc_feature 1..22: note = chemically synthesized
  source 1..22: mol_type = other DNA
agatgttgcattttcatggctg

SEQ ID NO: 22475 - DNA, 22 bp, synthetic construct
  misc_feature 1..22: note = chemically synthesized
  source 1..22: mol_type = other DNA
cattttcatggctgctgccttt

SEQ ID NO: 22476 - DNA, 22 bp, synthetic construct
  misc_feature 1..22: note = chemically synthesized
  source 1..22: mol_type = other DNA
tcatggctgctgcctttaggta

SEQ ID NO: 22477 - DNA, 22 bp, synthetic construct
  misc_feature 1..22: note = chemically synthesized
  source 1..22: mol_type = other DNA
catggctgctgcctttaggtat

SEQ ID NO: 22478 - DNA, 22 bp, synthetic construct
  misc_feature 1..22: note = chemically synthesized
  source 1..22: mol_type = other DNA
atggctgctgcctttaggtatt

SEQ ID NO: 22479 - DNA, 22 bp, synthetic construct
  misc_feature 1..22: note = chemically synthesized
  source 1..22: mol_type = other DNA
ctgcctttaggtattattgcaa

SEQ ID NO: 22480 - DNA, 22 bp, synthetic construct
  misc_feature 1..22: note = chemically synthesized
  source 1..22: mol_type = other DNA
cctttaggtattattgcaacag

SEQ ID NO: 22481 - DNA, 22 bp, synthetic construct
  misc_feature 1..22: note = chemically synthesized
  source 1..22: mol_type = other DNA
taggtattattgcaacagtttg

SEQ ID NO: 22482 - DNA, 22 bp, synthetic construct
  misc_feature 1..22: note = chemically synthesized
  source 1..22: mol_type = other DNA
aggtattattgcaacagtttgg

SEQ ID NO: 22483 - DNA, 22 bp, synthetic construct
  misc_feature 1..22: note = chemically synthesized
  source 1..22: mol_type = other DNA
ggtattattgcaacagtttgga

SEQ ID NO: 22484 - DNA, 22 bp, synthetic construct
  misc_feature 1..22: note = chemically synthesized
  source 1..22: mol_type = other DNA
ttgcaacagtttggaattttga

SEQ ID NO: 22485 - DNA, 22 bp, synthetic construct
  misc_feature 1..22: note = chemically synthesized
  source 1..22: mol_type = other DNA
caacagtttggaattttgaaat

SEQ ID NO: 22486 - DNA, 22 bp, synthetic construct
  misc_feature 1..22: note = chemically synthesized
  source 1..22: mol_type = other DNA
ggaattttgaaattaaaacagt

SEQ ID NO: 22487 - DNA, 22 bp, synthetic construct
  misc_feature 1..22: note = chemically synthesized
  source 1..22: mol_type = other DNA
gaattttgaaattaaaacagtt

SEQ ID NO: 22488 - DNA, 22 bp, synthetic construct
  misc_feature 1..22: note = chemically synthesized
  source 1..22: mol_type = other DNA
tgaaattaaaacagttctgtaa

SEQ ID NO: 22489 - DNA, 22 bp, synthetic construct
  misc_feature 1..22: note = chemically synthesized
  source 1..22: mol_type = other DNA
gaaattaaaacagttctgtaaa

SEQ ID NO: 22490 - DNA, 22 bp, synthetic construct
  misc_feature 1..22: note = chemically synthesized
  source 1..22: mol_type = other DNA
aaattaaaacagttctgtaaaa

SEQ ID NO: 22491 - DNA, 22 bp, synthetic construct
  misc_feature 1..22: note = chemically synthesized
  source 1..22: mol_type = other DNA
aaacagttctgtaaaaccagtt

SEQ ID NO: 22492 - DNA, 22 bp, synthetic construct
  misc_feature 1..22: note = chemically synthesized
  source 1..22: mol_type = other DNA
tgtaaaaccagtttagttttgt

SEQ ID NO: 22493 - DNA, 22 bp, synthetic construct
  misc_feature 1..22: note = chemically synthesized
  source 1..22: mol_type = other DNA
taaaaccagtttagttttgtaa

SEQ ID NO: 22494 - DNA, 22 bp, synthetic construct
  misc_feature 1..22: note = chemically synthesized
  source 1..22: mol_type = other DNA
agttttgtaaagtgtatgcatc

SEQ ID NO: 22495 - DNA, 22 bp, synthetic construct
  misc_feature 1..22: note = chemically synthesized
  source 1..22: mol_type = other DNA
gttttgtaaagtgtatgcatca

SEQ ID NO: 22496 - DNA, 22 bp, synthetic construct
  misc_feature 1..22: note = chemically synthesized
  source 1..22: mol_type = other DNA
tgtaaagtgtatgcatcaaaga

SEQ ID NO: 22497 - DNA, 22 bp, synthetic construct
  misc_feature 1..22: note = chemically synthesized
  source 1..22: mol_type = other DNA
gtaaagtgtatgcatcaaagat

SEQ ID NO: 22498 - DNA, 22 bp, synthetic construct
  misc_feature 1..22: note = chemically synthesized
  source 1..22: mol_type = other DNA
taaagtgtatgcatcaaagatg

SEQ ID NO: 22499 - DNA, 22 bp, synthetic construct
  misc_feature 1..22: note = chemically synthesized
  source 1..22: mol_type = other DNA
cattcagacattactgagttac

SEQ ID NO: 22500 - DNA, 22 bp, synthetic construct
  misc_feature 1..22: note = chemically synthesized
  source 1..22: mol_type = other DNA
attcagacattactgagttaca

SEQ ID NO: 22501 - DNA, 22 bp, synthetic construct
  misc_feature 1..22: note = chemically synthesized
  source 1..22: mol_type = other DNA
agacattactgagttacaacta

SEQ ID NO: 22502 - DNA, 22 bp, synthetic construct
  misc_feature 1..22: note = chemically synthesized
  source 1..22: mol_type = other DNA
ctgagttacaactatggtgcca

SEQ ID NO: 22503 - DNA, 22 bp, synthetic construct
  misc_feature 1..22: note = chemically synthesized
  source 1..22: mol_type = other DNA
agttacaactatggtgccaggt

SEQ ID NO: 22504 - DNA, 22 bp, synthetic construct
  misc_feature 1..22: note = chemically synthesized
  source 1..22: mol_type = other DNA
caactatggtgccaggtactgt

SEQ ID NO: 22505 - DNA, 22 bp, synthetic construct
  misc_feature 1..22: note = chemically synthesized
  source 1..22: mol_type = other DNA
tggtgccaggtactgtgtcagg

SEQ ID NO: 22506 - DNA, 22 bp, synthetic construct
  misc_feature 1..22: note = chemically synthesized
  source 1..22: mol_type = other DNA
tgtcagggtactaggggtatgg

SEQ ID NO: 22507 - DNA, 22 bp, synthetic construct
  misc_feature 1..22: note = chemically synthesized
  source 1..22: mol_type = other DNA
ggggtatggggataaaccagac

SEQ ID NO: 22508 - DNA, 22 bp, synthetic construct
  misc_feature 1..22: note = chemically synthesized
  source 1..22: mol_type = other DNA
cctctttgatctaaagcagcat

SEQ ID NO: 22509 - DNA, 22 bp, synthetic construct
  misc_feature 1..22: note = chemically synthesized
  source 1..22: mol_type = other DNA
tttgatctaaagcagcatgagg

SEQ ID NO: 22510 - DNA, 22 bp, synthetic construct
  misc_feature 1..22: note = chemically synthesized
  source 1..22: mol_type = other DNA
tgatctaaagcagcatgaggcc

SEQ ID NO: 22511 - DNA, 22 bp, synthetic construct
  misc_feature 1..22: note = chemically synthesized
  source 1..22: mol_type = other DNA
gatctaaagcagcatgaggcca

SEQ ID NO: 22512 - DNA, 22 bp, synthetic construct
  misc_feature 1..22: note = chemically synthesized
  source 1..22: mol_type = other DNA
atctaaagcagcatgaggccag

SEQ ID NO: 22513 - DNA, 22 bp, synthetic construct
  misc_feature 1..22: note = chemically synthesized
  source 1..22: mol_type = other DNA
aagcagcatgaggccaggtgag

SEQ ID NO: 22514 - DNA, 22 bp, synthetic construct
  misc_feature 1..22: note = chemically synthesized
  source 1..22: mol_type = other DNA
caatataatgtgataaaatgtg

SEQ ID NO: 22515 - DNA, 22 bp, synthetic construct
  misc_feature 1..22: note = chemically synthesized
  source 1..22: mol_type = other DNA
aatataatgtgataaaatgtgc

SEQ ID NO: 22516 - DNA, 22 bp, synthetic construct
  misc_feature 1..22: note = chemically synthesized
  source 1..22: mol_type = other DNA
ggtactaagggatcatagagaa

SEQ ID NO: 22517 - DNA, 22 bp, synthetic construct
  misc_feature 1..22: note = chemically synthesized
  source 1..22: mol_type = other DNA
agggatcatagagaaaggaaca

SEQ ID NO: 22518 - DNA, 22 bp, synthetic construct
  misc_feature 1..22: note = chemically synthesized
  source 1..22: mol_type = other DNA
aatggggaaacaattgatagag

SEQ ID NO: 22519 - DNA, 22 bp, synthetic construct
  misc_feature 1..22: note = chemically synthesized
  source 1..22: mol_type = other DNA
atagagagagaatattttcatc

SEQ ID NO: 22520 - DNA, 22 bp, synthetic construct
  misc_feature 1..22: note = chemically synthesized
  source 1..22: mol_type = other DNA
tcatctgggtcttaaaagatga

SEQ ID NO: 22521 - DNA, 22 bp, synthetic construct
  misc_feature 1..22: note = chemically synthesized
  source 1..22: mol_type = other DNA
catctgggtcttaaaagatgag

SEQ ID NO: 22522 - DNA, 22 bp, synthetic construct
  misc_feature 1..22: note = chemically synthesized
  source 1..22: mol_type = other DNA
atctgggtcttaaaagatgagt

SEQ ID NO: 22523 - DNA, 22 bp, synthetic construct
  misc_feature 1..22: note = chemically synthesized
  source 1..22: mol_type = other DNA
ggtcttaaaagatgagtaggcg

SEQ ID NO: 22524 - DNA, 22 bp, synthetic construct
  misc_feature 1..22: note = chemically synthesized
  source 1..22: mol_type = other DNA
aaaagatgagtaggcgttctct

SEQ ID NO: 22525 - DNA, 22 bp, synthetic construct
  misc_feature 1..22: note = chemically synthesized
  source 1..22: mol_type = other DNA
aaagatgagtaggcgttctctc

SEQ ID NO: 22526 - DNA, 22 bp, synthetic construct
  misc_feature 1..22: note = chemically synthesized
  source 1..22: mol_type = other DNA
tctctctttaaatgtctgatat

SEQ ID NO: 22527 - DNA, 22 bp, synthetic construct
  misc_feature 1..22: note = chemically synthesized
  source 1..22: mol_type = other DNA
tctctttaaatgtctgatataa

SEQ ID NO: 22528 - DNA, 22 bp, synthetic construct
  misc_feature 1..22: note = chemically synthesized
  source 1..22: mol_type = other DNA
tctttaaatgtctgatataagg

SEQ ID NO: 22529 - DNA, 22 bp, synthetic construct
  misc_feature 1..22: note = chemically synthesized
  source 1..22: mol_type = other DNA
tttaaatgtctgatataagggc

SEQ ID NO: 22530 - DNA, 22 bp, synthetic construct
  misc_feature 1..22: note = chemically synthesized
  source 1..22: mol_type = other DNA
taaatgtctgatataagggcat

SEQ ID NO: 22531 - DNA, 22 bp, synthetic construct
  misc_feature 1..22: note = chemically synthesized
  source 1..22: mol_type = other DNA
aaatgtctgatataagggcatt

SEQ ID NO: 22532 - DNA, 22 bp, synthetic construct
  misc_feature 1..22: note = chemically synthesized
  source 1..22: mol_type = other DNA
aatgtctgatataagggcattt

SEQ ID NO: 22533 - DNA, 22 bp, synthetic construct
  misc_feature 1..22: note = chemically synthesized
  source 1..22: mol_type = other DNA
atataagggcattttatgcaaa

SEQ ID NO: 22534 - DNA, 22 bp, synthetic construct
  misc_feature 1..22: note = chemically synthesized
  source 1..22: mol_type = other DNA
tatgcaaagaggatcactcgtg

SEQ ID NO: 22535 - DNA, 22 bp, synthetic construct
  misc_feature 1..22: note = chemically synthesized
  source 1..22: mol_type = other DNA
atgcaaagaggatcactcgtgc

SEQ ID NO: 22536 - DNA, 22 bp, synthetic construct
  misc_feature 1..22: note = chemically synthesized
  source 1..22: mol_type = other DNA
tgcaaagaggatcactcgtgca

SEQ ID NO: 22537 - DNA, 22 bp, synthetic construct
  misc_feature 1..22: note = chemically synthesized
  source 1..22: mol_type = other DNA
gtgcaaagactcagatttgcaa

SEQ ID NO: 22538 - DNA, 22 bp, synthetic construct
  misc_feature 1..22: note = chemically synthesized
  source 1..22: mol_type = other DNA
agatttgcaagaacgtgaggta

SEQ ID NO: 22539 - DNA, 22 bp, synthetic construct
  misc_feature 1..22: note = chemically synthesized
  source 1..22: mol_type = other DNA
gcaagaacgtgaggtatttcag

SEQ ID NO: 22540 - DNA, 22 bp, synthetic construct
  misc_feature 1..22: note = chemically synthesized
  source 1..22: mol_type = other DNA
caagaacgtgaggtatttcagg

SEQ ID NO: 22541 - DNA, 22 bp, synthetic construct
  misc_feature 1..22: note = chemically synthesized
  source 1..22: mol_type = other DNA
caggagttttgtatggttccat

SEQ ID NO: 22542 - DNA, 22 bp, synthetic construct
  misc_feature 1..22: note = chemically synthesized
  source 1..22: mol_type = other DNA
aggagttttgtatggttccata

SEQ ID NO: 22543 - DNA, 22 bp, synthetic construct
  misc_feature 1..22: note = chemically synthesized
  source 1..22: mol_type = other DNA
tgtatggttccatatggactat

SEQ ID NO: 22544 - DNA, 22 bp, synthetic construct
  misc_feature 1..22: note = chemically synthesized
  source 1..22: mol_type = other DNA
gtatggttccatatggactatg

SEQ ID NO: 22545 - DNA, 22 bp, synthetic construct
  misc_feature 1..22: note = chemically synthesized
  source 1..22: mol_type = other DNA
tatggttccatatggactatga

SEQ ID NO: 22546 - DNA, 22 bp, synthetic construct
  misc_feature 1..22: note = chemically synthesized
  source 1..22: mol_type = other DNA
catatggactatgacaagtgag

SEQ ID NO: 22547 - DNA, 22 bp, synthetic construct
  misc_feature 1..22: note = chemically synthesized
  source 1..22: mol_type = other DNA
tgacaagtgagacaggtaaact

SEQ ID NO: 22548 - DNA, 22 bp, synthetic construct
  misc_feature 1..22: note = chemically synthesized
  source 1..22: mol_type = other DNA
ggcagagctggtcatcagataa

SEQ ID NO: 22549 - DNA, 22 bp, synthetic construct
  misc_feature 1..22: note = chemically synthesized
  source 1..22: mol_type = other DNA
gtcatcagataatgaagtcatt

SEQ ID NO: 22550 - DNA, 22 bp, synthetic construct
  misc_feature 1..22: note = chemically synthesized
  source 1..22: mol_type = other DNA
acctaaggagattggacaataa

SEQ ID NO: 22551 - DNA, 22 bp, synthetic construct
  misc_feature 1..22: note = chemically synthesized
  source 1..22: mol_type = other DNA
aggagattggacaataaaatgc

SEQ ID NO: 22552 - DNA, 22 bp, synthetic construct
  misc_feature 1..22: note = chemically synthesized
  source 1..22: mol_type = other DNA
gacaataaaatgcaatatggag

SEQ ID NO: 22553 - DNA, 22 bp, synthetic construct
  misc_feature 1..22: note = chemically synthesized
  source 1..22: mol_type = other DNA
atggctgatttaggatgcccag

SEQ ID NO: 22554 - DNA, 22 bp, synthetic construct
  misc_feature 1..22: note = chemically synthesized
  source 1..22: mol_type = other DNA
atttaggatgcccagtctggca

SEQ ID NO: 22555 - DNA, 22 bp, synthetic construct
  misc_feature 1..22: note = chemically synthesized
  source 1..22: mol_type = other DNA
aggatgcccagtctggcaacac

SEQ ID NO: 22556 - DNA, 22 bp, synthetic construct
  misc_feature 1..22: note = chemically synthesized
  source 1..22: mol_type = other DNA
ggatgcccagtctggcaacacg

SEQ ID NO: 22557 - DNA, 22 bp, synthetic construct
  misc_feature 1..22: note = chemically synthesized
  source 1..22: mol_type = other DNA
gcaacacgctaatgaaatgata

SEQ ID NO: 22558 - DNA, 22 bp, synthetic construct
  misc_feature 1..22: note = chemically synthesized
  source 1..22: mol_type = other DNA
atgaaatgatagtgggggaggg

SEQ ID NO: 22559 - DNA, 22 bp, synthetic construct
  misc_feature 1..22: note = chemically synthesized
  source 1..22: mol_type = other DNA
ggagagagcagtcctgagacta

SEQ ID NO: 22560 - DNA, 22 bp, synthetic construct
  misc_feature 1..22: note = chemically synthesized
  source 1..22: mol_type = other DNA
agactattgcaattatctgcgg

SEQ ID NO: 22561 - DNA, 22 bp, synthetic construct
  misc_feature 1..22: note = chemically synthesized
  source 1..22: mol_type = other DNA
ttgcaattatctgcgggagaca

SEQ ID NO: 22562 - DNA, 22 bp, synthetic construct
  misc_feature 1..22: note = chemically synthesized
  source 1..22: mol_type = other DNA
caattatctgcgggagacataa

SEQ ID NO: 22563 - DNA, 22 bp, synthetic construct
  misc_feature 1..22: note = chemically synthesized
  source 1..22: mol_type = other DNA
tctgcgggagacataaaggcta

SEQ ID NO: 22564 - DNA, 22 bp, synthetic construct
  misc_feature 1..22: note = chemically synthesized
  source 1..22: mol_type = other DNA
cgggagacataaaggctagaac

SEQ ID NO: 22565 - DNA, 22 bp, synthetic construct
  misc_feature 1..22: note = chemically synthesized
  source 1..22: mol_type = other DNA
gaacctgaacagtagcagtaca

SEQ ID NO: 22566 - DNA, 22 bp, synthetic construct
  misc_feature 1..22: note = chemically synthesized
  source 1..22: mol_type = other DNA
aacagtagcagtacaaaaaaag

SEQ ID NO: 22567 - DNA, 22 bp, synthetic construct
  misc_feature 1..22: note = chemically synthesized
  source 1..22: mol_type = other DNA
aaatgatattaaggaagtagaa

SEQ ID NO: 22568 - DNA, 22 bp, synthetic construct
  misc_feature 1..22: note = chemically synthesized
  source 1..22: mol_type = other DNA
aggaagtagaagtggtatgact

SEQ ID NO: 22569 - DNA, 22 bp, synthetic construct
  misc_feature 1..22: note = chemically synthesized
  source 1..22: mol_type = other DNA
aaccatctgggtatggaagggg

SEQ ID NO: 22570 - DNA, 22 bp, synthetic construct
  misc_feature 1..22: note = chemically synthesized
  source 1..22: mol_type = other DNA
accatctgggtatggaagggga

SEQ ID NO: 22571 - DNA, 22 bp, synthetic construct
  misc_feature 1..22: note = chemically synthesized
  source 1..22: mol_type = other DNA
ggtatggaaggggaaatggcta

SEQ ID NO: 22572 - DNA, 22 bp, synthetic construct
  misc_feature 1..22: note = chemically synthesized
  source 1..22: mol_type = other DNA
gagtcttggggactttgtgttt

SEQ ID NO: 22573 - DNA, 22 bp, synthetic construct
  misc_feature 1..22: note = chemically synthesized
  source 1..22: mol_type = other DNA
ggggactttgtgtttgatgtga

SEQ ID NO: 22574 - DNA, 22 bp, synthetic construct
  misc_feature 1..22: note = chemically synthesized
  source 1..22: mol_type = other DNA
gggactttgtgtttgatgtgat

SEQ ID NO: 22575 - DNA, 22 bp, synthetic construct
  misc_feature 1..22: note = chemically synthesized
  source 1..22: mol_type = other DNA
tgtgtttgatgtgattatggac

SEQ ID NO: 22576 - DNA, 22 bp, synthetic construct
  misc_feature 1..22: note = chemically synthesized
  source 1..22: mol_type = other DNA
gtgtttgatgtgattatggacc

SEQ ID NO: 22577 - DNA, 22 bp, synthetic construct
  misc_feature 1..22: note = chemically synthesized
  source 1..22: mol_type = other DNA
tgtttgatgtgattatggacca

SEQ ID NO: 22578 - DNA, 22 bp, synthetic construct
  misc_feature 1..22: note = chemically synthesized
  source 1..22: mol_type = other DNA
gatgtgattatggaccacagaa

SEQ ID NO: 22579 - DNA, 22 bp, synthetic construct
  misc_feature 1..22: note = chemically synthesized
  source 1..22: mol_type = other DNA
atgtgattatggaccacagaat

SEQ ID NO: 22580 - DNA, 22 bp, synthetic construct
  misc_feature 1..22: note = chemically synthesized
  source 1..22: mol_type = other DNA
tggaccacagaataatgtctaa

SEQ ID NO: 22581 - DNA, 22 bp, synthetic construct
  misc_feature 1..22: note = chemically synthesized
  source 1..22: mol_type = other DNA
agagaactggctctttagtctg

SEQ ID NO: 22582 - DNA, 22 bp, synthetic construct
  misc_feature 1..22: note = chemically synthesized
  source 1..22: mol_type = other DNA
gctctttagtctgactgccaga

SEQ ID NO: 22583 - DNA, 22 bp, synthetic construct
  misc_feature 1..22: note = chemically synthesized
  source 1..22: mol_type = other DNA
tttagtctgactgccagagtct

SEQ ID NO: 22584 - DNA, 22 bp, synthetic construct
  misc_feature 1..22: note = chemically synthesized
  source 1..22: mol_type = other DNA
tagtctgactgccagagtctga

SEQ ID NO: 22585 - DNA, 22 bp, synthetic construct
  misc_feature 1..22: note = chemically synthesized
  source 1..22: mol_type = other DNA
agtctgactgccagagtctgaa

SEQ ID NO: 22586 - DNA, 22 bp, synthetic construct
  misc_feature 1..22: note = chemically synthesized
  source 1..22: mol_type = other DNA
gtctgactgccagagtctgaat

SEQ ID NO: 22587 - DNA, 22 bp, synthetic construct
  misc_feature 1..22: note = chemically synthesized
  source 1..22: mol_type = other DNA
actgccagagtctgaatcctga

SEQ ID NO: 22588 - DNA, 22 bp, synthetic construct
  misc_feature 1..22: note = chemically synthesized
  source 1..22: mol_type = other DNA
ccagagtctgaatcctgaatgt

SEQ ID NO: 22589 - DNA, 22 bp, synthetic construct
  misc_feature 1..22: note = chemically synthesized
  source 1..22: mol_type = other DNA
aatcctgaatgttttagtatgt

SEQ ID NO: 22590 - DNA, 22 bp, synthetic construct
  misc_feature 1..22: note = chemically synthesized
  source 1..22: mol_type = other DNA
aatgttttagtatgttaccttg

SEQ ID NO: 22591 - DNA, 22 bp, synthetic construct
  misc_feature 1..22: note = chemically synthesized
  source 1..22: mol_type = other DNA
tagtatgttaccttgggcaaag

SEQ ID NO: 22592 - DNA, 22 bp, synthetic construct
  misc_feature 1..22: note = chemically synthesized
  source 1..22: mol_type = other DNA
agtatgttaccttgggcaaagc

SEQ ID NO: 22593 - DNA, 22 bp, synthetic construct
  misc_feature 1..22: note = chemically synthesized
  source 1..22: mol_type = other DNA
gtatgttaccttgggcaaagcc

SEQ ID NO: 22594 - DNA, 22 bp, synthetic construct
  misc_feature 1..22: note = chemically synthesized
  source 1..22: mol_type = other DNA
ccttgggcaaagcccttagcct

SEQ ID NO: 22595 - DNA, 22 bp, synthetic construct
  misc_feature 1..22: note = chemically synthesized
  source 1..22: mol_type = other DNA
gggcaaagcccttagcctctat

SEQ ID NO: 22596 - DNA, 22 bp, synthetic construct
  misc_feature 1..22: note = chemically synthesized
  source 1..22: mol_type = other DNA
ggcaaagcccttagcctctatg

SEQ ID NO: 22597 - DNA, 22 bp, synthetic construct
  misc_feature 1..22: note = chemically synthesized
  source 1..22: mol_type = other DNA
agcctctatgaatctatcttcc

SEQ ID NO: 22598 - DNA, 22 bp, synthetic construct
  misc_feature 1..22: note = chemically synthesized
  source 1..22: mol_type = other DNA
gcctctatgaatctatcttcct

SEQ ID NO: 22599 - DNA, 22 bp, synthetic construct
  misc_feature 1..22: note = chemically synthesized
  source 1..22: mol_type = other DNA
tatgaatctatcttcctcattc

SEQ ID NO: 22600 - DNA, 22 bp, synthetic construct
  misc_feature 1..22: note = chemically synthesized
  source 1..22: mol_type = other DNA
tgaatctatcttcctcattcat

SEQ ID NO: 22601 - DNA, 22 bp, synthetic construct
  misc_feature 1..22: note = chemically synthesized
  source 1..22: mol_type = other DNA
tcttcctcattcataaaaataa

SEQ ID NO: 22602 - DNA, 22 bp, synthetic construct
  misc_feature 1..22: note = chemically synthesized
  source 1..22: mol_type = other DNA
cctcattcataaaaataagatg

SEQ ID NO: 22603 - DNA, 22 bp, synthetic construct
  misc_feature 1..22: note = chemically synthesized
  source 1..22: mol_type = other DNA
ctcattcataaaaataagatga

SEQ ID NO: 22604 - DNA, 22 bp, synthetic construct
  misc_feature 1..22: note = chemically synthesized
  source 1..22: mol_type = other DNA
attcataaaaataagatgacag

SEQ ID NO: 22605 - DNA, 22 bp, synthetic construct
  misc_feature 1..22: note = chemically synthesized
  source 1..22: mol_type = other DNA
ataaaaataagatgacagtgcc

SEQ ID NO: 22606 - DNA, 22 bp, synthetic construct
  misc_feature 1..22: note = chemically synthesized
  source 1..22: mol_type = other DNA
tctcgtgggacttttgtgagga

SEQ ID NO: 22607 - DNA, 22 bp, synthetic construct
  misc_feature 1..22: note = chemically synthesized
  source 1..22: mol_type = other DNA
gtgggacttttgtgaggatgaa

SEQ ID NO: 22608 - DNA, 22 bp, synthetic construct
  misc_feature 1..22: note = chemically synthesized
  source 1..22: mol_type = other DNA
ttgtgaggatgaagtgagataa

SEQ ID NO: 22609 - DNA, 22 bp, synthetic construct
  misc_feature 1..22: note = chemically synthesized
  source 1..22: mol_type = other DNA
tgtgaggatgaagtgagataat

SEQ ID NO: 22610 - DNA, 22 bp, synthetic construct
  misc_feature 1..22: note = chemically synthesized
  source 1..22: mol_type = other DNA
gtgaggatgaagtgagataatg

SEQ ID NO: 22611 - DNA, 22 bp, synthetic construct
  misc_feature 1..22: note = chemically synthesized
  source 1..22: mol_type = other DNA
tgaggatgaagtgagataatgg

SEQ ID NO: 22612 - DNA, 22 bp, synthetic construct
  misc_feature 1..22: note = chemically synthesized
  source 1..22: mol_type = other DNA
ctgagcacagtgtccaacacag

SEQ ID NO: 22613 - DNA, 22 bp, synthetic construct
  misc_feature 1..22: note = chemically synthesized
  source 1..22: mol_type = other DNA
agcacagtgtccaacacagcag

SEQ ID NO: 22614 - DNA, 22 bp, synthetic construct
  misc_feature 1..22: note = chemically synthesized
  source 1..22: mol_type = other DNA
catatacattagctattactgg

SEQ ID NO: 22615 - DNA, 22 bp, synthetic construct
  misc_feature 1..22: note = chemically synthesized
  source 1..22: mol_type = other DNA
gctattactggctacattatga

SEQ ID NO: 22616 - DNA, 22 bp, synthetic construct
  misc_feature 1..22: note = chemically synthesized
  source 1..22: mol_type = other DNA
ttactggctacattatgatata

SEQ ID NO: 22617 - DNA, 22 bp, synthetic construct
  misc_feature 1..22: note = chemically synthesized
  source 1..22: mol_type = other DNA
ctggctacattatgatatacag

SEQ ID NO: 22618 - DNA, 22 bp, synthetic construct
  misc_feature 1..22: note = chemically synthesized
  source 1..22: mol_type = other DNA
gctacattatgatatacagtta

SEQ ID NO: 22619 - DNA, 22 bp, synthetic construct
  misc_feature 1..22: note = chemically synthesized
  source 1..22: mol_type = other DNA
cattatgatatacagttaggga

SEQ ID NO: 22620 - DNA, 22 bp, synthetic construct
  misc_feature 1..22: note = chemically synthesized
  source 1..22: mol_type = other DNA
tgatatacagttagggagttgg

SEQ ID NO: 22621 - DNA, 22 bp, synthetic construct
  misc_feature 1..22: note = chemically synthesized
  source 1..22: mol_type = other DNA
gggagttggaaagataatctga

SEQ ID NO: 22622 - DNA, 22 bp, synthetic construct
  misc_feature 1..22: note = chemically synthesized
  source 1..22: mol_type = other DNA
gaaagataatctgaaattcagg

SEQ ID NO: 22623 - DNA, 22 bp, synthetic construct
  misc_feature 1..22: note = chemically synthesized
  source 1..22: mol_type = other DNA
aaattcaggagacgtatctgac

SEQ ID NO: 22624 - DNA, 22 bp, synthetic construct
  misc_feature 1..22: note = chemically synthesized
  source 1..22: mol_type = other DNA
aggagacgtatctgactatagg

SEQ ID NO: 22625 - DNA, 22 bp, synthetic construct
  misc_feature 1..22: note = chemically synthesized
  source 1..22: mol_type = other DNA
actataggtgagtatttggaac

SEQ ID NO: 22626 - DNA, 22 bp, synthetic construct
  misc_feature 1..22: note = chemically synthesized
  source 1..22: mol_type = other DNA
taggtgagtatttggaactcat

SEQ ID NO: 22627 - DNA, 22 bp, synthetic construct
  misc_feature 1..22: note = chemically synthesized
  source 1..22: mol_type = other DNA
ggaactcattgttctgtaaaca

SEQ ID NO: 22628 - DNA, 22 bp, synthetic construct
  misc_feature 1..22: note = chemically synthesized
  source 1..22: mol_type = other DNA
gaactcattgttctgtaaacag

SEQ ID NO: 22629 - DNA, 22 bp, synthetic construct
  misc_feature 1..22: note = chemically synthesized
  source 1..22: mol_type = other DNA
attgttctgtaaacagtagtta

SEQ ID NO: 22630 - DNA, 22 bp, synthetic construct
  misc_feature 1..22: note = chemically synthesized
  source 1..22: mol_type = other DNA
ttctgtaaacagtagttacagc

SEQ ID NO: 22631 - DNA, 22 bp, synthetic construct
  misc_feature 1..22: note = chemically synthesized
  source 1..22: mol_type = other DNA
tgtaaacagtagttacagccac

SEQ ID NO: 22632 - DNA, 22 bp, synthetic construct
  misc_feature 1..22: note = chemically synthesized
  source 1..22: mol_type = other DNA
taaacagtagttacagccacgt

SEQ ID NO: 22633 - DNA, 22 bp, synthetic construct
  misc_feature 1..22: note = chemically synthesized
  source 1..22: mol_type = other DNA
cagccacgtgtgtgggcatctg

SEQ ID NO: 22634 - DNA, 22 bp, synthetic construct
  misc_feature 1..22: note = chemically synthesized
  source 1..22: mol_type = other DNA
gagagtgagcatggatattgtg

SEQ ID NO: 22635 - DNA, 22 bp, synthetic construct
  misc_feature 1..22: note = chemically synthesized
  source 1..22: mol_type = other DNA
tgatacctagtacagtgcctgg

SEQ ID NO: 22636 - DNA, 22 bp, synthetic construct
  misc_feature 1..22: note = chemically synthesized
  source 1..22: mol_type = other DNA
gtacagtgcctggcagtagtgg

SEQ ID NO: 22637 - DNA, 22 bp, synthetic construct
  misc_feature 1..22: note = chemically synthesized
  source 1..22: mol_type = other DNA
gcagtagtggttgtatgctcag

SEQ ID NO: 22638 - DNA, 22 bp, synthetic construct
  misc_feature 1..22: note = chemically synthesized
  source 1..22: mol_type = other DNA
tatgctcagtaaattttgttga

SEQ ID NO: 22639 - DNA, 22 bp, synthetic construct
  misc_feature 1..22: note = chemically synthesized
  source 1..22: mol_type = other DNA
agtaaattttgttgacagggtc

SEQ ID NO: 22640 - DNA, 22 bp, synthetic construct
  misc_feature 1..22: note = chemically synthesized
  source 1..22: mol_type = other DNA
tgttgacagggtcagggccgga

SEQ ID NO: 22641 - DNA, 22 bp, synthetic construct
  misc_feature 1..22: note = chemically synthesized
  source 1..22: mol_type = other DNA
gttgacagggtcagggccggac

SEQ ID NO: 22642 - DNA, 22 bp, synthetic construct
  misc_feature 1..22: note = chemically synthesized
  source 1..22: mol_type = other DNA
ttgacagggtcagggccggact

SEQ ID NO: 22643 - DNA, 22 bp, synthetic construct
  misc_feature 1..22: note = chemically synthesized
  source 1..22: mol_type = other DNA
acagggtcagggccggactaga

SEQ ID NO: 22644 - DNA, 22 bp, synthetic construct
  misc_feature 1..22: note = chemically synthesized
  source 1..22: mol_type = other DNA
gactgtggtaagcaaggcctgt

SEQ ID NO: 22645 - DNA, 22 bp, synthetic construct
  misc_feature 1..22: note = chemically synthesized
  source 1..22: mol_type = other DNA
tggtaagcaaggcctgtagggc

SEQ ID NO: 22646 - DNA, 22 bp, synthetic construct
  misc_feature 1..22: note = chemically synthesized
  source 1..22: mol_type = other DNA
tagggcataaatatacttgtat

SEQ ID NO: 22647 - DNA, 22 bp, synthetic construct
  misc_feature 1..22: note = chemically synthesized
  source 1..22: mol_type = other DNA
gtatgccccgagaagtgaggac

SEQ ID NO: 22648 - DNA, 22 bp, synthetic construct
  misc_feature 1..22: note = chemically synthesized
  source 1..22: mol_type = other DNA
tatgccccgagaagtgaggacc

SEQ ID NO: 22649 - DNA, 22 bp, synthetic construct
  misc_feature 1..22: note = chemically synthesized
  source 1..22: mol_type = other DNA
ttaaatattgtgccctacatgc

SEQ ID NO: 22650 - DNA, 22 bp, synthetic construct
  misc_feature 1..22: note = chemically synthesized
  source 1..22: mol_type = other DNA
aaatattgtgccctacatgcct

SEQ ID NO: 22651 - DNA, 22 bp, synthetic construct
  misc_feature 1..22: note = chemically synthesized
  source 1..22: mol_type = other DNA
aatattgtgccctacatgcctt

SEQ ID NO: 22652 - DNA, 22 bp, synthetic construct
  misc_feature 1..22: note = chemically synthesized
  source 1..22: mol_type = other DNA
tgccctacatgccttgtttggt

SEQ ID NO: 22653 - DNA, 22 bp, synthetic construct
  misc_feature 1..22: note = chemically synthesized
  source 1..22: mol_type = other DNA
catgccttgtttggttcactct

SEQ ID NO: 22654 - DNA, 22 bp, synthetic construct
  misc_feature 1..22: note = chemically synthesized
  source 1..22: mol_type = other DNA
gtttggttcactcttgtcccag

SEQ ID NO: 22655 - DNA, 22 bp, synthetic construct
  misc_feature 1..22: note = chemically synthesized
  source 1..22: mol_type = other DNA
tttggttcactcttgtcccagc

SEQ ID NO: 22656 - DNA, 22 bp, synthetic construct
  misc_feature 1..22: note = chemically synthesized
  source 1..22: mol_type = other DNA
ggttcactcttgtcccagccct

SEQ ID NO: 22657 - DNA, 22 bp, synthetic construct
  misc_feature 1..22: note = chemically synthesized
  source 1..22: mol_type = other DNA
gttcactcttgtcccagcccta

SEQ ID NO: 22658 - DNA, 22 bp, synthetic construct
  misc_feature 1..22: note = chemically synthesized
  source 1..22: mol_type = other DNA
actcttgtcccagccctagcaa

SEQ ID NO: 22659 - DNA, 22 bp, synthetic construct
  misc_feature 1..22: note = chemically synthesized
  source 1..22: mol_type = other DNA
ttgtcccagccctagcaagtat

SEQ ID NO: 22660 - DNA, 22 bp, synthetic construct
  misc_feature 1..22: note = chemically synthesized
  source 1..22: mol_type = other DNA
gtcccagccctagcaagtatat

SEQ ID NO: 22661 - DNA, 22 bp, synthetic construct
  misc_feature 1..22: note = chemically synthesized
  source 1..22: mol_type = other DNA
tcccagccctagcaagtatata

SEQ ID NO: 22662 - DNA, 22 bp, synthetic construct
  misc_feature 1..22: note = chemically synthesized
  source 1..22: mol_type = other DNA
gcaagtatatataaggtgaaaa

SEQ ID NO: 22663 - DNA, 22 bp, synthetic construct
  misc_feature 1..22: note = chemically synthesized
  source 1..22: mol_type = other DNA
aggctggagcctgggagaaccc

SEQ ID NO: 22664 - DNA, 22 bp, synthetic construct
  misc_feature 1..22: note = chemically synthesized
  source 1..22: mol_type = other DNA
gagcctgggagaaccctggaca

SEQ ID NO: 22665 - DNA, 22 bp, synthetic construct
  misc_feature 1..22: note = chemically synthesized
  source 1..22: mol_type = other DNA
ggagaaccctggacatttaagg

SEQ ID NO: 22666 - DNA, 22 bp, synthetic construct
  misc_feature 1..22: note = chemically synthesized
  source 1..22: mol_type = other DNA
gacatttaagggccatggagag

SEQ ID NO: 22667 - DNA, 22 bp, synthetic construct
  misc_feature 1..22: note = chemically synthesized
  source 1..22: mol_type = other DNA
aagggccatggagaggaacagg

SEQ ID NO: 22668 - DNA, 22 bp, synthetic construct
  misc_feature 1..22: note = chemically synthesized
  source 1..22: mol_type = other DNA
agggccatggagaggaacagga

SEQ ID NO: 22669 - DNA, 22 bp, synthetic construct
  misc_feature 1..22: note = chemically synthesized
  source 1..22: mol_type = other DNA
atcaattcaagtgctggatgga

SEQ ID NO: 22670 - DNA, 22 bp, synthetic construct
  misc_feature 1..22: note = chemically synthesized
  source 1..22: mol_type = other DNA
aagtgctggatggataacagga

SEQ ID NO: 22671 - DNA, 22 bp, synthetic construct
  misc_feature 1..22: note = chemically synthesized
  source 1..22: mol_type = other DNA
gatggataacaggagttagagc

SEQ ID NO: 22672 - DNA, 22 bp, synthetic construct
  misc_feature 1..22: note = chemically synthesized
  source 1..22: mol_type = other DNA
gagcaaagcggggaaccagaat

SEQ ID NO: 22673 - DNA, 22 bp, synthetic construct
  misc_feature 1..22: note = chemically synthesized
  source 1..22: mol_type = other DNA
ttataaaaagagtttcctaaaa

SEQ ID NO: 22674 - DNA, 22 bp, synthetic construct
  misc_feature 1..22: note = chemically synthesized
  source 1..22: mol_type = other DNA
taaaaagagtttcctaaaaagg

SEQ ID NO: 22675 - DNA, 22 bp, synthetic construct
  misc_feature 1..22: note = chemically synthesized
  source 1..22: mol_type = other DNA
cctaaaaagggagagatcaaca

SEQ ID NO: 22676 - DNA, 22 bp, synthetic construct
  misc_feature 1..22: note = chemically synthesized
  source 1..22: mol_type = other DNA
ctaaaaagggagagatcaacaa

SEQ ID NO: 22677 - DNA, 22 bp, synthetic construct
  misc_feature 1..22: note = chemically synthesized
  source 1..22: mol_type = other DNA
aaaagggagagatcaacaatta

SEQ ID NO: 22678 - DNA, 22 bp, synthetic construct
  misc_feature 1..22: note = chemically synthesized
  source 1..22: mol_type = other DNA
gaaattatttagagcagccagt

SEQ ID NO: 22679 - DNA, 22 bp, synthetic construct
  misc_feature 1..22: note = chemically synthesized
  source 1..22: mol_type = other DNA
tttagagcagccagtaaataca

SEQ ID NO: 22680 - DNA, 22 bp, synthetic construct
  misc_feature 1..22: note = chemically synthesized
  source 1..22: mol_type = other DNA
agagcagccagtaaatacataa

SEQ ID NO: 22681 - DNA, 22 bp, synthetic construct
  misc_feature 1..22: note = chemically synthesized
  source 1..22: mol_type = other DNA
gagcagccagtaaatacataaa

SEQ ID NO: 22682 - DNA, 22 bp, synthetic construct
  misc_feature 1..22: note = chemically synthesized
  source 1..22: mol_type = other DNA
aaaattattctttaggtcattc

SEQ ID NO: 22683 - DNA, 22 bp, synthetic construct
  misc_feature 1..22: note = chemically synthesized
  source 1..22: mol_type = other DNA
ttctttaggtcattcctgattg

SEQ ID NO: 22684 - DNA, 22 bp, synthetic construct
  misc_feature 1..22: note = chemically synthesized
  source 1..22: mol_type = other DNA
tttaggtcattcctgattgtga

SEQ ID NO: 22685 - DNA, 22 bp, synthetic construct
  misc_feature 1..22: note = chemically synthesized
  source 1..22: mol_type = other DNA
taggtcattcctgattgtgaca

SEQ ID NO: 22686 - DNA, 22 bp, synthetic construct
  misc_feature 1..22: note = chemically synthesized
  source 1..22: mol_type = other DNA
aggtcattcctgattgtgacaa

SEQ ID NO: 22687 - DNA, 22 bp, synthetic construct
  misc_feature 1..22: note = chemically synthesized
  source 1..22: mol_type = other DNA
ggtcattcctgattgtgacaat

SEQ ID NO: 22688 - DNA, 22 bp, synthetic construct
  misc_feature 1..22: note = chemically synthesized
  source 1..22: mol_type = other DNA
ctgattgtgacaatagtcattt

SEQ ID NO: 22689 - DNA, 22 bp, synthetic construct
  misc_feature 1..22: note = chemically synthesized
  source 1..22: mol_type = other DNA
attgtgacaatagtcatttcat

SEQ ID NO: 22690 - DNA, 22 bp, synthetic construct
  misc_feature 1..22: note = chemically synthesized
  source 1..22: mol_type = other DNA
tgacaatagtcatttcattata

SEQ ID NO: 22691 - DNA, 22 bp, synthetic construct
  misc_feature 1..22: note = chemically synthesized
  source 1..22: mol_type = other DNA
cattatataaatgtgattaagg

SEQ ID NO: 22692 - DNA, 22 bp, synthetic construct
  misc_feature 1..22: note = chemically synthesized
  source 1..22: mol_type = other DNA
attatataaatgtgattaagga

SEQ ID NO: 22693 - DNA, 22 bp, synthetic construct
  misc_feature 1..22: note = chemically synthesized
  source 1..22: mol_type = other DNA
tataaatgtgattaaggaagga

SEQ ID NO: 22694 - DNA, 22 bp, synthetic construct
  misc_feature 1..22: note = chemically synthesized
  source 1..22: mol_type = other DNA
aggaaggaaaagagctacacag

SEQ ID NO: 22695 - DNA, 22 bp, synthetic construct
  misc_feature 1..22: note = chemically synthesized
  source 1..22: mol_type = other DNA
cacagaagttattaaagagcta

SEQ ID NO: 22696 - DNA, 22 bp, synthetic construct
  misc_feature 1..22: note = chemically synthesized
  source 1..22: mol_type = other DNA
ttaaagagctaaagagaattga

SEQ ID NO: 22697 - DNA, 22 bp, synthetic construct
  misc_feature 1..22: note = chemically synthesized
  source 1..22: mol_type = other DNA
aagagctaaagagaattgagaa

SEQ ID NO: 22698 - DNA, 22 bp, synthetic construct
  misc_feature 1..22: note = chemically synthesized
  source 1..22: mol_type = other DNA
aagagaattgagaaatttaaaa

SEQ ID NO: 22699 - DNA, 22 bp, synthetic construct
  misc_feature 1..22: note = chemically synthesized
  source 1..22: mol_type = other DNA
agaaatttaaaacagaagaaag

SEQ ID NO: 22700 - DNA, 22 bp, synthetic construct
  misc_feature 1..22: note = chemically synthesized
  source 1..22: mol_type = other DNA
aaaacagaagaaagtagggcca

SEQ ID NO: 22701 - DNA, 22 bp, synthetic construct
  misc_feature 1..22: note = chemically synthesized
  source 1..22: mol_type = other DNA
aaacagaagaaagtagggccaa

SEQ ID NO: 22702 - DNA, 22 bp, synthetic construct
  misc_feature 1..22: note = chemically synthesized
  source 1..22: mol_type = other DNA
tctcactgatcctgccaacacc

SEQ ID NO: 22703 - DNA, 22 bp, synthetic construct
  misc_feature 1..22: note = chemically synthesized
  source 1..22: mol_type = other DNA
actgatcctgccaacacctgtg

SEQ ID NO: 22704 - DNA, 22 bp, synthetic construct
  misc_feature 1..22: note = chemically synthesized
  source 1..22: mol_type = other DNA
atcctgccaacacctgtgagat

SEQ ID NO: 22705 - DNA, 22 bp, synthetic construct
  misc_feature 1..22: note = chemically synthesized
  source 1..22: mol_type = other DNA
ccaacacctgtgagatagatat

SEQ ID NO: 22706 - DNA, 22 bp, synthetic construct
  misc_feature 1..22: note = chemically synthesized
  source 1..22: mol_type = other DNA
tgagatagatattcttattata

SEQ ID NO: 22707 - DNA, 22 bp, synthetic construct
  misc_feature 1..22: note = chemically synthesized
  source 1..22: mol_type = other DNA
ttattatactactgttaaacct

SEQ ID NO: 22708 - DNA, 22 bp, synthetic construct
  misc_feature 1..22: note = chemically synthesized
  source 1..22: mol_type = other DNA
attatactactgttaaacctaa

SEQ ID NO: 22709 - DNA, 22 bp, synthetic construct
  misc_feature 1..22: note = chemically synthesized
  source 1..22: mol_type = other DNA
ttatactactgttaaacctaat

SEQ ID NO: 22710 - DNA, 22 bp, synthetic construct
  misc_feature 1..22: note = chemically synthesized
  source 1..22: mol_type = other DNA
tactactgttaaacctaattta

SEQ ID NO: 22711 - DNA, 22 bp, synthetic construct
  misc_feature 1..22: note = chemically synthesized
  source 1..22: mol_type = other DNA
ctgttaaacctaatttacattt

SEQ ID NO: 22712 - DNA, 22 bp, synthetic construct
  misc_feature 1..22: note = chemically synthesized
  source 1..22: mol_type = other DNA
ttaaacctaatttacatttgac

SEQ ID NO: 22713 - DNA, 22 bp, synthetic construct
  misc_feature 1..22: note = chemically synthesized
  source 1..22: mol_type = other DNA
aacctaatttacatttgacaaa

SEQ ID NO: 22714 - DNA, 22 bp, synthetic construct
  misc_feature 1..22: note = chemically synthesized
  source 1..22: mol_type = other DNA
atttacatttgacaaagttaag

SEQ ID NO: 22715 - DNA, 22 bp, synthetic construct
  misc_feature 1..22: note = chemically synthesized
  source 1..22: mol_type = other DNA
acatttgacaaagttaaggttc

SEQ ID NO: 22716 - DNA, 22 bp, synthetic construct
  misc_feature 1..22: note = chemically synthesized
  source 1..22: mol_type = other DNA
catttgacaaagttaaggttca

SEQ ID NO: 22717 - DNA, 22 bp, synthetic construct
  misc_feature 1..22: note = chemically synthesized
  source 1..22: mol_type = other DNA
gacaaagttaaggttcagagct

SEQ ID NO: 22718 - DNA, 22 bp, synthetic construct
  misc_feature 1..22: note = chemically synthesized
  source 1..22: mol_type = other DNA
acaaagttaaggttcagagctt

SEQ ID NO: 22719 - DNA, 22 bp, synthetic construct
  misc_feature 1..22: note = chemically synthesized
  source 1..22: mol_type = other DNA
aggttcagagcttgtgtgactt

SEQ ID NO: 22720 - DNA, 22 bp, synthetic construct
  misc_feature 1..22: note = chemically synthesized
  source 1..22: mol_type = other DNA
agagcttgtgtgacttgtccaa

SEQ ID NO: 22721 - DNA, 22 bp, synthetic construct
  misc_feature 1..22: note = chemically synthesized
  source 1..22: mol_type = other DNA
gtgtgacttgtccaaggtcaca

SEQ ID NO: 22722 - DNA, 22 bp, synthetic construct
  misc_feature 1..22: note = chemically synthesized
  source 1..22: mol_type = other DNA
tgtgacttgtccaaggtcacag

SEQ ID NO: 22723 - DNA, 22 bp, synthetic construct
  misc_feature 1..22: note = chemically synthesized
  source 1..22: mol_type = other DNA
gtccaaggtcacaggtctagag

SEQ ID NO: 22724 - DNA, 22 bp, synthetic construct
  misc_feature 1..22: note = chemically synthesized
  source 1..22: mol_type = other DNA
tccaaggtcacaggtctagagg

SEQ ID NO: 22725 - DNA, 22 bp, synthetic construct
  misc_feature 1..22: note = chemically synthesized
  source 1..22: mol_type = other DNA
gaggaggcagatacttgattca

SEQ ID NO: 22726 - DNA, 22 bp, synthetic construct
  misc_feature 1..22: note = chemically synthesized
  source 1..22: mol_type = other DNA
gattcaaacctatttctgtctg

SEQ ID NO: 22727 - DNA, 22 bp, synthetic construct
  misc_feature 1..22: note = chemically synthesized
  source 1..22: mol_type = other DNA
attcaaacctatttctgtctga

SEQ ID NO: 22728 - DNA, 22 bp, synthetic construct
  misc_feature 1..22: note = chemically synthesized
  source 1..22: mol_type = other DNA
aaacctatttctgtctgatctg

SEQ ID NO: 22729 - DNA, 22 bp, synthetic construct
  misc_feature 1..22: note = chemically synthesized
  source 1..22: mol_type = other DNA
tttctgtctgatctgattctaa

SEQ ID NO: 22730 - DNA, 22 bp, synthetic construct
  misc_feature 1..22: note = chemically synthesized
  source 1..22: mol_type = other DNA
ctgtctgatctgattctaaagt

SEQ ID NO: 22731 - DNA, 22 bp, synthetic construct
  misc_feature 1..22: note = chemically synthesized
  source 1..22: mol_type = other DNA
tgtctgatctgattctaaagtc

SEQ ID NO: 22732 - DNA, 22 bp, synthetic construct
  misc_feature 1..22: note = chemically synthesized
  source 1..22: mol_type = other DNA
tctgatctgattctaaagtctg

SEQ ID NO: 22733 - DNA, 22 bp, synthetic construct
  misc_feature 1..22: note = chemically synthesized
  source 1..22: mol_type = other DNA
atctgattctaaagtctgtttt

SEQ ID NO: 22734 - DNA, 22 bp, synthetic construct
  misc_feature 1..22: note = chemically synthesized
  source 1..22: mol_type = other DNA
attctaaagtctgttttttcac

SEQ ID NO: 22735 - DNA, 22 bp, synthetic construct
  misc_feature 1..22: note = chemically synthesized
  source 1..22: mol_type = other DNA
taaagtctgttttttcactcaa

SEQ ID NO: 22736 - DNA, 22 bp, synthetic construct
  misc_feature 1..22: note = chemically synthesized
  source 1..22: mol_type = other DNA
aagtctgttttttcactcaacc

SEQ ID NO: 22737 - DNA, 22 bp, synthetic construct
  misc_feature 1..22: note = chemically synthesized
  source 1..22: mol_type = other DNA
ttttttcactcaaccacactgt

SEQ ID NO: 22738 - DNA, 22 bp, synthetic construct
  misc_feature 1..22: note = chemically synthesized
  source 1..22: mol_type = other DNA
tttcactcaaccacactgtaca

SEQ ID NO: 22739 - DNA, 22 bp, synthetic construct
  misc_feature 1..22: note = chemically synthesized
  source 1..22: mol_type = other DNA
ttcactcaaccacactgtacag

SEQ ID NO: 22740 - DNA, 22 bp, synthetic construct
  misc_feature 1..22: note = chemically synthesized
  source 1..22: mol_type = other DNA
tcactcaaccacactgtacagt

SEQ ID NO: 22741 - DNA, 22 bp, synthetic construct
  misc_feature 1..22: note = chemically synthesized
  source 1..22: mol_type = other DNA
cactcaaccacactgtacagtc

SEQ ID NO: 22742 - DNA, 22 bp, synthetic construct
  misc_feature 1..22: note = chemically synthesized
  source 1..22: mol_type = other DNA
actcaaccacactgtacagtca

SEQ ID NO: 22743 - DNA, 22 bp, synthetic construct
  misc_feature 1..22: note = chemically synthesized
  source 1..22: mol_type = other DNA
aaccacactgtacagtcagctc

SEQ ID NO: 22744 - DNA, 22 bp, synthetic construct
  misc_feature 1..22: note = chemically synthesized
  source 1..22: mol_type = other DNA
tacagtcagctctccttgtgag

SEQ ID NO: 22745 - DNA, 22 bp, synthetic construct
  misc_feature 1..22: note = chemically synthesized
  source 1..22: mol_type = other DNA
tccttgtgagttccacagccac

SEQ ID NO: 22746 - DNA, 22 bp, synthetic construct
  misc_feature 1..22: note = chemically synthesized
  source 1..22: mol_type = other DNA
cttgtgagttccacagccacag

SEQ ID NO: 22747 - DNA, 22 bp, synthetic construct
  misc_feature 1..22: note = chemically synthesized
  source 1..22: mol_type = other DNA
gtgagttccacagccacagatt

SEQ ID NO: 22748 - DNA, 22 bp, synthetic construct
  misc_feature 1..22: note = chemically synthesized
  source 1..22: mol_type = other DNA
tgagttccacagccacagattc

SEQ ID NO: 22749 - DNA, 22 bp, synthetic construct
  misc_feature 1..22: note = chemically synthesized
  source 1..22: mol_type = other DNA
cacagccacagattcaattaac

SEQ ID NO: 22750 - DNA, 22 bp, synthetic construct
  misc_feature 1..22: note = chemically synthesized
  source 1..22: mol_type = other DNA
aattaactgcagatcaaaaata

SEQ ID NO: 22751 - DNA, 22 bp, synthetic construct
  misc_feature 1..22: note = chemically synthesized
  source 1..22: mol_type = other DNA
actgcagatcaaaaatattcaa

SEQ ID NO: 22752 - DNA, 22 bp, synthetic construct
  misc_feature 1..22: note = chemically synthesized
  source 1..22: mol_type = other DNA
cagatcaaaaatattcaagaaa

SEQ ID NO: 22753 - DNA, 22 bp, synthetic construct
  misc_feature 1..22: note = chemically synthesized
  source 1..22: mol_type = other DNA
aagaaaaaaatggatggttgca

SEQ ID NO: 22754 - DNA, 22 bp, synthetic construct
  misc_feature 1..22: note = chemically synthesized
  source 1..22: mol_type = other DNA
catctctactgaacatgtacag

SEQ ID NO: 22755 - DNA, 22 bp, synthetic construct
  misc_feature 1..22: note = chemically synthesized
  source 1..22: mol_type = other DNA
tactgaacatgtacagactctt

SEQ ID NO: 22756 - DNA, 22 bp, synthetic construct
  misc_feature 1..22: note = chemically synthesized
  source 1..22: mol_type = other DNA
ctgaacatgtacagactctttt

SEQ ID NO: 22757 - DNA, 22 bp, synthetic construct
  misc_feature 1..22: note = chemically synthesized
  source 1..22: mol_type = other DNA
aacatgtacagactcttttatc

SEQ ID NO: 22758 - DNA, 22 bp, synthetic construct
  misc_feature 1..22: note = chemically synthesized
  source 1..22: mol_type = other DNA
ttttatctttcattattcccta

SEQ ID NO: 22759 - DNA, 22 bp, synthetic construct
  misc_feature 1..22: note = chemically synthesized
  source 1..22: mol_type = other DNA
ttatctttcattattccctaaa

SEQ ID NO: 22760 - DNA, 22 bp, synthetic construct
  misc_feature 1..22: note = chemically synthesized
  source 1..22: mol_type = other DNA
tatctttcattattccctaaac

SEQ ID NO: 22761 - DNA, 22 bp, synthetic construct
  misc_feature 1..22: note = chemically synthesized
  source 1..22: mol_type = other DNA
atctttcattattccctaaaca

SEQ ID NO: 22762 - DNA, 22 bp, synthetic construct
  misc_feature 1..22: note = chemically synthesized
  source 1..22: mol_type = other DNA
tctttcattattccctaaacaa

SEQ ID NO: 22763 - DNA, 22 bp, synthetic construct
  misc_feature 1..22: note = chemically synthesized
  source 1..22: mol_type = other DNA
tcattattccctaaacaataca

SEQ ID NO: 22764 - DNA, 22 bp, synthetic construct
  misc_feature 1..22: note = chemically synthesized
  source 1..22: mol_type = other DNA
cattattccctaaacaatacag

SEQ ID NO: 22765 - DNA, 22 bp, synthetic construct
  misc_feature 1..22: note = chemically synthesized
  source 1..22: mol_type = other DNA
attattccctaaacaatacagc

SEQ ID NO: 22766 - DNA, 22 bp, synthetic construct
  misc_feature 1..22: note = chemically synthesized
  source 1..22: mol_type = other DNA
ttccctaaacaatacagcataa

SEQ ID NO: 22767 - DNA, 22 bp, synthetic construct
  misc_feature 1..22: note = chemically synthesized
  source 1..22: mol_type = other DNA
cctaaacaatacagcataacaa

SEQ ID NO: 22768 - DNA, 22 bp, synthetic construct
  misc_feature 1..22: note = chemically synthesized
  source 1..22: mol_type = other DNA
aacaatacagcataacaactat

SEQ ID NO: 22769 - DNA, 22 bp, synthetic construct
  misc_feature 1..22: note = chemically synthesized
  source 1..22: mol_type = other DNA
tttacatagcatttacattgta

SEQ ID NO: 22770 - DNA, 22 bp, synthetic construct
  misc_feature 1..22: note = chemically synthesized
  source 1..22: mol_type = other DNA
acatagcatttacattgtatta

SEQ ID NO: 22771 - DNA, 22 bp, synthetic construct
  misc_feature 1..22: note = chemically synthesized
  source 1..22: mol_type = other DNA
catagcatttacattgtattag

SEQ ID NO: 22772 - DNA, 22 bp, synthetic construct
  misc_feature 1..22: note = chemically synthesized
  source 1..22: mol_type = other DNA
acattgtattagctattaagag

SEQ ID NO: 22773 - DNA, 22 bp, synthetic construct
  misc_feature 1..22: note = chemically synthesized
  source 1..22: mol_type = other DNA
cattgtattagctattaagaga

SEQ ID NO: 22774 - DNA, 22 bp, synthetic construct
  misc_feature 1..22: note = chemically synthesized
  source 1..22: mol_type = other DNA
tattagctattaagagaaacct

SEQ ID NO: 22775 - DNA, 22 bp, synthetic construct
  misc_feature 1..22: note = chemically synthesized
  source 1..22: mol_type = other DNA
gctattaagagaaacctagaga

SEQ ID NO: 22776 - DNA, 22 bp, synthetic construct
  misc_feature 1..22: note = chemically synthesized
  source 1..22: mol_type = other DNA
ttaagagaaacctagagatgat

SEQ ID NO: 22777 - DNA, 22 bp, synthetic construct
  misc_feature 1..22: note = chemically synthesized
  source 1..22: mol_type = other DNA
agagaaacctagagatgattta

SEQ ID NO: 22778 - DNA, 22 bp, synthetic construct
  misc_feature 1..22: note = chemically synthesized
  source 1..22: mol_type = other DNA
gagatgatttaaagtacaaagg

SEQ ID NO: 22779 - DNA, 22 bp, synthetic construct
  misc_feature 1..22: note = chemically synthesized
  source 1..22: mol_type = other DNA
aaagtacaaaggaggatgtgtt

SEQ ID NO: 22780 - DNA, 22 bp, synthetic construct
  misc_feature 1..22: note = chemically synthesized
  source 1..22: mol_type = other DNA
aagtacaaaggaggatgtgttt

SEQ ID NO: 22781 - DNA, 22 bp, synthetic construct
  misc_feature 1..22: note = chemically synthesized
  source 1..22: mol_type = other DNA
aggttatatgcaaatagtaagc

SEQ ID NO: 22782 - DNA, 22 bp, synthetic construct
  misc_feature 1..22: note = chemically synthesized
  source 1..22: mol_type = other DNA
ggttatatgcaaatagtaagcc

SEQ ID NO: 22783 - DNA, 22 bp, synthetic construct
  misc_feature 1..22: note = chemically synthesized
  source 1..22: mol_type = other DNA
tatgcaaatagtaagccatttt

SEQ ID NO: 22784 - DNA, 22 bp, synthetic construct
  misc_feature 1..22: note = chemically synthesized
  source 1..22: mol_type = other DNA
ttatatcggagacttgagcatc

SEQ ID NO: 22785 - DNA, 22 bp, synthetic construct
  misc_feature 1..22: note = chemically synthesized
  source 1..22: mol_type = other DNA
tatatcggagacttgagcatcc

SEQ ID NO: 22786 - DNA, 22 bp, synthetic construct
  misc_feature 1..22: note = chemically synthesized
  source 1..22: mol_type = other DNA
atatcggagacttgagcatcca

SEQ ID NO: 22787 - DNA, 22 bp, synthetic construct
  misc_feature 1..22: note = chemically synthesized
  source 1..22: mol_type = other DNA
tatcggagacttgagcatccac

SEQ ID NO: 22788 - DNA, 22 bp, synthetic construct
  misc_feature 1..22: note = chemically synthesized
  source 1..22: mol_type = other DNA
gagcatccacagatcttgatat

SEQ ID NO: 22789 - DNA, 22 bp, synthetic construct
  misc_feature 1..22: note = chemically synthesized
  source 1..22: mol_type = other DNA
agcatccacagatcttgatatt

SEQ ID NO: 22790 - DNA, 22 bp, synthetic construct
  misc_feature 1..22: note = chemically synthesized
  source 1..22: mol_type = other DNA
gatatttgcagggggtcttgcc

SEQ ID NO: 22791 - DNA, 22 bp, synthetic construct
  misc_feature 1..22: note = chemically synthesized
  source 1..22: mol_type = other DNA
atatttgcagggggtcttgcca

SEQ ID NO: 22792 - DNA, 22 bp, synthetic construct
  misc_feature 1..22: note = chemically synthesized
  source 1..22: mol_type = other DNA
gcagggggtcttgccaccaatt

SEQ ID NO: 22793 - DNA, 22 bp, synthetic construct
  misc_feature 1..22: note = chemically synthesized
  source 1..22: mol_type = other DNA
cagggggtcttgccaccaattt

SEQ ID NO: 22794 - DNA, 22 bp, synthetic construct
  misc_feature 1..22: note = chemically synthesized
  source 1..22: mol_type = other DNA
gccaccaattttccatggatac

SEQ ID NO: 22795 - DNA, 22 bp, synthetic construct
  misc_feature 1..22: note = chemically synthesized
  source 1..22: mol_type = other DNA
ccaccaattttccatggatact

SEQ ID NO: 22796 - DNA, 22 bp, synthetic construct
  misc_feature 1..22: note = chemically synthesized
  source 1..22: mol_type = other DNA
tccatggatactgaggaacgac

SEQ ID NO: 22797 - DNA, 22 bp, synthetic construct
  misc_feature 1..22: note = chemically synthesized
  source 1..22: mol_type = other DNA
ccatggatactgaggaacgact

SEQ ID NO: 22798 - DNA, 22 bp, synthetic construct
  misc_feature 1..22: note = chemically synthesized
  source 1..22: mol_type = other DNA
catggatactgaggaacgactg

SEQ ID NO: 22799 - DNA, 22 bp, synthetic construct
  misc_feature 1..22: note = chemically synthesized
  source 1..22: mol_type = other DNA
aggaacgactgtaaatggatgc

SEQ ID NO: 22800 - DNA, 22 bp, synthetic construct
  misc_feature 1..22: note = chemically synthesized
  source 1..22: mol_type = other DNA
taaatggatgcaggcatggatg

SEQ ID NO: 22801 - DNA, 22 bp, synthetic construct
  misc_feature 1..22: note = chemically synthesized
  source 1..22: mol_type = other DNA
tttaggagtgtccagggccaag

SEQ ID NO: 22802 - DNA, 22 bp, synthetic construct
  misc_feature 1..22: note = chemically synthesized
  source 1..22: mol_type = other DNA
aggagtgtccagggccaagtaa

SEQ ID NO: 22803 - DNA, 22 bp, synthetic construct
  misc_feature 1..22: note = chemically synthesized
  source 1..22: mol_type = other DNA
ggagtgtccagggccaagtaaa

SEQ ID NO: 22804 - DNA, 22 bp, synthetic construct
  misc_feature 1..22: note = chemically synthesized
  source 1..22: mol_type = other DNA
ctgagcagagaggtgggtggag

SEQ ID NO: 22805 - DNA, 22 bp, synthetic construct
  misc_feature 1..22: note = chemically synthesized
  source 1..22: mol_type = other DNA
agcagagaggtgggtggaggct

SEQ ID NO: 22806 - DNA, 22 bp, synthetic construct
  misc_feature 1..22: note = chemically synthesized
  source 1..22: mol_type = other DNA
tgaggcatcaatatgtggtggc

SEQ ID NO: 22807 - DNA, 22 bp, synthetic construct
  misc_feature 1..22: note = chemically synthesized
  source 1..22: mol_type = other DNA
cattttggtgatttttttcctt

SEQ ID NO: 22808 - DNA, 22 bp, synthetic construct
  misc_feature 1..22: note = chemically synthesized
  source 1..22: mol_type = other DNA
tggtgatttttttccttcacag

SEQ ID NO: 22809 - DNA, 22 bp, synthetic construct
  misc_feature 1..22: note = chemically synthesized
  source 1..22: mol_type = other DNA
ggtgatttttttccttcacagt

SEQ ID NO: 22810 - DNA, 22 bp, synthetic construct
  misc_feature 1..22: note = chemically synthesized
  source 1..22: mol_type = other DNA
gtgatttttttccttcacagtc

SEQ ID NO: 22811 - DNA, 22 bp, synthetic construct
  misc_feature 1..22: note = chemically synthesized
  source 1..22: mol_type = other DNA
ttttccttcacagtcctcggct

SEQ ID NO: 22812 - DNA, 22 bp, synthetic construct
  misc_feature 1..22: note = chemically synthesized
  source 1..22: mol_type = other DNA
tttccttcacagtcctcggctg

SEQ ID NO: 22813 - DNA, 22 bp, synthetic construct
  misc_feature 1..22: note = chemically synthesized
  source 1..22: mol_type = other DNA
ttccttcacagtcctcggctgt

SEQ ID NO: 22814 - DNA, 22 bp, synthetic construct
  misc_feature 1..22: note = chemically synthesized
  source 1..22: mol_type = other DNA
tccttcacagtcctcggctgtc

SEQ ID NO: 22815 - DNA, 22 bp, synthetic construct
  misc_feature 1..22: note = chemically synthesized
  source 1..22: mol_type = other DNA
ccttcacagtcctcggctgtct

SEQ ID NO: 22816 - DNA, 22 bp, synthetic construct
  misc_feature 1..22: note = chemically synthesized
  source 1..22: mol_type = other DNA
cttcacagtcctcggctgtctg

SEQ ID NO: 22817 - DNA, 22 bp, synthetic construct
  misc_feature 1..22: note = chemically synthesized
  source 1..22: mol_type = other DNA
cacagtcctcggctgtctggga

SEQ ID NO: 22818 - DNA, 22 bp, synthetic construct
  misc_feature 1..22: note = chemically synthesized
  source 1..22: mol_type = other DNA
acagtcctcggctgtctgggaa

SEQ ID NO: 22819 - DNA, 22 bp, synthetic construct
  misc_feature 1..22: note = chemically synthesized
  source 1..22: mol_type = other DNA
ggctgtctgggaagagaaggat

SEQ ID NO: 22820 - DNA, 22 bp, synthetic construct
  misc_feature 1..22: note = chemically synthesized
  source 1..22: mol_type = other DNA
tctgggaagagaaggatgaagg

SEQ ID NO: 22821 - DNA, 22 bp, synthetic construct
  misc_feature 1..22: note = chemically synthesized
  source 1..22: mol_type = other DNA
ggaagagaaggatgaaggcaga

SEQ ID NO: 22822 - DNA, 22 bp, synthetic construct
  misc_feature 1..22: note = chemically synthesized
  source 1..22: mol_type = other DNA
ctccaatttaggggctaggatt

SEQ ID NO: 22823 - DNA, 22 bp, synthetic construct
  misc_feature 1..22: note = chemically synthesized
  source 1..22: mol_type = other DNA
caatttaggggctaggattgca

SEQ ID NO: 22824 - DNA, 22 bp, synthetic construct
  misc_feature 1..22: note = chemically synthesized
  source 1..22: mol_type = other DNA
aggggctaggattgcagggtgg

SEQ ID NO: 22825 - DNA, 22 bp, synthetic construct
  misc_feature 1..22: note = chemically synthesized
  source 1..22: mol_type = other DNA
ggggctaggattgcagggtggg

SEQ ID NO: 22826 - DNA, 22 bp, synthetic construct
  misc_feature 1..22: note = chemically synthesized
  source 1..22: mol_type = other DNA
ggattgcagggtgggcacagca

SEQ ID NO: 22827 - DNA, 22 bp, synthetic construct
  misc_feature 1..22: note = chemically synthesized
  source 1..22: mol_type = other DNA
cagggtgggcacagcattgcaa

SEQ ID NO: 22828 - DNA, 22 bp, synthetic construct
  misc_feature 1..22: note = chemically synthesized
  source 1..22: mol_type = other DNA
caaacgagtgaaggaaattgag

SEQ ID NO: 22829 - DNA, 22 bp, synthetic construct
  misc_feature 1..22: note = chemically synthesized
  source 1..22: mol_type = other DNA
agaaatatggccaatgaagagt

SEQ ID NO: 22830 - DNA, 22 bp, synthetic construct
  misc_feature 1..22: note = chemically synthesized
  source 1..22: mol_type = other DNA
aagagaggcctggcatggtggc

SEQ ID NO: 22831 - DNA, 22 bp, synthetic construct
  misc_feature 1..22: note = chemically synthesized
  source 1..22: mol_type = other DNA
gcatggtggctcacacctataa

SEQ ID NO: 22832 - DNA, 22 bp, synthetic construct
  misc_feature 1..22: note = chemically synthesized
  source 1..22: mol_type = other DNA
acacctataatcccagcacttt

SEQ ID NO: 22833 - DNA, 22 bp, synthetic construct
  misc_feature 1..22: note = chemically synthesized
  source 1..22: mol_type = other DNA
taatcccagcactttcagaggc

SEQ ID NO: 22834 - DNA, 22 bp, synthetic construct
  misc_feature 1..22: note = chemically synthesized
  source 1..22: mol_type = other DNA
tcagaggcccaggcaggcagat

SEQ ID NO: 22835 - DNA, 22 bp, synthetic construct
  misc_feature 1..22: note = chemically synthesized
  source 1..22: mol_type = other DNA
cagaggcccaggcaggcagatc

SEQ ID NO: 22836 - DNA, 22 bp, synthetic construct
  misc_feature 1..22: note = chemically synthesized
  source 1..22: mol_type = other DNA
agaggcccaggcaggcagatca

SEQ ID NO: 22837 - DNA, 22 bp, synthetic construct
  misc_feature 1..22: note = chemically synthesized
  source 1..22: mol_type = other DNA
gaggtcaggagttcgacaccag

SEQ ID NO: 22838 - DNA, 22 bp, synthetic construct
  misc_feature 1..22: note = chemically synthesized
  source 1..22: mol_type = other DNA
aggtcaggagttcgacaccagc

SEQ ID NO: 22839 - DNA, 22 bp, synthetic construct
  misc_feature 1..22: note = chemically synthesized
  source 1..22: mol_type = other DNA
gacaccagcctggccaacaagg

SEQ ID NO: 22840 - DNA, 22 bp, synthetic construct
  misc_feature 1..22: note = chemically synthesized
  source 1..22: mol_type = other DNA
gccaacaaggtgaaatggtgaa

SEQ ID NO: 22841 - DNA, 22 bp, synthetic construct
  misc_feature 1..22: note = chemically synthesized
  source 1..22: mol_type = other DNA
tactaaaaatacaaaaattagc

SEQ ID NO: 22842 - DNA, 22 bp, synthetic construct
  misc_feature 1..22: note = chemically synthesized
  source 1..22: mol_type = other DNA
actaaaaatacaaaaattagct

SEQ ID NO: 22843 - DNA, 22 bp, synthetic construct
  misc_feature 1..22: note = chemically synthesized
  source 1..22: mol_type = other DNA
ctaaaaatacaaaaattagctg

SEQ ID NO: 22844 - DNA, 22 bp, synthetic construct
  misc_feature 1..22: note = chemically synthesized
  source 1..22: mol_type = other DNA
aaaatacaaaaattagctgggc

SEQ ID NO: 22845 - DNA, 22 bp, synthetic construct
  misc_feature 1..22: note = chemically synthesized
  source 1..22: mol_type = other DNA
gctgggcatggtggcgggtgcc

SEQ ID NO: 22846 - DNA, 22 bp, synthetic construct
  misc_feature 1..22: note = chemically synthesized
  source 1..22: mol_type = other DNA
ggcatggtggcgggtgcctgta

SEQ ID NO: 22847 - DNA, 22 bp, synthetic construct
  misc_feature 1..22: note = chemically synthesized
  source 1..22: mol_type = other DNA
taatcccagctacttgggaggc

SEQ ID NO: 22848 - DNA, 22 bp, synthetic construct
  misc_feature 1..22: note = chemically synthesized
  source 1..22: mol_type = other DNA
cttgggaggctgaggcaggaga

SEQ ID NO: 22849 - DNA, 22 bp, synthetic construct
  misc_feature 1..22: note = chemically synthesized
  source 1..22: mol_type = other DNA
gggaggctgaggcaggagaata

SEQ ID NO: 22850 - DNA, 22 bp, synthetic construct
  misc_feature 1..22: note = chemically synthesized
  source 1..22: mol_type = other DNA
ggaggctgaggcaggagaatag

SEQ ID NO: 22851 - DNA, 22 bp, synthetic construct
  misc_feature 1..22: note = chemically synthesized
  source 1..22: mol_type = other DNA
aggcaggagaatagcttgaacc

SEQ ID NO: 22852 - DNA, 22 bp, synthetic construct
  misc_feature 1..22: note = chemically synthesized
  source 1..22: mol_type = other DNA
gaacctgggagatggaggttgc

SEQ ID NO: 22853 - DNA, 22 bp, synthetic construct
  misc_feature 1..22: note = chemically synthesized
  source 1..22: mol_type = other DNA
aacctgggagatggaggttgca

SEQ ID NO: 22854 - DNA, 22 bp, synthetic construct
  misc_feature 1..22: note = chemically synthesized
  source 1..22: mol_type = other DNA
ggagatggaggttgcagtgagc

SEQ ID NO: 22855 - DNA, 22 bp, synthetic construct
  misc_feature 1..22: note = chemically synthesized
  source 1..22: mol_type = other DNA
cagtgagctgagatcgcaccac

SEQ ID NO: 22856 - DNA, 22 bp, synthetic construct
  misc_feature 1..22: note = chemically synthesized
  source 1..22: mol_type = other DNA
agatcgcaccactgcactccag

SEQ ID NO: 22857 - DNA, 22 bp, synthetic construct
  misc_feature 1..22: note = chemically synthesized
  source 1..22: mol_type = other DNA
cactccagcctgggcgacagag

SEQ ID NO: 22858 - DNA, 22 bp, synthetic construct
  misc_feature 1..22: note = chemically synthesized
  source 1..22: mol_type = other DNA
cagcctgggcgacagagcaaga

SEQ ID NO: 22859 - DNA, 22 bp, synthetic construct
  misc_feature 1..22: note = chemically synthesized
  source 1..22: mol_type = other DNA
ggcgacagagcaagactctgtc

SEQ ID NO: 22860 - DNA, 22 bp, synthetic construct
  misc_feature 1..22: note = chemically synthesized
  source 1..22: mol_type = other DNA
tgtcaaaaaaaaaagagttgaa

SEQ ID NO: 22861 - DNA, 22 bp, synthetic construct
  misc_feature 1..22: note = chemically synthesized
  source 1..22: mol_type = other DNA
tcaaaaaaaaaagagttgaaga

SEQ ID NO: 22862 - DNA, 22 bp, synthetic construct
  misc_feature 1..22: note = chemically synthesized
  source 1..22: mol_type = other DNA
aagagaaaaagtctaggctaaa

SEQ ID NO: 22863 - DNA, 22 bp, synthetic construct
  misc_feature 1..22: note = chemically synthesized
  source 1..22: mol_type = other DNA
ggctaaattcaaagaaaaaaag

SEQ ID NO: 22864 - DNA, 22 bp, synthetic construct
  misc_feature 1..22: note = chemically synthesized
  source 1..22: mol_type = other DNA
aattcaaagaaaaaaagtgagc

SEQ ID NO: 22865 - DNA, 22 bp, synthetic construct
  misc_feature 1..22: note = chemically synthesized
  source 1..22: mol_type = other DNA
aaagaaaaaaagtgagcccaaa

SEQ ID NO: 22866 - DNA, 22 bp, synthetic construct
  misc_feature 1..22: note = chemically synthesized
  source 1..22: mol_type = other DNA
gcagagcaagggaaaagcaggg

SEQ ID NO: 22867 - DNA, 22 bp, synthetic construct
  misc_feature 1..22: note = chemically synthesized
  source 1..22: mol_type = other DNA
cagagcaagggaaaagcaggga

SEQ ID NO: 22868 - DNA, 22 bp, synthetic construct
  misc_feature 1..22: note = chemically synthesized
  source 1..22: mol_type = other DNA
gaacactccataaagtgaacag

SEQ ID NO: 22869 - DNA, 22 bp, synthetic construct
  misc_feature 1..22: note = chemically synthesized
  source 1..22: mol_type = other DNA
cataaagtgaacagctgcaatg

SEQ ID NO: 22870 - DNA, 22 bp, synthetic construct
  misc_feature 1..22: note = chemically synthesized
  source 1..22: mol_type = other DNA
caatgaaaataagggaagaaag

SEQ ID NO: 22871 - DNA, 22 bp, synthetic construct
  misc_feature 1..22: note = chemically synthesized
  source 1..22: mol_type = other DNA
agttcatctccgtttctttcct

SEQ ID NO: 22872 - DNA, 22 bp, synthetic construct
  misc_feature 1..22: note = chemically synthesized
  source 1..22: mol_type = other DNA
gttcatctccgtttctttcctt

SEQ ID NO: 22873 - DNA, 22 bp, synthetic construct
  misc_feature 1..22: note = chemically synthesized
  source 1..22: mol_type = other DNA
atctccgtttctttcctttcct

SEQ ID NO: 22874 - DNA, 22 bp, synthetic construct
  misc_feature 1..22: note = chemically synthesized
  source 1..22: mol_type = other DNA
cgtttctttcctttccttttta

SEQ ID NO: 22875 - DNA, 22 bp, synthetic construct
  misc_feature 1..22: note = chemically synthesized
  source 1..22: mol_type = other DNA
ctttcctttcctttttactttc

SEQ ID NO: 22876 - DNA, 22 bp, synthetic construct
  misc_feature 1..22: note = chemically synthesized
  source 1..22: mol_type = other DNA
tttcctttcctttttactttcc

SEQ ID NO: 22877 - DNA, 22 bp, synthetic construct
  misc_feature 1..22: note = chemically synthesized
  source 1..22: mol_type = other DNA
tcctttcctttttactttcctt

SEQ ID NO: 22878 - DNA, 22 bp, synthetic construct
  misc_feature 1..22: note = chemically synthesized
  source 1..22: mol_type = other DNA
cctttcctttttactttccttt

SEQ ID NO: 22879 - DNA, 22 bp, synthetic construct
  misc_feature 1..22: note = chemically synthesized
  source 1..22: mol_type = other DNA
ctttcctttttactttcctttc

SEQ ID NO: 22880 - DNA, 22 bp, synthetic construct
  misc_feature 1..22: note = chemically synthesized
  source 1..22: mol_type = other DNA
tcctttttactttcctttctct

SEQ ID NO: 22881 - DNA, 22 bp, synthetic construct
  misc_feature 1..22: note = chemically synthesized
  source 1..22: mol_type = other DNA
cctttttactttcctttctctt

SEQ ID NO: 22882 - DNA, 22 bp, synthetic construct
  misc_feature 1..22: note = chemically synthesized
  source 1..22: mol_type = other DNA
ctttttactttcctttctcttc

SEQ ID NO: 22883 - DNA, 22 bp, synthetic construct
  misc_feature 1..22: note = chemically synthesized
  source 1..22: mol_type = other DNA
tttactttcctttctcttcctt

SEQ ID NO: 22884 - DNA, 22 bp, synthetic construct
  misc_feature 1..22: note = chemically synthesized
  source 1..22: mol_type = other DNA
ttactttcctttctcttccttt

SEQ ID NO: 22885 - DNA, 22 bp, synthetic construct
  misc_feature 1..22: note = chemically synthesized
  source 1..22: mol_type = other DNA
tactttcctttctcttcctttt

SEQ ID NO: 22886 - DNA, 22 bp, synthetic construct
  misc_feature 1..22: note = chemically synthesized
  source 1..22: mol_type = other DNA
actttcctttctcttccttttt

SEQ ID NO: 22887 - DNA, 22 bp, synthetic construct
  misc_feature 1..22: note = chemically synthesized
  source 1..22: mol_type = other DNA
ctttcctttctcttcctttttg

SEQ ID NO: 22888 - DNA, 22 bp, synthetic construct
  misc_feature 1..22: note = chemically synthesized
  source 1..22: mol_type = other DNA
tcctttctcttcctttttggag

SEQ ID NO: 22889 - DNA, 22 bp, synthetic construct
  misc_feature 1..22: note = chemically synthesized
  source 1..22: mol_type = other DNA
cctttctcttcctttttggagt

SEQ ID NO: 22890 - DNA, 22 bp, synthetic construct
  misc_feature 1..22: note = chemically synthesized
  source 1..22: mol_type = other DNA
ctttctcttcctttttggagtt

SEQ ID NO: 22891 - DNA, 22 bp, synthetic construct
  misc_feature 1..22: note = chemically synthesized
  source 1..22: mol_type = other DNA
tctcttcctttttggagttaat

SEQ ID NO: 22892 - DNA, 22 bp, synthetic construct
  misc_feature 1..22: note = chemically synthesized
  source 1..22: mol_type = other DNA
ctcttcctttttggagttaatc

SEQ ID NO: 22893 - DNA, 22 bp, synthetic construct
  misc_feature 1..22: note = chemically synthesized
  source 1..22: mol_type = other DNA
tcttcctttttggagttaatca

SEQ ID NO: 22894 - DNA, 22 bp, synthetic construct
  misc_feature 1..22: note = chemically synthesized
  source 1..22: mol_type = other DNA
ttcctttttggagttaatcagg

SEQ ID NO: 22895 - DNA, 22 bp, synthetic construct
  misc_feature 1..22: note = chemically synthesized
  source 1..22: mol_type = other DNA
cctttttggagttaatcaggaa

SEQ ID NO: 22896 - DNA, 22 bp, synthetic construct
  misc_feature 1..22: note = chemically synthesized
  source 1..22: mol_type = other DNA
ctttttggagttaatcaggaag

SEQ ID NO: 22897 - DNA, 22 bp, synthetic construct
  misc_feature 1..22: note = chemically synthesized
  source 1..22: mol_type = other DNA
tttggagttaatcaggaagtag

SEQ ID NO: 22898 - DNA, 22 bp, synthetic construct
  misc_feature 1..22: note = chemically synthesized
  source 1..22: mol_type = other DNA
ttggagttaatcaggaagtagt

SEQ ID NO: 22899 - DNA, 22 bp, synthetic construct
  misc_feature 1..22: note = chemically synthesized
  source 1..22: mol_type = other DNA
tggagttaatcaggaagtagtc

SEQ ID NO: 22900 - DNA, 22 bp, synthetic construct
  misc_feature 1..22: note = chemically synthesized
  source 1..22: mol_type = other DNA
ggagttaatcaggaagtagtcc

SEQ ID NO: 22901 - DNA, 22 bp, synthetic construct
  misc_feature 1..22: note = chemically synthesized
  source 1..22: mol_type = other DNA
gagttaatcaggaagtagtccc

SEQ ID NO: 22902 - DNA, 22 bp, synthetic construct
  misc_feature 1..22: note = chemically synthesized
  source 1..22: mol_type = other DNA
atcaggaagtagtcccaaatac

SEQ ID NO: 22903 - DNA, 22 bp, synthetic construct
  misc_feature 1..22: note = chemically synthesized
  source 1..22: mol_type = other DNA
atcttataagcccttggtcctc

SEQ ID NO: 22904 - DNA, 22 bp, synthetic construct
  misc_feature 1..22: note = chemically synthesized
  source 1..22: mol_type = other DNA
ataagcccttggtcctcttgag

SEQ ID NO: 22905 - DNA, 22 bp, synthetic construct
  misc_feature 1..22: note = chemically synthesized
  source 1..22: mol_type = other DNA
taagcccttggtcctcttgaga

SEQ ID NO: 22906 - DNA, 22 bp, synthetic construct
  misc_feature 1..22: note = chemically synthesized
  source 1..22: mol_type = other DNA
ggtcctcttgagatggtatcag

SEQ ID NO: 22907 - DNA, 22 bp, synthetic construct
  misc_feature 1..22: note = chemically synthesized
  source 1..22: mol_type = other DNA
gtcctcttgagatggtatcaga

SEQ ID NO: 22908 - DNA, 22 bp, synthetic construct
  misc_feature 1..22: note = chemically synthesized
  source 1..22: mol_type = other DNA
ttgagatggtatcagatatatt

SEQ ID NO: 22909 - DNA, 22 bp, synthetic construct
  misc_feature 1..22: note = chemically synthesized
  source 1..22: mol_type = other DNA
gagatggtatcagatatattgc

SEQ ID NO: 22910 - DNA, 22 bp, synthetic construct
  misc_feature 1..22: note = chemically synthesized
  source 1..22: mol_type = other DNA
agatggtatcagatatattgct

SEQ ID NO: 22911 - DNA, 22 bp, synthetic construct
  misc_feature 1..22: note = chemically synthesized
  source 1..22: mol_type = other DNA
ctagacccttgaagaaaggaac

SEQ ID NO: 22912 - DNA, 22 bp, synthetic construct
  misc_feature 1..22: note = chemically synthesized
  source 1..22: mol_type = other DNA
gacccttgaagaaaggaacaac

SEQ ID NO: 22913 - DNA, 22 bp, synthetic construct
  misc_feature 1..22: note = chemically synthesized
  source 1..22: mol_type = other DNA
gaagaaaggaacaactccaggc

SEQ ID NO: 22914 - DNA, 22 bp, synthetic construct
  misc_feature 1..22: note = chemically synthesized
  source 1..22: mol_type = other DNA
aagaaaggaacaactccaggca

SEQ ID NO: 22915 - DNA, 22 bp, synthetic construct
  misc_feature 1..22: note = chemically synthesized
  source 1..22: mol_type = other DNA
caggcaacttcttgagtccctg

SEQ ID NO: 22916 - DNA, 22 bp, synthetic construct
  misc_feature 1..22: note = chemically synthesized
  source 1..22: mol_type = other DNA
cttgagtccctgttattaattt

SEQ ID NO: 22917 - DNA, 22 bp, synthetic construct
  misc_feature 1..22: note = chemically synthesized
  source 1..22: mol_type = other DNA
ttgagtccctgttattaatttt

SEQ ID NO: 22918 - DNA, 22 bp, synthetic construct
  misc_feature 1..22: note = chemically synthesized
  source 1..22: mol_type = other DNA
gagtccctgttattaattttat

SEQ ID NO: 22919 - DNA, 22 bp, synthetic construct
  misc_feature 1..22: note = chemically synthesized
  source 1..22: mol_type = other DNA
agtccctgttattaattttata

SEQ ID NO: 22920 - DNA, 22 bp, synthetic construct
  misc_feature 1..22: note = chemically synthesized
  source 1..22: mol_type = other DNA
ttattaattttatacatacaca

SEQ ID NO: 22921 - DNA, 22 bp, synthetic construct
  misc_feature 1..22: note = chemically synthesized
  source 1..22: mol_type = other DNA
ttaattttatacatacacacac

SEQ ID NO: 22922 - DNA, 22 bp, synthetic construct
  misc_feature 1..22: note = chemically synthesized
  source 1..22: mol_type = other DNA
attttatacatacacacacata

SEQ ID NO: 22923 - DNA, 22 bp, synthetic construct
  misc_feature 1..22: note = chemically synthesized
  source 1..22: mol_type = other DNA
tatacatacacacacatatatg

SEQ ID NO: 22924 - DNA, 22 bp, synthetic construct
  misc_feature 1..22: note = chemically synthesized
  source 1..22: mol_type = other DNA
atacatacacacacatatatgt

SEQ ID NO: 22925 - DNA, 22 bp, synthetic construct
  misc_feature 1..22: note = chemically synthesized
  source 1..22: mol_type = other DNA
tacatacacacacatatatgta

SEQ ID NO: 22926 - DNA, 22 bp, synthetic construct
  misc_feature 1..22: note = chemically synthesized
  source 1..22: mol_type = other DNA
cttaacaatggggatatattct

SEQ ID NO: 22927 - DNA, 22 bp, synthetic construct
  misc_feature 1..22: note = chemically synthesized
  source 1..22: mol_type = other DNA
aacaatggggatatattctgag

SEQ ID NO: 22928 - DNA, 22 bp, synthetic construct
  misc_feature 1..22: note = chemically synthesized
  source 1..22: mol_type = other DNA
acaatggggatatattctgaga

SEQ ID NO: 22929 - DNA, 22 bp, synthetic construct
  misc_feature 1..22: note = chemically synthesized
  source 1..22: mol_type = other DNA
tgagaaatgtgtcattaagcaa

SEQ ID NO: 22930 - DNA, 22 bp, synthetic construct
  misc_feature 1..22: note = chemically synthesized
  source 1..22: mol_type = other DNA
agaaatgtgtcattaagcaatt

SEQ ID NO: 22931 - DNA, 22 bp, synthetic construct
  misc_feature 1..22: note = chemically synthesized
  source 1..22: mol_type = other DNA
agcaatttcatcattgtgcgaa

SEQ ID NO: 22932 - DNA, 22 bp, synthetic construct
  misc_feature 1..22: note = chemically synthesized
  source 1..22: mol_type = other DNA
catcattgtgcgaacataatag

SEQ ID NO: 22933 - DNA, 22 bp, synthetic construct
  misc_feature 1..22: note = chemically synthesized
  source 1..22: mol_type = other DNA
atcattgtgcgaacataataga

SEQ ID NO: 22934 - DNA, 22 bp, synthetic construct
  misc_feature 1..22: note = chemically synthesized
  source 1..22: mol_type = other DNA
tgcgaacataatagagtgtact

SEQ ID NO: 22935 - DNA, 22 bp, synthetic construct
  misc_feature 1..22: note = chemically synthesized
  source 1..22: mol_type = other DNA
acctaaacctaaatggtatagc

SEQ ID NO: 22936 - DNA, 22 bp, synthetic construct
  misc_feature 1..22: note = chemically synthesized
  source 1..22: mol_type = other DNA
cctaaacctaaatggtatagct

SEQ ID NO: 22937 - DNA, 22 bp, synthetic construct
  misc_feature 1..22: note = chemically synthesized
  source 1..22: mol_type = other DNA
aacctaaatggtatagcttact

SEQ ID NO: 22938 - DNA, 22 bp, synthetic construct
  misc_feature 1..22: note = chemically synthesized
  source 1..22: mol_type = other DNA
aatggtatagcttactacatac

SEQ ID NO: 22939 - DNA, 22 bp, synthetic construct
  misc_feature 1..22: note = chemically synthesized
  source 1..22: mol_type = other DNA
actacatacctaggttgtattg

SEQ ID NO: 22940 - DNA, 22 bp, synthetic construct
  misc_feature 1..22: note = chemically synthesized
  source 1..22: mol_type = other DNA
ctacatacctaggttgtattga

SEQ ID NO: 22941 - DNA, 22 bp, synthetic construct
  misc_feature 1..22: note = chemically synthesized
  source 1..22: mol_type = other DNA
catacctaggttgtattgatgt

SEQ ID NO: 22942 - DNA, 22 bp, synthetic construct
  misc_feature 1..22: note = chemically synthesized
  source 1..22: mol_type = other DNA
ggttgtattgatgtggcctatt

SEQ ID NO: 22943 - DNA, 22 bp, synthetic construct
  misc_feature 1..22: note = chemically synthesized
  source 1..22: mol_type = other DNA
tattgatgtggcctattgctcc

SEQ ID NO: 22944 - DNA, 22 bp, synthetic construct
  misc_feature 1..22: note = chemically synthesized
  source 1..22: mol_type = other DNA
atgtggcctattgctcctaggc

SEQ ID NO: 22945 - DNA, 22 bp, synthetic construct
  misc_feature 1..22: note = chemically synthesized
  source 1..22: mol_type = other DNA
ttgctcctaggctcctgggctg

SEQ ID NO: 22946 - DNA, 22 bp, synthetic construct
  misc_feature 1..22: note = chemically synthesized
  source 1..22: mol_type = other DNA
ctcctaggctcctgggctgcaa

SEQ ID NO: 22947 - DNA, 22 bp, synthetic construct
  misc_feature 1..22: note = chemically synthesized
  source 1..22: mol_type = other DNA
ctaggctcctgggctgcaaacc

SEQ ID NO: 22948 - DNA, 22 bp, synthetic construct
  misc_feature 1..22: note = chemically synthesized
  source 1..22: mol_type = other DNA
ggctcctgggctgcaaacctgt

SEQ ID NO: 22949 - DNA, 22 bp, synthetic construct
  misc_feature 1..22: note = chemically synthesized
  source 1..22: mol_type = other DNA
ctgggctgcaaacctgtacagc

SEQ ID NO: 22950 - DNA, 22 bp, synthetic construct
  misc_feature 1..22: note = chemically synthesized
  source 1..22: mol_type = other DNA
ggctgcaaacctgtacagcatg

SEQ ID NO: 22951 - DNA, 22 bp, synthetic construct
  misc_feature 1..22: note = chemically synthesized
  source 1..22: mol_type = other DNA
caaacctgtacagcatgtgact

SEQ ID NO: 22952 - DNA, 22 bp, synthetic construct
  misc_feature 1..22: note = chemically synthesized
  source 1..22: mol_type = other DNA
tacagcatgtgactgtactgaa

SEQ ID NO: 22953 - DNA, 22 bp, synthetic construct
  misc_feature 1..22: note = chemically synthesized
  source 1..22: mol_type = other DNA
tactgaacactgtaggcaatgg

SEQ ID NO: 22954 - DNA, 22 bp, synthetic construct
  misc_feature 1..22: note = chemically synthesized
  source 1..22: mol_type = other DNA
aacactgtaggcaatggtaaca

SEQ ID NO: 22955 - DNA, 22 bp, synthetic construct
  misc_feature 1..22: note = chemically synthesized
  source 1..22: mol_type = other DNA
taggcaatggtaacagtggtat

SEQ ID NO: 22956 - DNA, 22 bp, synthetic construct
  misc_feature 1..22: note = chemically synthesized
  source 1..22: mol_type = other DNA
gtgtatctaaacatagaaaagg

SEQ ID NO: 22957 - DNA, 22 bp, synthetic construct
  misc_feature 1..22: note = chemically synthesized
  source 1..22: mol_type = other DNA
tgtatctaaacatagaaaaggt

SEQ ID NO: 22958 - DNA, 22 bp, synthetic construct
  misc_feature 1..22: note = chemically synthesized
  source 1..22: mol_type = other DNA
aacatagaaaaggtacagtgaa

SEQ ID NO: 22959 - DNA, 22 bp, synthetic construct
  misc_feature 1..22: note = chemically synthesized
  source 1..22: mol_type = other DNA
taaccttatgggaccactgtcg

SEQ ID NO: 22960 - DNA, 22 bp, synthetic construct
  misc_feature 1..22: note = chemically synthesized
  source 1..22: mol_type = other DNA
atgggaccactgtcgtataatg

SEQ ID NO: 22961 - DNA, 22 bp, synthetic construct
  misc_feature 1..22: note = chemically synthesized
  source 1..22: mol_type = other DNA
tgggaccactgtcgtataatgt

SEQ ID NO: 22962 - DNA, 22 bp, synthetic construct
  misc_feature 1..22: note = chemically synthesized
  source 1..22: mol_type = other DNA
tcgtataatgtggtccatcatt

SEQ ID NO: 22963 - DNA, 22 bp, synthetic construct
  misc_feature 1..22: note = chemically synthesized
  source 1..22: mol_type = other DNA
accaaaatgtcattgtgcagca

SEQ ID NO: 22964 - DNA, 22 bp, synthetic construct
  misc_feature 1..22: note = chemically synthesized
  source 1..22: mol_type = other DNA
tgcagcaaatgattatctcata

SEQ ID NO: 22965 - DNA, 22 bp, synthetic construct
  misc_feature 1..22: note = chemically synthesized
  source 1..22: mol_type = other DNA
tctcatatatatatatatatga

SEQ ID NO: 22966 - DNA, 22 bp, synthetic construct
  misc_feature 1..22: note = chemically synthesized
  source 1..22: mol_type = other DNA
atatatatatatatatgatatg

SEQ ID NO: 22967 - DNA, 22 bp, synthetic construct
  misc_feature 1..22: note = chemically synthesized
  source 1..22: mol_type = other DNA
agatagagacatctatcctcca

SEQ ID NO: 22968 - DNA, 22 bp, synthetic construct
  misc_feature 1..22: note = chemically synthesized
  source 1..22: mol_type = other DNA
tcctccagagttcaggagtgtc

SEQ ID NO: 22969 - DNA, 22 bp, synthetic construct
  misc_feature 1..22: note = chemically synthesized
  source 1..22: mol_type = other DNA
cagagttcaggagtgtctcttc

SEQ ID NO: 22970 - DNA, 22 bp, synthetic construct
  misc_feature 1..22: note = chemically synthesized
  source 1..22: mol_type = other DNA
aggagtgtctcttcagactagg

SEQ ID NO: 22971 - DNA, 22 bp, synthetic construct
  misc_feature 1..22: note = chemically synthesized
  source 1..22: mol_type = other DNA
ttcagactaggtagatgtagct

SEQ ID NO: 22972 - DNA, 22 bp, synthetic construct
  misc_feature 1..22: note = chemically synthesized
  source 1..22: mol_type = other DNA
cagactaggtagatgtagctta

SEQ ID NO: 22973 - DNA, 22 bp, synthetic construct
  misc_feature 1..22: note = chemically synthesized
  source 1..22: mol_type = other DNA
agactaggtagatgtagcttaa

SEQ ID NO: 22974 - DNA, 22 bp, synthetic construct
  misc_feature 1..22: note = chemically synthesized
  source 1..22: mol_type = other DNA
ggtagatgtagcttaaaaaaaa

SEQ ID NO: 22975 - DNA, 22 bp, synthetic construct
  misc_feature 1..22: note = chemically synthesized
  source 1..22: mol_type = other DNA
aaaaaaaacatatcctgaattc

SEQ ID NO: 22976 - DNA, 22 bp, synthetic construct
  misc_feature 1..22: note = chemically synthesized
  source 1..22: mol_type = other DNA
aaaaaaacatatcctgaattct

SEQ ID NO: 22977 - DNA, 22 bp, synthetic construct
  misc_feature 1..22: note = chemically synthesized
  source 1..22: mol_type = other DNA
aattctagagagatgcttaaat

SEQ ID NO: 22978 - DNA, 22 bp, synthetic construct
  misc_feature 1..22: note = chemically synthesized
  source 1..22: mol_type = other DNA
tagagagatgcttaaatcactg

SEQ ID NO: 22979 - DNA, 22 bp, synthetic construct
  misc_feature 1..22: note = chemically synthesized
  source 1..22: mol_type = other DNA
gagagatgcttaaatcactgca

SEQ ID NO: 22980 - DNA, 22 bp, synthetic construct
  misc_feature 1..22: note = chemically synthesized
  source 1..22: mol_type = other DNA
aaatcactgcaattcctataac

SEQ ID NO: 22981 - DNA, 22 bp, synthetic construct
  misc_feature 1..22: note = chemically synthesized
  source 1..22: mol_type = other DNA
aatcactgcaattcctataaca

SEQ ID NO: 22982 - DNA, 22 bp, synthetic construct
  misc_feature 1..22: note = chemically synthesized
  source 1..22: mol_type = other DNA
caattcctataacacttgccaa

SEQ ID NO: 22983 - DNA, 22 bp, synthetic construct
  misc_feature 1..22: note = chemically synthesized
  source 1..22: mol_type = other DNA
ctataacacttgccaaccaaag

SEQ ID NO: 22984 - DNA, 22 bp, synthetic construct
  misc_feature 1..22: note = chemically synthesized
  source 1..22: mol_type = other DNA
taacacttgccaaccaaaggtg

SEQ ID NO: 22985 - DNA, 22 bp, synthetic construct
  misc_feature 1..22: note = chemically synthesized
  source 1..22: mol_type = other DNA
gccaaccaaaggtgctgttgat

SEQ ID NO: 22986 - DNA, 22 bp, synthetic construct
  misc_feature 1..22: note = chemically synthesized
  source 1..22: mol_type = other DNA
ccaaccaaaggtgctgttgatc

SEQ ID NO: 22987 - DNA, 22 bp, synthetic construct
  misc_feature 1..22: note = chemically synthesized
  source 1..22: mol_type = other DNA
ttgatctgaaattgctttttta

SEQ ID NO: 22988 - DNA, 22 bp, synthetic construct
  misc_feature 1..22: note = chemically synthesized
  source 1..22: mol_type = other DNA
atctgaaattgcttttttaaat

SEQ ID NO: 22989 - DNA, 22 bp, synthetic construct
  misc_feature 1..22: note = chemically synthesized
  source 1..22: mol_type = other DNA
aaattgcttttttaaattaatg

SEQ ID NO: 22990 - DNA, 22 bp, synthetic construct
  misc_feature 1..22: note = chemically synthesized
  source 1..22: mol_type = other DNA
cttttttaaattaatgcagtga

SEQ ID NO: 22991 - DNA, 22 bp, synthetic construct
  misc_feature 1..22: note = chemically synthesized
  source 1..22: mol_type = other DNA
ttttaaattaatgcagtgattt

SEQ ID NO: 22992 - DNA, 22 bp, synthetic construct
  misc_feature 1..22: note = chemically synthesized
  source 1..22: mol_type = other DNA
tttaaattaatgcagtgatttt

SEQ ID NO: 22993 - DNA, 22 bp, synthetic construct
  misc_feature 1..22: note = chemically synthesized
  source 1..22: mol_type = other DNA
ttaaattaatgcagtgattttt

SEQ ID NO: 22994 - DNA, 22 bp, synthetic construct
  misc_feature 1..22: note = chemically synthesized
  source 1..22: mol_type = other DNA
taaattaatgcagtgatttttc

SEQ ID NO: 22995 - DNA, 22 bp, synthetic construct
  misc_feature 1..22: note = chemically synthesized
  source 1..22: mol_type = other DNA
aaattaatgcagtgatttttct

SEQ ID NO: 22996 - DNA, 22 bp, synthetic construct
  misc_feature 1..22: note = chemically synthesized
  source 1..22: mol_type = other DNA
aattaatgcagtgatttttctt

SEQ ID NO: 22997 - DNA, 22 bp, synthetic construct
  misc_feature 1..22: note = chemically synthesized
  source 1..22: mol_type = other DNA
atgcagtgatttttctttaaca

SEQ ID NO: 22998 - DNA, 22 bp, synthetic construct
  misc_feature 1..22: note = chemically synthesized
  source 1..22: mol_type = other DNA
ttctttaacatctagtgacaga

SEQ ID NO: 22999 - DNA, 22 bp, synthetic construct
  misc_feature 1..22: note = chemically synthesized
  source 1..22: mol_type = other DNA
tctttaacatctagtgacagac

SEQ ID NO: 23000 - DNA, 22 bp, synthetic construct
  misc_feature 1..22: note = chemically synthesized
  source 1..22: mol_type = other DNA
ctttaacatctagtgacagaca

SEQ ID NO: 23001 - DNA, 22 bp, synthetic construct
  misc_feature 1..22: note = chemically synthesized
  source 1..22: mol_type = other DNA
tttaacatctagtgacagacac

SEQ ID NO: 23002 - DNA, 22 bp, synthetic construct
  misc_feature 1..22: note = chemically synthesized
  source 1..22: mol_type = other DNA
taacatctagtgacagacactg

SEQ ID NO: 23003 - DNA, 22 bp, synthetic construct
  misc_feature 1..22: note = chemically synthesized
  source 1..22: mol_type = other DNA
aacatctagtgacagacactgg

SEQ ID NO: 23004 - DNA, 22 bp, synthetic construct
  misc_feature 1..22: note = chemically synthesized
  source 1..22: mol_type = other DNA
acatctagtgacagacactggg

SEQ ID NO: 23005 - DNA, 22 bp, synthetic construct
  misc_feature 1..22: note = chemically synthesized
  source 1..22: mol_type = other DNA
gtgacagacactggggtcacat

SEQ ID NO: 23006 - DNA, 22 bp, synthetic construct
  misc_feature 1..22: note = chemically synthesized
  source 1..22: mol_type = other DNA
gggtcacatttgcagctggacc

SEQ ID NO: 23007 - DNA, 22 bp, synthetic construct
  misc_feature 1..22: note = chemically synthesized
  source 1..22: mol_type = other DNA
gcagctggaccataattaggct

SEQ ID NO: 23008 - DNA, 22 bp, synthetic construct
  misc_feature 1..22: note = chemically synthesized
  source 1..22: mol_type = other DNA
cagctggaccataattaggctt

SEQ ID NO: 23009 - DNA, 22 bp, synthetic construct
  misc_feature 1..22: note = chemically synthesized
  source 1..22: mol_type = other DNA
gaccataattaggcttctgttc

SEQ ID NO: 23010 - DNA, 22 bp, synthetic construct
  misc_feature 1..22: note = chemically synthesized
  source 1..22: mol_type = other DNA
ggcttctgttcttcaggagaca

SEQ ID NO: 23011 - DNA, 22 bp, synthetic construct
  misc_feature 1..22: note = chemically synthesized
  source 1..22: mol_type = other DNA
ctgttcttcaggagacatttgt

SEQ ID NO: 23012 - DNA, 22 bp, synthetic construct
  misc_feature 1..22: note = chemically synthesized
  source 1..22: mol_type = other DNA
tgttcttcaggagacatttgtt

SEQ ID NO: 23013 - DNA, 22 bp, synthetic construct
  misc_feature 1..22: note = chemically synthesized
  source 1..22: mol_type = other DNA
ttcttcaggagacatttgttca

SEQ ID NO: 23014 - DNA, 22 bp, synthetic construct
  misc_feature 1..22: note = chemically synthesized
  source 1..22: mol_type = other DNA
ttcaggagacatttgttcaaag

SEQ ID NO: 23015 - DNA, 22 bp, synthetic construct
  misc_feature 1..22: note = chemically synthesized
  source 1..22: mol_type = other DNA
caggagacatttgttcaaagtc

SEQ ID NO: 23016 - DNA, 22 bp, synthetic construct
  misc_feature 1..22: note = chemically synthesized
  source 1..22: mol_type = other DNA
aggagacatttgttcaaagtca

SEQ ID NO: 23017 - DNA, 22 bp, synthetic construct
  misc_feature 1..22: note = chemically synthesized
  source 1..22: mol_type = other DNA
gttcaaagtcatttgggcaacc

SEQ ID NO: 23018 - DNA, 22 bp, synthetic construct
  misc_feature 1..22: note = chemically synthesized
  source 1..22: mol_type = other DNA
ttcaaagtcatttgggcaacca

SEQ ID NO: 23019 - DNA, 22 bp, synthetic construct
  misc_feature 1..22: note = chemically synthesized
  source 1..22: mol_type = other DNA
aaagtcatttgggcaaccatat

SEQ ID NO: 23020 - DNA, 22 bp, synthetic construct
  misc_feature 1..22: note = chemically synthesized
  source 1..22: mol_type = other DNA
gggcaaccatattctgaaaaca

SEQ ID NO: 23021 - DNA, 22 bp, synthetic construct
  misc_feature 1..22: note = chemically synthesized
  source 1..22: mol_type = other DNA
ggcaaccatattctgaaaacag

SEQ ID NO: 23022 - DNA, 22 bp, synthetic construct
  misc_feature 1..22: note = chemically synthesized
  source 1..22: mol_type = other DNA
tgaaaacagcccagccagggtg

SEQ ID NO: 23023 - DNA, 22 bp, synthetic construct
  misc_feature 1..22: note = chemically synthesized
  source 1..22: mol_type = other DNA
aaaacagcccagccagggtgat

SEQ ID NO: 23024 - DNA, 22 bp, synthetic construct
  misc_feature 1..22: note = chemically synthesized
  source 1..22: mol_type = other DNA
tgcaaagatcctcaatgagcta

SEQ ID NO: 23025 - DNA, 22 bp, synthetic construct
  misc_feature 1..22: note = chemically synthesized
  source 1..22: mol_type = other DNA
gcaaagatcctcaatgagctat

SEQ ID NO: 23026 - DNA, 22 bp, synthetic construct
  misc_feature 1..22: note = chemically synthesized
  source 1..22: mol_type = other DNA
caaagatcctcaatgagctatt

SEQ ID NO: 23027 - DNA, 22 bp, synthetic construct
  misc_feature 1..22: note = chemically synthesized
  source 1..22: mol_type = other DNA
aatgagctattttcaagtgatg

SEQ ID NO: 23028 - DNA, 22 bp, synthetic construct
  misc_feature 1..22: note = chemically synthesized
  source 1..22: mol_type = other DNA
ttttcaagtgatgacaaagtgt

SEQ ID NO: 23029 - DNA, 22 bp, synthetic construct
  misc_feature 1..22: note = chemically synthesized
  source 1..22: mol_type = other DNA
tcaagtgatgacaaagtgtgaa

SEQ ID NO: 23030 - DNA, 22 bp, synthetic construct
  misc_feature 1..22: note = chemically synthesized
  source 1..22: mol_type = other DNA
caagtgatgacaaagtgtgaag

SEQ ID NO: 23031 - DNA, 22 bp, synthetic construct
  misc_feature 1..22: note = chemically synthesized
  source 1..22: mol_type = other DNA
aagtgatgacaaagtgtgaagt

SEQ ID NO: 23032 - DNA, 22 bp, synthetic construct
  misc_feature 1..22: note = chemically synthesized
  source 1..22: mol_type = other DNA
accgctcatttgagaactttct

SEQ ID NO: 23033 - DNA, 22 bp, synthetic construct
  misc_feature 1..22: note = chemically synthesized
  source 1..22: mol_type = other DNA
atttgagaactttctttttcat

SEQ ID NO: 23034 - DNA, 22 bp, synthetic construct
  misc_feature 1..22: note = chemically synthesized
  source 1..22: mol_type = other DNA
gagaactttctttttcatccaa

SEQ ID NO: 23035 - DNA, 22 bp, synthetic construct
  misc_feature 1..22: note = chemically synthesized
  source 1..22: mol_type = other DNA
agaactttctttttcatccaaa

SEQ ID NO: 23036 - DNA, 22 bp, synthetic construct
  misc_feature 1..22: note = chemically synthesized
  source 1..22: mol_type = other DNA
tctttttcatccaaagtaaatt

SEQ ID NO: 23037 - DNA, 22 bp, synthetic construct
  misc_feature 1..22: note = chemically synthesized
  source 1..22: mol_type = other DNA
ctttttcatccaaagtaaattc

SEQ ID NO: 23038 - DNA, 22 bp, synthetic construct
  misc_feature 1..22: note = chemically synthesized
  source 1..22: mol_type = other DNA
tttttcatccaaagtaaattca

SEQ ID NO: 23039 - DNA, 22 bp, synthetic construct
  misc_feature 1..22: note = chemically synthesized
  source 1..22: mol_type = other DNA
tttcatccaaagtaaattcaaa

SEQ ID NO: 23040 - DNA, 22 bp, synthetic construct
  misc_feature 1..22: note = chemically synthesized
  source 1..22: mol_type = other DNA
ttcatccaaagtaaattcaaat

SEQ ID NO: 23041 - DNA, 22 bp, synthetic construct
  misc_feature 1..22: note = chemically synthesized
  source 1..22: mol_type = other DNA
tcatccaaagtaaattcaaata

SEQ ID NO: 23042 - DNA, 22 bp, synthetic construct
  misc_feature 1..22: note = chemically synthesized
  source 1..22: mol_type = other DNA
catccaaagtaaattcaaatat

SEQ ID NO: 23043 - DNA, 22 bp, synthetic construct
  misc_feature 1..22: note = chemically synthesized
  source 1..22: mol_type = other DNA
atccaaagtaaattcaaatatg

SEQ ID NO: 23044 - DNA, 22 bp, synthetic construct
  misc_feature 1..22: note = chemically synthesized
  source 1..22: mol_type = other DNA
aaatatgattagaaatctgacc

SEQ ID NO: 23045 - DNA, 22 bp, synthetic construct
  misc_feature 1..22: note = chemically synthesized
  source 1..22: mol_type = other DNA
gaaatctgaccttttattactg

SEQ ID NO: 23046 - DNA, 22 bp, synthetic construct
  misc_feature 1..22: note = chemically synthesized
  source 1..22: mol_type = other DNA
accttttattactggaattctc

SEQ ID NO: 23047 - DNA, 22 bp, synthetic construct
  misc_feature 1..22: note = chemically synthesized
  source 1..22: mol_type = other DNA
ttattactggaattctcttgac

SEQ ID NO: 23048 - DNA, 22 bp, synthetic construct
  misc_feature 1..22: note = chemically synthesized
  source 1..22: mol_type = other DNA
tattactggaattctcttgact

SEQ ID NO: 23049 - DNA, 22 bp, synthetic construct
  misc_feature 1..22: note = chemically synthesized
  source 1..22: mol_type = other DNA
attactggaattctcttgacta

SEQ ID NO: 23050 - DNA, 22 bp, synthetic construct
  misc_feature 1..22: note = chemically synthesized
  source 1..22: mol_type = other DNA
ttactggaattctcttgactaa

SEQ ID NO: 23051 - DNA, 22 bp, synthetic construct
  misc_feature 1..22: note = chemically synthesized
  source 1..22: mol_type = other DNA
ctggaattctcttgactaaaag

SEQ ID NO: 23052 - DNA, 22 bp, synthetic construct
  misc_feature 1..22: note = chemically synthesized
  source 1..22: mol_type = other DNA
gaattctcttgactaaaagtaa

SEQ ID NO: 23053 - DNA, 22 bp, synthetic construct
  misc_feature 1..22: note = chemically synthesized
  source 1..22: mol_type = other DNA
tcttgactaaaagtaaaattga

SEQ ID NO: 23054 - DNA, 22 bp, synthetic construct
  misc_feature 1..22: note = chemically synthesized
  source 1..22: mol_type = other DNA
ttgactaaaagtaaaattgaat

SEQ ID NO: 23055 - DNA, 22 bp, synthetic construct
  misc_feature 1..22: note = chemically synthesized
  source 1..22: mol_type = other DNA
gactaaaagtaaaattgaattt

SEQ ID NO: 23056 - DNA, 22 bp, synthetic construct
  misc_feature 1..22: note = chemically synthesized
  source 1..22: mol_type = other DNA
actaaaagtaaaattgaatttt

SEQ ID NO: 23057 - DNA, 22 bp, synthetic construct
  misc_feature 1..22: note = chemically synthesized
  source 1..22: mol_type = other DNA
aaagtaaaattgaattttaatt

SEQ ID NO: 23058 - DNA, 22 bp, synthetic construct
  misc_feature 1..22: note = chemically synthesized
  source 1..22: mol_type = other DNA
aattttaattcctaaatctcca

SEQ ID NO: 23059 - DNA, 22 bp, synthetic construct
  misc_feature 1..22: note = chemically synthesized
  source 1..22: mol_type = other DNA
taattcctaaatctccatgtgt

SEQ ID NO: 23060 - DNA, 22 bp, synthetic construct
  misc_feature 1..22: note = chemically synthesized
  source 1..22: mol_type = other DNA
aattcctaaatctccatgtgta

SEQ ID NO: 23061 - DNA, 22 bp, synthetic construct
  misc_feature 1..22: note = chemically synthesized
  source 1..22: mol_type = other DNA
attcctaaatctccatgtgtat

SEQ ID NO: 23062 - DNA, 22 bp, synthetic construct
  misc_feature 1..22: note = chemically synthesized
  source 1..22: mol_type = other DNA
ctaaatctccatgtgtatacag

SEQ ID NO: 23063 - DNA, 22 bp, synthetic construct
  misc_feature 1..22: note = chemically synthesized
  source 1..22: mol_type = other DNA
aatctccatgtgtatacagtac

SEQ ID NO: 23064 - DNA, 22 bp, synthetic construct
  misc_feature 1..22: note = chemically synthesized
  source 1..22: mol_type = other DNA
catgtgtatacagtactgtggg

SEQ ID NO: 23065 - DNA, 22 bp, synthetic construct
  misc_feature 1..22: note = chemically synthesized
  source 1..22: mol_type = other DNA
tgggaacatcacagattttggc

SEQ ID NO: 23066 - DNA, 22 bp, synthetic construct
  misc_feature 1..22: note = chemically synthesized
  source 1..22: mol_type = other DNA
tggctccatgccctaaagagaa

SEQ ID NO: 23067 - DNA, 22 bp, synthetic construct
  misc_feature 1..22: note = chemically synthesized
  source 1..22: mol_type = other DNA
ggctccatgccctaaagagaaa

SEQ ID NO: 23068 - DNA, 22 bp, synthetic construct
  misc_feature 1..22: note = chemically synthesized
  source 1..22: mol_type = other DNA
gctccatgccctaaagagaaat

SEQ ID NO: 23069 - DNA, 22 bp, synthetic construct
  misc_feature 1..22: note = chemically synthesized
  source 1..22: mol_type = other DNA
catgccctaaagagaaattggc

SEQ ID NO: 23070 - DNA, 22 bp, synthetic construct
  misc_feature 1..22: note = chemically synthesized
  source 1..22: mol_type = other DNA
aagagaaattggctttcagatt

SEQ ID NO: 23071 - DNA, 22 bp, synthetic construct
  misc_feature 1..22: note = chemically synthesized
  source 1..22: mol_type = other DNA
gctttcagattatttggattaa

SEQ ID NO: 23072 - DNA, 22 bp, synthetic construct
  misc_feature 1..22: note = chemically synthesized
  source 1..22: mol_type = other DNA
tcagattatttggattaaaaac

SEQ ID NO: 23073 - DNA, 22 bp, synthetic construct
  misc_feature 1..22: note = chemically synthesized
  source 1..22: mol_type = other DNA
cagattatttggattaaaaaca

SEQ ID NO: 23074 - DNA, 22 bp, synthetic construct
  misc_feature 1..22: note = chemically synthesized
  source 1..22: mol_type = other DNA
agattatttggattaaaaacaa

SEQ ID NO: 23075 - DNA, 22 bp, synthetic construct
  misc_feature 1..22: note = chemically synthesized
  source 1..22: mol_type = other DNA
tttggattaaaaacaaagactt

SEQ ID NO: 23076 - DNA, 22 bp, synthetic construct
  misc_feature 1..22: note = chemically synthesized
  source 1..22: mol_type = other DNA
ggattaaaaacaaagactttct

SEQ ID NO: 23077 - DNA, 22 bp, synthetic construct
  misc_feature 1..22: note = chemically synthesized
  source 1..22: mol_type = other DNA
gattaaaaacaaagactttctt

SEQ ID NO: 23078 - DNA, 22 bp, synthetic construct
  misc_feature 1..22: note = chemically synthesized
  source 1..22: mol_type = other DNA
aaaacaaagactttcttaagag

SEQ ID NO: 23079 - DNA, 22 bp, synthetic construct
  misc_feature 1..22: note = chemically synthesized
  source 1..22: mol_type = other DNA
tcttaagagatgtaaaattttc

SEQ ID NO: 23080 - DNA, 22 bp, synthetic construct
  misc_feature 1..22: note = chemically synthesized
  source 1..22: mol_type = other DNA
cttaagagatgtaaaattttca

SEQ ID NO: 23081 - DNA, 22 bp, synthetic construct
  misc_feature 1..22: note = chemically synthesized
  source 1..22: mol_type = other DNA
ttaagagatgtaaaattttcat

SEQ ID NO: 23082 - DNA, 22 bp, synthetic construct
  misc_feature 1..22: note = chemically synthesized
  source 1..22: mol_type = other DNA
aagagatgtaaaattttcatga

SEQ ID NO: 23083 - DNA, 22 bp, synthetic construct
  misc_feature 1..22: note = chemically synthesized
  source 1..22: mol_type = other DNA
agagatgtaaaattttcatgat

SEQ ID NO: 23084 - DNA, 22 bp, synthetic construct
  misc_feature 1..22: note = chemically synthesized
  source 1..22: mol_type = other DNA
tcatgatgttttcttttttgct

SEQ ID NO: 23085 - DNA, 22 bp, synthetic construct
  misc_feature 1..22: note = chemically synthesized
  source 1..22: mol_type = other DNA
catgatgttttcttttttgcta

SEQ ID NO: 23086 - DNA, 22 bp, synthetic construct
  misc_feature 1..22: note = chemically synthesized
  source 1..22: mol_type = other DNA
atgatgttttcttttttgctaa

SEQ ID NO: 23087 - DNA, 22 bp, synthetic construct
  misc_feature 1..22: note = chemically synthesized
  source 1..22: mol_type = other DNA
tcttttttgctaaaactaaaga

SEQ ID NO: 23088 - DNA, 22 bp, synthetic construct
  misc_feature 1..22: note = chemically synthesized
  source 1..22: mol_type = other DNA
cttttttgctaaaactaaagaa

SEQ ID NO: 23089 - DNA, 22 bp, synthetic construct
  misc_feature 1..22: note = chemically synthesized
  source 1..22: mol_type = other DNA
ttttttgctaaaactaaagaat

SEQ ID NO: 23090 - DNA, 22 bp, synthetic construct
  misc_feature 1..22: note = chemically synthesized
  source 1..22: mol_type = other DNA
ttttgctaaaactaaagaatta

SEQ ID NO: 23091 - DNA, 22 bp, synthetic construct
  misc_feature 1..22: note = chemically synthesized
  source 1..22: mol_type = other DNA
tttgctaaaactaaagaattat

SEQ ID NO: 23092 - DNA, 22 bp, synthetic construct
  misc_feature 1..22: note = chemically synthesized
  source 1..22: mol_type = other DNA
ttgctaaaactaaagaattatt

SEQ ID NO: 23093 - DNA, 22 bp, synthetic construct
  misc_feature 1..22: note = chemically synthesized
  source 1..22: mol_type = other DNA
tgctaaaactaaagaattattc

SEQ ID NO: 23094 - DNA, 22 bp, synthetic construct
  misc_feature 1..22: note = chemically synthesized
  source 1..22: mol_type = other DNA
gctaaaactaaagaattattct

SEQ ID NO: 23095 - DNA, 22 bp, synthetic construct
  misc_feature 1..22: note = chemically synthesized
  source 1..22: mol_type = other DNA
ctaaaactaaagaattattctt

SEQ ID NO: 23096 - DNA, 22 bp, synthetic construct
  misc_feature 1..22: note = chemically synthesized
  source 1..22: mol_type = other DNA
aaactaaagaattattctttta

SEQ ID NO: 23097 - DNA, 22 bp, synthetic construct
  misc_feature 1..22: note = chemically synthesized
  source 1..22: mol_type = other DNA
aagaattattcttttacatttc

SEQ ID NO: 23098 - DNA, 22 bp, synthetic construct
  misc_feature 1..22: note = chemically synthesized
  source 1..22: mol_type = other DNA
ttcttttacatttcagtttttc

SEQ ID NO: 23099 - DNA, 22 bp, synthetic construct
  misc_feature 1..22: note = chemically synthesized
  source 1..22: mol_type = other DNA
ttttacatttcagtttttcttg

SEQ ID NO: 23100 - DNA, 22 bp, synthetic construct
  misc_feature 1..22: note = chemically synthesized
  source 1..22: mol_type = other DNA
ttacatttcagtttttcttgat

SEQ ID NO: 23101 - DNA, 22 bp, synthetic construct
  misc_feature 1..22: note = chemically synthesized
  source 1..22: mol_type = other DNA
tacatttcagtttttcttgatc

SEQ ID NO: 23102 - DNA, 22 bp, synthetic construct
  misc_feature 1..22: note = chemically synthesized
  source 1..22: mol_type = other DNA
acatttcagtttttcttgatca

SEQ ID NO: 23103 - DNA, 22 bp, synthetic construct
  misc_feature 1..22: note = chemically synthesized
  source 1..22: mol_type = other DNA
catttcagtttttcttgatcat

SEQ ID NO: 23104 - DNA, 22 bp, synthetic construct
  misc_feature 1..22: note = chemically synthesized
  source 1..22: mol_type = other DNA
cagtttttcttgatcatgaaaa

SEQ ID NO: 23105 - DNA, 22 bp, synthetic construct
  misc_feature 1..22: note = chemically synthesized
  source 1..22: mol_type = other DNA
agtttttcttgatcatgaaaac

SEQ ID NO: 23106 - DNA, 22 bp, synthetic construct
  misc_feature 1..22: note = chemically synthesized
  source 1..22: mol_type = other DNA
ttcttgatcatgaaaacgccaa

SEQ ID NO: 23107 - DNA, 22 bp, synthetic construct
  misc_feature 1..22: note = chemically synthesized
  source 1..22: mol_type = other DNA
tcttgatcatgaaaacgccaac

SEQ ID NO: 23108 - DNA, 22 bp, synthetic construct
  misc_feature 1..22: note = chemically synthesized
  source 1..22: mol_type = other DNA
cttgatcatgaaaacgccaaca

SEQ ID NO: 23109 - DNA, 22 bp, synthetic construct
  misc_feature 1..22: note = chemically synthesized
  source 1..22: mol_type = other DNA
ttgatcatgaaaacgccaacaa

SEQ ID NO: 23110 - DNA, 22 bp, synthetic construct
  misc_feature 1..22: note = chemically synthesized
  source 1..22: mol_type = other DNA
gatcatgaaaacgccaacaaaa

SEQ ID NO: 23111 - DNA, 22 bp, synthetic construct
  misc_feature 1..22: note = chemically synthesized
  source 1..22: mol_type = other DNA
atcatgaaaacgccaacaaaat

SEQ ID NO: 23112 - DNA, 22 bp, synthetic construct
  misc_feature 1..22: note = chemically synthesized
  source 1..22: mol_type = other DNA
tgaatcggccaaagaggtataa

SEQ ID NO: 23113 - DNA, 22 bp, synthetic construct
  misc_feature 1..22: note = chemically synthesized
  source 1..22: mol_type = other DNA
aatcggccaaagaggtataatt

SEQ ID NO: 23114 - DNA, 22 bp, synthetic construct
  misc_feature 1..22: note = chemically synthesized
  source 1..22: mol_type = other DNA
aggtaaattggaagagtttgtt

SEQ ID NO: 23115 - DNA, 22 bp, synthetic construct
  misc_feature 1..22: note = chemically synthesized
  source 1..22: mol_type = other DNA
gaagagtttgttcaagggaacc

SEQ ID NO: 23116 - DNA, 22 bp, synthetic construct
  misc_feature 1..22: note = chemically synthesized
  source 1..22: mol_type = other DNA
gttcaagggaaccttgagagag

SEQ ID NO: 23117 - DNA, 22 bp, synthetic construct
  misc_feature 1..22: note = chemically synthesized
  source 1..22: mol_type = other DNA
ttcaagggaaccttgagagaga

SEQ ID NO: 23118 - DNA, 22 bp, synthetic construct
  misc_feature 1..22: note = chemically synthesized
  source 1..22: mol_type = other DNA
aagggaaccttgagagagaatg

SEQ ID NO: 23119 - DNA, 22 bp, synthetic construct
  misc_feature 1..22: note = chemically synthesized
  source 1..22: mol_type = other DNA
gagagagaatgtatggaagaaa

SEQ ID NO: 23120 - DNA, 22 bp, synthetic construct
  misc_feature 1..22: note = chemically synthesized
  source 1..22: mol_type = other DNA
agagagaatgtatggaagaaaa

SEQ ID NO: 23121 - DNA, 22 bp, synthetic construct
  misc_feature 1..22: note = chemically synthesized
  source 1..22: mol_type = other DNA
tgaagaagcacgagaagttttt

SEQ ID NO: 23122 - DNA, 22 bp, synthetic construct
  misc_feature 1..22: note = chemically synthesized
  source 1..22: mol_type = other DNA
gaagaagcacgagaagtttttg

SEQ ID NO: 23123 - DNA, 22 bp, synthetic construct
  misc_feature 1..22: note = chemically synthesized
  source 1..22: mol_type = other DNA
aagaagcacgagaagtttttga

SEQ ID NO: 23124 - DNA, 22 bp, synthetic construct
  misc_feature 1..22: note = chemically synthesized
  source 1..22: mol_type = other DNA
tttcagtgttttcaaaaacttc

SEQ ID NO: 23125 - DNA, 22 bp, synthetic construct
  misc_feature 1..22: note = chemically synthesized
  source 1..22: mol_type = other DNA
tcagtgttttcaaaaacttctc

SEQ ID NO: 23126 - DNA, 22 bp, synthetic construct
  misc_feature 1..22: note = chemically synthesized
  source 1..22: mol_type = other DNA
cagtgttttcaaaaacttctcg

SEQ ID NO: 23127 - DNA, 22 bp, synthetic construct
  misc_feature 1..22: note = chemically synthesized
  source 1..22: mol_type = other DNA
agtgttttcaaaaacttctcgt

SEQ ID NO: 23128 - DNA, 22 bp, synthetic construct
  misc_feature 1..22: note = chemically synthesized
  source 1..22: mol_type = other DNA
tcaaaaacttctcgtgcttctt

SEQ ID NO: 23129 - DNA, 22 bp, synthetic construct
  misc_feature 1..22: note = chemically synthesized
  source 1..22: mol_type = other DNA
caaaaacttctcgtgcttcttc

SEQ ID NO: 23130 - DNA, 22 bp, synthetic construct
  misc_feature 1..22: note = chemically synthesized
  source 1..22: mol_type = other DNA
aaaaacttctcgtgcttcttca

SEQ ID NO: 23131 - DNA, 22 bp, synthetic construct
  misc_feature 1..22: note = chemically synthesized
  source 1..22: mol_type = other DNA
ctcgtgcttcttcaaaactaca

SEQ ID NO: 23132 - DNA, 22 bp, synthetic construct
  misc_feature 1..22: note = chemically synthesized
  source 1..22: mol_type = other DNA
tcgtgcttcttcaaaactacac

SEQ ID NO: 23133 - DNA, 22 bp, synthetic construct
  misc_feature 1..22: note = chemically synthesized
  source 1..22: mol_type = other DNA
gtgcttcttcaaaactacactt

SEQ ID NO: 23134 - DNA, 22 bp, synthetic construct
  misc_feature 1..22: note = chemically synthesized
  source 1..22: mol_type = other DNA
cttcaaaactacacttttcttc

SEQ ID NO: 23135 - DNA, 22 bp, synthetic construct
  misc_feature 1..22: note = chemically synthesized
  source 1..22: mol_type = other DNA
ttcaaaactacacttttcttcc

SEQ ID NO: 23136 - DNA, 22 bp, synthetic construct
  misc_feature 1..22: note = chemically synthesized
  source 1..22: mol_type = other DNA
caaaactacacttttcttccat

SEQ ID NO: 23137 - DNA, 22 bp, synthetic construct
  misc_feature 1..22: note = chemically synthesized
  source 1..22: mol_type = other DNA
aaaactacacttttcttccata

SEQ ID NO: 23138 - DNA, 22 bp, synthetic construct
  misc_feature 1..22: note = chemically synthesized
  source 1..22: mol_type = other DNA
cacttttcttccatacattctc

SEQ ID NO: 23139 - DNA, 22 bp, synthetic construct
  misc_feature 1..22: note = chemically synthesized
  source 1..22: mol_type = other DNA
ttcttccatacattctctctca

SEQ ID NO: 23140 - DNA, 22 bp, synthetic construct
  misc_feature 1..22: note = chemically synthesized
  source 1..22: mol_type = other DNA
tcttccatacattctctctcaa

SEQ ID NO: 23141 - DNA, 22 bp, synthetic construct
  misc_feature 1..22: note = chemically synthesized
  source 1..22: mol_type = other DNA
cttccatacattctctctcaag

SEQ ID NO: 23142 - DNA, 22 bp, synthetic construct
  misc_feature 1..22: note = chemically synthesized
  source 1..22: mol_type = other DNA
ttccatacattctctctcaagg

SEQ ID NO: 23143 - DNA, 22 bp, synthetic construct
  misc_feature 1..22: note = chemically synthesized
  source 1..22: mol_type = other DNA
ccatacattctctctcaaggtt

SEQ ID NO: 23144 - DNA, 22 bp, synthetic construct
  misc_feature 1..22: note = chemically synthesized
  source 1..22: mol_type = other DNA
catacattctctctcaaggttc

SEQ ID NO: 23145 - DNA, 22 bp, synthetic construct
  misc_feature 1..22: note = chemically synthesized
  source 1..22: mol_type = other DNA
tctctcaaggttcccttgaaca

SEQ ID NO: 23146 - DNA, 22 bp, synthetic construct
  misc_feature 1..22: note = chemically synthesized
  source 1..22: mol_type = other DNA
tctcaaggttcccttgaacaaa

SEQ ID NO: 23147 - DNA, 22 bp, synthetic construct
  misc_feature 1..22: note = chemically synthesized
  source 1..22: mol_type = other DNA
tcaaggttcccttgaacaaact

SEQ ID NO: 23148 - DNA, 22 bp, synthetic construct
  misc_feature 1..22: note = chemically synthesized
  source 1..22: mol_type = other DNA
aaggttcccttgaacaaactct

SEQ ID NO: 23149 - DNA, 22 bp, synthetic construct
  misc_feature 1..22: note = chemically synthesized
  source 1..22: mol_type = other DNA
ccttgaacaaactcttccaatt

SEQ ID NO: 23150 - DNA, 22 bp, synthetic construct
  misc_feature 1..22: note = chemically synthesized
  source 1..22: mol_type = other DNA
gaacaaactcttccaatttacc

SEQ ID NO: 23151 - DNA, 22 bp, synthetic construct
  misc_feature 1..22: note = chemically synthesized
  source 1..22: mol_type = other DNA
aacaaactcttccaatttacct

SEQ ID NO: 23152 - DNA, 22 bp, synthetic construct
  misc_feature 1..22: note = chemically synthesized
  source 1..22: mol_type = other DNA
ttccaatttacctgaattatac

SEQ ID NO: 23153 - DNA, 22 bp, synthetic construct
  misc_feature 1..22: note = chemically synthesized
  source 1..22: mol_type = other DNA
ccaatttacctgaattatacct

SEQ ID NO: 23154 - DNA, 22 bp, synthetic construct
  misc_feature 1..22: note = chemically synthesized
  source 1..22: mol_type = other DNA
caatttacctgaattatacctc

SEQ ID NO: 23155 - DNA, 22 bp, synthetic construct
  misc_feature 1..22: note = chemically synthesized
  source 1..22: mol_type = other DNA
acctgaattatacctctttggc

SEQ ID NO: 23156 - DNA, 22 bp, synthetic construct
  misc_feature 1..22: note = chemically synthesized
  source 1..22: mol_type = other DNA
cctgaattatacctctttggcc

SEQ ID NO: 23157 - DNA, 22 bp, synthetic construct
  misc_feature 1..22: note = chemically synthesized
  source 1..22: mol_type = other DNA
aattatacctctttggccgatt

SEQ ID NO: 23158 - DNA, 22 bp, synthetic construct
  misc_feature 1..22: note = chemically synthesized
  source 1..22: mol_type = other DNA
tacctctttggccgattcagaa

SEQ ID NO: 23159 - DNA, 22 bp, synthetic construct
  misc_feature 1..22: note = chemically synthesized
  source 1..22: mol_type = other DNA
tttggccgattcagaattttgt

SEQ ID NO: 23160 - DNA, 22 bp, synthetic construct
  misc_feature 1..22: note = chemically synthesized
  source 1..22: mol_type = other DNA
tggccgattcagaattttgttg

SEQ ID NO: 23161 - DNA, 22 bp, synthetic construct
  misc_feature 1..22: note = chemically synthesized
  source 1..22: mol_type = other DNA
ggccgattcagaattttgttgg

SEQ ID NO: 23162 - DNA, 22 bp, synthetic construct
  misc_feature 1..22: note = chemically synthesized
  source 1..22: mol_type = other DNA
gccgattcagaattttgttggc

SEQ ID NO: 23163 - DNA, 22 bp, synthetic construct
  misc_feature 1..22: note = chemically synthesized
  source 1..22: mol_type = other DNA
agaattttgttggcgttttcat

SEQ ID NO: 23164 - DNA, 22 bp, synthetic construct
  misc_feature 1..22: note = chemically synthesized
  source 1..22: mol_type = other DNA
tgttggcgttttcatgatcaag

SEQ ID NO: 23165 - DNA, 22 bp, synthetic construct
  misc_feature 1..22: note = chemically synthesized
  source 1..22: mol_type = other DNA
gttggcgttttcatgatcaaga

SEQ ID NO: 23166 - DNA, 22 bp, synthetic construct
  misc_feature 1..22: note = chemically synthesized
  source 1..22: mol_type = other DNA
ttggcgttttcatgatcaagaa

SEQ ID NO: 23167 - DNA, 22 bp, synthetic construct
  misc_feature 1..22: note = chemically synthesized
  source 1..22: mol_type = other DNA
gcgttttcatgatcaagaaaaa

SEQ ID NO: 23168 - DNA, 22 bp, synthetic construct
  misc_feature 1..22: note = chemically synthesized
  source 1..22: mol_type = other DNA
tcatgatcaagaaaaactgaaa

SEQ ID NO: 23169 - DNA, 22 bp, synthetic construct
  misc_feature 1..22: note = chemically synthesized
  source 1..22: mol_type = other DNA
catgatcaagaaaaactgaaat

SEQ ID NO: 23170 - DNA, 22 bp, synthetic construct
  misc_feature 1..22: note = chemically synthesized
  source 1..22: mol_type = other DNA
atgatcaagaaaaactgaaatg

SEQ ID NO: 23171 - DNA, 22 bp, synthetic construct
  misc_feature 1..22: note = chemically synthesized
  source 1..22: mol_type = other DNA
aaatgtaaaagaataattcttt

SEQ ID NO: 23172 - DNA, 22 bp, synthetic construct
  misc_feature 1..22: note = chemically synthesized
  source 1..22: mol_type = other DNA
tttagttttagcaaaaaagaaa

SEQ ID NO: 23173 - DNA, 22 bp, synthetic construct
  misc_feature 1..22: note = chemically synthesized
  source 1..22: mol_type = other DNA
tagttttagcaaaaaagaaaac

SEQ ID NO: 23174 - DNA, 22 bp, synthetic construct
  misc_feature 1..22: note = chemically synthesized
  source 1..22: mol_type = other DNA
agttttagcaaaaaagaaaaca

SEQ ID NO: 23175 - DNA, 22 bp, synthetic construct
  misc_feature 1..22: note = chemically synthesized
  source 1..22: mol_type = other DNA
gttttagcaaaaaagaaaacat

SEQ ID NO: 23176 - DNA, 22 bp, synthetic construct
  misc_feature 1..22: note = chemically synthesized
  source 1..22: mol_type = other DNA
tagcaaaaaagaaaacatcatg

SEQ ID NO: 23177 - DNA, 22 bp, synthetic construct
  misc_feature 1..22: note = chemically synthesized
  source 1..22: mol_type = other DNA
agcaaaaaagaaaacatcatga

SEQ ID NO: 23178 - DNA, 22 bp, synthetic construct
  misc_feature 1..22: note = chemically synthesized
  source 1..22: mol_type = other DNA
gcaaaaaagaaaacatcatgaa

SEQ ID NO: 23179 - DNA, 22 bp, synthetic construct
  misc_feature 1..22: note = chemically synthesized
  source 1..22: mol_type = other DNA
tacatctcttaagaaagtcttt

SEQ ID NO: 23180 - DNA, 22 bp, synthetic construct
  misc_feature 1..22: note = chemically synthesized
  source 1..22: mol_type = other DNA
acatctcttaagaaagtctttg

SEQ ID NO: 23181 - DNA, 22 bp, synthetic construct
  misc_feature 1..22: note = chemically synthesized
  source 1..22: mol_type = other DNA
catctcttaagaaagtctttgt

SEQ ID NO: 23182 - DNA, 22 bp, synthetic construct
  misc_feature 1..22: note = chemically synthesized
  source 1..22: mol_type = other DNA
ttaagaaagtctttgtttttaa

SEQ ID NO: 23183 - DNA, 22 bp, synthetic construct
  misc_feature 1..22: note = chemically synthesized
  source 1..22: mol_type = other DNA
aagaaagtctttgtttttaatc

SEQ ID NO: 23184 - DNA, 22 bp, synthetic construct
  misc_feature 1..22: note = chemically synthesized
  source 1..22: mol_type = other DNA
agaaagtctttgtttttaatcc

SEQ ID NO: 23185 - DNA, 22 bp, synthetic construct
  misc_feature 1..22: note = chemically synthesized
  source 1..22: mol_type = other DNA
tgtttttaatccaaataatctg

SEQ ID NO: 23186 - DNA, 22 bp, synthetic construct
  misc_feature 1..22: note = chemically synthesized
  source 1..22: mol_type = other DNA
gtttttaatccaaataatctga

SEQ ID NO: 23187 - DNA, 22 bp, synthetic construct
  misc_feature 1..22: note = chemically synthesized
  source 1..22: mol_type = other DNA
tttttaatccaaataatctgaa

SEQ ID NO: 23188 - DNA, 22 bp, synthetic construct
  misc_feature 1..22: note = chemically synthesized
  source 1..22: mol_type = other DNA
ttaatccaaataatctgaaagc

SEQ ID NO: 23189 - DNA, 22 bp, synthetic construct
  misc_feature 1..22: note = chemically synthesized
  source 1..22: mol_type = other DNA
taatccaaataatctgaaagcc

SEQ ID NO: 23190 - DNA, 22 bp, synthetic construct
  misc_feature 1..22: note = chemically synthesized
  source 1..22: mol_type = other DNA
aatccaaataatctgaaagcca

SEQ ID NO: 23191 - DNA, 22 bp, synthetic construct
  misc_feature 1..22: note = chemically synthesized
  source 1..22: mol_type = other DNA
atccaaataatctgaaagccaa

SEQ ID NO: 23192 - DNA, 22 bp, synthetic construct
  misc_feature 1..22: note = chemically synthesized
  source 1..22: mol_type = other DNA
aaagccaatttctctttagggc

SEQ ID NO: 23193 - DNA, 22 bp, synthetic construct
  misc_feature 1..22: note = chemically synthesized
  source 1..22: mol_type = other DNA
ctctttagggcatggagccaaa

SEQ ID NO: 23194 - DNA, 22 bp, synthetic construct
  misc_feature 1..22: note = chemically synthesized
  source 1..22: mol_type = other DNA
tctttagggcatggagccaaaa

SEQ ID NO: 23195 - DNA, 22 bp, synthetic construct
  misc_feature 1..22: note = chemically synthesized
  source 1..22: mol_type = other DNA
tttagggcatggagccaaaatc

SEQ ID NO: 23196 - DNA, 22 bp, synthetic construct
  misc_feature 1..22: note = chemically synthesized
  source 1..22: mol_type = other DNA
tagggcatggagccaaaatctg

SEQ ID NO: 23197 - DNA, 22 bp, synthetic construct
  misc_feature 1..22: note = chemically synthesized
  source 1..22: mol_type = other DNA
agggcatggagccaaaatctgt

SEQ ID NO: 23198 - DNA, 22 bp, synthetic construct
  misc_feature 1..22: note = chemically synthesized
  source 1..22: mol_type = other DNA
gggcatggagccaaaatctgtg

SEQ ID NO: 23199 - DNA, 22 bp, synthetic construct
  misc_feature 1..22: note = chemically synthesized
  source 1..22: mol_type = other DNA
tgatgttcccacagtactgtat

SEQ ID NO: 23200 - DNA, 22 bp, synthetic construct
  misc_feature 1..22: note = chemically synthesized
  source 1..22: mol_type = other DNA
ccacagtactgtatacacatgg

SEQ ID NO: 23201 - DNA, 22 bp, synthetic construct
  misc_feature 1..22: note = chemically synthesized
  source 1..22: mol_type = other DNA
tatacacatggagatttaggaa

SEQ ID NO: 23202 - DNA, 22 bp, synthetic construct
  misc_feature 1..22: note = chemically synthesized
  source 1..22: mol_type = other DNA
aggaattaaaattcaattttac

SEQ ID NO: 23203 - DNA, 22 bp, synthetic construct
  misc_feature 1..22: note = chemically synthesized
  source 1..22: mol_type = other DNA
ggaattaaaattcaattttact

SEQ ID NO: 23204 - DNA, 22 bp, synthetic construct
  misc_feature 1..22: note = chemically synthesized
  source 1..22: mol_type = other DNA
aaattcaattttacttttagtc

SEQ ID NO: 23205 - DNA, 22 bp, synthetic construct
  misc_feature 1..22: note = chemically synthesized
  source 1..22: mol_type = other DNA
aattttacttttagtcaagaga

SEQ ID NO: 23206 - DNA, 22 bp, synthetic construct
  misc_feature 1..22: note = chemically synthesized
  source 1..22: mol_type = other DNA
tacttttagtcaagagaattcc

SEQ ID NO: 23207 - DNA, 22 bp, synthetic construct
  misc_feature 1..22: note = chemically synthesized
  source 1..22: mol_type = other DNA
acttttagtcaagagaattcca

SEQ ID NO: 23208 - DNA, 22 bp, synthetic construct
  misc_feature 1..22: note = chemically synthesized
  source 1..22: mol_type = other DNA
cttttagtcaagagaattccag

SEQ ID NO: 23209 - DNA, 22 bp, synthetic construct
  misc_feature 1..22: note = chemically synthesized
  source 1..22: mol_type = other DNA
ttagtcaagagaattccagtaa

SEQ ID NO: 23210 - DNA, 22 bp, synthetic construct
  misc_feature 1..22: note = chemically synthesized
  source 1..22: mol_type = other DNA
tagtcaagagaattccagtaat

SEQ ID NO: 23211 - DNA, 22 bp, synthetic construct
  misc_feature 1..22: note = chemically synthesized
  source 1..22: mol_type = other DNA
agtcaagagaattccagtaata

SEQ ID NO: 23212 - DNA, 22 bp, synthetic construct
  misc_feature 1..22: note = chemically synthesized
  source 1..22: mol_type = other DNA
gtcaagagaattccagtaataa

SEQ ID NO: 23213 - DNA, 22 bp, synthetic construct
  misc_feature 1..22: note = chemically synthesized
  source 1..22: mol_type = other DNA
cagtaataaaaggtcagatttc

SEQ ID NO: 23214 - DNA, 22 bp, synthetic construct
  misc_feature 1..22: note = chemically synthesized
  source 1..22: mol_type = other DNA
ctaatcatatttgaatttactt

SEQ ID NO: 23215 - DNA, 22 bp, synthetic construct
  misc_feature 1..22: note = chemically synthesized
  source 1..22: mol_type = other DNA
taatcatatttgaatttacttt

SEQ ID NO: 23216 - DNA, 22 bp, synthetic construct
  misc_feature 1..22: note = chemically synthesized
  source 1..22: mol_type = other DNA
atcatatttgaatttactttgg

SEQ ID NO: 23217 - DNA, 22 bp, synthetic construct
  misc_feature 1..22: note = chemically synthesized
  source 1..22: mol_type = other DNA
gaatttactttggatgaaaaag

SEQ ID NO: 23218 - DNA, 22 bp, synthetic construct
  misc_feature 1..22: note = chemically synthesized
  source 1..22: mol_type = other DNA
aatttactttggatgaaaaaga

SEQ ID NO: 23219 - DNA, 22 bp, synthetic construct
  misc_feature 1..22: note = chemically synthesized
  source 1..22: mol_type = other DNA
actttggatgaaaaagaaagtt

SEQ ID NO: 23220 - DNA, 22 bp, synthetic construct
  misc_feature 1..22: note = chemically synthesized
  source 1..22: mol_type = other DNA
ctttggatgaaaaagaaagttc

SEQ ID NO: 23221 - DNA, 22 bp, synthetic construct
  misc_feature 1..22: note = chemically synthesized
  source 1..22: mol_type = other DNA
tggatgaaaaagaaagttctca

SEQ ID NO: 23222 - DNA, 22 bp, synthetic construct
  misc_feature 1..22: note = chemically synthesized
  source 1..22: mol_type = other DNA
ggatgaaaaagaaagttctcaa

SEQ ID NO: 23223 - DNA, 22 bp, synthetic construct
  misc_feature 1..22: note = chemically synthesized
  source 1..22: mol_type = other DNA
gatgaaaaagaaagttctcaaa

SEQ ID NO: 23224 - DNA, 22 bp, synthetic construct
  misc_feature 1..22: note = chemically synthesized
  source 1..22: mol_type = other DNA
tcaaatgagcggttaacttcac

SEQ ID NO: 23225 - DNA, 22 bp, synthetic construct
  misc_feature 1..22: note = chemically synthesized
  source 1..22: mol_type = other DNA
aaatgagcggttaacttcacac

SEQ ID NO: 23226 - DNA, 22 bp, synthetic construct
  misc_feature 1..22: note = chemically synthesized
  source 1..22: mol_type = other DNA
acttcacactttgtcatcactt

SEQ ID NO: 23227 - DNA, 22 bp, synthetic construct
  misc_feature 1..22: note = chemically synthesized
  source 1..22: mol_type = other DNA
cacactttgtcatcacttgaaa

SEQ ID NO: 23228 - DNA, 22 bp, synthetic construct
  misc_feature 1..22: note = chemically synthesized
  source 1..22: mol_type = other DNA
acactttgtcatcacttgaaaa

SEQ ID NO: 23229 - DNA, 22 bp, synthetic construct
  misc_feature 1..22: note = chemically synthesized
  source 1..22: mol_type = other DNA
tgtcatcacttgaaaatagctc

SEQ ID NO: 23230 - DNA, 22 bp, synthetic construct
  misc_feature 1..22: note = chemically synthesized
  source 1..22: mol_type = other DNA
gtcatcacttgaaaatagctca

SEQ ID NO: 23231 - DNA, 22 bp, synthetic construct
  misc_feature 1..22: note = chemically synthesized
  source 1..22: mol_type = other DNA
tcatcacttgaaaatagctcat

SEQ ID NO: 23232 - DNA, 22 bp, synthetic construct
  misc_feature 1..22: note = chemically synthesized
  source 1..22: mol_type = other DNA
gaaaatagctcattgaggatct

SEQ ID NO: 23233 - DNA, 22 bp, synthetic construct
  misc_feature 1..22: note = chemically synthesized
  source 1..22: mol_type = other DNA
aaaatagctcattgaggatctt

SEQ ID NO: 23234 - DNA, 22 bp, synthetic construct
  misc_feature 1..22: note = chemically synthesized
  source 1..22: mol_type = other DNA
attgaggatctttgcaaagtga

SEQ ID NO: 23235 - DNA, 22 bp, synthetic construct
  misc_feature 1..22: note = chemically synthesized
  source 1..22: mol_type = other DNA
aggatctttgcaaagtgatcca

SEQ ID NO: 23236 - DNA, 22 bp, synthetic construct
  misc_feature 1..22: note = chemically synthesized
  source 1..22: mol_type = other DNA
tgcaaagtgatccatcaccctg

SEQ ID NO: 23237 - DNA, 22 bp, synthetic construct
  misc_feature 1..22: note = chemically synthesized
  source 1..22: mol_type = other DNA
gcaaagtgatccatcaccctgg

SEQ ID NO: 23238 - DNA, 22 bp, synthetic construct
  misc_feature 1..22: note = chemically synthesized
  source 1..22: mol_type = other DNA
caaagtgatccatcaccctggc

SEQ ID NO: 23239 - DNA, 22 bp, synthetic construct
  misc_feature 1..22: note = chemically synthesized
  source 1..22: mol_type = other DNA
gctgggctgttttcagaatatg

SEQ ID NO: 23240 - DNA, 22 bp, synthetic construct
  misc_feature 1..22: note = chemically synthesized
  source 1..22: mol_type = other DNA
ggctgttttcagaatatggttg

SEQ ID NO: 23241 - DNA, 22 bp, synthetic construct
  misc_feature 1..22: note = chemically synthesized
  source 1..22: mol_type = other DNA
ttttcagaatatggttgcccaa

SEQ ID NO: 23242 - DNA, 22 bp, synthetic construct
  misc_feature 1..22: note = chemically synthesized
  source 1..22: mol_type = other DNA
tcagaatatggttgcccaaatg

SEQ ID NO: 23243 - DNA, 22 bp, synthetic construct
  misc_feature 1..22: note = chemically synthesized
  source 1..22: mol_type = other DNA
cagaatatggttgcccaaatga

SEQ ID NO: 23244 - DNA, 22 bp, synthetic construct
  misc_feature 1..22: note = chemically synthesized
  source 1..22: mol_type = other DNA
agaatatggttgcccaaatgac

SEQ ID NO: 23245 - DNA, 22 bp, synthetic construct
  misc_feature 1..22: note = chemically synthesized
  source 1..22: mol_type = other DNA
cccaaatgactttgaacaaatg

SEQ ID NO: 23246 - DNA, 22 bp, synthetic construct
  misc_feature 1..22: note = chemically synthesized
  source 1..22: mol_type = other DNA
tgaacaaatgtctcctgaagaa

SEQ ID NO: 23247 - DNA, 22 bp, synthetic construct
  misc_feature 1..22: note = chemically synthesized
  source 1..22: mol_type = other DNA
gaacaaatgtctcctgaagaac

SEQ ID NO: 23248 - DNA, 22 bp, synthetic construct
  misc_feature 1..22: note = chemically synthesized
  source 1..22: mol_type = other DNA
aacaaatgtctcctgaagaaca

SEQ ID NO: 23249 - DNA, 22 bp, synthetic construct
  misc_feature 1..22: note = chemically synthesized
  source 1..22: mol_type = other DNA
ctgaagaacagaagcctaatta

SEQ ID NO: 23250 - DNA, 22 bp, synthetic construct
  misc_feature 1..22: note = chemically synthesized
  source 1..22: mol_type = other DNA
aagaacagaagcctaattatgg

SEQ ID NO: 23251 - DNA, 22 bp, synthetic construct
  misc_feature 1..22: note = chemically synthesized
  source 1..22: mol_type = other DNA
attatggtccagctgcaaatgt

SEQ ID NO: 23252 - DNA, 22 bp, synthetic construct
  misc_feature 1..22: note = chemically synthesized
  source 1..22: mol_type = other DNA
tggtccagctgcaaatgtgacc

SEQ ID NO: 23253 - DNA, 22 bp, synthetic construct
  misc_feature 1..22: note = chemically synthesized
  source 1..22: mol_type = other DNA
caaatgtgaccccagtgtctgt

SEQ ID NO: 23254 - DNA, 22 bp, synthetic construct
  misc_feature 1..22: note = chemically synthesized
  source 1..22: mol_type = other DNA
tcactagatgttaaagaaaaat

SEQ ID NO: 23255 - DNA, 22 bp, synthetic construct
  misc_feature 1..22: note = chemically synthesized
  source 1..22: mol_type = other DNA
gatgttaaagaaaaatcactgc

SEQ ID NO: 23256 - DNA, 22 bp, synthetic construct
  misc_feature 1..22: note = chemically synthesized
  source 1..22: mol_type = other DNA
aagaaaaatcactgcattaatt

SEQ ID NO: 23257 - DNA, 22 bp, synthetic construct
  misc_feature 1..22: note = chemically synthesized
  source 1..22: mol_type = other DNA
cattaatttaaaaaagcaattt

SEQ ID NO: 23258 - DNA, 22 bp, synthetic construct
  misc_feature 1..22: note = chemically synthesized
  source 1..22: mol_type = other DNA
atttaaaaaagcaatttcagat

SEQ ID NO: 23259 - DNA, 22 bp, synthetic construct
  misc_feature 1..22: note = chemically synthesized
  source 1..22: mol_type = other DNA
aaaaaagcaatttcagatcaac

SEQ ID NO: 23260 - DNA, 22 bp, synthetic construct
  misc_feature 1..22: note = chemically synthesized
  source 1..22: mol_type = other DNA
aaaaagcaatttcagatcaaca

SEQ ID NO: 23261 - DNA, 22 bp, synthetic construct
  misc_feature 1..22: note = chemically synthesized
  source 1..22: mol_type = other DNA
cagatcaacagcacctttggtt

SEQ ID NO: 23262 - DNA, 22 bp, synthetic construct
  misc_feature 1..22: note = chemically synthesized
  source 1..22: mol_type = other DNA
agatcaacagcacctttggttg

SEQ ID NO: 23263 - DNA, 22 bp, synthetic construct
  misc_feature 1..22: note = chemically synthesized
  source 1..22: mol_type = other DNA
tggttggcaagtgttataggaa

SEQ ID NO: 23264 - DNA, 22 bp, synthetic construct
  misc_feature 1..22: note = chemically synthesized
  source 1..22: mol_type = other DNA
ggttggcaagtgttataggaat

SEQ ID NO: 23265 - DNA, 22 bp, synthetic construct
  misc_feature 1..22: note = chemically synthesized
  source 1..22: mol_type = other DNA
gttggcaagtgttataggaatt

SEQ ID NO: 23266 - DNA, 22 bp, synthetic construct
  misc_feature 1..22: note = chemically synthesized
  source 1..22: mol_type = other DNA
gcaagtgttataggaattgcag

SEQ ID NO: 23267 - DNA, 22 bp, synthetic construct
  misc_feature 1..22: note = chemically synthesized
  source 1..22: mol_type = other DNA
taggaattgcagtgatttaagc

SEQ ID NO: 23268 - DNA, 22 bp, synthetic construct
  misc_feature 1..22: note = chemically synthesized
  source 1..22: mol_type = other DNA
cagtgatttaagcatctctcta

SEQ ID NO: 23269 - DNA, 22 bp, synthetic construct
  misc_feature 1..22: note = chemically synthesized
  source 1..22: mol_type = other DNA
aagcatctctctagaattcagg

SEQ ID NO: 23270 - DNA, 22 bp, synthetic construct
  misc_feature 1..22: note = chemically synthesized
  source 1..22: mol_type = other DNA
agcatctctctagaattcagga

SEQ ID NO: 23271 - DNA, 22 bp, synthetic construct
  misc_feature 1..22: note = chemically synthesized
  source 1..22: mol_type = other DNA
tctagaattcaggatatgtttt

SEQ ID NO: 23272 - DNA, 22 bp, synthetic construct
  misc_feature 1..22: note = chemically synthesized
  source 1..22: mol_type = other DNA
tagaattcaggatatgtttttt

SEQ ID NO: 23273 - DNA, 22 bp, synthetic construct
  misc_feature 1..22: note = chemically synthesized
  source 1..22: mol_type = other DNA
gaattcaggatatgtttttttt

SEQ ID NO: 23274 - DNA, 22 bp, synthetic construct
  misc_feature 1..22: note = chemically synthesized
  source 1..22: mol_type = other DNA
aggatatgttttttttaagcta

SEQ ID NO: 23275 - DNA, 22 bp, synthetic construct
  misc_feature 1..22: note = chemically synthesized
  source 1..22: mol_type = other DNA
tttttaagctacatctacctag

SEQ ID NO: 23276 - DNA, 22 bp, synthetic construct
  misc_feature 1..22: note = chemically synthesized
  source 1..22: mol_type = other DNA
ttttaagctacatctacctagt

SEQ ID NO: 23277 - DNA, 22 bp, synthetic construct
  misc_feature 1..22: note = chemically synthesized
  source 1..22: mol_type = other DNA
tttaagctacatctacctagtc

SEQ ID NO: 23278 - DNA, 22 bp, synthetic construct
  misc_feature 1..22: note = chemically synthesized
  source 1..22: mol_type = other DNA
ttaagctacatctacctagtct

SEQ ID NO: 23279 - DNA, 22 bp, synthetic construct
  misc_feature 1..22: note = chemically synthesized
  source 1..22: mol_type = other DNA
taagctacatctacctagtctg

SEQ ID NO: 23280 - DNA, 22 bp, synthetic construct
  misc_feature 1..22: note = chemically synthesized
  source 1..22: mol_type = other DNA
aagctacatctacctagtctga

SEQ ID NO: 23281 - DNA, 22 bp, synthetic construct
  misc_feature 1..22: note = chemically synthesized
  source 1..22: mol_type = other DNA
agctacatctacctagtctgaa

SEQ ID NO: 23282 - DNA, 22 bp, synthetic construct
  misc_feature 1..22: note = chemically synthesized
  source 1..22: mol_type = other DNA
catctacctagtctgaagagac

SEQ ID NO: 23283 - DNA, 22 bp, synthetic construct
  misc_feature 1..22: note = chemically synthesized
  source 1..22: mol_type = other DNA
cctagtctgaagagacactcct

SEQ ID NO: 23284 - DNA, 22 bp, synthetic construct
  misc_feature 1..22: note = chemically synthesized
  source 1..22: mol_type = other DNA
gtctgaagagacactcctgaac

SEQ ID NO: 23285 - DNA, 22 bp, synthetic construct
  misc_feature 1..22: note = chemically synthesized
  source 1..22: mol_type = other DNA
aagagacactcctgaactctgg

SEQ ID NO: 23286 - DNA, 22 bp, synthetic construct
  misc_feature 1..22: note = chemically synthesized
  source 1..22: mol_type = other DNA
ctgaactctggaggatagatgt

SEQ ID NO: 23287 - DNA, 22 bp, synthetic construct
  misc_feature 1..22: note = chemically synthesized
  source 1..22: mol_type = other DNA
aactctggaggatagatgtctc

SEQ ID NO: 23288 - DNA, 22 bp, synthetic construct
  misc_feature 1..22: note = chemically synthesized
  source 1..22: mol_type = other DNA
tggaggatagatgtctctatct

SEQ ID NO: 23289 - DNA, 22 bp, synthetic construct
  misc_feature 1..22: note = chemically synthesized
  source 1..22: mol_type = other DNA
gaggatagatgtctctatctga

SEQ ID NO: 23290 - DNA, 22 bp, synthetic construct
  misc_feature 1..22: note = chemically synthesized
  source 1..22: mol_type = other DNA
tatctgaatcatatttctcctt

SEQ ID NO: 23291 - DNA, 22 bp, synthetic construct
  misc_feature 1..22: note = chemically synthesized
  source 1..22: mol_type = other DNA
tctgaatcatatttctccttcc

SEQ ID NO: 23292 - DNA, 22 bp, synthetic construct
  misc_feature 1..22: note = chemically synthesized
  source 1..22: mol_type = other DNA
aatcatatttctccttccctcc

SEQ ID NO: 23293 - DNA, 22 bp, synthetic construct
  misc_feature 1..22: note = chemically synthesized
  source 1..22: mol_type = other DNA
ctccttccctccctccttcctc

SEQ ID NO: 23294 - DNA, 22 bp, synthetic construct
  misc_feature 1..22: note = chemically synthesized
  source 1..22: mol_type = other DNA
tccttccctccctccttcctct

SEQ ID NO: 23295 - DNA, 22 bp, synthetic construct
  misc_feature 1..22: note = chemically synthesized
  source 1..22: mol_type = other DNA
cttccctccctccttcctctcc

SEQ ID NO: 23296 - DNA, 22 bp, synthetic construct
  misc_feature 1..22: note = chemically synthesized
  source 1..22: mol_type = other DNA
ccctccctccttcctctcctct

SEQ ID NO: 23297 - DNA, 22 bp, synthetic construct
  misc_feature 1..22: note = chemically synthesized
  source 1..22: mol_type = other DNA
cctccctccttcctctcctctc

SEQ ID NO: 23298 - DNA, 22 bp, synthetic construct
  misc_feature 1..22: note = chemically synthesized
  source 1..22: mol_type = other DNA
cctccttcctctcctctcctct

SEQ ID NO: 23299 - DNA, 22 bp, synthetic construct
  misc_feature 1..22: note = chemically synthesized
  source 1..22: mol_type = other DNA
cttcctctcctctcctctctct

SEQ ID NO: 23300 - DNA, 22 bp, synthetic construct
  misc_feature 1..22: note = chemically synthesized
  source 1..22: mol_type = other DNA
cctctcctctcctctctctctc

SEQ ID NO: 23301 - DNA, 22 bp, synthetic construct
  misc_feature 1..22: note = chemically synthesized
  source 1..22: mol_type = other DNA
ctctcctctcctctctctctct

SEQ ID NO: 23302 - DNA, 22 bp, synthetic construct
  misc_feature 1..22: note = chemically synthesized
  source 1..22: mol_type = other DNA
tcctctcctctctctctctctc

SEQ ID NO: 23303 - DNA, 22 bp, synthetic construct
  misc_feature 1..22: note = chemically synthesized
  source 1..22: mol_type = other DNA
ctctcctctctctctctctcta

SEQ ID NO: 23304 - DNA, 22 bp, synthetic construct
  misc_feature 1..22: note = chemically synthesized
  source 1..22: mol_type = other DNA
tcctctctctctctctctatgt

SEQ ID NO: 23305 - DNA, 22 bp, synthetic construct
  misc_feature 1..22: note = chemically synthesized
  source 1..22: mol_type = other DNA
ctctctctctctctctatgtgt

SEQ ID NO: 23306 - DNA, 22 bp, synthetic construct
  misc_feature 1..22: note = chemically synthesized
  source 1..22: mol_type = other DNA
tctctctctctctatgtgtgtg

SEQ ID NO: 23307 - DNA, 22 bp, synthetic construct
  misc_feature 1..22: note = chemically synthesized
  source 1..22: mol_type = other DNA
tctctctctctatgtgtgtgtg

SEQ ID NO: 23308 - DNA, 22 bp, synthetic construct
  misc_feature 1..22: note = chemically synthesized
  source 1..22: mol_type = other DNA
tctctctctatgtgtgtgtgtg

SEQ ID NO: 23309 - DNA, 22 bp, synthetic construct
  misc_feature 1..22: note = chemically synthesized
  source 1..22: mol_type = other DNA
tctctctatgtgtgtgtgtgta

SEQ ID NO: 23310 - DNA, 22 bp, synthetic construct
  misc_feature 1..22: note = chemically synthesized
  source 1..22: mol_type = other DNA
tctctatgtgtgtgtgtgtaca

SEQ ID NO: 23311 - DNA, 22 bp, synthetic construct
  misc_feature 1..22: note = chemically synthesized
  source 1..22: mol_type = other DNA
tctatgtgtgtgtgtgtacata

SEQ ID NO: 23312 - DNA, 22 bp, synthetic construct
  misc_feature 1..22: note = chemically synthesized
  source 1..22: mol_type = other DNA
tatgtgtgtgtgtgtacatata

SEQ ID NO: 23313 - DNA, 22 bp, synthetic construct
  misc_feature 1..22: note = chemically synthesized
  source 1..22: mol_type = other DNA
tgtgtgtgtgtgtacatatata

SEQ ID NO: 23314 - DNA, 22 bp, synthetic construct
  misc_feature 1..22: note = chemically synthesized
  source 1..22: mol_type = other DNA
gctgcacaatgacattttggtc

SEQ ID NO: 23315 - DNA, 22 bp, synthetic construct
  misc_feature 1..22: note = chemically synthesized
  source 1..22: mol_type = other DNA
ctgcacaatgacattttggtca

SEQ ID NO: 23316 - DNA, 22 bp, synthetic construct
  misc_feature 1..22: note = chemically synthesized
  source 1..22: mol_type = other DNA
cacaatgacattttggtcaatg

SEQ ID NO: 23317 - DNA, 22 bp, synthetic construct
  misc_feature 1..22: note = chemically synthesized
  source 1..22: mol_type = other DNA
tggtcaatgatggaccacatta

SEQ ID NO: 23318 - DNA, 22 bp, synthetic construct
  misc_feature 1..22: note = chemically synthesized
  source 1..22: mol_type = other DNA
ggtcaatgatggaccacattat

SEQ ID NO: 23319 - DNA, 22 bp, synthetic construct
  misc_feature 1..22: note = chemically synthesized
  source 1..22: mol_type = other DNA
gtcaatgatggaccacattata

SEQ ID NO: 23320 - DNA, 22 bp, synthetic construct
  misc_feature 1..22: note = chemically synthesized
  source 1..22: mol_type = other DNA
tacgacagtggtcccataaggt

SEQ ID NO: 23321 - DNA, 22 bp, synthetic construct
  misc_feature 1..22: note = chemically synthesized
  source 1..22: mol_type = other DNA
taatactgtattttcactgtac

SEQ ID NO: 23322 - DNA, 22 bp, synthetic construct
  misc_feature 1..22: note = chemically synthesized
  source 1..22: mol_type = other DNA
tattttcactgtaccttttcta

SEQ ID NO: 23323 - DNA, 22 bp, synthetic construct
  misc_feature 1..22: note = chemically synthesized
  source 1..22: mol_type = other DNA
tcactgtaccttttctatgttt

SEQ ID NO: 23324 - DNA, 22 bp, synthetic construct
  misc_feature 1..22: note = chemically synthesized
  source 1..22: mol_type = other DNA
cactgtaccttttctatgttta

SEQ ID NO: 23325 - DNA, 22 bp, synthetic construct
  misc_feature 1..22: note = chemically synthesized
  source 1..22: mol_type = other DNA
actgtaccttttctatgtttag

SEQ ID NO: 23326 - DNA, 22 bp, synthetic construct
  misc_feature 1..22: note = chemically synthesized
  source 1..22: mol_type = other DNA
taccttttctatgtttagatac

SEQ ID NO: 23327 - DNA, 22 bp, synthetic construct
  misc_feature 1..22: note = chemically synthesized
  source 1..22: mol_type = other DNA
ttctatgtttagatacacaaat

SEQ ID NO: 23328 - DNA, 22 bp, synthetic construct
  misc_feature 1..22: note = chemically synthesized
  source 1..22: mol_type = other DNA
tctatgtttagatacacaaata

SEQ ID NO: 23329 - DNA, 22 bp, synthetic construct
  misc_feature 1..22: note = chemically synthesized
  source 1..22: mol_type = other DNA
ctatgtttagatacacaaatac

SEQ ID NO: 23330 - DNA, 22 bp, synthetic construct
  misc_feature 1..22: note = chemically synthesized
  source 1..22: mol_type = other DNA
tatgtttagatacacaaatacc

SEQ ID NO: 23331 - DNA, 22 bp, synthetic construct
  misc_feature 1..22: note = chemically synthesized
  source 1..22: mol_type = other DNA
tgtttagatacacaaataccac

SEQ ID NO: 23332 - DNA, 22 bp, synthetic construct
  misc_feature 1..22: note = chemically synthesized
  source 1..22: mol_type = other DNA
agatacacaaataccactgtta

SEQ ID NO: 23333 - DNA, 22 bp, synthetic construct
  misc_feature 1..22: note = chemically synthesized
  source 1..22: mol_type = other DNA
gatacacaaataccactgttac

SEQ ID NO: 23334 - DNA, 22 bp, synthetic construct
  misc_feature 1..22: note = chemically synthesized
  source 1..22: mol_type = other DNA
ttaccattgcctacagtgttca

SEQ ID NO: 23335 - DNA, 22 bp, synthetic construct
  misc_feature 1..22: note = chemically synthesized
  source 1..22: mol_type = other DNA
ccattgcctacagtgttcagta

SEQ ID NO: 23336 - DNA, 22 bp, synthetic construct
  misc_feature 1..22: note = chemically synthesized
  source 1..22: mol_type = other DNA
cctacagtgttcagtacagtca

SEQ ID NO: 23337 - DNA, 22 bp, synthetic construct
  misc_feature 1..22: note = chemically synthesized
  source 1..22: mol_type = other DNA
cagtgttcagtacagtcacatg

SEQ ID NO: 23338 - DNA, 22 bp, synthetic construct
  misc_feature 1..22: note = chemically synthesized
  source 1..22: mol_type = other DNA
agtacagtcacatgctgtacag

SEQ ID NO: 23339 - DNA, 22 bp, synthetic construct
  misc_feature 1..22: note = chemically synthesized
  source 1..22: mol_type = other DNA
tacaggtttgcagcccaggagc

SEQ ID NO: 23340 - DNA, 22 bp, synthetic construct
  misc_feature 1..22: note = chemically synthesized
  source 1..22: mol_type = other DNA
gcagcccaggagcctaggagca

SEQ ID NO: 23341 - DNA, 22 bp, synthetic construct
  misc_feature 1..22: note = chemically synthesized
  source 1..22: mol_type = other DNA
cagcccaggagcctaggagcaa

SEQ ID NO: 23342 - DNA, 22 bp, synthetic construct
  misc_feature 1..22: note = chemically synthesized
  source 1..22: mol_type = other DNA
ggagcaataggccacatcaata

SEQ ID NO: 23343 - DNA, 22 bp, synthetic construct
  misc_feature 1..22: note = chemically synthesized
  source 1..22: mol_type = other DNA
ggtatgtagtaagctataccat

SEQ ID NO: 23344 - DNA, 22 bp, synthetic construct
  misc_feature 1..22: note = chemically synthesized
  source 1..22: mol_type = other DNA
taccatttaggtttaggtaagt

SEQ ID NO: 23345 - DNA, 22 bp, synthetic construct
  misc_feature 1..22: note = chemically synthesized
  source 1..22: mol_type = other DNA
aggtttaggtaagtacactcta

SEQ ID NO: 23346 - DNA, 22 bp, synthetic construct
  misc_feature 1..22: note = chemically synthesized
  source 1..22: mol_type = other DNA
ggtttaggtaagtacactctat

SEQ ID NO: 23347 - DNA, 22 bp, synthetic construct
  misc_feature 1..22: note = chemically synthesized
  source 1..22: mol_type = other DNA
aggtaagtacactctattatgt

SEQ ID NO: 23348 - DNA, 22 bp, synthetic construct
  misc_feature 1..22: note = chemically synthesized
  source 1..22: mol_type = other DNA
ggtaagtacactctattatgtt

SEQ ID NO: 23349 - DNA, 22 bp, synthetic construct
  misc_feature 1..22: note = chemically synthesized
  source 1..22: mol_type = other DNA
tattatgttcgcacaatgatga

SEQ ID NO: 23350 - DNA, 22 bp, synthetic construct
  misc_feature 1..22: note = chemically synthesized
  source 1..22: mol_type = other DNA
ttatgttcgcacaatgatgaaa

SEQ ID NO: 23351 - DNA, 22 bp, synthetic construct
  misc_feature 1..22: note = chemically synthesized
  source 1..22: mol_type = other DNA
tgttcgcacaatgatgaaattg

SEQ ID NO: 23352 - DNA, 22 bp, synthetic construct
  misc_feature 1..22: note = chemically synthesized
  source 1..22: mol_type = other DNA
gcacaatgatgaaattgcttaa

SEQ ID NO: 23353 - DNA, 22 bp, synthetic construct
  misc_feature 1..22: note = chemically synthesized
  source 1..22: mol_type = other DNA
cttaatgacacatttctcagaa

SEQ ID NO: 23354 - DNA, 22 bp, synthetic construct
  misc_feature 1..22: note = chemically synthesized
  source 1..22: mol_type = other DNA
aatgacacatttctcagaatat

SEQ ID NO: 23355 - DNA, 22 bp, synthetic construct
  misc_feature 1..22: note = chemically synthesized
  source 1..22: mol_type = other DNA
atgacacatttctcagaatata

SEQ ID NO: 23356 - DNA, 22 bp, synthetic construct
  misc_feature 1..22: note = chemically synthesized
  source 1..22: mol_type = other DNA
ctcagaatatatccccattgtt

SEQ ID NO: 23357 - DNA, 22 bp, synthetic construct
  misc_feature 1..22: note = chemically synthesized
  source 1..22: mol_type = other DNA
tcagaatatatccccattgtta

SEQ ID NO: 23358 - DNA, 22 bp, synthetic construct
  misc_feature 1..22: note = chemically synthesized
  source 1..22: mol_type = other DNA
agaatatatccccattgttaag

SEQ ID NO: 23359 - DNA, 22 bp, synthetic construct
  misc_feature 1..22: note = chemically synthesized
  source 1..22: mol_type = other DNA
ttaaggaatgcatggctgtata

SEQ ID NO: 23360 - DNA, 22 bp, synthetic construct
  misc_feature 1..22: note = chemically synthesized
  source 1..22: mol_type = other DNA
aggaatgcatggctgtatacac

SEQ ID NO: 23361 - DNA, 22 bp, synthetic construct
  misc_feature 1..22: note = chemically synthesized
  source 1..22: mol_type = other DNA
tatacacacacatgtgtttgtg

SEQ ID NO: 23362 - DNA, 22 bp, synthetic construct
  misc_feature 1..22: note = chemically synthesized
  source 1..22: mol_type = other DNA
gtgtgttttcatgtatatacat

SEQ ID NO: 23363 - DNA, 22 bp, synthetic construct
  misc_feature 1..22: note = chemically synthesized
  source 1..22: mol_type = other DNA
tgtgttttcatgtatatacata

SEQ ID NO: 23364 - DNA, 22 bp, synthetic construct
  misc_feature 1..22: note = chemically synthesized
  source 1..22: mol_type = other DNA
tcatgtatatacatatatgtgt

SEQ ID NO: 23365 - DNA, 22 bp, synthetic construct
  misc_feature 1..22: note = chemically synthesized
  source 1..22: mol_type = other DNA
catgtatatacatatatgtgtg

SEQ ID NO: 23366 - DNA, 22 bp, synthetic construct
  misc_feature 1..22: note = chemically synthesized
  source 1..22: mol_type = other DNA
atgtatatacatatatgtgtgt

SEQ ID NO: 23367 - DNA, 22 bp, synthetic construct
  misc_feature 1..22: note = chemically synthesized
  source 1..22: mol_type = other DNA
ataacagggactcaagaagttg

SEQ ID NO: 23368 - DNA, 22 bp, synthetic construct
  misc_feature 1..22: note = chemically synthesized
  source 1..22: mol_type = other DNA
aagaagttgcctggagttgttc

SEQ ID NO: 23369 - DNA, 22 bp, synthetic construct
  misc_feature 1..22: note = chemically synthesized
  source 1..22: mol_type = other DNA
cctggagttgttcctttcttca

SEQ ID NO: 23370 - DNA, 22 bp, synthetic construct
  misc_feature 1..22: note = chemically synthesized
  source 1..22: mol_type = other DNA
gagttgttcctttcttcaaggg

SEQ ID NO: 23371 - DNA, 22 bp, synthetic construct
  misc_feature 1..22: note = chemically synthesized
  source 1..22: mol_type = other DNA
ttcctttcttcaagggtctagc

SEQ ID NO: 23372 - DNA, 22 bp, synthetic construct
  misc_feature 1..22: note = chemically synthesized
  source 1..22: mol_type = other DNA
ctttcttcaagggtctagcaat

SEQ ID NO: 23373 - DNA, 22 bp, synthetic construct
  misc_feature 1..22: note = chemically synthesized
  source 1..22: mol_type = other DNA
tcttcaagggtctagcaatata

SEQ ID NO: 23374 - DNA, 22 bp, synthetic construct
  misc_feature 1..22: note = chemically synthesized
  source 1..22: mol_type = other DNA
cttcaagggtctagcaatatat

SEQ ID NO: 23375 - DNA, 22 bp, synthetic construct
  misc_feature 1..22: note = chemically synthesized
  source 1..22: mol_type = other DNA
ttcaagggtctagcaatatatc

SEQ ID NO: 23376 - DNA, 22 bp, synthetic construct
  misc_feature 1..22: note = chemically synthesized
  source 1..22: mol_type = other DNA
caagggtctagcaatatatctg

SEQ ID NO: 23377 - DNA, 22 bp, synthetic construct
  misc_feature 1..22: note = chemically synthesized
  source 1..22: mol_type = other DNA
aagggtctagcaatatatctga

SEQ ID NO: 23378 - DNA, 22 bp, synthetic construct
  misc_feature 1..22: note = chemically synthesized
  source 1..22: mol_type = other DNA
gcaatatatctgataccatctc

SEQ ID NO: 23379 - DNA, 22 bp, synthetic construct
  misc_feature 1..22: note = chemically synthesized
  source 1..22: mol_type = other DNA
ataccatctcaagaggaccaag

SEQ ID NO: 23380 - DNA, 22 bp, synthetic construct
  misc_feature 1..22: note = chemically synthesized
  source 1..22: mol_type = other DNA
aagaggaccaagggcttataag

SEQ ID NO: 23381 - DNA, 22 bp, synthetic construct
  misc_feature 1..22: note = chemically synthesized
  source 1..22: mol_type = other DNA
ataagatgaactttctggggta

SEQ ID NO: 23382 - DNA, 22 bp, synthetic construct
  misc_feature 1..22: note = chemically synthesized
  source 1..22: mol_type = other DNA
taagatgaactttctggggtat

SEQ ID NO: 23383 - DNA, 22 bp, synthetic construct
  misc_feature 1..22: note = chemically synthesized
  source 1..22: mol_type = other DNA
tctggggtatttgggactactt

SEQ ID NO: 23384 - DNA, 22 bp, synthetic construct
  misc_feature 1..22: note = chemically synthesized
  source 1..22: mol_type = other DNA
ctggggtatttgggactacttc

SEQ ID NO: 23385 - DNA, 22 bp, synthetic construct
  misc_feature 1..22: note = chemically synthesized
  source 1..22: mol_type = other DNA
tggggtatttgggactacttcc

SEQ ID NO: 23386 - DNA, 22 bp, synthetic construct
  misc_feature 1..22: note = chemically synthesized
  source 1..22: mol_type = other DNA
gggtatttgggactacttcctg

SEQ ID NO: 23387 - DNA, 22 bp, synthetic construct
  misc_feature 1..22: note = chemically synthesized
  source 1..22: mol_type = other DNA
gggactacttcctgattaactc

SEQ ID NO: 23388 - DNA, 22 bp, synthetic construct
  misc_feature 1..22: note = chemically synthesized
  source 1..22: mol_type = other DNA
ggactacttcctgattaactcc

SEQ ID NO: 23389 - DNA, 22 bp, synthetic construct
  misc_feature 1..22: note = chemically synthesized
  source 1..22: mol_type = other DNA
cttcctgattaactccaaaaag

SEQ ID NO: 23390 - DNA, 22 bp, synthetic construct
  misc_feature 1..22: note = chemically synthesized
  source 1..22: mol_type = other DNA
cctgattaactccaaaaaggaa

SEQ ID NO: 23391 - DNA, 22 bp, synthetic construct
  misc_feature 1..22: note = chemically synthesized
  source 1..22: mol_type = other DNA
ctgattaactccaaaaaggaag

SEQ ID NO: 23392 - DNA, 22 bp, synthetic construct
  misc_feature 1..22: note = chemically synthesized
  source 1..22: mol_type = other DNA
attaactccaaaaaggaagaga

SEQ ID NO: 23393 - DNA, 22 bp, synthetic construct
  misc_feature 1..22: note = chemically synthesized
  source 1..22: mol_type = other DNA
actccaaaaaggaagagaaagg

SEQ ID NO: 23394 - DNA, 22 bp, synthetic construct
  misc_feature 1..22: note = chemically synthesized
  source 1..22: mol_type = other DNA
caaaaaggaagagaaaggaaag

SEQ ID NO: 23395 - DNA, 22 bp, synthetic construct
  misc_feature 1..22: note = chemically synthesized
  source 1..22: mol_type = other DNA
aactttcttcccttattttcat

SEQ ID NO: 23396 - DNA, 22 bp, synthetic construct
  misc_feature 1..22: note = chemically synthesized
  source 1..22: mol_type = other DNA
tcttcccttattttcattgcag

SEQ ID NO: 23397 - DNA, 22 bp, synthetic construct
  misc_feature 1..22: note = chemically synthesized
  source 1..22: mol_type = other DNA
cttcccttattttcattgcagc

SEQ ID NO: 23398 - DNA, 22 bp, synthetic construct
  misc_feature 1..22: note = chemically synthesized
  source 1..22: mol_type = other DNA
ttcccttattttcattgcagct

SEQ ID NO: 23399 - DNA, 22 bp, synthetic construct
  misc_feature 1..22: note = chemically synthesized
  source 1..22: mol_type = other DNA
cccttattttcattgcagctgt

SEQ ID NO: 23400 - DNA, 22 bp, synthetic construct
  misc_feature 1..22: note = chemically synthesized
  source 1..22: mol_type = other DNA
ccttattttcattgcagctgtt

SEQ ID NO: 23401 - DNA, 22 bp, synthetic construct
  misc_feature 1..22: note = chemically synthesized
  source 1..22: mol_type = other DNA
attttcattgcagctgttcact

SEQ ID NO: 23402 - DNA, 22 bp, synthetic construct
  misc_feature 1..22: note = chemically synthesized
  source 1..22: mol_type = other DNA
ttttcattgcagctgttcactt

SEQ ID NO: 23403 - DNA, 22 bp, synthetic construct
  misc_feature 1..22: note = chemically synthesized
  source 1..22: mol_type = other DNA
tcattgcagctgttcactttat

SEQ ID NO: 23404 - DNA, 22 bp, synthetic construct
  misc_feature 1..22: note = chemically synthesized
  source 1..22: mol_type = other DNA
cattgcagctgttcactttatg

SEQ ID NO: 23405 - DNA, 22 bp, synthetic construct
  misc_feature 1..22: note = chemically synthesized
  source 1..22: mol_type = other DNA
attgcagctgttcactttatgg

SEQ ID NO: 23406 - DNA, 22 bp, synthetic construct
  misc_feature 1..22: note = chemically synthesized
  source 1..22: mol_type = other DNA
cagctgttcactttatggagtg

SEQ ID NO: 23407 - DNA, 22 bp, synthetic construct
  misc_feature 1..22: note = chemically synthesized
  source 1..22: mol_type = other DNA
ttcactttatggagtgttctag

SEQ ID NO: 23408 - DNA, 22 bp, synthetic construct
  misc_feature 1..22: note = chemically synthesized
  source 1..22: mol_type = other DNA
actttatggagtgttctagtcc

SEQ ID NO: 23409 - DNA, 22 bp, synthetic construct
  misc_feature 1..22: note = chemically synthesized
  source 1..22: mol_type = other DNA
tatggagtgttctagtcccttg

SEQ ID NO: 23410 - DNA, 22 bp, synthetic construct
  misc_feature 1..22: note = chemically synthesized
  source 1..22: mol_type = other DNA
atggagtgttctagtcccttga

SEQ ID NO: 23411 - DNA, 22 bp, synthetic construct
  misc_feature 1..22: note = chemically synthesized
  source 1..22: mol_type = other DNA
tggagtgttctagtcccttgac

SEQ ID NO: 23412 - DNA, 22 bp, synthetic construct
  misc_feature 1..22: note = chemically synthesized
  source 1..22: mol_type = other DNA
tagtcccttgacatccctgctt

SEQ ID NO: 23413 - DNA, 22 bp, synthetic construct
  misc_feature 1..22: note = chemically synthesized
  source 1..22: mol_type = other DNA
gtcccttgacatccctgctttt

SEQ ID NO: 23414 - DNA, 22 bp, synthetic construct
  misc_feature 1..22: note = chemically synthesized
  source 1..22: mol_type = other DNA
gacatccctgcttttcccttgc

SEQ ID NO: 23415 - DNA, 22 bp, synthetic construct
  misc_feature 1..22: note = chemically synthesized
  source 1..22: mol_type = other DNA
acatccctgcttttcccttgct

SEQ ID NO: 23416 - DNA, 22 bp, synthetic construct
  misc_feature 1..22: note = chemically synthesized
  source 1..22: mol_type = other DNA
cttttcccttgctctgcaagtt

SEQ ID NO: 23417 - DNA, 22 bp, synthetic construct
  misc_feature 1..22: note = chemically synthesized
  source 1..22: mol_type = other DNA
ttcccttgctctgcaagttcct

SEQ ID NO: 23418 - DNA, 22 bp, synthetic construct
  misc_feature 1..22: note = chemically synthesized
  source 1..22: mol_type = other DNA
tcccttgctctgcaagttcctt

SEQ ID NO: 23419 - DNA, 22 bp, synthetic construct
  misc_feature 1..22: note = chemically synthesized
  source 1..22: mol_type = other DNA
cccttgctctgcaagttccttt

SEQ ID NO: 23420 - DNA, 22 bp, synthetic construct
  misc_feature 1..22: note = chemically synthesized
  source 1..22: mol_type = other DNA
ccttgctctgcaagttcctttt

SEQ ID NO: 23421 - DNA, 22 bp, synthetic construct
  misc_feature 1..22: note = chemically synthesized
  source 1..22: mol_type = other DNA
gctctgcaagttccttttgggc

SEQ ID NO: 23422 - DNA, 22 bp, synthetic construct
  misc_feature 1..22: note = chemically synthesized
  source 1..22: mol_type = other DNA
ctctgcaagttccttttgggct

SEQ ID NO: 23423 - DNA, 22 bp, synthetic construct
  misc_feature 1..22: note = chemically synthesized
  source 1..22: mol_type = other DNA
tgcaagttccttttgggctcac

SEQ ID NO: 23424 - DNA, 22 bp, synthetic construct
  misc_feature 1..22: note = chemically synthesized
  source 1..22: mol_type = other DNA
caagttccttttgggctcactt

SEQ ID NO: 23425 - DNA, 22 bp, synthetic construct
  misc_feature 1..22: note = chemically synthesized
  source 1..22: mol_type = other DNA
cttttgggctcactttttttct

SEQ ID NO: 23426 - DNA, 22 bp, synthetic construct
  misc_feature 1..22: note = chemically synthesized
  source 1..22: mol_type = other DNA
ttgggctcactttttttctttg

SEQ ID NO: 23427 - DNA, 22 bp, synthetic construct
  misc_feature 1..22: note = chemically synthesized
  source 1..22: mol_type = other DNA
tgggctcactttttttctttga

SEQ ID NO: 23428 - DNA, 22 bp, synthetic construct
  misc_feature 1..22: note = chemically synthesized
  source 1..22: mol_type = other DNA
gggctcactttttttctttgaa

SEQ ID NO: 23429 - DNA, 22 bp, synthetic construct
  misc_feature 1..22: note = chemically synthesized
  source 1..22: mol_type = other DNA
ggctcactttttttctttgaat

SEQ ID NO: 23430 - DNA, 22 bp, synthetic construct
  misc_feature 1..22: note = chemically synthesized
  source 1..22: mol_type = other DNA
actttttttctttgaatttagc

SEQ ID NO: 23431 - DNA, 22 bp, synthetic construct
  misc_feature 1..22: note = chemically synthesized
  source 1..22: mol_type = other DNA
tttttctttgaatttagcctag

SEQ ID NO: 23432 - DNA, 22 bp, synthetic construct
  misc_feature 1..22: note = chemically synthesized
  source 1..22: mol_type = other DNA
ttttctttgaatttagcctaga

SEQ ID NO: 23433 - DNA, 22 bp, synthetic construct
  misc_feature 1..22: note = chemically synthesized
  source 1..22: mol_type = other DNA
tttctttgaatttagcctagac

SEQ ID NO: 23434 - DNA, 22 bp, synthetic construct
  misc_feature 1..22: note = chemically synthesized
  source 1..22: mol_type = other DNA
ttctttgaatttagcctagact

SEQ ID NO: 23435 - DNA, 22 bp, synthetic construct
  misc_feature 1..22: note = chemically synthesized
  source 1..22: mol_type = other DNA
tctttgaatttagcctagactt

SEQ ID NO: 23436 - DNA, 22 bp, synthetic construct
  misc_feature 1..22: note = chemically synthesized
  source 1..22: mol_type = other DNA
ctttgaatttagcctagacttt

SEQ ID NO: 23437 - DNA, 22 bp, synthetic construct
  misc_feature 1..22: note = chemically synthesized
  source 1..22: mol_type = other DNA
tttgaatttagcctagactttt

SEQ ID NO: 23438 - DNA, 22 bp, synthetic construct
  misc_feature 1..22: note = chemically synthesized
  source 1..22: mol_type = other DNA
tgaatttagcctagactttttc

SEQ ID NO: 23439 - DNA, 22 bp, synthetic construct
  misc_feature 1..22: note = chemically synthesized
  source 1..22: mol_type = other DNA
gaatttagcctagactttttct

SEQ ID NO: 23440 - DNA, 22 bp, synthetic construct
  misc_feature 1..22: note = chemically synthesized
  source 1..22: mol_type = other DNA
aatttagcctagactttttctc

SEQ ID NO: 23441 - DNA, 22 bp, synthetic construct
  misc_feature 1..22: note = chemically synthesized
  source 1..22: mol_type = other DNA
agcctagactttttctcttcaa

SEQ ID NO: 23442 - DNA, 22 bp, synthetic construct
  misc_feature 1..22: note = chemically synthesized
  source 1..22: mol_type = other DNA
gcctagactttttctcttcaac

SEQ ID NO: 23443 - DNA, 22 bp, synthetic construct
  misc_feature 1..22: note = chemically synthesized
  source 1..22: mol_type = other DNA
gactttttctcttcaactcttt

SEQ ID NO: 23444 - DNA, 22 bp, synthetic construct
  misc_feature 1..22: note = chemically synthesized
  source 1..22: mol_type = other DNA
tttctcttcaactctttttttt

SEQ ID NO: 23445 - DNA, 22 bp, synthetic construct
  misc_feature 1..22: note = chemically synthesized
  source 1..22: mol_type = other DNA
ttctcttcaactcttttttttt

SEQ ID NO: 23446 - DNA, 22 bp, synthetic construct
  misc_feature 1..22: note = chemically synthesized
  source 1..22: mol_type = other DNA
tctcttcaactctttttttttt

SEQ ID NO: 23447 - DNA, 22 bp, synthetic construct
  misc_feature 1..22: note = chemically synthesized
  source 1..22: mol_type = other DNA
ctcttcaactcttttttttttg

SEQ ID NO: 23448 - DNA, 22 bp, synthetic construct
  misc_feature 1..22: note = chemically synthesized
  source 1..22: mol_type = other DNA
tcttcaactcttttttttttga

SEQ ID NO: 23449 - DNA, 22 bp, synthetic construct
  misc_feature 1..22: note = chemically synthesized
  source 1..22: mol_type = other DNA
ttcaactcttttttttttgaca

SEQ ID NO: 23450 - DNA, 22 bp, synthetic construct
  misc_feature 1..22: note = chemically synthesized
  source 1..22: mol_type = other DNA
caactcttttttttttgacaga

SEQ ID NO: 23451 - DNA, 22 bp, synthetic construct
  misc_feature 1..22: note = chemically synthesized
  source 1..22: mol_type = other DNA
aactcttttttttttgacagag

SEQ ID NO: 23452 - DNA, 22 bp, synthetic construct
  misc_feature 1..22: note = chemically synthesized
  source 1..22: mol_type = other DNA
ttttttttttgacagagtcttg

SEQ ID NO: 23453 - DNA, 22 bp, synthetic construct
  misc_feature 1..22: note = chemically synthesized
  source 1..22: mol_type = other DNA
ttttttttgacagagtcttgct

SEQ ID NO: 23454 - DNA, 22 bp, synthetic construct
  misc_feature 1..22: note = chemically synthesized
  source 1..22: mol_type = other DNA
tttttttgacagagtcttgctc

SEQ ID NO: 23455 - DNA, 22 bp, synthetic construct
  misc_feature 1..22: note = chemically synthesized
  source 1..22: mol_type = other DNA
ttttttgacagagtcttgctct

SEQ ID NO: 23456 - DNA, 22 bp, synthetic construct
  misc_feature 1..22: note = chemically synthesized
  source 1..22: mol_type = other DNA
tttttgacagagtcttgctctg

SEQ ID NO: 23457 - DNA, 22 bp, synthetic construct
  misc_feature 1..22: note = chemically synthesized
  source 1..22: mol_type = other DNA
ttttgacagagtcttgctctgt

SEQ ID NO: 23458 - DNA, 22 bp, synthetic construct
  misc_feature 1..22: note = chemically synthesized
  source 1..22: mol_type = other DNA
tttgacagagtcttgctctgtc

SEQ ID NO: 23459 - DNA, 22 bp, synthetic construct
  misc_feature 1..22: note = chemically synthesized
  source 1..22: mol_type = other DNA
ttgacagagtcttgctctgtcg

SEQ ID NO: 23460 - DNA, 22 bp, synthetic construct
  misc_feature 1..22: note = chemically synthesized
  source 1..22: mol_type = other DNA
tgacagagtcttgctctgtcgc

SEQ ID NO: 23461 - DNA, 22 bp, synthetic construct
  misc_feature 1..22: note = chemically synthesized
  source 1..22: mol_type = other DNA
gacagagtcttgctctgtcgcc

SEQ ID NO: 23462 - DNA, 22 bp, synthetic construct
  misc_feature 1..22: note = chemically synthesized
  source 1..22: mol_type = other DNA
acagagtcttgctctgtcgccc

SEQ ID NO: 23463 - DNA, 22 bp, synthetic construct
  misc_feature 1..22: note = chemically synthesized
  source 1..22: mol_type = other DNA
gctctgtcgcccaggctggagt

SEQ ID NO: 23464 - DNA, 22 bp, synthetic construct
  misc_feature 1..22: note = chemically synthesized
  source 1..22: mol_type = other DNA
ctctgtcgcccaggctggagtg

SEQ ID NO: 23465 - DNA, 22 bp, synthetic construct
  misc_feature 1..22: note = chemically synthesized
  source 1..22: mol_type = other DNA
tgtcgcccaggctggagtgcag

SEQ ID NO: 23466 - DNA, 22 bp, synthetic construct
  misc_feature 1..22: note = chemically synthesized
  source 1..22: mol_type = other DNA
tcgcccaggctggagtgcagtg

SEQ ID NO: 23467 - DNA, 22 bp, synthetic construct
  misc_feature 1..22: note = chemically synthesized
  source 1..22: mol_type = other DNA
gagtgcagtggtgcgatctcag

SEQ ID NO: 23468 - DNA, 22 bp, synthetic construct
  misc_feature 1..22: note = chemically synthesized
  source 1..22: mol_type = other DNA
agctcactgcaacctccatctc

SEQ ID NO: 23469 - DNA, 22 bp, synthetic construct
  misc_feature 1..22: note = chemically synthesized
  source 1..22: mol_type = other DNA
actgcaacctccatctcccagg

SEQ ID NO: 23470 - DNA, 22 bp, synthetic construct
  misc_feature 1..22: note = chemically synthesized
  source 1..22: mol_type = other DNA
caacctccatctcccaggttca

SEQ ID NO: 23471 - DNA, 22 bp, synthetic construct
  misc_feature 1..22: note = chemically synthesized
  source 1..22: mol_type = other DNA
catctcccaggttcaagctatt

SEQ ID NO: 23472 - DNA, 22 bp, synthetic construct
  misc_feature 1..22: note = chemically synthesized
  source 1..22: mol_type = other DNA
ccaggttcaagctattctcctg

SEQ ID NO: 23473 - DNA, 22 bp, synthetic construct
  misc_feature 1..22: note = chemically synthesized
  source 1..22: mol_type = other DNA
aagctattctcctgcctcagcc

SEQ ID NO: 23474 - DNA, 22 bp, synthetic construct
  misc_feature 1..22: note = chemically synthesized
  source 1..22: mol_type = other DNA
ttctcctgcctcagcctcccaa

SEQ ID NO: 23475 - DNA, 22 bp, synthetic construct
  misc_feature 1..22: note = chemically synthesized
  source 1..22: mol_type = other DNA
tcctgcctcagcctcccaagta

SEQ ID NO: 23476 - DNA, 22 bp, synthetic construct
  misc_feature 1..22: note = chemically synthesized
  source 1..22: mol_type = other DNA
ctgcctcagcctcccaagtagc

SEQ ID NO: 23477 - DNA, 22 bp, synthetic construct
  misc_feature 1..22: note = chemically synthesized
  source 1..22: mol_type = other DNA
cctcagcctcccaagtagctgg

SEQ ID NO: 23478 - DNA, 22 bp, synthetic construct
  misc_feature 1..22: note = chemically synthesized
  source 1..22: mol_type = other DNA
agcctcccaagtagctgggatt

SEQ ID NO: 23479 - DNA, 22 bp, synthetic construct
  misc_feature 1..22: note = chemically synthesized
  source 1..22: mol_type = other DNA
ccaagtagctgggattacaggc

SEQ ID NO: 23480 - DNA, 22 bp, synthetic construct
  misc_feature 1..22: note = chemically synthesized
  source 1..22: mol_type = other DNA
ggattacaggcacccgccacca

SEQ ID NO: 23481 - DNA, 22 bp, synthetic construct
  misc_feature 1..22: note = chemically synthesized
  source 1..22: mol_type = other DNA
caggcacccgccaccatgccca

SEQ ID NO: 23482 - DNA, 22 bp, synthetic construct
  misc_feature 1..22: note = chemically synthesized
  source 1..22: mol_type = other DNA
atttttgtatttttagtaaagc

SEQ ID NO: 23483 - DNA, 22 bp, synthetic construct
  misc_feature 1..22: note = chemically synthesized
  source 1..22: mol_type = other DNA
ttgtatttttagtaaagccggg

SEQ ID NO: 23484 - DNA, 22 bp, synthetic construct
  misc_feature 1..22: note = chemically synthesized
  source 1..22: mol_type = other DNA
tgtatttttagtaaagccgggg

SEQ ID NO: 23485 - DNA, 22 bp, synthetic construct
  misc_feature 1..22: note = chemically synthesized
  source 1..22: mol_type = other DNA
gtatttttagtaaagccggggt

SEQ ID NO: 23486 - DNA, 22 bp, synthetic construct
  misc_feature 1..22: note = chemically synthesized
  source 1..22: mol_type = other DNA
tatttttagtaaagccggggtt

SEQ ID NO: 23487 - DNA, 22 bp, synthetic construct
  misc_feature 1..22: note = chemically synthesized
  source 1..22: mol_type = other DNA
ttagtaaagccggggtttcacc

SEQ ID NO: 23488 - DNA, 22 bp, synthetic construct
  misc_feature 1..22: note = chemically synthesized
  source 1..22: mol_type = other DNA
tagtaaagccggggtttcacca

SEQ ID NO: 23489 - DNA, 22 bp, synthetic construct
  misc_feature 1..22: note = chemically synthesized
  source 1..22: mol_type = other DNA
agtaaagccggggtttcaccat

SEQ ID NO: 23490 - DNA, 22 bp, synthetic construct
  misc_feature 1..22: note = chemically synthesized
  source 1..22: mol_type = other DNA
gtaaagccggggtttcaccatt

SEQ ID NO: 23491 - DNA, 22 bp, synthetic construct
  misc_feature 1..22: note = chemically synthesized
  source 1..22: mol_type = other DNA
caccatttcaccttgttggcca

SEQ ID NO: 23492 - DNA, 22 bp, synthetic construct
  misc_feature 1..22: note = chemically synthesized
  source 1..22: mol_type = other DNA
accatttcaccttgttggccag

SEQ ID NO: 23493 - DNA, 22 bp, synthetic construct
  misc_feature 1..22: note = chemically synthesized
  source 1..22: mol_type = other DNA
caccttgttggccaggctggtg

SEQ ID NO: 23494 - DNA, 22 bp, synthetic construct
  misc_feature 1..22: note = chemically synthesized
  source 1..22: mol_type = other DNA
accttgttggccaggctggtgt

SEQ ID NO: 23495 - DNA, 22 bp, synthetic construct
  misc_feature 1..22: note = chemically synthesized
  source 1..22: mol_type = other DNA
gttggccaggctggtgtcgaac

SEQ ID NO: 23496 - DNA, 22 bp, synthetic construct
  misc_feature 1..22: note = chemically synthesized
  source 1..22: mol_type = other DNA
ttggccaggctggtgtcgaact

SEQ ID NO: 23497 - DNA, 22 bp, synthetic construct
  misc_feature 1..22: note = chemically synthesized
  source 1..22: mol_type = other DNA
gccaggctggtgtcgaactcct

SEQ ID NO: 23498 - DNA, 22 bp, synthetic construct
  misc_feature 1..22: note = chemically synthesized
  source 1..22: mol_type = other DNA
gtgtcgaactcctgacctcaag

SEQ ID NO: 23499 - DNA, 22 bp, synthetic construct
  misc_feature 1..22: note = chemically synthesized
  source 1..22: mol_type = other DNA
ctgacctcaagtgatctgcctg

SEQ ID NO: 23500 - DNA, 22 bp, synthetic construct
  misc_feature 1..22: note = chemically synthesized
  source 1..22: mol_type = other DNA
acctcaagtgatctgcctgcct

SEQ ID NO: 23501 - DNA, 22 bp, synthetic construct
  misc_feature 1..22: note = chemically synthesized
  source 1..22: mol_type = other DNA
aagtgatctgcctgcctgggcc

SEQ ID NO: 23502 - DNA, 22 bp, synthetic construct
  misc_feature 1..22: note = chemically synthesized
  source 1..22: mol_type = other DNA
cctgcctgggcctctgaaagtg

SEQ ID NO: 23503 - DNA, 22 bp, synthetic construct
  misc_feature 1..22: note = chemically synthesized
  source 1..22: mol_type = other DNA
cctgggcctctgaaagtgctgg

SEQ ID NO: 23504 - DNA, 22 bp, synthetic construct
  misc_feature 1..22: note = chemically synthesized
  source 1..22: mol_type = other DNA
ggcctctgaaagtgctgggatt

SEQ ID NO: 23505 - DNA, 22 bp, synthetic construct
  misc_feature 1..22: note = chemically synthesized
  source 1..22: mol_type = other DNA
tgaaagtgctgggattataggt

SEQ ID NO: 23506 - DNA, 22 bp, synthetic construct
  misc_feature 1..22: note = chemically synthesized
  source 1..22: mol_type = other DNA
aaagtgctgggattataggtgt

SEQ ID NO: 23507 - DNA, 22 bp, synthetic construct
  misc_feature 1..22: note = chemically synthesized
  source 1..22: mol_type = other DNA
ggattataggtgtgagccacca

SEQ ID NO: 23508 - DNA, 22 bp, synthetic construct
  misc_feature 1..22: note = chemically synthesized
  source 1..22: mol_type = other DNA
taggtgtgagccaccatgccag

SEQ ID NO: 23509 - DNA, 22 bp, synthetic construct
  misc_feature 1..22: note = chemically synthesized
  source 1..22: mol_type = other DNA
tcttcaactcttcattggccat

SEQ ID NO: 23510 - DNA, 22 bp, synthetic construct
  misc_feature 1..22: note = chemically synthesized
  source 1..22: mol_type = other DNA
ttcaactcttcattggccatat

SEQ ID NO: 23511 - DNA, 22 bp, synthetic construct
  misc_feature 1..22: note = chemically synthesized
  source 1..22: mol_type = other DNA
caactcttcattggccatattt

SEQ ID NO: 23512 - DNA, 22 bp, synthetic construct
  misc_feature 1..22: note = chemically synthesized
  source 1..22: mol_type = other DNA
aactcttcattggccatatttc

SEQ ID NO: 23513 - DNA, 22 bp, synthetic construct
  misc_feature 1..22: note = chemically synthesized
  source 1..22: mol_type = other DNA
ttcattggccatatttctcaat

SEQ ID NO: 23514 - DNA, 22 bp, synthetic construct
  misc_feature 1..22: note = chemically synthesized
  source 1..22: mol_type = other DNA
cattggccatatttctcaattt

SEQ ID NO: 23515 - DNA, 22 bp, synthetic construct
  misc_feature 1..22: note = chemically synthesized
  source 1..22: mol_type = other DNA
attggccatatttctcaatttc

SEQ ID NO: 23516 - DNA, 22 bp, synthetic construct
  misc_feature 1..22: note = chemically synthesized
  source 1..22: mol_type = other DNA
gccatatttctcaatttccttc

SEQ ID NO: 23517 - DNA, 22 bp, synthetic construct
  misc_feature 1..22: note = chemically synthesized
  source 1..22: mol_type = other DNA
ctcaatttccttcactcgtttg

SEQ ID NO: 23518 - DNA, 22 bp, synthetic construct
  misc_feature 1..22: note = chemically synthesized
  source 1..22: mol_type = other DNA
tcaatttccttcactcgtttgc

SEQ ID NO: 23519 - DNA, 22 bp, synthetic construct
  misc_feature 1..22: note = chemically synthesized
  source 1..22: mol_type = other DNA
aatttccttcactcgtttgcaa

SEQ ID NO: 23520 - DNA, 22 bp, synthetic construct
  misc_feature 1..22: note = chemically synthesized
  source 1..22: mol_type = other DNA
ccttcactcgtttgcaatgctg

SEQ ID NO: 23521 - DNA, 22 bp, synthetic construct
  misc_feature 1..22: note = chemically synthesized
  source 1..22: mol_type = other DNA
cttcactcgtttgcaatgctgt

SEQ ID NO: 23522 - DNA, 22 bp, synthetic construct
  misc_feature 1..22: note = chemically synthesized
  source 1..22: mol_type = other DNA
cactcgtttgcaatgctgtgcc

SEQ ID NO: 23523 - DNA, 22 bp, synthetic construct
  misc_feature 1..22: note = chemically synthesized
  source 1..22: mol_type = other DNA
actcgtttgcaatgctgtgccc

SEQ ID NO: 23524 - DNA, 22 bp, synthetic construct
  misc_feature 1..22: note = chemically synthesized
  source 1..22: mol_type = other DNA
gtttgcaatgctgtgcccaccc

SEQ ID NO: 23525 - DNA, 22 bp, synthetic construct
  misc_feature 1..22: note = chemically synthesized
  source 1..22: mol_type = other DNA
gcaatgctgtgcccaccctgca

SEQ ID NO: 23526 - DNA, 22 bp, synthetic construct
  misc_feature 1..22: note = chemically synthesized
  source 1..22: mol_type = other DNA
caatgctgtgcccaccctgcaa

SEQ ID NO: 23527 - DNA, 22 bp, synthetic construct
  misc_feature 1..22: note = chemically synthesized
  source 1..22: mol_type = other DNA
tgcccaccctgcaatcctagcc

SEQ ID NO: 23528 - DNA, 22 bp, synthetic construct
  misc_feature 1..22: note = chemically synthesized
  source 1..22: mol_type = other DNA
caatcctagcccctaaattgga

SEQ ID NO: 23529 - DNA, 22 bp, synthetic construct
  misc_feature 1..22: note = chemically synthesized
  source 1..22: mol_type = other DNA
gcccctaaattggagcagccat

SEQ ID NO: 23530 - DNA, 22 bp, synthetic construct
  misc_feature 1..22: note = chemically synthesized
  source 1..22: mol_type = other DNA
aattggagcagccatctgcctt

SEQ ID NO: 23531 - DNA, 22 bp, synthetic construct
  misc_feature 1..22: note = chemically synthesized
  source 1..22: mol_type = other DNA
gagcagccatctgccttcatcc

SEQ ID NO: 23532 - DNA, 22 bp, synthetic construct
  misc_feature 1..22: note = chemically synthesized
  source 1..22: mol_type = other DNA
ccttcatccttctcttcccaga

SEQ ID NO: 23533 - DNA, 22 bp, synthetic construct
  misc_feature 1..22: note = chemically synthesized
  source 1..22: mol_type = other DNA
catccttctcttcccagacagc

SEQ ID NO: 23534 - DNA, 22 bp, synthetic construct
  misc_feature 1..22: note = chemically synthesized
  source 1..22: mol_type = other DNA
atccttctcttcccagacagcc

SEQ ID NO: 23535 - DNA, 22 bp, synthetic construct
  misc_feature 1..22: note = chemically synthesized
  source 1..22: mol_type = other DNA
ctcttcccagacagccgaggac

SEQ ID NO: 23536 - DNA, 22 bp, synthetic construct
  misc_feature 1..22: note = chemically synthesized
  source 1..22: mol_type = other DNA
tcttcccagacagccgaggact

SEQ ID NO: 23537 - DNA, 22 bp, synthetic construct
  misc_feature 1..22: note = chemically synthesized
  source 1..22: mol_type = other DNA
ttcccagacagccgaggactgt

SEQ ID NO: 23538 - DNA, 22 bp, synthetic construct
  misc_feature 1..22: note = chemically synthesized
  source 1..22: mol_type = other DNA
cccagacagccgaggactgtga

SEQ ID NO: 23539 - DNA, 22 bp, synthetic construct
  misc_feature 1..22: note = chemically synthesized
  source 1..22: mol_type = other DNA
ccagacagccgaggactgtgaa

SEQ ID NO: 23540 - DNA, 22 bp, synthetic construct
  misc_feature 1..22: note = chemically synthesized
  source 1..22: mol_type = other DNA
tgaaggaaaaaaatcaccaaaa

SEQ ID NO: 23541 - DNA, 22 bp, synthetic construct
  misc_feature 1..22: note = chemically synthesized
  source 1..22: mol_type = other DNA
atgcctcacagcctccacccac

SEQ ID NO: 23542 - DNA, 22 bp, synthetic construct
  misc_feature 1..22: note = chemically synthesized
  source 1..22: mol_type = other DNA
acagcctccacccacctctctg

SEQ ID NO: 23543 - DNA, 22 bp, synthetic construct
  misc_feature 1..22: note = chemically synthesized
  source 1..22: mol_type = other DNA
cacccacctctctgctcagcaa

SEQ ID NO: 23544 - DNA, 22 bp, synthetic construct
  misc_feature 1..22: note = chemically synthesized
  source 1..22: mol_type = other DNA
tctgctcagcaactcatttact

SEQ ID NO: 23545 - DNA, 22 bp, synthetic construct
  misc_feature 1..22: note = chemically synthesized
  source 1..22: mol_type = other DNA
tgctcagcaactcatttacttg

SEQ ID NO: 23546 - DNA, 22 bp, synthetic construct
  misc_feature 1..22: note = chemically synthesized
  source 1..22: mol_type = other DNA
ctcagcaactcatttacttggc

SEQ ID NO: 23547 - DNA, 22 bp, synthetic construct
  misc_feature 1..22: note = chemically synthesized
  source 1..22: mol_type = other DNA
agcaactcatttacttggccct

SEQ ID NO: 23548 - DNA, 22 bp, synthetic construct
  misc_feature 1..22: note = chemically synthesized
  source 1..22: mol_type = other DNA
atttacttggccctggacactc

SEQ ID NO: 23549 - DNA, 22 bp, synthetic construct
  misc_feature 1..22: note = chemically synthesized
  source 1..22: mol_type = other DNA
acttggccctggacactcctaa

SEQ ID NO: 23550 - DNA, 22 bp, synthetic construct
  misc_feature 1..22: note = chemically synthesized
  source 1..22: mol_type = other DNA
cttggccctggacactcctaaa

SEQ ID NO: 23551 - DNA, 22 bp, synthetic construct
  misc_feature 1..22: note = chemically synthesized
  source 1..22: mol_type = other DNA
ggccctggacactcctaaatag

SEQ ID NO: 23552 - DNA, 22 bp, synthetic construct
  misc_feature 1..22: note = chemically synthesized
  source 1..22: mol_type = other DNA
gccctggacactcctaaatagc

SEQ ID NO: 23553 - DNA, 22 bp, synthetic construct
  misc_feature 1..22: note = chemically synthesized
  source 1..22: mol_type = other DNA
gacactcctaaatagcatccat

SEQ ID NO: 23554 - DNA, 22 bp, synthetic construct
  misc_feature 1..22: note = chemically synthesized
  source 1..22: mol_type = other DNA
ctaaatagcatccatgcctgca

SEQ ID NO: 23555 - DNA, 22 bp, synthetic construct
  misc_feature 1..22: note = chemically synthesized
  source 1..22: mol_type = other DNA
aatagcatccatgcctgcatcc

SEQ ID NO: 23556 - DNA, 22 bp, synthetic construct
  misc_feature 1..22: note = chemically synthesized
  source 1..22: mol_type = other DNA
catccatttacagtcgttcctc

SEQ ID NO: 23557 - DNA, 22 bp, synthetic construct
  misc_feature 1..22: note = chemically synthesized
  source 1..22: mol_type = other DNA
acagtcgttcctcagtatccat

SEQ ID NO: 23558 - DNA, 22 bp, synthetic construct
  misc_feature 1..22: note = chemically synthesized
  source 1..22: mol_type = other DNA
cagtcgttcctcagtatccatg

SEQ ID NO: 23559 - DNA, 22 bp, synthetic construct
  misc_feature 1..22: note = chemically synthesized
  source 1..22: mol_type = other DNA
ctcagtatccatggaaaattgg

SEQ ID NO: 23560 - DNA, 22 bp, synthetic construct
  misc_feature 1..22: note = chemically synthesized
  source 1..22: mol_type = other DNA
agtatccatggaaaattggtgg

SEQ ID NO: 23561 - DNA, 22 bp, synthetic construct
  misc_feature 1..22: note = chemically synthesized
  source 1..22: mol_type = other DNA
gtggcaagaccccctgcaaata

SEQ ID NO: 23562 - DNA, 22 bp, synthetic construct
  misc_feature 1..22: note = chemically synthesized
  source 1..22: mol_type = other DNA
caaatatcaagatctgtggatg

SEQ ID NO: 23563 - DNA, 22 bp, synthetic construct
  misc_feature 1..22: note = chemically synthesized
  source 1..22: mol_type = other DNA
tggatgctcaagtctccgatat

SEQ ID NO: 23564 - DNA, 22 bp, synthetic construct
  misc_feature 1..22: note = chemically synthesized
  source 1..22: mol_type = other DNA
aagtctccgatataaaaatggc

SEQ ID NO: 23565 - DNA, 22 bp, synthetic construct
  misc_feature 1..22: note = chemically synthesized
  source 1..22: mol_type = other DNA
cgatataaaaatggcttactat

SEQ ID NO: 23566 - DNA, 22 bp, synthetic construct
  misc_feature 1..22: note = chemically synthesized
  source 1..22: mol_type = other DNA
actatttgcatataacctaaac

SEQ ID NO: 23567 - DNA, 22 bp, synthetic construct
  misc_feature 1..22: note = chemically synthesized
  source 1..22: mol_type = other DNA
ctatttgcatataacctaaaca

SEQ ID NO: 23568 - DNA, 22 bp, synthetic construct
  misc_feature 1..22: note = chemically synthesized
  source 1..22: mol_type = other DNA
tttgcatataacctaaacacat

SEQ ID NO: 23569 - DNA, 22 bp, synthetic construct
  misc_feature 1..22: note = chemically synthesized
  source 1..22: mol_type = other DNA
gcatataacctaaacacatcct

SEQ ID NO: 23570 - DNA, 22 bp, synthetic construct
  misc_feature 1..22: note = chemically synthesized
  source 1..22: mol_type = other DNA
catataacctaaacacatcctc

SEQ ID NO: 23571 - DNA, 22 bp, synthetic construct
  misc_feature 1..22: note = chemically synthesized
  source 1..22: mol_type = other DNA
aacacatcctcctttgtacttt

SEQ ID NO: 23572 - DNA, 22 bp, synthetic construct
  misc_feature 1..22: note = chemically synthesized
  source 1..22: mol_type = other DNA
ctttgtactttaaatcatctct

SEQ ID NO: 23573 - DNA, 22 bp, synthetic construct
  misc_feature 1..22: note = chemically synthesized
  source 1..22: mol_type = other DNA
tgtactttaaatcatctctagg

SEQ ID NO: 23574 - DNA, 22 bp, synthetic construct
  misc_feature 1..22: note = chemically synthesized
  source 1..22: mol_type = other DNA
gtactttaaatcatctctaggt

SEQ ID NO: 23575 - DNA, 22 bp, synthetic construct
  misc_feature 1..22: note = chemically synthesized
  source 1..22: mol_type = other DNA
tactttaaatcatctctaggtt

SEQ ID NO: 23576 - DNA, 22 bp, synthetic construct
  misc_feature 1..22: note = chemically synthesized
  source 1..22: mol_type = other DNA
taaatcatctctaggtttctct

SEQ ID NO: 23577 - DNA, 22 bp, synthetic construct
  misc_feature 1..22: note = chemically synthesized
  source 1..22: mol_type = other DNA
aaatcatctctaggtttctctt

SEQ ID NO: 23578 - DNA, 22 bp, synthetic construct
  misc_feature 1..22: note = chemically synthesized
  source 1..22: mol_type = other DNA
aatcatctctaggtttctctta

SEQ ID NO: 23579 - DNA, 22 bp, synthetic construct
  misc_feature 1..22: note = chemically synthesized
  source 1..22: mol_type = other DNA
taggtttctcttaatagctaat

SEQ ID NO: 23580 - DNA, 22 bp, synthetic construct
  misc_feature 1..22: note = chemically synthesized
  source 1..22: mol_type = other DNA
ggtttctcttaatagctaatac

SEQ ID NO: 23581 - DNA, 22 bp, synthetic construct
  misc_feature 1..22: note = chemically synthesized
  source 1..22: mol_type = other DNA
ctcttaatagctaatacaatgt

SEQ ID NO: 23582 - DNA, 22 bp, synthetic construct
  misc_feature 1..22: note = chemically synthesized
  source 1..22: mol_type = other DNA
tcttaatagctaatacaatgta

SEQ ID NO: 23583 - DNA, 22 bp, synthetic construct
  misc_feature 1..22: note = chemically synthesized
  source 1..22: mol_type = other DNA
ttaatagctaatacaatgtaaa

SEQ ID NO: 23584 - DNA, 22 bp, synthetic construct
  misc_feature 1..22: note = chemically synthesized
  source 1..22: mol_type = other DNA
aatagctaatacaatgtaaatg

SEQ ID NO: 23585 - DNA, 22 bp, synthetic construct
  misc_feature 1..22: note = chemically synthesized
  source 1..22: mol_type = other DNA
atagctaatacaatgtaaatgc

SEQ ID NO: 23586 - DNA, 22 bp, synthetic construct
  misc_feature 1..22: note = chemically synthesized
  source 1..22: mol_type = other DNA
atacaatgtaaatgctatgtaa

SEQ ID NO: 23587 - DNA, 22 bp, synthetic construct
  misc_feature 1..22: note = chemically synthesized
  source 1..22: mol_type = other DNA
tgtaaatagttgttatgctgta

SEQ ID NO: 23588 - DNA, 22 bp, synthetic construct
  misc_feature 1..22: note = chemically synthesized
  source 1..22: mol_type = other DNA
ttatgctgtattgtttagggaa

SEQ ID NO: 23589 - DNA, 22 bp, synthetic construct
  misc_feature 1..22: note = chemically synthesized
  source 1..22: mol_type = other DNA
tgctgtattgtttagggaataa

SEQ ID NO: 23590 - DNA, 22 bp, synthetic construct
  misc_feature 1..22: note = chemically synthesized
  source 1..22: mol_type = other DNA
tattgtttagggaataatgaaa

SEQ ID NO: 23591 - DNA, 22 bp, synthetic construct
  misc_feature 1..22: note = chemically synthesized
  source 1..22: mol_type = other DNA
tttagggaataatgaaagataa

SEQ ID NO: 23592 - DNA, 22 bp, synthetic construct
  misc_feature 1..22: note = chemically synthesized
  source 1..22: mol_type = other DNA
agggaataatgaaagataaaag

SEQ ID NO: 23593 - DNA, 22 bp, synthetic construct
  misc_feature 1..22: note = chemically synthesized
  source 1..22: mol_type = other DNA
gggaataatgaaagataaaaga

SEQ ID NO: 23594 - DNA, 22 bp, synthetic construct
  misc_feature 1..22: note = chemically synthesized
  source 1..22: mol_type = other DNA
tacatgttcagtagagatgcaa

SEQ ID NO: 23595 - DNA, 22 bp, synthetic construct
  misc_feature 1..22: note = chemically synthesized
  source 1..22: mol_type = other DNA
agtagagatgcaaccatccatt

SEQ ID NO: 23596 - DNA, 22 bp, synthetic construct
  misc_feature 1..22: note = chemically synthesized
  source 1..22: mol_type = other DNA
ttttcttgaatatttttgatct

SEQ ID NO: 23597 - DNA, 22 bp, synthetic construct
  misc_feature 1..22: note = chemically synthesized
  source 1..22: mol_type = other DNA
tttcttgaatatttttgatctg

SEQ ID NO: 23598 - DNA, 22 bp, synthetic construct
  misc_feature 1..22: note = chemically synthesized
  source 1..22: mol_type = other DNA
ttcttgaatatttttgatctgc

SEQ ID NO: 23599 - DNA, 22 bp, synthetic construct
  misc_feature 1..22: note = chemically synthesized
  source 1..22: mol_type = other DNA
tcttgaatatttttgatctgca

SEQ ID NO: 23600 - DNA, 22 bp, synthetic construct
  misc_feature 1..22: note = chemically synthesized
  source 1..22: mol_type = other DNA
cttgaatatttttgatctgcag

SEQ ID NO: 23601 - DNA, 22 bp, synthetic construct
  misc_feature 1..22: note = chemically synthesized
  source 1..22: mol_type = other DNA
ttgaatatttttgatctgcagt

SEQ ID NO: 23602 - DNA, 22 bp, synthetic construct
  misc_feature 1..22: note = chemically synthesized
  source 1..22: mol_type = other DNA
gaatatttttgatctgcagtta

SEQ ID NO: 23603 - DNA, 22 bp, synthetic construct
  misc_feature 1..22: note = chemically synthesized
  source 1..22: mol_type = other DNA
aatatttttgatctgcagttaa

SEQ ID NO: 23604 - DNA, 22 bp, synthetic construct
  misc_feature 1..22: note = chemically synthesized
  source 1..22: mol_type = other DNA
ttgatctgcagttaattgaatc

SEQ ID NO: 23605 - DNA, 22 bp, synthetic construct
  misc_feature 1..22: note = chemically synthesized
  source 1..22: mol_type = other DNA
tgatctgcagttaattgaatct

SEQ ID NO: 23606 - DNA, 22 bp, synthetic construct
  misc_feature 1..22: note = chemically synthesized
  source 1..22: mol_type = other DNA
gatctgcagttaattgaatctg

SEQ ID NO: 23607 - DNA, 22 bp, synthetic construct
  misc_feature 1..22: note = chemically synthesized
  source 1..22: mol_type = other DNA
atctgcagttaattgaatctgt

SEQ ID NO: 23608 - DNA, 22 bp, synthetic construct
  misc_feature 1..22: note = chemically synthesized
  source 1..22: mol_type = other DNA
cagttaattgaatctgtggctg

SEQ ID NO: 23609 - DNA, 22 bp, synthetic construct
  misc_feature 1..22: note = chemically synthesized
  source 1..22: mol_type = other DNA
attgaatctgtggctgtggaac

SEQ ID NO: 23610 - DNA, 22 bp, synthetic construct
  misc_feature 1..22: note = chemically synthesized
  source 1..22: mol_type = other DNA
aatctgtggctgtggaactcac

SEQ ID NO: 23611 - DNA, 22 bp, synthetic construct
  misc_feature 1..22: note = chemically synthesized
  source 1..22: mol_type = other DNA
tggctgtggaactcacaaggag

SEQ ID NO: 23612 - DNA, 22 bp, synthetic construct
  misc_feature 1..22: note = chemically synthesized
  source 1..22: mol_type = other DNA
tggaactcacaaggagagctga

SEQ ID NO: 23613 - DNA, 22 bp, synthetic construct
  misc_feature 1..22: note = chemically synthesized
  source 1..22: mol_type = other DNA
acaaggagagctgactgtacag

SEQ ID NO: 23614 - DNA, 22 bp, synthetic construct
  misc_feature 1..22: note = chemically synthesized
  source 1..22: mol_type = other DNA
actgtacagtgtggttgagtga

SEQ ID NO: 23615 - DNA, 22 bp, synthetic construct
  misc_feature 1..22: note = chemically synthesized
  source 1..22: mol_type = other DNA
tacagtgtggttgagtgaaaaa

SEQ ID NO: 23616 - DNA, 22 bp, synthetic construct
  misc_feature 1..22: note = chemically synthesized
  source 1..22: mol_type = other DNA
agtgaaaaaacagactttagaa

SEQ ID NO: 23617 - DNA, 22 bp, synthetic construct
  misc_feature 1..22: note = chemically synthesized
  source 1..22: mol_type = other DNA
tagaatcagatcagacagaaat

SEQ ID NO: 23618 - DNA, 22 bp, synthetic construct
  misc_feature 1..22: note = chemically synthesized
  source 1..22: mol_type = other DNA
agaatcagatcagacagaaata

SEQ ID NO: 23619 - DNA, 22 bp, synthetic construct
  misc_feature 1..22: note = chemically synthesized
  source 1..22: mol_type = other DNA
gaatcagatcagacagaaatag

SEQ ID NO: 23620 - DNA, 22 bp, synthetic construct
  misc_feature 1..22: note = chemically synthesized
  source 1..22: mol_type = other DNA
gaatcaagtatctgcctcctct

SEQ ID NO: 23621 - DNA, 22 bp, synthetic construct
  misc_feature 1..22: note = chemically synthesized
  source 1..22: mol_type = other DNA
aatcaagtatctgcctcctcta

SEQ ID NO: 23622 - DNA, 22 bp, synthetic construct
  misc_feature 1..22: note = chemically synthesized
  source 1..22: mol_type = other DNA
cctcctctagacctgtgacctt

SEQ ID NO: 23623 - DNA, 22 bp, synthetic construct
  misc_feature 1..22: note = chemically synthesized
  source 1..22: mol_type = other DNA
ctctagacctgtgaccttggac

SEQ ID NO: 23624 - DNA, 22 bp, synthetic construct
  misc_feature 1..22: note = chemically synthesized
  source 1..22: mol_type = other DNA
tagacctgtgaccttggacaag

SEQ ID NO: 23625 - DNA, 22 bp, synthetic construct
  misc_feature 1..22: note = chemically synthesized
  source 1..22: mol_type = other DNA
gacctgtgaccttggacaagtc

SEQ ID NO: 23626 - DNA, 22 bp, synthetic construct
  misc_feature 1..22: note = chemically synthesized
  source 1..22: mol_type = other DNA
tgaccttggacaagtcacacaa

SEQ ID NO: 23627 - DNA, 22 bp, synthetic construct
  misc_feature 1..22: note = chemically synthesized
  source 1..22: mol_type = other DNA
ggacaagtcacacaagctctga

SEQ ID NO: 23628 - DNA, 22 bp, synthetic construct
  misc_feature 1..22: note = chemically synthesized
  source 1..22: mol_type = other DNA
gacaagtcacacaagctctgaa

SEQ ID NO: 23629 - DNA, 22 bp, synthetic construct
  misc_feature 1..22: note = chemically synthesized
  source 1..22: mol_type = other DNA
tgaaccttaactttgtcaaatg

SEQ ID NO: 23630 - DNA, 22 bp, synthetic construct
  misc_feature 1..22: note = chemically synthesized
  source 1..22: mol_type = other DNA
aaccttaactttgtcaaatgta

SEQ ID NO: 23631 - DNA, 22 bp, synthetic construct
  misc_feature 1..22: note = chemically synthesized
  source 1..22: mol_type = other DNA
aactttgtcaaatgtaaattag

SEQ ID NO: 23632 - DNA, 22 bp, synthetic construct
  misc_feature 1..22: note = chemically synthesized
  source 1..22: mol_type = other DNA
actttgtcaaatgtaaattagg

SEQ ID NO: 23633 - DNA, 22 bp, synthetic construct
  misc_feature 1..22: note = chemically synthesized
  source 1..22: mol_type = other DNA
tgtcaaatgtaaattaggttta

SEQ ID NO: 23634 - DNA, 22 bp, synthetic construct
  misc_feature 1..22: note = chemically synthesized
  source 1..22: mol_type = other DNA
gtcaaatgtaaattaggtttaa

SEQ ID NO: 23635 - DNA, 22 bp, synthetic construct
  misc_feature 1..22: note = chemically synthesized
  source 1..22: mol_type = other DNA
tcaaatgtaaattaggtttaac

SEQ ID NO: 23636 - DNA, 22 bp, synthetic construct
  misc_feature 1..22: note = chemically synthesized
  source 1..22: mol_type = other DNA
ggtttaacagtagtataataag

SEQ ID NO: 23637 - DNA, 22 bp, synthetic construct
  misc_feature 1..22: note = chemically synthesized
  source 1..22: mol_type = other DNA
aacagtagtataataagaatat

SEQ ID NO: 23638 - DNA, 22 bp, synthetic construct
  misc_feature 1..22: note = chemically synthesized
  source 1..22: mol_type = other DNA
acagtagtataataagaatatc

SEQ ID NO: 23639 - DNA, 22 bp, synthetic construct
  misc_feature 1..22: note = chemically synthesized
  source 1..22: mol_type = other DNA
tctcacaggtgttggcaggatc

SEQ ID NO: 23640 - DNA, 22 bp, synthetic construct
  misc_feature 1..22: note = chemically synthesized
  source 1..22: mol_type = other DNA
acaggtgttggcaggatcagtg

SEQ ID NO: 23641 - DNA, 22 bp, synthetic construct
  misc_feature 1..22: note = chemically synthesized
  source 1..22: mol_type = other DNA
gcaggatcagtgagacaatatg

SEQ ID NO: 23642 - DNA, 22 bp, synthetic construct
  misc_feature 1..22: note = chemically synthesized
  source 1..22: mol_type = other DNA
gttatctctttttctccctact

SEQ ID NO: 23643 - DNA, 22 bp, synthetic construct
  misc_feature 1..22: note = chemically synthesized
  source 1..22: mol_type = other DNA
tctctttttctccctactcctt

SEQ ID NO: 23644 - DNA, 22 bp, synthetic construct
  misc_feature 1..22: note = chemically synthesized
  source 1..22: mol_type = other DNA
tttttctccctactcctttcat

SEQ ID NO: 23645 - DNA, 22 bp, synthetic construct
  misc_feature 1..22: note = chemically synthesized
  source 1..22: mol_type = other DNA
tttctccctactcctttcatgt

SEQ ID NO: 23646 - DNA, 22 bp, synthetic construct
  misc_feature 1..22: note = chemically synthesized
  source 1..22: mol_type = other DNA
ttctccctactcctttcatgtt

SEQ ID NO: 23647 - DNA, 22 bp, synthetic construct
  misc_feature 1..22: note = chemically synthesized
  source 1..22: mol_type = other DNA
tctccctactcctttcatgttg

SEQ ID NO: 23648 - DNA, 22 bp, synthetic construct
  misc_feature 1..22: note = chemically synthesized
  source 1..22: mol_type = other DNA
ctccctactcctttcatgttgg

SEQ ID NO: 23649 - DNA, 22 bp, synthetic construct
  misc_feature 1..22: note = chemically synthesized
  source 1..22: mol_type = other DNA
tccctactcctttcatgttggc

SEQ ID NO: 23650 - DNA, 22 bp, synthetic construct
  misc_feature 1..22: note = chemically synthesized
  source 1..22: mol_type = other DNA
cctactcctttcatgttggccc

SEQ ID NO: 23651 - DNA, 22 bp, synthetic construct
  misc_feature 1..22: note = chemically synthesized
  source 1..22: mol_type = other DNA
ctcctttcatgttggccctact

SEQ ID NO: 23652 - DNA, 22 bp, synthetic construct
  misc_feature 1..22: note = chemically synthesized
  source 1..22: mol_type = other DNA
ctttcatgttggccctactttc

SEQ ID NO: 23653 - DNA, 22 bp, synthetic construct
  misc_feature 1..22: note = chemically synthesized
  source 1..22: mol_type = other DNA
tcatgttggccctactttcttc

SEQ ID NO: 23654 - DNA, 22 bp, synthetic construct
  misc_feature 1..22: note = chemically synthesized
  source 1..22: mol_type = other DNA
catgttggccctactttcttct

SEQ ID NO: 23655 - DNA, 22 bp, synthetic construct
  misc_feature 1..22: note = chemically synthesized
  source 1..22: mol_type = other DNA
atgttggccctactttcttctg

SEQ ID NO: 23656 - DNA, 22 bp, synthetic construct
  misc_feature 1..22: note = chemically synthesized
  source 1..22: mol_type = other DNA
gccctactttcttctgttttaa

SEQ ID NO: 23657 - DNA, 22 bp, synthetic construct
  misc_feature 1..22: note = chemically synthesized
  source 1..22: mol_type = other DNA
ctttcttctgttttaaatttct

SEQ ID NO: 23658 - DNA, 22 bp, synthetic construct
  misc_feature 1..22: note = chemically synthesized
  source 1..22: mol_type = other DNA
tcttctgttttaaatttctcaa

SEQ ID NO: 23659 - DNA, 22 bp, synthetic construct
  misc_feature 1..22: note = chemically synthesized
  source 1..22: mol_type = other DNA
cttctgttttaaatttctcaat

SEQ ID NO: 23660 - DNA, 22 bp, synthetic construct
  misc_feature 1..22: note = chemically synthesized
  source 1..22: mol_type = other DNA
ttctgttttaaatttctcaatt

SEQ ID NO: 23661 - DNA, 22 bp, synthetic construct
  misc_feature 1..22: note = chemically synthesized
  source 1..22: mol_type = other DNA
ctgttttaaatttctcaattct

SEQ ID NO: 23662 - DNA, 22 bp, synthetic construct
  misc_feature 1..22: note = chemically synthesized
  source 1..22: mol_type = other DNA
tgttttaaatttctcaattctc

SEQ ID NO: 23663 - DNA, 22 bp, synthetic construct
  misc_feature 1..22: note = chemically synthesized
  source 1..22: mol_type = other DNA
ttttaaatttctcaattctctt

SEQ ID NO: 23664 - DNA, 22 bp, synthetic construct
  misc_feature 1..22: note = chemically synthesized
  source 1..22: mol_type = other DNA
taaatttctcaattctctttag

SEQ ID NO: 23665 - DNA, 22 bp, synthetic construct
  misc_feature 1..22: note = chemically synthesized
  source 1..22: mol_type = other DNA
aaatttctcaattctctttagc

SEQ ID NO: 23666 - DNA, 22 bp, synthetic construct
  misc_feature 1..22: note = chemically synthesized
  source 1..22: mol_type = other DNA
aatttctcaattctctttagct

SEQ ID NO: 23667 - DNA, 22 bp, synthetic construct
  misc_feature 1..22: note = chemically synthesized
  source 1..22: mol_type = other DNA
ctcaattctctttagctcttta

SEQ ID NO: 23668 - DNA, 22 bp, synthetic construct
  misc_feature 1..22: note = chemically synthesized
  source 1..22: mol_type = other DNA
tcaattctctttagctctttaa

SEQ ID NO: 23669 - DNA, 22 bp, synthetic construct
  misc_feature 1..22: note = chemically synthesized
  source 1..22: mol_type = other DNA
aattctctttagctctttaata

SEQ ID NO: 23670 - DNA, 22 bp, synthetic construct
  misc_feature 1..22: note = chemically synthesized
  source 1..22: mol_type = other DNA
tctttagctctttaataacttc

SEQ ID NO: 23671 - DNA, 22 bp, synthetic construct
  misc_feature 1..22: note = chemically synthesized
  source 1..22: mol_type = other DNA
tttagctctttaataacttctg

SEQ ID NO: 23672 - DNA, 22 bp, synthetic construct
  misc_feature 1..22: note = chemically synthesized
  source 1..22: mol_type = other DNA
tagctctttaataacttctgtg

SEQ ID NO: 23673 - DNA, 22 bp, synthetic construct
  misc_feature 1..22: note = chemically synthesized
  source 1..22: mol_type = other DNA
agctctttaataacttctgtgt

SEQ ID NO: 23674 - DNA, 22 bp, synthetic construct
  misc_feature 1..22: note = chemically synthesized
  source 1..22: mol_type = other DNA
gctctttaataacttctgtgta

SEQ ID NO: 23675 - DNA, 22 bp, synthetic construct
  misc_feature 1..22: note = chemically synthesized
  source 1..22: mol_type = other DNA
tttaataacttctgtgtagctc

SEQ ID NO: 23676 - DNA, 22 bp, synthetic construct
  misc_feature 1..22: note = chemically synthesized
  source 1..22: mol_type = other DNA
taataacttctgtgtagctctt

SEQ ID NO: 23677 - DNA, 22 bp, synthetic construct
  misc_feature 1..22: note = chemically synthesized
  source 1..22: mol_type = other DNA
aataacttctgtgtagctcttt

SEQ ID NO: 23678 - DNA, 22 bp, synthetic construct
  misc_feature 1..22: note = chemically synthesized
  source 1..22: mol_type = other DNA
ataacttctgtgtagctctttt

SEQ ID NO: 23679 - DNA, 22 bp, synthetic construct
  misc_feature 1..22: note = chemically synthesized
  source 1..22: mol_type = other DNA
ctgtgtagctcttttccttcct

SEQ ID NO: 23680 - DNA, 22 bp, synthetic construct
  misc_feature 1..22: note = chemically synthesized
  source 1..22: mol_type = other DNA
tgtgtagctcttttccttcctt

SEQ ID NO: 23681 - DNA, 22 bp, synthetic construct
  misc_feature 1..22: note = chemically synthesized
  source 1..22: mol_type = other DNA
tgtagctcttttccttccttaa

SEQ ID NO: 23682 - DNA, 22 bp, synthetic construct
  misc_feature 1..22: note = chemically synthesized
  source 1..22: mol_type = other DNA
ttttccttccttaatcacattt

SEQ ID NO: 23683 - DNA, 22 bp, synthetic construct
  misc_feature 1..22: note = chemically synthesized
  source 1..22: mol_type = other DNA
ttccttccttaatcacatttat

SEQ ID NO: 23684 - DNA, 22 bp, synthetic construct
  misc_feature 1..22: note = chemically synthesized
  source 1..22: mol_type = other DNA
tccttccttaatcacatttata

SEQ ID NO: 23685 - DNA, 22 bp, synthetic construct
  misc_feature 1..22: note = chemically synthesized
  source 1..22: mol_type = other DNA
ccttccttaatcacatttatat

SEQ ID NO: 23686 - DNA, 22 bp, synthetic construct
  misc_feature 1..22: note = chemically synthesized
  source 1..22: mol_type = other DNA
cttccttaatcacatttatata

SEQ ID NO: 23687 - DNA, 22 bp, synthetic construct
  misc_feature 1..22: note = chemically synthesized
  source 1..22: mol_type = other DNA
ccttaatcacatttatataatg

SEQ ID NO: 23688 - DNA, 22 bp, synthetic construct
  misc_feature 1..22: note = chemically synthesized
  source 1..22: mol_type = other DNA
cttaatcacatttatataatga

SEQ ID NO: 23689 - DNA, 22 bp, synthetic construct
  misc_feature 1..22: note = chemically synthesized
  source 1..22: mol_type = other DNA
aatcacatttatataatgaaat

SEQ ID NO: 23690 - DNA, 22 bp, synthetic construct
  misc_feature 1..22: note = chemically synthesized
  source 1..22: mol_type = other DNA
atcacatttatataatgaaatg

SEQ ID NO: 23691 - DNA, 22 bp, synthetic construct
  misc_feature 1..22: note = chemically synthesized
  source 1..22: mol_type = other DNA
atataatgaaatgactattgtc

SEQ ID NO: 23692 - DNA, 22 bp, synthetic construct
  misc_feature 1..22: note = chemically synthesized
  source 1..22: mol_type = other DNA
tataatgaaatgactattgtca

SEQ ID NO: 23693 - DNA, 22 bp, synthetic construct
  misc_feature 1..22: note = chemically synthesized
  source 1..22: mol_type = other DNA
ttgtcacaatcaggaatgacct

SEQ ID NO: 23694 - DNA, 22 bp, synthetic construct
  misc_feature 1..22: note = chemically synthesized
  source 1..22: mol_type = other DNA
tcacaatcaggaatgacctaaa

SEQ ID NO: 23695 - DNA, 22 bp, synthetic construct
  misc_feature 1..22: note = chemically synthesized
  source 1..22: mol_type = other DNA
aagaataattttgagtttatgt

SEQ ID NO: 23696 - DNA, 22 bp, synthetic construct
  misc_feature 1..22: note = chemically synthesized
  source 1..22: mol_type = other DNA
tgagtttatgtatttactggct

SEQ ID NO: 23697 - DNA, 22 bp, synthetic construct
  misc_feature 1..22: note = chemically synthesized
  source 1..22: mol_type = other DNA
gagtttatgtatttactggctg

SEQ ID NO: 23698 - DNA, 22 bp, synthetic construct
  misc_feature 1..22: note = chemically synthesized
  source 1..22: mol_type = other DNA
agtttatgtatttactggctgc

SEQ ID NO: 23699 - DNA, 22 bp, synthetic construct
  misc_feature 1..22: note = chemically synthesized
  source 1..22: mol_type = other DNA
atgtatttactggctgctctaa

SEQ ID NO: 23700 - DNA, 22 bp, synthetic construct
  misc_feature 1..22: note = chemically synthesized
  source 1..22: mol_type = other DNA
tgtatttactggctgctctaaa

SEQ ID NO: 23701 - DNA, 22 bp, synthetic construct
  misc_feature 1..22: note = chemically synthesized
  source 1..22: mol_type = other DNA
actggctgctctaaataatttc

SEQ ID NO: 23702 - DNA, 22 bp, synthetic construct
  misc_feature 1..22: note = chemically synthesized
  source 1..22: mol_type = other DNA
ctggctgctctaaataatttct

SEQ ID NO: 23703 - DNA, 22 bp, synthetic construct
  misc_feature 1..22: note = chemically synthesized
  source 1..22: mol_type = other DNA
gctgctctaaataatttctaat

SEQ ID NO: 23704 - DNA, 22 bp, synthetic construct
  misc_feature 1..22: note = chemically synthesized
  source 1..22: mol_type = other DNA
ctctaaataatttctaattgtt

SEQ ID NO: 23705 - DNA, 22 bp, synthetic construct
  misc_feature 1..22: note = chemically synthesized
  source 1..22: mol_type = other DNA
taaataatttctaattgttgat

SEQ ID NO: 23706 - DNA, 22 bp, synthetic construct
  misc_feature 1..22: note = chemically synthesized
  source 1..22: mol_type = other DNA
aataatttctaattgttgatct

SEQ ID NO: 23707 - DNA, 22 bp, synthetic construct
  misc_feature 1..22: note = chemically synthesized
  source 1..22: mol_type = other DNA
ctaattgttgatctctcccttt

SEQ ID NO: 23708 - DNA, 22 bp, synthetic construct
  misc_feature 1..22: note = chemically synthesized
  source 1..22: mol_type = other DNA
taattgttgatctctccctttt

SEQ ID NO: 23709 - DNA, 22 bp, synthetic construct
  misc_feature 1..22: note = chemically synthesized
  source 1..22: mol_type = other DNA
attgttgatctctcccttttta

SEQ ID NO: 23710 - DNA, 22 bp, synthetic construct
  misc_feature 1..22: note = chemically synthesized
  source 1..22: mol_type = other DNA
ttgatctctccctttttaggaa

SEQ ID NO: 23711 - DNA, 22 bp, synthetic construct
  misc_feature 1..22: note = chemically synthesized
  source 1..22: mol_type = other DNA
atctctccctttttaggaaact

SEQ ID NO: 23712 - DNA, 22 bp, synthetic construct
  misc_feature 1..22: note = chemically synthesized
  source 1..22: mol_type = other DNA
tccctttttaggaaactctttt

SEQ ID NO: 23713 - DNA, 22 bp, synthetic construct
  misc_feature 1..22: note = chemically synthesized
  source 1..22: mol_type = other DNA
cctttttaggaaactcttttta

SEQ ID NO: 23714 - DNA, 22 bp, synthetic construct
  misc_feature 1..22: note = chemically synthesized
  source 1..22: mol_type = other DNA
tttaggaaactctttttataat

SEQ ID NO: 23715 - DNA, 22 bp, synthetic construct
  misc_feature 1..22: note = chemically synthesized
  source 1..22: mol_type = other DNA
ttaggaaactctttttataata

SEQ ID NO: 23716 - DNA, 22 bp, synthetic construct
  misc_feature 1..22: note = chemically synthesized
  source 1..22: mol_type = other DNA
taggaaactctttttataataa

SEQ ID NO: 23717 - DNA, 22 bp, synthetic construct
  misc_feature 1..22: note = chemically synthesized
  source 1..22: mol_type = other DNA
aggaaactctttttataataat

SEQ ID NO: 23718 - DNA, 22 bp, synthetic construct
  misc_feature 1..22: note = chemically synthesized
  source 1..22: mol_type = other DNA
ggaaactctttttataataatc

SEQ ID NO: 23719 - DNA, 22 bp, synthetic construct
  misc_feature 1..22: note = chemically synthesized
  source 1..22: mol_type = other DNA
tttttataataatcactctatt

SEQ ID NO: 23720 - DNA, 22 bp, synthetic construct
  misc_feature 1..22: note = chemically synthesized
  source 1..22: mol_type = other DNA
tttataataatcactctattct

SEQ ID NO: 23721 - DNA, 22 bp, synthetic construct
  misc_feature 1..22: note = chemically synthesized
  source 1..22: mol_type = other DNA
ttataataatcactctattctg

SEQ ID NO: 23722 - DNA, 22 bp, synthetic construct
  misc_feature 1..22: note = chemically synthesized
  source 1..22: mol_type = other DNA
tataataatcactctattctgg

SEQ ID NO: 23723 - DNA, 22 bp, synthetic construct
  misc_feature 1..22: note = chemically synthesized
  source 1..22: mol_type = other DNA
ataataatcactctattctggt

SEQ ID NO: 23724 - DNA, 22 bp, synthetic construct
  misc_feature 1..22: note = chemically synthesized
  source 1..22: mol_type = other DNA
taataatcactctattctggtt

SEQ ID NO: 23725 - DNA, 22 bp, synthetic construct
  misc_feature 1..22: note = chemically synthesized
  source 1..22: mol_type = other DNA
tattctggttccccgctttgct

SEQ ID NO: 23726 - DNA, 22 bp, synthetic construct
  misc_feature 1..22: note = chemically synthesized
  source 1..22: mol_type = other DNA
ttctggttccccgctttgctct

SEQ ID NO: 23727 - DNA, 22 bp, synthetic construct
  misc_feature 1..22: note = chemically synthesized
  source 1..22: mol_type = other DNA
tggttccccgctttgctctaac

SEQ ID NO: 23728 - DNA, 22 bp, synthetic construct
  misc_feature 1..22: note = chemically synthesized
  source 1..22: mol_type = other DNA
gttccccgctttgctctaactc

SEQ ID NO: 23729 - DNA, 22 bp, synthetic construct
  misc_feature 1..22: note = chemically synthesized
  source 1..22: mol_type = other DNA
cccgctttgctctaactcctgt

SEQ ID NO: 23730 - DNA, 22 bp, synthetic construct
  misc_feature 1..22: note = chemically synthesized
  source 1..22: mol_type = other DNA
tgctctaactcctgttatccat

SEQ ID NO: 23731 - DNA, 22 bp, synthetic construct
  misc_feature 1..22: note = chemically synthesized
  source 1..22: mol_type = other DNA
gctctaactcctgttatccatc

SEQ ID NO: 23732 - DNA, 22 bp, synthetic construct
  misc_feature 1..22: note = chemically synthesized
  source 1..22: mol_type = other DNA
ctctaactcctgttatccatcc

SEQ ID NO: 23733 - DNA, 22 bp, synthetic construct
  misc_feature 1..22: note = chemically synthesized
  source 1..22: mol_type = other DNA
taactcctgttatccatccagc

SEQ ID NO: 23734 - DNA, 22 bp, synthetic construct
  misc_feature 1..22: note = chemically synthesized
  source 1..22: mol_type = other DNA
actcctgttatccatccagcac

SEQ ID NO: 23735 - DNA, 22 bp, synthetic construct
  misc_feature 1..22: note = chemically synthesized
  source 1..22: mol_type = other DNA
ctgttatccatccagcacttga

SEQ ID NO: 23736 - DNA, 22 bp, synthetic construct
  misc_feature 1..22: note = chemically synthesized
  source 1..22: mol_type = other DNA
ttatccatccagcacttgaatt

SEQ ID NO: 23737 - DNA, 22 bp, synthetic construct
  misc_feature 1..22: note = chemically synthesized
  source 1..22: mol_type = other DNA
tccatccagcacttgaattgat

SEQ ID NO: 23738 - DNA, 22 bp, synthetic construct
  misc_feature 1..22: note = chemically synthesized
  source 1..22: mol_type = other DNA
gaattgattaactcctgttcct

SEQ ID NO: 23739 - DNA, 22 bp, synthetic construct
  misc_feature 1..22: note = chemically synthesized
  source 1..22: mol_type = other DNA
aattgattaactcctgttcctc

SEQ ID NO: 23740 - DNA, 22 bp, synthetic construct
  misc_feature 1..22: note = chemically synthesized
  source 1..22: mol_type = other DNA
attaactcctgttcctctccat

SEQ ID NO: 23741 - DNA, 22 bp, synthetic construct
  misc_feature 1..22: note = chemically synthesized
  source 1..22: mol_type = other DNA
actcctgttcctctccatggcc

SEQ ID NO: 23742 - DNA, 22 bp, synthetic construct
  misc_feature 1..22: note = chemically synthesized
  source 1..22: mol_type = other DNA
ctgttcctctccatggccctta

SEQ ID NO: 23743 - DNA, 22 bp, synthetic construct
  misc_feature 1..22: note = chemically synthesized
  source 1..22: mol_type = other DNA
ttcctctccatggcccttaaat

SEQ ID NO: 23744 - DNA, 22 bp, synthetic construct
  misc_feature 1..22: note = chemically synthesized
  source 1..22: mol_type = other DNA
ctctccatggcccttaaatgtc

SEQ ID NO: 23745 - DNA, 22 bp, synthetic construct
  misc_feature 1..22: note = chemically synthesized
  source 1..22: mol_type = other DNA
tccatggcccttaaatgtccag

SEQ ID NO: 23746 - DNA, 22 bp, synthetic construct
  misc_feature 1..22: note = chemically synthesized
  source 1..22: mol_type = other DNA
catggcccttaaatgtccaggg

SEQ ID NO: 23747 - DNA, 22 bp, synthetic construct
  misc_feature 1..22: note = chemically synthesized
  source 1..22: mol_type = other DNA
aaatgtccagggttctcccagg

SEQ ID NO: 23748 - DNA, 22 bp, synthetic construct
  misc_feature 1..22: note = chemically synthesized
  source 1..22: mol_type = other DNA
aatgtccagggttctcccaggc

SEQ ID NO: 23749 - DNA, 22 bp, synthetic construct
  misc_feature 1..22: note = chemically synthesized
  source 1..22: mol_type = other DNA
tcccaggctccagcctcagctt

SEQ ID NO: 23750 - DNA, 22 bp, synthetic construct
  misc_feature 1..22: note = chemically synthesized
  source 1..22: mol_type = other DNA
ccaggctccagcctcagctttt

SEQ ID NO: 23751 - DNA, 22 bp, synthetic construct
  misc_feature 1..22: note = chemically synthesized
  source 1..22: mol_type = other DNA
cagcctcagctttttccttttt

SEQ ID NO: 23752 - DNA, 22 bp, synthetic construct
  misc_feature 1..22: note = chemically synthesized
  source 1..22: mol_type = other DNA
agctttttcctttttcacctta

SEQ ID NO: 23753 - DNA, 22 bp, synthetic construct
  misc_feature 1..22: note = chemically synthesized
  source 1..22: mol_type = other DNA
tttcctttttcaccttatatat

SEQ ID NO: 23754 - DNA, 22 bp, synthetic construct
  misc_feature 1..22: note = chemically synthesized
  source 1..22: mol_type = other DNA
ttcctttttcaccttatatata

SEQ ID NO: 23755 - DNA, 22 bp, synthetic construct
  misc_feature 1..22: note = chemically synthesized
  source 1..22: mol_type = other DNA
tcctttttcaccttatatatac

SEQ ID NO: 23756 - DNA, 22 bp, synthetic construct
  misc_feature 1..22: note = chemically synthesized
  source 1..22: mol_type = other DNA
cctttttcaccttatatatact

SEQ ID NO: 23757 - DNA, 22 bp, synthetic construct
  misc_feature 1..22: note = chemically synthesized
  source 1..22: mol_type = other DNA
ctttttcaccttatatatactt

SEQ ID NO: 23758 - DNA, 22 bp, synthetic construct
  misc_feature 1..22: note = chemically synthesized
  source 1..22: mol_type = other DNA
tttcaccttatatatacttgct

SEQ ID NO: 23759 - DNA, 22 bp, synthetic construct
  misc_feature 1..22: note = chemically synthesized
  source 1..22: mol_type = other DNA
ttcaccttatatatacttgcta

SEQ ID NO: 23760 - DNA, 22 bp, synthetic construct
  misc_feature 1..22: note = chemically synthesized
  source 1..22: mol_type = other DNA
tcaccttatatatacttgctag

SEQ ID NO: 23761 - DNA, 22 bp, synthetic construct
  misc_feature 1..22: note = chemically synthesized
  source 1..22: mol_type = other DNA
caccttatatatacttgctagg

SEQ ID NO: 23762 - DNA, 22 bp, synthetic construct
  misc_feature 1..22: note = chemically synthesized
  source 1..22: mol_type = other DNA
accttatatatacttgctaggg

SEQ ID NO: 23763 - DNA, 22 bp, synthetic construct
  misc_feature 1..22: note = chemically synthesized
  source 1..22: mol_type = other DNA
atatatacttgctagggctggg

SEQ ID NO: 23764 - DNA, 22 bp, synthetic construct
  misc_feature 1..22: note = chemically synthesized
  source 1..22: mol_type = other DNA
tatatacttgctagggctggga

SEQ ID NO: 23765 - DNA, 22 bp, synthetic construct
  misc_feature 1..22: note = chemically synthesized
  source 1..22: mol_type = other DNA
gctagggctgggacaagagtga

SEQ ID NO: 23766 - DNA, 22 bp, synthetic construct
  misc_feature 1..22: note = chemically synthesized
  source 1..22: mol_type = other DNA
ctagggctgggacaagagtgaa

SEQ ID NO: 23767 - DNA, 22 bp, synthetic construct
  misc_feature 1..22: note = chemically synthesized
  source 1..22: mol_type = other DNA
gggctgggacaagagtgaacca

SEQ ID NO: 23768 - DNA, 22 bp, synthetic construct
  misc_feature 1..22: note = chemically synthesized
  source 1..22: mol_type = other DNA
ggacaagagtgaaccaaacaag

SEQ ID NO: 23769 - DNA, 22 bp, synthetic construct
  misc_feature 1..22: note = chemically synthesized
  source 1..22: mol_type = other DNA
aagaggtcctcacttctcgggg

SEQ ID NO: 23770 - DNA, 22 bp, synthetic construct
  misc_feature 1..22: note = chemically synthesized
  source 1..22: mol_type = other DNA
agaggtcctcacttctcggggc

SEQ ID NO: 23771 - DNA, 22 bp, synthetic construct
  misc_feature 1..22: note = chemically synthesized
  source 1..22: mol_type = other DNA
acttctcggggcatacaagtat

SEQ ID NO: 23772 - DNA, 22 bp, synthetic construct
  misc_feature 1..22: note = chemically synthesized
  source 1..22: mol_type = other DNA
ctcggggcatacaagtatattt

SEQ ID NO: 23773 - DNA, 22 bp, synthetic construct
  misc_feature 1..22: note = chemically synthesized
  source 1..22: mol_type = other DNA
tcggggcatacaagtatattta

SEQ ID NO: 23774 - DNA, 22 bp, synthetic construct
  misc_feature 1..22: note = chemically synthesized
  source 1..22: mol_type = other DNA
ggggcatacaagtatatttatg

SEQ ID NO: 23775 - DNA, 22 bp, synthetic construct
  misc_feature 1..22: note = chemically synthesized
  source 1..22: mol_type = other DNA
atgccctacaggccttgcttac

SEQ ID NO: 23776 - DNA, 22 bp, synthetic construct
  misc_feature 1..22: note = chemically synthesized
  source 1..22: mol_type = other DNA
tgccctacaggccttgcttacc

SEQ ID NO: 23777 - DNA, 22 bp, synthetic construct
  misc_feature 1..22: note = chemically synthesized
  source 1..22: mol_type = other DNA
caggccttgcttaccacagtct

SEQ ID NO: 23778 - DNA, 22 bp, synthetic construct
  misc_feature 1..22: note = chemically synthesized
  source 1..22: mol_type = other DNA
gcttaccacagtctagtccggc

SEQ ID NO: 23779 - DNA, 22 bp, synthetic construct
  misc_feature 1..22: note = chemically synthesized
  source 1..22: mol_type = other DNA
cttaccacagtctagtccggcc

SEQ ID NO: 23780 - DNA, 22 bp, synthetic construct
  misc_feature 1..22: note = chemically synthesized
  source 1..22: mol_type = other DNA
accacagtctagtccggccctg

SEQ ID NO: 23781 - DNA, 22 bp, synthetic construct
  misc_feature 1..22: note = chemically synthesized
  source 1..22: mol_type = other DNA
ccacagtctagtccggccctga

SEQ ID NO: 23782 - DNA, 22 bp, synthetic construct
  misc_feature 1..22: note = chemically synthesized
  source 1..22: mol_type = other DNA
gtccggccctgaccctgtcaac

SEQ ID NO: 23783 - DNA, 22 bp, synthetic construct
  misc_feature 1..22: note = chemically synthesized
  source 1..22: mol_type = other DNA
accctgtcaacaaaatttactg

SEQ ID NO: 23784 - DNA, 22 bp, synthetic construct
  misc_feature 1..22: note = chemically synthesized
  source 1..22: mol_type = other DNA
tcaacaaaatttactgagcata

SEQ ID NO: 23785 - DNA, 22 bp, synthetic construct
  misc_feature 1..22: note = chemically synthesized
  source 1..22: mol_type = other DNA
actgagcatacaaccactactg

SEQ ID NO: 23786 - DNA, 22 bp, synthetic construct
  misc_feature 1..22: note = chemically synthesized
  source 1..22: mol_type = other DNA
ctgagcatacaaccactactgc

SEQ ID NO: 23787 - DNA, 22 bp, synthetic construct
  misc_feature 1..22: note = chemically synthesized
  source 1..22: mol_type = other DNA
agcatacaaccactactgccag

SEQ ID NO: 23788 - DNA, 22 bp, synthetic construct
  misc_feature 1..22: note = chemically synthesized
  source 1..22: mol_type = other DNA
ctgccaggcactgtactaggta

SEQ ID NO: 23789 - DNA, 22 bp, synthetic construct
  misc_feature 1..22: note = chemically synthesized
  source 1..22: mol_type = other DNA
ccaggcactgtactaggtatca

SEQ ID NO: 23790 - DNA, 22 bp, synthetic construct
  misc_feature 1..22: note = chemically synthesized
  source 1..22: mol_type = other DNA
tactaggtatcacaatatccat

SEQ ID NO: 23791 - DNA, 22 bp, synthetic construct
  misc_feature 1..22: note = chemically synthesized
  source 1..22: mol_type = other DNA
ggtatcacaatatccatgctca

SEQ ID NO: 23792 - DNA, 22 bp, synthetic construct
  misc_feature 1..22: note = chemically synthesized
  source 1..22: mol_type = other DNA
actctccagatgcccacacacg

SEQ ID NO: 23793 - DNA, 22 bp, synthetic construct
  misc_feature 1..22: note = chemically synthesized
  source 1..22: mol_type = other DNA
tccagatgcccacacacgtggc

SEQ ID NO: 23794 - DNA, 22 bp, synthetic construct
  misc_feature 1..22: note = chemically synthesized
  source 1..22: mol_type = other DNA
cagatgcccacacacgtggctg

SEQ ID NO: 23795 - DNA, 22 bp, synthetic construct
  misc_feature 1..22: note = chemically synthesized
  source 1..22: mol_type = other DNA
taactactgtttacagaacaat

SEQ ID NO: 23796 - DNA, 22 bp, synthetic construct
  misc_feature 1..22: note = chemically synthesized
  source 1..22: mol_type = other DNA
ctgtttacagaacaatgagttc

SEQ ID NO: 23797 - DNA, 22 bp, synthetic construct
  misc_feature 1..22: note = chemically synthesized
  source 1..22: mol_type = other DNA
tttacagaacaatgagttccaa

SEQ ID NO: 23798 - DNA, 22 bp, synthetic construct
  misc_feature 1..22: note = chemically synthesized
  source 1..22: mol_type = other DNA
acagaacaatgagttccaaata

SEQ ID NO: 23799 - DNA, 22 bp, synthetic construct
  misc_feature 1..22: note = chemically synthesized
  source 1..22: mol_type = other DNA
cagaacaatgagttccaaatac

SEQ ID NO: 23800 - DNA, 22 bp, synthetic construct
  misc_feature 1..22: note = chemically synthesized
  source 1..22: mol_type = other DNA
caaatactcacctatagtcaga

SEQ ID NO: 23801 - DNA, 22 bp, synthetic construct
  misc_feature 1..22: note = chemically synthesized
  source 1..22: mol_type = other DNA
acctatagtcagatacgtctcc

SEQ ID NO: 23802 - DNA, 22 bp, synthetic construct
  misc_feature 1..22: note = chemically synthesized
  source 1..22: mol_type = other DNA
tagtcagatacgtctcctgaat

SEQ ID NO: 23803 - DNA, 22 bp, synthetic construct
  misc_feature 1..22: note = chemically synthesized
  source 1..22: mol_type = other DNA
ctgaatttcagattatctttcc

SEQ ID NO: 23804 - DNA, 22 bp, synthetic construct
  misc_feature 1..22: note = chemically synthesized
  source 1..22: mol_type = other DNA
aatttcagattatctttccaac

SEQ ID NO: 23805 - DNA, 22 bp, synthetic construct
  misc_feature 1..22: note = chemically synthesized
  source 1..22: mol_type = other DNA
cagattatctttccaactccct

SEQ ID NO: 23806 - DNA, 22 bp, synthetic construct
  misc_feature 1..22: note = chemically synthesized
  source 1..22: mol_type = other DNA
agattatctttccaactcccta

SEQ ID NO: 23807 - DNA, 22 bp, synthetic construct
  misc_feature 1..22: note = chemically synthesized
  source 1..22: mol_type = other DNA
tctttccaactccctaactgta

SEQ ID NO: 23808 - DNA, 22 bp, synthetic construct
  misc_feature 1..22: note = chemically synthesized
  source 1..22: mol_type = other DNA
tccaactccctaactgtatatc

SEQ ID NO: 23809 - DNA, 22 bp, synthetic construct
  misc_feature 1..22: note = chemically synthesized
  source 1..22: mol_type = other DNA
ccaactccctaactgtatatca

SEQ ID NO: 23810 - DNA, 22 bp, synthetic construct
  misc_feature 1..22: note = chemically synthesized
  source 1..22: mol_type = other DNA
caactccctaactgtatatcat

SEQ ID NO: 23811 - DNA, 22 bp, synthetic construct
  misc_feature 1..22: note = chemically synthesized
  source 1..22: mol_type = other DNA
cctaactgtatatcataatgta

SEQ ID NO: 23812 - DNA, 22 bp, synthetic construct
  misc_feature 1..22: note = chemically synthesized
  source 1..22: mol_type = other DNA
actgtatatcataatgtagcca

SEQ ID NO: 23813 - DNA, 22 bp, synthetic construct
  misc_feature 1..22: note = chemically synthesized
  source 1..22: mol_type = other DNA
tatatcataatgtagccagtaa

SEQ ID NO: 23814 - DNA, 22 bp, synthetic construct
  misc_feature 1..22: note = chemically synthesized
  source 1..22: mol_type = other DNA
atgtatatgtaatgcttctgct

SEQ ID NO: 23815 - DNA, 22 bp, synthetic construct
  misc_feature 1..22: note = chemically synthesized
  source 1..22: mol_type = other DNA
ctgctgtgttggacactgtgct

SEQ ID NO: 23816 - DNA, 22 bp, synthetic construct
  misc_feature 1..22: note = chemically synthesized
  source 1..22: mol_type = other DNA
tgctgtgttggacactgtgctc

SEQ ID NO: 23817 - DNA, 22 bp, synthetic construct
  misc_feature 1..22: note = chemically synthesized
  source 1..22: mol_type = other DNA
ctgtgttggacactgtgctcag

SEQ ID NO: 23818 - DNA, 22 bp, synthetic construct
  misc_feature 1..22: note = chemically synthesized
  source 1..22: mol_type = other DNA
tgttggacactgtgctcagtaa

SEQ ID NO: 23819 - DNA, 22 bp, synthetic construct
  misc_feature 1..22: note = chemically synthesized
  source 1..22: mol_type = other DNA
gacactgtgctcagtaactttg

SEQ ID NO: 23820 - DNA, 22 bp, synthetic construct
  misc_feature 1..22: note = chemically synthesized
  source 1..22: mol_type = other DNA
tgctcagtaactttgcatccat

SEQ ID NO: 23821 - DNA, 22 bp, synthetic construct
  misc_feature 1..22: note = chemically synthesized
  source 1..22: mol_type = other DNA
agtaactttgcatccattatct

SEQ ID NO: 23822 - DNA, 22 bp, synthetic construct
  misc_feature 1..22: note = chemically synthesized
  source 1..22: mol_type = other DNA
tgcatccattatctcacttcat

SEQ ID NO: 23823 - DNA, 22 bp, synthetic construct
  misc_feature 1..22: note = chemically synthesized
  source 1..22: mol_type = other DNA
gcatccattatctcacttcatc

SEQ ID NO: 23824 - DNA, 22 bp, synthetic construct
  misc_feature 1..22: note = chemically synthesized
  source 1..22: mol_type = other DNA
catccattatctcacttcatcc

SEQ ID NO: 23825 - DNA, 22 bp, synthetic construct
  misc_feature 1..22: note = chemically synthesized
  source 1..22: mol_type = other DNA
tctcacttcatcctcacaaaag

SEQ ID NO: 23826 - DNA, 22 bp, synthetic construct
  misc_feature 1..22: note = chemically synthesized
  source 1..22: mol_type = other DNA
acttcatcctcacaaaagtccc

SEQ ID NO: 23827 - DNA, 22 bp, synthetic construct
  misc_feature 1..22: note = chemically synthesized
  source 1..22: mol_type = other DNA
catcctcacaaaagtcccacga

SEQ ID NO: 23828 - DNA, 22 bp, synthetic construct
  misc_feature 1..22: note = chemically synthesized
  source 1..22: mol_type = other DNA
atcctcacaaaagtcccacgag

SEQ ID NO: 23829 - DNA, 22 bp, synthetic construct
  misc_feature 1..22: note = chemically synthesized
  source 1..22: mol_type = other DNA
acaaaagtcccacgagataggc

SEQ ID NO: 23830 - DNA, 22 bp, synthetic construct
  misc_feature 1..22: note = chemically synthesized
  source 1..22: mol_type = other DNA
tcatcttatttttatgaatgag

SEQ ID NO: 23831 - DNA, 22 bp, synthetic construct
  misc_feature 1..22: note = chemically synthesized
  source 1..22: mol_type = other DNA
atttttatgaatgaggaagata

SEQ ID NO: 23832 - DNA, 22 bp, synthetic construct
  misc_feature 1..22: note = chemically synthesized
  source 1..22: mol_type = other DNA
tttttatgaatgaggaagatag

SEQ ID NO: 23833 - DNA, 22 bp, synthetic construct
  misc_feature 1..22: note = chemically synthesized
  source 1..22: mol_type = other DNA
ttatgaatgaggaagatagatt

SEQ ID NO: 23834 - DNA, 22 bp, synthetic construct
  misc_feature 1..22: note = chemically synthesized
  source 1..22: mol_type = other DNA
tatgaatgaggaagatagattc

SEQ ID NO: 23835 - DNA, 22 bp, synthetic construct
  misc_feature 1..22: note = chemically synthesized
  source 1..22: mol_type = other DNA
atgaatgaggaagatagattca

SEQ ID NO: 23836 - DNA, 22 bp, synthetic construct
  misc_feature 1..22: note = chemically synthesized
  source 1..22: mol_type = other DNA
tgaatgaggaagatagattcat

SEQ ID NO: 23837 - DNA, 22 bp, synthetic construct
  misc_feature 1..22: note = chemically synthesized
  source 1..22: mol_type = other DNA
atagaggctaagggctttgccc

SEQ ID NO: 23838 - DNA, 22 bp, synthetic construct
  misc_feature 1..22: note = chemically synthesized
  source 1..22: mol_type = other DNA
agggctttgcccaaggtaacat

SEQ ID NO: 23839 - DNA, 22 bp, synthetic construct
  misc_feature 1..22: note = chemically synthesized
  source 1..22: mol_type = other DNA
tgcccaaggtaacatactaaaa

SEQ ID NO: 23840 - DNA, 22 bp, synthetic construct
  misc_feature 1..22: note = chemically synthesized
  source 1..22: mol_type = other DNA
gcccaaggtaacatactaaaac

SEQ ID NO: 23841 - DNA, 22 bp, synthetic construct
  misc_feature 1..22: note = chemically synthesized
  source 1..22: mol_type = other DNA
cccaaggtaacatactaaaaca

SEQ ID NO: 23842 - DNA, 22 bp, synthetic construct
  misc_feature 1..22: note = chemically synthesized
  source 1..22: mol_type = other DNA
aaacattcaggattcagactct

SEQ ID NO: 23843 - DNA, 22 bp, synthetic construct
  misc_feature 1..22: note = chemically synthesized
  source 1..22: mol_type = other DNA
aggattcagactctggcagtca

SEQ ID NO: 23844 - DNA, 22 bp, synthetic construct
  misc_feature 1..22: note = chemically synthesized
  source 1..22: mol_type = other DNA
agactctggcagtcagactaaa

SEQ ID NO: 23845 - DNA, 22 bp, synthetic construct
  misc_feature 1..22: note = chemically synthesized
  source 1..22: mol_type = other DNA
tggcagtcagactaaagagcca

SEQ ID NO: 23846 - DNA, 22 bp, synthetic construct
  misc_feature 1..22: note = chemically synthesized
  source 1..22: mol_type = other DNA
gcagtcagactaaagagccagt

SEQ ID NO: 23847 - DNA, 22 bp, synthetic construct
  misc_feature 1..22: note = chemically synthesized
  source 1..22: mol_type = other DNA
aagagccagttctcttagacat

SEQ ID NO: 23848 - DNA, 22 bp, synthetic construct
  misc_feature 1..22: note = chemically synthesized
  source 1..22: mol_type = other DNA
tcttagacattattctgtggtc

SEQ ID NO: 23849 - DNA, 22 bp, synthetic construct
  misc_feature 1..22: note = chemically synthesized
  source 1..22: mol_type = other DNA
ttagacattattctgtggtcca

SEQ ID NO: 23850 - DNA, 22 bp, synthetic construct
  misc_feature 1..22: note = chemically synthesized
  source 1..22: mol_type = other DNA
agacattattctgtggtccata

SEQ ID NO: 23851 - DNA, 22 bp, synthetic construct
  misc_feature 1..22: note = chemically synthesized
  source 1..22: mol_type = other DNA
gacattattctgtggtccataa

SEQ ID NO: 23852 - DNA, 22 bp, synthetic construct
  misc_feature 1..22: note = chemically synthesized
  source 1..22: mol_type = other DNA
ttctgtggtccataatcacatc

SEQ ID NO: 23853 - DNA, 22 bp, synthetic construct
  misc_feature 1..22: note = chemically synthesized
  source 1..22: mol_type = other DNA
tgtggtccataatcacatcaaa

SEQ ID NO: 23854 - DNA, 22 bp, synthetic construct
  misc_feature 1..22: note = chemically synthesized
  source 1..22: mol_type = other DNA
tggtccataatcacatcaaaca

SEQ ID NO: 23855 - DNA, 22 bp, synthetic construct
  misc_feature 1..22: note = chemically synthesized
  source 1..22: mol_type = other DNA
tagccatttccccttccatacc

SEQ ID NO: 23856 - DNA, 22 bp, synthetic construct
  misc_feature 1..22: note = chemically synthesized
  source 1..22: mol_type = other DNA
gccatttccccttccataccca

SEQ ID NO: 23857 - DNA, 22 bp, synthetic construct
  misc_feature 1..22: note = chemically synthesized
  source 1..22: mol_type = other DNA
ccccttccatacccagatggtt

SEQ ID NO: 23858 - DNA, 22 bp, synthetic construct
  misc_feature 1..22: note = chemically synthesized
  source 1..22: mol_type = other DNA
cccttccatacccagatggtta

SEQ ID NO: 23859 - DNA, 22 bp, synthetic construct
  misc_feature 1..22: note = chemically synthesized
  source 1..22: mol_type = other DNA
ccatacccagatggttaagtca

SEQ ID NO: 23860 - DNA, 22 bp, synthetic construct
  misc_feature 1..22: note = chemically synthesized
  source 1..22: mol_type = other DNA
catacccagatggttaagtcat

SEQ ID NO: 23861 - DNA, 22 bp, synthetic construct
  misc_feature 1..22: note = chemically synthesized
  source 1..22: mol_type = other DNA
agtcataccacttctacttcct

SEQ ID NO: 23862 - DNA, 22 bp, synthetic construct
  misc_feature 1..22: note = chemically synthesized
  source 1..22: mol_type = other DNA
ctacttccttaatatcatttga

SEQ ID NO: 23863 - DNA, 22 bp, synthetic construct
  misc_feature 1..22: note = chemically synthesized
  source 1..22: mol_type = other DNA
tacttccttaatatcatttgaa

SEQ ID NO: 23864 - DNA, 22 bp, synthetic construct
  misc_feature 1..22: note = chemically synthesized
  source 1..22: mol_type = other DNA
cttccttaatatcatttgaact

SEQ ID NO: 23865 - DNA, 22 bp, synthetic construct
  misc_feature 1..22: note = chemically synthesized
  source 1..22: mol_type = other DNA
ccttaatatcatttgaactccc

SEQ ID NO: 23866 - DNA, 22 bp, synthetic construct
  misc_feature 1..22: note = chemically synthesized
  source 1..22: mol_type = other DNA
cttaatatcatttgaactcccc

SEQ ID NO: 23867 - DNA, 22 bp, synthetic construct
  misc_feature 1..22: note = chemically synthesized
  source 1..22: mol_type = other DNA
aatatcatttgaactcccctct

SEQ ID NO: 23868 - DNA, 22 bp, synthetic construct
  misc_feature 1..22: note = chemically synthesized
  source 1..22: mol_type = other DNA
atatcatttgaactcccctctt

SEQ ID NO: 23869 - DNA, 22 bp, synthetic construct
  misc_feature 1..22: note = chemically synthesized
  source 1..22: mol_type = other DNA
gaactcccctctttttttgtac

SEQ ID NO: 23870 - DNA, 22 bp, synthetic construct
  misc_feature 1..22: note = chemically synthesized
  source 1..22: mol_type = other DNA
aactcccctctttttttgtact

SEQ ID NO: 23871 - DNA, 22 bp, synthetic construct
  misc_feature 1..22: note = chemically synthesized
  source 1..22: mol_type = other DNA
ccctctttttttgtactgctac

SEQ ID NO: 23872 - DNA, 22 bp, synthetic construct
  misc_feature 1..22: note = chemically synthesized
  source 1..22: mol_type = other DNA
tttttttgtactgctactgttc

SEQ ID NO: 23873 - DNA, 22 bp, synthetic construct
  misc_feature 1..22: note = chemically synthesized
  source 1..22: mol_type = other DNA
tttttgtactgctactgttcag

SEQ ID NO: 23874 - DNA, 22 bp, synthetic construct
  misc_feature 1..22: note = chemically synthesized
  source 1..22: mol_type = other DNA
ttttgtactgctactgttcagg

SEQ ID NO: 23875 - DNA, 22 bp, synthetic construct
  misc_feature 1..22: note = chemically synthesized
  source 1..22: mol_type = other DNA
tttgtactgctactgttcaggt

SEQ ID NO: 23876 - DNA, 22 bp, synthetic construct
  misc_feature 1..22: note = chemically synthesized
  source 1..22: mol_type = other DNA
ttgtactgctactgttcaggtt

SEQ ID NO: 23877 - DNA, 22 bp, synthetic construct
  misc_feature 1..22: note = chemically synthesized
  source 1..22: mol_type = other DNA
tgtactgctactgttcaggttc

SEQ ID NO: 23878 - DNA, 22 bp, synthetic construct
  misc_feature 1..22: note = chemically synthesized
  source 1..22: mol_type = other DNA
gtactgctactgttcaggttct

SEQ ID NO: 23879 - DNA, 22 bp, synthetic construct
  misc_feature 1..22: note = chemically synthesized
  source 1..22: mol_type = other DNA
tactgctactgttcaggttcta

SEQ ID NO: 23880 - DNA, 22 bp, synthetic construct
  misc_feature 1..22: note = chemically synthesized
  source 1..22: mol_type = other DNA
ctactgttcaggttctagcctt

SEQ ID NO: 23881 - DNA, 22 bp, synthetic construct
  misc_feature 1..22: note = chemically synthesized
  source 1..22: mol_type = other DNA
ctgttcaggttctagcctttat

SEQ ID NO: 23882 - DNA, 22 bp, synthetic construct
  misc_feature 1..22: note = chemically synthesized
  source 1..22: mol_type = other DNA
ttcaggttctagcctttatgtc

SEQ ID NO: 23883 - DNA, 22 bp, synthetic construct
  misc_feature 1..22: note = chemically synthesized
  source 1..22: mol_type = other DNA
aggttctagcctttatgtctcc

SEQ ID NO: 23884 - DNA, 22 bp, synthetic construct
  misc_feature 1..22: note = chemically synthesized
  source 1..22: mol_type = other DNA
tagcctttatgtctcccgcaga

SEQ ID NO: 23885 - DNA, 22 bp, synthetic construct
  misc_feature 1..22: note = chemically synthesized
  source 1..22: mol_type = other DNA
gcctttatgtctcccgcagata

SEQ ID NO: 23886 - DNA, 22 bp, synthetic construct
  misc_feature 1..22: note = chemically synthesized
  source 1..22: mol_type = other DNA
tatgtctcccgcagataattgc

SEQ ID NO: 23887 - DNA, 22 bp, synthetic construct
  misc_feature 1..22: note = chemically synthesized
  source 1..22: mol_type = other DNA
atgtctcccgcagataattgca

SEQ ID NO: 23888 - DNA, 22 bp, synthetic construct
  misc_feature 1..22: note = chemically synthesized
  source 1..22: mol_type = other DNA
tgtctcccgcagataattgcaa

SEQ ID NO: 23889 - DNA, 22 bp, synthetic construct
  misc_feature 1..22: note = chemically synthesized
  source 1..22: mol_type = other DNA
ccgcagataattgcaatagtct

SEQ ID NO: 23890 - DNA, 22 bp, synthetic construct
  misc_feature 1..22: note = chemically synthesized
  source 1..22: mol_type = other DNA
caatagtctcaggactgctctc

SEQ ID NO: 23891 - DNA, 22 bp, synthetic construct
  misc_feature 1..22: note = chemically synthesized
  source 1..22: mol_type = other DNA
aggactgctctctcctagtctt

SEQ ID NO: 23892 - DNA, 22 bp, synthetic construct
  misc_feature 1..22: note = chemically synthesized
  source 1..22: mol_type = other DNA
ctctctcctagtcttggtacgg

SEQ ID NO: 23893 - DNA, 22 bp, synthetic construct
  misc_feature 1..22: note = chemically synthesized
  source 1..22: mol_type = other DNA
tctcctagtcttggtacggccc

SEQ ID NO: 23894 - DNA, 22 bp, synthetic construct
  misc_feature 1..22: note = chemically synthesized
  source 1..22: mol_type = other DNA
tcctagtcttggtacggccccc

SEQ ID NO: 23895 - DNA, 22 bp, synthetic construct
  misc_feature 1..22: note = chemically synthesized
  source 1..22: mol_type = other DNA
ctagtcttggtacggccccctc

SEQ ID NO: 23896 - DNA, 22 bp, synthetic construct
  misc_feature 1..22: note = chemically synthesized
  source 1..22: mol_type = other DNA
gtcttggtacggccccctcccc

SEQ ID NO: 23897 - DNA, 22 bp, synthetic construct
  misc_feature 1..22: note = chemically synthesized
  source 1..22: mol_type = other DNA
ggtacggccccctcccccacta

SEQ ID NO: 23898 - DNA, 22 bp, synthetic construct
  misc_feature 1..22: note = chemically synthesized
  source 1..22: mol_type = other DNA
gtacggccccctcccccactat

SEQ ID NO: 23899 - DNA, 22 bp, synthetic construct
  misc_feature 1..22: note = chemically synthesized
  source 1..22: mol_type = other DNA
ccccactatcatttcattagcg

SEQ ID NO: 23900 - DNA, 22 bp, synthetic construct
  misc_feature 1..22: note = chemically synthesized
  source 1..22: mol_type = other DNA
tcatttcattagcgtgttgcca

SEQ ID NO: 23901 - DNA, 22 bp, synthetic construct
  misc_feature 1..22: note = chemically synthesized
  source 1..22: mol_type = other DNA
cattagcgtgttgccagactgg

SEQ ID NO: 23902 - DNA, 22 bp, synthetic construct
  misc_feature 1..22: note = chemically synthesized
  source 1..22: mol_type = other DNA
attagcgtgttgccagactggg

SEQ ID NO: 23903 - DNA, 22 bp, synthetic construct
  misc_feature 1..22: note = chemically synthesized
  source 1..22: mol_type = other DNA
gcgtgttgccagactgggcatc

SEQ ID NO: 23904 - DNA, 22 bp, synthetic construct
  misc_feature 1..22: note = chemically synthesized
  source 1..22: mol_type = other DNA
ccagactgggcatcctaaatca

SEQ ID NO: 23905 - DNA, 22 bp, synthetic construct
  misc_feature 1..22: note = chemically synthesized
  source 1..22: mol_type = other DNA
ggcatcctaaatcagccatcag

SEQ ID NO: 23906 - DNA, 22 bp, synthetic construct
  misc_feature 1..22: note = chemically synthesized
  source 1..22: mol_type = other DNA
aatcagccatcagtggtactcc

SEQ ID NO: 23907 - DNA, 22 bp, synthetic construct
  misc_feature 1..22: note = chemically synthesized
  source 1..22: mol_type = other DNA
cttatgtttatacttcgatacc

SEQ ID NO: 23908 - DNA, 22 bp, synthetic construct
  misc_feature 1..22: note = chemically synthesized
  source 1..22: mol_type = other DNA
atgtttatacttcgatacctcc

SEQ ID NO: 23909 - DNA, 22 bp, synthetic construct
  misc_feature 1..22: note = chemically synthesized
  source 1..22: mol_type = other DNA
tgtttatacttcgatacctcca

SEQ ID NO: 23910 - DNA, 22 bp, synthetic construct
  misc_feature 1..22: note = chemically synthesized
  source 1..22: mol_type = other DNA
atacttcgatacctccatattg

SEQ ID NO: 23911 - DNA, 22 bp, synthetic construct
  misc_feature 1..22: note = chemically synthesized
  source 1..22: mol_type = other DNA
tacttcgatacctccatattgc

SEQ ID NO: 23912 - DNA, 22 bp, synthetic construct
  misc_feature 1..22: note = chemically synthesized
  source 1..22: mol_type = other DNA
cgatacctccatattgcatttt

SEQ ID NO: 23913 - DNA, 22 bp, synthetic construct
  misc_feature 1..22: note = chemically synthesized
  source 1..22: mol_type = other DNA
gatacctccatattgcatttta

SEQ ID NO: 23914 - DNA, 22 bp, synthetic construct
  misc_feature 1..22: note = chemically synthesized
  source 1..22: mol_type = other DNA
catattgcattttattgtccaa

SEQ ID NO: 23915 - DNA, 22 bp, synthetic construct
  misc_feature 1..22: note = chemically synthesized
  source 1..22: mol_type = other DNA
cattttattgtccaatctcctt

SEQ ID NO: 23916 - DNA, 22 bp, synthetic construct
  misc_feature 1..22: note = chemically synthesized
  source 1..22: mol_type = other DNA
tattgtccaatctccttaggtt

SEQ ID NO: 23917 - DNA, 22 bp, synthetic construct
  misc_feature 1..22: note = chemically synthesized
  source 1..22: mol_type = other DNA
attgtccaatctccttaggtta

SEQ ID NO: 23918 - DNA, 22 bp, synthetic construct
  misc_feature 1..22: note = chemically synthesized
  source 1..22: mol_type = other DNA
ttgtccaatctccttaggttaa

SEQ ID NO: 23919 - DNA, 22 bp, synthetic construct
  misc_feature 1..22: note = chemically synthesized
  source 1..22: mol_type = other DNA
tccaatctccttaggttaatga

SEQ ID NO: 23920 - DNA, 22 bp, synthetic construct
  misc_feature 1..22: note = chemically synthesized
  source 1..22: mol_type = other DNA
cttaggttaatgacttcattat

SEQ ID NO: 23921 - DNA, 22 bp, synthetic construct
  misc_feature 1..22: note = chemically synthesized
  source 1..22: mol_type = other DNA
aggttaatgacttcattatctg

SEQ ID NO: 23922 - DNA, 22 bp, synthetic construct
  misc_feature 1..22: note = chemically synthesized
  source 1..22: mol_type = other DNA
ggttaatgacttcattatctga

SEQ ID NO: 23923 - DNA, 22 bp, synthetic construct
  misc_feature 1..22: note = chemically synthesized
  source 1..22: mol_type = other DNA
atgacttcattatctgatgacc

SEQ ID NO: 23924 - DNA, 22 bp, synthetic construct
  misc_feature 1..22: note = chemically synthesized
  source 1..22: mol_type = other DNA
cattatctgatgaccagctctg

SEQ ID NO: 23925 - DNA, 22 bp, synthetic construct
  misc_feature 1..22: note = chemically synthesized
  source 1..22: mol_type = other DNA
attatctgatgaccagctctgc

SEQ ID NO: 23926 - DNA, 22 bp, synthetic construct
  misc_feature 1..22: note = chemically synthesized
  source 1..22: mol_type = other DNA
tctgatgaccagctctgcctag

SEQ ID NO: 23927 - DNA, 22 bp, synthetic construct
  misc_feature 1..22: note = chemically synthesized
  source 1..22: mol_type = other DNA
atgaccagctctgcctagttta

SEQ ID NO: 23928 - DNA, 22 bp, synthetic construct
  misc_feature 1..22: note = chemically synthesized
  source 1..22: mol_type = other DNA
tgcctagtttacctgtctcact

SEQ ID NO: 23929 - DNA, 22 bp, synthetic construct
  misc_feature 1..22: note = chemically synthesized
  source 1..22: mol_type = other DNA
cctagtttacctgtctcacttg

SEQ ID NO: 23930 - DNA, 22 bp, synthetic construct
  misc_feature 1..22: note = chemically synthesized
  source 1..22: mol_type = other DNA
gtttacctgtctcacttgtcat

SEQ ID NO: 23931 - DNA, 22 bp, synthetic construct
  misc_feature 1..22: note = chemically synthesized
  source 1..22: mol_type = other DNA
acctgtctcacttgtcatagtc

SEQ ID NO: 23932 - DNA, 22 bp, synthetic construct
  misc_feature 1..22: note = chemically synthesized
  source 1..22: mol_type = other DNA
cctgtctcacttgtcatagtcc

SEQ ID NO: 23933 - DNA, 22 bp, synthetic construct
  misc_feature 1..22: note = chemically synthesized
  source 1..22: mol_type = other DNA
tctcacttgtcatagtccatat

SEQ ID NO: 23934 - DNA, 22 bp, synthetic construct
  misc_feature 1..22: note = chemically synthesized
  source 1..22: mol_type = other DNA
acttgtcatagtccatatggaa

SEQ ID NO: 23935 - DNA, 22 bp, synthetic construct
  misc_feature 1..22: note = chemically synthesized
  source 1..22: mol_type = other DNA
gtcatagtccatatggaaccat

SEQ ID NO: 23936 - DNA, 22 bp, synthetic construct
  misc_feature 1..22: note = chemically synthesized
  source 1..22: mol_type = other DNA
tcatagtccatatggaaccata

SEQ ID NO: 23937 - DNA, 22 bp, synthetic construct
  misc_feature 1..22: note = chemically synthesized
  source 1..22: mol_type = other DNA
ctgaaatacctcacgttcttgc

SEQ ID NO: 23938 - DNA, 22 bp, synthetic construct
  misc_feature 1..22: note = chemically synthesized
  source 1..22: mol_type = other DNA
aaatacctcacgttcttgcaaa

SEQ ID NO: 23939 - DNA, 22 bp, synthetic construct
  misc_feature 1..22: note = chemically synthesized
  source 1..22: mol_type = other DNA
acgttcttgcaaatctgagtct

SEQ ID NO: 23940 - DNA, 22 bp, synthetic construct
  misc_feature 1..22: note = chemically synthesized
  source 1..22: mol_type = other DNA
ttgcaaatctgagtctttgcac

SEQ ID NO: 23941 - DNA, 22 bp, synthetic construct
  misc_feature 1..22: note = chemically synthesized
  source 1..22: mol_type = other DNA
gcaaatctgagtctttgcacga

SEQ ID NO: 23942 - DNA, 22 bp, synthetic construct
  misc_feature 1..22: note = chemically synthesized
  source 1..22: mol_type = other DNA
caaatctgagtctttgcacgag

SEQ ID NO: 23943 - DNA, 22 bp, synthetic construct
  misc_feature 1..22: note = chemically synthesized
  source 1..22: mol_type = other DNA
agtctttgcacgagtgatcctc

SEQ ID NO: 23944 - DNA, 22 bp, synthetic construct
  misc_feature 1..22: note = chemically synthesized
  source 1..22: mol_type = other DNA
tgcacgagtgatcctctttgca

SEQ ID NO: 23945 - DNA, 22 bp, synthetic construct
  misc_feature 1..22: note = chemically synthesized
  source 1..22: mol_type = other DNA
gcacgagtgatcctctttgcat

SEQ ID NO: 23946 - DNA, 22 bp, synthetic construct
  misc_feature 1..22: note = chemically synthesized
  source 1..22: mol_type = other DNA
cacgagtgatcctctttgcata

SEQ ID NO: 23947 - DNA, 22 bp, synthetic construct
  misc_feature 1..22: note = chemically synthesized
  source 1..22: mol_type = other DNA
tttgcataaaatgcccttatat

SEQ ID NO: 23948 - DNA, 22 bp, synthetic construct
  misc_feature 1..22: note = chemically synthesized
  source 1..22: mol_type = other DNA
tgcataaaatgcccttatatca

SEQ ID NO: 23949 - DNA, 22 bp, synthetic construct
  misc_feature 1..22: note = chemically synthesized
  source 1..22: mol_type = other DNA
gcataaaatgcccttatatcag

SEQ ID NO: 23950 - DNA, 22 bp, synthetic construct
  misc_feature 1..22: note = chemically synthesized
  source 1..22: mol_type = other DNA
cataaaatgcccttatatcaga

SEQ ID NO: 23951 - DNA, 22 bp, synthetic construct
  misc_feature 1..22: note = chemically synthesized
  source 1..22: mol_type = other DNA
atatcagacatttaaagagaga

SEQ ID NO: 23952 - DNA, 22 bp, synthetic construct
  misc_feature 1..22: note = chemically synthesized
  source 1..22: mol_type = other DNA
tatcagacatttaaagagagag

SEQ ID NO: 23953 - DNA, 22 bp, synthetic construct
  misc_feature 1..22: note = chemically synthesized
  source 1..22: mol_type = other DNA
aaagagagagaacgcctactca

SEQ ID NO: 23954 - DNA, 22 bp, synthetic construct
  misc_feature 1..22: note = chemically synthesized
  source 1..22: mol_type = other DNA
aagagagagaacgcctactcat

SEQ ID NO: 23955 - DNA, 22 bp, synthetic construct
  misc_feature 1..22: note = chemically synthesized
  source 1..22: mol_type = other DNA
ctcatcttttaagacccagatg

SEQ ID NO: 23956 - DNA, 22 bp, synthetic construct
  misc_feature 1..22: note = chemically synthesized
  source 1..22: mol_type = other DNA
atcttttaagacccagatgaaa

SEQ ID NO: 23957 - DNA, 22 bp, synthetic construct
  misc_feature 1..22: note = chemically synthesized
  source 1..22: mol_type = other DNA
ttaagacccagatgaaaatatt

SEQ ID NO: 23958 - DNA, 22 bp, synthetic construct
  misc_feature 1..22: note = chemically synthesized
  source 1..22: mol_type = other DNA
taagacccagatgaaaatattc

SEQ ID NO: 23959 - DNA, 22 bp, synthetic construct
  misc_feature 1..22: note = chemically synthesized
  source 1..22: mol_type = other DNA
aagacccagatgaaaatattct

SEQ ID NO: 23960 - DNA, 22 bp, synthetic construct
  misc_feature 1..22: note = chemically synthesized
  source 1..22: mol_type = other DNA
agacccagatgaaaatattctc

SEQ ID NO: 23961 - DNA, 22 bp, synthetic construct
  misc_feature 1..22: note = chemically synthesized
  source 1..22: mol_type = other DNA
tctctctatcaattgtttcccc

SEQ ID NO: 23962 - DNA, 22 bp, synthetic construct
  misc_feature 1..22: note = chemically synthesized
  source 1..22: mol_type = other DNA
tctctatcaattgtttccccat

SEQ ID NO: 23963 - DNA, 22 bp, synthetic construct
  misc_feature 1..22: note = chemically synthesized
  source 1..22: mol_type = other DNA
tctatcaattgtttccccattt

SEQ ID NO: 23964 - DNA, 22 bp, synthetic construct
  misc_feature 1..22: note = chemically synthesized
  source 1..22: mol_type = other DNA
tatcaattgtttccccatttaa

SEQ ID NO: 23965 - DNA, 22 bp, synthetic construct
  misc_feature 1..22: note = chemically synthesized
  source 1..22: mol_type = other DNA
tcaattgtttccccatttaatg

SEQ ID NO: 23966 - DNA, 22 bp, synthetic construct
  misc_feature 1..22: note = chemically synthesized
  source 1..22: mol_type = other DNA
tttccccatttaatgtgttcct

SEQ ID NO: 23967 - DNA, 22 bp, synthetic construct
  misc_feature 1..22: note = chemically synthesized
  source 1..22: mol_type = other DNA
ccccatttaatgtgttcctttc

SEQ ID NO: 23968 - DNA, 22 bp, synthetic construct
  misc_feature 1..22: note = chemically synthesized
  source 1..22: mol_type = other DNA
cccatttaatgtgttcctttct

SEQ ID NO: 23969 - DNA, 22 bp, synthetic construct
  misc_feature 1..22: note = chemically synthesized
  source 1..22: mol_type = other DNA
aatgtgttcctttctctatgat

SEQ ID NO: 23970 - DNA, 22 bp, synthetic construct
  misc_feature 1..22: note = chemically synthesized
  source 1..22: mol_type = other DNA
atgtgttcctttctctatgatc

SEQ ID NO: 23971 - DNA, 22 bp, synthetic construct
  misc_feature 1..22: note = chemically synthesized
  source 1..22: mol_type = other DNA
ctttctctatgatcccttagta

SEQ ID NO: 23972 - DNA, 22 bp, synthetic construct
  misc_feature 1..22: note = chemically synthesized
  source 1..22: mol_type = other DNA
tctctatgatcccttagtacct

SEQ ID NO: 23973 - DNA, 22 bp, synthetic construct
  misc_feature 1..22: note = chemically synthesized
  source 1..22: mol_type = other DNA
ctctatgatcccttagtaccta

SEQ ID NO: 23974 - DNA, 22 bp, synthetic construct
  misc_feature 1..22: note = chemically synthesized
  source 1..22: mol_type = other DNA
tctatgatcccttagtacctag

SEQ ID NO: 23975 - DNA, 22 bp, synthetic construct
  misc_feature 1..22: note = chemically synthesized
  source 1..22: mol_type = other DNA
tatgatcccttagtacctagtg

SEQ ID NO: 23976 - DNA, 22 bp, synthetic construct
  misc_feature 1..22: note = chemically synthesized
  source 1..22: mol_type = other DNA
tgatcccttagtacctagtgca

SEQ ID NO: 23977 - DNA, 22 bp, synthetic construct
  misc_feature 1..22: note = chemically synthesized
  source 1..22: mol_type = other DNA
agtacctagtgcacattttatc

SEQ ID NO: 23978 - DNA, 22 bp, synthetic construct
  misc_feature 1..22: note = chemically synthesized
  source 1..22: mol_type = other DNA
gtacctagtgcacattttatca

SEQ ID NO: 23979 - DNA, 22 bp, synthetic construct
  misc_feature 1..22: note = chemically synthesized
  source 1..22: mol_type = other DNA
gtgcacattttatcacattata

SEQ ID NO: 23980 - DNA, 22 bp, synthetic construct
  misc_feature 1..22: note = chemically synthesized
  source 1..22: mol_type = other DNA
tatcacattatattgaaacctc

SEQ ID NO: 23981 - DNA, 22 bp, synthetic construct
  misc_feature 1..22: note = chemically synthesized
  source 1..22: mol_type = other DNA
atcacattatattgaaacctct

SEQ ID NO: 23982 - DNA, 22 bp, synthetic construct
  misc_feature 1..22: note = chemically synthesized
  source 1..22: mol_type = other DNA
tcacattatattgaaacctctc

SEQ ID NO: 23983 - DNA, 22 bp, synthetic construct
  misc_feature 1..22: note = chemically synthesized
  source 1..22: mol_type = other DNA
tattgaaacctctcacctggcc

SEQ ID NO: 23984 - DNA, 22 bp, synthetic construct
  misc_feature 1..22: note = chemically synthesized
  source 1..22: mol_type = other DNA
aaacctctcacctggcctcatg

SEQ ID NO: 23985 - DNA, 22 bp, synthetic construct
  misc_feature 1..22: note = chemically synthesized
  source 1..22: mol_type = other DNA
tcacctggcctcatgctgcttt

SEQ ID NO: 23986 - DNA, 22 bp, synthetic construct
  misc_feature 1..22: note = chemically synthesized
  source 1..22: mol_type = other DNA
acctggcctcatgctgctttag

SEQ ID NO: 23987 - DNA, 22 bp, synthetic construct
  misc_feature 1..22: note = chemically synthesized
  source 1..22: mol_type = other DNA
gcctcatgctgctttagatcaa

SEQ ID NO: 23988 - DNA, 22 bp, synthetic construct
  misc_feature 1..22: note = chemically synthesized
  source 1..22: mol_type = other DNA
atgctgctttagatcaaagagg

SEQ ID NO: 23989 - DNA, 22 bp, synthetic construct
  misc_feature 1..22: note = chemically synthesized
  source 1..22: mol_type = other DNA
ctttagatcaaagagggagtct

SEQ ID NO: 23990 - DNA, 22 bp, synthetic construct
  misc_feature 1..22: note = chemically synthesized
  source 1..22: mol_type = other DNA
tagatcaaagagggagtctggt

SEQ ID NO: 23991 - DNA, 22 bp, synthetic construct
  misc_feature 1..22: note = chemically synthesized
  source 1..22: mol_type = other DNA
agatcaaagagggagtctggtt

SEQ ID NO: 23992 - DNA, 22 bp, synthetic construct
  misc_feature 1..22: note = chemically synthesized
  source 1..22: mol_type = other DNA
gatcaaagagggagtctggttt

SEQ ID NO: 23993 - DNA, 22 bp, synthetic construct
  misc_feature 1..22: note = chemically synthesized
  source 1..22: mol_type = other DNA
gtttatccccatacccctagta

SEQ ID NO: 23994 - DNA, 22 bp, synthetic construct
  misc_feature 1..22: note = chemically synthesized
  source 1..22: mol_type = other DNA
atccccatacccctagtaccct

SEQ ID NO: 23995 - DNA, 22 bp, synthetic construct
  misc_feature 1..22: note = chemically synthesized
  source 1..22: mol_type = other DNA
tccccatacccctagtaccctg

SEQ ID NO: 23996 - DNA, 22 bp, synthetic construct
  misc_feature 1..22: note = chemically synthesized
  source 1..22: mol_type = other DNA
gtaccctgacacagtacctggc

SEQ ID NO: 23997 - DNA, 22 bp, synthetic construct
  misc_feature 1..22: note = chemically synthesized
  source 1..22: mol_type = other DNA
acacagtacctggcaccatagt

SEQ ID NO: 23998 - DNA, 22 bp, synthetic construct
  misc_feature 1..22: note = chemically synthesized
  source 1..22: mol_type = other DNA
gcaccatagttgtaactcagta

SEQ ID NO: 23999 - DNA, 22 bp, synthetic construct
  misc_feature 1..22: note = chemically synthesized
  source 1..22: mol_type = other DNA
taactcagtaatgtctgaatga

SEQ ID NO: 24000 - DNA, 22 bp, synthetic construct
  misc_feature 1..22: note = chemically synthesized
  source 1..22: mol_type = other DNA
agtaatgtctgaatgaaggaca

SEQ ID NO: 24001 - DNA, 22 bp, synthetic construct
  misc_feature 1..22: note = chemically synthesized
  source 1..22: mol_type = other DNA
aatgaaggacatctttgatgca

SEQ ID NO: 24002 - DNA, 22 bp, synthetic construct
  misc_feature 1..22: note = chemically synthesized
  source 1..22: mol_type = other DNA
tgatgcatacactttacaaaac

SEQ ID NO: 24003 - DNA, 22 bp, synthetic construct
  misc_feature 1..22: note = chemically synthesized
  source 1..22: mol_type = other DNA
gatgcatacactttacaaaact

SEQ ID NO: 24004 - DNA, 22 bp, synthetic construct
  misc_feature 1..22: note = chemically synthesized
  source 1..22: mol_type = other DNA
atgcatacactttacaaaacta

SEQ ID NO: 24005 - DNA, 22 bp, synthetic construct
  misc_feature 1..22: note = chemically synthesized
  source 1..22: mol_type = other DNA
tacaaaactaaactggttttac

SEQ ID NO: 24006 - DNA, 22 bp, synthetic construct
  misc_feature 1..22: note = chemically synthesized
  source 1..22: mol_type = other DNA
acaaaactaaactggttttaca

SEQ ID NO: 24007 - DNA, 22 bp, synthetic construct
  misc_feature 1..22: note = chemically synthesized
  source 1..22: mol_type = other DNA
caaaactaaactggttttacag

SEQ ID NO: 24008 - DNA, 22 bp, synthetic construct
  misc_feature 1..22: note = chemically synthesized
  source 1..22: mol_type = other DNA
aactggttttacagaactgttt

SEQ ID NO: 24009 - DNA, 22 bp, synthetic construct
  misc_feature 1..22: note = chemically synthesized
  source 1..22: mol_type = other DNA
gttttacagaactgttttaatt

SEQ ID NO: 24010 - DNA, 22 bp, synthetic construct
  misc_feature 1..22: note = chemically synthesized
  source 1..22: mol_type = other DNA
tacagaactgttttaatttcaa

SEQ ID NO: 24011 - DNA, 22 bp, synthetic construct
  misc_feature 1..22: note = chemically synthesized
  source 1..22: mol_type = other DNA
acagaactgttttaatttcaaa

SEQ ID NO: 24012 - DNA, 22 bp, synthetic construct
  misc_feature 1..22: note = chemically synthesized
  source 1..22: mol_type = other DNA
cagaactgttttaatttcaaaa

SEQ ID NO: 24013 - DNA, 22 bp, synthetic construct
  misc_feature 1..22: note = chemically synthesized
  source 1..22: mol_type = other DNA
ttttaatttcaaaattccaaac

SEQ ID NO: 24014 - DNA, 22 bp, synthetic construct
  misc_feature 1..22: note = chemically synthesized
  source 1..22: mol_type = other DNA
taatttcaaaattccaaactgt

SEQ ID NO: 24015 - DNA, 22 bp, synthetic construct
  misc_feature 1..22: note = chemically synthesized
  source 1..22: mol_type = other DNA
aatttcaaaattccaaactgtt

SEQ ID NO: 24016 - DNA, 22 bp, synthetic construct
  misc_feature 1..22: note = chemically synthesized
  source 1..22: mol_type = other DNA
atttcaaaattccaaactgttg

SEQ ID NO: 24017 - DNA, 22 bp, synthetic construct
  misc_feature 1..22: note = chemically synthesized
  source 1..22: mol_type = other DNA
caaaattccaaactgttgcaat

SEQ ID NO: 24018 - DNA, 22 bp, synthetic construct
  misc_feature 1..22: note = chemically synthesized
  source 1..22: mol_type = other DNA
aaaattccaaactgttgcaata

SEQ ID NO: 24019 - DNA, 22 bp, synthetic construct
  misc_feature 1..22: note = chemically synthesized
  source 1..22: mol_type = other DNA
caaactgttgcaataataccta

SEQ ID NO: 24020 - DNA, 22 bp, synthetic construct
  misc_feature 1..22: note = chemically synthesized
  source 1..22: mol_type = other DNA
ttgcaataatacctaaaggcag

SEQ ID NO: 24021 - DNA, 22 bp, synthetic construct
  misc_feature 1..22: note = chemically synthesized
  source 1..22: mol_type = other DNA
caataatacctaaaggcagcag

SEQ ID NO: 24022 - DNA, 22 bp, synthetic construct
  misc_feature 1..22: note = chemically synthesized
  source 1..22: mol_type = other DNA
aaggcagcagccatgaaaatgc

SEQ ID NO: 24023 - DNA, 22 bp, synthetic construct
  misc_feature 1..22: note = chemically synthesized
  source 1..22: mol_type = other DNA
agcaaatcactcaccgaaactc

SEQ ID NO: 24024 - DNA, 22 bp, synthetic construct
  misc_feature 1..22: note = chemically synthesized
  source 1..22: mol_type = other DNA
accgaaactccttttagaagcc

SEQ ID NO: 24025 - DNA, 22 bp, synthetic construct
  misc_feature 1..22: note = chemically synthesized
  source 1..22: mol_type = other DNA
cttttagaagccaatgagagtt

SEQ ID NO: 24026 - DNA, 22 bp, synthetic construct
  misc_feature 1..22: note = chemically synthesized
  source 1..22: mol_type = other DNA
ttagaagccaatgagagtttaa

SEQ ID NO: 24027 - DNA, 22 bp, synthetic construct
  misc_feature 1..22: note = chemically synthesized
  source 1..22: mol_type = other DNA
tagaagccaatgagagtttaat

SEQ ID NO: 24028 - DNA, 22 bp, synthetic construct
  misc_feature 1..22: note = chemically synthesized
  source 1..22: mol_type = other DNA
agaagccaatgagagtttaata

SEQ ID NO: 24029 - DNA, 22 bp, synthetic construct
  misc_feature 1..22: note = chemically synthesized
  source 1..22: mol_type = other DNA
gaagccaatgagagtttaatag

SEQ ID NO: 24030 - DNA, 22 bp, synthetic construct
  misc_feature 1..22: note = chemically synthesized
  source 1..22: mol_type = other DNA
aatagcagaagagagtgctgca

SEQ ID NO: 24031 - DNA, 22 bp, synthetic construct
  misc_feature 1..22: note = chemically synthesized
  source 1..22: mol_type = other DNA
atagcagaagagagtgctgcat

SEQ ID NO: 24032 - DNA, 22 bp, synthetic construct
  misc_feature 1..22: note = chemically synthesized
  source 1..22: mol_type = other DNA
cattaatactgtctatccttag

SEQ ID NO: 24033 - DNA, 22 bp, synthetic construct
  misc_feature 1..22: note = chemically synthesized
  source 1..22: mol_type = other DNA
atactgtctatccttagaaaaa

SEQ ID NO: 24034 - DNA, 22 bp, synthetic construct
  misc_feature 1..22: note = chemically synthesized
  source 1..22: mol_type = other DNA
tctatccttagaaaaattcccc

SEQ ID NO: 24035 - DNA, 22 bp, synthetic construct
  misc_feature 1..22: note = chemically synthesized
  source 1..22: mol_type = other DNA
tccttagaaaaattcccctggc

SEQ ID NO: 24036 - DNA, 22 bp, synthetic construct
  misc_feature 1..22: note = chemically synthesized
  source 1..22: mol_type = other DNA
agaaaaattcccctggcccctt

SEQ ID NO: 24037 - DNA, 22 bp, synthetic construct
  misc_feature 1..22: note = chemically synthesized
  source 1..22: mol_type = other DNA
gaaaaattcccctggccccttc

SEQ ID NO: 24038 - DNA, 22 bp, synthetic construct
  misc_feature 1..22: note = chemically synthesized
  source 1..22: mol_type = other DNA
ccctggccccttcctcaagggc

SEQ ID NO: 24039 - DNA, 22 bp, synthetic construct
  misc_feature 1..22: note = chemically synthesized
  source 1..22: mol_type = other DNA
gccccttcctcaagggcttatt

SEQ ID NO: 24040 - DNA, 22 bp, synthetic construct
  misc_feature 1..22: note = chemically synthesized
  source 1..22: mol_type = other DNA
cctcaagggcttattatctctg

SEQ ID NO: 24041 - DNA, 22 bp, synthetic construct
  misc_feature 1..22: note = chemically synthesized
  source 1..22: mol_type = other DNA
ctcaagggcttattatctctgg

SEQ ID NO: 24042 - DNA, 22 bp, synthetic construct
  misc_feature 1..22: note = chemically synthesized
  source 1..22: mol_type = other DNA
aagggcttattatctctggcta

SEQ ID NO: 24043 - DNA, 22 bp, synthetic construct
  misc_feature 1..22: note = chemically synthesized
  source 1..22: mol_type = other DNA
attatctctggctacaatggct

SEQ ID NO: 24044 - DNA, 22 bp, synthetic construct
  misc_feature 1..22: note = chemically synthesized
  source 1..22: mol_type = other DNA
ttatctctggctacaatggctg

SEQ ID NO: 24045 - DNA, 22 bp, synthetic construct
  misc_feature 1..22: note = chemically synthesized
  source 1..22: mol_type = other DNA
tctctggctacaatggctgcag

SEQ ID NO: 24046 - DNA, 22 bp, synthetic construct
  misc_feature 1..22: note = chemically synthesized
  source 1..22: mol_type = other DNA
tggctacaatggctgcagaatc

SEQ ID NO: 24047 - DNA, 22 bp, synthetic construct
  misc_feature 1..22: note = chemically synthesized
  source 1..22: mol_type = other DNA
gctacaatggctgcagaatcac

SEQ ID NO: 24048 - DNA, 22 bp, synthetic construct
  misc_feature 1..22: note = chemically synthesized
  source 1..22: mol_type = other DNA
caatggctgcagaatcacattg

SEQ ID NO: 24049 - DNA, 22 bp, synthetic construct
  misc_feature 1..22: note = chemically synthesized
  source 1..22: mol_type = other DNA
cagaatcacattgcctttctcc

SEQ ID NO: 24050 - DNA, 22 bp, synthetic construct
  misc_feature 1..22: note = chemically synthesized
  source 1..22: mol_type = other DNA
cctttctccttagtattatctg

SEQ ID NO: 24051 - DNA, 22 bp, synthetic construct
  misc_feature 1..22: note = chemically synthesized
  source 1..22: mol_type = other DNA
tctccttagtattatctgggga

SEQ ID NO: 24052 - DNA, 22 bp, synthetic construct
  misc_feature 1..22: note = chemically synthesized
  source 1..22: mol_type = other DNA
ctccttagtattatctggggat

SEQ ID NO: 24053 - DNA, 22 bp, synthetic construct
  misc_feature 1..22: note = chemically synthesized
  source 1..22: mol_type = other DNA
tccttagtattatctggggatc

SEQ ID NO: 24054 - DNA, 22 bp, synthetic construct
  misc_feature 1..22: note = chemically synthesized
  source 1..22: mol_type = other DNA
cttagtattatctggggatcgt

SEQ ID NO: 24055 - DNA, 22 bp, synthetic construct
  misc_feature 1..22: note = chemically synthesized
  source 1..22: mol_type = other DNA
agtattatctggggatcgtata

SEQ ID NO: 24056 - DNA, 22 bp, synthetic construct
  misc_feature 1..22: note = chemically synthesized
  source 1..22: mol_type = other DNA
gtattatctggggatcgtatac

SEQ ID NO: 24057 - DNA, 22 bp, synthetic construct
  misc_feature 1..22: note = chemically synthesized
  source 1..22: mol_type = other DNA
tctggggatcgtatacttaact

SEQ ID NO: 24058 - DNA, 22 bp, synthetic construct
  misc_feature 1..22: note = chemically synthesized
  source 1..22: mol_type = other DNA
gggatcgtatacttaacttccc

SEQ ID NO: 24059 - DNA, 22 bp, synthetic construct
  misc_feature 1..22: note = chemically synthesized
  source 1..22: mol_type = other DNA
aacttcccttcaggtttatcgc

SEQ ID NO: 24060 - DNA, 22 bp, synthetic construct
  misc_feature 1..22: note = chemically synthesized
  source 1..22: mol_type = other DNA
acttcccttcaggtttatcgct

SEQ ID NO: 24061 - DNA, 22 bp, synthetic construct
  misc_feature 1..22: note = chemically synthesized
  source 1..22: mol_type = other DNA
cccttcaggtttatcgctagtc

SEQ ID NO: 24062 - DNA, 22 bp, synthetic construct
  misc_feature 1..22: note = chemically synthesized
  source 1..22: mol_type = other DNA
ccttcaggtttatcgctagtca

SEQ ID NO: 24063 - DNA, 22 bp, synthetic construct
  misc_feature 1..22: note = chemically synthesized
  source 1..22: mol_type = other DNA
caggtttatcgctagtcattat

SEQ ID NO: 24064 - DNA, 22 bp, synthetic construct
  misc_feature 1..22: note = chemically synthesized
  source 1..22: mol_type = other DNA
aggtttatcgctagtcattatt

SEQ ID NO: 24065 - DNA, 22 bp, synthetic construct
  misc_feature 1..22: note = chemically synthesized
  source 1..22: mol_type = other DNA
atcgctagtcattatttcccag

SEQ ID NO: 24066 - DNA, 22 bp, synthetic construct
  misc_feature 1..22: note = chemically synthesized
  source 1..22: mol_type = other DNA
tcgctagtcattatttcccagg

SEQ ID NO: 24067 - DNA, 22 bp, synthetic construct
  misc_feature 1..22: note = chemically synthesized
  source 1..22: mol_type = other DNA
gtcattatttcccaggctccaa

SEQ ID NO: 24068 - DNA, 22 bp, synthetic construct
  misc_feature 1..22: note = chemically synthesized
  source 1..22: mol_type = other DNA
tttcccaggctccaaaagcctg

SEQ ID NO: 24069 - DNA, 22 bp, synthetic construct
  misc_feature 1..22: note = chemically synthesized
  source 1..22: mol_type = other DNA
cccaggctccaaaagcctggtt

SEQ ID NO: 24070 - DNA, 22 bp, synthetic construct
  misc_feature 1..22: note = chemically synthesized
  source 1..22: mol_type = other DNA
ccaggctccaaaagcctggttc

SEQ ID NO: 24071 - DNA, 22 bp, synthetic construct
  misc_feature 1..22: note = chemically synthesized
  source 1..22: mol_type = other DNA
caaaagcctggttcatccttat

SEQ ID NO: 24072 - DNA, 22 bp, synthetic construct
  misc_feature 1..22: note = chemically synthesized
  source 1..22: mol_type = other DNA
gttcatccttattcttatctat

SEQ ID NO: 24073 - DNA, 22 bp, synthetic construct
  misc_feature 1..22: note = chemically synthesized
  source 1..22: mol_type = other DNA
atccttattcttatctatcctt

SEQ ID NO: 24074 - DNA, 22 bp, synthetic construct
  misc_feature 1..22: note = chemically synthesized
  source 1..22: mol_type = other DNA
attcttatctatcctttcccca

SEQ ID NO: 24075 - DNA, 22 bp, synthetic construct
  misc_feature 1..22: note = chemically synthesized
  source 1..22: mol_type = other DNA
ttcttatctatcctttccccag

SEQ ID NO: 24076 - DNA, 22 bp, synthetic construct
  misc_feature 1..22: note = chemically synthesized
  source 1..22: mol_type = other DNA
ttatctatcctttccccagcat

SEQ ID NO: 24077 - DNA, 22 bp, synthetic construct
  misc_feature 1..22: note = chemically synthesized
  source 1..22: mol_type = other DNA
atctatcctttccccagcatct

SEQ ID NO: 24078 - DNA, 22 bp, synthetic construct
  misc_feature 1..22: note = chemically synthesized
  source 1..22: mol_type = other DNA
tctatcctttccccagcatctg

SEQ ID NO: 24079 - DNA, 22 bp, synthetic construct
  misc_feature 1..22: note = chemically synthesized
  source 1..22: mol_type = other DNA
tcctttccccagcatctgaagt

SEQ ID NO: 24080 - DNA, 22 bp, synthetic construct
  misc_feature 1..22: note = chemically synthesized
  source 1..22: mol_type = other DNA
tccccagcatctgaagtcttca

SEQ ID NO: 24081 - DNA, 22 bp, synthetic construct
  misc_feature 1..22: note = chemically synthesized
  source 1..22: mol_type = other DNA
ccccagcatctgaagtcttcaa

SEQ ID NO: 24082 - DNA, 22 bp, synthetic construct
  misc_feature 1..22: note = chemically synthesized
  source 1..22: mol_type = other DNA
cccagcatctgaagtcttcaag

SEQ ID NO: 24083 - DNA, 22 bp, synthetic construct
  misc_feature 1..22: note = chemically synthesized
  source 1..22: mol_type = other DNA
aagtcttcaagggggcagaagc

SEQ ID NO: 24084 - DNA, 22 bp, synthetic construct
  misc_feature 1..22: note = chemically synthesized
  source 1..22: mol_type = other DNA
caagggggcagaagccctctta

SEQ ID NO: 24085 - DNA, 22 bp, synthetic construct
  misc_feature 1..22: note = chemically synthesized
  source 1..22: mol_type = other DNA
aagggggcagaagccctcttac

SEQ ID NO: 24086 - DNA, 22 bp, synthetic construct
  misc_feature 1..22: note = chemically synthesized
  source 1..22: mol_type = other DNA
ttacaaccttcatcatctcacc

SEQ ID NO: 24087 - DNA, 22 bp, synthetic construct
  misc_feature 1..22: note = chemically synthesized
  source 1..22: mol_type = other DNA
acaaccttcatcatctcaccac

SEQ ID NO: 24088 - DNA, 22 bp, synthetic construct
  misc_feature 1..22: note = chemically synthesized
  source 1..22: mol_type = other DNA
caaccttcatcatctcaccact

SEQ ID NO: 24089 - DNA, 22 bp, synthetic construct
  misc_feature 1..22: note = chemically synthesized
  source 1..22: mol_type = other DNA
catcatctcaccacttatatag

SEQ ID NO: 24090 - DNA, 22 bp, synthetic construct
  misc_feature 1..22: note = chemically synthesized
  source 1..22: mol_type = other DNA
atcatctcaccacttatataga

SEQ ID NO: 24091 - DNA, 22 bp, synthetic construct
  misc_feature 1..22: note = chemically synthesized
  source 1..22: mol_type = other DNA
accacttatatagaagaaaggg

SEQ ID NO: 24092 - DNA, 22 bp, synthetic construct
  misc_feature 1..22: note = chemically synthesized
  source 1..22: mol_type = other DNA
atatagaagaaagggtttggat

SEQ ID NO: 24093 - DNA, 22 bp, synthetic construct
  misc_feature 1..22: note = chemically synthesized
  source 1..22: mol_type = other DNA
tatagaagaaagggtttggatg

SEQ ID NO: 24094 - DNA, 22 bp, synthetic construct
  misc_feature 1..22: note = chemically synthesized
  source 1..22: mol_type = other DNA
ggatgctttgtcctcccagatg

SEQ ID NO: 24095 - DNA, 22 bp, synthetic construct
  misc_feature 1..22: note = chemically synthesized
  source 1..22: mol_type = other DNA
gatgctttgtcctcccagatgt

SEQ ID NO: 24096 - DNA, 22 bp, synthetic construct
  misc_feature 1..22: note = chemically synthesized
  source 1..22: mol_type = other DNA
tgtcctcccagatgtcacacta

SEQ ID NO: 24097 - DNA, 22 bp, synthetic construct
  misc_feature 1..22: note = chemically synthesized
  source 1..22: mol_type = other DNA
gtcctcccagatgtcacactaa

SEQ ID NO: 24098 - DNA, 22 bp, synthetic construct
  misc_feature 1..22: note = chemically synthesized
  source 1..22: mol_type = other DNA
tcctcccagatgtcacactaat

SEQ ID NO: 24099 - DNA, 22 bp, synthetic construct
  misc_feature 1..22: note = chemically synthesized
  source 1..22: mol_type = other DNA
ccagatgtcacactaatgagat

SEQ ID NO: 24100 - DNA, 22 bp, synthetic construct
  misc_feature 1..22: note = chemically synthesized
  source 1..22: mol_type = other DNA
atgagatatatctaatggcctt

SEQ ID NO: 24101 - DNA, 22 bp, synthetic construct
  misc_feature 1..22: note = chemically synthesized
  source 1..22: mol_type = other DNA
atggccttgctttatgtcctgc

SEQ ID NO: 24102 - DNA, 22 bp, synthetic construct
  misc_feature 1..22: note = chemically synthesized
  source 1..22: mol_type = other DNA
gctttatgtcctgctttgtgag

SEQ ID NO: 24103 - DNA, 22 bp, synthetic construct
  misc_feature 1..22: note = chemically synthesized
  source 1..22: mol_type = other DNA
ctttatgtcctgctttgtgagt

SEQ ID NO: 24104 - DNA, 22 bp, synthetic construct
  misc_feature 1..22: note = chemically synthesized
  source 1..22: mol_type = other DNA
tatgtcctgctttgtgagtttt

SEQ ID NO: 24105 - DNA, 22 bp, synthetic construct
  misc_feature 1..22: note = chemically synthesized
  source 1..22: mol_type = other DNA
atgtcctgctttgtgagttttc

SEQ ID NO: 24106 - DNA, 22 bp, synthetic construct
  misc_feature 1..22: note = chemically synthesized
  source 1..22: mol_type = other DNA
tgtcctgctttgtgagttttcc

SEQ ID NO: 24107 - DNA, 22 bp, synthetic construct
  misc_feature 1..22: note = chemically synthesized
  source 1..22: mol_type = other DNA
ctttgtgagttttccaacaaat

SEQ ID NO: 24108 - DNA, 22 bp, synthetic construct
  misc_feature 1..22: note = chemically synthesized
  source 1..22: mol_type = other DNA
tgtgagttttccaacaaatttt

SEQ ID NO: 24109 - DNA, 22 bp, synthetic construct
  misc_feature 1..22: note = chemically synthesized
  source 1..22: mol_type = other DNA
gtgagttttccaacaaattttc

SEQ ID NO: 24110 - DNA, 22 bp, synthetic construct
  misc_feature 1..22: note = chemically synthesized
  source 1..22: mol_type = other DNA
tgagttttccaacaaattttct

SEQ ID NO: 24111 - DNA, 22 bp, synthetic construct
  misc_feature 1..22: note = chemically synthesized
  source 1..22: mol_type = other DNA
tccaacaaattttctttatccc

SEQ ID NO: 24112 - DNA, 22 bp, synthetic construct
  misc_feature 1..22: note = chemically synthesized
  source 1..22: mol_type = other DNA
ccaacaaattttctttatccct

SEQ ID NO: 24113 - DNA, 22 bp, synthetic construct
  misc_feature 1..22: note = chemically synthesized
  source 1..22: mol_type = other DNA
caacaaattttctttatccctt

SEQ ID NO: 24114 - DNA, 22 bp, synthetic construct
  misc_feature 1..22: note = chemically synthesized
  source 1..22: mol_type = other DNA
tctttatcccttgactttactc

SEQ ID NO: 24115 - DNA, 22 bp, synthetic construct
  misc_feature 1..22: note = chemically synthesized
  source 1..22: mol_type = other DNA
ctttatcccttgactttactca

SEQ ID NO: 24116 - DNA, 22 bp, synthetic construct
  misc_feature 1..22: note = chemically synthesized
  source 1..22: mol_type = other DNA
tttatcccttgactttactcac

SEQ ID NO: 24117 - DNA, 22 bp, synthetic construct
  misc_feature 1..22: note = chemically synthesized
  source 1..22: mol_type = other DNA
tatcccttgactttactcactt

SEQ ID NO: 24118 - DNA, 22 bp, synthetic construct
  misc_feature 1..22: note = chemically synthesized
  source 1..22: mol_type = other DNA
atcccttgactttactcacttt

SEQ ID NO: 24119 - DNA, 22 bp, synthetic construct
  misc_feature 1..22: note = chemically synthesized
  source 1..22: mol_type = other DNA
tcccttgactttactcactttg

SEQ ID NO: 24120 - DNA, 22 bp, synthetic construct
  misc_feature 1..22: note = chemically synthesized
  source 1..22: mol_type = other DNA
gactttactcactttgctagtt

SEQ ID NO: 24121 - DNA, 22 bp, synthetic construct
  misc_feature 1..22: note = chemically synthesized
  source 1..22: mol_type = other DNA
actttactcactttgctagttt

SEQ ID NO: 24122 - DNA, 22 bp, synthetic construct
  misc_feature 1..22: note = chemically synthesized
  source 1..22: mol_type = other DNA
tactcactttgctagtttaacc

SEQ ID NO: 24123 - DNA, 22 bp, synthetic construct
  misc_feature 1..22: note = chemically synthesized
  source 1..22: mol_type = other DNA
actcactttgctagtttaacct

SEQ ID NO: 24124 - DNA, 22 bp, synthetic construct
  misc_feature 1..22: note = chemically synthesized
  source 1..22: mol_type = other DNA
ctcactttgctagtttaacctc

SEQ ID NO: 24125 - DNA, 22 bp, synthetic construct
  misc_feature 1..22: note = chemically synthesized
  source 1..22: mol_type = other DNA
actttgctagtttaacctctgt

SEQ ID NO: 24126 - DNA, 22 bp, synthetic construct
  misc_feature 1..22: note = chemically synthesized
  source 1..22: mol_type = other DNA
tgctagtttaacctctgtattt

SEQ ID NO: 24127 - DNA, 22 bp, synthetic construct
  misc_feature 1..22: note = chemically synthesized
  source 1..22: mol_type = other DNA
gctagtttaacctctgtatttt

SEQ ID NO: 24128 - DNA, 22 bp, synthetic construct
  misc_feature 1..22: note = chemically synthesized
  source 1..22: mol_type = other DNA
ctagtttaacctctgtattttt

SEQ ID NO: 24129 - DNA, 22 bp, synthetic construct
  misc_feature 1..22: note = chemically synthesized
  source 1..22: mol_type = other DNA
gtttaacctctgtatttttttt

SEQ ID NO: 24130 - DNA, 22 bp, synthetic construct
  misc_feature 1..22: note = chemically synthesized
  source 1..22: mol_type = other DNA
aacctctgtatttttttttatc

SEQ ID NO: 24131 - DNA, 22 bp, synthetic construct
  misc_feature 1..22: note = chemically synthesized
  source 1..22: mol_type = other DNA
acctctgtatttttttttatcg

SEQ ID NO: 24132 - DNA, 22 bp, synthetic construct
  misc_feature 1..22: note = chemically synthesized
  source 1..22: mol_type = other DNA
tgtatttttttttatcgttatt

SEQ ID NO: 24133 - DNA, 22 bp, synthetic construct
  misc_feature 1..22: note = chemically synthesized
  source 1..22: mol_type = other DNA
tatttttttttatcgttatttc

SEQ ID NO: 24134 - DNA, 22 bp, synthetic construct
  misc_feature 1..22: note = chemically synthesized
  source 1..22: mol_type = other DNA
ttttttatcgttatttcagcat

SEQ ID NO: 24135 - DNA, 22 bp, synthetic construct
  misc_feature 1..22: note = chemically synthesized
  source 1..22: mol_type = other DNA
tttttatcgttatttcagcatt

SEQ ID NO: 24136 - DNA, 22 bp, synthetic construct
  misc_feature 1..22: note = chemically synthesized
  source 1..22: mol_type = other DNA
ttttatcgttatttcagcattt

SEQ ID NO: 24137 - DNA, 22 bp, synthetic construct
  misc_feature 1..22: note = chemically synthesized
  source 1..22: mol_type = other DNA
tttatcgttatttcagcatttc

SEQ ID NO: 24138 - DNA, 22 bp, synthetic construct
  misc_feature 1..22: note = chemically synthesized
  source 1..22: mol_type = other DNA
ttatcgttatttcagcatttca

SEQ ID NO: 24139 - DNA, 22 bp, synthetic construct
  misc_feature 1..22: note = chemically synthesized
  source 1..22: mol_type = other DNA
tatcgttatttcagcatttcag

SEQ ID NO: 24140 - DNA, 22 bp, synthetic construct
  misc_feature 1..22: note = chemically synthesized
  source 1..22: mol_type = other DNA
atcgttatttcagcatttcagt

SEQ ID NO: 24141 - DNA, 22 bp, synthetic construct
  misc_feature 1..22: note = chemically synthesized
  source 1..22: mol_type = other DNA
tcgttatttcagcatttcagtc

SEQ ID NO: 24142 - DNA, 22 bp, synthetic construct
  misc_feature 1..22: note = chemically synthesized
  source 1..22: mol_type = other DNA
tttcagcatttcagtctgattt

SEQ ID NO: 24143 - DNA, 22 bp, synthetic construct
  misc_feature 1..22: note = chemically synthesized
  source 1..22: mol_type = other DNA
cagcatttcagtctgatttcac

SEQ ID NO: 24144 - DNA, 22 bp, synthetic construct
  misc_feature 1..22: note = chemically synthesized
  source 1..22: mol_type = other DNA
agcatttcagtctgatttcaca

SEQ ID NO: 24145 - DNA, 22 bp, synthetic construct
  misc_feature 1..22: note = chemically synthesized
  source 1..22: mol_type = other DNA
cagtctgatttcacagctgaca

SEQ ID NO: 24146 - DNA, 22 bp, synthetic construct
  misc_feature 1..22: note = chemically synthesized
  source 1..22: mol_type = other DNA
agtctgatttcacagctgacat

SEQ ID NO: 24147 - DNA, 22 bp, synthetic construct
  misc_feature 1..22: note = chemically synthesized
  source 1..22: mol_type = other DNA
atttcacagctgacatcatgtc

SEQ ID NO: 24148 - DNA, 22 bp, synthetic construct
  misc_feature 1..22: note = chemically synthesized
  source 1..22: mol_type = other DNA
cacagctgacatcatgtctgga

SEQ ID NO: 24149 - DNA, 22 bp, synthetic construct
  misc_feature 1..22: note = chemically synthesized
  source 1..22: mol_type = other DNA
acagctgacatcatgtctggag

SEQ ID NO: 24150 - DNA, 22 bp, synthetic construct
  misc_feature 1..22: note = chemically synthesized
  source 1..22: mol_type = other DNA
acatcatgtctggagtgggaac

SEQ ID NO: 24151 - DNA, 22 bp, synthetic construct
  misc_feature 1..22: note = chemically synthesized
  source 1..22: mol_type = other DNA
gagtgggaaccacagggccagt

SEQ ID NO: 24152 - DNA, 22 bp, synthetic construct
  misc_feature 1..22: note = chemically synthesized
  source 1..22: mol_type = other DNA
tctgggggtgcttagggttggc

SEQ ID NO: 24153 - DNA, 22 bp, synthetic construct
  misc_feature 1..22: note = chemically synthesized
  source 1..22: mol_type = other DNA
ctgggggtgcttagggttggca

SEQ ID NO: 24154 - DNA, 22 bp, synthetic construct
  misc_feature 1..22: note = chemically synthesized
  source 1..22: mol_type = other DNA
tgggggtgcttagggttggcac

SEQ ID NO: 24155 - DNA, 22 bp, synthetic construct
  misc_feature 1..22: note = chemically synthesized
  source 1..22: mol_type = other DNA
ggggtgcttagggttggcaccc

SEQ ID NO: 24156 - DNA, 22 bp, synthetic construct
  misc_feature 1..22: note = chemically synthesized
  source 1..22: mol_type = other DNA
agggttggcacccctgatcctg

SEQ ID NO: 24157 - DNA, 22 bp, synthetic construct
  misc_feature 1..22: note = chemically synthesized
  source 1..22: mol_type = other DNA
gggttggcacccctgatcctgg

SEQ ID NO: 24158 - DNA, 22 bp, synthetic construct
  misc_feature 1..22: note = chemically synthesized
  source 1..22: mol_type = other DNA
gcacccctgatcctggtactgt

SEQ ID NO: 24159 - DNA, 22 bp, synthetic construct
  misc_feature 1..22: note = chemically synthesized
  source 1..22: mol_type = other DNA
atcctggtactgtcagctacta

SEQ ID NO: 24160 - DNA, 22 bp, synthetic construct
  misc_feature 1..22: note = chemically synthesized
  source 1..22: mol_type = other DNA
gtactgtcagctactagatttg

SEQ ID NO: 24161 - DNA, 22 bp, synthetic construct
  misc_feature 1..22: note = chemically synthesized
  source 1..22: mol_type = other DNA
tcagctactagatttgattcta

SEQ ID NO: 24162 - DNA, 22 bp, synthetic construct
  misc_feature 1..22: note = chemically synthesized
  source 1..22: mol_type = other DNA
ctagatttgattctagaaagtt

SEQ ID NO: 24163 - DNA, 22 bp, synthetic construct
  misc_feature 1..22: note = chemically synthesized
  source 1..22: mol_type = other DNA
gatttgattctagaaagttgac

SEQ ID NO: 24164 - DNA, 22 bp, synthetic construct
  misc_feature 1..22: note = chemically synthesized
  source 1..22: mol_type = other DNA
gattctagaaagttgacaagta

SEQ ID NO: 24165 - DNA, 22 bp, synthetic construct
  misc_feature 1..22: note = chemically synthesized
  source 1..22: mol_type = other DNA
attctagaaagttgacaagtaa

SEQ ID NO: 24166 - DNA, 22 bp, synthetic construct
  misc_feature 1..22: note = chemically synthesized
  source 1..22: mol_type = other DNA
tagaaagttgacaagtaagtgt

SEQ ID NO: 24167 - DNA, 22 bp, synthetic construct
  misc_feature 1..22: note = chemically synthesized
  source 1..22: mol_type = other DNA
gaaagttgacaagtaagtgtga

SEQ ID NO: 24168 - DNA, 22 bp, synthetic construct
  misc_feature 1..22: note = chemically synthesized
  source 1..22: mol_type = other DNA
acaagtaagtgtgataaatgct

SEQ ID NO: 24169 - DNA, 22 bp, synthetic construct
  misc_feature 1..22: note = chemically synthesized
  source 1..22: mol_type = other DNA
cctgtgagaacatgctgtttgt

SEQ ID NO: 24170 - DNA, 22 bp, synthetic construct
  misc_feature 1..22: note = chemically synthesized
  source 1..22: mol_type = other DNA
ctgtgagaacatgctgtttgtc

SEQ ID NO: 24171 - DNA, 22 bp, synthetic construct
  misc_feature 1..22: note = chemically synthesized
  source 1..22: mol_type = other DNA
tgagaacatgctgtttgtccaa

SEQ ID NO: 24172 - DNA, 22 bp, synthetic construct
  misc_feature 1..22: note = chemically synthesized
  source 1..22: mol_type = other DNA
tttgtccaaatgggataatttc

SEQ ID NO: 24173 - DNA, 22 bp, synthetic construct
  misc_feature 1..22: note = chemically synthesized
  source 1..22: mol_type = other DNA
gtccaaatgggataatttcttc

SEQ ID NO: 24174 - DNA, 22 bp, synthetic construct
  misc_feature 1..22: note = chemically synthesized
  source 1..22: mol_type = other DNA
tccaaatgggataatttcttcc

SEQ ID NO: 24175 - DNA, 22 bp, synthetic construct
  misc_feature 1..22: note = chemically synthesized
  source 1..22: mol_type = other DNA
cttccctgtatgccttcctctg

SEQ ID NO: 24176 - DNA, 22 bp, synthetic construct
  misc_feature 1..22: note = chemically synthesized
  source 1..22: mol_type = other DNA
ttccctgtatgccttcctctgg

SEQ ID NO: 24177 - DNA, 22 bp, synthetic construct
  misc_feature 1..22: note = chemically synthesized
  source 1..22: mol_type = other DNA
ccctgtatgccttcctctggga

SEQ ID NO: 24178 - DNA, 22 bp, synthetic construct
  misc_feature 1..22: note = chemically synthesized
  source 1..22: mol_type = other DNA
cctgtatgccttcctctgggaa

SEQ ID NO: 24179 - DNA, 22 bp, synthetic construct
  misc_feature 1..22: note = chemically synthesized
  source 1..22: mol_type = other DNA
tatgccttcctctgggaaatac

SEQ ID NO: 24180 - DNA, 22 bp, synthetic construct
  misc_feature 1..22: note = chemically synthesized
  source 1..22: mol_type = other DNA
cctctgggaaatacataaagtc

SEQ ID NO: 24181 - DNA, 22 bp, synthetic construct
  misc_feature 1..22: note = chemically synthesized
  source 1..22: mol_type = other DNA
ctctgggaaatacataaagtca

SEQ ID NO: 24182 - DNA, 22 bp, synthetic construct
  misc_feature 1..22: note = chemically synthesized
  source 1..22: mol_type = other DNA
tgggaaatacataaagtcactg

SEQ ID NO: 24183 - DNA, 22 bp, synthetic construct
  misc_feature 1..22: note = chemically synthesized
  source 1..22: mol_type = other DNA
ggaaatacataaagtcactgta

SEQ ID NO: 24184 - DNA, 22 bp, synthetic construct
  misc_feature 1..22: note = chemically synthesized
  source 1..22: mol_type = other DNA
tagttgtgaaaaaacaaagtga

SEQ ID NO: 24185 - DNA, 22 bp, synthetic construct
  misc_feature 1..22: note = chemically synthesized
  source 1..22: mol_type = other DNA
tgaaaaaacaaagtgatatatg

SEQ ID NO: 24186 - DNA, 22 bp, synthetic construct
  misc_feature 1..22: note = chemically synthesized
  source 1..22: mol_type = other DNA
cattagctaacttcctactctt

SEQ ID NO: 24187 - DNA, 22 bp, synthetic construct
  misc_feature 1..22: note = chemically synthesized
  source 1..22: mol_type = other DNA
gctaacttcctactctttatgt

SEQ ID NO: 24188 - DNA, 22 bp, synthetic construct
  misc_feature 1..22: note = chemically synthesized
  source 1..22: mol_type = other DNA
acttcctactctttatgtcaat

SEQ ID NO: 24189 - DNA, 22 bp, synthetic construct
  misc_feature 1..22: note = chemically synthesized
  source 1..22: mol_type = other DNA
cctactctttatgtcaattctt

SEQ ID NO: 24190 - DNA, 22 bp, synthetic construct
  misc_feature 1..22: note = chemically synthesized
  source 1..22: mol_type = other DNA
ctactctttatgtcaattctta

SEQ ID NO: 24191 - DNA, 22 bp, synthetic construct
  misc_feature 1..22: note = chemically synthesized
  source 1..22: mol_type = other DNA
ctctttatgtcaattcttaagc

SEQ ID NO: 24192 - DNA, 22 bp, synthetic construct
  misc_feature 1..22: note = chemically synthesized
  source 1..22: mol_type = other DNA
tttatgtcaattcttaagcttg

SEQ ID NO: 24193 - DNA, 22 bp, synthetic construct
  misc_feature 1..22: note = chemically synthesized
  source 1..22: mol_type = other DNA
tatgtcaattcttaagcttgct

SEQ ID NO: 24194 - DNA, 22 bp, synthetic construct
  misc_feature 1..22: note = chemically synthesized
  source 1..22: mol_type = other DNA
atgtcaattcttaagcttgctt

SEQ ID NO: 24195 - DNA, 22 bp, synthetic construct
  misc_feature 1..22: note = chemically synthesized
  source 1..22: mol_type = other DNA
tgtcaattcttaagcttgcttt

SEQ ID NO: 24196 - DNA, 22 bp, synthetic construct
  misc_feature 1..22: note = chemically synthesized
  source 1..22: mol_type = other DNA
ttaagcttgcttttctccccta

SEQ ID NO: 24197 - DNA, 22 bp, synthetic construct
  misc_feature 1..22: note = chemically synthesized
  source 1..22: mol_type = other DNA
aagcttgcttttctcccctagg

SEQ ID NO: 24198 - DNA, 22 bp, synthetic construct
  misc_feature 1..22: note = chemically synthesized
  source 1..22: mol_type = other DNA
agcttgcttttctcccctaggg

SEQ ID NO: 24199 - DNA, 22 bp, synthetic construct
  misc_feature 1..22: note = chemically synthesized
  source 1..22: mol_type = other DNA
gcttttctcccctagggaactc

SEQ ID NO: 24200 - DNA, 22 bp, synthetic construct
  misc_feature 1..22: note = chemically synthesized
  source 1..22: mol_type = other DNA
cttttctcccctagggaactca

SEQ ID NO: 24201 - DNA, 22 bp, synthetic construct
  misc_feature 1..22: note = chemically synthesized
  source 1..22: mol_type = other DNA
ttctcccctagggaactcaact

SEQ ID NO: 24202 - DNA, 22 bp, synthetic construct
  misc_feature 1..22: note = chemically synthesized
  source 1..22: mol_type = other DNA
tctcccctagggaactcaactg

SEQ ID NO: 24203 - DNA, 22 bp, synthetic construct
  misc_feature 1..22: note = chemically synthesized
  source 1..22: mol_type = other DNA
ctcccctagggaactcaactga

SEQ ID NO: 24204 - DNA, 22 bp, synthetic construct
  misc_feature 1..22: note = chemically synthesized
  source 1..22: mol_type = other DNA
tcccctagggaactcaactgag

SEQ ID NO: 24205 - DNA, 22 bp, synthetic construct
  misc_feature 1..22: note = chemically synthesized
  source 1..22: mol_type = other DNA
ccctagggaactcaactgagta

SEQ ID NO: 24206 - DNA, 22 bp, synthetic construct
  misc_feature 1..22: note = chemically synthesized
  source 1..22: mol_type = other DNA
gggaactcaactgagtattgtg

SEQ ID NO: 24207 - DNA, 22 bp, synthetic construct
  misc_feature 1..22: note = chemically synthesized
  source 1..22: mol_type = other DNA
aactgagtattgtgtttcccca

SEQ ID NO: 24208 - DNA, 22 bp, synthetic construct
  misc_feature 1..22: note = chemically synthesized
  source 1..22: mol_type = other DNA
agtattgtgtttccccaaatat

SEQ ID NO: 24209 - DNA, 22 bp, synthetic construct
  misc_feature 1..22: note = chemically synthesized
  source 1..22: mol_type = other DNA
tgtttccccaaatatcaactcc

SEQ ID NO: 24210 - DNA, 22 bp, synthetic construct
  misc_feature 1..22: note = chemically synthesized
  source 1..22: mol_type = other DNA
ccccaaatatcaactccaagat

SEQ ID NO: 24211 - DNA, 22 bp, synthetic construct
  misc_feature 1..22: note = chemically synthesized
  source 1..22: mol_type = other DNA
cccaaatatcaactccaagatg

SEQ ID NO: 24212 - DNA, 22 bp, synthetic construct
  misc_feature 1..22: note = chemically synthesized
  source 1..22: mol_type = other DNA
caagatgtttgacatagagaca

SEQ ID NO: 24213 - DNA, 22 bp, synthetic construct
  misc_feature 1..22: note = chemically synthesized
  source 1..22: mol_type = other DNA
gacatagagacaaaatgatttt

SEQ ID NO: 24214 - DNA, 22 bp, synthetic construct
  misc_feature 1..22: note = chemically synthesized
  source 1..22: mol_type = other DNA
acatagagacaaaatgattttt

SEQ ID NO: 24215 - DNA, 22 bp, synthetic construct
  misc_feature 1..22: note = chemically synthesized
  source 1..22: mol_type = other DNA
tttcctaatccatgaaaagctt

SEQ ID NO: 24216 - DNA, 22 bp, synthetic construct
  misc_feature 1..22: note = chemically synthesized
  source 1..22: mol_type = other DNA
ttcctaatccatgaaaagcttt

SEQ ID NO: 24217 - DNA, 22 bp, synthetic construct
  misc_feature 1..22: note = chemically synthesized
  source 1..22: mol_type = other DNA
tcctaatccatgaaaagctttg

SEQ ID NO: 24218 - DNA, 22 bp, synthetic construct
  misc_feature 1..22: note = chemically synthesized
  source 1..22: mol_type = other DNA
cctaatccatgaaaagctttgg

SEQ ID NO: 24219 - DNA, 22 bp, synthetic construct
  misc_feature 1..22: note = chemically synthesized
  source 1..22: mol_type = other DNA
ctaatccatgaaaagctttggt

SEQ ID NO: 24220 - DNA, 22 bp, synthetic construct
  misc_feature 1..22: note = chemically synthesized
  source 1..22: mol_type = other DNA
atccatgaaaagctttggtgat

SEQ ID NO: 24221 - DNA, 22 bp, synthetic construct
  misc_feature 1..22: note = chemically synthesized
  source 1..22: mol_type = other DNA
tggtgataactaacagcttgct

SEQ ID NO: 24222 - DNA, 22 bp, synthetic construct
  misc_feature 1..22: note = chemically synthesized
  source 1..22: mol_type = other DNA
ggtgataactaacagcttgcta

SEQ ID NO: 24223 - DNA, 22 bp, synthetic construct
  misc_feature 1..22: note = chemically synthesized
  source 1..22: mol_type = other DNA
gtgataactaacagcttgctaa

SEQ ID NO: 24224 - DNA, 22 bp, synthetic construct
  misc_feature 1..22: note = chemically synthesized
  source 1..22: mol_type = other DNA
acagcttgctaatgaaaggtta

SEQ ID NO: 24225 - DNA, 22 bp, synthetic construct
  misc_feature 1..22: note = chemically synthesized
  source 1..22: mol_type = other DNA
gctaatgaaaggttaatcttta

SEQ ID NO: 24226 - DNA, 22 bp, synthetic construct
  misc_feature 1..22: note = chemically synthesized
  source 1..22: mol_type = other DNA
ctaatgaaaggttaatctttat

SEQ ID NO: 24227 - DNA, 22 bp, synthetic construct
  misc_feature 1..22: note = chemically synthesized
  source 1..22: mol_type = other DNA
atgaaaggttaatctttatgtt

SEQ ID NO: 24228 - DNA, 22 bp, synthetic construct
  misc_feature 1..22: note = chemically synthesized
  source 1..22: mol_type = other DNA
atctttatgttttaactaaaac

SEQ ID NO: 24229 - DNA, 22 bp, synthetic construct
  misc_feature 1..22: note = chemically synthesized
  source 1..22: mol_type = other DNA
tatgttttaactaaaactttaa

SEQ ID NO: 24230 - DNA, 22 bp, synthetic construct
  misc_feature 1..22: note = chemically synthesized
  source 1..22: mol_type = other DNA
atgttttaactaaaactttaaa

SEQ ID NO: 24231 - DNA, 22 bp, synthetic construct
  misc_feature 1..22: note = chemically synthesized
  source 1..22: mol_type = other DNA
tgttttaactaaaactttaaat

SEQ ID NO: 24232 - DNA, 22 bp, synthetic construct
  misc_feature 1..22: note = chemically synthesized
  source 1..22: mol_type = other DNA
taactaaaactttaaattgaag

SEQ ID NO: 24233 - DNA, 22 bp, synthetic construct
  misc_feature 1..22: note = chemically synthesized
  source 1..22: mol_type = other DNA
aactaaaactttaaattgaaga

SEQ ID NO: 24234 - DNA, 22 bp, synthetic construct
  misc_feature 1..22: note = chemically synthesized
  source 1..22: mol_type = other DNA
actaaaactttaaattgaagat

SEQ ID NO: 24235 - DNA, 22 bp, synthetic construct
  misc_feature 1..22: note = chemically synthesized
  source 1..22: mol_type = other DNA
aaactttaaattgaagatatat

SEQ ID NO: 24236 - DNA, 22 bp, synthetic construct
  misc_feature 1..22: note = chemically synthesized
  source 1..22: mol_type = other DNA
taaattgaagatatataattta

SEQ ID NO: 24237 - DNA, 22 bp, synthetic construct
  misc_feature 1..22: note = chemically synthesized
  source 1..22: mol_type = other DNA
aaattgaagatatataatttaa

SEQ ID NO: 24238 - DNA, 22 bp, synthetic construct
  misc_feature 1..22: note = chemically synthesized
  source 1..22: mol_type = other DNA
aattgaagatatataatttaaa

SEQ ID NO: 24239 - DNA, 22 bp, synthetic construct
  misc_feature 1..22: note = chemically synthesized
  source 1..22: mol_type = other DNA
aagatatataatttaaaaaatt

SEQ ID NO: 24240 - DNA, 22 bp, synthetic construct
  misc_feature 1..22: note = chemically synthesized
  source 1..22: mol_type = other DNA
aaaaaattagagacacacctca

SEQ ID NO: 24241 - DNA, 22 bp, synthetic construct
  misc_feature 1..22: note = chemically synthesized
  source 1..22: mol_type = other DNA
aaaaattagagacacacctcat

SEQ ID NO: 24242 - DNA, 22 bp, synthetic construct
  misc_feature 1..22: note = chemically synthesized
  source 1..22: mol_type = other DNA
gagacacacctcattacatact

SEQ ID NO: 24243 - DNA, 22 bp, synthetic construct
  misc_feature 1..22: note = chemically synthesized
  source 1..22: mol_type = other DNA
attacatacttctgaaaccttg

SEQ ID NO: 24244 - DNA, 22 bp, synthetic construct
  misc_feature 1..22: note = chemically synthesized
  source 1..22: mol_type = other DNA
catacttctgaaaccttgaaat

SEQ ID NO: 24245 - DNA, 22 bp, synthetic construct
  misc_feature 1..22: note = chemically synthesized
  source 1..22: mol_type = other DNA
ctgaaaccttgaaatgtcatat

SEQ ID NO: 24246 - DNA, 22 bp, synthetic construct
  misc_feature 1..22: note = chemically synthesized
  source 1..22: mol_type = other DNA
tgaaaccttgaaatgtcatata

SEQ ID NO: 24247 - DNA, 22 bp, synthetic construct
  misc_feature 1..22: note = chemically synthesized
  source 1..22: mol_type = other DNA
aaaccttgaaatgtcatatatc

SEQ ID NO: 24248 - DNA, 22 bp, synthetic construct
  misc_feature 1..22: note = chemically synthesized
  source 1..22: mol_type = other DNA
gaaatgtcatatatcttaaaat

SEQ ID NO: 24249 - DNA, 22 bp, synthetic construct
  misc_feature 1..22: note = chemically synthesized
  source 1..22: mol_type = other DNA
aaatgtcatatatcttaaaatc

SEQ ID NO: 24250 - DNA, 22 bp, synthetic construct
  misc_feature 1..22: note = chemically synthesized
  source 1..22: mol_type = other DNA
aaaatcagactttttgtgtaaa

SEQ ID NO: 24251 - DNA, 22 bp, synthetic construct
  misc_feature 1..22: note = chemically synthesized
  source 1..22: mol_type = other DNA
aaatcagactttttgtgtaaat

SEQ ID NO: 24252 - DNA, 22 bp, synthetic construct
  misc_feature 1..22: note = chemically synthesized
  source 1..22: mol_type = other DNA
tttgtgtaaataaggccattgt

SEQ ID NO: 24253 - DNA, 22 bp, synthetic construct
  misc_feature 1..22: note = chemically synthesized
  source 1..22: mol_type = other DNA
ttgtgtaaataaggccattgtt

SEQ ID NO: 24254 - DNA, 22 bp, synthetic construct
  misc_feature 1..22: note = chemically synthesized
  source 1..22: mol_type = other DNA
tgtgtaaataaggccattgttt

SEQ ID NO: 24255 - DNA, 22 bp, synthetic construct
  misc_feature 1..22: note = chemically synthesized
  source 1..22: mol_type = other DNA
gtgtaaataaggccattgtttg

SEQ ID NO: 24256 - DNA, 22 bp, synthetic construct
  misc_feature 1..22: note = chemically synthesized
  source 1..22: mol_type = other DNA
tgtaaataaggccattgtttgt

SEQ ID NO: 24257 - DNA, 22 bp, synthetic construct
  misc_feature 1..22: note = chemically synthesized
  source 1..22: mol_type = other DNA
tttgtgcttttgtttcccattt

SEQ ID NO: 24258 - DNA, 22 bp, synthetic construct
  misc_feature 1..22: note = chemically synthesized
  source 1..22: mol_type = other DNA
gtgcttttgtttcccattttga

SEQ ID NO: 24259 - DNA, 22 bp, synthetic construct
  misc_feature 1..22: note = chemically synthesized
  source 1..22: mol_type = other DNA
tgcttttgtttcccattttgat

SEQ ID NO: 24260 - DNA, 22 bp, synthetic construct
  misc_feature 1..22: note = chemically synthesized
  source 1..22: mol_type = other DNA
ttgtttcccattttgatttcaa

SEQ ID NO: 24261 - DNA, 22 bp, synthetic construct
  misc_feature 1..22: note = chemically synthesized
  source 1..22: mol_type = other DNA
tgtttcccattttgatttcaaa

SEQ ID NO: 24262 - DNA, 22 bp, synthetic construct
  misc_feature 1..22: note = chemically synthesized
  source 1..22: mol_type = other DNA
gtttcccattttgatttcaaag

SEQ ID NO: 24263 - DNA, 22 bp, synthetic construct
  misc_feature 1..22: note = chemically synthesized
  source 1..22: mol_type = other DNA
tttcccattttgatttcaaagt

SEQ ID NO: 24264 - DNA, 22 bp, synthetic construct
  misc_feature 1..22: note = chemically synthesized
  source 1..22: mol_type = other DNA
cccattttgatttcaaagtggt

SEQ ID NO: 24265 - DNA, 22 bp, synthetic construct
  misc_feature 1..22: note = chemically synthesized
  source 1..22: mol_type = other DNA
ccattttgatttcaaagtggta

SEQ ID NO: 24266 - DNA, 22 bp, synthetic construct
  misc_feature 1..22: note = chemically synthesized
  source 1..22: mol_type = other DNA
tgatttcaaagtggtaagtcca

SEQ ID NO: 24267 - DNA, 22 bp, synthetic construct
  misc_feature 1..22: note = chemically synthesized
  source 1..22: mol_type = other DNA
gatttcaaagtggtaagtccaa

SEQ ID NO: 24268 - DNA, 22 bp, synthetic construct
  misc_feature 1..22: note = chemically synthesized
  source 1..22: mol_type = other DNA
atttcaaagtggtaagtccaaa

SEQ ID NO: 24269 - DNA, 22 bp, synthetic construct
  misc_feature 1..22: note = chemically synthesized
  source 1..22: mol_type = other DNA
caaagtggtaagtccaaacaaa

SEQ ID NO: 24270 - DNA, 22 bp, synthetic construct
  misc_feature 1..22: note = chemically synthesized
  source 1..22: mol_type = other DNA
aaagtggtaagtccaaacaaaa

SEQ ID NO: 24271 - DNA, 22 bp, synthetic construct
  misc_feature 1..22: note = chemically synthesized
  source 1..22: mol_type = other DNA
ttttttttcactatattctgct

SEQ ID NO: 24272 - DNA, 22 bp, synthetic construct
  misc_feature 1..22: note = chemically synthesized
  source 1..22: mol_type = other DNA
tttttcactatattctgctatt

SEQ ID NO: 24273 - DNA, 22 bp, synthetic construct
  misc_feature 1..22: note = chemically synthesized
  source 1..22: mol_type = other DNA
ttttcactatattctgctattt

SEQ ID NO: 24274 - DNA, 22 bp, synthetic construct
  misc_feature 1..22: note = chemically synthesized
  source 1..22: mol_type = other DNA
tttcactatattctgctatttc

SEQ ID NO: 24275 - DNA, 22 bp, synthetic construct
  misc_feature 1..22: note = chemically synthesized
  source 1..22: mol_type = other DNA
ttcactatattctgctatttct

SEQ ID NO: 24276 - DNA, 22 bp, synthetic construct
  misc_feature 1..22: note = chemically synthesized
  source 1..22: mol_type = other DNA
tcactatattctgctatttctt

SEQ ID NO: 24277 - DNA, 22 bp, synthetic construct
  misc_feature 1..22: note = chemically synthesized
  source 1..22: mol_type = other DNA
cactatattctgctatttcttt

SEQ ID NO: 24278 - DNA, 22 bp, synthetic construct
  misc_feature 1..22: note = chemically synthesized
  source 1..22: mol_type = other DNA
actatattctgctatttctttg

SEQ ID NO: 24279 - DNA, 22 bp, synthetic construct
  misc_feature 1..22: note = chemically synthesized
  source 1..22: mol_type = other DNA
tattctgctatttctttgtttt

SEQ ID NO: 24280 - DNA, 22 bp, synthetic construct
  misc_feature 1..22: note = chemically synthesized
  source 1..22: mol_type = other DNA
tgctatttctttgttttcccac

SEQ ID NO: 24281 - DNA, 22 bp, synthetic construct
  misc_feature 1..22: note = chemically synthesized
  source 1..22: mol_type = other DNA
ctatttctttgttttcccactt

SEQ ID NO: 24282 - DNA, 22 bp, synthetic construct
  misc_feature 1..22: note = chemically synthesized
  source 1..22: mol_type = other DNA
tttctttgttttcccactttta

SEQ ID NO: 24283 - DNA, 22 bp, synthetic construct
  misc_feature 1..22: note = chemically synthesized
  source 1..22: mol_type = other DNA
ctttgttttcccacttttaatt

SEQ ID NO: 24284 - DNA, 22 bp, synthetic construct
  misc_feature 1..22: note = chemically synthesized
  source 1..22: mol_type = other DNA
tttgttttcccacttttaattt

SEQ ID NO: 24285 - DNA, 22 bp, synthetic construct
  misc_feature 1..22: note = chemically synthesized
  source 1..22: mol_type = other DNA
tgttttcccacttttaattttt

SEQ ID NO: 24286 - DNA, 22 bp, synthetic construct
  misc_feature 1..22: note = chemically synthesized
  source 1..22: mol_type = other DNA
gttttcccacttttaatttttt

SEQ ID NO: 24287 - DNA, 22 bp, synthetic construct
  misc_feature 1..22: note = chemically synthesized
  source 1..22: mol_type = other DNA
ttttcccacttttaattttttt

SEQ ID NO: 24288 - DNA, 22 bp, synthetic construct
  misc_feature 1..22: note = chemically synthesized
  source 1..22: mol_type = other DNA
tcccacttttaatttttttaaa

SEQ ID NO: 24289 - DNA, 22 bp, synthetic construct
  misc_feature 1..22: note = chemically synthesized
  source 1..22: mol_type = other DNA
cccacttttaatttttttaaac

SEQ ID NO: 24290 - DNA, 22 bp, synthetic construct
  misc_feature 1..22: note = chemically synthesized
  source 1..22: mol_type = other DNA
ccacttttaatttttttaaacc

SEQ ID NO: 24291 - DNA, 22 bp, synthetic construct
  misc_feature 1..22: note = chemically synthesized
  source 1..22: mol_type = other DNA
ttaatttttttaaaccaaggag

SEQ ID NO: 24292 - DNA, 22 bp, synthetic construct
  misc_feature 1..22: note = chemically synthesized
  source 1..22: mol_type = other DNA
taatttttttaaaccaaggaga

SEQ ID NO: 24293 - DNA, 22 bp, synthetic construct
  misc_feature 1..22: note = chemically synthesized
  source 1..22: mol_type = other DNA
aatttttttaaaccaaggagat

SEQ ID NO: 24294 - DNA, 22 bp, synthetic construct
  misc_feature 1..22: note = chemically synthesized
  source 1..22: mol_type = other DNA
atttttttaaaccaaggagatg

SEQ ID NO: 24295 - DNA, 22 bp, synthetic construct
  misc_feature 1..22: note = chemically synthesized
  source 1..22: mol_type = other DNA
ttttaaaccaaggagatgaatg

SEQ ID NO: 24296 - DNA, 22 bp, synthetic construct
  misc_feature 1..22: note = chemically synthesized
  source 1..22: mol_type = other DNA
tttaaaccaaggagatgaatgt

SEQ ID NO: 24297 - DNA, 22 bp, synthetic construct
  misc_feature 1..22: note = chemically synthesized
  source 1..22: mol_type = other DNA
ttaaaccaaggagatgaatgtt

SEQ ID NO: 24298 - DNA, 22 bp, synthetic construct
  misc_feature 1..22: note = chemically synthesized
  source 1..22: mol_type = other DNA
taaaccaaggagatgaatgttt

SEQ ID NO: 24299 - DNA, 22 bp, synthetic construct
  misc_feature 1..22: note = chemically synthesized
  source 1..22: mol_type = other DNA
aaaccaaggagatgaatgtttt

SEQ ID NO: 24300 - DNA, 22 bp, synthetic construct
  misc_feature 1..22: note = chemically synthesized
  source 1..22: mol_type = other DNA
aaccaaggagatgaatgttttc

SEQ ID NO: 24301 - DNA, 22 bp, synthetic construct
  misc_feature 1..22: note = chemically synthesized
  source 1..22: mol_type = other DNA
tctaacaggaattacatgacca

SEQ ID NO: 24302 - DNA, 22 bp, synthetic construct
  misc_feature 1..22: note = chemically synthesized
  source 1..22: mol_type = other DNA
ctaacaggaattacatgaccaa

SEQ ID NO: 24303 - DNA, 22 bp, synthetic construct
  misc_feature 1..22: note = chemically synthesized
  source 1..22: mol_type = other DNA
taacaggaattacatgaccaaa

SEQ ID NO: 24304 - DNA, 22 bp, synthetic construct
  misc_feature 1..22: note = chemically synthesized
  source 1..22: mol_type = other DNA
acaggaattacatgaccaaatc

SEQ ID NO: 24305 - DNA, 22 bp, synthetic construct
  misc_feature 1..22: note = chemically synthesized
  source 1..22: mol_type = other DNA
catgaccaaatcatgaactgaa

SEQ ID NO: 24306 - DNA, 22 bp, synthetic construct
  misc_feature 1..22: note = chemically synthesized
  source 1..22: mol_type = other DNA
aacagtgtttattaaacataaa

SEQ ID NO: 24307 - DNA, 22 bp, synthetic construct
  misc_feature 1..22: note = chemically synthesized
  source 1..22: mol_type = other DNA
attaaacataaatgcatcataa

SEQ ID NO: 24308 - DNA, 22 bp, synthetic construct
  misc_feature 1..22: note = chemically synthesized
  source 1..22: mol_type = other DNA
ttaaacataaatgcatcataag

SEQ ID NO: 24309 - DNA, 22 bp, synthetic construct
  misc_feature 1..22: note = chemically synthesized
  source 1..22: mol_type = other DNA
aacataaatgcatcataagcat

SEQ ID NO: 24310 - DNA, 22 bp, synthetic construct
  misc_feature 1..22: note = chemically synthesized
  source 1..22: mol_type = other DNA
tcgatctatttagttttaaaaa

SEQ ID NO: 24311 - DNA, 22 bp, synthetic construct
  misc_feature 1..22: note = chemically synthesized
  source 1..22: mol_type = other DNA
tttagttttaaaaatgaagaag

SEQ ID NO: 24312 - DNA, 22 bp, synthetic construct
  misc_feature 1..22: note = chemically synthesized
  source 1..22: mol_type = other DNA
agttttaaaaatgaagaagaag

SEQ ID NO: 24313 - DNA, 22 bp, synthetic construct
  misc_feature 1..22: note = chemically synthesized
  source 1..22: mol_type = other DNA
gttttaaaaatgaagaagaaga

SEQ ID NO: 24314 - DNA, 22 bp, synthetic construct
  misc_feature 1..22: note = chemically synthesized
  source 1..22: mol_type = other DNA
taaaaatgaagaagaagaaaac

SEQ ID NO: 24315 - DNA, 22 bp, synthetic construct
  misc_feature 1..22: note = chemically synthesized
  source 1..22: mol_type = other DNA
aaaaatgaagaagaagaaaacc

SEQ ID NO: 24316 - DNA, 22 bp, synthetic construct
  misc_feature 1..22: note = chemically synthesized
  source 1..22: mol_type = other DNA
aaaatgaagaagaagaaaacct

SEQ ID NO: 24317 - DNA, 22 bp, synthetic construct
  misc_feature 1..22: note = chemically synthesized
  source 1..22: mol_type = other DNA
gctaacaaagaaccagtactta

SEQ ID NO: 24318 - DNA, 22 bp, synthetic construct
  misc_feature 1..22: note = chemically synthesized
  source 1..22: mol_type = other DNA
acaaagaaccagtacttaccaa

SEQ ID NO: 24319 - DNA, 22 bp, synthetic construct
  misc_feature 1..22: note = chemically synthesized
  source 1..22: mol_type = other DNA
accaacctgcgtgctggctgtt

SEQ ID NO: 24320 - DNA, 22 bp, synthetic construct
  misc_feature 1..22: note = chemically synthesized
  source 1..22: mol_type = other DNA
ccaacctgcgtgctggctgtta

SEQ ID NO: 24321 - DNA, 22 bp, synthetic construct
  misc_feature 1..22: note = chemically synthesized
  source 1..22: mol_type = other DNA
cgtgctggctgttagactcttc

SEQ ID NO: 24322 - DNA, 22 bp, synthetic construct
  misc_feature 1..22: note = chemically synthesized
  source 1..22: mol_type = other DNA
gctgttagactcttcaatattg

SEQ ID NO: 24323 - DNA, 22 bp, synthetic construct
  misc_feature 1..22: note = chemically synthesized
  source 1..22: mol_type = other DNA
ttagactcttcaatattgctgt

SEQ ID NO: 24324 - DNA, 22 bp, synthetic construct
  misc_feature 1..22: note = chemically synthesized
  source 1..22: mol_type = other DNA
gactcttcaatattgctgtcaa

SEQ ID NO: 24325 - DNA, 22 bp, synthetic construct
  misc_feature 1..22: note = chemically synthesized
  source 1..22: mol_type = other DNA
ttcaatattgctgtcaaatcat

SEQ ID NO: 24326 - DNA, 22 bp, synthetic construct
  misc_feature 1..22: note = chemically synthesized
  source 1..22: mol_type = other DNA
caatattgctgtcaaatcatgt

SEQ ID NO: 24327 - DNA, 22 bp, synthetic construct
  misc_feature 1..22: note = chemically synthesized
  source 1..22: mol_type = other DNA
aatattgctgtcaaatcatgta

SEQ ID NO: 24328 - DNA, 22 bp, synthetic construct
  misc_feature 1..22: note = chemically synthesized
  source 1..22: mol_type = other DNA
ctgtcaaatcatgtaatcaaaa

SEQ ID NO: 24329 - DNA, 22 bp, synthetic construct
  misc_feature 1..22: note = chemically synthesized
  source 1..22: mol_type = other DNA
tcaaatcatgtaatcaaaattt

SEQ ID NO: 24330 - DNA, 22 bp, synthetic construct
  misc_feature 1..22: note = chemically synthesized
  source 1..22: mol_type = other DNA
agtgaagaagacagcatcagat

SEQ ID NO: 24331 - DNA, 22 bp, synthetic construct
  misc_feature 1..22: note = chemically synthesized
  source 1..22: mol_type = other DNA
gtgaagaagacagcatcagata

SEQ ID NO: 24332 - DNA, 22 bp, synthetic construct
  misc_feature 1..22: note = chemically synthesized
  source 1..22: mol_type = other DNA
ctatatctaaaaggcaagcata

SEQ ID NO: 24333 - DNA, 22 bp, synthetic construct
  misc_feature 1..22: note = chemically synthesized
  source 1..22: mol_type = other DNA
tatatctaaaaggcaagcatac

SEQ ID NO: 24334 - DNA, 22 bp, synthetic construct
  misc_feature 1..22: note = chemically synthesized
  source 1..22: mol_type = other DNA
tatctaaaaggcaagcatactc

SEQ ID NO: 24335 - DNA, 22 bp, synthetic construct
  misc_feature 1..22: note = chemically synthesized
  source 1..22: mol_type = other DNA
aaaggcaagcatactcaatgta

SEQ ID NO: 24336 - DNA, 22 bp, synthetic construct
  misc_feature 1..22: note = chemically synthesized
  source 1..22: mol_type = other DNA
aatgtattttaaaaaaggaaac

SEQ ID NO: 24337 - DNA, 22 bp, synthetic construct
  misc_feature 1..22: note = chemically synthesized
  source 1..22: mol_type = other DNA
taaaaaaggaaacaaacctgta

SEQ ID NO: 24338 - DNA, 22 bp, synthetic construct
  misc_feature 1..22: note = chemically synthesized
  source 1..22: mol_type = other DNA
aaaaaaggaaacaaacctgtac

SEQ ID NO: 24339 - DNA, 22 bp, synthetic construct
  misc_feature 1..22: note = chemically synthesized
  source 1..22: mol_type = other DNA
aaaaaggaaacaaacctgtaca

SEQ ID NO: 24340 - DNA, 22 bp, synthetic construct
  misc_feature 1..22: note = chemically synthesized
  source 1..22: mol_type = other DNA
tacattcagcactgagtagata

SEQ ID NO: 24341 - DNA, 22 bp, synthetic construct
  misc_feature 1..22: note = chemically synthesized
  source 1..22: mol_type = other DNA
agcactgagtagatatcctaaa

SEQ ID NO: 24342 - DNA, 22 bp, synthetic construct
  misc_feature 1..22: note = chemically synthesized
  source 1..22: mol_type = other DNA
agtagatatcctaaaaggcaga

SEQ ID NO: 24343 - DNA, 22 bp, synthetic construct
  misc_feature 1..22: note = chemically synthesized
  source 1..22: mol_type = other DNA
aaaggcagatggtgatgaggcc

SEQ ID NO: 24344 - DNA, 22 bp, synthetic construct
  misc_feature 1..22: note = chemically synthesized
  source 1..22: mol_type = other DNA
gtgattctgccatgatcatgtt

SEQ ID NO: 24345 - DNA, 22 bp, synthetic construct
  misc_feature 1..22: note = chemically synthesized
  source 1..22: mol_type = other DNA
tgccatgatcatgttcacgcgc

SEQ ID NO: 24346 - DNA, 22 bp, synthetic construct
  misc_feature 1..22: note = chemically synthesized
  source 1..22: mol_type = other DNA
ccatgatcatgttcacgcgctg

SEQ ID NO: 24347 - DNA, 22 bp, synthetic construct
  misc_feature 1..22: note = chemically synthesized
  source 1..22: mol_type = other DNA
acgcgctgcataacctttgcta

SEQ ID NO: 24348 - DNA, 22 bp, synthetic construct
  misc_feature 1..22: note = chemically synthesized
  source 1..22: mol_type = other DNA
cataacctttgctagcagattg

SEQ ID NO: 24349 - DNA, 22 bp, synthetic construct
  misc_feature 1..22: note = chemically synthesized
  source 1..22: mol_type = other DNA
tgctagcagattgtgaaagtgg

SEQ ID NO: 24350 - DNA, 22 bp, synthetic construct
  misc_feature 1..22: note = chemically synthesized
  source 1..22: mol_type = other DNA
gctagcagattgtgaaagtggt

SEQ ID NO: 24351 - DNA, 20 bp, synthetic construct
  misc_feature 1..20: note = chemically synthesized
  source 1..20: mol_type = other DNA
tttagacaaacgtggttttt

SEQ ID NO: 24352 - DNA, 20 bp, synthetic construct
  misc_feature 1..20: note = chemically synthesized
  source 1..20: mol_type = other DNA
aaacgtggtttttgagtcca

SEQ ID NO: 24353 - DNA, 20 bp, synthetic construct
  misc_feature 1..20: note = chemically synthesized
  source 1..20: mol_type = other DNA
tggtttttgagtccaaagat

SEQ ID NO: 24354 - DNA, 20 bp, synthetic construct
  misc_feature 1..20: note = chemically synthesized
  source 1..20: mol_type = other DNA
ggtttttgagtccaaagatc

SEQ ID NO: 24355 - DNA, 20 bp, synthetic construct
  misc_feature 1..20: note = chemically synthesized
  source 1..20: mol_type = other DNA
gtttttgagtccaaagatca

SEQ ID NO: 24356 - DNA, 20 bp, synthetic construct
  misc_feature 1..20: note = chemically synthesized
  source 1..20: mol_type = other DNA
ttgagtccaaagatcagggc

SEQ ID NO: 24357 - DNA, 20 bp, synthetic construct
  misc_feature 1..20: note = chemically synthesized
  source 1..20: mol_type = other DNA
tgagtccaaagatcagggct

SEQ ID NO: 24358 - DNA, 20 bp, synthetic construct
  misc_feature 1..20: note = chemically synthesized
  source 1..20: mol_type = other DNA
ggctgggttgacctgaatac

SEQ ID NO: 24359 - DNA, 20 bp, synthetic construct
  misc_feature 1..20: note = chemically synthesized
  source 1..20: mol_type = other DNA
gttgacctgaatactggata

SEQ ID NO: 24360 - DNA, 20 bp, synthetic construct
  misc_feature 1..20: note = chemically synthesized
  source 1..20: mol_type = other DNA
ttgacctgaatactggatac

SEQ ID NO: 24361 - DNA, 20 bp, synthetic construct
  misc_feature 1..20: note = chemically synthesized
  source 1..20: mol_type = other DNA
tgacctgaatactggataca

SEQ ID NO: 24362 - DNA, 20 bp, synthetic construct
  misc_feature 1..20: note = chemically synthesized
  source 1..20: mol_type = other DNA
tggatacagggcatataaaa

SEQ ID NO: 24363 - DNA, 20 bp, synthetic construct
  misc_feature 1..20: note = chemically synthesized
  source 1..20: mol_type = other DNA
ggatacagggcatataaaac

SEQ ID NO: 24364 - DNA, 20 bp, synthetic construct
  misc_feature 1..20: note = chemically synthesized
  source 1..20: mol_type = other DNA
gatacagggcatataaaaca

SEQ ID NO: 24365 - DNA, 20 bp, synthetic construct
  misc_feature 1..20: note = chemically synthesized
  source 1..20: mol_type = other DNA
atacagggcatataaaacag

SEQ ID NO: 24366 - DNA, 20 bp, synthetic construct
  misc_feature 1..20: note = chemically synthesized
  source 1..20: mol_type = other DNA
agggcatataaaacaggggc

SEQ ID NO: 24367 - DNA, 20 bp, synthetic construct
  misc_feature 1..20: note = chemically synthesized
  source 1..20: mol_type = other DNA
gggcatataaaacaggggca

SEQ ID NO: 24368 - DNA, 20 bp, synthetic construct
  misc_feature 1..20: note = chemically synthesized
  source 1..20: mol_type = other DNA
tataaaacaggggcaaggca

SEQ ID NO: 24369 - DNA, 20 bp, synthetic construct
  misc_feature 1..20: note = chemically synthesized
  source 1..20: mol_type = other DNA
aggggcaaggcacagactca

SEQ ID NO: 24370 - DNA, 20 bp, synthetic construct
  misc_feature 1..20: note = chemically synthesized
  source 1..20: mol_type = other DNA
ggcaaggcacagactcatag

SEQ ID NO: 24371 - DNA, 20 bp, synthetic construct
  misc_feature 1..20: note = chemically synthesized
  source 1..20: mol_type = other DNA
caaggcacagactcatagca

SEQ ID NO: 24372 - DNA, 20 bp, synthetic construct
  misc_feature 1..20: note = chemically synthesized
  source 1..20: mol_type = other DNA
atagcagagcaatcaccacc

SEQ ID NO: 24373 - DNA, 20 bp, synthetic construct
  misc_feature 1..20: note = chemically synthesized
  source 1..20: mol_type = other DNA
agagcaatcaccaccaagcc

SEQ ID NO: 24374 - DNA, 20 bp, synthetic construct
  misc_feature 1..20: note = chemically synthesized
  source 1..20: mol_type = other DNA
accaagcctggaataactgc

SEQ ID NO: 24375 - DNA, 20 bp, synthetic construct
  misc_feature 1..20: note = chemically synthesized
  source 1..20: mol_type = other DNA
ccaagcctggaataactgca

SEQ ID NO: 24376 - DNA, 20 bp, synthetic construct
  misc_feature 1..20: note = chemically synthesized
  source 1..20: mol_type = other DNA
caagcctggaataactgcaa

SEQ ID NO: 24377 - DNA, 20 bp, synthetic construct
  misc_feature 1..20: note = chemically synthesized
  source 1..20: mol_type = other DNA
ggctctgctgacatcttcct

SEQ ID NO: 24378 - DNA, 20 bp, synthetic construct
  misc_feature 1..20: note = chemically synthesized
  source 1..20: mol_type = other DNA
gctctgctgacatcttcctg

SEQ ID NO: 24379 - DNA, 20 bp, synthetic construct
  misc_feature 1..20: note = chemically synthesized
  source 1..20: mol_type = other DNA
tgacatcttcctgaggtgcc

SEQ ID NO: 24380 - DNA, 20 bp, synthetic construct
  misc_feature 1..20: note = chemically synthesized
  source 1..20: mol_type = other DNA
gacatcttcctgaggtgcca

SEQ ID NO: 24381 - DNA, 20 bp, synthetic construct
  misc_feature 1..20: note = chemically synthesized
  source 1..20: mol_type = other DNA
tcctgaggtgccaaggaaat

SEQ ID NO: 24382 - DNA, 20 bp, synthetic construct
  misc_feature 1..20: note = chemically synthesized
  source 1..20: mol_type = other DNA
cctgaggtgccaaggaaatg

SEQ ID NO: 24383 - DNA, 20 bp, synthetic construct
  misc_feature 1..20: note = chemically synthesized
  source 1..20: mol_type = other DNA
aggtgccaaggaaatgagga

SEQ ID NO: 24384 - DNA, 20 bp, synthetic construct
  misc_feature 1..20: note = chemically synthesized
  source 1..20: mol_type = other DNA
gtgccaaggaaatgaggatg

SEQ ID NO: 24385 - DNA, 20 bp, synthetic construct
  misc_feature 1..20: note = chemically synthesized
  source 1..20: mol_type = other DNA
tgccaaggaaatgaggatgg

SEQ ID NO: 24386 - DNA, 20 bp, synthetic construct
  misc_feature 1..20: note = chemically synthesized
  source 1..20: mol_type = other DNA
caaggaaatgaggatggagg

SEQ ID NO: 24387 - DNA, 20 bp, synthetic construct
  misc_feature 1..20: note = chemically synthesized
  source 1..20: mol_type = other DNA
aaggaaatgaggatggagga

SEQ ID NO: 24388 - DNA, 20 bp, synthetic construct
  misc_feature 1..20: note = chemically synthesized
  source 1..20: mol_type = other DNA
atgaatgttctccatgactt

SEQ ID NO: 24389 - DNA, 20 bp, synthetic construct
  misc_feature 1..20: note = chemically synthesized
  source 1..20: mol_type = other DNA
tgaatgttctccatgacttt

SEQ ID NO: 24390 - DNA, 20 bp, synthetic construct
  misc_feature 1..20: note = chemically synthesized
  source 1..20: mol_type = other DNA
ttctccatgactttgggatc

SEQ ID NO: 24391 - DNA, 20 bp, synthetic construct
  misc_feature 1..20: note = chemically synthesized
  source 1..20: mol_type = other DNA
tccagtcaacacattacctc

SEQ ID NO: 24392 - DNA, 20 bp, synthetic construct
  misc_feature 1..20: note = chemically synthesized
  source 1..20: mol_type = other DNA
ccagtcaacacattacctcc

SEQ ID NO: 24393 - DNA, 20 bp, synthetic construct
  misc_feature 1..20: note = chemically synthesized
  source 1..20: mol_type = other DNA
ttacctccaggtgaattacc

SEQ ID NO: 24394 - DNA, 20 bp, synthetic construct
  misc_feature 1..20: note = chemically synthesized
  source 1..20: mol_type = other DNA
aggtgaattaccaagactcc

SEQ ID NO: 24395 - DNA, 20 bp, synthetic construct
  misc_feature 1..20: note = chemically synthesized
  source 1..20: mol_type = other DNA
ggtgaattaccaagactccc

SEQ ID NO: 24396 - DNA, 20 bp, synthetic construct
  misc_feature 1..20: note = chemically synthesized
  source 1..20: mol_type = other DNA
attaccaagactcccaggac

SEQ ID NO: 24397 - DNA, 20 bp, synthetic construct
  misc_feature 1..20: note = chemically synthesized
  source 1..20: mol_type = other DNA
ctcccaggactggttcatct

SEQ ID NO: 24398 - DNA, 20 bp, synthetic construct
  misc_feature 1..20: note = chemically synthesized
  source 1..20: mol_type = other DNA
catcttggtgtccgtgatcg

SEQ ID NO: 24399 - DNA, 20 bp, synthetic construct
  misc_feature 1..20: note = chemically synthesized
  source 1..20: mol_type = other DNA
gtgtccgtgatcgcagacct

SEQ ID NO: 24400 - DNA, 20 bp, synthetic construct
  misc_feature 1..20: note = chemically synthesized
  source 1..20: mol_type = other DNA
tgtccgtgatcgcagacctc

SEQ ID NO: 24401 - DNA, 20 bp, synthetic construct
  misc_feature 1..20: note = chemically synthesized
  source 1..20: mol_type = other DNA
tctacgtcctcttccccatc

SEQ ID NO: 24402 - DNA, 20 bp, synthetic construct
  misc_feature 1..20: note = chemically synthesized
  source 1..20: mol_type = other DNA
tccccatctggttccatctt

SEQ ID NO: 24403 - DNA, 20 bp, synthetic construct
  misc_feature 1..20: note = chemically synthesized
  source 1..20: mol_type = other DNA
ccccatctggttccatcttc

SEQ ID NO: 24404 - DNA, 20 bp, synthetic construct
  misc_feature 1..20: note = chemically synthesized
  source 1..20: mol_type = other DNA
catctggttccatcttcagg

SEQ ID NO: 24405 - DNA, 20 bp, synthetic construct
  misc_feature 1..20: note = chemically synthesized
  source 1..20: mol_type = other DNA
gttccatcttcaggaagctg

SEQ ID NO: 24406 - DNA, 20 bp, synthetic construct
  misc_feature 1..20: note = chemically synthesized
  source 1..20: mol_type = other DNA
ttccatcttcaggaagctgt

SEQ ID NO: 24407 - DNA, 20 bp, synthetic construct
  misc_feature 1..20: note = chemically synthesized
  source 1..20: mol_type = other DNA
ctgtgggcattaaactcctt

SEQ ID NO: 24408 - DNA, 20 bp, synthetic construct
  misc_feature 1..20: note = chemically synthesized
  source 1..20: mol_type = other DNA
tgtgggcattaaactccttt

SEQ ID NO: 24409 - DNA, 20 bp, synthetic construct
  misc_feature 1..20: note = chemically synthesized
  source 1..20: mol_type = other DNA
gggcattaaactcctttggg

SEQ ID NO: 24410 - DNA, 20 bp, synthetic construct
  misc_feature 1..20: note = chemically synthesized
  source 1..20: mol_type = other DNA
ctcctttgggtagctgtgat

SEQ ID NO: 24411 - DNA, 20 bp, synthetic construct
  misc_feature 1..20: note = chemically synthesized
  source 1..20: mol_type = other DNA
cctttgggtagctgtgattg

SEQ ID NO: 24412 - DNA, 20 bp, synthetic construct
  misc_feature 1..20: note = chemically synthesized
  source 1..20: mol_type = other DNA
gggtagctgtgattggagac

SEQ ID NO: 24413 - DNA, 20 bp, synthetic construct
  misc_feature 1..20: note = chemically synthesized
  source 1..20: mol_type = other DNA
actggctcaacctcgtcttt

SEQ ID NO: 24414 - DNA, 20 bp, synthetic construct
  misc_feature 1..20: note = chemically synthesized
  source 1..20: mol_type = other DNA
ggctcaacctcgtctttaag

SEQ ID NO: 24415 - DNA, 20 bp, synthetic construct
  misc_feature 1..20: note = chemically synthesized
  source 1..20: mol_type = other DNA
caacctcgtctttaagtggt

SEQ ID NO: 24416 - DNA, 20 bp, synthetic construct
  misc_feature 1..20: note = chemically synthesized
  source 1..20: mol_type = other DNA
tttaagtggtaagaaccata

SEQ ID NO: 24417 - DNA, 20 bp, synthetic construct
  misc_feature 1..20: note = chemically synthesized
  source 1..20: mol_type = other DNA
taagtggtaagaaccatata

SEQ ID NO: 24418 - DNA, 20 bp, synthetic construct
  misc_feature 1..20: note = chemically synthesized
  source 1..20: mol_type = other DNA
agtggtaagaaccatataga

SEQ ID NO: 24419 - DNA, 20 bp, synthetic construct
  misc_feature 1..20: note = chemically synthesized
  source 1..20: mol_type = other DNA
gtggtaagaaccatatagag

SEQ ID NO: 24420 - DNA, 20 bp, synthetic construct
  misc_feature 1..20: note = chemically synthesized
  source 1..20: mol_type = other DNA
ggtaagaaccatatagagag

SEQ ID NO: 24421 - DNA, 20 bp, synthetic construct
  misc_feature 1..20: note = chemically synthesized
  source 1..20: mol_type = other DNA
gaaccatatagagaggagat

SEQ ID NO: 24422 - DNA, 20 bp, synthetic construct
  misc_feature 1..20: note = chemically synthesized
  source 1..20: mol_type = other DNA
catatagagaggagatcagc

SEQ ID NO: 24423 - DNA, 20 bp, synthetic construct
  misc_feature 1..20: note = chemically synthesized
  source 1..20: mol_type = other DNA
agagaggagatcagcaagaa

SEQ ID NO: 24424 - DNA, 20 bp, synthetic construct
  misc_feature 1..20: note = chemically synthesized
  source 1..20: mol_type = other DNA
agaggagatcagcaagaaaa

SEQ ID NO: 24425 - DNA, 20 bp, synthetic construct
  misc_feature 1..20: note = chemically synthesized
  source 1..20: mol_type = other DNA
gaggagatcagcaagaaaag

SEQ ID NO: 24426 - DNA, 20 bp, synthetic construct
  misc_feature 1..20: note = chemically synthesized
  source 1..20: mol_type = other DNA
agatcagcaagaaaagaggc

SEQ ID NO: 24427 - DNA, 20 bp, synthetic construct
  misc_feature 1..20: note = chemically synthesized
  source 1..20: mol_type = other DNA
ctctcgcaatgtctgtccat

SEQ ID NO: 24428 - DNA, 20 bp, synthetic construct
  misc_feature 1..20: note = chemically synthesized
  source 1..20: mol_type = other DNA
tcgcaatgtctgtccatcag

SEQ ID NO: 24429 - DNA, 20 bp, synthetic construct
  misc_feature 1..20: note = chemically synthesized
  source 1..20: mol_type = other DNA
ccatcagaagttgctttccc

SEQ ID NO: 24430 - DNA, 20 bp, synthetic construct
  misc_feature 1..20: note = chemically synthesized
  source 1..20: mol_type = other DNA
catcagaagttgctttcccc

SEQ ID NO: 24431 - DNA, 20 bp, synthetic construct
  misc_feature 1..20: note = chemically synthesized
  source 1..20: mol_type = other DNA
gttgctttccccaggctatt

SEQ ID NO: 24432 - DNA, 20 bp, synthetic construct
  misc_feature 1..20: note = chemically synthesized
  source 1..20: mol_type = other DNA
ttgctttccccaggctattc

SEQ ID NO: 24433 - DNA, 20 bp, synthetic construct
  misc_feature 1..20: note = chemically synthesized
  source 1..20: mol_type = other DNA
ctttccccaggctattcagg

SEQ ID NO: 24434 - DNA, 20 bp, synthetic construct
  misc_feature 1..20: note = chemically synthesized
  source 1..20: mol_type = other DNA
ccaggctattcaggaagcca

SEQ ID NO: 24435 - DNA, 20 bp, synthetic construct
  misc_feature 1..20: note = chemically synthesized
  source 1..20: mol_type = other DNA
caggctattcaggaagccac

SEQ ID NO: 24436 - DNA, 20 bp, synthetic construct
  misc_feature 1..20: note = chemically synthesized
  source 1..20: mol_type = other DNA
ccaacccctctctctgactt

SEQ ID NO: 24437 - DNA, 20 bp, synthetic construct
  misc_feature 1..20: note = chemically synthesized
  source 1..20: mol_type = other DNA
gactttggatcatctacata

SEQ ID NO: 24438 - DNA, 20 bp, synthetic construct
  misc_feature 1..20: note = chemically synthesized
  source 1..20: mol_type = other DNA
actttggatcatctacataa

SEQ ID NO: 24439 - DNA, 20 bp, synthetic construct
  misc_feature 1..20: note = chemically synthesized
  source 1..20: mol_type = other DNA
ctttggatcatctacataaa

SEQ ID NO: 24440 - DNA, 20 bp, synthetic construct
  misc_feature 1..20: note = chemically synthesized
  source 1..20: mol_type = other DNA
tttggatcatctacataaag

SEQ ID NO: 24441 - DNA, 20 bp, synthetic construct
  misc_feature 1..20: note = chemically synthesized
  source 1..20: mol_type = other DNA
ttggatcatctacataaagg

SEQ ID NO: 24442 - DNA, 20 bp, synthetic construct
  misc_feature 1..20: note = chemically synthesized
  source 1..20: mol_type = other DNA
gatcatctacataaaggggg

SEQ ID NO: 24443 - DNA, 20 bp, synthetic construct
  misc_feature 1..20: note = chemically synthesized
  source 1..20: mol_type = other DNA
atctacataaagggggaaga

SEQ ID NO: 24444 - DNA, 20 bp, synthetic construct
  misc_feature 1..20: note = chemically synthesized
  source 1..20: mol_type = other DNA
gaagacagaaaaaatcctac

SEQ ID NO: 24445 - DNA, 20 bp, synthetic construct
  misc_feature 1..20: note = chemically synthesized
  source 1..20: mol_type = other DNA
acagaaaaaatcctaccagt

SEQ ID NO: 24446 - DNA, 20 bp, synthetic construct
  misc_feature 1..20: note = chemically synthesized
  source 1..20: mol_type = other DNA
ctaccagtgagttgaaaata

SEQ ID NO: 24447 - DNA, 20 bp, synthetic construct
  misc_feature 1..20: note = chemically synthesized
  source 1..20: mol_type = other DNA
taccagtgagttgaaaatac

SEQ ID NO: 24448 - DNA, 20 bp, synthetic construct
  misc_feature 1..20: note = chemically synthesized
  source 1..20: mol_type = other DNA
agtgagttgaaaatacagga

SEQ ID NO: 24449 - DNA, 20 bp, synthetic construct
  misc_feature 1..20: note = chemically synthesized
  source 1..20: mol_type = other DNA
acaggaaagcctatttcata

SEQ ID NO: 24450 - DNA, 20 bp, synthetic construct
  misc_feature 1..20: note = chemically synthesized
  source 1..20: mol_type = other DNA
caggaaagcctatttcatat

SEQ ID NO: 24451 - DNA, 20 bp, synthetic construct
  misc_feature 1..20: note = chemically synthesized
  source 1..20: mol_type = other DNA
agcctatttcatatgggtta

SEQ ID NO: 24452 - DNA, 20 bp, synthetic construct
  misc_feature 1..20: note = chemically synthesized
  source 1..20: mol_type = other DNA
gcctatttcatatgggttaa

SEQ ID NO: 24453 - DNA, 20 bp, synthetic construct
  misc_feature 1..20: note = chemically synthesized
  source 1..20: mol_type = other DNA
cctatttcatatgggttaaa

SEQ ID NO: 24454 - DNA, 20 bp, synthetic construct
  misc_feature 1..20: note = chemically synthesized
  source 1..20: mol_type = other DNA
atttcatatgggttaaaggg

SEQ ID NO: 24455 - DNA, 20 bp, synthetic construct
  misc_feature 1..20: note = chemically synthesized
  source 1..20: mol_type = other DNA
tttcatatgggttaaagggt

SEQ ID NO: 24456 - DNA, 20 bp, synthetic construct
  misc_feature 1..20: note = chemically synthesized
  source 1..20: mol_type = other DNA
atatgggttaaagggtagga

SEQ ID NO: 24457 - DNA, 20 bp, synthetic construct
  misc_feature 1..20: note = chemically synthesized
  source 1..20: mol_type = other DNA
ggacagttgaatttcgtgaa

SEQ ID NO: 24458 - DNA, 20 bp, synthetic construct
  misc_feature 1..20: note = chemically synthesized
  source 1..20: mol_type = other DNA
ttgaatttcgtgaaaagtct

SEQ ID NO: 24459 - DNA, 20 bp, synthetic construct
  misc_feature 1..20: note = chemically synthesized
  source 1..20: mol_type = other DNA
cgtgaaaagtctgagttata

SEQ ID NO: 24460 - DNA, 20 bp, synthetic construct
  misc_feature 1..20: note = chemically synthesized
  source 1..20: mol_type = other DNA
gtgaaaagtctgagttatat

SEQ ID NO: 24461 - DNA, 20 bp, synthetic construct
  misc_feature 1..20: note = chemically synthesized
  source 1..20: mol_type = other DNA
gtctgagttatataggcttt

SEQ ID NO: 24462 - DNA, 20 bp, synthetic construct
  misc_feature 1..20: note = chemically synthesized
  source 1..20: mol_type = other DNA
agttatataggctttgagca

SEQ ID NO: 24463 - DNA, 20 bp, synthetic construct
  misc_feature 1..20: note = chemically synthesized
  source 1..20: mol_type = other DNA
ttatataggctttgagcaaa

SEQ ID NO: 24464 - DNA, 20 bp, synthetic construct
  misc_feature 1..20: note = chemically synthesized
  source 1..20: mol_type = other DNA
ctttgagcaaagagttttat

SEQ ID NO: 24465 - DNA, 20 bp, synthetic construct
  misc_feature 1..20: note = chemically synthesized
  source 1..20: mol_type = other DNA
caaagagttttattagtatg

SEQ ID NO: 24466 - DNA, 20 bp, synthetic construct
  misc_feature 1..20: note = chemically synthesized
  source 1..20: mol_type = other DNA
agagttttattagtatgaag

SEQ ID NO: 24467 - DNA, 20 bp, synthetic construct
  misc_feature 1..20: note = chemically synthesized
  source 1..20: mol_type = other DNA
gttttattagtatgaagcag

SEQ ID NO: 24468 - DNA, 20 bp, synthetic construct
  misc_feature 1..20: note = chemically synthesized
  source 1..20: mol_type = other DNA
tttattagtatgaagcagaa

SEQ ID NO: 24469 - DNA, 20 bp, synthetic construct
  misc_feature 1..20: note = chemically synthesized
  source 1..20: mol_type = other DNA
ttattagtatgaagcagaag

SEQ ID NO: 24470 - DNA, 20 bp, synthetic construct
  misc_feature 1..20: note = chemically synthesized
  source 1..20: mol_type = other DNA
gaagcagaagaggtaacata

SEQ ID NO: 24471 - DNA, 20 bp, synthetic construct
  misc_feature 1..20: note = chemically synthesized
  source 1..20: mol_type = other DNA
cagaagaggtaacataaaga

SEQ ID NO: 24472 - DNA, 20 bp, synthetic construct
  misc_feature 1..20: note = chemically synthesized
  source 1..20: mol_type = other DNA
gtaacataaagaaagatgta

SEQ ID NO: 24473 - DNA, 20 bp, synthetic construct
  misc_feature 1..20: note = chemically synthesized
  source 1..20: mol_type = other DNA
taacataaagaaagatgtat

SEQ ID NO: 24474 - DNA, 20 bp, synthetic construct
  misc_feature 1..20: note = chemically synthesized
  source 1..20: mol_type = other DNA
aacataaagaaagatgtatg

SEQ ID NO: 24475 - DNA, 20 bp, synthetic construct
  misc_feature 1..20: note = chemically synthesized
  source 1..20: mol_type = other DNA
taaagaaagatgtatggggc

SEQ ID NO: 24476 - DNA, 20 bp, synthetic construct
  misc_feature 1..20: note = chemically synthesized
  source 1..20: mol_type = other DNA
aaagaaagatgtatggggcc

SEQ ID NO: 24477 - DNA, 20 bp, synthetic construct
  misc_feature 1..20: note = chemically synthesized
  source 1..20: mol_type = other DNA
aagatgtatggggccaggca

SEQ ID NO: 24478 - DNA, 20 bp, synthetic construct
  misc_feature 1..20: note = chemically synthesized
  source 1..20: mol_type = other DNA
atgtatggggccaggcatgg

SEQ ID NO: 24479 - DNA, 20 bp, synthetic construct
  misc_feature 1..20: note = chemically synthesized
  source 1..20: mol_type = other DNA
gtggctcacacctgtaatcc

SEQ ID NO: 24480 - DNA, 20 bp, synthetic construct
  misc_feature 1..20: note = chemically synthesized
  source 1..20: mol_type = other DNA
cacctgtaatcccagcactt

SEQ ID NO: 24481 - DNA, 20 bp, synthetic construct
  misc_feature 1..20: note = chemically synthesized
  source 1..20: mol_type = other DNA
acctgtaatcccagcacttt

SEQ ID NO: 24482 - DNA, 20 bp, synthetic construct
  misc_feature 1..20: note = chemically synthesized
  source 1..20: mol_type = other DNA
ctgtaatcccagcactttgg

SEQ ID NO: 24483 - DNA, 20 bp, synthetic construct
  misc_feature 1..20: note = chemically synthesized
  source 1..20: mol_type = other DNA
tgtaatcccagcactttggg

SEQ ID NO: 24484 - DNA, 20 bp, synthetic construct
  misc_feature 1..20: note = chemically synthesized
  source 1..20: mol_type = other DNA
tcccagcactttgggaggcc

SEQ ID NO: 24485 - DNA, 20 bp, synthetic construct
  misc_feature 1..20: note = chemically synthesized
  source 1..20: mol_type = other DNA
cccagcactttgggaggccg

SEQ ID NO: 24486 - DNA, 20 bp, synthetic construct
  misc_feature 1..20: note = chemically synthesized
  source 1..20: mol_type = other DNA
agcactttgggaggccgagg

SEQ ID NO: 24487 - DNA, 20 bp, synthetic construct
  misc_feature 1..20: note = chemically synthesized
  source 1..20: mol_type = other DNA
gcactttgggaggccgaggt

SEQ ID NO: 24488 - DNA, 20 bp, synthetic construct
  misc_feature 1..20: note = chemically synthesized
  source 1..20: mol_type = other DNA
cgaggtgggcgaatcactcc

SEQ ID NO: 24489 - DNA, 20 bp, synthetic construct
  misc_feature 1..20: note = chemically synthesized
  source 1..20: mol_type = other DNA
gaggtgggcgaatcactcct

SEQ ID NO: 24490 - DNA, 20 bp, synthetic construct
  misc_feature 1..20: note = chemically synthesized
  source 1..20: mol_type = other DNA
gaatcactcctgggtgaact

SEQ ID NO: 24491 - DNA, 20 bp, synthetic construct
  misc_feature 1..20: note = chemically synthesized
  source 1..20: mol_type = other DNA
aatcactcctgggtgaactc

SEQ ID NO: 24492 - DNA, 20 bp, synthetic construct
  misc_feature 1..20: note = chemically synthesized
  source 1..20: mol_type = other DNA
tcactcctgggtgaactcag

SEQ ID NO: 24493 - DNA, 20 bp, synthetic construct
  misc_feature 1..20: note = chemically synthesized
  source 1..20: mol_type = other DNA
ctgggtgaactcaggagttc

SEQ ID NO: 24494 - DNA, 20 bp, synthetic construct
  misc_feature 1..20: note = chemically synthesized
  source 1..20: mol_type = other DNA
tgaactcaggagttcaagac

SEQ ID NO: 24495 - DNA, 20 bp, synthetic construct
  misc_feature 1..20: note = chemically synthesized
  source 1..20: mol_type = other DNA
tcaggagttcaagaccagcc

SEQ ID NO: 24496 - DNA, 20 bp, synthetic construct
  misc_feature 1..20: note = chemically synthesized
  source 1..20: mol_type = other DNA
caggagttcaagaccagcct

SEQ ID NO: 24497 - DNA, 20 bp, synthetic construct
  misc_feature 1..20: note = chemically synthesized
  source 1..20: mol_type = other DNA
caagaccagcctgggcaaca

SEQ ID NO: 24498 - DNA, 20 bp, synthetic construct
  misc_feature 1..20: note = chemically synthesized
  source 1..20: mol_type = other DNA
tacaaaaacattacgaaaat

SEQ ID NO: 24499 - DNA, 20 bp, synthetic construct
  misc_feature 1..20: note = chemically synthesized
  source 1..20: mol_type = other DNA
aaaacattacgaaaattagc

SEQ ID NO: 24500 - DNA, 20 bp, synthetic construct
  misc_feature 1..20: note = chemically synthesized
  source 1..20: mol_type = other DNA
aaacattacgaaaattagct

SEQ ID NO: 24501 - DNA, 20 bp, synthetic construct
  misc_feature 1..20: note = chemically synthesized
  source 1..20: mol_type = other DNA
cgaaaattagctgggcgtgt

SEQ ID NO: 24502 - DNA, 20 bp, synthetic construct
  misc_feature 1..20: note = chemically synthesized
  source 1..20: mol_type = other DNA
agctgggcgtgttggtgctg

SEQ ID NO: 24503 - DNA, 20 bp, synthetic construct
  misc_feature 1..20: note = chemically synthesized
  source 1..20: mol_type = other DNA
gcgtgttggtgctgtagtcc

SEQ ID NO: 24504 - DNA, 20 bp, synthetic construct
  misc_feature 1..20: note = chemically synthesized
  source 1..20: mol_type = other DNA
gtgctgtagtcccagctact

SEQ ID NO: 24505 - DNA, 20 bp, synthetic construct
  misc_feature 1..20: note = chemically synthesized
  source 1..20: mol_type = other DNA
tgctgtagtcccagctactc

SEQ ID NO: 24506 - DNA, 20 bp, synthetic construct
  misc_feature 1..20: note = chemically synthesized
  source 1..20: mol_type = other DNA
ctgtagtcccagctactcag

SEQ ID NO: 24507 - DNA, 20 bp, synthetic construct
  misc_feature 1..20: note = chemically synthesized
  source 1..20: mol_type = other DNA
tgtagtcccagctactcagg

SEQ ID NO: 24508 - DNA, 20 bp, synthetic construct
  misc_feature 1..20: note = chemically synthesized
  source 1..20: mol_type = other DNA
tcccagctactcaggaggct

SEQ ID NO: 24509 - DNA, 20 bp, synthetic construct
  misc_feature 1..20: note = chemically synthesized
  source 1..20: mol_type = other DNA
cccagctactcaggaggctg

SEQ ID NO: 24510 - DNA, 20 bp, synthetic construct
  misc_feature 1..20: note = chemically synthesized
  source 1..20: mol_type = other DNA
gctactcaggaggctgaggt

SEQ ID NO: 24511 - DNA, 20 bp, synthetic construct
  misc_feature 1..20: note = chemically synthesized
  source 1..20: mol_type = other DNA
tactcaggaggctgaggtga

SEQ ID NO: 24512 - DNA, 20 bp, synthetic construct
  misc_feature 1..20: note = chemically synthesized
  source 1..20: mol_type = other DNA
actcaggaggctgaggtgag

SEQ ID NO: 24513 - DNA, 20 bp, synthetic construct
  misc_feature 1..20: note = chemically synthesized
  source 1..20: mol_type = other DNA
caggaggctgaggtgagagg

SEQ ID NO: 24514 - DNA, 20 bp, synthetic construct
  misc_feature 1..20: note = chemically synthesized
  source 1..20: mol_type = other DNA
ggaggctgaggtgagaggcg

SEQ ID NO: 24515 - DNA, 20 bp, synthetic construct
  misc_feature 1..20: note = chemically synthesized
  source 1..20: mol_type = other DNA
gaggctgaggtgagaggcgg

SEQ ID NO: 24516 - DNA, 20 bp, synthetic construct
  misc_feature 1..20: note = chemically synthesized
  source 1..20: mol_type = other DNA
ggctgaggtgagaggcggag

SEQ ID NO: 24517 - DNA, 20 bp, synthetic construct
  misc_feature 1..20: note = chemically synthesized
  source 1..20: mol_type = other DNA
gctgaggtgagaggcggagg

SEQ ID NO: 24518 - DNA, 20 bp, synthetic construct
  misc_feature 1..20: note = chemically synthesized
  source 1..20: mol_type = other DNA
gtgagaggcggaggaggttg

SEQ ID NO: 24519 - DNA, 20 bp, synthetic construct
  misc_feature 1..20: note = chemically synthesized
  source 1..20: mol_type = other DNA
gaggcggaggaggttgcagt

SEQ ID NO: 24520 - DNA, 20 bp, synthetic construct
  misc_feature 1..20: note = chemically synthesized
  source 1..20: mol_type = other DNA
ggaggaggttgcagtgagtc

SEQ ID NO: 24521 - DNA, 20 bp, synthetic construct
  misc_feature 1..20: note = chemically synthesized
  source 1..20: mol_type = other DNA
aagatcatgccactgcactc

SEQ ID NO: 24522 - DNA, 20 bp, synthetic construct
  misc_feature 1..20: note = chemically synthesized
  source 1..20: mol_type = other DNA
catgccactgcactccagcc

SEQ ID NO: 24523 - DNA, 20 bp, synthetic construct
  misc_feature 1..20: note = chemically synthesized
  source 1..20: mol_type = other DNA
atgccactgcactccagcct

SEQ ID NO: 24524 - DNA, 20 bp, synthetic construct
  misc_feature 1..20: note = chemically synthesized
  source 1..20: mol_type = other DNA
ctgcactccagcctgggcaa

SEQ ID NO: 24525 - DNA, 20 bp, synthetic construct
  misc_feature 1..20: note = chemically synthesized
  source 1..20: mol_type = other DNA
gcactccagcctgggcaaca

SEQ ID NO: 24526 - DNA, 20 bp, synthetic construct
  misc_feature 1..20: note = chemically synthesized
  source 1..20: mol_type = other DNA
tccagcctgggcaacagagt

SEQ ID NO: 24527 - DNA, 20 bp, synthetic construct
  misc_feature 1..20: note = chemically synthesized
  source 1..20: mol_type = other DNA
cctgtctcaaaaaaaaaaaa

SEQ ID NO: 24528 - DNA, 20 bp, synthetic construct
  misc_feature 1..20: note = chemically synthesized
  source 1..20: mol_type = other DNA
tctcaaaaaaaaaaaaaaga

SEQ ID NO: 24529 - DNA, 20 bp, synthetic construct
  misc_feature 1..20: note = chemically synthesized
  source 1..20: mol_type = other DNA
tgatgtatgctgtatgaaaa

SEQ ID NO: 24530 - DNA, 20 bp, synthetic construct
  misc_feature 1..20: note = chemically synthesized
  source 1..20: mol_type = other DNA
gatgtatgctgtatgaaaaa

SEQ ID NO: 24531 - DNA, 20 bp, synthetic construct
  misc_feature 1..20: note = chemically synthesized
  source 1..20: mol_type = other DNA
gtatgaaaaaaggaaacaca

SEQ ID NO: 24532 - DNA, 20 bp, synthetic construct
  misc_feature 1..20: note = chemically synthesized
  source 1..20: mol_type = other DNA
gaaacacacagatgattcaa

SEQ ID NO: 24533 - DNA, 20 bp, synthetic construct
  misc_feature 1..20: note = chemically synthesized
  source 1..20: mol_type = other DNA
tgattcaacagcctgttttg

SEQ ID NO: 24534 - DNA, 20 bp, synthetic construct
  misc_feature 1..20: note = chemically synthesized
  source 1..20: mol_type = other DNA
gattcaacagcctgttttgt

SEQ ID NO: 24535 - DNA, 20 bp, synthetic construct
  misc_feature 1..20: note = chemically synthesized
  source 1..20: mol_type = other DNA
attcaacagcctgttttgtg

SEQ ID NO: 24536 - DNA, 20 bp, synthetic construct
  misc_feature 1..20: note = chemically synthesized
  source 1..20: mol_type = other DNA
ctgttttgtggggtaatgaa

SEQ ID NO: 24537 - DNA, 20 bp, synthetic construct
  misc_feature 1..20: note = chemically synthesized
  source 1..20: mol_type = other DNA
ggggtaatgaaaagtcaccc

SEQ ID NO: 24538 - DNA, 20 bp, synthetic construct
  misc_feature 1..20: note = chemically synthesized
  source 1..20: mol_type = other DNA
gggtaatgaaaagtcaccct

SEQ ID NO: 24539 - DNA, 20 bp, synthetic construct
  misc_feature 1..20: note = chemically synthesized
  source 1..20: mol_type = other DNA
tgaaaagtcaccctgggaac

SEQ ID NO: 24540 - DNA, 20 bp, synthetic construct
  misc_feature 1..20: note = chemically synthesized
  source 1..20: mol_type = other DNA
gaaaagtcaccctgggaact

SEQ ID NO: 24541 - DNA, 20 bp, synthetic construct
  misc_feature 1..20: note = chemically synthesized
  source 1..20: mol_type = other DNA
tcaccctgggaactgggctc

SEQ ID NO: 24542 - DNA, 20 bp, synthetic construct
  misc_feature 1..20: note = chemically synthesized
  source 1..20: mol_type = other DNA
acccaccaactacatgtcct

SEQ ID NO: 24543 - DNA, 20 bp, synthetic construct
  misc_feature 1..20: note = chemically synthesized
  source 1..20: mol_type = other DNA
accaactacatgtccttggc

SEQ ID NO: 24544 - DNA, 20 bp, synthetic construct
  misc_feature 1..20: note = chemically synthesized
  source 1..20: mol_type = other DNA
gcaagtcatatcaattatct

SEQ ID NO: 24545 - DNA, 20 bp, synthetic construct
  misc_feature 1..20: note = chemically synthesized
  source 1..20: mol_type = other DNA
tctgttttataatctacaaa

SEQ ID NO: 24546 - DNA, 20 bp, synthetic construct
  misc_feature 1..20: note = chemically synthesized
  source 1..20: mol_type = other DNA
ctgttttataatctacaaat

SEQ ID NO: 24547 - DNA, 20 bp, synthetic construct
  misc_feature 1..20: note = chemically synthesized
  source 1..20: mol_type = other DNA
atctacaaataggttatctc

SEQ ID NO: 24548 - DNA, 20 bp, synthetic construct
  misc_feature 1..20: note = chemically synthesized
  source 1..20: mol_type = other DNA
tacaaataggttatctctgg

SEQ ID NO: 24549 - DNA, 20 bp, synthetic construct
  misc_feature 1..20: note = chemically synthesized
  source 1..20: mol_type = other DNA
tctggcagcttaataataat

SEQ ID NO: 24550 - DNA, 20 bp, synthetic construct
  misc_feature 1..20: note = chemically synthesized
  source 1..20: mol_type = other DNA
ctggcagcttaataataatc

SEQ ID NO: 24551 - DNA, 20 bp, synthetic construct
  misc_feature 1..20: note = chemically synthesized
  source 1..20: mol_type = other DNA
tggcagcttaataataatca

SEQ ID NO: 24552 - DNA, 20 bp, synthetic construct
  misc_feature 1..20: note = chemically synthesized
  source 1..20: mol_type = other DNA
cagggttaacatttattaaa

SEQ ID NO: 24553 - DNA, 20 bp, synthetic construct
  misc_feature 1..20: note = chemically synthesized
  source 1..20: mol_type = other DNA
atttattaaacagtgtgtgc

SEQ ID NO: 24554 - DNA, 20 bp, synthetic construct
  misc_feature 1..20: note = chemically synthesized
  source 1..20: mol_type = other DNA
tgtgctatgtgcttttctgt

SEQ ID NO: 24555 - DNA, 20 bp, synthetic construct
  misc_feature 1..20: note = chemically synthesized
  source 1..20: mol_type = other DNA
gtgctatgtgcttttctgtg

SEQ ID NO: 24556 - DNA, 20 bp, synthetic construct
  misc_feature 1..20: note = chemically synthesized
  source 1..20: mol_type = other DNA
ctatgtgcttttctgtgagg

SEQ ID NO: 24557 - DNA, 20 bp, synthetic construct
  misc_feature 1..20: note = chemically synthesized
  source 1..20: mol_type = other DNA
gaggtagttactgctattta

SEQ ID NO: 24558 - DNA, 20 bp, synthetic construct
  misc_feature 1..20: note = chemically synthesized
  source 1..20: mol_type = other DNA
gttactgctatttacagaaa

SEQ ID NO: 24559 - DNA, 20 bp, synthetic construct
  misc_feature 1..20: note = chemically synthesized
  source 1..20: mol_type = other DNA
actgctatttacagaaacag

SEQ ID NO: 24560 - DNA, 20 bp, synthetic construct
  misc_feature 1..20: note = chemically synthesized
  source 1..20: mol_type = other DNA
atttacagaaacagtagatg

SEQ ID NO: 24561 - DNA, 20 bp, synthetic construct
  misc_feature 1..20: note = chemically synthesized
  source 1..20: mol_type = other DNA
ttacagaaacagtagatgca

SEQ ID NO: 24562 - DNA, 20 bp, synthetic construct
  misc_feature 1..20: note = chemically synthesized
  source 1..20: mol_type = other DNA
aaacagtagatgcagagacc

SEQ ID NO: 24563 - DNA, 20 bp, synthetic construct
  misc_feature 1..20: note = chemically synthesized
  source 1..20: mol_type = other DNA
aacagtagatgcagagacca

SEQ ID NO: 24564 - DNA, 20 bp, synthetic construct
  misc_feature 1..20: note = chemically synthesized
  source 1..20: mol_type = other DNA
gatgcagagaccaaggtgct

SEQ ID NO: 24565 - DNA, 20 bp, synthetic construct
  misc_feature 1..20: note = chemically synthesized
  source 1..20: mol_type = other DNA
aaggtgctgagttaaatgat

SEQ ID NO: 24566 - DNA, 20 bp, synthetic construct
  misc_feature 1..20: note = chemically synthesized
  source 1..20: mol_type = other DNA
aggtgctgagttaaatgatt

SEQ ID NO: 24567 - DNA, 20 bp, synthetic construct
  misc_feature 1..20: note = chemically synthesized
  source 1..20: mol_type = other DNA
agttaaatgattaggccaac

SEQ ID NO: 24568 - DNA, 20 bp, synthetic construct
  misc_feature 1..20: note = chemically synthesized
  source 1..20: mol_type = other DNA
gttaaatgattaggccaaca

SEQ ID NO: 24569 - DNA, 20 bp, synthetic construct
  misc_feature 1..20: note = chemically synthesized
  source 1..20: mol_type = other DNA
aatgattaggccaacaaggt

SEQ ID NO: 24570 - DNA, 20 bp, synthetic construct
  misc_feature 1..20: note = chemically synthesized
  source 1..20: mol_type = other DNA
caacaaggttagtacatgcc

SEQ ID NO: 24571 - DNA, 20 bp, synthetic construct
  misc_feature 1..20: note = chemically synthesized
  source 1..20: mol_type = other DNA
aaggttagtacatgccgagc

SEQ ID NO: 24572 - DNA, 20 bp, synthetic construct
  misc_feature 1..20: note = chemically synthesized
  source 1..20: mol_type = other DNA
aggttagtacatgccgagcc

SEQ ID NO: 24573 - DNA, 20 bp, synthetic construct
  misc_feature 1..20: note = chemically synthesized
  source 1..20: mol_type = other DNA
tagtacatgccgagccagga

SEQ ID NO: 24574 - DNA, 20 bp, synthetic construct
  misc_feature 1..20: note = chemically synthesized
  source 1..20: mol_type = other DNA
tacatgccgagccaggatgg

SEQ ID NO: 24575 - DNA, 20 bp, synthetic construct
  misc_feature 1..20: note = chemically synthesized
  source 1..20: mol_type = other DNA
gccgagccaggatggaagcc

SEQ ID NO: 24576 - DNA, 20 bp, synthetic construct
  misc_feature 1..20: note = chemically synthesized
  source 1..20: mol_type = other DNA
ccgagccaggatggaagccc

SEQ ID NO: 24577 - DNA, 20 bp, synthetic construct
  misc_feature 1..20: note = chemically synthesized
  source 1..20: mol_type = other DNA
agccaggatggaagcccagg

SEQ ID NO: 24578 - DNA, 20 bp, synthetic construct
  misc_feature 1..20: note = chemically synthesized
  source 1..20: mol_type = other DNA
gccaggatggaagcccaggt

SEQ ID NO: 24579 - DNA, 20 bp, synthetic construct
  misc_feature 1..20: note = chemically synthesized
  source 1..20: mol_type = other DNA
aggatggaagcccaggtagg

SEQ ID NO: 24580 - DNA, 20 bp, synthetic construct
  misc_feature 1..20: note = chemically synthesized
  source 1..20: mol_type = other DNA
ggatggaagcccaggtaggc

SEQ ID NO: 24581 - DNA, 20 bp, synthetic construct
  misc_feature 1..20: note = chemically synthesized
  source 1..20: mol_type = other DNA
ggaagcccaggtaggcaggc

SEQ ID NO: 24582 - DNA, 20 bp, synthetic construct
  misc_feature 1..20: note = chemically synthesized
  source 1..20: mol_type = other DNA
ggtaggcaggctggcttccg

SEQ ID NO: 24583 - DNA, 20 bp, synthetic construct
  misc_feature 1..20: note = chemically synthesized
  source 1..20: mol_type = other DNA
cttatgaactatgttacgtc

SEQ ID NO: 24584 - DNA, 20 bp, synthetic construct
  misc_feature 1..20: note = chemically synthesized
  source 1..20: mol_type = other DNA
gtgctgataaactgactctc

SEQ ID NO: 24585 - DNA, 20 bp, synthetic construct
  misc_feature 1..20: note = chemically synthesized
  source 1..20: mol_type = other DNA
tgctgataaactgactctct

SEQ ID NO: 24586 - DNA, 20 bp, synthetic construct
  misc_feature 1..20: note = chemically synthesized
  source 1..20: mol_type = other DNA
gctgataaactgactctctg

SEQ ID NO: 24587 - DNA, 20 bp, synthetic construct
  misc_feature 1..20: note = chemically synthesized
  source 1..20: mol_type = other DNA
tgataaactgactctctggg

SEQ ID NO: 24588 - DNA, 20 bp, synthetic construct
  misc_feature 1..20: note = chemically synthesized
  source 1..20: mol_type = other DNA
taaactgactctctggggag

SEQ ID NO: 24589 - DNA, 20 bp, synthetic construct
  misc_feature 1..20: note = chemically synthesized
  source 1..20: mol_type = other DNA
aaactgactctctggggagc

SEQ ID NO: 24590 - DNA, 20 bp, synthetic construct
  misc_feature 1..20: note = chemically synthesized
  source 1..20: mol_type = other DNA
aactgactctctggggagca

SEQ ID NO: 24591 - DNA, 20 bp, synthetic construct
  misc_feature 1..20: note = chemically synthesized
  source 1..20: mol_type = other DNA
actgactctctggggagcag

SEQ ID NO: 24592 - DNA, 20 bp, synthetic construct
  misc_feature 1..20: note = chemically synthesized
  source 1..20: mol_type = other DNA
actctctggggagcagggga

SEQ ID NO: 24593 - DNA, 20 bp, synthetic construct
  misc_feature 1..20: note = chemically synthesized
  source 1..20: mol_type = other DNA
ggggagcaggggaaagccct

SEQ ID NO: 24594 - DNA, 20 bp, synthetic construct
  misc_feature 1..20: note = chemically synthesized
  source 1..20: mol_type = other DNA
gcaggggaaagccctgagtt

SEQ ID NO: 24595 - DNA, 20 bp, synthetic construct
  misc_feature 1..20: note = chemically synthesized
  source 1..20: mol_type = other DNA
tcacgtaaacattcccattc

SEQ ID NO: 24596 - DNA, 20 bp, synthetic construct
  misc_feature 1..20: note = chemically synthesized
  source 1..20: mol_type = other DNA
tttcttttgtttgtttgttt

SEQ ID NO: 24597 - DNA, 20 bp, synthetic construct
  misc_feature 1..20: note = chemically synthesized
  source 1..20: mol_type = other DNA
ttttgtttgtttgtttgaga

SEQ ID NO: 24598 - DNA, 20 bp, synthetic construct
  misc_feature 1..20: note = chemically synthesized
  source 1..20: mol_type = other DNA
ttgtttgtttgtttgagatg

SEQ ID NO: 24599 - DNA, 20 bp, synthetic construct
  misc_feature 1..20: note = chemically synthesized
  source 1..20: mol_type = other DNA
tggagtctcgcactgttgcc

SEQ ID NO: 24600 - DNA, 20 bp, synthetic construct
  misc_feature 1..20: note = chemically synthesized
  source 1..20: mol_type = other DNA
gtctcgcactgttgcctggc

SEQ ID NO: 24601 - DNA, 20 bp, synthetic construct
  misc_feature 1..20: note = chemically synthesized
  source 1..20: mol_type = other DNA
ctcgcactgttgcctggctg

SEQ ID NO: 24602 - DNA, 20 bp, synthetic construct
  misc_feature 1..20: note = chemically synthesized
  source 1..20: mol_type = other DNA
gttgcctggctggagtgcaa

SEQ ID NO: 24603 - DNA, 20 bp, synthetic construct
  misc_feature 1..20: note = chemically synthesized
  source 1..20: mol_type = other DNA
ggagtgcaatggtgcaatct

SEQ ID NO: 24604 - DNA, 20 bp, synthetic construct
  misc_feature 1..20: note = chemically synthesized
  source 1..20: mol_type = other DNA
cactgcaacctctgcctctc

SEQ ID NO: 24605 - DNA, 20 bp, synthetic construct
  misc_feature 1..20: note = chemically synthesized
  source 1..20: mol_type = other DNA
aacctctgcctctccggttc

SEQ ID NO: 24606 - DNA, 20 bp, synthetic construct
  misc_feature 1..20: note = chemically synthesized
  source 1..20: mol_type = other DNA
ttcaagtgattctcctgcct

SEQ ID NO: 24607 - DNA, 20 bp, synthetic construct
  misc_feature 1..20: note = chemically synthesized
  source 1..20: mol_type = other DNA
ttctcctgcctcagcctccc

SEQ ID NO: 24608 - DNA, 20 bp, synthetic construct
  misc_feature 1..20: note = chemically synthesized
  source 1..20: mol_type = other DNA
tcctgcctcagcctcccaag

SEQ ID NO: 24609 - DNA, 20 bp, synthetic construct
  misc_feature 1..20: note = chemically synthesized
  source 1..20: mol_type = other DNA
gcctcagcctcccaagtagc

SEQ ID NO: 24610 - DNA, 20 bp, synthetic construct
  misc_feature 1..20: note = chemically synthesized
  source 1..20: mol_type = other DNA
cctcagcctcccaagtagct

SEQ ID NO: 24611 - DNA, 20 bp, synthetic construct
  misc_feature 1..20: note = chemically synthesized
  source 1..20: mol_type = other DNA
ctcccaagtagctgggatta

SEQ ID NO: 24612 - DNA, 20 bp, synthetic construct
  misc_feature 1..20: note = chemically synthesized
  source 1..20: mol_type = other DNA
tcccaagtagctgggattac

SEQ ID NO: 24613 - DNA, 20 bp, synthetic construct
  misc_feature 1..20: note = chemically synthesized
  source 1..20: mol_type = other DNA
caggtgcccgccaccatgcc

SEQ ID NO: 24614 - DNA, 20 bp, synthetic construct
  misc_feature 1..20: note = chemically synthesized
  source 1..20: mol_type = other DNA
gctaattttttttgtatttt

SEQ ID NO: 24615 - DNA, 20 bp, synthetic construct
  misc_feature 1..20: note = chemically synthesized
  source 1..20: mol_type = other DNA
aattttttttgtatttttag

SEQ ID NO: 24616 - DNA, 20 bp, synthetic construct
  misc_feature 1..20: note = chemically synthesized
  source 1..20: mol_type = other DNA
ttttttttgtatttttagta

SEQ ID NO: 24617 - DNA, 20 bp, synthetic construct
  misc_feature 1..20: note = chemically synthesized
  source 1..20: mol_type = other DNA
ttgtatttttagtagagaca

SEQ ID NO: 24618 - DNA, 20 bp, synthetic construct
  misc_feature 1..20: note = chemically synthesized
  source 1..20: mol_type = other DNA
catggtttcactatgttgac

SEQ ID NO: 24619 - DNA, 20 bp, synthetic construct
  misc_feature 1..20: note = chemically synthesized
  source 1..20: mol_type = other DNA
atggtttcactatgttgact

SEQ ID NO: 24620 - DNA, 20 bp, synthetic construct
  misc_feature 1..20: note = chemically synthesized
  source 1..20: mol_type = other DNA
tttcactatgttgactaggc

SEQ ID NO: 24621 - DNA, 20 bp, synthetic construct
  misc_feature 1..20: note = chemically synthesized
  source 1..20: mol_type = other DNA
acctcatgatctgcctgcct

SEQ ID NO: 24622 - DNA, 20 bp, synthetic construct
  misc_feature 1..20: note = chemically synthesized
  source 1..20: mol_type = other DNA
ctgcctgccttggcctccct

SEQ ID NO: 24623 - DNA, 20 bp, synthetic construct
  misc_feature 1..20: note = chemically synthesized
  source 1..20: mol_type = other DNA
gccttggcctccctaagtgc

SEQ ID NO: 24624 - DNA, 20 bp, synthetic construct
  misc_feature 1..20: note = chemically synthesized
  source 1..20: mol_type = other DNA
ccttggcctccctaagtgct

SEQ ID NO: 24625 - DNA, 20 bp, synthetic construct
  misc_feature 1..20: note = chemically synthesized
  source 1..20: mol_type = other DNA
ctccctaagtgctaggatta

SEQ ID NO: 24626 - DNA, 20 bp, synthetic construct
  misc_feature 1..20: note = chemically synthesized
  source 1..20: mol_type = other DNA
tccctaagtgctaggattac

SEQ ID NO: 24627 - DNA, 20 bp, synthetic construct
  misc_feature 1..20: note = chemically synthesized
  source 1..20: mol_type = other DNA
agtgctaggattacaggcgt

SEQ ID NO: 24628 - DNA, 20 bp, synthetic construct
  misc_feature 1..20: note = chemically synthesized
  source 1..20: mol_type = other DNA
caggcgtgagccactacacc

SEQ ID NO: 24629 - DNA, 20 bp, synthetic construct
  misc_feature 1..20: note = chemically synthesized
  source 1..20: mol_type = other DNA
gcatgattctaaaaaataaa

SEQ ID NO: 24630 - DNA, 20 bp, synthetic construct
  misc_feature 1..20: note = chemically synthesized
  source 1..20: mol_type = other DNA
ttctaaaaaataaaaagatg

SEQ ID NO: 24631 - DNA, 20 bp, synthetic construct
  misc_feature 1..20: note = chemically synthesized
  source 1..20: mol_type = other DNA
caaacatctgatctccattg

SEQ ID NO: 24632 - DNA, 20 bp, synthetic construct
  misc_feature 1..20: note = chemically synthesized
  source 1..20: mol_type = other DNA
gaagaaccatgcaatctctc

SEQ ID NO: 24633 - DNA, 20 bp, synthetic construct
  misc_feature 1..20: note = chemically synthesized
  source 1..20: mol_type = other DNA
aagaaccatgcaatctctct

SEQ ID NO: 24634 - DNA, 20 bp, synthetic construct
  misc_feature 1..20: note = chemically synthesized
  source 1..20: mol_type = other DNA
atgcaatctctctgggttga

SEQ ID NO: 24635 - DNA, 20 bp, synthetic construct
  misc_feature 1..20: note = chemically synthesized
  source 1..20: mol_type = other DNA
gcaatctctctgggttgata

SEQ ID NO: 24636 - DNA, 20 bp, synthetic construct
  misc_feature 1..20: note = chemically synthesized
  source 1..20: mol_type = other DNA
caatctctctgggttgatag

SEQ ID NO: 24637 - DNA, 20 bp, synthetic construct
  misc_feature 1..20: note = chemically synthesized
  source 1..20: mol_type = other DNA
ctctctgggttgatagaggc

SEQ ID NO: 24638 - DNA, 20 bp, synthetic construct
  misc_feature 1..20: note = chemically synthesized
  source 1..20: mol_type = other DNA
ctctgggttgatagaggcca

SEQ ID NO: 24639 - DNA, 20 bp, synthetic construct
  misc_feature 1..20: note = chemically synthesized
  source 1..20: mol_type = other DNA
gggttgatagaggccagagt

SEQ ID NO: 24640 - DNA, 20 bp, synthetic construct
  misc_feature 1..20: note = chemically synthesized
  source 1..20: mol_type = other DNA
ttgatagaggccagagttag

SEQ ID NO: 24641 - DNA, 20 bp, synthetic construct
  misc_feature 1..20: note = chemically synthesized
  source 1..20: mol_type = other DNA
ttagtggctctccctgattt

SEQ ID NO: 24642 - DNA, 20 bp, synthetic construct
  misc_feature 1..20: note = chemically synthesized
  source 1..20: mol_type = other DNA
tggctctccctgatttcggt

SEQ ID NO: 24643 - DNA, 20 bp, synthetic construct
  misc_feature 1..20: note = chemically synthesized
  source 1..20: mol_type = other DNA
aaatcactattccaccatca

SEQ ID NO: 24644 - DNA, 20 bp, synthetic construct
  misc_feature 1..20: note = chemically synthesized
  source 1..20: mol_type = other DNA
aatcactattccaccatcac

SEQ ID NO: 24645 - DNA, 20 bp, synthetic construct
  misc_feature 1..20: note = chemically synthesized
  source 1..20: mol_type = other DNA
attccaccatcacgggataa

SEQ ID NO: 24646 - DNA, 20 bp, synthetic construct
  misc_feature 1..20: note = chemically synthesized
  source 1..20: mol_type = other DNA
ttccaccatcacgggataaa

SEQ ID NO: 24647 - DNA, 20 bp, synthetic construct
  misc_feature 1..20: note = chemically synthesized
  source 1..20: mol_type = other DNA
gggataaaaggcatcctgac

SEQ ID NO: 24648 - DNA, 20 bp, synthetic construct
  misc_feature 1..20: note = chemically synthesized
  source 1..20: mol_type = other DNA
ataaaaggcatcctgactgg

SEQ ID NO: 24649 - DNA, 20 bp, synthetic construct
  misc_feature 1..20: note = chemically synthesized
  source 1..20: mol_type = other DNA
gcggttgacacctatttcca

SEQ ID NO: 24650 - DNA, 20 bp, synthetic construct
  misc_feature 1..20: note = chemically synthesized
  source 1..20: mol_type = other DNA
gacacctatttccacagtga

SEQ ID NO: 24651 - DNA, 20 bp, synthetic construct
  misc_feature 1..20: note = chemically synthesized
  source 1..20: mol_type = other DNA
tccacagtgaaagatatatc

SEQ ID NO: 24652 - DNA, 20 bp, synthetic construct
  misc_feature 1..20: note = chemically synthesized
  source 1..20: mol_type = other DNA
agatatatctagtactttta

SEQ ID NO: 24653 - DNA, 20 bp, synthetic construct
  misc_feature 1..20: note = chemically synthesized
  source 1..20: mol_type = other DNA
gatatatctagtacttttaa

SEQ ID NO: 24654 - DNA, 20 bp, synthetic construct
  misc_feature 1..20: note = chemically synthesized
  source 1..20: mol_type = other DNA
atatatctagtacttttaaa

SEQ ID NO: 24655 - DNA, 20 bp, synthetic construct
  misc_feature 1..20: note = chemically synthesized
  source 1..20: mol_type = other DNA
tatatctagtacttttaaag

SEQ ID NO: 24656 - DNA, 20 bp, synthetic construct
  misc_feature 1..20: note = chemically synthesized
  source 1..20: mol_type = other DNA
atctagtacttttaaagggg

SEQ ID NO: 24657 - DNA, 20 bp, synthetic construct
  misc_feature 1..20: note = chemically synthesized
  source 1..20: mol_type = other DNA
tagtacttttaaaggggaag

SEQ ID NO: 24658 - DNA, 20 bp, synthetic construct
  misc_feature 1..20: note = chemically synthesized
  source 1..20: mol_type = other DNA
aaaggggaagtggtttgtct

SEQ ID NO: 24659 - DNA, 20 bp, synthetic construct
  misc_feature 1..20: note = chemically synthesized
  source 1..20: mol_type = other DNA
gtctgagatactctgtttca

SEQ ID NO: 24660 - DNA, 20 bp, synthetic construct
  misc_feature 1..20: note = chemically synthesized
  source 1..20: mol_type = other DNA
tgagatactctgtttcaaag

SEQ ID NO: 24661 - DNA, 20 bp, synthetic construct
  misc_feature 1..20: note = chemically synthesized
  source 1..20: mol_type = other DNA
agatactctgtttcaaagta

SEQ ID NO: 24662 - DNA, 20 bp, synthetic construct
  misc_feature 1..20: note = chemically synthesized
  source 1..20: mol_type = other DNA
atactctgtttcaaagtaga

SEQ ID NO: 24663 - DNA, 20 bp, synthetic construct
  misc_feature 1..20: note = chemically synthesized
  source 1..20: mol_type = other DNA
tactctgtttcaaagtagag

SEQ ID NO: 24664 - DNA, 20 bp, synthetic construct
  misc_feature 1..20: note = chemically synthesized
  source 1..20: mol_type = other DNA
gtttcaaagtagagaggata

SEQ ID NO: 24665 - DNA, 20 bp, synthetic construct
  misc_feature 1..20: note = chemically synthesized
  source 1..20: mol_type = other DNA
aagtagagaggatacagaac

SEQ ID NO: 24666 - DNA, 20 bp, synthetic construct
  misc_feature 1..20: note = chemically synthesized
  source 1..20: mol_type = other DNA
ggatacagaacaagcatctg

SEQ ID NO: 24667 - DNA, 20 bp, synthetic construct
  misc_feature 1..20: note = chemically synthesized
  source 1..20: mol_type = other DNA
tgaagctatatacatcctta

SEQ ID NO: 24668 - DNA, 20 bp, synthetic construct
  misc_feature 1..20: note = chemically synthesized
  source 1..20: mol_type = other DNA
aagctatatacatccttaca

SEQ ID NO: 24669 - DNA, 20 bp, synthetic construct
  misc_feature 1..20: note = chemically synthesized
  source 1..20: mol_type = other DNA
gctatatacatccttacaga

SEQ ID NO: 24670 - DNA, 20 bp, synthetic construct
  misc_feature 1..20: note = chemically synthesized
  source 1..20: mol_type = other DNA
cttacagagagcaattctga

SEQ ID NO: 24671 - DNA, 20 bp, synthetic construct
  misc_feature 1..20: note = chemically synthesized
  source 1..20: mol_type = other DNA
gagcaattctgatggaaatg

SEQ ID NO: 24672 - DNA, 20 bp, synthetic construct
  misc_feature 1..20: note = chemically synthesized
  source 1..20: mol_type = other DNA
agcaattctgatggaaatgc

SEQ ID NO: 24673 - DNA, 20 bp, synthetic construct
  misc_feature 1..20: note = chemically synthesized
  source 1..20: mol_type = other DNA
aaatgcaggccatgtttccc

SEQ ID NO: 24674 - DNA, 20 bp, synthetic construct
  misc_feature 1..20: note = chemically synthesized
  source 1..20: mol_type = other DNA
aatgcaggccatgtttccct

SEQ ID NO: 24675 - DNA, 20 bp, synthetic construct
  misc_feature 1..20: note = chemically synthesized
  source 1..20: mol_type = other DNA
atgcaggccatgtttccctg

SEQ ID NO: 24676 - DNA, 20 bp, synthetic construct
  misc_feature 1..20: note = chemically synthesized
  source 1..20: mol_type = other DNA
tgcaggccatgtttccctgg

SEQ ID NO: 24677 - DNA, 20 bp, synthetic construct
  misc_feature 1..20: note = chemically synthesized
  source 1..20: mol_type = other DNA
gcaggccatgtttccctggg

SEQ ID NO: 24678 - DNA, 20 bp, synthetic construct
  misc_feature 1..20: note = chemically synthesized
  source 1..20: mol_type = other DNA
caggccatgtttccctgggg

SEQ ID NO: 24679 - DNA, 20 bp, synthetic construct
  misc_feature 1..20: note = chemically synthesized
  source 1..20: mol_type = other DNA
aggccatgtttccctggggg

SEQ ID NO: 24680 - DNA, 20 bp, synthetic construct
  misc_feature 1..20: note = chemically synthesized
  source 1..20: mol_type = other DNA
tccctggggggggctcgtcc

SEQ ID NO: 24681 - DNA, 20 bp, synthetic construct
  misc_feature 1..20: note = chemically synthesized
  source 1..20: mol_type = other DNA
ccctggggggggctcgtcct

SEQ ID NO: 24682 - DNA, 20 bp, synthetic construct
  misc_feature 1..20: note = chemically synthesized
  source 1..20: mol_type = other DNA
cctggggggggctcgtccta

SEQ ID NO: 24683 - DNA, 20 bp, synthetic construct
  misc_feature 1..20: note = chemically synthesized
  source 1..20: mol_type = other DNA
ctggggggggctcgtcctag

SEQ ID NO: 24684 - DNA, 20 bp, synthetic construct
  misc_feature 1..20: note = chemically synthesized
  source 1..20: mol_type = other DNA
ggggggctcgtcctaggggc

SEQ ID NO: 24685 - DNA, 20 bp, synthetic construct
  misc_feature 1..20: note = chemically synthesized
  source 1..20: mol_type = other DNA
ggggctcgtcctaggggctg

SEQ ID NO: 24686 - DNA, 20 bp, synthetic construct
  misc_feature 1..20: note = chemically synthesized
  source 1..20: mol_type = other DNA
tggagtgcattctctgatgt

SEQ ID NO: 24687 - DNA, 20 bp, synthetic construct
  misc_feature 1..20: note = chemically synthesized
  source 1..20: mol_type = other DNA
gagtgcattctctgatgtca

SEQ ID NO: 24688 - DNA, 20 bp, synthetic construct
  misc_feature 1..20: note = chemically synthesized
  source 1..20: mol_type = other DNA
agtgcattctctgatgtcag

SEQ ID NO: 24689 - DNA, 20 bp, synthetic construct
  misc_feature 1..20: note = chemically synthesized
  source 1..20: mol_type = other DNA
tctgatgtcagaggaaatgc

SEQ ID NO: 24690 - DNA, 20 bp, synthetic construct
  misc_feature 1..20: note = chemically synthesized
  source 1..20: mol_type = other DNA
gaggaaatgcaagattccct

SEQ ID NO: 24691 - DNA, 20 bp, synthetic construct
  misc_feature 1..20: note = chemically synthesized
  source 1..20: mol_type = other DNA
aggaaatgcaagattccctg

SEQ ID NO: 24692 - DNA, 20 bp, synthetic construct
  misc_feature 1..20: note = chemically synthesized
  source 1..20: mol_type = other DNA
tgcaagattccctgaggcct

SEQ ID NO: 24693 - DNA, 20 bp, synthetic construct
  misc_feature 1..20: note = chemically synthesized
  source 1..20: mol_type = other DNA
gcaagattccctgaggcctg

SEQ ID NO: 24694 - DNA, 20 bp, synthetic construct
  misc_feature 1..20: note = chemically synthesized
  source 1..20: mol_type = other DNA
caagattccctgaggcctga

SEQ ID NO: 24695 - DNA, 20 bp, synthetic construct
  misc_feature 1..20: note = chemically synthesized
  source 1..20: mol_type = other DNA
ctgaggcctgagggaaccca

SEQ ID NO: 24696 - DNA, 20 bp, synthetic construct
  misc_feature 1..20: note = chemically synthesized
  source 1..20: mol_type = other DNA
agggaacccatggtatatgc

SEQ ID NO: 24697 - DNA, 20 bp, synthetic construct
  misc_feature 1..20: note = chemically synthesized
  source 1..20: mol_type = other DNA
cccatggtatatgcaagtcc

SEQ ID NO: 24698 - DNA, 20 bp, synthetic construct
  misc_feature 1..20: note = chemically synthesized
  source 1..20: mol_type = other DNA
caagtccaagtttcaaactg

SEQ ID NO: 24699 - DNA, 20 bp, synthetic construct
  misc_feature 1..20: note = chemically synthesized
  source 1..20: mol_type = other DNA
tagttccatatgcattcttc

SEQ ID NO: 24700 - DNA, 20 bp, synthetic construct
  misc_feature 1..20: note = chemically synthesized
  source 1..20: mol_type = other DNA
agttccatatgcattcttcc

SEQ ID NO: 24701 - DNA, 20 bp, synthetic construct
  misc_feature 1..20: note = chemically synthesized
  source 1..20: mol_type = other DNA
ttccaggacaaatacttctt

SEQ ID NO: 24702 - DNA, 20 bp, synthetic construct
  misc_feature 1..20: note = chemically synthesized
  source 1..20: mol_type = other DNA
tccaggacaaatacttcttg

SEQ ID NO: 24703 - DNA, 20 bp, synthetic construct
  misc_feature 1..20: note = chemically synthesized
  source 1..20: mol_type = other DNA
ttcttgaggttaaaaaaaaa

SEQ ID NO: 24704 - DNA, 20 bp, synthetic construct
  misc_feature 1..20: note = chemically synthesized
  source 1..20: mol_type = other DNA
gttaaaaaaaaaaagtcaca

SEQ ID NO: 24705 - DNA, 20 bp, synthetic construct
  misc_feature 1..20: note = chemically synthesized
  source 1..20: mol_type = other DNA
gtcacatagctgccatttta

SEQ ID NO: 24706 - DNA, 20 bp, synthetic construct
  misc_feature 1..20: note = chemically synthesized
  source 1..20: mol_type = other DNA
agctgccattttatggattt

SEQ ID NO: 24707 - DNA, 20 bp, synthetic construct
  misc_feature 1..20: note = chemically synthesized
  source 1..20: mol_type = other DNA
gctgccattttatggatttc

SEQ ID NO: 24708 - DNA, 20 bp, synthetic construct
  misc_feature 1..20: note = chemically synthesized
  source 1..20: mol_type = other DNA
attttttttttttttttttt

SEQ ID NO: 24709 - DNA, 20 bp, synthetic construct
  misc_feature 1..20: note = chemically synthesized
  source 1..20: mol_type = other DNA
ttttttttttttttttgaga

SEQ ID NO: 24710 - DNA, 20 bp, synthetic construct
  misc_feature 1..20: note = chemically synthesized
  source 1..20: mol_type = other DNA
ttttttttttttttgagatg

SEQ ID NO: 24711 - DNA, 20 bp, synthetic construct
  misc_feature 1..20: note = chemically synthesized
  source 1..20: mol_type = other DNA
tggagtcttgctctgtcacc

SEQ ID NO: 24712 - DNA, 20 bp, synthetic construct
  misc_feature 1..20: note = chemically synthesized
  source 1..20: mol_type = other DNA
ttgctctgtcacccagcctg

SEQ ID NO: 24713 - DNA, 20 bp, synthetic construct
  misc_feature 1..20: note = chemically synthesized
  source 1..20: mol_type = other DNA
ctgtcacccagcctgtagtg

SEQ ID NO: 24714 - DNA, 20 bp, synthetic construct
  misc_feature 1..20: note = chemically synthesized
  source 1..20: mol_type = other DNA
tcacccagcctgtagtgcag

SEQ ID NO: 24715 - DNA, 20 bp, synthetic construct
  misc_feature 1..20: note = chemically synthesized
  source 1..20: mol_type = other DNA
gtagtgcagtggcataatct

SEQ ID NO: 24716 - DNA, 20 bp, synthetic construct
  misc_feature 1..20: note = chemically synthesized
  source 1..20: mol_type = other DNA
agtggcataatctcggctca

SEQ ID NO: 24717 - DNA, 20 bp, synthetic construct
  misc_feature 1..20: note = chemically synthesized
  source 1..20: mol_type = other DNA
tcacggcaacctccgcctcc

SEQ ID NO: 24718 - DNA, 20 bp, synthetic construct
  misc_feature 1..20: note = chemically synthesized
  source 1..20: mol_type = other DNA
cacggcaacctccgcctccc

SEQ ID NO: 24719 - DNA, 20 bp, synthetic construct
  misc_feature 1..20: note = chemically synthesized
  source 1..20: mol_type = other DNA
aacctccgcctcccaggttc

SEQ ID NO: 24720 - DNA, 20 bp, synthetic construct
  misc_feature 1..20: note = chemically synthesized
  source 1..20: mol_type = other DNA
ttcaagcgattctcttgcct

SEQ ID NO: 24721 - DNA, 20 bp, synthetic construct
  misc_feature 1..20: note = chemically synthesized
  source 1..20: mol_type = other DNA
ttctcttgccttagcctccc

SEQ ID NO: 24722 - DNA, 20 bp, synthetic construct
  misc_feature 1..20: note = chemically synthesized
  source 1..20: mol_type = other DNA
tcttgccttagcctcccgag

SEQ ID NO: 24723 - DNA, 20 bp, synthetic construct
  misc_feature 1..20: note = chemically synthesized
  source 1..20: mol_type = other DNA
gccttagcctcccgagtagc

SEQ ID NO: 24724 - DNA, 20 bp, synthetic construct
  misc_feature 1..20: note = chemically synthesized
  source 1..20: mol_type = other DNA
ccttagcctcccgagtagct

SEQ ID NO: 24725 - DNA, 20 bp, synthetic construct
  misc_feature 1..20: note = chemically synthesized
  source 1..20: mol_type = other DNA
ctcccgagtagctgggatta

SEQ ID NO: 24726 - DNA, 20 bp, synthetic construct
  misc_feature 1..20: note = chemically synthesized
  source 1..20: mol_type = other DNA
cagtcacgcaccaccacatc

SEQ ID NO: 24727 - DNA, 20 bp, synthetic construct
  misc_feature 1..20: note = chemically synthesized
  source 1..20: mol_type = other DNA
ggctaattctttatattttt

SEQ ID NO: 24728 - DNA, 20 bp, synthetic construct
  misc_feature 1..20: note = chemically synthesized
  source 1..20: mol_type = other DNA
taattctttatattttttgg

SEQ ID NO: 24729 - DNA, 20 bp, synthetic construct
  misc_feature 1..20: note = chemically synthesized
  source 1..20: mol_type = other DNA
tttatattttttggtagaaa

SEQ ID NO: 24730 - DNA, 20 bp, synthetic construct
  misc_feature 1..20: note = chemically synthesized
  source 1..20: mol_type = other DNA
gaaacggtgtttcaccatgt

SEQ ID NO: 24731 - DNA, 20 bp, synthetic construct
  misc_feature 1..20: note = chemically synthesized
  source 1..20: mol_type = other DNA
cggtgtttcaccatgttggc

SEQ ID NO: 24732 - DNA, 20 bp, synthetic construct
  misc_feature 1..20: note = chemically synthesized
  source 1..20: mol_type = other DNA
ggtgtttcaccatgttggcc

SEQ ID NO: 24733 - DNA, 20 bp, synthetic construct
  misc_feature 1..20: note = chemically synthesized
  source 1..20: mol_type = other DNA
tttcaccatgttggccaggc

SEQ ID NO: 24734 - DNA, 20 bp, synthetic construct
  misc_feature 1..20: note = chemically synthesized
  source 1..20: mol_type = other DNA
ctcatgtgatctgcctgcct

SEQ ID NO: 24735 - DNA, 20 bp, synthetic construct
  misc_feature 1..20: note = chemically synthesized
  source 1..20: mol_type = other DNA
ctgcctgccttggcctccca

SEQ ID NO: 24736 - DNA, 20 bp, synthetic construct
  misc_feature 1..20: note = chemically synthesized
  source 1..20: mol_type = other DNA
ccttggcctcccaaagtgct

SEQ ID NO: 24737 - DNA, 20 bp, synthetic construct
  misc_feature 1..20: note = chemically synthesized
  source 1..20: mol_type = other DNA
ctcccaaagtgctgagatta

SEQ ID NO: 24738 - DNA, 20 bp, synthetic construct
  misc_feature 1..20: note = chemically synthesized
  source 1..20: mol_type = other DNA
tcccaaagtgctgagattac

SEQ ID NO: 24739 - DNA, 20 bp, synthetic construct
  misc_feature 1..20: note = chemically synthesized
  source 1..20: mol_type = other DNA
agtgctgagattacaggtgt

SEQ ID NO: 24740 - DNA, 20 bp, synthetic construct
  misc_feature 1..20: note = chemically synthesized
  source 1..20: mol_type = other DNA
tgtgagccaccgcgcctgcc

SEQ ID NO: 24741 - DNA, 20 bp, synthetic construct
  misc_feature 1..20: note = chemically synthesized
  source 1..20: mol_type = other DNA
tgagccaccgcgcctgcctg

SEQ ID NO: 24742 - DNA, 20 bp, synthetic construct
  misc_feature 1..20: note = chemically synthesized
  source 1..20: mol_type = other DNA
caccgcgcctgcctggagtt

SEQ ID NO: 24743 - DNA, 20 bp, synthetic construct
  misc_feature 1..20: note = chemically synthesized
  source 1..20: mol_type = other DNA
ctgcctggagttcagaatct

SEQ ID NO: 24744 - DNA, 20 bp, synthetic construct
  misc_feature 1..20: note = chemically synthesized
  source 1..20: mol_type = other DNA
tgcctggagttcagaatctt

SEQ ID NO: 24745 - DNA, 20 bp, synthetic construct
  misc_feature 1..20: note = chemically synthesized
  source 1..20: mol_type = other DNA
cttcattatttgtgtttaaa

SEQ ID NO: 24746 - DNA, 20 bp, synthetic construct
  misc_feature 1..20: note = chemically synthesized
  source 1..20: mol_type = other DNA
ttgtgtttaaatagatcata

SEQ ID NO: 24747 - DNA, 20 bp, synthetic construct
  misc_feature 1..20: note = chemically synthesized
  source 1..20: mol_type = other DNA
gtttaaatagatcatacagt

SEQ ID NO: 24748 - DNA, 20 bp, synthetic construct
  misc_feature 1..20: note = chemically synthesized
  source 1..20: mol_type = other DNA
tttaaatagatcatacagtc

SEQ ID NO: 24749 - DNA, 20 bp, synthetic construct
  misc_feature 1..20: note = chemically synthesized
  source 1..20: mol_type = other DNA
atagatcatacagtcaggca

SEQ ID NO: 24750 - DNA, 20 bp, synthetic construct
  misc_feature 1..20: note = chemically synthesized
  source 1..20: mol_type = other DNA
gatcatacagtcaggcacgg

SEQ ID NO: 24751 - DNA, 20 bp, synthetic construct
  misc_feature 1..20: note = chemically synthesized
  source 1..20: mol_type = other DNA
gtggctcatgcctgtaatcc

SEQ ID NO: 24752 - DNA, 20 bp, synthetic construct
  misc_feature 1..20: note = chemically synthesized
  source 1..20: mol_type = other DNA
tgcctgtaatcccagcactt

SEQ ID NO: 24753 - DNA, 20 bp, synthetic construct
  misc_feature 1..20: note = chemically synthesized
  source 1..20: mol_type = other DNA
gcctgtaatcccagcacttt

SEQ ID NO: 24754 - DNA, 20 bp, synthetic construct
  misc_feature 1..20: note = chemically synthesized
  source 1..20: mol_type = other DNA
ctgtaatcccagcactttgg

SEQ ID NO: 24755 - DNA, 20 bp, synthetic construct
  misc_feature 1..20: note = chemically synthesized
  source 1..20: mol_type = other DNA
tgtaatcccagcactttggg

SEQ ID NO: 24756 - DNA, 20 bp, synthetic construct
  misc_feature 1..20: note = chemically synthesized
  source 1..20: mol_type = other DNA
tcccagcactttgggaggct

SEQ ID NO: 24757 - DNA, 20 bp, synthetic construct
  misc_feature 1..20: note = chemically synthesized
  source 1..20: mol_type = other DNA
cccagcactttgggaggctg

SEQ ID NO: 24758 - DNA, 20 bp, synthetic construct
  misc_feature 1..20: note = chemically synthesized
  source 1..20: mol_type = other DNA
agcactttgggaggctgagg

SEQ ID NO: 24759 - DNA, 20 bp, synthetic construct
  misc_feature 1..20: note = chemically synthesized
  source 1..20: mol_type = other DNA
gcactttgggaggctgaggt

SEQ ID NO: 24760 - DNA, 20 bp, synthetic construct
  misc_feature 1..20: note = chemically synthesized
  source 1..20: mol_type = other DNA
actttgggaggctgaggtgg

SEQ ID NO: 24761 - DNA, 20 bp, synthetic construct
  misc_feature 1..20: note = chemically synthesized
  source 1..20: mol_type = other DNA
ctttgggaggctgaggtggg

SEQ ID NO: 24762 - DNA, 20 bp, synthetic construct
  misc_feature 1..20: note = chemically synthesized
  source 1..20: mol_type = other DNA
ctgaggtgggaggattgcct

SEQ ID NO: 24763 - DNA, 20 bp, synthetic construct
  misc_feature 1..20: note = chemically synthesized
  source 1..20: mol_type = other DNA
gtgggaggattgcctgagtt

SEQ ID NO: 24764 - DNA, 20 bp, synthetic construct
  misc_feature 1..20: note = chemically synthesized
  source 1..20: mol_type = other DNA
tgggaggattgcctgagttc

SEQ ID NO: 24765 - DNA, 20 bp, synthetic construct
  misc_feature 1..20: note = chemically synthesized
  source 1..20: mol_type = other DNA
ggaggattgcctgagttcag

SEQ ID NO: 24766 - DNA, 20 bp, synthetic construct
  misc_feature 1..20: note = chemically synthesized
  source 1..20: mol_type = other DNA
gattgcctgagttcaggaga

SEQ ID NO: 24767 - DNA, 20 bp, synthetic construct
  misc_feature 1..20: note = chemically synthesized
  source 1..20: mol_type = other DNA
ttgcctgagttcaggagatg

SEQ ID NO: 24768 - DNA, 20 bp, synthetic construct
  misc_feature 1..20: note = chemically synthesized
  source 1..20: mol_type = other DNA
tgagttcaggagatggagac

SEQ ID NO: 24769 - DNA, 20 bp, synthetic construct
  misc_feature 1..20: note = chemically synthesized
  source 1..20: mol_type = other DNA
tcaggagatggagaccagcc

SEQ ID NO: 24770 - DNA, 20 bp, synthetic construct
  misc_feature 1..20: note = chemically synthesized
  source 1..20: mol_type = other DNA
caggagatggagaccagcct

SEQ ID NO: 24771 - DNA, 20 bp, synthetic construct
  misc_feature 1..20: note = chemically synthesized
  source 1..20: mol_type = other DNA
ggagaccagcctgggcaaca

SEQ ID NO: 24772 - DNA, 20 bp, synthetic construct
  misc_feature 1..20: note = chemically synthesized
  source 1..20: mol_type = other DNA
tctactaaaaatacaaaaac

SEQ ID NO: 24773 - DNA, 20 bp, synthetic construct
  misc_feature 1..20: note = chemically synthesized
  source 1..20: mol_type = other DNA
ctaaaaatacaaaaactagc

SEQ ID NO: 24774 - DNA, 20 bp, synthetic construct
  misc_feature 1..20: note = chemically synthesized
  source 1..20: mol_type = other DNA
atacaaaaactagctggatg

SEQ ID NO: 24775 - DNA, 20 bp, synthetic construct
  misc_feature 1..20: note = chemically synthesized
  source 1..20: mol_type = other DNA
caaaaactagctggatgtgg

SEQ ID NO: 24776 - DNA, 20 bp, synthetic construct
  misc_feature 1..20: note = chemically synthesized
  source 1..20: mol_type = other DNA
gatgtggtggcacacacctg

SEQ ID NO: 24777 - DNA, 20 bp, synthetic construct
  misc_feature 1..20: note = chemically synthesized
  source 1..20: mol_type = other DNA
gtggcacacacctgtagtcc

SEQ ID NO: 24778 - DNA, 20 bp, synthetic construct
  misc_feature 1..20: note = chemically synthesized
  source 1..20: mol_type = other DNA
cacctgtagtcccagctatt

SEQ ID NO: 24779 - DNA, 20 bp, synthetic construct
  misc_feature 1..20: note = chemically synthesized
  source 1..20: mol_type = other DNA
acctgtagtcccagctattc

SEQ ID NO: 24780 - DNA, 20 bp, synthetic construct
  misc_feature 1..20: note = chemically synthesized
  source 1..20: mol_type = other DNA
ctgtagtcccagctattcag

SEQ ID NO: 24781 - DNA, 20 bp, synthetic construct
  misc_feature 1..20: note = chemically synthesized
  source 1..20: mol_type = other DNA
tgtagtcccagctattcagg

SEQ ID NO: 24782 - DNA, 20 bp, synthetic construct
  misc_feature 1..20: note = chemically synthesized
  source 1..20: mol_type = other DNA
tcccagctattcaggaggct

SEQ ID NO: 24783 - DNA, 20 bp, synthetic construct
  misc_feature 1..20: note = chemically synthesized
  source 1..20: mol_type = other DNA
cccagctattcaggaggctg

SEQ ID NO: 24784 - DNA, 20 bp, synthetic construct
  misc_feature 1..20: note = chemically synthesized
  source 1..20: mol_type = other DNA
agctattcaggaggctgagg

SEQ ID NO: 24785 - DNA, 20 bp, synthetic construct
  misc_feature 1..20: note = chemically synthesized
  source 1..20: mol_type = other DNA
gctattcaggaggctgaggt

SEQ ID NO: 24786 - DNA, 20 bp, synthetic construct
  misc_feature 1..20: note = chemically synthesized
  source 1..20: mol_type = other DNA
tattcaggaggctgaggtgg

SEQ ID NO: 24787 - DNA, 20 bp, synthetic construct
  misc_feature 1..20: note = chemically synthesized
  source 1..20: mol_type = other DNA
attcaggaggctgaggtggg

SEQ ID NO: 24788 - DNA, 20 bp, synthetic construct
  misc_feature 1..20: note = chemically synthesized
  source 1..20: mol_type = other DNA
aggctgaggtgggaggatcc

SEQ ID NO: 24789 - DNA, 20 bp, synthetic construct
  misc_feature 1..20: note = chemically synthesized
  source 1..20: mol_type = other DNA
ggctgaggtgggaggatccc

SEQ ID NO: 24790 - DNA, 20 bp, synthetic construct
  misc_feature 1..20: note = chemically synthesized
  source 1..20: mol_type = other DNA
ctgaggtgggaggatcccag

SEQ ID NO: 24791 - DNA, 20 bp, synthetic construct
  misc_feature 1..20: note = chemically synthesized
  source 1..20: mol_type = other DNA
tgaggtgggaggatcccagg

SEQ ID NO: 24792 - DNA, 20 bp, synthetic construct
  misc_feature 1..20: note = chemically synthesized
  source 1..20: mol_type = other DNA
ggtgggaggatcccaggagg

SEQ ID NO: 24793 - DNA, 20 bp, synthetic construct
  misc_feature 1..20: note = chemically synthesized
  source 1..20: mol_type = other DNA
tgggaggatcccaggaggta

SEQ ID NO: 24794 - DNA, 20 bp, synthetic construct
  misc_feature 1..20: note = chemically synthesized
  source 1..20: mol_type = other DNA
gggaggatcccaggaggtag

SEQ ID NO: 24795 - DNA, 20 bp, synthetic construct
  misc_feature 1..20: note = chemically synthesized
  source 1..20: mol_type = other DNA
caggaggtagaggtcacaat

SEQ ID NO: 24796 - DNA, 20 bp, synthetic construct
  misc_feature 1..20: note = chemically synthesized
  source 1..20: mol_type = other DNA
ggtagaggtcacaatgagcc

SEQ ID NO: 24797 - DNA, 20 bp, synthetic construct
  misc_feature 1..20: note = chemically synthesized
  source 1..20: mol_type = other DNA
gagattgcgccactgcactc

SEQ ID NO: 24798 - DNA, 20 bp, synthetic construct
  misc_feature 1..20: note = chemically synthesized
  source 1..20: mol_type = other DNA
agattgcgccactgcactcc

SEQ ID NO: 24799 - DNA, 20 bp, synthetic construct
  misc_feature 1..20: note = chemically synthesized
  source 1..20: mol_type = other DNA
tgcgccactgcactccaggc

SEQ ID NO: 24800 - DNA, 20 bp, synthetic construct
  misc_feature 1..20: note = chemically synthesized
  source 1..20: mol_type = other DNA
gcgccactgcactccaggct

SEQ ID NO: 24801 - DNA, 20 bp, synthetic construct
  misc_feature 1..20: note = chemically synthesized
  source 1..20: mol_type = other DNA
gcactccaggctgggttact

SEQ ID NO: 24802 - DNA, 20 bp, synthetic construct
  misc_feature 1..20: note = chemically synthesized
  source 1..20: mol_type = other DNA
tccaggctgggttactgagc

SEQ ID NO: 24803 - DNA, 20 bp, synthetic construct
  misc_feature 1..20: note = chemically synthesized
  source 1..20: mol_type = other DNA
atcctgtctcaaaaaaaaaa

SEQ ID NO: 24804 - DNA, 20 bp, synthetic construct
  misc_feature 1..20: note = chemically synthesized
  source 1..20: mol_type = other DNA
aaaaagataatacattcaaa

SEQ ID NO: 24805 - DNA, 20 bp, synthetic construct
  misc_feature 1..20: note = chemically synthesized
  source 1..20: mol_type = other DNA
tcaaacagttcaaaatgcaa

SEQ ID NO: 24806 - DNA, 20 bp, synthetic construct
  misc_feature 1..20: note = chemically synthesized
  source 1..20: mol_type = other DNA
aatgcaaaagttacatacat

SEQ ID NO: 24807 - DNA, 20 bp, synthetic construct
  misc_feature 1..20: note = chemically synthesized
  source 1..20: mol_type = other DNA
atgcaaaagttacatacata

SEQ ID NO: 24808 - DNA, 20 bp, synthetic construct
  misc_feature 1..20: note = chemically synthesized
  source 1..20: mol_type = other DNA
caaaagttacatacataagg

SEQ ID NO: 24809 - DNA, 20 bp, synthetic construct
  misc_feature 1..20: note = chemically synthesized
  source 1..20: mol_type = other DNA
ctccctctcacacttctccc

SEQ ID NO: 24810 - DNA, 20 bp, synthetic construct
  misc_feature 1..20: note = chemically synthesized
  source 1..20: mol_type = other DNA
cacacttctccccagccacc

SEQ ID NO: 24811 - DNA, 20 bp, synthetic construct
  misc_feature 1..20: note = chemically synthesized
  source 1..20: mol_type = other DNA
agccacccagttctcccttc

SEQ ID NO: 24812 - DNA, 20 bp, synthetic construct
  misc_feature 1..20: note = chemically synthesized
  source 1..20: mol_type = other DNA
ccacccagttctcccttcta

SEQ ID NO: 24813 - DNA, 20 bp, synthetic construct
  misc_feature 1..20: note = chemically synthesized
  source 1..20: mol_type = other DNA
cacccagttctcccttctag

SEQ ID NO: 24814 - DNA, 20 bp, synthetic construct
  misc_feature 1..20: note = chemically synthesized
  source 1..20: mol_type = other DNA
gcaacatgtgaaatccttct

SEQ ID NO: 24815 - DNA, 20 bp, synthetic construct
  misc_feature 1..20: note = chemically synthesized
  source 1..20: mol_type = other DNA
caacatgtgaaatccttctc

SEQ ID NO: 24816 - DNA, 20 bp, synthetic construct
  misc_feature 1..20: note = chemically synthesized
  source 1..20: mol_type = other DNA
ctcaggctacactcttcttg

SEQ ID NO: 24817 - DNA, 20 bp, synthetic construct
  misc_feature 1..20: note = chemically synthesized
  source 1..20: mol_type = other DNA
tcaggctacactcttcttga

SEQ ID NO: 24818 - DNA, 20 bp, synthetic construct
  misc_feature 1..20: note = chemically synthesized
  source 1..20: mol_type = other DNA
ctacactcttcttgaaggtg

SEQ ID NO: 24819 - DNA, 20 bp, synthetic construct
  misc_feature 1..20: note = chemically synthesized
  source 1..20: mol_type = other DNA
tacactcttcttgaaggtgt

SEQ ID NO: 24820 - DNA, 20 bp, synthetic construct
  misc_feature 1..20: note = chemically synthesized
  source 1..20: mol_type = other DNA
cttcttgaaggtgtaggctt

SEQ ID NO: 24821 - DNA, 20 bp, synthetic construct
  misc_feature 1..20: note = chemically synthesized
  source 1..20: mol_type = other DNA
ttcttgaaggtgtaggcttt

SEQ ID NO: 24822 - DNA, 20 bp, synthetic construct
  misc_feature 1..20: note = chemically synthesized
  source 1..20: mol_type = other DNA
aaggtgtaggctttgggcaa

SEQ ID NO: 24823 - DNA, 20 bp, synthetic construct
  misc_feature 1..20: note = chemically synthesized
  source 1..20: mol_type = other DNA
tttgggcaaaagcattcatt

SEQ ID NO: 24824 - DNA, 20 bp, synthetic construct
  misc_feature 1..20: note = chemically synthesized
  source 1..20: mol_type = other DNA
aagcattcattcagtaaccc

SEQ ID NO: 24825 - DNA, 20 bp, synthetic construct
  misc_feature 1..20: note = chemically synthesized
  source 1..20: mol_type = other DNA
aaacttgttctgtttttcca

SEQ ID NO: 24826 - DNA, 20 bp, synthetic construct
  misc_feature 1..20: note = chemically synthesized
  source 1..20: mol_type = other DNA
aacttgttctgtttttccat

SEQ ID NO: 24827 - DNA, 20 bp, synthetic construct
  misc_feature 1..20: note = chemically synthesized
  source 1..20: mol_type = other DNA
tttttccataggattctctt

SEQ ID NO: 24828 - DNA, 20 bp, synthetic construct
  misc_feature 1..20: note = chemically synthesized
  source 1..20: mol_type = other DNA
tccataggattctctttgga

SEQ ID NO: 24829 - DNA, 20 bp, synthetic construct
  misc_feature 1..20: note = chemically synthesized
  source 1..20: mol_type = other DNA
tctttggacagcgtccatac

SEQ ID NO: 24830 - DNA, 20 bp, synthetic construct
  misc_feature 1..20: note = chemically synthesized
  source 1..20: mol_type = other DNA
ttggacagcgtccatactgg

SEQ ID NO: 24831 - DNA, 20 bp, synthetic construct
  misc_feature 1..20: note = chemically synthesized
  source 1..20: mol_type = other DNA
tggacagcgtccatactggt

SEQ ID NO: 24832 - DNA, 20 bp, synthetic construct
  misc_feature 1..20: note = chemically synthesized
  source 1..20: mol_type = other DNA
gcgtccatactggtgggttt

SEQ ID NO: 24833 - DNA, 20 bp, synthetic construct
  misc_feature 1..20: note = chemically synthesized
  source 1..20: mol_type = other DNA
gttttggatactgactacta

SEQ ID NO: 24834 - DNA, 20 bp, synthetic construct
  misc_feature 1..20: note = chemically synthesized
  source 1..20: mol_type = other DNA
acacttccgtgcccctgata

SEQ ID NO: 24835 - DNA, 20 bp, synthetic construct
  misc_feature 1..20: note = chemically synthesized
  source 1..20: mol_type = other DNA
cttccgtgcccctgataaag

SEQ ID NO: 24836 - DNA, 20 bp, synthetic construct
  misc_feature 1..20: note = chemically synthesized
  source 1..20: mol_type = other DNA
agcagttccctgtaacctgt

SEQ ID NO: 24837 - DNA, 20 bp, synthetic construct
  misc_feature 1..20: note = chemically synthesized
  source 1..20: mol_type = other DNA
ttccctgtaacctgtgagac

SEQ ID NO: 24838 - DNA, 20 bp, synthetic construct
  misc_feature 1..20: note = chemically synthesized
  source 1..20: mol_type = other DNA
tgtaacctgtgagactggac

SEQ ID NO: 24839 - DNA, 20 bp, synthetic construct
  misc_feature 1..20: note = chemically synthesized
  source 1..20: mol_type = other DNA
gtaacctgtgagactggacc

SEQ ID NO: 24840 - DNA, 20 bp, synthetic construct
  misc_feature 1..20: note = chemically synthesized
  source 1..20: mol_type = other DNA
cctgtgagactggaccaggt

SEQ ID NO: 24841 - DNA, 20 bp, synthetic construct
  misc_feature 1..20: note = chemically synthesized
  source 1..20: mol_type = other DNA
actggaccaggtaagcgtcc

SEQ ID NO: 24842 - DNA, 20 bp, synthetic construct
  misc_feature 1..20: note = chemically synthesized
  source 1..20: mol_type = other DNA
ggtaagcgtcccagcccctg

SEQ ID NO: 24843 - DNA, 20 bp, synthetic construct
  misc_feature 1..20: note = chemically synthesized
  source 1..20: mol_type = other DNA
agcgtcccagcccctgcaga

SEQ ID NO: 24844 - DNA, 20 bp, synthetic construct
  misc_feature 1..20: note = chemically synthesized
  source 1..20: mol_type = other DNA
gtcccagcccctgcagacag

SEQ ID NO: 24845 - DNA, 20 bp, synthetic construct
  misc_feature 1..20: note = chemically synthesized
  source 1..20: mol_type = other DNA
agcccctgcagacagaagct

SEQ ID NO: 24846 - DNA, 20 bp, synthetic construct
  misc_feature 1..20: note = chemically synthesized
  source 1..20: mol_type = other DNA
ccctgcagacagaagctgag

SEQ ID NO: 24847 - DNA, 20 bp, synthetic construct
  misc_feature 1..20: note = chemically synthesized
  source 1..20: mol_type = other DNA
tggacctcgtttacctgtta

SEQ ID NO: 24848 - DNA, 20 bp, synthetic construct
  misc_feature 1..20: note = chemically synthesized
  source 1..20: mol_type = other DNA
ttatggatgaaactgacctt

SEQ ID NO: 24849 - DNA, 20 bp, synthetic construct
  misc_feature 1..20: note = chemically synthesized
  source 1..20: mol_type = other DNA
tatggatgaaactgaccttg

SEQ ID NO: 24850 - DNA, 20 bp, synthetic construct
  misc_feature 1..20: note = chemically synthesized
  source 1..20: mol_type = other DNA
atggatgaaactgaccttga

SEQ ID NO: 24851 - DNA, 20 bp, synthetic construct
  misc_feature 1..20: note = chemically synthesized
  source 1..20: mol_type = other DNA
tggatgaaactgaccttgag

SEQ ID NO: 24852 - DNA, 20 bp, synthetic construct
  misc_feature 1..20: note = chemically synthesized
  source 1..20: mol_type = other DNA
aactgaccttgaggggacat

SEQ ID NO: 24853 - DNA, 20 bp, synthetic construct
  misc_feature 1..20: note = chemically synthesized
  source 1..20: mol_type = other DNA
actgaccttgaggggacatg

SEQ ID NO: 24854 - DNA, 20 bp, synthetic construct
  misc_feature 1..20: note = chemically synthesized
  source 1..20: mol_type = other DNA
tgaccttgaggggacatgag

SEQ ID NO: 24855 - DNA, 20 bp, synthetic construct
  misc_feature 1..20: note = chemically synthesized
  source 1..20: mol_type = other DNA
accttgaggggacatgagga

SEQ ID NO: 24856 - DNA, 20 bp, synthetic construct
  misc_feature 1..20: note = chemically synthesized
  source 1..20: mol_type = other DNA
cttttgtcatgctcttcaat

SEQ ID NO: 24857 - DNA, 20 bp, synthetic construct
  misc_feature 1..20: note = chemically synthesized
  source 1..20: mol_type = other DNA
ttctgcaatactttcctgaa

SEQ ID NO: 24858 - DNA, 20 bp, synthetic construct
  misc_feature 1..20: note = chemically synthesized
  source 1..20: mol_type = other DNA
caatactttcctgaatagca

SEQ ID NO: 24859 - DNA, 20 bp, synthetic construct
  misc_feature 1..20: note = chemically synthesized
  source 1..20: mol_type = other DNA
tactttcctgaatagcacag

SEQ ID NO: 24860 - DNA, 20 bp, synthetic construct
  misc_feature 1..20: note = chemically synthesized
  source 1..20: mol_type = other DNA
cctgaatagcacagtagtat

SEQ ID NO: 24861 - DNA, 20 bp, synthetic construct
  misc_feature 1..20: note = chemically synthesized
  source 1..20: mol_type = other DNA
tattggaaatctgcctatta

SEQ ID NO: 24862 - DNA, 20 bp, synthetic construct
  misc_feature 1..20: note = chemically synthesized
  source 1..20: mol_type = other DNA
aatctgcctattacagaacc

SEQ ID NO: 24863 - DNA, 20 bp, synthetic construct
  misc_feature 1..20: note = chemically synthesized
  source 1..20: mol_type = other DNA
tgcctattacagaacctgga

SEQ ID NO: 24864 - DNA, 20 bp, synthetic construct
  misc_feature 1..20: note = chemically synthesized
  source 1..20: mol_type = other DNA
cctattacagaacctggatg

SEQ ID NO: 24865 - DNA, 20 bp, synthetic construct
  misc_feature 1..20: note = chemically synthesized
  source 1..20: mol_type = other DNA
tacagaacctggatggagtc

SEQ ID NO: 24866 - DNA, 20 bp, synthetic construct
  misc_feature 1..20: note = chemically synthesized
  source 1..20: mol_type = other DNA
cagaacctggatggagtcca

SEQ ID NO: 24867 - DNA, 20 bp, synthetic construct
  misc_feature 1..20: note = chemically synthesized
  source 1..20: mol_type = other DNA
gaacctggatggagtccaga

SEQ ID NO: 24868 - DNA, 20 bp, synthetic construct
  misc_feature 1..20: note = chemically synthesized
  source 1..20: mol_type = other DNA
aacctggatggagtccagag

SEQ ID NO: 24869 - DNA, 20 bp, synthetic construct
  misc_feature 1..20: note = chemically synthesized
  source 1..20: mol_type = other DNA
ggatggagtccagagaggca

SEQ ID NO: 24870 - DNA, 20 bp, synthetic construct
  misc_feature 1..20: note = chemically synthesized
  source 1..20: mol_type = other DNA
gatggagtccagagaggcac

SEQ ID NO: 24871 - DNA, 20 bp, synthetic construct
  misc_feature 1..20: note = chemically synthesized
  source 1..20: mol_type = other DNA
cagagaggcacgggcatcca

SEQ ID NO: 24872 - DNA, 20 bp, synthetic construct
  misc_feature 1..20: note = chemically synthesized
  source 1..20: mol_type = other DNA
agagaggcacgggcatccat

SEQ ID NO: 24873 - DNA, 20 bp, synthetic construct
  misc_feature 1..20: note = chemically synthesized
  source 1..20: mol_type = other DNA
ggcacgggcatccatgggca

SEQ ID NO: 24874 - DNA, 20 bp, synthetic construct
  misc_feature 1..20: note = chemically synthesized
  source 1..20: mol_type = other DNA
gcacgggcatccatgggcaa

SEQ ID NO: 24875 - DNA, 20 bp, synthetic construct
  misc_feature 1..20: note = chemically synthesized
  source 1..20: mol_type = other DNA
cacgggcatccatgggcaaa

SEQ ID NO: 24876 - DNA, 20 bp, synthetic construct
  misc_feature 1..20: note = chemically synthesized
  source 1..20: mol_type = other DNA
tccatgggcaaagggctcgt

SEQ ID NO: 24877 - DNA, 20 bp, synthetic construct
  misc_feature 1..20: note = chemically synthesized
  source 1..20: mol_type = other DNA
catgggcaaagggctcgtga

SEQ ID NO: 24878 - DNA, 20 bp, synthetic construct
  misc_feature 1..20: note = chemically synthesized
  source 1..20: mol_type = other DNA
tcgtgagagtcaccgccctg

SEQ ID NO: 24879 - DNA, 20 bp, synthetic construct
  misc_feature 1..20: note = chemically synthesized
  source 1..20: mol_type = other DNA
tgcagggcggtgactctcac

SEQ ID NO: 24880 - DNA, 20 bp, synthetic construct
  misc_feature 1..20: note = chemically synthesized
  source 1..20: mol_type = other DNA
tctcacgagccctttgccca

SEQ ID NO: 24881 - DNA, 20 bp, synthetic construct
  misc_feature 1..20: note = chemically synthesized
  source 1..20: mol_type = other DNA
catggatgcccgtgcctctc

SEQ ID NO: 24882 - DNA, 20 bp, synthetic construct
  misc_feature 1..20: note = chemically synthesized
  source 1..20: mol_type = other DNA
gtgcctctctggactccatc

SEQ ID NO: 24883 - DNA, 20 bp, synthetic construct
  misc_feature 1..20: note = chemically synthesized
  source 1..20: mol_type = other DNA
tgcctctctggactccatcc

SEQ ID NO: 24884 - DNA, 20 bp, synthetic construct
  misc_feature 1..20: note = chemically synthesized
  source 1..20: mol_type = other DNA
actccatccaggttctgtaa

SEQ ID NO: 24885 - DNA, 20 bp, synthetic construct
  misc_feature 1..20: note = chemically synthesized
  source 1..20: mol_type = other DNA
ctccatccaggttctgtaat

SEQ ID NO: 24886 - DNA, 20 bp, synthetic construct
  misc_feature 1..20: note = chemically synthesized
  source 1..20: mol_type = other DNA
catccaggttctgtaatagg

SEQ ID NO: 24887 - DNA, 20 bp, synthetic construct
  misc_feature 1..20: note = chemically synthesized
  source 1..20: mol_type = other DNA
tccaatactactgtgctatt

SEQ ID NO: 24888 - DNA, 20 bp, synthetic construct
  misc_feature 1..20: note = chemically synthesized
  source 1..20: mol_type = other DNA
ccaatactactgtgctattc

SEQ ID NO: 24889 - DNA, 20 bp, synthetic construct
  misc_feature 1..20: note = chemically synthesized
  source 1..20: mol_type = other DNA
tactactgtgctattcagga

SEQ ID NO: 24890 - DNA, 20 bp, synthetic construct
  misc_feature 1..20: note = chemically synthesized
  source 1..20: mol_type = other DNA
tgctattcaggaaagtattg

SEQ ID NO: 24891 - DNA, 20 bp, synthetic construct
  misc_feature 1..20: note = chemically synthesized
  source 1..20: mol_type = other DNA
tattcaggaaagtattgcag

SEQ ID NO: 24892 - DNA, 20 bp, synthetic construct
  misc_feature 1..20: note = chemically synthesized
  source 1..20: mol_type = other DNA
gaattaatttgtgccaattg

SEQ ID NO: 24893 - DNA, 20 bp, synthetic construct
  misc_feature 1..20: note = chemically synthesized
  source 1..20: mol_type = other DNA
attaatttgtgccaattgaa

SEQ ID NO: 24894 - DNA, 20 bp, synthetic construct
  misc_feature 1..20: note = chemically synthesized
  source 1..20: mol_type = other DNA
ccaattgaagagcatgacaa

SEQ ID NO: 24895 - DNA, 20 bp, synthetic construct
  misc_feature 1..20: note = chemically synthesized
  source 1..20: mol_type = other DNA
aagagcatgacaaaagtaca

SEQ ID NO: 24896 - DNA, 20 bp, synthetic construct
  misc_feature 1..20: note = chemically synthesized
  source 1..20: mol_type = other DNA
agagcatgacaaaagtacaa

SEQ ID NO: 24897 - DNA, 20 bp, synthetic construct
  misc_feature 1..20: note = chemically synthesized
  source 1..20: mol_type = other DNA
atgacaaaagtacaaaggaa

SEQ ID NO: 24898 - DNA, 20 bp, synthetic construct
  misc_feature 1..20: note = chemically synthesized
  source 1..20: mol_type = other DNA
ggctctcctcatgtcccctc

SEQ ID NO: 24899 - DNA, 20 bp, synthetic construct
  misc_feature 1..20: note = chemically synthesized
  source 1..20: mol_type = other DNA
gctctcctcatgtcccctca

SEQ ID NO: 24900 - DNA, 20 bp, synthetic construct
  misc_feature 1..20: note = chemically synthesized
  source 1..20: mol_type = other DNA
tcctcatgtcccctcaaggt

SEQ ID NO: 24901 - DNA, 20 bp, synthetic construct
  misc_feature 1..20: note = chemically synthesized
  source 1..20: mol_type = other DNA
aaggtcagtttcatccataa

SEQ ID NO: 24902 - DNA, 20 bp, synthetic construct
  misc_feature 1..20: note = chemically synthesized
  source 1..20: mol_type = other DNA
aggtcagtttcatccataac

SEQ ID NO: 24903 - DNA, 20 bp, synthetic construct
  misc_feature 1..20: note = chemically synthesized
  source 1..20: mol_type = other DNA
ttcatccataacaggtaaac

SEQ ID NO: 24904 - DNA, 20 bp, synthetic construct
  misc_feature 1..20: note = chemically synthesized
  source 1..20: mol_type = other DNA
tcatccataacaggtaaacg

SEQ ID NO: 24905 - DNA, 20 bp, synthetic construct
  misc_feature 1..20: note = chemically synthesized
  source 1..20: mol_type = other DNA
acaggtaaacgaggtccact

SEQ ID NO: 24906 - DNA, 20 bp, synthetic construct
  misc_feature 1..20: note = chemically synthesized
  source 1..20: mol_type = other DNA
gtccactcagcttctgtctg

SEQ ID NO: 24907 - DNA, 20 bp, synthetic construct
  misc_feature 1..20: note = chemically synthesized
  source 1..20: mol_type = other DNA
tccactcagcttctgtctgc

SEQ ID NO: 24908 - DNA, 20 bp, synthetic construct
  misc_feature 1..20: note = chemically synthesized
  source 1..20: mol_type = other DNA
ccactcagcttctgtctgca

SEQ ID NO: 24909 - DNA, 20 bp, synthetic construct
  misc_feature 1..20: note = chemically synthesized
  source 1..20: mol_type = other DNA
cactcagcttctgtctgcag

SEQ ID NO: 24910 - DNA, 20 bp, synthetic construct
  misc_feature 1..20: note = chemically synthesized
  source 1..20: mol_type = other DNA
cagcttctgtctgcaggggc

SEQ ID NO: 24911 - DNA, 20 bp, synthetic construct
  misc_feature 1..20: note = chemically synthesized
  source 1..20: mol_type = other DNA
agcttctgtctgcaggggct

SEQ ID NO: 24912 - DNA, 20 bp, synthetic construct
  misc_feature 1..20: note = chemically synthesized
  source 1..20: mol_type = other DNA
caggggctgggacgcttacc

SEQ ID NO: 24913 - DNA, 20 bp, synthetic construct
  misc_feature 1..20: note = chemically synthesized
  source 1..20: mol_type = other DNA
gctgggacgcttacctggtc

SEQ ID NO: 24914 - DNA, 20 bp, synthetic construct
  misc_feature 1..20: note = chemically synthesized
  source 1..20: mol_type = other DNA
gcttacctggtccagtctca

SEQ ID NO: 24915 - DNA, 20 bp, synthetic construct
  misc_feature 1..20: note = chemically synthesized
  source 1..20: mol_type = other DNA
cttacctggtccagtctcac

SEQ ID NO: 24916 - DNA, 20 bp, synthetic construct
  misc_feature 1..20: note = chemically synthesized
  source 1..20: mol_type = other DNA
tggtccagtctcacaggtta

SEQ ID NO: 24917 - DNA, 20 bp, synthetic construct
  misc_feature 1..20: note = chemically synthesized
  source 1..20: mol_type = other DNA
ggtccagtctcacaggttac

SEQ ID NO: 24918 - DNA, 20 bp, synthetic construct
  misc_feature 1..20: note = chemically synthesized
  source 1..20: mol_type = other DNA
gtccagtctcacaggttaca

SEQ ID NO: 24919 - DNA, 20 bp, synthetic construct
  misc_feature 1..20: note = chemically synthesized
  source 1..20: mol_type = other DNA
gttacagggaactgctttat

SEQ ID NO: 24920 - DNA, 20 bp, synthetic construct
  misc_feature 1..20: note = chemically synthesized
  source 1..20: mol_type = other DNA
ttacagggaactgctttatc

SEQ ID NO: 24921 - DNA, 20 bp, synthetic construct
  misc_feature 1..20: note = chemically synthesized
  source 1..20: mol_type = other DNA
tacagggaactgctttatca

SEQ ID NO: 24922 - DNA, 20 bp, synthetic construct
  misc_feature 1..20: note = chemically synthesized
  source 1..20: mol_type = other DNA
acagggaactgctttatcag

SEQ ID NO: 24923 - DNA, 20 bp, synthetic construct
  misc_feature 1..20: note = chemically synthesized
  source 1..20: mol_type = other DNA
gaactgctttatcaggggca

SEQ ID NO: 24924 - DNA, 20 bp, synthetic construct
  misc_feature 1..20: note = chemically synthesized
  source 1..20: mol_type = other DNA
ctgctttatcaggggcacgg

SEQ ID NO: 24925 - DNA, 20 bp, synthetic construct
  misc_feature 1..20: note = chemically synthesized
  source 1..20: mol_type = other DNA
ggggcacggaagtgttgctg

SEQ ID NO: 24926 - DNA, 20 bp, synthetic construct
  misc_feature 1..20: note = chemically synthesized
  source 1..20: mol_type = other DNA
gcacggaagtgttgctgtag

SEQ ID NO: 24927 - DNA, 20 bp, synthetic construct
  misc_feature 1..20: note = chemically synthesized
  source 1..20: mol_type = other DNA
ggaagtgttgctgtagtagt

SEQ ID NO: 24928 - DNA, 20 bp, synthetic construct
  misc_feature 1..20: note = chemically synthesized
  source 1..20: mol_type = other DNA
agtcagtatccaaaacccac

SEQ ID NO: 24929 - DNA, 20 bp, synthetic construct
  misc_feature 1..20: note = chemically synthesized
  source 1..20: mol_type = other DNA
gtatccaaaacccaccagta

SEQ ID NO: 24930 - DNA, 20 bp, synthetic construct
  misc_feature 1..20: note = chemically synthesized
  source 1..20: mol_type = other DNA
accagtatggacgctgtcca

SEQ ID NO: 24931 - DNA, 20 bp, synthetic construct
  misc_feature 1..20: note = chemically synthesized
  source 1..20: mol_type = other DNA
cagtatggacgctgtccaaa

SEQ ID NO: 24932 - DNA, 20 bp, synthetic construct
  misc_feature 1..20: note = chemically synthesized
  source 1..20: mol_type = other DNA
gctgtccaaagagaatccta

SEQ ID NO: 24933 - DNA, 20 bp, synthetic construct
  misc_feature 1..20: note = chemically synthesized
  source 1..20: mol_type = other DNA
aagagaatcctatggaaaaa

SEQ ID NO: 24934 - DNA, 20 bp, synthetic construct
  misc_feature 1..20: note = chemically synthesized
  source 1..20: mol_type = other DNA
atcctatggaaaaacagaac

SEQ ID NO: 24935 - DNA, 20 bp, synthetic construct
  misc_feature 1..20: note = chemically synthesized
  source 1..20: mol_type = other DNA
ggaaaaacagaacaagtttc

SEQ ID NO: 24936 - DNA, 20 bp, synthetic construct
  misc_feature 1..20: note = chemically synthesized
  source 1..20: mol_type = other DNA
gaaaaacagaacaagtttct

SEQ ID NO: 24937 - DNA, 20 bp, synthetic construct
  misc_feature 1..20: note = chemically synthesized
  source 1..20: mol_type = other DNA
aaaaacagaacaagtttctg

SEQ ID NO: 24938 - DNA, 20 bp, synthetic construct
  misc_feature 1..20: note = chemically synthesized
  source 1..20: mol_type = other DNA
tgaatgaatgcttttgccca

SEQ ID NO: 24939 - DNA, 20 bp, synthetic construct
  misc_feature 1..20: note = chemically synthesized
  source 1..20: mol_type = other DNA
tgcccaaagcctacaccttc

SEQ ID NO: 24940 - DNA, 20 bp, synthetic construct
  misc_feature 1..20: note = chemically synthesized
  source 1..20: mol_type = other DNA
ccaaagcctacaccttcaag

SEQ ID NO: 24941 - DNA, 20 bp, synthetic construct
  misc_feature 1..20: note = chemically synthesized
  source 1..20: mol_type = other DNA
aaagcctacaccttcaagaa

SEQ ID NO: 24942 - DNA, 20 bp, synthetic construct
  misc_feature 1..20: note = chemically synthesized
  source 1..20: mol_type = other DNA
ctacaccttcaagaagagtg

SEQ ID NO: 24943 - DNA, 20 bp, synthetic construct
  misc_feature 1..20: note = chemically synthesized
  source 1..20: mol_type = other DNA
cttcaagaagagtgtagcct

SEQ ID NO: 24944 - DNA, 20 bp, synthetic construct
  misc_feature 1..20: note = chemically synthesized
  source 1..20: mol_type = other DNA
caagaagagtgtagcctgag

SEQ ID NO: 24945 - DNA, 20 bp, synthetic construct
  misc_feature 1..20: note = chemically synthesized
  source 1..20: mol_type = other DNA
aagaagagtgtagcctgaga

SEQ ID NO: 24946 - DNA, 20 bp, synthetic construct
  misc_feature 1..20: note = chemically synthesized
  source 1..20: mol_type = other DNA
aggatttcacatgttgcctc

SEQ ID NO: 24947 - DNA, 20 bp, synthetic construct
  misc_feature 1..20: note = chemically synthesized
  source 1..20: mol_type = other DNA
atttcacatgttgcctctag

SEQ ID NO: 24948 - DNA, 20 bp, synthetic construct
  misc_feature 1..20: note = chemically synthesized
  source 1..20: mol_type = other DNA
tttcacatgttgcctctaga

SEQ ID NO: 24949 - DNA, 20 bp, synthetic construct
  misc_feature 1..20: note = chemically synthesized
  source 1..20: mol_type = other DNA
ttcacatgttgcctctagaa

SEQ ID NO: 24950 - DNA, 20 bp, synthetic construct
  misc_feature 1..20: note = chemically synthesized
  source 1..20: mol_type = other DNA
cacatgttgcctctagaagg

SEQ ID NO: 24951 - DNA, 20 bp, synthetic construct
  misc_feature 1..20: note = chemically synthesized
  source 1..20: mol_type = other DNA
ttgcctctagaagggagaac

SEQ ID NO: 24952 - DNA, 20 bp, synthetic construct
  misc_feature 1..20: note = chemically synthesized
  source 1..20: mol_type = other DNA
tgcctctagaagggagaact

SEQ ID NO: 24953 - DNA, 20 bp, synthetic construct
  misc_feature 1..20: note = chemically synthesized
  source 1..20: mol_type = other DNA
ctctagaagggagaactggg

SEQ ID NO: 24954 - DNA, 20 bp, synthetic construct
  misc_feature 1..20: note = chemically synthesized
  source 1..20: mol_type = other DNA
agaagggagaactgggtggc

SEQ ID NO: 24955 - DNA, 20 bp, synthetic construct
  misc_feature 1..20: note = chemically synthesized
  source 1..20: mol_type = other DNA
gaagggagaactgggtggct

SEQ ID NO: 24956 - DNA, 20 bp, synthetic construct
  misc_feature 1..20: note = chemically synthesized
  source 1..20: mol_type = other DNA
aagggagaactgggtggctg

SEQ ID NO: 24957 - DNA, 20 bp, synthetic construct
  misc_feature 1..20: note = chemically synthesized
  source 1..20: mol_type = other DNA
gggagaactgggtggctggg

SEQ ID NO: 24958 - DNA, 20 bp, synthetic construct
  misc_feature 1..20: note = chemically synthesized
  source 1..20: mol_type = other DNA
agaactgggtggctggggag

SEQ ID NO: 24959 - DNA, 20 bp, synthetic construct
  misc_feature 1..20: note = chemically synthesized
  source 1..20: mol_type = other DNA
gggtggctggggagaagtgt

SEQ ID NO: 24960 - DNA, 20 bp, synthetic construct
  misc_feature 1..20: note = chemically synthesized
  source 1..20: mol_type = other DNA
gtggctggggagaagtgtga

SEQ ID NO: 24961 - DNA, 20 bp, synthetic construct
  misc_feature 1..20: note = chemically synthesized
  source 1..20: mol_type = other DNA
tggctggggagaagtgtgag

SEQ ID NO: 24962 - DNA, 20 bp, synthetic construct
  misc_feature 1..20: note = chemically synthesized
  source 1..20: mol_type = other DNA
ggctggggagaagtgtgaga

SEQ ID NO: 24963 - DNA, 20 bp, synthetic construct
  misc_feature 1..20: note = chemically synthesized
  source 1..20: mol_type = other DNA
ctggggagaagtgtgagagg

SEQ ID NO: 24964 - DNA, 20 bp, synthetic construct
  misc_feature 1..20: note = chemically synthesized
  source 1..20: mol_type = other DNA
gtattatctttttttttttt

SEQ ID NO: 24965 - DNA, 20 bp, synthetic construct
  misc_feature 1..20: note = chemically synthesized
  source 1..20: mol_type = other DNA
tatcttttttttttttgaga

SEQ ID NO: 24966 - DNA, 20 bp, synthetic construct
  misc_feature 1..20: note = chemically synthesized
  source 1..20: mol_type = other DNA
atcttttttttttttgagac

SEQ ID NO: 24967 - DNA, 20 bp, synthetic construct
  misc_feature 1..20: note = chemically synthesized
  source 1..20: mol_type = other DNA
tttttttttgagacaggatc

SEQ ID NO: 24968 - DNA, 20 bp, synthetic construct
  misc_feature 1..20: note = chemically synthesized
  source 1..20: mol_type = other DNA
ttttgagacaggatctggct

SEQ ID NO: 24969 - DNA, 20 bp, synthetic construct
  misc_feature 1..20: note = chemically synthesized
  source 1..20: mol_type = other DNA
caggatctggctcagtaacc

SEQ ID NO: 24970 - DNA, 20 bp, synthetic construct
  misc_feature 1..20: note = chemically synthesized
  source 1..20: mol_type = other DNA
tctggctcagtaacccagcc

SEQ ID NO: 24971 - DNA, 20 bp, synthetic construct
  misc_feature 1..20: note = chemically synthesized
  source 1..20: mol_type = other DNA
tggctcagtaacccagcctg

SEQ ID NO: 24972 - DNA, 20 bp, synthetic construct
  misc_feature 1..20: note = chemically synthesized
  source 1..20: mol_type = other DNA
cagtaacccagcctggagtg

SEQ ID NO: 24973 - DNA, 20 bp, synthetic construct
  misc_feature 1..20: note = chemically synthesized
  source 1..20: mol_type = other DNA
taacccagcctggagtgcag

SEQ ID NO: 24974 - DNA, 20 bp, synthetic construct
  misc_feature 1..20: note = chemically synthesized
  source 1..20: mol_type = other DNA
ggagtgcagtggcgcaatct

SEQ ID NO: 24975 - DNA, 20 bp, synthetic construct
  misc_feature 1..20: note = chemically synthesized
  source 1..20: mol_type = other DNA
tcattgtgacctctacctcc

SEQ ID NO: 24976 - DNA, 20 bp, synthetic construct
  misc_feature 1..20: note = chemically synthesized
  source 1..20: mol_type = other DNA
cattgtgacctctacctcct

SEQ ID NO: 24977 - DNA, 20 bp, synthetic construct
  misc_feature 1..20: note = chemically synthesized
  source 1..20: mol_type = other DNA
ctcctgggatcctcccacct

SEQ ID NO: 24978 - DNA, 20 bp, synthetic construct
  misc_feature 1..20: note = chemically synthesized
  source 1..20: mol_type = other DNA
tcccacctcagcctcctgaa

SEQ ID NO: 24979 - DNA, 20 bp, synthetic construct
  misc_feature 1..20: note = chemically synthesized
  source 1..20: mol_type = other DNA
acctcagcctcctgaatagc

SEQ ID NO: 24980 - DNA, 20 bp, synthetic construct
  misc_feature 1..20: note = chemically synthesized
  source 1..20: mol_type = other DNA
cctcagcctcctgaatagct

SEQ ID NO: 24981 - DNA, 20 bp, synthetic construct
  misc_feature 1..20: note = chemically synthesized
  source 1..20: mol_type = other DNA
ctcctgaatagctgggacta

SEQ ID NO: 24982 - DNA, 20 bp, synthetic construct
  misc_feature 1..20: note = chemically synthesized
  source 1..20: mol_type = other DNA
tcctgaatagctgggactac

SEQ ID NO: 24983 - DNA, 20 bp, synthetic construct
  misc_feature 1..20: note = chemically synthesized
  source 1..20: mol_type = other DNA
caggtgtgtgccaccacatc

SEQ ID NO: 24984 - DNA, 20 bp, synthetic construct
  misc_feature 1..20: note = chemically synthesized
  source 1..20: mol_type = other DNA
tgtgtgccaccacatccagc

SEQ ID NO: 24985 - DNA, 20 bp, synthetic construct
  misc_feature 1..20: note = chemically synthesized
  source 1..20: mol_type = other DNA
ccagctagtttttgtatttt

SEQ ID NO: 24986 - DNA, 20 bp, synthetic construct
  misc_feature 1..20: note = chemically synthesized
  source 1..20: mol_type = other DNA
gctagtttttgtatttttag

SEQ ID NO: 24987 - DNA, 20 bp, synthetic construct
  misc_feature 1..20: note = chemically synthesized
  source 1..20: mol_type = other DNA
tagtttttgtatttttagta

SEQ ID NO: 24988 - DNA, 20 bp, synthetic construct
  misc_feature 1..20: note = chemically synthesized
  source 1..20: mol_type = other DNA
ttttgtatttttagtagaga

SEQ ID NO: 24989 - DNA, 20 bp, synthetic construct
  misc_feature 1..20: note = chemically synthesized
  source 1..20: mol_type = other DNA
tttgtatttttagtagagac

SEQ ID NO: 24990 - DNA, 20 bp, synthetic construct
  misc_feature 1..20: note = chemically synthesized
  source 1..20: mol_type = other DNA
ttgtatttttagtagagacg

SEQ ID NO: 24991 - DNA, 20 bp, synthetic construct
  misc_feature 1..20: note = chemically synthesized
  source 1..20: mol_type = other DNA
cggggtttcaccatgttgcc

SEQ ID NO: 24992 - DNA, 20 bp, synthetic construct
  misc_feature 1..20: note = chemically synthesized
  source 1..20: mol_type = other DNA
ggggtttcaccatgttgccc

SEQ ID NO: 24993 - DNA, 20 bp, synthetic construct
  misc_feature 1..20: note = chemically synthesized
  source 1..20: mol_type = other DNA
tttcaccatgttgcccaggc

SEQ ID NO: 24994 - DNA, 20 bp, synthetic construct
  misc_feature 1..20: note = chemically synthesized
  source 1..20: mol_type = other DNA
tggtctccatctcctgaact

SEQ ID NO: 24995 - DNA, 20 bp, synthetic construct
  misc_feature 1..20: note = chemically synthesized
  source 1..20: mol_type = other DNA
ggtctccatctcctgaactc

SEQ ID NO: 24996 - DNA, 20 bp, synthetic construct
  misc_feature 1..20: note = chemically synthesized
  source 1..20: mol_type = other DNA
ctcaggcaatcctcccacct

SEQ ID NO: 24997 - DNA, 20 bp, synthetic construct
  misc_feature 1..20: note = chemically synthesized
  source 1..20: mol_type = other DNA
cctcccacctcagcctccca

SEQ ID NO: 24998 - DNA, 20 bp, synthetic construct
  misc_feature 1..20: note = chemically synthesized
  source 1..20: mol_type = other DNA
acctcagcctcccaaagtgc

SEQ ID NO: 24999 - DNA, 20 bp, synthetic construct
  misc_feature 1..20: note = chemically synthesized
  source 1..20: mol_type = other DNA
cctcagcctcccaaagtgct

SEQ ID NO: 25000 - DNA, 20 bp, synthetic construct
  misc_feature 1..20: note = chemically synthesized
  source 1..20: mol_type = other DNA
ctcccaaagtgctgggatta

SEQ ID NO: 25001 - DNA, 20 bp, synthetic construct
  misc_feature 1..20: note = chemically synthesized
  source 1..20: mol_type = other DNA
tcccaaagtgctgggattac

SEQ ID NO: 25002 - DNA, 20 bp, synthetic construct
  misc_feature 1..20: note = chemically synthesized
  source 1..20: mol_type = other DNA
agtgctgggattacaggcat

SEQ ID NO: 25003 - DNA, 20 bp, synthetic construct
  misc_feature 1..20: note = chemically synthesized
  source 1..20: mol_type = other DNA
ctatttaaacacaaataatg

SEQ ID NO: 25004 - DNA, 20 bp, synthetic construct
  misc_feature 1..20: note = chemically synthesized
  source 1..20: mol_type = other DNA
aaacacaaataatgaagccc

SEQ ID NO: 25005 - DNA, 20 bp, synthetic construct
  misc_feature 1..20: note = chemically synthesized
  source 1..20: mol_type = other DNA
aagcccaagattctgaactc

SEQ ID NO: 25006 - DNA, 20 bp, synthetic construct
  misc_feature 1..20: note = chemically synthesized
  source 1..20: mol_type = other DNA
agcccaagattctgaactcc

SEQ ID NO: 25007 - DNA, 20 bp, synthetic construct
  misc_feature 1..20: note = chemically synthesized
  source 1..20: mol_type = other DNA
ccaagattctgaactccagg

SEQ ID NO: 25008 - DNA, 20 bp, synthetic construct
  misc_feature 1..20: note = chemically synthesized
  source 1..20: mol_type = other DNA
caagattctgaactccaggc

SEQ ID NO: 25009 - DNA, 20 bp, synthetic construct
  misc_feature 1..20: note = chemically synthesized
  source 1..20: mol_type = other DNA
ttctgaactccaggcaggcg

SEQ ID NO: 25010 - DNA, 20 bp, synthetic construct
  misc_feature 1..20: note = chemically synthesized
  source 1..20: mol_type = other DNA
tgaactccaggcaggcgcgg

SEQ ID NO: 25011 - DNA, 20 bp, synthetic construct
  misc_feature 1..20: note = chemically synthesized
  source 1..20: mol_type = other DNA
gtggctcacacctgtaatct

SEQ ID NO: 25012 - DNA, 20 bp, synthetic construct
  misc_feature 1..20: note = chemically synthesized
  source 1..20: mol_type = other DNA
cacctgtaatctcagcactt

SEQ ID NO: 25013 - DNA, 20 bp, synthetic construct
  misc_feature 1..20: note = chemically synthesized
  source 1..20: mol_type = other DNA
acctgtaatctcagcacttt

SEQ ID NO: 25014 - DNA, 20 bp, synthetic construct
  misc_feature 1..20: note = chemically synthesized
  source 1..20: mol_type = other DNA
ctgtaatctcagcactttgg

SEQ ID NO: 25015 - DNA, 20 bp, synthetic construct
  misc_feature 1..20: note = chemically synthesized
  source 1..20: mol_type = other DNA
tgtaatctcagcactttggg

SEQ ID NO: 25016 - DNA, 20 bp, synthetic construct
  misc_feature 1..20: note = chemically synthesized
  source 1..20: mol_type = other DNA
tctcagcactttgggaggcc

SEQ ID NO: 25017 - DNA, 20 bp, synthetic construct
  misc_feature 1..20: note = chemically synthesized
  source 1..20: mol_type = other DNA
ctcagcactttgggaggcca

SEQ ID NO: 25018 - DNA, 20 bp, synthetic construct
  misc_feature 1..20: note = chemically synthesized
  source 1..20: mol_type = other DNA
agcactttgggaggccaagg

SEQ ID NO: 25019 - DNA, 20 bp, synthetic construct
  misc_feature 1..20: note = chemically synthesized
  source 1..20: mol_type = other DNA
gcactttgggaggccaaggc

SEQ ID NO: 25020 - DNA, 20 bp, synthetic construct
  misc_feature 1..20: note = chemically synthesized
  source 1..20: mol_type = other DNA
ctttgggaggccaaggcagg

SEQ ID NO: 25021 - DNA, 20 bp, synthetic construct
  misc_feature 1..20: note = chemically synthesized
  source 1..20: mol_type = other DNA
ccaaggcaggcagatcacat

SEQ ID NO: 25022 - DNA, 20 bp, synthetic construct
  misc_feature 1..20: note = chemically synthesized
  source 1..20: mol_type = other DNA
caaggcaggcagatcacatg

SEQ ID NO: 25023 - DNA, 20 bp, synthetic construct
  misc_feature 1..20: note = chemically synthesized
  source 1..20: mol_type = other DNA
gcaggcagatcacatgaggt

SEQ ID NO: 25024 - DNA, 20 bp, synthetic construct
  misc_feature 1..20: note = chemically synthesized
  source 1..20: mol_type = other DNA
caggcagatcacatgaggtc

SEQ ID NO: 25025 - DNA, 20 bp, synthetic construct
  misc_feature 1..20: note = chemically synthesized
  source 1..20: mol_type = other DNA
ggcagatcacatgaggtcag

SEQ ID NO: 25026 - DNA, 20 bp, synthetic construct
  misc_feature 1..20: note = chemically synthesized
  source 1..20: mol_type = other DNA
tcacatgaggtcaggagttt

SEQ ID NO: 25027 - DNA, 20 bp, synthetic construct
  misc_feature 1..20: note = chemically synthesized
  source 1..20: mol_type = other DNA
tgaggtcaggagtttgagac

SEQ ID NO: 25028 - DNA, 20 bp, synthetic construct
  misc_feature 1..20: note = chemically synthesized
  source 1..20: mol_type = other DNA
tcaggagtttgagaccagcc

SEQ ID NO: 25029 - DNA, 20 bp, synthetic construct
  misc_feature 1..20: note = chemically synthesized
  source 1..20: mol_type = other DNA
tgagaccagcctggccaaca

SEQ ID NO: 25030 - DNA, 20 bp, synthetic construct
  misc_feature 1..20: note = chemically synthesized
  source 1..20: mol_type = other DNA
cgtttctaccaaaaaatata

SEQ ID NO: 25031 - DNA, 20 bp, synthetic construct
  misc_feature 1..20: note = chemically synthesized
  source 1..20: mol_type = other DNA
taccaaaaaatataaagaat

SEQ ID NO: 25032 - DNA, 20 bp, synthetic construct
  misc_feature 1..20: note = chemically synthesized
  source 1..20: mol_type = other DNA
aaaaaatataaagaattagc

SEQ ID NO: 25033 - DNA, 20 bp, synthetic construct
  misc_feature 1..20: note = chemically synthesized
  source 1..20: mol_type = other DNA
tataaagaattagccagatg

SEQ ID NO: 25034 - DNA, 20 bp, synthetic construct
  misc_feature 1..20: note = chemically synthesized
  source 1..20: mol_type = other DNA
aaagaattagccagatgtgg

SEQ ID NO: 25035 - DNA, 20 bp, synthetic construct
  misc_feature 1..20: note = chemically synthesized
  source 1..20: mol_type = other DNA
gtggtgcgtgactgtaatcc

SEQ ID NO: 25036 - DNA, 20 bp, synthetic construct
  misc_feature 1..20: note = chemically synthesized
  source 1..20: mol_type = other DNA
tgactgtaatcccagctact

SEQ ID NO: 25037 - DNA, 20 bp, synthetic construct
  misc_feature 1..20: note = chemically synthesized
  source 1..20: mol_type = other DNA
gactgtaatcccagctactc

SEQ ID NO: 25038 - DNA, 20 bp, synthetic construct
  misc_feature 1..20: note = chemically synthesized
  source 1..20: mol_type = other DNA
ctgtaatcccagctactcgg

SEQ ID NO: 25039 - DNA, 20 bp, synthetic construct
  misc_feature 1..20: note = chemically synthesized
  source 1..20: mol_type = other DNA
tgtaatcccagctactcggg

SEQ ID NO: 25040 - DNA, 20 bp, synthetic construct
  misc_feature 1..20: note = chemically synthesized
  source 1..20: mol_type = other DNA
tcccagctactcgggaggct

SEQ ID NO: 25041 - DNA, 20 bp, synthetic construct
  misc_feature 1..20: note = chemically synthesized
  source 1..20: mol_type = other DNA
cccagctactcgggaggcta

SEQ ID NO: 25042 - DNA, 20 bp, synthetic construct
  misc_feature 1..20: note = chemically synthesized
  source 1..20: mol_type = other DNA
gctactcgggaggctaaggc

SEQ ID NO: 25043 - DNA, 20 bp, synthetic construct
  misc_feature 1..20: note = chemically synthesized
  source 1..20: mol_type = other DNA
tactcgggaggctaaggcaa

SEQ ID NO: 25044 - DNA, 20 bp, synthetic construct
  misc_feature 1..20: note = chemically synthesized
  source 1..20: mol_type = other DNA
gcaagagaatcgcttgaacc

SEQ ID NO: 25045 - DNA, 20 bp, synthetic construct
  misc_feature 1..20: note = chemically synthesized
  source 1..20: mol_type = other DNA
caagagaatcgcttgaacct

SEQ ID NO: 25046 - DNA, 20 bp, synthetic construct
  misc_feature 1..20: note = chemically synthesized
  source 1..20: mol_type = other DNA
agagaatcgcttgaacctgg

SEQ ID NO: 25047 - DNA, 20 bp, synthetic construct
  misc_feature 1..20: note = chemically synthesized
  source 1..20: mol_type = other DNA
gagaatcgcttgaacctggg

SEQ ID NO: 25048 - DNA, 20 bp, synthetic construct
  misc_feature 1..20: note = chemically synthesized
  source 1..20: mol_type = other DNA
aatcgcttgaacctgggagg

SEQ ID NO: 25049 - DNA, 20 bp, synthetic construct
  misc_feature 1..20: note = chemically synthesized
  source 1..20: mol_type = other DNA
tcgcttgaacctgggaggcg

SEQ ID NO: 25050 - DNA, 20 bp, synthetic construct
  misc_feature 1..20: note = chemically synthesized
  source 1..20: mol_type = other DNA
cgcttgaacctgggaggcgg

SEQ ID NO: 25051 - DNA, 20 bp, synthetic construct
  misc_feature 1..20: note = chemically synthesized
  source 1..20: mol_type = other DNA
tgggaggcggaggttgccgt

SEQ ID NO: 25052 - DNA, 20 bp, synthetic construct
  misc_feature 1..20: note = chemically synthesized
  source 1..20: mol_type = other DNA
ggcggaggttgccgtgagcc

SEQ ID NO: 25053 - DNA, 20 bp, synthetic construct
  misc_feature 1..20: note = chemically synthesized
  source 1..20: mol_type = other DNA
gagattatgccactgcacta

SEQ ID NO: 25054 - DNA, 20 bp, synthetic construct
  misc_feature 1..20: note = chemically synthesized
  source 1..20: mol_type = other DNA
agattatgccactgcactac

SEQ ID NO: 25055 - DNA, 20 bp, synthetic construct
  misc_feature 1..20: note = chemically synthesized
  source 1..20: mol_type = other DNA
tatgccactgcactacaggc

SEQ ID NO: 25056 - DNA, 20 bp, synthetic construct
  misc_feature 1..20: note = chemically synthesized
  source 1..20: mol_type = other DNA
atgccactgcactacaggct

SEQ ID NO: 25057 - DNA, 20 bp, synthetic construct
  misc_feature 1..20: note = chemically synthesized
  source 1..20: mol_type = other DNA
ctgcactacaggctgggtga

SEQ ID NO: 25058 - DNA, 20 bp, synthetic construct
  misc_feature 1..20: note = chemically synthesized
  source 1..20: mol_type = other DNA
gcactacaggctgggtgaca

SEQ ID NO: 25059 - DNA, 20 bp, synthetic construct
  misc_feature 1..20: note = chemically synthesized
  source 1..20: mol_type = other DNA
tacaggctgggtgacagagc

SEQ ID NO: 25060 - DNA, 20 bp, synthetic construct
  misc_feature 1..20: note = chemically synthesized
  source 1..20: mol_type = other DNA
aaatcctgaaatccataaaa

SEQ ID NO: 25061 - DNA, 20 bp, synthetic construct
  misc_feature 1..20: note = chemically synthesized
  source 1..20: mol_type = other DNA
tcctgaaatccataaaatgg

SEQ ID NO: 25062 - DNA, 20 bp, synthetic construct
  misc_feature 1..20: note = chemically synthesized
  source 1..20: mol_type = other DNA
gactttttttttttaacctc

SEQ ID NO: 25063 - DNA, 20 bp, synthetic construct
  misc_feature 1..20: note = chemically synthesized
  source 1..20: mol_type = other DNA
tttttttttttaacctcaag

SEQ ID NO: 25064 - DNA, 20 bp, synthetic construct
  misc_feature 1..20: note = chemically synthesized
  source 1..20: mol_type = other DNA
acctcaagaagtatttgtcc

SEQ ID NO: 25065 - DNA, 20 bp, synthetic construct
  misc_feature 1..20: note = chemically synthesized
  source 1..20: mol_type = other DNA
tcaagaagtatttgtcctgg

SEQ ID NO: 25066 - DNA, 20 bp, synthetic construct
  misc_feature 1..20: note = chemically synthesized
  source 1..20: mol_type = other DNA
ttgtcctggaagaatgcata

SEQ ID NO: 25067 - DNA, 20 bp, synthetic construct
  misc_feature 1..20: note = chemically synthesized
  source 1..20: mol_type = other DNA
gaagaatgcatatggaacta

SEQ ID NO: 25068 - DNA, 20 bp, synthetic construct
  misc_feature 1..20: note = chemically synthesized
  source 1..20: mol_type = other DNA
tggaactacagtttgaaact

SEQ ID NO: 25069 - DNA, 20 bp, synthetic construct
  misc_feature 1..20: note = chemically synthesized
  source 1..20: mol_type = other DNA
acttggacttgcatatacca

SEQ ID NO: 25070 - DNA, 20 bp, synthetic construct
  misc_feature 1..20: note = chemically synthesized
  source 1..20: mol_type = other DNA
cttggacttgcatataccat

SEQ ID NO: 25071 - DNA, 20 bp, synthetic construct
  misc_feature 1..20: note = chemically synthesized
  source 1..20: mol_type = other DNA
gcatataccatgggttccct

SEQ ID NO: 25072 - DNA, 20 bp, synthetic construct
  misc_feature 1..20: note = chemically synthesized
  source 1..20: mol_type = other DNA
catataccatgggttccctc

SEQ ID NO: 25073 - DNA, 20 bp, synthetic construct
  misc_feature 1..20: note = chemically synthesized
  source 1..20: mol_type = other DNA
ccatgggttccctcaggcct

SEQ ID NO: 25074 - DNA, 20 bp, synthetic construct
  misc_feature 1..20: note = chemically synthesized
  source 1..20: mol_type = other DNA
catgggttccctcaggcctc

SEQ ID NO: 25075 - DNA, 20 bp, synthetic construct
  misc_feature 1..20: note = chemically synthesized
  source 1..20: mol_type = other DNA
atgggttccctcaggcctca

SEQ ID NO: 25076 - DNA, 20 bp, synthetic construct
  misc_feature 1..20: note = chemically synthesized
  source 1..20: mol_type = other DNA
tcttgcatttcctctgacat

SEQ ID NO: 25077 - DNA, 20 bp, synthetic construct
  misc_feature 1..20: note = chemically synthesized
  source 1..20: mol_type = other DNA
ttgcatttcctctgacatca

SEQ ID NO: 25078 - DNA, 20 bp, synthetic construct
  misc_feature 1..20: note = chemically synthesized
  source 1..20: mol_type = other DNA
tgacatcagagaatgcactc

SEQ ID NO: 25079 - DNA, 20 bp, synthetic construct
  misc_feature 1..20: note = chemically synthesized
  source 1..20: mol_type = other DNA
agagaatgcactccagcccc

SEQ ID NO: 25080 - DNA, 20 bp, synthetic construct
  misc_feature 1..20: note = chemically synthesized
  source 1..20: mol_type = other DNA
gagaatgcactccagcccct

SEQ ID NO: 25081 - DNA, 20 bp, synthetic construct
  misc_feature 1..20: note = chemically synthesized
  source 1..20: mol_type = other DNA
tgcactccagcccctaggac

SEQ ID NO: 25082 - DNA, 20 bp, synthetic construct
  misc_feature 1..20: note = chemically synthesized
  source 1..20: mol_type = other DNA
cccctaggacgagccccccc

SEQ ID NO: 25083 - DNA, 20 bp, synthetic construct
  misc_feature 1..20: note = chemically synthesized
  source 1..20: mol_type = other DNA
ccctaggacgagcccccccc

SEQ ID NO: 25084 - DNA, 20 bp, synthetic construct
  misc_feature 1..20: note = chemically synthesized
  source 1..20: mol_type = other DNA
cctaggacgagcccccccca

SEQ ID NO: 25085 - DNA, 20 bp, synthetic construct
  misc_feature 1..20: note = chemically synthesized
  source 1..20: mol_type = other DNA
gagccccccccagggaaaca

SEQ ID NO: 25086 - DNA, 20 bp, synthetic construct
  misc_feature 1..20: note = chemically synthesized
  source 1..20: mol_type = other DNA
aacatggcctgcatttccat

SEQ ID NO: 25087 - DNA, 20 bp, synthetic construct
  misc_feature 1..20: note = chemically synthesized
  source 1..20: mol_type = other DNA
ccatcagaattgctctctgt

SEQ ID NO: 25088 - DNA, 20 bp, synthetic construct
  misc_feature 1..20: note = chemically synthesized
  source 1..20: mol_type = other DNA
catcagaattgctctctgta

SEQ ID NO: 25089 - DNA, 20 bp, synthetic construct
  misc_feature 1..20: note = chemically synthesized
  source 1..20: mol_type = other DNA
gctctctgtaaggatgtata

SEQ ID NO: 25090 - DNA, 20 bp, synthetic construct
  misc_feature 1..20: note = chemically synthesized
  source 1..20: mol_type = other DNA
tgtaaggatgtatatagctt

SEQ ID NO: 25091 - DNA, 20 bp, synthetic construct
  misc_feature 1..20: note = chemically synthesized
  source 1..20: mol_type = other DNA
gtatcctctctactttgaaa

SEQ ID NO: 25092 - DNA, 20 bp, synthetic construct
  misc_feature 1..20: note = chemically synthesized
  source 1..20: mol_type = other DNA
atcctctctactttgaaaca

SEQ ID NO: 25093 - DNA, 20 bp, synthetic construct
  misc_feature 1..20: note = chemically synthesized
  source 1..20: mol_type = other DNA
tactttgaaacagagtatct

SEQ ID NO: 25094 - DNA, 20 bp, synthetic construct
  misc_feature 1..20: note = chemically synthesized
  source 1..20: mol_type = other DNA
acaaaccacttcccctttaa

SEQ ID NO: 25095 - DNA, 20 bp, synthetic construct
  misc_feature 1..20: note = chemically synthesized
  source 1..20: mol_type = other DNA
cacttcccctttaaaagtac

SEQ ID NO: 25096 - DNA, 20 bp, synthetic construct
  misc_feature 1..20: note = chemically synthesized
  source 1..20: mol_type = other DNA
actagatatatctttcactg

SEQ ID NO: 25097 - DNA, 20 bp, synthetic construct
  misc_feature 1..20: note = chemically synthesized
  source 1..20: mol_type = other DNA
tatatctttcactgtggaaa

SEQ ID NO: 25098 - DNA, 20 bp, synthetic construct
  misc_feature 1..20: note = chemically synthesized
  source 1..20: mol_type = other DNA
atatctttcactgtggaaat

SEQ ID NO: 25099 - DNA, 20 bp, synthetic construct
  misc_feature 1..20: note = chemically synthesized
  source 1..20: mol_type = other DNA
tggaaataggtgtcaaccgc

SEQ ID NO: 25100 - DNA, 20 bp, synthetic construct
  misc_feature 1..20: note = chemically synthesized
  source 1..20: mol_type = other DNA
aataggtgtcaaccgccagt

SEQ ID NO: 25101 - DNA, 20 bp, synthetic construct
  misc_feature 1..20: note = chemically synthesized
  source 1..20: mol_type = other DNA
ataggtgtcaaccgccagtc

SEQ ID NO: 25102 - DNA, 20 bp, synthetic construct
  misc_feature 1..20: note = chemically synthesized
  source 1..20: mol_type = other DNA
ggatgccttttatcccgtga

SEQ ID NO: 25103 - DNA, 20 bp, synthetic construct
  misc_feature 1..20: note = chemically synthesized
  source 1..20: mol_type = other DNA
tgccttttatcccgtgatgg

SEQ ID NO: 25104 - DNA, 20 bp, synthetic construct
  misc_feature 1..20: note = chemically synthesized
  source 1..20: mol_type = other DNA
tttatcccgtgatggtggaa

SEQ ID NO: 25105 - DNA, 20 bp, synthetic construct
  misc_feature 1..20: note = chemically synthesized
  source 1..20: mol_type = other DNA
tagtgatttctcaccgaaat

SEQ ID NO: 25106 - DNA, 20 bp, synthetic construct
  misc_feature 1..20: note = chemically synthesized
  source 1..20: mol_type = other DNA
agtgatttctcaccgaaatc

SEQ ID NO: 25107 - DNA, 20 bp, synthetic construct
  misc_feature 1..20: note = chemically synthesized
  source 1..20: mol_type = other DNA
gtgatttctcaccgaaatca

SEQ ID NO: 25108 - DNA, 20 bp, synthetic construct
  misc_feature 1..20: note = chemically synthesized
  source 1..20: mol_type = other DNA
gatttctcaccgaaatcagg

SEQ ID NO: 25109 - DNA, 20 bp, synthetic construct
  misc_feature 1..20: note = chemically synthesized
  source 1..20: mol_type = other DNA
tttctcaccgaaatcaggga

SEQ ID NO: 25110 - DNA, 20 bp, synthetic construct
  misc_feature 1..20: note = chemically synthesized
  source 1..20: mol_type = other DNA
tcagggagagccactaactc

SEQ ID NO: 25111 - DNA, 20 bp, synthetic construct
  misc_feature 1..20: note = chemically synthesized
  source 1..20: mol_type = other DNA
aactctggcctctatcaacc

SEQ ID NO: 25112 - DNA, 20 bp, synthetic construct
  misc_feature 1..20: note = chemically synthesized
  source 1..20: mol_type = other DNA
ctctggcctctatcaaccca

SEQ ID NO: 25113 - DNA, 20 bp, synthetic construct
  misc_feature 1..20: note = chemically synthesized
  source 1..20: mol_type = other DNA
ctggcctctatcaacccaga

SEQ ID NO: 25114 - DNA, 20 bp, synthetic construct
  misc_feature 1..20: note = chemically synthesized
  source 1..20: mol_type = other DNA
atcaacccagagagattgca

SEQ ID NO: 25115 - DNA, 20 bp, synthetic construct
  misc_feature 1..20: note = chemically synthesized
  source 1..20: mol_type = other DNA
gagattgcatggttcttcaa

SEQ ID NO: 25116 - DNA, 20 bp, synthetic construct
  misc_feature 1..20: note = chemically synthesized
  source 1..20: mol_type = other DNA
gattgcatggttcttcaatg

SEQ ID NO: 25117 - DNA, 20 bp, synthetic construct
  misc_feature 1..20: note = chemically synthesized
  source 1..20: mol_type = other DNA
catggttcttcaatggagat

SEQ ID NO: 25118 - DNA, 20 bp, synthetic construct
  misc_feature 1..20: note = chemically synthesized
  source 1..20: mol_type = other DNA
ttcaatggagatcagatgtt

SEQ ID NO: 25119 - DNA, 20 bp, synthetic construct
  misc_feature 1..20: note = chemically synthesized
  source 1..20: mol_type = other DNA
cacttcatctttttattttt

SEQ ID NO: 25120 - DNA, 20 bp, synthetic construct
  misc_feature 1..20: note = chemically synthesized
  source 1..20: mol_type = other DNA
ttttattttttagaatcatg

SEQ ID NO: 25121 - DNA, 20 bp, synthetic construct
  misc_feature 1..20: note = chemically synthesized
  source 1..20: mol_type = other DNA
attttttagaatcatgcggc

SEQ ID NO: 25122 - DNA, 20 bp, synthetic construct
  misc_feature 1..20: note = chemically synthesized
  source 1..20: mol_type = other DNA
ttttttagaatcatgcggct

SEQ ID NO: 25123 - DNA, 20 bp, synthetic construct
  misc_feature 1..20: note = chemically synthesized
  source 1..20: mol_type = other DNA
tagaatcatgcggctgggtg

SEQ ID NO: 25124 - DNA, 20 bp, synthetic construct
  misc_feature 1..20: note = chemically synthesized
  source 1..20: mol_type = other DNA
aatcatgcggctgggtgtag

SEQ ID NO: 25125 - DNA, 20 bp, synthetic construct
  misc_feature 1..20: note = chemically synthesized
  source 1..20: mol_type = other DNA
gtggctcacgcctgtaatcc

SEQ ID NO: 25126 - DNA, 20 bp, synthetic construct
  misc_feature 1..20: note = chemically synthesized
  source 1..20: mol_type = other DNA
acgcctgtaatcctagcact

SEQ ID NO: 25127 - DNA, 20 bp, synthetic construct
  misc_feature 1..20: note = chemically synthesized
  source 1..20: mol_type = other DNA
cgcctgtaatcctagcactt

SEQ ID NO: 25128 - DNA, 20 bp, synthetic construct
  misc_feature 1..20: note = chemically synthesized
  source 1..20: mol_type = other DNA
gcctgtaatcctagcactta

SEQ ID NO: 25129 - DNA, 20 bp, synthetic construct
  misc_feature 1..20: note = chemically synthesized
  source 1..20: mol_type = other DNA
ctgtaatcctagcacttagg

SEQ ID NO: 25130 - DNA, 20 bp, synthetic construct
  misc_feature 1..20: note = chemically synthesized
  source 1..20: mol_type = other DNA
tgtaatcctagcacttaggg

SEQ ID NO: 25131 - DNA, 20 bp, synthetic construct
  misc_feature 1..20: note = chemically synthesized
  source 1..20: mol_type = other DNA
tcctagcacttagggaggcc

SEQ ID NO: 25132 - DNA, 20 bp, synthetic construct
  misc_feature 1..20: note = chemically synthesized
  source 1..20: mol_type = other DNA
cctagcacttagggaggcca

SEQ ID NO: 25133 - DNA, 20 bp, synthetic construct
  misc_feature 1..20: note = chemically synthesized
  source 1..20: mol_type = other DNA
agcacttagggaggccaagg

SEQ ID NO: 25134 - DNA, 20 bp, synthetic construct
  misc_feature 1..20: note = chemically synthesized
  source 1..20: mol_type = other DNA
gcacttagggaggccaaggc

SEQ ID NO: 25135 - DNA, 20 bp, synthetic construct
  misc_feature 1..20: note = chemically synthesized
  source 1..20: mol_type = other DNA
cttagggaggccaaggcagg

SEQ ID NO: 25136 - DNA, 20 bp, synthetic construct
  misc_feature 1..20: note = chemically synthesized
  source 1..20: mol_type = other DNA
ggccaaggcaggcagatcat

SEQ ID NO: 25137 - DNA, 20 bp, synthetic construct
  misc_feature 1..20: note = chemically synthesized
  source 1..20: mol_type = other DNA
gccaaggcaggcagatcatg

SEQ ID NO: 25138 - DNA, 20 bp, synthetic construct
  misc_feature 1..20: note = chemically synthesized
  source 1..20: mol_type = other DNA
aggcaggcagatcatgaggt

SEQ ID NO: 25139 - DNA, 20 bp, synthetic construct
  misc_feature 1..20: note = chemically synthesized
  source 1..20: mol_type = other DNA
ggcaggcagatcatgaggtc

SEQ ID NO: 25140 - DNA, 20 bp, synthetic construct
  misc_feature 1..20: note = chemically synthesized
  source 1..20: mol_type = other DNA
caggcagatcatgaggtcag

SEQ ID NO: 25141 - DNA, 20 bp, synthetic construct
  misc_feature 1..20: note = chemically synthesized
  source 1..20: mol_type = other DNA
gatcatgaggtcaggagttc

SEQ ID NO: 25142 - DNA, 20 bp, synthetic construct
  misc_feature 1..20: note = chemically synthesized
  source 1..20: mol_type = other DNA
tgaggtcaggagttcgagac

SEQ ID NO: 25143 - DNA, 20 bp, synthetic construct
  misc_feature 1..20: note = chemically synthesized
  source 1..20: mol_type = other DNA
tcaggagttcgagaccagcc

SEQ ID NO: 25144 - DNA, 20 bp, synthetic construct
  misc_feature 1..20: note = chemically synthesized
  source 1..20: mol_type = other DNA
cgagaccagcctagtcaaca

SEQ ID NO: 25145 - DNA, 20 bp, synthetic construct
  misc_feature 1..20: note = chemically synthesized
  source 1..20: mol_type = other DNA
actaaaaatacaaaaaaaat

SEQ ID NO: 25146 - DNA, 20 bp, synthetic construct
  misc_feature 1..20: note = chemically synthesized
  source 1..20: mol_type = other DNA
aaaatacaaaaaaaattagc

SEQ ID NO: 25147 - DNA, 20 bp, synthetic construct
  misc_feature 1..20: note = chemically synthesized
  source 1..20: mol_type = other DNA
aaatacaaaaaaaattagct

SEQ ID NO: 25148 - DNA, 20 bp, synthetic construct
  misc_feature 1..20: note = chemically synthesized
  source 1..20: mol_type = other DNA
caaaaaaaattagctgggca

SEQ ID NO: 25149 - DNA, 20 bp, synthetic construct
  misc_feature 1..20: note = chemically synthesized
  source 1..20: mol_type = other DNA
aaaaaattagctgggcatgg

SEQ ID NO: 25150 - DNA, 20 bp, synthetic construct
  misc_feature 1..20: note = chemically synthesized
  source 1..20: mol_type = other DNA
aaattagctgggcatggtgg

SEQ ID NO: 25151 - DNA, 20 bp, synthetic construct
  misc_feature 1..20: note = chemically synthesized
  source 1..20: mol_type = other DNA
aattagctgggcatggtggc

SEQ ID NO: 25152 - DNA, 20 bp, synthetic construct
  misc_feature 1..20: note = chemically synthesized
  source 1..20: mol_type = other DNA
gtggcgggcacctgtaatcc

SEQ ID NO: 25153 - DNA, 20 bp, synthetic construct
  misc_feature 1..20: note = chemically synthesized
  source 1..20: mol_type = other DNA
cacctgtaatcccagctact

SEQ ID NO: 25154 - DNA, 20 bp, synthetic construct
  misc_feature 1..20: note = chemically synthesized
  source 1..20: mol_type = other DNA
acctgtaatcccagctactt

SEQ ID NO: 25155 - DNA, 20 bp, synthetic construct
  misc_feature 1..20: note = chemically synthesized
  source 1..20: mol_type = other DNA
ctgtaatcccagctacttgg

SEQ ID NO: 25156 - DNA, 20 bp, synthetic construct
  misc_feature 1..20: note = chemically synthesized
  source 1..20: mol_type = other DNA
tgtaatcccagctacttggg

SEQ ID NO: 25157 - DNA, 20 bp, synthetic construct
  misc_feature 1..20: note = chemically synthesized
  source 1..20: mol_type = other DNA
tcccagctacttgggaggct

SEQ ID NO: 25158 - DNA, 20 bp, synthetic construct
  misc_feature 1..20: note = chemically synthesized
  source 1..20: mol_type = other DNA
cccagctacttgggaggctg

SEQ ID NO: 25159 - DNA, 20 bp, synthetic construct
  misc_feature 1..20: note = chemically synthesized
  source 1..20: mol_type = other DNA
agctacttgggaggctgagg

SEQ ID NO: 25160 - DNA, 20 bp, synthetic construct
  misc_feature 1..20: note = chemically synthesized
  source 1..20: mol_type = other DNA
gctacttgggaggctgaggc

SEQ ID NO: 25161 - DNA, 20 bp, synthetic construct
  misc_feature 1..20: note = chemically synthesized
  source 1..20: mol_type = other DNA
tacttgggaggctgaggcag

SEQ ID NO: 25162 - DNA, 20 bp, synthetic construct
  misc_feature 1..20: note = chemically synthesized
  source 1..20: mol_type = other DNA
ggcaggagaatcacttgaac

SEQ ID NO: 25163 - DNA, 20 bp, synthetic construct
  misc_feature 1..20: note = chemically synthesized
  source 1..20: mol_type = other DNA
caggagaatcacttgaaccg

SEQ ID NO: 25164 - DNA, 20 bp, synthetic construct
  misc_feature 1..20: note = chemically synthesized
  source 1..20: mol_type = other DNA
ggagaatcacttgaaccgga

SEQ ID NO: 25165 - DNA, 20 bp, synthetic construct
  misc_feature 1..20: note = chemically synthesized
  source 1..20: mol_type = other DNA
gagaatcacttgaaccggag

SEQ ID NO: 25166 - DNA, 20 bp, synthetic construct
  misc_feature 1..20: note = chemically synthesized
  source 1..20: mol_type = other DNA
aatcacttgaaccggagagg

SEQ ID NO: 25167 - DNA, 20 bp, synthetic construct
  misc_feature 1..20: note = chemically synthesized
  source 1..20: mol_type = other DNA
tcacttgaaccggagaggca

SEQ ID NO: 25168 - DNA, 20 bp, synthetic construct
  misc_feature 1..20: note = chemically synthesized
  source 1..20: mol_type = other DNA
cacttgaaccggagaggcag

SEQ ID NO: 25169 - DNA, 20 bp, synthetic construct
  misc_feature 1..20: note = chemically synthesized
  source 1..20: mol_type = other DNA
aaccggagaggcagaggttg

SEQ ID NO: 25170 - DNA, 20 bp, synthetic construct
  misc_feature 1..20: note = chemically synthesized
  source 1..20: mol_type = other DNA
ggagaggcagaggttgcagt

SEQ ID NO: 25171 - DNA, 20 bp, synthetic construct
  misc_feature 1..20: note = chemically synthesized
  source 1..20: mol_type = other DNA
ggcagaggttgcagtgagct

SEQ ID NO: 25172 - DNA, 20 bp, synthetic construct
  misc_feature 1..20: note = chemically synthesized
  source 1..20: mol_type = other DNA
gagattgcaccattgcactc

SEQ ID NO: 25173 - DNA, 20 bp, synthetic construct
  misc_feature 1..20: note = chemically synthesized
  source 1..20: mol_type = other DNA
ttgcaccattgcactccagc

SEQ ID NO: 25174 - DNA, 20 bp, synthetic construct
  misc_feature 1..20: note = chemically synthesized
  source 1..20: mol_type = other DNA
tgcaccattgcactccagcc

SEQ ID NO: 25175 - DNA, 20 bp, synthetic construct
  misc_feature 1..20: note = chemically synthesized
  source 1..20: mol_type = other DNA
attgcactccagccaggcaa

SEQ ID NO: 25176 - DNA, 20 bp, synthetic construct
  misc_feature 1..20: note = chemically synthesized
  source 1..20: mol_type = other DNA
ctccagccaggcaacagtgc

SEQ ID NO: 25177 - DNA, 20 bp, synthetic construct
  misc_feature 1..20: note = chemically synthesized
  source 1..20: mol_type = other DNA
catctcaaacaaacaaacaa

SEQ ID NO: 25178 - DNA, 20 bp, synthetic construct
  misc_feature 1..20: note = chemically synthesized
  source 1..20: mol_type = other DNA
tcaaacaaacaaacaaaaga

SEQ ID NO: 25179 - DNA, 20 bp, synthetic construct
  misc_feature 1..20: note = chemically synthesized
  source 1..20: mol_type = other DNA
acaaacaaacaaaagaaaga

SEQ ID NO: 25180 - DNA, 20 bp, synthetic construct
  misc_feature 1..20: note = chemically synthesized
  source 1..20: mol_type = other DNA
acaaacaaaagaaagaaaga

SEQ ID NO: 25181 - DNA, 20 bp, synthetic construct
  misc_feature 1..20: note = chemically synthesized
  source 1..20: mol_type = other DNA
acaaaagaaagaaagaaaga

SEQ ID NO: 25182 - DNA, 20 bp, synthetic construct
  misc_feature 1..20: note = chemically synthesized
  source 1..20: mol_type = other DNA
aaagaaagaaagaaagaaag

SEQ ID NO: 25183 - DNA, 20 bp, synthetic construct
  misc_feature 1..20: note = chemically synthesized
  source 1..20: mol_type = other DNA
aaagaaagaaagaaagtggc

SEQ ID NO: 25184 - DNA, 20 bp, synthetic construct
  misc_feature 1..20: note = chemically synthesized
  source 1..20: mol_type = other DNA
aagaaagaaagtggccagaa

SEQ ID NO: 25185 - DNA, 20 bp, synthetic construct
  misc_feature 1..20: note = chemically synthesized
  source 1..20: mol_type = other DNA
agaaagaaagtggccagaat

SEQ ID NO: 25186 - DNA, 20 bp, synthetic construct
  misc_feature 1..20: note = chemically synthesized
  source 1..20: mol_type = other DNA
gaatgggaatgtttacgtga

SEQ ID NO: 25187 - DNA, 20 bp, synthetic construct
  misc_feature 1..20: note = chemically synthesized
  source 1..20: mol_type = other DNA
aatgtttacgtgatagaaat

SEQ ID NO: 25188 - DNA, 20 bp, synthetic construct
  misc_feature 1..20: note = chemically synthesized
  source 1..20: mol_type = other DNA
aaattggcaaatgctaaact

SEQ ID NO: 25189 - DNA, 20 bp, synthetic construct
  misc_feature 1..20: note = chemically synthesized
  source 1..20: mol_type = other DNA
aattggcaaatgctaaactc

SEQ ID NO: 25190 - DNA, 20 bp, synthetic construct
  misc_feature 1..20: note = chemically synthesized
  source 1..20: mol_type = other DNA
attggcaaatgctaaactca

SEQ ID NO: 25191 - DNA, 20 bp, synthetic construct
  misc_feature 1..20: note = chemically synthesized
  source 1..20: mol_type = other DNA
cagggctttcccctgctccc

SEQ ID NO: 25192 - DNA, 20 bp, synthetic construct
  misc_feature 1..20: note = chemically synthesized
  source 1..20: mol_type = other DNA
gggctttcccctgctcccca

SEQ ID NO: 25193 - DNA, 20 bp, synthetic construct
  misc_feature 1..20: note = chemically synthesized
  source 1..20: mol_type = other DNA
gctttcccctgctccccaga

SEQ ID NO: 25194 - DNA, 20 bp, synthetic construct
  misc_feature 1..20: note = chemically synthesized
  source 1..20: mol_type = other DNA
tcccctgctccccagagagt

SEQ ID NO: 25195 - DNA, 20 bp, synthetic construct
  misc_feature 1..20: note = chemically synthesized
  source 1..20: mol_type = other DNA
tccccagagagtcagtttat

SEQ ID NO: 25196 - DNA, 20 bp, synthetic construct
  misc_feature 1..20: note = chemically synthesized
  source 1..20: mol_type = other DNA
gagagtcagtttatcagcac

SEQ ID NO: 25197 - DNA, 20 bp, synthetic construct
  misc_feature 1..20: note = chemically synthesized
  source 1..20: mol_type = other DNA
tatcagcactggacgtaaca

SEQ ID NO: 25198 - DNA, 20 bp, synthetic construct
  misc_feature 1..20: note = chemically synthesized
  source 1..20: mol_type = other DNA
ctggacgtaacatagttcat

SEQ ID NO: 25199 - DNA, 20 bp, synthetic construct
  misc_feature 1..20: note = chemically synthesized
  source 1..20: mol_type = other DNA
ggacgtaacatagttcataa

SEQ ID NO: 25200 - DNA, 20 bp, synthetic construct
  misc_feature 1..20: note = chemically synthesized
  source 1..20: mol_type = other DNA
agttcataagagcattgccg

SEQ ID NO: 25201 - DNA, 20 bp, synthetic construct
  misc_feature 1..20: note = chemically synthesized
  source 1..20: mol_type = other DNA
tcataagagcattgccgcgg

SEQ ID NO: 25202 - DNA, 20 bp, synthetic construct
  misc_feature 1..20: note = chemically synthesized
  source 1..20: mol_type = other DNA
aagagcattgccgcggaagc

SEQ ID NO: 25203 - DNA, 20 bp, synthetic construct
  misc_feature 1..20: note = chemically synthesized
  source 1..20: mol_type = other DNA
cggaagccagcctgcctacc

SEQ ID NO: 25204 - DNA, 20 bp, synthetic construct
  misc_feature 1..20: note = chemically synthesized
  source 1..20: mol_type = other DNA
ggaagccagcctgcctacct

SEQ ID NO: 25205 - DNA, 20 bp, synthetic construct
  misc_feature 1..20: note = chemically synthesized
  source 1..20: mol_type = other DNA
gcctacctgggcttccatcc

SEQ ID NO: 25206 - DNA, 20 bp, synthetic construct
  misc_feature 1..20: note = chemically synthesized
  source 1..20: mol_type = other DNA
cctgggcttccatcctggct

SEQ ID NO: 25207 - DNA, 20 bp, synthetic construct
  misc_feature 1..20: note = chemically synthesized
  source 1..20: mol_type = other DNA
tcggcatgtactaaccttgt

SEQ ID NO: 25208 - DNA, 20 bp, synthetic construct
  misc_feature 1..20: note = chemically synthesized
  source 1..20: mol_type = other DNA
gttggcctaatcatttaact

SEQ ID NO: 25209 - DNA, 20 bp, synthetic construct
  misc_feature 1..20: note = chemically synthesized
  source 1..20: mol_type = other DNA
aatcatttaactcagcacct

SEQ ID NO: 25210 - DNA, 20 bp, synthetic construct
  misc_feature 1..20: note = chemically synthesized
  source 1..20: mol_type = other DNA
gcatctactgtttctgtaaa

SEQ ID NO: 25211 - DNA, 20 bp, synthetic construct
  misc_feature 1..20: note = chemically synthesized
  source 1..20: mol_type = other DNA
tctactgtttctgtaaatag

SEQ ID NO: 25212 - DNA, 20 bp, synthetic construct
  misc_feature 1..20: note = chemically synthesized
  source 1..20: mol_type = other DNA
aaatagcagtaactacctca

SEQ ID NO: 25213 - DNA, 20 bp, synthetic construct
  misc_feature 1..20: note = chemically synthesized
  source 1..20: mol_type = other DNA
gcagtaactacctcacagaa

SEQ ID NO: 25214 - DNA, 20 bp, synthetic construct
  misc_feature 1..20: note = chemically synthesized
  source 1..20: mol_type = other DNA
ctacctcacagaaaagcaca

SEQ ID NO: 25215 - DNA, 20 bp, synthetic construct
  misc_feature 1..20: note = chemically synthesized
  source 1..20: mol_type = other DNA
acagaaaagcacatagcaca

SEQ ID NO: 25216 - DNA, 20 bp, synthetic construct
  misc_feature 1..20: note = chemically synthesized
  source 1..20: mol_type = other DNA
aaagcacatagcacatggac

SEQ ID NO: 25217 - DNA, 20 bp, synthetic construct
  misc_feature 1..20: note = chemically synthesized
  source 1..20: mol_type = other DNA
tgttaaccctgattattatt

SEQ ID NO: 25218 - DNA, 20 bp, synthetic construct
  misc_feature 1..20: note = chemically synthesized
  source 1..20: mol_type = other DNA
cctgattattattaagctgc

SEQ ID NO: 25219 - DNA, 20 bp, synthetic construct
  misc_feature 1..20: note = chemically synthesized
  source 1..20: mol_type = other DNA
tgattattattaagctgcca

SEQ ID NO: 25220 - DNA, 20 bp, synthetic construct
  misc_feature 1..20: note = chemically synthesized
  source 1..20: mol_type = other DNA
tgccagagataacctatttg

SEQ ID NO: 25221 - DNA, 20 bp, synthetic construct
  misc_feature 1..20: note = chemically synthesized
  source 1..20: mol_type = other DNA
cctatttgtagattataaaa

SEQ ID NO: 25222 - DNA, 20 bp, synthetic construct
  misc_feature 1..20: note = chemically synthesized
  source 1..20: mol_type = other DNA
tagattataaaacagaaact

SEQ ID NO: 25223 - DNA, 20 bp, synthetic construct
  misc_feature 1..20: note = chemically synthesized
  source 1..20: mol_type = other DNA
gataattgatatgacttgcc

SEQ ID NO: 25224 - DNA, 20 bp, synthetic construct
  misc_feature 1..20: note = chemically synthesized
  source 1..20: mol_type = other DNA
ataattgatatgacttgcca

SEQ ID NO: 25225 - DNA, 20 bp, synthetic construct
  misc_feature 1..20: note = chemically synthesized
  source 1..20: mol_type = other DNA
tatgacttgccaaggacatg

SEQ ID NO: 25226 - DNA, 20 bp, synthetic construct
  misc_feature 1..20: note = chemically synthesized
  source 1..20: mol_type = other DNA
acttgccaaggacatgtagt

SEQ ID NO: 25227 - DNA, 20 bp, synthetic construct
  misc_feature 1..20: note = chemically synthesized
  source 1..20: mol_type = other DNA
tgccaaggacatgtagttgg

SEQ ID NO: 25228 - DNA, 20 bp, synthetic construct
  misc_feature 1..20: note = chemically synthesized
  source 1..20: mol_type = other DNA
gccaaggacatgtagttggt

SEQ ID NO: 25229 - DNA, 20 bp, synthetic construct
  misc_feature 1..20: note = chemically synthesized
  source 1..20: mol_type = other DNA
aaggacatgtagttggtggg

SEQ ID NO: 25230 - DNA, 20 bp, synthetic construct
  misc_feature 1..20: note = chemically synthesized
  source 1..20: mol_type = other DNA
gacatgtagttggtgggtgg

SEQ ID NO: 25231 - DNA, 20 bp, synthetic construct
  misc_feature 1..20: note = chemically synthesized
  source 1..20: mol_type = other DNA
tagttggtgggtggcagaac

SEQ ID NO: 25232 - DNA, 20 bp, synthetic construct
  misc_feature 1..20: note = chemically synthesized
  source 1..20: mol_type = other DNA
agttggtgggtggcagaacg

SEQ ID NO: 25233 - DNA, 20 bp, synthetic construct
  misc_feature 1..20: note = chemically synthesized
  source 1..20: mol_type = other DNA
gttggtgggtggcagaacga

SEQ ID NO: 25234 - DNA, 20 bp, synthetic construct
  misc_feature 1..20: note = chemically synthesized
  source 1..20: mol_type = other DNA
gtgggtggcagaacgagggc

SEQ ID NO: 25235 - DNA, 20 bp, synthetic construct
  misc_feature 1..20: note = chemically synthesized
  source 1..20: mol_type = other DNA
gggtggcagaacgagggctg

SEQ ID NO: 25236 - DNA, 20 bp, synthetic construct
  misc_feature 1..20: note = chemically synthesized
  source 1..20: mol_type = other DNA
gcagaacgagggctggagcc

SEQ ID NO: 25237 - DNA, 20 bp, synthetic construct
  misc_feature 1..20: note = chemically synthesized
  source 1..20: mol_type = other DNA
gagggctggagcccagttcc

SEQ ID NO: 25238 - DNA, 20 bp, synthetic construct
  misc_feature 1..20: note = chemically synthesized
  source 1..20: mol_type = other DNA
agggctggagcccagttccc

SEQ ID NO: 25239 - DNA, 20 bp, synthetic construct
  misc_feature 1..20: note = chemically synthesized
  source 1..20: mol_type = other DNA
gggctggagcccagttccca

SEQ ID NO: 25240 - DNA, 20 bp, synthetic construct
  misc_feature 1..20: note = chemically synthesized
  source 1..20: mol_type = other DNA
cttttcattaccccacaaaa

SEQ ID NO: 25241 - DNA, 20 bp, synthetic construct
  misc_feature 1..20: note = chemically synthesized
  source 1..20: mol_type = other DNA
ttttcattaccccacaaaac

SEQ ID NO: 25242 - DNA, 20 bp, synthetic construct
  misc_feature 1..20: note = chemically synthesized
  source 1..20: mol_type = other DNA
gtgtgtttccttttttcata

SEQ ID NO: 25243 - DNA, 20 bp, synthetic construct
  misc_feature 1..20: note = chemically synthesized
  source 1..20: mol_type = other DNA
tctatctttttttttttttt

SEQ ID NO: 25244 - DNA, 20 bp, synthetic construct
  misc_feature 1..20: note = chemically synthesized
  source 1..20: mol_type = other DNA
tcttttttttttttttgaga

SEQ ID NO: 25245 - DNA, 20 bp, synthetic construct
  misc_feature 1..20: note = chemically synthesized
  source 1..20: mol_type = other DNA
cttttttttttttttgagac

SEQ ID NO: 25246 - DNA, 20 bp, synthetic construct
  misc_feature 1..20: note = chemically synthesized
  source 1..20: mol_type = other DNA
ttttttttttttttgagaca

SEQ ID NO: 25247 - DNA, 20 bp, synthetic construct
  misc_feature 1..20: note = chemically synthesized
  source 1..20: mol_type = other DNA
cagggtcttactctgttgcc

SEQ ID NO: 25248 - DNA, 20 bp, synthetic construct
  misc_feature 1..20: note = chemically synthesized
  source 1..20: mol_type = other DNA
agggtcttactctgttgccc

SEQ ID NO: 25249 - DNA, 20 bp, synthetic construct
  misc_feature 1..20: note = chemically synthesized
  source 1..20: mol_type = other DNA
tcttactctgttgcccaggc

SEQ ID NO: 25250 - DNA, 20 bp, synthetic construct
  misc_feature 1..20: note = chemically synthesized
  source 1..20: mol_type = other DNA
ttactctgttgcccaggctg

SEQ ID NO: 25251 - DNA, 20 bp, synthetic construct
  misc_feature 1..20: note = chemically synthesized
  source 1..20: mol_type = other DNA
ctgttgcccaggctggagtg

SEQ ID NO: 25252 - DNA, 20 bp, synthetic construct
  misc_feature 1..20: note = chemically synthesized
  source 1..20: mol_type = other DNA
ttgcccaggctggagtgcag

SEQ ID NO: 25253 - DNA, 20 bp, synthetic construct
  misc_feature 1..20: note = chemically synthesized
  source 1..20: mol_type = other DNA
acctcctccgcctctcacct

SEQ ID NO: 25254 - DNA, 20 bp, synthetic construct
  misc_feature 1..20: note = chemically synthesized
  source 1..20: mol_type = other DNA
gcctctcacctcagcctcct

SEQ ID NO: 25255 - DNA, 20 bp, synthetic construct
  misc_feature 1..20: note = chemically synthesized
  source 1..20: mol_type = other DNA
tctcacctcagcctcctgag

SEQ ID NO: 25256 - DNA, 20 bp, synthetic construct
  misc_feature 1..20: note = chemically synthesized
  source 1..20: mol_type = other DNA
acctcagcctcctgagtagc

SEQ ID NO: 25257 - DNA, 20 bp, synthetic construct
  misc_feature 1..20: note = chemically synthesized
  source 1..20: mol_type = other DNA
cctcagcctcctgagtagct

SEQ ID NO: 25258 - DNA, 20 bp, synthetic construct
  misc_feature 1..20: note = chemically synthesized
  source 1..20: mol_type = other DNA
ctcctgagtagctgggacta

SEQ ID NO: 25259 - DNA, 20 bp, synthetic construct
  misc_feature 1..20: note = chemically synthesized
  source 1..20: mol_type = other DNA
gactacagcaccaacacgcc

SEQ ID NO: 25260 - DNA, 20 bp, synthetic construct
  misc_feature 1..20: note = chemically synthesized
  source 1..20: mol_type = other DNA
taattttcgtaatgtttttg

SEQ ID NO: 25261 - DNA, 20 bp, synthetic construct
  misc_feature 1..20: note = chemically synthesized
  source 1..20: mol_type = other DNA
attttcgtaatgtttttgta

SEQ ID NO: 25262 - DNA, 20 bp, synthetic construct
  misc_feature 1..20: note = chemically synthesized
  source 1..20: mol_type = other DNA
tcgtaatgtttttgtagaga

SEQ ID NO: 25263 - DNA, 20 bp, synthetic construct
  misc_feature 1..20: note = chemically synthesized
  source 1..20: mol_type = other DNA
gtaatgtttttgtagagatg

SEQ ID NO: 25264 - DNA, 20 bp, synthetic construct
  misc_feature 1..20: note = chemically synthesized
  source 1..20: mol_type = other DNA
tggagtttcgccatgttgcc

SEQ ID NO: 25265 - DNA, 20 bp, synthetic construct
  misc_feature 1..20: note = chemically synthesized
  source 1..20: mol_type = other DNA
ggagtttcgccatgttgccc

SEQ ID NO: 25266 - DNA, 20 bp, synthetic construct
  misc_feature 1..20: note = chemically synthesized
  source 1..20: mol_type = other DNA
tttcgccatgttgcccaggc

SEQ ID NO: 25267 - DNA, 20 bp, synthetic construct
  misc_feature 1..20: note = chemically synthesized
  source 1..20: mol_type = other DNA
caggctggtcttgaactcct

SEQ ID NO: 25268 - DNA, 20 bp, synthetic construct
  misc_feature 1..20: note = chemically synthesized
  source 1..20: mol_type = other DNA
cttgaactcctgagttcacc

SEQ ID NO: 25269 - DNA, 20 bp, synthetic construct
  misc_feature 1..20: note = chemically synthesized
  source 1..20: mol_type = other DNA
ttgaactcctgagttcaccc

SEQ ID NO: 25270 - DNA, 20 bp, synthetic construct
  misc_feature 1..20: note = chemically synthesized
  source 1..20: mol_type = other DNA
gaactcctgagttcacccag

SEQ ID NO: 25271 - DNA, 20 bp, synthetic construct
  misc_feature 1..20: note = chemically synthesized
  source 1..20: mol_type = other DNA
caggagtgattcgcccacct

SEQ ID NO: 25272 - DNA, 20 bp, synthetic construct
  misc_feature 1..20: note = chemically synthesized
  source 1..20: mol_type = other DNA
tcgcccacctcggcctccca

SEQ ID NO: 25273 - DNA, 20 bp, synthetic construct
  misc_feature 1..20: note = chemically synthesized
  source 1..20: mol_type = other DNA
acctcggcctcccaaagtgc

SEQ ID NO: 25274 - DNA, 20 bp, synthetic construct
  misc_feature 1..20: note = chemically synthesized
  source 1..20: mol_type = other DNA
cctcggcctcccaaagtgct

SEQ ID NO: 25275 - DNA, 20 bp, synthetic construct
  misc_feature 1..20: note = chemically synthesized
  source 1..20: mol_type = other DNA
ctcccaaagtgctgggatta

SEQ ID NO: 25276 - DNA, 20 bp, synthetic construct
  misc_feature 1..20: note = chemically synthesized
  source 1..20: mol_type = other DNA
tcccaaagtgctgggattac

SEQ ID NO: 25277 - DNA, 20 bp, synthetic construct
  misc_feature 1..20: note = chemically synthesized
  source 1..20: mol_type = other DNA
agtgctgggattacaggtgt

SEQ ID NO: 25278 - DNA, 20 bp, synthetic construct
  misc_feature 1..20: note = chemically synthesized
  source 1..20: mol_type = other DNA
caggtgtgagccaccatgcc

SEQ ID NO: 25279 - DNA, 20 bp, synthetic construct
  misc_feature 1..20: note = chemically synthesized
  source 1..20: mol_type = other DNA
ctaataaaactctttgctca

SEQ ID NO: 25280 - DNA, 20 bp, synthetic construct
  misc_feature 1..20: note = chemically synthesized
  source 1..20: mol_type = other DNA
tgctcaaagcctatataact

SEQ ID NO: 25281 - DNA, 20 bp, synthetic construct
  misc_feature 1..20: note = chemically synthesized
  source 1..20: mol_type = other DNA
accctttaacccatatgaaa

SEQ ID NO: 25282 - DNA, 20 bp, synthetic construct
  misc_feature 1..20: note = chemically synthesized
  source 1..20: mol_type = other DNA
ccctttaacccatatgaaat

SEQ ID NO: 25283 - DNA, 20 bp, synthetic construct
  misc_feature 1..20: note = chemically synthesized
  source 1..20: mol_type = other DNA
ttcctgtattttcaactcac

SEQ ID NO: 25284 - DNA, 20 bp, synthetic construct
  misc_feature 1..20: note = chemically synthesized
  source 1..20: mol_type = other DNA
ctgtattttcaactcactgg

SEQ ID NO: 25285 - DNA, 20 bp, synthetic construct
  misc_feature 1..20: note = chemically synthesized
  source 1..20: mol_type = other DNA
tgtattttcaactcactggt

SEQ ID NO: 25286 - DNA, 20 bp, synthetic construct
  misc_feature 1..20: note = chemically synthesized
  source 1..20: mol_type = other DNA
ttctgtcttccccctttatg

SEQ ID NO: 25287 - DNA, 20 bp, synthetic construct
  misc_feature 1..20: note = chemically synthesized
  source 1..20: mol_type = other DNA
ccctttatgtagatgatcca

SEQ ID NO: 25288 - DNA, 20 bp, synthetic construct
  misc_feature 1..20: note = chemically synthesized
  source 1..20: mol_type = other DNA
ttatgtagatgatccaaagt

SEQ ID NO: 25289 - DNA, 20 bp, synthetic construct
  misc_feature 1..20: note = chemically synthesized
  source 1..20: mol_type = other DNA
atgtagatgatccaaagtca

SEQ ID NO: 25290 - DNA, 20 bp, synthetic construct
  misc_feature 1..20: note = chemically synthesized
  source 1..20: mol_type = other DNA
gtagatgatccaaagtcaga

SEQ ID NO: 25291 - DNA, 20 bp, synthetic construct
  misc_feature 1..20: note = chemically synthesized
  source 1..20: mol_type = other DNA
agatgatccaaagtcagaga

SEQ ID NO: 25292 - DNA, 20 bp, synthetic construct
  misc_feature 1..20: note = chemically synthesized
  source 1..20: mol_type = other DNA
gatgatccaaagtcagagag

SEQ ID NO: 25293 - DNA, 20 bp, synthetic construct
  misc_feature 1..20: note = chemically synthesized
  source 1..20: mol_type = other DNA
atgatccaaagtcagagaga

SEQ ID NO: 25294 - DNA, 20 bp, synthetic construct
  misc_feature 1..20: note = chemically synthesized
  source 1..20: mol_type = other DNA
tgatccaaagtcagagagag

SEQ ID NO: 25295 - DNA, 20 bp, synthetic construct
  misc_feature 1..20: note = chemically synthesized
  source 1..20: mol_type = other DNA
ccaaagtcagagagaggggt

SEQ ID NO: 25296 - DNA, 20 bp, synthetic construct
  misc_feature 1..20: note = chemically synthesized
  source 1..20: mol_type = other DNA
aagtcagagagaggggttgg

SEQ ID NO: 25297 - DNA, 20 bp, synthetic construct
  misc_feature 1..20: note = chemically synthesized
  source 1..20: mol_type = other DNA
gagagaggggttggaagcat

SEQ ID NO: 25298 - DNA, 20 bp, synthetic construct
  misc_feature 1..20: note = chemically synthesized
  source 1..20: mol_type = other DNA
agaggggttggaagcatgag

SEQ ID NO: 25299 - DNA, 20 bp, synthetic construct
  misc_feature 1..20: note = chemically synthesized
  source 1..20: mol_type = other DNA
ttggaagcatgagtagcccg

SEQ ID NO: 25300 - DNA, 20 bp, synthetic construct
  misc_feature 1..20: note = chemically synthesized
  source 1..20: mol_type = other DNA
gtagcccgtggcttcctgaa

SEQ ID NO: 25301 - DNA, 20 bp, synthetic construct
  misc_feature 1..20: note = chemically synthesized
  source 1..20: mol_type = other DNA
ccgtggcttcctgaatagcc

SEQ ID NO: 25302 - DNA, 20 bp, synthetic construct
  misc_feature 1..20: note = chemically synthesized
  source 1..20: mol_type = other DNA
cgtggcttcctgaatagcct

SEQ ID NO: 25303 - DNA, 20 bp, synthetic construct
  misc_feature 1..20: note = chemically synthesized
  source 1..20: mol_type = other DNA
gtggcttcctgaatagcctg

SEQ ID NO: 25304 - DNA, 20 bp, synthetic construct
  misc_feature 1..20: note = chemically synthesized
  source 1..20: mol_type = other DNA
cttcctgaatagcctgggga

SEQ ID NO: 25305 - DNA, 20 bp, synthetic construct
  misc_feature 1..20: note = chemically synthesized
  source 1..20: mol_type = other DNA
ctggggaaagcaacttctga

SEQ ID NO: 25306 - DNA, 20 bp, synthetic construct
  misc_feature 1..20: note = chemically synthesized
  source 1..20: mol_type = other DNA
ggaaagcaacttctgatgga

SEQ ID NO: 25307 - DNA, 20 bp, synthetic construct
  misc_feature 1..20: note = chemically synthesized
  source 1..20: mol_type = other DNA
ttctgatggacagacattgc

SEQ ID NO: 25308 - DNA, 20 bp, synthetic construct
  misc_feature 1..20: note = chemically synthesized
  source 1..20: mol_type = other DNA
ctgatggacagacattgcga

SEQ ID NO: 25309 - DNA, 20 bp, synthetic construct
  misc_feature 1..20: note = chemically synthesized
  source 1..20: mol_type = other DNA
gacattgcgagagcgaatgc

SEQ ID NO: 25310 - DNA, 20 bp, synthetic construct
  misc_feature 1..20: note = chemically synthesized
  source 1..20: mol_type = other DNA
ttgctgatctcctctctata

SEQ ID NO: 25311 - DNA, 20 bp, synthetic construct
  misc_feature 1..20: note = chemically synthesized
  source 1..20: mol_type = other DNA
tatatggttcttaccactta

SEQ ID NO: 25312 - DNA, 20 bp, synthetic construct
  misc_feature 1..20: note = chemically synthesized
  source 1..20: mol_type = other DNA
ggttcttaccacttaaagac

SEQ ID NO: 25313 - DNA, 20 bp, synthetic construct
  misc_feature 1..20: note = chemically synthesized
  source 1..20: mol_type = other DNA
gttcttaccacttaaagacg

SEQ ID NO: 25314 - DNA, 20 bp, synthetic construct
  misc_feature 1..20: note = chemically synthesized
  source 1..20: mol_type = other DNA
taccacttaaagacgaggtt

SEQ ID NO: 25315 - DNA, 20 bp, synthetic construct
  misc_feature 1..20: note = chemically synthesized
  source 1..20: mol_type = other DNA
acttaaagacgaggttgagc

SEQ ID NO: 25316 - DNA, 20 bp, synthetic construct
  misc_feature 1..20: note = chemically synthesized
  source 1..20: mol_type = other DNA
gttgagccagtctccaatca

SEQ ID NO: 25317 - DNA, 20 bp, synthetic construct
  misc_feature 1..20: note = chemically synthesized
  source 1..20: mol_type = other DNA
tctccaatcacagctaccca

SEQ ID NO: 25318 - DNA, 20 bp, synthetic construct
  misc_feature 1..20: note = chemically synthesized
  source 1..20: mol_type = other DNA
ctccaatcacagctacccaa

SEQ ID NO: 25319 - DNA, 20 bp, synthetic construct
  misc_feature 1..20: note = chemically synthesized
  source 1..20: mol_type = other DNA
ccaatcacagctacccaaag

SEQ ID NO: 25320 - DNA, 20 bp, synthetic construct
  misc_feature 1..20: note = chemically synthesized
  source 1..20: mol_type = other DNA
ccaaaggagtttaatgccca

SEQ ID NO: 25321 - DNA, 20 bp, synthetic construct
  misc_feature 1..20: note = chemically synthesized
  source 1..20: mol_type = other DNA
ttaatgcccacagcttcctg

SEQ ID NO: 25322 - DNA, 20 bp, synthetic construct
  misc_feature 1..20: note = chemically synthesized
  source 1..20: mol_type = other DNA
tgcccacagcttcctgaaga

SEQ ID NO: 25323 - DNA, 20 bp, synthetic construct
  misc_feature 1..20: note = chemically synthesized
  source 1..20: mol_type = other DNA
cagcttcctgaagatggaac

SEQ ID NO: 25324 - DNA, 20 bp, synthetic construct
  misc_feature 1..20: note = chemically synthesized
  source 1..20: mol_type = other DNA
ttcctgaagatggaaccaga

SEQ ID NO: 25325 - DNA, 20 bp, synthetic construct
  misc_feature 1..20: note = chemically synthesized
  source 1..20: mol_type = other DNA
tcctgaagatggaaccagat

SEQ ID NO: 25326 - DNA, 20 bp, synthetic construct
  misc_feature 1..20: note = chemically synthesized
  source 1..20: mol_type = other DNA
cctgaagatggaaccagatg

SEQ ID NO: 25327 - DNA, 20 bp, synthetic construct
  misc_feature 1..20: note = chemically synthesized
  source 1..20: mol_type = other DNA
gaagatggaaccagatgggg

SEQ ID NO: 25328 - DNA, 20 bp, synthetic construct
  misc_feature 1..20: note = chemically synthesized
  source 1..20: mol_type = other DNA
agatggaaccagatggggaa

SEQ ID NO: 25329 - DNA, 20 bp, synthetic construct
  misc_feature 1..20: note = chemically synthesized
  source 1..20: mol_type = other DNA
gatggaaccagatggggaag

SEQ ID NO: 25330 - DNA, 20 bp, synthetic construct
  misc_feature 1..20: note = chemically synthesized
  source 1..20: mol_type = other DNA
accagatggggaagaggacg

SEQ ID NO: 25331 - DNA, 20 bp, synthetic construct
  misc_feature 1..20: note = chemically synthesized
  source 1..20: mol_type = other DNA
agatggggaagaggacgtag

SEQ ID NO: 25332 - DNA, 20 bp, synthetic construct
  misc_feature 1..20: note = chemically synthesized
  source 1..20: mol_type = other DNA
gatggggaagaggacgtaga

SEQ ID NO: 25333 - DNA, 20 bp, synthetic construct
  misc_feature 1..20: note = chemically synthesized
  source 1..20: mol_type = other DNA
aggacgtagaaggcattcct

SEQ ID NO: 25334 - DNA, 20 bp, synthetic construct
  misc_feature 1..20: note = chemically synthesized
  source 1..20: mol_type = other DNA
ggacgtagaaggcattcctg

SEQ ID NO: 25335 - DNA, 20 bp, synthetic construct
  misc_feature 1..20: note = chemically synthesized
  source 1..20: mol_type = other DNA
attcctgaggtctgcgatca

SEQ ID NO: 25336 - DNA, 20 bp, synthetic construct
  misc_feature 1..20: note = chemically synthesized
  source 1..20: mol_type = other DNA
ggtctgcgatcacggacacc

SEQ ID NO: 25337 - DNA, 20 bp, synthetic construct
  misc_feature 1..20: note = chemically synthesized
  source 1..20: mol_type = other DNA
tcacggacaccaagatgaac

SEQ ID NO: 25338 - DNA, 20 bp, synthetic construct
  misc_feature 1..20: note = chemically synthesized
  source 1..20: mol_type = other DNA
acaccaagatgaaccagtcc

SEQ ID NO: 25339 - DNA, 20 bp, synthetic construct
  misc_feature 1..20: note = chemically synthesized
  source 1..20: mol_type = other DNA
caccaagatgaaccagtcct

SEQ ID NO: 25340 - DNA, 20 bp, synthetic construct
  misc_feature 1..20: note = chemically synthesized
  source 1..20: mol_type = other DNA
ccaagatgaaccagtcctgg

SEQ ID NO: 25341 - DNA, 20 bp, synthetic construct
  misc_feature 1..20: note = chemically synthesized
  source 1..20: mol_type = other DNA
tgaaccagtcctgggagtct

SEQ ID NO: 25342 - DNA, 20 bp, synthetic construct
  misc_feature 1..20: note = chemically synthesized
  source 1..20: mol_type = other DNA
gggagtcttggtaattcacc

SEQ ID NO: 25343 - DNA, 20 bp, synthetic construct
  misc_feature 1..20: note = chemically synthesized
  source 1..20: mol_type = other DNA
gagtcttggtaattcacctg

SEQ ID NO: 25344 - DNA, 20 bp, synthetic construct
  misc_feature 1..20: note = chemically synthesized
  source 1..20: mol_type = other DNA
agtcttggtaattcacctgg

SEQ ID NO: 25345 - DNA, 20 bp, synthetic construct
  misc_feature 1..20: note = chemically synthesized
  source 1..20: mol_type = other DNA
cctggaggtaatgtgttgac

SEQ ID NO: 25346 - DNA, 20 bp, synthetic construct
  misc_feature 1..20: note = chemically synthesized
  source 1..20: mol_type = other DNA
aatgtgttgactggatccca

SEQ ID NO: 25347 - DNA, 20 bp, synthetic construct
  misc_feature 1..20: note = chemically synthesized
  source 1..20: mol_type = other DNA
ttgactggatcccaaagtca

SEQ ID NO: 25348 - DNA, 20 bp, synthetic construct
  misc_feature 1..20: note = chemically synthesized
  source 1..20: mol_type = other DNA
gactggatcccaaagtcatg

SEQ ID NO: 25349 - DNA, 20 bp, synthetic construct
  misc_feature 1..20: note = chemically synthesized
  source 1..20: mol_type = other DNA
ttcctccatcctcatttcct

SEQ ID NO: 25350 - DNA, 20 bp, synthetic construct
  misc_feature 1..20: note = chemically synthesized
  source 1..20: mol_type = other DNA
tcctcatttccttggcacct

SEQ ID NO: 25351 - DNA, 20 bp, synthetic construct
  misc_feature 1..20: note = chemically synthesized
  source 1..20: mol_type = other DNA
cctcatttccttggcacctc

SEQ ID NO: 25352 - DNA, 20 bp, synthetic construct
  misc_feature 1..20: note = chemically synthesized
  source 1..20: mol_type = other DNA
catttccttggcacctcagg

SEQ ID NO: 25353 - DNA, 20 bp, synthetic construct
  misc_feature 1..20: note = chemically synthesized
  source 1..20: mol_type = other DNA
ttggcacctcaggaagatgt

SEQ ID NO: 25354 - DNA, 20 bp, synthetic construct
  misc_feature 1..20: note = chemically synthesized
  source 1..20: mol_type = other DNA
gcacctcaggaagatgtcag

SEQ ID NO: 25355 - DNA, 20 bp, synthetic construct
  misc_feature 1..20: note = chemically synthesized
  source 1..20: mol_type = other DNA
acctcaggaagatgtcagca

SEQ ID NO: 25356 - DNA, 20 bp, synthetic construct
  misc_feature 1..20: note = chemically synthesized
  source 1..20: mol_type = other DNA
agatgtcagcagagcccttg

SEQ ID NO: 25357 - DNA, 20 bp, synthetic construct
  misc_feature 1..20: note = chemically synthesized
  source 1..20: mol_type = other DNA
cagagcccttgcagttattc

SEQ ID NO: 25358 - DNA, 20 bp, synthetic construct
  misc_feature 1..20: note = chemically synthesized
  source 1..20: mol_type = other DNA
agagcccttgcagttattcc

SEQ ID NO: 25359 - DNA, 20 bp, synthetic construct
  misc_feature 1..20: note = chemically synthesized
  source 1..20: mol_type = other DNA
ccttgcagttattccaggct

SEQ ID NO: 25360 - DNA, 20 bp, synthetic construct
  misc_feature 1..20: note = chemically synthesized
  source 1..20: mol_type = other DNA
tgcagttattccaggcttgg

SEQ ID NO: 25361 - DNA, 20 bp, synthetic construct
  misc_feature 1..20: note = chemically synthesized
  source 1..20: mol_type = other DNA
ggtggtgattgctctgctat

SEQ ID NO: 25362 - DNA, 20 bp, synthetic construct
  misc_feature 1..20: note = chemically synthesized
  source 1..20: mol_type = other DNA
tgttttatatgccctgtatc

SEQ ID NO: 25363 - DNA, 20 bp, synthetic construct
  misc_feature 1..20: note = chemically synthesized
  source 1..20: mol_type = other DNA
tatgccctgtatccagtatt

SEQ ID NO: 25364 - DNA, 20 bp, synthetic construct
  misc_feature 1..20: note = chemically synthesized
  source 1..20: mol_type = other DNA
atgccctgtatccagtattc

SEQ ID NO: 25365 - DNA, 20 bp, synthetic construct
  misc_feature 1..20: note = chemically synthesized
  source 1..20: mol_type = other DNA
atccagtattcaggtcaacc

SEQ ID NO: 25366 - DNA, 20 bp, synthetic construct
  misc_feature 1..20: note = chemically synthesized
  source 1..20: mol_type = other DNA
gtcaacccagccctgatctt

SEQ ID NO: 25367 - DNA, 20 bp, synthetic construct
  misc_feature 1..20: note = chemically synthesized
  source 1..20: mol_type = other DNA
attttagacaaacgtggttt

SEQ ID NO: 25368 - DNA, 20 bp, synthetic construct
  misc_feature 1..20: note = chemically synthesized
  source 1..20: mol_type = other DNA
tttgagtccaaagatcaggg

SEQ ID NO: 25369 - DNA, 20 bp, synthetic construct
  misc_feature 1..20: note = chemically synthesized
  source 1..20: mol_type = other DNA
aagatcagggctgggttgac

SEQ ID NO: 25370 - DNA, 20 bp, synthetic construct
  misc_feature 1..20: note = chemically synthesized
  source 1..20: mol_type = other DNA
gggctgggttgacctgaata

SEQ ID NO: 25371 - DNA, 20 bp, synthetic construct
  misc_feature 1..20: note = chemically synthesized
  source 1..20: mol_type = other DNA
agagcaatcaccaccaagcc

SEQ ID NO: 25372 - DNA, 20 bp, synthetic construct
  misc_feature 1..20: note = chemically synthesized
  source 1..20: mol_type = other DNA
tcctgaggtgccaaggaaat

SEQ ID NO: 25373 - DNA, 20 bp, synthetic construct
  misc_feature 1..20: note = chemically synthesized
  source 1..20: mol_type = other DNA
aaggaaatgaggatggagga

SEQ ID NO: 25374 - DNA, 20 bp, synthetic construct
  misc_feature 1..20: note = chemically synthesized
  source 1..20: mol_type = other DNA
aaatgaggatggaggaagga

SEQ ID NO: 25375 - DNA, 20 bp, synthetic construct
  misc_feature 1..20: note = chemically synthesized
  source 1..20: mol_type = other DNA
atgaatgttctccatgactt

SEQ ID NO: 25376 - DNA, 20 bp, synthetic construct
  misc_feature 1..20: note = chemically synthesized
  source 1..20: mol_type = other DNA
agtcaacacattacctccag

SEQ ID NO: 25377 - DNA, 20 bp, synthetic construct
  misc_feature 1..20: note = chemically synthesized
  source 1..20: mol_type = other DNA
tgtccgtgatcgcagacctc

SEQ ID NO: 25378 - DNA, 20 bp, synthetic construct
  misc_feature 1..20: note = chemically synthesized
  source 1..20: mol_type = other DNA
gctgtgggcattaaactcct

SEQ ID NO: 25379 - DNA, 20 bp, synthetic construct
  misc_feature 1..20: note = chemically synthesized
  source 1..20: mol_type = other DNA
tccaacccctctctctgact

SEQ ID NO: 25380 - DNA, 20 bp, synthetic construct
  misc_feature 1..20: note = chemically synthesized
  source 1..20: mol_type = other DNA
agacagaaaaaatcctacca

SEQ ID NO: 25381 - DNA, 20 bp, synthetic construct
  misc_feature 1..20: note = chemically synthesized
  source 1..20: mol_type = other DNA
tacaggaaagcctatttcat

SEQ ID NO: 25382 - DNA, 20 bp, synthetic construct
  misc_feature 1..20: note = chemically synthesized
  source 1..20: mol_type = other DNA
agcctatttcatatgggtta

SEQ ID NO: 25383 - DNA, 20 bp, synthetic construct
  misc_feature 1..20: note = chemically synthesized
  source 1..20: mol_type = other DNA
tgggttaaagggtaggacag

SEQ ID NO: 25384 - DNA, 20 bp, synthetic construct
  misc_feature 1..20: note = chemically synthesized
  source 1..20: mol_type = other DNA
agttgaatttcgtgaaaagt

SEQ ID NO: 25385 - DNA, 20 bp, synthetic construct
  misc_feature 1..20: note = chemically synthesized
  source 1..20: mol_type = other DNA
agttatataggctttgagca

SEQ ID NO: 25386 - DNA, 20 bp, synthetic construct
  misc_feature 1..20: note = chemically synthesized
  source 1..20: mol_type = other DNA
actttgggaggccgaggtgg

SEQ ID NO: 25387 - DNA, 20 bp, synthetic construct
  misc_feature 1..20: note = chemically synthesized
  source 1..20: mol_type = other DNA
ccgaggtgggcgaatcactc

SEQ ID NO: 25388 - DNA, 20 bp, synthetic construct
  misc_feature 1..20: note = chemically synthesized
  source 1..20: mol_type = other DNA
aatcactcctgggtgaactc

SEQ ID NO: 25389 - DNA, 20 bp, synthetic construct
  misc_feature 1..20: note = chemically synthesized
  source 1..20: mol_type = other DNA
gagaggcggaggaggttgca

SEQ ID NO: 25390 - DNA, 20 bp, synthetic construct
  misc_feature 1..20: note = chemically synthesized
  source 1..20: mol_type = other DNA
ctgcactccagcctgggcaa

SEQ ID NO: 25391 - DNA, 20 bp, synthetic construct
  misc_feature 1..20: note = chemically synthesized
  source 1..20: mol_type = other DNA
tgattcaacagcctgttttg

SEQ ID NO: 25392 - DNA, 20 bp, synthetic construct
  misc_feature 1..20: note = chemically synthesized
  source 1..20: mol_type = other DNA
tggcaagtcatatcaattat

SEQ ID NO: 25393 - DNA, 20 bp, synthetic construct
  misc_feature 1..20: note = chemically synthesized
  source 1..20: mol_type = other DNA
tctggcagcttaataataat

SEQ ID NO: 25394 - DNA, 20 bp, synthetic construct
  misc_feature 1..20: note = chemically synthesized
  source 1..20: mol_type = other DNA
tagatgcagagaccaaggtg

SEQ ID NO: 25395 - DNA, 20 bp, synthetic construct
  misc_feature 1..20: note = chemically synthesized
  source 1..20: mol_type = other DNA
aaggttagtacatgccgagc

SEQ ID NO: 25396 - DNA, 20 bp, synthetic construct
  misc_feature 1..20: note = chemically synthesized
  source 1..20: mol_type = other DNA
ctggggagcaggggaaagcc

SEQ ID NO: 25397 - DNA, 20 bp, synthetic construct
  misc_feature 1..20: note = chemically synthesized
  source 1..20: mol_type = other DNA
ttttgtttgtttgtttgaga

SEQ ID NO: 25398 - DNA, 20 bp, synthetic construct
  misc_feature 1..20: note = chemically synthesized
  source 1..20: mol_type = other DNA
gtctcgcactgttgcctggc

SEQ ID NO: 25399 - DNA, 20 bp, synthetic construct
  misc_feature 1..20: note = chemically synthesized
  source 1..20: mol_type = other DNA
gcctcagcctcccaagtagc

SEQ ID NO: 25400 - DNA, 20 bp, synthetic construct
  misc_feature 1..20: note = chemically synthesized
  source 1..20: mol_type = other DNA
gccttggcctccctaagtgc

SEQ ID NO: 25401 - DNA, 20 bp, synthetic construct
  misc_feature 1..20: note = chemically synthesized
  source 1..20: mol_type = other DNA
tgaagaaccatgcaatctct

SEQ ID NO: 25402 - DNA, 20 bp, synthetic construct
  misc_feature 1..20: note = chemically synthesized
  source 1..20: mol_type = other DNA
ctctctgggttgatagaggc

SEQ ID NO: 25403 - DNA, 20 bp, synthetic construct
  misc_feature 1..20: note = chemically synthesized
  source 1..20: mol_type = other DNA
aaatcactattccaccatca

SEQ ID NO: 25404 - DNA, 20 bp, synthetic construct
  misc_feature 1..20: note = chemically synthesized
  source 1..20: mol_type = other DNA
atactctgtttcaaagtaga

SEQ ID NO: 25405 - DNA, 20 bp, synthetic construct
  misc_feature 1..20: note = chemically synthesized
  source 1..20: mol_type = other DNA
ggggggctcgtcctaggggc

SEQ ID NO: 25406 - DNA, 20 bp, synthetic construct
  misc_feature 1..20: note = chemically synthesized
  source 1..20: mol_type = other DNA
agtcacatagctgccatttt

SEQ ID NO: 25407 - DNA, 20 bp, synthetic construct
  misc_feature 1..20: note = chemically synthesized
  source 1..20: mol_type = other DNA
agctgccattttatggattt

SEQ ID NO: 25408 - DNA, 20 bp, synthetic construct
  misc_feature 1..20: note = chemically synthesized
  source 1..20: mol_type = other DNA
ttttttttttttttttgaga

SEQ ID NO: 25409 - DNA, 20 bp, synthetic construct
  misc_feature 1..20: note = chemically synthesized
  source 1..20: mol_type = other DNA
gattctcttgccttagcctc

SEQ ID NO: 25410 - DNA, 20 bp, synthetic construct
  misc_feature 1..20: note = chemically synthesized
  source 1..20: mol_type = other DNA
gccttagcctcccgagtagc

SEQ ID NO: 25411 - DNA, 20 bp, synthetic construct
  misc_feature 1..20: note = chemically synthesized
  source 1..20: mol_type = other DNA
tgtgagccaccgcgcctgcc

SEQ ID NO: 25412 - DNA, 20 bp, synthetic construct
  misc_feature 1..20: note = chemically synthesized
  source 1..20: mol_type = other DNA
caccgcgcctgcctggagtt

SEQ ID NO: 25413 - DNA, 20 bp, synthetic construct
  misc_feature 1..20: note = chemically synthesized
  source 1..20: mol_type = other DNA
actttgggaggctgaggtgg

SEQ ID NO: 25414 - DNA, 20 bp, synthetic construct
  misc_feature 1..20: note = chemically synthesized
  source 1..20: mol_type = other DNA
ggctgaggtgggaggattgc

SEQ ID NO: 25415 - DNA, 20 bp, synthetic construct
  misc_feature 1..20: note = chemically synthesized
  source 1..20: mol_type = other DNA
actaaaaatacaaaaactag

SEQ ID NO: 25416 - DNA, 20 bp, synthetic construct
  misc_feature 1..20: note = chemically synthesized
  source 1..20: mol_type = other DNA
tattcaggaggctgaggtgg

SEQ ID NO: 25417 - DNA, 20 bp, synthetic construct
  misc_feature 1..20: note = chemically synthesized
  source 1..20: mol_type = other DNA
ttgcgccactgcactccagg

SEQ ID NO: 25418 - DNA, 20 bp, synthetic construct
  misc_feature 1..20: note = chemically synthesized
  source 1..20: mol_type = other DNA
aaacttgttctgtttttcca

SEQ ID NO: 25419 - DNA, 20 bp, synthetic construct
  misc_feature 1..20: note = chemically synthesized
  source 1..20: mol_type = other DNA
tttggacagcgtccatactg

SEQ ID NO: 25420 - DNA, 20 bp, synthetic construct
  misc_feature 1..20: note = chemically synthesized
  source 1..20: mol_type = other DNA
agcgtccatactggtgggtt

SEQ ID NO: 25421 - DNA, 20 bp, synthetic construct
  misc_feature 1..20: note = chemically synthesized
  source 1..20: mol_type = other DNA
ccagcccctgcagacagaag

SEQ ID NO: 25422 - DNA, 20 bp, synthetic construct
  misc_feature 1..20: note = chemically synthesized
  source 1..20: mol_type = other DNA
gtggacctcgtttacctgtt

SEQ ID NO: 25423 - DNA, 20 bp, synthetic construct
  misc_feature 1..20: note = chemically synthesized
  source 1..20: mol_type = other DNA
ttcacttctgcaatactttc

SEQ ID NO: 25424 - DNA, 20 bp, synthetic construct
  misc_feature 1..20: note = chemically synthesized
  source 1..20: mol_type = other DNA
aaatctgcctattacagaac

SEQ ID NO: 25425 - DNA, 20 bp, synthetic construct
  misc_feature 1..20: note = chemically synthesized
  source 1..20: mol_type = other DNA
tgcctattacagaacctgga

SEQ ID NO: 25426 - DNA, 20 bp, synthetic construct
  misc_feature 1..20: note = chemically synthesized
  source 1..20: mol_type = other DNA
tccatgggcaaagggctcgt

SEQ ID NO: 25427 - DNA, 20 bp, synthetic construct
  misc_feature 1..20: note = chemically synthesized
  source 1..20: mol_type = other DNA
ctctcacgagccctttgccc

SEQ ID NO: 25428 - DNA, 20 bp, synthetic construct
  misc_feature 1..20: note = chemically synthesized
  source 1..20: mol_type = other DNA
ttcaggaaagtattgcagaa

SEQ ID NO: 25429 - DNA, 20 bp, synthetic construct
  misc_feature 1..20: note = chemically synthesized
  source 1..20: mol_type = other DNA
agagcatgacaaaagtacaa

SEQ ID NO: 25430 - DNA, 20 bp, synthetic construct
  misc_feature 1..20: note = chemically synthesized
  source 1..20: mol_type = other DNA
cagtatggacgctgtccaaa

SEQ ID NO: 25431 - DNA, 20 bp, synthetic construct
  misc_feature 1..20: note = chemically synthesized
  source 1..20: mol_type = other DNA
ggaaaaacagaacaagtttc

SEQ ID NO: 25432 - DNA, 20 bp, synthetic construct
  misc_feature 1..20: note = chemically synthesized
  source 1..20: mol_type = other DNA
agaacaagtttctggggtta

SEQ ID NO: 25433 - DNA, 20 bp, synthetic construct
  misc_feature 1..20: note = chemically synthesized
  source 1..20: mol_type = other DNA
caagtttctggggttactga

SEQ ID NO: 25434 - DNA, 20 bp, synthetic construct
  misc_feature 1..20: note = chemically synthesized
  source 1..20: mol_type = other DNA
ccaaagcctacaccttcaag

SEQ ID NO: 25435 - DNA, 20 bp, synthetic construct
  misc_feature 1..20: note = chemically synthesized
  source 1..20: mol_type = other DNA
caagaagagtgtagcctgag

SEQ ID NO: 25436 - DNA, 20 bp, synthetic construct
  misc_feature 1..20: note = chemically synthesized
  source 1..20: mol_type = other DNA
gttgcctctagaagggagaa

SEQ ID NO: 25437 - DNA, 20 bp, synthetic construct
  misc_feature 1..20: note = chemically synthesized
  source 1..20: mol_type = other DNA
acttttgcattttgaactgt

SEQ ID NO: 25438 - DNA, 20 bp, synthetic construct
  misc_feature 1..20: note = chemically synthesized
  source 1..20: mol_type = other DNA
tatcttttttttttttgaga

SEQ ID NO: 25439 - DNA, 20 bp, synthetic construct
  misc_feature 1..20: note = chemically synthesized
  source 1..20: mol_type = other DNA
tctggctcagtaacccagcc

SEQ ID NO: 25440 - DNA, 20 bp, synthetic construct
  misc_feature 1..20: note = chemically synthesized
  source 1..20: mol_type = other DNA
tcattgtgacctctacctcc

SEQ ID NO: 25441 - DNA, 20 bp, synthetic construct
  misc_feature 1..20: note = chemically synthesized
  source 1..20: mol_type = other DNA
gatcctcccacctcagcctc

SEQ ID NO: 25442 - DNA, 20 bp, synthetic construct
  misc_feature 1..20: note = chemically synthesized
  source 1..20: mol_type = other DNA
ttttgtatttttagtagaga

SEQ ID NO: 25443 - DNA, 20 bp, synthetic construct
  misc_feature 1..20: note = chemically synthesized
  source 1..20: mol_type = other DNA
acctcagcctcccaaagtgc

SEQ ID NO: 25444 - DNA, 20 bp, synthetic construct
  misc_feature 1..20: note = chemically synthesized
  source 1..20: mol_type = other DNA
caggcagatcacatgaggtc

SEQ ID NO: 25445 - DNA, 20 bp, synthetic construct
  misc_feature 1..20: note = chemically synthesized
  source 1..20: mol_type = other DNA
cgtttctaccaaaaaatata

SEQ ID NO: 25446 - DNA, 20 bp, synthetic construct
  misc_feature 1..20: note = chemically synthesized
  source 1..20: mol_type = other DNA
tactcgggaggctaaggcaa

SEQ ID NO: 25447 - DNA, 20 bp, synthetic construct
  misc_feature 1..20: note = chemically synthesized
  source 1..20: mol_type = other DNA
ttatgccactgcactacagg

SEQ ID NO: 25448 - DNA, 20 bp, synthetic construct
  misc_feature 1..20: note = chemically synthesized
  source 1..20: mol_type = other DNA
tcaagaagtatttgtcctgg

SEQ ID NO: 25449 - DNA, 20 bp, synthetic construct
  misc_feature 1..20: note = chemically synthesized
  source 1..20: mol_type = other DNA
aacttggacttgcatatacc

SEQ ID NO: 25450 - DNA, 20 bp, synthetic construct
  misc_feature 1..20: note = chemically synthesized
  source 1..20: mol_type = other DNA
atgggttccctcaggcctca

SEQ ID NO: 25451 - DNA, 20 bp, synthetic construct
  misc_feature 1..20: note = chemically synthesized
  source 1..20: mol_type = other DNA
ttgcatttcctctgacatca

SEQ ID NO: 25452 - DNA, 20 bp, synthetic construct
  misc_feature 1..20: note = chemically synthesized
  source 1..20: mol_type = other DNA
aacatggcctgcatttccat

SEQ ID NO: 25453 - DNA, 20 bp, synthetic construct
  misc_feature 1..20: note = chemically synthesized
  source 1..20: mol_type = other DNA
ccatcagaattgctctctgt

SEQ ID NO: 25454 - DNA, 20 bp, synthetic construct
  misc_feature 1..20: note = chemically synthesized
  source 1..20: mol_type = other DNA
gtatcctctctactttgaaa

SEQ ID NO: 25455 - DNA, 20 bp, synthetic construct
  misc_feature 1..20: note = chemically synthesized
  source 1..20: mol_type = other DNA
aataggtgtcaaccgccagt

SEQ ID NO: 25456 - DNA, 20 bp, synthetic construct
  misc_feature 1..20: note = chemically synthesized
  source 1..20: mol_type = other DNA
tgccttttatcccgtgatgg

SEQ ID NO: 25457 - DNA, 20 bp, synthetic construct
  misc_feature 1..20: note = chemically synthesized
  source 1..20: mol_type = other DNA
ttcaatggagatcagatgtt

SEQ ID NO: 25458 - DNA, 20 bp, synthetic construct
  misc_feature 1..20: note = chemically synthesized
  source 1..20: mol_type = other DNA
cacttcatctttttattttt

SEQ ID NO: 25459 - DNA, 20 bp, synthetic construct
  misc_feature 1..20: note = chemically synthesized
  source 1..20: mol_type = other DNA
tattttttagaatcatgcgg

SEQ ID NO: 25460 - DNA, 20 bp, synthetic construct
  misc_feature 1..20: note = chemically synthesized
  source 1..20: mol_type = other DNA
ggcaggcagatcatgaggtc

SEQ ID NO: 25461 - DNA, 20 bp, synthetic construct
  misc_feature 1..20: note = chemically synthesized
  source 1..20: mol_type = other DNA
tacttgggaggctgaggcag

SEQ ID NO: 25462 - DNA, 20 bp, synthetic construct
  misc_feature 1..20: note = chemically synthesized
  source 1..20: mol_type = other DNA
aaagaaagaaagaaagtggc

SEQ ID NO: 25463 - DNA, 20 bp, synthetic construct
  misc_feature 1..20: note = chemically synthesized
  source 1..20: mol_type = other DNA
agaaagaaagtggccagaat

SEQ ID NO: 25464 - DNA, 20 bp, synthetic construct
  misc_feature 1..20: note = chemically synthesized
  source 1..20: mol_type = other DNA
gggctttcccctgctcccca

SEQ ID NO: 25465 - DNA, 20 bp, synthetic construct
  misc_feature 1..20: note = chemically synthesized
  source 1..20: mol_type = other DNA
ttgccaaggacatgtagttg

SEQ ID NO: 25466 - DNA, 20 bp, synthetic construct
  misc_feature 1..20: note = chemically synthesized
  source 1..20: mol_type = other DNA
gagggctggagcccagttcc

SEQ ID NO: 25467 - DNA, 20 bp, synthetic construct
  misc_feature 1..20: note = chemically synthesized
  source 1..20: mol_type = other DNA
ttaccccacaaaacaggctg

SEQ ID NO: 25468 - DNA, 20 bp, synthetic construct
  misc_feature 1..20: note = chemically synthesized
  source 1..20: mol_type = other DNA
tcttttttttttttttgaga

SEQ ID NO: 25469 - DNA, 20 bp, synthetic construct
  misc_feature 1..20: note = chemically synthesized
  source 1..20: mol_type = other DNA
tcttactctgttgcccaggc

SEQ ID NO: 25470 - DNA, 20 bp, synthetic construct
  misc_feature 1..20: note = chemically synthesized
  source 1..20: mol_type = other DNA
ccgcctctcacctcagcctc

SEQ ID NO: 25471 - DNA, 20 bp, synthetic construct
  misc_feature 1..20: note = chemically synthesized
  source 1..20: mol_type = other DNA
tcgtaatgtttttgtagaga

SEQ ID NO: 25472 - DNA, 20 bp, synthetic construct
  misc_feature 1..20: note = chemically synthesized
  source 1..20: mol_type = other DNA
cccaggctggtcttgaactc

SEQ ID NO: 25473 - DNA, 20 bp, synthetic construct
  misc_feature 1..20: note = chemically synthesized
  source 1..20: mol_type = other DNA
ttgaactcctgagttcaccc

SEQ ID NO: 25474 - DNA, 20 bp, synthetic construct
  misc_feature 1..20: note = chemically synthesized
  source 1..20: mol_type = other DNA
acctcggcctcccaaagtgc

SEQ ID NO: 25475 - DNA, 20 bp, synthetic construct
  misc_feature 1..20: note = chemically synthesized
  source 1..20: mol_type = other DNA
ctgtattttcaactcactgg

SEQ ID NO: 25476 - DNA, 20 bp, synthetic construct
  misc_feature 1..20: note = chemically synthesized
  source 1..20: mol_type = other DNA
gatgatccaaagtcagagag

SEQ ID NO: 25477 - DNA, 20 bp, synthetic construct
  misc_feature 1..20: note = chemically synthesized
  source 1..20: mol_type = other DNA
cagagagaggggttggaagc

SEQ ID NO: 25478 - DNA, 20 bp, synthetic construct
  misc_feature 1..20: note = chemically synthesized
  source 1..20: mol_type = other DNA
catgagtagcccgtggcttc

SEQ ID NO: 25479 - DNA, 20 bp, synthetic construct
  misc_feature 1..20: note = chemically synthesized
  source 1..20: mol_type = other DNA
gatggacagacattgcgaga

SEQ ID NO: 25480 - DNA, 20 bp, synthetic construct
  misc_feature 1..20: note = chemically synthesized
  source 1..20: mol_type = other DNA
ctccaatcacagctacccaa

SEQ ID NO: 25481 - DNA, 20 bp, synthetic construct
  misc_feature 1..20: note = chemically synthesized
  source 1..20: mol_type = other DNA
caccaagatgaaccagtcct

SEQ ID NO: 25482 - DNA, 20 bp, synthetic construct
  misc_feature 1..20: note = chemically synthesized
  source 1..20: mol_type = other DNA
acctggaggtaatgtgttga

SEQ ID NO: 25483 - DNA, 20 bp, synthetic construct
  misc_feature 1..20: note = chemically synthesized
  source 1..20: mol_type = other DNA
ttggtggtgattgctctgct

SEQ ID NO: 25484 - DNA, 20 bp, synthetic construct
  misc_feature 1..20: note = chemically synthesized
  source 1..20: mol_type = other DNA
ccatatagagaggagatcag

SEQ ID NO: 25485 - DNA, 20 bp, synthetic construct
  misc_feature 1..20: note = chemically synthesized
  source 1..20: mol_type = other DNA
catctacataaagggggaag

SEQ ID NO: 25486 - DNA, 20 bp, synthetic construct
  misc_feature 1..20: note = chemically synthesized
  source 1..20: mol_type = other DNA
tgaagcagaagaggtaacat

SEQ ID NO: 25487 - DNA, 20 bp, synthetic construct
  misc_feature 1..20: note = chemically synthesized
  source 1..20: mol_type = other DNA
tgaggtagttactgctattt

SEQ ID NO: 25488 - DNA, 20 bp, synthetic construct
  misc_feature 1..20: note = chemically synthesized
  source 1..20: mol_type = other DNA
gtggctctccctgatttcgg

SEQ ID NO: 25489 - DNA, 20 bp, synthetic construct
  misc_feature 1..20: note = chemically synthesized
  source 1..20: mol_type = other DNA
ctaattctttatattttttg

SEQ ID NO: 25490 - DNA, 20 bp, synthetic construct
  misc_feature 1..20: note = chemically synthesized
  source 1..20: mol_type = other DNA
ccaccgcgcctgcctggagt

SEQ ID NO: 25491 - DNA, 20 bp, synthetic construct
  misc_feature 1..20: note = chemically synthesized
  source 1..20: mol_type = other DNA
aaagcattcattcagtaacc

SEQ ID NO: 25492 - DNA, 20 bp, synthetic construct
  misc_feature 1..20: note = chemically synthesized
  source 1..20: mol_type = other DNA
ccagtatggacgctgtccaa

SEQ ID NO: 25493 - DNA, 20 bp, synthetic construct
  misc_feature 1..20: note = chemically synthesized
  source 1..20: mol_type = other DNA
ccgtttctaccaaaaaatat

SEQ ID NO: 25494 - DNA, 20 bp, synthetic construct
  misc_feature 1..20: note = chemically synthesized
  source 1..20: mol_type = other DNA
ctactcgggaggctaaggca

SEQ ID NO: 25495 - DNA, 20 bp, synthetic construct
  misc_feature 1..20: note = chemically synthesized
  source 1..20: mol_type = other DNA
ctcaagaagtatttgtcctg

SEQ ID NO: 25496 - DNA, 20 bp, synthetic construct
  misc_feature 1..20: note = chemically synthesized
  source 1..20: mol_type = other DNA
cttgcatttcctctgacatc

SEQ ID NO: 25497 - DNA, 20 bp, synthetic construct
  misc_feature 1..20: note = chemically synthesized
  source 1..20: mol_type = other DNA
aaacatggcctgcatttcca

SEQ ID NO: 25498 - DNA, 20 bp, synthetic construct
  misc_feature 1..20: note = chemically synthesized
  source 1..20: mol_type = other DNA
acacttcatctttttatttt

SEQ ID NO: 25499 - DNA, 20 bp, synthetic construct
  misc_feature 1..20: note = chemically synthesized
  source 1..20: mol_type = other DNA
ctacttgggaggctgaggca

SEQ ID NO: 25500 - DNA, 20 bp, synthetic construct
  misc_feature 1..20: note = chemically synthesized
  source 1..20: mol_type = other DNA
ccatctcaaacaaacaaaca

SEQ ID NO: 25501 - DNA, 20 bp, synthetic construct
  misc_feature 1..20: note = chemically synthesized
  source 1..20: mol_type = other DNA
ctcaaacaaacaaacaaaag

SEQ ID NO: 25502 - DNA, 20 bp, synthetic construct
  misc_feature 1..20: note = chemically synthesized
  source 1..20: mol_type = other DNA
aacaaacaaacaaaagaaag

SEQ ID NO: 25503 - DNA, 20 bp, synthetic construct
  misc_feature 1..20: note = chemically synthesized
  source 1..20: mol_type = other DNA
aacaaacaaaagaaagaaag

SEQ ID NO: 25504 - DNA, 20 bp, synthetic construct
  misc_feature 1..20: note = chemically synthesized
  source 1..20: mol_type = other DNA
gaaagaaagaaagaaagtgg

SEQ ID NO: 25505 - DNA, 20 bp, synthetic construct
  misc_feature 1..20: note = chemically synthesized
  source 1..20: mol_type = other DNA
agaatgggaatgtttacgtg

SEQ ID NO: 25506 - DNA, 20 bp, synthetic construct
  misc_feature 1..20: note = chemically synthesized
  source 1..20: mol_type = other DNA
taaatagcagtaactacctc

SEQ ID NO: 25507 - DNA, 20 bp, synthetic construct
  misc_feature 1..20: note = chemically synthesized
  source 1..20: mol_type = other DNA
acctatttgtagattataaa

SEQ ID NO: 25508 - DNA, 20 bp, synthetic construct
  misc_feature 1..20: note = chemically synthesized
  source 1..20: mol_type = other DNA
aatactggatacagggcata

SEQ ID NO: 25509 - DNA, 20 bp, synthetic construct
  misc_feature 1..20: note = chemically synthesized
  source 1..20: mol_type = other DNA
tggcgaaactccatctctac

SEQ ID NO: 25510 - DNA, 20 bp, synthetic construct
  misc_feature 1..20: note = chemically synthesized
  source 1..20: mol_type = other DNA
cccgtctctactaaaaatac

SEQ ID NO: 25511 - DNA, 20 bp, synthetic construct
  misc_feature 1..20: note = chemically synthesized
  source 1..20: mol_type = other DNA
ttgctgtagtagtcagtatc

SEQ ID NO: 25512 - DNA, 20 bp, synthetic construct
  misc_feature 1..20: note = chemically synthesized
  source 1..20: mol_type = other DNA
gtccaaagagaatcctatgg

SEQ ID NO: 25513 - DNA, 20 bp, synthetic construct
  misc_feature 1..20: note = chemically synthesized
  source 1..20: mol_type = other DNA
gataacctatttgtagatta

SEQ ID NO: 25514 - DNA, 20 bp, synthetic construct
  misc_feature 1..20: note = chemically synthesized
  source 1..20: mol_type = other DNA
ggtgacttttcattacccca

SEQ ID NO: 25515 - DNA, 20 bp, synthetic construct
  misc_feature 1..20: note = chemically synthesized
  source 1..20: mol_type = other DNA
cctcttctgcttcatactaa

SEQ ID NO: 25516 - DNA, 20 bp, synthetic construct
  misc_feature 1..20: note = chemically synthesized
  source 1..20: mol_type = other DNA
cagccctgatctttggactc

SEQ ID NO: 25517 - DNA, 20 bp, synthetic construct
  misc_feature 1..20: note = chemically synthesized
  source 1..20: mol_type = other DNA
cattaaactcctttgggtag

SEQ ID NO: 25518 - DNA, 20 bp, synthetic construct
  misc_feature 1..20: note = chemically synthesized
  source 1..20: mol_type = other DNA
cgcaatgtctgtccatcaga

SEQ ID NO: 25519 - DNA, 20 bp, synthetic construct
  misc_feature 1..20: note = chemically synthesized
  source 1..20: mol_type = other DNA
ttcaggaagccacgggctac

SEQ ID NO: 25520 - DNA, 20 bp, synthetic construct
  misc_feature 1..20: note = chemically synthesized
  source 1..20: mol_type = other DNA
tcgtgaaaagtctgagttat

SEQ ID NO: 25521 - DNA, 20 bp, synthetic construct
  misc_feature 1..20: note = chemically synthesized
  source 1..20: mol_type = other DNA
agttatataggctttgagca

SEQ ID NO: 25522 - DNA, 20 bp, synthetic construct
  misc_feature 1..20: note = chemically synthesized
  source 1..20: mol_type = other DNA
tatgaaaaaaggaaacacac

SEQ ID NO: 25523 - DNA, 20 bp, synthetic construct
  misc_feature 1..20: note = chemically synthesized
  source 1..20: mol_type = other DNA
aacacacagatgattcaaca

SEQ ID NO: 25524 - DNA, 20 bp, synthetic construct
  misc_feature 1..20: note = chemically synthesized
  source 1..20: mol_type = other DNA
tggcaagtcatatcaattat

SEQ ID NO: 25525 - DNA, 20 bp, synthetic construct
  misc_feature 1..20: note = chemically synthesized
  source 1..20: mol_type = other DNA
gtcatatcaattatctgagt

SEQ ID NO: 25526 - DNA, 20 bp, synthetic construct
  misc_feature 1..20: note = chemically synthesized
  source 1..20: mol_type = other DNA
tctacaaataggttatctct

SEQ ID NO: 25527 - DNA, 20 bp, synthetic construct
  misc_feature 1..20: note = chemically synthesized
  source 1..20: mol_type = other DNA
tgtgtgccagtccatgtgct

SEQ ID NO: 25528 - DNA, 20 bp, synthetic construct
  misc_feature 1..20: note = chemically synthesized
  source 1..20: mol_type = other DNA
agagaccaaggtgctgagtt

SEQ ID NO: 25529 - DNA, 20 bp, synthetic construct
  misc_feature 1..20: note = chemically synthesized
  source 1..20: mol_type = other DNA
atggaagcccaggtaggcag

SEQ ID NO: 25530 - DNA, 20 bp, synthetic construct
  misc_feature 1..20: note = chemically synthesized
  source 1..20: mol_type = other DNA
ctggggagcaggggaaagcc

SEQ ID NO: 25531 - DNA, 20 bp, synthetic construct
  misc_feature 1..20: note = chemically synthesized
  source 1..20: mol_type = other DNA
ccactttctttctttctttc

SEQ ID NO: 25532 - DNA, 20 bp, synthetic construct
  misc_feature 1..20: note = chemically synthesized
  source 1..20: mol_type = other DNA
tttctttctttctttctttt

SEQ ID NO: 25533 - DNA, 20 bp, synthetic construct
  misc_feature 1..20: note = chemically synthesized
  source 1..20: mol_type = other DNA
tttctttctttcttttgttt

SEQ ID NO: 25534 - DNA, 20 bp, synthetic construct
  misc_feature 1..20: note = chemically synthesized
  source 1..20: mol_type = other DNA
aacctctgcctctccggttc

SEQ ID NO: 25535 - DNA, 20 bp, synthetic construct
  misc_feature 1..20: note = chemically synthesized
  source 1..20: mol_type = other DNA
tgcctcagcctcccaagtag

SEQ ID NO: 25536 - DNA, 20 bp, synthetic construct
  misc_feature 1..20: note = chemically synthesized
  source 1..20: mol_type = other DNA
ttttgtatttttagtagaga

SEQ ID NO: 25537 - DNA, 20 bp, synthetic construct
  misc_feature 1..20: note = chemically synthesized
  source 1..20: mol_type = other DNA
tgccttggcctccctaagtg

SEQ ID NO: 25538 - DNA, 20 bp, synthetic construct
  misc_feature 1..20: note = chemically synthesized
  source 1..20: mol_type = other DNA
gtgagccactacacccagcc

SEQ ID NO: 25539 - DNA, 20 bp, synthetic construct
  misc_feature 1..20: note = chemically synthesized
  source 1..20: mol_type = other DNA
aggccagagttagtggctct

SEQ ID NO: 25540 - DNA, 20 bp, synthetic construct
  misc_feature 1..20: note = chemically synthesized
  source 1..20: mol_type = other DNA
tctagtacttttaaagggga

SEQ ID NO: 25541 - DNA, 20 bp, synthetic construct
  misc_feature 1..20: note = chemically synthesized
  source 1..20: mol_type = other DNA
gaagtggtttgtctgagata

SEQ ID NO: 25542 - DNA, 20 bp, synthetic construct
  misc_feature 1..20: note = chemically synthesized
  source 1..20: mol_type = other DNA
aattctgatggaaatgcagg

SEQ ID NO: 25543 - DNA, 20 bp, synthetic construct
  misc_feature 1..20: note = chemically synthesized
  source 1..20: mol_type = other DNA
tctctgatgtcagaggaaat

SEQ ID NO: 25544 - DNA, 20 bp, synthetic construct
  misc_feature 1..20: note = chemically synthesized
  source 1..20: mol_type = other DNA
aacccatggtatatgcaagt

SEQ ID NO: 25545 - DNA, 20 bp, synthetic construct
  misc_feature 1..20: note = chemically synthesized
  source 1..20: mol_type = other DNA
aagtcacatagctgccattt

SEQ ID NO: 25546 - DNA, 20 bp, synthetic construct
  misc_feature 1..20: note = chemically synthesized
  source 1..20: mol_type = other DNA
tagctgccattttatggatt

SEQ ID NO: 25547 - DNA, 20 bp, synthetic construct
  misc_feature 1..20: note = chemically synthesized
  source 1..20: mol_type = other DNA
aacctccgcctcccaggttc

SEQ ID NO: 25548 - DNA, 20 bp, synthetic construct
  misc_feature 1..20: note = chemically synthesized
  source 1..20: mol_type = other DNA
tgccttagcctcccgagtag

SEQ ID NO: 25549 - DNA, 20 bp, synthetic construct
  misc_feature 1..20: note = chemically synthesized
  source 1..20: mol_type = other DNA
tttatattttttggtagaaa

SEQ ID NO: 25550 - DNA, 20 bp, synthetic construct
  misc_feature 1..20: note = chemically synthesized
  source 1..20: mol_type = other DNA
tgccttggcctcccaaagtg

SEQ ID NO: 25551 - DNA, 20 bp, synthetic construct
  misc_feature 1..20: note = chemically synthesized
  source 1..20: mol_type = other DNA
cctgcctggagttcagaatc

SEQ ID NO: 25552 - DNA, 20 bp, synthetic construct
  misc_feature 1..20: note = chemically synthesized
  source 1..20: mol_type = other DNA
agaatcttgggcttcattat

SEQ ID NO: 25553 - DNA, 20 bp, synthetic construct
  misc_feature 1..20: note = chemically synthesized
  source 1..20: mol_type = other DNA
cactttgggaggctgaggtg

SEQ ID NO: 25554 - DNA, 20 bp, synthetic construct
  misc_feature 1..20: note = chemically synthesized
  source 1..20: mol_type = other DNA
gaggtagaggtcacaatgag

SEQ ID NO: 25555 - DNA, 20 bp, synthetic construct
  misc_feature 1..20: note = chemically synthesized
  source 1..20: mol_type = other DNA
gctacactcttcttgaaggt

SEQ ID NO: 25556 - DNA, 20 bp, synthetic construct
  misc_feature 1..20: note = chemically synthesized
  source 1..20: mol_type = other DNA
tcagtaaccccagaaacttg

SEQ ID NO: 25557 - DNA, 20 bp, synthetic construct
  misc_feature 1..20: note = chemically synthesized
  source 1..20: mol_type = other DNA
gaaacttgttctgtttttcc

SEQ ID NO: 25558 - DNA, 20 bp, synthetic construct
  misc_feature 1..20: note = chemically synthesized
  source 1..20: mol_type = other DNA
tttggacagcgtccatactg

SEQ ID NO: 25559 - DNA, 20 bp, synthetic construct
  misc_feature 1..20: note = chemically synthesized
  source 1..20: mol_type = other DNA
gcagacagaagctgagtgga

SEQ ID NO: 25560 - DNA, 20 bp, synthetic construct
  misc_feature 1..20: note = chemically synthesized
  source 1..20: mol_type = other DNA
tccatccaggttctgtaata

SEQ ID NO: 25561 - DNA, 20 bp, synthetic construct
  misc_feature 1..20: note = chemically synthesized
  source 1..20: mol_type = other DNA
tctcctcatgtcccctcaag

SEQ ID NO: 25562 - DNA, 20 bp, synthetic construct
  misc_feature 1..20: note = chemically synthesized
  source 1..20: mol_type = other DNA
taacaggtaaacgaggtcca

SEQ ID NO: 25563 - DNA, 20 bp, synthetic construct
  misc_feature 1..20: note = chemically synthesized
  source 1..20: mol_type = other DNA
gcttctgtctgcaggggctg

SEQ ID NO: 25564 - DNA, 20 bp, synthetic construct
  misc_feature 1..20: note = chemically synthesized
  source 1..20: mol_type = other DNA
cagtctcacaggttacaggg

SEQ ID NO: 25565 - DNA, 20 bp, synthetic construct
  misc_feature 1..20: note = chemically synthesized
  source 1..20: mol_type = other DNA
gaatcctatggaaaaacaga

SEQ ID NO: 25566 - DNA, 20 bp, synthetic construct
  misc_feature 1..20: note = chemically synthesized
  source 1..20: mol_type = other DNA
agtttctggggttactgaat

SEQ ID NO: 25567 - DNA, 20 bp, synthetic construct
  misc_feature 1..20: note = chemically synthesized
  source 1..20: mol_type = other DNA
tcaagaagagtgtagcctga

SEQ ID NO: 25568 - DNA, 20 bp, synthetic construct
  misc_feature 1..20: note = chemically synthesized
  source 1..20: mol_type = other DNA
tatgtaacttttgcattttg

SEQ ID NO: 25569 - DNA, 20 bp, synthetic construct
  misc_feature 1..20: note = chemically synthesized
  source 1..20: mol_type = other DNA
ggtgtgtgccaccacatcca

SEQ ID NO: 25570 - DNA, 20 bp, synthetic construct
  misc_feature 1..20: note = chemically synthesized
  source 1..20: mol_type = other DNA
ttttgtatttttagtagaga

SEQ ID NO: 25571 - DNA, 20 bp, synthetic construct
  misc_feature 1..20: note = chemically synthesized
  source 1..20: mol_type = other DNA
cacctcagcctcccaaagtg

SEQ ID NO: 25572 - DNA, 20 bp, synthetic construct
  misc_feature 1..20: note = chemically synthesized
  source 1..20: mol_type = other DNA
ttaaacacaaataatgaagc

SEQ ID NO: 25573 - DNA, 20 bp, synthetic construct
  misc_feature 1..20: note = chemically synthesized
  source 1..20: mol_type = other DNA
caggcagatcacatgaggtc

SEQ ID NO: 25574 - DNA, 20 bp, synthetic construct
  misc_feature 1..20: note = chemically synthesized
  source 1..20: mol_type = other DNA
gcctggccaacatggtgaaa

SEQ ID NO: 25575 - DNA, 20 bp, synthetic construct
  misc_feature 1..20: note = chemically synthesized
  source 1..20: mol_type = other DNA
tcgggaggctaaggcaagag

SEQ ID NO: 25576 - DNA, 20 bp, synthetic construct
  misc_feature 1..20: note = chemically synthesized
  source 1..20: mol_type = other DNA
gaggcggaggttgccgtgag

SEQ ID NO: 25577 - DNA, 20 bp, synthetic construct
  misc_feature 1..20: note = chemically synthesized
  source 1..20: mol_type = other DNA
tggaagaatgcatatggaac

SEQ ID NO: 25578 - DNA, 20 bp, synthetic construct
  misc_feature 1..20: note = chemically synthesized
  source 1..20: mol_type = other DNA
ttgctctctgtaaggatgta

SEQ ID NO: 25579 - DNA, 20 bp, synthetic construct
  misc_feature 1..20: note = chemically synthesized
  source 1..20: mol_type = other DNA
gtaaggatgtatatagcttc

SEQ ID NO: 25580 - DNA, 20 bp, synthetic construct
  misc_feature 1..20: note = chemically synthesized
  source 1..20: mol_type = other DNA
tttatcccgtgatggtggaa

SEQ ID NO: 25581 - DNA, 20 bp, synthetic construct
  misc_feature 1..20: note = chemically synthesized
  source 1..20: mol_type = other DNA
ctctggcctctatcaaccca

SEQ ID NO: 25582 - DNA, 20 bp, synthetic construct
  misc_feature 1..20: note = chemically synthesized
  source 1..20: mol_type = other DNA
atggttcttcaatggagatc

SEQ ID NO: 25583 - DNA, 20 bp, synthetic construct
  misc_feature 1..20: note = chemically synthesized
  source 1..20: mol_type = other DNA
gaggcagaggttgcagtgag

SEQ ID NO: 25584 - DNA, 20 bp, synthetic construct
  misc_feature 1..20: note = chemically synthesized
  source 1..20: mol_type = other DNA
aaagaaagtggccagaatgg

SEQ ID NO: 25585 - DNA, 20 bp, synthetic construct
  misc_feature 1..20: note = chemically synthesized
  source 1..20: mol_type = other DNA
aaattggcaaatgctaaact

SEQ ID NO: 25586 - DNA, 20 bp, synthetic construct
  misc_feature 1..20: note = chemically synthesized
  source 1..20: mol_type = other DNA
tttcccctgctccccagaga

SEQ ID NO: 25587 - DNA, 20 bp, synthetic construct
  misc_feature 1..20: note = chemically synthesized
  source 1..20: mol_type = other DNA
gcggaagccagcctgcctac

SEQ ID NO: 25588 - DNA, 20 bp, synthetic construct
  misc_feature 1..20: note = chemically synthesized
  source 1..20: mol_type = other DNA
agcaccttggtctctgcatc

SEQ ID NO: 25589 - DNA, 20 bp, synthetic construct
  misc_feature 1..20: note = chemically synthesized
  source 1..20: mol_type = other DNA
atagcacatggactggcaca

SEQ ID NO: 25590 - DNA, 20 bp, synthetic construct
  misc_feature 1..20: note = chemically synthesized
  source 1..20: mol_type = other DNA
cactgtttaataaatgttaa

SEQ ID NO: 25591 - DNA, 20 bp, synthetic construct
  misc_feature 1..20: note = chemically synthesized
  source 1..20: mol_type = other DNA
gctgccagagataacctatt

SEQ ID NO: 25592 - DNA, 20 bp, synthetic construct
  misc_feature 1..20: note = chemically synthesized
  source 1..20: mol_type = other DNA
aacaggctgttgaatcatct

SEQ ID NO: 25593 - DNA, 20 bp, synthetic construct
  misc_feature 1..20: note = chemically synthesized
  source 1..20: mol_type = other DNA
acacgcccagctaattttcg

SEQ ID NO: 25594 - DNA, 20 bp, synthetic construct
  misc_feature 1..20: note = chemically synthesized
  source 1..20: mol_type = other DNA
tcgtaatgtttttgtagaga

SEQ ID NO: 25595 - DNA, 20 bp, synthetic construct
  misc_feature 1..20: note = chemically synthesized
  source 1..20: mol_type = other DNA
gaactcctgagttcacccag

SEQ ID NO: 25596 - DNA, 20 bp, synthetic construct
  misc_feature 1..20: note = chemically synthesized
  source 1..20: mol_type = other DNA
cacctcggcctcccaaagtg

SEQ ID NO: 25597 - DNA, 20 bp, synthetic construct
  misc_feature 1..20: note = chemically synthesized
  source 1..20: mol_type = other DNA
atctttctttatgttacctc

SEQ ID NO: 25598 - DNA, 20 bp, synthetic construct
  misc_feature 1..20: note = chemically synthesized
  source 1..20: mol_type = other DNA
taccctttaacccatatgaa

SEQ ID NO: 25599 - DNA, 20 bp, synthetic construct
  misc_feature 1..20: note = chemically synthesized
  source 1..20: mol_type = other DNA
cctgtattttcaactcactg

SEQ ID NO: 25600 - DNA, 20 bp, synthetic construct
  misc_feature 1..20: note = chemically synthesized
  source 1..20: mol_type = other DNA
ggttggaagcatgagtagcc

SEQ ID NO: 25601 - DNA, 20 bp, synthetic construct
  misc_feature 1..20: note = chemically synthesized
  source 1..20: mol_type = other DNA
ctccaatcacagctacccaa

SEQ ID NO: 25602 - DNA, 20 bp, synthetic construct
  misc_feature 1..20: note = chemically synthesized
  source 1..20: mol_type = other DNA
acccaaaggagtttaatgcc

SEQ ID NO: 25603 - DNA, 20 bp, synthetic construct
  misc_feature 1..20: note = chemically synthesized
  source 1..20: mol_type = other DNA
gcagagcccttgcagttatt

SEQ ID NO: 25604 - DNA, 20 bp, synthetic construct
  misc_feature 1..20: note = chemically synthesized
  source 1..20: mol_type = other DNA
tgcagttattccaggcttgg

SEQ ID NO: 25605 - DNA, 20 bp, synthetic construct
  misc_feature 1..20: note = chemically synthesized
  source 1..20: mol_type = other DNA
gctatgagtctgtgccttgc

SEQ ID NO: 25606 - DNA, 20 bp, synthetic construct
  misc_feature 1..20: note = chemically synthesized
  source 1..20: mol_type = other DNA
ctgatctttggactcaaaaa

SEQ ID NO: 25607 - DNA, 22 bp, synthetic construct
  misc_feature 1..22: note = chemically synthesized
  source 1..22: mol_type = other DNA
tagacaaacgtggtttttgagt

SEQ ID NO: 25608 - DNA, 22 bp, synthetic construct
  misc_feature 1..22: note = chemically synthesized
  source 1..22: mol_type = other DNA
agacaaacgtggtttttgagtc

SEQ ID NO: 25609 - DNA, 22 bp, synthetic construct
  misc_feature 1..22: note = chemically synthesized
  source 1..22: mol_type = other DNA
gacaaacgtggtttttgagtcc

SEQ ID NO: 25610 - DNA, 22 bp, synthetic construct
  misc_feature 1..22: note = chemically synthesized
  source 1..22: mol_type = other DNA
ttgagtccaaagatcagggctg

SEQ ID NO: 25611 - DNA, 22 bp, synthetic construct
  misc_feature 1..22: note = chemically synthesized
  source 1..22: mol_type = other DNA
tgagtccaaagatcagggctgg

SEQ ID NO: 25612 - DNA, 22 bp, synthetic construct
  misc_feature 1..22: note = chemically synthesized
  source 1..22: mol_type = other DNA
gagtccaaagatcagggctggg

SEQ ID NO: 25613 - DNA, 22 bp, synthetic construct
  misc_feature 1..22: note = chemically synthesized
  source 1..22: mol_type = other DNA
agtccaaagatcagggctgggt

SEQ ID NO: 25614 - DNA, 22 bp, synthetic construct
  misc_feature 1..22: note = chemically synthesized
  source 1..22: mol_type = other DNA
ggttgacctgaatactggatac

SEQ ID NO: 25615 - DNA, 22 bp, synthetic construct
  misc_feature 1..22: note = chemically synthesized
  source 1..22: mol_type = other DNA
acctgaatactggatacagggc

SEQ ID NO: 25616 - DNA, 22 bp, synthetic construct
  misc_feature 1..22: note = chemically synthesized
  source 1..22: mol_type = other DNA
aatactggatacagggcatata

SEQ ID NO: 25617 - DNA, 22 bp, synthetic construct
  misc_feature 1..22: note = chemically synthesized
  source 1..22: mol_type = other DNA
gatacagggcatataaaacagg

SEQ ID NO: 25618 - DNA, 22 bp, synthetic construct
  misc_feature 1..22: note = chemically synthesized
  source 1..22: mol_type = other DNA
atagcagagcaatcaccaccaa

SEQ ID NO: 25619 - DNA, 22 bp, synthetic construct
  misc_feature 1..22: note = chemically synthesized
  source 1..22: mol_type = other DNA
gaataactgcaagggctctgct

SEQ ID NO: 25620 - DNA, 22 bp, synthetic construct
  misc_feature 1..22: note = chemically synthesized
  source 1..22: mol_type = other DNA
caagggctctgctgacatcttc

SEQ ID NO: 25621 - DNA, 22 bp, synthetic construct
  misc_feature 1..22: note = chemically synthesized
  source 1..22: mol_type = other DNA
tgctgacatcttcctgaggtgc

SEQ ID NO: 25622 - DNA, 22 bp, synthetic construct
  misc_feature 1..22: note = chemically synthesized
  source 1..22: mol_type = other DNA
ctgacatcttcctgaggtgcca

SEQ ID NO: 25623 - DNA, 22 bp, synthetic construct
  misc_feature 1..22: note = chemically synthesized
  source 1..22: mol_type = other DNA
acatcttcctgaggtgccaagg

SEQ ID NO: 25624 - DNA, 22 bp, synthetic construct
  misc_feature 1..22: note = chemically synthesized
  source 1..22: mol_type = other DNA
cctgaggtgccaaggaaatgag

SEQ ID NO: 25625 - DNA, 22 bp, synthetic construct
  misc_feature 1..22: note = chemically synthesized
  source 1..22: mol_type = other DNA
ctgaggtgccaaggaaatgagg

SEQ ID NO: 25626 - DNA, 22 bp, synthetic construct
  misc_feature 1..22: note = chemically synthesized
  source 1..22: mol_type = other DNA
aggtgccaaggaaatgaggatg

SEQ ID NO: 25627 - DNA, 22 bp, synthetic construct
  misc_feature 1..22: note = chemically synthesized
  source 1..22: mol_type = other DNA
tccatgactttgggatccagtc

SEQ ID NO: 25628 - DNA, 22 bp, synthetic construct
  misc_feature 1..22: note = chemically synthesized
  source 1..22: mol_type = other DNA
catgactttgggatccagtcaa

SEQ ID NO: 25629 - DNA, 22 bp, synthetic construct
  misc_feature 1..22: note = chemically synthesized
  source 1..22: mol_type = other DNA
tgggatccagtcaacacattac

SEQ ID NO: 25630 - DNA, 22 bp, synthetic construct
  misc_feature 1..22: note = chemically synthesized
  source 1..22: mol_type = other DNA
gggatccagtcaacacattacc

SEQ ID NO: 25631 - DNA, 22 bp, synthetic construct
  misc_feature 1..22: note = chemically synthesized
  source 1..22: mol_type = other DNA
ggatccagtcaacacattacct

SEQ ID NO: 25632 - DNA, 22 bp, synthetic construct
  misc_feature 1..22: note = chemically synthesized
  source 1..22: mol_type = other DNA
cctccaggtgaattaccaagac

SEQ ID NO: 25633 - DNA, 22 bp, synthetic construct
  misc_feature 1..22: note = chemically synthesized
  source 1..22: mol_type = other DNA
caggtgaattaccaagactccc

SEQ ID NO: 25634 - DNA, 22 bp, synthetic construct
  misc_feature 1..22: note = chemically synthesized
  source 1..22: mol_type = other DNA
ccaagactcccaggactggttc

SEQ ID NO: 25635 - DNA, 22 bp, synthetic construct
  misc_feature 1..22: note = chemically synthesized
  source 1..22: mol_type = other DNA
ccaggactggttcatcttggtg

SEQ ID NO: 25636 - DNA, 22 bp, synthetic construct
  misc_feature 1..22: note = chemically synthesized
  source 1..22: mol_type = other DNA
gttcatcttggtgtccgtgatc

SEQ ID NO: 25637 - DNA, 22 bp, synthetic construct
  misc_feature 1..22: note = chemically synthesized
  source 1..22: mol_type = other DNA
atcttggtgtccgtgatcgcag

SEQ ID NO: 25638 - DNA, 22 bp, synthetic construct
  misc_feature 1..22: note = chemically synthesized
  source 1..22: mol_type = other DNA
ggtgtccgtgatcgcagacctc

SEQ ID NO: 25639 - DNA, 22 bp, synthetic construct
  misc_feature 1..22: note = chemically synthesized
  source 1..22: mol_type = other DNA
gtgtccgtgatcgcagacctca

SEQ ID NO: 25640 - DNA, 22 bp, synthetic construct
  misc_feature 1..22: note = chemically synthesized
  source 1..22: mol_type = other DNA
aggaatgccttctacgtcctct

SEQ ID NO: 25641 - DNA, 22 bp, synthetic construct
  misc_feature 1..22: note = chemically synthesized
  source 1..22: mol_type = other DNA
ctacgtcctcttccccatctgg

SEQ ID NO: 25642 - DNA, 22 bp, synthetic construct
  misc_feature 1..22: note = chemically synthesized
  source 1..22: mol_type = other DNA
tacgtcctcttccccatctggt

SEQ ID NO: 25643 - DNA, 22 bp, synthetic construct
  misc_feature 1..22: note = chemically synthesized
  source 1..22: mol_type = other DNA
cgtcctcttccccatctggttc

SEQ ID NO: 25644 - DNA, 22 bp, synthetic construct
  misc_feature 1..22: note = chemically synthesized
  source 1..22: mol_type = other DNA
ttccccatctggttccatcttc

SEQ ID NO: 25645 - DNA, 22 bp, synthetic construct
  misc_feature 1..22: note = chemically synthesized
  source 1..22: mol_type = other DNA
ccccatctggttccatcttcag

SEQ ID NO: 25646 - DNA, 22 bp, synthetic construct
  misc_feature 1..22: note = chemically synthesized
  source 1..22: mol_type = other DNA
cccatctggttccatcttcagg

SEQ ID NO: 25647 - DNA, 22 bp, synthetic construct
  misc_feature 1..22: note = chemically synthesized
  source 1..22: mol_type = other DNA
gttccatcttcaggaagctgtg

SEQ ID NO: 25648 - DNA, 22 bp, synthetic construct
  misc_feature 1..22: note = chemically synthesized
  source 1..22: mol_type = other DNA
catcttcaggaagctgtgggca

SEQ ID NO: 25649 - DNA, 22 bp, synthetic construct
  misc_feature 1..22: note = chemically synthesized
  source 1..22: mol_type = other DNA
caggaagctgtgggcattaaac

SEQ ID NO: 25650 - DNA, 22 bp, synthetic construct
  misc_feature 1..22: note = chemically synthesized
  source 1..22: mol_type = other DNA
aggaagctgtgggcattaaact

SEQ ID NO: 25651 - DNA, 22 bp, synthetic construct
  misc_feature 1..22: note = chemically synthesized
  source 1..22: mol_type = other DNA
tgggcattaaactcctttgggt

SEQ ID NO: 25652 - DNA, 22 bp, synthetic construct
  misc_feature 1..22: note = chemically synthesized
  source 1..22: mol_type = other DNA
aactcctttgggtagctgtgat

SEQ ID NO: 25653 - DNA, 22 bp, synthetic construct
  misc_feature 1..22: note = chemically synthesized
  source 1..22: mol_type = other DNA
ctttgggtagctgtgattggag

SEQ ID NO: 25654 - DNA, 22 bp, synthetic construct
  misc_feature 1..22: note = chemically synthesized
  source 1..22: mol_type = other DNA
tgggtagctgtgattggagact

SEQ ID NO: 25655 - DNA, 22 bp, synthetic construct
  misc_feature 1..22: note = chemically synthesized
  source 1..22: mol_type = other DNA
gggtagctgtgattggagactg

SEQ ID NO: 25656 - DNA, 22 bp, synthetic construct
  misc_feature 1..22: note = chemically synthesized
  source 1..22: mol_type = other DNA
ggtagctgtgattggagactgg

SEQ ID NO: 25657 - DNA, 22 bp, synthetic construct
  misc_feature 1..22: note = chemically synthesized
  source 1..22: mol_type = other DNA
tgattggagactggctcaacct

SEQ ID NO: 25658 - DNA, 22 bp, synthetic construct
  misc_feature 1..22: note = chemically synthesized
  source 1..22: mol_type = other DNA
gagactggctcaacctcgtctt

SEQ ID NO: 25659 - DNA, 22 bp, synthetic construct
  misc_feature 1..22: note = chemically synthesized
  source 1..22: mol_type = other DNA
gctcaacctcgtctttaagtgg

SEQ ID NO: 25660 - DNA, 22 bp, synthetic construct
  misc_feature 1..22: note = chemically synthesized
  source 1..22: mol_type = other DNA
aacctcgtctttaagtggtaag

SEQ ID NO: 25661 - DNA, 22 bp, synthetic construct
  misc_feature 1..22: note = chemically synthesized
  source 1..22: mol_type = other DNA
gtctttaagtggtaagaaccat

SEQ ID NO: 25662 - DNA, 22 bp, synthetic construct
  misc_feature 1..22: note = chemically synthesized
  source 1..22: mol_type = other DNA
taagtggtaagaaccatataga

SEQ ID NO: 25663 - DNA, 22 bp, synthetic construct
  misc_feature 1..22: note = chemically synthesized
  source 1..22: mol_type = other DNA
aagtggtaagaaccatatagag

SEQ ID NO: 25664 - DNA, 22 bp, synthetic construct
  misc_feature 1..22: note = chemically synthesized
  source 1..22: mol_type = other DNA
agtggtaagaaccatatagaga

SEQ ID NO: 25665 - DNA, 22 bp, synthetic construct
  misc_feature 1..22: note = chemically synthesized
  source 1..22: mol_type = other DNA
gcattcgctctcgcaatgtctg

SEQ ID NO: 25666 - DNA, 22 bp, synthetic construct
  misc_feature 1..22: note = chemically synthesized
  source 1..22: mol_type = other DNA
gctctcgcaatgtctgtccatc

SEQ ID NO: 25667 - DNA, 22 bp, synthetic construct
  misc_feature 1..22: note = chemically synthesized
  source 1..22: mol_type = other DNA
tcgcaatgtctgtccatcagaa

SEQ ID NO: 25668 - DNA, 22 bp, synthetic construct
  misc_feature 1..22: note = chemically synthesized
  source 1..22: mol_type = other DNA
gcaatgtctgtccatcagaagt

SEQ ID NO: 25669 - DNA, 22 bp, synthetic construct
  misc_feature 1..22: note = chemically synthesized
  source 1..22: mol_type = other DNA
tccatcagaagttgctttcccc

SEQ ID NO: 25670 - DNA, 22 bp, synthetic construct
  misc_feature 1..22: note = chemically synthesized
  source 1..22: mol_type = other DNA
ctttccccaggctattcaggaa

SEQ ID NO: 25671 - DNA, 22 bp, synthetic construct
  misc_feature 1..22: note = chemically synthesized
  source 1..22: mol_type = other DNA
tccccaggctattcaggaagcc

SEQ ID NO: 25672 - DNA, 22 bp, synthetic construct
  misc_feature 1..22: note = chemically synthesized
  source 1..22: mol_type = other DNA
ccccaggctattcaggaagcca

SEQ ID NO: 25673 - DNA, 22 bp, synthetic construct
  misc_feature 1..22: note = chemically synthesized
  source 1..22: mol_type = other DNA
cccaggctattcaggaagccac

SEQ ID NO: 25674 - DNA, 22 bp, synthetic construct
  misc_feature 1..22: note = chemically synthesized
  source 1..22: mol_type = other DNA
ttcaggaagccacgggctactc

SEQ ID NO: 25675 - DNA, 22 bp, synthetic construct
  misc_feature 1..22: note = chemically synthesized
  source 1..22: mol_type = other DNA
aggaagccacgggctactcatg

SEQ ID NO: 25676 - DNA, 22 bp, synthetic construct
  misc_feature 1..22: note = chemically synthesized
  source 1..22: mol_type = other DNA
ctcatgcttccaacccctctct

SEQ ID NO: 25677 - DNA, 22 bp, synthetic construct
  misc_feature 1..22: note = chemically synthesized
  source 1..22: mol_type = other DNA
atgcttccaacccctctctctg

SEQ ID NO: 25678 - DNA, 22 bp, synthetic construct
  misc_feature 1..22: note = chemically synthesized
  source 1..22: mol_type = other DNA
ccaacccctctctctgactttg

SEQ ID NO: 25679 - DNA, 22 bp, synthetic construct
  misc_feature 1..22: note = chemically synthesized
  source 1..22: mol_type = other DNA
caacccctctctctgactttgg

SEQ ID NO: 25680 - DNA, 22 bp, synthetic construct
  misc_feature 1..22: note = chemically synthesized
  source 1..22: mol_type = other DNA
tctctgactttggatcatctac

SEQ ID NO: 25681 - DNA, 22 bp, synthetic construct
  misc_feature 1..22: note = chemically synthesized
  source 1..22: mol_type = other DNA
tctgactttggatcatctacat

SEQ ID NO: 25682 - DNA, 22 bp, synthetic construct
  misc_feature 1..22: note = chemically synthesized
  source 1..22: mol_type = other DNA
tgactttggatcatctacataa

SEQ ID NO: 25683 - DNA, 22 bp, synthetic construct
  misc_feature 1..22: note = chemically synthesized
  source 1..22: mol_type = other DNA
actttggatcatctacataaag

SEQ ID NO: 25684 - DNA, 22 bp, synthetic construct
  misc_feature 1..22: note = chemically synthesized
  source 1..22: mol_type = other DNA
tggatcatctacataaaggggg

SEQ ID NO: 25685 - DNA, 22 bp, synthetic construct
  misc_feature 1..22: note = chemically synthesized
  source 1..22: mol_type = other DNA
ggatcatctacataaaggggga

SEQ ID NO: 25686 - DNA, 22 bp, synthetic construct
  misc_feature 1..22: note = chemically synthesized
  source 1..22: mol_type = other DNA
gatcatctacataaagggggaa

SEQ ID NO: 25687 - DNA, 22 bp, synthetic construct
  misc_feature 1..22: note = chemically synthesized
  source 1..22: mol_type = other DNA
cataaagggggaagacagaaaa

SEQ ID NO: 25688 - DNA, 22 bp, synthetic construct
  misc_feature 1..22: note = chemically synthesized
  source 1..22: mol_type = other DNA
ccagtgagttgaaaatacagga

SEQ ID NO: 25689 - DNA, 22 bp, synthetic construct
  misc_feature 1..22: note = chemically synthesized
  source 1..22: mol_type = other DNA
aaaatacaggaaagcctatttc

SEQ ID NO: 25690 - DNA, 22 bp, synthetic construct
  misc_feature 1..22: note = chemically synthesized
  source 1..22: mol_type = other DNA
tttcatatgggttaaagggtag

SEQ ID NO: 25691 - DNA, 22 bp, synthetic construct
  misc_feature 1..22: note = chemically synthesized
  source 1..22: mol_type = other DNA
catatgggttaaagggtaggac

SEQ ID NO: 25692 - DNA, 22 bp, synthetic construct
  misc_feature 1..22: note = chemically synthesized
  source 1..22: mol_type = other DNA
atatgggttaaagggtaggaca

SEQ ID NO: 25693 - DNA, 22 bp, synthetic construct
  misc_feature 1..22: note = chemically synthesized
  source 1..22: mol_type = other DNA
aagggtaggacagttgaatttc

SEQ ID NO: 25694 - DNA, 22 bp, synthetic construct
  misc_feature 1..22: note = chemically synthesized
  source 1..22: mol_type = other DNA
aatttcgtgaaaagtctgagtt

SEQ ID NO: 25695 - DNA, 22 bp, synthetic construct
  misc_feature 1..22: note = chemically synthesized
  source 1..22: mol_type = other DNA
cgtgaaaagtctgagttatata

SEQ ID NO: 25696 - DNA, 22 bp, synthetic construct
  misc_feature 1..22: note = chemically synthesized
  source 1..22: mol_type = other DNA
gtgaaaagtctgagttatatag

SEQ ID NO: 25697 - DNA, 22 bp, synthetic construct
  misc_feature 1..22: note = chemically synthesized
  source 1..22: mol_type = other DNA
agttatataggctttgagcaaa

SEQ ID NO: 25698 - DNA, 22 bp, synthetic construct
  misc_feature 1..22: note = chemically synthesized
  source 1..22: mol_type = other DNA
tataggctttgagcaaagagtt

SEQ ID NO: 25699 - DNA, 22 bp, synthetic construct
  misc_feature 1..22: note = chemically synthesized
  source 1..22: mol_type = other DNA
tgagcaaagagttttattagta

SEQ ID NO: 25700 - DNA, 22 bp, synthetic construct
  misc_feature 1..22: note = chemically synthesized
  source 1..22: mol_type = other DNA
gagcaaagagttttattagtat

SEQ ID NO: 25701 - DNA, 22 bp, synthetic construct
  misc_feature 1..22: note = chemically synthesized
  source 1..22: mol_type = other DNA
agcaaagagttttattagtatg

SEQ ID NO: 25702 - DNA, 22 bp, synthetic construct
  misc_feature 1..22: note = chemically synthesized
  source 1..22: mol_type = other DNA
tattagtatgaagcagaagagg

SEQ ID NO: 25703 - DNA, 22 bp, synthetic construct
  misc_feature 1..22: note = chemically synthesized
  source 1..22: mol_type = other DNA
attagtatgaagcagaagaggt

SEQ ID NO: 25704 - DNA, 22 bp, synthetic construct
  misc_feature 1..22: note = chemically synthesized
  source 1..22: mol_type = other DNA
ttagtatgaagcagaagaggta

SEQ ID NO: 25705 - DNA, 22 bp, synthetic construct
  misc_feature 1..22: note = chemically synthesized
  source 1..22: mol_type = other DNA
gtatgaagcagaagaggtaaca

SEQ ID NO: 25706 - DNA, 22 bp, synthetic construct
  misc_feature 1..22: note = chemically synthesized
  source 1..22: mol_type = other DNA
acacctgtaatcccagcacttt

SEQ ID NO: 25707 - DNA, 22 bp, synthetic construct
  misc_feature 1..22: note = chemically synthesized
  source 1..22: mol_type = other DNA
taatcccagcactttgggaggc

SEQ ID NO: 25708 - DNA, 22 bp, synthetic construct
  misc_feature 1..22: note = chemically synthesized
  source 1..22: mol_type = other DNA
tgggaggccgaggtgggcgaat

SEQ ID NO: 25709 - DNA, 22 bp, synthetic construct
  misc_feature 1..22: note = chemically synthesized
  source 1..22: mol_type = other DNA
gggaggccgaggtgggcgaatc

SEQ ID NO: 25710 - DNA, 22 bp, synthetic construct
  misc_feature 1..22: note = chemically synthesized
  source 1..22: mol_type = other DNA
ggaggccgaggtgggcgaatca

SEQ ID NO: 25711 - DNA, 22 bp, synthetic construct
  misc_feature 1..22: note = chemically synthesized
  source 1..22: mol_type = other DNA
ctgggtgaactcaggagttcaa

SEQ ID NO: 25712 - DNA, 22 bp, synthetic construct
  misc_feature 1..22: note = chemically synthesized
  source 1..22: mol_type = other DNA
ggtgaactcaggagttcaagac

SEQ ID NO: 25713 - DNA, 22 bp, synthetic construct
  misc_feature 1..22: note = chemically synthesized
  source 1..22: mol_type = other DNA
aggagttcaagaccagcctggg

SEQ ID NO: 25714 - DNA, 22 bp, synthetic construct
  misc_feature 1..22: note = chemically synthesized
  source 1..22: mol_type = other DNA
aagaccagcctgggcaacatgg

SEQ ID NO: 25715 - DNA, 22 bp, synthetic construct
  misc_feature 1..22: note = chemically synthesized
  source 1..22: mol_type = other DNA
ggcaacatggcgaaactccatc

SEQ ID NO: 25716 - DNA, 22 bp, synthetic construct
  misc_feature 1..22: note = chemically synthesized
  source 1..22: mol_type = other DNA
catctctacaaaaacattacga

SEQ ID NO: 25717 - DNA, 22 bp, synthetic construct
  misc_feature 1..22: note = chemically synthesized
  source 1..22: mol_type = other DNA
tacaaaaacattacgaaaatta

SEQ ID NO: 25718 - DNA, 22 bp, synthetic construct
  misc_feature 1..22: note = chemically synthesized
  source 1..22: mol_type = other DNA
caaaaacattacgaaaattagc

SEQ ID NO: 25719 - DNA, 22 bp, synthetic construct
  misc_feature 1..22: note = chemically synthesized
  source 1..22: mol_type = other DNA
cgaaaattagctgggcgtgttg

SEQ ID NO: 25720 - DNA, 22 bp, synthetic construct
  misc_feature 1..22: note = chemically synthesized
  source 1..22: mol_type = other DNA
gctgggcgtgttggtgctgtag

SEQ ID NO: 25721 - DNA, 22 bp, synthetic construct
  misc_feature 1..22: note = chemically synthesized
  source 1..22: mol_type = other DNA
ggcgtgttggtgctgtagtccc

SEQ ID NO: 25722 - DNA, 22 bp, synthetic construct
  misc_feature 1..22: note = chemically synthesized
  source 1..22: mol_type = other DNA
gtgctgtagtcccagctactca

SEQ ID NO: 25723 - DNA, 22 bp, synthetic construct
  misc_feature 1..22: note = chemically synthesized
  source 1..22: mol_type = other DNA
tagtcccagctactcaggaggc

SEQ ID NO: 25724 - DNA, 22 bp, synthetic construct
  misc_feature 1..22: note = chemically synthesized
  source 1..22: mol_type = other DNA
ctcaggaggctgaggtgagagg

SEQ ID NO: 25725 - DNA, 22 bp, synthetic construct
  misc_feature 1..22: note = chemically synthesized
  source 1..22: mol_type = other DNA
aggaggctgaggtgagaggcgg

SEQ ID NO: 25726 - DNA, 22 bp, synthetic construct
  misc_feature 1..22: note = chemically synthesized
  source 1..22: mol_type = other DNA
aggtgagaggcggaggaggttg

SEQ ID NO: 25727 - DNA, 22 bp, synthetic construct
  misc_feature 1..22: note = chemically synthesized
  source 1..22: mol_type = other DNA
cagtgagtcaagatcatgccac

SEQ ID NO: 25728 - DNA, 22 bp, synthetic construct
  misc_feature 1..22: note = chemically synthesized
  source 1..22: mol_type = other DNA
cactccagcctgggcaacagag

SEQ ID NO: 25729 - DNA, 22 bp, synthetic construct
  misc_feature 1..22: note = chemically synthesized
  source 1..22: mol_type = other DNA
cagcctgggcaacagagtaaga

SEQ ID NO: 25730 - DNA, 22 bp, synthetic construct
  misc_feature 1..22: note = chemically synthesized
  source 1..22: mol_type = other DNA
ggcaacagagtaagaccctgtc

SEQ ID NO: 25731 - DNA, 22 bp, synthetic construct
  misc_feature 1..22: note = chemically synthesized
  source 1..22: mol_type = other DNA
tctcaaaaaaaaaaaaaagata

SEQ ID NO: 25732 - DNA, 22 bp, synthetic construct
  misc_feature 1..22: note = chemically synthesized
  source 1..22: mol_type = other DNA
aaaaaaaaaaaaaagatagatg

SEQ ID NO: 25733 - DNA, 22 bp, synthetic construct
  misc_feature 1..22: note = chemically synthesized
  source 1..22: mol_type = other DNA
tatgaaaaaaggaaacacacag

SEQ ID NO: 25734 - DNA, 22 bp, synthetic construct
  misc_feature 1..22: note = chemically synthesized
  source 1..22: mol_type = other DNA
aacagcctgttttgtggggtaa

SEQ ID NO: 25735 - DNA, 22 bp, synthetic construct
  misc_feature 1..22: note = chemically synthesized
  source 1..22: mol_type = other DNA
ttttgtggggtaatgaaaagtc

SEQ ID NO: 25736 - DNA, 22 bp, synthetic construct
  misc_feature 1..22: note = chemically synthesized
  source 1..22: mol_type = other DNA
tgtggggtaatgaaaagtcacc

SEQ ID NO: 25737 - DNA, 22 bp, synthetic construct
  misc_feature 1..22: note = chemically synthesized
  source 1..22: mol_type = other DNA
gtggggtaatgaaaagtcaccc

SEQ ID NO: 25738 - DNA, 22 bp, synthetic construct
  misc_feature 1..22: note = chemically synthesized
  source 1..22: mol_type = other DNA
tggggtaatgaaaagtcaccct

SEQ ID NO: 25739 - DNA, 22 bp, synthetic construct
  misc_feature 1..22: note = chemically synthesized
  source 1..22: mol_type = other DNA
ggaactgggctccagccctcgt

SEQ ID NO: 25740 - DNA, 22 bp, synthetic construct
  misc_feature 1..22: note = chemically synthesized
  source 1..22: mol_type = other DNA
ggctccagccctcgttctgcca

SEQ ID NO: 25741 - DNA, 22 bp, synthetic construct
  misc_feature 1..22: note = chemically synthesized
  source 1..22: mol_type = other DNA
cagccctcgttctgccacccac

SEQ ID NO: 25742 - DNA, 22 bp, synthetic construct
  misc_feature 1..22: note = chemically synthesized
  source 1..22: mol_type = other DNA
gttctgccacccaccaactaca

SEQ ID NO: 25743 - DNA, 22 bp, synthetic construct
  misc_feature 1..22: note = chemically synthesized
  source 1..22: mol_type = other DNA
tgccacccaccaactacatgtc

SEQ ID NO: 25744 - DNA, 22 bp, synthetic construct
  misc_feature 1..22: note = chemically synthesized
  source 1..22: mol_type = other DNA
ccacccaccaactacatgtcct

SEQ ID NO: 25745 - DNA, 22 bp, synthetic construct
  misc_feature 1..22: note = chemically synthesized
  source 1..22: mol_type = other DNA
catgtccttggcaagtcatatc

SEQ ID NO: 25746 - DNA, 22 bp, synthetic construct
  misc_feature 1..22: note = chemically synthesized
  source 1..22: mol_type = other DNA
ggcaagtcatatcaattatctg

SEQ ID NO: 25747 - DNA, 22 bp, synthetic construct
  misc_feature 1..22: note = chemically synthesized
  source 1..22: mol_type = other DNA
gcaagtcatatcaattatctga

SEQ ID NO: 25748 - DNA, 22 bp, synthetic construct
  misc_feature 1..22: note = chemically synthesized
  source 1..22: mol_type = other DNA
tctgagtttctgttttataatc

SEQ ID NO: 25749 - DNA, 22 bp, synthetic construct
  misc_feature 1..22: note = chemically synthesized
  source 1..22: mol_type = other DNA
agtttctgttttataatctaca

SEQ ID NO: 25750 - DNA, 22 bp, synthetic construct
  misc_feature 1..22: note = chemically synthesized
  source 1..22: mol_type = other DNA
ctgttttataatctacaaatag

SEQ ID NO: 25751 - DNA, 22 bp, synthetic construct
  misc_feature 1..22: note = chemically synthesized
  source 1..22: mol_type = other DNA
tgttttataatctacaaatagg

SEQ ID NO: 25752 - DNA, 22 bp, synthetic construct
  misc_feature 1..22: note = chemically synthesized
  source 1..22: mol_type = other DNA
ttttataatctacaaataggtt

SEQ ID NO: 25753 - DNA, 22 bp, synthetic construct
  misc_feature 1..22: note = chemically synthesized
  source 1..22: mol_type = other DNA
tataatctacaaataggttatc

SEQ ID NO: 25754 - DNA, 22 bp, synthetic construct
  misc_feature 1..22: note = chemically synthesized
  source 1..22: mol_type = other DNA
ataatctacaaataggttatct

SEQ ID NO: 25755 - DNA, 22 bp, synthetic construct
  misc_feature 1..22: note = chemically synthesized
  source 1..22: mol_type = other DNA
taatctacaaataggttatctc

SEQ ID NO: 25756 - DNA, 22 bp, synthetic construct
  misc_feature 1..22: note = chemically synthesized
  source 1..22: mol_type = other DNA
caaataggttatctctggcagc

SEQ ID NO: 25757 - DNA, 22 bp, synthetic construct
  misc_feature 1..22: note = chemically synthesized
  source 1..22: mol_type = other DNA
tctctggcagcttaataataat

SEQ ID NO: 25758 - DNA, 22 bp, synthetic construct
  misc_feature 1..22: note = chemically synthesized
  source 1..22: mol_type = other DNA
tggcagcttaataataatcagg

SEQ ID NO: 25759 - DNA, 22 bp, synthetic construct
  misc_feature 1..22: note = chemically synthesized
  source 1..22: mol_type = other DNA
gcagcttaataataatcagggt

SEQ ID NO: 25760 - DNA, 22 bp, synthetic construct
  misc_feature 1..22: note = chemically synthesized
  source 1..22: mol_type = other DNA
aataataatcagggttaacatt

SEQ ID NO: 25761 - DNA, 22 bp, synthetic construct
  misc_feature 1..22: note = chemically synthesized
  source 1..22: mol_type = other DNA
ataataatcagggttaacattt

SEQ ID NO: 25762 - DNA, 22 bp, synthetic construct
  misc_feature 1..22: note = chemically synthesized
  source 1..22: mol_type = other DNA
acatttattaaacagtgtgtgc

SEQ ID NO: 25763 - DNA, 22 bp, synthetic construct
  misc_feature 1..22: note = chemically synthesized
  source 1..22: mol_type = other DNA
attaaacagtgtgtgccagtcc

SEQ ID NO: 25764 - DNA, 22 bp, synthetic construct
  misc_feature 1..22: note = chemically synthesized
  source 1..22: mol_type = other DNA
ttaaacagtgtgtgccagtcca

SEQ ID NO: 25765 - DNA, 22 bp, synthetic construct
  misc_feature 1..22: note = chemically synthesized
  source 1..22: mol_type = other DNA
aacagtgtgtgccagtccatgt

SEQ ID NO: 25766 - DNA, 22 bp, synthetic construct
  misc_feature 1..22: note = chemically synthesized
  source 1..22: mol_type = other DNA
tgtgcttttctgtgaggtagtt

SEQ ID NO: 25767 - DNA, 22 bp, synthetic construct
  misc_feature 1..22: note = chemically synthesized
  source 1..22: mol_type = other DNA
ttctgtgaggtagttactgcta

SEQ ID NO: 25768 - DNA, 22 bp, synthetic construct
  misc_feature 1..22: note = chemically synthesized
  source 1..22: mol_type = other DNA
tctgtgaggtagttactgctat

SEQ ID NO: 25769 - DNA, 22 bp, synthetic construct
  misc_feature 1..22: note = chemically synthesized
  source 1..22: mol_type = other DNA
ctgtgaggtagttactgctatt

SEQ ID NO: 25770 - DNA, 22 bp, synthetic construct
  misc_feature 1..22: note = chemically synthesized
  source 1..22: mol_type = other DNA
tgtgaggtagttactgctattt

SEQ ID NO: 25771 - DNA, 22 bp, synthetic construct
  misc_feature 1..22: note = chemically synthesized
  source 1..22: mol_type = other DNA
tgaggtagttactgctatttac

SEQ ID NO: 25772 - DNA, 22 bp, synthetic construct
  misc_feature 1..22: note = chemically synthesized
  source 1..22: mol_type = other DNA
ctgctatttacagaaacagtag

SEQ ID NO: 25773 - DNA, 22 bp, synthetic construct
  misc_feature 1..22: note = chemically synthesized
  source 1..22: mol_type = other DNA
ctatttacagaaacagtagatg

SEQ ID NO: 25774 - DNA, 22 bp, synthetic construct
  misc_feature 1..22: note = chemically synthesized
  source 1..22: mol_type = other DNA
tttacagaaacagtagatgcag

SEQ ID NO: 25775 - DNA, 22 bp, synthetic construct
  misc_feature 1..22: note = chemically synthesized
  source 1..22: mol_type = other DNA
acagaaacagtagatgcagaga

SEQ ID NO: 25776 - DNA, 22 bp, synthetic construct
  misc_feature 1..22: note = chemically synthesized
  source 1..22: mol_type = other DNA
cagaaacagtagatgcagagac

SEQ ID NO: 25777 - DNA, 22 bp, synthetic construct
  misc_feature 1..22: note = chemically synthesized
  source 1..22: mol_type = other DNA
agttaaatgattaggccaacaa

SEQ ID NO: 25778 - DNA, 22 bp, synthetic construct
  misc_feature 1..22: note = chemically synthesized
  source 1..22: mol_type = other DNA
aatgattaggccaacaaggtta

SEQ ID NO: 25779 - DNA, 22 bp, synthetic construct
  misc_feature 1..22: note = chemically synthesized
  source 1..22: mol_type = other DNA
ggccaacaaggttagtacatgc

SEQ ID NO: 25780 - DNA, 22 bp, synthetic construct
  misc_feature 1..22: note = chemically synthesized
  source 1..22: mol_type = other DNA
gtacatgccgagccaggatgga

SEQ ID NO: 25781 - DNA, 22 bp, synthetic construct
  misc_feature 1..22: note = chemically synthesized
  source 1..22: mol_type = other DNA
gcttccgcggcaatgctcttat

SEQ ID NO: 25782 - DNA, 22 bp, synthetic construct
  misc_feature 1..22: note = chemically synthesized
  source 1..22: mol_type = other DNA
ccgcggcaatgctcttatgaac

SEQ ID NO: 25783 - DNA, 22 bp, synthetic construct
  misc_feature 1..22: note = chemically synthesized
  source 1..22: mol_type = other DNA
cgcggcaatgctcttatgaact

SEQ ID NO: 25784 - DNA, 22 bp, synthetic construct
  misc_feature 1..22: note = chemically synthesized
  source 1..22: mol_type = other DNA
ttatgaactatgttacgtccag

SEQ ID NO: 25785 - DNA, 22 bp, synthetic construct
  misc_feature 1..22: note = chemically synthesized
  source 1..22: mol_type = other DNA
atgaactatgttacgtccagtg

SEQ ID NO: 25786 - DNA, 22 bp, synthetic construct
  misc_feature 1..22: note = chemically synthesized
  source 1..22: mol_type = other DNA
tgaactatgttacgtccagtgc

SEQ ID NO: 25787 - DNA, 22 bp, synthetic construct
  misc_feature 1..22: note = chemically synthesized
  source 1..22: mol_type = other DNA
tgttacgtccagtgctgataaa

SEQ ID NO: 25788 - DNA, 22 bp, synthetic construct
  misc_feature 1..22: note = chemically synthesized
  source 1..22: mol_type = other DNA
cgtccagtgctgataaactgac

SEQ ID NO: 25789 - DNA, 22 bp, synthetic construct
  misc_feature 1..22: note = chemically synthesized
  source 1..22: mol_type = other DNA
ataaactgactctctggggagc

SEQ ID NO: 25790 - DNA, 22 bp, synthetic construct
  misc_feature 1..22: note = chemically synthesized
  source 1..22: mol_type = other DNA
actctctggggagcaggggaaa

SEQ ID NO: 25791 - DNA, 22 bp, synthetic construct
  misc_feature 1..22: note = chemically synthesized
  source 1..22: mol_type = other DNA
tctggggagcaggggaaagccc

SEQ ID NO: 25792 - DNA, 22 bp, synthetic construct
  misc_feature 1..22: note = chemically synthesized
  source 1..22: mol_type = other DNA
tggggagcaggggaaagccctg

SEQ ID NO: 25793 - DNA, 22 bp, synthetic construct
  misc_feature 1..22: note = chemically synthesized
  source 1..22: mol_type = other DNA
gggagcaggggaaagccctgag

SEQ ID NO: 25794 - DNA, 22 bp, synthetic construct
  misc_feature 1..22: note = chemically synthesized
  source 1..22: mol_type = other DNA
agtttagcatttgccaatttct

SEQ ID NO: 25795 - DNA, 22 bp, synthetic construct
  misc_feature 1..22: note = chemically synthesized
  source 1..22: mol_type = other DNA
agcatttgccaatttctatcac

SEQ ID NO: 25796 - DNA, 22 bp, synthetic construct
  misc_feature 1..22: note = chemically synthesized
  source 1..22: mol_type = other DNA
gcatttgccaatttctatcacg

SEQ ID NO: 25797 - DNA, 22 bp, synthetic construct
  misc_feature 1..22: note = chemically synthesized
  source 1..22: mol_type = other DNA
gccaatttctatcacgtaaaca

SEQ ID NO: 25798 - DNA, 22 bp, synthetic construct
  misc_feature 1..22: note = chemically synthesized
  source 1..22: mol_type = other DNA
ccaatttctatcacgtaaacat

SEQ ID NO: 25799 - DNA, 22 bp, synthetic construct
  misc_feature 1..22: note = chemically synthesized
  source 1..22: mol_type = other DNA
ctatcacgtaaacattcccatt

SEQ ID NO: 25800 - DNA, 22 bp, synthetic construct
  misc_feature 1..22: note = chemically synthesized
  source 1..22: mol_type = other DNA
tatcacgtaaacattcccattc

SEQ ID NO: 25801 - DNA, 22 bp, synthetic construct
  misc_feature 1..22: note = chemically synthesized
  source 1..22: mol_type = other DNA
tcacgtaaacattcccattctg

SEQ ID NO: 25802 - DNA, 22 bp, synthetic construct
  misc_feature 1..22: note = chemically synthesized
  source 1..22: mol_type = other DNA
ccattctggccactttctttct

SEQ ID NO: 25803 - DNA, 22 bp, synthetic construct
  misc_feature 1..22: note = chemically synthesized
  source 1..22: mol_type = other DNA
tggccactttctttctttcttt

SEQ ID NO: 25804 - DNA, 22 bp, synthetic construct
  misc_feature 1..22: note = chemically synthesized
  source 1..22: mol_type = other DNA
gccactttctttctttctttct

SEQ ID NO: 25805 - DNA, 22 bp, synthetic construct
  misc_feature 1..22: note = chemically synthesized
  source 1..22: mol_type = other DNA
tctttctttctttcttttgttt

SEQ ID NO: 25806 - DNA, 22 bp, synthetic construct
  misc_feature 1..22: note = chemically synthesized
  source 1..22: mol_type = other DNA
ctttctttctttcttttgtttg

SEQ ID NO: 25807 - DNA, 22 bp, synthetic construct
  misc_feature 1..22: note = chemically synthesized
  source 1..22: mol_type = other DNA
tttctttctttcttttgtttgt

SEQ ID NO: 25808 - DNA, 22 bp, synthetic construct
  misc_feature 1..22: note = chemically synthesized
  source 1..22: mol_type = other DNA
tctttctttcttttgtttgttt

SEQ ID NO: 25809 - DNA, 22 bp, synthetic construct
  misc_feature 1..22: note = chemically synthesized
  source 1..22: mol_type = other DNA
ctttctttcttttgtttgtttg

SEQ ID NO: 25810 - DNA, 22 bp, synthetic construct
  misc_feature 1..22: note = chemically synthesized
  source 1..22: mol_type = other DNA
tttctttcttttgtttgtttgt

SEQ ID NO: 25811 - DNA, 22 bp, synthetic construct
  misc_feature 1..22: note = chemically synthesized
  source 1..22: mol_type = other DNA
tctttcttttgtttgtttgttt

SEQ ID NO: 25812 - DNA, 22 bp, synthetic construct
  misc_feature 1..22: note = chemically synthesized
  source 1..22: mol_type = other DNA
ctttcttttgtttgtttgtttg

SEQ ID NO: 25813 - DNA, 22 bp, synthetic construct
  misc_feature 1..22: note = chemically synthesized
  source 1..22: mol_type = other DNA
tttcttttgtttgtttgtttga

SEQ ID NO: 25814 - DNA, 22 bp, synthetic construct
  misc_feature 1..22: note = chemically synthesized
  source 1..22: mol_type = other DNA
tcttttgtttgtttgtttgaga

SEQ ID NO: 25815 - DNA, 22 bp, synthetic construct
  misc_feature 1..22: note = chemically synthesized
  source 1..22: mol_type = other DNA
cttttgtttgtttgtttgagat

SEQ ID NO: 25816 - DNA, 22 bp, synthetic construct
  misc_feature 1..22: note = chemically synthesized
  source 1..22: mol_type = other DNA
ttttgtttgtttgtttgagatg

SEQ ID NO: 25817 - DNA, 22 bp, synthetic construct
  misc_feature 1..22: note = chemically synthesized
  source 1..22: mol_type = other DNA
ttgtttgtttgtttgagatgga

SEQ ID NO: 25818 - DNA, 22 bp, synthetic construct
  misc_feature 1..22: note = chemically synthesized
  source 1..22: mol_type = other DNA
tgtttgtttgtttgagatggag

SEQ ID NO: 25819 - DNA, 22 bp, synthetic construct
  misc_feature 1..22: note = chemically synthesized
  source 1..22: mol_type = other DNA
gtttgtttgtttgagatggagt

SEQ ID NO: 25820 - DNA, 22 bp, synthetic construct
  misc_feature 1..22: note = chemically synthesized
  source 1..22: mol_type = other DNA
tttgtttgtttgagatggagtc

SEQ ID NO: 25821 - DNA, 22 bp, synthetic construct
  misc_feature 1..22: note = chemically synthesized
  source 1..22: mol_type = other DNA
gtttgtttgagatggagtctcg

SEQ ID NO: 25822 - DNA, 22 bp, synthetic construct
  misc_feature 1..22: note = chemically synthesized
  source 1..22: mol_type = other DNA
tttgtttgagatggagtctcgc

SEQ ID NO: 25823 - DNA, 22 bp, synthetic construct
  misc_feature 1..22: note = chemically synthesized
  source 1..22: mol_type = other DNA
gtttgagatggagtctcgcact

SEQ ID NO: 25824 - DNA, 22 bp, synthetic construct
  misc_feature 1..22: note = chemically synthesized
  source 1..22: mol_type = other DNA
tttgagatggagtctcgcactg

SEQ ID NO: 25825 - DNA, 22 bp, synthetic construct
  misc_feature 1..22: note = chemically synthesized
  source 1..22: mol_type = other DNA
gagatggagtctcgcactgttg

SEQ ID NO: 25826 - DNA, 22 bp, synthetic construct
  misc_feature 1..22: note = chemically synthesized
  source 1..22: mol_type = other DNA
agatggagtctcgcactgttgc

SEQ ID NO: 25827 - DNA, 22 bp, synthetic construct
  misc_feature 1..22: note = chemically synthesized
  source 1..22: mol_type = other DNA
gcactgttgcctggctggagtg

SEQ ID NO: 25828 - DNA, 22 bp, synthetic construct
  misc_feature 1..22: note = chemically synthesized
  source 1..22: mol_type = other DNA
ttgcctggctggagtgcaatgg

SEQ ID NO: 25829 - DNA, 22 bp, synthetic construct
  misc_feature 1..22: note = chemically synthesized
  source 1..22: mol_type = other DNA
cctggctggagtgcaatggtgc

SEQ ID NO: 25830 - DNA, 22 bp, synthetic construct
  misc_feature 1..22: note = chemically synthesized
  source 1..22: mol_type = other DNA
gctggagtgcaatggtgcaatc

SEQ ID NO: 25831 - DNA, 22 bp, synthetic construct
  misc_feature 1..22: note = chemically synthesized
  source 1..22: mol_type = other DNA
gagtgcaatggtgcaatctcag

SEQ ID NO: 25832 - DNA, 22 bp, synthetic construct
  misc_feature 1..22: note = chemically synthesized
  source 1..22: mol_type = other DNA
agctcactgcaacctctgcctc

SEQ ID NO: 25833 - DNA, 22 bp, synthetic construct
  misc_feature 1..22: note = chemically synthesized
  source 1..22: mol_type = other DNA
actgcaacctctgcctctccgg

SEQ ID NO: 25834 - DNA, 22 bp, synthetic construct
  misc_feature 1..22: note = chemically synthesized
  source 1..22: mol_type = other DNA
caacctctgcctctccggttca

SEQ ID NO: 25835 - DNA, 22 bp, synthetic construct
  misc_feature 1..22: note = chemically synthesized
  source 1..22: mol_type = other DNA
tgcctctccggttcaagtgatt

SEQ ID NO: 25836 - DNA, 22 bp, synthetic construct
  misc_feature 1..22: note = chemically synthesized
  source 1..22: mol_type = other DNA
cctctccggttcaagtgattct

SEQ ID NO: 25837 - DNA, 22 bp, synthetic construct
  misc_feature 1..22: note = chemically synthesized
  source 1..22: mol_type = other DNA
tccggttcaagtgattctcctg

SEQ ID NO: 25838 - DNA, 22 bp, synthetic construct
  misc_feature 1..22: note = chemically synthesized
  source 1..22: mol_type = other DNA
cggttcaagtgattctcctgcc

SEQ ID NO: 25839 - DNA, 22 bp, synthetic construct
  misc_feature 1..22: note = chemically synthesized
  source 1..22: mol_type = other DNA
aagtgattctcctgcctcagcc

SEQ ID NO: 25840 - DNA, 22 bp, synthetic construct
  misc_feature 1..22: note = chemically synthesized
  source 1..22: mol_type = other DNA
tcctgcctcagcctcccaagta

SEQ ID NO: 25841 - DNA, 22 bp, synthetic construct
  misc_feature 1..22: note = chemically synthesized
  source 1..22: mol_type = other DNA
ctgcctcagcctcccaagtagc

SEQ ID NO: 25842 - DNA, 22 bp, synthetic construct
  misc_feature 1..22: note = chemically synthesized
  source 1..22: mol_type = other DNA
cctcagcctcccaagtagctgg

SEQ ID NO: 25843 - DNA, 22 bp, synthetic construct
  misc_feature 1..22: note = chemically synthesized
  source 1..22: mol_type = other DNA
agcctcccaagtagctgggatt

SEQ ID NO: 25844 - DNA, 22 bp, synthetic construct
  misc_feature 1..22: note = chemically synthesized
  source 1..22: mol_type = other DNA
ccaagtagctgggattacaggt

SEQ ID NO: 25845 - DNA, 22 bp, synthetic construct
  misc_feature 1..22: note = chemically synthesized
  source 1..22: mol_type = other DNA
ggattacaggtgcccgccacca

SEQ ID NO: 25846 - DNA, 22 bp, synthetic construct
  misc_feature 1..22: note = chemically synthesized
  source 1..22: mol_type = other DNA
caggtgcccgccaccatgccca

SEQ ID NO: 25847 - DNA, 22 bp, synthetic construct
  misc_feature 1..22: note = chemically synthesized
  source 1..22: mol_type = other DNA
attttttttgtatttttagtag

SEQ ID NO: 25848 - DNA, 22 bp, synthetic construct
  misc_feature 1..22: note = chemically synthesized
  source 1..22: mol_type = other DNA
tttttgtatttttagtagagac

SEQ ID NO: 25849 - DNA, 22 bp, synthetic construct
  misc_feature 1..22: note = chemically synthesized
  source 1..22: mol_type = other DNA
ttttgtatttttagtagagaca

SEQ ID NO: 25850 - DNA, 22 bp, synthetic construct
  misc_feature 1..22: note = chemically synthesized
  source 1..22: mol_type = other DNA
tttgtatttttagtagagacat

SEQ ID NO: 25851 - DNA, 22 bp, synthetic construct
  misc_feature 1..22: note = chemically synthesized
  source 1..22: mol_type = other DNA
ttgtatttttagtagagacatg

SEQ ID NO: 25852 - DNA, 22 bp, synthetic construct
  misc_feature 1..22: note = chemically synthesized
  source 1..22: mol_type = other DNA
tgtatttttagtagagacatgg

SEQ ID NO: 25853 - DNA, 22 bp, synthetic construct
  misc_feature 1..22: note = chemically synthesized
  source 1..22: mol_type = other DNA
gtatttttagtagagacatggt

SEQ ID NO: 25854 - DNA, 22 bp, synthetic construct
  misc_feature 1..22: note = chemically synthesized
  source 1..22: mol_type = other DNA
tatttttagtagagacatggtt

SEQ ID NO: 25855 - DNA, 22 bp, synthetic construct
  misc_feature 1..22: note = chemically synthesized
  source 1..22: mol_type = other DNA
ttagtagagacatggtttcact

SEQ ID NO: 25856 - DNA, 22 bp, synthetic construct
  misc_feature 1..22: note = chemically synthesized
  source 1..22: mol_type = other DNA
tagtagagacatggtttcacta

SEQ ID NO: 25857 - DNA, 22 bp, synthetic construct
  misc_feature 1..22: note = chemically synthesized
  source 1..22: mol_type = other DNA
agtagagacatggtttcactat

SEQ ID NO: 25858 - DNA, 22 bp, synthetic construct
  misc_feature 1..22: note = chemically synthesized
  source 1..22: mol_type = other DNA
gtagagacatggtttcactatg

SEQ ID NO: 25859 - DNA, 22 bp, synthetic construct
  misc_feature 1..22: note = chemically synthesized
  source 1..22: mol_type = other DNA
cactatgttgactaggctggtc

SEQ ID NO: 25860 - DNA, 22 bp, synthetic construct
  misc_feature 1..22: note = chemically synthesized
  source 1..22: mol_type = other DNA
actatgttgactaggctggtct

SEQ ID NO: 25861 - DNA, 22 bp, synthetic construct
  misc_feature 1..22: note = chemically synthesized
  source 1..22: mol_type = other DNA
tgttgactaggctggtctcgaa

SEQ ID NO: 25862 - DNA, 22 bp, synthetic construct
  misc_feature 1..22: note = chemically synthesized
  source 1..22: mol_type = other DNA
actaggctggtctcgaactcct

SEQ ID NO: 25863 - DNA, 22 bp, synthetic construct
  misc_feature 1..22: note = chemically synthesized
  source 1..22: mol_type = other DNA
ggctggtctcgaactcctgacc

SEQ ID NO: 25864 - DNA, 22 bp, synthetic construct
  misc_feature 1..22: note = chemically synthesized
  source 1..22: mol_type = other DNA
gtctcgaactcctgacctcatg

SEQ ID NO: 25865 - DNA, 22 bp, synthetic construct
  misc_feature 1..22: note = chemically synthesized
  source 1..22: mol_type = other DNA
gaactcctgacctcatgatctg

SEQ ID NO: 25866 - DNA, 22 bp, synthetic construct
  misc_feature 1..22: note = chemically synthesized
  source 1..22: mol_type = other DNA
ctgacctcatgatctgcctgcc

SEQ ID NO: 25867 - DNA, 22 bp, synthetic construct
  misc_feature 1..22: note = chemically synthesized
  source 1..22: mol_type = other DNA
acctcatgatctgcctgccttg

SEQ ID NO: 25868 - DNA, 22 bp, synthetic construct
  misc_feature 1..22: note = chemically synthesized
  source 1..22: mol_type = other DNA
atgatctgcctgccttggcctc

SEQ ID NO: 25869 - DNA, 22 bp, synthetic construct
  misc_feature 1..22: note = chemically synthesized
  source 1..22: mol_type = other DNA
cctgccttggcctccctaagtg

SEQ ID NO: 25870 - DNA, 22 bp, synthetic construct
  misc_feature 1..22: note = chemically synthesized
  source 1..22: mol_type = other DNA
ccttggcctccctaagtgctag

SEQ ID NO: 25871 - DNA, 22 bp, synthetic construct
  misc_feature 1..22: note = chemically synthesized
  source 1..22: mol_type = other DNA
ggcctccctaagtgctaggatt

SEQ ID NO: 25872 - DNA, 22 bp, synthetic construct
  misc_feature 1..22: note = chemically synthesized
  source 1..22: mol_type = other DNA
gcctccctaagtgctaggatta

SEQ ID NO: 25873 - DNA, 22 bp, synthetic construct
  misc_feature 1..22: note = chemically synthesized
  source 1..22: mol_type = other DNA
cctaagtgctaggattacaggc

SEQ ID NO: 25874 - DNA, 22 bp, synthetic construct
  misc_feature 1..22: note = chemically synthesized
  source 1..22: mol_type = other DNA
agtgctaggattacaggcgtga

SEQ ID NO: 25875 - DNA, 22 bp, synthetic construct
  misc_feature 1..22: note = chemically synthesized
  source 1..22: mol_type = other DNA
ggattacaggcgtgagccacta

SEQ ID NO: 25876 - DNA, 22 bp, synthetic construct
  misc_feature 1..22: note = chemically synthesized
  source 1..22: mol_type = other DNA
caggcgtgagccactacaccca

SEQ ID NO: 25877 - DNA, 22 bp, synthetic construct
  misc_feature 1..22: note = chemically synthesized
  source 1..22: mol_type = other DNA
cacccagccgcatgattctaaa

SEQ ID NO: 25878 - DNA, 22 bp, synthetic construct
  misc_feature 1..22: note = chemically synthesized
  source 1..22: mol_type = other DNA
taaaaaataaaaagatgaagtg

SEQ ID NO: 25879 - DNA, 22 bp, synthetic construct
  misc_feature 1..22: note = chemically synthesized
  source 1..22: mol_type = other DNA
aaaaataaaaagatgaagtgtt

SEQ ID NO: 25880 - DNA, 22 bp, synthetic construct
  misc_feature 1..22: note = chemically synthesized
  source 1..22: mol_type = other DNA
ttccaaacatctgatctccatt

SEQ ID NO: 25881 - DNA, 22 bp, synthetic construct
  misc_feature 1..22: note = chemically synthesized
  source 1..22: mol_type = other DNA
caaacatctgatctccattgaa

SEQ ID NO: 25882 - DNA, 22 bp, synthetic construct
  misc_feature 1..22: note = chemically synthesized
  source 1..22: mol_type = other DNA
atctccattgaagaaccatgca

SEQ ID NO: 25883 - DNA, 22 bp, synthetic construct
  misc_feature 1..22: note = chemically synthesized
  source 1..22: mol_type = other DNA
cattgaagaaccatgcaatctc

SEQ ID NO: 25884 - DNA, 22 bp, synthetic construct
  misc_feature 1..22: note = chemically synthesized
  source 1..22: mol_type = other DNA
aagaaccatgcaatctctctgg

SEQ ID NO: 25885 - DNA, 22 bp, synthetic construct
  misc_feature 1..22: note = chemically synthesized
  source 1..22: mol_type = other DNA
tctgggttgatagaggccagag

SEQ ID NO: 25886 - DNA, 22 bp, synthetic construct
  misc_feature 1..22: note = chemically synthesized
  source 1..22: mol_type = other DNA
tgggttgatagaggccagagtt

SEQ ID NO: 25887 - DNA, 22 bp, synthetic construct
  misc_feature 1..22: note = chemically synthesized
  source 1..22: mol_type = other DNA
ggttgatagaggccagagttag

SEQ ID NO: 25888 - DNA, 22 bp, synthetic construct
  misc_feature 1..22: note = chemically synthesized
  source 1..22: mol_type = other DNA
atagaggccagagttagtggct

SEQ ID NO: 25889 - DNA, 22 bp, synthetic construct
  misc_feature 1..22: note = chemically synthesized
  source 1..22: mol_type = other DNA
gtggctctccctgatttcggtg

SEQ ID NO: 25890 - DNA, 22 bp, synthetic construct
  misc_feature 1..22: note = chemically synthesized
  source 1..22: mol_type = other DNA
tccctgatttcggtgagaaatc

SEQ ID NO: 25891 - DNA, 22 bp, synthetic construct
  misc_feature 1..22: note = chemically synthesized
  source 1..22: mol_type = other DNA
cctgatttcggtgagaaatcac

SEQ ID NO: 25892 - DNA, 22 bp, synthetic construct
  misc_feature 1..22: note = chemically synthesized
  source 1..22: mol_type = other DNA
atttcggtgagaaatcactatt

SEQ ID NO: 25893 - DNA, 22 bp, synthetic construct
  misc_feature 1..22: note = chemically synthesized
  source 1..22: mol_type = other DNA
cggtgagaaatcactattccac

SEQ ID NO: 25894 - DNA, 22 bp, synthetic construct
  misc_feature 1..22: note = chemically synthesized
  source 1..22: mol_type = other DNA
ggtgagaaatcactattccacc

SEQ ID NO: 25895 - DNA, 22 bp, synthetic construct
  misc_feature 1..22: note = chemically synthesized
  source 1..22: mol_type = other DNA
ttccaccatcacgggataaaag

SEQ ID NO: 25896 - DNA, 22 bp, synthetic construct
  misc_feature 1..22: note = chemically synthesized
  source 1..22: mol_type = other DNA
caccatcacgggataaaaggca

SEQ ID NO: 25897 - DNA, 22 bp, synthetic construct
  misc_feature 1..22: note = chemically synthesized
  source 1..22: mol_type = other DNA
actggcggttgacacctatttc

SEQ ID NO: 25898 - DNA, 22 bp, synthetic construct
  misc_feature 1..22: note = chemically synthesized
  source 1..22: mol_type = other DNA
gcggttgacacctatttccaca

SEQ ID NO: 25899 - DNA, 22 bp, synthetic construct
  misc_feature 1..22: note = chemically synthesized
  source 1..22: mol_type = other DNA
acacctatttccacagtgaaag

SEQ ID NO: 25900 - DNA, 22 bp, synthetic construct
  misc_feature 1..22: note = chemically synthesized
  source 1..22: mol_type = other DNA
tttccacagtgaaagatatatc

SEQ ID NO: 25901 - DNA, 22 bp, synthetic construct
  misc_feature 1..22: note = chemically synthesized
  source 1..22: mol_type = other DNA
ccacagtgaaagatatatctag

SEQ ID NO: 25902 - DNA, 22 bp, synthetic construct
  misc_feature 1..22: note = chemically synthesized
  source 1..22: mol_type = other DNA
cacagtgaaagatatatctagt

SEQ ID NO: 25903 - DNA, 22 bp, synthetic construct
  misc_feature 1..22: note = chemically synthesized
  source 1..22: mol_type = other DNA
gtacttttaaaggggaagtggt

SEQ ID NO: 25904 - DNA, 22 bp, synthetic construct
  misc_feature 1..22: note = chemically synthesized
  source 1..22: mol_type = other DNA
ttaaaggggaagtggtttgtct

SEQ ID NO: 25905 - DNA, 22 bp, synthetic construct
  misc_feature 1..22: note = chemically synthesized
  source 1..22: mol_type = other DNA
taaaggggaagtggtttgtctg

SEQ ID NO: 25906 - DNA, 22 bp, synthetic construct
  misc_feature 1..22: note = chemically synthesized
  source 1..22: mol_type = other DNA
aaaggggaagtggtttgtctga

SEQ ID NO: 25907 - DNA, 22 bp, synthetic construct
  misc_feature 1..22: note = chemically synthesized
  source 1..22: mol_type = other DNA
aaggggaagtggtttgtctgag

SEQ ID NO: 25908 - DNA, 22 bp, synthetic construct
  misc_feature 1..22: note = chemically synthesized
  source 1..22: mol_type = other DNA
gtctgagatactctgtttcaaa

SEQ ID NO: 25909 - DNA, 22 bp, synthetic construct
  misc_feature 1..22: note = chemically synthesized
  source 1..22: mol_type = other DNA
tctgagatactctgtttcaaag

SEQ ID NO: 25910 - DNA, 22 bp, synthetic construct
  misc_feature 1..22: note = chemically synthesized
  source 1..22: mol_type = other DNA
agatactctgtttcaaagtaga

SEQ ID NO: 25911 - DNA, 22 bp, synthetic construct
  misc_feature 1..22: note = chemically synthesized
  source 1..22: mol_type = other DNA
tgtttcaaagtagagaggatac

SEQ ID NO: 25912 - DNA, 22 bp, synthetic construct
  misc_feature 1..22: note = chemically synthesized
  source 1..22: mol_type = other DNA
tttcaaagtagagaggatacag

SEQ ID NO: 25913 - DNA, 22 bp, synthetic construct
  misc_feature 1..22: note = chemically synthesized
  source 1..22: mol_type = other DNA
caaagtagagaggatacagaac

SEQ ID NO: 25914 - DNA, 22 bp, synthetic construct
  misc_feature 1..22: note = chemically synthesized
  source 1..22: mol_type = other DNA
aaagtagagaggatacagaaca

SEQ ID NO: 25915 - DNA, 22 bp, synthetic construct
  misc_feature 1..22: note = chemically synthesized
  source 1..22: mol_type = other DNA
aagctatatacatccttacaga

SEQ ID NO: 25916 - DNA, 22 bp, synthetic construct
  misc_feature 1..22: note = chemically synthesized
  source 1..22: mol_type = other DNA
tatacatccttacagagagcaa

SEQ ID NO: 25917 - DNA, 22 bp, synthetic construct
  misc_feature 1..22: note = chemically synthesized
  source 1..22: mol_type = other DNA
acagagagcaattctgatggaa

SEQ ID NO: 25918 - DNA, 22 bp, synthetic construct
  misc_feature 1..22: note = chemically synthesized
  source 1..22: mol_type = other DNA
cagagagcaattctgatggaaa

SEQ ID NO: 25919 - DNA, 22 bp, synthetic construct
  misc_feature 1..22: note = chemically synthesized
  source 1..22: mol_type = other DNA
tgatggaaatgcaggccatgtt

SEQ ID NO: 25920 - DNA, 22 bp, synthetic construct
  misc_feature 1..22: note = chemically synthesized
  source 1..22: mol_type = other DNA
atggaaatgcaggccatgtttc

SEQ ID NO: 25921 - DNA, 22 bp, synthetic construct
  misc_feature 1..22: note = chemically synthesized
  source 1..22: mol_type = other DNA
ccctggggggggctcgtcctag

SEQ ID NO: 25922 - DNA, 22 bp, synthetic construct
  misc_feature 1..22: note = chemically synthesized
  source 1..22: mol_type = other DNA
cctggggggggctcgtcctagg

SEQ ID NO: 25923 - DNA, 22 bp, synthetic construct
  misc_feature 1..22: note = chemically synthesized
  source 1..22: mol_type = other DNA
gggggggctcgtcctaggggct

SEQ ID NO: 25924 - DNA, 22 bp, synthetic construct
  misc_feature 1..22: note = chemically synthesized
  source 1..22: mol_type = other DNA
gtcctaggggctggagtgcatt

SEQ ID NO: 25925 - DNA, 22 bp, synthetic construct
  misc_feature 1..22: note = chemically synthesized
  source 1..22: mol_type = other DNA
ggggctggagtgcattctctga

SEQ ID NO: 25926 - DNA, 22 bp, synthetic construct
  misc_feature 1..22: note = chemically synthesized
  source 1..22: mol_type = other DNA
gagtgcattctctgatgtcaga

SEQ ID NO: 25927 - DNA, 22 bp, synthetic construct
  misc_feature 1..22: note = chemically synthesized
  source 1..22: mol_type = other DNA
tctgatgtcagaggaaatgcaa

SEQ ID NO: 25928 - DNA, 22 bp, synthetic construct
  misc_feature 1..22: note = chemically synthesized
  source 1..22: mol_type = other DNA
tgatgtcagaggaaatgcaaga

SEQ ID NO: 25929 - DNA, 22 bp, synthetic construct
  misc_feature 1..22: note = chemically synthesized
  source 1..22: mol_type = other DNA
atgtcagaggaaatgcaagatt

SEQ ID NO: 25930 - DNA, 22 bp, synthetic construct
  misc_feature 1..22: note = chemically synthesized
  source 1..22: mol_type = other DNA
cctgaggcctgagggaacccat

SEQ ID NO: 25931 - DNA, 22 bp, synthetic construct
  misc_feature 1..22: note = chemically synthesized
  source 1..22: mol_type = other DNA
aggcctgagggaacccatggta

SEQ ID NO: 25932 - DNA, 22 bp, synthetic construct
  misc_feature 1..22: note = chemically synthesized
  source 1..22: mol_type = other DNA
agggaacccatggtatatgcaa

SEQ ID NO: 25933 - DNA, 22 bp, synthetic construct
  misc_feature 1..22: note = chemically synthesized
  source 1..22: mol_type = other DNA
caaactgtagttccatatgcat

SEQ ID NO: 25934 - DNA, 22 bp, synthetic construct
  misc_feature 1..22: note = chemically synthesized
  source 1..22: mol_type = other DNA
aaactgtagttccatatgcatt

SEQ ID NO: 25935 - DNA, 22 bp, synthetic construct
  misc_feature 1..22: note = chemically synthesized
  source 1..22: mol_type = other DNA
tagttccatatgcattcttcca

SEQ ID NO: 25936 - DNA, 22 bp, synthetic construct
  misc_feature 1..22: note = chemically synthesized
  source 1..22: mol_type = other DNA
catatgcattcttccaggacaa

SEQ ID NO: 25937 - DNA, 22 bp, synthetic construct
  misc_feature 1..22: note = chemically synthesized
  source 1..22: mol_type = other DNA
ttccaggacaaatacttcttga

SEQ ID NO: 25938 - DNA, 22 bp, synthetic construct
  misc_feature 1..22: note = chemically synthesized
  source 1..22: mol_type = other DNA
ccaggacaaatacttcttgagg

SEQ ID NO: 25939 - DNA, 22 bp, synthetic construct
  misc_feature 1..22: note = chemically synthesized
  source 1..22: mol_type = other DNA
caggacaaatacttcttgaggt

SEQ ID NO: 25940 - DNA, 22 bp, synthetic construct
  misc_feature 1..22: note = chemically synthesized
  source 1..22: mol_type = other DNA
cttgaggttaaaaaaaaaaagt

SEQ ID NO: 25941 - DNA, 22 bp, synthetic construct
  misc_feature 1..22: note = chemically synthesized
  source 1..22: mol_type = other DNA
ttgaggttaaaaaaaaaaagtc

SEQ ID NO: 25942 - DNA, 22 bp, synthetic construct
  misc_feature 1..22: note = chemically synthesized
  source 1..22: mol_type = other DNA
gaggttaaaaaaaaaaagtcac

SEQ ID NO: 25943 - DNA, 22 bp, synthetic construct
  misc_feature 1..22: note = chemically synthesized
  source 1..22: mol_type = other DNA
aggttaaaaaaaaaaagtcaca

SEQ ID NO: 25944 - DNA, 22 bp, synthetic construct
  misc_feature 1..22: note = chemically synthesized
  source 1..22: mol_type = other DNA
aaaaaaaaaagtcacatagctg

SEQ ID NO: 25945 - DNA, 22 bp, synthetic construct
  misc_feature 1..22: note = chemically synthesized
  source 1..22: mol_type = other DNA
ccattttatggatttcaggatt

SEQ ID NO: 25946 - DNA, 22 bp, synthetic construct
  misc_feature 1..22: note = chemically synthesized
  source 1..22: mol_type = other DNA
tatggatttcaggatttttttt

SEQ ID NO: 25947 - DNA, 22 bp, synthetic construct
  misc_feature 1..22: note = chemically synthesized
  source 1..22: mol_type = other DNA
atggatttcaggattttttttt

SEQ ID NO: 25948 - DNA, 22 bp, synthetic construct
  misc_feature 1..22: note = chemically synthesized
  source 1..22: mol_type = other DNA
tggatttcaggatttttttttt

SEQ ID NO: 25949 - DNA, 22 bp, synthetic construct
  misc_feature 1..22: note = chemically synthesized
  source 1..22: mol_type = other DNA
caggattttttttttttttttt

SEQ ID NO: 25950 - DNA, 22 bp, synthetic construct
  misc_feature 1..22: note = chemically synthesized
  source 1..22: mol_type = other DNA
aggatttttttttttttttttt

SEQ ID NO: 25951 - DNA, 22 bp, synthetic construct
  misc_feature 1..22: note = chemically synthesized
  source 1..22: mol_type = other DNA
ttttttttttttttttgagatg

SEQ ID NO: 25952 - DNA, 22 bp, synthetic construct
  misc_feature 1..22: note = chemically synthesized
  source 1..22: mol_type = other DNA
tttttttttttttttgagatgg

SEQ ID NO: 25953 - DNA, 22 bp, synthetic construct
  misc_feature 1..22: note = chemically synthesized
  source 1..22: mol_type = other DNA
ttttttttttttttgagatgga

SEQ ID NO: 25954 - DNA, 22 bp, synthetic construct
  misc_feature 1..22: note = chemically synthesized
  source 1..22: mol_type = other DNA
tttttttttttttgagatggag

SEQ ID NO: 25955 - DNA, 22 bp, synthetic construct
  misc_feature 1..22: note = chemically synthesized
  source 1..22: mol_type = other DNA
ttttttttttttgagatggagt

SEQ ID NO: 25956 - DNA, 22 bp, synthetic construct
  misc_feature 1..22: note = chemically synthesized
  source 1..22: mol_type = other DNA
tttttttttttgagatggagtc

SEQ ID NO: 25957 - DNA, 22 bp, synthetic construct
  misc_feature 1..22: note = chemically synthesized
  source 1..22: mol_type = other DNA
ttttttttttgagatggagtct

SEQ ID NO: 25958 - DNA, 22 bp, synthetic construct
  misc_feature 1..22: note = chemically synthesized
  source 1..22: mol_type = other DNA
tttttttttgagatggagtctt

SEQ ID NO: 25959 - DNA, 22 bp, synthetic construct
  misc_feature 1..22: note = chemically synthesized
  source 1..22: mol_type = other DNA
ttttttttgagatggagtcttg

SEQ ID NO: 25960 - DNA, 22 bp, synthetic construct
  misc_feature 1..22: note = chemically synthesized
  source 1..22: mol_type = other DNA
tttttttgagatggagtcttgc

SEQ ID NO: 25961 - DNA, 22 bp, synthetic construct
  misc_feature 1..22: note = chemically synthesized
  source 1..22: mol_type = other DNA
ttttttgagatggagtcttgct

SEQ ID NO: 25962 - DNA, 22 bp, synthetic construct
  misc_feature 1..22: note = chemically synthesized
  source 1..22: mol_type = other DNA
tttttgagatggagtcttgctc

SEQ ID NO: 25963 - DNA, 22 bp, synthetic construct
  misc_feature 1..22: note = chemically synthesized
  source 1..22: mol_type = other DNA
ttttgagatggagtcttgctct

SEQ ID NO: 25964 - DNA, 22 bp, synthetic construct
  misc_feature 1..22: note = chemically synthesized
  source 1..22: mol_type = other DNA
tttgagatggagtcttgctctg

SEQ ID NO: 25965 - DNA, 22 bp, synthetic construct
  misc_feature 1..22: note = chemically synthesized
  source 1..22: mol_type = other DNA
ttgagatggagtcttgctctgt

SEQ ID NO: 25966 - DNA, 22 bp, synthetic construct
  misc_feature 1..22: note = chemically synthesized
  source 1..22: mol_type = other DNA
tgagatggagtcttgctctgtc

SEQ ID NO: 25967 - DNA, 22 bp, synthetic construct
  misc_feature 1..22: note = chemically synthesized
  source 1..22: mol_type = other DNA
gagatggagtcttgctctgtca

SEQ ID NO: 25968 - DNA, 22 bp, synthetic construct
  misc_feature 1..22: note = chemically synthesized
  source 1..22: mol_type = other DNA
agatggagtcttgctctgtcac

SEQ ID NO: 25969 - DNA, 22 bp, synthetic construct
  misc_feature 1..22: note = chemically synthesized
  source 1..22: mol_type = other DNA
gctctgtcacccagcctgtagt

SEQ ID NO: 25970 - DNA, 22 bp, synthetic construct
  misc_feature 1..22: note = chemically synthesized
  source 1..22: mol_type = other DNA
ctctgtcacccagcctgtagtg

SEQ ID NO: 25971 - DNA, 22 bp, synthetic construct
  misc_feature 1..22: note = chemically synthesized
  source 1..22: mol_type = other DNA
tgtcacccagcctgtagtgcag

SEQ ID NO: 25972 - DNA, 22 bp, synthetic construct
  misc_feature 1..22: note = chemically synthesized
  source 1..22: mol_type = other DNA
tcacccagcctgtagtgcagtg

SEQ ID NO: 25973 - DNA, 22 bp, synthetic construct
  misc_feature 1..22: note = chemically synthesized
  source 1..22: mol_type = other DNA
tagtgcagtggcataatctcgg

SEQ ID NO: 25974 - DNA, 22 bp, synthetic construct
  misc_feature 1..22: note = chemically synthesized
  source 1..22: mol_type = other DNA
ggctcacggcaacctccgcctc

SEQ ID NO: 25975 - DNA, 22 bp, synthetic construct
  misc_feature 1..22: note = chemically synthesized
  source 1..22: mol_type = other DNA
acggcaacctccgcctcccagg

SEQ ID NO: 25976 - DNA, 22 bp, synthetic construct
  misc_feature 1..22: note = chemically synthesized
  source 1..22: mol_type = other DNA
cgcctcccaggttcaagcgatt

SEQ ID NO: 25977 - DNA, 22 bp, synthetic construct
  misc_feature 1..22: note = chemically synthesized
  source 1..22: mol_type = other DNA
ccaggttcaagcgattctcttg

SEQ ID NO: 25978 - DNA, 22 bp, synthetic construct
  misc_feature 1..22: note = chemically synthesized
  source 1..22: mol_type = other DNA
aagcgattctcttgccttagcc

SEQ ID NO: 25979 - DNA, 22 bp, synthetic construct
  misc_feature 1..22: note = chemically synthesized
  source 1..22: mol_type = other DNA
tcttgccttagcctcccgagta

SEQ ID NO: 25980 - DNA, 22 bp, synthetic construct
  misc_feature 1..22: note = chemically synthesized
  source 1..22: mol_type = other DNA
ttgccttagcctcccgagtagc

SEQ ID NO: 25981 - DNA, 22 bp, synthetic construct
  misc_feature 1..22: note = chemically synthesized
  source 1..22: mol_type = other DNA
gccttagcctcccgagtagctg

SEQ ID NO: 25982 - DNA, 22 bp, synthetic construct
  misc_feature 1..22: note = chemically synthesized
  source 1..22: mol_type = other DNA
ccttagcctcccgagtagctgg

SEQ ID NO: 25983 - DNA, 22 bp, synthetic construct
  misc_feature 1..22: note = chemically synthesized
  source 1..22: mol_type = other DNA
agcctcccgagtagctgggatt

SEQ ID NO: 25984 - DNA, 22 bp, synthetic construct
  misc_feature 1..22: note = chemically synthesized
  source 1..22: mol_type = other DNA
gcctcccgagtagctgggatta

SEQ ID NO: 25985 - DNA, 22 bp, synthetic construct
  misc_feature 1..22: note = chemically synthesized
  source 1..22: mol_type = other DNA
ccgagtagctgggattacagtc

SEQ ID NO: 25986 - DNA, 22 bp, synthetic construct
  misc_feature 1..22: note = chemically synthesized
  source 1..22: mol_type = other DNA
ggattacagtcacgcaccacca

SEQ ID NO: 25987 - DNA, 22 bp, synthetic construct
  misc_feature 1..22: note = chemically synthesized
  source 1..22: mol_type = other DNA
cagtcacgcaccaccacatctg

SEQ ID NO: 25988 - DNA, 22 bp, synthetic construct
  misc_feature 1..22: note = chemically synthesized
  source 1..22: mol_type = other DNA
gctaattctttatattttttgg

SEQ ID NO: 25989 - DNA, 22 bp, synthetic construct
  misc_feature 1..22: note = chemically synthesized
  source 1..22: mol_type = other DNA
attctttatattttttggtaga

SEQ ID NO: 25990 - DNA, 22 bp, synthetic construct
  misc_feature 1..22: note = chemically synthesized
  source 1..22: mol_type = other DNA
tttatattttttggtagaaacg

SEQ ID NO: 25991 - DNA, 22 bp, synthetic construct
  misc_feature 1..22: note = chemically synthesized
  source 1..22: mol_type = other DNA
tatattttttggtagaaacggt

SEQ ID NO: 25992 - DNA, 22 bp, synthetic construct
  misc_feature 1..22: note = chemically synthesized
  source 1..22: mol_type = other DNA
atattttttggtagaaacggtg

SEQ ID NO: 25993 - DNA, 22 bp, synthetic construct
  misc_feature 1..22: note = chemically synthesized
  source 1..22: mol_type = other DNA
tattttttggtagaaacggtgt

SEQ ID NO: 25994 - DNA, 22 bp, synthetic construct
  misc_feature 1..22: note = chemically synthesized
  source 1..22: mol_type = other DNA
tttggtagaaacggtgtttcac

SEQ ID NO: 25995 - DNA, 22 bp, synthetic construct
  misc_feature 1..22: note = chemically synthesized
  source 1..22: mol_type = other DNA
ttggtagaaacggtgtttcacc

SEQ ID NO: 25996 - DNA, 22 bp, synthetic construct
  misc_feature 1..22: note = chemically synthesized
  source 1..22: mol_type = other DNA
tggtagaaacggtgtttcacca

SEQ ID NO: 25997 - DNA, 22 bp, synthetic construct
  misc_feature 1..22: note = chemically synthesized
  source 1..22: mol_type = other DNA
ggtagaaacggtgtttcaccat

SEQ ID NO: 25998 - DNA, 22 bp, synthetic construct
  misc_feature 1..22: note = chemically synthesized
  source 1..22: mol_type = other DNA
gtagaaacggtgtttcaccatg

SEQ ID NO: 25999 - DNA, 22 bp, synthetic construct
  misc_feature 1..22: note = chemically synthesized
  source 1..22: mol_type = other DNA
caccatgttggccaggctggtc

SEQ ID NO: 26000 - DNA, 22 bp, synthetic construct
  misc_feature 1..22: note = chemically synthesized
  source 1..22: mol_type = other DNA
accatgttggccaggctggtct

SEQ ID NO: 26001 - DNA, 22 bp, synthetic construct
  misc_feature 1..22: note = chemically synthesized
  source 1..22: mol_type = other DNA
gccaggctggtctcaaactcct

SEQ ID NO: 26002 - DNA, 22 bp, synthetic construct
  misc_feature 1..22: note = chemically synthesized
  source 1..22: mol_type = other DNA
gtctcaaactcctgacctcatg

SEQ ID NO: 26003 - DNA, 22 bp, synthetic construct
  misc_feature 1..22: note = chemically synthesized
  source 1..22: mol_type = other DNA
aaactcctgacctcatgtgatc

SEQ ID NO: 26004 - DNA, 22 bp, synthetic construct
  misc_feature 1..22: note = chemically synthesized
  source 1..22: mol_type = other DNA
ctgacctcatgtgatctgcctg

SEQ ID NO: 26005 - DNA, 22 bp, synthetic construct
  misc_feature 1..22: note = chemically synthesized
  source 1..22: mol_type = other DNA
acctcatgtgatctgcctgcct

SEQ ID NO: 26006 - DNA, 22 bp, synthetic construct
  misc_feature 1..22: note = chemically synthesized
  source 1..22: mol_type = other DNA
atgtgatctgcctgccttggcc

SEQ ID NO: 26007 - DNA, 22 bp, synthetic construct
  misc_feature 1..22: note = chemically synthesized
  source 1..22: mol_type = other DNA
cctgccttggcctcccaaagtg

SEQ ID NO: 26008 - DNA, 22 bp, synthetic construct
  misc_feature 1..22: note = chemically synthesized
  source 1..22: mol_type = other DNA
ccttggcctcccaaagtgctga

SEQ ID NO: 26009 - DNA, 22 bp, synthetic construct
  misc_feature 1..22: note = chemically synthesized
  source 1..22: mol_type = other DNA
ggcctcccaaagtgctgagatt

SEQ ID NO: 26010 - DNA, 22 bp, synthetic construct
  misc_feature 1..22: note = chemically synthesized
  source 1..22: mol_type = other DNA
gcctcccaaagtgctgagatta

SEQ ID NO: 26011 - DNA, 22 bp, synthetic construct
  misc_feature 1..22: note = chemically synthesized
  source 1..22: mol_type = other DNA
ccaaagtgctgagattacaggt

SEQ ID NO: 26012 - DNA, 22 bp, synthetic construct
  misc_feature 1..22: note = chemically synthesized
  source 1..22: mol_type = other DNA
agattacaggtgtgagccaccg

SEQ ID NO: 26013 - DNA, 22 bp, synthetic construct
  misc_feature 1..22: note = chemically synthesized
  source 1..22: mol_type = other DNA
caggtgtgagccaccgcgcctg

SEQ ID NO: 26014 - DNA, 22 bp, synthetic construct
  misc_feature 1..22: note = chemically synthesized
  source 1..22: mol_type = other DNA
cctggagttcagaatcttgggc

SEQ ID NO: 26015 - DNA, 22 bp, synthetic construct
  misc_feature 1..22: note = chemically synthesized
  source 1..22: mol_type = other DNA
gagttcagaatcttgggcttca

SEQ ID NO: 26016 - DNA, 22 bp, synthetic construct
  misc_feature 1..22: note = chemically synthesized
  source 1..22: mol_type = other DNA
agaatcttgggcttcattattt

SEQ ID NO: 26017 - DNA, 22 bp, synthetic construct
  misc_feature 1..22: note = chemically synthesized
  source 1..22: mol_type = other DNA
gggcttcattatttgtgtttaa

SEQ ID NO: 26018 - DNA, 22 bp, synthetic construct
  misc_feature 1..22: note = chemically synthesized
  source 1..22: mol_type = other DNA
ggcttcattatttgtgtttaaa

SEQ ID NO: 26019 - DNA, 22 bp, synthetic construct
  misc_feature 1..22: note = chemically synthesized
  source 1..22: mol_type = other DNA
cattatttgtgtttaaatagat

SEQ ID NO: 26020 - DNA, 22 bp, synthetic construct
  misc_feature 1..22: note = chemically synthesized
  source 1..22: mol_type = other DNA
attatttgtgtttaaatagatc

SEQ ID NO: 26021 - DNA, 22 bp, synthetic construct
  misc_feature 1..22: note = chemically synthesized
  source 1..22: mol_type = other DNA
tttgtgtttaaatagatcatac

SEQ ID NO: 26022 - DNA, 22 bp, synthetic construct
  misc_feature 1..22: note = chemically synthesized
  source 1..22: mol_type = other DNA
gtgtttaaatagatcatacagt

SEQ ID NO: 26023 - DNA, 22 bp, synthetic construct
  misc_feature 1..22: note = chemically synthesized
  source 1..22: mol_type = other DNA
tgtttaaatagatcatacagtc

SEQ ID NO: 26024 - DNA, 22 bp, synthetic construct
  misc_feature 1..22: note = chemically synthesized
  source 1..22: mol_type = other DNA
aaatagatcatacagtcaggca

SEQ ID NO: 26025 - DNA, 22 bp, synthetic construct
  misc_feature 1..22: note = chemically synthesized
  source 1..22: mol_type = other DNA
aatagatcatacagtcaggcac

SEQ ID NO: 26026 - DNA, 22 bp, synthetic construct
  misc_feature 1..22: note = chemically synthesized
  source 1..22: mol_type = other DNA
atgcctgtaatcccagcacttt

SEQ ID NO: 26027 - DNA, 22 bp, synthetic construct
  misc_feature 1..22: note = chemically synthesized
  source 1..22: mol_type = other DNA
taatcccagcactttgggaggc

SEQ ID NO: 26028 - DNA, 22 bp, synthetic construct
  misc_feature 1..22: note = chemically synthesized
  source 1..22: mol_type = other DNA
tgggaggctgaggtgggaggat

SEQ ID NO: 26029 - DNA, 22 bp, synthetic construct
  misc_feature 1..22: note = chemically synthesized
  source 1..22: mol_type = other DNA
gggaggctgaggtgggaggatt

SEQ ID NO: 26030 - DNA, 22 bp, synthetic construct
  misc_feature 1..22: note = chemically synthesized
  source 1..22: mol_type = other DNA
ggaggctgaggtgggaggattg

SEQ ID NO: 26031 - DNA, 22 bp, synthetic construct
  misc_feature 1..22: note = chemically synthesized
  source 1..22: mol_type = other DNA
aggtgggaggattgcctgagtt

SEQ ID NO: 26032 - DNA, 22 bp, synthetic construct
  misc_feature 1..22: note = chemically synthesized
  source 1..22: mol_type = other DNA
cctgagttcaggagatggagac

SEQ ID NO: 26033 - DNA, 22 bp, synthetic construct
  misc_feature 1..22: note = chemically synthesized
  source 1..22: mol_type = other DNA
agttcaggagatggagaccagc

SEQ ID NO: 26034 - DNA, 22 bp, synthetic construct
  misc_feature 1..22: note = chemically synthesized
  source 1..22: mol_type = other DNA
aggagatggagaccagcctggg

SEQ ID NO: 26035 - DNA, 22 bp, synthetic construct
  misc_feature 1..22: note = chemically synthesized
  source 1..22: mol_type = other DNA
ggcaacatggtgaaaccccgtc

SEQ ID NO: 26036 - DNA, 22 bp, synthetic construct
  misc_feature 1..22: note = chemically synthesized
  source 1..22: mol_type = other DNA
tactaaaaatacaaaaactagc

SEQ ID NO: 26037 - DNA, 22 bp, synthetic construct
  misc_feature 1..22: note = chemically synthesized
  source 1..22: mol_type = other DNA
ctaaaaatacaaaaactagctg

SEQ ID NO: 26038 - DNA, 22 bp, synthetic construct
  misc_feature 1..22: note = chemically synthesized
  source 1..22: mol_type = other DNA
aaaatacaaaaactagctggat

SEQ ID NO: 26039 - DNA, 22 bp, synthetic construct
  misc_feature 1..22: note = chemically synthesized
  source 1..22: mol_type = other DNA
gctggatgtggtggcacacacc

SEQ ID NO: 26040 - DNA, 22 bp, synthetic construct
  misc_feature 1..22: note = chemically synthesized
  source 1..22: mol_type = other DNA
gatgtggtggcacacacctgta

SEQ ID NO: 26041 - DNA, 22 bp, synthetic construct
  misc_feature 1..22: note = chemically synthesized
  source 1..22: mol_type = other DNA
tagtcccagctattcaggaggc

SEQ ID NO: 26042 - DNA, 22 bp, synthetic construct
  misc_feature 1..22: note = chemically synthesized
  source 1..22: mol_type = other DNA
ttcaggaggctgaggtgggagg

SEQ ID NO: 26043 - DNA, 22 bp, synthetic construct
  misc_feature 1..22: note = chemically synthesized
  source 1..22: mol_type = other DNA
aggaggctgaggtgggaggatc

SEQ ID NO: 26044 - DNA, 22 bp, synthetic construct
  misc_feature 1..22: note = chemically synthesized
  source 1..22: mol_type = other DNA
aggtgggaggatcccaggaggt

SEQ ID NO: 26045 - DNA, 22 bp, synthetic construct
  misc_feature 1..22: note = chemically synthesized
  source 1..22: mol_type = other DNA
cgccactgcactccaggctggg

SEQ ID NO: 26046 - DNA, 22 bp, synthetic construct
  misc_feature 1..22: note = chemically synthesized
  source 1..22: mol_type = other DNA
cactccaggctgggttactgag

SEQ ID NO: 26047 - DNA, 22 bp, synthetic construct
  misc_feature 1..22: note = chemically synthesized
  source 1..22: mol_type = other DNA
caggctgggttactgagccaga

SEQ ID NO: 26048 - DNA, 22 bp, synthetic construct
  misc_feature 1..22: note = chemically synthesized
  source 1..22: mol_type = other DNA
ggttactgagccagatcctgtc

SEQ ID NO: 26049 - DNA, 22 bp, synthetic construct
  misc_feature 1..22: note = chemically synthesized
  source 1..22: mol_type = other DNA
ctgagccagatcctgtctcaaa

SEQ ID NO: 26050 - DNA, 22 bp, synthetic construct
  misc_feature 1..22: note = chemically synthesized
  source 1..22: mol_type = other DNA
agccagatcctgtctcaaaaaa

SEQ ID NO: 26051 - DNA, 22 bp, synthetic construct
  misc_feature 1..22: note = chemically synthesized
  source 1..22: mol_type = other DNA
tctcaaaaaaaaaaaagataat

SEQ ID NO: 26052 - DNA, 22 bp, synthetic construct
  misc_feature 1..22: note = chemically synthesized
  source 1..22: mol_type = other DNA
aaaaaaaaaaaagataatacat

SEQ ID NO: 26053 - DNA, 22 bp, synthetic construct
  misc_feature 1..22: note = chemically synthesized
  source 1..22: mol_type = other DNA
aaacagttcaaaatgcaaaagt

SEQ ID NO: 26054 - DNA, 22 bp, synthetic construct
  misc_feature 1..22: note = chemically synthesized
  source 1..22: mol_type = other DNA
aaaatgcaaaagttacatacat

SEQ ID NO: 26055 - DNA, 22 bp, synthetic construct
  misc_feature 1..22: note = chemically synthesized
  source 1..22: mol_type = other DNA
catacataaggaagtgtcatga

SEQ ID NO: 26056 - DNA, 22 bp, synthetic construct
  misc_feature 1..22: note = chemically synthesized
  source 1..22: mol_type = other DNA
cctctcacacttctccccagcc

SEQ ID NO: 26057 - DNA, 22 bp, synthetic construct
  misc_feature 1..22: note = chemically synthesized
  source 1..22: mol_type = other DNA
tcacacttctccccagccaccc

SEQ ID NO: 26058 - DNA, 22 bp, synthetic construct
  misc_feature 1..22: note = chemically synthesized
  source 1..22: mol_type = other DNA
acacttctccccagccacccag

SEQ ID NO: 26059 - DNA, 22 bp, synthetic construct
  misc_feature 1..22: note = chemically synthesized
  source 1..22: mol_type = other DNA
ctccccagccacccagttctcc

SEQ ID NO: 26060 - DNA, 22 bp, synthetic construct
  misc_feature 1..22: note = chemically synthesized
  source 1..22: mol_type = other DNA
tccccagccacccagttctccc

SEQ ID NO: 26061 - DNA, 22 bp, synthetic construct
  misc_feature 1..22: note = chemically synthesized
  source 1..22: mol_type = other DNA
cccagccacccagttctccctt

SEQ ID NO: 26062 - DNA, 22 bp, synthetic construct
  misc_feature 1..22: note = chemically synthesized
  source 1..22: mol_type = other DNA
tcccttctagaggcaacatgtg

SEQ ID NO: 26063 - DNA, 22 bp, synthetic construct
  misc_feature 1..22: note = chemically synthesized
  source 1..22: mol_type = other DNA
ccttctagaggcaacatgtgaa

SEQ ID NO: 26064 - DNA, 22 bp, synthetic construct
  misc_feature 1..22: note = chemically synthesized
  source 1..22: mol_type = other DNA
ctagaggcaacatgtgaaatcc

SEQ ID NO: 26065 - DNA, 22 bp, synthetic construct
  misc_feature 1..22: note = chemically synthesized
  source 1..22: mol_type = other DNA
tagaggcaacatgtgaaatcct

SEQ ID NO: 26066 - DNA, 22 bp, synthetic construct
  misc_feature 1..22: note = chemically synthesized
  source 1..22: mol_type = other DNA
gaggcaacatgtgaaatccttc

SEQ ID NO: 26067 - DNA, 22 bp, synthetic construct
  misc_feature 1..22: note = chemically synthesized
  source 1..22: mol_type = other DNA
ctcaggctacactcttcttgaa

SEQ ID NO: 26068 - DNA, 22 bp, synthetic construct
  misc_feature 1..22: note = chemically synthesized
  source 1..22: mol_type = other DNA
tcaggctacactcttcttgaag

SEQ ID NO: 26069 - DNA, 22 bp, synthetic construct
  misc_feature 1..22: note = chemically synthesized
  source 1..22: mol_type = other DNA
aggctacactcttcttgaaggt

SEQ ID NO: 26070 - DNA, 22 bp, synthetic construct
  misc_feature 1..22: note = chemically synthesized
  source 1..22: mol_type = other DNA
cactcttcttgaaggtgtaggc

SEQ ID NO: 26071 - DNA, 22 bp, synthetic construct
  misc_feature 1..22: note = chemically synthesized
  source 1..22: mol_type = other DNA
ttcttgaaggtgtaggctttgg

SEQ ID NO: 26072 - DNA, 22 bp, synthetic construct
  misc_feature 1..22: note = chemically synthesized
  source 1..22: mol_type = other DNA
cttgaaggtgtaggctttgggc

SEQ ID NO: 26073 - DNA, 22 bp, synthetic construct
  misc_feature 1..22: note = chemically synthesized
  source 1..22: mol_type = other DNA
ttgaaggtgtaggctttgggca

SEQ ID NO: 26074 - DNA, 22 bp, synthetic construct
  misc_feature 1..22: note = chemically synthesized
  source 1..22: mol_type = other DNA
gaaggtgtaggctttgggcaaa

SEQ ID NO: 26075 - DNA, 22 bp, synthetic construct
  misc_feature 1..22: note = chemically synthesized
  source 1..22: mol_type = other DNA
aaggtgtaggctttgggcaaaa

SEQ ID NO: 26076 - DNA, 22 bp, synthetic construct
  misc_feature 1..22: note = chemically synthesized
  source 1..22: mol_type = other DNA
tgggcaaaagcattcattcagt

SEQ ID NO: 26077 - DNA, 22 bp, synthetic construct
  misc_feature 1..22: note = chemically synthesized
  source 1..22: mol_type = other DNA
gggcaaaagcattcattcagta

SEQ ID NO: 26078 - DNA, 22 bp, synthetic construct
  misc_feature 1..22: note = chemically synthesized
  source 1..22: mol_type = other DNA
ggcaaaagcattcattcagtaa

SEQ ID NO: 26079 - DNA, 22 bp, synthetic construct
  misc_feature 1..22: note = chemically synthesized
  source 1..22: mol_type = other DNA
attcagtaaccccagaaacttg

SEQ ID NO: 26080 - DNA, 22 bp, synthetic construct
  misc_feature 1..22: note = chemically synthesized
  source 1..22: mol_type = other DNA
agtaaccccagaaacttgttct

SEQ ID NO: 26081 - DNA, 22 bp, synthetic construct
  misc_feature 1..22: note = chemically synthesized
  source 1..22: mol_type = other DNA
gttctgtttttccataggattc

SEQ ID NO: 26082 - DNA, 22 bp, synthetic construct
  misc_feature 1..22: note = chemically synthesized
  source 1..22: mol_type = other DNA
ttctgtttttccataggattct

SEQ ID NO: 26083 - DNA, 22 bp, synthetic construct
  misc_feature 1..22: note = chemically synthesized
  source 1..22: mol_type = other DNA
tgtttttccataggattctctt

SEQ ID NO: 26084 - DNA, 22 bp, synthetic construct
  misc_feature 1..22: note = chemically synthesized
  source 1..22: mol_type = other DNA
tttttccataggattctctttg

SEQ ID NO: 26085 - DNA, 22 bp, synthetic construct
  misc_feature 1..22: note = chemically synthesized
  source 1..22: mol_type = other DNA
ttccataggattctctttggac

SEQ ID NO: 26086 - DNA, 22 bp, synthetic construct
  misc_feature 1..22: note = chemically synthesized
  source 1..22: mol_type = other DNA
tccataggattctctttggaca

SEQ ID NO: 26087 - DNA, 22 bp, synthetic construct
  misc_feature 1..22: note = chemically synthesized
  source 1..22: mol_type = other DNA
ccataggattctctttggacag

SEQ ID NO: 26088 - DNA, 22 bp, synthetic construct
  misc_feature 1..22: note = chemically synthesized
  source 1..22: mol_type = other DNA
cataggattctctttggacagc

SEQ ID NO: 26089 - DNA, 22 bp, synthetic construct
  misc_feature 1..22: note = chemically synthesized
  source 1..22: mol_type = other DNA
tctttggacagcgtccatactg

SEQ ID NO: 26090 - DNA, 22 bp, synthetic construct
  misc_feature 1..22: note = chemically synthesized
  source 1..22: mol_type = other DNA
tttggacagcgtccatactggt

SEQ ID NO: 26091 - DNA, 22 bp, synthetic construct
  misc_feature 1..22: note = chemically synthesized
  source 1..22: mol_type = other DNA
tggacagcgtccatactggtgg

SEQ ID NO: 26092 - DNA, 22 bp, synthetic construct
  misc_feature 1..22: note = chemically synthesized
  source 1..22: mol_type = other DNA
ggacagcgtccatactggtggg

SEQ ID NO: 26093 - DNA, 22 bp, synthetic construct
  misc_feature 1..22: note = chemically synthesized
  source 1..22: mol_type = other DNA
gacagcgtccatactggtgggt

SEQ ID NO: 26094 - DNA, 22 bp, synthetic construct
  misc_feature 1..22: note = chemically synthesized
  source 1..22: mol_type = other DNA
gtgggttttggatactgactac

SEQ ID NO: 26095 - DNA, 22 bp, synthetic construct
  misc_feature 1..22: note = chemically synthesized
  source 1..22: mol_type = other DNA
tggatactgactactacagcaa

SEQ ID NO: 26096 - DNA, 22 bp, synthetic construct
  misc_feature 1..22: note = chemically synthesized
  source 1..22: mol_type = other DNA
ggatactgactactacagcaac

SEQ ID NO: 26097 - DNA, 22 bp, synthetic construct
  misc_feature 1..22: note = chemically synthesized
  source 1..22: mol_type = other DNA
gatactgactactacagcaaca

SEQ ID NO: 26098 - DNA, 22 bp, synthetic construct
  misc_feature 1..22: note = chemically synthesized
  source 1..22: mol_type = other DNA
actactacagcaacacttccgt

SEQ ID NO: 26099 - DNA, 22 bp, synthetic construct
  misc_feature 1..22: note = chemically synthesized
  source 1..22: mol_type = other DNA
ctacagcaacacttccgtgccc

SEQ ID NO: 26100 - DNA, 22 bp, synthetic construct
  misc_feature 1..22: note = chemically synthesized
  source 1..22: mol_type = other DNA
cagcaacacttccgtgcccctg

SEQ ID NO: 26101 - DNA, 22 bp, synthetic construct
  misc_feature 1..22: note = chemically synthesized
  source 1..22: mol_type = other DNA
ccgtgcccctgataaagcagtt

SEQ ID NO: 26102 - DNA, 22 bp, synthetic construct
  misc_feature 1..22: note = chemically synthesized
  source 1..22: mol_type = other DNA
cgtgcccctgataaagcagttc

SEQ ID NO: 26103 - DNA, 22 bp, synthetic construct
  misc_feature 1..22: note = chemically synthesized
  source 1..22: mol_type = other DNA
ataaagcagttccctgtaacct

SEQ ID NO: 26104 - DNA, 22 bp, synthetic construct
  misc_feature 1..22: note = chemically synthesized
  source 1..22: mol_type = other DNA
cctgtaacctgtgagactggac

SEQ ID NO: 26105 - DNA, 22 bp, synthetic construct
  misc_feature 1..22: note = chemically synthesized
  source 1..22: mol_type = other DNA
taacctgtgagactggaccagg

SEQ ID NO: 26106 - DNA, 22 bp, synthetic construct
  misc_feature 1..22: note = chemically synthesized
  source 1..22: mol_type = other DNA
tgagactggaccaggtaagcgt

SEQ ID NO: 26107 - DNA, 22 bp, synthetic construct
  misc_feature 1..22: note = chemically synthesized
  source 1..22: mol_type = other DNA
gaccaggtaagcgtcccagccc

SEQ ID NO: 26108 - DNA, 22 bp, synthetic construct
  misc_feature 1..22: note = chemically synthesized
  source 1..22: mol_type = other DNA
cagacagaagctgagtggacct

SEQ ID NO: 26109 - DNA, 22 bp, synthetic construct
  misc_feature 1..22: note = chemically synthesized
  source 1..22: mol_type = other DNA
agtggacctcgtttacctgtta

SEQ ID NO: 26110 - DNA, 22 bp, synthetic construct
  misc_feature 1..22: note = chemically synthesized
  source 1..22: mol_type = other DNA
gtttacctgttatggatgaaac

SEQ ID NO: 26111 - DNA, 22 bp, synthetic construct
  misc_feature 1..22: note = chemically synthesized
  source 1..22: mol_type = other DNA
acctgttatggatgaaactgac

SEQ ID NO: 26112 - DNA, 22 bp, synthetic construct
  misc_feature 1..22: note = chemically synthesized
  source 1..22: mol_type = other DNA
cctgttatggatgaaactgacc

SEQ ID NO: 26113 - DNA, 22 bp, synthetic construct
  misc_feature 1..22: note = chemically synthesized
  source 1..22: mol_type = other DNA
ttatggatgaaactgaccttga

SEQ ID NO: 26114 - DNA, 22 bp, synthetic construct
  misc_feature 1..22: note = chemically synthesized
  source 1..22: mol_type = other DNA
tggatgaaactgaccttgaggg

SEQ ID NO: 26115 - DNA, 22 bp, synthetic construct
  misc_feature 1..22: note = chemically synthesized
  source 1..22: mol_type = other DNA
accttgaggggacatgaggaga

SEQ ID NO: 26116 - DNA, 22 bp, synthetic construct
  misc_feature 1..22: note = chemically synthesized
  source 1..22: mol_type = other DNA
gaggggacatgaggagagccat

SEQ ID NO: 26117 - DNA, 22 bp, synthetic construct
  misc_feature 1..22: note = chemically synthesized
  source 1..22: mol_type = other DNA
aggggacatgaggagagccatt

SEQ ID NO: 26118 - DNA, 22 bp, synthetic construct
  misc_feature 1..22: note = chemically synthesized
  source 1..22: mol_type = other DNA
ctttgtacttttgtcatgctct

SEQ ID NO: 26119 - DNA, 22 bp, synthetic construct
  misc_feature 1..22: note = chemically synthesized
  source 1..22: mol_type = other DNA
tgtacttttgtcatgctcttca

SEQ ID NO: 26120 - DNA, 22 bp, synthetic construct
  misc_feature 1..22: note = chemically synthesized
  source 1..22: mol_type = other DNA
gtacttttgtcatgctcttcaa

SEQ ID NO: 26121 - DNA, 22 bp, synthetic construct
  misc_feature 1..22: note = chemically synthesized
  source 1..22: mol_type = other DNA
tacttttgtcatgctcttcaat

SEQ ID NO: 26122 - DNA, 22 bp, synthetic construct
  misc_feature 1..22: note = chemically synthesized
  source 1..22: mol_type = other DNA
ttgtcatgctcttcaattggca

SEQ ID NO: 26123 - DNA, 22 bp, synthetic construct
  misc_feature 1..22: note = chemically synthesized
  source 1..22: mol_type = other DNA
tgtcatgctcttcaattggcac

SEQ ID NO: 26124 - DNA, 22 bp, synthetic construct
  misc_feature 1..22: note = chemically synthesized
  source 1..22: mol_type = other DNA
gtcatgctcttcaattggcaca

SEQ ID NO: 26125 - DNA, 22 bp, synthetic construct
  misc_feature 1..22: note = chemically synthesized
  source 1..22: mol_type = other DNA
tcatgctcttcaattggcacaa

SEQ ID NO: 26126 - DNA, 22 bp, synthetic construct
  misc_feature 1..22: note = chemically synthesized
  source 1..22: mol_type = other DNA
ttcaattggcacaaattaattc

SEQ ID NO: 26127 - DNA, 22 bp, synthetic construct
  misc_feature 1..22: note = chemically synthesized
  source 1..22: mol_type = other DNA
caattggcacaaattaattcac

SEQ ID NO: 26128 - DNA, 22 bp, synthetic construct
  misc_feature 1..22: note = chemically synthesized
  source 1..22: mol_type = other DNA
aattggcacaaattaattcact

SEQ ID NO: 26129 - DNA, 22 bp, synthetic construct
  misc_feature 1..22: note = chemically synthesized
  source 1..22: mol_type = other DNA
gcacaaattaattcacttctgc

SEQ ID NO: 26130 - DNA, 22 bp, synthetic construct
  misc_feature 1..22: note = chemically synthesized
  source 1..22: mol_type = other DNA
attcacttctgcaatactttcc

SEQ ID NO: 26131 - DNA, 22 bp, synthetic construct
  misc_feature 1..22: note = chemically synthesized
  source 1..22: mol_type = other DNA
acttctgcaatactttcctgaa

SEQ ID NO: 26132 - DNA, 22 bp, synthetic construct
  misc_feature 1..22: note = chemically synthesized
  source 1..22: mol_type = other DNA
ctgcaatactttcctgaatagc

SEQ ID NO: 26133 - DNA, 22 bp, synthetic construct
  misc_feature 1..22: note = chemically synthesized
  source 1..22: mol_type = other DNA
tgcaatactttcctgaatagca

SEQ ID NO: 26134 - DNA, 22 bp, synthetic construct
  misc_feature 1..22: note = chemically synthesized
  source 1..22: mol_type = other DNA
caatactttcctgaatagcaca

SEQ ID NO: 26135 - DNA, 22 bp, synthetic construct
  misc_feature 1..22: note = chemically synthesized
  source 1..22: mol_type = other DNA
tcctgaatagcacagtagtatt

SEQ ID NO: 26136 - DNA, 22 bp, synthetic construct
  misc_feature 1..22: note = chemically synthesized
  source 1..22: mol_type = other DNA
cctgaatagcacagtagtattg

SEQ ID NO: 26137 - DNA, 22 bp, synthetic construct
  misc_feature 1..22: note = chemically synthesized
  source 1..22: mol_type = other DNA
ctgaatagcacagtagtattgg

SEQ ID NO: 26138 - DNA, 22 bp, synthetic construct
  misc_feature 1..22: note = chemically synthesized
  source 1..22: mol_type = other DNA
aatagcacagtagtattggaaa

SEQ ID NO: 26139 - DNA, 22 bp, synthetic construct
  misc_feature 1..22: note = chemically synthesized
  source 1..22: mol_type = other DNA
gaaatctgcctattacagaacc

SEQ ID NO: 26140 - DNA, 22 bp, synthetic construct
  misc_feature 1..22: note = chemically synthesized
  source 1..22: mol_type = other DNA
cctattacagaacctggatgga

SEQ ID NO: 26141 - DNA, 22 bp, synthetic construct
  misc_feature 1..22: note = chemically synthesized
  source 1..22: mol_type = other DNA
ttacagaacctggatggagtcc

SEQ ID NO: 26142 - DNA, 22 bp, synthetic construct
  misc_feature 1..22: note = chemically synthesized
  source 1..22: mol_type = other DNA
cagaacctggatggagtccaga

SEQ ID NO: 26143 - DNA, 22 bp, synthetic construct
  misc_feature 1..22: note = chemically synthesized
  source 1..22: mol_type = other DNA
gatggagtccagagaggcacgg

SEQ ID NO: 26144 - DNA, 22 bp, synthetic construct
  misc_feature 1..22: note = chemically synthesized
  source 1..22: mol_type = other DNA
gtgagagtcaccgccctgcagc

SEQ ID NO: 26145 - DNA, 22 bp, synthetic construct
  misc_feature 1..22: note = chemically synthesized
  source 1..22: mol_type = other DNA
cagggcggtgactctcacgagc

SEQ ID NO: 26146 - DNA, 22 bp, synthetic construct
  misc_feature 1..22: note = chemically synthesized
  source 1..22: mol_type = other DNA
tcacgagccctttgcccatgga

SEQ ID NO: 26147 - DNA, 22 bp, synthetic construct
  misc_feature 1..22: note = chemically synthesized
  source 1..22: mol_type = other DNA
acgagccctttgcccatggatg

SEQ ID NO: 26148 - DNA, 22 bp, synthetic construct
  misc_feature 1..22: note = chemically synthesized
  source 1..22: mol_type = other DNA
tgcccatggatgcccgtgcctc

SEQ ID NO: 26149 - DNA, 22 bp, synthetic construct
  misc_feature 1..22: note = chemically synthesized
  source 1..22: mol_type = other DNA
gcccatggatgcccgtgcctct

SEQ ID NO: 26150 - DNA, 22 bp, synthetic construct
  misc_feature 1..22: note = chemically synthesized
  source 1..22: mol_type = other DNA
cccatggatgcccgtgcctctc

SEQ ID NO: 26151 - DNA, 22 bp, synthetic construct
  misc_feature 1..22: note = chemically synthesized
  source 1..22: mol_type = other DNA
tctggactccatccaggttctg

SEQ ID NO: 26152 - DNA, 22 bp, synthetic construct
  misc_feature 1..22: note = chemically synthesized
  source 1..22: mol_type = other DNA
tggactccatccaggttctgta

SEQ ID NO: 26153 - DNA, 22 bp, synthetic construct
  misc_feature 1..22: note = chemically synthesized
  source 1..22: mol_type = other DNA
gactccatccaggttctgtaat

SEQ ID NO: 26154 - DNA, 22 bp, synthetic construct
  misc_feature 1..22: note = chemically synthesized
  source 1..22: mol_type = other DNA
catccaggttctgtaataggca

SEQ ID NO: 26155 - DNA, 22 bp, synthetic construct
  misc_feature 1..22: note = chemically synthesized
  source 1..22: mol_type = other DNA
tgtaataggcagatttccaata

SEQ ID NO: 26156 - DNA, 22 bp, synthetic construct
  misc_feature 1..22: note = chemically synthesized
  source 1..22: mol_type = other DNA
taataggcagatttccaatact

SEQ ID NO: 26157 - DNA, 22 bp, synthetic construct
  misc_feature 1..22: note = chemically synthesized
  source 1..22: mol_type = other DNA
ccaatactactgtgctattcag

SEQ ID NO: 26158 - DNA, 22 bp, synthetic construct
  misc_feature 1..22: note = chemically synthesized
  source 1..22: mol_type = other DNA
caatactactgtgctattcagg

SEQ ID NO: 26159 - DNA, 22 bp, synthetic construct
  misc_feature 1..22: note = chemically synthesized
  source 1..22: mol_type = other DNA
ctgtgctattcaggaaagtatt

SEQ ID NO: 26160 - DNA, 22 bp, synthetic construct
  misc_feature 1..22: note = chemically synthesized
  source 1..22: mol_type = other DNA
tgctattcaggaaagtattgca

SEQ ID NO: 26161 - DNA, 22 bp, synthetic construct
  misc_feature 1..22: note = chemically synthesized
  source 1..22: mol_type = other DNA
ttcaggaaagtattgcagaagt

SEQ ID NO: 26162 - DNA, 22 bp, synthetic construct
  misc_feature 1..22: note = chemically synthesized
  source 1..22: mol_type = other DNA
aggaaagtattgcagaagtgaa

SEQ ID NO: 26163 - DNA, 22 bp, synthetic construct
  misc_feature 1..22: note = chemically synthesized
  source 1..22: mol_type = other DNA
cagaagtgaattaatttgtgcc

SEQ ID NO: 26164 - DNA, 22 bp, synthetic construct
  misc_feature 1..22: note = chemically synthesized
  source 1..22: mol_type = other DNA
atttgtgccaattgaagagcat

SEQ ID NO: 26165 - DNA, 22 bp, synthetic construct
  misc_feature 1..22: note = chemically synthesized
  source 1..22: mol_type = other DNA
gtgccaattgaagagcatgaca

SEQ ID NO: 26166 - DNA, 22 bp, synthetic construct
  misc_feature 1..22: note = chemically synthesized
  source 1..22: mol_type = other DNA
tgccaattgaagagcatgacaa

SEQ ID NO: 26167 - DNA, 22 bp, synthetic construct
  misc_feature 1..22: note = chemically synthesized
  source 1..22: mol_type = other DNA
aagagcatgacaaaagtacaaa

SEQ ID NO: 26168 - DNA, 22 bp, synthetic construct
  misc_feature 1..22: note = chemically synthesized
  source 1..22: mol_type = other DNA
tcctcatgtcccctcaaggtca

SEQ ID NO: 26169 - DNA, 22 bp, synthetic construct
  misc_feature 1..22: note = chemically synthesized
  source 1..22: mol_type = other DNA
ctcatgtcccctcaaggtcagt

SEQ ID NO: 26170 - DNA, 22 bp, synthetic construct
  misc_feature 1..22: note = chemically synthesized
  source 1..22: mol_type = other DNA
atgtcccctcaaggtcagtttc

SEQ ID NO: 26171 - DNA, 22 bp, synthetic construct
  misc_feature 1..22: note = chemically synthesized
  source 1..22: mol_type = other DNA
aaggtcagtttcatccataaca

SEQ ID NO: 26172 - DNA, 22 bp, synthetic construct
  misc_feature 1..22: note = chemically synthesized
  source 1..22: mol_type = other DNA
catccataacaggtaaacgagg

SEQ ID NO: 26173 - DNA, 22 bp, synthetic construct
  misc_feature 1..22: note = chemically synthesized
  source 1..22: mol_type = other DNA
atccataacaggtaaacgaggt

SEQ ID NO: 26174 - DNA, 22 bp, synthetic construct
  misc_feature 1..22: note = chemically synthesized
  source 1..22: mol_type = other DNA
agcttctgtctgcaggggctgg

SEQ ID NO: 26175 - DNA, 22 bp, synthetic construct
  misc_feature 1..22: note = chemically synthesized
  source 1..22: mol_type = other DNA
ctgtctgcaggggctgggacgc

SEQ ID NO: 26176 - DNA, 22 bp, synthetic construct
  misc_feature 1..22: note = chemically synthesized
  source 1..22: mol_type = other DNA
tgtctgcaggggctgggacgct

SEQ ID NO: 26177 - DNA, 22 bp, synthetic construct
  misc_feature 1..22: note = chemically synthesized
  source 1..22: mol_type = other DNA
tctgcaggggctgggacgctta

SEQ ID NO: 26178 - DNA, 22 bp, synthetic construct
  misc_feature 1..22: note = chemically synthesized
  source 1..22: mol_type = other DNA
caggggctgggacgcttacctg

SEQ ID NO: 26179 - DNA, 22 bp, synthetic construct
  misc_feature 1..22: note = chemically synthesized
  source 1..22: mol_type = other DNA
ggacgcttacctggtccagtct

SEQ ID NO: 26180 - DNA, 22 bp, synthetic construct
  misc_feature 1..22: note = chemically synthesized
  source 1..22: mol_type = other DNA
acctggtccagtctcacaggtt

SEQ ID NO: 26181 - DNA, 22 bp, synthetic construct
  misc_feature 1..22: note = chemically synthesized
  source 1..22: mol_type = other DNA
cctggtccagtctcacaggtta

SEQ ID NO: 26182 - DNA, 22 bp, synthetic construct
  misc_feature 1..22: note = chemically synthesized
  source 1..22: mol_type = other DNA
gtccagtctcacaggttacagg

SEQ ID NO: 26183 - DNA, 22 bp, synthetic construct
  misc_feature 1..22: note = chemically synthesized
  source 1..22: mol_type = other DNA
acaggttacagggaactgcttt

SEQ ID NO: 26184 - DNA, 22 bp, synthetic construct
  misc_feature 1..22: note = chemically synthesized
  source 1..22: mol_type = other DNA
cagggaactgctttatcagggg

SEQ ID NO: 26185 - DNA, 22 bp, synthetic construct
  misc_feature 1..22: note = chemically synthesized
  source 1..22: mol_type = other DNA
ctttatcaggggcacggaagtg

SEQ ID NO: 26186 - DNA, 22 bp, synthetic construct
  misc_feature 1..22: note = chemically synthesized
  source 1..22: mol_type = other DNA
tatcaggggcacggaagtgttg

SEQ ID NO: 26187 - DNA, 22 bp, synthetic construct
  misc_feature 1..22: note = chemically synthesized
  source 1..22: mol_type = other DNA
atcaggggcacggaagtgttgc

SEQ ID NO: 26188 - DNA, 22 bp, synthetic construct
  misc_feature 1..22: note = chemically synthesized
  source 1..22: mol_type = other DNA
tcaggggcacggaagtgttgct

SEQ ID NO: 26189 - DNA, 22 bp, synthetic construct
  misc_feature 1..22: note = chemically synthesized
  source 1..22: mol_type = other DNA
ctgtagtagtcagtatccaaaa

SEQ ID NO: 26190 - DNA, 22 bp, synthetic construct
  misc_feature 1..22: note = chemically synthesized
  source 1..22: mol_type = other DNA
tagtagtcagtatccaaaaccc

SEQ ID NO: 26191 - DNA, 22 bp, synthetic construct
  misc_feature 1..22: note = chemically synthesized
  source 1..22: mol_type = other DNA
tccaaagagaatcctatggaaa

SEQ ID NO: 26192 - DNA, 22 bp, synthetic construct
  misc_feature 1..22: note = chemically synthesized
  source 1..22: mol_type = other DNA
tggaaaaacagaacaagtttct

SEQ ID NO: 26193 - DNA, 22 bp, synthetic construct
  misc_feature 1..22: note = chemically synthesized
  source 1..22: mol_type = other DNA
ctggggttactgaatgaatgct

SEQ ID NO: 26194 - DNA, 22 bp, synthetic construct
  misc_feature 1..22: note = chemically synthesized
  source 1..22: mol_type = other DNA
tggggttactgaatgaatgctt

SEQ ID NO: 26195 - DNA, 22 bp, synthetic construct
  misc_feature 1..22: note = chemically synthesized
  source 1..22: mol_type = other DNA
gggttactgaatgaatgctttt

SEQ ID NO: 26196 - DNA, 22 bp, synthetic construct
  misc_feature 1..22: note = chemically synthesized
  source 1..22: mol_type = other DNA
ctgaatgaatgcttttgcccaa

SEQ ID NO: 26197 - DNA, 22 bp, synthetic construct
  misc_feature 1..22: note = chemically synthesized
  source 1..22: mol_type = other DNA
aatgaatgcttttgcccaaagc

SEQ ID NO: 26198 - DNA, 22 bp, synthetic construct
  misc_feature 1..22: note = chemically synthesized
  source 1..22: mol_type = other DNA
ttgcccaaagcctacaccttca

SEQ ID NO: 26199 - DNA, 22 bp, synthetic construct
  misc_feature 1..22: note = chemically synthesized
  source 1..22: mol_type = other DNA
tgcccaaagcctacaccttcaa

SEQ ID NO: 26200 - DNA, 22 bp, synthetic construct
  misc_feature 1..22: note = chemically synthesized
  source 1..22: mol_type = other DNA
gcccaaagcctacaccttcaag

SEQ ID NO: 26201 - DNA, 22 bp, synthetic construct
  misc_feature 1..22: note = chemically synthesized
  source 1..22: mol_type = other DNA
cccaaagcctacaccttcaaga

SEQ ID NO: 26202 - DNA, 22 bp, synthetic construct
  misc_feature 1..22: note = chemically synthesized
  source 1..22: mol_type = other DNA
caccttcaagaagagtgtagcc

SEQ ID NO: 26203 - DNA, 22 bp, synthetic construct
  misc_feature 1..22: note = chemically synthesized
  source 1..22: mol_type = other DNA
caagaagagtgtagcctgagaa

SEQ ID NO: 26204 - DNA, 22 bp, synthetic construct
  misc_feature 1..22: note = chemically synthesized
  source 1..22: mol_type = other DNA
aagaagagtgtagcctgagaag

SEQ ID NO: 26205 - DNA, 22 bp, synthetic construct
  misc_feature 1..22: note = chemically synthesized
  source 1..22: mol_type = other DNA
agaaggatttcacatgttgcct

SEQ ID NO: 26206 - DNA, 22 bp, synthetic construct
  misc_feature 1..22: note = chemically synthesized
  source 1..22: mol_type = other DNA
cacatgttgcctctagaaggga

SEQ ID NO: 26207 - DNA, 22 bp, synthetic construct
  misc_feature 1..22: note = chemically synthesized
  source 1..22: mol_type = other DNA
acatgttgcctctagaagggag

SEQ ID NO: 26208 - DNA, 22 bp, synthetic construct
  misc_feature 1..22: note = chemically synthesized
  source 1..22: mol_type = other DNA
cctctagaagggagaactgggt

SEQ ID NO: 26209 - DNA, 22 bp, synthetic construct
  misc_feature 1..22: note = chemically synthesized
  source 1..22: mol_type = other DNA
tagaagggagaactgggtggct

SEQ ID NO: 26210 - DNA, 22 bp, synthetic construct
  misc_feature 1..22: note = chemically synthesized
  source 1..22: mol_type = other DNA
gaagggagaactgggtggctgg

SEQ ID NO: 26211 - DNA, 22 bp, synthetic construct
  misc_feature 1..22: note = chemically synthesized
  source 1..22: mol_type = other DNA
ggtggctggggagaagtgtgag

SEQ ID NO: 26212 - DNA, 22 bp, synthetic construct
  misc_feature 1..22: note = chemically synthesized
  source 1..22: mol_type = other DNA
gggagaagtgtgagagggagat

SEQ ID NO: 26213 - DNA, 22 bp, synthetic construct
  misc_feature 1..22: note = chemically synthesized
  source 1..22: mol_type = other DNA
catgacacttccttatgtatgt

SEQ ID NO: 26214 - DNA, 22 bp, synthetic construct
  misc_feature 1..22: note = chemically synthesized
  source 1..22: mol_type = other DNA
atgacacttccttatgtatgta

SEQ ID NO: 26215 - DNA, 22 bp, synthetic construct
  misc_feature 1..22: note = chemically synthesized
  source 1..22: mol_type = other DNA
ccttatgtatgtaacttttgca

SEQ ID NO: 26216 - DNA, 22 bp, synthetic construct
  misc_feature 1..22: note = chemically synthesized
  source 1..22: mol_type = other DNA
cttatgtatgtaacttttgcat

SEQ ID NO: 26217 - DNA, 22 bp, synthetic construct
  misc_feature 1..22: note = chemically synthesized
  source 1..22: mol_type = other DNA
atgtatgtaacttttgcatttt

SEQ ID NO: 26218 - DNA, 22 bp, synthetic construct
  misc_feature 1..22: note = chemically synthesized
  source 1..22: mol_type = other DNA
tgtatgtaacttttgcattttg

SEQ ID NO: 26219 - DNA, 22 bp, synthetic construct
  misc_feature 1..22: note = chemically synthesized
  source 1..22: mol_type = other DNA
ttgcattttgaactgtttgaat

SEQ ID NO: 26220 - DNA, 22 bp, synthetic construct
  misc_feature 1..22: note = chemically synthesized
  source 1..22: mol_type = other DNA
tgcattttgaactgtttgaatg

SEQ ID NO: 26221 - DNA, 22 bp, synthetic construct
  misc_feature 1..22: note = chemically synthesized
  source 1..22: mol_type = other DNA
gcattttgaactgtttgaatgt

SEQ ID NO: 26222 - DNA, 22 bp, synthetic construct
  misc_feature 1..22: note = chemically synthesized
  source 1..22: mol_type = other DNA
cattttgaactgtttgaatgta

SEQ ID NO: 26223 - DNA, 22 bp, synthetic construct
  misc_feature 1..22: note = chemically synthesized
  source 1..22: mol_type = other DNA
tgaactgtttgaatgtattatc

SEQ ID NO: 26224 - DNA, 22 bp, synthetic construct
  misc_feature 1..22: note = chemically synthesized
  source 1..22: mol_type = other DNA
gaactgtttgaatgtattatct

SEQ ID NO: 26225 - DNA, 22 bp, synthetic construct
  misc_feature 1..22: note = chemically synthesized
  source 1..22: mol_type = other DNA
aactgtttgaatgtattatctt

SEQ ID NO: 26226 - DNA, 22 bp, synthetic construct
  misc_feature 1..22: note = chemically synthesized
  source 1..22: mol_type = other DNA
tttgaatgtattatcttttttt

SEQ ID NO: 26227 - DNA, 22 bp, synthetic construct
  misc_feature 1..22: note = chemically synthesized
  source 1..22: mol_type = other DNA
gaatgtattatctttttttttt

SEQ ID NO: 26228 - DNA, 22 bp, synthetic construct
  misc_feature 1..22: note = chemically synthesized
  source 1..22: mol_type = other DNA
aatgtattatcttttttttttt

SEQ ID NO: 26229 - DNA, 22 bp, synthetic construct
  misc_feature 1..22: note = chemically synthesized
  source 1..22: mol_type = other DNA
tcttttttttttttgagacagg

SEQ ID NO: 26230 - DNA, 22 bp, synthetic construct
  misc_feature 1..22: note = chemically synthesized
  source 1..22: mol_type = other DNA
ttttttttttgagacaggatct

SEQ ID NO: 26231 - DNA, 22 bp, synthetic construct
  misc_feature 1..22: note = chemically synthesized
  source 1..22: mol_type = other DNA
tttttttttgagacaggatctg

SEQ ID NO: 26232 - DNA, 22 bp, synthetic construct
  misc_feature 1..22: note = chemically synthesized
  source 1..22: mol_type = other DNA
ttttttttgagacaggatctgg

SEQ ID NO: 26233 - DNA, 22 bp, synthetic construct
  misc_feature 1..22: note = chemically synthesized
  source 1..22: mol_type = other DNA
tttttttgagacaggatctggc

SEQ ID NO: 26234 - DNA, 22 bp, synthetic construct
  misc_feature 1..22: note = chemically synthesized
  source 1..22: mol_type = other DNA
ttttttgagacaggatctggct

SEQ ID NO: 26235 - DNA, 22 bp, synthetic construct
  misc_feature 1..22: note = chemically synthesized
  source 1..22: mol_type = other DNA
tttttgagacaggatctggctc

SEQ ID NO: 26236 - DNA, 22 bp, synthetic construct
  misc_feature 1..22: note = chemically synthesized
  source 1..22: mol_type = other DNA
ttttgagacaggatctggctca

SEQ ID NO: 26237 - DNA, 22 bp, synthetic construct
  misc_feature 1..22: note = chemically synthesized
  source 1..22: mol_type = other DNA
tttgagacaggatctggctcag

SEQ ID NO: 26238 - DNA, 22 bp, synthetic construct
  misc_feature 1..22: note = chemically synthesized
  source 1..22: mol_type = other DNA
ttgagacaggatctggctcagt

SEQ ID NO: 26239 - DNA, 22 bp, synthetic construct
  misc_feature 1..22: note = chemically synthesized
  source 1..22: mol_type = other DNA
tgagacaggatctggctcagta

SEQ ID NO: 26240 - DNA, 22 bp, synthetic construct
  misc_feature 1..22: note = chemically synthesized
  source 1..22: mol_type = other DNA
gagacaggatctggctcagtaa

SEQ ID NO: 26241 - DNA, 22 bp, synthetic construct
  misc_feature 1..22: note = chemically synthesized
  source 1..22: mol_type = other DNA
agacaggatctggctcagtaac

SEQ ID NO: 26242 - DNA, 22 bp, synthetic construct
  misc_feature 1..22: note = chemically synthesized
  source 1..22: mol_type = other DNA
gctcagtaacccagcctggagt

SEQ ID NO: 26243 - DNA, 22 bp, synthetic construct
  misc_feature 1..22: note = chemically synthesized
  source 1..22: mol_type = other DNA
agtaacccagcctggagtgcag

SEQ ID NO: 26244 - DNA, 22 bp, synthetic construct
  misc_feature 1..22: note = chemically synthesized
  source 1..22: mol_type = other DNA
gagtgcagtggcgcaatctcgg

SEQ ID NO: 26245 - DNA, 22 bp, synthetic construct
  misc_feature 1..22: note = chemically synthesized
  source 1..22: mol_type = other DNA
ggctcattgtgacctctacctc

SEQ ID NO: 26246 - DNA, 22 bp, synthetic construct
  misc_feature 1..22: note = chemically synthesized
  source 1..22: mol_type = other DNA
attgtgacctctacctcctggg

SEQ ID NO: 26247 - DNA, 22 bp, synthetic construct
  misc_feature 1..22: note = chemically synthesized
  source 1..22: mol_type = other DNA
tgacctctacctcctgggatcc

SEQ ID NO: 26248 - DNA, 22 bp, synthetic construct
  misc_feature 1..22: note = chemically synthesized
  source 1..22: mol_type = other DNA
tacctcctgggatcctcccacc

SEQ ID NO: 26249 - DNA, 22 bp, synthetic construct
  misc_feature 1..22: note = chemically synthesized
  source 1..22: mol_type = other DNA
cctcctgggatcctcccacctc

SEQ ID NO: 26250 - DNA, 22 bp, synthetic construct
  misc_feature 1..22: note = chemically synthesized
  source 1..22: mol_type = other DNA
ctgggatcctcccacctcagcc

SEQ ID NO: 26251 - DNA, 22 bp, synthetic construct
  misc_feature 1..22: note = chemically synthesized
  source 1..22: mol_type = other DNA
ggatcctcccacctcagcctcc

SEQ ID NO: 26252 - DNA, 22 bp, synthetic construct
  misc_feature 1..22: note = chemically synthesized
  source 1..22: mol_type = other DNA
ccacctcagcctcctgaatagc

SEQ ID NO: 26253 - DNA, 22 bp, synthetic construct
  misc_feature 1..22: note = chemically synthesized
  source 1..22: mol_type = other DNA
agcctcctgaatagctgggact

SEQ ID NO: 26254 - DNA, 22 bp, synthetic construct
  misc_feature 1..22: note = chemically synthesized
  source 1..22: mol_type = other DNA
ctgaatagctgggactacaggt

SEQ ID NO: 26255 - DNA, 22 bp, synthetic construct
  misc_feature 1..22: note = chemically synthesized
  source 1..22: mol_type = other DNA
aatagctgggactacaggtgtg

SEQ ID NO: 26256 - DNA, 22 bp, synthetic construct
  misc_feature 1..22: note = chemically synthesized
  source 1..22: mol_type = other DNA
ggactacaggtgtgtgccacca

SEQ ID NO: 26257 - DNA, 22 bp, synthetic construct
  misc_feature 1..22: note = chemically synthesized
  source 1..22: mol_type = other DNA
caggtgtgtgccaccacatcca

SEQ ID NO: 26258 - DNA, 22 bp, synthetic construct
  misc_feature 1..22: note = chemically synthesized
  source 1..22: mol_type = other DNA
gtttttgtatttttagtagaga

SEQ ID NO: 26259 - DNA, 22 bp, synthetic construct
  misc_feature 1..22: note = chemically synthesized
  source 1..22: mol_type = other DNA
ttgtatttttagtagagacggg

SEQ ID NO: 26260 - DNA, 22 bp, synthetic construct
  misc_feature 1..22: note = chemically synthesized
  source 1..22: mol_type = other DNA
tgtatttttagtagagacgggg

SEQ ID NO: 26261 - DNA, 22 bp, synthetic construct
  misc_feature 1..22: note = chemically synthesized
  source 1..22: mol_type = other DNA
gtatttttagtagagacggggt

SEQ ID NO: 26262 - DNA, 22 bp, synthetic construct
  misc_feature 1..22: note = chemically synthesized
  source 1..22: mol_type = other DNA
tatttttagtagagacggggtt

SEQ ID NO: 26263 - DNA, 22 bp, synthetic construct
  misc_feature 1..22: note = chemically synthesized
  source 1..22: mol_type = other DNA
ttagtagagacggggtttcacc

SEQ ID NO: 26264 - DNA, 22 bp, synthetic construct
  misc_feature 1..22: note = chemically synthesized
  source 1..22: mol_type = other DNA
tagtagagacggggtttcacca

SEQ ID NO: 26265 - DNA, 22 bp, synthetic construct
  misc_feature 1..22: note = chemically synthesized
  source 1..22: mol_type = other DNA
agtagagacggggtttcaccat

SEQ ID NO: 26266 - DNA, 22 bp, synthetic construct
  misc_feature 1..22: note = chemically synthesized
  source 1..22: mol_type = other DNA
gtagagacggggtttcaccatg

SEQ ID NO: 26267 - DNA, 22 bp, synthetic construct
  misc_feature 1..22: note = chemically synthesized
  source 1..22: mol_type = other DNA
caccatgttgcccaggctggtc

SEQ ID NO: 26268 - DNA, 22 bp, synthetic construct
  misc_feature 1..22: note = chemically synthesized
  source 1..22: mol_type = other DNA
accatgttgcccaggctggtct

SEQ ID NO: 26269 - DNA, 22 bp, synthetic construct
  misc_feature 1..22: note = chemically synthesized
  source 1..22: mol_type = other DNA
cccaggctggtctccatctcct

SEQ ID NO: 26270 - DNA, 22 bp, synthetic construct
  misc_feature 1..22: note = chemically synthesized
  source 1..22: mol_type = other DNA
gtctccatctcctgaactcagg

SEQ ID NO: 26271 - DNA, 22 bp, synthetic construct
  misc_feature 1..22: note = chemically synthesized
  source 1..22: mol_type = other DNA
catctcctgaactcaggcaatc

SEQ ID NO: 26272 - DNA, 22 bp, synthetic construct
  misc_feature 1..22: note = chemically synthesized
  source 1..22: mol_type = other DNA
ctgaactcaggcaatcctccca

SEQ ID NO: 26273 - DNA, 22 bp, synthetic construct
  misc_feature 1..22: note = chemically synthesized
  source 1..22: mol_type = other DNA
aactcaggcaatcctcccacct

SEQ ID NO: 26274 - DNA, 22 bp, synthetic construct
  misc_feature 1..22: note = chemically synthesized
  source 1..22: mol_type = other DNA
aggcaatcctcccacctcagcc

SEQ ID NO: 26275 - DNA, 22 bp, synthetic construct
  misc_feature 1..22: note = chemically synthesized
  source 1..22: mol_type = other DNA
ccacctcagcctcccaaagtgc

SEQ ID NO: 26276 - DNA, 22 bp, synthetic construct
  misc_feature 1..22: note = chemically synthesized
  source 1..22: mol_type = other DNA
agcctcccaaagtgctgggatt

SEQ ID NO: 26277 - DNA, 22 bp, synthetic construct
  misc_feature 1..22: note = chemically synthesized
  source 1..22: mol_type = other DNA
ccaaagtgctgggattacaggc

SEQ ID NO: 26278 - DNA, 22 bp, synthetic construct
  misc_feature 1..22: note = chemically synthesized
  source 1..22: mol_type = other DNA
ggattacaggcatgagccaccg

SEQ ID NO: 26279 - DNA, 22 bp, synthetic construct
  misc_feature 1..22: note = chemically synthesized
  source 1..22: mol_type = other DNA
caggcatgagccaccgtgcctg

SEQ ID NO: 26280 - DNA, 22 bp, synthetic construct
  misc_feature 1..22: note = chemically synthesized
  source 1..22: mol_type = other DNA
actgtatgatctatttaaacac

SEQ ID NO: 26281 - DNA, 22 bp, synthetic construct
  misc_feature 1..22: note = chemically synthesized
  source 1..22: mol_type = other DNA
tatgatctatttaaacacaaat

SEQ ID NO: 26282 - DNA, 22 bp, synthetic construct
  misc_feature 1..22: note = chemically synthesized
  source 1..22: mol_type = other DNA
tttaaacacaaataatgaagcc

SEQ ID NO: 26283 - DNA, 22 bp, synthetic construct
  misc_feature 1..22: note = chemically synthesized
  source 1..22: mol_type = other DNA
aaacacaaataatgaagcccaa

SEQ ID NO: 26284 - DNA, 22 bp, synthetic construct
  misc_feature 1..22: note = chemically synthesized
  source 1..22: mol_type = other DNA
aacacaaataatgaagcccaag

SEQ ID NO: 26285 - DNA, 22 bp, synthetic construct
  misc_feature 1..22: note = chemically synthesized
  source 1..22: mol_type = other DNA
tgaactccaggcaggcgcggtg

SEQ ID NO: 26286 - DNA, 22 bp, synthetic construct
  misc_feature 1..22: note = chemically synthesized
  source 1..22: mol_type = other DNA
aactccaggcaggcgcggtggc

SEQ ID NO: 26287 - DNA, 22 bp, synthetic construct
  misc_feature 1..22: note = chemically synthesized
  source 1..22: mol_type = other DNA
caggcaggcgcggtggctcaca

SEQ ID NO: 26288 - DNA, 22 bp, synthetic construct
  misc_feature 1..22: note = chemically synthesized
  source 1..22: mol_type = other DNA
acacctgtaatctcagcacttt

SEQ ID NO: 26289 - DNA, 22 bp, synthetic construct
  misc_feature 1..22: note = chemically synthesized
  source 1..22: mol_type = other DNA
taatctcagcactttgggaggc

SEQ ID NO: 26290 - DNA, 22 bp, synthetic construct
  misc_feature 1..22: note = chemically synthesized
  source 1..22: mol_type = other DNA
agcactttgggaggccaaggca

SEQ ID NO: 26291 - DNA, 22 bp, synthetic construct
  misc_feature 1..22: note = chemically synthesized
  source 1..22: mol_type = other DNA
tgggaggccaaggcaggcagat

SEQ ID NO: 26292 - DNA, 22 bp, synthetic construct
  misc_feature 1..22: note = chemically synthesized
  source 1..22: mol_type = other DNA
gggaggccaaggcaggcagatc

SEQ ID NO: 26293 - DNA, 22 bp, synthetic construct
  misc_feature 1..22: note = chemically synthesized
  source 1..22: mol_type = other DNA
ggaggccaaggcaggcagatca

SEQ ID NO: 26294 - DNA, 22 bp, synthetic construct
  misc_feature 1..22: note = chemically synthesized
  source 1..22: mol_type = other DNA
gagaccagcctggccaacatgg

SEQ ID NO: 26295 - DNA, 22 bp, synthetic construct
  misc_feature 1..22: note = chemically synthesized
  source 1..22: mol_type = other DNA
agaccagcctggccaacatggt

SEQ ID NO: 26296 - DNA, 22 bp, synthetic construct
  misc_feature 1..22: note = chemically synthesized
  source 1..22: mol_type = other DNA
gccaacatggtgaaacaccgtt

SEQ ID NO: 26297 - DNA, 22 bp, synthetic construct
  misc_feature 1..22: note = chemically synthesized
  source 1..22: mol_type = other DNA
ctaccaaaaaatataaagaatt

SEQ ID NO: 26298 - DNA, 22 bp, synthetic construct
  misc_feature 1..22: note = chemically synthesized
  source 1..22: mol_type = other DNA
taccaaaaaatataaagaatta

SEQ ID NO: 26299 - DNA, 22 bp, synthetic construct
  misc_feature 1..22: note = chemically synthesized
  source 1..22: mol_type = other DNA
ccaaaaaatataaagaattagc

SEQ ID NO: 26300 - DNA, 22 bp, synthetic construct
  misc_feature 1..22: note = chemically synthesized
  source 1..22: mol_type = other DNA
gccagatgtggtggtgcgtgac

SEQ ID NO: 26301 - DNA, 22 bp, synthetic construct
  misc_feature 1..22: note = chemically synthesized
  source 1..22: mol_type = other DNA
taatcccagctactcgggaggc

SEQ ID NO: 26302 - DNA, 22 bp, synthetic construct
  misc_feature 1..22: note = chemically synthesized
  source 1..22: mol_type = other DNA
ctcgggaggctaaggcaagaga

SEQ ID NO: 26303 - DNA, 22 bp, synthetic construct
  misc_feature 1..22: note = chemically synthesized
  source 1..22: mol_type = other DNA
gggaggctaaggcaagagaatc

SEQ ID NO: 26304 - DNA, 22 bp, synthetic construct
  misc_feature 1..22: note = chemically synthesized
  source 1..22: mol_type = other DNA
aggcaagagaatcgcttgaacc

SEQ ID NO: 26305 - DNA, 22 bp, synthetic construct
  misc_feature 1..22: note = chemically synthesized
  source 1..22: mol_type = other DNA
gaacctgggaggcggaggttgc

SEQ ID NO: 26306 - DNA, 22 bp, synthetic construct
  misc_feature 1..22: note = chemically synthesized
  source 1..22: mol_type = other DNA
aacctgggaggcggaggttgcc

SEQ ID NO: 26307 - DNA, 22 bp, synthetic construct
  misc_feature 1..22: note = chemically synthesized
  source 1..22: mol_type = other DNA
ggaggcggaggttgccgtgagc

SEQ ID NO: 26308 - DNA, 22 bp, synthetic construct
  misc_feature 1..22: note = chemically synthesized
  source 1..22: mol_type = other DNA
ccgtgagccgagattatgccac

SEQ ID NO: 26309 - DNA, 22 bp, synthetic construct
  misc_feature 1..22: note = chemically synthesized
  source 1..22: mol_type = other DNA
tgccactgcactacaggctggg

SEQ ID NO: 26310 - DNA, 22 bp, synthetic construct
  misc_feature 1..22: note = chemically synthesized
  source 1..22: mol_type = other DNA
cactacaggctgggtgacagag

SEQ ID NO: 26311 - DNA, 22 bp, synthetic construct
  misc_feature 1..22: note = chemically synthesized
  source 1..22: mol_type = other DNA
caggctgggtgacagagcaaga

SEQ ID NO: 26312 - DNA, 22 bp, synthetic construct
  misc_feature 1..22: note = chemically synthesized
  source 1..22: mol_type = other DNA
ggtgacagagcaagactccatc

SEQ ID NO: 26313 - DNA, 22 bp, synthetic construct
  misc_feature 1..22: note = chemically synthesized
  source 1..22: mol_type = other DNA
catctcaaaaaaaaaaaaaaaa

SEQ ID NO: 26314 - DNA, 22 bp, synthetic construct
  misc_feature 1..22: note = chemically synthesized
  source 1..22: mol_type = other DNA
aaaaaaaaaaaaaaaaaaatcc

SEQ ID NO: 26315 - DNA, 22 bp, synthetic construct
  misc_feature 1..22: note = chemically synthesized
  source 1..22: mol_type = other DNA
aaatccataaaatggcagctat

SEQ ID NO: 26316 - DNA, 22 bp, synthetic construct
  misc_feature 1..22: note = chemically synthesized
  source 1..22: mol_type = other DNA
tgtgactttttttttttaacct

SEQ ID NO: 26317 - DNA, 22 bp, synthetic construct
  misc_feature 1..22: note = chemically synthesized
  source 1..22: mol_type = other DNA
tttttttttaacctcaagaagt

SEQ ID NO: 26318 - DNA, 22 bp, synthetic construct
  misc_feature 1..22: note = chemically synthesized
  source 1..22: mol_type = other DNA
ttttttttaacctcaagaagta

SEQ ID NO: 26319 - DNA, 22 bp, synthetic construct
  misc_feature 1..22: note = chemically synthesized
  source 1..22: mol_type = other DNA
tttttttaacctcaagaagtat

SEQ ID NO: 26320 - DNA, 22 bp, synthetic construct
  misc_feature 1..22: note = chemically synthesized
  source 1..22: mol_type = other DNA
ttttttaacctcaagaagtatt

SEQ ID NO: 26321 - DNA, 22 bp, synthetic construct
  misc_feature 1..22: note = chemically synthesized
  source 1..22: mol_type = other DNA
tttttaacctcaagaagtattt

SEQ ID NO: 26322 - DNA, 22 bp, synthetic construct
  misc_feature 1..22: note = chemically synthesized
  source 1..22: mol_type = other DNA
ttttaacctcaagaagtatttg

SEQ ID NO: 26323 - DNA, 22 bp, synthetic construct
  misc_feature 1..22: note = chemically synthesized
  source 1..22: mol_type = other DNA
tttaacctcaagaagtatttgt

SEQ ID NO: 26324 - DNA, 22 bp, synthetic construct
  misc_feature 1..22: note = chemically synthesized
  source 1..22: mol_type = other DNA
ttaacctcaagaagtatttgtc

SEQ ID NO: 26325 - DNA, 22 bp, synthetic construct
  misc_feature 1..22: note = chemically synthesized
  source 1..22: mol_type = other DNA
taacctcaagaagtatttgtcc

SEQ ID NO: 26326 - DNA, 22 bp, synthetic construct
  misc_feature 1..22: note = chemically synthesized
  source 1..22: mol_type = other DNA
aacctcaagaagtatttgtcct

SEQ ID NO: 26327 - DNA, 22 bp, synthetic construct
  misc_feature 1..22: note = chemically synthesized
  source 1..22: mol_type = other DNA
acctcaagaagtatttgtcctg

SEQ ID NO: 26328 - DNA, 22 bp, synthetic construct
  misc_feature 1..22: note = chemically synthesized
  source 1..22: mol_type = other DNA
aagaagtatttgtcctggaaga

SEQ ID NO: 26329 - DNA, 22 bp, synthetic construct
  misc_feature 1..22: note = chemically synthesized
  source 1..22: mol_type = other DNA
gtcctggaagaatgcatatgga

SEQ ID NO: 26330 - DNA, 22 bp, synthetic construct
  misc_feature 1..22: note = chemically synthesized
  source 1..22: mol_type = other DNA
tcctggaagaatgcatatggaa

SEQ ID NO: 26331 - DNA, 22 bp, synthetic construct
  misc_feature 1..22: note = chemically synthesized
  source 1..22: mol_type = other DNA
gaagaatgcatatggaactaca

SEQ ID NO: 26332 - DNA, 22 bp, synthetic construct
  misc_feature 1..22: note = chemically synthesized
  source 1..22: mol_type = other DNA
cagtttgaaacttggacttgca

SEQ ID NO: 26333 - DNA, 22 bp, synthetic construct
  misc_feature 1..22: note = chemically synthesized
  source 1..22: mol_type = other DNA
gaaacttggacttgcatatacc

SEQ ID NO: 26334 - DNA, 22 bp, synthetic construct
  misc_feature 1..22: note = chemically synthesized
  source 1..22: mol_type = other DNA
aaacttggacttgcatatacca

SEQ ID NO: 26335 - DNA, 22 bp, synthetic construct
  misc_feature 1..22: note = chemically synthesized
  source 1..22: mol_type = other DNA
ggacttgcatataccatgggtt

SEQ ID NO: 26336 - DNA, 22 bp, synthetic construct
  misc_feature 1..22: note = chemically synthesized
  source 1..22: mol_type = other DNA
gacttgcatataccatgggttc

SEQ ID NO: 26337 - DNA, 22 bp, synthetic construct
  misc_feature 1..22: note = chemically synthesized
  source 1..22: mol_type = other DNA
gcatataccatgggttccctca

SEQ ID NO: 26338 - DNA, 22 bp, synthetic construct
  misc_feature 1..22: note = chemically synthesized
  source 1..22: mol_type = other DNA
catataccatgggttccctcag

SEQ ID NO: 26339 - DNA, 22 bp, synthetic construct
  misc_feature 1..22: note = chemically synthesized
  source 1..22: mol_type = other DNA
cctcaggcctcagggaatcttg

SEQ ID NO: 26340 - DNA, 22 bp, synthetic construct
  misc_feature 1..22: note = chemically synthesized
  source 1..22: mol_type = other DNA
aggcctcagggaatcttgcatt

SEQ ID NO: 26341 - DNA, 22 bp, synthetic construct
  misc_feature 1..22: note = chemically synthesized
  source 1..22: mol_type = other DNA
agggaatcttgcatttcctctg

SEQ ID NO: 26342 - DNA, 22 bp, synthetic construct
  misc_feature 1..22: note = chemically synthesized
  source 1..22: mol_type = other DNA
gcatttcctctgacatcagaga

SEQ ID NO: 26343 - DNA, 22 bp, synthetic construct
  misc_feature 1..22: note = chemically synthesized
  source 1..22: mol_type = other DNA
catttcctctgacatcagagaa

SEQ ID NO: 26344 - DNA, 22 bp, synthetic construct
  misc_feature 1..22: note = chemically synthesized
  source 1..22: mol_type = other DNA
cctctgacatcagagaatgcac

SEQ ID NO: 26345 - DNA, 22 bp, synthetic construct
  misc_feature 1..22: note = chemically synthesized
  source 1..22: mol_type = other DNA
ctctgacatcagagaatgcact

SEQ ID NO: 26346 - DNA, 22 bp, synthetic construct
  misc_feature 1..22: note = chemically synthesized
  source 1..22: mol_type = other DNA
tgacatcagagaatgcactcca

SEQ ID NO: 26347 - DNA, 22 bp, synthetic construct
  misc_feature 1..22: note = chemically synthesized
  source 1..22: mol_type = other DNA
acatcagagaatgcactccagc

SEQ ID NO: 26348 - DNA, 22 bp, synthetic construct
  misc_feature 1..22: note = chemically synthesized
  source 1..22: mol_type = other DNA
cagcccctaggacgagcccccc

SEQ ID NO: 26349 - DNA, 22 bp, synthetic construct
  misc_feature 1..22: note = chemically synthesized
  source 1..22: mol_type = other DNA
ggacgagccccccccagggaaa

SEQ ID NO: 26350 - DNA, 22 bp, synthetic construct
  misc_feature 1..22: note = chemically synthesized
  source 1..22: mol_type = other DNA
catttccatcagaattgctctc

SEQ ID NO: 26351 - DNA, 22 bp, synthetic construct
  misc_feature 1..22: note = chemically synthesized
  source 1..22: mol_type = other DNA
ccatcagaattgctctctgtaa

SEQ ID NO: 26352 - DNA, 22 bp, synthetic construct
  misc_feature 1..22: note = chemically synthesized
  source 1..22: mol_type = other DNA
catcagaattgctctctgtaag

SEQ ID NO: 26353 - DNA, 22 bp, synthetic construct
  misc_feature 1..22: note = chemically synthesized
  source 1..22: mol_type = other DNA
ctctctgtaaggatgtatatag

SEQ ID NO: 26354 - DNA, 22 bp, synthetic construct
  misc_feature 1..22: note = chemically synthesized
  source 1..22: mol_type = other DNA
tctgtaaggatgtatatagctt

SEQ ID NO: 26355 - DNA, 22 bp, synthetic construct
  misc_feature 1..22: note = chemically synthesized
  source 1..22: mol_type = other DNA
tgtaaggatgtatatagcttca

SEQ ID NO: 26356 - DNA, 22 bp, synthetic construct
  misc_feature 1..22: note = chemically synthesized
  source 1..22: mol_type = other DNA
taaggatgtatatagcttcaga

SEQ ID NO: 26357 - DNA, 22 bp, synthetic construct
  misc_feature 1..22: note = chemically synthesized
  source 1..22: mol_type = other DNA
cagatgcttgttctgtatcctc

SEQ ID NO: 26358 - DNA, 22 bp, synthetic construct
  misc_feature 1..22: note = chemically synthesized
  source 1..22: mol_type = other DNA
agatgcttgttctgtatcctct

SEQ ID NO: 26359 - DNA, 22 bp, synthetic construct
  misc_feature 1..22: note = chemically synthesized
  source 1..22: mol_type = other DNA
gttctgtatcctctctactttg

SEQ ID NO: 26360 - DNA, 22 bp, synthetic construct
  misc_feature 1..22: note = chemically synthesized
  source 1..22: mol_type = other DNA
ttctgtatcctctctactttga

SEQ ID NO: 26361 - DNA, 22 bp, synthetic construct
  misc_feature 1..22: note = chemically synthesized
  source 1..22: mol_type = other DNA
tgtatcctctctactttgaaac

SEQ ID NO: 26362 - DNA, 22 bp, synthetic construct
  misc_feature 1..22: note = chemically synthesized
  source 1..22: mol_type = other DNA
tatcctctctactttgaaacag

SEQ ID NO: 26363 - DNA, 22 bp, synthetic construct
  misc_feature 1..22: note = chemically synthesized
  source 1..22: mol_type = other DNA
tctactttgaaacagagtatct

SEQ ID NO: 26364 - DNA, 22 bp, synthetic construct
  misc_feature 1..22: note = chemically synthesized
  source 1..22: mol_type = other DNA
tactttgaaacagagtatctca

SEQ ID NO: 26365 - DNA, 22 bp, synthetic construct
  misc_feature 1..22: note = chemically synthesized
  source 1..22: mol_type = other DNA
ctttgaaacagagtatctcaga

SEQ ID NO: 26366 - DNA, 22 bp, synthetic construct
  misc_feature 1..22: note = chemically synthesized
  source 1..22: mol_type = other DNA
tgaaacagagtatctcagacaa

SEQ ID NO: 26367 - DNA, 22 bp, synthetic construct
  misc_feature 1..22: note = chemically synthesized
  source 1..22: mol_type = other DNA
gaaacagagtatctcagacaaa

SEQ ID NO: 26368 - DNA, 22 bp, synthetic construct
  misc_feature 1..22: note = chemically synthesized
  source 1..22: mol_type = other DNA
aaacagagtatctcagacaaac

SEQ ID NO: 26369 - DNA, 22 bp, synthetic construct
  misc_feature 1..22: note = chemically synthesized
  source 1..22: mol_type = other DNA
agacaaaccacttcccctttaa

SEQ ID NO: 26370 - DNA, 22 bp, synthetic construct
  misc_feature 1..22: note = chemically synthesized
  source 1..22: mol_type = other DNA
cccctttaaaagtactagatat

SEQ ID NO: 26371 - DNA, 22 bp, synthetic construct
  misc_feature 1..22: note = chemically synthesized
  source 1..22: mol_type = other DNA
ccctttaaaagtactagatata

SEQ ID NO: 26372 - DNA, 22 bp, synthetic construct
  misc_feature 1..22: note = chemically synthesized
  source 1..22: mol_type = other DNA
taaaagtactagatatatcttt

SEQ ID NO: 26373 - DNA, 22 bp, synthetic construct
  misc_feature 1..22: note = chemically synthesized
  source 1..22: mol_type = other DNA
aaaagtactagatatatctttc

SEQ ID NO: 26374 - DNA, 22 bp, synthetic construct
  misc_feature 1..22: note = chemically synthesized
  source 1..22: mol_type = other DNA
aaagtactagatatatctttca

SEQ ID NO: 26375 - DNA, 22 bp, synthetic construct
  misc_feature 1..22: note = chemically synthesized
  source 1..22: mol_type = other DNA
gatatatctttcactgtggaaa

SEQ ID NO: 26376 - DNA, 22 bp, synthetic construct
  misc_feature 1..22: note = chemically synthesized
  source 1..22: mol_type = other DNA
tcactgtggaaataggtgtcaa

SEQ ID NO: 26377 - DNA, 22 bp, synthetic construct
  misc_feature 1..22: note = chemically synthesized
  source 1..22: mol_type = other DNA
cactgtggaaataggtgtcaac

SEQ ID NO: 26378 - DNA, 22 bp, synthetic construct
  misc_feature 1..22: note = chemically synthesized
  source 1..22: mol_type = other DNA
actgtggaaataggtgtcaacc

SEQ ID NO: 26379 - DNA, 22 bp, synthetic construct
  misc_feature 1..22: note = chemically synthesized
  source 1..22: mol_type = other DNA
tggaaataggtgtcaaccgcca

SEQ ID NO: 26380 - DNA, 22 bp, synthetic construct
  misc_feature 1..22: note = chemically synthesized
  source 1..22: mol_type = other DNA
ttatcccgtgatggtggaatag

SEQ ID NO: 26381 - DNA, 22 bp, synthetic construct
  misc_feature 1..22: note = chemically synthesized
  source 1..22: mol_type = other DNA
tatcccgtgatggtggaatagt

SEQ ID NO: 26382 - DNA, 22 bp, synthetic construct
  misc_feature 1..22: note = chemically synthesized
  source 1..22: mol_type = other DNA
atcccgtgatggtggaatagtg

SEQ ID NO: 26383 - DNA, 22 bp, synthetic construct
  misc_feature 1..22: note = chemically synthesized
  source 1..22: mol_type = other DNA
tcccgtgatggtggaatagtga

SEQ ID NO: 26384 - DNA, 22 bp, synthetic construct
  misc_feature 1..22: note = chemically synthesized
  source 1..22: mol_type = other DNA
ctcaccgaaatcagggagagcc

SEQ ID NO: 26385 - DNA, 22 bp, synthetic construct
  misc_feature 1..22: note = chemically synthesized
  source 1..22: mol_type = other DNA
tcaccgaaatcagggagagcca

SEQ ID NO: 26386 - DNA, 22 bp, synthetic construct
  misc_feature 1..22: note = chemically synthesized
  source 1..22: mol_type = other DNA
accgaaatcagggagagccact

SEQ ID NO: 26387 - DNA, 22 bp, synthetic construct
  misc_feature 1..22: note = chemically synthesized
  source 1..22: mol_type = other DNA
actctggcctctatcaacccag

SEQ ID NO: 26388 - DNA, 22 bp, synthetic construct
  misc_feature 1..22: note = chemically synthesized
  source 1..22: mol_type = other DNA
tggcctctatcaacccagagag

SEQ ID NO: 26389 - DNA, 22 bp, synthetic construct
  misc_feature 1..22: note = chemically synthesized
  source 1..22: mol_type = other DNA
gcctctatcaacccagagagat

SEQ ID NO: 26390 - DNA, 22 bp, synthetic construct
  misc_feature 1..22: note = chemically synthesized
  source 1..22: mol_type = other DNA
tatcaacccagagagattgcat

SEQ ID NO: 26391 - DNA, 22 bp, synthetic construct
  misc_feature 1..22: note = chemically synthesized
  source 1..22: mol_type = other DNA
tcaacccagagagattgcatgg

SEQ ID NO: 26392 - DNA, 22 bp, synthetic construct
  misc_feature 1..22: note = chemically synthesized
  source 1..22: mol_type = other DNA
catggttcttcaatggagatca

SEQ ID NO: 26393 - DNA, 22 bp, synthetic construct
  misc_feature 1..22: note = chemically synthesized
  source 1..22: mol_type = other DNA
ttcaatggagatcagatgtttg

SEQ ID NO: 26394 - DNA, 22 bp, synthetic construct
  misc_feature 1..22: note = chemically synthesized
  source 1..22: mol_type = other DNA
caatggagatcagatgtttgga

SEQ ID NO: 26395 - DNA, 22 bp, synthetic construct
  misc_feature 1..22: note = chemically synthesized
  source 1..22: mol_type = other DNA
aatggagatcagatgtttggaa

SEQ ID NO: 26396 - DNA, 22 bp, synthetic construct
  misc_feature 1..22: note = chemically synthesized
  source 1..22: mol_type = other DNA
ggaataacacttcatcttttta

SEQ ID NO: 26397 - DNA, 22 bp, synthetic construct
  misc_feature 1..22: note = chemically synthesized
  source 1..22: mol_type = other DNA
gaataacacttcatctttttat

SEQ ID NO: 26398 - DNA, 22 bp, synthetic construct
  misc_feature 1..22: note = chemically synthesized
  source 1..22: mol_type = other DNA
catctttttattttttagaatc

SEQ ID NO: 26399 - DNA, 22 bp, synthetic construct
  misc_feature 1..22: note = chemically synthesized
  source 1..22: mol_type = other DNA
atctttttattttttagaatca

SEQ ID NO: 26400 - DNA, 22 bp, synthetic construct
  misc_feature 1..22: note = chemically synthesized
  source 1..22: mol_type = other DNA
tttattttttagaatcatgcgg

SEQ ID NO: 26401 - DNA, 22 bp, synthetic construct
  misc_feature 1..22: note = chemically synthesized
  source 1..22: mol_type = other DNA
ttattttttagaatcatgcggc

SEQ ID NO: 26402 - DNA, 22 bp, synthetic construct
  misc_feature 1..22: note = chemically synthesized
  source 1..22: mol_type = other DNA
tattttttagaatcatgcggct

SEQ ID NO: 26403 - DNA, 22 bp, synthetic construct
  misc_feature 1..22: note = chemically synthesized
  source 1..22: mol_type = other DNA
attttttagaatcatgcggctg

SEQ ID NO: 26404 - DNA, 22 bp, synthetic construct
  misc_feature 1..22: note = chemically synthesized
  source 1..22: mol_type = other DNA
ttttttagaatcatgcggctgg

SEQ ID NO: 26405 - DNA, 22 bp, synthetic construct
  misc_feature 1..22: note = chemically synthesized
  source 1..22: mol_type = other DNA
tttagaatcatgcggctgggtg

SEQ ID NO: 26406 - DNA, 22 bp, synthetic construct
  misc_feature 1..22: note = chemically synthesized
  source 1..22: mol_type = other DNA
ttagaatcatgcggctgggtgt

SEQ ID NO: 26407 - DNA, 22 bp, synthetic construct
  misc_feature 1..22: note = chemically synthesized
  source 1..22: mol_type = other DNA
tagaatcatgcggctgggtgta

SEQ ID NO: 26408 - DNA, 22 bp, synthetic construct
  misc_feature 1..22: note = chemically synthesized
  source 1..22: mol_type = other DNA
agaatcatgcggctgggtgtag

SEQ ID NO: 26409 - DNA, 22 bp, synthetic construct
  misc_feature 1..22: note = chemically synthesized
  source 1..22: mol_type = other DNA
gaatcatgcggctgggtgtagt

SEQ ID NO: 26410 - DNA, 22 bp, synthetic construct
  misc_feature 1..22: note = chemically synthesized
  source 1..22: mol_type = other DNA
ggtgtagtggctcacgcctgta

SEQ ID NO: 26411 - DNA, 22 bp, synthetic construct
  misc_feature 1..22: note = chemically synthesized
  source 1..22: mol_type = other DNA
acgcctgtaatcctagcactta

SEQ ID NO: 26412 - DNA, 22 bp, synthetic construct
  misc_feature 1..22: note = chemically synthesized
  source 1..22: mol_type = other DNA
taatcctagcacttagggaggc

SEQ ID NO: 26413 - DNA, 22 bp, synthetic construct
  misc_feature 1..22: note = chemically synthesized
  source 1..22: mol_type = other DNA
gcacttagggaggccaaggcag

SEQ ID NO: 26414 - DNA, 22 bp, synthetic construct
  misc_feature 1..22: note = chemically synthesized
  source 1..22: mol_type = other DNA
agggaggccaaggcaggcagat

SEQ ID NO: 26415 - DNA, 22 bp, synthetic construct
  misc_feature 1..22: note = chemically synthesized
  source 1..22: mol_type = other DNA
gggaggccaaggcaggcagatc

SEQ ID NO: 26416 - DNA, 22 bp, synthetic construct
  misc_feature 1..22: note = chemically synthesized
  source 1..22: mol_type = other DNA
gagaccagcctagtcaacatag

SEQ ID NO: 26417 - DNA, 22 bp, synthetic construct
  misc_feature 1..22: note = chemically synthesized
  source 1..22: mol_type = other DNA
gtcaacatagtgaaaccatgtc

SEQ ID NO: 26418 - DNA, 22 bp, synthetic construct
  misc_feature 1..22: note = chemically synthesized
  source 1..22: mol_type = other DNA
tactaaaaatacaaaaaaaatt

SEQ ID NO: 26419 - DNA, 22 bp, synthetic construct
  misc_feature 1..22: note = chemically synthesized
  source 1..22: mol_type = other DNA
ctaaaaatacaaaaaaaattag

SEQ ID NO: 26420 - DNA, 22 bp, synthetic construct
  misc_feature 1..22: note = chemically synthesized
  source 1..22: mol_type = other DNA
aaaatacaaaaaaaattagctg

SEQ ID NO: 26421 - DNA, 22 bp, synthetic construct
  misc_feature 1..22: note = chemically synthesized
  source 1..22: mol_type = other DNA
gctgggcatggtggcgggcacc

SEQ ID NO: 26422 - DNA, 22 bp, synthetic construct
  misc_feature 1..22: note = chemically synthesized
  source 1..22: mol_type = other DNA
ggcatggtggcgggcacctgta

SEQ ID NO: 26423 - DNA, 22 bp, synthetic construct
  misc_feature 1..22: note = chemically synthesized
  source 1..22: mol_type = other DNA
taatcccagctacttgggaggc

SEQ ID NO: 26424 - DNA, 22 bp, synthetic construct
  misc_feature 1..22: note = chemically synthesized
  source 1..22: mol_type = other DNA
cttgggaggctgaggcaggaga

SEQ ID NO: 26425 - DNA, 22 bp, synthetic construct
  misc_feature 1..22: note = chemically synthesized
  source 1..22: mol_type = other DNA
gggaggctgaggcaggagaatc

SEQ ID NO: 26426 - DNA, 22 bp, synthetic construct
  misc_feature 1..22: note = chemically synthesized
  source 1..22: mol_type = other DNA
ggaggctgaggcaggagaatca

SEQ ID NO: 26427 - DNA, 22 bp, synthetic construct
  misc_feature 1..22: note = chemically synthesized
  source 1..22: mol_type = other DNA
aggcaggagaatcacttgaacc

SEQ ID NO: 26428 - DNA, 22 bp, synthetic construct
  misc_feature 1..22: note = chemically synthesized
  source 1..22: mol_type = other DNA
gaaccggagaggcagaggttgc

SEQ ID NO: 26429 - DNA, 22 bp, synthetic construct
  misc_feature 1..22: note = chemically synthesized
  source 1..22: mol_type = other DNA
aaccggagaggcagaggttgca

SEQ ID NO: 26430 - DNA, 22 bp, synthetic construct
  misc_feature 1..22: note = chemically synthesized
  source 1..22: mol_type = other DNA
cagtgagctgagattgcaccat

SEQ ID NO: 26431 - DNA, 22 bp, synthetic construct
  misc_feature 1..22: note = chemically synthesized
  source 1..22: mol_type = other DNA
agattgcaccattgcactccag

SEQ ID NO: 26432 - DNA, 22 bp, synthetic construct
  misc_feature 1..22: note = chemically synthesized
  source 1..22: mol_type = other DNA
caccattgcactccagccaggc

SEQ ID NO: 26433 - DNA, 22 bp, synthetic construct
  misc_feature 1..22: note = chemically synthesized
  source 1..22: mol_type = other DNA
cactccagccaggcaacagtgc

SEQ ID NO: 26434 - DNA, 22 bp, synthetic construct
  misc_feature 1..22: note = chemically synthesized
  source 1..22: mol_type = other DNA
cagccaggcaacagtgcgagac

SEQ ID NO: 26435 - DNA, 22 bp, synthetic construct
  misc_feature 1..22: note = chemically synthesized
  source 1..22: mol_type = other DNA
catctcaaacaaacaaacaaaa

SEQ ID NO: 26436 - DNA, 22 bp, synthetic construct
  misc_feature 1..22: note = chemically synthesized
  source 1..22: mol_type = other DNA
aaacaaacaaacaaaagaaaga

SEQ ID NO: 26437 - DNA, 22 bp, synthetic construct
  misc_feature 1..22: note = chemically synthesized
  source 1..22: mol_type = other DNA
acgtgatagaaattggcaaatg

SEQ ID NO: 26438 - DNA, 22 bp, synthetic construct
  misc_feature 1..22: note = chemically synthesized
  source 1..22: mol_type = other DNA
cgtgatagaaattggcaaatgc

SEQ ID NO: 26439 - DNA, 22 bp, synthetic construct
  misc_feature 1..22: note = chemically synthesized
  source 1..22: mol_type = other DNA
gcaaatgctaaactcagggctt

SEQ ID NO: 26440 - DNA, 22 bp, synthetic construct
  misc_feature 1..22: note = chemically synthesized
  source 1..22: mol_type = other DNA
aactcagggctttcccctgctc

SEQ ID NO: 26441 - DNA, 22 bp, synthetic construct
  misc_feature 1..22: note = chemically synthesized
  source 1..22: mol_type = other DNA
agggctttcccctgctccccag

SEQ ID NO: 26442 - DNA, 22 bp, synthetic construct
  misc_feature 1..22: note = chemically synthesized
  source 1..22: mol_type = other DNA
tcccctgctccccagagagtca

SEQ ID NO: 26443 - DNA, 22 bp, synthetic construct
  misc_feature 1..22: note = chemically synthesized
  source 1..22: mol_type = other DNA
cccctgctccccagagagtcag

SEQ ID NO: 26444 - DNA, 22 bp, synthetic construct
  misc_feature 1..22: note = chemically synthesized
  source 1..22: mol_type = other DNA
ccctgctccccagagagtcagt

SEQ ID NO: 26445 - DNA, 22 bp, synthetic construct
  misc_feature 1..22: note = chemically synthesized
  source 1..22: mol_type = other DNA
ctccccagagagtcagtttatc

SEQ ID NO: 26446 - DNA, 22 bp, synthetic construct
  misc_feature 1..22: note = chemically synthesized
  source 1..22: mol_type = other DNA
cccagagagtcagtttatcagc

SEQ ID NO: 26447 - DNA, 22 bp, synthetic construct
  misc_feature 1..22: note = chemically synthesized
  source 1..22: mol_type = other DNA
atcagcactggacgtaacatag

SEQ ID NO: 26448 - DNA, 22 bp, synthetic construct
  misc_feature 1..22: note = chemically synthesized
  source 1..22: mol_type = other DNA
tcagcactggacgtaacatagt

SEQ ID NO: 26449 - DNA, 22 bp, synthetic construct
  misc_feature 1..22: note = chemically synthesized
  source 1..22: mol_type = other DNA
gacgtaacatagttcataagag

SEQ ID NO: 26450 - DNA, 22 bp, synthetic construct
  misc_feature 1..22: note = chemically synthesized
  source 1..22: mol_type = other DNA
ataagagcattgccgcggaagc

SEQ ID NO: 26451 - DNA, 22 bp, synthetic construct
  misc_feature 1..22: note = chemically synthesized
  source 1..22: mol_type = other DNA
ccgcggaagccagcctgcctac

SEQ ID NO: 26452 - DNA, 22 bp, synthetic construct
  misc_feature 1..22: note = chemically synthesized
  source 1..22: mol_type = other DNA
cctacctgggcttccatcctgg

SEQ ID NO: 26453 - DNA, 22 bp, synthetic construct
  misc_feature 1..22: note = chemically synthesized
  source 1..22: mol_type = other DNA
cctgggcttccatcctggctcg

SEQ ID NO: 26454 - DNA, 22 bp, synthetic construct
  misc_feature 1..22: note = chemically synthesized
  source 1..22: mol_type = other DNA
ggcttccatcctggctcggcat

SEQ ID NO: 26455 - DNA, 22 bp, synthetic construct
  misc_feature 1..22: note = chemically synthesized
  source 1..22: mol_type = other DNA
ccatcctggctcggcatgtact

SEQ ID NO: 26456 - DNA, 22 bp, synthetic construct
  misc_feature 1..22: note = chemically synthesized
  source 1..22: mol_type = other DNA
catcctggctcggcatgtacta

SEQ ID NO: 26457 - DNA, 22 bp, synthetic construct
  misc_feature 1..22: note = chemically synthesized
  source 1..22: mol_type = other DNA
gctcggcatgtactaaccttgt

SEQ ID NO: 26458 - DNA, 22 bp, synthetic construct
  misc_feature 1..22: note = chemically synthesized
  source 1..22: mol_type = other DNA
ggcatgtactaaccttgttggc

SEQ ID NO: 26459 - DNA, 22 bp, synthetic construct
  misc_feature 1..22: note = chemically synthesized
  source 1..22: mol_type = other DNA
accttgttggcctaatcattta

SEQ ID NO: 26460 - DNA, 22 bp, synthetic construct
  misc_feature 1..22: note = chemically synthesized
  source 1..22: mol_type = other DNA
gttggcctaatcatttaactca

SEQ ID NO: 26461 - DNA, 22 bp, synthetic construct
  misc_feature 1..22: note = chemically synthesized
  source 1..22: mol_type = other DNA
ttggcctaatcatttaactcag

SEQ ID NO: 26462 - DNA, 22 bp, synthetic construct
  misc_feature 1..22: note = chemically synthesized
  source 1..22: mol_type = other DNA
gcctaatcatttaactcagcac

SEQ ID NO: 26463 - DNA, 22 bp, synthetic construct
  misc_feature 1..22: note = chemically synthesized
  source 1..22: mol_type = other DNA
atcatttaactcagcaccttgg

SEQ ID NO: 26464 - DNA, 22 bp, synthetic construct
  misc_feature 1..22: note = chemically synthesized
  source 1..22: mol_type = other DNA
aactcagcaccttggtctctgc

SEQ ID NO: 26465 - DNA, 22 bp, synthetic construct
  misc_feature 1..22: note = chemically synthesized
  source 1..22: mol_type = other DNA
actcagcaccttggtctctgca

SEQ ID NO: 26466 - DNA, 22 bp, synthetic construct
  misc_feature 1..22: note = chemically synthesized
  source 1..22: mol_type = other DNA
agcaccttggtctctgcatcta

SEQ ID NO: 26467 - DNA, 22 bp, synthetic construct
  misc_feature 1..22: note = chemically synthesized
  source 1..22: mol_type = other DNA
ggtctctgcatctactgtttct

SEQ ID NO: 26468 - DNA, 22 bp, synthetic construct
  misc_feature 1..22: note = chemically synthesized
  source 1..22: mol_type = other DNA
gtctctgcatctactgtttctg

SEQ ID NO: 26469 - DNA, 22 bp, synthetic construct
  misc_feature 1..22: note = chemically synthesized
  source 1..22: mol_type = other DNA
tgcatctactgtttctgtaaat

SEQ ID NO: 26470 - DNA, 22 bp, synthetic construct
  misc_feature 1..22: note = chemically synthesized
  source 1..22: mol_type = other DNA
catctactgtttctgtaaatag

SEQ ID NO: 26471 - DNA, 22 bp, synthetic construct
  misc_feature 1..22: note = chemically synthesized
  source 1..22: mol_type = other DNA
ctgtttctgtaaatagcagtaa

SEQ ID NO: 26472 - DNA, 22 bp, synthetic construct
  misc_feature 1..22: note = chemically synthesized
  source 1..22: mol_type = other DNA
tttctgtaaatagcagtaacta

SEQ ID NO: 26473 - DNA, 22 bp, synthetic construct
  misc_feature 1..22: note = chemically synthesized
  source 1..22: mol_type = other DNA
ctgtaaatagcagtaactacct

SEQ ID NO: 26474 - DNA, 22 bp, synthetic construct
  misc_feature 1..22: note = chemically synthesized
  source 1..22: mol_type = other DNA
tgtaaatagcagtaactacctc

SEQ ID NO: 26475 - DNA, 22 bp, synthetic construct
  misc_feature 1..22: note = chemically synthesized
  source 1..22: mol_type = other DNA
taaatagcagtaactacctcac

SEQ ID NO: 26476 - DNA, 22 bp, synthetic construct
  misc_feature 1..22: note = chemically synthesized
  source 1..22: mol_type = other DNA
cctcacagaaaagcacatagca

SEQ ID NO: 26477 - DNA, 22 bp, synthetic construct
  misc_feature 1..22: note = chemically synthesized
  source 1..22: mol_type = other DNA
acagaaaagcacatagcacatg

SEQ ID NO: 26478 - DNA, 22 bp, synthetic construct
  misc_feature 1..22: note = chemically synthesized
  source 1..22: mol_type = other DNA
gcacacactgtttaataaatgt

SEQ ID NO: 26479 - DNA, 22 bp, synthetic construct
  misc_feature 1..22: note = chemically synthesized
  source 1..22: mol_type = other DNA
tttaataaatgttaaccctgat

SEQ ID NO: 26480 - DNA, 22 bp, synthetic construct
  misc_feature 1..22: note = chemically synthesized
  source 1..22: mol_type = other DNA
aataaatgttaaccctgattat

SEQ ID NO: 26481 - DNA, 22 bp, synthetic construct
  misc_feature 1..22: note = chemically synthesized
  source 1..22: mol_type = other DNA
ataaatgttaaccctgattatt

SEQ ID NO: 26482 - DNA, 22 bp, synthetic construct
  misc_feature 1..22: note = chemically synthesized
  source 1..22: mol_type = other DNA
accctgattattattaagctgc

SEQ ID NO: 26483 - DNA, 22 bp, synthetic construct
  misc_feature 1..22: note = chemically synthesized
  source 1..22: mol_type = other DNA
attattattaagctgccagaga

SEQ ID NO: 26484 - DNA, 22 bp, synthetic construct
  misc_feature 1..22: note = chemically synthesized
  source 1..22: mol_type = other DNA
ttattaagctgccagagataac

SEQ ID NO: 26485 - DNA, 22 bp, synthetic construct
  misc_feature 1..22: note = chemically synthesized
  source 1..22: mol_type = other DNA
ttaagctgccagagataaccta

SEQ ID NO: 26486 - DNA, 22 bp, synthetic construct
  misc_feature 1..22: note = chemically synthesized
  source 1..22: mol_type = other DNA
agctgccagagataacctattt

SEQ ID NO: 26487 - DNA, 22 bp, synthetic construct
  misc_feature 1..22: note = chemically synthesized
  source 1..22: mol_type = other DNA
ccagagataacctatttgtaga

SEQ ID NO: 26488 - DNA, 22 bp, synthetic construct
  misc_feature 1..22: note = chemically synthesized
  source 1..22: mol_type = other DNA
tttgtagattataaaacagaaa

SEQ ID NO: 26489 - DNA, 22 bp, synthetic construct
  misc_feature 1..22: note = chemically synthesized
  source 1..22: mol_type = other DNA
gtagattataaaacagaaactc

SEQ ID NO: 26490 - DNA, 22 bp, synthetic construct
  misc_feature 1..22: note = chemically synthesized
  source 1..22: mol_type = other DNA
tagattataaaacagaaactca

SEQ ID NO: 26491 - DNA, 22 bp, synthetic construct
  misc_feature 1..22: note = chemically synthesized
  source 1..22: mol_type = other DNA
taaaacagaaactcagataatt

SEQ ID NO: 26492 - DNA, 22 bp, synthetic construct
  misc_feature 1..22: note = chemically synthesized
  source 1..22: mol_type = other DNA
agataattgatatgacttgcca

SEQ ID NO: 26493 - DNA, 22 bp, synthetic construct
  misc_feature 1..22: note = chemically synthesized
  source 1..22: mol_type = other DNA
atatgacttgccaaggacatgt

SEQ ID NO: 26494 - DNA, 22 bp, synthetic construct
  misc_feature 1..22: note = chemically synthesized
  source 1..22: mol_type = other DNA
gccaaggacatgtagttggtgg

SEQ ID NO: 26495 - DNA, 22 bp, synthetic construct
  misc_feature 1..22: note = chemically synthesized
  source 1..22: mol_type = other DNA
ccaaggacatgtagttggtggg

SEQ ID NO: 26496 - DNA, 22 bp, synthetic construct
  misc_feature 1..22: note = chemically synthesized
  source 1..22: mol_type = other DNA
gtgggtggcagaacgagggctg

SEQ ID NO: 26497 - DNA, 22 bp, synthetic construct
  misc_feature 1..22: note = chemically synthesized
  source 1..22: mol_type = other DNA
gagcccagttcccagggtgact

SEQ ID NO: 26498 - DNA, 22 bp, synthetic construct
  misc_feature 1..22: note = chemically synthesized
  source 1..22: mol_type = other DNA
ccagggtgacttttcattaccc

SEQ ID NO: 26499 - DNA, 22 bp, synthetic construct
  misc_feature 1..22: note = chemically synthesized
  source 1..22: mol_type = other DNA
ttcattaccccacaaaacaggc

SEQ ID NO: 26500 - DNA, 22 bp, synthetic construct
  misc_feature 1..22: note = chemically synthesized
  source 1..22: mol_type = other DNA
tcattaccccacaaaacaggct

SEQ ID NO: 26501 - DNA, 22 bp, synthetic construct
  misc_feature 1..22: note = chemically synthesized
  source 1..22: mol_type = other DNA
cattaccccacaaaacaggctg

SEQ ID NO: 26502 - DNA, 22 bp, synthetic construct
  misc_feature 1..22: note = chemically synthesized
  source 1..22: mol_type = other DNA
attaccccacaaaacaggctgt

SEQ ID NO: 26503 - DNA, 22 bp, synthetic construct
  misc_feature 1..22: note = chemically synthesized
  source 1..22: mol_type = other DNA
ccccacaaaacaggctgttgaa

SEQ ID NO: 26504 - DNA, 22 bp, synthetic construct
  misc_feature 1..22: note = chemically synthesized
  source 1..22: mol_type = other DNA
ttgaatcatctgtgtgtttcct

SEQ ID NO: 26505 - DNA, 22 bp, synthetic construct
  misc_feature 1..22: note = chemically synthesized
  source 1..22: mol_type = other DNA
aatcatctgtgtgtttcctttt

SEQ ID NO: 26506 - DNA, 22 bp, synthetic construct
  misc_feature 1..22: note = chemically synthesized
  source 1..22: mol_type = other DNA
tgtgtttccttttttcatacag

SEQ ID NO: 26507 - DNA, 22 bp, synthetic construct
  misc_feature 1..22: note = chemically synthesized
  source 1..22: mol_type = other DNA
ccttttttcatacagcatacat

SEQ ID NO: 26508 - DNA, 22 bp, synthetic construct
  misc_feature 1..22: note = chemically synthesized
  source 1..22: mol_type = other DNA
cttttttcatacagcatacatc

SEQ ID NO: 26509 - DNA, 22 bp, synthetic construct
  misc_feature 1..22: note = chemically synthesized
  source 1..22: mol_type = other DNA
ttttcatacagcatacatcatc

SEQ ID NO: 26510 - DNA, 22 bp, synthetic construct
  misc_feature 1..22: note = chemically synthesized
  source 1..22: mol_type = other DNA
tttcatacagcatacatcatct

SEQ ID NO: 26511 - DNA, 22 bp, synthetic construct
  misc_feature 1..22: note = chemically synthesized
  source 1..22: mol_type = other DNA
ttcatacagcatacatcatcta

SEQ ID NO: 26512 - DNA, 22 bp, synthetic construct
  misc_feature 1..22: note = chemically synthesized
  source 1..22: mol_type = other DNA
tcatacagcatacatcatctat

SEQ ID NO: 26513 - DNA, 22 bp, synthetic construct
  misc_feature 1..22: note = chemically synthesized
  source 1..22: mol_type = other DNA
catacagcatacatcatctatc

SEQ ID NO: 26514 - DNA, 22 bp, synthetic construct
  misc_feature 1..22: note = chemically synthesized
  source 1..22: mol_type = other DNA
atacagcatacatcatctatct

SEQ ID NO: 26515 - DNA, 22 bp, synthetic construct
  misc_feature 1..22: note = chemically synthesized
  source 1..22: mol_type = other DNA
tcttttttttttttttgagaca

SEQ ID NO: 26516 - DNA, 22 bp, synthetic construct
  misc_feature 1..22: note = chemically synthesized
  source 1..22: mol_type = other DNA
ttttttttttttgagacagggt

SEQ ID NO: 26517 - DNA, 22 bp, synthetic construct
  misc_feature 1..22: note = chemically synthesized
  source 1..22: mol_type = other DNA
tttttttttttgagacagggtc

SEQ ID NO: 26518 - DNA, 22 bp, synthetic construct
  misc_feature 1..22: note = chemically synthesized
  source 1..22: mol_type = other DNA
ttttttttttgagacagggtct

SEQ ID NO: 26519 - DNA, 22 bp, synthetic construct
  misc_feature 1..22: note = chemically synthesized
  source 1..22: mol_type = other DNA
tttttttttgagacagggtctt

SEQ ID NO: 26520 - DNA, 22 bp, synthetic construct
  misc_feature 1..22: note = chemically synthesized
  source 1..22: mol_type = other DNA
ttttttttgagacagggtctta

SEQ ID NO: 26521 - DNA, 22 bp, synthetic construct
  misc_feature 1..22: note = chemically synthesized
  source 1..22: mol_type = other DNA
tttttttgagacagggtcttac

SEQ ID NO: 26522 - DNA, 22 bp, synthetic construct
  misc_feature 1..22: note = chemically synthesized
  source 1..22: mol_type = other DNA
ttttttgagacagggtcttact

SEQ ID NO: 26523 - DNA, 22 bp, synthetic construct
  misc_feature 1..22: note = chemically synthesized
  source 1..22: mol_type = other DNA
tttttgagacagggtcttactc

SEQ ID NO: 26524 - DNA, 22 bp, synthetic construct
  misc_feature 1..22: note = chemically synthesized
  source 1..22: mol_type = other DNA
ttttgagacagggtcttactct

SEQ ID NO: 26525 - DNA, 22 bp, synthetic construct
  misc_feature 1..22: note = chemically synthesized
  source 1..22: mol_type = other DNA
tttgagacagggtcttactctg

SEQ ID NO: 26526 - DNA, 22 bp, synthetic construct
  misc_feature 1..22: note = chemically synthesized
  source 1..22: mol_type = other DNA
ttgagacagggtcttactctgt

SEQ ID NO: 26527 - DNA, 22 bp, synthetic construct
  misc_feature 1..22: note = chemically synthesized
  source 1..22: mol_type = other DNA
tgagacagggtcttactctgtt

SEQ ID NO: 26528 - DNA, 22 bp, synthetic construct
  misc_feature 1..22: note = chemically synthesized
  source 1..22: mol_type = other DNA
gagacagggtcttactctgttg

SEQ ID NO: 26529 - DNA, 22 bp, synthetic construct
  misc_feature 1..22: note = chemically synthesized
  source 1..22: mol_type = other DNA
agacagggtcttactctgttgc

SEQ ID NO: 26530 - DNA, 22 bp, synthetic construct
  misc_feature 1..22: note = chemically synthesized
  source 1..22: mol_type = other DNA
actctgttgcccaggctggagt

SEQ ID NO: 26531 - DNA, 22 bp, synthetic construct
  misc_feature 1..22: note = chemically synthesized
  source 1..22: mol_type = other DNA
ctctgttgcccaggctggagtg

SEQ ID NO: 26532 - DNA, 22 bp, synthetic construct
  misc_feature 1..22: note = chemically synthesized
  source 1..22: mol_type = other DNA
tgttgcccaggctggagtgcag

SEQ ID NO: 26533 - DNA, 22 bp, synthetic construct
  misc_feature 1..22: note = chemically synthesized
  source 1..22: mol_type = other DNA
ttgcccaggctggagtgcagtg

SEQ ID NO: 26534 - DNA, 22 bp, synthetic construct
  misc_feature 1..22: note = chemically synthesized
  source 1..22: mol_type = other DNA
cccaggctggagtgcagtggca

SEQ ID NO: 26535 - DNA, 22 bp, synthetic construct
  misc_feature 1..22: note = chemically synthesized
  source 1..22: mol_type = other DNA
gagtgcagtggcatgatcttga

SEQ ID NO: 26536 - DNA, 22 bp, synthetic construct
  misc_feature 1..22: note = chemically synthesized
  source 1..22: mol_type = other DNA
gactcactgcaacctcctccgc

SEQ ID NO: 26537 - DNA, 22 bp, synthetic construct
  misc_feature 1..22: note = chemically synthesized
  source 1..22: mol_type = other DNA
actcactgcaacctcctccgcc

SEQ ID NO: 26538 - DNA, 22 bp, synthetic construct
  misc_feature 1..22: note = chemically synthesized
  source 1..22: mol_type = other DNA
actgcaacctcctccgcctctc

SEQ ID NO: 26539 - DNA, 22 bp, synthetic construct
  misc_feature 1..22: note = chemically synthesized
  source 1..22: mol_type = other DNA
caacctcctccgcctctcacct

SEQ ID NO: 26540 - DNA, 22 bp, synthetic construct
  misc_feature 1..22: note = chemically synthesized
  source 1..22: mol_type = other DNA
ctccgcctctcacctcagcctc

SEQ ID NO: 26541 - DNA, 22 bp, synthetic construct
  misc_feature 1..22: note = chemically synthesized
  source 1..22: mol_type = other DNA
cgcctctcacctcagcctcctg

SEQ ID NO: 26542 - DNA, 22 bp, synthetic construct
  misc_feature 1..22: note = chemically synthesized
  source 1..22: mol_type = other DNA
tcacctcagcctcctgagtagc

SEQ ID NO: 26543 - DNA, 22 bp, synthetic construct
  misc_feature 1..22: note = chemically synthesized
  source 1..22: mol_type = other DNA
acctcagcctcctgagtagctg

SEQ ID NO: 26544 - DNA, 22 bp, synthetic construct
  misc_feature 1..22: note = chemically synthesized
  source 1..22: mol_type = other DNA
agcctcctgagtagctgggact

SEQ ID NO: 26545 - DNA, 22 bp, synthetic construct
  misc_feature 1..22: note = chemically synthesized
  source 1..22: mol_type = other DNA
ctgagtagctgggactacagca

SEQ ID NO: 26546 - DNA, 22 bp, synthetic construct
  misc_feature 1..22: note = chemically synthesized
  source 1..22: mol_type = other DNA
agtagctgggactacagcacca

SEQ ID NO: 26547 - DNA, 22 bp, synthetic construct
  misc_feature 1..22: note = chemically synthesized
  source 1..22: mol_type = other DNA
ggactacagcaccaacacgccc

SEQ ID NO: 26548 - DNA, 22 bp, synthetic construct
  misc_feature 1..22: note = chemically synthesized
  source 1..22: mol_type = other DNA
cagcaccaacacgcccagctaa

SEQ ID NO: 26549 - DNA, 22 bp, synthetic construct
  misc_feature 1..22: note = chemically synthesized
  source 1..22: mol_type = other DNA
attttcgtaatgtttttgtaga

SEQ ID NO: 26550 - DNA, 22 bp, synthetic construct
  misc_feature 1..22: note = chemically synthesized
  source 1..22: mol_type = other DNA
tcgtaatgtttttgtagagatg

SEQ ID NO: 26551 - DNA, 22 bp, synthetic construct
  misc_feature 1..22: note = chemically synthesized
  source 1..22: mol_type = other DNA
cgtaatgtttttgtagagatgg

SEQ ID NO: 26552 - DNA, 22 bp, synthetic construct
  misc_feature 1..22: note = chemically synthesized
  source 1..22: mol_type = other DNA
gtaatgtttttgtagagatgga

SEQ ID NO: 26553 - DNA, 22 bp, synthetic construct
  misc_feature 1..22: note = chemically synthesized
  source 1..22: mol_type = other DNA
ttgtagagatggagtttcgcca

SEQ ID NO: 26554 - DNA, 22 bp, synthetic construct
  misc_feature 1..22: note = chemically synthesized
  source 1..22: mol_type = other DNA
tgtagagatggagtttcgccat

SEQ ID NO: 26555 - DNA, 22 bp, synthetic construct
  misc_feature 1..22: note = chemically synthesized
  source 1..22: mol_type = other DNA
gtagagatggagtttcgccatg

SEQ ID NO: 26556 - DNA, 22 bp, synthetic construct
  misc_feature 1..22: note = chemically synthesized
  source 1..22: mol_type = other DNA
tagagatggagtttcgccatgt

SEQ ID NO: 26557 - DNA, 22 bp, synthetic construct
  misc_feature 1..22: note = chemically synthesized
  source 1..22: mol_type = other DNA
cgccatgttgcccaggctggtc

SEQ ID NO: 26558 - DNA, 22 bp, synthetic construct
  misc_feature 1..22: note = chemically synthesized
  source 1..22: mol_type = other DNA
gccatgttgcccaggctggtct

SEQ ID NO: 26559 - DNA, 22 bp, synthetic construct
  misc_feature 1..22: note = chemically synthesized
  source 1..22: mol_type = other DNA
cccaggctggtcttgaactcct

SEQ ID NO: 26560 - DNA, 22 bp, synthetic construct
  misc_feature 1..22: note = chemically synthesized
  source 1..22: mol_type = other DNA
gtcttgaactcctgagttcacc

SEQ ID NO: 26561 - DNA, 22 bp, synthetic construct
  misc_feature 1..22: note = chemically synthesized
  source 1..22: mol_type = other DNA
gaactcctgagttcacccagga

SEQ ID NO: 26562 - DNA, 22 bp, synthetic construct
  misc_feature 1..22: note = chemically synthesized
  source 1..22: mol_type = other DNA
aactcctgagttcacccaggag

SEQ ID NO: 26563 - DNA, 22 bp, synthetic construct
  misc_feature 1..22: note = chemically synthesized
  source 1..22: mol_type = other DNA
ctgagttcacccaggagtgatt

SEQ ID NO: 26564 - DNA, 22 bp, synthetic construct
  misc_feature 1..22: note = chemically synthesized
  source 1..22: mol_type = other DNA
agttcacccaggagtgattcgc

SEQ ID NO: 26565 - DNA, 22 bp, synthetic construct
  misc_feature 1..22: note = chemically synthesized
  source 1..22: mol_type = other DNA
acccaggagtgattcgcccacc

SEQ ID NO: 26566 - DNA, 22 bp, synthetic construct
  misc_feature 1..22: note = chemically synthesized
  source 1..22: mol_type = other DNA
gcccacctcggcctcccaaagt

SEQ ID NO: 26567 - DNA, 22 bp, synthetic construct
  misc_feature 1..22: note = chemically synthesized
  source 1..22: mol_type = other DNA
ggcctcccaaagtgctgggatt

SEQ ID NO: 26568 - DNA, 22 bp, synthetic construct
  misc_feature 1..22: note = chemically synthesized
  source 1..22: mol_type = other DNA
ccaaagtgctgggattacaggt

SEQ ID NO: 26569 - DNA, 22 bp, synthetic construct
  misc_feature 1..22: note = chemically synthesized
  source 1..22: mol_type = other DNA
ggattacaggtgtgagccacca

SEQ ID NO: 26570 - DNA, 22 bp, synthetic construct
  misc_feature 1..22: note = chemically synthesized
  source 1..22: mol_type = other DNA
caggtgtgagccaccatgcctg

SEQ ID NO: 26571 - DNA, 22 bp, synthetic construct
  misc_feature 1..22: note = chemically synthesized
  source 1..22: mol_type = other DNA
gccccatacatctttctttatg

SEQ ID NO: 26572 - DNA, 22 bp, synthetic construct
  misc_feature 1..22: note = chemically synthesized
  source 1..22: mol_type = other DNA
tctttatgttacctcttctgct

SEQ ID NO: 26573 - DNA, 22 bp, synthetic construct
  misc_feature 1..22: note = chemically synthesized
  source 1..22: mol_type = other DNA
ctttatgttacctcttctgctt

SEQ ID NO: 26574 - DNA, 22 bp, synthetic construct
  misc_feature 1..22: note = chemically synthesized
  source 1..22: mol_type = other DNA
tttatgttacctcttctgcttc

SEQ ID NO: 26575 - DNA, 22 bp, synthetic construct
  misc_feature 1..22: note = chemically synthesized
  source 1..22: mol_type = other DNA
tatgttacctcttctgcttcat

SEQ ID NO: 26576 - DNA, 22 bp, synthetic construct
  misc_feature 1..22: note = chemically synthesized
  source 1..22: mol_type = other DNA
atgttacctcttctgcttcata

SEQ ID NO: 26577 - DNA, 22 bp, synthetic construct
  misc_feature 1..22: note = chemically synthesized
  source 1..22: mol_type = other DNA
tgttacctcttctgcttcatac

SEQ ID NO: 26578 - DNA, 22 bp, synthetic construct
  misc_feature 1..22: note = chemically synthesized
  source 1..22: mol_type = other DNA
cctcttctgcttcatactaata

SEQ ID NO: 26579 - DNA, 22 bp, synthetic construct
  misc_feature 1..22: note = chemically synthesized
  source 1..22: mol_type = other DNA
ttctgcttcatactaataaaac

SEQ ID NO: 26580 - DNA, 22 bp, synthetic construct
  misc_feature 1..22: note = chemically synthesized
  source 1..22: mol_type = other DNA
ctgcttcatactaataaaactc

SEQ ID NO: 26581 - DNA, 22 bp, synthetic construct
  misc_feature 1..22: note = chemically synthesized
  source 1..22: mol_type = other DNA
tgcttcatactaataaaactct

SEQ ID NO: 26582 - DNA, 22 bp, synthetic construct
  misc_feature 1..22: note = chemically synthesized
  source 1..22: mol_type = other DNA
cttcatactaataaaactcttt

SEQ ID NO: 26583 - DNA, 22 bp, synthetic construct
  misc_feature 1..22: note = chemically synthesized
  source 1..22: mol_type = other DNA
catactaataaaactctttgct

SEQ ID NO: 26584 - DNA, 22 bp, synthetic construct
  misc_feature 1..22: note = chemically synthesized
  source 1..22: mol_type = other DNA
atactaataaaactctttgctc

SEQ ID NO: 26585 - DNA, 22 bp, synthetic construct
  misc_feature 1..22: note = chemically synthesized
  source 1..22: mol_type = other DNA
ataaaactctttgctcaaagcc

SEQ ID NO: 26586 - DNA, 22 bp, synthetic construct
  misc_feature 1..22: note = chemically synthesized
  source 1..22: mol_type = other DNA
tttgctcaaagcctatataact

SEQ ID NO: 26587 - DNA, 22 bp, synthetic construct
  misc_feature 1..22: note = chemically synthesized
  source 1..22: mol_type = other DNA
tgctcaaagcctatataactca

SEQ ID NO: 26588 - DNA, 22 bp, synthetic construct
  misc_feature 1..22: note = chemically synthesized
  source 1..22: mol_type = other DNA
gctcaaagcctatataactcag

SEQ ID NO: 26589 - DNA, 22 bp, synthetic construct
  misc_feature 1..22: note = chemically synthesized
  source 1..22: mol_type = other DNA
ctcaaagcctatataactcaga

SEQ ID NO: 26590 - DNA, 22 bp, synthetic construct
  misc_feature 1..22: note = chemically synthesized
  source 1..22: mol_type = other DNA
aaagcctatataactcagactt

SEQ ID NO: 26591 - DNA, 22 bp, synthetic construct
  misc_feature 1..22: note = chemically synthesized
  source 1..22: mol_type = other DNA
tataactcagacttttcacgaa

SEQ ID NO: 26592 - DNA, 22 bp, synthetic construct
  misc_feature 1..22: note = chemically synthesized
  source 1..22: mol_type = other DNA
agacttttcacgaaattcaact

SEQ ID NO: 26593 - DNA, 22 bp, synthetic construct
  misc_feature 1..22: note = chemically synthesized
  source 1..22: mol_type = other DNA
ttcacgaaattcaactgtccta

SEQ ID NO: 26594 - DNA, 22 bp, synthetic construct
  misc_feature 1..22: note = chemically synthesized
  source 1..22: mol_type = other DNA
tcacgaaattcaactgtcctac

SEQ ID NO: 26595 - DNA, 22 bp, synthetic construct
  misc_feature 1..22: note = chemically synthesized
  source 1..22: mol_type = other DNA
cacgaaattcaactgtcctacc

SEQ ID NO: 26596 - DNA, 22 bp, synthetic construct
  misc_feature 1..22: note = chemically synthesized
  source 1..22: mol_type = other DNA
acgaaattcaactgtcctaccc

SEQ ID NO: 26597 - DNA, 22 bp, synthetic construct
  misc_feature 1..22: note = chemically synthesized
  source 1..22: mol_type = other DNA
aactgtcctaccctttaaccca

SEQ ID NO: 26598 - DNA, 22 bp, synthetic construct
  misc_feature 1..22: note = chemically synthesized
  source 1..22: mol_type = other DNA
tcctaccctttaacccatatga

SEQ ID NO: 26599 - DNA, 22 bp, synthetic construct
  misc_feature 1..22: note = chemically synthesized
  source 1..22: mol_type = other DNA
ccctttaacccatatgaaatag

SEQ ID NO: 26600 - DNA, 22 bp, synthetic construct
  misc_feature 1..22: note = chemically synthesized
  source 1..22: mol_type = other DNA
taacccatatgaaataggcttt

SEQ ID NO: 26601 - DNA, 22 bp, synthetic construct
  misc_feature 1..22: note = chemically synthesized
  source 1..22: mol_type = other DNA
aacccatatgaaataggctttc

SEQ ID NO: 26602 - DNA, 22 bp, synthetic construct
  misc_feature 1..22: note = chemically synthesized
  source 1..22: mol_type = other DNA
acccatatgaaataggctttcc

SEQ ID NO: 26603 - DNA, 22 bp, synthetic construct
  misc_feature 1..22: note = chemically synthesized
  source 1..22: mol_type = other DNA
tcctgtattttcaactcactgg

SEQ ID NO: 26604 - DNA, 22 bp, synthetic construct
  misc_feature 1..22: note = chemically synthesized
  source 1..22: mol_type = other DNA
cctgtattttcaactcactggt

SEQ ID NO: 26605 - DNA, 22 bp, synthetic construct
  misc_feature 1..22: note = chemically synthesized
  source 1..22: mol_type = other DNA
ctgtattttcaactcactggta

SEQ ID NO: 26606 - DNA, 22 bp, synthetic construct
  misc_feature 1..22: note = chemically synthesized
  source 1..22: mol_type = other DNA
tattttcaactcactggtagga

SEQ ID NO: 26607 - DNA, 22 bp, synthetic construct
  misc_feature 1..22: note = chemically synthesized
  source 1..22: mol_type = other DNA
tcaactcactggtaggattttt

SEQ ID NO: 26608 - DNA, 22 bp, synthetic construct
  misc_feature 1..22: note = chemically synthesized
  source 1..22: mol_type = other DNA
caactcactggtaggatttttt

SEQ ID NO: 26609 - DNA, 22 bp, synthetic construct
  misc_feature 1..22: note = chemically synthesized
  source 1..22: mol_type = other DNA
aactcactggtaggattttttc

SEQ ID NO: 26610 - DNA, 22 bp, synthetic construct
  misc_feature 1..22: note = chemically synthesized
  source 1..22: mol_type = other DNA
actggtaggattttttctgtct

SEQ ID NO: 26611 - DNA, 22 bp, synthetic construct
  misc_feature 1..22: note = chemically synthesized
  source 1..22: mol_type = other DNA
gtaggattttttctgtcttccc

SEQ ID NO: 26612 - DNA, 22 bp, synthetic construct
  misc_feature 1..22: note = chemically synthesized
  source 1..22: mol_type = other DNA
tttctgtcttccccctttatgt

SEQ ID NO: 26613 - DNA, 22 bp, synthetic construct
  misc_feature 1..22: note = chemically synthesized
  source 1..22: mol_type = other DNA
ttctgtcttccccctttatgta

SEQ ID NO: 26614 - DNA, 22 bp, synthetic construct
  misc_feature 1..22: note = chemically synthesized
  source 1..22: mol_type = other DNA
tctgtcttccccctttatgtag

SEQ ID NO: 26615 - DNA, 22 bp, synthetic construct
  misc_feature 1..22: note = chemically synthesized
  source 1..22: mol_type = other DNA
ctgtcttccccctttatgtaga

SEQ ID NO: 26616 - DNA, 22 bp, synthetic construct
  misc_feature 1..22: note = chemically synthesized
  source 1..22: mol_type = other DNA
tgtcttccccctttatgtagat

SEQ ID NO: 26617 - DNA, 22 bp, synthetic construct
  misc_feature 1..22: note = chemically synthesized
  source 1..22: mol_type = other DNA
tcttccccctttatgtagatga

SEQ ID NO: 26618 - DNA, 22 bp, synthetic construct
  misc_feature 1..22: note = chemically synthesized
  source 1..22: mol_type = other DNA
ccccctttatgtagatgatcca

SEQ ID NO: 26619 - DNA, 22 bp, synthetic construct
  misc_feature 1..22: note = chemically synthesized
  source 1..22: mol_type = other DNA
cccctttatgtagatgatccaa

SEQ ID NO: 26620 - DNA, 22 bp, synthetic construct
  misc_feature 1..22: note = chemically synthesized
  source 1..22: mol_type = other DNA
tatgtagatgatccaaagtcag

SEQ ID NO: 26621 - DNA, 22 bp, synthetic construct
  misc_feature 1..22: note = chemically synthesized
  source 1..22: mol_type = other DNA
atgtagatgatccaaagtcaga

SEQ ID NO: 26622 - DNA, 22 bp, synthetic construct
  misc_feature 1..22: note = chemically synthesized
  source 1..22: mol_type = other DNA
tgtagatgatccaaagtcagag

SEQ ID NO: 26623 - DNA, 22 bp, synthetic construct
  misc_feature 1..22: note = chemically synthesized
  source 1..22: mol_type = other DNA
gaagcatgagtagcccgtggct

SEQ ID NO: 26624 - DNA, 22 bp, synthetic construct
  misc_feature 1..22: note = chemically synthesized
  source 1..22: mol_type = other DNA
cctgaatagcctggggaaagca

SEQ ID NO: 26625 - DNA, 22 bp, synthetic construct
  misc_feature 1..22: note = chemically synthesized
  source 1..22: mol_type = other DNA
ctgaatagcctggggaaagcaa

SEQ ID NO: 26626 - DNA, 22 bp, synthetic construct
  misc_feature 1..22: note = chemically synthesized
  source 1..22: mol_type = other DNA
aatagcctggggaaagcaactt

SEQ ID NO: 26627 - DNA, 22 bp, synthetic construct
  misc_feature 1..22: note = chemically synthesized
  source 1..22: mol_type = other DNA
gggaaagcaacttctgatggac

SEQ ID NO: 26628 - DNA, 22 bp, synthetic construct
  misc_feature 1..22: note = chemically synthesized
  source 1..22: mol_type = other DNA
ctgatggacagacattgcgaga

SEQ ID NO: 26629 - DNA, 22 bp, synthetic construct
  misc_feature 1..22: note = chemically synthesized
  source 1..22: mol_type = other DNA
tgatggacagacattgcgagag

SEQ ID NO: 26630 - DNA, 22 bp, synthetic construct
  misc_feature 1..22: note = chemically synthesized
  source 1..22: mol_type = other DNA
atggacagacattgcgagagcg

SEQ ID NO: 26631 - DNA, 22 bp, synthetic construct
  misc_feature 1..22: note = chemically synthesized
  source 1..22: mol_type = other DNA
cgagagcgaatgccagcctctt

SEQ ID NO: 26632 - DNA, 22 bp, synthetic construct
  misc_feature 1..22: note = chemically synthesized
  source 1..22: mol_type = other DNA
ttttcttgctgatctcctctct

SEQ ID NO: 26633 - DNA, 22 bp, synthetic construct
  misc_feature 1..22: note = chemically synthesized
  source 1..22: mol_type = other DNA
ttcttgctgatctcctctctat

SEQ ID NO: 26634 - DNA, 22 bp, synthetic construct
  misc_feature 1..22: note = chemically synthesized
  source 1..22: mol_type = other DNA
tcttgctgatctcctctctata

SEQ ID NO: 26635 - DNA, 22 bp, synthetic construct
  misc_feature 1..22: note = chemically synthesized
  source 1..22: mol_type = other DNA
cttgctgatctcctctctatat

SEQ ID NO: 26636 - DNA, 22 bp, synthetic construct
  misc_feature 1..22: note = chemically synthesized
  source 1..22: mol_type = other DNA
ttgctgatctcctctctatatg

SEQ ID NO: 26637 - DNA, 22 bp, synthetic construct
  misc_feature 1..22: note = chemically synthesized
  source 1..22: mol_type = other DNA
gctgatctcctctctatatggt

SEQ ID NO: 26638 - DNA, 22 bp, synthetic construct
  misc_feature 1..22: note = chemically synthesized
  source 1..22: mol_type = other DNA
ctgatctcctctctatatggtt

SEQ ID NO: 26639 - DNA, 22 bp, synthetic construct
  misc_feature 1..22: note = chemically synthesized
  source 1..22: mol_type = other DNA
atctcctctctatatggttctt

SEQ ID NO: 26640 - DNA, 22 bp, synthetic construct
  misc_feature 1..22: note = chemically synthesized
  source 1..22: mol_type = other DNA
ctctctatatggttcttaccac

SEQ ID NO: 26641 - DNA, 22 bp, synthetic construct
  misc_feature 1..22: note = chemically synthesized
  source 1..22: mol_type = other DNA
tctatatggttcttaccactta

SEQ ID NO: 26642 - DNA, 22 bp, synthetic construct
  misc_feature 1..22: note = chemically synthesized
  source 1..22: mol_type = other DNA
tatatggttcttaccacttaaa

SEQ ID NO: 26643 - DNA, 22 bp, synthetic construct
  misc_feature 1..22: note = chemically synthesized
  source 1..22: mol_type = other DNA
tatggttcttaccacttaaaga

SEQ ID NO: 26644 - DNA, 22 bp, synthetic construct
  misc_feature 1..22: note = chemically synthesized
  source 1..22: mol_type = other DNA
ttaccacttaaagacgaggttg

SEQ ID NO: 26645 - DNA, 22 bp, synthetic construct
  misc_feature 1..22: note = chemically synthesized
  source 1..22: mol_type = other DNA
accacttaaagacgaggttgag

SEQ ID NO: 26646 - DNA, 22 bp, synthetic construct
  misc_feature 1..22: note = chemically synthesized
  source 1..22: mol_type = other DNA
ccacttaaagacgaggttgagc

SEQ ID NO: 26647 - DNA, 22 bp, synthetic construct
  misc_feature 1..22: note = chemically synthesized
  source 1..22: mol_type = other DNA
aaagacgaggttgagccagtct

SEQ ID NO: 26648 - DNA, 22 bp, synthetic construct
  misc_feature 1..22: note = chemically synthesized
  source 1..22: mol_type = other DNA
aagacgaggttgagccagtctc

SEQ ID NO: 26649 - DNA, 22 bp, synthetic construct
  misc_feature 1..22: note = chemically synthesized
  source 1..22: mol_type = other DNA
agccagtctccaatcacagcta

SEQ ID NO: 26650 - DNA, 22 bp, synthetic construct
  misc_feature 1..22: note = chemically synthesized
  source 1..22: mol_type = other DNA
caatcacagctacccaaaggag

SEQ ID NO: 26651 - DNA, 22 bp, synthetic construct
  misc_feature 1..22: note = chemically synthesized
  source 1..22: mol_type = other DNA
cccaaaggagtttaatgcccac

SEQ ID NO: 26652 - DNA, 22 bp, synthetic construct
  misc_feature 1..22: note = chemically synthesized
  source 1..22: mol_type = other DNA
aatgcccacagcttcctgaaga

SEQ ID NO: 26653 - DNA, 22 bp, synthetic construct
  misc_feature 1..22: note = chemically synthesized
  source 1..22: mol_type = other DNA
atgcccacagcttcctgaagat

SEQ ID NO: 26654 - DNA, 22 bp, synthetic construct
  misc_feature 1..22: note = chemically synthesized
  source 1..22: mol_type = other DNA
cctgaagatggaaccagatggg

SEQ ID NO: 26655 - DNA, 22 bp, synthetic construct
  misc_feature 1..22: note = chemically synthesized
  source 1..22: mol_type = other DNA
ctgaagatggaaccagatgggg

SEQ ID NO: 26656 - DNA, 22 bp, synthetic construct
  misc_feature 1..22: note = chemically synthesized
  source 1..22: mol_type = other DNA
aagatggaaccagatggggaag

SEQ ID NO: 26657 - DNA, 22 bp, synthetic construct
  misc_feature 1..22: note = chemically synthesized
  source 1..22: mol_type = other DNA
ctgaggtctgcgatcacggaca

SEQ ID NO: 26658 - DNA, 22 bp, synthetic construct
  misc_feature 1..22: note = chemically synthesized
  source 1..22: mol_type = other DNA
aggtctgcgatcacggacacca

SEQ ID NO: 26659 - DNA, 22 bp, synthetic construct
  misc_feature 1..22: note = chemically synthesized
  source 1..22: mol_type = other DNA
cgatcacggacaccaagatgaa

SEQ ID NO: 26660 - DNA, 22 bp, synthetic construct
  misc_feature 1..22: note = chemically synthesized
  source 1..22: mol_type = other DNA
ggagtcttggtaattcacctgg

SEQ ID NO: 26661 - DNA, 22 bp, synthetic construct
  misc_feature 1..22: note = chemically synthesized
  source 1..22: mol_type = other DNA
ggtaattcacctggaggtaatg

SEQ ID NO: 26662 - DNA, 22 bp, synthetic construct
  misc_feature 1..22: note = chemically synthesized
  source 1..22: mol_type = other DNA
gtaattcacctggaggtaatgt

SEQ ID NO: 26663 - DNA, 22 bp, synthetic construct
  misc_feature 1..22: note = chemically synthesized
  source 1..22: mol_type = other DNA
acctggaggtaatgtgttgact

SEQ ID NO: 26664 - DNA, 22 bp, synthetic construct
  misc_feature 1..22: note = chemically synthesized
  source 1..22: mol_type = other DNA
gaggtaatgtgttgactggatc

SEQ ID NO: 26665 - DNA, 22 bp, synthetic construct
  misc_feature 1..22: note = chemically synthesized
  source 1..22: mol_type = other DNA
actggatcccaaagtcatggag

SEQ ID NO: 26666 - DNA, 22 bp, synthetic construct
  misc_feature 1..22: note = chemically synthesized
  source 1..22: mol_type = other DNA
gatcccaaagtcatggagaaca

SEQ ID NO: 26667 - DNA, 22 bp, synthetic construct
  misc_feature 1..22: note = chemically synthesized
  source 1..22: mol_type = other DNA
attccttcctccatcctcattt

SEQ ID NO: 26668 - DNA, 22 bp, synthetic construct
  misc_feature 1..22: note = chemically synthesized
  source 1..22: mol_type = other DNA
cttcctccatcctcatttcctt

SEQ ID NO: 26669 - DNA, 22 bp, synthetic construct
  misc_feature 1..22: note = chemically synthesized
  source 1..22: mol_type = other DNA
cctccatcctcatttccttggc

SEQ ID NO: 26670 - DNA, 22 bp, synthetic construct
  misc_feature 1..22: note = chemically synthesized
  source 1..22: mol_type = other DNA
ctccatcctcatttccttggca

SEQ ID NO: 26671 - DNA, 22 bp, synthetic construct
  misc_feature 1..22: note = chemically synthesized
  source 1..22: mol_type = other DNA
catcctcatttccttggcacct

SEQ ID NO: 26672 - DNA, 22 bp, synthetic construct
  misc_feature 1..22: note = chemically synthesized
  source 1..22: mol_type = other DNA
atttccttggcacctcaggaag

SEQ ID NO: 26673 - DNA, 22 bp, synthetic construct
  misc_feature 1..22: note = chemically synthesized
  source 1..22: mol_type = other DNA
ccttggcacctcaggaagatgt

SEQ ID NO: 26674 - DNA, 22 bp, synthetic construct
  misc_feature 1..22: note = chemically synthesized
  source 1..22: mol_type = other DNA
cttggcacctcaggaagatgtc

SEQ ID NO: 26675 - DNA, 22 bp, synthetic construct
  misc_feature 1..22: note = chemically synthesized
  source 1..22: mol_type = other DNA
ggcacctcaggaagatgtcagc

SEQ ID NO: 26676 - DNA, 22 bp, synthetic construct
  misc_feature 1..22: note = chemically synthesized
  source 1..22: mol_type = other DNA
gcacctcaggaagatgtcagca

SEQ ID NO: 26677 - DNA, 22 bp, synthetic construct
  misc_feature 1..22: note = chemically synthesized
  source 1..22: mol_type = other DNA
aggaagatgtcagcagagccct

SEQ ID NO: 26678 - DNA, 22 bp, synthetic construct
  misc_feature 1..22: note = chemically synthesized
  source 1..22: mol_type = other DNA
gcagttattccaggcttggtgg

SEQ ID NO: 26679 - DNA, 22 bp, synthetic construct
  misc_feature 1..22: note = chemically synthesized
  source 1..22: mol_type = other DNA
cagttattccaggcttggtggt

SEQ ID NO: 26680 - DNA, 22 bp, synthetic construct
  misc_feature 1..22: note = chemically synthesized
  source 1..22: mol_type = other DNA
ttccaggcttggtggtgattgc

SEQ ID NO: 26681 - DNA, 22 bp, synthetic construct
  misc_feature 1..22: note = chemically synthesized
  source 1..22: mol_type = other DNA
caggcttggtggtgattgctct

SEQ ID NO: 26682 - DNA, 22 bp, synthetic construct
  misc_feature 1..22: note = chemically synthesized
  source 1..22: mol_type = other DNA
ggtggtgattgctctgctatga

SEQ ID NO: 26683 - DNA, 22 bp, synthetic construct
  misc_feature 1..22: note = chemically synthesized
  source 1..22: mol_type = other DNA
gtggtgattgctctgctatgag

SEQ ID NO: 26684 - DNA, 22 bp, synthetic construct
  misc_feature 1..22: note = chemically synthesized
  source 1..22: mol_type = other DNA
ctctgctatgagtctgtgcctt

SEQ ID NO: 26685 - DNA, 22 bp, synthetic construct
  misc_feature 1..22: note = chemically synthesized
  source 1..22: mol_type = other DNA
tgctatgagtctgtgccttgcc

SEQ ID NO: 26686 - DNA, 22 bp, synthetic construct
  misc_feature 1..22: note = chemically synthesized
  source 1..22: mol_type = other DNA
ctatgagtctgtgccttgcccc

SEQ ID NO: 26687 - DNA, 22 bp, synthetic construct
  misc_feature 1..22: note = chemically synthesized
  source 1..22: mol_type = other DNA
tgagtctgtgccttgcccctgt

SEQ ID NO: 26688 - DNA, 22 bp, synthetic construct
  misc_feature 1..22: note = chemically synthesized
  source 1..22: mol_type = other DNA
tgccttgcccctgttttatatg

SEQ ID NO: 26689 - DNA, 22 bp, synthetic construct
  misc_feature 1..22: note = chemically synthesized
  source 1..22: mol_type = other DNA
gcccctgttttatatgccctgt

SEQ ID NO: 26690 - DNA, 22 bp, synthetic construct
  misc_feature 1..22: note = chemically synthesized
  source 1..22: mol_type = other DNA
cccctgttttatatgccctgta

SEQ ID NO: 26691 - DNA, 22 bp, synthetic construct
  misc_feature 1..22: note = chemically synthesized
  source 1..22: mol_type = other DNA
ttttatatgccctgtatccagt

SEQ ID NO: 26692 - DNA, 22 bp, synthetic construct
  misc_feature 1..22: note = chemically synthesized
  source 1..22: mol_type = other DNA
tatatgccctgtatccagtatt

SEQ ID NO: 26693 - DNA, 22 bp, synthetic construct
  misc_feature 1..22: note = chemically synthesized
  source 1..22: mol_type = other DNA
atatgccctgtatccagtattc

SEQ ID NO: 26694 - DNA, 22 bp, synthetic construct
  misc_feature 1..22: note = chemically synthesized
  source 1..22: mol_type = other DNA
tatgccctgtatccagtattca

SEQ ID NO: 26695 - DNA, 22 bp, synthetic construct
  misc_feature 1..22: note = chemically synthesized
  source 1..22: mol_type = other DNA
tatccagtattcaggtcaaccc

SEQ ID NO: 26696 - DNA, 22 bp, synthetic construct
  misc_feature 1..22: note = chemically synthesized
  source 1..22: mol_type = other DNA
aggtcaacccagccctgatctt

SEQ ID NO: 26697 - DNA, 22 bp, synthetic construct
  misc_feature 1..22: note = chemically synthesized
  source 1..22: mol_type = other DNA
atctttggactcaaaaaccacg

SEQ ID NO: 26698 - DNA, 22 bp, synthetic construct
  misc_feature 1..22: note = chemically synthesized
  source 1..22: mol_type = other DNA
tggactcaaaaaccacgtttgt

SEQ ID NO: 26699 - DNA, 22 bp, synthetic construct
  misc_feature 1..22: note = chemically synthesized
  source 1..22: mol_type = other DNA
ggactcaaaaaccacgtttgtc

SEQ ID NO: 26700 - DNA, 22 bp, synthetic construct
  misc_feature 1..22: note = chemically synthesized
  source 1..22: mol_type = other DNA
gactcaaaaaccacgtttgtct

SEQ ID NO: 26701 - DNA, 22 bp, synthetic construct
  misc_feature 1..22: note = chemically synthesized
  source 1..22: mol_type = other DNA
aaaaaccacgtttgtctaaaat

SEQ ID NO: 26702 - DNA, 20 bp, synthetic construct
  misc_feature 1..20: note = chemically synthesized
  source 1..20: mol_type = other DNA
tgcgtccactgctcttctga

SEQ ID NO: 26703 - DNA, 20 bp, synthetic construct
  misc_feature 1..20: note = chemically synthesized
  source 1..20: mol_type = other DNA
tcttctgacagcatcattta

SEQ ID NO: 26704 - DNA, 20 bp, synthetic construct
  misc_feature 1..20: note = chemically synthesized
  source 1..20: mol_type = other DNA
cttctgacagcatcatttac

SEQ ID NO: 26705 - DNA, 20 bp, synthetic construct
  misc_feature 1..20: note = chemically synthesized
  source 1..20: mol_type = other DNA
aggttcacactgttccacct

SEQ ID NO: 26706 - DNA, 20 bp, synthetic construct
  misc_feature 1..20: note = chemically synthesized
  source 1..20: mol_type = other DNA
ttcatattatgctcaaaata

SEQ ID NO: 26707 - DNA, 20 bp, synthetic construct
  misc_feature 1..20: note = chemically synthesized
  source 1..20: mol_type = other DNA
tgctcaaaatatggacctat

SEQ ID NO: 26708 - DNA, 20 bp, synthetic construct
  misc_feature 1..20: note = chemically synthesized
  source 1..20: mol_type = other DNA
aatatggacctatcagaaaa

SEQ ID NO: 26709 - DNA, 20 bp, synthetic construct
  misc_feature 1..20: note = chemically synthesized
  source 1..20: mol_type = other DNA
ccattcatctgctgttgttt

SEQ ID NO: 26710 - DNA, 20 bp, synthetic construct
  misc_feature 1..20: note = chemically synthesized
  source 1..20: mol_type = other DNA
tttggcctttgtctgaatca

SEQ ID NO: 26711 - DNA, 20 bp, synthetic construct
  misc_feature 1..20: note = chemically synthesized
  source 1..20: mol_type = other DNA
cctttgtctgaatcacagta

SEQ ID NO: 26712 - DNA, 20 bp, synthetic construct
  misc_feature 1..20: note = chemically synthesized
  source 1..20: mol_type = other DNA
tagatgcctccaactgttaa

SEQ ID NO: 26713 - DNA, 20 bp, synthetic construct
  misc_feature 1..20: note = chemically synthesized
  source 1..20: mol_type = other DNA
agatgcctccaactgttaaa

SEQ ID NO: 26714 - DNA, 20 bp, synthetic construct
  misc_feature 1..20: note = chemically synthesized
  source 1..20: mol_type = other DNA
tccaactgttaaaaggaaaa

SEQ ID NO: 26715 - DNA, 20 bp, synthetic construct
  misc_feature 1..20: note = chemically synthesized
  source 1..20: mol_type = other DNA
aaaaagtttctattatcatt

SEQ ID NO: 26716 - DNA, 20 bp, synthetic construct
  misc_feature 1..20: note = chemically synthesized
  source 1..20: mol_type = other DNA
aaaagtttctattatcattc

SEQ ID NO: 26717 - DNA, 20 bp, synthetic construct
  misc_feature 1..20: note = chemically synthesized
  source 1..20: mol_type = other DNA
gtttctattatcattcaggt

SEQ ID NO: 26718 - DNA, 20 bp, synthetic construct
  misc_feature 1..20: note = chemically synthesized
  source 1..20: mol_type = other DNA
tcaggttagcaatttgttta

SEQ ID NO: 26719 - DNA, 20 bp, synthetic construct
  misc_feature 1..20: note = chemically synthesized
  source 1..20: mol_type = other DNA
agcaatttgtttaaagtaat

SEQ ID NO: 26720 - DNA, 20 bp, synthetic construct
  misc_feature 1..20: note = chemically synthesized
  source 1..20: mol_type = other DNA
gcaatttgtttaaagtaata

SEQ ID NO: 26721 - DNA, 20 bp, synthetic construct
  misc_feature 1..20: note = chemically synthesized
  source 1..20: mol_type = other DNA
caatttgtttaaagtaataa

SEQ ID NO: 26722 - DNA, 20 bp, synthetic construct
  misc_feature 1..20: note = chemically synthesized
  source 1..20: mol_type = other DNA
ttgtttaaagtaataaggga

SEQ ID NO: 26723 - DNA, 20 bp, synthetic construct
  misc_feature 1..20: note = chemically synthesized
  source 1..20: mol_type = other DNA
aagtaataagggatggaaat

SEQ ID NO: 26724 - DNA, 20 bp, synthetic construct
  misc_feature 1..20: note = chemically synthesized
  source 1..20: mol_type = other DNA
ataagggatggaaatgagtt

SEQ ID NO: 26725 - DNA, 20 bp, synthetic construct
  misc_feature 1..20: note = chemically synthesized
  source 1..20: mol_type = other DNA
atgagttcagatttttaaat

SEQ ID NO: 26726 - DNA, 20 bp, synthetic construct
  misc_feature 1..20: note = chemically synthesized
  source 1..20: mol_type = other DNA
cagatttttaaattagcatt

SEQ ID NO: 26727 - DNA, 20 bp, synthetic construct
  misc_feature 1..20: note = chemically synthesized
  source 1..20: mol_type = other DNA
agatttttaaattagcattt

SEQ ID NO: 26728 - DNA, 20 bp, synthetic construct
  misc_feature 1..20: note = chemically synthesized
  source 1..20: mol_type = other DNA
attagcatttaggatccact

SEQ ID NO: 26729 - DNA, 20 bp, synthetic construct
  misc_feature 1..20: note = chemically synthesized
  source 1..20: mol_type = other DNA
atttaggatccactaagccc

SEQ ID NO: 26730 - DNA, 20 bp, synthetic construct
  misc_feature 1..20: note = chemically synthesized
  source 1..20: mol_type = other DNA
tttaggatccactaagccca

SEQ ID NO: 26731 - DNA, 20 bp, synthetic construct
  misc_feature 1..20: note = chemically synthesized
  source 1..20: mol_type = other DNA
tatttacctttcaaaaataa

SEQ ID NO: 26732 - DNA, 20 bp, synthetic construct
  misc_feature 1..20: note = chemically synthesized
  source 1..20: mol_type = other DNA
atagtatttgacatattgtt

SEQ ID NO: 26733 - DNA, 20 bp, synthetic construct
  misc_feature 1..20: note = chemically synthesized
  source 1..20: mol_type = other DNA
tagtatttgacatattgtta

SEQ ID NO: 26734 - DNA, 20 bp, synthetic construct
  misc_feature 1..20: note = chemically synthesized
  source 1..20: mol_type = other DNA
agtatttgacatattgttaa

SEQ ID NO: 26735 - DNA, 20 bp, synthetic construct
  misc_feature 1..20: note = chemically synthesized
  source 1..20: mol_type = other DNA
tgttaagggacaccaacgaa

SEQ ID NO: 26736 - DNA, 20 bp, synthetic construct
  misc_feature 1..20: note = chemically synthesized
  source 1..20: mol_type = other DNA
tcaattctgtgcatgtttta

SEQ ID NO: 26737 - DNA, 20 bp, synthetic construct
  misc_feature 1..20: note = chemically synthesized
  source 1..20: mol_type = other DNA
gcatgttttaaagtcccttc

SEQ ID NO: 26738 - DNA, 20 bp, synthetic construct
  misc_feature 1..20: note = chemically synthesized
  source 1..20: mol_type = other DNA
catgttttaaagtcccttct

SEQ ID NO: 26739 - DNA, 20 bp, synthetic construct
  misc_feature 1..20: note = chemically synthesized
  source 1..20: mol_type = other DNA
ccttctaggtgcatgtgaaa

SEQ ID NO: 26740 - DNA, 20 bp, synthetic construct
  misc_feature 1..20: note = chemically synthesized
  source 1..20: mol_type = other DNA
tctaggtgcatgtgaaatag

SEQ ID NO: 26741 - DNA, 20 bp, synthetic construct
  misc_feature 1..20: note = chemically synthesized
  source 1..20: mol_type = other DNA
aggtgcatgtgaaatagcag

SEQ ID NO: 26742 - DNA, 20 bp, synthetic construct
  misc_feature 1..20: note = chemically synthesized
  source 1..20: mol_type = other DNA
ggtgcatgtgaaatagcagc

SEQ ID NO: 26743 - DNA, 20 bp, synthetic construct
  misc_feature 1..20: note = chemically synthesized
  source 1..20: mol_type = other DNA
agcagcaggctgatgccgca

SEQ ID NO: 26744 - DNA, 20 bp, synthetic construct
  misc_feature 1..20: note = chemically synthesized
  source 1..20: mol_type = other DNA
cagcaggctgatgccgcaaa

SEQ ID NO: 26745 - DNA, 20 bp, synthetic construct
  misc_feature 1..20: note = chemically synthesized
  source 1..20: mol_type = other DNA
agcaggctgatgccgcaaag

SEQ ID NO: 26746 - DNA, 20 bp, synthetic construct
  misc_feature 1..20: note = chemically synthesized
  source 1..20: mol_type = other DNA
aagaggtcaaatacctcaaa

SEQ ID NO: 26747 - DNA, 20 bp, synthetic construct
  misc_feature 1..20: note = chemically synthesized
  source 1..20: mol_type = other DNA
ggtcaaatacctcaaaaaga

SEQ ID NO: 26748 - DNA, 20 bp, synthetic construct
  misc_feature 1..20: note = chemically synthesized
  source 1..20: mol_type = other DNA
tcaaatacctcaaaaagaaa

SEQ ID NO: 26749 - DNA, 20 bp, synthetic construct
  misc_feature 1..20: note = chemically synthesized
  source 1..20: mol_type = other DNA
tcaaaaagaaagagtctgaa

SEQ ID NO: 26750 - DNA, 20 bp, synthetic construct
  misc_feature 1..20: note = chemically synthesized
  source 1..20: mol_type = other DNA
aaagagtctgaaaagacaat

SEQ ID NO: 26751 - DNA, 20 bp, synthetic construct
  misc_feature 1..20: note = chemically synthesized
  source 1..20: mol_type = other DNA
agagtctgaaaagacaattg

SEQ ID NO: 26752 - DNA, 20 bp, synthetic construct
  misc_feature 1..20: note = chemically synthesized
  source 1..20: mol_type = other DNA
ttggagtaactacttgccta

SEQ ID NO: 26753 - DNA, 20 bp, synthetic construct
  misc_feature 1..20: note = chemically synthesized
  source 1..20: mol_type = other DNA
taactacttgcctaaagctc

SEQ ID NO: 26754 - DNA, 20 bp, synthetic construct
  misc_feature 1..20: note = chemically synthesized
  source 1..20: mol_type = other DNA
ctaaagctccagtcactttg

SEQ ID NO: 26755 - DNA, 20 bp, synthetic construct
  misc_feature 1..20: note = chemically synthesized
  source 1..20: mol_type = other DNA
ccagtcactttgtagtgtca

SEQ ID NO: 26756 - DNA, 20 bp, synthetic construct
  misc_feature 1..20: note = chemically synthesized
  source 1..20: mol_type = other DNA
tcactttgtagtgtcaaagt

SEQ ID NO: 26757 - DNA, 20 bp, synthetic construct
  misc_feature 1..20: note = chemically synthesized
  source 1..20: mol_type = other DNA
cactttgtagtgtcaaagtt

SEQ ID NO: 26758 - DNA, 20 bp, synthetic construct
  misc_feature 1..20: note = chemically synthesized
  source 1..20: mol_type = other DNA
attgtcatcatacatgccct

SEQ ID NO: 26759 - DNA, 20 bp, synthetic construct
  misc_feature 1..20: note = chemically synthesized
  source 1..20: mol_type = other DNA
gtcatcatacatgccctcag

SEQ ID NO: 26760 - DNA, 20 bp, synthetic construct
  misc_feature 1..20: note = chemically synthesized
  source 1..20: mol_type = other DNA
atcatacatgccctcagcag

SEQ ID NO: 26761 - DNA, 20 bp, synthetic construct
  misc_feature 1..20: note = chemically synthesized
  source 1..20: mol_type = other DNA
ctctcttcctccttctccta

SEQ ID NO: 26762 - DNA, 20 bp, synthetic construct
  misc_feature 1..20: note = chemically synthesized
  source 1..20: mol_type = other DNA
tcttcctccttctcctacag

SEQ ID NO: 26763 - DNA, 20 bp, synthetic construct
  misc_feature 1..20: note = chemically synthesized
  source 1..20: mol_type = other DNA
ctccttctcctacagtggtc

SEQ ID NO: 26764 - DNA, 20 bp, synthetic construct
  misc_feature 1..20: note = chemically synthesized
  source 1..20: mol_type = other DNA
cttctcctacagtggtccag

SEQ ID NO: 26765 - DNA, 20 bp, synthetic construct
  misc_feature 1..20: note = chemically synthesized
  source 1..20: mol_type = other DNA
ttctcctacagtggtccaga

SEQ ID NO: 26766 - DNA, 20 bp, synthetic construct
  misc_feature 1..20: note = chemically synthesized
  source 1..20: mol_type = other DNA
tctcctacagtggtccagaa

SEQ ID NO: 26767 - DNA, 20 bp, synthetic construct
  misc_feature 1..20: note = chemically synthesized
  source 1..20: mol_type = other DNA
ctcctacagtggtccagaag

SEQ ID NO: 26768 - DNA, 20 bp, synthetic construct
  misc_feature 1..20: note = chemically synthesized
  source 1..20: mol_type = other DNA
acagtggtccagaaggggct

SEQ ID NO: 26769 - DNA, 20 bp, synthetic construct
  misc_feature 1..20: note = chemically synthesized
  source 1..20: mol_type = other DNA
cagtggtccagaaggggctc

SEQ ID NO: 26770 - DNA, 20 bp, synthetic construct
  misc_feature 1..20: note = chemically synthesized
  source 1..20: mol_type = other DNA
gctcaggtatgttcaaataa

SEQ ID NO: 26771 - DNA, 20 bp, synthetic construct
  misc_feature 1..20: note = chemically synthesized
  source 1..20: mol_type = other DNA
tgttcaaataacagctgctg

SEQ ID NO: 26772 - DNA, 20 bp, synthetic construct
  misc_feature 1..20: note = chemically synthesized
  source 1..20: mol_type = other DNA
tgctgtggttttcaattatg

SEQ ID NO: 26773 - DNA, 20 bp, synthetic construct
  misc_feature 1..20: note = chemically synthesized
  source 1..20: mol_type = other DNA
caattatgaagaaatctcct

SEQ ID NO: 26774 - DNA, 20 bp, synthetic construct
  misc_feature 1..20: note = chemically synthesized
  source 1..20: mol_type = other DNA
aagaaatctcctaagctaca

SEQ ID NO: 26775 - DNA, 20 bp, synthetic construct
  misc_feature 1..20: note = chemically synthesized
  source 1..20: mol_type = other DNA
acatagtcatttatctttta

SEQ ID NO: 26776 - DNA, 20 bp, synthetic construct
  misc_feature 1..20: note = chemically synthesized
  source 1..20: mol_type = other DNA
catttatcttttaaagcacc

SEQ ID NO: 26777 - DNA, 20 bp, synthetic construct
  misc_feature 1..20: note = chemically synthesized
  source 1..20: mol_type = other DNA
atcttttaaagcaccaagca

SEQ ID NO: 26778 - DNA, 20 bp, synthetic construct
  misc_feature 1..20: note = chemically synthesized
  source 1..20: mol_type = other DNA
caagcaaagtaccttttgat

SEQ ID NO: 26779 - DNA, 20 bp, synthetic construct
  misc_feature 1..20: note = chemically synthesized
  source 1..20: mol_type = other DNA
aagcaaagtaccttttgata

SEQ ID NO: 26780 - DNA, 20 bp, synthetic construct
  misc_feature 1..20: note = chemically synthesized
  source 1..20: mol_type = other DNA
gcaaagtaccttttgataag

SEQ ID NO: 26781 - DNA, 20 bp, synthetic construct
  misc_feature 1..20: note = chemically synthesized
  source 1..20: mol_type = other DNA
tgataaggagaacgtgctta

SEQ ID NO: 26782 - DNA, 20 bp, synthetic construct
  misc_feature 1..20: note = chemically synthesized
  source 1..20: mol_type = other DNA
aacgtgcttatagatgttca

SEQ ID NO: 26783 - DNA, 20 bp, synthetic construct
  misc_feature 1..20: note = chemically synthesized
  source 1..20: mol_type = other DNA
gtgcttatagatgttcatag

SEQ ID NO: 26784 - DNA, 20 bp, synthetic construct
  misc_feature 1..20: note = chemically synthesized
  source 1..20: mol_type = other DNA
agatgttcatagaagatgct

SEQ ID NO: 26785 - DNA, 20 bp, synthetic construct
  misc_feature 1..20: note = chemically synthesized
  source 1..20: mol_type = other DNA
atacgtatttcattctcaca

SEQ ID NO: 26786 - DNA, 20 bp, synthetic construct
  misc_feature 1..20: note = chemically synthesized
  source 1..20: mol_type = other DNA
acatggtatttctctcttcc

SEQ ID NO: 26787 - DNA, 20 bp, synthetic construct
  misc_feature 1..20: note = chemically synthesized
  source 1..20: mol_type = other DNA
ggtatttctctcttcctagt

SEQ ID NO: 26788 - DNA, 20 bp, synthetic construct
  misc_feature 1..20: note = chemically synthesized
  source 1..20: mol_type = other DNA
gtatttctctcttcctagta

SEQ ID NO: 26789 - DNA, 20 bp, synthetic construct
  misc_feature 1..20: note = chemically synthesized
  source 1..20: mol_type = other DNA
tatttctctcttcctagtaa

SEQ ID NO: 26790 - DNA, 20 bp, synthetic construct
  misc_feature 1..20: note = chemically synthesized
  source 1..20: mol_type = other DNA
tttctctcttcctagtaagg

SEQ ID NO: 26791 - DNA, 20 bp, synthetic construct
  misc_feature 1..20: note = chemically synthesized
  source 1..20: mol_type = other DNA
ttctctcttcctagtaaggg

SEQ ID NO: 26792 - DNA, 20 bp, synthetic construct
  misc_feature 1..20: note = chemically synthesized
  source 1..20: mol_type = other DNA
ctctcttcctagtaagggag

SEQ ID NO: 26793 - DNA, 20 bp, synthetic construct
  misc_feature 1..20: note = chemically synthesized
  source 1..20: mol_type = other DNA
atgcccaatttctgcctcca

SEQ ID NO: 26794 - DNA, 20 bp, synthetic construct
  misc_feature 1..20: note = chemically synthesized
  source 1..20: mol_type = other DNA
ccaatttctgcctccaaaga

SEQ ID NO: 26795 - DNA, 20 bp, synthetic construct
  misc_feature 1..20: note = chemically synthesized
  source 1..20: mol_type = other DNA
atttctgcctccaaagaaag

SEQ ID NO: 26796 - DNA, 20 bp, synthetic construct
  misc_feature 1..20: note = chemically synthesized
  source 1..20: mol_type = other DNA
tctgcctccaaagaaagaag

SEQ ID NO: 26797 - DNA, 20 bp, synthetic construct
  misc_feature 1..20: note = chemically synthesized
  source 1..20: mol_type = other DNA
aaagaagaagtaaaaactaa

SEQ ID NO: 26798 - DNA, 20 bp, synthetic construct
  misc_feature 1..20: note = chemically synthesized
  source 1..20: mol_type = other DNA
aagaagaagtaaaaactaaa

SEQ ID NO: 26799 - DNA, 20 bp, synthetic construct
  misc_feature 1..20: note = chemically synthesized
  source 1..20: mol_type = other DNA
aagaagtaaaaactaaaagg

SEQ ID NO: 26800 - DNA, 20 bp, synthetic construct
  misc_feature 1..20: note = chemically synthesized
  source 1..20: mol_type = other DNA
aaaggcagaaatgaaatcca

SEQ ID NO: 26801 - DNA, 20 bp, synthetic construct
  misc_feature 1..20: note = chemically synthesized
  source 1..20: mol_type = other DNA
aaggcagaaatgaaatccac

SEQ ID NO: 26802 - DNA, 20 bp, synthetic construct
  misc_feature 1..20: note = chemically synthesized
  source 1..20: mol_type = other DNA
aaatgaaatccacaggcaaa

SEQ ID NO: 26803 - DNA, 20 bp, synthetic construct
  misc_feature 1..20: note = chemically synthesized
  source 1..20: mol_type = other DNA
aatccacaggcaaacagcct

SEQ ID NO: 26804 - DNA, 20 bp, synthetic construct
  misc_feature 1..20: note = chemically synthesized
  source 1..20: mol_type = other DNA
aacagcctgagaccacatcc

SEQ ID NO: 26805 - DNA, 20 bp, synthetic construct
  misc_feature 1..20: note = chemically synthesized
  source 1..20: mol_type = other DNA
acagcctgagaccacatcct

SEQ ID NO: 26806 - DNA, 20 bp, synthetic construct
  misc_feature 1..20: note = chemically synthesized
  source 1..20: mol_type = other DNA
ctgagaccacatcctgggcc

SEQ ID NO: 26807 - DNA, 20 bp, synthetic construct
  misc_feature 1..20: note = chemically synthesized
  source 1..20: mol_type = other DNA
ccacatcctgggcctggtta

SEQ ID NO: 26808 - DNA, 20 bp, synthetic construct
  misc_feature 1..20: note = chemically synthesized
  source 1..20: mol_type = other DNA
atcctgggcctggttaaaga

SEQ ID NO: 26809 - DNA, 20 bp, synthetic construct
  misc_feature 1..20: note = chemically synthesized
  source 1..20: mol_type = other DNA
ttaaagatagacccctgacc

SEQ ID NO: 26810 - DNA, 20 bp, synthetic construct
  misc_feature 1..20: note = chemically synthesized
  source 1..20: mol_type = other DNA
agatagacccctgacctggc

SEQ ID NO: 26811 - DNA, 20 bp, synthetic construct
  misc_feature 1..20: note = chemically synthesized
  source 1..20: mol_type = other DNA
ctggccagttatgttatcta

SEQ ID NO: 26812 - DNA, 20 bp, synthetic construct
  misc_feature 1..20: note = chemically synthesized
  source 1..20: mol_type = other DNA
gttatgttatctatagattc

SEQ ID NO: 26813 - DNA, 20 bp, synthetic construct
  misc_feature 1..20: note = chemically synthesized
  source 1..20: mol_type = other DNA
tatagattccagacactgta

SEQ ID NO: 26814 - DNA, 20 bp, synthetic construct
  misc_feature 1..20: note = chemically synthesized
  source 1..20: mol_type = other DNA
attccagacactgtatggaa

SEQ ID NO: 26815 - DNA, 20 bp, synthetic construct
  misc_feature 1..20: note = chemically synthesized
  source 1..20: mol_type = other DNA
ccagacactgtatggaaaag

SEQ ID NO: 26816 - DNA, 20 bp, synthetic construct
  misc_feature 1..20: note = chemically synthesized
  source 1..20: mol_type = other DNA
ttctgttccattctgatgac

SEQ ID NO: 26817 - DNA, 20 bp, synthetic construct
  misc_feature 1..20: note = chemically synthesized
  source 1..20: mol_type = other DNA
attctgatgaccagtgcatg

SEQ ID NO: 26818 - DNA, 20 bp, synthetic construct
  misc_feature 1..20: note = chemically synthesized
  source 1..20: mol_type = other DNA
tgaccagtgcatgcagcccc

SEQ ID NO: 26819 - DNA, 20 bp, synthetic construct
  misc_feature 1..20: note = chemically synthesized
  source 1..20: mol_type = other DNA
cccccagtcatgtaccccct

SEQ ID NO: 26820 - DNA, 20 bp, synthetic construct
  misc_feature 1..20: note = chemically synthesized
  source 1..20: mol_type = other DNA
cccagtcatgtaccccctta

SEQ ID NO: 26821 - DNA, 20 bp, synthetic construct
  misc_feature 1..20: note = chemically synthesized
  source 1..20: mol_type = other DNA
atgtacccccttagagttgt

SEQ ID NO: 26822 - DNA, 20 bp, synthetic construct
  misc_feature 1..20: note = chemically synthesized
  source 1..20: mol_type = other DNA
ttagagttgtaagcccttaa

SEQ ID NO: 26823 - DNA, 20 bp, synthetic construct
  misc_feature 1..20: note = chemically synthesized
  source 1..20: mol_type = other DNA
tagagttgtaagcccttaaa

SEQ ID NO: 26824 - DNA, 20 bp, synthetic construct
  misc_feature 1..20: note = chemically synthesized
  source 1..20: mol_type = other DNA
agagttgtaagcccttaaaa

SEQ ID NO: 26825 - DNA, 20 bp, synthetic construct
  misc_feature 1..20: note = chemically synthesized
  source 1..20: mol_type = other DNA
ttgtaagcccttaaaaggga

SEQ ID NO: 26826 - DNA, 20 bp, synthetic construct
  misc_feature 1..20: note = chemically synthesized
  source 1..20: mol_type = other DNA
tgtaagcccttaaaagggac

SEQ ID NO: 26827 - DNA, 20 bp, synthetic construct
  misc_feature 1..20: note = chemically synthesized
  source 1..20: mol_type = other DNA
ggacaggaattgctcactct

SEQ ID NO: 26828 - DNA, 20 bp, synthetic construct
  misc_feature 1..20: note = chemically synthesized
  source 1..20: mol_type = other DNA
acaggaattgctcactctga

SEQ ID NO: 26829 - DNA, 20 bp, synthetic construct
  misc_feature 1..20: note = chemically synthesized
  source 1..20: mol_type = other DNA
aattgctcactctgagagct

SEQ ID NO: 26830 - DNA, 20 bp, synthetic construct
  misc_feature 1..20: note = chemically synthesized
  source 1..20: mol_type = other DNA
cactctgagagcttggttgt

SEQ ID NO: 26831 - DNA, 20 bp, synthetic construct
  misc_feature 1..20: note = chemically synthesized
  source 1..20: mol_type = other DNA
ctctgagagcttggttgttg

SEQ ID NO: 26832 - DNA, 20 bp, synthetic construct
  misc_feature 1..20: note = chemically synthesized
  source 1..20: mol_type = other DNA
agcttggttgttggagatgt

SEQ ID NO: 26833 - DNA, 20 bp, synthetic construct
  misc_feature 1..20: note = chemically synthesized
  source 1..20: mol_type = other DNA
tggagatgtgagtcttgccc

SEQ ID NO: 26834 - DNA, 20 bp, synthetic construct
  misc_feature 1..20: note = chemically synthesized
  source 1..20: mol_type = other DNA
gtgagtcttgcccaagctcc

SEQ ID NO: 26835 - DNA, 20 bp, synthetic construct
  misc_feature 1..20: note = chemically synthesized
  source 1..20: mol_type = other DNA
cccaagctcccagccgaata

SEQ ID NO: 26836 - DNA, 20 bp, synthetic construct
  misc_feature 1..20: note = chemically synthesized
  source 1..20: mol_type = other DNA
aagcccttccttctttaact

SEQ ID NO: 26837 - DNA, 20 bp, synthetic construct
  misc_feature 1..20: note = chemically synthesized
  source 1..20: mol_type = other DNA
ccttctttaactcggtgtct

SEQ ID NO: 26838 - DNA, 20 bp, synthetic construct
  misc_feature 1..20: note = chemically synthesized
  source 1..20: mol_type = other DNA
cttctttaactcggtgtctg

SEQ ID NO: 26839 - DNA, 20 bp, synthetic construct
  misc_feature 1..20: note = chemically synthesized
  source 1..20: mol_type = other DNA
ttctttaactcggtgtctga

SEQ ID NO: 26840 - DNA, 20 bp, synthetic construct
  misc_feature 1..20: note = chemically synthesized
  source 1..20: mol_type = other DNA
tctttaactcggtgtctgag

SEQ ID NO: 26841 - DNA, 20 bp, synthetic construct
  misc_feature 1..20: note = chemically synthesized
  source 1..20: mol_type = other DNA
tgtctgaggggttttgtatg

SEQ ID NO: 26842 - DNA, 20 bp, synthetic construct
  misc_feature 1..20: note = chemically synthesized
  source 1..20: mol_type = other DNA
tgcagcttgtcctgctacac

SEQ ID NO: 26843 - DNA, 20 bp, synthetic construct
  misc_feature 1..20: note = chemically synthesized
  source 1..20: mol_type = other DNA
gctacctctattaaaacaca

SEQ ID NO: 26844 - DNA, 20 bp, synthetic construct
  misc_feature 1..20: note = chemically synthesized
  source 1..20: mol_type = other DNA
aaacacaaagccacaatata

SEQ ID NO: 26845 - DNA, 20 bp, synthetic construct
  misc_feature 1..20: note = chemically synthesized
  source 1..20: mol_type = other DNA
ccacaatatatggatacatt

SEQ ID NO: 26846 - DNA, 20 bp, synthetic construct
  misc_feature 1..20: note = chemically synthesized
  source 1..20: mol_type = other DNA
tttggaaaatatgcacactt

SEQ ID NO: 26847 - DNA, 20 bp, synthetic construct
  misc_feature 1..20: note = chemically synthesized
  source 1..20: mol_type = other DNA
aaatatgcacactttggatc

SEQ ID NO: 26848 - DNA, 20 bp, synthetic construct
  misc_feature 1..20: note = chemically synthesized
  source 1..20: mol_type = other DNA
atgcacactttggatccagc

SEQ ID NO: 26849 - DNA, 20 bp, synthetic construct
  misc_feature 1..20: note = chemically synthesized
  source 1..20: mol_type = other DNA
ggatccagcaagtccacatc

SEQ ID NO: 26850 - DNA, 20 bp, synthetic construct
  misc_feature 1..20: note = chemically synthesized
  source 1..20: mol_type = other DNA
ccacatctagaaaaccatcc

SEQ ID NO: 26851 - DNA, 20 bp, synthetic construct
  misc_feature 1..20: note = chemically synthesized
  source 1..20: mol_type = other DNA
cacatctagaaaaccatcct

SEQ ID NO: 26852 - DNA, 20 bp, synthetic construct
  misc_feature 1..20: note = chemically synthesized
  source 1..20: mol_type = other DNA
acatctagaaaaccatcctg

SEQ ID NO: 26853 - DNA, 20 bp, synthetic construct
  misc_feature 1..20: note = chemically synthesized
  source 1..20: mol_type = other DNA
catctagaaaaccatcctgg

SEQ ID NO: 26854 - DNA, 20 bp, synthetic construct
  misc_feature 1..20: note = chemically synthesized
  source 1..20: mol_type = other DNA
aaccatcctgggggaaaatt

SEQ ID NO: 26855 - DNA, 20 bp, synthetic construct
  misc_feature 1..20: note = chemically synthesized
  source 1..20: mol_type = other DNA
accatcctgggggaaaatta

SEQ ID NO: 26856 - DNA, 20 bp, synthetic construct
  misc_feature 1..20: note = chemically synthesized
  source 1..20: mol_type = other DNA
catcctgggggaaaattaag

SEQ ID NO: 26857 - DNA, 20 bp, synthetic construct
  misc_feature 1..20: note = chemically synthesized
  source 1..20: mol_type = other DNA
tcctgggggaaaattaagga

SEQ ID NO: 26858 - DNA, 20 bp, synthetic construct
  misc_feature 1..20: note = chemically synthesized
  source 1..20: mol_type = other DNA
aaaattaaggagagtatgaa

SEQ ID NO: 26859 - DNA, 20 bp, synthetic construct
  misc_feature 1..20: note = chemically synthesized
  source 1..20: mol_type = other DNA
aaattaaggagagtatgaaa

SEQ ID NO: 26860 - DNA, 20 bp, synthetic construct
  misc_feature 1..20: note = chemically synthesized
  source 1..20: mol_type = other DNA
tatgaaaaggatgtttacta

SEQ ID NO: 26861 - DNA, 20 bp, synthetic construct
  misc_feature 1..20: note = chemically synthesized
  source 1..20: mol_type = other DNA
tgtttactaaagcattatga

SEQ ID NO: 26862 - DNA, 20 bp, synthetic construct
  misc_feature 1..20: note = chemically synthesized
  source 1..20: mol_type = other DNA
gcattatgatggcaaaaaat

SEQ ID NO: 26863 - DNA, 20 bp, synthetic construct
  misc_feature 1..20: note = chemically synthesized
  source 1..20: mol_type = other DNA
agaaacaacttacactgaac

SEQ ID NO: 26864 - DNA, 20 bp, synthetic construct
  misc_feature 1..20: note = chemically synthesized
  source 1..20: mol_type = other DNA
gaactagtcaacttacttaa

SEQ ID NO: 26865 - DNA, 20 bp, synthetic construct
  misc_feature 1..20: note = chemically synthesized
  source 1..20: mol_type = other DNA
tagtcaacttacttaacaga

SEQ ID NO: 26866 - DNA, 20 bp, synthetic construct
  misc_feature 1..20: note = chemically synthesized
  source 1..20: mol_type = other DNA
tcaacttacttaacagacag

SEQ ID NO: 26867 - DNA, 20 bp, synthetic construct
  misc_feature 1..20: note = chemically synthesized
  source 1..20: mol_type = other DNA
caacttacttaacagacaga

SEQ ID NO: 26868 - DNA, 20 bp, synthetic construct
  misc_feature 1..20: note = chemically synthesized
  source 1..20: mol_type = other DNA
taacagacagaaggctcaat

SEQ ID NO: 26869 - DNA, 20 bp, synthetic construct
  misc_feature 1..20: note = chemically synthesized
  source 1..20: mol_type = other DNA
caattagctcatgtgtcaaa

SEQ ID NO: 26870 - DNA, 20 bp, synthetic construct
  misc_feature 1..20: note = chemically synthesized
  source 1..20: mol_type = other DNA
aattagctcatgtgtcaaat

SEQ ID NO: 26871 - DNA, 20 bp, synthetic construct
  misc_feature 1..20: note = chemically synthesized
  source 1..20: mol_type = other DNA
attagctcatgtgtcaaatg

SEQ ID NO: 26872 - DNA, 20 bp, synthetic construct
  misc_feature 1..20: note = chemically synthesized
  source 1..20: mol_type = other DNA
ttagctcatgtgtcaaatgg

SEQ ID NO: 26873 - DNA, 20 bp, synthetic construct
  misc_feature 1..20: note = chemically synthesized
  source 1..20: mol_type = other DNA
aatgggggtaaaataatatt

SEQ ID NO: 26874 - DNA, 20 bp, synthetic construct
  misc_feature 1..20: note = chemically synthesized
  source 1..20: mol_type = other DNA
gggtaaaataatatttagtt

SEQ ID NO: 26875 - DNA, 20 bp, synthetic construct
  misc_feature 1..20: note = chemically synthesized
  source 1..20: mol_type = other DNA
gtaaaataatatttagtttg

SEQ ID NO: 26876 - DNA, 20 bp, synthetic construct
  misc_feature 1..20: note = chemically synthesized
  source 1..20: mol_type = other DNA
taaaataatatttagtttgg

SEQ ID NO: 26877 - DNA, 20 bp, synthetic construct
  misc_feature 1..20: note = chemically synthesized
  source 1..20: mol_type = other DNA
aaaataatatttagtttgga

SEQ ID NO: 26878 - DNA, 20 bp, synthetic construct
  misc_feature 1..20: note = chemically synthesized
  source 1..20: mol_type = other DNA
taatatttagtttggaggga

SEQ ID NO: 26879 - DNA, 20 bp, synthetic construct
  misc_feature 1..20: note = chemically synthesized
  source 1..20: mol_type = other DNA
atttagtttggagggaaaga

SEQ ID NO: 26880 - DNA, 20 bp, synthetic construct
  misc_feature 1..20: note = chemically synthesized
  source 1..20: mol_type = other DNA
tttagtttggagggaaagac

SEQ ID NO: 26881 - DNA, 20 bp, synthetic construct
  misc_feature 1..20: note = chemically synthesized
  source 1..20: mol_type = other DNA
gagggaaagacaggctctaa

SEQ ID NO: 26882 - DNA, 20 bp, synthetic construct
  misc_feature 1..20: note = chemically synthesized
  source 1..20: mol_type = other DNA
gggaaagacaggctctaaaa

SEQ ID NO: 26883 - DNA, 20 bp, synthetic construct
  misc_feature 1..20: note = chemically synthesized
  source 1..20: mol_type = other DNA
ggaaagacaggctctaaaag

SEQ ID NO: 26884 - DNA, 20 bp, synthetic construct
  misc_feature 1..20: note = chemically synthesized
  source 1..20: mol_type = other DNA
tctaaaagaggattaaaaat

SEQ ID NO: 26885 - DNA, 20 bp, synthetic construct
  misc_feature 1..20: note = chemically synthesized
  source 1..20: mol_type = other DNA
agaggattaaaaattagatg

SEQ ID NO: 26886 - DNA, 20 bp, synthetic construct
  misc_feature 1..20: note = chemically synthesized
  source 1..20: mol_type = other DNA
attaaaaattagatgtggcc

SEQ ID NO: 26887 - DNA, 20 bp, synthetic construct
  misc_feature 1..20: note = chemically synthesized
  source 1..20: mol_type = other DNA
ttaaaaattagatgtggcct

SEQ ID NO: 26888 - DNA, 20 bp, synthetic construct
  misc_feature 1..20: note = chemically synthesized
  source 1..20: mol_type = other DNA
aattagatgtggcctaggca

SEQ ID NO: 26889 - DNA, 20 bp, synthetic construct
  misc_feature 1..20: note = chemically synthesized
  source 1..20: mol_type = other DNA
taggcaaagaatttatgacc

SEQ ID NO: 26890 - DNA, 20 bp, synthetic construct
  misc_feature 1..20: note = chemically synthesized
  source 1..20: mol_type = other DNA
aaacacaacaaaaacaaaaa

SEQ ID NO: 26891 - DNA, 20 bp, synthetic construct
  misc_feature 1..20: note = chemically synthesized
  source 1..20: mol_type = other DNA
caaaaacaaaaacagacaaa

SEQ ID NO: 26892 - DNA, 20 bp, synthetic construct
  misc_feature 1..20: note = chemically synthesized
  source 1..20: mol_type = other DNA
aaaaacaaaaacagacaaat

SEQ ID NO: 26893 - DNA, 20 bp, synthetic construct
  misc_feature 1..20: note = chemically synthesized
  source 1..20: mol_type = other DNA
aaaatgcttctgcaccgcaa

SEQ ID NO: 26894 - DNA, 20 bp, synthetic construct
  misc_feature 1..20: note = chemically synthesized
  source 1..20: mol_type = other DNA
accgcaaaagaccgaatcaa

SEQ ID NO: 26895 - DNA, 20 bp, synthetic construct
  misc_feature 1..20: note = chemically synthesized
  source 1..20: mol_type = other DNA
cgcaaaagaccgaatcaaca

SEQ ID NO: 26896 - DNA, 20 bp, synthetic construct
  misc_feature 1..20: note = chemically synthesized
  source 1..20: mol_type = other DNA
gaccgaatcaacagagtaaa

SEQ ID NO: 26897 - DNA, 20 bp, synthetic construct
  misc_feature 1..20: note = chemically synthesized
  source 1..20: mol_type = other DNA
cagagtaaacggataaccta

SEQ ID NO: 26898 - DNA, 20 bp, synthetic construct
  misc_feature 1..20: note = chemically synthesized
  source 1..20: mol_type = other DNA
aaacggataacctacagaat

SEQ ID NO: 26899 - DNA, 20 bp, synthetic construct
  misc_feature 1..20: note = chemically synthesized
  source 1..20: mol_type = other DNA
gcaaactatgaatgcaacaa

SEQ ID NO: 26900 - DNA, 20 bp, synthetic construct
  misc_feature 1..20: note = chemically synthesized
  source 1..20: mol_type = other DNA
caaactatgaatgcaacaaa

SEQ ID NO: 26901 - DNA, 20 bp, synthetic construct
  misc_feature 1..20: note = chemically synthesized
  source 1..20: mol_type = other DNA
tgcaacaaaaggctaatata

SEQ ID NO: 26902 - DNA, 20 bp, synthetic construct
  misc_feature 1..20: note = chemically synthesized
  source 1..20: mol_type = other DNA
ggctaatatacagaatctac

SEQ ID NO: 26903 - DNA, 20 bp, synthetic construct
  misc_feature 1..20: note = chemically synthesized
  source 1..20: mol_type = other DNA
gctaatatacagaatctaca

SEQ ID NO: 26904 - DNA, 20 bp, synthetic construct
  misc_feature 1..20: note = chemically synthesized
  source 1..20: mol_type = other DNA
aacaaaaaaaccaacctcat

SEQ ID NO: 26905 - DNA, 20 bp, synthetic construct
  misc_feature 1..20: note = chemically synthesized
  source 1..20: mol_type = other DNA
aaaaaaccaacctcattaga

SEQ ID NO: 26906 - DNA, 20 bp, synthetic construct
  misc_feature 1..20: note = chemically synthesized
  source 1..20: mol_type = other DNA
tcattagaaagtgactgtga

SEQ ID NO: 26907 - DNA, 20 bp, synthetic construct
  misc_feature 1..20: note = chemically synthesized
  source 1..20: mol_type = other DNA
tgactgtgatggttaatact

SEQ ID NO: 26908 - DNA, 20 bp, synthetic construct
  misc_feature 1..20: note = chemically synthesized
  source 1..20: mol_type = other DNA
atactgagtgtcaacttgat

SEQ ID NO: 26909 - DNA, 20 bp, synthetic construct
  misc_feature 1..20: note = chemically synthesized
  source 1..20: mol_type = other DNA
gtgtcaacttgattggactg

SEQ ID NO: 26910 - DNA, 20 bp, synthetic construct
  misc_feature 1..20: note = chemically synthesized
  source 1..20: mol_type = other DNA
tgtcaacttgattggactga

SEQ ID NO: 26911 - DNA, 20 bp, synthetic construct
  misc_feature 1..20: note = chemically synthesized
  source 1..20: mol_type = other DNA
tgattggactgaaggatgca

SEQ ID NO: 26912 - DNA, 20 bp, synthetic construct
  misc_feature 1..20: note = chemically synthesized
  source 1..20: mol_type = other DNA
aggatgcaaagtaatgatct

SEQ ID NO: 26913 - DNA, 20 bp, synthetic construct
  misc_feature 1..20: note = chemically synthesized
  source 1..20: mol_type = other DNA
ggatgcaaagtaatgatctt

SEQ ID NO: 26914 - DNA, 20 bp, synthetic construct
  misc_feature 1..20: note = chemically synthesized
  source 1..20: mol_type = other DNA
atgatcttgggtgtgtctgt

SEQ ID NO: 26915 - DNA, 20 bp, synthetic construct
  misc_feature 1..20: note = chemically synthesized
  source 1..20: mol_type = other DNA
tgatcttgggtgtgtctgtg

SEQ ID NO: 26916 - DNA, 20 bp, synthetic construct
  misc_feature 1..20: note = chemically synthesized
  source 1..20: mol_type = other DNA
gatcttgggtgtgtctgtga

SEQ ID NO: 26917 - DNA, 20 bp, synthetic construct
  misc_feature 1..20: note = chemically synthesized
  source 1..20: mol_type = other DNA
tgtctgtgagggtgttacca

SEQ ID NO: 26918 - DNA, 20 bp, synthetic construct
  misc_feature 1..20: note = chemically synthesized
  source 1..20: mol_type = other DNA
gtctgtgagggtgttaccaa

SEQ ID NO: 26919 - DNA, 20 bp, synthetic construct
  misc_feature 1..20: note = chemically synthesized
  source 1..20: mol_type = other DNA
ctgtgagggtgttaccaaag

SEQ ID NO: 26920 - DNA, 20 bp, synthetic construct
  misc_feature 1..20: note = chemically synthesized
  source 1..20: mol_type = other DNA
accaaaggagattaatattt

SEQ ID NO: 26921 - DNA, 20 bp, synthetic construct
  misc_feature 1..20: note = chemically synthesized
  source 1..20: mol_type = other DNA
aaggagattaatatttcagt

SEQ ID NO: 26922 - DNA, 20 bp, synthetic construct
  misc_feature 1..20: note = chemically synthesized
  source 1..20: mol_type = other DNA
gagattaatatttcagtcag

SEQ ID NO: 26923 - DNA, 20 bp, synthetic construct
  misc_feature 1..20: note = chemically synthesized
  source 1..20: mol_type = other DNA
agattaatatttcagtcagt

SEQ ID NO: 26924 - DNA, 20 bp, synthetic construct
  misc_feature 1..20: note = chemically synthesized
  source 1..20: mol_type = other DNA
taatatttcagtcagtgggc

SEQ ID NO: 26925 - DNA, 20 bp, synthetic construct
  misc_feature 1..20: note = chemically synthesized
  source 1..20: mol_type = other DNA
aatatttcagtcagtgggct

SEQ ID NO: 26926 - DNA, 20 bp, synthetic construct
  misc_feature 1..20: note = chemically synthesized
  source 1..20: mol_type = other DNA
atatttcagtcagtgggctg

SEQ ID NO: 26927 - DNA, 20 bp, synthetic construct
  misc_feature 1..20: note = chemically synthesized
  source 1..20: mol_type = other DNA
tttcagtcagtgggctgggg

SEQ ID NO: 26928 - DNA, 20 bp, synthetic construct
  misc_feature 1..20: note = chemically synthesized
  source 1..20: mol_type = other DNA
ttcagtcagtgggctgggga

SEQ ID NO: 26929 - DNA, 20 bp, synthetic construct
  misc_feature 1..20: note = chemically synthesized
  source 1..20: mol_type = other DNA
agtcagtgggctggggaagg

SEQ ID NO: 26930 - DNA, 20 bp, synthetic construct
  misc_feature 1..20: note = chemically synthesized
  source 1..20: mol_type = other DNA
aggcagacccacccttaatc

SEQ ID NO: 26931 - DNA, 20 bp, synthetic construct
  misc_feature 1..20: note = chemically synthesized
  source 1..20: mol_type = other DNA
ggcagacccacccttaatct

SEQ ID NO: 26932 - DNA, 20 bp, synthetic construct
  misc_feature 1..20: note = chemically synthesized
  source 1..20: mol_type = other DNA
agacccacccttaatctggg

SEQ ID NO: 26933 - DNA, 20 bp, synthetic construct
  misc_feature 1..20: note = chemically synthesized
  source 1..20: mol_type = other DNA
gacccacccttaatctgggt

SEQ ID NO: 26934 - DNA, 20 bp, synthetic construct
  misc_feature 1..20: note = chemically synthesized
  source 1..20: mol_type = other DNA
ctgggtgggcaccatctaat

SEQ ID NO: 26935 - DNA, 20 bp, synthetic construct
  misc_feature 1..20: note = chemically synthesized
  source 1..20: mol_type = other DNA
ggcaccatctaatcagttgc

SEQ ID NO: 26936 - DNA, 20 bp, synthetic construct
  misc_feature 1..20: note = chemically synthesized
  source 1..20: mol_type = other DNA
catctaatcagttgccagca

SEQ ID NO: 26937 - DNA, 20 bp, synthetic construct
  misc_feature 1..20: note = chemically synthesized
  source 1..20: mol_type = other DNA
taatcagttgccagcacagc

SEQ ID NO: 26938 - DNA, 20 bp, synthetic construct
  misc_feature 1..20: note = chemically synthesized
  source 1..20: mol_type = other DNA
aatcagttgccagcacagcc

SEQ ID NO: 26939 - DNA, 20 bp, synthetic construct
  misc_feature 1..20: note = chemically synthesized
  source 1..20: mol_type = other DNA
gccagcacagccaggatata

SEQ ID NO: 26940 - DNA, 20 bp, synthetic construct
  misc_feature 1..20: note = chemically synthesized
  source 1..20: mol_type = other DNA
agcacagccaggatataaag

SEQ ID NO: 26941 - DNA, 20 bp, synthetic construct
  misc_feature 1..20: note = chemically synthesized
  source 1..20: mol_type = other DNA
gcacagccaggatataaagc

SEQ ID NO: 26942 - DNA, 20 bp, synthetic construct
  misc_feature 1..20: note = chemically synthesized
  source 1..20: mol_type = other DNA
cagccaggatataaagcagg

SEQ ID NO: 26943 - DNA, 20 bp, synthetic construct
  misc_feature 1..20: note = chemically synthesized
  source 1..20: mol_type = other DNA
agcaggcagaaaaatgtgaa

SEQ ID NO: 26944 - DNA, 20 bp, synthetic construct
  misc_feature 1..20: note = chemically synthesized
  source 1..20: mol_type = other DNA
gcaggcagaaaaatgtgaaa

SEQ ID NO: 26945 - DNA, 20 bp, synthetic construct
  misc_feature 1..20: note = chemically synthesized
  source 1..20: mol_type = other DNA
gcagaaaaatgtgaaaaggc

SEQ ID NO: 26946 - DNA, 20 bp, synthetic construct
  misc_feature 1..20: note = chemically synthesized
  source 1..20: mol_type = other DNA
aaaatgtgaaaaggctagat

SEQ ID NO: 26947 - DNA, 20 bp, synthetic construct
  misc_feature 1..20: note = chemically synthesized
  source 1..20: mol_type = other DNA
gtgaaaaggctagattggct

SEQ ID NO: 26948 - DNA, 20 bp, synthetic construct
  misc_feature 1..20: note = chemically synthesized
  source 1..20: mol_type = other DNA
gctagattggcttggcatcc

SEQ ID NO: 26949 - DNA, 20 bp, synthetic construct
  misc_feature 1..20: note = chemically synthesized
  source 1..20: mol_type = other DNA
cctacatttttctcccatgc

SEQ ID NO: 26950 - DNA, 20 bp, synthetic construct
  misc_feature 1..20: note = chemically synthesized
  source 1..20: mol_type = other DNA
atgctggattcttcctgccc

SEQ ID NO: 26951 - DNA, 20 bp, synthetic construct
  misc_feature 1..20: note = chemically synthesized
  source 1..20: mol_type = other DNA
tgccctggaacattgaactc

SEQ ID NO: 26952 - DNA, 20 bp, synthetic construct
  misc_feature 1..20: note = chemically synthesized
  source 1..20: mol_type = other DNA
gccctggaacattgaactcc

SEQ ID NO: 26953 - DNA, 20 bp, synthetic construct
  misc_feature 1..20: note = chemically synthesized
  source 1..20: mol_type = other DNA
acattgaactccaggttctt

SEQ ID NO: 26954 - DNA, 20 bp, synthetic construct
  misc_feature 1..20: note = chemically synthesized
  source 1..20: mol_type = other DNA
aactccaggttcttcagctt

SEQ ID NO: 26955 - DNA, 20 bp, synthetic construct
  misc_feature 1..20: note = chemically synthesized
  source 1..20: mol_type = other DNA
actccaggttcttcagcttt

SEQ ID NO: 26956 - DNA, 20 bp, synthetic construct
  misc_feature 1..20: note = chemically synthesized
  source 1..20: mol_type = other DNA
ttcagctttgggactccgac

SEQ ID NO: 26957 - DNA, 20 bp, synthetic construct
  misc_feature 1..20: note = chemically synthesized
  source 1..20: mol_type = other DNA
cgactagcttccttgttcct

SEQ ID NO: 26958 - DNA, 20 bp, synthetic construct
  misc_feature 1..20: note = chemically synthesized
  source 1..20: mol_type = other DNA
tagcttccttgttcctcagc

SEQ ID NO: 26959 - DNA, 20 bp, synthetic construct
  misc_feature 1..20: note = chemically synthesized
  source 1..20: mol_type = other DNA
cttccttgttcctcagctgg

SEQ ID NO: 26960 - DNA, 20 bp, synthetic construct
  misc_feature 1..20: note = chemically synthesized
  source 1..20: mol_type = other DNA
cttgttcctcagctggcaga

SEQ ID NO: 26961 - DNA, 20 bp, synthetic construct
  misc_feature 1..20: note = chemically synthesized
  source 1..20: mol_type = other DNA
agctggcagatggcctgttt

SEQ ID NO: 26962 - DNA, 20 bp, synthetic construct
  misc_feature 1..20: note = chemically synthesized
  source 1..20: mol_type = other DNA
gctggcagatggcctgtttt

SEQ ID NO: 26963 - DNA, 20 bp, synthetic construct
  misc_feature 1..20: note = chemically synthesized
  source 1..20: mol_type = other DNA
ttgggaccttgtgaacatgt

SEQ ID NO: 26964 - DNA, 20 bp, synthetic construct
  misc_feature 1..20: note = chemically synthesized
  source 1..20: mol_type = other DNA
ctacataataaactctcata

SEQ ID NO: 26965 - DNA, 20 bp, synthetic construct
  misc_feature 1..20: note = chemically synthesized
  source 1..20: mol_type = other DNA
aataaactctcatatagata

SEQ ID NO: 26966 - DNA, 20 bp, synthetic construct
  misc_feature 1..20: note = chemically synthesized
  source 1..20: mol_type = other DNA
ctctcatatagatatagata

SEQ ID NO: 26967 - DNA, 20 bp, synthetic construct
  misc_feature 1..20: note = chemically synthesized
  source 1..20: mol_type = other DNA
ctcatatagatatagatata

SEQ ID NO: 26968 - DNA, 20 bp, synthetic construct
  misc_feature 1..20: note = chemically synthesized
  source 1..20: mol_type = other DNA
tatagatatagatatagaga

SEQ ID NO: 26969 - DNA, 20 bp, synthetic construct
  misc_feature 1..20: note = chemically synthesized
  source 1..20: mol_type = other DNA
tatagatatagagatagata

SEQ ID NO: 26970 - DNA, 20 bp, synthetic construct
  misc_feature 1..20: note = chemically synthesized
  source 1..20: mol_type = other DNA
tagatatagagatagatata

SEQ ID NO: 26971 - DNA, 20 bp, synthetic construct
  misc_feature 1..20: note = chemically synthesized
  source 1..20: mol_type = other DNA
tatagagatagatatagaga

SEQ ID NO: 26972 - DNA, 20 bp, synthetic construct
  misc_feature 1..20: note = chemically synthesized
  source 1..20: mol_type = other DNA
gatagatatagagatagata

SEQ ID NO: 26973 - DNA, 20 bp, synthetic construct
  misc_feature 1..20: note = chemically synthesized
  source 1..20: mol_type = other DNA
tatagagatagatatagata

SEQ ID NO: 26974 - DNA, 20 bp, synthetic construct
  misc_feature 1..20: note = chemically synthesized
  source 1..20: mol_type = other DNA
gatagatatagatatagata

SEQ ID NO: 26975 - DNA, 20 bp, synthetic construct
  misc_feature 1..20: note = chemically synthesized
  source 1..20: mol_type = other DNA
tatagatatagatatagata

SEQ ID NO: 26976 - DNA, 20 bp, synthetic construct
  misc_feature 1..20: note = chemically synthesized
  source 1..20: mol_type = other DNA
tatagatatagatatagata

SEQ ID NO: 26977 - DNA, 20 bp, synthetic construct
  misc_feature 1..20: note = chemically synthesized
  source 1..20: mol_type = other DNA
tatagatatagatatagata

SEQ ID NO: 26978 - DNA, 20 bp, synthetic construct
  misc_feature 1..20: note = chemically synthesized
  source 1..20: mol_type = other DNA
ctattaattctgtttctctg

SEQ ID NO: 26979 - DNA, 20 bp, synthetic construct
  misc_feature 1..20: note = chemically synthesized
  source 1..20: mol_type = other DNA
ttctctgtagaaccctaata

SEQ ID NO: 26980 - DNA, 20 bp, synthetic construct
  misc_feature 1..20: note = chemically synthesized
  source 1..20: mol_type = other DNA
tagaaccctaatacagattt

SEQ ID NO: 26981 - DNA, 20 bp, synthetic construct
  misc_feature 1..20: note = chemically synthesized
  source 1..20: mol_type = other DNA
cctaatacagattttggtac

SEQ ID NO: 26982 - DNA, 20 bp, synthetic construct
  misc_feature 1..20: note = chemically synthesized
  source 1..20: mol_type = other DNA
ctaatacagattttggtacc

SEQ ID NO: 26983 - DNA, 20 bp, synthetic construct
  misc_feature 1..20: note = chemically synthesized
  source 1..20: mol_type = other DNA
aatacagattttggtaccag

SEQ ID NO: 26984 - DNA, 20 bp, synthetic construct
  misc_feature 1..20: note = chemically synthesized
  source 1..20: mol_type = other DNA
acagattttggtaccaggag

SEQ ID NO: 26985 - DNA, 20 bp, synthetic construct
  misc_feature 1..20: note = chemically synthesized
  source 1..20: mol_type = other DNA
tttggtaccaggagtggttc

SEQ ID NO: 26986 - DNA, 20 bp, synthetic construct
  misc_feature 1..20: note = chemically synthesized
  source 1..20: mol_type = other DNA
tggtaccaggagtggttcta

SEQ ID NO: 26987 - DNA, 20 bp, synthetic construct
  misc_feature 1..20: note = chemically synthesized
  source 1..20: mol_type = other DNA
ggtaccaggagtggttctag

SEQ ID NO: 26988 - DNA, 20 bp, synthetic construct
  misc_feature 1..20: note = chemically synthesized
  source 1..20: mol_type = other DNA
caggagtggttctagaggaa

SEQ ID NO: 26989 - DNA, 20 bp, synthetic construct
  misc_feature 1..20: note = chemically synthesized
  source 1..20: mol_type = other DNA
ttctagaggaacagaatatt

SEQ ID NO: 26990 - DNA, 20 bp, synthetic construct
  misc_feature 1..20: note = chemically synthesized
  source 1..20: mol_type = other DNA
tctagaggaacagaatatta

SEQ ID NO: 26991 - DNA, 20 bp, synthetic construct
  misc_feature 1..20: note = chemically synthesized
  source 1..20: mol_type = other DNA
gaggaacagaatattaagga

SEQ ID NO: 26992 - DNA, 20 bp, synthetic construct
  misc_feature 1..20: note = chemically synthesized
  source 1..20: mol_type = other DNA
ggaacagaatattaaggatg

SEQ ID NO: 26993 - DNA, 20 bp, synthetic construct
  misc_feature 1..20: note = chemically synthesized
  source 1..20: mol_type = other DNA
taaggatggagttctttcat

SEQ ID NO: 26994 - DNA, 20 bp, synthetic construct
  misc_feature 1..20: note = chemically synthesized
  source 1..20: mol_type = other DNA
tggagttctttcattggttt

SEQ ID NO: 26995 - DNA, 20 bp, synthetic construct
  misc_feature 1..20: note = chemically synthesized
  source 1..20: mol_type = other DNA
ggagttctttcattggtttt

SEQ ID NO: 26996 - DNA, 20 bp, synthetic construct
  misc_feature 1..20: note = chemically synthesized
  source 1..20: mol_type = other DNA
gagttctttcattggttttg

SEQ ID NO: 26997 - DNA, 20 bp, synthetic construct
  misc_feature 1..20: note = chemically synthesized
  source 1..20: mol_type = other DNA
ttcattggttttggggtttc

SEQ ID NO: 26998 - DNA, 20 bp, synthetic construct
  misc_feature 1..20: note = chemically synthesized
  source 1..20: mol_type = other DNA
cattggttttggggtttctg

SEQ ID NO: 26999 - DNA, 20 bp, synthetic construct
  misc_feature 1..20: note = chemically synthesized
  source 1..20: mol_type = other DNA
ggttttggggtttctggagt

SEQ ID NO: 27000 - DNA, 20 bp, synthetic construct
  misc_feature 1..20: note = chemically synthesized
  source 1..20: mol_type = other DNA
agttggctgcttaatatgat

SEQ ID NO: 27001 - DNA, 20 bp, synthetic construct
  misc_feature 1..20: note = chemically synthesized
  source 1..20: mol_type = other DNA
tgattagacccaaatatgct

SEQ ID NO: 27002 - DNA, 20 bp, synthetic construct
  misc_feature 1..20: note = chemically synthesized
  source 1..20: mol_type = other DNA
gattagacccaaatatgcta

SEQ ID NO: 27003 - DNA, 20 bp, synthetic construct
  misc_feature 1..20: note = chemically synthesized
  source 1..20: mol_type = other DNA
gctaaggactcttcttctaa

SEQ ID NO: 27004 - DNA, 20 bp, synthetic construct
  misc_feature 1..20: note = chemically synthesized
  source 1..20: mol_type = other DNA
ggactcttcttctaatggta

SEQ ID NO: 27005 - DNA, 20 bp, synthetic construct
  misc_feature 1..20: note = chemically synthesized
  source 1..20: mol_type = other DNA
actcttcttctaatggtatg

SEQ ID NO: 27006 - DNA, 20 bp, synthetic construct
  misc_feature 1..20: note = chemically synthesized
  source 1..20: mol_type = other DNA
tggagaacactgataatcct

SEQ ID NO: 27007 - DNA, 20 bp, synthetic construct
  misc_feature 1..20: note = chemically synthesized
  source 1..20: mol_type = other DNA
aatccttggcatcaattgtt

SEQ ID NO: 27008 - DNA, 20 bp, synthetic construct
  misc_feature 1..20: note = chemically synthesized
  source 1..20: mol_type = other DNA
tccttggcatcaattgttta

SEQ ID NO: 27009 - DNA, 20 bp, synthetic construct
  misc_feature 1..20: note = chemically synthesized
  source 1..20: mol_type = other DNA
cttggcatcaattgtttaga

SEQ ID NO: 27010 - DNA, 20 bp, synthetic construct
  misc_feature 1..20: note = chemically synthesized
  source 1..20: mol_type = other DNA
actcttgattcaacgcttgt

SEQ ID NO: 27011 - DNA, 20 bp, synthetic construct
  misc_feature 1..20: note = chemically synthesized
  source 1..20: mol_type = other DNA
tcttgattcaacgcttgtga

SEQ ID NO: 27012 - DNA, 20 bp, synthetic construct
  misc_feature 1..20: note = chemically synthesized
  source 1..20: mol_type = other DNA
cttgattcaacgcttgtgag

SEQ ID NO: 27013 - DNA, 20 bp, synthetic construct
  misc_feature 1..20: note = chemically synthesized
  source 1..20: mol_type = other DNA
attcaacgcttgtgagaggc

SEQ ID NO: 27014 - DNA, 20 bp, synthetic construct
  misc_feature 1..20: note = chemically synthesized
  source 1..20: mol_type = other DNA
ttcaacgcttgtgagaggca

SEQ ID NO: 27015 - DNA, 20 bp, synthetic construct
  misc_feature 1..20: note = chemically synthesized
  source 1..20: mol_type = other DNA
cttgtgagaggcaaggaatt

SEQ ID NO: 27016 - DNA, 20 bp, synthetic construct
  misc_feature 1..20: note = chemically synthesized
  source 1..20: mol_type = other DNA
ataatacttttgactatatg

SEQ ID NO: 27017 - DNA, 20 bp, synthetic construct
  misc_feature 1..20: note = chemically synthesized
  source 1..20: mol_type = other DNA
aatacttttgactatatgtg

SEQ ID NO: 27018 - DNA, 20 bp, synthetic construct
  misc_feature 1..20: note = chemically synthesized
  source 1..20: mol_type = other DNA
ttgactatatgtggagaatc

SEQ ID NO: 27019 - DNA, 20 bp, synthetic construct
  misc_feature 1..20: note = chemically synthesized
  source 1..20: mol_type = other DNA
tgactatatgtggagaatca

SEQ ID NO: 27020 - DNA, 20 bp, synthetic construct
  misc_feature 1..20: note = chemically synthesized
  source 1..20: mol_type = other DNA
atgtggagaatcaaggaaca

SEQ ID NO: 27021 - DNA, 20 bp, synthetic construct
  misc_feature 1..20: note = chemically synthesized
  source 1..20: mol_type = other DNA
gagaatcaaggaacatagtg

SEQ ID NO: 27022 - DNA, 20 bp, synthetic construct
  misc_feature 1..20: note = chemically synthesized
  source 1..20: mol_type = other DNA
atcaaggaacatagtgaagt

SEQ ID NO: 27023 - DNA, 20 bp, synthetic construct
  misc_feature 1..20: note = chemically synthesized
  source 1..20: mol_type = other DNA
aggaacatagtgaagttggt

SEQ ID NO: 27024 - DNA, 20 bp, synthetic construct
  misc_feature 1..20: note = chemically synthesized
  source 1..20: mol_type = other DNA
gaagttggttggttgcttgt

SEQ ID NO: 27025 - DNA, 20 bp, synthetic construct
  misc_feature 1..20: note = chemically synthesized
  source 1..20: mol_type = other DNA
ttggttgcttgtaagttcgc

SEQ ID NO: 27026 - DNA, 20 bp, synthetic construct
  misc_feature 1..20: note = chemically synthesized
  source 1..20: mol_type = other DNA
gcttgtaagttcgctggaca

SEQ ID NO: 27027 - DNA, 20 bp, synthetic construct
  misc_feature 1..20: note = chemically synthesized
  source 1..20: mol_type = other DNA
ttcgctggacaaagtgatga

SEQ ID NO: 27028 - DNA, 20 bp, synthetic construct
  misc_feature 1..20: note = chemically synthesized
  source 1..20: mol_type = other DNA
atgaaagaaaatgatgaact

SEQ ID NO: 27029 - DNA, 20 bp, synthetic construct
  misc_feature 1..20: note = chemically synthesized
  source 1..20: mol_type = other DNA
tgaaagaaaatgatgaactc

SEQ ID NO: 27030 - DNA, 20 bp, synthetic construct
  misc_feature 1..20: note = chemically synthesized
  source 1..20: mol_type = other DNA
aaagaaaatgatgaactcag

SEQ ID NO: 27031 - DNA, 20 bp, synthetic construct
  misc_feature 1..20: note = chemically synthesized
  source 1..20: mol_type = other DNA
tcaggagtatatcaactctc

SEQ ID NO: 27032 - DNA, 20 bp, synthetic construct
  misc_feature 1..20: note = chemically synthesized
  source 1..20: mol_type = other DNA
ctttgtgccataatcttatt

SEQ ID NO: 27033 - DNA, 20 bp, synthetic construct
  misc_feature 1..20: note = chemically synthesized
  source 1..20: mol_type = other DNA
ttgtgccataatcttatttg

SEQ ID NO: 27034 - DNA, 20 bp, synthetic construct
  misc_feature 1..20: note = chemically synthesized
  source 1..20: mol_type = other DNA
gtgccataatcttatttgga

SEQ ID NO: 27035 - DNA, 20 bp, synthetic construct
  misc_feature 1..20: note = chemically synthesized
  source 1..20: mol_type = other DNA
tgctcacctttcacttccac

SEQ ID NO: 27036 - DNA, 20 bp, synthetic construct
  misc_feature 1..20: note = chemically synthesized
  source 1..20: mol_type = other DNA
ttcacttccacaagatatca

SEQ ID NO: 27037 - DNA, 20 bp, synthetic construct
  misc_feature 1..20: note = chemically synthesized
  source 1..20: mol_type = other DNA
acttccacaagatatcacag

SEQ ID NO: 27038 - DNA, 20 bp, synthetic construct
  misc_feature 1..20: note = chemically synthesized
  source 1..20: mol_type = other DNA
tacattgatgacatgctgac

SEQ ID NO: 27039 - DNA, 20 bp, synthetic construct
  misc_feature 1..20: note = chemically synthesized
  source 1..20: mol_type = other DNA
gatgacatgctgactggaac

SEQ ID NO: 27040 - DNA, 20 bp, synthetic construct
  misc_feature 1..20: note = chemically synthesized
  source 1..20: mol_type = other DNA
acatgctgactggaactagt

SEQ ID NO: 27041 - DNA, 20 bp, synthetic construct
  misc_feature 1..20: note = chemically synthesized
  source 1..20: mol_type = other DNA
gctgactggaactagtgagc

SEQ ID NO: 27042 - DNA, 20 bp, synthetic construct
  misc_feature 1..20: note = chemically synthesized
  source 1..20: mol_type = other DNA
gactggaactagtgagcaag

SEQ ID NO: 27043 - DNA, 20 bp, synthetic construct
  misc_feature 1..20: note = chemically synthesized
  source 1..20: mol_type = other DNA
tggaactagtgagcaagaag

SEQ ID NO: 27044 - DNA, 20 bp, synthetic construct
  misc_feature 1..20: note = chemically synthesized
  source 1..20: mol_type = other DNA
gcaagaagtagcaaacacac

SEQ ID NO: 27045 - DNA, 20 bp, synthetic construct
  misc_feature 1..20: note = chemically synthesized
  source 1..20: mol_type = other DNA
aacacactggatttattgat

SEQ ID NO: 27046 - DNA, 20 bp, synthetic construct
  misc_feature 1..20: note = chemically synthesized
  source 1..20: mol_type = other DNA
atttattgatgagacatttg

SEQ ID NO: 27047 - DNA, 20 bp, synthetic construct
  misc_feature 1..20: note = chemically synthesized
  source 1..20: mol_type = other DNA
tttattgatgagacatttgt

SEQ ID NO: 27048 - DNA, 20 bp, synthetic construct
  misc_feature 1..20: note = chemically synthesized
  source 1..20: mol_type = other DNA
ttgatgagacatttgtggga

SEQ ID NO: 27049 - DNA, 20 bp, synthetic construct
  misc_feature 1..20: note = chemically synthesized
  source 1..20: mol_type = other DNA
gatgagacatttgtgggaca

SEQ ID NO: 27050 - DNA, 20 bp, synthetic construct
  misc_feature 1..20: note = chemically synthesized
  source 1..20: mol_type = other DNA
atgagacatttgtgggacag

SEQ ID NO: 27051 - DNA, 20 bp, synthetic construct
  misc_feature 1..20: note = chemically synthesized
  source 1..20: mol_type = other DNA
gacatttgtgggacagagga

SEQ ID NO: 27052 - DNA, 20 bp, synthetic construct
  misc_feature 1..20: note = chemically synthesized
  source 1..20: mol_type = other DNA
acatttgtgggacagaggat

SEQ ID NO: 27053 - DNA, 20 bp, synthetic construct
  misc_feature 1..20: note = chemically synthesized
  source 1..20: mol_type = other DNA
gaaataaatctgattaaatt

SEQ ID NO: 27054 - DNA, 20 bp, synthetic construct
  misc_feature 1..20: note = chemically synthesized
  source 1..20: mol_type = other DNA
aaataaatctgattaaattc

SEQ ID NO: 27055 - DNA, 20 bp, synthetic construct
  misc_feature 1..20: note = chemically synthesized
  source 1..20: mol_type = other DNA
aataaatctgattaaattca

SEQ ID NO: 27056 - DNA, 20 bp, synthetic construct
  misc_feature 1..20: note = chemically synthesized
  source 1..20: mol_type = other DNA
aattcagggaccttctacct

SEQ ID NO: 27057 - DNA, 20 bp, synthetic construct
  misc_feature 1..20: note = chemically synthesized
  source 1..20: mol_type = other DNA
ttctacctcagtaaaattta

SEQ ID NO: 27058 - DNA, 20 bp, synthetic construct
  misc_feature 1..20: note = chemically synthesized
  source 1..20: mol_type = other DNA
tctacctcagtaaaatttat

SEQ ID NO: 27059 - DNA, 20 bp, synthetic construct
  misc_feature 1..20: note = chemically synthesized
  source 1..20: mol_type = other DNA
ctacctcagtaaaatttata

SEQ ID NO: 27060 - DNA, 20 bp, synthetic construct
  misc_feature 1..20: note = chemically synthesized
  source 1..20: mol_type = other DNA
tacctcagtaaaatttatag

SEQ ID NO: 27061 - DNA, 20 bp, synthetic construct
  misc_feature 1..20: note = chemically synthesized
  source 1..20: mol_type = other DNA
taaaatttataggggtccaa

SEQ ID NO: 27062 - DNA, 20 bp, synthetic construct
  misc_feature 1..20: note = chemically synthesized
  source 1..20: mol_type = other DNA
tttataggggtccaatggtt

SEQ ID NO: 27063 - DNA, 20 bp, synthetic construct
  misc_feature 1..20: note = chemically synthesized
  source 1..20: mol_type = other DNA
ttataggggtccaatggttt

SEQ ID NO: 27064 - DNA, 20 bp, synthetic construct
  misc_feature 1..20: note = chemically synthesized
  source 1..20: mol_type = other DNA
tataggggtccaatggtttg

SEQ ID NO: 27065 - DNA, 20 bp, synthetic construct
  misc_feature 1..20: note = chemically synthesized
  source 1..20: mol_type = other DNA
ccaatggtttggggctcttt

SEQ ID NO: 27066 - DNA, 20 bp, synthetic construct
  misc_feature 1..20: note = chemically synthesized
  source 1..20: mol_type = other DNA
tctttgagatattccttcta

SEQ ID NO: 27067 - DNA, 20 bp, synthetic construct
  misc_feature 1..20: note = chemically synthesized
  source 1..20: mol_type = other DNA
gagatattccttctaaagtg

SEQ ID NO: 27068 - DNA, 20 bp, synthetic construct
  misc_feature 1..20: note = chemically synthesized
  source 1..20: mol_type = other DNA
agatattccttctaaagtga

SEQ ID NO: 27069 - DNA, 20 bp, synthetic construct
  misc_feature 1..20: note = chemically synthesized
  source 1..20: mol_type = other DNA
gaaggataatttgctgcatt

SEQ ID NO: 27070 - DNA, 20 bp, synthetic construct
  misc_feature 1..20: note = chemically synthesized
  source 1..20: mol_type = other DNA
atttggccactcttacaacc

SEQ ID NO: 27071 - DNA, 20 bp, synthetic construct
  misc_feature 1..20: note = chemically synthesized
  source 1..20: mol_type = other DNA
ccactcttacaaccaagaaa

SEQ ID NO: 27072 - DNA, 20 bp, synthetic construct
  misc_feature 1..20: note = chemically synthesized
  source 1..20: mol_type = other DNA
cactcttacaaccaagaaat

SEQ ID NO: 27073 - DNA, 20 bp, synthetic construct
  misc_feature 1..20: note = chemically synthesized
  source 1..20: mol_type = other DNA
caagaaataggcacaacgcc

SEQ ID NO: 27074 - DNA, 20 bp, synthetic construct
  misc_feature 1..20: note = chemically synthesized
  source 1..20: mol_type = other DNA
gaaataggcacaacgcctag

SEQ ID NO: 27075 - DNA, 20 bp, synthetic construct
  misc_feature 1..20: note = chemically synthesized
  source 1..20: mol_type = other DNA
aaataggcacaacgcctagt

SEQ ID NO: 27076 - DNA, 20 bp, synthetic construct
  misc_feature 1..20: note = chemically synthesized
  source 1..20: mol_type = other DNA
caacgcctagtgggcctatt

SEQ ID NO: 27077 - DNA, 20 bp, synthetic construct
  misc_feature 1..20: note = chemically synthesized
  source 1..20: mol_type = other DNA
tagtgggcctatttggattt

SEQ ID NO: 27078 - DNA, 20 bp, synthetic construct
  misc_feature 1..20: note = chemically synthesized
  source 1..20: mol_type = other DNA
gtgggcctatttggattttg

SEQ ID NO: 27079 - DNA, 20 bp, synthetic construct
  misc_feature 1..20: note = chemically synthesized
  source 1..20: mol_type = other DNA
tgggcctatttggattttgg

SEQ ID NO: 27080 - DNA, 20 bp, synthetic construct
  misc_feature 1..20: note = chemically synthesized
  source 1..20: mol_type = other DNA
gaggcaacatattcctgatt

SEQ ID NO: 27081 - DNA, 20 bp, synthetic construct
  misc_feature 1..20: note = chemically synthesized
  source 1..20: mol_type = other DNA
aggcaacatattcctgattt

SEQ ID NO: 27082 - DNA, 20 bp, synthetic construct
  misc_feature 1..20: note = chemically synthesized
  source 1..20: mol_type = other DNA
ctgatttgggtgtgttactc

SEQ ID NO: 27083 - DNA, 20 bp, synthetic construct
  misc_feature 1..20: note = chemically synthesized
  source 1..20: mol_type = other DNA
gttactctggcccatttatc

SEQ ID NO: 27084 - DNA, 20 bp, synthetic construct
  misc_feature 1..20: note = chemically synthesized
  source 1..20: mol_type = other DNA
ccatttatcgagtgatccaa

SEQ ID NO: 27085 - DNA, 20 bp, synthetic construct
  misc_feature 1..20: note = chemically synthesized
  source 1..20: mol_type = other DNA
catttatcgagtgatccaaa

SEQ ID NO: 27086 - DNA, 20 bp, synthetic construct
  misc_feature 1..20: note = chemically synthesized
  source 1..20: mol_type = other DNA
cgagtgatccaaaaggctgc

SEQ ID NO: 27087 - DNA, 20 bp, synthetic construct
  misc_feature 1..20: note = chemically synthesized
  source 1..20: mol_type = other DNA
tccaaaaggctgccagtttt

SEQ ID NO: 27088 - DNA, 20 bp, synthetic construct
  misc_feature 1..20: note = chemically synthesized
  source 1..20: mol_type = other DNA
aaaaggctgccagttttgag

SEQ ID NO: 27089 - DNA, 20 bp, synthetic construct
  misc_feature 1..20: note = chemically synthesized
  source 1..20: mol_type = other DNA
aaggctgccagttttgagtg

SEQ ID NO: 27090 - DNA, 20 bp, synthetic construct
  misc_feature 1..20: note = chemically synthesized
  source 1..20: mol_type = other DNA
tgccagttttgagtggagtc

SEQ ID NO: 27091 - DNA, 20 bp, synthetic construct
  misc_feature 1..20: note = chemically synthesized
  source 1..20: mol_type = other DNA
gttttgagtggagtccagaa

SEQ ID NO: 27092 - DNA, 20 bp, synthetic construct
  misc_feature 1..20: note = chemically synthesized
  source 1..20: mol_type = other DNA
ttgagtggagtccagaacag

SEQ ID NO: 27093 - DNA, 20 bp, synthetic construct
  misc_feature 1..20: note = chemically synthesized
  source 1..20: mol_type = other DNA
tgagtggagtccagaacaga

SEQ ID NO: 27094 - DNA, 20 bp, synthetic construct
  misc_feature 1..20: note = chemically synthesized
  source 1..20: mol_type = other DNA
cagaacagaaggctctgcca

SEQ ID NO: 27095 - DNA, 20 bp, synthetic construct
  misc_feature 1..20: note = chemically synthesized
  source 1..20: mol_type = other DNA
agaacagaaggctctgccac

SEQ ID NO: 27096 - DNA, 20 bp, synthetic construct
  misc_feature 1..20: note = chemically synthesized
  source 1..20: mol_type = other DNA
agaaggctctgccacaggtc

SEQ ID NO: 27097 - DNA, 20 bp, synthetic construct
  misc_feature 1..20: note = chemically synthesized
  source 1..20: mol_type = other DNA
gaaggctctgccacaggtcc

SEQ ID NO: 27098 - DNA, 20 bp, synthetic construct
  misc_feature 1..20: note = chemically synthesized
  source 1..20: mol_type = other DNA
acaggtccaggctgctgtgc

SEQ ID NO: 27099 - DNA, 20 bp, synthetic construct
  misc_feature 1..20: note = chemically synthesized
  source 1..20: mol_type = other DNA
gtgcaagctgctatgccact

SEQ ID NO: 27100 - DNA, 20 bp, synthetic construct
  misc_feature 1..20: note = chemically synthesized
  source 1..20: mol_type = other DNA
tgcaagctgctatgccactt

SEQ ID NO: 27101 - DNA, 20 bp, synthetic construct
  misc_feature 1..20: note = chemically synthesized
  source 1..20: mol_type = other DNA
gccacttgggccatatgacc

SEQ ID NO: 27102 - DNA, 20 bp, synthetic construct
  misc_feature 1..20: note = chemically synthesized
  source 1..20: mol_type = other DNA
acttgggccatatgacctag

SEQ ID NO: 27103 - DNA, 20 bp, synthetic construct
  misc_feature 1..20: note = chemically synthesized
  source 1..20: mol_type = other DNA
tagcagatccaatgatgctt

SEQ ID NO: 27104 - DNA, 20 bp, synthetic construct
  misc_feature 1..20: note = chemically synthesized
  source 1..20: mol_type = other DNA
agcagatccaatgatgcttg

SEQ ID NO: 27105 - DNA, 20 bp, synthetic construct
  misc_feature 1..20: note = chemically synthesized
  source 1..20: mol_type = other DNA
tccaatgatgcttgaggtgt

SEQ ID NO: 27106 - DNA, 20 bp, synthetic construct
  misc_feature 1..20: note = chemically synthesized
  source 1..20: mol_type = other DNA
gatgcttgaggtgtcagtgc

SEQ ID NO: 27107 - DNA, 20 bp, synthetic construct
  misc_feature 1..20: note = chemically synthesized
  source 1..20: mol_type = other DNA
cttgaggtgtcagtgccaga

SEQ ID NO: 27108 - DNA, 20 bp, synthetic construct
  misc_feature 1..20: note = chemically synthesized
  source 1..20: mol_type = other DNA
ttgaggtgtcagtgccagat

SEQ ID NO: 27109 - DNA, 20 bp, synthetic construct
  misc_feature 1..20: note = chemically synthesized
  source 1..20: mol_type = other DNA
tgaggtgtcagtgccagata

SEQ ID NO: 27110 - DNA, 20 bp, synthetic construct
  misc_feature 1..20: note = chemically synthesized
  source 1..20: mol_type = other DNA
tgccagatagggatgctgtt

SEQ ID NO: 27111 - DNA, 20 bp, synthetic construct
  misc_feature 1..20: note = chemically synthesized
  source 1..20: mol_type = other DNA
ccagatagggatgctgtttg

SEQ ID NO: 27112 - DNA, 20 bp, synthetic construct
  misc_feature 1..20: note = chemically synthesized
  source 1..20: mol_type = other DNA
gggatgctgtttggagcatt

SEQ ID NO: 27113 - DNA, 20 bp, synthetic construct
  misc_feature 1..20: note = chemically synthesized
  source 1..20: mol_type = other DNA
atgctgtttggagcatttgg

SEQ ID NO: 27114 - DNA, 20 bp, synthetic construct
  misc_feature 1..20: note = chemically synthesized
  source 1..20: mol_type = other DNA
tgctgtttggagcatttggc

SEQ ID NO: 27115 - DNA, 20 bp, synthetic construct
  misc_feature 1..20: note = chemically synthesized
  source 1..20: mol_type = other DNA
gcatttggcaggctgaatca

SEQ ID NO: 27116 - DNA, 20 bp, synthetic construct
  misc_feature 1..20: note = chemically synthesized
  source 1..20: mol_type = other DNA
tttggcaggctgaatcacag

SEQ ID NO: 27117 - DNA, 20 bp, synthetic construct
  misc_feature 1..20: note = chemically synthesized
  source 1..20: mol_type = other DNA
tggcaggctgaatcacagcg

SEQ ID NO: 27118 - DNA, 20 bp, synthetic construct
  misc_feature 1..20: note = chemically synthesized
  source 1..20: mol_type = other DNA
ggcaggctgaatcacagcgg

SEQ ID NO: 27119 - DNA, 20 bp, synthetic construct
  misc_feature 1..20: note = chemically synthesized
  source 1..20: mol_type = other DNA
tgaatcacagcggaggcctc

SEQ ID NO: 27120 - DNA, 20 bp, synthetic construct
  misc_feature 1..20: note = chemically synthesized
  source 1..20: mol_type = other DNA
gaatcacagcggaggcctct

SEQ ID NO: 27121 - DNA, 20 bp, synthetic construct
  misc_feature 1..20: note = chemically synthesized
  source 1..20: mol_type = other DNA
agcggaggcctctaggattt

SEQ ID NO: 27122 - DNA, 20 bp, synthetic construct
  misc_feature 1..20: note = chemically synthesized
  source 1..20: mol_type = other DNA
cggaggcctctaggattttg

SEQ ID NO: 27123 - DNA, 20 bp, synthetic construct
  misc_feature 1..20: note = chemically synthesized
  source 1..20: mol_type = other DNA
ggcctctaggattttggagc

SEQ ID NO: 27124 - DNA, 20 bp, synthetic construct
  misc_feature 1..20: note = chemically synthesized
  source 1..20: mol_type = other DNA
gcctctaggattttggagca

SEQ ID NO: 27125 - DNA, 20 bp, synthetic construct
  misc_feature 1..20: note = chemically synthesized
  source 1..20: mol_type = other DNA
caaggccctgccatcttctg

SEQ ID NO: 27126 - DNA, 20 bp, synthetic construct
  misc_feature 1..20: note = chemically synthesized
  source 1..20: mol_type = other DNA
tgcagataactactctcttt

SEQ ID NO: 27127 - DNA, 20 bp, synthetic construct
  misc_feature 1..20: note = chemically synthesized
  source 1..20: mol_type = other DNA
gcagataactactctctttt

SEQ ID NO: 27128 - DNA, 20 bp, synthetic construct
  misc_feature 1..20: note = chemically synthesized
  source 1..20: mol_type = other DNA
cagataactactctctttta

SEQ ID NO: 27129 - DNA, 20 bp, synthetic construct
  misc_feature 1..20: note = chemically synthesized
  source 1..20: mol_type = other DNA
gataactactctcttttagg

SEQ ID NO: 27130 - DNA, 20 bp, synthetic construct
  misc_feature 1..20: note = chemically synthesized
  source 1..20: mol_type = other DNA
actactctcttttagggaga

SEQ ID NO: 27131 - DNA, 20 bp, synthetic construct
  misc_feature 1..20: note = chemically synthesized
  source 1..20: mol_type = other DNA
tcttttagggagaaagctct

SEQ ID NO: 27132 - DNA, 20 bp, synthetic construct
  misc_feature 1..20: note = chemically synthesized
  source 1..20: mol_type = other DNA
gaaagctcttggcctgttac

SEQ ID NO: 27133 - DNA, 20 bp, synthetic construct
  misc_feature 1..20: note = chemically synthesized
  source 1..20: mol_type = other DNA
aaagctcttggcctgttact

SEQ ID NO: 27134 - DNA, 20 bp, synthetic construct
  misc_feature 1..20: note = chemically synthesized
  source 1..20: mol_type = other DNA
cttggcctgttactgggctt

SEQ ID NO: 27135 - DNA, 20 bp, synthetic construct
  misc_feature 1..20: note = chemically synthesized
  source 1..20: mol_type = other DNA
ggcctgttactgggctttgg

SEQ ID NO: 27136 - DNA, 20 bp, synthetic construct
  misc_feature 1..20: note = chemically synthesized
  source 1..20: mol_type = other DNA
gaaacgaaatatttgactat

SEQ ID NO: 27137 - DNA, 20 bp, synthetic construct
  misc_feature 1..20: note = chemically synthesized
  source 1..20: mol_type = other DNA
atatttgactatgagtcatc

SEQ ID NO: 27138 - DNA, 20 bp, synthetic construct
  misc_feature 1..20: note = chemically synthesized
  source 1..20: mol_type = other DNA
ctgaactgcctatcatgaac

SEQ ID NO: 27139 - DNA, 20 bp, synthetic construct
  misc_feature 1..20: note = chemically synthesized
  source 1..20: mol_type = other DNA
tgaactgcctatcatgaact

SEQ ID NO: 27140 - DNA, 20 bp, synthetic construct
  misc_feature 1..20: note = chemically synthesized
  source 1..20: mol_type = other DNA
tgggtgctttctgatccatc

SEQ ID NO: 27141 - DNA, 20 bp, synthetic construct
  misc_feature 1..20: note = chemically synthesized
  source 1..20: mol_type = other DNA
ttctgatccatctagccata

SEQ ID NO: 27142 - DNA, 20 bp, synthetic construct
  misc_feature 1..20: note = chemically synthesized
  source 1..20: mol_type = other DNA
tgatccatctagccataaag

SEQ ID NO: 27143 - DNA, 20 bp, synthetic construct
  misc_feature 1..20: note = chemically synthesized
  source 1..20: mol_type = other DNA
gatccatctagccataaagt

SEQ ID NO: 27144 - DNA, 20 bp, synthetic construct
  misc_feature 1..20: note = chemically synthesized
  source 1..20: mol_type = other DNA
gccataaagtgggctgtgca

SEQ ID NO: 27145 - DNA, 20 bp, synthetic construct
  misc_feature 1..20: note = chemically synthesized
  source 1..20: mol_type = other DNA
ataaagtgggctgtgcacag

SEQ ID NO: 27146 - DNA, 20 bp, synthetic construct
  misc_feature 1..20: note = chemically synthesized
  source 1..20: mol_type = other DNA
tgtgcacagcagcattgcat

SEQ ID NO: 27147 - DNA, 20 bp, synthetic construct
  misc_feature 1..20: note = chemically synthesized
  source 1..20: mol_type = other DNA
agcagcattgcatcagcaaa

SEQ ID NO: 27148 - DNA, 20 bp, synthetic construct
  misc_feature 1..20: note = chemically synthesized
  source 1..20: mol_type = other DNA
agcattgcatcagcaaatgg

SEQ ID NO: 27149 - DNA, 20 bp, synthetic construct
  misc_feature 1..20: note = chemically synthesized
  source 1..20: mol_type = other DNA
attgcatcagcaaatggaag

SEQ ID NO: 27150 - DNA, 20 bp, synthetic construct
  misc_feature 1..20: note = chemically synthesized
  source 1..20: mol_type = other DNA
ggaagtggtatatatgcgat

SEQ ID NO: 27151 - DNA, 20 bp, synthetic construct
  misc_feature 1..20: note = chemically synthesized
  source 1..20: mol_type = other DNA
gaagtggtatatatgcgatt

SEQ ID NO: 27152 - DNA, 20 bp, synthetic construct
  misc_feature 1..20: note = chemically synthesized
  source 1..20: mol_type = other DNA
gtatatatgcgattgggctt

SEQ ID NO: 27153 - DNA, 20 bp, synthetic construct
  misc_feature 1..20: note = chemically synthesized
  source 1..20: mol_type = other DNA
tatatgcgattgggcttgag

SEQ ID NO: 27154 - DNA, 20 bp, synthetic construct
  misc_feature 1..20: note = chemically synthesized
  source 1..20: mol_type = other DNA
ttgggcttgagcagatcctg

SEQ ID NO: 27155 - DNA, 20 bp, synthetic construct
  misc_feature 1..20: note = chemically synthesized
  source 1..20: mol_type = other DNA
tgggcttgagcagatcctga

SEQ ID NO: 27156 - DNA, 20 bp, synthetic construct
  misc_feature 1..20: note = chemically synthesized
  source 1..20: mol_type = other DNA
tgagcagatcctgaaggcac

SEQ ID NO: 27157 - DNA, 20 bp, synthetic construct
  misc_feature 1..20: note = chemically synthesized
  source 1..20: mol_type = other DNA
cagatcctgaaggcactagt

SEQ ID NO: 27158 - DNA, 20 bp, synthetic construct
  misc_feature 1..20: note = chemically synthesized
  source 1..20: mol_type = other DNA
aaggcactagtaagttacat

SEQ ID NO: 27159 - DNA, 20 bp, synthetic construct
  misc_feature 1..20: note = chemically synthesized
  source 1..20: mol_type = other DNA
cactagtaagttacatgaga

SEQ ID NO: 27160 - DNA, 20 bp, synthetic construct
  misc_feature 1..20: note = chemically synthesized
  source 1..20: mol_type = other DNA
actagtaagttacatgagaa

SEQ ID NO: 27161 - DNA, 20 bp, synthetic construct
  misc_feature 1..20: note = chemically synthesized
  source 1..20: mol_type = other DNA
ctagtaagttacatgagaaa

SEQ ID NO: 27162 - DNA, 20 bp, synthetic construct
  misc_feature 1..20: note = chemically synthesized
  source 1..20: mol_type = other DNA
tagtaagttacatgagaaag

SEQ ID NO: 27163 - DNA, 20 bp, synthetic construct
  misc_feature 1..20: note = chemically synthesized
  source 1..20: mol_type = other DNA
gaaaggggctcaaatgccca

SEQ ID NO: 27164 - DNA, 20 bp, synthetic construct
  misc_feature 1..20: note = chemically synthesized
  source 1..20: mol_type = other DNA
acacactgctttctctccct

SEQ ID NO: 27165 - DNA, 20 bp, synthetic construct
  misc_feature 1..20: note = chemically synthesized
  source 1..20: mol_type = other DNA
tctccctgagactgcaccga

SEQ ID NO: 27166 - DNA, 20 bp, synthetic construct
  misc_feature 1..20: note = chemically synthesized
  source 1..20: mol_type = other DNA
agactgcaccgatggtctca

SEQ ID NO: 27167 - DNA, 20 bp, synthetic construct
  misc_feature 1..20: note = chemically synthesized
  source 1..20: mol_type = other DNA
gactgcaccgatggtctcat

SEQ ID NO: 27168 - DNA, 20 bp, synthetic construct
  misc_feature 1..20: note = chemically synthesized
  source 1..20: mol_type = other DNA
actgcaccgatggtctcatg

SEQ ID NO: 27169 - DNA, 20 bp, synthetic construct
  misc_feature 1..20: note = chemically synthesized
  source 1..20: mol_type = other DNA
tgcaccgatggtctcatggg

SEQ ID NO: 27170 - DNA, 20 bp, synthetic construct
  misc_feature 1..20: note = chemically synthesized
  source 1..20: mol_type = other DNA
catggggagttccctatgat

SEQ ID NO: 27171 - DNA, 20 bp, synthetic construct
  misc_feature 1..20: note = chemically synthesized
  source 1..20: mol_type = other DNA
agttccctatgatcagctga

SEQ ID NO: 27172 - DNA, 20 bp, synthetic construct
  misc_feature 1..20: note = chemically synthesized
  source 1..20: mol_type = other DNA
ttccctatgatcagctgaca

SEQ ID NO: 27173 - DNA, 20 bp, synthetic construct
  misc_feature 1..20: note = chemically synthesized
  source 1..20: mol_type = other DNA
tccctatgatcagctgacag

SEQ ID NO: 27174 - DNA, 20 bp, synthetic construct
  misc_feature 1..20: note = chemically synthesized
  source 1..20: mol_type = other DNA
ctatgatcagctgacagagg

SEQ ID NO: 27175 - DNA, 20 bp, synthetic construct
  misc_feature 1..20: note = chemically synthesized
  source 1..20: mol_type = other DNA
atgatcagctgacagaggaa

SEQ ID NO: 27176 - DNA, 20 bp, synthetic construct
  misc_feature 1..20: note = chemically synthesized
  source 1..20: mol_type = other DNA
atcagctgacagaggaagag

SEQ ID NO: 27177 - DNA, 20 bp, synthetic construct
  misc_feature 1..20: note = chemically synthesized
  source 1..20: mol_type = other DNA
ctgacagaggaagagaagac

SEQ ID NO: 27178 - DNA, 20 bp, synthetic construct
  misc_feature 1..20: note = chemically synthesized
  source 1..20: mol_type = other DNA
tgacagaggaagagaagact

SEQ ID NO: 27179 - DNA, 20 bp, synthetic construct
  misc_feature 1..20: note = chemically synthesized
  source 1..20: mol_type = other DNA
aggaagagaagactaggtcc

SEQ ID NO: 27180 - DNA, 20 bp, synthetic construct
  misc_feature 1..20: note = chemically synthesized
  source 1..20: mol_type = other DNA
gaagactaggtcctggttca

SEQ ID NO: 27181 - DNA, 20 bp, synthetic construct
  misc_feature 1..20: note = chemically synthesized
  source 1..20: mol_type = other DNA
actaggtcctggttcacaga

SEQ ID NO: 27182 - DNA, 20 bp, synthetic construct
  misc_feature 1..20: note = chemically synthesized
  source 1..20: mol_type = other DNA
agatagttctgcacgatatg

SEQ ID NO: 27183 - DNA, 20 bp, synthetic construct
  misc_feature 1..20: note = chemically synthesized
  source 1..20: mol_type = other DNA
gatagttctgcacgatatgc

SEQ ID NO: 27184 - DNA, 20 bp, synthetic construct
  misc_feature 1..20: note = chemically synthesized
  source 1..20: mol_type = other DNA
gatatgcaggcaccacccaa

SEQ ID NO: 27185 - DNA, 20 bp, synthetic construct
  misc_feature 1..20: note = chemically synthesized
  source 1..20: mol_type = other DNA
atgcaggcaccacccaaaag

SEQ ID NO: 27186 - DNA, 20 bp, synthetic construct
  misc_feature 1..20: note = chemically synthesized
  source 1..20: mol_type = other DNA
aggcaccacccaaaagtgga

SEQ ID NO: 27187 - DNA, 20 bp, synthetic construct
  misc_feature 1..20: note = chemically synthesized
  source 1..20: mol_type = other DNA
cacccaaaagtggacagccg

SEQ ID NO: 27188 - DNA, 20 bp, synthetic construct
  misc_feature 1..20: note = chemically synthesized
  source 1..20: mol_type = other DNA
agtggacagccgcagcacta

SEQ ID NO: 27189 - DNA, 20 bp, synthetic construct
  misc_feature 1..20: note = chemically synthesized
  source 1..20: mol_type = other DNA
gcagcactacagcccctttc

SEQ ID NO: 27190 - DNA, 20 bp, synthetic construct
  misc_feature 1..20: note = chemically synthesized
  source 1..20: mol_type = other DNA
cagcactacagcccctttct

SEQ ID NO: 27191 - DNA, 20 bp, synthetic construct
  misc_feature 1..20: note = chemically synthesized
  source 1..20: mol_type = other DNA
ccctttctaggacatccctg

SEQ ID NO: 27192 - DNA, 20 bp, synthetic construct
  misc_feature 1..20: note = chemically synthesized
  source 1..20: mol_type = other DNA
cctttctaggacatccctga

SEQ ID NO: 27193 - DNA, 20 bp, synthetic construct
  misc_feature 1..20: note = chemically synthesized
  source 1..20: mol_type = other DNA
aggacatccctgaaggacaa

SEQ ID NO: 27194 - DNA, 20 bp, synthetic construct
  misc_feature 1..20: note = chemically synthesized
  source 1..20: mol_type = other DNA
atccctgaaggacaacggtg

SEQ ID NO: 27195 - DNA, 20 bp, synthetic construct
  misc_feature 1..20: note = chemically synthesized
  source 1..20: mol_type = other DNA
tccctgaaggacaacggtga

SEQ ID NO: 27196 - DNA, 20 bp, synthetic construct
  misc_feature 1..20: note = chemically synthesized
  source 1..20: mol_type = other DNA
ccctgaaggacaacggtgaa

SEQ ID NO: 27197 - DNA, 20 bp, synthetic construct
  misc_feature 1..20: note = chemically synthesized
  source 1..20: mol_type = other DNA
acggtgaagggaaatcttcc

SEQ ID NO: 27198 - DNA, 20 bp, synthetic construct
  misc_feature 1..20: note = chemically synthesized
  source 1..20: mol_type = other DNA
tgaagggaaatcttcctagt

SEQ ID NO: 27199 - DNA, 20 bp, synthetic construct
  misc_feature 1..20: note = chemically synthesized
  source 1..20: mol_type = other DNA
agggaaatcttcctagttgg

SEQ ID NO: 27200 - DNA, 20 bp, synthetic construct
  misc_feature 1..20: note = chemically synthesized
  source 1..20: mol_type = other DNA
ttcctagttggcagaacttt

SEQ ID NO: 27201 - DNA, 20 bp, synthetic construct
  misc_feature 1..20: note = chemically synthesized
  source 1..20: mol_type = other DNA
ctagttggcagaactttgag

SEQ ID NO: 27202 - DNA, 20 bp, synthetic construct
  misc_feature 1..20: note = chemically synthesized
  source 1..20: mol_type = other DNA
agaactttgagcagtgtgcc

SEQ ID NO: 27203 - DNA, 20 bp, synthetic construct
  misc_feature 1..20: note = chemically synthesized
  source 1..20: mol_type = other DNA
gcctggttgtgcactttgca

SEQ ID NO: 27204 - DNA, 20 bp, synthetic construct
  misc_feature 1..20: note = chemically synthesized
  source 1..20: mol_type = other DNA
tggttgtgcactttgcacag

SEQ ID NO: 27205 - DNA, 20 bp, synthetic construct
  misc_feature 1..20: note = chemically synthesized
  source 1..20: mol_type = other DNA
ggttgtgcactttgcacaga

SEQ ID NO: 27206 - DNA, 20 bp, synthetic construct
  misc_feature 1..20: note = chemically synthesized
  source 1..20: mol_type = other DNA
ttgtgcactttgcacagaag

SEQ ID NO: 27207 - DNA, 20 bp, synthetic construct
  misc_feature 1..20: note = chemically synthesized
  source 1..20: mol_type = other DNA
actttgcacagaaggagaaa

SEQ ID NO: 27208 - DNA, 20 bp, synthetic construct
  misc_feature 1..20: note = chemically synthesized
  source 1..20: mol_type = other DNA
tgcacagaaggagaaatggc

SEQ ID NO: 27209 - DNA, 20 bp, synthetic construct
  misc_feature 1..20: note = chemically synthesized
  source 1..20: mol_type = other DNA
tgcgattatatacttattca

SEQ ID NO: 27210 - DNA, 20 bp, synthetic construct
  misc_feature 1..20: note = chemically synthesized
  source 1..20: mol_type = other DNA
gcgattatatacttattcat

SEQ ID NO: 27211 - DNA, 20 bp, synthetic construct
  misc_feature 1..20: note = chemically synthesized
  source 1..20: mol_type = other DNA
atatacttattcatgggctg

SEQ ID NO: 27212 - DNA, 20 bp, synthetic construct
  misc_feature 1..20: note = chemically synthesized
  source 1..20: mol_type = other DNA
ttattcatgggctgtagcca

SEQ ID NO: 27213 - DNA, 20 bp, synthetic construct
  misc_feature 1..20: note = chemically synthesized
  source 1..20: mol_type = other DNA
tattcatgggctgtagccaa

SEQ ID NO: 27214 - DNA, 20 bp, synthetic construct
  misc_feature 1..20: note = chemically synthesized
  source 1..20: mol_type = other DNA
atgggctgtagccaaaggtt

SEQ ID NO: 27215 - DNA, 20 bp, synthetic construct
  misc_feature 1..20: note = chemically synthesized
  source 1..20: mol_type = other DNA
gctgtagccaaaggtttggc

SEQ ID NO: 27216 - DNA, 20 bp, synthetic construct
  misc_feature 1..20: note = chemically synthesized
  source 1..20: mol_type = other DNA
tagccaaaggtttggctaga

SEQ ID NO: 27217 - DNA, 20 bp, synthetic construct
  misc_feature 1..20: note = chemically synthesized
  source 1..20: mol_type = other DNA
caaaggtttggctagatggt

SEQ ID NO: 27218 - DNA, 20 bp, synthetic construct
  misc_feature 1..20: note = chemically synthesized
  source 1..20: mol_type = other DNA
aaaggtttggctagatggtc

SEQ ID NO: 27219 - DNA, 20 bp, synthetic construct
  misc_feature 1..20: note = chemically synthesized
  source 1..20: mol_type = other DNA
aaggtttggctagatggtca

SEQ ID NO: 27220 - DNA, 20 bp, synthetic construct
  misc_feature 1..20: note = chemically synthesized
  source 1..20: mol_type = other DNA
tggctagatggtcagggact

SEQ ID NO: 27221 - DNA, 20 bp, synthetic construct
  misc_feature 1..20: note = chemically synthesized
  source 1..20: mol_type = other DNA
gatggtcagggacttggaaa

SEQ ID NO: 27222 - DNA, 20 bp, synthetic construct
  misc_feature 1..20: note = chemically synthesized
  source 1..20: mol_type = other DNA
ggacttggaaaaagcatgac

SEQ ID NO: 27223 - DNA, 20 bp, synthetic construct
  misc_feature 1..20: note = chemically synthesized
  source 1..20: mol_type = other DNA
tgactggaaaattgatgaca

SEQ ID NO: 27224 - DNA, 20 bp, synthetic construct
  misc_feature 1..20: note = chemically synthesized
  source 1..20: mol_type = other DNA
aaattgatgacaaagaaatt

SEQ ID NO: 27225 - DNA, 20 bp, synthetic construct
  misc_feature 1..20: note = chemically synthesized
  source 1..20: mol_type = other DNA
aattgatgacaaagaaattt

SEQ ID NO: 27226 - DNA, 20 bp, synthetic construct
  misc_feature 1..20: note = chemically synthesized
  source 1..20: mol_type = other DNA
attgatgacaaagaaatttg

SEQ ID NO: 27227 - DNA, 20 bp, synthetic construct
  misc_feature 1..20: note = chemically synthesized
  source 1..20: mol_type = other DNA
gatgacaaagaaatttgggg

SEQ ID NO: 27228 - DNA, 20 bp, synthetic construct
  misc_feature 1..20: note = chemically synthesized
  source 1..20: mol_type = other DNA
tgacaaagaaatttggggaa

SEQ ID NO: 27229 - DNA, 20 bp, synthetic construct
  misc_feature 1..20: note = chemically synthesized
  source 1..20: mol_type = other DNA
gacaaagaaatttggggaag

SEQ ID NO: 27230 - DNA, 20 bp, synthetic construct
  misc_feature 1..20: note = chemically synthesized
  source 1..20: mol_type = other DNA
aaatttggggaagaggtatg

SEQ ID NO: 27231 - DNA, 20 bp, synthetic construct
  misc_feature 1..20: note = chemically synthesized
  source 1..20: mol_type = other DNA
ttggggaagaggtatgtgga

SEQ ID NO: 27232 - DNA, 20 bp, synthetic construct
  misc_feature 1..20: note = chemically synthesized
  source 1..20: mol_type = other DNA
tgtggatggacctctatgat

SEQ ID NO: 27233 - DNA, 20 bp, synthetic construct
  misc_feature 1..20: note = chemically synthesized
  source 1..20: mol_type = other DNA
atgattagtcaaaaactaca

SEQ ID NO: 27234 - DNA, 20 bp, synthetic construct
  misc_feature 1..20: note = chemically synthesized
  source 1..20: mol_type = other DNA
aagatattttcatcccatgt

SEQ ID NO: 27235 - DNA, 20 bp, synthetic construct
  misc_feature 1..20: note = chemically synthesized
  source 1..20: mol_type = other DNA
cccatgtgagtgctcaccaa

SEQ ID NO: 27236 - DNA, 20 bp, synthetic construct
  misc_feature 1..20: note = chemically synthesized
  source 1..20: mol_type = other DNA
ccatgtgagtgctcaccaat

SEQ ID NO: 27237 - DNA, 20 bp, synthetic construct
  misc_feature 1..20: note = chemically synthesized
  source 1..20: mol_type = other DNA
tgctcaccaatgggtgacct

SEQ ID NO: 27238 - DNA, 20 bp, synthetic construct
  misc_feature 1..20: note = chemically synthesized
  source 1..20: mol_type = other DNA
tcaccaatgggtgacctcag

SEQ ID NO: 27239 - DNA, 20 bp, synthetic construct
  misc_feature 1..20: note = chemically synthesized
  source 1..20: mol_type = other DNA
ccaatgggtgacctcagcag

SEQ ID NO: 27240 - DNA, 20 bp, synthetic construct
  misc_feature 1..20: note = chemically synthesized
  source 1..20: mol_type = other DNA
aatgggtgacctcagcagaa

SEQ ID NO: 27241 - DNA, 20 bp, synthetic construct
  misc_feature 1..20: note = chemically synthesized
  source 1..20: mol_type = other DNA
atgggtgacctcagcagaag

SEQ ID NO: 27242 - DNA, 20 bp, synthetic construct
  misc_feature 1..20: note = chemically synthesized
  source 1..20: mol_type = other DNA
agaagaggattttaataatc

SEQ ID NO: 27243 - DNA, 20 bp, synthetic construct
  misc_feature 1..20: note = chemically synthesized
  source 1..20: mol_type = other DNA
agaggattttaataatcaag

SEQ ID NO: 27244 - DNA, 20 bp, synthetic construct
  misc_feature 1..20: note = chemically synthesized
  source 1..20: mol_type = other DNA
gattttaataatcaagtgga

SEQ ID NO: 27245 - DNA, 20 bp, synthetic construct
  misc_feature 1..20: note = chemically synthesized
  source 1..20: mol_type = other DNA
attttaataatcaagtggat

SEQ ID NO: 27246 - DNA, 20 bp, synthetic construct
  misc_feature 1..20: note = chemically synthesized
  source 1..20: mol_type = other DNA
ggataggatgatcaattctg

SEQ ID NO: 27247 - DNA, 20 bp, synthetic construct
  misc_feature 1..20: note = chemically synthesized
  source 1..20: mol_type = other DNA
tcaattctgtggacaccact

SEQ ID NO: 27248 - DNA, 20 bp, synthetic construct
  misc_feature 1..20: note = chemically synthesized
  source 1..20: mol_type = other DNA
gacaccactcagccttttcc

SEQ ID NO: 27249 - DNA, 20 bp, synthetic construct
  misc_feature 1..20: note = chemically synthesized
  source 1..20: mol_type = other DNA
acaccactcagccttttccc

SEQ ID NO: 27250 - DNA, 20 bp, synthetic construct
  misc_feature 1..20: note = chemically synthesized
  source 1..20: mol_type = other DNA
ccactcatgtcatcgtccaa

SEQ ID NO: 27251 - DNA, 20 bp, synthetic construct
  misc_feature 1..20: note = chemically synthesized
  source 1..20: mol_type = other DNA
gtccaatggacccatgaaca

SEQ ID NO: 27252 - DNA, 20 bp, synthetic construct
  misc_feature 1..20: note = chemically synthesized
  source 1..20: mol_type = other DNA
caatggacccatgaacaaag

SEQ ID NO: 27253 - DNA, 20 bp, synthetic construct
  misc_feature 1..20: note = chemically synthesized
  source 1..20: mol_type = other DNA
acccatgaacaaagtggcca

SEQ ID NO: 27254 - DNA, 20 bp, synthetic construct
  misc_feature 1..20: note = chemically synthesized
  source 1..20: mol_type = other DNA
gaacaaagtggccacagttg

SEQ ID NO: 27255 - DNA, 20 bp, synthetic construct
  misc_feature 1..20: note = chemically synthesized
  source 1..20: mol_type = other DNA
aacaaagtggccacagttgc

SEQ ID NO: 27256 - DNA, 20 bp, synthetic construct
  misc_feature 1..20: note = chemically synthesized
  source 1..20: mol_type = other DNA
acaaagtggccacagttgca

SEQ ID NO: 27257 - DNA, 20 bp, synthetic construct
  misc_feature 1..20: note = chemically synthesized
  source 1..20: mol_type = other DNA
agtggccacagttgcaggga

SEQ ID NO: 27258 - DNA, 20 bp, synthetic construct
  misc_feature 1..20: note = chemically synthesized
  source 1..20: mol_type = other DNA
ggccacagttgcagggatgg

SEQ ID NO: 27259 - DNA, 20 bp, synthetic construct
  misc_feature 1..20: note = chemically synthesized
  source 1..20: mol_type = other DNA
gcagggatggaagttatgct

SEQ ID NO: 27260 - DNA, 20 bp, synthetic construct
  misc_feature 1..20: note = chemically synthesized
  source 1..20: mol_type = other DNA
cagggatggaagttatgctt

SEQ ID NO: 27261 - DNA, 20 bp, synthetic construct
  misc_feature 1..20: note = chemically synthesized
  source 1..20: mol_type = other DNA
atggaagttatgcttgggct

SEQ ID NO: 27262 - DNA, 20 bp, synthetic construct
  misc_feature 1..20: note = chemically synthesized
  source 1..20: mol_type = other DNA
tatgcttgggctcagcaaca

SEQ ID NO: 27263 - DNA, 20 bp, synthetic construct
  misc_feature 1..20: note = chemically synthesized
  source 1..20: mol_type = other DNA
acatggacttccactcacca

SEQ ID NO: 27264 - DNA, 20 bp, synthetic construct
  misc_feature 1..20: note = chemically synthesized
  source 1..20: mol_type = other DNA
tccactcaccaaagctgacc

SEQ ID NO: 27265 - DNA, 20 bp, synthetic construct
  misc_feature 1..20: note = chemically synthesized
  source 1..20: mol_type = other DNA
caccaaagctgacctggcca

SEQ ID NO: 27266 - DNA, 20 bp, synthetic construct
  misc_feature 1..20: note = chemically synthesized
  source 1..20: mol_type = other DNA
tggccacagccactgcttgc

SEQ ID NO: 27267 - DNA, 20 bp, synthetic construct
  misc_feature 1..20: note = chemically synthesized
  source 1..20: mol_type = other DNA
cagccactgcttgccagcat

SEQ ID NO: 27268 - DNA, 20 bp, synthetic construct
  misc_feature 1..20: note = chemically synthesized
  source 1..20: mol_type = other DNA
gccactgcttgccagcatca

SEQ ID NO: 27269 - DNA, 20 bp, synthetic construct
  misc_feature 1..20: note = chemically synthesized
  source 1..20: mol_type = other DNA
cagcatcagagaccaacact

SEQ ID NO: 27270 - DNA, 20 bp, synthetic construct
  misc_feature 1..20: note = chemically synthesized
  source 1..20: mol_type = other DNA
ccaacactaagcccttgata

SEQ ID NO: 27271 - DNA, 20 bp, synthetic construct
  misc_feature 1..20: note = chemically synthesized
  source 1..20: mol_type = other DNA
cttgatatggcaccattcct

SEQ ID NO: 27272 - DNA, 20 bp, synthetic construct
  misc_feature 1..20: note = chemically synthesized
  source 1..20: mol_type = other DNA
ttgatatggcaccattcctc

SEQ ID NO: 27273 - DNA, 20 bp, synthetic construct
  misc_feature 1..20: note = chemically synthesized
  source 1..20: mol_type = other DNA
tgatatggcaccattcctcg

SEQ ID NO: 27274 - DNA, 20 bp, synthetic construct
  misc_feature 1..20: note = chemically synthesized
  source 1..20: mol_type = other DNA
gcaccattcctcggggtgat

SEQ ID NO: 27275 - DNA, 20 bp, synthetic construct
  misc_feature 1..20: note = chemically synthesized
  source 1..20: mol_type = other DNA
cattcctcggggtgatcagc

SEQ ID NO: 27276 - DNA, 20 bp, synthetic construct
  misc_feature 1..20: note = chemically synthesized
  source 1..20: mol_type = other DNA
ggggtgatcagccagctacc

SEQ ID NO: 27277 - DNA, 20 bp, synthetic construct
  misc_feature 1..20: note = chemically synthesized
  source 1..20: mol_type = other DNA
gtgatcagccagctacctgg

SEQ ID NO: 27278 - DNA, 20 bp, synthetic construct
  misc_feature 1..20: note = chemically synthesized
  source 1..20: mol_type = other DNA
atcagccagctacctggtgg

SEQ ID NO: 27279 - DNA, 20 bp, synthetic construct
  misc_feature 1..20: note = chemically synthesized
  source 1..20: mol_type = other DNA
tcagccagctacctggtggc

SEQ ID NO: 27280 - DNA, 20 bp, synthetic construct
  misc_feature 1..20: note = chemically synthesized
  source 1..20: mol_type = other DNA
tggtggcaggttgattatat

SEQ ID NO: 27281 - DNA, 20 bp, synthetic construct
  misc_feature 1..20: note = chemically synthesized
  source 1..20: mol_type = other DNA
atattggacctcttccatca

SEQ ID NO: 27282 - DNA, 20 bp, synthetic construct
  misc_feature 1..20: note = chemically synthesized
  source 1..20: mol_type = other DNA
tggacctcttccatcatgga

SEQ ID NO: 27283 - DNA, 20 bp, synthetic construct
  misc_feature 1..20: note = chemically synthesized
  source 1..20: mol_type = other DNA
ggacctcttccatcatggaa

SEQ ID NO: 27284 - DNA, 20 bp, synthetic construct
  misc_feature 1..20: note = chemically synthesized
  source 1..20: mol_type = other DNA
gacctcttccatcatggaaa

SEQ ID NO: 27285 - DNA, 20 bp, synthetic construct
  misc_feature 1..20: note = chemically synthesized
  source 1..20: mol_type = other DNA
ctcttccatcatggaaaggg

SEQ ID NO: 27286 - DNA, 20 bp, synthetic construct
  misc_feature 1..20: note = chemically synthesized
  source 1..20: mol_type = other DNA
cttccatcatggaaagggca

SEQ ID NO: 27287 - DNA, 20 bp, synthetic construct
  misc_feature 1..20: note = chemically synthesized
  source 1..20: mol_type = other DNA
ttccatcatggaaagggcag

SEQ ID NO: 27288 - DNA, 20 bp, synthetic construct
  misc_feature 1..20: note = chemically synthesized
  source 1..20: mol_type = other DNA
gggcagaggcttgtcctcac

SEQ ID NO: 27289 - DNA, 20 bp, synthetic construct
  misc_feature 1..20: note = chemically synthesized
  source 1..20: mol_type = other DNA
gaggcttgtcctcactggaa

SEQ ID NO: 27290 - DNA, 20 bp, synthetic construct
  misc_feature 1..20: note = chemically synthesized
  source 1..20: mol_type = other DNA
actggaatagacacttactc

SEQ ID NO: 27291 - DNA, 20 bp, synthetic construct
  misc_feature 1..20: note = chemically synthesized
  source 1..20: mol_type = other DNA
atagacacttactctggata

SEQ ID NO: 27292 - DNA, 20 bp, synthetic construct
  misc_feature 1..20: note = chemically synthesized
  source 1..20: mol_type = other DNA
tagacacttactctggatat

SEQ ID NO: 27293 - DNA, 20 bp, synthetic construct
  misc_feature 1..20: note = chemically synthesized
  source 1..20: mol_type = other DNA
ctgaactcaatgcttatgcc

SEQ ID NO: 27294 - DNA, 20 bp, synthetic construct
  misc_feature 1..20: note = chemically synthesized
  source 1..20: mol_type = other DNA
tatgccaagactaccatcca

SEQ ID NO: 27295 - DNA, 20 bp, synthetic construct
  misc_feature 1..20: note = chemically synthesized
  source 1..20: mol_type = other DNA
gactaccatccatggaatca

SEQ ID NO: 27296 - DNA, 20 bp, synthetic construct
  misc_feature 1..20: note = chemically synthesized
  source 1..20: mol_type = other DNA
gaatgccgtatccactgtca

SEQ ID NO: 27297 - DNA, 20 bp, synthetic construct
  misc_feature 1..20: note = chemically synthesized
  source 1..20: mol_type = other DNA
cactgtcatggtattccaca

SEQ ID NO: 27298 - DNA, 20 bp, synthetic construct
  misc_feature 1..20: note = chemically synthesized
  source 1..20: mol_type = other DNA
acacagcattgcttctgacc

SEQ ID NO: 27299 - DNA, 20 bp, synthetic construct
  misc_feature 1..20: note = chemically synthesized
  source 1..20: mol_type = other DNA
tgaccaagccactcacttta

SEQ ID NO: 27300 - DNA, 20 bp, synthetic construct
  misc_feature 1..20: note = chemically synthesized
  source 1..20: mol_type = other DNA
agccactcactttatggcta

SEQ ID NO: 27301 - DNA, 20 bp, synthetic construct
  misc_feature 1..20: note = chemically synthesized
  source 1..20: mol_type = other DNA
cactcactttatggctaaag

SEQ ID NO: 27302 - DNA, 20 bp, synthetic construct
  misc_feature 1..20: note = chemically synthesized
  source 1..20: mol_type = other DNA
ttatggctaaagaagtgtga

SEQ ID NO: 27303 - DNA, 20 bp, synthetic construct
  misc_feature 1..20: note = chemically synthesized
  source 1..20: mol_type = other DNA
tggctaaagaagtgtgacag

SEQ ID NO: 27304 - DNA, 20 bp, synthetic construct
  misc_feature 1..20: note = chemically synthesized
  source 1..20: mol_type = other DNA
ggctaaagaagtgtgacagt

SEQ ID NO: 27305 - DNA, 20 bp, synthetic construct
  misc_feature 1..20: note = chemically synthesized
  source 1..20: mol_type = other DNA
tgacagtgggctcatgctca

SEQ ID NO: 27306 - DNA, 20 bp, synthetic construct
  misc_feature 1..20: note = chemically synthesized
  source 1..20: mol_type = other DNA
ctcatgctcatggaatttac

SEQ ID NO: 27307 - DNA, 20 bp, synthetic construct
  misc_feature 1..20: note = chemically synthesized
  source 1..20: mol_type = other DNA
ccatgatccctatcatcctg

SEQ ID NO: 27308 - DNA, 20 bp, synthetic construct
  misc_feature 1..20: note = chemically synthesized
  source 1..20: mol_type = other DNA
tgatccctatcatcctgaag

SEQ ID NO: 27309 - DNA, 20 bp, synthetic construct
  misc_feature 1..20: note = chemically synthesized
  source 1..20: mol_type = other DNA
atcctgaagcagcttttgaa

SEQ ID NO: 27310 - DNA, 20 bp, synthetic construct
  misc_feature 1..20: note = chemically synthesized
  source 1..20: mol_type = other DNA
agcttttgaatggccttttg

SEQ ID NO: 27311 - DNA, 20 bp, synthetic construct
  misc_feature 1..20: note = chemically synthesized
  source 1..20: mol_type = other DNA
gtcacgattacaatgccaac

SEQ ID NO: 27312 - DNA, 20 bp, synthetic construct
  misc_feature 1..20: note = chemically synthesized
  source 1..20: mol_type = other DNA
tcacgattacaatgccaact

SEQ ID NO: 27313 - DNA, 20 bp, synthetic construct
  misc_feature 1..20: note = chemically synthesized
  source 1..20: mol_type = other DNA
aactaggtgacaatactttg

SEQ ID NO: 27314 - DNA, 20 bp, synthetic construct
  misc_feature 1..20: note = chemically synthesized
  source 1..20: mol_type = other DNA
actaggtgacaatactttgc

SEQ ID NO: 27315 - DNA, 20 bp, synthetic construct
  misc_feature 1..20: note = chemically synthesized
  source 1..20: mol_type = other DNA
gtgacaatactttgcaggcc

SEQ ID NO: 27316 - DNA, 20 bp, synthetic construct
  misc_feature 1..20: note = chemically synthesized
  source 1..20: mol_type = other DNA
tgacaatactttgcaggcct

SEQ ID NO: 27317 - DNA, 20 bp, synthetic construct
  misc_feature 1..20: note = chemically synthesized
  source 1..20: mol_type = other DNA
gacaatactttgcaggcctg

SEQ ID NO: 27318 - DNA, 20 bp, synthetic construct
  misc_feature 1..20: note = chemically synthesized
  source 1..20: mol_type = other DNA
tactttgcaggcctggggca

SEQ ID NO: 27319 - DNA, 20 bp, synthetic construct
  misc_feature 1..20: note = chemically synthesized
  source 1..20: mol_type = other DNA
aggcctggggcaaagttctc

SEQ ID NO: 27320 - DNA, 20 bp, synthetic construct
  misc_feature 1..20: note = chemically synthesized
  source 1..20: mol_type = other DNA
cctggggcaaagttctccag

SEQ ID NO: 27321 - DNA, 20 bp, synthetic construct
  misc_feature 1..20: note = chemically synthesized
  source 1..20: mol_type = other DNA
ctggggcaaagttctccaga

SEQ ID NO: 27322 - DNA, 20 bp, synthetic construct
  misc_feature 1..20: note = chemically synthesized
  source 1..20: mol_type = other DNA
aggctgtgtatgctctgaat

SEQ ID NO: 27323 - DNA, 20 bp, synthetic construct
  misc_feature 1..20: note = chemically synthesized
  source 1..20: mol_type = other DNA
ctgaatcagtgtccaatata

SEQ ID NO: 27324 - DNA, 20 bp, synthetic construct
  misc_feature 1..20: note = chemically synthesized
  source 1..20: mol_type = other DNA
atatggtactgtttctccca

SEQ ID NO: 27325 - DNA, 20 bp, synthetic construct
  misc_feature 1..20: note = chemically synthesized
  source 1..20: mol_type = other DNA
ggtactgtttctcccataga

SEQ ID NO: 27326 - DNA, 20 bp, synthetic construct
  misc_feature 1..20: note = chemically synthesized
  source 1..20: mol_type = other DNA
gtactgtttctcccatagac

SEQ ID NO: 27327 - DNA, 20 bp, synthetic construct
  misc_feature 1..20: note = chemically synthesized
  source 1..20: mol_type = other DNA
tctcccatagacaggattca

SEQ ID NO: 27328 - DNA, 20 bp, synthetic construct
  misc_feature 1..20: note = chemically synthesized
  source 1..20: mol_type = other DNA
ctcccatagacaggattcac

SEQ ID NO: 27329 - DNA, 20 bp, synthetic construct
  misc_feature 1..20: note = chemically synthesized
  source 1..20: mol_type = other DNA
atagacaggattcacgggtc

SEQ ID NO: 27330 - DNA, 20 bp, synthetic construct
  misc_feature 1..20: note = chemically synthesized
  source 1..20: mol_type = other DNA
tagacaggattcacgggtcc

SEQ ID NO: 27331 - DNA, 20 bp, synthetic construct
  misc_feature 1..20: note = chemically synthesized
  source 1..20: mol_type = other DNA
attcacgggtccaggaatca

SEQ ID NO: 27332 - DNA, 20 bp, synthetic construct
  misc_feature 1..20: note = chemically synthesized
  source 1..20: mol_type = other DNA
ttcacgggtccaggaatcaa

SEQ ID NO: 27333 - DNA, 20 bp, synthetic construct
  misc_feature 1..20: note = chemically synthesized
  source 1..20: mol_type = other DNA
tcacgggtccaggaatcaaa

SEQ ID NO: 27334 - DNA, 20 bp, synthetic construct
  misc_feature 1..20: note = chemically synthesized
  source 1..20: mol_type = other DNA
cgggtccaggaatcaaaggg

SEQ ID NO: 27335 - DNA, 20 bp, synthetic construct
  misc_feature 1..20: note = chemically synthesized
  source 1..20: mol_type = other DNA
gtccaggaatcaaagggtgg

SEQ ID NO: 27336 - DNA, 20 bp, synthetic construct
  misc_feature 1..20: note = chemically synthesized
  source 1..20: mol_type = other DNA
caggaatcaaagggtggaag

SEQ ID NO: 27337 - DNA, 20 bp, synthetic construct
  misc_feature 1..20: note = chemically synthesized
  source 1..20: mol_type = other DNA
gaatcaaagggtggaagtgg

SEQ ID NO: 27338 - DNA, 20 bp, synthetic construct
  misc_feature 1..20: note = chemically synthesized
  source 1..20: mol_type = other DNA
tcaaagggtggaagtggaag

SEQ ID NO: 27339 - DNA, 20 bp, synthetic construct
  misc_feature 1..20: note = chemically synthesized
  source 1..20: mol_type = other DNA
aagggtggaagtggaagtgg

SEQ ID NO: 27340 - DNA, 20 bp, synthetic construct
  misc_feature 1..20: note = chemically synthesized
  source 1..20: mol_type = other DNA
ggtggaagtggaagtggaag

SEQ ID NO: 27341 - DNA, 20 bp, synthetic construct
  misc_feature 1..20: note = chemically synthesized
  source 1..20: mol_type = other DNA
gcaccactcaccatcacccc

SEQ ID NO: 27342 - DNA, 20 bp, synthetic construct
  misc_feature 1..20: note = chemically synthesized
  source 1..20: mol_type = other DNA
catcacccctagtgttccac

SEQ ID NO: 27343 - DNA, 20 bp, synthetic construct
  misc_feature 1..20: note = chemically synthesized
  source 1..20: mol_type = other DNA
atttttgcttcctgttccca

SEQ ID NO: 27344 - DNA, 20 bp, synthetic construct
  misc_feature 1..20: note = chemically synthesized
  source 1..20: mol_type = other DNA
cccatggcattatgttctgc

SEQ ID NO: 27345 - DNA, 20 bp, synthetic construct
  misc_feature 1..20: note = chemically synthesized
  source 1..20: mol_type = other DNA
ggcattatgttctgctggct

SEQ ID NO: 27346 - DNA, 20 bp, synthetic construct
  misc_feature 1..20: note = chemically synthesized
  source 1..20: mol_type = other DNA
cattatgttctgctggctta

SEQ ID NO: 27347 - DNA, 20 bp, synthetic construct
  misc_feature 1..20: note = chemically synthesized
  source 1..20: mol_type = other DNA
attatgttctgctggcttag

SEQ ID NO: 27348 - DNA, 20 bp, synthetic construct
  misc_feature 1..20: note = chemically synthesized
  source 1..20: mol_type = other DNA
ttctgctggcttagaggtct

SEQ ID NO: 27349 - DNA, 20 bp, synthetic construct
  misc_feature 1..20: note = chemically synthesized
  source 1..20: mol_type = other DNA
tggcttagaggtcttagttc

SEQ ID NO: 27350 - DNA, 20 bp, synthetic construct
  misc_feature 1..20: note = chemically synthesized
  source 1..20: mol_type = other DNA
gcttagaggtcttagttcca

SEQ ID NO: 27351 - DNA, 20 bp, synthetic construct
  misc_feature 1..20: note = chemically synthesized
  source 1..20: mol_type = other DNA
cttagaggtcttagttccag

SEQ ID NO: 27352 - DNA, 20 bp, synthetic construct
  misc_feature 1..20: note = chemically synthesized
  source 1..20: mol_type = other DNA
ttagaggtcttagttccaga

SEQ ID NO: 27353 - DNA, 20 bp, synthetic construct
  misc_feature 1..20: note = chemically synthesized
  source 1..20: mol_type = other DNA
agaggtcttagttccagagg

SEQ ID NO: 27354 - DNA, 20 bp, synthetic construct
  misc_feature 1..20: note = chemically synthesized
  source 1..20: mol_type = other DNA
gaggtcttagttccagaggg

SEQ ID NO: 27355 - DNA, 20 bp, synthetic construct
  misc_feature 1..20: note = chemically synthesized
  source 1..20: mol_type = other DNA
agagggaggaacactgccgc

SEQ ID NO: 27356 - DNA, 20 bp, synthetic construct
  misc_feature 1..20: note = chemically synthesized
  source 1..20: mol_type = other DNA
gagggaggaacactgccgcc

SEQ ID NO: 27357 - DNA, 20 bp, synthetic construct
  misc_feature 1..20: note = chemically synthesized
  source 1..20: mol_type = other DNA
attccattaaactgcaaatt

SEQ ID NO: 27358 - DNA, 20 bp, synthetic construct
  misc_feature 1..20: note = chemically synthesized
  source 1..20: mol_type = other DNA
tgcaaattaagattgccacc

SEQ ID NO: 27359 - DNA, 20 bp, synthetic construct
  misc_feature 1..20: note = chemically synthesized
  source 1..20: mol_type = other DNA
agattgccacctggacactt

SEQ ID NO: 27360 - DNA, 20 bp, synthetic construct
  misc_feature 1..20: note = chemically synthesized
  source 1..20: mol_type = other DNA
gattgccacctggacacttt

SEQ ID NO: 27361 - DNA, 20 bp, synthetic construct
  misc_feature 1..20: note = chemically synthesized
  source 1..20: mol_type = other DNA
tttgggctcctcccaccttt

SEQ ID NO: 27362 - DNA, 20 bp, synthetic construct
  misc_feature 1..20: note = chemically synthesized
  source 1..20: mol_type = other DNA
tcctcccacctttaagtcaa

SEQ ID NO: 27363 - DNA, 20 bp, synthetic construct
  misc_feature 1..20: note = chemically synthesized
  source 1..20: mol_type = other DNA
cctcccacctttaagtcaac

SEQ ID NO: 27364 - DNA, 20 bp, synthetic construct
  misc_feature 1..20: note = chemically synthesized
  source 1..20: mol_type = other DNA
cacctttaagtcaacaggct

SEQ ID NO: 27365 - DNA, 20 bp, synthetic construct
  misc_feature 1..20: note = chemically synthesized
  source 1..20: mol_type = other DNA
ctttaagtcaacaggctaag

SEQ ID NO: 27366 - DNA, 20 bp, synthetic construct
  misc_feature 1..20: note = chemically synthesized
  source 1..20: mol_type = other DNA
ttaagtcaacaggctaagaa

SEQ ID NO: 27367 - DNA, 20 bp, synthetic construct
  misc_feature 1..20: note = chemically synthesized
  source 1..20: mol_type = other DNA
aagtcaacaggctaagaaga

SEQ ID NO: 27368 - DNA, 20 bp, synthetic construct
  misc_feature 1..20: note = chemically synthesized
  source 1..20: mol_type = other DNA
acaggctaagaagagagtta

SEQ ID NO: 27369 - DNA, 20 bp, synthetic construct
  misc_feature 1..20: note = chemically synthesized
  source 1..20: mol_type = other DNA
taagaagagagttacagtgt

SEQ ID NO: 27370 - DNA, 20 bp, synthetic construct
  misc_feature 1..20: note = chemically synthesized
  source 1..20: mol_type = other DNA
gagagttacagtgttggctg

SEQ ID NO: 27371 - DNA, 20 bp, synthetic construct
  misc_feature 1..20: note = chemically synthesized
  source 1..20: mol_type = other DNA
gttggctgcggtgattaacc

SEQ ID NO: 27372 - DNA, 20 bp, synthetic construct
  misc_feature 1..20: note = chemically synthesized
  source 1..20: mol_type = other DNA
ggtgattaacccagactatc

SEQ ID NO: 27373 - DNA, 20 bp, synthetic construct
  misc_feature 1..20: note = chemically synthesized
  source 1..20: mol_type = other DNA
ccagactatcaagatgaaat

SEQ ID NO: 27374 - DNA, 20 bp, synthetic construct
  misc_feature 1..20: note = chemically synthesized
  source 1..20: mol_type = other DNA
atcagtctacaactccacaa

SEQ ID NO: 27375 - DNA, 20 bp, synthetic construct
  misc_feature 1..20: note = chemically synthesized
  source 1..20: mol_type = other DNA
cagtctacaactccacaatg

SEQ ID NO: 27376 - DNA, 20 bp, synthetic construct
  misc_feature 1..20: note = chemically synthesized
  source 1..20: mol_type = other DNA
agtctacaactccacaatgg

SEQ ID NO: 27377 - DNA, 20 bp, synthetic construct
  misc_feature 1..20: note = chemically synthesized
  source 1..20: mol_type = other DNA
tacaactccacaatggaggt

SEQ ID NO: 27378 - DNA, 20 bp, synthetic construct
  misc_feature 1..20: note = chemically synthesized
  source 1..20: mol_type = other DNA
acaactccacaatggaggta

SEQ ID NO: 27379 - DNA, 20 bp, synthetic construct
  misc_feature 1..20: note = chemically synthesized
  source 1..20: mol_type = other DNA
actccacaatggaggtaagg

SEQ ID NO: 27380 - DNA, 20 bp, synthetic construct
  misc_feature 1..20: note = chemically synthesized
  source 1..20: mol_type = other DNA
gaggtaaggaagcgtatgca

SEQ ID NO: 27381 - DNA, 20 bp, synthetic construct
  misc_feature 1..20: note = chemically synthesized
  source 1..20: mol_type = other DNA
ggaagcgtatgcatggaata

SEQ ID NO: 27382 - DNA, 20 bp, synthetic construct
  misc_feature 1..20: note = chemically synthesized
  source 1..20: mol_type = other DNA
gaagcgtatgcatggaatat

SEQ ID NO: 27383 - DNA, 20 bp, synthetic construct
  misc_feature 1..20: note = chemically synthesized
  source 1..20: mol_type = other DNA
agcgtatgcatggaatatag

SEQ ID NO: 27384 - DNA, 20 bp, synthetic construct
  misc_feature 1..20: note = chemically synthesized
  source 1..20: mol_type = other DNA
atggaatataggagatccat

SEQ ID NO: 27385 - DNA, 20 bp, synthetic construct
  misc_feature 1..20: note = chemically synthesized
  source 1..20: mol_type = other DNA
tggaatataggagatccatt

SEQ ID NO: 27386 - DNA, 20 bp, synthetic construct
  misc_feature 1..20: note = chemically synthesized
  source 1..20: mol_type = other DNA
ggaatataggagatccatta

SEQ ID NO: 27387 - DNA, 20 bp, synthetic construct
  misc_feature 1..20: note = chemically synthesized
  source 1..20: mol_type = other DNA
agatccattagggtgtctct

SEQ ID NO: 27388 - DNA, 20 bp, synthetic construct
  misc_feature 1..20: note = chemically synthesized
  source 1..20: mol_type = other DNA
ctcttagttttaccatgtcc

SEQ ID NO: 27389 - DNA, 20 bp, synthetic construct
  misc_feature 1..20: note = chemically synthesized
  source 1..20: mol_type = other DNA
ttttaccatgtcctggaatt

SEQ ID NO: 27390 - DNA, 20 bp, synthetic construct
  misc_feature 1..20: note = chemically synthesized
  source 1..20: mol_type = other DNA
tttaccatgtcctggaatta

SEQ ID NO: 27391 - DNA, 20 bp, synthetic construct
  misc_feature 1..20: note = chemically synthesized
  source 1..20: mol_type = other DNA
ccatgtcctggaattaaggt

SEQ ID NO: 27392 - DNA, 20 bp, synthetic construct
  misc_feature 1..20: note = chemically synthesized
  source 1..20: mol_type = other DNA
tgtcctggaattaaggtcag

SEQ ID NO: 27393 - DNA, 20 bp, synthetic construct
  misc_feature 1..20: note = chemically synthesized
  source 1..20: mol_type = other DNA
gtcctggaattaaggtcagt

SEQ ID NO: 27394 - DNA, 20 bp, synthetic construct
  misc_feature 1..20: note = chemically synthesized
  source 1..20: mol_type = other DNA
aggtcagtgggaaactacta

SEQ ID NO: 27395 - DNA, 20 bp, synthetic construct
  misc_feature 1..20: note = chemically synthesized
  source 1..20: mol_type = other DNA
ggtcagtgggaaactactac

SEQ ID NO: 27396 - DNA, 20 bp, synthetic construct
  misc_feature 1..20: note = chemically synthesized
  source 1..20: mol_type = other DNA
gaaactactacaggccattc

SEQ ID NO: 27397 - DNA, 20 bp, synthetic construct
  misc_feature 1..20: note = chemically synthesized
  source 1..20: mol_type = other DNA
aaactactacaggccattcc

SEQ ID NO: 27398 - DNA, 20 bp, synthetic construct
  misc_feature 1..20: note = chemically synthesized
  source 1..20: mol_type = other DNA
ctactacaggccattccagg

SEQ ID NO: 27399 - DNA, 20 bp, synthetic construct
  misc_feature 1..20: note = chemically synthesized
  source 1..20: mol_type = other DNA
tactacaggccattccaggc

SEQ ID NO: 27400 - DNA, 20 bp, synthetic construct
  misc_feature 1..20: note = chemically synthesized
  source 1..20: mol_type = other DNA
tccaggcaggactacaaata

SEQ ID NO: 27401 - DNA, 20 bp, synthetic construct
  misc_feature 1..20: note = chemically synthesized
  source 1..20: mol_type = other DNA
ccaggcaggactacaaataa

SEQ ID NO: 27402 - DNA, 20 bp, synthetic construct
  misc_feature 1..20: note = chemically synthesized
  source 1..20: mol_type = other DNA
caggactacaaataaaggtt

SEQ ID NO: 27403 - DNA, 20 bp, synthetic construct
  misc_feature 1..20: note = chemically synthesized
  source 1..20: mol_type = other DNA
aggactacaaataaaggttt

SEQ ID NO: 27404 - DNA, 20 bp, synthetic construct
  misc_feature 1..20: note = chemically synthesized
  source 1..20: mol_type = other DNA
aaaggtttgggtcactccac

SEQ ID NO: 27405 - DNA, 20 bp, synthetic construct
  misc_feature 1..20: note = chemically synthesized
  source 1..20: mol_type = other DNA
aaggtttgggtcactccacc

SEQ ID NO: 27406 - DNA, 20 bp, synthetic construct
  misc_feature 1..20: note = chemically synthesized
  source 1..20: mol_type = other DNA
caggaaaaaaaaaaaaaaaa

SEQ ID NO: 27407 - DNA, 20 bp, synthetic construct
  misc_feature 1..20: note = chemically synthesized
  source 1..20: mol_type = other DNA
aaaaaaaaaaaaaaaaagac

SEQ ID NO: 27408 - DNA, 20 bp, synthetic construct
  misc_feature 1..20: note = chemically synthesized
  source 1..20: mol_type = other DNA
aaaaaaagacaagacctgct

SEQ ID NO: 27409 - DNA, 20 bp, synthetic construct
  misc_feature 1..20: note = chemically synthesized
  source 1..20: mol_type = other DNA
aaaaaagacaagacctgctg

SEQ ID NO: 27410 - DNA, 20 bp, synthetic construct
  misc_feature 1..20: note = chemically synthesized
  source 1..20: mol_type = other DNA
gacctgctgaggtgcttgct

SEQ ID NO: 27411 - DNA, 20 bp, synthetic construct
  misc_feature 1..20: note = chemically synthesized
  source 1..20: mol_type = other DNA
acctgctgaggtgcttgctg

SEQ ID NO: 27412 - DNA, 20 bp, synthetic construct
  misc_feature 1..20: note = chemically synthesized
  source 1..20: mol_type = other DNA
cctgctgaggtgcttgctga

SEQ ID NO: 27413 - DNA, 20 bp, synthetic construct
  misc_feature 1..20: note = chemically synthesized
  source 1..20: mol_type = other DNA
tgaggtgcttgctgagggca

SEQ ID NO: 27414 - DNA, 20 bp, synthetic construct
  misc_feature 1..20: note = chemically synthesized
  source 1..20: mol_type = other DNA
gaggtgcttgctgagggcaa

SEQ ID NO: 27415 - DNA, 20 bp, synthetic construct
  misc_feature 1..20: note = chemically synthesized
  source 1..20: mol_type = other DNA
aggtgcttgctgagggcaaa

SEQ ID NO: 27416 - DNA, 20 bp, synthetic construct
  misc_feature 1..20: note = chemically synthesized
  source 1..20: mol_type = other DNA
tgctgagggcaaagggaata

SEQ ID NO: 27417 - DNA, 20 bp, synthetic construct
  misc_feature 1..20: note = chemically synthesized
  source 1..20: mol_type = other DNA
caaagggaatacagaatatg

SEQ ID NO: 27418 - DNA, 20 bp, synthetic construct
  misc_feature 1..20: note = chemically synthesized
  source 1..20: mol_type = other DNA
agggaatacagaatatgtag

SEQ ID NO: 27419 - DNA, 20 bp, synthetic construct
  misc_feature 1..20: note = chemically synthesized
  source 1..20: mol_type = other DNA
gaatacagaatatgtagcag

SEQ ID NO: 27420 - DNA, 20 bp, synthetic construct
  misc_feature 1..20: note = chemically synthesized
  source 1..20: mol_type = other DNA
tacagaatatgtagcagaag

SEQ ID NO: 27421 - DNA, 20 bp, synthetic construct
  misc_feature 1..20: note = chemically synthesized
  source 1..20: mol_type = other DNA
acagaatatgtagcagaaga

SEQ ID NO: 27422 - DNA, 20 bp, synthetic construct
  misc_feature 1..20: note = chemically synthesized
  source 1..20: mol_type = other DNA
gaatatgtagcagaagaagg

SEQ ID NO: 27423 - DNA, 20 bp, synthetic construct
  misc_feature 1..20: note = chemically synthesized
  source 1..20: mol_type = other DNA
aagaaggtagtcatcaatac

SEQ ID NO: 27424 - DNA, 20 bp, synthetic construct
  misc_feature 1..20: note = chemically synthesized
  source 1..20: mol_type = other DNA
tacgatcacgtgaccaattg

SEQ ID NO: 27425 - DNA, 20 bp, synthetic construct
  misc_feature 1..20: note = chemically synthesized
  source 1..20: mol_type = other DNA
acgtgaccaattgcagatac

SEQ ID NO: 27426 - DNA, 20 bp, synthetic construct
  misc_feature 1..20: note = chemically synthesized
  source 1..20: mol_type = other DNA
cgtgaccaattgcagataca

SEQ ID NO: 27427 - DNA, 20 bp, synthetic construct
  misc_feature 1..20: note = chemically synthesized
  source 1..20: mol_type = other DNA
acaaggactgtaattgtcat

SEQ ID NO: 27428 - DNA, 20 bp, synthetic construct
  misc_feature 1..20: note = chemically synthesized
  source 1..20: mol_type = other DNA
tgtctgtatacacttgtact

SEQ ID NO: 27429 - DNA, 20 bp, synthetic construct
  misc_feature 1..20: note = chemically synthesized
  source 1..20: mol_type = other DNA
tttcctttatcatgtgacat

SEQ ID NO: 27430 - DNA, 20 bp, synthetic construct
  misc_feature 1..20: note = chemically synthesized
  source 1..20: mol_type = other DNA
aagatttattgacttcatat

SEQ ID NO: 27431 - DNA, 20 bp, synthetic construct
  misc_feature 1..20: note = chemically synthesized
  source 1..20: mol_type = other DNA
ttgacttcatatcagcattt

SEQ ID NO: 27432 - DNA, 20 bp, synthetic construct
  misc_feature 1..20: note = chemically synthesized
  source 1..20: mol_type = other DNA
atcagcatttaagtattgtt

SEQ ID NO: 27433 - DNA, 20 bp, synthetic construct
  misc_feature 1..20: note = chemically synthesized
  source 1..20: mol_type = other DNA
gtattgttaagtttatgtaa

SEQ ID NO: 27434 - DNA, 20 bp, synthetic construct
  misc_feature 1..20: note = chemically synthesized
  source 1..20: mol_type = other DNA
ttatgtaatagcatttgcaa

SEQ ID NO: 27435 - DNA, 20 bp, synthetic construct
  misc_feature 1..20: note = chemically synthesized
  source 1..20: mol_type = other DNA
tatgtaatagcatttgcaat

SEQ ID NO: 27436 - DNA, 20 bp, synthetic construct
  misc_feature 1..20: note = chemically synthesized
  source 1..20: mol_type = other DNA
atgtaatagcatttgcaatg

SEQ ID NO: 27437 - DNA, 20 bp, synthetic construct
  misc_feature 1..20: note = chemically synthesized
  source 1..20: mol_type = other DNA
atagcatttgcaatggggat

SEQ ID NO: 27438 - DNA, 20 bp, synthetic construct
  misc_feature 1..20: note = chemically synthesized
  source 1..20: mol_type = other DNA
ggtgcattttcaattgcacg

SEQ ID NO: 27439 - DNA, 20 bp, synthetic construct
  misc_feature 1..20: note = chemically synthesized
  source 1..20: mol_type = other DNA
gtgcattttcaattgcacga

SEQ ID NO: 27440 - DNA, 20 bp, synthetic construct
  misc_feature 1..20: note = chemically synthesized
  source 1..20: mol_type = other DNA
attttcaattgcacgaagga

SEQ ID NO: 27441 - DNA, 20 bp, synthetic construct
  misc_feature 1..20: note = chemically synthesized
  source 1..20: mol_type = other DNA
aattgcacgaaggatagttt

SEQ ID NO: 27442 - DNA, 20 bp, synthetic construct
  misc_feature 1..20: note = chemically synthesized
  source 1..20: mol_type = other DNA
gaaggatagttttagtatgt

SEQ ID NO: 27443 - DNA, 20 bp, synthetic construct
  misc_feature 1..20: note = chemically synthesized
  source 1..20: mol_type = other DNA
aaggatagttttagtatgtt

SEQ ID NO: 27444 - DNA, 20 bp, synthetic construct
  misc_feature 1..20: note = chemically synthesized
  source 1..20: mol_type = other DNA
cttattgttgtctttatttg

SEQ ID NO: 27445 - DNA, 20 bp, synthetic construct
  misc_feature 1..20: note = chemically synthesized
  source 1..20: mol_type = other DNA
ttgaagataatgtatgacct

SEQ ID NO: 27446 - DNA, 20 bp, synthetic construct
  misc_feature 1..20: note = chemically synthesized
  source 1..20: mol_type = other DNA
tgaagataatgtatgacctc

SEQ ID NO: 27447 - DNA, 20 bp, synthetic construct
  misc_feature 1..20: note = chemically synthesized
  source 1..20: mol_type = other DNA
gaagataatgtatgacctca

SEQ ID NO: 27448 - DNA, 20 bp, synthetic construct
  misc_feature 1..20: note = chemically synthesized
  source 1..20: mol_type = other DNA
aagataatgtatgacctcag

SEQ ID NO: 27449 - DNA, 20 bp, synthetic construct
  misc_feature 1..20: note = chemically synthesized
  source 1..20: mol_type = other DNA
atgacctcaggggatgtgta

SEQ ID NO: 27450 - DNA, 20 bp, synthetic construct
  misc_feature 1..20: note = chemically synthesized
  source 1..20: mol_type = other DNA
tgacctcaggggatgtgtat

SEQ ID NO: 27451 - DNA, 20 bp, synthetic construct
  misc_feature 1..20: note = chemically synthesized
  source 1..20: mol_type = other DNA
caggggatgtgtataggctc

SEQ ID NO: 27452 - DNA, 20 bp, synthetic construct
  misc_feature 1..20: note = chemically synthesized
  source 1..20: mol_type = other DNA
gtgtataggctcaagttgac

SEQ ID NO: 27453 - DNA, 20 bp, synthetic construct
  misc_feature 1..20: note = chemically synthesized
  source 1..20: mol_type = other DNA
aggctcaagttgacaagcga

SEQ ID NO: 27454 - DNA, 20 bp, synthetic construct
  misc_feature 1..20: note = chemically synthesized
  source 1..20: mol_type = other DNA
gacaagcgatggacttgtga

SEQ ID NO: 27455 - DNA, 20 bp, synthetic construct
  misc_feature 1..20: note = chemically synthesized
  source 1..20: mol_type = other DNA
gacttgtgatggttaatact

SEQ ID NO: 27456 - DNA, 20 bp, synthetic construct
  misc_feature 1..20: note = chemically synthesized
  source 1..20: mol_type = other DNA
atactgagtgtcaacttgat

SEQ ID NO: 27457 - DNA, 20 bp, synthetic construct
  misc_feature 1..20: note = chemically synthesized
  source 1..20: mol_type = other DNA
gtgtcaacttgattggattg

SEQ ID NO: 27458 - DNA, 20 bp, synthetic construct
  misc_feature 1..20: note = chemically synthesized
  source 1..20: mol_type = other DNA
tgattggattgaagtgtgca

SEQ ID NO: 27459 - DNA, 20 bp, synthetic construct
  misc_feature 1..20: note = chemically synthesized
  source 1..20: mol_type = other DNA
gtgtgcaaagtattgatcct

SEQ ID NO: 27460 - DNA, 20 bp, synthetic construct
  misc_feature 1..20: note = chemically synthesized
  source 1..20: mol_type = other DNA
ttgatcctgagtgtgtctgt

SEQ ID NO: 27461 - DNA, 20 bp, synthetic construct
  misc_feature 1..20: note = chemically synthesized
  source 1..20: mol_type = other DNA
tgatcctgagtgtgtctgtg

SEQ ID NO: 27462 - DNA, 20 bp, synthetic construct
  misc_feature 1..20: note = chemically synthesized
  source 1..20: mol_type = other DNA
gatcctgagtgtgtctgtga

SEQ ID NO: 27463 - DNA, 20 bp, synthetic construct
  misc_feature 1..20: note = chemically synthesized
  source 1..20: mol_type = other DNA
tgtctgtgagggtattgcca

SEQ ID NO: 27464 - DNA, 20 bp, synthetic construct
  misc_feature 1..20: note = chemically synthesized
  source 1..20: mol_type = other DNA
gtctgtgagggtattgccaa

SEQ ID NO: 27465 - DNA, 20 bp, synthetic construct
  misc_feature 1..20: note = chemically synthesized
  source 1..20: mol_type = other DNA
ctgtgagggtattgccaaag

SEQ ID NO: 27466 - DNA, 20 bp, synthetic construct
  misc_feature 1..20: note = chemically synthesized
  source 1..20: mol_type = other DNA
gccaaaggagattaacattt

SEQ ID NO: 27467 - DNA, 20 bp, synthetic construct
  misc_feature 1..20: note = chemically synthesized
  source 1..20: mol_type = other DNA
aaggagattaacattttagt

SEQ ID NO: 27468 - DNA, 20 bp, synthetic construct
  misc_feature 1..20: note = chemically synthesized
  source 1..20: mol_type = other DNA
gagattaacattttagtcag

SEQ ID NO: 27469 - DNA, 20 bp, synthetic construct
  misc_feature 1..20: note = chemically synthesized
  source 1..20: mol_type = other DNA
agattaacattttagtcagt

SEQ ID NO: 27470 - DNA, 20 bp, synthetic construct
  misc_feature 1..20: note = chemically synthesized
  source 1..20: mol_type = other DNA
taacattttagtcagtgggc

SEQ ID NO: 27471 - DNA, 20 bp, synthetic construct
  misc_feature 1..20: note = chemically synthesized
  source 1..20: mol_type = other DNA
aacattttagtcagtgggct

SEQ ID NO: 27472 - DNA, 20 bp, synthetic construct
  misc_feature 1..20: note = chemically synthesized
  source 1..20: mol_type = other DNA
ttttagtcagtgggctggga

SEQ ID NO: 27473 - DNA, 20 bp, synthetic construct
  misc_feature 1..20: note = chemically synthesized
  source 1..20: mol_type = other DNA
tttagtcagtgggctgggaa

SEQ ID NO: 27474 - DNA, 20 bp, synthetic construct
  misc_feature 1..20: note = chemically synthesized
  source 1..20: mol_type = other DNA
agtcagtgggctgggaaagg

SEQ ID NO: 27475 - DNA, 20 bp, synthetic construct
  misc_feature 1..20: note = chemically synthesized
  source 1..20: mol_type = other DNA
aggcagacccacccttaatc

SEQ ID NO: 27476 - DNA, 20 bp, synthetic construct
  misc_feature 1..20: note = chemically synthesized
  source 1..20: mol_type = other DNA
ggcagacccacccttaatct

SEQ ID NO: 27477 - DNA, 20 bp, synthetic construct
  misc_feature 1..20: note = chemically synthesized
  source 1..20: mol_type = other DNA
agacccacccttaatctggg

SEQ ID NO: 27478 - DNA, 20 bp, synthetic construct
  misc_feature 1..20: note = chemically synthesized
  source 1..20: mol_type = other DNA
gacccacccttaatctgggt

SEQ ID NO: 27479 - DNA, 20 bp, synthetic construct
  misc_feature 1..20: note = chemically synthesized
  source 1..20: mol_type = other DNA
ctgggtgggcaccatctaat

SEQ ID NO: 27480 - DNA, 20 bp, synthetic construct
  misc_feature 1..20: note = chemically synthesized
  source 1..20: mol_type = other DNA
ggcaccatctaatcagttgc

SEQ ID NO: 27481 - DNA, 20 bp, synthetic construct
  misc_feature 1..20: note = chemically synthesized
  source 1..20: mol_type = other DNA
catctaatcagttgccagtg

SEQ ID NO: 27482 - DNA, 20 bp, synthetic construct
  misc_feature 1..20: note = chemically synthesized
  source 1..20: mol_type = other DNA
taatcagttgccagtgtggc

SEQ ID NO: 27483 - DNA, 20 bp, synthetic construct
  misc_feature 1..20: note = chemically synthesized
  source 1..20: mol_type = other DNA
aatcagttgccagtgtggcc

SEQ ID NO: 27484 - DNA, 20 bp, synthetic construct
  misc_feature 1..20: note = chemically synthesized
  source 1..20: mol_type = other DNA
gccagtgtggccaggatata

SEQ ID NO: 27485 - DNA, 20 bp, synthetic construct
  misc_feature 1..20: note = chemically synthesized
  source 1..20: mol_type = other DNA
agtgtggccaggatataaag

SEQ ID NO: 27486 - DNA, 20 bp, synthetic construct
  misc_feature 1..20: note = chemically synthesized
  source 1..20: mol_type = other DNA
gtgtggccaggatataaagc

SEQ ID NO: 27487 - DNA, 20 bp, synthetic construct
  misc_feature 1..20: note = chemically synthesized
  source 1..20: mol_type = other DNA
tggccaggatataaagcagg

SEQ ID NO: 27488 - DNA, 20 bp, synthetic construct
  misc_feature 1..20: note = chemically synthesized
  source 1..20: mol_type = other DNA
aaaaaaacatgtgaaaatcc

SEQ ID NO: 27489 - DNA, 20 bp, synthetic construct
  misc_feature 1..20: note = chemically synthesized
  source 1..20: mol_type = other DNA
aacatgtgaaaatcctggac

SEQ ID NO: 27490 - DNA, 20 bp, synthetic construct
  misc_feature 1..20: note = chemically synthesized
  source 1..20: mol_type = other DNA
gtgaaaatcctggactggct

SEQ ID NO: 27491 - DNA, 20 bp, synthetic construct
  misc_feature 1..20: note = chemically synthesized
  source 1..20: mol_type = other DNA
cctggactggcttagcctcc

SEQ ID NO: 27492 - DNA, 20 bp, synthetic construct
  misc_feature 1..20: note = chemically synthesized
  source 1..20: mol_type = other DNA
cctacatctttctcccatgc

SEQ ID NO: 27493 - DNA, 20 bp, synthetic construct
  misc_feature 1..20: note = chemically synthesized
  source 1..20: mol_type = other DNA
tgcttcctgccctcaaacat

SEQ ID NO: 27494 - DNA, 20 bp, synthetic construct
  misc_feature 1..20: note = chemically synthesized
  source 1..20: mol_type = other DNA
gccctcaaacattggactcc

SEQ ID NO: 27495 - DNA, 20 bp, synthetic construct
  misc_feature 1..20: note = chemically synthesized
  source 1..20: mol_type = other DNA
acattggactccaagtcctt

SEQ ID NO: 27496 - DNA, 20 bp, synthetic construct
  misc_feature 1..20: note = chemically synthesized
  source 1..20: mol_type = other DNA
gactccaagtccttcagctt

SEQ ID NO: 27497 - DNA, 20 bp, synthetic construct
  misc_feature 1..20: note = chemically synthesized
  source 1..20: mol_type = other DNA
actccaagtccttcagcttt

SEQ ID NO: 27498 - DNA, 20 bp, synthetic construct
  misc_feature 1..20: note = chemically synthesized
  source 1..20: mol_type = other DNA
agtccttcagctttgggact

SEQ ID NO: 27499 - DNA, 20 bp, synthetic construct
  misc_feature 1..20: note = chemically synthesized
  source 1..20: mol_type = other DNA
ttcagctttgggacttggac

SEQ ID NO: 27500 - DNA, 20 bp, synthetic construct
  misc_feature 1..20: note = chemically synthesized
  source 1..20: mol_type = other DNA
cttccttgctcctctgcttg

SEQ ID NO: 27501 - DNA, 20 bp, synthetic construct
  misc_feature 1..20: note = chemically synthesized
  source 1..20: mol_type = other DNA
cttgctcctctgcttgcaga

SEQ ID NO: 27502 - DNA, 20 bp, synthetic construct
  misc_feature 1..20: note = chemically synthesized
  source 1..20: mol_type = other DNA
tgcttgcagatggcctattg

SEQ ID NO: 27503 - DNA, 20 bp, synthetic construct
  misc_feature 1..20: note = chemically synthesized
  source 1..20: mol_type = other DNA
gcttgcagatggcctattgt

SEQ ID NO: 27504 - DNA, 20 bp, synthetic construct
  misc_feature 1..20: note = chemically synthesized
  source 1..20: mol_type = other DNA
gtgggaccttgtgattgtgt

SEQ ID NO: 27505 - DNA, 20 bp, synthetic construct
  misc_feature 1..20: note = chemically synthesized
  source 1..20: mol_type = other DNA
tctatctatctatctcctat

SEQ ID NO: 27506 - DNA, 20 bp, synthetic construct
  misc_feature 1..20: note = chemically synthesized
  source 1..20: mol_type = other DNA
tcctattagttctgtctctc

SEQ ID NO: 27507 - DNA, 20 bp, synthetic construct
  misc_feature 1..20: note = chemically synthesized
  source 1..20: mol_type = other DNA
cctattagttctgtctctct

SEQ ID NO: 27508 - DNA, 20 bp, synthetic construct
  misc_feature 1..20: note = chemically synthesized
  source 1..20: mol_type = other DNA
ctattagttctgtctctcta

SEQ ID NO: 27509 - DNA, 20 bp, synthetic construct
  misc_feature 1..20: note = chemically synthesized
  source 1..20: mol_type = other DNA
ctagggaaccctgacaaata

SEQ ID NO: 27510 - DNA, 20 bp, synthetic construct
  misc_feature 1..20: note = chemically synthesized
  source 1..20: mol_type = other DNA
ggaaccctgacaaatacagt

SEQ ID NO: 27511 - DNA, 20 bp, synthetic construct
  misc_feature 1..20: note = chemically synthesized
  source 1..20: mol_type = other DNA
cctgacaaatacagtgagct

SEQ ID NO: 27512 - DNA, 20 bp, synthetic construct
  misc_feature 1..20: note = chemically synthesized
  source 1..20: mol_type = other DNA
ctgacaaatacagtgagctc

SEQ ID NO: 27513 - DNA, 20 bp, synthetic construct
  misc_feature 1..20: note = chemically synthesized
  source 1..20: mol_type = other DNA
atacagtgagctcaggtcct

SEQ ID NO: 27514 - DNA, 20 bp, synthetic construct
  misc_feature 1..20: note = chemically synthesized
  source 1..20: mol_type = other DNA
cagtgagctcaggtcctgag

SEQ ID NO: 27515 - DNA, 20 bp, synthetic construct
  misc_feature 1..20: note = chemically synthesized
  source 1..20: mol_type = other DNA
cctgagcagacattttccaa

SEQ ID NO: 27516 - DNA, 20 bp, synthetic construct
  misc_feature 1..20: note = chemically synthesized
  source 1..20: mol_type = other DNA
gagcagacattttccaaaag

SEQ ID NO: 27517 - DNA, 20 bp, synthetic construct
  misc_feature 1..20: note = chemically synthesized
  source 1..20: mol_type = other DNA
ttttccaaaagaagacatac

SEQ ID NO: 27518 - DNA, 20 bp, synthetic construct
  misc_feature 1..20: note = chemically synthesized
  source 1..20: mol_type = other DNA
tccaaaagaagacatacaag

SEQ ID NO: 27519 - DNA, 20 bp, synthetic construct
  misc_feature 1..20: note = chemically synthesized
  source 1..20: mol_type = other DNA
ggccaataaacgtcaaaaaa

SEQ ID NO: 27520 - DNA, 20 bp, synthetic construct
  misc_feature 1..20: note = chemically synthesized
  source 1..20: mol_type = other DNA
agttcaacatcactaataat

SEQ ID NO: 27521 - DNA, 20 bp, synthetic construct
  misc_feature 1..20: note = chemically synthesized
  source 1..20: mol_type = other DNA
ttcaacatcactaataatca

SEQ ID NO: 27522 - DNA, 20 bp, synthetic construct
  misc_feature 1..20: note = chemically synthesized
  source 1..20: mol_type = other DNA
catatgatacctccttatgc

SEQ ID NO: 27523 - DNA, 20 bp, synthetic construct
  misc_feature 1..20: note = chemically synthesized
  source 1..20: mol_type = other DNA
tgatacctccttatgccagt

SEQ ID NO: 27524 - DNA, 20 bp, synthetic construct
  misc_feature 1..20: note = chemically synthesized
  source 1..20: mol_type = other DNA
cctccttatgccagtcagaa

SEQ ID NO: 27525 - DNA, 20 bp, synthetic construct
  misc_feature 1..20: note = chemically synthesized
  source 1..20: mol_type = other DNA
tcagaatggctatcattata

SEQ ID NO: 27526 - DNA, 20 bp, synthetic construct
  misc_feature 1..20: note = chemically synthesized
  source 1..20: mol_type = other DNA
atcattataaagttcaaaaa

SEQ ID NO: 27527 - DNA, 20 bp, synthetic construct
  misc_feature 1..20: note = chemically synthesized
  source 1..20: mol_type = other DNA
attataaagttcaaaaacag

SEQ ID NO: 27528 - DNA, 20 bp, synthetic construct
  misc_feature 1..20: note = chemically synthesized
  source 1..20: mol_type = other DNA
agttcaaaaacagcagatgt

SEQ ID NO: 27529 - DNA, 20 bp, synthetic construct
  misc_feature 1..20: note = chemically synthesized
  source 1..20: mol_type = other DNA
caaaaacagcagatgttggt

SEQ ID NO: 27530 - DNA, 20 bp, synthetic construct
  misc_feature 1..20: note = chemically synthesized
  source 1..20: mol_type = other DNA
aaaaacagcagatgttggtg

SEQ ID NO: 27531 - DNA, 20 bp, synthetic construct
  misc_feature 1..20: note = chemically synthesized
  source 1..20: mol_type = other DNA
agcagatgttggtgaggatg

SEQ ID NO: 27532 - DNA, 20 bp, synthetic construct
  misc_feature 1..20: note = chemically synthesized
  source 1..20: mol_type = other DNA
cagatgttggtgaggatgtg

SEQ ID NO: 27533 - DNA, 20 bp, synthetic construct
  misc_feature 1..20: note = chemically synthesized
  source 1..20: mol_type = other DNA
gttggtgaggatgtggagac

SEQ ID NO: 27534 - DNA, 20 bp, synthetic construct
  misc_feature 1..20: note = chemically synthesized
  source 1..20: mol_type = other DNA
agaaaatgcttatacactgt

SEQ ID NO: 27535 - DNA, 20 bp, synthetic construct
  misc_feature 1..20: note = chemically synthesized
  source 1..20: mol_type = other DNA
aatgcttatacactgttggt

SEQ ID NO: 27536 - DNA, 20 bp, synthetic construct
  misc_feature 1..20: note = chemically synthesized
  source 1..20: mol_type = other DNA
ctgttggtaagaatgtaaat

SEQ ID NO: 27537 - DNA, 20 bp, synthetic construct
  misc_feature 1..20: note = chemically synthesized
  source 1..20: mol_type = other DNA
gtaaattagtacaaacttta

SEQ ID NO: 27538 - DNA, 20 bp, synthetic construct
  misc_feature 1..20: note = chemically synthesized
  source 1..20: mol_type = other DNA
aattagtacaaactttatgg

SEQ ID NO: 27539 - DNA, 20 bp, synthetic construct
  misc_feature 1..20: note = chemically synthesized
  source 1..20: mol_type = other DNA
agtacaaactttatggaaga

SEQ ID NO: 27540 - DNA, 20 bp, synthetic construct
  misc_feature 1..20: note = chemically synthesized
  source 1..20: mol_type = other DNA
actttatggaagacagcatg

SEQ ID NO: 27541 - DNA, 20 bp, synthetic construct
  misc_feature 1..20: note = chemically synthesized
  source 1..20: mol_type = other DNA
gacagcatgaagatttctta

SEQ ID NO: 27542 - DNA, 20 bp, synthetic construct
  misc_feature 1..20: note = chemically synthesized
  source 1..20: mol_type = other DNA
atgaagatttcttaaagaac

SEQ ID NO: 27543 - DNA, 20 bp, synthetic construct
  misc_feature 1..20: note = chemically synthesized
  source 1..20: mol_type = other DNA
atttcttaaagaactagaaa

SEQ ID NO: 27544 - DNA, 20 bp, synthetic construct
  misc_feature 1..20: note = chemically synthesized
  source 1..20: mol_type = other DNA
caatcctgcaatcccactac

SEQ ID NO: 27545 - DNA, 20 bp, synthetic construct
  misc_feature 1..20: note = chemically synthesized
  source 1..20: mol_type = other DNA
aatcctgcaatcccactact

SEQ ID NO: 27546 - DNA, 20 bp, synthetic construct
  misc_feature 1..20: note = chemically synthesized
  source 1..20: mol_type = other DNA
tgcaatcccactactgggta

SEQ ID NO: 27547 - DNA, 20 bp, synthetic construct
  misc_feature 1..20: note = chemically synthesized
  source 1..20: mol_type = other DNA
cactactgggtatggaccca

SEQ ID NO: 27548 - DNA, 20 bp, synthetic construct
  misc_feature 1..20: note = chemically synthesized
  source 1..20: mol_type = other DNA
tgggtatggacccaaagtga

SEQ ID NO: 27549 - DNA, 20 bp, synthetic construct
  misc_feature 1..20: note = chemically synthesized
  source 1..20: mol_type = other DNA
ggtatggacccaaagtgaaa

SEQ ID NO: 27550 - DNA, 20 bp, synthetic construct
  misc_feature 1..20: note = chemically synthesized
  source 1..20: mol_type = other DNA
tgaaagagatcatattaaaa

SEQ ID NO: 27551 - DNA, 20 bp, synthetic construct
  misc_feature 1..20: note = chemically synthesized
  source 1..20: mol_type = other DNA
attaaaaaagatatctgcat

SEQ ID NO: 27552 - DNA, 20 bp, synthetic construct
  misc_feature 1..20: note = chemically synthesized
  source 1..20: mol_type = other DNA
tatctgcattagtatgttca

SEQ ID NO: 27553 - DNA, 20 bp, synthetic construct
  misc_feature 1..20: note = chemically synthesized
  source 1..20: mol_type = other DNA
ctgcattagtatgttcaaag

SEQ ID NO: 27554 - DNA, 20 bp, synthetic construct
  misc_feature 1..20: note = chemically synthesized
  source 1..20: mol_type = other DNA
caaagtagcactgttcccaa

SEQ ID NO: 27555 - DNA, 20 bp, synthetic construct
  misc_feature 1..20: note = chemically synthesized
  source 1..20: mol_type = other DNA
tagcactgttcccaatagca

SEQ ID NO: 27556 - DNA, 20 bp, synthetic construct
  misc_feature 1..20: note = chemically synthesized
  source 1..20: mol_type = other DNA
tgttcccaatagcaaagata

SEQ ID NO: 27557 - DNA, 20 bp, synthetic construct
  misc_feature 1..20: note = chemically synthesized
  source 1..20: mol_type = other DNA
tcaacctaaatgtctaccaa

SEQ ID NO: 27558 - DNA, 20 bp, synthetic construct
  misc_feature 1..20: note = chemically synthesized
  source 1..20: mol_type = other DNA
aatgtctaccaatggacgat

SEQ ID NO: 27559 - DNA, 20 bp, synthetic construct
  misc_feature 1..20: note = chemically synthesized
  source 1..20: mol_type = other DNA
taccaatggacgattggata

SEQ ID NO: 27560 - DNA, 20 bp, synthetic construct
  misc_feature 1..20: note = chemically synthesized
  source 1..20: mol_type = other DNA
acgattggataaagaaaatg

SEQ ID NO: 27561 - DNA, 20 bp, synthetic construct
  misc_feature 1..20: note = chemically synthesized
  source 1..20: mol_type = other DNA
ttatatacatatatattact

SEQ ID NO: 27562 - DNA, 20 bp, synthetic construct
  misc_feature 1..20: note = chemically synthesized
  source 1..20: mol_type = other DNA
tatattactcagccataaaa

SEQ ID NO: 27563 - DNA, 20 bp, synthetic construct
  misc_feature 1..20: note = chemically synthesized
  source 1..20: mol_type = other DNA
gaatgaaatcatgtcttctc

SEQ ID NO: 27564 - DNA, 20 bp, synthetic construct
  misc_feature 1..20: note = chemically synthesized
  source 1..20: mol_type = other DNA
tcatgtcttctctagaaaca

SEQ ID NO: 27565 - DNA, 20 bp, synthetic construct
  misc_feature 1..20: note = chemically synthesized
  source 1..20: mol_type = other DNA
gtcttctctagaaacatggt

SEQ ID NO: 27566 - DNA, 20 bp, synthetic construct
  misc_feature 1..20: note = chemically synthesized
  source 1..20: mol_type = other DNA
tctagaaacatggttagaac

SEQ ID NO: 27567 - DNA, 20 bp, synthetic construct
  misc_feature 1..20: note = chemically synthesized
  source 1..20: mol_type = other DNA
tagaaacatggttagaactg

SEQ ID NO: 27568 - DNA, 20 bp, synthetic construct
  misc_feature 1..20: note = chemically synthesized
  source 1..20: mol_type = other DNA
agaaacatggttagaactgg

SEQ ID NO: 27569 - DNA, 20 bp, synthetic construct
  misc_feature 1..20: note = chemically synthesized
  source 1..20: mol_type = other DNA
gaactggaggacattatcct

SEQ ID NO: 27570 - DNA, 20 bp, synthetic construct
  misc_feature 1..20: note = chemically synthesized
  source 1..20: mol_type = other DNA
ttatcctcagtgaaataact

SEQ ID NO: 27571 - DNA, 20 bp, synthetic construct
  misc_feature 1..20: note = chemically synthesized
  source 1..20: mol_type = other DNA
tcagtgaaataactcagaaa

SEQ ID NO: 27572 - DNA, 20 bp, synthetic construct
  misc_feature 1..20: note = chemically synthesized
  source 1..20: mol_type = other DNA
tgaaataactcagaaacaga

SEQ ID NO: 27573 - DNA, 20 bp, synthetic construct
  misc_feature 1..20: note = chemically synthesized
  source 1..20: mol_type = other DNA
cagaaacagaaagtcaaaca

SEQ ID NO: 27574 - DNA, 20 bp, synthetic construct
  misc_feature 1..20: note = chemically synthesized
  source 1..20: mol_type = other DNA
aaacacagtatgttctcatt

SEQ ID NO: 27575 - DNA, 20 bp, synthetic construct
  misc_feature 1..20: note = chemically synthesized
  source 1..20: mol_type = other DNA
acagtatgttctcatttagt

SEQ ID NO: 27576 - DNA, 20 bp, synthetic construct
  misc_feature 1..20: note = chemically synthesized
  source 1..20: mol_type = other DNA
agtatgttctcatttagtga

SEQ ID NO: 27577 - DNA, 20 bp, synthetic construct
  misc_feature 1..20: note = chemically synthesized
  source 1..20: mol_type = other DNA
gttctcatttagtgagagcc

SEQ ID NO: 27578 - DNA, 20 bp, synthetic construct
  misc_feature 1..20: note = chemically synthesized
  source 1..20: mol_type = other DNA
ctcatttagtgagagccaag

SEQ ID NO: 27579 - DNA, 20 bp, synthetic construct
  misc_feature 1..20: note = chemically synthesized
  source 1..20: mol_type = other DNA
tcatttagtgagagccaagt

SEQ ID NO: 27580 - DNA, 20 bp, synthetic construct
  misc_feature 1..20: note = chemically synthesized
  source 1..20: mol_type = other DNA
atttagtgagagccaagtgg

SEQ ID NO: 27581 - DNA, 20 bp, synthetic construct
  misc_feature 1..20: note = chemically synthesized
  source 1..20: mol_type = other DNA
ccaagtgggagctaaacgat

SEQ ID NO: 27582 - DNA, 20 bp, synthetic construct
  misc_feature 1..20: note = chemically synthesized
  source 1..20: mol_type = other DNA
gtgggagctaaacgatgagt

SEQ ID NO: 27583 - DNA, 20 bp, synthetic construct
  misc_feature 1..20: note = chemically synthesized
  source 1..20: mol_type = other DNA
agctaaacgatgagtaagca

SEQ ID NO: 27584 - DNA, 20 bp, synthetic construct
  misc_feature 1..20: note = chemically synthesized
  source 1..20: mol_type = other DNA
gatgagtaagcatagacata

SEQ ID NO: 27585 - DNA, 20 bp, synthetic construct
  misc_feature 1..20: note = chemically synthesized
  source 1..20: mol_type = other DNA
agacatatagaatgaaataa

SEQ ID NO: 27586 - DNA, 20 bp, synthetic construct
  misc_feature 1..20: note = chemically synthesized
  source 1..20: mol_type = other DNA
gaatgaaataatagacactt

SEQ ID NO: 27587 - DNA, 20 bp, synthetic construct
  misc_feature 1..20: note = chemically synthesized
  source 1..20: mol_type = other DNA
aaataatagacacttgagac

SEQ ID NO: 27588 - DNA, 20 bp, synthetic construct
  misc_feature 1..20: note = chemically synthesized
  source 1..20: mol_type = other DNA
ataatagacacttgagacta

SEQ ID NO: 27589 - DNA, 20 bp, synthetic construct
  misc_feature 1..20: note = chemically synthesized
  source 1..20: mol_type = other DNA
tagacacttgagactagaga

SEQ ID NO: 27590 - DNA, 20 bp, synthetic construct
  misc_feature 1..20: note = chemically synthesized
  source 1..20: mol_type = other DNA
agacacttgagactagagaa

SEQ ID NO: 27591 - DNA, 20 bp, synthetic construct
  misc_feature 1..20: note = chemically synthesized
  source 1..20: mol_type = other DNA
cacttgagactagagaaagg

SEQ ID NO: 27592 - DNA, 20 bp, synthetic construct
  misc_feature 1..20: note = chemically synthesized
  source 1..20: mol_type = other DNA
acttgagactagagaaaggt

SEQ ID NO: 27593 - DNA, 20 bp, synthetic construct
  misc_feature 1..20: note = chemically synthesized
  source 1..20: mol_type = other DNA
ttgagactagagaaaggtgg

SEQ ID NO: 27594 - DNA, 20 bp, synthetic construct
  misc_feature 1..20: note = chemically synthesized
  source 1..20: mol_type = other DNA
tgagactagagaaaggtggg

SEQ ID NO: 27595 - DNA, 20 bp, synthetic construct
  misc_feature 1..20: note = chemically synthesized
  source 1..20: mol_type = other DNA
actagagaaaggtgggagga

SEQ ID NO: 27596 - DNA, 20 bp, synthetic construct
  misc_feature 1..20: note = chemically synthesized
  source 1..20: mol_type = other DNA
ctagagaaaggtgggaggat

SEQ ID NO: 27597 - DNA, 20 bp, synthetic construct
  misc_feature 1..20: note = chemically synthesized
  source 1..20: mol_type = other DNA
agagaaaggtgggaggatag

SEQ ID NO: 27598 - DNA, 20 bp, synthetic construct
  misc_feature 1..20: note = chemically synthesized
  source 1..20: mol_type = other DNA
aaggtgggaggataggagta

SEQ ID NO: 27599 - DNA, 20 bp, synthetic construct
  misc_feature 1..20: note = chemically synthesized
  source 1..20: mol_type = other DNA
tgggaggataggagtatggt

SEQ ID NO: 27600 - DNA, 20 bp, synthetic construct
  misc_feature 1..20: note = chemically synthesized
  source 1..20: mol_type = other DNA
gggaggataggagtatggtg

SEQ ID NO: 27601 - DNA, 20 bp, synthetic construct
  misc_feature 1..20: note = chemically synthesized
  source 1..20: mol_type = other DNA
tggtgaggactgaaaaacta

SEQ ID NO: 27602 - DNA, 20 bp, synthetic construct
  misc_feature 1..20: note = chemically synthesized
  source 1..20: mol_type = other DNA
aggactgaaaaactacggat

SEQ ID NO: 27603 - DNA, 20 bp, synthetic construct
  misc_feature 1..20: note = chemically synthesized
  source 1..20: mol_type = other DNA
tggatacaacattcactttt

SEQ ID NO: 27604 - DNA, 20 bp, synthetic construct
  misc_feature 1..20: note = chemically synthesized
  source 1..20: mol_type = other DNA
ggatacaacattcacttttc

SEQ ID NO: 27605 - DNA, 20 bp, synthetic construct
  misc_feature 1..20: note = chemically synthesized
  source 1..20: mol_type = other DNA
aacattcacttttcaggtga

SEQ ID NO: 27606 - DNA, 20 bp, synthetic construct
  misc_feature 1..20: note = chemically synthesized
  source 1..20: mol_type = other DNA
ttcaggtgatggtccactaa

SEQ ID NO: 27607 - DNA, 20 bp, synthetic construct
  misc_feature 1..20: note = chemically synthesized
  source 1..20: mol_type = other DNA
gtgatggtccactaaaagct

SEQ ID NO: 27608 - DNA, 20 bp, synthetic construct
  misc_feature 1..20: note = chemically synthesized
  source 1..20: mol_type = other DNA
actatgcaacatacatatgt

SEQ ID NO: 27609 - DNA, 20 bp, synthetic construct
  misc_feature 1..20: note = chemically synthesized
  source 1..20: mol_type = other DNA
ctatgcaacatacatatgta

SEQ ID NO: 27610 - DNA, 20 bp, synthetic construct
  misc_feature 1..20: note = chemically synthesized
  source 1..20: mol_type = other DNA
catacatatgtaaggaaccc

SEQ ID NO: 27611 - DNA, 20 bp, synthetic construct
  misc_feature 1..20: note = chemically synthesized
  source 1..20: mol_type = other DNA
cccgagcttgtaccctgata

SEQ ID NO: 27612 - DNA, 20 bp, synthetic construct
  misc_feature 1..20: note = chemically synthesized
  source 1..20: mol_type = other DNA
ccaaatctcatcttgaattg

SEQ ID NO: 27613 - DNA, 20 bp, synthetic construct
  misc_feature 1..20: note = chemically synthesized
  source 1..20: mol_type = other DNA
cccataatcctcacgtgttg

SEQ ID NO: 27614 - DNA, 20 bp, synthetic construct
  misc_feature 1..20: note = chemically synthesized
  source 1..20: mol_type = other DNA
ccataatcctcacgtgttgt

SEQ ID NO: 27615 - DNA, 20 bp, synthetic construct
  misc_feature 1..20: note = chemically synthesized
  source 1..20: mol_type = other DNA
ataatcctcacgtgttgtgg

SEQ ID NO: 27616 - DNA, 20 bp, synthetic construct
  misc_feature 1..20: note = chemically synthesized
  source 1..20: mol_type = other DNA
taatcctcacgtgttgtggg

SEQ ID NO: 27617 - DNA, 20 bp, synthetic construct
  misc_feature 1..20: note = chemically synthesized
  source 1..20: mol_type = other DNA
aatcctcacgtgttgtggga

SEQ ID NO: 27618 - DNA, 20 bp, synthetic construct
  misc_feature 1..20: note = chemically synthesized
  source 1..20: mol_type = other DNA
cacgtgttgtgggagggatt

SEQ ID NO: 27619 - DNA, 20 bp, synthetic construct
  misc_feature 1..20: note = chemically synthesized
  source 1..20: mol_type = other DNA
cgtgttgtgggagggatttg

SEQ ID NO: 27620 - DNA, 20 bp, synthetic construct
  misc_feature 1..20: note = chemically synthesized
  source 1..20: mol_type = other DNA
gtgttgtgggagggatttgg

SEQ ID NO: 27621 - DNA, 20 bp, synthetic construct
  misc_feature 1..20: note = chemically synthesized
  source 1..20: mol_type = other DNA
tgttgtgggagggatttgga

SEQ ID NO: 27622 - DNA, 20 bp, synthetic construct
  misc_feature 1..20: note = chemically synthesized
  source 1..20: mol_type = other DNA
ttgtgggagggatttggagg

SEQ ID NO: 27623 - DNA, 20 bp, synthetic construct
  misc_feature 1..20: note = chemically synthesized
  source 1..20: mol_type = other DNA
tgtgggagggatttggaggg

SEQ ID NO: 27624 - DNA, 20 bp, synthetic construct
  misc_feature 1..20: note = chemically synthesized
  source 1..20: mol_type = other DNA
ggagggaggtaattgaatca

SEQ ID NO: 27625 - DNA, 20 bp, synthetic construct
  misc_feature 1..20: note = chemically synthesized
  source 1..20: mol_type = other DNA
agggaggtaattgaatcata

SEQ ID NO: 27626 - DNA, 20 bp, synthetic construct
  misc_feature 1..20: note = chemically synthesized
  source 1..20: mol_type = other DNA
gggaggtaattgaatcatag

SEQ ID NO: 27627 - DNA, 20 bp, synthetic construct
  misc_feature 1..20: note = chemically synthesized
  source 1..20: mol_type = other DNA
gaggtaattgaatcatagag

SEQ ID NO: 27628 - DNA, 20 bp, synthetic construct
  misc_feature 1..20: note = chemically synthesized
  source 1..20: mol_type = other DNA
aggtaattgaatcatagagg

SEQ ID NO: 27629 - DNA, 20 bp, synthetic construct
  misc_feature 1..20: note = chemically synthesized
  source 1..20: mol_type = other DNA
ctctcatgctcttctcgtga

SEQ ID NO: 27630 - DNA, 20 bp, synthetic construct
  misc_feature 1..20: note = chemically synthesized
  source 1..20: mol_type = other DNA
catgctcttctcgtgatagt

SEQ ID NO: 27631 - DNA, 20 bp, synthetic construct
  misc_feature 1..20: note = chemically synthesized
  source 1..20: mol_type = other DNA
tcgtgatagtgagttcttac

SEQ ID NO: 27632 - DNA, 20 bp, synthetic construct
  misc_feature 1..20: note = chemically synthesized
  source 1..20: mol_type = other DNA
tgagttcttacaagatctga

SEQ ID NO: 27633 - DNA, 20 bp, synthetic construct
  misc_feature 1..20: note = chemically synthesized
  source 1..20: mol_type = other DNA
acaagatctgatggttttat

SEQ ID NO: 27634 - DNA, 20 bp, synthetic construct
  misc_feature 1..20: note = chemically synthesized
  source 1..20: mol_type = other DNA
agatctgatggttttataag

SEQ ID NO: 27635 - DNA, 20 bp, synthetic construct
  misc_feature 1..20: note = chemically synthesized
  source 1..20: mol_type = other DNA
cggcttttcccccttttgct

SEQ ID NO: 27636 - DNA, 20 bp, synthetic construct
  misc_feature 1..20: note = chemically synthesized
  source 1..20: mol_type = other DNA
ctacttgctgctgccatgtg

SEQ ID NO: 27637 - DNA, 20 bp, synthetic construct
  misc_feature 1..20: note = chemically synthesized
  source 1..20: mol_type = other DNA
cttgctgctgccatgtgaag

SEQ ID NO: 27638 - DNA, 20 bp, synthetic construct
  misc_feature 1..20: note = chemically synthesized
  source 1..20: mol_type = other DNA
ttgctgctgccatgtgaaga

SEQ ID NO: 27639 - DNA, 20 bp, synthetic construct
  misc_feature 1..20: note = chemically synthesized
  source 1..20: mol_type = other DNA
tcttcttctgccatgattgt

SEQ ID NO: 27640 - DNA, 20 bp, synthetic construct
  misc_feature 1..20: note = chemically synthesized
  source 1..20: mol_type = other DNA
gccatgattgtaagtttccc

SEQ ID NO: 27641 - DNA, 20 bp, synthetic construct
  misc_feature 1..20: note = chemically synthesized
  source 1..20: mol_type = other DNA
ccatgattgtaagtttcccg

SEQ ID NO: 27642 - DNA, 20 bp, synthetic construct
  misc_feature 1..20: note = chemically synthesized
  source 1..20: mol_type = other DNA
taagtttcccgaggcctccc

SEQ ID NO: 27643 - DNA, 20 bp, synthetic construct
  misc_feature 1..20: note = chemically synthesized
  source 1..20: mol_type = other DNA
ccgaggcctccccagccctg

SEQ ID NO: 27644 - DNA, 20 bp, synthetic construct
  misc_feature 1..20: note = chemically synthesized
  source 1..20: mol_type = other DNA
ccccagccctgtggaactgt

SEQ ID NO: 27645 - DNA, 20 bp, synthetic construct
  misc_feature 1..20: note = chemically synthesized
  source 1..20: mol_type = other DNA
ttttttccttataaattacc

SEQ ID NO: 27646 - DNA, 20 bp, synthetic construct
  misc_feature 1..20: note = chemically synthesized
  source 1..20: mol_type = other DNA
ccttataaattacccagtct

SEQ ID NO: 27647 - DNA, 20 bp, synthetic construct
  misc_feature 1..20: note = chemically synthesized
  source 1..20: mol_type = other DNA
cttataaattacccagtctc

SEQ ID NO: 27648 - DNA, 20 bp, synthetic construct
  misc_feature 1..20: note = chemically synthesized
  source 1..20: mol_type = other DNA
agtctcaggtatgtctttat

SEQ ID NO: 27649 - DNA, 20 bp, synthetic construct
  misc_feature 1..20: note = chemically synthesized
  source 1..20: mol_type = other DNA
ctcaggtatgtctttataag

SEQ ID NO: 27650 - DNA, 20 bp, synthetic construct
  misc_feature 1..20: note = chemically synthesized
  source 1..20: mol_type = other DNA
taagcagcatgataacgaac

SEQ ID NO: 27651 - DNA, 20 bp, synthetic construct
  misc_feature 1..20: note = chemically synthesized
  source 1..20: mol_type = other DNA
tttaaaaatataaaataaat

SEQ ID NO: 27652 - DNA, 20 bp, synthetic construct
  misc_feature 1..20: note = chemically synthesized
  source 1..20: mol_type = other DNA
ataaattagatctgattgaa

SEQ ID NO: 27653 - DNA, 20 bp, synthetic construct
  misc_feature 1..20: note = chemically synthesized
  source 1..20: mol_type = other DNA
taaattagatctgattgaaa

SEQ ID NO: 27654 - DNA, 20 bp, synthetic construct
  misc_feature 1..20: note = chemically synthesized
  source 1..20: mol_type = other DNA
tgattgaaaaggcaaaaatt

SEQ ID NO: 27655 - DNA, 20 bp, synthetic construct
  misc_feature 1..20: note = chemically synthesized
  source 1..20: mol_type = other DNA
tgaaaaggcaaaaattgagc

SEQ ID NO: 27656 - DNA, 20 bp, synthetic construct
  misc_feature 1..20: note = chemically synthesized
  source 1..20: mol_type = other DNA
gcaagcaaaatatcacttaa

SEQ ID NO: 27657 - DNA, 20 bp, synthetic construct
  misc_feature 1..20: note = chemically synthesized
  source 1..20: mol_type = other DNA
caagcaaaatatcacttaat

SEQ ID NO: 27658 - DNA, 20 bp, synthetic construct
  misc_feature 1..20: note = chemically synthesized
  source 1..20: mol_type = other DNA
aagcaaaatatcacttaatg

SEQ ID NO: 27659 - DNA, 20 bp, synthetic construct
  misc_feature 1..20: note = chemically synthesized
  source 1..20: mol_type = other DNA
tcacttaatggggtaattaa

SEQ ID NO: 27660 - DNA, 20 bp, synthetic construct
  misc_feature 1..20: note = chemically synthesized
  source 1..20: mol_type = other DNA
cacttaatggggtaattaaa

SEQ ID NO: 27661 - DNA, 20 bp, synthetic construct
  misc_feature 1..20: note = chemically synthesized
  source 1..20: mol_type = other DNA
acttaatggggtaattaaaa

SEQ ID NO: 27662 - DNA, 20 bp, synthetic construct
  misc_feature 1..20: note = chemically synthesized
  source 1..20: mol_type = other DNA
atggggtaattaaaagggtg

SEQ ID NO: 27663 - DNA, 20 bp, synthetic construct
  misc_feature 1..20: note = chemically synthesized
  source 1..20: mol_type = other DNA
aattaaaagggtgaagaaat

SEQ ID NO: 27664 - DNA, 20 bp, synthetic construct
  misc_feature 1..20: note = chemically synthesized
  source 1..20: mol_type = other DNA
attaaaagggtgaagaaatt

SEQ ID NO: 27665 - DNA, 20 bp, synthetic construct
  misc_feature 1..20: note = chemically synthesized
  source 1..20: mol_type = other DNA
gggtgaagaaattgggcaaa

SEQ ID NO: 27666 - DNA, 20 bp, synthetic construct
  misc_feature 1..20: note = chemically synthesized
  source 1..20: mol_type = other DNA
attgggcaaatggatgtcat

SEQ ID NO: 27667 - DNA, 20 bp, synthetic construct
  misc_feature 1..20: note = chemically synthesized
  source 1..20: mol_type = other DNA
ttgggcaaatggatgtcatg

SEQ ID NO: 27668 - DNA, 20 bp, synthetic construct
  misc_feature 1..20: note = chemically synthesized
  source 1..20: mol_type = other DNA
gggcaaatggatgtcatgag

SEQ ID NO: 27669 - DNA, 20 bp, synthetic construct
  misc_feature 1..20: note = chemically synthesized
  source 1..20: mol_type = other DNA
ggcaaatggatgtcatgagg

SEQ ID NO: 27670 - DNA, 20 bp, synthetic construct
  misc_feature 1..20: note = chemically synthesized
  source 1..20: mol_type = other DNA
atgtcatgaggaggaatttt

SEQ ID NO: 27671 - DNA, 20 bp, synthetic construct
  misc_feature 1..20: note = chemically synthesized
  source 1..20: mol_type = other DNA
tgtcatgaggaggaattttt

SEQ ID NO: 27672 - DNA, 20 bp, synthetic construct
  misc_feature 1..20: note = chemically synthesized
  source 1..20: mol_type = other DNA
catgaggaggaatttttagg

SEQ ID NO: 27673 - DNA, 20 bp, synthetic construct
  misc_feature 1..20: note = chemically synthesized
  source 1..20: mol_type = other DNA
tgaggaggaatttttaggca

SEQ ID NO: 27674 - DNA, 20 bp, synthetic construct
  misc_feature 1..20: note = chemically synthesized
  source 1..20: mol_type = other DNA
gaggaggaatttttaggcag

SEQ ID NO: 27675 - DNA, 20 bp, synthetic construct
  misc_feature 1..20: note = chemically synthesized
  source 1..20: mol_type = other DNA
gaatttttaggcagaggtaa

SEQ ID NO: 27676 - DNA, 20 bp, synthetic construct
  misc_feature 1..20: note = chemically synthesized
  source 1..20: mol_type = other DNA
ttttaggcagaggtaatggt

SEQ ID NO: 27677 - DNA, 20 bp, synthetic construct
  misc_feature 1..20: note = chemically synthesized
  source 1..20: mol_type = other DNA
ttaggcagaggtaatggtca

SEQ ID NO: 27678 - DNA, 20 bp, synthetic construct
  misc_feature 1..20: note = chemically synthesized
  source 1..20: mol_type = other DNA
cagaggtaatggtcagagcc

SEQ ID NO: 27679 - DNA, 20 bp, synthetic construct
  misc_feature 1..20: note = chemically synthesized
  source 1..20: mol_type = other DNA
agaggtaatggtcagagccc

SEQ ID NO: 27680 - DNA, 20 bp, synthetic construct
  misc_feature 1..20: note = chemically synthesized
  source 1..20: mol_type = other DNA
atggtcagagcccaggccct

SEQ ID NO: 27681 - DNA, 20 bp, synthetic construct
  misc_feature 1..20: note = chemically synthesized
  source 1..20: mol_type = other DNA
tcagagcccaggccctaagc

SEQ ID NO: 27682 - DNA, 20 bp, synthetic construct
  misc_feature 1..20: note = chemically synthesized
  source 1..20: mol_type = other DNA
agagcccaggccctaagctg

SEQ ID NO: 27683 - DNA, 20 bp, synthetic construct
  misc_feature 1..20: note = chemically synthesized
  source 1..20: mol_type = other DNA
gcccaggccctaagctggag

SEQ ID NO: 27684 - DNA, 20 bp, synthetic construct
  misc_feature 1..20: note = chemically synthesized
  source 1..20: mol_type = other DNA
ccaggccctaagctggagta

SEQ ID NO: 27685 - DNA, 20 bp, synthetic construct
  misc_feature 1..20: note = chemically synthesized
  source 1..20: mol_type = other DNA
taagctggagtagagtgtgc

SEQ ID NO: 27686 - DNA, 20 bp, synthetic construct
  misc_feature 1..20: note = chemically synthesized
  source 1..20: mol_type = other DNA
aagctggagtagagtgtgca

SEQ ID NO: 27687 - DNA, 20 bp, synthetic construct
  misc_feature 1..20: note = chemically synthesized
  source 1..20: mol_type = other DNA
tggagtagagtgtgcaagga

SEQ ID NO: 27688 - DNA, 20 bp, synthetic construct
  misc_feature 1..20: note = chemically synthesized
  source 1..20: mol_type = other DNA
gagtagagtgtgcaaggaaa

SEQ ID NO: 27689 - DNA, 20 bp, synthetic construct
  misc_feature 1..20: note = chemically synthesized
  source 1..20: mol_type = other DNA
agtgtgcaaggaaagagtaa

SEQ ID NO: 27690 - DNA, 20 bp, synthetic construct
  misc_feature 1..20: note = chemically synthesized
  source 1..20: mol_type = other DNA
gtgtgcaaggaaagagtaat

SEQ ID NO: 27691 - DNA, 20 bp, synthetic construct
  misc_feature 1..20: note = chemically synthesized
  source 1..20: mol_type = other DNA
gaaagagtaataggattgaa

SEQ ID NO: 27692 - DNA, 20 bp, synthetic construct
  misc_feature 1..20: note = chemically synthesized
  source 1..20: mol_type = other DNA
aaagagtaataggattgaaa

SEQ ID NO: 27693 - DNA, 20 bp, synthetic construct
  misc_feature 1..20: note = chemically synthesized
  source 1..20: mol_type = other DNA
ataggattgaaaaggataac

SEQ ID NO: 27694 - DNA, 20 bp, synthetic construct
  misc_feature 1..20: note = chemically synthesized
  source 1..20: mol_type = other DNA
taggattgaaaaggataacc

SEQ ID NO: 27695 - DNA, 20 bp, synthetic construct
  misc_feature 1..20: note = chemically synthesized
  source 1..20: mol_type = other DNA
gattgaaaaggataaccagg

SEQ ID NO: 27696 - DNA, 20 bp, synthetic construct
  misc_feature 1..20: note = chemically synthesized
  source 1..20: mol_type = other DNA
attgaaaaggataaccaggt

SEQ ID NO: 27697 - DNA, 20 bp, synthetic construct
  misc_feature 1..20: note = chemically synthesized
  source 1..20: mol_type = other DNA
tgaaaaggataaccaggtag

SEQ ID NO: 27698 - DNA, 20 bp, synthetic construct
  misc_feature 1..20: note = chemically synthesized
  source 1..20: mol_type = other DNA
gaaaaggataaccaggtagg

SEQ ID NO: 27699 - DNA, 20 bp, synthetic construct
  misc_feature 1..20: note = chemically synthesized
  source 1..20: mol_type = other DNA
gataaccaggtaggaggaca

SEQ ID NO: 27700 - DNA, 20 bp, synthetic construct
  misc_feature 1..20: note = chemically synthesized
  source 1..20: mol_type = other DNA
ataaccaggtaggaggacat

SEQ ID NO: 27701 - DNA, 20 bp, synthetic construct
  misc_feature 1..20: note = chemically synthesized
  source 1..20: mol_type = other DNA
taaccaggtaggaggacata

SEQ ID NO: 27702 - DNA, 20 bp, synthetic construct
  misc_feature 1..20: note = chemically synthesized
  source 1..20: mol_type = other DNA
accaggtaggaggacatagg

SEQ ID NO: 27703 - DNA, 20 bp, synthetic construct
  misc_feature 1..20: note = chemically synthesized
  source 1..20: mol_type = other DNA
ccaggtaggaggacataggg

SEQ ID NO: 27704 - DNA, 20 bp, synthetic construct
  misc_feature 1..20: note = chemically synthesized
  source 1..20: mol_type = other DNA
caggtaggaggacataggga

SEQ ID NO: 27705 - DNA, 20 bp, synthetic construct
  misc_feature 1..20: note = chemically synthesized
  source 1..20: mol_type = other DNA
aggtaggaggacatagggag

SEQ ID NO: 27706 - DNA, 20 bp, synthetic construct
  misc_feature 1..20: note = chemically synthesized
  source 1..20: mol_type = other DNA
aggaggacatagggaggggt

SEQ ID NO: 27707 - DNA, 20 bp, synthetic construct
  misc_feature 1..20: note = chemically synthesized
  source 1..20: mol_type = other DNA
ggaggacatagggaggggta

SEQ ID NO: 27708 - DNA, 20 bp, synthetic construct
  misc_feature 1..20: note = chemically synthesized
  source 1..20: mol_type = other DNA
gaggacatagggaggggtaa

SEQ ID NO: 27709 - DNA, 20 bp, synthetic construct
  misc_feature 1..20: note = chemically synthesized
  source 1..20: mol_type = other DNA
aggacatagggaggggtaag

SEQ ID NO: 27710 - DNA, 20 bp, synthetic construct
  misc_feature 1..20: note = chemically synthesized
  source 1..20: mol_type = other DNA
gacatagggaggggtaaggg

SEQ ID NO: 27711 - DNA, 20 bp, synthetic construct
  misc_feature 1..20: note = chemically synthesized
  source 1..20: mol_type = other DNA
acatagggaggggtaagggg

SEQ ID NO: 27712 - DNA, 20 bp, synthetic construct
  misc_feature 1..20: note = chemically synthesized
  source 1..20: mol_type = other DNA
tagggaggggtaaggggagg

SEQ ID NO: 27713 - DNA, 20 bp, synthetic construct
  misc_feature 1..20: note = chemically synthesized
  source 1..20: mol_type = other DNA
ggtaaggggaggaagacctc

SEQ ID NO: 27714 - DNA, 20 bp, synthetic construct
  misc_feature 1..20: note = chemically synthesized
  source 1..20: mol_type = other DNA
aggaagacctccagtaaact

SEQ ID NO: 27715 - DNA, 20 bp, synthetic construct
  misc_feature 1..20: note = chemically synthesized
  source 1..20: mol_type = other DNA
ggaagacctccagtaaactt

SEQ ID NO: 27716 - DNA, 20 bp, synthetic construct
  misc_feature 1..20: note = chemically synthesized
  source 1..20: mol_type = other DNA
agacctccagtaaacttagg

SEQ ID NO: 27717 - DNA, 20 bp, synthetic construct
  misc_feature 1..20: note = chemically synthesized
  source 1..20: mol_type = other DNA
gacctccagtaaacttaggc

SEQ ID NO: 27718 - DNA, 20 bp, synthetic construct
  misc_feature 1..20: note = chemically synthesized
  source 1..20: mol_type = other DNA
aggcaggatatttcccgtga

SEQ ID NO: 27719 - DNA, 20 bp, synthetic construct
  misc_feature 1..20: note = chemically synthesized
  source 1..20: mol_type = other DNA
actaaataataatcacatgt

SEQ ID NO: 27720 - DNA, 20 bp, synthetic construct
  misc_feature 1..20: note = chemically synthesized
  source 1..20: mol_type = other DNA
aaataatctgtcgattactt

SEQ ID NO: 27721 - DNA, 20 bp, synthetic construct
  misc_feature 1..20: note = chemically synthesized
  source 1..20: mol_type = other DNA
ttgagcaatactttgttcat

SEQ ID NO: 27722 - DNA, 20 bp, synthetic construct
  misc_feature 1..20: note = chemically synthesized
  source 1..20: mol_type = other DNA
gcaatactttgttcatgagc

SEQ ID NO: 27723 - DNA, 20 bp, synthetic construct
  misc_feature 1..20: note = chemically synthesized
  source 1..20: mol_type = other DNA
aatactttgttcatgagcta

SEQ ID NO: 27724 - DNA, 20 bp, synthetic construct
  misc_feature 1..20: note = chemically synthesized
  source 1..20: mol_type = other DNA
ctttgttcatgagctagagc

SEQ ID NO: 27725 - DNA, 20 bp, synthetic construct
  misc_feature 1..20: note = chemically synthesized
  source 1..20: mol_type = other DNA
tttgttcatgagctagagca

SEQ ID NO: 27726 - DNA, 20 bp, synthetic construct
  misc_feature 1..20: note = chemically synthesized
  source 1..20: mol_type = other DNA
ttgttcatgagctagagcaa

SEQ ID NO: 27727 - DNA, 20 bp, synthetic construct
  misc_feature 1..20: note = chemically synthesized
  source 1..20: mol_type = other DNA
tgttcatgagctagagcaag

SEQ ID NO: 27728 - DNA, 20 bp, synthetic construct
  misc_feature 1..20: note = chemically synthesized
  source 1..20: mol_type = other DNA
ctagagcaaggggatgactc

SEQ ID NO: 27729 - DNA, 20 bp, synthetic construct
  misc_feature 1..20: note = chemically synthesized
  source 1..20: mol_type = other DNA
agaaatcctttgtgaaatcc

SEQ ID NO: 27730 - DNA, 20 bp, synthetic construct
  misc_feature 1..20: note = chemically synthesized
  source 1..20: mol_type = other DNA
aaatcctttgtgaaatcctg

SEQ ID NO: 27731 - DNA, 20 bp, synthetic construct
  misc_feature 1..20: note = chemically synthesized
  source 1..20: mol_type = other DNA
aatcctttgtgaaatcctgg

SEQ ID NO: 27732 - DNA, 20 bp, synthetic construct
  misc_feature 1..20: note = chemically synthesized
  source 1..20: mol_type = other DNA
tgtgaaatcctggaggtaat

SEQ ID NO: 27733 - DNA, 20 bp, synthetic construct
  misc_feature 1..20: note = chemically synthesized
  source 1..20: mol_type = other DNA
tcctggaggtaataagatcc

SEQ ID NO: 27734 - DNA, 20 bp, synthetic construct
  misc_feature 1..20: note = chemically synthesized
  source 1..20: mol_type = other DNA
atcttcaactcaattgcaaa

SEQ ID NO: 27735 - DNA, 20 bp, synthetic construct
  misc_feature 1..20: note = chemically synthesized
  source 1..20: mol_type = other DNA
caaaacatattccatttcat

SEQ ID NO: 27736 - DNA, 20 bp, synthetic construct
  misc_feature 1..20: note = chemically synthesized
  source 1..20: mol_type = other DNA
tattccatttcatcagacta

SEQ ID NO: 27737 - DNA, 20 bp, synthetic construct
  misc_feature 1..20: note = chemically synthesized
  source 1..20: mol_type = other DNA
attccatttcatcagactac

SEQ ID NO: 27738 - DNA, 20 bp, synthetic construct
  misc_feature 1..20: note = chemically synthesized
  source 1..20: mol_type = other DNA
catcagactacaggttttaa

SEQ ID NO: 27739 - DNA, 20 bp, synthetic construct
  misc_feature 1..20: note = chemically synthesized
  source 1..20: mol_type = other DNA
atttcttaaatgtattattc

SEQ ID NO: 27740 - DNA, 20 bp, synthetic construct
  misc_feature 1..20: note = chemically synthesized
  source 1..20: mol_type = other DNA
ccagtaacttatactttaca

SEQ ID NO: 27741 - DNA, 20 bp, synthetic construct
  misc_feature 1..20: note = chemically synthesized
  source 1..20: mol_type = other DNA
tacatagtaaatcttatcaa

SEQ ID NO: 27742 - DNA, 20 bp, synthetic construct
  misc_feature 1..20: note = chemically synthesized
  source 1..20: mol_type = other DNA
ttatcaatagtcacaatcaa

SEQ ID NO: 27743 - DNA, 20 bp, synthetic construct
  misc_feature 1..20: note = chemically synthesized
  source 1..20: mol_type = other DNA
agtcacaatcaatggtcaca

SEQ ID NO: 27744 - DNA, 20 bp, synthetic construct
  misc_feature 1..20: note = chemically synthesized
  source 1..20: mol_type = other DNA
cacaatcaatggtcacaaag

SEQ ID NO: 27745 - DNA, 20 bp, synthetic construct
  misc_feature 1..20: note = chemically synthesized
  source 1..20: mol_type = other DNA
tcacaaagtagaacttcatc

SEQ ID NO: 27746 - DNA, 20 bp, synthetic construct
  misc_feature 1..20: note = chemically synthesized
  source 1..20: mol_type = other DNA
acaaagtagaacttcatctg

SEQ ID NO: 27747 - DNA, 20 bp, synthetic construct
  misc_feature 1..20: note = chemically synthesized
  source 1..20: mol_type = other DNA
tcatctggagacattacttt

SEQ ID NO: 27748 - DNA, 20 bp, synthetic construct
  misc_feature 1..20: note = chemically synthesized
  source 1..20: mol_type = other DNA
ggagacattacttttagcct

SEQ ID NO: 27749 - DNA, 20 bp, synthetic construct
  misc_feature 1..20: note = chemically synthesized
  source 1..20: mol_type = other DNA
gccatgcaaaatatactttt

SEQ ID NO: 27750 - DNA, 20 bp, synthetic construct
  misc_feature 1..20: note = chemically synthesized
  source 1..20: mol_type = other DNA
tttggaaaattgccctttga

SEQ ID NO: 27751 - DNA, 20 bp, synthetic construct
  misc_feature 1..20: note = chemically synthesized
  source 1..20: mol_type = other DNA
ttggaaaattgccctttgaa

SEQ ID NO: 27752 - DNA, 20 bp, synthetic construct
  misc_feature 1..20: note = chemically synthesized
  source 1..20: mol_type = other DNA
aaaattgccctttgaaaggc

SEQ ID NO: 27753 - DNA, 20 bp, synthetic construct
  misc_feature 1..20: note = chemically synthesized
  source 1..20: mol_type = other DNA
ctttgaaaggcgagacacaa

SEQ ID NO: 27754 - DNA, 20 bp, synthetic construct
  misc_feature 1..20: note = chemically synthesized
  source 1..20: mol_type = other DNA
tttgaaaggcgagacacaaa

SEQ ID NO: 27755 - DNA, 20 bp, synthetic construct
  misc_feature 1..20: note = chemically synthesized
  source 1..20: mol_type = other DNA
caaatgttgatgctattata

SEQ ID NO: 27756 - DNA, 20 bp, synthetic construct
  misc_feature 1..20: note = chemically synthesized
  source 1..20: mol_type = other DNA
atgctattatatggtaccaa

SEQ ID NO: 27757 - DNA, 20 bp, synthetic construct
  misc_feature 1..20: note = chemically synthesized
  source 1..20: mol_type = other DNA
tgctattatatggtaccaat

SEQ ID NO: 27758 - DNA, 20 bp, synthetic construct
  misc_feature 1..20: note = chemically synthesized
  source 1..20: mol_type = other DNA
ataggattcattaatttata

SEQ ID NO: 27759 - DNA, 20 bp, synthetic construct
  misc_feature 1..20: note = chemically synthesized
  source 1..20: mol_type = other DNA
taggattcattaatttataa

SEQ ID NO: 27760 - DNA, 20 bp, synthetic construct
  misc_feature 1..20: note = chemically synthesized
  source 1..20: mol_type = other DNA
ggattcattaatttataaag

SEQ ID NO: 27761 - DNA, 20 bp, synthetic construct
  misc_feature 1..20: note = chemically synthesized
  source 1..20: mol_type = other DNA
ttcattaatttataaaggag

SEQ ID NO: 27762 - DNA, 20 bp, synthetic construct
  misc_feature 1..20: note = chemically synthesized
  source 1..20: mol_type = other DNA
cattaatttataaaggagaa

SEQ ID NO: 27763 - DNA, 20 bp, synthetic construct
  misc_feature 1..20: note = chemically synthesized
  source 1..20: mol_type = other DNA
ctaatgtaactccaaaatgc

SEQ ID NO: 27764 - DNA, 20 bp, synthetic construct
  misc_feature 1..20: note = chemically synthesized
  source 1..20: mol_type = other DNA
aatgcaagcaattttcatat

SEQ ID NO: 27765 - DNA, 20 bp, synthetic construct
  misc_feature 1..20: note = chemically synthesized
  source 1..20: mol_type = other DNA
attttcatatgagtctacac

SEQ ID NO: 27766 - DNA, 20 bp, synthetic construct
  misc_feature 1..20: note = chemically synthesized
  source 1..20: mol_type = other DNA
tacacaagctaattgtcctt

SEQ ID NO: 27767 - DNA, 20 bp, synthetic construct
  misc_feature 1..20: note = chemically synthesized
  source 1..20: mol_type = other DNA
tccttaagaatttcatcttt

SEQ ID NO: 27768 - DNA, 20 bp, synthetic construct
  misc_feature 1..20: note = chemically synthesized
  source 1..20: mol_type = other DNA
ccttaagaatttcatcttta

SEQ ID NO: 27769 - DNA, 20 bp, synthetic construct
  misc_feature 1..20: note = chemically synthesized
  source 1..20: mol_type = other DNA
agaatttcatctttaaggaa

SEQ ID NO: 27770 - DNA, 20 bp, synthetic construct
  misc_feature 1..20: note = chemically synthesized
  source 1..20: mol_type = other DNA
aagttttttactgtatcaaa

SEQ ID NO: 27771 - DNA, 20 bp, synthetic construct
  misc_feature 1..20: note = chemically synthesized
  source 1..20: mol_type = other DNA
ttttttactgtatcaaaaag

SEQ ID NO: 27772 - DNA, 20 bp, synthetic construct
  misc_feature 1..20: note = chemically synthesized
  source 1..20: mol_type = other DNA
aagaagtttaaactgtcatt

SEQ ID NO: 27773 - DNA, 20 bp, synthetic construct
  misc_feature 1..20: note = chemically synthesized
  source 1..20: mol_type = other DNA
aagtttaaactgtcattgag

SEQ ID NO: 27774 - DNA, 20 bp, synthetic construct
  misc_feature 1..20: note = chemically synthesized
  source 1..20: mol_type = other DNA
gtttaaactgtcattgagca

SEQ ID NO: 27775 - DNA, 20 bp, synthetic construct
  misc_feature 1..20: note = chemically synthesized
  source 1..20: mol_type = other DNA
attgagcagagtctgataat

SEQ ID NO: 27776 - DNA, 20 bp, synthetic construct
  misc_feature 1..20: note = chemically synthesized
  source 1..20: mol_type = other DNA
ttgagcagagtctgataata

SEQ ID NO: 27777 - DNA, 20 bp, synthetic construct
  misc_feature 1..20: note = chemically synthesized
  source 1..20: mol_type = other DNA
ataaggacactgtcaaatca

SEQ ID NO: 27778 - DNA, 20 bp, synthetic construct
  misc_feature 1..20: note = chemically synthesized
  source 1..20: mol_type = other DNA
gacactgtcaaatcacagtt

SEQ ID NO: 27779 - DNA, 20 bp, synthetic construct
  misc_feature 1..20: note = chemically synthesized
  source 1..20: mol_type = other DNA
cagttcagatgttatgtgat

SEQ ID NO: 27780 - DNA, 20 bp, synthetic construct
  misc_feature 1..20: note = chemically synthesized
  source 1..20: mol_type = other DNA
agttcagatgttatgtgatg

SEQ ID NO: 27781 - DNA, 20 bp, synthetic construct
  misc_feature 1..20: note = chemically synthesized
  source 1..20: mol_type = other DNA
cagatgttatgtgatgagga

SEQ ID NO: 27782 - DNA, 20 bp, synthetic construct
  misc_feature 1..20: note = chemically synthesized
  source 1..20: mol_type = other DNA
gttatgtgatgaggacagaa

SEQ ID NO: 27783 - DNA, 20 bp, synthetic construct
  misc_feature 1..20: note = chemically synthesized
  source 1..20: mol_type = other DNA
gaggacagaatagaacacat

SEQ ID NO: 27784 - DNA, 20 bp, synthetic construct
  misc_feature 1..20: note = chemically synthesized
  source 1..20: mol_type = other DNA
aggacagaatagaacacatg

SEQ ID NO: 27785 - DNA, 20 bp, synthetic construct
  misc_feature 1..20: note = chemically synthesized
  source 1..20: mol_type = other DNA
gacagaatagaacacatgag

SEQ ID NO: 27786 - DNA, 20 bp, synthetic construct
  misc_feature 1..20: note = chemically synthesized
  source 1..20: mol_type = other DNA
acagaatagaacacatgagg

SEQ ID NO: 27787 - DNA, 20 bp, synthetic construct
  misc_feature 1..20: note = chemically synthesized
  source 1..20: mol_type = other DNA
gaatagaacacatgaggagg

SEQ ID NO: 27788 - DNA, 20 bp, synthetic construct
  misc_feature 1..20: note = chemically synthesized
  source 1..20: mol_type = other DNA
tagaacacatgaggaggaag

SEQ ID NO: 27789 - DNA, 20 bp, synthetic construct
  misc_feature 1..20: note = chemically synthesized
  source 1..20: mol_type = other DNA
gaggaggaagcagaaacttc

SEQ ID NO: 27790 - DNA, 20 bp, synthetic construct
  misc_feature 1..20: note = chemically synthesized
  source 1..20: mol_type = other DNA
ggaagcagaaacttctagac

SEQ ID NO: 27791 - DNA, 20 bp, synthetic construct
  misc_feature 1..20: note = chemically synthesized
  source 1..20: mol_type = other DNA
cagaaacttctagactggac

SEQ ID NO: 27792 - DNA, 20 bp, synthetic construct
  misc_feature 1..20: note = chemically synthesized
  source 1..20: mol_type = other DNA
acttctagactggacaagaa

SEQ ID NO: 27793 - DNA, 20 bp, synthetic construct
  misc_feature 1..20: note = chemically synthesized
  source 1..20: mol_type = other DNA
aaccatccaacaataaatct

SEQ ID NO: 27794 - DNA, 20 bp, synthetic construct
  misc_feature 1..20: note = chemically synthesized
  source 1..20: mol_type = other DNA
tgatgtcatctactacatct

SEQ ID NO: 27795 - DNA, 20 bp, synthetic construct
  misc_feature 1..20: note = chemically synthesized
  source 1..20: mol_type = other DNA
ctaagtatttcctcaaattc

SEQ ID NO: 27796 - DNA, 20 bp, synthetic construct
  misc_feature 1..20: note = chemically synthesized
  source 1..20: mol_type = other DNA
cctcaaattctggacaattt

SEQ ID NO: 27797 - DNA, 20 bp, synthetic construct
  misc_feature 1..20: note = chemically synthesized
  source 1..20: mol_type = other DNA
aaccatcaaaattatttgtt

SEQ ID NO: 27798 - DNA, 20 bp, synthetic construct
  misc_feature 1..20: note = chemically synthesized
  source 1..20: mol_type = other DNA
accatcaaaattatttgttg

SEQ ID NO: 27799 - DNA, 20 bp, synthetic construct
  misc_feature 1..20: note = chemically synthesized
  source 1..20: mol_type = other DNA
ttgttgaggaaaaataaact

SEQ ID NO: 27800 - DNA, 20 bp, synthetic construct
  misc_feature 1..20: note = chemically synthesized
  source 1..20: mol_type = other DNA
aataaacttagccaatttgc

SEQ ID NO: 27801 - DNA, 20 bp, synthetic construct
  misc_feature 1..20: note = chemically synthesized
  source 1..20: mol_type = other DNA
ataaacttagccaatttgca

SEQ ID NO: 27802 - DNA, 20 bp, synthetic construct
  misc_feature 1..20: note = chemically synthesized
  source 1..20: mol_type = other DNA
taaacttagccaatttgcaa

SEQ ID NO: 27803 - DNA, 20 bp, synthetic construct
  misc_feature 1..20: note = chemically synthesized
  source 1..20: mol_type = other DNA
ttgcaagggcaactaaaatg

SEQ ID NO: 27804 - DNA, 20 bp, synthetic construct
  misc_feature 1..20: note = chemically synthesized
  source 1..20: mol_type = other DNA
aaatgaagaacttttcttta

SEQ ID NO: 27805 - DNA, 20 bp, synthetic construct
  misc_feature 1..20: note = chemically synthesized
  source 1..20: mol_type = other DNA
aagaacttttctttaaagtg

SEQ ID NO: 27806 - DNA, 20 bp, synthetic construct
  misc_feature 1..20: note = chemically synthesized
  source 1..20: mol_type = other DNA
agaacttttctttaaagtgt

SEQ ID NO: 27807 - DNA, 20 bp, synthetic construct
  misc_feature 1..20: note = chemically synthesized
  source 1..20: mol_type = other DNA
aacttttctttaaagtgtgg

SEQ ID NO: 27808 - DNA, 20 bp, synthetic construct
  misc_feature 1..20: note = chemically synthesized
  source 1..20: mol_type = other DNA
aaagtgtgggagtcacatct

SEQ ID NO: 27809 - DNA, 20 bp, synthetic construct
  misc_feature 1..20: note = chemically synthesized
  source 1..20: mol_type = other DNA
caacatatttaaatatatct

SEQ ID NO: 27810 - DNA, 20 bp, synthetic construct
  misc_feature 1..20: note = chemically synthesized
  source 1..20: mol_type = other DNA
acaaaaatgcaaaatttcca

SEQ ID NO: 27811 - DNA, 20 bp, synthetic construct
  misc_feature 1..20: note = chemically synthesized
  source 1..20: mol_type = other DNA
aaagaatttctcctcttctg

SEQ ID NO: 27812 - DNA, 20 bp, synthetic construct
  misc_feature 1..20: note = chemically synthesized
  source 1..20: mol_type = other DNA
ttcttcatcttcatcttttc

SEQ ID NO: 27813 - DNA, 20 bp, synthetic construct
  misc_feature 1..20: note = chemically synthesized
  source 1..20: mol_type = other DNA
tcttcatcttcatcttttcc

SEQ ID NO: 27814 - DNA, 20 bp, synthetic construct
  misc_feature 1..20: note = chemically synthesized
  source 1..20: mol_type = other DNA
ttcatcttcatcttttccag

SEQ ID NO: 27815 - DNA, 20 bp, synthetic construct
  misc_feature 1..20: note = chemically synthesized
  source 1..20: mol_type = other DNA
tttccaggagaatataccat

SEQ ID NO: 27816 - DNA, 20 bp, synthetic construct
  misc_feature 1..20: note = chemically synthesized
  source 1..20: mol_type = other DNA
aatataccataagtttctga

SEQ ID NO: 27817 - DNA, 20 bp, synthetic construct
  misc_feature 1..20: note = chemically synthesized
  source 1..20: mol_type = other DNA
ttctgatggtacacatttat

SEQ ID NO: 27818 - DNA, 20 bp, synthetic construct
  misc_feature 1..20: note = chemically synthesized
  source 1..20: mol_type = other DNA
ttgcaactatgcatcttact

SEQ ID NO: 27819 - DNA, 20 bp, synthetic construct
  misc_feature 1..20: note = chemically synthesized
  source 1..20: mol_type = other DNA
gcaactatgcatcttactca

SEQ ID NO: 27820 - DNA, 20 bp, synthetic construct
  misc_feature 1..20: note = chemically synthesized
  source 1..20: mol_type = other DNA
cttaaaacatccttgtttgt

SEQ ID NO: 27821 - DNA, 20 bp, synthetic construct
  misc_feature 1..20: note = chemically synthesized
  source 1..20: mol_type = other DNA
tttcaaattcatatacactt

SEQ ID NO: 27822 - DNA, 20 bp, synthetic construct
  misc_feature 1..20: note = chemically synthesized
  source 1..20: mol_type = other DNA
caaattcatatacactttgg

SEQ ID NO: 27823 - DNA, 20 bp, synthetic construct
  misc_feature 1..20: note = chemically synthesized
  source 1..20: mol_type = other DNA
gcaaacatttttatttgctg

SEQ ID NO: 27824 - DNA, 20 bp, synthetic construct
  misc_feature 1..20: note = chemically synthesized
  source 1..20: mol_type = other DNA
ttttatttgctgaagaacat

SEQ ID NO: 27825 - DNA, 20 bp, synthetic construct
  misc_feature 1..20: note = chemically synthesized
  source 1..20: mol_type = other DNA
tttatttgctgaagaacata

SEQ ID NO: 27826 - DNA, 20 bp, synthetic construct
  misc_feature 1..20: note = chemically synthesized
  source 1..20: mol_type = other DNA
ttatttgctgaagaacataa

SEQ ID NO: 27827 - DNA, 20 bp, synthetic construct
  misc_feature 1..20: note = chemically synthesized
  source 1..20: mol_type = other DNA
tatttgctgaagaacataag

SEQ ID NO: 27828 - DNA, 20 bp, synthetic construct
  misc_feature 1..20: note = chemically synthesized
  source 1..20: mol_type = other DNA
atttgctgaagaacataagg

SEQ ID NO: 27829 - DNA, 20 bp, synthetic construct
  misc_feature 1..20: note = chemically synthesized
  source 1..20: mol_type = other DNA
tgaagaacataagggggaaa

SEQ ID NO: 27830 - DNA, 20 bp, synthetic construct
  misc_feature 1..20: note = chemically synthesized
  source 1..20: mol_type = other DNA
aagaacataagggggaaata

SEQ ID NO: 27831 - DNA, 20 bp, synthetic construct
  misc_feature 1..20: note = chemically synthesized
  source 1..20: mol_type = other DNA
aaatagagattctttatttg

SEQ ID NO: 27832 - DNA, 20 bp, synthetic construct
  misc_feature 1..20: note = chemically synthesized
  source 1..20: mol_type = other DNA
aagaaacaaatgatttgatt

SEQ ID NO: 27833 - DNA, 20 bp, synthetic construct
  misc_feature 1..20: note = chemically synthesized
  source 1..20: mol_type = other DNA
agaaacaaatgatttgattt

SEQ ID NO: 27834 - DNA, 20 bp, synthetic construct
  misc_feature 1..20: note = chemically synthesized
  source 1..20: mol_type = other DNA
gatttgggaaatgaaatgaa

SEQ ID NO: 27835 - DNA, 20 bp, synthetic construct
  misc_feature 1..20: note = chemically synthesized
  source 1..20: mol_type = other DNA
atgaaatgaaaagaaaaaca

SEQ ID NO: 27836 - DNA, 20 bp, synthetic construct
  misc_feature 1..20: note = chemically synthesized
  source 1..20: mol_type = other DNA
gctacttcttttactcatct

SEQ ID NO: 27837 - DNA, 20 bp, synthetic construct
  misc_feature 1..20: note = chemically synthesized
  source 1..20: mol_type = other DNA
ctacttcttttactcatctg

SEQ ID NO: 27838 - DNA, 20 bp, synthetic construct
  misc_feature 1..20: note = chemically synthesized
  source 1..20: mol_type = other DNA
ttttactcatctgaggcctt

SEQ ID NO: 27839 - DNA, 20 bp, synthetic construct
  misc_feature 1..20: note = chemically synthesized
  source 1..20: mol_type = other DNA
actcatctgaggccttcaga

SEQ ID NO: 27840 - DNA, 20 bp, synthetic construct
  misc_feature 1..20: note = chemically synthesized
  source 1..20: mol_type = other DNA
ccttcagatagtcccccata

SEQ ID NO: 27841 - DNA, 20 bp, synthetic construct
  misc_feature 1..20: note = chemically synthesized
  source 1..20: mol_type = other DNA
gatagtcccccatatagcct

SEQ ID NO: 27842 - DNA, 20 bp, synthetic construct
  misc_feature 1..20: note = chemically synthesized
  source 1..20: mol_type = other DNA
tagtcccccatatagcctta

SEQ ID NO: 27843 - DNA, 20 bp, synthetic construct
  misc_feature 1..20: note = chemically synthesized
  source 1..20: mol_type = other DNA
aaaatatgattatgctcttt

SEQ ID NO: 27844 - DNA, 20 bp, synthetic construct
  misc_feature 1..20: note = chemically synthesized
  source 1..20: mol_type = other DNA
attatgctctttcagtctat

SEQ ID NO: 27845 - DNA, 20 bp, synthetic construct
  misc_feature 1..20: note = chemically synthesized
  source 1..20: mol_type = other DNA
ctattagaaataaaaacata

SEQ ID NO: 27846 - DNA, 20 bp, synthetic construct
  misc_feature 1..20: note = chemically synthesized
  source 1..20: mol_type = other DNA
cataaagcttaaaaaatttc

SEQ ID NO: 27847 - DNA, 20 bp, synthetic construct
  misc_feature 1..20: note = chemically synthesized
  source 1..20: mol_type = other DNA
ataaagcttaaaaaatttca

SEQ ID NO: 27848 - DNA, 20 bp, synthetic construct
  misc_feature 1..20: note = chemically synthesized
  source 1..20: mol_type = other DNA
taaagcttaaaaaatttcaa

SEQ ID NO: 27849 - DNA, 20 bp, synthetic construct
  misc_feature 1..20: note = chemically synthesized
  source 1..20: mol_type = other DNA
agcttaaaaaatttcaaggg

SEQ ID NO: 27850 - DNA, 20 bp, synthetic construct
  misc_feature 1..20: note = chemically synthesized
  source 1..20: mol_type = other DNA
gcttaaaaaatttcaaggga

SEQ ID NO: 27851 - DNA, 20 bp, synthetic construct
  misc_feature 1..20: note = chemically synthesized
  source 1..20: mol_type = other DNA
cttaaaaaatttcaagggaa

SEQ ID NO: 27852 - DNA, 20 bp, synthetic construct
  misc_feature 1..20: note = chemically synthesized
  source 1..20: mol_type = other DNA
ttaaaaaatttcaagggaag

SEQ ID NO: 27853 - DNA, 20 bp, synthetic construct
  misc_feature 1..20: note = chemically synthesized
  source 1..20: mol_type = other DNA
atttcaagggaaggggcttg

SEQ ID NO: 27854 - DNA, 20 bp, synthetic construct
  misc_feature 1..20: note = chemically synthesized
  source 1..20: mol_type = other DNA
gggcttgaagattactgact

SEQ ID NO: 27855 - DNA, 20 bp, synthetic construct
  misc_feature 1..20: note = chemically synthesized
  source 1..20: mol_type = other DNA
ggcttgaagattactgacta

SEQ ID NO: 27856 - DNA, 20 bp, synthetic construct
  misc_feature 1..20: note = chemically synthesized
  source 1..20: mol_type = other DNA
gcttgaagattactgactaa

SEQ ID NO: 27857 - DNA, 20 bp, synthetic construct
  misc_feature 1..20: note = chemically synthesized
  source 1..20: mol_type = other DNA
tgaagattactgactaaggg

SEQ ID NO: 27858 - DNA, 20 bp, synthetic construct
  misc_feature 1..20: note = chemically synthesized
  source 1..20: mol_type = other DNA
tgacactcacctcctccaca

SEQ ID NO: 27859 - DNA, 20 bp, synthetic construct
  misc_feature 1..20: note = chemically synthesized
  source 1..20: mol_type = other DNA
tcctccacaaagaaccaaaa

SEQ ID NO: 27860 - DNA, 20 bp, synthetic construct
  misc_feature 1..20: note = chemically synthesized
  source 1..20: mol_type = other DNA
ccacaaagaaccaaaatagt

SEQ ID NO: 27861 - DNA, 20 bp, synthetic construct
  misc_feature 1..20: note = chemically synthesized
  source 1..20: mol_type = other DNA
caaagaaccaaaatagtaag

SEQ ID NO: 27862 - DNA, 20 bp, synthetic construct
  misc_feature 1..20: note = chemically synthesized
  source 1..20: mol_type = other DNA
gtaagtagaaaatcccacat

SEQ ID NO: 27863 - DNA, 20 bp, synthetic construct
  misc_feature 1..20: note = chemically synthesized
  source 1..20: mol_type = other DNA
aagtagaaaatcccacataa

SEQ ID NO: 27864 - DNA, 20 bp, synthetic construct
  misc_feature 1..20: note = chemically synthesized
  source 1..20: mol_type = other DNA
gtagaaaatcccacataaga

SEQ ID NO: 27865 - DNA, 20 bp, synthetic construct
  misc_feature 1..20: note = chemically synthesized
  source 1..20: mol_type = other DNA
tcccacataagagagaattc

SEQ ID NO: 27866 - DNA, 20 bp, synthetic construct
  misc_feature 1..20: note = chemically synthesized
  source 1..20: mol_type = other DNA
gagagaattctggaattcaa

SEQ ID NO: 27867 - DNA, 20 bp, synthetic construct
  misc_feature 1..20: note = chemically synthesized
  source 1..20: mol_type = other DNA
gagaattctggaattcaaca

SEQ ID NO: 27868 - DNA, 20 bp, synthetic construct
  misc_feature 1..20: note = chemically synthesized
  source 1..20: mol_type = other DNA
aattctggaattcaacagag

SEQ ID NO: 27869 - DNA, 20 bp, synthetic construct
  misc_feature 1..20: note = chemically synthesized
  source 1..20: mol_type = other DNA
ggaattcaacagagaagtga

SEQ ID NO: 27870 - DNA, 20 bp, synthetic construct
  misc_feature 1..20: note = chemically synthesized
  source 1..20: mol_type = other DNA
gaattcaacagagaagtgac

SEQ ID NO: 27871 - DNA, 20 bp, synthetic construct
  misc_feature 1..20: note = chemically synthesized
  source 1..20: mol_type = other DNA
ttcaacagagaagtgacagg

SEQ ID NO: 27872 - DNA, 20 bp, synthetic construct
  misc_feature 1..20: note = chemically synthesized
  source 1..20: mol_type = other DNA
agaagtgacaggaagcatct

SEQ ID NO: 27873 - DNA, 20 bp, synthetic construct
  misc_feature 1..20: note = chemically synthesized
  source 1..20: mol_type = other DNA
gaagtgacaggaagcatcta

SEQ ID NO: 27874 - DNA, 20 bp, synthetic construct
  misc_feature 1..20: note = chemically synthesized
  source 1..20: mol_type = other DNA
aggaagcatctaaggcaatg

SEQ ID NO: 27875 - DNA, 20 bp, synthetic construct
  misc_feature 1..20: note = chemically synthesized
  source 1..20: mol_type = other DNA
ggaagcatctaaggcaatga

SEQ ID NO: 27876 - DNA, 20 bp, synthetic construct
  misc_feature 1..20: note = chemically synthesized
  source 1..20: mol_type = other DNA
gaagcatctaaggcaatgaa

SEQ ID NO: 27877 - DNA, 20 bp, synthetic construct
  misc_feature 1..20: note = chemically synthesized
  source 1..20: mol_type = other DNA
aagcatctaaggcaatgaag

SEQ ID NO: 27878 - DNA, 20 bp, synthetic construct
  misc_feature 1..20: note = chemically synthesized
  source 1..20: mol_type = other DNA
gcatctaaggcaatgaaggg

SEQ ID NO: 27879 - DNA, 20 bp, synthetic construct
  misc_feature 1..20: note = chemically synthesized
  source 1..20: mol_type = other DNA
catctaaggcaatgaagggg

SEQ ID NO: 27880 - DNA, 20 bp, synthetic construct
  misc_feature 1..20: note = chemically synthesized
  source 1..20: mol_type = other DNA
atctaaggcaatgaagggga

SEQ ID NO: 27881 - DNA, 20 bp, synthetic construct
  misc_feature 1..20: note = chemically synthesized
  source 1..20: mol_type = other DNA
taaggcaatgaaggggaggg

SEQ ID NO: 27882 - DNA, 20 bp, synthetic construct
  misc_feature 1..20: note = chemically synthesized
  source 1..20: mol_type = other DNA
gcaatgaaggggagggaagc

SEQ ID NO: 27883 - DNA, 20 bp, synthetic construct
  misc_feature 1..20: note = chemically synthesized
  source 1..20: mol_type = other DNA
caatgaaggggagggaagca

SEQ ID NO: 27884 - DNA, 20 bp, synthetic construct
  misc_feature 1..20: note = chemically synthesized
  source 1..20: mol_type = other DNA
tgaaggggagggaagcaagg

SEQ ID NO: 27885 - DNA, 20 bp, synthetic construct
  misc_feature 1..20: note = chemically synthesized
  source 1..20: mol_type = other DNA
gggaagcaaggaagcctacc

SEQ ID NO: 27886 - DNA, 20 bp, synthetic construct
  misc_feature 1..20: note = chemically synthesized
  source 1..20: mol_type = other DNA
aagcaaggaagcctacccag

SEQ ID NO: 27887 - DNA, 20 bp, synthetic construct
  misc_feature 1..20: note = chemically synthesized
  source 1..20: mol_type = other DNA
agcaaggaagcctacccagt

SEQ ID NO: 27888 - DNA, 20 bp, synthetic construct
  misc_feature 1..20: note = chemically synthesized
  source 1..20: mol_type = other DNA
gcaaggaagcctacccagta

SEQ ID NO: 27889 - DNA, 20 bp, synthetic construct
  misc_feature 1..20: note = chemically synthesized
  source 1..20: mol_type = other DNA
acccagtagggatcctctgt

SEQ ID NO: 27890 - DNA, 20 bp, synthetic construct
  misc_feature 1..20: note = chemically synthesized
  source 1..20: mol_type = other DNA
cccagtagggatcctctgtg

SEQ ID NO: 27891 - DNA, 20 bp, synthetic construct
  misc_feature 1..20: note = chemically synthesized
  source 1..20: mol_type = other DNA
gtagggatcctctgtgaggc

SEQ ID NO: 27892 - DNA, 20 bp, synthetic construct
  misc_feature 1..20: note = chemically synthesized
  source 1..20: mol_type = other DNA
agggatcctctgtgaggcca

SEQ ID NO: 27893 - DNA, 20 bp, synthetic construct
  misc_feature 1..20: note = chemically synthesized
  source 1..20: mol_type = other DNA
ggatcctctgtgaggccaga

SEQ ID NO: 27894 - DNA, 20 bp, synthetic construct
  misc_feature 1..20: note = chemically synthesized
  source 1..20: mol_type = other DNA
gatcctctgtgaggccagag

SEQ ID NO: 27895 - DNA, 20 bp, synthetic construct
  misc_feature 1..20: note = chemically synthesized
  source 1..20: mol_type = other DNA
gtgaggccagagaggctccc

SEQ ID NO: 27896 - DNA, 20 bp, synthetic construct
  misc_feature 1..20: note = chemically synthesized
  source 1..20: mol_type = other DNA
gaggctccccagtgcatcga

SEQ ID NO: 27897 - DNA, 20 bp, synthetic construct
  misc_feature 1..20: note = chemically synthesized
  source 1..20: mol_type = other DNA
tccccagtgcatcgaaagtt

SEQ ID NO: 27898 - DNA, 20 bp, synthetic construct
  misc_feature 1..20: note = chemically synthesized
  source 1..20: mol_type = other DNA
aaagttaagtgactgactcc

SEQ ID NO: 27899 - DNA, 20 bp, synthetic construct
  misc_feature 1..20: note = chemically synthesized
  source 1..20: mol_type = other DNA
gttaagtgactgactcccag

SEQ ID NO: 27900 - DNA, 20 bp, synthetic construct
  misc_feature 1..20: note = chemically synthesized
  source 1..20: mol_type = other DNA
agtggtccacatctgcatta

SEQ ID NO: 27901 - DNA, 20 bp, synthetic construct
  misc_feature 1..20: note = chemically synthesized
  source 1..20: mol_type = other DNA
cacatctgcattatggactc

SEQ ID NO: 27902 - DNA, 20 bp, synthetic construct
  misc_feature 1..20: note = chemically synthesized
  source 1..20: mol_type = other DNA
acatctgcattatggactcc

SEQ ID NO: 27903 - DNA, 20 bp, synthetic construct
  misc_feature 1..20: note = chemically synthesized
  source 1..20: mol_type = other DNA
attatggactccaggaatcc

SEQ ID NO: 27904 - DNA, 20 bp, synthetic construct
  misc_feature 1..20: note = chemically synthesized
  source 1..20: mol_type = other DNA
gactccaggaatcctagcca

SEQ ID NO: 27905 - DNA, 20 bp, synthetic construct
  misc_feature 1..20: note = chemically synthesized
  source 1..20: mol_type = other DNA
actccaggaatcctagccac

SEQ ID NO: 27906 - DNA, 20 bp, synthetic construct
  misc_feature 1..20: note = chemically synthesized
  source 1..20: mol_type = other DNA
tccaggaatcctagccacag

SEQ ID NO: 27907 - DNA, 20 bp, synthetic construct
  misc_feature 1..20: note = chemically synthesized
  source 1..20: mol_type = other DNA
caggaatcctagccacagga

SEQ ID NO: 27908 - DNA, 20 bp, synthetic construct
  misc_feature 1..20: note = chemically synthesized
  source 1..20: mol_type = other DNA
aggagagtcccttgaccatg

SEQ ID NO: 27909 - DNA, 20 bp, synthetic construct
  misc_feature 1..20: note = chemically synthesized
  source 1..20: mol_type = other DNA
ggagagtcccttgaccatgc

SEQ ID NO: 27910 - DNA, 20 bp, synthetic construct
  misc_feature 1..20: note = chemically synthesized
  source 1..20: mol_type = other DNA
cccttgaccatgcaggcctt

SEQ ID NO: 27911 - DNA, 20 bp, synthetic construct
  misc_feature 1..20: note = chemically synthesized
  source 1..20: mol_type = other DNA
gcaggccttgagactatcat

SEQ ID NO: 27912 - DNA, 20 bp, synthetic construct
  misc_feature 1..20: note = chemically synthesized
  source 1..20: mol_type = other DNA
caggccttgagactatcata

SEQ ID NO: 27913 - DNA, 20 bp, synthetic construct
  misc_feature 1..20: note = chemically synthesized
  source 1..20: mol_type = other DNA
gactatcataaggaactgcc

SEQ ID NO: 27914 - DNA, 20 bp, synthetic construct
  misc_feature 1..20: note = chemically synthesized
  source 1..20: mol_type = other DNA
aactgcccagcaatcgcaca

SEQ ID NO: 27915 - DNA, 20 bp, synthetic construct
  misc_feature 1..20: note = chemically synthesized
  source 1..20: mol_type = other DNA
actgcccagcaatcgcacaa

SEQ ID NO: 27916 - DNA, 20 bp, synthetic construct
  misc_feature 1..20: note = chemically synthesized
  source 1..20: mol_type = other DNA
atcgcacaaaggcattgctc

SEQ ID NO: 27917 - DNA, 20 bp, synthetic construct
  misc_feature 1..20: note = chemically synthesized
  source 1..20: mol_type = other DNA
cgcacaaaggcattgctcca

SEQ ID NO: 27918 - DNA, 20 bp, synthetic construct
  misc_feature 1..20: note = chemically synthesized
  source 1..20: mol_type = other DNA
acaaaggcattgctccagag

SEQ ID NO: 27919 - DNA, 20 bp, synthetic construct
  misc_feature 1..20: note = chemically synthesized
  source 1..20: mol_type = other DNA
caaaggcattgctccagaga

SEQ ID NO: 27920 - DNA, 20 bp, synthetic construct
  misc_feature 1..20: note = chemically synthesized
  source 1..20: mol_type = other DNA
aaggcattgctccagagaag

SEQ ID NO: 27921 - DNA, 20 bp, synthetic construct
  misc_feature 1..20: note = chemically synthesized
  source 1..20: mol_type = other DNA
tccagagaaggagctctcac

SEQ ID NO: 27922 - DNA, 20 bp, synthetic construct
  misc_feature 1..20: note = chemically synthesized
  source 1..20: mol_type = other DNA
ccagagaaggagctctcact

SEQ ID NO: 27923 - DNA, 20 bp, synthetic construct
  misc_feature 1..20: note = chemically synthesized
  source 1..20: mol_type = other DNA
cccctgccatccccattact

SEQ ID NO: 27924 - DNA, 20 bp, synthetic construct
  misc_feature 1..20: note = chemically synthesized
  source 1..20: mol_type = other DNA
ctgccatccccattactgag

SEQ ID NO: 27925 - DNA, 20 bp, synthetic construct
  misc_feature 1..20: note = chemically synthesized
  source 1..20: mol_type = other DNA
catccccattactgagcagc

SEQ ID NO: 27926 - DNA, 20 bp, synthetic construct
  misc_feature 1..20: note = chemically synthesized
  source 1..20: mol_type = other DNA
atccccattactgagcagca

SEQ ID NO: 27927 - DNA, 20 bp, synthetic construct
  misc_feature 1..20: note = chemically synthesized
  source 1..20: mol_type = other DNA
gagcagcaaggtgccatttt

SEQ ID NO: 27928 - DNA, 20 bp, synthetic construct
  misc_feature 1..20: note = chemically synthesized
  source 1..20: mol_type = other DNA
gcagcaaggtgccattttga

SEQ ID NO: 27929 - DNA, 20 bp, synthetic construct
  misc_feature 1..20: note = chemically synthesized
  source 1..20: mol_type = other DNA
tttgagagcccaacacccac

SEQ ID NO: 27930 - DNA, 20 bp, synthetic construct
  misc_feature 1..20: note = chemically synthesized
  source 1..20: mol_type = other DNA
caccagatgacatcgttcct

SEQ ID NO: 27931 - DNA, 20 bp, synthetic construct
  misc_feature 1..20: note = chemically synthesized
  source 1..20: mol_type = other DNA
tctgcatctctacatccctg

SEQ ID NO: 27932 - DNA, 20 bp, synthetic construct
  misc_feature 1..20: note = chemically synthesized
  source 1..20: mol_type = other DNA
ctgctgacatcccccaccca

SEQ ID NO: 27933 - DNA, 20 bp, synthetic construct
  misc_feature 1..20: note = chemically synthesized
  source 1..20: mol_type = other DNA
gacatcccccacccacagct

SEQ ID NO: 27934 - DNA, 20 bp, synthetic construct
  misc_feature 1..20: note = chemically synthesized
  source 1..20: mol_type = other DNA
ccacagctgagtgctactgc

SEQ ID NO: 27935 - DNA, 20 bp, synthetic construct
  misc_feature 1..20: note = chemically synthesized
  source 1..20: mol_type = other DNA
ctactgctggctgctgtcac

SEQ ID NO: 27936 - DNA, 20 bp, synthetic construct
  misc_feature 1..20: note = chemically synthesized
  source 1..20: mol_type = other DNA
tactgctggctgctgtcacc

SEQ ID NO: 27937 - DNA, 20 bp, synthetic construct
  misc_feature 1..20: note = chemically synthesized
  source 1..20: mol_type = other DNA
actgctggctgctgtcacca

SEQ ID NO: 27938 - DNA, 20 bp, synthetic construct
  misc_feature 1..20: note = chemically synthesized
  source 1..20: mol_type = other DNA
ggctgctgtcaccagggata

SEQ ID NO: 27939 - DNA, 20 bp, synthetic construct
  misc_feature 1..20: note = chemically synthesized
  source 1..20: mol_type = other DNA
ccagggataaagtgtgtcat

SEQ ID NO: 27940 - DNA, 20 bp, synthetic construct
  misc_feature 1..20: note = chemically synthesized
  source 1..20: mol_type = other DNA
gggataaagtgtgtcattag

SEQ ID NO: 27941 - DNA, 20 bp, synthetic construct
  misc_feature 1..20: note = chemically synthesized
  source 1..20: mol_type = other DNA
ataaagtgtgtcattagaag

SEQ ID NO: 27942 - DNA, 20 bp, synthetic construct
  misc_feature 1..20: note = chemically synthesized
  source 1..20: mol_type = other DNA
gaagtggactcccccacccc

SEQ ID NO: 27943 - DNA, 20 bp, synthetic construct
  misc_feature 1..20: note = chemically synthesized
  source 1..20: mol_type = other DNA
gtggactcccccacccccag

SEQ ID NO: 27944 - DNA, 20 bp, synthetic construct
  misc_feature 1..20: note = chemically synthesized
  source 1..20: mol_type = other DNA
gactcccccacccccagtag

SEQ ID NO: 27945 - DNA, 20 bp, synthetic construct
  misc_feature 1..20: note = chemically synthesized
  source 1..20: mol_type = other DNA
actcccccacccccagtagc

SEQ ID NO: 27946 - DNA, 20 bp, synthetic construct
  misc_feature 1..20: note = chemically synthesized
  source 1..20: mol_type = other DNA
ctcccccacccccagtagca

SEQ ID NO: 27947 - DNA, 20 bp, synthetic construct
  misc_feature 1..20: note = chemically synthesized
  source 1..20: mol_type = other DNA
cagggctgctacacatttat

SEQ ID NO: 27948 - DNA, 20 bp, synthetic construct
  misc_feature 1..20: note = chemically synthesized
  source 1..20: mol_type = other DNA
tacacatttataagctccct

SEQ ID NO: 27949 - DNA, 20 bp, synthetic construct
  misc_feature 1..20: note = chemically synthesized
  source 1..20: mol_type = other DNA
agaaaatgctaccccacttg

SEQ ID NO: 27950 - DNA, 20 bp, synthetic construct
  misc_feature 1..20: note = chemically synthesized
  source 1..20: mol_type = other DNA
ccccacttgcagccaccatc

SEQ ID NO: 27951 - DNA, 20 bp, synthetic construct
  misc_feature 1..20: note = chemically synthesized
  source 1..20: mol_type = other DNA
cccacttgcagccaccatct

SEQ ID NO: 27952 - DNA, 20 bp, synthetic construct
  misc_feature 1..20: note = chemically synthesized
  source 1..20: mol_type = other DNA
ccacttgcagccaccatctg

SEQ ID NO: 27953 - DNA, 20 bp, synthetic construct
  misc_feature 1..20: note = chemically synthesized
  source 1..20: mol_type = other DNA
gggctgaaacacatgcccac

SEQ ID NO: 27954 - DNA, 20 bp, synthetic construct
  misc_feature 1..20: note = chemically synthesized
  source 1..20: mol_type = other DNA
gcccaccagcaacccattta

SEQ ID NO: 27955 - DNA, 20 bp, synthetic construct
  misc_feature 1..20: note = chemically synthesized
  source 1..20: mol_type = other DNA
tttatagctgctgccactga

SEQ ID NO: 27956 - DNA, 20 bp, synthetic construct
  misc_feature 1..20: note = chemically synthesized
  source 1..20: mol_type = other DNA
aacacaccccgcaccccttc

SEQ ID NO: 27957 - DNA, 20 bp, synthetic construct
  misc_feature 1..20: note = chemically synthesized
  source 1..20: mol_type = other DNA
cacaccccgcaccccttcaa

SEQ ID NO: 27958 - DNA, 20 bp, synthetic construct
  misc_feature 1..20: note = chemically synthesized
  source 1..20: mol_type = other DNA
accccgcaccccttcaagag

SEQ ID NO: 27959 - DNA, 20 bp, synthetic construct
  misc_feature 1..20: note = chemically synthesized
  source 1..20: mol_type = other DNA
ccccgcaccccttcaagagc

SEQ ID NO: 27960 - DNA, 20 bp, synthetic construct
  misc_feature 1..20: note = chemically synthesized
  source 1..20: mol_type = other DNA
cccgcaccccttcaagagca

SEQ ID NO: 27961 - DNA, 20 bp, synthetic construct
  misc_feature 1..20: note = chemically synthesized
  source 1..20: mol_type = other DNA
tcaagagcagggcaacaatg

SEQ ID NO: 27962 - DNA, 20 bp, synthetic construct
  misc_feature 1..20: note = chemically synthesized
  source 1..20: mol_type = other DNA
agagcagggcaacaatgcag

SEQ ID NO: 27963 - DNA, 20 bp, synthetic construct
  misc_feature 1..20: note = chemically synthesized
  source 1..20: mol_type = other DNA
gcagtagctgctaattcact

SEQ ID NO: 27964 - DNA, 20 bp, synthetic construct
  misc_feature 1..20: note = chemically synthesized
  source 1..20: mol_type = other DNA
cagtagctgctaattcactc

SEQ ID NO: 27965 - DNA, 20 bp, synthetic construct
  misc_feature 1..20: note = chemically synthesized
  source 1..20: mol_type = other DNA
aattcactcaggcattctgc

SEQ ID NO: 27966 - DNA, 20 bp, synthetic construct
  misc_feature 1..20: note = chemically synthesized
  source 1..20: mol_type = other DNA
attcactcaggcattctgct

SEQ ID NO: 27967 - DNA, 20 bp, synthetic construct
  misc_feature 1..20: note = chemically synthesized
  source 1..20: mol_type = other DNA
ttcactcaggcattctgctg

SEQ ID NO: 27968 - DNA, 20 bp, synthetic construct
  misc_feature 1..20: note = chemically synthesized
  source 1..20: mol_type = other DNA
tcactcaggcattctgctgg

SEQ ID NO: 27969 - DNA, 20 bp, synthetic construct
  misc_feature 1..20: note = chemically synthesized
  source 1..20: mol_type = other DNA
aggcattctgctgggggcct

SEQ ID NO: 27970 - DNA, 20 bp, synthetic construct
  misc_feature 1..20: note = chemically synthesized
  source 1..20: mol_type = other DNA
ggcattctgctgggggcctg

SEQ ID NO: 27971 - DNA, 20 bp, synthetic construct
  misc_feature 1..20: note = chemically synthesized
  source 1..20: mol_type = other DNA
gcctgaggatcactccactc

SEQ ID NO: 27972 - DNA, 20 bp, synthetic construct
  misc_feature 1..20: note = chemically synthesized
  source 1..20: mol_type = other DNA
cactccactccagcctatga

SEQ ID NO: 27973 - DNA, 20 bp, synthetic construct
  misc_feature 1..20: note = chemically synthesized
  source 1..20: mol_type = other DNA
ccactccagcctatgatagc

SEQ ID NO: 27974 - DNA, 20 bp, synthetic construct
  misc_feature 1..20: note = chemically synthesized
  source 1..20: mol_type = other DNA
cggtgtccacacacaccact

SEQ ID NO: 27975 - DNA, 20 bp, synthetic construct
  misc_feature 1..20: note = chemically synthesized
  source 1..20: mol_type = other DNA
tgtccacacacaccactgag

SEQ ID NO: 27976 - DNA, 20 bp, synthetic construct
  misc_feature 1..20: note = chemically synthesized
  source 1..20: mol_type = other DNA
cacacaccactgagtggcct

SEQ ID NO: 27977 - DNA, 20 bp, synthetic construct
  misc_feature 1..20: note = chemically synthesized
  source 1..20: mol_type = other DNA
acacaccactgagtggcctg

SEQ ID NO: 27978 - DNA, 20 bp, synthetic construct
  misc_feature 1..20: note = chemically synthesized
  source 1..20: mol_type = other DNA
accactgagtggcctgaggt

SEQ ID NO: 27979 - DNA, 20 bp, synthetic construct
  misc_feature 1..20: note = chemically synthesized
  source 1..20: mol_type = other DNA
ccactgagtggcctgaggtc

SEQ ID NO: 27980 - DNA, 20 bp, synthetic construct
  misc_feature 1..20: note = chemically synthesized
  source 1..20: mol_type = other DNA
ggcctgaggtcaggaacacc

SEQ ID NO: 27981 - DNA, 20 bp, synthetic construct
  misc_feature 1..20: note = chemically synthesized
  source 1..20: mol_type = other DNA
gaggtcaggaacacccagcc

SEQ ID NO: 27982 - DNA, 20 bp, synthetic construct
  misc_feature 1..20: note = chemically synthesized
  source 1..20: mol_type = other DNA
ctttgccttcctcaatgcct

SEQ ID NO: 27983 - DNA, 20 bp, synthetic construct
  misc_feature 1..20: note = chemically synthesized
  source 1..20: mol_type = other DNA
gccttcctcaatgcctaagc

SEQ ID NO: 27984 - DNA, 20 bp, synthetic construct
  misc_feature 1..20: note = chemically synthesized
  source 1..20: mol_type = other DNA
caatgcctaagcaagttgtc

SEQ ID NO: 27985 - DNA, 20 bp, synthetic construct
  misc_feature 1..20: note = chemically synthesized
  source 1..20: mol_type = other DNA
aatgcctaagcaagttgtct

SEQ ID NO: 27986 - DNA, 20 bp, synthetic construct
  misc_feature 1..20: note = chemically synthesized
  source 1..20: mol_type = other DNA
aagcaagttgtctgggaacc

SEQ ID NO: 27987 - DNA, 20 bp, synthetic construct
  misc_feature 1..20: note = chemically synthesized
  source 1..20: mol_type = other DNA
gcaagttgtctgggaaccca

SEQ ID NO: 27988 - DNA, 20 bp, synthetic construct
  misc_feature 1..20: note = chemically synthesized
  source 1..20: mol_type = other DNA
gttgtctgggaacccagaga

SEQ ID NO: 27989 - DNA, 20 bp, synthetic construct
  misc_feature 1..20: note = chemically synthesized
  source 1..20: mol_type = other DNA
cttgtgccatccaccatgac

SEQ ID NO: 27990 - DNA, 20 bp, synthetic construct
  misc_feature 1..20: note = chemically synthesized
  source 1..20: mol_type = other DNA
atccaccatgactggtacct

SEQ ID NO: 27991 - DNA, 20 bp, synthetic construct
  misc_feature 1..20: note = chemically synthesized
  source 1..20: mol_type = other DNA
tggtacctaagcaaccctcc

SEQ ID NO: 27992 - DNA, 20 bp, synthetic construct
  misc_feature 1..20: note = chemically synthesized
  source 1..20: mol_type = other DNA
tacctaagcaaccctcccag

SEQ ID NO: 27993 - DNA, 20 bp, synthetic construct
  misc_feature 1..20: note = chemically synthesized
  source 1..20: mol_type = other DNA
ccctcccagaagcctgatga

SEQ ID NO: 27994 - DNA, 20 bp, synthetic construct
  misc_feature 1..20: note = chemically synthesized
  source 1..20: mol_type = other DNA
cctcccagaagcctgatgat

SEQ ID NO: 27995 - DNA, 20 bp, synthetic construct
  misc_feature 1..20: note = chemically synthesized
  source 1..20: mol_type = other DNA
tctgccactgccatcacaac

SEQ ID NO: 27996 - DNA, 20 bp, synthetic construct
  misc_feature 1..20: note = chemically synthesized
  source 1..20: mol_type = other DNA
cctcctgcatgtgccacctg

SEQ ID NO: 27997 - DNA, 20 bp, synthetic construct
  misc_feature 1..20: note = chemically synthesized
  source 1..20: mol_type = other DNA
ctcctgcatgtgccacctgt

SEQ ID NO: 27998 - DNA, 20 bp, synthetic construct
  misc_feature 1..20: note = chemically synthesized
  source 1..20: mol_type = other DNA
atgtgccacctgtgggtctg

SEQ ID NO: 27999 - DNA, 20 bp, synthetic construct
  misc_feature 1..20: note = chemically synthesized
  source 1..20: mol_type = other DNA
ccacctgtgggtctgaagac

SEQ ID NO: 28000 - DNA, 20 bp, synthetic construct
  misc_feature 1..20: note = chemically synthesized
  source 1..20: mol_type = other DNA
ggtctgaagactggctcatt

SEQ ID NO: 28001 - DNA, 20 bp, synthetic construct
  misc_feature 1..20: note = chemically synthesized
  source 1..20: mol_type = other DNA
actggctcattcagcccttg

SEQ ID NO: 28002 - DNA, 20 bp, synthetic construct
  misc_feature 1..20: note = chemically synthesized
  source 1..20: mol_type = other DNA
cttgcagccaccaccaacac

SEQ ID NO: 28003 - DNA, 20 bp, synthetic construct
  misc_feature 1..20: note = chemically synthesized
  source 1..20: mol_type = other DNA
agccaccaccaacaccagtg

SEQ ID NO: 28004 - DNA, 20 bp, synthetic construct
  misc_feature 1..20: note = chemically synthesized
  source 1..20: mol_type = other DNA
caacaccagtgcagactgct

SEQ ID NO: 28005 - DNA, 20 bp, synthetic construct
  misc_feature 1..20: note = chemically synthesized
  source 1..20: mol_type = other DNA
aacaccagtgcagactgctt

SEQ ID NO: 28006 - DNA, 20 bp, synthetic construct
  misc_feature 1..20: note = chemically synthesized
  source 1..20: mol_type = other DNA
caccagtgcagactgcttgg

SEQ ID NO: 28007 - DNA, 20 bp, synthetic construct
  misc_feature 1..20: note = chemically synthesized
  source 1..20: mol_type = other DNA
agtgcagactgcttgggagc

SEQ ID NO: 28008 - DNA, 20 bp, synthetic construct
  misc_feature 1..20: note = chemically synthesized
  source 1..20: mol_type = other DNA
tgcagactgcttgggagcca

SEQ ID NO: 28009 - DNA, 20 bp, synthetic construct
  misc_feature 1..20: note = chemically synthesized
  source 1..20: mol_type = other DNA
gcagactgcttgggagccag

SEQ ID NO: 28010 - DNA, 20 bp, synthetic construct
  misc_feature 1..20: note = chemically synthesized
  source 1..20: mol_type = other DNA
cagactgcttgggagccaga

SEQ ID NO: 28011 - DNA, 20 bp, synthetic construct
  misc_feature 1..20: note = chemically synthesized
  source 1..20: mol_type = other DNA
ggagccagagggttgtcctg

SEQ ID NO: 28012 - DNA, 20 bp, synthetic construct
  misc_feature 1..20: note = chemically synthesized
  source 1..20: mol_type = other DNA
gggttgtcctgcagttgcta

SEQ ID NO: 28013 - DNA, 20 bp, synthetic construct
  misc_feature 1..20: note = chemically synthesized
  source 1..20: mol_type = other DNA
cccacaccacacccactgtc

SEQ ID NO: 28014 - DNA, 20 bp, synthetic construct
  misc_feature 1..20: note = chemically synthesized
  source 1..20: mol_type = other DNA
acaccacacccactgtccag

SEQ ID NO: 28015 - DNA, 20 bp, synthetic construct
  misc_feature 1..20: note = chemically synthesized
  source 1..20: mol_type = other DNA
cacccactgtccagaagcct

SEQ ID NO: 28016 - DNA, 20 bp, synthetic construct
  misc_feature 1..20: note = chemically synthesized
  source 1..20: mol_type = other DNA
acccactgtccagaagcctg

SEQ ID NO: 28017 - DNA, 20 bp, synthetic construct
  misc_feature 1..20: note = chemically synthesized
  source 1..20: mol_type = other DNA
aagcctgaggacccacacac

SEQ ID NO: 28018 - DNA, 20 bp, synthetic construct
  misc_feature 1..20: note = chemically synthesized
  source 1..20: mol_type = other DNA
tgaggacccacacaccagcc

SEQ ID NO: 28019 - DNA, 20 bp, synthetic construct
  misc_feature 1..20: note = chemically synthesized
  source 1..20: mol_type = other DNA
cacaccagcccagtctacta

SEQ ID NO: 28020 - DNA, 20 bp, synthetic construct
  misc_feature 1..20: note = chemically synthesized
  source 1..20: mol_type = other DNA
tatggccactactgacaccc

SEQ ID NO: 28021 - DNA, 20 bp, synthetic construct
  misc_feature 1..20: note = chemically synthesized
  source 1..20: mol_type = other DNA
acacccaagcaaactgcctg

SEQ ID NO: 28022 - DNA, 20 bp, synthetic construct
  misc_feature 1..20: note = chemically synthesized
  source 1..20: mol_type = other DNA
cacccaagcaaactgcctga

SEQ ID NO: 28023 - DNA, 20 bp, synthetic construct
  misc_feature 1..20: note = chemically synthesized
  source 1..20: mol_type = other DNA
agcaaactgcctgaaggcca

SEQ ID NO: 28024 - DNA, 20 bp, synthetic construct
  misc_feature 1..20: note = chemically synthesized
  source 1..20: mol_type = other DNA
ggccaaagaatcaacccaac

SEQ ID NO: 28025 - DNA, 20 bp, synthetic construct
  misc_feature 1..20: note = chemically synthesized
  source 1..20: mol_type = other DNA
ccaactagactcattaccat

SEQ ID NO: 28026 - DNA, 20 bp, synthetic construct
  misc_feature 1..20: note = chemically synthesized
  source 1..20: mol_type = other DNA
accatcagtgccaatgtaca

SEQ ID NO: 28027 - DNA, 20 bp, synthetic construct
  misc_feature 1..20: note = chemically synthesized
  source 1..20: mol_type = other DNA
agtgccaatgtacacagcca

SEQ ID NO: 28028 - DNA, 20 bp, synthetic construct
  misc_feature 1..20: note = chemically synthesized
  source 1..20: mol_type = other DNA
gtgccaatgtacacagccat

SEQ ID NO: 28029 - DNA, 20 bp, synthetic construct
  misc_feature 1..20: note = chemically synthesized
  source 1..20: mol_type = other DNA
tgccaatgtacacagccatg

SEQ ID NO: 28030 - DNA, 20 bp, synthetic construct
  misc_feature 1..20: note = chemically synthesized
  source 1..20: mol_type = other DNA
tgtacacagccatggggccc

SEQ ID NO: 28031 - DNA, 20 bp, synthetic construct
  misc_feature 1..20: note = chemically synthesized
  source 1..20: mol_type = other DNA
gtacacagccatggggccca

SEQ ID NO: 28032 - DNA, 20 bp, synthetic construct
  misc_feature 1..20: note = chemically synthesized
  source 1..20: mol_type = other DNA
acagccatggggcccaagga

SEQ ID NO: 28033 - DNA, 20 bp, synthetic construct
  misc_feature 1..20: note = chemically synthesized
  source 1..20: mol_type = other DNA
cagccatggggcccaaggac

SEQ ID NO: 28034 - DNA, 20 bp, synthetic construct
  misc_feature 1..20: note = chemically synthesized
  source 1..20: mol_type = other DNA
gggcccaaggacaggaatgc

SEQ ID NO: 28035 - DNA, 20 bp, synthetic construct
  misc_feature 1..20: note = chemically synthesized
  source 1..20: mol_type = other DNA
ggcccaaggacaggaatgct

SEQ ID NO: 28036 - DNA, 20 bp, synthetic construct
  misc_feature 1..20: note = chemically synthesized
  source 1..20: mol_type = other DNA
gctaggcccaccaccaccac

SEQ ID NO: 28037 - DNA, 20 bp, synthetic construct
  misc_feature 1..20: note = chemically synthesized
  source 1..20: mol_type = other DNA
ctaggcccaccaccaccact

SEQ ID NO: 28038 - DNA, 20 bp, synthetic construct
  misc_feature 1..20: note = chemically synthesized
  source 1..20: mol_type = other DNA
taggcccaccaccaccactg

SEQ ID NO: 28039 - DNA, 20 bp, synthetic construct
  misc_feature 1..20: note = chemically synthesized
  source 1..20: mol_type = other DNA
ccaccaccaccactggggcc

SEQ ID NO: 28040 - DNA, 20 bp, synthetic construct
  misc_feature 1..20: note = chemically synthesized
  source 1..20: mol_type = other DNA
caccaccaccactggggcca

SEQ ID NO: 28041 - DNA, 20 bp, synthetic construct
  misc_feature 1..20: note = chemically synthesized
  source 1..20: mol_type = other DNA
ccaccactggggccaaggac

SEQ ID NO: 28042 - DNA, 20 bp, synthetic construct
  misc_feature 1..20: note = chemically synthesized
  source 1..20: mol_type = other DNA
ccacttgatattcttgtctc

SEQ ID NO: 28043 - DNA, 20 bp, synthetic construct
  misc_feature 1..20: note = chemically synthesized
  source 1..20: mol_type = other DNA
ttcactaacaaatgcaccct

SEQ ID NO: 28044 - DNA, 20 bp, synthetic construct
  misc_feature 1..20: note = chemically synthesized
  source 1..20: mol_type = other DNA
ctaagccactgaaaaaatca

SEQ ID NO: 28045 - DNA, 20 bp, synthetic construct
  misc_feature 1..20: note = chemically synthesized
  source 1..20: mol_type = other DNA
acagacactgatgatactgt

SEQ ID NO: 28046 - DNA, 20 bp, synthetic construct
  misc_feature 1..20: note = chemically synthesized
  source 1..20: mol_type = other DNA
gacactgatgatactgttgg

SEQ ID NO: 28047 - DNA, 20 bp, synthetic construct
  misc_feature 1..20: note = chemically synthesized
  source 1..20: mol_type = other DNA
agctgaaaaaaaataatatg

SEQ ID NO: 28048 - DNA, 20 bp, synthetic construct
  misc_feature 1..20: note = chemically synthesized
  source 1..20: mol_type = other DNA
actatgctgctgtatgcacc

SEQ ID NO: 28049 - DNA, 20 bp, synthetic construct
  misc_feature 1..20: note = chemically synthesized
  source 1..20: mol_type = other DNA
gcacctagaaatcaaaatca

SEQ ID NO: 28050 - DNA, 20 bp, synthetic construct
  misc_feature 1..20: note = chemically synthesized
  source 1..20: mol_type = other DNA
tgccctactcaatcaacacc

SEQ ID NO: 28051 - DNA, 20 bp, synthetic construct
  misc_feature 1..20: note = chemically synthesized
  source 1..20: mol_type = other DNA
tcaacaccaagatacatctt

SEQ ID NO: 28052 - DNA, 20 bp, synthetic construct
  misc_feature 1..20: note = chemically synthesized
  source 1..20: mol_type = other DNA
caagatacatcttcagaaaa

SEQ ID NO: 28053 - DNA, 20 bp, synthetic construct
  misc_feature 1..20: note = chemically synthesized
  source 1..20: mol_type = other DNA
caaaaacaaatttacaaaac

SEQ ID NO: 28054 - DNA, 20 bp, synthetic construct
  misc_feature 1..20: note = chemically synthesized
  source 1..20: mol_type = other DNA
aaacaaatttacaaaactgg

SEQ ID NO: 28055 - DNA, 20 bp, synthetic construct
  misc_feature 1..20: note = chemically synthesized
  source 1..20: mol_type = other DNA
caaatttacaaaactggaag

SEQ ID NO: 28056 - DNA, 20 bp, synthetic construct
  misc_feature 1..20: note = chemically synthesized
  source 1..20: mol_type = other DNA
ggaagcagcaatcattacac

SEQ ID NO: 28057 - DNA, 20 bp, synthetic construct
  misc_feature 1..20: note = chemically synthesized
  source 1..20: mol_type = other DNA
agcaatcattacaccagatg

SEQ ID NO: 28058 - DNA, 20 bp, synthetic construct
  misc_feature 1..20: note = chemically synthesized
  source 1..20: mol_type = other DNA
caatcattacaccagatgca

SEQ ID NO: 28059 - DNA, 20 bp, synthetic construct
  misc_feature 1..20: note = chemically synthesized
  source 1..20: mol_type = other DNA
agatgcagagatatcaatgc

SEQ ID NO: 28060 - DNA, 20 bp, synthetic construct
  misc_feature 1..20: note = chemically synthesized
  source 1..20: mol_type = other DNA
aagaacaaaataaacataaa

SEQ ID NO: 28061 - DNA, 20 bp, synthetic construct
  misc_feature 1..20: note = chemically synthesized
  source 1..20: mol_type = other DNA
agaacaaaataaacataaaa

SEQ ID NO: 28062 - DNA, 20 bp, synthetic construct
  misc_feature 1..20: note = chemically synthesized
  source 1..20: mol_type = other DNA
aaaataaacataaaaaggtg

SEQ ID NO: 28063 - DNA, 20 bp, synthetic construct
  misc_feature 1..20: note = chemically synthesized
  source 1..20: mol_type = other DNA
gaagaaatatgacacttcca

SEQ ID NO: 28064 - DNA, 20 bp, synthetic construct
  misc_feature 1..20: note = chemically synthesized
  source 1..20: mol_type = other DNA
aagaaatatgacacttccaa

SEQ ID NO: 28065 - DNA, 20 bp, synthetic construct
  misc_feature 1..20: note = chemically synthesized
  source 1..20: mol_type = other DNA
aaaggaatttaataattctt

SEQ ID NO: 28066 - DNA, 20 bp, synthetic construct
  misc_feature 1..20: note = chemically synthesized
  source 1..20: mol_type = other DNA
taataattcttcagcaacat

SEQ ID NO: 28067 - DNA, 20 bp, synthetic construct
  misc_feature 1..20: note = chemically synthesized
  source 1..20: mol_type = other DNA
aattcttcagcaacataagc

SEQ ID NO: 28068 - DNA, 20 bp, synthetic construct
  misc_feature 1..20: note = chemically synthesized
  source 1..20: mol_type = other DNA
tcttcagcaacataagccag

SEQ ID NO: 28069 - DNA, 20 bp, synthetic construct
  misc_feature 1..20: note = chemically synthesized
  source 1..20: mol_type = other DNA
acataagccagtggaaaaaa

SEQ ID NO: 28070 - DNA, 20 bp, synthetic construct
  misc_feature 1..20: note = chemically synthesized
  source 1..20: mol_type = other DNA
aaaagacatttataaaattc

SEQ ID NO: 28071 - DNA, 20 bp, synthetic construct
  misc_feature 1..20: note = chemically synthesized
  source 1..20: mol_type = other DNA
atttataaaattctggaaaa

SEQ ID NO: 28072 - DNA, 20 bp, synthetic construct
  misc_feature 1..20: note = chemically synthesized
  source 1..20: mol_type = other DNA
gaatccaaaatgttgatatt

SEQ ID NO: 28073 - DNA, 20 bp, synthetic construct
  misc_feature 1..20: note = chemically synthesized
  source 1..20: mol_type = other DNA
aatccaaaatgttgatatta

SEQ ID NO: 28074 - DNA, 20 bp, synthetic construct
  misc_feature 1..20: note = chemically synthesized
  source 1..20: mol_type = other DNA
ccaaaatgttgatattaagg

SEQ ID NO: 28075 - DNA, 20 bp, synthetic construct
  misc_feature 1..20: note = chemically synthesized
  source 1..20: mol_type = other DNA
atgttgatattaaggaagct

SEQ ID NO: 28076 - DNA, 20 bp, synthetic construct
  misc_feature 1..20: note = chemically synthesized
  source 1..20: mol_type = other DNA
tgatattaaggaagctcagt

SEQ ID NO: 28077 - DNA, 20 bp, synthetic construct
  misc_feature 1..20: note = chemically synthesized
  source 1..20: mol_type = other DNA
aaggaagctcagtgagacac

SEQ ID NO: 28078 - DNA, 20 bp, synthetic construct
  misc_feature 1..20: note = chemically synthesized
  source 1..20: mol_type = other DNA
ggaagctcagtgagacacaa

SEQ ID NO: 28079 - DNA, 20 bp, synthetic construct
  misc_feature 1..20: note = chemically synthesized
  source 1..20: mol_type = other DNA
cagtgagacacaagagaact

SEQ ID NO: 28080 - DNA, 20 bp, synthetic construct
  misc_feature 1..20: note = chemically synthesized
  source 1..20: mol_type = other DNA
gaactcagataaacaataaa

SEQ ID NO: 28081 - DNA, 20 bp, synthetic construct
  misc_feature 1..20: note = chemically synthesized
  source 1..20: mol_type = other DNA
gataaacaataaaaagaaat

SEQ ID NO: 28082 - DNA, 20 bp, synthetic construct
  misc_feature 1..20: note = chemically synthesized
  source 1..20: mol_type = other DNA
aagaaatcagaaaaacaatt

SEQ ID NO: 28083 - DNA, 20 bp, synthetic construct
  misc_feature 1..20: note = chemically synthesized
  source 1..20: mol_type = other DNA
agaaatcagaaaaacaattc

SEQ ID NO: 28084 - DNA, 20 bp, synthetic construct
  misc_feature 1..20: note = chemically synthesized
  source 1..20: mol_type = other DNA
aaacaattcaggatatgaat

SEQ ID NO: 28085 - DNA, 20 bp, synthetic construct
  misc_feature 1..20: note = chemically synthesized
  source 1..20: mol_type = other DNA
tatgaatgagaaatttaccc

SEQ ID NO: 28086 - DNA, 20 bp, synthetic construct
  misc_feature 1..20: note = chemically synthesized
  source 1..20: mol_type = other DNA
tgaatgagaaatttacccaa

SEQ ID NO: 28087 - DNA, 20 bp, synthetic construct
  misc_feature 1..20: note = chemically synthesized
  source 1..20: mol_type = other DNA
tgagaaatttacccaagaga

SEQ ID NO: 28088 - DNA, 20 bp, synthetic construct
  misc_feature 1..20: note = chemically synthesized
  source 1..20: mol_type = other DNA
acccaagagatagatacaac

SEQ ID NO: 28089 - DNA, 20 bp, synthetic construct
  misc_feature 1..20: note = chemically synthesized
  source 1..20: mol_type = other DNA
tacaacaagaatgaaccaaa

SEQ ID NO: 28090 - DNA, 20 bp, synthetic construct
  misc_feature 1..20: note = chemically synthesized
  source 1..20: mol_type = other DNA
aaacagaaattctgtaactg

SEQ ID NO: 28091 - DNA, 20 bp, synthetic construct
  misc_feature 1..20: note = chemically synthesized
  source 1..20: mol_type = other DNA
acagaaattctgtaactgaa

SEQ ID NO: 28092 - DNA, 20 bp, synthetic construct
  misc_feature 1..20: note = chemically synthesized
  source 1..20: mol_type = other DNA
gtaactgaagagtttattga

SEQ ID NO: 28093 - DNA, 20 bp, synthetic construct
  misc_feature 1..20: note = chemically synthesized
  source 1..20: mol_type = other DNA
acattcaaaaacttcaacaa

SEQ ID NO: 28094 - DNA, 20 bp, synthetic construct
  misc_feature 1..20: note = chemically synthesized
  source 1..20: mol_type = other DNA
caaaaacttcaacaatagat

SEQ ID NO: 28095 - DNA, 20 bp, synthetic construct
  misc_feature 1..20: note = chemically synthesized
  source 1..20: mol_type = other DNA
cttcaacaatagatcagatc

SEQ ID NO: 28096 - DNA, 20 bp, synthetic construct
  misc_feature 1..20: note = chemically synthesized
  source 1..20: mol_type = other DNA
caacaatagatcagatcaag

SEQ ID NO: 28097 - DNA, 20 bp, synthetic construct
  misc_feature 1..20: note = chemically synthesized
  source 1..20: mol_type = other DNA
caatagatcagatcaagcag

SEQ ID NO: 28098 - DNA, 20 bp, synthetic construct
  misc_feature 1..20: note = chemically synthesized
  source 1..20: mol_type = other DNA
atcaagcagaagaaaaattt

SEQ ID NO: 28099 - DNA, 20 bp, synthetic construct
  misc_feature 1..20: note = chemically synthesized
  source 1..20: mol_type = other DNA
aagaaaaatttcagaacttg

SEQ ID NO: 28100 - DNA, 20 bp, synthetic construct
  misc_feature 1..20: note = chemically synthesized
  source 1..20: mol_type = other DNA
aaaatttcagaacttgaaga

SEQ ID NO: 28101 - DNA, 20 bp, synthetic construct
  misc_feature 1..20: note = chemically synthesized
  source 1..20: mol_type = other DNA
aaatttcagaacttgaagac

SEQ ID NO: 28102 - DNA, 20 bp, synthetic construct
  misc_feature 1..20: note = chemically synthesized
  source 1..20: mol_type = other DNA
gaagacaggtcttttaaaat

SEQ ID NO: 28103 - DNA, 20 bp, synthetic construct
  misc_feature 1..20: note = chemically synthesized
  source 1..20: mol_type = other DNA
acaggtcttttaaaattagc

SEQ ID NO: 28104 - DNA, 20 bp, synthetic construct
  misc_feature 1..20: note = chemically synthesized
  source 1..20: mol_type = other DNA
aaaattagctggtcaaatga

SEQ ID NO: 28105 - DNA, 20 bp, synthetic construct
  misc_feature 1..20: note = chemically synthesized
  source 1..20: mol_type = other DNA
ttagctggtcaaatgataga

SEQ ID NO: 28106 - DNA, 20 bp, synthetic construct
  misc_feature 1..20: note = chemically synthesized
  source 1..20: mol_type = other DNA
tagctggtcaaatgatagaa

SEQ ID NO: 28107 - DNA, 20 bp, synthetic construct
  misc_feature 1..20: note = chemically synthesized
  source 1..20: mol_type = other DNA
aatgatagaaaggaaaaaaa

SEQ ID NO: 28108 - DNA, 20 bp, synthetic construct
  misc_feature 1..20: note = chemically synthesized
  source 1..20: mol_type = other DNA
ggaaaaaaaaagaatgaaca

SEQ ID NO: 28109 - DNA, 20 bp, synthetic construct
  misc_feature 1..20: note = chemically synthesized
  source 1..20: mol_type = other DNA
acaaagtgtatgtgacatat

SEQ ID NO: 28110 - DNA, 20 bp, synthetic construct
  misc_feature 1..20: note = chemically synthesized
  source 1..20: mol_type = other DNA
caaagtgtatgtgacatatg

SEQ ID NO: 28111 - DNA, 20 bp, synthetic construct
  misc_feature 1..20: note = chemically synthesized
  source 1..20: mol_type = other DNA
gtgacatatgaggcactata

SEQ ID NO: 28112 - DNA, 20 bp, synthetic construct
  misc_feature 1..20: note = chemically synthesized
  source 1..20: mol_type = other DNA
tgaacaaatattcaaatttg

SEQ ID NO: 28113 - DNA, 20 bp, synthetic construct
  misc_feature 1..20: note = chemically synthesized
  source 1..20: mol_type = other DNA
tattcaaatttgcagtttcc

SEQ ID NO: 28114 - DNA, 20 bp, synthetic construct
  misc_feature 1..20: note = chemically synthesized
  source 1..20: mol_type = other DNA
tcaaatttgcagtttcccag

SEQ ID NO: 28115 - DNA, 20 bp, synthetic construct
  misc_feature 1..20: note = chemically synthesized
  source 1..20: mol_type = other DNA
caaatttgcagtttcccaga

SEQ ID NO: 28116 - DNA, 20 bp, synthetic construct
  misc_feature 1..20: note = chemically synthesized
  source 1..20: mol_type = other DNA
ttgcagtttcccagaaggta

SEQ ID NO: 28117 - DNA, 20 bp, synthetic construct
  misc_feature 1..20: note = chemically synthesized
  source 1..20: mol_type = other DNA
gcagtttcccagaaggtaaa

SEQ ID NO: 28118 - DNA, 20 bp, synthetic construct
  misc_feature 1..20: note = chemically synthesized
  source 1..20: mol_type = other DNA
agaaggtaaagagaacatga

SEQ ID NO: 28119 - DNA, 20 bp, synthetic construct
  misc_feature 1..20: note = chemically synthesized
  source 1..20: mol_type = other DNA
gaaggtaaagagaacatgaa

SEQ ID NO: 28120 - DNA, 20 bp, synthetic construct
  misc_feature 1..20: note = chemically synthesized
  source 1..20: mol_type = other DNA
taaagagaacatgaaaggtg

SEQ ID NO: 28121 - DNA, 20 bp, synthetic construct
  misc_feature 1..20: note = chemically synthesized
  source 1..20: mol_type = other DNA
aaagagaacatgaaaggtgt

SEQ ID NO: 28122 - DNA, 20 bp, synthetic construct
  misc_feature 1..20: note = chemically synthesized
  source 1..20: mol_type = other DNA
aaacctacgtaacaacacaa

SEQ ID NO: 28123 - DNA, 20 bp, synthetic construct
  misc_feature 1..20: note = chemically synthesized
  source 1..20: mol_type = other DNA
acaatagctgaaaacttgtc

SEQ ID NO: 28124 - DNA, 20 bp, synthetic construct
  misc_feature 1..20: note = chemically synthesized
  source 1..20: mol_type = other DNA
agctgaaaacttgtcaagtc

SEQ ID NO: 28125 - DNA, 20 bp, synthetic construct
  misc_feature 1..20: note = chemically synthesized
  source 1..20: mol_type = other DNA
gaaaacttgtcaagtctagc

SEQ ID NO: 28126 - DNA, 20 bp, synthetic construct
  misc_feature 1..20: note = chemically synthesized
  source 1..20: mol_type = other DNA
gtcaagtctagcaagaaatg

SEQ ID NO: 28127 - DNA, 20 bp, synthetic construct
  misc_feature 1..20: note = chemically synthesized
  source 1..20: mol_type = other DNA
tagcaagaaatgtagacatc

SEQ ID NO: 28128 - DNA, 20 bp, synthetic construct
  misc_feature 1..20: note = chemically synthesized
  source 1..20: mol_type = other DNA
acatccagacaaatgaaaat

SEQ ID NO: 28129 - DNA, 20 bp, synthetic construct
  misc_feature 1..20: note = chemically synthesized
  source 1..20: mol_type = other DNA
cccaaataatataatgcaaa

SEQ ID NO: 28130 - DNA, 20 bp, synthetic construct
  misc_feature 1..20: note = chemically synthesized
  source 1..20: mol_type = other DNA
atgcaaaaagctcttctcca

SEQ ID NO: 28131 - DNA, 20 bp, synthetic construct
  misc_feature 1..20: note = chemically synthesized
  source 1..20: mol_type = other DNA
ctcttctccacagcacatta

SEQ ID NO: 28132 - DNA, 20 bp, synthetic construct
  misc_feature 1..20: note = chemically synthesized
  source 1..20: mol_type = other DNA
cattatagtcaaactgtcaa

SEQ ID NO: 28133 - DNA, 20 bp, synthetic construct
  misc_feature 1..20: note = chemically synthesized
  source 1..20: mol_type = other DNA
agtcaaactgtcaaaagcca

SEQ ID NO: 28134 - DNA, 20 bp, synthetic construct
  misc_feature 1..20: note = chemically synthesized
  source 1..20: mol_type = other DNA
tcaaactgtcaaaagccaaa

SEQ ID NO: 28135 - DNA, 20 bp, synthetic construct
  misc_feature 1..20: note = chemically synthesized
  source 1..20: mol_type = other DNA
actgtcaaaagccaaagagt

SEQ ID NO: 28136 - DNA, 20 bp, synthetic construct
  misc_feature 1..20: note = chemically synthesized
  source 1..20: mol_type = other DNA
aaagagtaagaactctaaaa

SEQ ID NO: 28137 - DNA, 20 bp, synthetic construct
  misc_feature 1..20: note = chemically synthesized
  source 1..20: mol_type = other DNA
agtaagaactctaaaacagc

SEQ ID NO: 28138 - DNA, 20 bp, synthetic construct
  misc_feature 1..20: note = chemically synthesized
  source 1..20: mol_type = other DNA
aaaacagcaagcaaaatgtc

SEQ ID NO: 28139 - DNA, 20 bp, synthetic construct
  misc_feature 1..20: note = chemically synthesized
  source 1..20: mol_type = other DNA
caaaatgtctagtcacttat

SEQ ID NO: 28140 - DNA, 20 bp, synthetic construct
  misc_feature 1..20: note = chemically synthesized
  source 1..20: mol_type = other DNA
aaaatgtctagtcacttata

SEQ ID NO: 28141 - DNA, 20 bp, synthetic construct
  misc_feature 1..20: note = chemically synthesized
  source 1..20: mol_type = other DNA
aaatgtctagtcacttataa

SEQ ID NO: 28142 - DNA, 20 bp, synthetic construct
  misc_feature 1..20: note = chemically synthesized
  source 1..20: mol_type = other DNA
acttataagggaacttccac

SEQ ID NO: 28143 - DNA, 20 bp, synthetic construct
  misc_feature 1..20: note = chemically synthesized
  source 1..20: mol_type = other DNA
gggaacttccacaagattaa

SEQ ID NO: 28144 - DNA, 20 bp, synthetic construct
  misc_feature 1..20: note = chemically synthesized
  source 1..20: mol_type = other DNA
ccacaagattaacagattaa

SEQ ID NO: 28145 - DNA, 20 bp, synthetic construct
  misc_feature 1..20: note = chemically synthesized
  source 1..20: mol_type = other DNA
caagattaacagattaacag

SEQ ID NO: 28146 - DNA, 20 bp, synthetic construct
  misc_feature 1..20: note = chemically synthesized
  source 1..20: mol_type = other DNA
cagattaacagcagatttct

SEQ ID NO: 28147 - DNA, 20 bp, synthetic construct
  misc_feature 1..20: note = chemically synthesized
  source 1..20: mol_type = other DNA
attaacagcagatttctcag

SEQ ID NO: 28148 - DNA, 20 bp, synthetic construct
  misc_feature 1..20: note = chemically synthesized
  source 1..20: mol_type = other DNA
atttctcagcagaaacctca

SEQ ID NO: 28149 - DNA, 20 bp, synthetic construct
  misc_feature 1..20: note = chemically synthesized
  source 1..20: mol_type = other DNA
tttctcagcagaaacctcac

SEQ ID NO: 28150 - DNA, 20 bp, synthetic construct
  misc_feature 1..20: note = chemically synthesized
  source 1..20: mol_type = other DNA
tcagcagaaacctcacaggc

SEQ ID NO: 28151 - DNA, 20 bp, synthetic construct
  misc_feature 1..20: note = chemically synthesized
  source 1..20: mol_type = other DNA
cagcagaaacctcacaggcc

SEQ ID NO: 28152 - DNA, 20 bp, synthetic construct
  misc_feature 1..20: note = chemically synthesized
  source 1..20: mol_type = other DNA
gcagaaacctcacaggccag

SEQ ID NO: 28153 - DNA, 20 bp, synthetic construct
  misc_feature 1..20: note = chemically synthesized
  source 1..20: mol_type = other DNA
gaaacctcacaggccaggag

SEQ ID NO: 28154 - DNA, 20 bp, synthetic construct
  misc_feature 1..20: note = chemically synthesized
  source 1..20: mol_type = other DNA
cctcacaggccaggagaaga

SEQ ID NO: 28155 - DNA, 20 bp, synthetic construct
  misc_feature 1..20: note = chemically synthesized
  source 1..20: mol_type = other DNA
ctcacaggccaggagaagat

SEQ ID NO: 28156 - DNA, 20 bp, synthetic construct
  misc_feature 1..20: note = chemically synthesized
  source 1..20: mol_type = other DNA
atgggatgatatattcaaaa

SEQ ID NO: 28157 - DNA, 20 bp, synthetic construct
  misc_feature 1..20: note = chemically synthesized
  source 1..20: mol_type = other DNA
tgatatattcaaaatagtga

SEQ ID NO: 28158 - DNA, 20 bp, synthetic construct
  misc_feature 1..20: note = chemically synthesized
  source 1..20: mol_type = other DNA
tgaaagaaaaaaatgacacc

SEQ ID NO: 28159 - DNA, 20 bp, synthetic construct
  misc_feature 1..20: note = chemically synthesized
  source 1..20: mol_type = other DNA
gaaagaaaaaaatgacacca

SEQ ID NO: 28160 - DNA, 20 bp, synthetic construct
  misc_feature 1..20: note = chemically synthesized
  source 1..20: mol_type = other DNA
gacaccaaggatgttatacc

SEQ ID NO: 28161 - DNA, 20 bp, synthetic construct
  misc_feature 1..20: note = chemically synthesized
  source 1..20: mol_type = other DNA
aacattgttcttcaaaaatg

SEQ ID NO: 28162 - DNA, 20 bp, synthetic construct
  misc_feature 1..20: note = chemically synthesized
  source 1..20: mol_type = other DNA
acattgttcttcaaaaatga

SEQ ID NO: 28163 - DNA, 20 bp, synthetic construct
  misc_feature 1..20: note = chemically synthesized
  source 1..20: mol_type = other DNA
aggataaataaaatcttttc

SEQ ID NO: 28164 - DNA, 20 bp, synthetic construct
  misc_feature 1..20: note = chemically synthesized
  source 1..20: mol_type = other DNA
ggataaataaaatcttttct

SEQ ID NO: 28165 - DNA, 20 bp, synthetic construct
  misc_feature 1..20: note = chemically synthesized
  source 1..20: mol_type = other DNA
aaataaaatcttttctgggc

SEQ ID NO: 28166 - DNA, 20 bp, synthetic construct
  misc_feature 1..20: note = chemically synthesized
  source 1..20: mol_type = other DNA
ttctgggcaagaaaaatttg

SEQ ID NO: 28167 - DNA, 20 bp, synthetic construct
  misc_feature 1..20: note = chemically synthesized
  source 1..20: mol_type = other DNA
tctgggcaagaaaaatttga

SEQ ID NO: 28168 - DNA, 20 bp, synthetic construct
  misc_feature 1..20: note = chemically synthesized
  source 1..20: mol_type = other DNA
ttgaaggaattcactatcac

SEQ ID NO: 28169 - DNA, 20 bp, synthetic construct
  misc_feature 1..20: note = chemically synthesized
  source 1..20: mol_type = other DNA
ggaattcactatcactagac

SEQ ID NO: 28170 - DNA, 20 bp, synthetic construct
  misc_feature 1..20: note = chemically synthesized
  source 1..20: mol_type = other DNA
tatcactagactggctttac

SEQ ID NO: 28171 - DNA, 20 bp, synthetic construct
  misc_feature 1..20: note = chemically synthesized
  source 1..20: mol_type = other DNA
tggctttacaagaaatattt

SEQ ID NO: 28172 - DNA, 20 bp, synthetic construct
  misc_feature 1..20: note = chemically synthesized
  source 1..20: mol_type = other DNA
ggctttacaagaaatattta

SEQ ID NO: 28173 - DNA, 20 bp, synthetic construct
  misc_feature 1..20: note = chemically synthesized
  source 1..20: mol_type = other DNA
gctttacaagaaatatttaa

SEQ ID NO: 28174 - DNA, 20 bp, synthetic construct
  misc_feature 1..20: note = chemically synthesized
  source 1..20: mol_type = other DNA
tttacaagaaatatttaagg

SEQ ID NO: 28175 - DNA, 20 bp, synthetic construct
  misc_feature 1..20: note = chemically synthesized
  source 1..20: mol_type = other DNA
taagggagtcctacacatga

SEQ ID NO: 28176 - DNA, 20 bp, synthetic construct
  misc_feature 1..20: note = chemically synthesized
  source 1..20: mol_type = other DNA
agtcctacacatgaaagtga

SEQ ID NO: 28177 - DNA, 20 bp, synthetic construct
  misc_feature 1..20: note = chemically synthesized
  source 1..20: mol_type = other DNA
gtcctacacatgaaagtgac

SEQ ID NO: 28178 - DNA, 20 bp, synthetic construct
  misc_feature 1..20: note = chemically synthesized
  source 1..20: mol_type = other DNA
gacaggacactgccattatg

SEQ ID NO: 28179 - DNA, 20 bp, synthetic construct
  misc_feature 1..20: note = chemically synthesized
  source 1..20: mol_type = other DNA
tgccattatgaagacacaca

SEQ ID NO: 28180 - DNA, 20 bp, synthetic construct
  misc_feature 1..20: note = chemically synthesized
  source 1..20: mol_type = other DNA
gccattatgaagacacacaa

SEQ ID NO: 28181 - DNA, 20 bp, synthetic construct
  misc_feature 1..20: note = chemically synthesized
  source 1..20: mol_type = other DNA
cacaaaggtatacaactaac

SEQ ID NO: 28182 - DNA, 20 bp, synthetic construct
  misc_feature 1..20: note = chemically synthesized
  source 1..20: mol_type = other DNA
aaaggtatacaactaactgg

SEQ ID NO: 28183 - DNA, 20 bp, synthetic construct
  misc_feature 1..20: note = chemically synthesized
  source 1..20: mol_type = other DNA
aggtatacaactaactggta

SEQ ID NO: 28184 - DNA, 20 bp, synthetic construct
  misc_feature 1..20: note = chemically synthesized
  source 1..20: mol_type = other DNA
ggtagagcaaaacacaaata

SEQ ID NO: 28185 - DNA, 20 bp, synthetic construct
  misc_feature 1..20: note = chemically synthesized
  source 1..20: mol_type = other DNA
agagcaaaacacaaataaag

SEQ ID NO: 28186 - DNA, 20 bp, synthetic construct
  misc_feature 1..20: note = chemically synthesized
  source 1..20: mol_type = other DNA
agcaaaacacaaataaagaa

SEQ ID NO: 28187 - DNA, 20 bp, synthetic construct
  misc_feature 1..20: note = chemically synthesized
  source 1..20: mol_type = other DNA
aaacacaaataaagaagaga

SEQ ID NO: 28188 - DNA, 20 bp, synthetic construct
  misc_feature 1..20: note = chemically synthesized
  source 1..20: mol_type = other DNA
gaactcaaacgttaccacta

SEQ ID NO: 28189 - DNA, 20 bp, synthetic construct
  misc_feature 1..20: note = chemically synthesized
  source 1..20: mol_type = other DNA
aaaccacaatcataaataat

SEQ ID NO: 28190 - DNA, 20 bp, synthetic construct
  misc_feature 1..20: note = chemically synthesized
  source 1..20: mol_type = other DNA
cacaatcataaataataaga

SEQ ID NO: 28191 - DNA, 20 bp, synthetic construct
  misc_feature 1..20: note = chemically synthesized
  source 1..20: mol_type = other DNA
atcataaataataagaaaga

SEQ ID NO: 28192 - DNA, 20 bp, synthetic construct
  misc_feature 1..20: note = chemically synthesized
  source 1..20: mol_type = other DNA
taaataataagaaagaaaga

SEQ ID NO: 28193 - DNA, 20 bp, synthetic construct
  misc_feature 1..20: note = chemically synthesized
  source 1..20: mol_type = other DNA
taataagaaagaaagaaaga

SEQ ID NO: 28194 - DNA, 20 bp, synthetic construct
  misc_feature 1..20: note = chemically synthesized
  source 1..20: mol_type = other DNA
aagaaagaaagaaagaaaga

SEQ ID NO: 28195 - DNA, 20 bp, synthetic construct
  misc_feature 1..20: note = chemically synthesized
  source 1..20: mol_type = other DNA
gaaagaaagaaagaaagaaa

SEQ ID NO: 28196 - DNA, 20 bp, synthetic construct
  misc_feature 1..20: note = chemically synthesized
  source 1..20: mol_type = other DNA
aagaaagaaagaaagaaaga

SEQ ID NO: 28197 - DNA, 20 bp, synthetic construct
  misc_feature 1..20: note = chemically synthesized
  source 1..20: mol_type = other DNA
gaaagaaagaaagaaagaga

SEQ ID NO: 28198 - DNA, 20 bp, synthetic construct
  misc_feature 1..20: note = chemically synthesized
  source 1..20: mol_type = other DNA
aagaaagaaagaaagagaga

SEQ ID NO: 28199 - DNA, 20 bp, synthetic construct
  misc_feature 1..20: note = chemically synthesized
  source 1..20: mol_type = other DNA
gaaagaaagaaagagagaga

SEQ ID NO: 28200 - DNA, 20 bp, synthetic construct
  misc_feature 1..20: note = chemically synthesized
  source 1..20: mol_type = other DNA
aagaaagaaagagagagaga

SEQ ID NO: 28201 - DNA, 20 bp, synthetic construct
  misc_feature 1..20: note = chemically synthesized
  source 1..20: mol_type = other DNA
gaaagaaagagagagagaga

SEQ ID NO: 28202 - DNA, 20 bp, synthetic construct
  misc_feature 1..20: note = chemically synthesized
  source 1..20: mol_type = other DNA
gagagagagagagagaatga

SEQ ID NO: 28203 - DNA, 20 bp, synthetic construct
  misc_feature 1..20: note = chemically synthesized
  source 1..20: mol_type = other DNA
gagagagagagaatgaaaga

SEQ ID NO: 28204 - DNA, 20 bp, synthetic construct
  misc_feature 1..20: note = chemically synthesized
  source 1..20: mol_type = other DNA
agagagaatgaaagaaagaa

SEQ ID NO: 28205 - DNA, 20 bp, synthetic construct
  misc_feature 1..20: note = chemically synthesized
  source 1..20: mol_type = other DNA
gagagaatgaaagaaagaaa

SEQ ID NO: 28206 - DNA, 20 bp, synthetic construct
  misc_feature 1..20: note = chemically synthesized
  source 1..20: mol_type = other DNA
agaatgaaagaaagaaaagg

SEQ ID NO: 28207 - DNA, 20 bp, synthetic construct
  misc_feature 1..20: note = chemically synthesized
  source 1..20: mol_type = other DNA
gaatgaaagaaagaaaagga

SEQ ID NO: 28208 - DNA, 20 bp, synthetic construct
  misc_feature 1..20: note = chemically synthesized
  source 1..20: mol_type = other DNA
tgaaagaaagaaaaggaagg

SEQ ID NO: 28209 - DNA, 20 bp, synthetic construct
  misc_feature 1..20: note = chemically synthesized
  source 1..20: mol_type = other DNA
gaaagaaagaaaaggaagga

SEQ ID NO: 28210 - DNA, 20 bp, synthetic construct
  misc_feature 1..20: note = chemically synthesized
  source 1..20: mol_type = other DNA
agaaagaaaaggaaggaagg

SEQ ID NO: 28211 - DNA, 20 bp, synthetic construct
  misc_feature 1..20: note = chemically synthesized
  source 1..20: mol_type = other DNA
taaaaaaaaaacaaaacaac

SEQ ID NO: 28212 - DNA, 20 bp, synthetic construct
  misc_feature 1..20: note = chemically synthesized
  source 1..20: mol_type = other DNA
aaaaaaaaaacaaaacaacc

SEQ ID NO: 28213 - DNA, 20 bp, synthetic construct
  misc_feature 1..20: note = chemically synthesized
  source 1..20: mol_type = other DNA
ccaggaatcaattaacaaaa

SEQ ID NO: 28214 - DNA, 20 bp, synthetic construct
  misc_feature 1..20: note = chemically synthesized
  source 1..20: mol_type = other DNA
ggaatcaattaacaaaatgg

SEQ ID NO: 28215 - DNA, 20 bp, synthetic construct
  misc_feature 1..20: note = chemically synthesized
  source 1..20: mol_type = other DNA
gaatcaattaacaaaatggc

SEQ ID NO: 28216 - DNA, 20 bp, synthetic construct
  misc_feature 1..20: note = chemically synthesized
  source 1..20: mol_type = other DNA
attaacaaaatggcaggaat

SEQ ID NO: 28217 - DNA, 20 bp, synthetic construct
  misc_feature 1..20: note = chemically synthesized
  source 1..20: mol_type = other DNA
aagctctcacatgtcaataa

SEQ ID NO: 28218 - DNA, 20 bp, synthetic construct
  misc_feature 1..20: note = chemically synthesized
  source 1..20: mol_type = other DNA
ataatagccttgcatgtaaa

SEQ ID NO: 28219 - DNA, 20 bp, synthetic construct
  misc_feature 1..20: note = chemically synthesized
  source 1..20: mol_type = other DNA
tggattaaattgttacttga

SEQ ID NO: 28220 - DNA, 20 bp, synthetic construct
  misc_feature 1..20: note = chemically synthesized
  source 1..20: mol_type = other DNA
aaattgttacttgaaagata

SEQ ID NO: 28221 - DNA, 20 bp, synthetic construct
  misc_feature 1..20: note = chemically synthesized
  source 1..20: mol_type = other DNA
gttacttgaaagatatagac

SEQ ID NO: 28222 - DNA, 20 bp, synthetic construct
  misc_feature 1..20: note = chemically synthesized
  source 1..20: mol_type = other DNA
aaagatatagactggctaaa

SEQ ID NO: 28223 - DNA, 20 bp, synthetic construct
  misc_feature 1..20: note = chemically synthesized
  source 1..20: mol_type = other DNA
tttaaaacaaaaatatgacc

SEQ ID NO: 28224 - DNA, 20 bp, synthetic construct
  misc_feature 1..20: note = chemically synthesized
  source 1..20: mol_type = other DNA
caaaaatatgacccagttgt

SEQ ID NO: 28225 - DNA, 20 bp, synthetic construct
  misc_feature 1..20: note = chemically synthesized
  source 1..20: mol_type = other DNA
cccagttgtaagctgcctat

SEQ ID NO: 28226 - DNA, 20 bp, synthetic construct
  misc_feature 1..20: note = chemically synthesized
  source 1..20: mol_type = other DNA
agaaacttatctcacttgta

SEQ ID NO: 28227 - DNA, 20 bp, synthetic construct
  misc_feature 1..20: note = chemically synthesized
  source 1..20: mol_type = other DNA
ctcacttgtaaagataaata

SEQ ID NO: 28228 - DNA, 20 bp, synthetic construct
  misc_feature 1..20: note = chemically synthesized
  source 1..20: mol_type = other DNA
taaagataaatatagactga

SEQ ID NO: 28229 - DNA, 20 bp, synthetic construct
  misc_feature 1..20: note = chemically synthesized
  source 1..20: mol_type = other DNA
aaatatagactgaaagtaaa

SEQ ID NO: 28230 - DNA, 20 bp, synthetic construct
  misc_feature 1..20: note = chemically synthesized
  source 1..20: mol_type = other DNA
gactgaaagtaaaaagatga

SEQ ID NO: 28231 - DNA, 20 bp, synthetic construct
  misc_feature 1..20: note = chemically synthesized
  source 1..20: mol_type = other DNA
gatgaaagatcttccataca

SEQ ID NO: 28232 - DNA, 20 bp, synthetic construct
  misc_feature 1..20: note = chemically synthesized
  source 1..20: mol_type = other DNA
tgaaagatcttccatacaaa

SEQ ID NO: 28233 - DNA, 20 bp, synthetic construct
  misc_feature 1..20: note = chemically synthesized
  source 1..20: mol_type = other DNA
tacaaagagaaaccaaaaat

SEQ ID NO: 28234 - DNA, 20 bp, synthetic construct
  misc_feature 1..20: note = chemically synthesized
  source 1..20: mol_type = other DNA
gagaaaccaaaaatgagcaa

SEQ ID NO: 28235 - DNA, 20 bp, synthetic construct
  misc_feature 1..20: note = chemically synthesized
  source 1..20: mol_type = other DNA
aaaccaaaaatgagcaaaag

SEQ ID NO: 28236 - DNA, 20 bp, synthetic construct
  misc_feature 1..20: note = chemically synthesized
  source 1..20: mol_type = other DNA
aaaagtagttatacctataa

SEQ ID NO: 28237 - DNA, 20 bp, synthetic construct
  misc_feature 1..20: note = chemically synthesized
  source 1..20: mol_type = other DNA
gactttaaataaaaaacact

SEQ ID NO: 28238 - DNA, 20 bp, synthetic construct
  misc_feature 1..20: note = chemically synthesized
  source 1..20: mol_type = other DNA
ctttaaataaaaaacactaa

SEQ ID NO: 28239 - DNA, 20 bp, synthetic construct
  misc_feature 1..20: note = chemically synthesized
  source 1..20: mol_type = other DNA
taaaaaacactaagagacaa

SEQ ID NO: 28240 - DNA, 20 bp, synthetic construct
  misc_feature 1..20: note = chemically synthesized
  source 1..20: mol_type = other DNA
aagtcattacataatgataa

SEQ ID NO: 28241 - DNA, 20 bp, synthetic construct
  misc_feature 1..20: note = chemically synthesized
  source 1..20: mol_type = other DNA
agtcattacataatgataaa

SEQ ID NO: 28242 - DNA, 20 bp, synthetic construct
  misc_feature 1..20: note = chemically synthesized
  source 1..20: mol_type = other DNA
taatgataaaaggaacaatt

SEQ ID NO: 28243 - DNA, 20 bp, synthetic construct
  misc_feature 1..20: note = chemically synthesized
  source 1..20: mol_type = other DNA
gataaaaggaacaattcagc

SEQ ID NO: 28244 - DNA, 20 bp, synthetic construct
  misc_feature 1..20: note = chemically synthesized
  source 1..20: mol_type = other DNA
taaaaggaacaattcagcaa

SEQ ID NO: 28245 - DNA, 20 bp, synthetic construct
  misc_feature 1..20: note = chemically synthesized
  source 1..20: mol_type = other DNA
taaacattcacactcaacac

SEQ ID NO: 28246 - DNA, 20 bp, synthetic construct
  misc_feature 1..20: note = chemically synthesized
  source 1..20: mol_type = other DNA
aacattcacactcaacacca

SEQ ID NO: 28247 - DNA, 20 bp, synthetic construct
  misc_feature 1..20: note = chemically synthesized
  source 1..20: mol_type = other DNA
acactcaacaccagagcatc

SEQ ID NO: 28248 - DNA, 20 bp, synthetic construct
  misc_feature 1..20: note = chemically synthesized
  source 1..20: mol_type = other DNA
ccagagcatccagatatgta

SEQ ID NO: 28249 - DNA, 20 bp, synthetic construct
  misc_feature 1..20: note = chemically synthesized
  source 1..20: mol_type = other DNA
atatgtaaagcaaatgttat

SEQ ID NO: 28250 - DNA, 20 bp, synthetic construct
  misc_feature 1..20: note = chemically synthesized
  source 1..20: mol_type = other DNA
agcaaatgttattagatata

SEQ ID NO: 28251 - DNA, 20 bp, synthetic construct
  misc_feature 1..20: note = chemically synthesized
  source 1..20: mol_type = other DNA
gcaaatgttattagatataa

SEQ ID NO: 28252 - DNA, 20 bp, synthetic construct
  misc_feature 1..20: note = chemically synthesized
  source 1..20: mol_type = other DNA
caaatgttattagatataaa

SEQ ID NO: 28253 - DNA, 20 bp, synthetic construct
  misc_feature 1..20: note = chemically synthesized
  source 1..20: mol_type = other DNA
attagatataaagggtgaaa

SEQ ID NO: 28254 - DNA, 20 bp, synthetic construct
  misc_feature 1..20: note = chemically synthesized
  source 1..20: mol_type = other DNA
aatagaatccaatacaataa

SEQ ID NO: 28255 - DNA, 20 bp, synthetic construct
  misc_feature 1..20: note = chemically synthesized
  source 1..20: mol_type = other DNA
gaatccaatacaataatagt

SEQ ID NO: 28256 - DNA, 20 bp, synthetic construct
  misc_feature 1..20: note = chemically synthesized
  source 1..20: mol_type = other DNA
aatccaatacaataatagtt

SEQ ID NO: 28257 - DNA, 20 bp, synthetic construct
  misc_feature 1..20: note = chemically synthesized
  source 1..20: mol_type = other DNA
atccaatacaataatagttg

SEQ ID NO: 28258 - DNA, 20 bp, synthetic construct
  misc_feature 1..20: note = chemically synthesized
  source 1..20: mol_type = other DNA
ggatttcaacattctaatct

SEQ ID NO: 28259 - DNA, 20 bp, synthetic construct
  misc_feature 1..20: note = chemically synthesized
  source 1..20: mol_type = other DNA
caacattctaatctcagcat

SEQ ID NO: 28260 - DNA, 20 bp, synthetic construct
  misc_feature 1..20: note = chemically synthesized
  source 1..20: mol_type = other DNA
attctaatctcagcatcaga

SEQ ID NO: 28261 - DNA, 20 bp, synthetic construct
  misc_feature 1..20: note = chemically synthesized
  source 1..20: mol_type = other DNA
tcagcatcagatagatcatc

SEQ ID NO: 28262 - DNA, 20 bp, synthetic construct
  misc_feature 1..20: note = chemically synthesized
  source 1..20: mol_type = other DNA
catcagatagatcatctaga

SEQ ID NO: 28263 - DNA, 20 bp, synthetic construct
  misc_feature 1..20: note = chemically synthesized
  source 1..20: mol_type = other DNA
atctagacagaaaattaaca

SEQ ID NO: 28264 - DNA, 20 bp, synthetic construct
  misc_feature 1..20: note = chemically synthesized
  source 1..20: mol_type = other DNA
gaaaattaacaaagaaacat

SEQ ID NO: 28265 - DNA, 20 bp, synthetic construct
  misc_feature 1..20: note = chemically synthesized
  source 1..20: mol_type = other DNA
attggatttaaacttgactt

SEQ ID NO: 28266 - DNA, 20 bp, synthetic construct
  misc_feature 1..20: note = chemically synthesized
  source 1..20: mol_type = other DNA
aaacttgactttagaccaaa

SEQ ID NO: 28267 - DNA, 20 bp, synthetic construct
  misc_feature 1..20: note = chemically synthesized
  source 1..20: mol_type = other DNA
ttacacaatatttcatccaa

SEQ ID NO: 28268 - DNA, 20 bp, synthetic construct
  misc_feature 1..20: note = chemically synthesized
  source 1..20: mol_type = other DNA
aatatttcatccaacagcta

SEQ ID NO: 28269 - DNA, 20 bp, synthetic construct
  misc_feature 1..20: note = chemically synthesized
  source 1..20: mol_type = other DNA
acagaatatatttatctcat

SEQ ID NO: 28270 - DNA, 20 bp, synthetic construct
  misc_feature 1..20: note = chemically synthesized
  source 1..20: mol_type = other DNA
tcagcacatgacgcattccc

SEQ ID NO: 28271 - DNA, 20 bp, synthetic construct
  misc_feature 1..20: note = chemically synthesized
  source 1..20: mol_type = other DNA
cagcacatgacgcattcccc

SEQ ID NO: 28272 - DNA, 20 bp, synthetic construct
  misc_feature 1..20: note = chemically synthesized
  source 1..20: mol_type = other DNA
ccccaggatacaccatatgt

SEQ ID NO: 28273 - DNA, 20 bp, synthetic construct
  misc_feature 1..20: note = chemically synthesized
  source 1..20: mol_type = other DNA
caccatatgttagaacacaa

SEQ ID NO: 28274 - DNA, 20 bp, synthetic construct
  misc_feature 1..20: note = chemically synthesized
  source 1..20: mol_type = other DNA
catatgttagaacacaaaag

SEQ ID NO: 28275 - DNA, 20 bp, synthetic construct
  misc_feature 1..20: note = chemically synthesized
  source 1..20: mol_type = other DNA
gaaatatttgaaatcatatt

SEQ ID NO: 28276 - DNA, 20 bp, synthetic construct
  misc_feature 1..20: note = chemically synthesized
  source 1..20: mol_type = other DNA
aatcatattaagcatcttct

SEQ ID NO: 28277 - DNA, 20 bp, synthetic construct
  misc_feature 1..20: note = chemically synthesized
  source 1..20: mol_type = other DNA
agcatcttctcagaccacaa

SEQ ID NO: 28278 - DNA, 20 bp, synthetic construct
  misc_feature 1..20: note = chemically synthesized
  source 1..20: mol_type = other DNA
agaccacaatggaataaaac

SEQ ID NO: 28279 - DNA, 20 bp, synthetic construct
  misc_feature 1..20: note = chemically synthesized
  source 1..20: mol_type = other DNA
taaaactagaaatcaataac

SEQ ID NO: 28280 - DNA, 20 bp, synthetic construct
  misc_feature 1..20: note = chemically synthesized
  source 1..20: mol_type = other DNA
ttaaaacctatacaaataca

SEQ ID NO: 28281 - DNA, 20 bp, synthetic construct
  misc_feature 1..20: note = chemically synthesized
  source 1..20: mol_type = other DNA
tcctgaatgaacgttatgtc

SEQ ID NO: 28282 - DNA, 20 bp, synthetic construct
  misc_feature 1..20: note = chemically synthesized
  source 1..20: mol_type = other DNA
tgaatgaacgttatgtcaag

SEQ ID NO: 28283 - DNA, 20 bp, synthetic construct
  misc_feature 1..20: note = chemically synthesized
  source 1..20: mol_type = other DNA
gttatgtcaagaagaaaatt

SEQ ID NO: 28284 - DNA, 20 bp, synthetic construct
  misc_feature 1..20: note = chemically synthesized
  source 1..20: mol_type = other DNA
atgtcaagaagaaaattaag

SEQ ID NO: 28285 - DNA, 20 bp, synthetic construct
  misc_feature 1..20: note = chemically synthesized
  source 1..20: mol_type = other DNA
tgtcaagaagaaaattaaga

SEQ ID NO: 28286 - DNA, 20 bp, synthetic construct
  misc_feature 1..20: note = chemically synthesized
  source 1..20: mol_type = other DNA
atgaaaattgaaatacaaca

SEQ ID NO: 28287 - DNA, 20 bp, synthetic construct
  misc_feature 1..20: note = chemically synthesized
  source 1..20: mol_type = other DNA
tgaaaattgaaatacaacat

SEQ ID NO: 28288 - DNA, 20 bp, synthetic construct
  misc_feature 1..20: note = chemically synthesized
  source 1..20: mol_type = other DNA
attgaaatacaacataggaa

SEQ ID NO: 28289 - DNA, 20 bp, synthetic construct
  misc_feature 1..20: note = chemically synthesized
  source 1..20: mol_type = other DNA
atacaacataggaaaagcca

SEQ ID NO: 28290 - DNA, 20 bp, synthetic construct
  misc_feature 1..20: note = chemically synthesized
  source 1..20: mol_type = other DNA
tacaacataggaaaagccat

SEQ ID NO: 28291 - DNA, 20 bp, synthetic construct
  misc_feature 1..20: note = chemically synthesized
  source 1..20: mol_type = other DNA
ataggaaaagccatgggata

SEQ ID NO: 28292 - DNA, 20 bp, synthetic construct
  misc_feature 1..20: note = chemically synthesized
  source 1..20: mol_type = other DNA
aaagccatgggatacagcaa

SEQ ID NO: 28293 - DNA, 20 bp, synthetic construct
  misc_feature 1..20: note = chemically synthesized
  source 1..20: mol_type = other DNA
gccatgggatacagcaaaag

SEQ ID NO: 28294 - DNA, 20 bp, synthetic construct
  misc_feature 1..20: note = chemically synthesized
  source 1..20: mol_type = other DNA
gatacagcaaaagcagtgct

SEQ ID NO: 28295 - DNA, 20 bp, synthetic construct
  misc_feature 1..20: note = chemically synthesized
  source 1..20: mol_type = other DNA
tacagcaaaagcagtgctaa

SEQ ID NO: 28296 - DNA, 20 bp, synthetic construct
  misc_feature 1..20: note = chemically synthesized
  source 1..20: mol_type = other DNA
cagcaaaagcagtgctaaga

SEQ ID NO: 28297 - DNA, 20 bp, synthetic construct
  misc_feature 1..20: note = chemically synthesized
  source 1..20: mol_type = other DNA
caaaagcagtgctaagagag

SEQ ID NO: 28298 - DNA, 20 bp, synthetic construct
  misc_feature 1..20: note = chemically synthesized
  source 1..20: mol_type = other DNA
aaacacttaaattaaaaaca

SEQ ID NO: 28299 - DNA, 20 bp, synthetic construct
  misc_feature 1..20: note = chemically synthesized
  source 1..20: mol_type = other DNA
acttaaattaaaaacataga

SEQ ID NO: 28300 - DNA, 20 bp, synthetic construct
  misc_feature 1..20: note = chemically synthesized
  source 1..20: mol_type = other DNA
atctaatcatgtacctcaac

SEQ ID NO: 28301 - DNA, 20 bp, synthetic construct
  misc_feature 1..20: note = chemically synthesized
  source 1..20: mol_type = other DNA
aatcatgtacctcaacaagc

SEQ ID NO: 28302 - DNA, 20 bp, synthetic construct
  misc_feature 1..20: note = chemically synthesized
  source 1..20: mol_type = other DNA
tgtacctcaacaagctagaa

SEQ ID NO: 28303 - DNA, 20 bp, synthetic construct
  misc_feature 1..20: note = chemically synthesized
  source 1..20: mol_type = other DNA
cctcaacaagctagaaaagc

SEQ ID NO: 28304 - DNA, 20 bp, synthetic construct
  misc_feature 1..20: note = chemically synthesized
  source 1..20: mol_type = other DNA
gcaagaacaaaacccaaaac

SEQ ID NO: 28305 - DNA, 20 bp, synthetic construct
  misc_feature 1..20: note = chemically synthesized
  source 1..20: mol_type = other DNA
agaacaaaacccaaaactag

SEQ ID NO: 28306 - DNA, 20 bp, synthetic construct
  misc_feature 1..20: note = chemically synthesized
  source 1..20: mol_type = other DNA
acaaaacccaaaactagcag

SEQ ID NO: 28307 - DNA, 20 bp, synthetic construct
  misc_feature 1..20: note = chemically synthesized
  source 1..20: mol_type = other DNA
caaaacccaaaactagcaga

SEQ ID NO: 28308 - DNA, 20 bp, synthetic construct
  misc_feature 1..20: note = chemically synthesized
  source 1..20: mol_type = other DNA
acccaaaactagcagaagga

SEQ ID NO: 28309 - DNA, 20 bp, synthetic construct
  misc_feature 1..20: note = chemically synthesized
  source 1..20: mol_type = other DNA
gcagaaggaaagaaaaaatg

SEQ ID NO: 28310 - DNA, 20 bp, synthetic construct
  misc_feature 1..20: note = chemically synthesized
  source 1..20: mol_type = other DNA
aggaaagaaaaaatgaagaa

SEQ ID NO: 28311 - DNA, 20 bp, synthetic construct
  misc_feature 1..20: note = chemically synthesized
  source 1..20: mol_type = other DNA
aaagaaaaaatgaagaacag

SEQ ID NO: 28312 - DNA, 20 bp, synthetic construct
  misc_feature 1..20: note = chemically synthesized
  source 1..20: mol_type = other DNA
aacagaagaacttaatgaaa

SEQ ID NO: 28313 - DNA, 20 bp, synthetic construct
  misc_feature 1..20: note = chemically synthesized
  source 1..20: mol_type = other DNA
cagaagaacttaatgaaata

SEQ ID NO: 28314 - DNA, 20 bp, synthetic construct
  misc_feature 1..20: note = chemically synthesized
  source 1..20: mol_type = other DNA
aaatagagaaaaacaacaac

SEQ ID NO: 28315 - DNA, 20 bp, synthetic construct
  misc_feature 1..20: note = chemically synthesized
  source 1..20: mol_type = other DNA
aatagagaaaaacaacaaca

SEQ ID NO: 28316 - DNA, 20 bp, synthetic construct
  misc_feature 1..20: note = chemically synthesized
  source 1..20: mol_type = other DNA
atagagaaaaacaacaacaa

SEQ ID NO: 28317 - DNA, 20 bp, synthetic construct
  misc_feature 1..20: note = chemically synthesized
  source 1..20: mol_type = other DNA
gaaaaacaacaacaagggat

SEQ ID NO: 28318 - DNA, 20 bp, synthetic construct
  misc_feature 1..20: note = chemically synthesized
  source 1..20: mol_type = other DNA
caagggattagcaaaatgaa

SEQ ID NO: 28319 - DNA, 20 bp, synthetic construct
  misc_feature 1..20: note = chemically synthesized
  source 1..20: mol_type = other DNA
tgaaaagttgttatttaaaa

SEQ ID NO: 28320 - DNA, 20 bp, synthetic construct
  misc_feature 1..20: note = chemically synthesized
  source 1..20: mol_type = other DNA
gttatttaaaaaagataaaa

SEQ ID NO: 28321 - DNA, 20 bp, synthetic construct
  misc_feature 1..20: note = chemically synthesized
  source 1..20: mol_type = other DNA
taaaaaagataaaatggata

SEQ ID NO: 28322 - DNA, 20 bp, synthetic construct
  misc_feature 1..20: note = chemically synthesized
  source 1..20: mol_type = other DNA
agataaaatggatatagctc

SEQ ID NO: 28323 - DNA, 20 bp, synthetic construct
  misc_feature 1..20: note = chemically synthesized
  source 1..20: mol_type = other DNA
aaaatggatatagctctagc

SEQ ID NO: 28324 - DNA, 20 bp, synthetic construct
  misc_feature 1..20: note = chemically synthesized
  source 1..20: mol_type = other DNA
tagctctagctagactaacc

SEQ ID NO: 28325 - DNA, 20 bp, synthetic construct
  misc_feature 1..20: note = chemically synthesized
  source 1..20: mol_type = other DNA
tagctagactaaccaagaaa

SEQ ID NO: 28326 - DNA, 20 bp, synthetic construct
  misc_feature 1..20: note = chemically synthesized
  source 1..20: mol_type = other DNA
gctagactaaccaagaaaaa

SEQ ID NO: 28327 - DNA, 20 bp, synthetic construct
  misc_feature 1..20: note = chemically synthesized
  source 1..20: mol_type = other DNA
agactaaccaagaaaaagag

SEQ ID NO: 28328 - DNA, 20 bp, synthetic construct
  misc_feature 1..20: note = chemically synthesized
  source 1..20: mol_type = other DNA
actaaccaagaaaaagagaa

SEQ ID NO: 28329 - DNA, 20 bp, synthetic construct
  misc_feature 1..20: note = chemically synthesized
  source 1..20: mol_type = other DNA
aaagagaagagactgaaata

SEQ ID NO: 28330 - DNA, 20 bp, synthetic construct
  misc_feature 1..20: note = chemically synthesized
  source 1..20: mol_type = other DNA
gagactgaaataaagaaaat

SEQ ID NO: 28331 - DNA, 20 bp, synthetic construct
  misc_feature 1..20: note = chemically synthesized
  source 1..20: mol_type = other DNA
aaagaaaatcagaaataaaa

SEQ ID NO: 28332 - DNA, 20 bp, synthetic construct
  misc_feature 1..20: note = chemically synthesized
  source 1..20: mol_type = other DNA
atatattacaaccgatacca

SEQ ID NO: 28333 - DNA, 20 bp, synthetic construct
  misc_feature 1..20: note = chemically synthesized
  source 1..20: mol_type = other DNA
tacaaccgataccacagaaa

SEQ ID NO: 28334 - DNA, 20 bp, synthetic construct
  misc_feature 1..20: note = chemically synthesized
  source 1..20: mol_type = other DNA
ccgataccacagaaatagaa

SEQ ID NO: 28335 - DNA, 20 bp, synthetic construct
  misc_feature 1..20: note = chemically synthesized
  source 1..20: mol_type = other DNA
acagaaatagaaaagattat

SEQ ID NO: 28336 - DNA, 20 bp, synthetic construct
  misc_feature 1..20: note = chemically synthesized
  source 1..20: mol_type = other DNA
agaaatagaaaagattatca

SEQ ID NO: 28337 - DNA, 20 bp, synthetic construct
  misc_feature 1..20: note = chemically synthesized
  source 1..20: mol_type = other DNA
cactaaaaaactgaaaaatc

SEQ ID NO: 28338 - DNA, 20 bp, synthetic construct
  misc_feature 1..20: note = chemically synthesized
  source 1..20: mol_type = other DNA
ctaaaaaactgaaaaatcta

SEQ ID NO: 28339 - DNA, 20 bp, synthetic construct
  misc_feature 1..20: note = chemically synthesized
  source 1..20: mol_type = other DNA
taaaaaactgaaaaatctag

SEQ ID NO: 28340 - DNA, 20 bp, synthetic construct
  misc_feature 1..20: note = chemically synthesized
  source 1..20: mol_type = other DNA
agaggaaattaataaatttc

SEQ ID NO: 28341 - DNA, 20 bp, synthetic construct
  misc_feature 1..20: note = chemically synthesized
  source 1..20: mol_type = other DNA
ctggacacataccacctacc

SEQ ID NO: 28342 - DNA, 20 bp, synthetic construct
  misc_feature 1..20: note = chemically synthesized
  source 1..20: mol_type = other DNA
ccacctaccaagattgaatt

SEQ ID NO: 28343 - DNA, 20 bp, synthetic construct
  misc_feature 1..20: note = chemically synthesized
  source 1..20: mol_type = other DNA
ctaccaagattgaattaaga

SEQ ID NO: 28344 - DNA, 20 bp, synthetic construct
  misc_feature 1..20: note = chemically synthesized
  source 1..20: mol_type = other DNA
aagattgaattaagaaagaa

SEQ ID NO: 28345 - DNA, 20 bp, synthetic construct
  misc_feature 1..20: note = chemically synthesized
  source 1..20: mol_type = other DNA
gaaagaatagaaaacctgaa

SEQ ID NO: 28346 - DNA, 20 bp, synthetic construct
  misc_feature 1..20: note = chemically synthesized
  source 1..20: mol_type = other DNA
aatagaaaacctgaacagac

SEQ ID NO: 28347 - DNA, 20 bp, synthetic construct
  misc_feature 1..20: note = chemically synthesized
  source 1..20: mol_type = other DNA
aatgaataatgaaattgaat

SEQ ID NO: 28348 - DNA, 20 bp, synthetic construct
  misc_feature 1..20: note = chemically synthesized
  source 1..20: mol_type = other DNA
gaataatgaaattgaatcag

SEQ ID NO: 28349 - DNA, 20 bp, synthetic construct
  misc_feature 1..20: note = chemically synthesized
  source 1..20: mol_type = other DNA
gaaattgaatcagtagtaaa

SEQ ID NO: 28350 - DNA, 20 bp, synthetic construct
  misc_feature 1..20: note = chemically synthesized
  source 1..20: mol_type = other DNA
tagtaaaaagtctcccaaaa

SEQ ID NO: 28351 - DNA, 20 bp, synthetic construct
  misc_feature 1..20: note = chemically synthesized
  source 1..20: mol_type = other DNA
ctcccaaaaaagaaaatttc

SEQ ID NO: 28352 - DNA, 20 bp, synthetic construct
  misc_feature 1..20: note = chemically synthesized
  source 1..20: mol_type = other DNA
aaaaaagaaaatttcaagac

SEQ ID NO: 28353 - DNA, 20 bp, synthetic construct
  misc_feature 1..20: note = chemically synthesized
  source 1..20: mol_type = other DNA
aagaaaatttcaagaccaga

SEQ ID NO: 28354 - DNA, 20 bp, synthetic construct
  misc_feature 1..20: note = chemically synthesized
  source 1..20: mol_type = other DNA
caaattttaccaaactttca

SEQ ID NO: 28355 - DNA, 20 bp, synthetic construct
  misc_feature 1..20: note = chemically synthesized
  source 1..20: mol_type = other DNA
aactttcaaagaaaactaac

SEQ ID NO: 28356 - DNA, 20 bp, synthetic construct
  misc_feature 1..20: note = chemically synthesized
  source 1..20: mol_type = other DNA
aaattcttttaaaaattaaa

SEQ ID NO: 28357 - DNA, 20 bp, synthetic construct
  misc_feature 1..20: note = chemically synthesized
  source 1..20: mol_type = other DNA
aattcttttaaaaattaaac

SEQ ID NO: 28358 - DNA, 20 bp, synthetic construct
  misc_feature 1..20: note = chemically synthesized
  source 1..20: mol_type = other DNA
tcttttaaaaattaaacagg

SEQ ID NO: 28359 - DNA, 20 bp, synthetic construct
  misc_feature 1..20: note = chemically synthesized
  source 1..20: mol_type = other DNA
cttttaaaaattaaacagga

SEQ ID NO: 28360 - DNA, 20 bp, synthetic construct
  misc_feature 1..20: note = chemically synthesized
  source 1..20: mol_type = other DNA
ttctccctaactcattctct

SEQ ID NO: 28361 - DNA, 20 bp, synthetic construct
  misc_feature 1..20: note = chemically synthesized
  source 1..20: mol_type = other DNA
tctccctaactcattctctg

SEQ ID NO: 28362 - DNA, 20 bp, synthetic construct
  misc_feature 1..20: note = chemically synthesized
  source 1..20: mol_type = other DNA
cctaactcattctctgaggc

SEQ ID NO: 28363 - DNA, 20 bp, synthetic construct
  misc_feature 1..20: note = chemically synthesized
  source 1..20: mol_type = other DNA
tattatcctgattccataac

SEQ ID NO: 28364 - DNA, 20 bp, synthetic construct
  misc_feature 1..20: note = chemically synthesized
  source 1..20: mol_type = other DNA
tcctgattccataaccagac

SEQ ID NO: 28365 - DNA, 20 bp, synthetic construct
  misc_feature 1..20: note = chemically synthesized
  source 1..20: mol_type = other DNA
cctgattccataaccagaca

SEQ ID NO: 28366 - DNA, 20 bp, synthetic construct
  misc_feature 1..20: note = chemically synthesized
  source 1..20: mol_type = other DNA
ccataaccagacaaggatgc

SEQ ID NO: 28367 - DNA, 20 bp, synthetic construct
  misc_feature 1..20: note = chemically synthesized
  source 1..20: mol_type = other DNA
tgcaagtaaaaataaaactg

SEQ ID NO: 28368 - DNA, 20 bp, synthetic construct
  misc_feature 1..20: note = chemically synthesized
  source 1..20: mol_type = other DNA
gcaagtaaaaataaaactgc

SEQ ID NO: 28369 - DNA, 20 bp, synthetic construct
  misc_feature 1..20: note = chemically synthesized
  source 1..20: mol_type = other DNA
ctgcaggtcaatatccctga

SEQ ID NO: 28370 - DNA, 20 bp, synthetic construct
  misc_feature 1..20: note = chemically synthesized
  source 1..20: mol_type = other DNA
tcaatatccctgatggaaca

SEQ ID NO: 28371 - DNA, 20 bp, synthetic construct
  misc_feature 1..20: note = chemically synthesized
  source 1..20: mol_type = other DNA
caatatccctgatggaacat

SEQ ID NO: 28372 - DNA, 20 bp, synthetic construct
  misc_feature 1..20: note = chemically synthesized
  source 1..20: mol_type = other DNA
gaaaatcctcaacaaaatac

SEQ ID NO: 28373 - DNA, 20 bp, synthetic construct
  misc_feature 1..20: note = chemically synthesized
  source 1..20: mol_type = other DNA
tactagcaaactgaatccaa

SEQ ID NO: 28374 - DNA, 20 bp, synthetic construct
  misc_feature 1..20: note = chemically synthesized
  source 1..20: mol_type = other DNA
gaatccaacagtacatccaa

SEQ ID NO: 28375 - DNA, 20 bp, synthetic construct
  misc_feature 1..20: note = chemically synthesized
  source 1..20: mol_type = other DNA
aaagataatacaccatgatc

SEQ ID NO: 28376 - DNA, 20 bp, synthetic construct
  misc_feature 1..20: note = chemically synthesized
  source 1..20: mol_type = other DNA
gataatacaccatgatcaag

SEQ ID NO: 28377 - DNA, 20 bp, synthetic construct
  misc_feature 1..20: note = chemically synthesized
  source 1..20: mol_type = other DNA
ataatacaccatgatcaagt

SEQ ID NO: 28378 - DNA, 20 bp, synthetic construct
  misc_feature 1..20: note = chemically synthesized
  source 1..20: mol_type = other DNA
tgatcaagtgggatttatac

SEQ ID NO: 28379 - DNA, 20 bp, synthetic construct
  misc_feature 1..20: note = chemically synthesized
  source 1..20: mol_type = other DNA
gatcaagtgggatttatact

SEQ ID NO: 28380 - DNA, 20 bp, synthetic construct
  misc_feature 1..20: note = chemically synthesized
  source 1..20: mol_type = other DNA
atcaagtgggatttatacta

SEQ ID NO: 28381 - DNA, 20 bp, synthetic construct
  misc_feature 1..20: note = chemically synthesized
  source 1..20: mol_type = other DNA
gggatttatactagggttgc

SEQ ID NO: 28382 - DNA, 20 bp, synthetic construct
  misc_feature 1..20: note = chemically synthesized
  source 1..20: mol_type = other DNA
ttatactagggttgcaagaa

SEQ ID NO: 28383 - DNA, 20 bp, synthetic construct
  misc_feature 1..20: note = chemically synthesized
  source 1..20: mol_type = other DNA
tgatacatcacatcaacaaa

SEQ ID NO: 28384 - DNA, 20 bp, synthetic construct
  misc_feature 1..20: note = chemically synthesized
  source 1..20: mol_type = other DNA
aaaccatatgatcatctcaa

SEQ ID NO: 28385 - DNA, 20 bp, synthetic construct
  misc_feature 1..20: note = chemically synthesized
  source 1..20: mol_type = other DNA
tatgatcatctcaatagata

SEQ ID NO: 28386 - DNA, 20 bp, synthetic construct
  misc_feature 1..20: note = chemically synthesized
  source 1..20: mol_type = other DNA
catctcaatagatacagaaa

SEQ ID NO: 28387 - DNA, 20 bp, synthetic construct
  misc_feature 1..20: note = chemically synthesized
  source 1..20: mol_type = other DNA
ttcatgataaaaactatctg

SEQ ID NO: 28388 - DNA, 20 bp, synthetic construct
  misc_feature 1..20: note = chemically synthesized
  source 1..20: mol_type = other DNA
aaactatctgcagccaatca

SEQ ID NO: 28389 - DNA, 20 bp, synthetic construct
  misc_feature 1..20: note = chemically synthesized
  source 1..20: mol_type = other DNA
ctatctgcagccaatcatag

SEQ ID NO: 28390 - DNA, 20 bp, synthetic construct
  misc_feature 1..20: note = chemically synthesized
  source 1..20: mol_type = other DNA
tatctgcagccaatcataga

SEQ ID NO: 28391 - DNA, 20 bp, synthetic construct
  misc_feature 1..20: note = chemically synthesized
  source 1..20: mol_type = other DNA
aacatatctcaatataataa

SEQ ID NO: 28392 - DNA, 20 bp, synthetic construct
  misc_feature 1..20: note = chemically synthesized
  source 1..20: mol_type = other DNA
agtcatatatgacaaaccca

SEQ ID NO: 28393 - DNA, 20 bp, synthetic construct
  misc_feature 1..20: note = chemically synthesized
  source 1..20: mol_type = other DNA
cagctaacatcatactgaat

SEQ ID NO: 28394 - DNA, 20 bp, synthetic construct
  misc_feature 1..20: note = chemically synthesized
  source 1..20: mol_type = other DNA
agctaacatcatactgaatt

SEQ ID NO: 28395 - DNA, 20 bp, synthetic construct
  misc_feature 1..20: note = chemically synthesized
  source 1..20: mol_type = other DNA
acatcatactgaattgggaa

SEQ ID NO: 28396 - DNA, 20 bp, synthetic construct
  misc_feature 1..20: note = chemically synthesized
  source 1..20: mol_type = other DNA
catactgaattgggaaaagc

SEQ ID NO: 28397 - DNA, 20 bp, synthetic construct
  misc_feature 1..20: note = chemically synthesized
  source 1..20: mol_type = other DNA
actgaattgggaaaagctgg

SEQ ID NO: 28398 - DNA, 20 bp, synthetic construct
  misc_feature 1..20: note = chemically synthesized
  source 1..20: mol_type = other DNA
aagctggaagcctttcctct

SEQ ID NO: 28399 - DNA, 20 bp, synthetic construct
  misc_feature 1..20: note = chemically synthesized
  source 1..20: mol_type = other DNA
tctaagaactgaaacaaaat

SEQ ID NO: 28400 - DNA, 20 bp, synthetic construct
  misc_feature 1..20: note = chemically synthesized
  source 1..20: mol_type = other DNA
ctaagaactgaaacaaaata

SEQ ID NO: 28401 - DNA, 20 bp, synthetic construct
  misc_feature 1..20: note = chemically synthesized
  source 1..20: mol_type = other DNA
actcctattcaatataatac

SEQ ID NO: 28402 - DNA, 20 bp, synthetic construct
  misc_feature 1..20: note = chemically synthesized
  source 1..20: mol_type = other DNA
cctattcaatataatactgg

SEQ ID NO: 28403 - DNA, 20 bp, synthetic construct
  misc_feature 1..20: note = chemically synthesized
  source 1..20: mol_type = other DNA
caatataatactggaagtcc

SEQ ID NO: 28404 - DNA, 20 bp, synthetic construct
  misc_feature 1..20: note = chemically synthesized
  source 1..20: mol_type = other DNA
aatactggaagtcctagcca

SEQ ID NO: 28405 - DNA, 20 bp, synthetic construct
  misc_feature 1..20: note = chemically synthesized
  source 1..20: mol_type = other DNA
gaagtcctagccacagcttt

SEQ ID NO: 28406 - DNA, 20 bp, synthetic construct
  misc_feature 1..20: note = chemically synthesized
  source 1..20: mol_type = other DNA
aagtcctagccacagctttc

SEQ ID NO: 28407 - DNA, 20 bp, synthetic construct
  misc_feature 1..20: note = chemically synthesized
  source 1..20: mol_type = other DNA
cctagccacagctttcaggt

SEQ ID NO: 28408 - DNA, 20 bp, synthetic construct
  misc_feature 1..20: note = chemically synthesized
  source 1..20: mol_type = other DNA
tagccacagctttcaggtca

SEQ ID NO: 28409 - DNA, 20 bp, synthetic construct
  misc_feature 1..20: note = chemically synthesized
  source 1..20: mol_type = other DNA
cacagctttcaggtcagaga

SEQ ID NO: 28410 - DNA, 20 bp, synthetic construct
  misc_feature 1..20: note = chemically synthesized
  source 1..20: mol_type = other DNA
gctttcaggtcagagaaaga

SEQ ID NO: 28411 - DNA, 20 bp, synthetic construct
  misc_feature 1..20: note = chemically synthesized
  source 1..20: mol_type = other DNA
tcaggtcagagaaagaaaga

SEQ ID NO: 28412 - DNA, 20 bp, synthetic construct
  misc_feature 1..20: note = chemically synthesized
  source 1..20: mol_type = other DNA
tcagagaaagaaagaaagaa

SEQ ID NO: 28413 - DNA, 20 bp, synthetic construct
  misc_feature 1..20: note = chemically synthesized
  source 1..20: mol_type = other DNA
cagagaaagaaagaaagaaa

SEQ ID NO: 28414 - DNA, 20 bp, synthetic construct
  misc_feature 1..20: note = chemically synthesized
  source 1..20: mol_type = other DNA
agaaagaaaaggcatgcaaa

SEQ ID NO: 28415 - DNA, 20 bp, synthetic construct
  misc_feature 1..20: note = chemically synthesized
  source 1..20: mol_type = other DNA
gaaagaaaaggcatgcaaat

SEQ ID NO: 28416 - DNA, 20 bp, synthetic construct
  misc_feature 1..20: note = chemically synthesized
  source 1..20: mol_type = other DNA
aaaaggcatgcaaataggaa

SEQ ID NO: 28417 - DNA, 20 bp, synthetic construct
  misc_feature 1..20: note = chemically synthesized
  source 1..20: mol_type = other DNA
catgcaaataggaaaagatg

SEQ ID NO: 28418 - DNA, 20 bp, synthetic construct
  misc_feature 1..20: note = chemically synthesized
  source 1..20: mol_type = other DNA
agtcaaactgtccatctttc

SEQ ID NO: 28419 - DNA, 20 bp, synthetic construct
  misc_feature 1..20: note = chemically synthesized
  source 1..20: mol_type = other DNA
agatgacatgattttatacc

SEQ ID NO: 28420 - DNA, 20 bp, synthetic construct
  misc_feature 1..20: note = chemically synthesized
  source 1..20: mol_type = other DNA
attttatacctagaaaaacc

SEQ ID NO: 28421 - DNA, 20 bp, synthetic construct
  misc_feature 1..20: note = chemically synthesized
  source 1..20: mol_type = other DNA
gaaaaaccaagactccacca

SEQ ID NO: 28422 - DNA, 20 bp, synthetic construct
  misc_feature 1..20: note = chemically synthesized
  source 1..20: mol_type = other DNA
agactccaccaaagcactct

SEQ ID NO: 28423 - DNA, 20 bp, synthetic construct
  misc_feature 1..20: note = chemically synthesized
  source 1..20: mol_type = other DNA
ttagcgctgaaaaataaatt

SEQ ID NO: 28424 - DNA, 20 bp, synthetic construct
  misc_feature 1..20: note = chemically synthesized
  source 1..20: mol_type = other DNA
gctgaaaaataaattcagta

SEQ ID NO: 28425 - DNA, 20 bp, synthetic construct
  misc_feature 1..20: note = chemically synthesized
  source 1..20: mol_type = other DNA
aaataaattcagtaaagtta

SEQ ID NO: 28426 - DNA, 20 bp, synthetic construct
  misc_feature 1..20: note = chemically synthesized
  source 1..20: mol_type = other DNA
aataaattcagtaaagttac

SEQ ID NO: 28427 - DNA, 20 bp, synthetic construct
  misc_feature 1..20: note = chemically synthesized
  source 1..20: mol_type = other DNA
taaattcagtaaagttacag

SEQ ID NO: 28428 - DNA, 20 bp, synthetic construct
  misc_feature 1..20: note = chemically synthesized
  source 1..20: mol_type = other DNA
aaagttacaggagacaaaat

SEQ ID NO: 28429 - DNA, 20 bp, synthetic construct
  misc_feature 1..20: note = chemically synthesized
  source 1..20: mol_type = other DNA
acaaaatcagcatatgaaac

SEQ ID NO: 28430 - DNA, 20 bp, synthetic construct
  misc_feature 1..20: note = chemically synthesized
  source 1..20: mol_type = other DNA
tctacacaccaataataaac

SEQ ID NO: 28431 - DNA, 20 bp, synthetic construct
  misc_feature 1..20: note = chemically synthesized
  source 1..20: mol_type = other DNA
acaccaataataaactagct

SEQ ID NO: 28432 - DNA, 20 bp, synthetic construct
  misc_feature 1..20: note = chemically synthesized
  source 1..20: mol_type = other DNA
ccaataataaactagctgag

SEQ ID NO: 28433 - DNA, 20 bp, synthetic construct
  misc_feature 1..20: note = chemically synthesized
  source 1..20: mol_type = other DNA
caataataaactagctgaga

SEQ ID NO: 28434 - DNA, 20 bp, synthetic construct
  misc_feature 1..20: note = chemically synthesized
  source 1..20: mol_type = other DNA
aactagctgagaaggaaatt

SEQ ID NO: 28435 - DNA, 20 bp, synthetic construct
  misc_feature 1..20: note = chemically synthesized
  source 1..20: mol_type = other DNA
tagctgagaaggaaattaag

SEQ ID NO: 28436 - DNA, 20 bp, synthetic construct
  misc_feature 1..20: note = chemically synthesized
  source 1..20: mol_type = other DNA
agctgagaaggaaattaaga

SEQ ID NO: 28437 - DNA, 20 bp, synthetic construct
  misc_feature 1..20: note = chemically synthesized
  source 1..20: mol_type = other DNA
gaaggcaatcccatttacaa

SEQ ID NO: 28438 - DNA, 20 bp, synthetic construct
  misc_feature 1..20: note = chemically synthesized
  source 1..20: mol_type = other DNA
tagctaaaaaataaaatatt

SEQ ID NO: 28439 - DNA, 20 bp, synthetic construct
  misc_feature 1..20: note = chemically synthesized
  source 1..20: mol_type = other DNA
agctaaaaaataaaatattt

SEQ ID NO: 28440 - DNA, 20 bp, synthetic construct
  misc_feature 1..20: note = chemically synthesized
  source 1..20: mol_type = other DNA
gctaaaaaataaaatattta

SEQ ID NO: 28441 - DNA, 20 bp, synthetic construct
  misc_feature 1..20: note = chemically synthesized
  source 1..20: mol_type = other DNA
atttagggataaatttaacc

SEQ ID NO: 28442 - DNA, 20 bp, synthetic construct
  misc_feature 1..20: note = chemically synthesized
  source 1..20: mol_type = other DNA
tttagggataaatttaacca

SEQ ID NO: 28443 - DNA, 20 bp, synthetic construct
  misc_feature 1..20: note = chemically synthesized
  source 1..20: mol_type = other DNA
ggaaccgaaaaacctctatt

SEQ ID NO: 28444 - DNA, 20 bp, synthetic construct
  misc_feature 1..20: note = chemically synthesized
  source 1..20: mol_type = other DNA
aaactacaaaacactgataa

SEQ ID NO: 28445 - DNA, 20 bp, synthetic construct
  misc_feature 1..20: note = chemically synthesized
  source 1..20: mol_type = other DNA
acactgataaaagaattgaa

SEQ ID NO: 28446 - DNA, 20 bp, synthetic construct
  misc_feature 1..20: note = chemically synthesized
  source 1..20: mol_type = other DNA
cactgataaaagaattgaaa

SEQ ID NO: 28447 - DNA, 20 bp, synthetic construct
  misc_feature 1..20: note = chemically synthesized
  source 1..20: mol_type = other DNA
gataaaagaattgaaaagga

SEQ ID NO: 28448 - DNA, 20 bp, synthetic construct
  misc_feature 1..20: note = chemically synthesized
  source 1..20: mol_type = other DNA
ttgaaaaggacagaaacaaa

SEQ ID NO: 28449 - DNA, 20 bp, synthetic construct
  misc_feature 1..20: note = chemically synthesized
  source 1..20: mol_type = other DNA
gaaaaggacagaaacaaatg

SEQ ID NO: 28450 - DNA, 20 bp, synthetic construct
  misc_feature 1..20: note = chemically synthesized
  source 1..20: mol_type = other DNA
aaaggacagaaacaaatgga

SEQ ID NO: 28451 - DNA, 20 bp, synthetic construct
  misc_feature 1..20: note = chemically synthesized
  source 1..20: mol_type = other DNA
ggagagatatcctatgttca

SEQ ID NO: 28452 - DNA, 20 bp, synthetic construct
  misc_feature 1..20: note = chemically synthesized
  source 1..20: mol_type = other DNA
gatatcctatgttcatggat

SEQ ID NO: 28453 - DNA, 20 bp, synthetic construct
  misc_feature 1..20: note = chemically synthesized
  source 1..20: mol_type = other DNA
aaaaattaatattgttaaaa

SEQ ID NO: 28454 - DNA, 20 bp, synthetic construct
  misc_feature 1..20: note = chemically synthesized
  source 1..20: mol_type = other DNA
taaaatggccatactaccca

SEQ ID NO: 28455 - DNA, 20 bp, synthetic construct
  misc_feature 1..20: note = chemically synthesized
  source 1..20: mol_type = other DNA
atactacccaaagcaatcta

SEQ ID NO: 28456 - DNA, 20 bp, synthetic construct
  misc_feature 1..20: note = chemically synthesized
  source 1..20: mol_type = other DNA
ctatatgaccgctatcaaaa

SEQ ID NO: 28457 - DNA, 20 bp, synthetic construct
  misc_feature 1..20: note = chemically synthesized
  source 1..20: mol_type = other DNA
aatagcaatgtcatttttca

SEQ ID NO: 28458 - DNA, 20 bp, synthetic construct
  misc_feature 1..20: note = chemically synthesized
  source 1..20: mol_type = other DNA
aatgtcatttttcacagaaa

SEQ ID NO: 28459 - DNA, 20 bp, synthetic construct
  misc_feature 1..20: note = chemically synthesized
  source 1..20: mol_type = other DNA
atttgtatgaaattaaaaaa

SEQ ID NO: 28460 - DNA, 20 bp, synthetic construct
  misc_feature 1..20: note = chemically synthesized
  source 1..20: mol_type = other DNA
atgaaattaaaaaatagctc

SEQ ID NO: 28461 - DNA, 20 bp, synthetic construct
  misc_feature 1..20: note = chemically synthesized
  source 1..20: mol_type = other DNA
aaattaaaaaatagctccag

SEQ ID NO: 28462 - DNA, 20 bp, synthetic construct
  misc_feature 1..20: note = chemically synthesized
  source 1..20: mol_type = other DNA
aaaaatagctccagtagcca

SEQ ID NO: 28463 - DNA, 20 bp, synthetic construct
  misc_feature 1..20: note = chemically synthesized
  source 1..20: mol_type = other DNA
ccaaagtcatcctgtgaaaa

SEQ ID NO: 28464 - DNA, 20 bp, synthetic construct
  misc_feature 1..20: note = chemically synthesized
  source 1..20: mol_type = other DNA
ctgtgaaaaaagaacaatgc

SEQ ID NO: 28465 - DNA, 20 bp, synthetic construct
  misc_feature 1..20: note = chemically synthesized
  source 1..20: mol_type = other DNA
gtgaaaaaagaacaatgcta

SEQ ID NO: 28466 - DNA, 20 bp, synthetic construct
  misc_feature 1..20: note = chemically synthesized
  source 1..20: mol_type = other DNA
tgaaaaaagaacaatgctag

SEQ ID NO: 28467 - DNA, 20 bp, synthetic construct
  misc_feature 1..20: note = chemically synthesized
  source 1..20: mol_type = other DNA
tatcatactacctgatttca

SEQ ID NO: 28468 - DNA, 20 bp, synthetic construct
  misc_feature 1..20: note = chemically synthesized
  source 1..20: mol_type = other DNA
gatttcaaagtatattacaa

SEQ ID NO: 28469 - DNA, 20 bp, synthetic construct
  misc_feature 1..20: note = chemically synthesized
  source 1..20: mol_type = other DNA
caaagtatattacaaaagta

SEQ ID NO: 28470 - DNA, 20 bp, synthetic construct
  misc_feature 1..20: note = chemically synthesized
  source 1..20: mol_type = other DNA
aaagtatattacaaaagtat

SEQ ID NO: 28471 - DNA, 20 bp, synthetic construct
  misc_feature 1..20: note = chemically synthesized
  source 1..20: mol_type = other DNA
caaaagtataggaacctaaa

SEQ ID NO: 28472 - DNA, 20 bp, synthetic construct
  misc_feature 1..20: note = chemically synthesized
  source 1..20: mol_type = other DNA
aaacagcatgatactgacat

SEQ ID NO: 28473 - DNA, 20 bp, synthetic construct
  misc_feature 1..20: note = chemically synthesized
  source 1..20: mol_type = other DNA
gcatgatactgacattagaa

SEQ ID NO: 28474 - DNA, 20 bp, synthetic construct
  misc_feature 1..20: note = chemically synthesized
  source 1..20: mol_type = other DNA
ctgacattagaacagacact

SEQ ID NO: 28475 - DNA, 20 bp, synthetic construct
  misc_feature 1..20: note = chemically synthesized
  source 1..20: mol_type = other DNA
agaacagacacttagaccaa

SEQ ID NO: 28476 - DNA, 20 bp, synthetic construct
  misc_feature 1..20: note = chemically synthesized
  source 1..20: mol_type = other DNA
acagacacttagaccaatgg

SEQ ID NO: 28477 - DNA, 20 bp, synthetic construct
  misc_feature 1..20: note = chemically synthesized
  source 1..20: mol_type = other DNA
agacacttagaccaatggaa

SEQ ID NO: 28478 - DNA, 20 bp, synthetic construct
  misc_feature 1..20: note = chemically synthesized
  source 1..20: mol_type = other DNA
cttagaccaatggaagagaa

SEQ ID NO: 28479 - DNA, 20 bp, synthetic construct
  misc_feature 1..20: note = chemically synthesized
  source 1..20: mol_type = other DNA
tagaccaatggaagagaata

SEQ ID NO: 28480 - DNA, 20 bp, synthetic construct
  misc_feature 1..20: note = chemically synthesized
  source 1..20: mol_type = other DNA
atggaagagaatagagaacc

SEQ ID NO: 28481 - DNA, 20 bp, synthetic construct
  misc_feature 1..20: note = chemically synthesized
  source 1..20: mol_type = other DNA
gaaatgcatccacatattta

SEQ ID NO: 28482 - DNA, 20 bp, synthetic construct
  misc_feature 1..20: note = chemically synthesized
  source 1..20: mol_type = other DNA
atccacatatttatagccaa

SEQ ID NO: 28483 - DNA, 20 bp, synthetic construct
  misc_feature 1..20: note = chemically synthesized
  source 1..20: mol_type = other DNA
tagccaacagattttcaaca

SEQ ID NO: 28484 - DNA, 20 bp, synthetic construct
  misc_feature 1..20: note = chemically synthesized
  source 1..20: mol_type = other DNA
agccaacagattttcaacaa

SEQ ID NO: 28485 - DNA, 20 bp, synthetic construct
  misc_feature 1..20: note = chemically synthesized
  source 1..20: mol_type = other DNA
agattttcaacaaaggtgac

SEQ ID NO: 28486 - DNA, 20 bp, synthetic construct
  misc_feature 1..20: note = chemically synthesized
  source 1..20: mol_type = other DNA
aggtgacaagaatatacatt

SEQ ID NO: 28487 - DNA, 20 bp, synthetic construct
  misc_feature 1..20: note = chemically synthesized
  source 1..20: mol_type = other DNA
ggtgacaagaatatacattg

SEQ ID NO: 28488 - DNA, 20 bp, synthetic construct
  misc_feature 1..20: note = chemically synthesized
  source 1..20: mol_type = other DNA
acaagaatatacattgagga

SEQ ID NO: 28489 - DNA, 20 bp, synthetic construct
  misc_feature 1..20: note = chemically synthesized
  source 1..20: mol_type = other DNA
caagaatatacattgaggaa

SEQ ID NO: 28490 - DNA, 20 bp, synthetic construct
  misc_feature 1..20: note = chemically synthesized
  source 1..20: mol_type = other DNA
tatacattgaggaaaggaca

SEQ ID NO: 28491 - DNA, 20 bp, synthetic construct
  misc_feature 1..20: note = chemically synthesized
  source 1..20: mol_type = other DNA
gaggaaaggacacagtgttc

SEQ ID NO: 28492 - DNA, 20 bp, synthetic construct
  misc_feature 1..20: note = chemically synthesized
  source 1..20: mol_type = other DNA
aggacacagtgttcaagaaa

SEQ ID NO: 28493 - DNA, 20 bp, synthetic construct
  misc_feature 1..20: note = chemically synthesized
  source 1..20: mol_type = other DNA
agaaatggtgctgaaaaaat

SEQ ID NO: 28494 - DNA, 20 bp, synthetic construct
  misc_feature 1..20: note = chemically synthesized
  source 1..20: mol_type = other DNA
tgaaaaaattggatatccat

SEQ ID NO: 28495 - DNA, 20 bp, synthetic construct
  misc_feature 1..20: note = chemically synthesized
  source 1..20: mol_type = other DNA
cattggatatccatgtgcaa

SEQ ID NO: 28496 - DNA, 20 bp, synthetic construct
  misc_feature 1..20: note = chemically synthesized
  source 1..20: mol_type = other DNA
catgtgcaaaagaataaaac

SEQ ID NO: 28497 - DNA, 20 bp, synthetic construct
  misc_feature 1..20: note = chemically synthesized
  source 1..20: mol_type = other DNA
ataaaactggactgctgata

SEQ ID NO: 28498 - DNA, 20 bp, synthetic construct
  misc_feature 1..20: note = chemically synthesized
  source 1..20: mol_type = other DNA
actggactgctgatatggtt

SEQ ID NO: 28499 - DNA, 20 bp, synthetic construct
  misc_feature 1..20: note = chemically synthesized
  source 1..20: mol_type = other DNA
aaatataatccccaacttct

SEQ ID NO: 28500 - DNA, 20 bp, synthetic construct
  misc_feature 1..20: note = chemically synthesized
  source 1..20: mol_type = other DNA
aatataatccccaacttctc

SEQ ID NO: 28501 - DNA, 20 bp, synthetic construct
  misc_feature 1..20: note = chemically synthesized
  source 1..20: mol_type = other DNA
tccccaacttctcaggatct

SEQ ID NO: 28502 - DNA, 20 bp, synthetic construct
  misc_feature 1..20: note = chemically synthesized
  source 1..20: mol_type = other DNA
ccaacttctcaggatcttgg

SEQ ID NO: 28503 - DNA, 20 bp, synthetic construct
  misc_feature 1..20: note = chemically synthesized
  source 1..20: mol_type = other DNA
cttctcaggatcttggcgga

SEQ ID NO: 28504 - DNA, 20 bp, synthetic construct
  misc_feature 1..20: note = chemically synthesized
  source 1..20: mol_type = other DNA
ttctcaggatcttggcggat

SEQ ID NO: 28505 - DNA, 20 bp, synthetic construct
  misc_feature 1..20: note = chemically synthesized
  source 1..20: mol_type = other DNA
ctcaggatcttggcggatgg

SEQ ID NO: 28506 - DNA, 20 bp, synthetic construct
  misc_feature 1..20: note = chemically synthesized
  source 1..20: mol_type = other DNA
tcaggatcttggcggatggg

SEQ ID NO: 28507 - DNA, 20 bp, synthetic construct
  misc_feature 1..20: note = chemically synthesized
  source 1..20: mol_type = other DNA
ggatcttggcggatgggagg

SEQ ID NO: 28508 - DNA, 20 bp, synthetic construct
  misc_feature 1..20: note = chemically synthesized
  source 1..20: mol_type = other DNA
gatcttggcggatgggaggt

SEQ ID NO: 28509 - DNA, 20 bp, synthetic construct
  misc_feature 1..20: note = chemically synthesized
  source 1..20: mol_type = other DNA
tggcggatgggaggtaggcc

SEQ ID NO: 28510 - DNA, 20 bp, synthetic construct
  misc_feature 1..20: note = chemically synthesized
  source 1..20: mol_type = other DNA
tgggaggtaggcctagattg

SEQ ID NO: 28511 - DNA, 20 bp, synthetic construct
  misc_feature 1..20: note = chemically synthesized
  source 1..20: mol_type = other DNA
cctagattgcagctccaact

SEQ ID NO: 28512 - DNA, 20 bp, synthetic construct
  misc_feature 1..20: note = chemically synthesized
  source 1..20: mol_type = other DNA
gattgcagctccaactcaga

SEQ ID NO: 28513 - DNA, 20 bp, synthetic construct
  misc_feature 1..20: note = chemically synthesized
  source 1..20: mol_type = other DNA
gcagctccaactcagatgga

SEQ ID NO: 28514 - DNA, 20 bp, synthetic construct
  misc_feature 1..20: note = chemically synthesized
  source 1..20: mol_type = other DNA
agctccaactcagatggaca

SEQ ID NO: 28515 - DNA, 20 bp, synthetic construct
  misc_feature 1..20: note = chemically synthesized
  source 1..20: mol_type = other DNA
tccaactcagatggacagag

SEQ ID NO: 28516 - DNA, 20 bp, synthetic construct
  misc_feature 1..20: note = chemically synthesized
  source 1..20: mol_type = other DNA
cagatggacagagcagcatg

SEQ ID NO: 28517 - DNA, 20 bp, synthetic construct
  misc_feature 1..20: note = chemically synthesized
  source 1..20: mol_type = other DNA
gatggacagagcagcatgtg

SEQ ID NO: 28518 - DNA, 20 bp, synthetic construct
  misc_feature 1..20: note = chemically synthesized
  source 1..20: mol_type = other DNA
atggacagagcagcatgtgg

SEQ ID NO: 28519 - DNA, 20 bp, synthetic construct
  misc_feature 1..20: note = chemically synthesized
  source 1..20: mol_type = other DNA
gaggctcgcattgtgaattt

SEQ ID NO: 28520 - DNA, 20 bp, synthetic construct
  misc_feature 1..20: note = chemically synthesized
  source 1..20: mol_type = other DNA
cgcattgtgaattttagctg

SEQ ID NO: 28521 - DNA, 20 bp, synthetic construct
  misc_feature 1..20: note = chemically synthesized
  source 1..20: mol_type = other DNA
ttgtgaattttagctgcaga

SEQ ID NO: 28522 - DNA, 20 bp, synthetic construct
  misc_feature 1..20: note = chemically synthesized
  source 1..20: mol_type = other DNA
tttagctgcagatagactgc

SEQ ID NO: 28523 - DNA, 20 bp, synthetic construct
  misc_feature 1..20: note = chemically synthesized
  source 1..20: mol_type = other DNA
gatagactgcaagaacaaac

SEQ ID NO: 28524 - DNA, 20 bp, synthetic construct
  misc_feature 1..20: note = chemically synthesized
  source 1..20: mol_type = other DNA
aagaacaaaccagcaatcct

SEQ ID NO: 28525 - DNA, 20 bp, synthetic construct
  misc_feature 1..20: note = chemically synthesized
  source 1..20: mol_type = other DNA
gaacaaaccagcaatcctga

SEQ ID NO: 28526 - DNA, 20 bp, synthetic construct
  misc_feature 1..20: note = chemically synthesized
  source 1..20: mol_type = other DNA
aacaaaccagcaatcctgag

SEQ ID NO: 28527 - DNA, 20 bp, synthetic construct
  misc_feature 1..20: note = chemically synthesized
  source 1..20: mol_type = other DNA
agcaatcctgagaggaccca

SEQ ID NO: 28528 - DNA, 20 bp, synthetic construct
  misc_feature 1..20: note = chemically synthesized
  source 1..20: mol_type = other DNA
gaggacccacagaccctctg

SEQ ID NO: 28529 - DNA, 20 bp, synthetic construct
  misc_feature 1..20: note = chemically synthesized
  source 1..20: mol_type = other DNA
aggacccacagaccctctga

SEQ ID NO: 28530 - DNA, 20 bp, synthetic construct
  misc_feature 1..20: note = chemically synthesized
  source 1..20: mol_type = other DNA
acccacagaccctctgaagg

SEQ ID NO: 28531 - DNA, 20 bp, synthetic construct
  misc_feature 1..20: note = chemically synthesized
  source 1..20: mol_type = other DNA
cacagaccctctgaaggaag

SEQ ID NO: 28532 - DNA, 20 bp, synthetic construct
  misc_feature 1..20: note = chemically synthesized
  source 1..20: mol_type = other DNA
aaggaagtagattgctcctg

SEQ ID NO: 28533 - DNA, 20 bp, synthetic construct
  misc_feature 1..20: note = chemically synthesized
  source 1..20: mol_type = other DNA
aggaagtagattgctcctgc

SEQ ID NO: 28534 - DNA, 20 bp, synthetic construct
  misc_feature 1..20: note = chemically synthesized
  source 1..20: mol_type = other DNA
tagattgctcctgcaggacc

SEQ ID NO: 28535 - DNA, 20 bp, synthetic construct
  misc_feature 1..20: note = chemically synthesized
  source 1..20: mol_type = other DNA
agattgctcctgcaggaccc

SEQ ID NO: 28536 - DNA, 20 bp, synthetic construct
  misc_feature 1..20: note = chemically synthesized
  source 1..20: mol_type = other DNA
attgctcctgcaggacccag

SEQ ID NO: 28537 - DNA, 20 bp, synthetic construct
  misc_feature 1..20: note = chemically synthesized
  source 1..20: mol_type = other DNA
ggagacaccccaaatactgt

SEQ ID NO: 28538 - DNA, 20 bp, synthetic construct
  misc_feature 1..20: note = chemically synthesized
  source 1..20: mol_type = other DNA
tactgtgagtgccccaactg

SEQ ID NO: 28539 - DNA, 20 bp, synthetic construct
  misc_feature 1..20: note = chemically synthesized
  source 1..20: mol_type = other DNA
tgtgagtgccccaactgcgg

SEQ ID NO: 28540 - DNA, 20 bp, synthetic construct
  misc_feature 1..20: note = chemically synthesized
  source 1..20: mol_type = other DNA
gagtgccccaactgcggaag

SEQ ID NO: 28541 - DNA, 20 bp, synthetic construct
  misc_feature 1..20: note = chemically synthesized
  source 1..20: mol_type = other DNA
agtgccccaactgcggaagt

SEQ ID NO: 28542 - DNA, 20 bp, synthetic construct
  misc_feature 1..20: note = chemically synthesized
  source 1..20: mol_type = other DNA
ccccaactgcggaagtggga

SEQ ID NO: 28543 - DNA, 20 bp, synthetic construct
  misc_feature 1..20: note = chemically synthesized
  source 1..20: mol_type = other DNA
cccaactgcggaagtgggaa

SEQ ID NO: 28544 - DNA, 20 bp, synthetic construct
  misc_feature 1..20: note = chemically synthesized
  source 1..20: mol_type = other DNA
ccaactgcggaagtgggaaa

SEQ ID NO: 28545 - DNA, 20 bp, synthetic construct
  misc_feature 1..20: note = chemically synthesized
  source 1..20: mol_type = other DNA
aactgcggaagtgggaaagg

SEQ ID NO: 28546 - DNA, 20 bp, synthetic construct
  misc_feature 1..20: note = chemically synthesized
  source 1..20: mol_type = other DNA
tcctaaacacacactcccac

SEQ ID NO: 28547 - DNA, 20 bp, synthetic construct
  misc_feature 1..20: note = chemically synthesized
  source 1..20: mol_type = other DNA
ctaaacacacactcccactg

SEQ ID NO: 28548 - DNA, 20 bp, synthetic construct
  misc_feature 1..20: note = chemically synthesized
  source 1..20: mol_type = other DNA
cactcccactggagaaactg

SEQ ID NO: 28549 - DNA, 20 bp, synthetic construct
  misc_feature 1..20: note = chemically synthesized
  source 1..20: mol_type = other DNA
actcccactggagaaactga

SEQ ID NO: 28550 - DNA, 20 bp, synthetic construct
  misc_feature 1..20: note = chemically synthesized
  source 1..20: mol_type = other DNA
agaaactgaaggtctgtttg

SEQ ID NO: 28551 - DNA, 20 bp, synthetic construct
  misc_feature 1..20: note = chemically synthesized
  source 1..20: mol_type = other DNA
gaaactgaaggtctgtttgt

SEQ ID NO: 28552 - DNA, 20 bp, synthetic construct
  misc_feature 1..20: note = chemically synthesized
  source 1..20: mol_type = other DNA
aactgaaggtctgtttgtgg

SEQ ID NO: 28553 - DNA, 20 bp, synthetic construct
  misc_feature 1..20: note = chemically synthesized
  source 1..20: mol_type = other DNA
tgaaggtctgtttgtgggag

SEQ ID NO: 28554 - DNA, 20 bp, synthetic construct
  misc_feature 1..20: note = chemically synthesized
  source 1..20: mol_type = other DNA
gagaagtttctgaccttacc

SEQ ID NO: 28555 - DNA, 20 bp, synthetic construct
  misc_feature 1..20: note = chemically synthesized
  source 1..20: mol_type = other DNA
gaagtttctgaccttacctg

SEQ ID NO: 28556 - DNA, 20 bp, synthetic construct
  misc_feature 1..20: note = chemically synthesized
  source 1..20: mol_type = other DNA
ttctgaccttacctggagtt

SEQ ID NO: 28557 - DNA, 20 bp, synthetic construct
  misc_feature 1..20: note = chemically synthesized
  source 1..20: mol_type = other DNA
tacctggagttgagttaact

SEQ ID NO: 28558 - DNA, 20 bp, synthetic construct
  misc_feature 1..20: note = chemically synthesized
  source 1..20: mol_type = other DNA
cctggagttgagttaactta

SEQ ID NO: 28559 - DNA, 20 bp, synthetic construct
  misc_feature 1..20: note = chemically synthesized
  source 1..20: mol_type = other DNA
tggagttgagttaacttaga

SEQ ID NO: 28560 - DNA, 20 bp, synthetic construct
  misc_feature 1..20: note = chemically synthesized
  source 1..20: mol_type = other DNA
ttgagttaacttagagagct

SEQ ID NO: 28561 - DNA, 20 bp, synthetic construct
  misc_feature 1..20: note = chemically synthesized
  source 1..20: mol_type = other DNA
ttagagagctgagcaaaata

SEQ ID NO: 28562 - DNA, 20 bp, synthetic construct
  misc_feature 1..20: note = chemically synthesized
  source 1..20: mol_type = other DNA
tagagagctgagcaaaatac

SEQ ID NO: 28563 - DNA, 20 bp, synthetic construct
  misc_feature 1..20: note = chemically synthesized
  source 1..20: mol_type = other DNA
agctgagcaaaatacaggtg

SEQ ID NO: 28564 - DNA, 20 bp, synthetic construct
  misc_feature 1..20: note = chemically synthesized
  source 1..20: mol_type = other DNA
ctgagcaaaatacaggtgta

SEQ ID NO: 28565 - DNA, 20 bp, synthetic construct
  misc_feature 1..20: note = chemically synthesized
  source 1..20: mol_type = other DNA
tgagcaaaatacaggtgtag

SEQ ID NO: 28566 - DNA, 20 bp, synthetic construct
  misc_feature 1..20: note = chemically synthesized
  source 1..20: mol_type = other DNA
gcaaaatacaggtgtagagg

SEQ ID NO: 28567 - DNA, 20 bp, synthetic construct
  misc_feature 1..20: note = chemically synthesized
  source 1..20: mol_type = other DNA
aaatacaggtgtagaggaag

SEQ ID NO: 28568 - DNA, 20 bp, synthetic construct
  misc_feature 1..20: note = chemically synthesized
  source 1..20: mol_type = other DNA
acaggtgtagaggaagcagt

SEQ ID NO: 28569 - DNA, 20 bp, synthetic construct
  misc_feature 1..20: note = chemically synthesized
  source 1..20: mol_type = other DNA
gtgtagaggaagcagtgaga

SEQ ID NO: 28570 - DNA, 20 bp, synthetic construct
  misc_feature 1..20: note = chemically synthesized
  source 1..20: mol_type = other DNA
tgtagaggaagcagtgagaa

SEQ ID NO: 28571 - DNA, 20 bp, synthetic construct
  misc_feature 1..20: note = chemically synthesized
  source 1..20: mol_type = other DNA
ggaagcagtgagaaaggccc

SEQ ID NO: 28572 - DNA, 20 bp, synthetic construct
  misc_feature 1..20: note = chemically synthesized
  source 1..20: mol_type = other DNA
gaagcagtgagaaaggccct

SEQ ID NO: 28573 - DNA, 20 bp, synthetic construct
  misc_feature 1..20: note = chemically synthesized
  source 1..20: mol_type = other DNA
agcagtgagaaaggccctgg

SEQ ID NO: 28574 - DNA, 20 bp, synthetic construct
  misc_feature 1..20: note = chemically synthesized
  source 1..20: mol_type = other DNA
gaaaggccctgggagctcac

SEQ ID NO: 28575 - DNA, 20 bp, synthetic construct
  misc_feature 1..20: note = chemically synthesized
  source 1..20: mol_type = other DNA
aaaggccctgggagctcact

SEQ ID NO: 28576 - DNA, 20 bp, synthetic construct
  misc_feature 1..20: note = chemically synthesized
  source 1..20: mol_type = other DNA
tgggagctcactgggtccct

SEQ ID NO: 28577 - DNA, 20 bp, synthetic construct
  misc_feature 1..20: note = chemically synthesized
  source 1..20: mol_type = other DNA
gagctcactgggtccctgag

SEQ ID NO: 28578 - DNA, 20 bp, synthetic construct
  misc_feature 1..20: note = chemically synthesized
  source 1..20: mol_type = other DNA
agctcactgggtccctgagc

SEQ ID NO: 28579 - DNA, 20 bp, synthetic construct
  misc_feature 1..20: note = chemically synthesized
  source 1..20: mol_type = other DNA
ctgagcaggccattcctgcc

SEQ ID NO: 28580 - DNA, 20 bp, synthetic construct
  misc_feature 1..20: note = chemically synthesized
  source 1..20: mol_type = other DNA
caggccattcctgcctggca

SEQ ID NO: 28581 - DNA, 20 bp, synthetic construct
  misc_feature 1..20: note = chemically synthesized
  source 1..20: mol_type = other DNA
ccattcctgcctggcatagc

SEQ ID NO: 28582 - DNA, 20 bp, synthetic construct
  misc_feature 1..20: note = chemically synthesized
  source 1..20: mol_type = other DNA
cattcctgcctggcatagcc

SEQ ID NO: 28583 - DNA, 20 bp, synthetic construct
  misc_feature 1..20: note = chemically synthesized
  source 1..20: mol_type = other DNA
ttactaacattgaatgtaaa

SEQ ID NO: 28584 - DNA, 20 bp, synthetic construct
  misc_feature 1..20: note = chemically synthesized
  source 1..20: mol_type = other DNA
ggcctaaatgctccacttaa

SEQ ID NO: 28585 - DNA, 20 bp, synthetic construct
  misc_feature 1..20: note = chemically synthesized
  source 1..20: mol_type = other DNA
gcctaaatgctccacttaaa

SEQ ID NO: 28586 - DNA, 20 bp, synthetic construct
  misc_feature 1..20: note = chemically synthesized
  source 1..20: mol_type = other DNA
cctaaatgctccacttaaaa

SEQ ID NO: 28587 - DNA, 20 bp, synthetic construct
  misc_feature 1..20: note = chemically synthesized
  source 1..20: mol_type = other DNA
ctccacttaaaagggtgaaa

SEQ ID NO: 28588 - DNA, 20 bp, synthetic construct
  misc_feature 1..20: note = chemically synthesized
  source 1..20: mol_type = other DNA
tccacttaaaagggtgaaaa

SEQ ID NO: 28589 - DNA, 20 bp, synthetic construct
  misc_feature 1..20: note = chemically synthesized
  source 1..20: mol_type = other DNA
aaaaaggtatttcatgcaaa

SEQ ID NO: 28590 - DNA, 20 bp, synthetic construct
  misc_feature 1..20: note = chemically synthesized
  source 1..20: mol_type = other DNA
ttcatgcaaatggccaccaa

SEQ ID NO: 28591 - DNA, 20 bp, synthetic construct
  misc_feature 1..20: note = chemically synthesized
  source 1..20: mol_type = other DNA
tgcaaatggccaccaaaagt

SEQ ID NO: 28592 - DNA, 20 bp, synthetic construct
  misc_feature 1..20: note = chemically synthesized
  source 1..20: mol_type = other DNA
aaatggccaccaaaagtgag

SEQ ID NO: 28593 - DNA, 20 bp, synthetic construct
  misc_feature 1..20: note = chemically synthesized
  source 1..20: mol_type = other DNA
aatggccaccaaaagtgagt

SEQ ID NO: 28594 - DNA, 20 bp, synthetic construct
  misc_feature 1..20: note = chemically synthesized
  source 1..20: mol_type = other DNA
agtaggcaaaacaaacttta

SEQ ID NO: 28595 - DNA, 20 bp, synthetic construct
  misc_feature 1..20: note = chemically synthesized
  source 1..20: mol_type = other DNA
caaaacaaactttaaagcaa

SEQ ID NO: 28596 - DNA, 20 bp, synthetic construct
  misc_feature 1..20: note = chemically synthesized
  source 1..20: mol_type = other DNA
aacaaactttaaagcaacag

SEQ ID NO: 28597 - DNA, 20 bp, synthetic construct
  misc_feature 1..20: note = chemically synthesized
  source 1..20: mol_type = other DNA
tttaaagcaacagcagttaa

SEQ ID NO: 28598 - DNA, 20 bp, synthetic construct
  misc_feature 1..20: note = chemically synthesized
  source 1..20: mol_type = other DNA
taaagcaacagcagttaaaa

SEQ ID NO: 28599 - DNA, 20 bp, synthetic construct
  misc_feature 1..20: note = chemically synthesized
  source 1..20: mol_type = other DNA
aacagcagttaaaagagaca

SEQ ID NO: 28600 - DNA, 20 bp, synthetic construct
  misc_feature 1..20: note = chemically synthesized
  source 1..20: mol_type = other DNA
cagcagttaaaagagacaaa

SEQ ID NO: 28601 - DNA, 20 bp, synthetic construct
  misc_feature 1..20: note = chemically synthesized
  source 1..20: mol_type = other DNA
agcagttaaaagagacaaag

SEQ ID NO: 28602 - DNA, 20 bp, synthetic construct
  misc_feature 1..20: note = chemically synthesized
  source 1..20: mol_type = other DNA
gcagttaaaagagacaaaga

SEQ ID NO: 28603 - DNA, 20 bp, synthetic construct
  misc_feature 1..20: note = chemically synthesized
  source 1..20: mol_type = other DNA
caaagagggacattatataa

SEQ ID NO: 28604 - DNA, 20 bp, synthetic construct
  misc_feature 1..20: note = chemically synthesized
  source 1..20: mol_type = other DNA
gggacattatataatggtaa

SEQ ID NO: 28605 - DNA, 20 bp, synthetic construct
  misc_feature 1..20: note = chemically synthesized
  source 1..20: mol_type = other DNA
ggacattatataatggtaaa

SEQ ID NO: 28606 - DNA, 20 bp, synthetic construct
  misc_feature 1..20: note = chemically synthesized
  source 1..20: mol_type = other DNA
tggtaaaaggccttgtccaa

SEQ ID NO: 28607 - DNA, 20 bp, synthetic construct
  misc_feature 1..20: note = chemically synthesized
  source 1..20: mol_type = other DNA
ggtaaaaggccttgtccaac

SEQ ID NO: 28608 - DNA, 20 bp, synthetic construct
  misc_feature 1..20: note = chemically synthesized
  source 1..20: mol_type = other DNA
aacatatatgcacctaacac

SEQ ID NO: 28609 - DNA, 20 bp, synthetic construct
  misc_feature 1..20: note = chemically synthesized
  source 1..20: mol_type = other DNA
catatatgcacctaacactg

SEQ ID NO: 28610 - DNA, 20 bp, synthetic construct
  misc_feature 1..20: note = chemically synthesized
  source 1..20: mol_type = other DNA
cactggagctcccaaattta

SEQ ID NO: 28611 - DNA, 20 bp, synthetic construct
  misc_feature 1..20: note = chemically synthesized
  source 1..20: mol_type = other DNA
atttatagaacaattactaa

SEQ ID NO: 28612 - DNA, 20 bp, synthetic construct
  misc_feature 1..20: note = chemically synthesized
  source 1..20: mol_type = other DNA
gaacaattactaatagacct

SEQ ID NO: 28613 - DNA, 20 bp, synthetic construct
  misc_feature 1..20: note = chemically synthesized
  source 1..20: mol_type = other DNA
tactaatagacctaagaaat

SEQ ID NO: 28614 - DNA, 20 bp, synthetic construct
  misc_feature 1..20: note = chemically synthesized
  source 1..20: mol_type = other DNA
aatagacctaagaaatgaga

SEQ ID NO: 28615 - DNA, 20 bp, synthetic construct
  misc_feature 1..20: note = chemically synthesized
  source 1..20: mol_type = other DNA
gacctaagaaatgagataga

SEQ ID NO: 28616 - DNA, 20 bp, synthetic construct
  misc_feature 1..20: note = chemically synthesized
  source 1..20: mol_type = other DNA
gatagacagcaacacaataa

SEQ ID NO: 28617 - DNA, 20 bp, synthetic construct
  misc_feature 1..20: note = chemically synthesized
  source 1..20: mol_type = other DNA
agacagcaacacaataatag

SEQ ID NO: 28618 - DNA, 20 bp, synthetic construct
  misc_feature 1..20: note = chemically synthesized
  source 1..20: mol_type = other DNA
gacagcaacacaataatagt

SEQ ID NO: 28619 - DNA, 20 bp, synthetic construct
  misc_feature 1..20: note = chemically synthesized
  source 1..20: mol_type = other DNA
acagcaacacaataatagtg

SEQ ID NO: 28620 - DNA, 20 bp, synthetic construct
  misc_feature 1..20: note = chemically synthesized
  source 1..20: mol_type = other DNA
cagcaacacaataatagtgg

SEQ ID NO: 28621 - DNA, 20 bp, synthetic construct
  misc_feature 1..20: note = chemically synthesized
  source 1..20: mol_type = other DNA
ggacttcaatacttcattga

SEQ ID NO: 28622 - DNA, 20 bp, synthetic construct
  misc_feature 1..20: note = chemically synthesized
  source 1..20: mol_type = other DNA
caatacttcattgacagcac

SEQ ID NO: 28623 - DNA, 20 bp, synthetic construct
  misc_feature 1..20: note = chemically synthesized
  source 1..20: mol_type = other DNA
acttcattgacagcactaga

SEQ ID NO: 28624 - DNA, 20 bp, synthetic construct
  misc_feature 1..20: note = chemically synthesized
  source 1..20: mol_type = other DNA
acagcactagacagttcatc

SEQ ID NO: 28625 - DNA, 20 bp, synthetic construct
  misc_feature 1..20: note = chemically synthesized
  source 1..20: mol_type = other DNA
cactagacagttcatcaaga

SEQ ID NO: 28626 - DNA, 20 bp, synthetic construct
  misc_feature 1..20: note = chemically synthesized
  source 1..20: mol_type = other DNA
agacagttcatcaagacaga

SEQ ID NO: 28627 - DNA, 20 bp, synthetic construct
  misc_feature 1..20: note = chemically synthesized
  source 1..20: mol_type = other DNA
gaaagtcaacaaaaaaataa

SEQ ID NO: 28628 - DNA, 20 bp, synthetic construct
  misc_feature 1..20: note = chemically synthesized
  source 1..20: mol_type = other DNA
aatggatttaaattatacct

SEQ ID NO: 28629 - DNA, 20 bp, synthetic construct
  misc_feature 1..20: note = chemically synthesized
  source 1..20: mol_type = other DNA
aaattataccttagaacaaa

SEQ ID NO: 28630 - DNA, 20 bp, synthetic construct
  misc_feature 1..20: note = chemically synthesized
  source 1..20: mol_type = other DNA
cttagaacaaatggacttaa

SEQ ID NO: 28631 - DNA, 20 bp, synthetic construct
  misc_feature 1..20: note = chemically synthesized
  source 1..20: mol_type = other DNA
atggacttaacagttatata

SEQ ID NO: 28632 - DNA, 20 bp, synthetic construct
  misc_feature 1..20: note = chemically synthesized
  source 1..20: mol_type = other DNA
aacatttcatccaataacca

SEQ ID NO: 28633 - DNA, 20 bp, synthetic construct
  misc_feature 1..20: note = chemically synthesized
  source 1..20: mol_type = other DNA
agaacacacattctattcaa

SEQ ID NO: 28634 - DNA, 20 bp, synthetic construct
  misc_feature 1..20: note = chemically synthesized
  source 1..20: mol_type = other DNA
acattctattcaacagcgcg

SEQ ID NO: 28635 - DNA, 20 bp, synthetic construct
  misc_feature 1..20: note = chemically synthesized
  source 1..20: mol_type = other DNA
cagcgcgtggaaatttctcc

SEQ ID NO: 28636 - DNA, 20 bp, synthetic construct
  misc_feature 1..20: note = chemically synthesized
  source 1..20: mol_type = other DNA
agcgcgtggaaatttctcca

SEQ ID NO: 28637 - DNA, 20 bp, synthetic construct
  misc_feature 1..20: note = chemically synthesized
  source 1..20: mol_type = other DNA
gcgtggaaatttctccaagg

SEQ ID NO: 28638 - DNA, 20 bp, synthetic construct
  misc_feature 1..20: note = chemically synthesized
  source 1..20: mol_type = other DNA
ctccaaggtagaccatatga

SEQ ID NO: 28639 - DNA, 20 bp, synthetic construct
  misc_feature 1..20: note = chemically synthesized
  source 1..20: mol_type = other DNA
tccaaggtagaccatatgat

SEQ ID NO: 28640 - DNA, 20 bp, synthetic construct
  misc_feature 1..20: note = chemically synthesized
  source 1..20: mol_type = other DNA
catatgataggccatgaaat

SEQ ID NO: 28641 - DNA, 20 bp, synthetic construct
  misc_feature 1..20: note = chemically synthesized
  source 1..20: mol_type = other DNA
agcctcaataaatttactaa

SEQ ID NO: 28642 - DNA, 20 bp, synthetic construct
  misc_feature 1..20: note = chemically synthesized
  source 1..20: mol_type = other DNA
tttactaacagaccaataac

SEQ ID NO: 28643 - DNA, 20 bp, synthetic construct
  misc_feature 1..20: note = chemically synthesized
  source 1..20: mol_type = other DNA
actaacagaccaataacaag

SEQ ID NO: 28644 - DNA, 20 bp, synthetic construct
  misc_feature 1..20: note = chemically synthesized
  source 1..20: mol_type = other DNA
acagaccaataacaagcagt

SEQ ID NO: 28645 - DNA, 20 bp, synthetic construct
  misc_feature 1..20: note = chemically synthesized
  source 1..20: mol_type = other DNA
aacaagcagtgagatttaat

SEQ ID NO: 28646 - DNA, 20 bp, synthetic construct
  misc_feature 1..20: note = chemically synthesized
  source 1..20: mol_type = other DNA
aaaaattaccaaccaaaaaa

SEQ ID NO: 28647 - DNA, 20 bp, synthetic construct
  misc_feature 1..20: note = chemically synthesized
  source 1..20: mol_type = other DNA
ttaccaaccaaaaaaaagtt

SEQ ID NO: 28648 - DNA, 20 bp, synthetic construct
  misc_feature 1..20: note = chemically synthesized
  source 1..20: mol_type = other DNA
taccaaccaaaaaaaagttc

SEQ ID NO: 28649 - DNA, 20 bp, synthetic construct
  misc_feature 1..20: note = chemically synthesized
  source 1..20: mol_type = other DNA
accaaaaaaaagttcaggac

SEQ ID NO: 28650 - DNA, 20 bp, synthetic construct
  misc_feature 1..20: note = chemically synthesized
  source 1..20: mol_type = other DNA
aaaaaaagttcaggaccaga

SEQ ID NO: 28651 - DNA, 20 bp, synthetic construct
  misc_feature 1..20: note = chemically synthesized
  source 1..20: mol_type = other DNA
aggaccagatggattcacaa

SEQ ID NO: 28652 - DNA, 20 bp, synthetic construct
  misc_feature 1..20: note = chemically synthesized
  source 1..20: mol_type = other DNA
gattcacaacagaattctac

SEQ ID NO: 28653 - DNA, 20 bp, synthetic construct
  misc_feature 1..20: note = chemically synthesized
  source 1..20: mol_type = other DNA
agaattctactagacattca

SEQ ID NO: 28654 - DNA, 20 bp, synthetic construct
  misc_feature 1..20: note = chemically synthesized
  source 1..20: mol_type = other DNA
aattctactagacattcaaa

SEQ ID NO: 28655 - DNA, 20 bp, synthetic construct
  misc_feature 1..20: note = chemically synthesized
  source 1..20: mol_type = other DNA
attctactagacattcaaag

SEQ ID NO: 28656 - DNA, 20 bp, synthetic construct
  misc_feature 1..20: note = chemically synthesized
  source 1..20: mol_type = other DNA
ctagacattcaaagaggaat

SEQ ID NO: 28657 - DNA, 20 bp, synthetic construct
  misc_feature 1..20: note = chemically synthesized
  source 1..20: mol_type = other DNA
tctttttgacactattctac

SEQ ID NO: 28658 - DNA, 20 bp, synthetic construct
  misc_feature 1..20: note = chemically synthesized
  source 1..20: mol_type = other DNA
tttgacactattctacaaga

SEQ ID NO: 28659 - DNA, 20 bp, synthetic construct
  misc_feature 1..20: note = chemically synthesized
  source 1..20: mol_type = other DNA
actattctacaagacagata

SEQ ID NO: 28660 - DNA, 20 bp, synthetic construct
  misc_feature 1..20: note = chemically synthesized
  source 1..20: mol_type = other DNA
attctacaagacagataaag

SEQ ID NO: 28661 - DNA, 20 bp, synthetic construct
  misc_feature 1..20: note = chemically synthesized
  source 1..20: mol_type = other DNA
ttctacaagacagataaaga

SEQ ID NO: 28662 - DNA, 20 bp, synthetic construct
  misc_feature 1..20: note = chemically synthesized
  source 1..20: mol_type = other DNA
ctgccctaattcattctatg

SEQ ID NO: 28663 - DNA, 20 bp, synthetic construct
  misc_feature 1..20: note = chemically synthesized
  source 1..20: mol_type = other DNA
cctaattcattctatgaagc

SEQ ID NO: 28664 - DNA, 20 bp, synthetic construct
  misc_feature 1..20: note = chemically synthesized
  source 1..20: mol_type = other DNA
agccagcatcacaccaaaac

SEQ ID NO: 28665 - DNA, 20 bp, synthetic construct
  misc_feature 1..20: note = chemically synthesized
  source 1..20: mol_type = other DNA
gccagcatcacaccaaaacc

SEQ ID NO: 28666 - DNA, 20 bp, synthetic construct
  misc_feature 1..20: note = chemically synthesized
  source 1..20: mol_type = other DNA
ccagcatcacaccaaaacca

SEQ ID NO: 28667 - DNA, 20 bp, synthetic construct
  misc_feature 1..20: note = chemically synthesized
  source 1..20: mol_type = other DNA
gcatcacaccaaaaccaggg

SEQ ID NO: 28668 - DNA, 20 bp, synthetic construct
  misc_feature 1..20: note = chemically synthesized
  source 1..20: mol_type = other DNA
catcacaccaaaaccaggga

SEQ ID NO: 28669 - DNA, 20 bp, synthetic construct
  misc_feature 1..20: note = chemically synthesized
  source 1..20: mol_type = other DNA
agggaaggacataaccaaaa

SEQ ID NO: 28670 - DNA, 20 bp, synthetic construct
  misc_feature 1..20: note = chemically synthesized
  source 1..20: mol_type = other DNA
ataaccaaaaaagaaaacta

SEQ ID NO: 28671 - DNA, 20 bp, synthetic construct
  misc_feature 1..20: note = chemically synthesized
  source 1..20: mol_type = other DNA
aaaagaaaactacagactga

SEQ ID NO: 28672 - DNA, 20 bp, synthetic construct
  misc_feature 1..20: note = chemically synthesized
  source 1..20: mol_type = other DNA
actgatagccttgatgaaca

SEQ ID NO: 28673 - DNA, 20 bp, synthetic construct
  misc_feature 1..20: note = chemically synthesized
  source 1..20: mol_type = other DNA
taaaatccttaacaaaatac

SEQ ID NO: 28674 - DNA, 20 bp, synthetic construct
  misc_feature 1..20: note = chemically synthesized
  source 1..20: mol_type = other DNA
aaattcaacaacataacaaa

SEQ ID NO: 28675 - DNA, 20 bp, synthetic construct
  misc_feature 1..20: note = chemically synthesized
  source 1..20: mol_type = other DNA
aaagataatccaccatgatc

SEQ ID NO: 28676 - DNA, 20 bp, synthetic construct
  misc_feature 1..20: note = chemically synthesized
  source 1..20: mol_type = other DNA
gataatccaccatgatcaag

SEQ ID NO: 28677 - DNA, 20 bp, synthetic construct
  misc_feature 1..20: note = chemically synthesized
  source 1..20: mol_type = other DNA
ataatccaccatgatcaagc

SEQ ID NO: 28678 - DNA, 20 bp, synthetic construct
  misc_feature 1..20: note = chemically synthesized
  source 1..20: mol_type = other DNA
tgatcaagcaggttccatgc

SEQ ID NO: 28679 - DNA, 20 bp, synthetic construct
  misc_feature 1..20: note = chemically synthesized
  source 1..20: mol_type = other DNA
gatcaagcaggttccatgcc

SEQ ID NO: 28680 - DNA, 20 bp, synthetic construct
  misc_feature 1..20: note = chemically synthesized
  source 1..20: mol_type = other DNA
atcaagcaggttccatgcca

SEQ ID NO: 28681 - DNA, 20 bp, synthetic construct
  misc_feature 1..20: note = chemically synthesized
  source 1..20: mol_type = other DNA
caggttccatgccagggatg

SEQ ID NO: 28682 - DNA, 20 bp, synthetic construct
  misc_feature 1..20: note = chemically synthesized
  source 1..20: mol_type = other DNA
aggttccatgccagggatgc

SEQ ID NO: 28683 - DNA, 20 bp, synthetic construct
  misc_feature 1..20: note = chemically synthesized
  source 1..20: mol_type = other DNA
ggttccatgccagggatgca

SEQ ID NO: 28684 - DNA, 20 bp, synthetic construct
  misc_feature 1..20: note = chemically synthesized
  source 1..20: mol_type = other DNA
ccatgccagggatgcagggt

SEQ ID NO: 28685 - DNA, 20 bp, synthetic construct
  misc_feature 1..20: note = chemically synthesized
  source 1..20: mol_type = other DNA
agggttggtttgacatctgc

SEQ ID NO: 28686 - DNA, 20 bp, synthetic construct
  misc_feature 1..20: note = chemically synthesized
  source 1..20: mol_type = other DNA
tttgacatctgcaagtcaat

SEQ ID NO: 28687 - DNA, 20 bp, synthetic construct
  misc_feature 1..20: note = chemically synthesized
  source 1..20: mol_type = other DNA
agtgtgatacaccacataaa

SEQ ID NO: 28688 - DNA, 20 bp, synthetic construct
  misc_feature 1..20: note = chemically synthesized
  source 1..20: mol_type = other DNA
aaattacatgatcatctcaa

SEQ ID NO: 28689 - DNA, 20 bp, synthetic construct
  misc_feature 1..20: note = chemically synthesized
  source 1..20: mol_type = other DNA
catgatcatctcaatagatg

SEQ ID NO: 28690 - DNA, 20 bp, synthetic construct
  misc_feature 1..20: note = chemically synthesized
  source 1..20: mol_type = other DNA
catctcaatagatgcagaaa

SEQ ID NO: 28691 - DNA, 20 bp, synthetic construct
  misc_feature 1..20: note = chemically synthesized
  source 1..20: mol_type = other DNA
aaaaagcattcaacaaaatc

SEQ ID NO: 28692 - DNA, 20 bp, synthetic construct
  misc_feature 1..20: note = chemically synthesized
  source 1..20: mol_type = other DNA
acatttatgattaaaatgct

SEQ ID NO: 28693 - DNA, 20 bp, synthetic construct
  misc_feature 1..20: note = chemically synthesized
  source 1..20: mol_type = other DNA
attaaaatgctcagcaaaat

SEQ ID NO: 28694 - DNA, 20 bp, synthetic construct
  misc_feature 1..20: note = chemically synthesized
  source 1..20: mol_type = other DNA
gctcagcaaaatcagcatac

SEQ ID NO: 28695 - DNA, 20 bp, synthetic construct
  misc_feature 1..20: note = chemically synthesized
  source 1..20: mol_type = other DNA
tcagcaaaatcagcatacaa

SEQ ID NO: 28696 - DNA, 20 bp, synthetic construct
  misc_feature 1..20: note = chemically synthesized
  source 1..20: mol_type = other DNA
agcatacaagagacatacct

SEQ ID NO: 28697 - DNA, 20 bp, synthetic construct
  misc_feature 1..20: note = chemically synthesized
  source 1..20: mol_type = other DNA
gacatacctcagtgtaataa

SEQ ID NO: 28698 - DNA, 20 bp, synthetic construct
  misc_feature 1..20: note = chemically synthesized
  source 1..20: mol_type = other DNA
agccatctgtgacaaaccca

SEQ ID NO: 28699 - DNA, 20 bp, synthetic construct
  misc_feature 1..20: note = chemically synthesized
  source 1..20: mol_type = other DNA
acagccaacataatattgaa

SEQ ID NO: 28700 - DNA, 20 bp, synthetic construct
  misc_feature 1..20: note = chemically synthesized
  source 1..20: mol_type = other DNA
cagccaacataatattgaat

SEQ ID NO: 28701 - DNA, 20 bp, synthetic construct
  misc_feature 1..20: note = chemically synthesized
  source 1..20: mol_type = other DNA
agccaacataatattgaatg

SEQ ID NO: 28702 - DNA, 20 bp, synthetic construct
  misc_feature 1..20: note = chemically synthesized
  source 1..20: mol_type = other DNA
acataatattgaatggggaa

SEQ ID NO: 28703 - DNA, 20 bp, synthetic construct
  misc_feature 1..20: note = chemically synthesized
  source 1..20: mol_type = other DNA
attgaatggggaaaagttga

SEQ ID NO: 28704 - DNA, 20 bp, synthetic construct
  misc_feature 1..20: note = chemically synthesized
  source 1..20: mol_type = other DNA
aagttgaaagcattccctct

SEQ ID NO: 28705 - DNA, 20 bp, synthetic construct
  misc_feature 1..20: note = chemically synthesized
  source 1..20: mol_type = other DNA
aaagcattccctctgagaac

SEQ ID NO: 28706 - DNA, 20 bp, synthetic construct
  misc_feature 1..20: note = chemically synthesized
  source 1..20: mol_type = other DNA
ttccctctgagaactggaac

SEQ ID NO: 28707 - DNA, 20 bp, synthetic construct
  misc_feature 1..20: note = chemically synthesized
  source 1..20: mol_type = other DNA
tctgagaactggaacaagac

SEQ ID NO: 28708 - DNA, 20 bp, synthetic construct
  misc_feature 1..20: note = chemically synthesized
  source 1..20: mol_type = other DNA
ctgagaactggaacaagaca

SEQ ID NO: 28709 - DNA, 20 bp, synthetic construct
  misc_feature 1..20: note = chemically synthesized
  source 1..20: mol_type = other DNA
ctcaccactcctcttcaaca

SEQ ID NO: 28710 - DNA, 20 bp, synthetic construct
  misc_feature 1..20: note = chemically synthesized
  source 1..20: mol_type = other DNA
actcctcttcaacatagtac

SEQ ID NO: 28711 - DNA, 20 bp, synthetic construct
  misc_feature 1..20: note = chemically synthesized
  source 1..20: mol_type = other DNA
cctcttcaacatagtactgg

SEQ ID NO: 28712 - DNA, 20 bp, synthetic construct
  misc_feature 1..20: note = chemically synthesized
  source 1..20: mol_type = other DNA
caacatagtactggaagtcc

SEQ ID NO: 28713 - DNA, 20 bp, synthetic construct
  misc_feature 1..20: note = chemically synthesized
  source 1..20: mol_type = other DNA
atagtactggaagtcctagc

SEQ ID NO: 28714 - DNA, 20 bp, synthetic construct
  misc_feature 1..20: note = chemically synthesized
  source 1..20: mol_type = other DNA
tagtactggaagtcctagcc

SEQ ID NO: 28715 - DNA, 20 bp, synthetic construct
  misc_feature 1..20: note = chemically synthesized
  source 1..20: mol_type = other DNA
agtactggaagtcctagcca

SEQ ID NO: 28716 - DNA, 20 bp, synthetic construct
  misc_feature 1..20: note = chemically synthesized
  source 1..20: mol_type = other DNA
gaagtcctagccagggcaat

SEQ ID NO: 28717 - DNA, 20 bp, synthetic construct
  misc_feature 1..20: note = chemically synthesized
  source 1..20: mol_type = other DNA
cagggcaatcagacaaaaca

SEQ ID NO: 28718 - DNA, 20 bp, synthetic construct
  misc_feature 1..20: note = chemically synthesized
  source 1..20: mol_type = other DNA
tcagacaaaacaaagaaata

SEQ ID NO: 28719 - DNA, 20 bp, synthetic construct
  misc_feature 1..20: note = chemically synthesized
  source 1..20: mol_type = other DNA
cagacaaaacaaagaaataa

SEQ ID NO: 28720 - DNA, 20 bp, synthetic construct
  misc_feature 1..20: note = chemically synthesized
  source 1..20: mol_type = other DNA
agacaaaacaaagaaataaa

SEQ ID NO: 28721 - DNA, 20 bp, synthetic construct
  misc_feature 1..20: note = chemically synthesized
  source 1..20: mol_type = other DNA
gaaataaagggcattcaaat

SEQ ID NO: 28722 - DNA, 20 bp, synthetic construct
  misc_feature 1..20: note = chemically synthesized
  source 1..20: mol_type = other DNA
aaagggcattcaaatcagta

SEQ ID NO: 28723 - DNA, 20 bp, synthetic construct
  misc_feature 1..20: note = chemically synthesized
  source 1..20: mol_type = other DNA
agggcattcaaatcagtaaa

SEQ ID NO: 28724 - DNA, 20 bp, synthetic construct
  misc_feature 1..20: note = chemically synthesized
  source 1..20: mol_type = other DNA
gggcattcaaatcagtaaag

SEQ ID NO: 28725 - DNA, 20 bp, synthetic construct
  misc_feature 1..20: note = chemically synthesized
  source 1..20: mol_type = other DNA
cattcaaatcagtaaagagg

SEQ ID NO: 28726 - DNA, 20 bp, synthetic construct
  misc_feature 1..20: note = chemically synthesized
  source 1..20: mol_type = other DNA
catttacctttaaaacccta

SEQ ID NO: 28727 - DNA, 20 bp, synthetic construct
  misc_feature 1..20: note = chemically synthesized
  source 1..20: mol_type = other DNA
taaaaccctaaagactcctc

SEQ ID NO: 28728 - DNA, 20 bp, synthetic construct
  misc_feature 1..20: note = chemically synthesized
  source 1..20: mol_type = other DNA
accctaaagactcctccaga

SEQ ID NO: 28729 - DNA, 20 bp, synthetic construct
  misc_feature 1..20: note = chemically synthesized
  source 1..20: mol_type = other DNA
agactcctccagaaagctcc

SEQ ID NO: 28730 - DNA, 20 bp, synthetic construct
  misc_feature 1..20: note = chemically synthesized
  source 1..20: mol_type = other DNA
ctagaactgataaaataatt

SEQ ID NO: 28731 - DNA, 20 bp, synthetic construct
  misc_feature 1..20: note = chemically synthesized
  source 1..20: mol_type = other DNA
actgataaaataattcagca

SEQ ID NO: 28732 - DNA, 20 bp, synthetic construct
  misc_feature 1..20: note = chemically synthesized
  source 1..20: mol_type = other DNA
aaataattcagcaaagtttc

SEQ ID NO: 28733 - DNA, 20 bp, synthetic construct
  misc_feature 1..20: note = chemically synthesized
  source 1..20: mol_type = other DNA
tcagcaaagtttccagatac

SEQ ID NO: 28734 - DNA, 20 bp, synthetic construct
  misc_feature 1..20: note = chemically synthesized
  source 1..20: mol_type = other DNA
caagatgaatgcacacaaat

SEQ ID NO: 28735 - DNA, 20 bp, synthetic construct
  misc_feature 1..20: note = chemically synthesized
  source 1..20: mol_type = other DNA
gtaactcttctatacaccaa

SEQ ID NO: 28736 - DNA, 20 bp, synthetic construct
  misc_feature 1..20: note = chemically synthesized
  source 1..20: mol_type = other DNA
atacaccaacagcaaccaaa

SEQ ID NO: 28737 - DNA, 20 bp, synthetic construct
  misc_feature 1..20: note = chemically synthesized
  source 1..20: mol_type = other DNA
acaccaacagcaaccaaatg

SEQ ID NO: 28738 - DNA, 20 bp, synthetic construct
  misc_feature 1..20: note = chemically synthesized
  source 1..20: mol_type = other DNA
accaaatggagaatcaaatc

SEQ ID NO: 28739 - DNA, 20 bp, synthetic construct
  misc_feature 1..20: note = chemically synthesized
  source 1..20: mol_type = other DNA
gaactcaaccccttgtacaa

SEQ ID NO: 28740 - DNA, 20 bp, synthetic construct
  misc_feature 1..20: note = chemically synthesized
  source 1..20: mol_type = other DNA
ttgtacaatagatgcaaaaa

SEQ ID NO: 28741 - DNA, 20 bp, synthetic construct
  misc_feature 1..20: note = chemically synthesized
  source 1..20: mol_type = other DNA
gccatataaaacgtactctc

SEQ ID NO: 28742 - DNA, 20 bp, synthetic construct
  misc_feature 1..20: note = chemically synthesized
  source 1..20: mol_type = other DNA
tataaaacgtactctcaaga

SEQ ID NO: 28743 - DNA, 20 bp, synthetic construct
  misc_feature 1..20: note = chemically synthesized
  source 1..20: mol_type = other DNA
cgtactctcaagatggatta

SEQ ID NO: 28744 - DNA, 20 bp, synthetic construct
  misc_feature 1..20: note = chemically synthesized
  source 1..20: mol_type = other DNA
taaaactataaaactactaa

SEQ ID NO: 28745 - DNA, 20 bp, synthetic construct
  misc_feature 1..20: note = chemically synthesized
  source 1..20: mol_type = other DNA
aaactactaaaagaaaacat

SEQ ID NO: 28746 - DNA, 20 bp, synthetic construct
  misc_feature 1..20: note = chemically synthesized
  source 1..20: mol_type = other DNA
aactactaaaagaaaacata

SEQ ID NO: 28747 - DNA, 20 bp, synthetic construct
  misc_feature 1..20: note = chemically synthesized
  source 1..20: mol_type = other DNA
actactaaaagaaaacataa

SEQ ID NO: 28748 - DNA, 20 bp, synthetic construct
  misc_feature 1..20: note = chemically synthesized
  source 1..20: mol_type = other DNA
tactaaaagaaaacataagg

SEQ ID NO: 28749 - DNA, 20 bp, synthetic construct
  misc_feature 1..20: note = chemically synthesized
  source 1..20: mol_type = other DNA
aaacataagggagacacttc

SEQ ID NO: 28750 - DNA, 20 bp, synthetic construct
  misc_feature 1..20: note = chemically synthesized
  source 1..20: mol_type = other DNA
aagggagacacttcaagaca

SEQ ID NO: 28751 - DNA, 20 bp, synthetic construct
  misc_feature 1..20: note = chemically synthesized
  source 1..20: mol_type = other DNA
gacacttcaagacatggctt

SEQ ID NO: 28752 - DNA, 20 bp, synthetic construct
  misc_feature 1..20: note = chemically synthesized
  source 1..20: mol_type = other DNA
acacttcaagacatggcttt

SEQ ID NO: 28753 - DNA, 20 bp, synthetic construct
  misc_feature 1..20: note = chemically synthesized
  source 1..20: mol_type = other DNA
tcaagacatggctttgggca

SEQ ID NO: 28754 - DNA, 20 bp, synthetic construct
  misc_feature 1..20: note = chemically synthesized
  source 1..20: mol_type = other DNA
ggctttgggcaaagatttta

SEQ ID NO: 28755 - DNA, 20 bp, synthetic construct
  misc_feature 1..20: note = chemically synthesized
  source 1..20: mol_type = other DNA
tgggcaaagattttatggcc

SEQ ID NO: 28756 - DNA, 20 bp, synthetic construct
  misc_feature 1..20: note = chemically synthesized
  source 1..20: mol_type = other DNA
ttttatggccaagacctcaa

SEQ ID NO: 28757 - DNA, 20 bp, synthetic construct
  misc_feature 1..20: note = chemically synthesized
  source 1..20: mol_type = other DNA
tggccaagacctcaaaagca

SEQ ID NO: 28758 - DNA, 20 bp, synthetic construct
  misc_feature 1..20: note = chemically synthesized
  source 1..20: mol_type = other DNA
ggccaagacctcaaaagcac

SEQ ID NO: 28759 - DNA, 20 bp, synthetic construct
  misc_feature 1..20: note = chemically synthesized
  source 1..20: mol_type = other DNA
ctcaaaagcacaggcaacaa

SEQ ID NO: 28760 - DNA, 20 bp, synthetic construct
  misc_feature 1..20: note = chemically synthesized
  source 1..20: mol_type = other DNA
acaggcaacaaaagcaaaaa

SEQ ID NO: 28761 - DNA, 20 bp, synthetic construct
  misc_feature 1..20: note = chemically synthesized
  source 1..20: mol_type = other DNA
caaaagcaaaaatagacaaa

SEQ ID NO: 28762 - DNA, 20 bp, synthetic construct
  misc_feature 1..20: note = chemically synthesized
  source 1..20: mol_type = other DNA
aaaagcaaaaatagacaaat

SEQ ID NO: 28763 - DNA, 20 bp, synthetic construct
  misc_feature 1..20: note = chemically synthesized
  source 1..20: mol_type = other DNA
tagacaaatgggactatatt

SEQ ID NO: 28764 - DNA, 20 bp, synthetic construct
  misc_feature 1..20: note = chemically synthesized
  source 1..20: mol_type = other DNA
taagctaaaatacatctgca

SEQ ID NO: 28765 - DNA, 20 bp, synthetic construct
  misc_feature 1..20: note = chemically synthesized
  source 1..20: mol_type = other DNA
taaaatacatctgcacagta

SEQ ID NO: 28766 - DNA, 20 bp, synthetic construct
  misc_feature 1..20: note = chemically synthesized
  source 1..20: mol_type = other DNA
aaaatacatctgcacagtaa

SEQ ID NO: 28767 - DNA, 20 bp, synthetic construct
  misc_feature 1..20: note = chemically synthesized
  source 1..20: mol_type = other DNA
agtaaaggaaacaatcaaca

SEQ ID NO: 28768 - DNA, 20 bp, synthetic construct
  misc_feature 1..20: note = chemically synthesized
  source 1..20: mol_type = other DNA
aggaaacaatcaacacagtg

SEQ ID NO: 28769 - DNA, 20 bp, synthetic construct
  misc_feature 1..20: note = chemically synthesized
  source 1..20: mol_type = other DNA
gaaacaatcaacacagtgaa

SEQ ID NO: 28770 - DNA, 20 bp, synthetic construct
  misc_feature 1..20: note = chemically synthesized
  source 1..20: mol_type = other DNA
aatcaacacagtgaagagac

SEQ ID NO: 28771 - DNA, 20 bp, synthetic construct
  misc_feature 1..20: note = chemically synthesized
  source 1..20: mol_type = other DNA
agagacaagctgttgaatgc

SEQ ID NO: 28772 - DNA, 20 bp, synthetic construct
  misc_feature 1..20: note = chemically synthesized
  source 1..20: mol_type = other DNA
aatatttgcatacatttgac

SEQ ID NO: 28773 - DNA, 20 bp, synthetic construct
  misc_feature 1..20: note = chemically synthesized
  source 1..20: mol_type = other DNA
atatttgcatacatttgaca

SEQ ID NO: 28774 - DNA, 20 bp, synthetic construct
  misc_feature 1..20: note = chemically synthesized
  source 1..20: mol_type = other DNA
tttgacaaggaattaatctc

SEQ ID NO: 28775 - DNA, 20 bp, synthetic construct
  misc_feature 1..20: note = chemically synthesized
  source 1..20: mol_type = other DNA
aattaatctccagaatatat

SEQ ID NO: 28776 - DNA, 20 bp, synthetic construct
  misc_feature 1..20: note = chemically synthesized
  source 1..20: mol_type = other DNA
aagaaactcaaacaactcaa

SEQ ID NO: 28777 - DNA, 20 bp, synthetic construct
  misc_feature 1..20: note = chemically synthesized
  source 1..20: mol_type = other DNA
aaactcaaacaactcaacag

SEQ ID NO: 28778 - DNA, 20 bp, synthetic construct
  misc_feature 1..20: note = chemically synthesized
  source 1..20: mol_type = other DNA
aaataatctcattaaaaaat

SEQ ID NO: 28779 - DNA, 20 bp, synthetic construct
  misc_feature 1..20: note = chemically synthesized
  source 1..20: mol_type = other DNA
atctcattaaaaaattggca

SEQ ID NO: 28780 - DNA, 20 bp, synthetic construct
  misc_feature 1..20: note = chemically synthesized
  source 1..20: mol_type = other DNA
tctcattaaaaaattggcaa

SEQ ID NO: 28781 - DNA, 20 bp, synthetic construct
  misc_feature 1..20: note = chemically synthesized
  source 1..20: mol_type = other DNA
tggcaaaggatatttttcaa

SEQ ID NO: 28782 - DNA, 20 bp, synthetic construct
  misc_feature 1..20: note = chemically synthesized
  source 1..20: mol_type = other DNA
caaaggatatttttcaaaag

SEQ ID NO: 28783 - DNA, 20 bp, synthetic construct
  misc_feature 1..20: note = chemically synthesized
  source 1..20: mol_type = other DNA
gaagacatacaaatgcacaa

SEQ ID NO: 28784 - DNA, 20 bp, synthetic construct
  misc_feature 1..20: note = chemically synthesized
  source 1..20: mol_type = other DNA
aagacatacaaatgcacaat

SEQ ID NO: 28785 - DNA, 20 bp, synthetic construct
  misc_feature 1..20: note = chemically synthesized
  source 1..20: mol_type = other DNA
atacaaatgcacaatgggta

SEQ ID NO: 28786 - DNA, 20 bp, synthetic construct
  misc_feature 1..20: note = chemically synthesized
  source 1..20: mol_type = other DNA
tacaaatgcacaatgggtat

SEQ ID NO: 28787 - DNA, 20 bp, synthetic construct
  misc_feature 1..20: note = chemically synthesized
  source 1..20: mol_type = other DNA
acaaatgcacaatgggtatg

SEQ ID NO: 28788 - DNA, 20 bp, synthetic construct
  misc_feature 1..20: note = chemically synthesized
  source 1..20: mol_type = other DNA
tgctcaacattactaatcat

SEQ ID NO: 28789 - DNA, 20 bp, synthetic construct
  misc_feature 1..20: note = chemically synthesized
  source 1..20: mol_type = other DNA
ctcaacattactaatcatca

SEQ ID NO: 28790 - DNA, 20 bp, synthetic construct
  misc_feature 1..20: note = chemically synthesized
  source 1..20: mol_type = other DNA
atgcaaatcaaaaccacaat

SEQ ID NO: 28791 - DNA, 20 bp, synthetic construct
  misc_feature 1..20: note = chemically synthesized
  source 1..20: mol_type = other DNA
aatgagatatcatcttatgc

SEQ ID NO: 28792 - DNA, 20 bp, synthetic construct
  misc_feature 1..20: note = chemically synthesized
  source 1..20: mol_type = other DNA
agatatcatcttatgccagt

SEQ ID NO: 28793 - DNA, 20 bp, synthetic construct
  misc_feature 1..20: note = chemically synthesized
  source 1..20: mol_type = other DNA
aataaataaataacacatgc

SEQ ID NO: 28794 - DNA, 20 bp, synthetic construct
  misc_feature 1..20: note = chemically synthesized
  source 1..20: mol_type = other DNA
aataaataacacatgctggc

SEQ ID NO: 28795 - DNA, 20 bp, synthetic construct
  misc_feature 1..20: note = chemically synthesized
  source 1..20: mol_type = other DNA
ataaataacacatgctggca

SEQ ID NO: 28796 - DNA, 20 bp, synthetic construct
  misc_feature 1..20: note = chemically synthesized
  source 1..20: mol_type = other DNA
cacatgctggcaaggatgtg

SEQ ID NO: 28797 - DNA, 20 bp, synthetic construct
  misc_feature 1..20: note = chemically synthesized
  source 1..20: mol_type = other DNA
acatgctggcaaggatgtga

SEQ ID NO: 28798 - DNA, 20 bp, synthetic construct
  misc_feature 1..20: note = chemically synthesized
  source 1..20: mol_type = other DNA
ctggcaaggatgtgaaggaa

SEQ ID NO: 28799 - DNA, 20 bp, synthetic construct
  misc_feature 1..20: note = chemically synthesized
  source 1..20: mol_type = other DNA
tggcaaggatgtgaaggaaa

SEQ ID NO: 28800 - DNA, 20 bp, synthetic construct
  misc_feature 1..20: note = chemically synthesized
  source 1..20: mol_type = other DNA
tgtgaaggaaaaggcactcg

SEQ ID NO: 28801 - DNA, 20 bp, synthetic construct
  misc_feature 1..20: note = chemically synthesized
  source 1..20: mol_type = other DNA
gtgaaggaaaaggcactcgt

SEQ ID NO: 28802 - DNA, 20 bp, synthetic construct
  misc_feature 1..20: note = chemically synthesized
  source 1..20: mol_type = other DNA
aaggcactcgtaggcactat

SEQ ID NO: 28803 - DNA, 20 bp, synthetic construct
  misc_feature 1..20: note = chemically synthesized
  source 1..20: mol_type = other DNA
cactcgtaggcactattggt

SEQ ID NO: 28804 - DNA, 20 bp, synthetic construct
  misc_feature 1..20: note = chemically synthesized
  source 1..20: mol_type = other DNA
ctattggtaagcatgcaaat

SEQ ID NO: 28805 - DNA, 20 bp, synthetic construct
  misc_feature 1..20: note = chemically synthesized
  source 1..20: mol_type = other DNA
ggtaagcatgcaaattagta

SEQ ID NO: 28806 - DNA, 20 bp, synthetic construct
  misc_feature 1..20: note = chemically synthesized
  source 1..20: mol_type = other DNA
gcaaattagtatagccacta

SEQ ID NO: 28807 - DNA, 20 bp, synthetic construct
  misc_feature 1..20: note = chemically synthesized
  source 1..20: mol_type = other DNA
ccactatggaaaacaatatg

SEQ ID NO: 28808 - DNA, 20 bp, synthetic construct
  misc_feature 1..20: note = chemically synthesized
  source 1..20: mol_type = other DNA
caatatgtagatttaccaaa

SEQ ID NO: 28809 - DNA, 20 bp, synthetic construct
  misc_feature 1..20: note = chemically synthesized
  source 1..20: mol_type = other DNA
gctaaaaattgaactatcat

SEQ ID NO: 28810 - DNA, 20 bp, synthetic construct
  misc_feature 1..20: note = chemically synthesized
  source 1..20: mol_type = other DNA
aattgaactatcataagatc

SEQ ID NO: 28811 - DNA, 20 bp, synthetic construct
  misc_feature 1..20: note = chemically synthesized
  source 1..20: mol_type = other DNA
agatccagcaatcttattac

SEQ ID NO: 28812 - DNA, 20 bp, synthetic construct
  misc_feature 1..20: note = chemically synthesized
  source 1..20: mol_type = other DNA
gatccagcaatcttattact

SEQ ID NO: 28813 - DNA, 20 bp, synthetic construct
  misc_feature 1..20: note = chemically synthesized
  source 1..20: mol_type = other DNA
tattactgggtatttatcca

SEQ ID NO: 28814 - DNA, 20 bp, synthetic construct
  misc_feature 1..20: note = chemically synthesized
  source 1..20: mol_type = other DNA
attactgggtatttatccaa

SEQ ID NO: 28815 - DNA, 20 bp, synthetic construct
  misc_feature 1..20: note = chemically synthesized
  source 1..20: mol_type = other DNA
tgggtatttatccaaaggaa

SEQ ID NO: 28816 - DNA, 20 bp, synthetic construct
  misc_feature 1..20: note = chemically synthesized
  source 1..20: mol_type = other DNA
ttatccaaaggaaaagaatt

SEQ ID NO: 28817 - DNA, 20 bp, synthetic construct
  misc_feature 1..20: note = chemically synthesized
  source 1..20: mol_type = other DNA
aaagaattcagaataataaa

SEQ ID NO: 28818 - DNA, 20 bp, synthetic construct
  misc_feature 1..20: note = chemically synthesized
  source 1..20: mol_type = other DNA
tcagaataataaacagatac

SEQ ID NO: 28819 - DNA, 20 bp, synthetic construct
  misc_feature 1..20: note = chemically synthesized
  source 1..20: mol_type = other DNA
tggtaccacactgtttattg

SEQ ID NO: 28820 - DNA, 20 bp, synthetic construct
  misc_feature 1..20: note = chemically synthesized
  source 1..20: mol_type = other DNA
tattgcagcacgattcacat

SEQ ID NO: 28821 - DNA, 20 bp, synthetic construct
  misc_feature 1..20: note = chemically synthesized
  source 1..20: mol_type = other DNA
cagcacgattcacattagca

SEQ ID NO: 28822 - DNA, 20 bp, synthetic construct
  misc_feature 1..20: note = chemically synthesized
  source 1..20: mol_type = other DNA
gattcacattagcaaagata

SEQ ID NO: 28823 - DNA, 20 bp, synthetic construct
  misc_feature 1..20: note = chemically synthesized
  source 1..20: mol_type = other DNA
caaagatatggaatcaacct

SEQ ID NO: 28824 - DNA, 20 bp, synthetic construct
  misc_feature 1..20: note = chemically synthesized
  source 1..20: mol_type = other DNA
tcaacctaagtgtccatcaa

SEQ ID NO: 28825 - DNA, 20 bp, synthetic construct
  misc_feature 1..20: note = chemically synthesized
  source 1..20: mol_type = other DNA
tgtccatcaatggatgaatg

SEQ ID NO: 28826 - DNA, 20 bp, synthetic construct
  misc_feature 1..20: note = chemically synthesized
  source 1..20: mol_type = other DNA
atggatgaatgaagaaaatg

SEQ ID NO: 28827 - DNA, 20 bp, synthetic construct
  misc_feature 1..20: note = chemically synthesized
  source 1..20: mol_type = other DNA
atataaaatcatttcatttg

SEQ ID NO: 28828 - DNA, 20 bp, synthetic construct
  misc_feature 1..20: note = chemically synthesized
  source 1..20: mol_type = other DNA
tcatttcatttgcagcaaca

SEQ ID NO: 28829 - DNA, 20 bp, synthetic construct
  misc_feature 1..20: note = chemically synthesized
  source 1..20: mol_type = other DNA
tgcagcaacatggatgaaac

SEQ ID NO: 28830 - DNA, 20 bp, synthetic construct
  misc_feature 1..20: note = chemically synthesized
  source 1..20: mol_type = other DNA
agcaacatggatgaaactgg

SEQ ID NO: 28831 - DNA, 20 bp, synthetic construct
  misc_feature 1..20: note = chemically synthesized
  source 1..20: mol_type = other DNA
gtcattatgttaaacgaaat

SEQ ID NO: 28832 - DNA, 20 bp, synthetic construct
  misc_feature 1..20: note = chemically synthesized
  source 1..20: mol_type = other DNA
ttatgttaaacgaaataagc

SEQ ID NO: 28833 - DNA, 20 bp, synthetic construct
  misc_feature 1..20: note = chemically synthesized
  source 1..20: mol_type = other DNA
tatgttaaacgaaataagcc

SEQ ID NO: 28834 - DNA, 20 bp, synthetic construct
  misc_feature 1..20: note = chemically synthesized
  source 1..20: mol_type = other DNA
taaacgaaataagccaggca

SEQ ID NO: 28835 - DNA, 20 bp, synthetic construct
  misc_feature 1..20: note = chemically synthesized
  source 1..20: mol_type = other DNA
cgaaataagccaggcataga

SEQ ID NO: 28836 - DNA, 20 bp, synthetic construct
  misc_feature 1..20: note = chemically synthesized
  source 1..20: mol_type = other DNA
tgcatgttctcactgatatg

SEQ ID NO: 28837 - DNA, 20 bp, synthetic construct
  misc_feature 1..20: note = chemically synthesized
  source 1..20: mol_type = other DNA
gcatgttctcactgatatgt

SEQ ID NO: 28838 - DNA, 20 bp, synthetic construct
  misc_feature 1..20: note = chemically synthesized
  source 1..20: mol_type = other DNA
atgttctcactgatatgtgg

SEQ ID NO: 28839 - DNA, 20 bp, synthetic construct
  misc_feature 1..20: note = chemically synthesized
  source 1..20: mol_type = other DNA
ctgatatgtgggagctaaaa

SEQ ID NO: 28840 - DNA, 20 bp, synthetic construct
  misc_feature 1..20: note = chemically synthesized
  source 1..20: mol_type = other DNA
ctaaaaaagttaatatcatg

SEQ ID NO: 28841 - DNA, 20 bp, synthetic construct
  misc_feature 1..20: note = chemically synthesized
  source 1..20: mol_type = other DNA
taaaaaagttaatatcatgt

SEQ ID NO: 28842 - DNA, 20 bp, synthetic construct
  misc_feature 1..20: note = chemically synthesized
  source 1..20: mol_type = other DNA
aaaagttaatatcatgtagg

SEQ ID NO: 28843 - DNA, 20 bp, synthetic construct
  misc_feature 1..20: note = chemically synthesized
  source 1..20: mol_type = other DNA
aagttaatatcatgtaggta

SEQ ID NO: 28844 - DNA, 20 bp, synthetic construct
  misc_feature 1..20: note = chemically synthesized
  source 1..20: mol_type = other DNA
gttaatatcatgtaggtaga

SEQ ID NO: 28845 - DNA, 20 bp, synthetic construct
  misc_feature 1..20: note = chemically synthesized
  source 1..20: mol_type = other DNA
aatatcatgtaggtagagag

SEQ ID NO: 28846 - DNA, 20 bp, synthetic construct
  misc_feature 1..20: note = chemically synthesized
  source 1..20: mol_type = other DNA
gtaggtagagagtagaatga

SEQ ID NO: 28847 - DNA, 20 bp, synthetic construct
  misc_feature 1..20: note = chemically synthesized
  source 1..20: mol_type = other DNA
gagagtagaatgacagaaac

SEQ ID NO: 28848 - DNA, 20 bp, synthetic construct
  misc_feature 1..20: note = chemically synthesized
  source 1..20: mol_type = other DNA
gagtagaatgacagaaacca

SEQ ID NO: 28849 - DNA, 20 bp, synthetic construct
  misc_feature 1..20: note = chemically synthesized
  source 1..20: mol_type = other DNA
agtagaatgacagaaaccag

SEQ ID NO: 28850 - DNA, 20 bp, synthetic construct
  misc_feature 1..20: note = chemically synthesized
  source 1..20: mol_type = other DNA
agaatgacagaaaccagagg

SEQ ID NO: 28851 - DNA, 20 bp, synthetic construct
  misc_feature 1..20: note = chemically synthesized
  source 1..20: mol_type = other DNA
aatgacagaaaccagaggta

SEQ ID NO: 28852 - DNA, 20 bp, synthetic construct
  misc_feature 1..20: note = chemically synthesized
  source 1..20: mol_type = other DNA
acagaaaccagaggtagaga

SEQ ID NO: 28853 - DNA, 20 bp, synthetic construct
  misc_feature 1..20: note = chemically synthesized
  source 1..20: mol_type = other DNA
cagaaaccagaggtagagaa

SEQ ID NO: 28854 - DNA, 20 bp, synthetic construct
  misc_feature 1..20: note = chemically synthesized
  source 1..20: mol_type = other DNA
agagaaaggtgtgtacgtta

SEQ ID NO: 28855 - DNA, 20 bp, synthetic construct
  misc_feature 1..20: note = chemically synthesized
  source 1..20: mol_type = other DNA
gagaaaggtgtgtacgttat

SEQ ID NO: 28856 - DNA, 20 bp, synthetic construct
  misc_feature 1..20: note = chemically synthesized
  source 1..20: mol_type = other DNA
gaaaggtgtgtacgttatgg

SEQ ID NO: 28857 - DNA, 20 bp, synthetic construct
  misc_feature 1..20: note = chemically synthesized
  source 1..20: mol_type = other DNA
aaaggtgtgtacgttatggg

SEQ ID NO: 28858 - DNA, 20 bp, synthetic construct
  misc_feature 1..20: note = chemically synthesized
  source 1..20: mol_type = other DNA
ggtgtgtacgttatgggagg

SEQ ID NO: 28859 - DNA, 20 bp, synthetic construct
  misc_feature 1..20: note = chemically synthesized
  source 1..20: mol_type = other DNA
gtgtgtacgttatgggagga

SEQ ID NO: 28860 - DNA, 20 bp, synthetic construct
  misc_feature 1..20: note = chemically synthesized
  source 1..20: mol_type = other DNA
tgtgtacgttatgggaggaa

SEQ ID NO: 28861 - DNA, 20 bp, synthetic construct
  misc_feature 1..20: note = chemically synthesized
  source 1..20: mol_type = other DNA
tgtacgttatgggaggaagg

SEQ ID NO: 28862 - DNA, 20 bp, synthetic construct
  misc_feature 1..20: note = chemically synthesized
  source 1..20: mol_type = other DNA
ttatgggaggaagggagacg

SEQ ID NO: 28863 - DNA, 20 bp, synthetic construct
  misc_feature 1..20: note = chemically synthesized
  source 1..20: mol_type = other DNA
atgggaggaagggagacgaa

SEQ ID NO: 28864 - DNA, 20 bp, synthetic construct
  misc_feature 1..20: note = chemically synthesized
  source 1..20: mol_type = other DNA
ggaggaagggagacgaagag

SEQ ID NO: 28865 - DNA, 20 bp, synthetic construct
  misc_feature 1..20: note = chemically synthesized
  source 1..20: mol_type = other DNA
gaagggagacgaagagaagt

SEQ ID NO: 28866 - DNA, 20 bp, synthetic construct
  misc_feature 1..20: note = chemically synthesized
  source 1..20: mol_type = other DNA
gacgaagagaagttggttaa

SEQ ID NO: 28867 - DNA, 20 bp, synthetic construct
  misc_feature 1..20: note = chemically synthesized
  source 1..20: mol_type = other DNA
gagaagttggttaatggaaa

SEQ ID NO: 28868 - DNA, 20 bp, synthetic construct
  misc_feature 1..20: note = chemically synthesized
  source 1..20: mol_type = other DNA
agaagttggttaatggaaac

SEQ ID NO: 28869 - DNA, 20 bp, synthetic construct
  misc_feature 1..20: note = chemically synthesized
  source 1..20: mol_type = other DNA
agttggttaatggaaacagg

SEQ ID NO: 28870 - DNA, 20 bp, synthetic construct
  misc_feature 1..20: note = chemically synthesized
  source 1..20: mol_type = other DNA
ggttaatggaaacaggcagt

SEQ ID NO: 28871 - DNA, 20 bp, synthetic construct
  misc_feature 1..20: note = chemically synthesized
  source 1..20: mol_type = other DNA
aatggaaacaggcagttaga

SEQ ID NO: 28872 - DNA, 20 bp, synthetic construct
  misc_feature 1..20: note = chemically synthesized
  source 1..20: mol_type = other DNA
ggaaacaggcagttagatag

SEQ ID NO: 28873 - DNA, 20 bp, synthetic construct
  misc_feature 1..20: note = chemically synthesized
  source 1..20: mol_type = other DNA
gaaacaggcagttagataga

SEQ ID NO: 28874 - DNA, 20 bp, synthetic construct
  misc_feature 1..20: note = chemically synthesized
  source 1..20: mol_type = other DNA
gaatatgttctgatgttcaa

SEQ ID NO: 28875 - DNA, 20 bp, synthetic construct
  misc_feature 1..20: note = chemically synthesized
  source 1..20: mol_type = other DNA
tgttctgatgttcaatagca

SEQ ID NO: 28876 - DNA, 20 bp, synthetic construct
  misc_feature 1..20: note = chemically synthesized
  source 1..20: mol_type = other DNA
tctgatgttcaatagcaaag

SEQ ID NO: 28877 - DNA, 20 bp, synthetic construct
  misc_feature 1..20: note = chemically synthesized
  source 1..20: mol_type = other DNA
ctgatgttcaatagcaaagt

SEQ ID NO: 28878 - DNA, 20 bp, synthetic construct
  misc_feature 1..20: note = chemically synthesized
  source 1..20: mol_type = other DNA
tgatgttcaatagcaaagta

SEQ ID NO: 28879 - DNA, 20 bp, synthetic construct
  misc_feature 1..20: note = chemically synthesized
  source 1..20: mol_type = other DNA
atagcaaagtagggtgatta

SEQ ID NO: 28880 - DNA, 20 bp, synthetic construct
  misc_feature 1..20: note = chemically synthesized
  source 1..20: mol_type = other DNA
atatattgtatatttcaaaa

SEQ ID NO: 28881 - DNA, 20 bp, synthetic construct
  misc_feature 1..20: note = chemically synthesized
  source 1..20: mol_type = other DNA
tattgtatatttcaaaatag

SEQ ID NO: 28882 - DNA, 20 bp, synthetic construct
  misc_feature 1..20: note = chemically synthesized
  source 1..20: mol_type = other DNA
tgtatatttcaaaatagtag

SEQ ID NO: 28883 - DNA, 20 bp, synthetic construct
  misc_feature 1..20: note = chemically synthesized
  source 1..20: mol_type = other DNA
tatttcaaaatagtagaaga

SEQ ID NO: 28884 - DNA, 20 bp, synthetic construct
  misc_feature 1..20: note = chemically synthesized
  source 1..20: mol_type = other DNA
atttcaaaatagtagaagaa

SEQ ID NO: 28885 - DNA, 20 bp, synthetic construct
  misc_feature 1..20: note = chemically synthesized
  source 1..20: mol_type = other DNA
cttgaaatgttcctaacaca

SEQ ID NO: 28886 - DNA, 20 bp, synthetic construct
  misc_feature 1..20: note = chemically synthesized
  source 1..20: mol_type = other DNA
catagaaacgataaatactt

SEQ ID NO: 28887 - DNA, 20 bp, synthetic construct
  misc_feature 1..20: note = chemically synthesized
  source 1..20: mol_type = other DNA
atagaaacgataaatacttg

SEQ ID NO: 28888 - DNA, 20 bp, synthetic construct
  misc_feature 1..20: note = chemically synthesized
  source 1..20: mol_type = other DNA
aacacgtcatatatcaataa

SEQ ID NO: 28889 - DNA, 20 bp, synthetic construct
  misc_feature 1..20: note = chemically synthesized
  source 1..20: mol_type = other DNA
cgtcatatatcaataaaaga

SEQ ID NO: 28890 - DNA, 20 bp, synthetic construct
  misc_feature 1..20: note = chemically synthesized
  source 1..20: mol_type = other DNA
aaagaaagtcgatctcatat

SEQ ID NO: 28891 - DNA, 20 bp, synthetic construct
  misc_feature 1..20: note = chemically synthesized
  source 1..20: mol_type = other DNA
aagtcgatctcatattggtt

SEQ ID NO: 28892 - DNA, 20 bp, synthetic construct
  misc_feature 1..20: note = chemically synthesized
  source 1..20: mol_type = other DNA
agtcgatctcatattggttg

SEQ ID NO: 28893 - DNA, 20 bp, synthetic construct
  misc_feature 1..20: note = chemically synthesized
  source 1..20: mol_type = other DNA
attggttgaggcctgattgt

SEQ ID NO: 28894 - DNA, 20 bp, synthetic construct
  misc_feature 1..20: note = chemically synthesized
  source 1..20: mol_type = other DNA
taagtaaatctttgtccctc

SEQ ID NO: 28895 - DNA, 20 bp, synthetic construct
  misc_feature 1..20: note = chemically synthesized
  source 1..20: mol_type = other DNA
tccctgtactgtcttgctgt

SEQ ID NO: 28896 - DNA, 20 bp, synthetic construct
  misc_feature 1..20: note = chemically synthesized
  source 1..20: mol_type = other DNA
ccctgtactgtcttgctgtg

SEQ ID NO: 28897 - DNA, 20 bp, synthetic construct
  misc_feature 1..20: note = chemically synthesized
  source 1..20: mol_type = other DNA
ctgtactgtcttgctgtgag

SEQ ID NO: 28898 - DNA, 20 bp, synthetic construct
  misc_feature 1..20: note = chemically synthesized
  source 1..20: mol_type = other DNA
cttatattccaacaccattt

SEQ ID NO: 28899 - DNA, 20 bp, synthetic construct
  misc_feature 1..20: note = chemically synthesized
  source 1..20: mol_type = other DNA
tcctccccatatttttacct

SEQ ID NO: 28900 - DNA, 20 bp, synthetic construct
  misc_feature 1..20: note = chemically synthesized
  source 1..20: mol_type = other DNA
ctcggtttttactgtttata

SEQ ID NO: 28901 - DNA, 20 bp, synthetic construct
  misc_feature 1..20: note = chemically synthesized
  source 1..20: mol_type = other DNA
atatagcacactttgtgcta

SEQ ID NO: 28902 - DNA, 20 bp, synthetic construct
  misc_feature 1..20: note = chemically synthesized
  source 1..20: mol_type = other DNA
ctttgtgctatagtttacct

SEQ ID NO: 28903 - DNA, 20 bp, synthetic construct
  misc_feature 1..20: note = chemically synthesized
  source 1..20: mol_type = other DNA
ctcagtttttactatttata

SEQ ID NO: 28904 - DNA, 20 bp, synthetic construct
  misc_feature 1..20: note = chemically synthesized
  source 1..20: mol_type = other DNA
ccccaaacttctctcttaac

SEQ ID NO: 28905 - DNA, 20 bp, synthetic construct
  misc_feature 1..20: note = chemically synthesized
  source 1..20: mol_type = other DNA
aaacttctctcttaacaagc

SEQ ID NO: 28906 - DNA, 20 bp, synthetic construct
  misc_feature 1..20: note = chemically synthesized
  source 1..20: mol_type = other DNA
ctcttaacaagctagaatat

SEQ ID NO: 28907 - DNA, 20 bp, synthetic construct
  misc_feature 1..20: note = chemically synthesized
  source 1..20: mol_type = other DNA
gctagaatataagtgaatgc

SEQ ID NO: 28908 - DNA, 20 bp, synthetic construct
  misc_feature 1..20: note = chemically synthesized
  source 1..20: mol_type = other DNA
tagaatataagtgaatgcaa

SEQ ID NO: 28909 - DNA, 20 bp, synthetic construct
  misc_feature 1..20: note = chemically synthesized
  source 1..20: mol_type = other DNA
tataagtgaatgcaagagca

SEQ ID NO: 28910 - DNA, 20 bp, synthetic construct
  misc_feature 1..20: note = chemically synthesized
  source 1..20: mol_type = other DNA
taagtgaatgcaagagcata

SEQ ID NO: 28911 - DNA, 20 bp, synthetic construct
  misc_feature 1..20: note = chemically synthesized
  source 1..20: mol_type = other DNA
tgaatgcaagagcatagaga

SEQ ID NO: 28912 - DNA, 20 bp, synthetic construct
  misc_feature 1..20: note = chemically synthesized
  source 1..20: mol_type = other DNA
gaatgcaagagcatagagac

SEQ ID NO: 28913 - DNA, 20 bp, synthetic construct
  misc_feature 1..20: note = chemically synthesized
  source 1..20: mol_type = other DNA
aatgcaagagcatagagaca

SEQ ID NO: 28914 - DNA, 20 bp, synthetic construct
  misc_feature 1..20: note = chemically synthesized
  source 1..20: mol_type = other DNA
tcattcctattttcatattt

SEQ ID NO: 28915 - DNA, 20 bp, synthetic construct
  misc_feature 1..20: note = chemically synthesized
  source 1..20: mol_type = other DNA
cattcctattttcatatttg

SEQ ID NO: 28916 - DNA, 20 bp, synthetic construct
  misc_feature 1..20: note = chemically synthesized
  source 1..20: mol_type = other DNA
tcatatttgaggtataaacc

SEQ ID NO: 28917 - DNA, 20 bp, synthetic construct
  misc_feature 1..20: note = chemically synthesized
  source 1..20: mol_type = other DNA
catatttgaggtataaacca

SEQ ID NO: 28918 - DNA, 20 bp, synthetic construct
  misc_feature 1..20: note = chemically synthesized
  source 1..20: mol_type = other DNA
tatttgaggtataaaccaag

SEQ ID NO: 28919 - DNA, 20 bp, synthetic construct
  misc_feature 1..20: note = chemically synthesized
  source 1..20: mol_type = other DNA
tttttaaatctgcaaataaa

SEQ ID NO: 28920 - DNA, 20 bp, synthetic construct
  misc_feature 1..20: note = chemically synthesized
  source 1..20: mol_type = other DNA
gttttattctgacattaaaa

SEQ ID NO: 28921 - DNA, 20 bp, synthetic construct
  misc_feature 1..20: note = chemically synthesized
  source 1..20: mol_type = other DNA
aatgaatgatcgttttacca

SEQ ID NO: 28922 - DNA, 20 bp, synthetic construct
  misc_feature 1..20: note = chemically synthesized
  source 1..20: mol_type = other DNA
atgatcgttttaccacagcg

SEQ ID NO: 28923 - DNA, 20 bp, synthetic construct
  misc_feature 1..20: note = chemically synthesized
  source 1..20: mol_type = other DNA
tgatcgttttaccacagcgt

SEQ ID NO: 28924 - DNA, 20 bp, synthetic construct
  misc_feature 1..20: note = chemically synthesized
  source 1..20: mol_type = other DNA
cttaaccttcactttcaaac

SEQ ID NO: 28925 - DNA, 20 bp, synthetic construct
  misc_feature 1..20: note = chemically synthesized
  source 1..20: mol_type = other DNA
tttattgatctctattttcc

SEQ ID NO: 28926 - DNA, 20 bp, synthetic construct
  misc_feature 1..20: note = chemically synthesized
  source 1..20: mol_type = other DNA
tctattttcctggaacaaca

SEQ ID NO: 28927 - DNA, 20 bp, synthetic construct
  misc_feature 1..20: note = chemically synthesized
  source 1..20: mol_type = other DNA
ctattttcctggaacaacat

SEQ ID NO: 28928 - DNA, 20 bp, synthetic construct
  misc_feature 1..20: note = chemically synthesized
  source 1..20: mol_type = other DNA
tattttcctggaacaacatg

SEQ ID NO: 28929 - DNA, 20 bp, synthetic construct
  misc_feature 1..20: note = chemically synthesized
  source 1..20: mol_type = other DNA
attttcctggaacaacatgg

SEQ ID NO: 28930 - DNA, 20 bp, synthetic construct
  misc_feature 1..20: note = chemically synthesized
  source 1..20: mol_type = other DNA
aacaacatgggggctatgtt

SEQ ID NO: 28931 - DNA, 20 bp, synthetic construct
  misc_feature 1..20: note = chemically synthesized
  source 1..20: mol_type = other DNA
atgggggctatgtttagcgt

SEQ ID NO: 28932 - DNA, 20 bp, synthetic construct
  misc_feature 1..20: note = chemically synthesized
  source 1..20: mol_type = other DNA
tgggggctatgtttagcgtg

SEQ ID NO: 28933 - DNA, 20 bp, synthetic construct
  misc_feature 1..20: note = chemically synthesized
  source 1..20: mol_type = other DNA
ctatgtttagcgtgaggaca

SEQ ID NO: 28934 - DNA, 20 bp, synthetic construct
  misc_feature 1..20: note = chemically synthesized
  source 1..20: mol_type = other DNA
gtatcacaactttcacctga

SEQ ID NO: 28935 - DNA, 20 bp, synthetic construct
  misc_feature 1..20: note = chemically synthesized
  source 1..20: mol_type = other DNA
acaactttcacctgaaagaa

SEQ ID NO: 28936 - DNA, 20 bp, synthetic construct
  misc_feature 1..20: note = chemically synthesized
  source 1..20: mol_type = other DNA
tttcacctgaaagaaaagat

SEQ ID NO: 28937 - DNA, 20 bp, synthetic construct
  misc_feature 1..20: note = chemically synthesized
  source 1..20: mol_type = other DNA
aaagaaaagatgagctacca

SEQ ID NO: 28938 - DNA, 20 bp, synthetic construct
  misc_feature 1..20: note = chemically synthesized
  source 1..20: mol_type = other DNA
accatggtacatataacaat

SEQ ID NO: 28939 - DNA, 20 bp, synthetic construct
  misc_feature 1..20: note = chemically synthesized
  source 1..20: mol_type = other DNA
ccatggtacatataacaatg

SEQ ID NO: 28940 - DNA, 20 bp, synthetic construct
  misc_feature 1..20: note = chemically synthesized
  source 1..20: mol_type = other DNA
tggtacatataacaatgagg

SEQ ID NO: 28941 - DNA, 20 bp, synthetic construct
  misc_feature 1..20: note = chemically synthesized
  source 1..20: mol_type = other DNA
aatgaggtggttaaaactct

SEQ ID NO: 28942 - DNA, 20 bp, synthetic construct
  misc_feature 1..20: note = chemically synthesized
  source 1..20: mol_type = other DNA
taaaactctaagtcgtcatc

SEQ ID NO: 28943 - DNA, 20 bp, synthetic construct
  misc_feature 1..20: note = chemically synthesized
  source 1..20: mol_type = other DNA
tactaaaaatcactatttca

SEQ ID NO: 28944 - DNA, 20 bp, synthetic construct
  misc_feature 1..20: note = chemically synthesized
  source 1..20: mol_type = other DNA
taaaaatcactatttcaaag

SEQ ID NO: 28945 - DNA, 20 bp, synthetic construct
  misc_feature 1..20: note = chemically synthesized
  source 1..20: mol_type = other DNA
atcactatttcaaagaagta

SEQ ID NO: 28946 - DNA, 20 bp, synthetic construct
  misc_feature 1..20: note = chemically synthesized
  source 1..20: mol_type = other DNA
tatttcaaagaagtatagaa

SEQ ID NO: 28947 - DNA, 20 bp, synthetic construct
  misc_feature 1..20: note = chemically synthesized
  source 1..20: mol_type = other DNA
aagaagtatagaatagatat

SEQ ID NO: 28948 - DNA, 20 bp, synthetic construct
  misc_feature 1..20: note = chemically synthesized
  source 1..20: mol_type = other DNA
gaatagatatcagccaaaat

SEQ ID NO: 28949 - DNA, 20 bp, synthetic construct
  misc_feature 1..20: note = chemically synthesized
  source 1..20: mol_type = other DNA
aatagatatcagccaaaata

SEQ ID NO: 28950 - DNA, 20 bp, synthetic construct
  misc_feature 1..20: note = chemically synthesized
  source 1..20: mol_type = other DNA
atatacatattatacacata

SEQ ID NO: 28951 - DNA, 20 bp, synthetic construct
  misc_feature 1..20: note = chemically synthesized
  source 1..20: mol_type = other DNA
atacatattatacacatatg

SEQ ID NO: 28952 - DNA, 20 bp, synthetic construct
  misc_feature 1..20: note = chemically synthesized
  source 1..20: mol_type = other DNA
ttgtatatgcttaaaaatta

SEQ ID NO: 28953 - DNA, 20 bp, synthetic construct
  misc_feature 1..20: note = chemically synthesized
  source 1..20: mol_type = other DNA
tgcttaaaaattacagactt

SEQ ID NO: 28954 - DNA, 20 bp, synthetic construct
  misc_feature 1..20: note = chemically synthesized
  source 1..20: mol_type = other DNA
ttaaaaattacagactttgg

SEQ ID NO: 28955 - DNA, 20 bp, synthetic construct
  misc_feature 1..20: note = chemically synthesized
  source 1..20: mol_type = other DNA
tggaagtcatatgactattt

SEQ ID NO: 28956 - DNA, 20 bp, synthetic construct
  misc_feature 1..20: note = chemically synthesized
  source 1..20: mol_type = other DNA
tatgactatttcagtgtgtg

SEQ ID NO: 28957 - DNA, 20 bp, synthetic construct
  misc_feature 1..20: note = chemically synthesized
  source 1..20: mol_type = other DNA
caccctcctgttccaaaaca

SEQ ID NO: 28958 - DNA, 20 bp, synthetic construct
  misc_feature 1..20: note = chemically synthesized
  source 1..20: mol_type = other DNA
cctgttccaaaacacagttg

SEQ ID NO: 28959 - DNA, 20 bp, synthetic construct
  misc_feature 1..20: note = chemically synthesized
  source 1..20: mol_type = other DNA
gttccaaaacacagttgcag

SEQ ID NO: 28960 - DNA, 20 bp, synthetic construct
  misc_feature 1..20: note = chemically synthesized
  source 1..20: mol_type = other DNA
ccaaaacacagttgcagaag

SEQ ID NO: 28961 - DNA, 20 bp, synthetic construct
  misc_feature 1..20: note = chemically synthesized
  source 1..20: mol_type = other DNA
aaaacacagttgcagaagca

SEQ ID NO: 28962 - DNA, 20 bp, synthetic construct
  misc_feature 1..20: note = chemically synthesized
  source 1..20: mol_type = other DNA
aaacacagttgcagaagcag

SEQ ID NO: 28963 - DNA, 20 bp, synthetic construct
  misc_feature 1..20: note = chemically synthesized
  source 1..20: mol_type = other DNA
cacagttgcagaagcagagg

SEQ ID NO: 28964 - DNA, 20 bp, synthetic construct
  misc_feature 1..20: note = chemically synthesized
  source 1..20: mol_type = other DNA
agaggaagtcattatacact

SEQ ID NO: 28965 - DNA, 20 bp, synthetic construct
  misc_feature 1..20: note = chemically synthesized
  source 1..20: mol_type = other DNA
cacttagaacatcattttat

SEQ ID NO: 28966 - DNA, 20 bp, synthetic construct
  misc_feature 1..20: note = chemically synthesized
  source 1..20: mol_type = other DNA
acttagaacatcattttata

SEQ ID NO: 28967 - DNA, 20 bp, synthetic construct
  misc_feature 1..20: note = chemically synthesized
  source 1..20: mol_type = other DNA
tagaacatcattttataagg

SEQ ID NO: 28968 - DNA, 20 bp, synthetic construct
  misc_feature 1..20: note = chemically synthesized
  source 1..20: mol_type = other DNA
aacatcattttataaggcag

SEQ ID NO: 28969 - DNA, 20 bp, synthetic construct
  misc_feature 1..20: note = chemically synthesized
  source 1..20: mol_type = other DNA
acatcattttataaggcagc

SEQ ID NO: 28970 - DNA, 20 bp, synthetic construct
  misc_feature 1..20: note = chemically synthesized
  source 1..20: mol_type = other DNA
attttataaggcagcaggtc

SEQ ID NO: 28971 - DNA, 20 bp, synthetic construct
  misc_feature 1..20: note = chemically synthesized
  source 1..20: mol_type = other DNA
ttataaggcagcaggtctgg

SEQ ID NO: 28972 - DNA, 20 bp, synthetic construct
  misc_feature 1..20: note = chemically synthesized
  source 1..20: mol_type = other DNA
tataaggcagcaggtctggt

SEQ ID NO: 28973 - DNA, 20 bp, synthetic construct
  misc_feature 1..20: note = chemically synthesized
  source 1..20: mol_type = other DNA
aaggcagcaggtctggtagg

SEQ ID NO: 28974 - DNA, 20 bp, synthetic construct
  misc_feature 1..20: note = chemically synthesized
  source 1..20: mol_type = other DNA
aggcagcaggtctggtagga

SEQ ID NO: 28975 - DNA, 20 bp, synthetic construct
  misc_feature 1..20: note = chemically synthesized
  source 1..20: mol_type = other DNA
gcagcaggtctggtaggaag

SEQ ID NO: 28976 - DNA, 20 bp, synthetic construct
  misc_feature 1..20: note = chemically synthesized
  source 1..20: mol_type = other DNA
aggtctggtaggaaggagat

SEQ ID NO: 28977 - DNA, 20 bp, synthetic construct
  misc_feature 1..20: note = chemically synthesized
  source 1..20: mol_type = other DNA
ggtctggtaggaaggagatt

SEQ ID NO: 28978 - DNA, 20 bp, synthetic construct
  misc_feature 1..20: note = chemically synthesized
  source 1..20: mol_type = other DNA
attaggtgctacttgtgaca

SEQ ID NO: 28979 - DNA, 20 bp, synthetic construct
  misc_feature 1..20: note = chemically synthesized
  source 1..20: mol_type = other DNA
ttaggtgctacttgtgacaa

SEQ ID NO: 28980 - DNA, 20 bp, synthetic construct
  misc_feature 1..20: note = chemically synthesized
  source 1..20: mol_type = other DNA
gtgctacttgtgacaaaggt

SEQ ID NO: 28981 - DNA, 20 bp, synthetic construct
  misc_feature 1..20: note = chemically synthesized
  source 1..20: mol_type = other DNA
tcagcaaatatttgtgttcc

SEQ ID NO: 28982 - DNA, 20 bp, synthetic construct
  misc_feature 1..20: note = chemically synthesized
  source 1..20: mol_type = other DNA
ttgtgttcccagcacttttc

SEQ ID NO: 28983 - DNA, 20 bp, synthetic construct
  misc_feature 1..20: note = chemically synthesized
  source 1..20: mol_type = other DNA
ccagcacttttctagatcct

SEQ ID NO: 28984 - DNA, 20 bp, synthetic construct
  misc_feature 1..20: note = chemically synthesized
  source 1..20: mol_type = other DNA
tagatcctcagttaaaatca

SEQ ID NO: 28985 - DNA, 20 bp, synthetic construct
  misc_feature 1..20: note = chemically synthesized
  source 1..20: mol_type = other DNA
atcctcagttaaaatcaaag

SEQ ID NO: 28986 - DNA, 20 bp, synthetic construct
  misc_feature 1..20: note = chemically synthesized
  source 1..20: mol_type = other DNA
agttaaaatcaaagcagctg

SEQ ID NO: 28987 - DNA, 20 bp, synthetic construct
  misc_feature 1..20: note = chemically synthesized
  source 1..20: mol_type = other DNA
aatcaaagcagctgcagtct

SEQ ID NO: 28988 - DNA, 20 bp, synthetic construct
  misc_feature 1..20: note = chemically synthesized
  source 1..20: mol_type = other DNA
caaagcagctgcagtcttgg

SEQ ID NO: 28989 - DNA, 20 bp, synthetic construct
  misc_feature 1..20: note = chemically synthesized
  source 1..20: mol_type = other DNA
agcagctgcagtcttggcag

SEQ ID NO: 28990 - DNA, 20 bp, synthetic construct
  misc_feature 1..20: note = chemically synthesized
  source 1..20: mol_type = other DNA
gcagctgcagtcttggcagt

SEQ ID NO: 28991 - DNA, 20 bp, synthetic construct
  misc_feature 1..20: note = chemically synthesized
  source 1..20: mol_type = other DNA
agctgcagtcttggcagtgg

SEQ ID NO: 28992 - DNA, 20 bp, synthetic construct
  misc_feature 1..20: note = chemically synthesized
  source 1..20: mol_type = other DNA
gctgcagtcttggcagtggg

SEQ ID NO: 28993 - DNA, 20 bp, synthetic construct
  misc_feature 1..20: note = chemically synthesized
  source 1..20: mol_type = other DNA
gtgatactcacactttgaac

SEQ ID NO: 28994 - DNA, 20 bp, synthetic construct
  misc_feature 1..20: note = chemically synthesized
  source 1..20: mol_type = other DNA
accacctgcactacctacaa

SEQ ID NO: 28995 - DNA, 20 bp, synthetic construct
  misc_feature 1..20: note = chemically synthesized
  source 1..20: mol_type = other DNA
acctgcactacctacaatgg

SEQ ID NO: 28996 - DNA, 20 bp, synthetic construct
  misc_feature 1..20: note = chemically synthesized
  source 1..20: mol_type = other DNA
gctccaaatattttatatga

SEQ ID NO: 28997 - DNA, 20 bp, synthetic construct
  misc_feature 1..20: note = chemically synthesized
  source 1..20: mol_type = other DNA
ctccaaatattttatatgaa

SEQ ID NO: 28998 - DNA, 20 bp, synthetic construct
  misc_feature 1..20: note = chemically synthesized
  source 1..20: mol_type = other DNA
tccaaatattttatatgaaa

SEQ ID NO: 28999 - DNA, 20 bp, synthetic construct
  misc_feature 1..20: note = chemically synthesized
  source 1..20: mol_type = other DNA
ccaaatattttatatgaaag

SEQ ID NO: 29000 - DNA, 20 bp, synthetic construct
  misc_feature 1..20: note = chemically synthesized
  source 1..20: mol_type = other DNA
tattttatatgaaaggggcc

SEQ ID NO: 29001 - DNA, 20 bp, synthetic construct
  misc_feature 1..20: note = chemically synthesized
  source 1..20: mol_type = other DNA
atatgaaaggggcctagaca

SEQ ID NO: 29002 - DNA, 20 bp, synthetic construct
  misc_feature 1..20: note = chemically synthesized
  source 1..20: mol_type = other DNA
gacatagcatgctgaatgaa

SEQ ID NO: 29003 - DNA, 20 bp, synthetic construct
  misc_feature 1..20: note = chemically synthesized
  source 1..20: mol_type = other DNA
acatagcatgctgaatgaaa

SEQ ID NO: 29004 - DNA, 20 bp, synthetic construct
  misc_feature 1..20: note = chemically synthesized
  source 1..20: mol_type = other DNA
tagcatgctgaatgaaaagg

SEQ ID NO: 29005 - DNA, 20 bp, synthetic construct
  misc_feature 1..20: note = chemically synthesized
  source 1..20: mol_type = other DNA
atgctgaatgaaaaggaagt

SEQ ID NO: 29006 - DNA, 20 bp, synthetic construct
  misc_feature 1..20: note = chemically synthesized
  source 1..20: mol_type = other DNA
ctgaatgaaaaggaagtgag

SEQ ID NO: 29007 - DNA, 20 bp, synthetic construct
  misc_feature 1..20: note = chemically synthesized
  source 1..20: mol_type = other DNA
tgaaaaggaagtgagtagac

SEQ ID NO: 29008 - DNA, 20 bp, synthetic construct
  misc_feature 1..20: note = chemically synthesized
  source 1..20: mol_type = other DNA
gtagactagtgctttccttg

SEQ ID NO: 29009 - DNA, 20 bp, synthetic construct
  misc_feature 1..20: note = chemically synthesized
  source 1..20: mol_type = other DNA
ttccttgaagctgtgcaacc

SEQ ID NO: 29010 - DNA, 20 bp, synthetic construct
  misc_feature 1..20: note = chemically synthesized
  source 1..20: mol_type = other DNA
tgaagctgtgcaaccaagca

SEQ ID NO: 29011 - DNA, 20 bp, synthetic construct
  misc_feature 1..20: note = chemically synthesized
  source 1..20: mol_type = other DNA
aaccaagcatagtttttaca

SEQ ID NO: 29012 - DNA, 20 bp, synthetic construct
  misc_feature 1..20: note = chemically synthesized
  source 1..20: mol_type = other DNA
catagatcgtgtgtttcaca

SEQ ID NO: 29013 - DNA, 20 bp, synthetic construct
  misc_feature 1..20: note = chemically synthesized
  source 1..20: mol_type = other DNA
tgtttcacatggtgtgataa

SEQ ID NO: 29014 - DNA, 20 bp, synthetic construct
  misc_feature 1..20: note = chemically synthesized
  source 1..20: mol_type = other DNA
acatggtgtgataacagctt

SEQ ID NO: 29015 - DNA, 20 bp, synthetic construct
  misc_feature 1..20: note = chemically synthesized
  source 1..20: mol_type = other DNA
agcttgagatgccattgaca

SEQ ID NO: 29016 - DNA, 20 bp, synthetic construct
  misc_feature 1..20: note = chemically synthesized
  source 1..20: mol_type = other DNA
atgccattgacatggcccac

SEQ ID NO: 29017 - DNA, 20 bp, synthetic construct
  misc_feature 1..20: note = chemically synthesized
  source 1..20: mol_type = other DNA
gcccaccggcttatccacat

SEQ ID NO: 29018 - DNA, 20 bp, synthetic construct
  misc_feature 1..20: note = chemically synthesized
  source 1..20: mol_type = other DNA
ggcttatccacatcagtaat

SEQ ID NO: 29019 - DNA, 20 bp, synthetic construct
  misc_feature 1..20: note = chemically synthesized
  source 1..20: mol_type = other DNA
gcttatccacatcagtaatt

SEQ ID NO: 29020 - DNA, 20 bp, synthetic construct
  misc_feature 1..20: note = chemically synthesized
  source 1..20: mol_type = other DNA
cttatccacatcagtaatta

SEQ ID NO: 29021 - DNA, 20 bp, synthetic construct
  misc_feature 1..20: note = chemically synthesized
  source 1..20: mol_type = other DNA
ccacatcagtaattagggca

SEQ ID NO: 29022 - DNA, 20 bp, synthetic construct
  misc_feature 1..20: note = chemically synthesized
  source 1..20: mol_type = other DNA
tactatgcatcccgtgattg

SEQ ID NO: 29023 - DNA, 20 bp, synthetic construct
  misc_feature 1..20: note = chemically synthesized
  source 1..20: mol_type = other DNA
tgtgtttaaaaatgcaatta

SEQ ID NO: 29024 - DNA, 20 bp, synthetic construct
  misc_feature 1..20: note = chemically synthesized
  source 1..20: mol_type = other DNA
tgcaattatggactcattca

SEQ ID NO: 29025 - DNA, 20 bp, synthetic construct
  misc_feature 1..20: note = chemically synthesized
  source 1..20: mol_type = other DNA
tatggactcattcaaagtga

SEQ ID NO: 29026 - DNA, 20 bp, synthetic construct
  misc_feature 1..20: note = chemically synthesized
  source 1..20: mol_type = other DNA
gactcattcaaagtgaaagc

SEQ ID NO: 29027 - DNA, 20 bp, synthetic construct
  misc_feature 1..20: note = chemically synthesized
  source 1..20: mol_type = other DNA
aagctggtatgacaatacat

SEQ ID NO: 29028 - DNA, 20 bp, synthetic construct
  misc_feature 1..20: note = chemically synthesized
  source 1..20: mol_type = other DNA
ttttatgaataaattttata

SEQ ID NO: 29029 - DNA, 20 bp, synthetic construct
  misc_feature 1..20: note = chemically synthesized
  source 1..20: mol_type = other DNA
aataaattttataaagaaat

SEQ ID NO: 29030 - DNA, 20 bp, synthetic construct
  misc_feature 1..20: note = chemically synthesized
  source 1..20: mol_type = other DNA
aagaaataagctaataccta

SEQ ID NO: 29031 - DNA, 20 bp, synthetic construct
  misc_feature 1..20: note = chemically synthesized
  source 1..20: mol_type = other DNA
gaaataagctaatacctaca

SEQ ID NO: 29032 - DNA, 20 bp, synthetic construct
  misc_feature 1..20: note = chemically synthesized
  source 1..20: mol_type = other DNA
acagagtgtttattaaatgc

SEQ ID NO: 29033 - DNA, 20 bp, synthetic construct
  misc_feature 1..20: note = chemically synthesized
  source 1..20: mol_type = other DNA
cagagtgtttattaaatgct

SEQ ID NO: 29034 - DNA, 20 bp, synthetic construct
  misc_feature 1..20: note = chemically synthesized
  source 1..20: mol_type = other DNA
tgtttattaaatgctaggca

SEQ ID NO: 29035 - DNA, 20 bp, synthetic construct
  misc_feature 1..20: note = chemically synthesized
  source 1..20: mol_type = other DNA
taaatgctaggcacagttct

SEQ ID NO: 29036 - DNA, 20 bp, synthetic construct
  misc_feature 1..20: note = chemically synthesized
  source 1..20: mol_type = other DNA
agttctgagtgatttacaac

SEQ ID NO: 29037 - DNA, 20 bp, synthetic construct
  misc_feature 1..20: note = chemically synthesized
  source 1..20: mol_type = other DNA
taattttcacaacattatta

SEQ ID NO: 29038 - DNA, 20 bp, synthetic construct
  misc_feature 1..20: note = chemically synthesized
  source 1..20: mol_type = other DNA
aattttcacaacattattac

SEQ ID NO: 29039 - DNA, 20 bp, synthetic construct
  misc_feature 1..20: note = chemically synthesized
  source 1..20: mol_type = other DNA
tttcacaacattattacagg

SEQ ID NO: 29040 - DNA, 20 bp, synthetic construct
  misc_feature 1..20: note = chemically synthesized
  source 1..20: mol_type = other DNA
ttacaggtagattttatata

SEQ ID NO: 29041 - DNA, 20 bp, synthetic construct
  misc_feature 1..20: note = chemically synthesized
  source 1..20: mol_type = other DNA
acaggtagattttatatatg

SEQ ID NO: 29042 - DNA, 20 bp, synthetic construct
  misc_feature 1..20: note = chemically synthesized
  source 1..20: mol_type = other DNA
attttatatatggagaaact

SEQ ID NO: 29043 - DNA, 20 bp, synthetic construct
  misc_feature 1..20: note = chemically synthesized
  source 1..20: mol_type = other DNA
ttttatatatggagaaactg

SEQ ID NO: 29044 - DNA, 20 bp, synthetic construct
  misc_feature 1..20: note = chemically synthesized
  source 1..20: mol_type = other DNA
tatatggagaaactgaggca

SEQ ID NO: 29045 - DNA, 20 bp, synthetic construct
  misc_feature 1..20: note = chemically synthesized
  source 1..20: mol_type = other DNA
tatggagaaactgaggcaca

SEQ ID NO: 29046 - DNA, 20 bp, synthetic construct
  misc_feature 1..20: note = chemically synthesized
  source 1..20: mol_type = other DNA
taataaatctcaacattacc

SEQ ID NO: 29047 - DNA, 20 bp, synthetic construct
  misc_feature 1..20: note = chemically synthesized
  source 1..20: mol_type = other DNA
aataaatctcaacattaccc

SEQ ID NO: 29048 - DNA, 20 bp, synthetic construct
  misc_feature 1..20: note = chemically synthesized
  source 1..20: mol_type = other DNA
tctcaacattacccaggtga

SEQ ID NO: 29049 - DNA, 20 bp, synthetic construct
  misc_feature 1..20: note = chemically synthesized
  source 1..20: mol_type = other DNA
caacattacccaggtgatgg

SEQ ID NO: 29050 - DNA, 20 bp, synthetic construct
  misc_feature 1..20: note = chemically synthesized
  source 1..20: mol_type = other DNA
acattacccaggtgatggtg

SEQ ID NO: 29051 - DNA, 20 bp, synthetic construct
  misc_feature 1..20: note = chemically synthesized
  source 1..20: mol_type = other DNA
tacccaggtgatggtggagt

SEQ ID NO: 29052 - DNA, 20 bp, synthetic construct
  misc_feature 1..20: note = chemically synthesized
  source 1..20: mol_type = other DNA
agttggaattccaaatcatg

SEQ ID NO: 29053 - DNA, 20 bp, synthetic construct
  misc_feature 1..20: note = chemically synthesized
  source 1..20: mol_type = other DNA
caaatcatgcagtctgactt

SEQ ID NO: 29054 - DNA, 20 bp, synthetic construct
  misc_feature 1..20: note = chemically synthesized
  source 1..20: mol_type = other DNA
atgcagtctgactttagctg

SEQ ID NO: 29055 - DNA, 20 bp, synthetic construct
  misc_feature 1..20: note = chemically synthesized
  source 1..20: mol_type = other DNA
agtctgactttagctgtaga

SEQ ID NO: 29056 - DNA, 20 bp, synthetic construct
  misc_feature 1..20: note = chemically synthesized
  source 1..20: mol_type = other DNA
tgactttagctgtagacagc

SEQ ID NO: 29057 - DNA, 20 bp, synthetic construct
  misc_feature 1..20: note = chemically synthesized
  source 1..20: mol_type = other DNA
tttagctgtagacagcaaga

SEQ ID NO: 29058 - DNA, 20 bp, synthetic construct
  misc_feature 1..20: note = chemically synthesized
  source 1..20: mol_type = other DNA
gctgtagacagcaagatagt

SEQ ID NO: 29059 - DNA, 20 bp, synthetic construct
  misc_feature 1..20: note = chemically synthesized
  source 1..20: mol_type = other DNA
agacagcaagatagtaagta

SEQ ID NO: 29060 - DNA, 20 bp, synthetic construct
  misc_feature 1..20: note = chemically synthesized
  source 1..20: mol_type = other DNA
gacagcaagatagtaagtaa

SEQ ID NO: 29061 - DNA, 20 bp, synthetic construct
  misc_feature 1..20: note = chemically synthesized
  source 1..20: mol_type = other DNA
caagatagtaagtaaaggaa

SEQ ID NO: 29062 - DNA, 20 bp, synthetic construct
  misc_feature 1..20: note = chemically synthesized
  source 1..20: mol_type = other DNA
agatagtaagtaaaggaatg

SEQ ID NO: 29063 - DNA, 20 bp, synthetic construct
  misc_feature 1..20: note = chemically synthesized
  source 1..20: mol_type = other DNA
ggaatggagcaacaaattga

SEQ ID NO: 29064 - DNA, 20 bp, synthetic construct
  misc_feature 1..20: note = chemically synthesized
  source 1..20: mol_type = other DNA
ttttgcttgtttgtttgaaa

SEQ ID NO: 29065 - DNA, 20 bp, synthetic construct
  misc_feature 1..20: note = chemically synthesized
  source 1..20: mol_type = other DNA
tttgcttgtttgtttgaaac

SEQ ID NO: 29066 - DNA, 20 bp, synthetic construct
  misc_feature 1..20: note = chemically synthesized
  source 1..20: mol_type = other DNA
ttgcttgtttgtttgaaaca

SEQ ID NO: 29067 - DNA, 20 bp, synthetic construct
  misc_feature 1..20: note = chemically synthesized
  source 1..20: mol_type = other DNA
agggtctcactctgtcaccc

SEQ ID NO: 29068 - DNA, 20 bp, synthetic construct
  misc_feature 1..20: note = chemically synthesized
  source 1..20: mol_type = other DNA
tctcactctgtcaccccggc

SEQ ID NO: 29069 - DNA, 20 bp, synthetic construct
  misc_feature 1..20: note = chemically synthesized
  source 1..20: mol_type = other DNA
tcactctgtcaccccggctg

SEQ ID NO: 29070 - DNA, 20 bp, synthetic construct
  misc_feature 1..20: note = chemically synthesized
  source 1..20: mol_type = other DNA
tcaccccggctggagtgcaa

SEQ ID NO: 29071 - DNA, 20 bp, synthetic construct
  misc_feature 1..20: note = chemically synthesized
  source 1..20: mol_type = other DNA
tggtgcaatcttgctcactg

SEQ ID NO: 29072 - DNA, 20 bp, synthetic construct
  misc_feature 1..20: note = chemically synthesized
  source 1..20: mol_type = other DNA
cttgctcactgaagcctcac

SEQ ID NO: 29073 - DNA, 20 bp, synthetic construct
  misc_feature 1..20: note = chemically synthesized
  source 1..20: mol_type = other DNA
tgaagcctcactagaacgcc

SEQ ID NO: 29074 - DNA, 20 bp, synthetic construct
  misc_feature 1..20: note = chemically synthesized
  source 1..20: mol_type = other DNA
ttcaattgatcctcctgctt

SEQ ID NO: 29075 - DNA, 20 bp, synthetic construct
  misc_feature 1..20: note = chemically synthesized
  source 1..20: mol_type = other DNA
atcctcctgctttagcctct

SEQ ID NO: 29076 - DNA, 20 bp, synthetic construct
  misc_feature 1..20: note = chemically synthesized
  source 1..20: mol_type = other DNA
tcctcctgctttagcctctc

SEQ ID NO: 29077 - DNA, 20 bp, synthetic construct
  misc_feature 1..20: note = chemically synthesized
  source 1..20: mol_type = other DNA
tcctgctttagcctctcagg

SEQ ID NO: 29078 - DNA, 20 bp, synthetic construct
  misc_feature 1..20: note = chemically synthesized
  source 1..20: mol_type = other DNA
gctttagcctctcaggtagc

SEQ ID NO: 29079 - DNA, 20 bp, synthetic construct
  misc_feature 1..20: note = chemically synthesized
  source 1..20: mol_type = other DNA
ctttagcctctcaggtagct

SEQ ID NO: 29080 - DNA, 20 bp, synthetic construct
  misc_feature 1..20: note = chemically synthesized
  source 1..20: mol_type = other DNA
ctctcaggtagctaggacta

SEQ ID NO: 29081 - DNA, 20 bp, synthetic construct
  misc_feature 1..20: note = chemically synthesized
  source 1..20: mol_type = other DNA
tctcaggtagctaggactac

SEQ ID NO: 29082 - DNA, 20 bp, synthetic construct
  misc_feature 1..20: note = chemically synthesized
  source 1..20: mol_type = other DNA
gtagctaggactacaggtgt

SEQ ID NO: 29083 - DNA, 20 bp, synthetic construct
  misc_feature 1..20: note = chemically synthesized
  source 1..20: mol_type = other DNA
actacaggtgtgagcctcca

SEQ ID NO: 29084 - DNA, 20 bp, synthetic construct
  misc_feature 1..20: note = chemically synthesized
  source 1..20: mol_type = other DNA
caggtgtgagcctccatggc

SEQ ID NO: 29085 - DNA, 20 bp, synthetic construct
  misc_feature 1..20: note = chemically synthesized
  source 1..20: mol_type = other DNA
tgtgagcctccatggccagc

SEQ ID NO: 29086 - DNA, 20 bp, synthetic construct
  misc_feature 1..20: note = chemically synthesized
  source 1..20: mol_type = other DNA
tgagcctccatggccagcta

SEQ ID NO: 29087 - DNA, 20 bp, synthetic construct
  misc_feature 1..20: note = chemically synthesized
  source 1..20: mol_type = other DNA
agaaattttttaaatttctg

SEQ ID NO: 29088 - DNA, 20 bp, synthetic construct
  misc_feature 1..20: note = chemically synthesized
  source 1..20: mol_type = other DNA
tttttaaatttctgtagaaa

SEQ ID NO: 29089 - DNA, 20 bp, synthetic construct
  misc_feature 1..20: note = chemically synthesized
  source 1..20: mol_type = other DNA
ttttaaatttctgtagaaac

SEQ ID NO: 29090 - DNA, 20 bp, synthetic construct
  misc_feature 1..20: note = chemically synthesized
  source 1..20: mol_type = other DNA
tttaaatttctgtagaaaca

SEQ ID NO: 29091 - DNA, 20 bp, synthetic construct
  misc_feature 1..20: note = chemically synthesized
  source 1..20: mol_type = other DNA
cagggtctccctatgttccc

SEQ ID NO: 29092 - DNA, 20 bp, synthetic construct
  misc_feature 1..20: note = chemically synthesized
  source 1..20: mol_type = other DNA
agggtctccctatgttcccc

SEQ ID NO: 29093 - DNA, 20 bp, synthetic construct
  misc_feature 1..20: note = chemically synthesized
  source 1..20: mol_type = other DNA
tctccctatgttccccaggc

SEQ ID NO: 29094 - DNA, 20 bp, synthetic construct
  misc_feature 1..20: note = chemically synthesized
  source 1..20: mol_type = other DNA
ccaggctggtatccaactct

SEQ ID NO: 29095 - DNA, 20 bp, synthetic construct
  misc_feature 1..20: note = chemically synthesized
  source 1..20: mol_type = other DNA
ctcaaacaattctcccacct

SEQ ID NO: 29096 - DNA, 20 bp, synthetic construct
  misc_feature 1..20: note = chemically synthesized
  source 1..20: mol_type = other DNA
tctcccacctcagccttgaa

SEQ ID NO: 29097 - DNA, 20 bp, synthetic construct
  misc_feature 1..20: note = chemically synthesized
  source 1..20: mol_type = other DNA
cctcagccttgaaaagtgtt

SEQ ID NO: 29098 - DNA, 20 bp, synthetic construct
  misc_feature 1..20: note = chemically synthesized
  source 1..20: mol_type = other DNA
cttgaaaagtgttgagatta

SEQ ID NO: 29099 - DNA, 20 bp, synthetic construct
  misc_feature 1..20: note = chemically synthesized
  source 1..20: mol_type = other DNA
ttgaaaagtgttgagattac

SEQ ID NO: 29100 - DNA, 20 bp, synthetic construct
  misc_feature 1..20: note = chemically synthesized
  source 1..20: mol_type = other DNA
acaggtgtgaatcaccatgc

SEQ ID NO: 29101 - DNA, 20 bp, synthetic construct
  misc_feature 1..20: note = chemically synthesized
  source 1..20: mol_type = other DNA
caggtgtgaatcaccatgct

SEQ ID NO: 29102 - DNA, 20 bp, synthetic construct
  misc_feature 1..20: note = chemically synthesized
  source 1..20: mol_type = other DNA
atcaccatgctgggccttga

SEQ ID NO: 29103 - DNA, 20 bp, synthetic construct
  misc_feature 1..20: note = chemically synthesized
  source 1..20: mol_type = other DNA
gggccttgatggatctttaa

SEQ ID NO: 29104 - DNA, 20 bp, synthetic construct
  misc_feature 1..20: note = chemically synthesized
  source 1..20: mol_type = other DNA
ccttgatggatctttaaaag

SEQ ID NO: 29105 - DNA, 20 bp, synthetic construct
  misc_feature 1..20: note = chemically synthesized
  source 1..20: mol_type = other DNA
tgatggatctttaaaagtgg

SEQ ID NO: 29106 - DNA, 20 bp, synthetic construct
  misc_feature 1..20: note = chemically synthesized
  source 1..20: mol_type = other DNA
gatggatctttaaaagtggt

SEQ ID NO: 29107 - DNA, 20 bp, synthetic construct
  misc_feature 1..20: note = chemically synthesized
  source 1..20: mol_type = other DNA
atggatctttaaaagtggtg

SEQ ID NO: 29108 - DNA, 20 bp, synthetic construct
  misc_feature 1..20: note = chemically synthesized
  source 1..20: mol_type = other DNA
tggatctttaaaagtggtgg

SEQ ID NO: 29109 - DNA, 20 bp, synthetic construct
  misc_feature 1..20: note = chemically synthesized
  source 1..20: mol_type = other DNA
ggatctttaaaagtggtggg

SEQ ID NO: 29110 - DNA, 20 bp, synthetic construct
  misc_feature 1..20: note = chemically synthesized
  source 1..20: mol_type = other DNA
tctttaaaagtggtgggggg

SEQ ID NO: 29111 - DNA, 20 bp, synthetic construct
  misc_feature 1..20: note = chemically synthesized
  source 1..20: mol_type = other DNA
ctttaaaagtggtggggggt

SEQ ID NO: 29112 - DNA, 20 bp, synthetic construct
  misc_feature 1..20: note = chemically synthesized
  source 1..20: mol_type = other DNA
ttaaaagtggtggggggtag

SEQ ID NO: 29113 - DNA, 20 bp, synthetic construct
  misc_feature 1..20: note = chemically synthesized
  source 1..20: mol_type = other DNA
gtggtggggggtaggagaaa

SEQ ID NO: 29114 - DNA, 20 bp, synthetic construct
  misc_feature 1..20: note = chemically synthesized
  source 1..20: mol_type = other DNA
ggtggggggtaggagaaaaa

SEQ ID NO: 29115 - DNA, 20 bp, synthetic construct
  misc_feature 1..20: note = chemically synthesized
  source 1..20: mol_type = other DNA
gtggggggtaggagaaaaag

SEQ ID NO: 29116 - DNA, 20 bp, synthetic construct
  misc_feature 1..20: note = chemically synthesized
  source 1..20: mol_type = other DNA
gggggtaggagaaaaagagg

SEQ ID NO: 29117 - DNA, 20 bp, synthetic construct
  misc_feature 1..20: note = chemically synthesized
  source 1..20: mol_type = other DNA
aaaaagaggaagaacaaaaa

SEQ ID NO: 29118 - DNA, 20 bp, synthetic construct
  misc_feature 1..20: note = chemically synthesized
  source 1..20: mol_type = other DNA
gaacaaaaacagtatcacga

SEQ ID NO: 29119 - DNA, 20 bp, synthetic construct
  misc_feature 1..20: note = chemically synthesized
  source 1..20: mol_type = other DNA
tcacgaaagataaacatcgt

SEQ ID NO: 29120 - DNA, 20 bp, synthetic construct
  misc_feature 1..20: note = chemically synthesized
  source 1..20: mol_type = other DNA
cacgaaagataaacatcgtt

SEQ ID NO: 29121 - DNA, 20 bp, synthetic construct
  misc_feature 1..20: note = chemically synthesized
  source 1..20: mol_type = other DNA
agataaacatcgttaggtct

SEQ ID NO: 29122 - DNA, 20 bp, synthetic construct
  misc_feature 1..20: note = chemically synthesized
  source 1..20: mol_type = other DNA
gataaacatcgttaggtctc

SEQ ID NO: 29123 - DNA, 20 bp, synthetic construct
  misc_feature 1..20: note = chemically synthesized
  source 1..20: mol_type = other DNA
aaacatcgttaggtctcggg

SEQ ID NO: 29124 - DNA, 20 bp, synthetic construct
  misc_feature 1..20: note = chemically synthesized
  source 1..20: mol_type = other DNA
aacatcgttaggtctcggga

SEQ ID NO: 29125 - DNA, 20 bp, synthetic construct
  misc_feature 1..20: note = chemically synthesized
  source 1..20: mol_type = other DNA
tcgttaggtctcgggaagga

SEQ ID NO: 29126 - DNA, 20 bp, synthetic construct
  misc_feature 1..20: note = chemically synthesized
  source 1..20: mol_type = other DNA
cgttaggtctcgggaaggat

SEQ ID NO: 29127 - DNA, 20 bp, synthetic construct
  misc_feature 1..20: note = chemically synthesized
  source 1..20: mol_type = other DNA
ggatccttttcattttgctc

SEQ ID NO: 29128 - DNA, 20 bp, synthetic construct
  misc_feature 1..20: note = chemically synthesized
  source 1..20: mol_type = other DNA
atccttttcattttgctcta

SEQ ID NO: 29129 - DNA, 20 bp, synthetic construct
  misc_feature 1..20: note = chemically synthesized
  source 1..20: mol_type = other DNA
tttcattttgctctagagaa

SEQ ID NO: 29130 - DNA, 20 bp, synthetic construct
  misc_feature 1..20: note = chemically synthesized
  source 1..20: mol_type = other DNA
tgctctagagaaaagccatt

SEQ ID NO: 29131 - DNA, 20 bp, synthetic construct
  misc_feature 1..20: note = chemically synthesized
  source 1..20: mol_type = other DNA
acttctgtgttaacaaaaaa

SEQ ID NO: 29132 - DNA, 20 bp, synthetic construct
  misc_feature 1..20: note = chemically synthesized
  source 1..20: mol_type = other DNA
tgtgttaacaaaaaacagcc

SEQ ID NO: 29133 - DNA, 20 bp, synthetic construct
  misc_feature 1..20: note = chemically synthesized
  source 1..20: mol_type = other DNA
gttaacaaaaaacagccgag

SEQ ID NO: 29134 - DNA, 20 bp, synthetic construct
  misc_feature 1..20: note = chemically synthesized
  source 1..20: mol_type = other DNA
caaaaaacagccgagtagcc

SEQ ID NO: 29135 - DNA, 20 bp, synthetic construct
  misc_feature 1..20: note = chemically synthesized
  source 1..20: mol_type = other DNA
agtagcctagtattaaactt

SEQ ID NO: 29136 - DNA, 20 bp, synthetic construct
  misc_feature 1..20: note = chemically synthesized
  source 1..20: mol_type = other DNA
tagcctagtattaaacttta

SEQ ID NO: 29137 - DNA, 20 bp, synthetic construct
  misc_feature 1..20: note = chemically synthesized
  source 1..20: mol_type = other DNA
cctagtattaaactttagag

SEQ ID NO: 29138 - DNA, 20 bp, synthetic construct
  misc_feature 1..20: note = chemically synthesized
  source 1..20: mol_type = other DNA
tttagagcagttgttcttta

SEQ ID NO: 29139 - DNA, 20 bp, synthetic construct
  misc_feature 1..20: note = chemically synthesized
  source 1..20: mol_type = other DNA
gttgttctttacggcaatta

SEQ ID NO: 29140 - DNA, 20 bp, synthetic construct
  misc_feature 1..20: note = chemically synthesized
  source 1..20: mol_type = other DNA
ttgttctttacggcaattac

SEQ ID NO: 29141 - DNA, 20 bp, synthetic construct
  misc_feature 1..20: note = chemically synthesized
  source 1..20: mol_type = other DNA
tgttctttacggcaattaca

SEQ ID NO: 29142 - DNA, 20 bp, synthetic construct
  misc_feature 1..20: note = chemically synthesized
  source 1..20: mol_type = other DNA
gttctttacggcaattacag

SEQ ID NO: 29143 - DNA, 20 bp, synthetic construct
  misc_feature 1..20: note = chemically synthesized
  source 1..20: mol_type = other DNA
acggcaattacaggggcctt

SEQ ID NO: 29144 - DNA, 20 bp, synthetic construct
  misc_feature 1..20: note = chemically synthesized
  source 1..20: mol_type = other DNA
cggcaattacaggggccttc

SEQ ID NO: 29145 - DNA, 20 bp, synthetic construct
  misc_feature 1..20: note = chemically synthesized
  source 1..20: mol_type = other DNA
caattacaggggccttcagg

SEQ ID NO: 29146 - DNA, 20 bp, synthetic construct
  misc_feature 1..20: note = chemically synthesized
  source 1..20: mol_type = other DNA
aggggccttcaggaagctga

SEQ ID NO: 29147 - DNA, 20 bp, synthetic construct
  misc_feature 1..20: note = chemically synthesized
  source 1..20: mol_type = other DNA
ggccttcaggaagctgatgg

SEQ ID NO: 29148 - DNA, 20 bp, synthetic construct
  misc_feature 1..20: note = chemically synthesized
  source 1..20: mol_type = other DNA
aggaagctgatggaagtgtg

SEQ ID NO: 29149 - DNA, 20 bp, synthetic construct
  misc_feature 1..20: note = chemically synthesized
  source 1..20: mol_type = other DNA
gaagtgtgaagtcctcttct

SEQ ID NO: 29150 - DNA, 20 bp, synthetic construct
  misc_feature 1..20: note = chemically synthesized
  source 1..20: mol_type = other DNA
agtgtgaagtcctcttctca

SEQ ID NO: 29151 - DNA, 20 bp, synthetic construct
  misc_feature 1..20: note = chemically synthesized
  source 1..20: mol_type = other DNA
gaagtcctcttctcagagaa

SEQ ID NO: 29152 - DNA, 20 bp, synthetic construct
  misc_feature 1..20: note = chemically synthesized
  source 1..20: mol_type = other DNA
atatacgtgcacctaatttt

SEQ ID NO: 29153 - DNA, 20 bp, synthetic construct
  misc_feature 1..20: note = chemically synthesized
  source 1..20: mol_type = other DNA
atttttagatataatttctg

SEQ ID NO: 29154 - DNA, 20 bp, synthetic construct
  misc_feature 1..20: note = chemically synthesized
  source 1..20: mol_type = other DNA
tttttagatataatttctga

SEQ ID NO: 29155 - DNA, 20 bp, synthetic construct
  misc_feature 1..20: note = chemically synthesized
  source 1..20: mol_type = other DNA
agatataatttctgaaggtt

SEQ ID NO: 29156 - DNA, 20 bp, synthetic construct
  misc_feature 1..20: note = chemically synthesized
  source 1..20: mol_type = other DNA
tgaaggtttagaaactcctt

SEQ ID NO: 29157 - DNA, 20 bp, synthetic construct
  misc_feature 1..20: note = chemically synthesized
  source 1..20: mol_type = other DNA
ccttgagttcacttatatca

SEQ ID NO: 29158 - DNA, 20 bp, synthetic construct
  misc_feature 1..20: note = chemically synthesized
  source 1..20: mol_type = other DNA
tatatcaaagtcctcacctt

SEQ ID NO: 29159 - DNA, 20 bp, synthetic construct
  misc_feature 1..20: note = chemically synthesized
  source 1..20: mol_type = other DNA
cacctttagaactcctgtcc

SEQ ID NO: 29160 - DNA, 20 bp, synthetic construct
  misc_feature 1..20: note = chemically synthesized
  source 1..20: mol_type = other DNA
ctttagaactcctgtcctag

SEQ ID NO: 29161 - DNA, 20 bp, synthetic construct
  misc_feature 1..20: note = chemically synthesized
  source 1..20: mol_type = other DNA
ttagaactcctgtcctagaa

SEQ ID NO: 29162 - DNA, 20 bp, synthetic construct
  misc_feature 1..20: note = chemically synthesized
  source 1..20: mol_type = other DNA
gaactcctgtcctagaagag

SEQ ID NO: 29163 - DNA, 20 bp, synthetic construct
  misc_feature 1..20: note = chemically synthesized
  source 1..20: mol_type = other DNA
ttccataaccactttgactc

SEQ ID NO: 29164 - DNA, 20 bp, synthetic construct
  misc_feature 1..20: note = chemically synthesized
  source 1..20: mol_type = other DNA
gccacttgtaccatgtaatt

SEQ ID NO: 29165 - DNA, 20 bp, synthetic construct
  misc_feature 1..20: note = chemically synthesized
  source 1..20: mol_type = other DNA
cacttgtaccatgtaattca

SEQ ID NO: 29166 - DNA, 20 bp, synthetic construct
  misc_feature 1..20: note = chemically synthesized
  source 1..20: mol_type = other DNA
acttgtaccatgtaattcag

SEQ ID NO: 29167 - DNA, 20 bp, synthetic construct
  misc_feature 1..20: note = chemically synthesized
  source 1..20: mol_type = other DNA
taccatgtaattcagaggtg

SEQ ID NO: 29168 - DNA, 20 bp, synthetic construct
  misc_feature 1..20: note = chemically synthesized
  source 1..20: mol_type = other DNA
taattcagaggtgtagtgtc

SEQ ID NO: 29169 - DNA, 20 bp, synthetic construct
  misc_feature 1..20: note = chemically synthesized
  source 1..20: mol_type = other DNA
agaggtgtagtgtcaagact

SEQ ID NO: 29170 - DNA, 20 bp, synthetic construct
  misc_feature 1..20: note = chemically synthesized
  source 1..20: mol_type = other DNA
gaggtgtagtgtcaagactg

SEQ ID NO: 29171 - DNA, 20 bp, synthetic construct
  misc_feature 1..20: note = chemically synthesized
  source 1..20: mol_type = other DNA
ggtgtagtgtcaagactgag

SEQ ID NO: 29172 - DNA, 20 bp, synthetic construct
  misc_feature 1..20: note = chemically synthesized
  source 1..20: mol_type = other DNA
gtgtagtgtcaagactgagg

SEQ ID NO: 29173 - DNA, 20 bp, synthetic construct
  misc_feature 1..20: note = chemically synthesized
  source 1..20: mol_type = other DNA
tagtgtcaagactgaggagg

SEQ ID NO: 29174 - DNA, 20 bp, synthetic construct
  misc_feature 1..20: note = chemically synthesized
  source 1..20: mol_type = other DNA
tgtcaagactgaggaggaag

SEQ ID NO: 29175 - DNA, 20 bp, synthetic construct
  misc_feature 1..20: note = chemically synthesized
  source 1..20: mol_type = other DNA
gtcaagactgaggaggaagc

SEQ ID NO: 29176 - DNA, 20 bp, synthetic construct
  misc_feature 1..20: note = chemically synthesized
  source 1..20: mol_type = other DNA
ggaagcaggtaaattatgtc

SEQ ID NO: 29177 - DNA, 20 bp, synthetic construct
  misc_feature 1..20: note = chemically synthesized
  source 1..20: mol_type = other DNA
aattatgtccagcaatacgt

SEQ ID NO: 29178 - DNA, 20 bp, synthetic construct
  misc_feature 1..20: note = chemically synthesized
  source 1..20: mol_type = other DNA
tgtccagcaatacgttggct

SEQ ID NO: 29179 - DNA, 20 bp, synthetic construct
  misc_feature 1..20: note = chemically synthesized
  source 1..20: mol_type = other DNA
gtccagcaatacgttggctt

SEQ ID NO: 29180 - DNA, 20 bp, synthetic construct
  misc_feature 1..20: note = chemically synthesized
  source 1..20: mol_type = other DNA
aggcaaaaacaaattgtttc

SEQ ID NO: 29181 - DNA, 20 bp, synthetic construct
  misc_feature 1..20: note = chemically synthesized
  source 1..20: mol_type = other DNA
aattgtttctagtccatttt

SEQ ID NO: 29182 - DNA, 20 bp, synthetic construct
  misc_feature 1..20: note = chemically synthesized
  source 1..20: mol_type = other DNA
ttgtttctagtccattttaa

SEQ ID NO: 29183 - DNA, 20 bp, synthetic construct
  misc_feature 1..20: note = chemically synthesized
  source 1..20: mol_type = other DNA
tgtttctagtccattttaag

SEQ ID NO: 29184 - DNA, 20 bp, synthetic construct
  misc_feature 1..20: note = chemically synthesized
  source 1..20: mol_type = other DNA
gtttctagtccattttaaga

SEQ ID NO: 29185 - DNA, 20 bp, synthetic construct
  misc_feature 1..20: note = chemically synthesized
  source 1..20: mol_type = other DNA
tctagtccattttaagaggg

SEQ ID NO: 29186 - DNA, 20 bp, synthetic construct
  misc_feature 1..20: note = chemically synthesized
  source 1..20: mol_type = other DNA
ttaagagggaagcatttatt

SEQ ID NO: 29187 - DNA, 20 bp, synthetic construct
  misc_feature 1..20: note = chemically synthesized
  source 1..20: mol_type = other DNA
taagagggaagcatttattt

SEQ ID NO: 29188 - DNA, 20 bp, synthetic construct
  misc_feature 1..20: note = chemically synthesized
  source 1..20: mol_type = other DNA
aagagggaagcatttattta

SEQ ID NO: 29189 - DNA, 20 bp, synthetic construct
  misc_feature 1..20: note = chemically synthesized
  source 1..20: mol_type = other DNA
atttagggactacatcgctc

SEQ ID NO: 29190 - DNA, 20 bp, synthetic construct
  misc_feature 1..20: note = chemically synthesized
  source 1..20: mol_type = other DNA
ccttaacatgttaatttctc

SEQ ID NO: 29191 - DNA, 20 bp, synthetic construct
  misc_feature 1..20: note = chemically synthesized
  source 1..20: mol_type = other DNA
ttaacatgttaatttctcca

SEQ ID NO: 29192 - DNA, 20 bp, synthetic construct
  misc_feature 1..20: note = chemically synthesized
  source 1..20: mol_type = other DNA
tccagagtttgtaatgttct

SEQ ID NO: 29193 - DNA, 20 bp, synthetic construct
  misc_feature 1..20: note = chemically synthesized
  source 1..20: mol_type = other DNA
gagtttgtaatgttctgagc

SEQ ID NO: 29194 - DNA, 20 bp, synthetic construct
  misc_feature 1..20: note = chemically synthesized
  source 1..20: mol_type = other DNA
atgttctgagcaagtgtgtg

SEQ ID NO: 29195 - DNA, 20 bp, synthetic construct
  misc_feature 1..20: note = chemically synthesized
  source 1..20: mol_type = other DNA
ttctgagcaagtgtgtgcag

SEQ ID NO: 29196 - DNA, 20 bp, synthetic construct
  misc_feature 1..20: note = chemically synthesized
  source 1..20: mol_type = other DNA
gtgtgcagaagaaatgattg

SEQ ID NO: 29197 - DNA, 20 bp, synthetic construct
  misc_feature 1..20: note = chemically synthesized
  source 1..20: mol_type = other DNA
gcagaagaaatgattgtagt

SEQ ID NO: 29198 - DNA, 20 bp, synthetic construct
  misc_feature 1..20: note = chemically synthesized
  source 1..20: mol_type = other DNA
gaaatgattgtagtaagacc

SEQ ID NO: 29199 - DNA, 20 bp, synthetic construct
  misc_feature 1..20: note = chemically synthesized
  source 1..20: mol_type = other DNA
aaatgattgtagtaagacct

SEQ ID NO: 29200 - DNA, 20 bp, synthetic construct
  misc_feature 1..20: note = chemically synthesized
  source 1..20: mol_type = other DNA
attgtagtaagacctgggca

SEQ ID NO: 29201 - DNA, 20 bp, synthetic construct
  misc_feature 1..20: note = chemically synthesized
  source 1..20: mol_type = other DNA
ttgtagtaagacctgggcaa

SEQ ID NO: 29202 - DNA, 20 bp, synthetic construct
  misc_feature 1..20: note = chemically synthesized
  source 1..20: mol_type = other DNA
gtagtaagacctgggcaaag

SEQ ID NO: 29203 - DNA, 20 bp, synthetic construct
  misc_feature 1..20: note = chemically synthesized
  source 1..20: mol_type = other DNA
agtaagacctgggcaaagga

SEQ ID NO: 29204 - DNA, 20 bp, synthetic construct
  misc_feature 1..20: note = chemically synthesized
  source 1..20: mol_type = other DNA
taagacctgggcaaaggaga

SEQ ID NO: 29205 - DNA, 20 bp, synthetic construct
  misc_feature 1..20: note = chemically synthesized
  source 1..20: mol_type = other DNA
aaacatttttcccccacatt

SEQ ID NO: 29206 - DNA, 20 bp, synthetic construct
  misc_feature 1..20: note = chemically synthesized
  source 1..20: mol_type = other DNA
aacatttttcccccacattt

SEQ ID NO: 29207 - DNA, 20 bp, synthetic construct
  misc_feature 1..20: note = chemically synthesized
  source 1..20: mol_type = other DNA
ttgggcaaaactttccatcc

SEQ ID NO: 29208 - DNA, 20 bp, synthetic construct
  misc_feature 1..20: note = chemically synthesized
  source 1..20: mol_type = other DNA
tgggcaaaactttccatcct

SEQ ID NO: 29209 - DNA, 20 bp, synthetic construct
  misc_feature 1..20: note = chemically synthesized
  source 1..20: mol_type = other DNA
ttccatcctgggtcacacca

SEQ ID NO: 29210 - DNA, 20 bp, synthetic construct
  misc_feature 1..20: note = chemically synthesized
  source 1..20: mol_type = other DNA
ctcctctcctctccctcaac

SEQ ID NO: 29211 - DNA, 20 bp, synthetic construct
  misc_feature 1..20: note = chemically synthesized
  source 1..20: mol_type = other DNA
tcctctccctcaactggtaa

SEQ ID NO: 29212 - DNA, 20 bp, synthetic construct
  misc_feature 1..20: note = chemically synthesized
  source 1..20: mol_type = other DNA
ccaaaacatacctgactact

SEQ ID NO: 29213 - DNA, 20 bp, synthetic construct
  misc_feature 1..20: note = chemically synthesized
  source 1..20: mol_type = other DNA
cttagtacttcccactactg

SEQ ID NO: 29214 - DNA, 20 bp, synthetic construct
  misc_feature 1..20: note = chemically synthesized
  source 1..20: mol_type = other DNA
gtacttcccactactgtgga

SEQ ID NO: 29215 - DNA, 20 bp, synthetic construct
  misc_feature 1..20: note = chemically synthesized
  source 1..20: mol_type = other DNA
cactactgtggatagaattt

SEQ ID NO: 29216 - DNA, 20 bp, synthetic construct
  misc_feature 1..20: note = chemically synthesized
  source 1..20: mol_type = other DNA
ctcattcattgttcataccc

SEQ ID NO: 29217 - DNA, 20 bp, synthetic construct
  misc_feature 1..20: note = chemically synthesized
  source 1..20: mol_type = other DNA
cattcattgttcataccctg

SEQ ID NO: 29218 - DNA, 20 bp, synthetic construct
  misc_feature 1..20: note = chemically synthesized
  source 1..20: mol_type = other DNA
ccctggagacaaaactcctt

SEQ ID NO: 29219 - DNA, 20 bp, synthetic construct
  misc_feature 1..20: note = chemically synthesized
  source 1..20: mol_type = other DNA
cctggagacaaaactcctta

SEQ ID NO: 29220 - DNA, 20 bp, synthetic construct
  misc_feature 1..20: note = chemically synthesized
  source 1..20: mol_type = other DNA
taaggctattaactccccct

SEQ ID NO: 29221 - DNA, 20 bp, synthetic construct
  misc_feature 1..20: note = chemically synthesized
  source 1..20: mol_type = other DNA
tccccctgagcttcacaatc

SEQ ID NO: 29222 - DNA, 20 bp, synthetic construct
  misc_feature 1..20: note = chemically synthesized
  source 1..20: mol_type = other DNA
gcttcacaatctagtccctg

SEQ ID NO: 29223 - DNA, 20 bp, synthetic construct
  misc_feature 1..20: note = chemically synthesized
  source 1..20: mol_type = other DNA
cttcacaatctagtccctgc

SEQ ID NO: 29224 - DNA, 20 bp, synthetic construct
  misc_feature 1..20: note = chemically synthesized
  source 1..20: mol_type = other DNA
tcctctccttttccctctct

SEQ ID NO: 29225 - DNA, 20 bp, synthetic construct
  misc_feature 1..20: note = chemically synthesized
  source 1..20: mol_type = other DNA
ttccctctctgagccccgct

SEQ ID NO: 29226 - DNA, 20 bp, synthetic construct
  misc_feature 1..20: note = chemically synthesized
  source 1..20: mol_type = other DNA
gccccgctcagatcttcgaa

SEQ ID NO: 29227 - DNA, 20 bp, synthetic construct
  misc_feature 1..20: note = chemically synthesized
  source 1..20: mol_type = other DNA
cccgctcagatcttcgaaca

SEQ ID NO: 29228 - DNA, 20 bp, synthetic construct
  misc_feature 1..20: note = chemically synthesized
  source 1..20: mol_type = other DNA
cagagaacacttctgcatct

SEQ ID NO: 29229 - DNA, 20 bp, synthetic construct
  misc_feature 1..20: note = chemically synthesized
  source 1..20: mol_type = other DNA
cttctgcatcttggcatata

SEQ ID NO: 29230 - DNA, 20 bp, synthetic construct
  misc_feature 1..20: note = chemically synthesized
  source 1..20: mol_type = other DNA
gcatatatagttctctcaca

SEQ ID NO: 29231 - DNA, 20 bp, synthetic construct
  misc_feature 1..20: note = chemically synthesized
  source 1..20: mol_type = other DNA
atagaacgctttctcccctt

SEQ ID NO: 29232 - DNA, 20 bp, synthetic construct
  misc_feature 1..20: note = chemically synthesized
  source 1..20: mol_type = other DNA
cctttagctatttatccttc

SEQ ID NO: 29233 - DNA, 20 bp, synthetic construct
  misc_feature 1..20: note = chemically synthesized
  source 1..20: mol_type = other DNA
gctatttatccttcaagtgt

SEQ ID NO: 29234 - DNA, 20 bp, synthetic construct
  misc_feature 1..20: note = chemically synthesized
  source 1..20: mol_type = other DNA
cagctcaaacatctcatcat

SEQ ID NO: 29235 - DNA, 20 bp, synthetic construct
  misc_feature 1..20: note = chemically synthesized
  source 1..20: mol_type = other DNA
gctcaaacatctcatcatta

SEQ ID NO: 29236 - DNA, 20 bp, synthetic construct
  misc_feature 1..20: note = chemically synthesized
  source 1..20: mol_type = other DNA
tcaaacatctcatcattaga

SEQ ID NO: 29237 - DNA, 20 bp, synthetic construct
  misc_feature 1..20: note = chemically synthesized
  source 1..20: mol_type = other DNA
caaacatctcatcattagag

SEQ ID NO: 29238 - DNA, 20 bp, synthetic construct
  misc_feature 1..20: note = chemically synthesized
  source 1..20: mol_type = other DNA
agaggtttttcccaaacctc

SEQ ID NO: 29239 - DNA, 20 bp, synthetic construct
  misc_feature 1..20: note = chemically synthesized
  source 1..20: mol_type = other DNA
gaggtttttcccaaacctct

SEQ ID NO: 29240 - DNA, 20 bp, synthetic construct
  misc_feature 1..20: note = chemically synthesized
  source 1..20: mol_type = other DNA
ttcccaaacctctaggtaac

SEQ ID NO: 29241 - DNA, 20 bp, synthetic construct
  misc_feature 1..20: note = chemically synthesized
  source 1..20: mol_type = other DNA
tcccaaacctctaggtaact

SEQ ID NO: 29242 - DNA, 20 bp, synthetic construct
  misc_feature 1..20: note = chemically synthesized
  source 1..20: mol_type = other DNA
aaacctctaggtaactaggt

SEQ ID NO: 29243 - DNA, 20 bp, synthetic construct
  misc_feature 1..20: note = chemically synthesized
  source 1..20: mol_type = other DNA
agaaaccactccccattcca

SEQ ID NO: 29244 - DNA, 20 bp, synthetic construct
  misc_feature 1..20: note = chemically synthesized
  source 1..20: mol_type = other DNA
ccattccacggtacactgta

SEQ ID NO: 29245 - DNA, 20 bp, synthetic construct
  misc_feature 1..20: note = chemically synthesized
  source 1..20: mol_type = other DNA
cacggtacactgtatagtct

SEQ ID NO: 29246 - DNA, 20 bp, synthetic construct
  misc_feature 1..20: note = chemically synthesized
  source 1..20: mol_type = other DNA
acggtacactgtatagtctt

SEQ ID NO: 29247 - DNA, 20 bp, synthetic construct
  misc_feature 1..20: note = chemically synthesized
  source 1..20: mol_type = other DNA
ctgtatagtcttaggacacc

SEQ ID NO: 29248 - DNA, 20 bp, synthetic construct
  misc_feature 1..20: note = chemically synthesized
  source 1..20: mol_type = other DNA
cttaggacacctggttccct

SEQ ID NO: 29249 - DNA, 20 bp, synthetic construct
  misc_feature 1..20: note = chemically synthesized
  source 1..20: mol_type = other DNA
tacaaatttgtcaattcttg

SEQ ID NO: 29250 - DNA, 20 bp, synthetic construct
  misc_feature 1..20: note = chemically synthesized
  source 1..20: mol_type = other DNA
tttgtcaattcttgaagatt

SEQ ID NO: 29251 - DNA, 20 bp, synthetic construct
  misc_feature 1..20: note = chemically synthesized
  source 1..20: mol_type = other DNA
aattcttgaagattaagaat

SEQ ID NO: 29252 - DNA, 20 bp, synthetic construct
  misc_feature 1..20: note = chemically synthesized
  source 1..20: mol_type = other DNA
actctatctccctcgcctct

SEQ ID NO: 29253 - DNA, 20 bp, synthetic construct
  misc_feature 1..20: note = chemically synthesized
  source 1..20: mol_type = other DNA
tctcagtgcctgatacctaa

SEQ ID NO: 29254 - DNA, 20 bp, synthetic construct
  misc_feature 1..20: note = chemically synthesized
  source 1..20: mol_type = other DNA
atccttactgaataataaaa

SEQ ID NO: 29255 - DNA, 20 bp, synthetic construct
  misc_feature 1..20: note = chemically synthesized
  source 1..20: mol_type = other DNA
taaaatggattaatgaataa

SEQ ID NO: 29256 - DNA, 20 bp, synthetic construct
  misc_feature 1..20: note = chemically synthesized
  source 1..20: mol_type = other DNA
gaataaaagcaataaatttc

SEQ ID NO: 29257 - DNA, 20 bp, synthetic construct
  misc_feature 1..20: note = chemically synthesized
  source 1..20: mol_type = other DNA
aataaaagcaataaatttca

SEQ ID NO: 29258 - DNA, 20 bp, synthetic construct
  misc_feature 1..20: note = chemically synthesized
  source 1..20: mol_type = other DNA
gttaatattaataaattaaa

SEQ ID NO: 29259 - DNA, 20 bp, synthetic construct
  misc_feature 1..20: note = chemically synthesized
  source 1..20: mol_type = other DNA
ttaatattaataaattaaaa

SEQ ID NO: 29260 - DNA, 20 bp, synthetic construct
  misc_feature 1..20: note = chemically synthesized
  source 1..20: mol_type = other DNA
aaattaaaaaggttattttg

SEQ ID NO: 29261 - DNA, 20 bp, synthetic construct
  misc_feature 1..20: note = chemically synthesized
  source 1..20: mol_type = other DNA
aaaaggttattttgaagtct

SEQ ID NO: 29262 - DNA, 20 bp, synthetic construct
  misc_feature 1..20: note = chemically synthesized
  source 1..20: mol_type = other DNA
ttattttgaagtctgagaat

SEQ ID NO: 29263 - DNA, 20 bp, synthetic construct
  misc_feature 1..20: note = chemically synthesized
  source 1..20: mol_type = other DNA
tttcacgtttccattgttca

SEQ ID NO: 29264 - DNA, 20 bp, synthetic construct
  misc_feature 1..20: note = chemically synthesized
  source 1..20: mol_type = other DNA
ttcacgtttccattgttcat

SEQ ID NO: 29265 - DNA, 20 bp, synthetic construct
  misc_feature 1..20: note = chemically synthesized
  source 1..20: mol_type = other DNA
attgttcatgggcaaaattc

SEQ ID NO: 29266 - DNA, 20 bp, synthetic construct
  misc_feature 1..20: note = chemically synthesized
  source 1..20: mol_type = other DNA
gttcatgggcaaaattctgg

SEQ ID NO: 29267 - DNA, 20 bp, synthetic construct
  misc_feature 1..20: note = chemically synthesized
  source 1..20: mol_type = other DNA
atgggcaaaattctggcagc

SEQ ID NO: 29268 - DNA, 20 bp, synthetic construct
  misc_feature 1..20: note = chemically synthesized
  source 1..20: mol_type = other DNA
tgggcaaaattctggcagca

SEQ ID NO: 29269 - DNA, 20 bp, synthetic construct
  misc_feature 1..20: note = chemically synthesized
  source 1..20: mol_type = other DNA
gggcaaaattctggcagcaa

SEQ ID NO: 29270 - DNA, 20 bp, synthetic construct
  misc_feature 1..20: note = chemically synthesized
  source 1..20: mol_type = other DNA
cagcaagggattcttctcct

SEQ ID NO: 29271 - DNA, 20 bp, synthetic construct
  misc_feature 1..20: note = chemically synthesized
  source 1..20: mol_type = other DNA
taagaaaccttttgttttct

SEQ ID NO: 29272 - DNA, 20 bp, synthetic construct
  misc_feature 1..20: note = chemically synthesized
  source 1..20: mol_type = other DNA
gaatacatttccttgtttgc

SEQ ID NO: 29273 - DNA, 20 bp, synthetic construct
  misc_feature 1..20: note = chemically synthesized
  source 1..20: mol_type = other DNA
tccttgtttgccagaaaaca

SEQ ID NO: 29274 - DNA, 20 bp, synthetic construct
  misc_feature 1..20: note = chemically synthesized
  source 1..20: mol_type = other DNA
tgtttgccagaaaacatggt

SEQ ID NO: 29275 - DNA, 20 bp, synthetic construct
  misc_feature 1..20: note = chemically synthesized
  source 1..20: mol_type = other DNA
agaaaacatggtaagataac

SEQ ID NO: 29276 - DNA, 20 bp, synthetic construct
  misc_feature 1..20: note = chemically synthesized
  source 1..20: mol_type = other DNA
aaaacatggtaagataactg

SEQ ID NO: 29277 - DNA, 20 bp, synthetic construct
  misc_feature 1..20: note = chemically synthesized
  source 1..20: mol_type = other DNA
aacatggtaagataactgga

SEQ ID NO: 29278 - DNA, 20 bp, synthetic construct
  misc_feature 1..20: note = chemically synthesized
  source 1..20: mol_type = other DNA
taacattcattttattcatg

SEQ ID NO: 29279 - DNA, 20 bp, synthetic construct
  misc_feature 1..20: note = chemically synthesized
  source 1..20: mol_type = other DNA
ttcatgaagaaactgttatt

SEQ ID NO: 29280 - DNA, 20 bp, synthetic construct
  misc_feature 1..20: note = chemically synthesized
  source 1..20: mol_type = other DNA
aagaaactgttattcagttt

SEQ ID NO: 29281 - DNA, 20 bp, synthetic construct
  misc_feature 1..20: note = chemically synthesized
  source 1..20: mol_type = other DNA
agaaactgttattcagttta

SEQ ID NO: 29282 - DNA, 20 bp, synthetic construct
  misc_feature 1..20: note = chemically synthesized
  source 1..20: mol_type = other DNA
gaaactgttattcagtttaa

SEQ ID NO: 29283 - DNA, 20 bp, synthetic construct
  misc_feature 1..20: note = chemically synthesized
  source 1..20: mol_type = other DNA
aaactgttattcagtttaag

SEQ ID NO: 29284 - DNA, 20 bp, synthetic construct
  misc_feature 1..20: note = chemically synthesized
  source 1..20: mol_type = other DNA
cagtttaaggggttcttttt

SEQ ID NO: 29285 - DNA, 20 bp, synthetic construct
  misc_feature 1..20: note = chemically synthesized
  source 1..20: mol_type = other DNA
ttaaggggttctttttcaga

SEQ ID NO: 29286 - DNA, 20 bp, synthetic construct
  misc_feature 1..20: note = chemically synthesized
  source 1..20: mol_type = other DNA
ggttctttttcagaaagttt

SEQ ID NO: 29287 - DNA, 20 bp, synthetic construct
  misc_feature 1..20: note = chemically synthesized
  source 1..20: mol_type = other DNA
tcagaaagtttcagaaatcc

SEQ ID NO: 29288 - DNA, 20 bp, synthetic construct
  misc_feature 1..20: note = chemically synthesized
  source 1..20: mol_type = other DNA
aatccaagacctttgactgc

SEQ ID NO: 29289 - DNA, 20 bp, synthetic construct
  misc_feature 1..20: note = chemically synthesized
  source 1..20: mol_type = other DNA
gtactgtgttctttcatcta

SEQ ID NO: 29290 - DNA, 20 bp, synthetic construct
  misc_feature 1..20: note = chemically synthesized
  source 1..20: mol_type = other DNA
tactgtgttctttcatctat

SEQ ID NO: 29291 - DNA, 20 bp, synthetic construct
  misc_feature 1..20: note = chemically synthesized
  source 1..20: mol_type = other DNA
ggacatttcctttgaaaact

SEQ ID NO: 29292 - DNA, 20 bp, synthetic construct
  misc_feature 1..20: note = chemically synthesized
  source 1..20: mol_type = other DNA
gacatttcctttgaaaactg

SEQ ID NO: 29293 - DNA, 20 bp, synthetic construct
  misc_feature 1..20: note = chemically synthesized
  source 1..20: mol_type = other DNA
aatatttaattcttacataa

SEQ ID NO: 29294 - DNA, 20 bp, synthetic construct
  misc_feature 1..20: note = chemically synthesized
  source 1..20: mol_type = other DNA
attcttacataatagtaaaa

SEQ ID NO: 29295 - DNA, 20 bp, synthetic construct
  misc_feature 1..20: note = chemically synthesized
  source 1..20: mol_type = other DNA
ataatagtaaaaaagtgaat

SEQ ID NO: 29296 - DNA, 20 bp, synthetic construct
  misc_feature 1..20: note = chemically synthesized
  source 1..20: mol_type = other DNA
gtaaaaaagtgaattggcct

SEQ ID NO: 29297 - DNA, 20 bp, synthetic construct
  misc_feature 1..20: note = chemically synthesized
  source 1..20: mol_type = other DNA
aaagtgaattggccttggaa

SEQ ID NO: 29298 - DNA, 20 bp, synthetic construct
  misc_feature 1..20: note = chemically synthesized
  source 1..20: mol_type = other DNA
cttggaaaagacctaaatcc

SEQ ID NO: 29299 - DNA, 20 bp, synthetic construct
  misc_feature 1..20: note = chemically synthesized
  source 1..20: mol_type = other DNA
aatcaatttgctctatgaac

SEQ ID NO: 29300 - DNA, 20 bp, synthetic construct
  misc_feature 1..20: note = chemically synthesized
  source 1..20: mol_type = other DNA
tcaatttgctctatgaactg

SEQ ID NO: 29301 - DNA, 20 bp, synthetic construct
  misc_feature 1..20: note = chemically synthesized
  source 1..20: mol_type = other DNA
caatttgctctatgaactgg

SEQ ID NO: 29302 - DNA, 20 bp, synthetic construct
  misc_feature 1..20: note = chemically synthesized
  source 1..20: mol_type = other DNA
atttgctctatgaactggag

SEQ ID NO: 29303 - DNA, 20 bp, synthetic construct
  misc_feature 1..20: note = chemically synthesized
  source 1..20: mol_type = other DNA
tgctctatgaactggaggag

SEQ ID NO: 29304 - DNA, 20 bp, synthetic construct
  misc_feature 1..20: note = chemically synthesized
  source 1..20: mol_type = other DNA
gctctatgaactggaggagt

SEQ ID NO: 29305 - DNA, 20 bp, synthetic construct
  misc_feature 1..20: note = chemically synthesized
  source 1..20: mol_type = other DNA
gagtgggattcatgatctct

SEQ ID NO: 29306 - DNA, 20 bp, synthetic construct
  misc_feature 1..20: note = chemically synthesized
  source 1..20: mol_type = other DNA
catatcactactatgaaatg

SEQ ID NO: 29307 - DNA, 20 bp, synthetic construct
  misc_feature 1..20: note = chemically synthesized
  source 1..20: mol_type = other DNA
atatcactactatgaaatgc

SEQ ID NO: 29308 - DNA, 20 bp, synthetic construct
  misc_feature 1..20: note = chemically synthesized
  source 1..20: mol_type = other DNA
tatcactactatgaaatgca

SEQ ID NO: 29309 - DNA, 20 bp, synthetic construct
  misc_feature 1..20: note = chemically synthesized
  source 1..20: mol_type = other DNA
cactactatgaaatgcaggg

SEQ ID NO: 29310 - DNA, 20 bp, synthetic construct
  misc_feature 1..20: note = chemically synthesized
  source 1..20: mol_type = other DNA
aattcaaatcattaaattta

SEQ ID NO: 29311 - DNA, 20 bp, synthetic construct
  misc_feature 1..20: note = chemically synthesized
  source 1..20: mol_type = other DNA
cattaaatttaaagaaacta

SEQ ID NO: 29312 - DNA, 20 bp, synthetic construct
  misc_feature 1..20: note = chemically synthesized
  source 1..20: mol_type = other DNA
taaatttaaagaaactatag

SEQ ID NO: 29313 - DNA, 20 bp, synthetic construct
  misc_feature 1..20: note = chemically synthesized
  source 1..20: mol_type = other DNA
ctatagtggcaatgtattat

SEQ ID NO: 29314 - DNA, 20 bp, synthetic construct
  misc_feature 1..20: note = chemically synthesized
  source 1..20: mol_type = other DNA
tatagtggcaatgtattatt

SEQ ID NO: 29315 - DNA, 20 bp, synthetic construct
  misc_feature 1..20: note = chemically synthesized
  source 1..20: mol_type = other DNA
atgaaaatctcaaaccatac

SEQ ID NO: 29316 - DNA, 20 bp, synthetic construct
  misc_feature 1..20: note = chemically synthesized
  source 1..20: mol_type = other DNA
tgaaaatctcaaaccatacc

SEQ ID NO: 29317 - DNA, 20 bp, synthetic construct
  misc_feature 1..20: note = chemically synthesized
  source 1..20: mol_type = other DNA
gctatgataatattaaaata

SEQ ID NO: 29318 - DNA, 20 bp, synthetic construct
  misc_feature 1..20: note = chemically synthesized
  source 1..20: mol_type = other DNA
attaaaataaagatacattg

SEQ ID NO: 29319 - DNA, 20 bp, synthetic construct
  misc_feature 1..20: note = chemically synthesized
  source 1..20: mol_type = other DNA
aacttgtgtaaatcacattg

SEQ ID NO: 29320 - DNA, 20 bp, synthetic construct
  misc_feature 1..20: note = chemically synthesized
  source 1..20: mol_type = other DNA
acttgtgtaaatcacattgt

SEQ ID NO: 29321 - DNA, 20 bp, synthetic construct
  misc_feature 1..20: note = chemically synthesized
  source 1..20: mol_type = other DNA
cttgtgtaaatcacattgtg

SEQ ID NO: 29322 - DNA, 20 bp, synthetic construct
  misc_feature 1..20: note = chemically synthesized
  source 1..20: mol_type = other DNA
aacacttcccttccccttga

SEQ ID NO: 29323 - DNA, 20 bp, synthetic construct
  misc_feature 1..20: note = chemically synthesized
  source 1..20: mol_type = other DNA
acacttcccttccccttgaa

SEQ ID NO: 29324 - DNA, 20 bp, synthetic construct
  misc_feature 1..20: note = chemically synthesized
  source 1..20: mol_type = other DNA
cacttcccttccccttgaaa

SEQ ID NO: 29325 - DNA, 20 bp, synthetic construct
  misc_feature 1..20: note = chemically synthesized
  source 1..20: mol_type = other DNA
tccccttgaaagggaaatga

SEQ ID NO: 29326 - DNA, 20 bp, synthetic construct
  misc_feature 1..20: note = chemically synthesized
  source 1..20: mol_type = other DNA
aaagggaaatgatagaaaat

SEQ ID NO: 29327 - DNA, 20 bp, synthetic construct
  misc_feature 1..20: note = chemically synthesized
  source 1..20: mol_type = other DNA
atgatagaaaataagtatta

SEQ ID NO: 29328 - DNA, 20 bp, synthetic construct
  misc_feature 1..20: note = chemically synthesized
  source 1..20: mol_type = other DNA
tgatagaaaataagtattaa

SEQ ID NO: 29329 - DNA, 20 bp, synthetic construct
  misc_feature 1..20: note = chemically synthesized
  source 1..20: mol_type = other DNA
tagaaaataagtattaaagg

SEQ ID NO: 29330 - DNA, 20 bp, synthetic construct
  misc_feature 1..20: note = chemically synthesized
  source 1..20: mol_type = other DNA
aataagtattaaaggcagct

SEQ ID NO: 29331 - DNA, 20 bp, synthetic construct
  misc_feature 1..20: note = chemically synthesized
  source 1..20: mol_type = other DNA
ataagtattaaaggcagctt

SEQ ID NO: 29332 - DNA, 20 bp, synthetic construct
  misc_feature 1..20: note = chemically synthesized
  source 1..20: mol_type = other DNA
taagtattaaaggcagctta

SEQ ID NO: 29333 - DNA, 20 bp, synthetic construct
  misc_feature 1..20: note = chemically synthesized
  source 1..20: mol_type = other DNA
aagtattaaaggcagcttag

SEQ ID NO: 29334 - DNA, 20 bp, synthetic construct
  misc_feature 1..20: note = chemically synthesized
  source 1..20: mol_type = other DNA
ttttcaaaaaaaaatccatt

SEQ ID NO: 29335 - DNA, 20 bp, synthetic construct
  misc_feature 1..20: note = chemically synthesized
  source 1..20: mol_type = other DNA
attgagcattttctatgtac

SEQ ID NO: 29336 - DNA, 20 bp, synthetic construct
  misc_feature 1..20: note = chemically synthesized
  source 1..20: mol_type = other DNA
ttgagcattttctatgtacc

SEQ ID NO: 29337 - DNA, 20 bp, synthetic construct
  misc_feature 1..20: note = chemically synthesized
  source 1..20: mol_type = other DNA
ctatgtaccaggcactgttc

SEQ ID NO: 29338 - DNA, 20 bp, synthetic construct
  misc_feature 1..20: note = chemically synthesized
  source 1..20: mol_type = other DNA
caggcactgttctagaccct

SEQ ID NO: 29339 - DNA, 20 bp, synthetic construct
  misc_feature 1..20: note = chemically synthesized
  source 1..20: mol_type = other DNA
acacacatgctactgattat

SEQ ID NO: 29340 - DNA, 20 bp, synthetic construct
  misc_feature 1..20: note = chemically synthesized
  source 1..20: mol_type = other DNA
ataagatccataaaataact

SEQ ID NO: 29341 - DNA, 20 bp, synthetic construct
  misc_feature 1..20: note = chemically synthesized
  source 1..20: mol_type = other DNA
ataaaataacttagtttcac

SEQ ID NO: 29342 - DNA, 20 bp, synthetic construct
  misc_feature 1..20: note = chemically synthesized
  source 1..20: mol_type = other DNA
tagtttcactggcgtgttcc

SEQ ID NO: 29343 - DNA, 20 bp, synthetic construct
  misc_feature 1..20: note = chemically synthesized
  source 1..20: mol_type = other DNA
actggcgtgttcccagtgcc

SEQ ID NO: 29344 - DNA, 20 bp, synthetic construct
  misc_feature 1..20: note = chemically synthesized
  source 1..20: mol_type = other DNA
ctggcgtgttcccagtgccc

SEQ ID NO: 29345 - DNA, 20 bp, synthetic construct
  misc_feature 1..20: note = chemically synthesized
  source 1..20: mol_type = other DNA
tgttcccagtgcccaggtaa

SEQ ID NO: 29346 - DNA, 20 bp, synthetic construct
  misc_feature 1..20: note = chemically synthesized
  source 1..20: mol_type = other DNA
attaatgtttgttaaatgat

SEQ ID NO: 29347 - DNA, 20 bp, synthetic construct
  misc_feature 1..20: note = chemically synthesized
  source 1..20: mol_type = other DNA
tgtttgttaaatgatgagaa

SEQ ID NO: 29348 - DNA, 20 bp, synthetic construct
  misc_feature 1..20: note = chemically synthesized
  source 1..20: mol_type = other DNA
tttgttaaatgatgagaaaa

SEQ ID NO: 29349 - DNA, 20 bp, synthetic construct
  misc_feature 1..20: note = chemically synthesized
  source 1..20: mol_type = other DNA
ttgttaaatgatgagaaaag

SEQ ID NO: 29350 - DNA, 20 bp, synthetic construct
  misc_feature 1..20: note = chemically synthesized
  source 1..20: mol_type = other DNA
taaatgatgagaaaagagga

SEQ ID NO: 29351 - DNA, 20 bp, synthetic construct
  misc_feature 1..20: note = chemically synthesized
  source 1..20: mol_type = other DNA
atgatgagaaaagaggaaag

SEQ ID NO: 29352 - DNA, 20 bp, synthetic construct
  misc_feature 1..20: note = chemically synthesized
  source 1..20: mol_type = other DNA
atgagaaaagaggaaagcag

SEQ ID NO: 29353 - DNA, 20 bp, synthetic construct
  misc_feature 1..20: note = chemically synthesized
  source 1..20: mol_type = other DNA
tgagaaaagaggaaagcaga

SEQ ID NO: 29354 - DNA, 20 bp, synthetic construct
  misc_feature 1..20: note = chemically synthesized
  source 1..20: mol_type = other DNA
gagaaaagaggaaagcagaa

SEQ ID NO: 29355 - DNA, 20 bp, synthetic construct
  misc_feature 1..20: note = chemically synthesized
  source 1..20: mol_type = other DNA
agaaaagaggaaagcagaag

SEQ ID NO: 29356 - DNA, 20 bp, synthetic construct
  misc_feature 1..20: note = chemically synthesized
  source 1..20: mol_type = other DNA
aaagcagaaggggctctgct

SEQ ID NO: 29357 - DNA, 20 bp, synthetic construct
  misc_feature 1..20: note = chemically synthesized
  source 1..20: mol_type = other DNA
aagcagaaggggctctgctc

SEQ ID NO: 29358 - DNA, 20 bp, synthetic construct
  misc_feature 1..20: note = chemically synthesized
  source 1..20: mol_type = other DNA
gaaggggctctgctcaggtg

SEQ ID NO: 29359 - DNA, 20 bp, synthetic construct
  misc_feature 1..20: note = chemically synthesized
  source 1..20: mol_type = other DNA
aaggggctctgctcaggtgc

SEQ ID NO: 29360 - DNA, 20 bp, synthetic construct
  misc_feature 1..20: note = chemically synthesized
  source 1..20: mol_type = other DNA
ctcaggtgcaggaacttgtg

SEQ ID NO: 29361 - DNA, 20 bp, synthetic construct
  misc_feature 1..20: note = chemically synthesized
  source 1..20: mol_type = other DNA
caggtgcaggaacttgtgca

SEQ ID NO: 29362 - DNA, 20 bp, synthetic construct
  misc_feature 1..20: note = chemically synthesized
  source 1..20: mol_type = other DNA
gaacttgtgcagagatcttc

SEQ ID NO: 29363 - DNA, 20 bp, synthetic construct
  misc_feature 1..20: note = chemically synthesized
  source 1..20: mol_type = other DNA
agatcttctggactgattcc

SEQ ID NO: 29364 - DNA, 20 bp, synthetic construct
  misc_feature 1..20: note = chemically synthesized
  source 1..20: mol_type = other DNA
gactgattcccagtgctaac

SEQ ID NO: 29365 - DNA, 20 bp, synthetic construct
  misc_feature 1..20: note = chemically synthesized
  source 1..20: mol_type = other DNA
cagtgctaacaagtcccttc

SEQ ID NO: 29366 - DNA, 20 bp, synthetic construct
  misc_feature 1..20: note = chemically synthesized
  source 1..20: mol_type = other DNA
ttccagttttatccaccaat

SEQ ID NO: 29367 - DNA, 20 bp, synthetic construct
  misc_feature 1..20: note = chemically synthesized
  source 1..20: mol_type = other DNA
caccaataagctatgtcctt

SEQ ID NO: 29368 - DNA, 20 bp, synthetic construct
  misc_feature 1..20: note = chemically synthesized
  source 1..20: mol_type = other DNA
ttgagctcctgcccactctc

SEQ ID NO: 29369 - DNA, 20 bp, synthetic construct
  misc_feature 1..20: note = chemically synthesized
  source 1..20: mol_type = other DNA
gagctcctgcccactctcta

SEQ ID NO: 29370 - DNA, 20 bp, synthetic construct
  misc_feature 1..20: note = chemically synthesized
  source 1..20: mol_type = other DNA
ctagagaaaacttttatttc

SEQ ID NO: 29371 - DNA, 20 bp, synthetic construct
  misc_feature 1..20: note = chemically synthesized
  source 1..20: mol_type = other DNA
tagagaaaacttttatttca

SEQ ID NO: 29372 - DNA, 20 bp, synthetic construct
  misc_feature 1..20: note = chemically synthesized
  source 1..20: mol_type = other DNA
ttttatttcaaggcatactc

SEQ ID NO: 29373 - DNA, 20 bp, synthetic construct
  misc_feature 1..20: note = chemically synthesized
  source 1..20: mol_type = other DNA
tttatttcaaggcatactcc

SEQ ID NO: 29374 - DNA, 20 bp, synthetic construct
  misc_feature 1..20: note = chemically synthesized
  source 1..20: mol_type = other DNA
actccgggattcacatgtga

SEQ ID NO: 29375 - DNA, 20 bp, synthetic construct
  misc_feature 1..20: note = chemically synthesized
  source 1..20: mol_type = other DNA
tccgggattcacatgtgata

SEQ ID NO: 29376 - DNA, 20 bp, synthetic construct
  misc_feature 1..20: note = chemically synthesized
  source 1..20: mol_type = other DNA
ggattcacatgtgatagaga

SEQ ID NO: 29377 - DNA, 20 bp, synthetic construct
  misc_feature 1..20: note = chemically synthesized
  source 1..20: mol_type = other DNA
gatagagatggttctgttcc

SEQ ID NO: 29378 - DNA, 20 bp, synthetic construct
  misc_feature 1..20: note = chemically synthesized
  source 1..20: mol_type = other DNA
atagagatggttctgttccc

SEQ ID NO: 29379 - DNA, 20 bp, synthetic construct
  misc_feature 1..20: note = chemically synthesized
  source 1..20: mol_type = other DNA
ggttctgttcccaggaactt

SEQ ID NO: 29380 - DNA, 20 bp, synthetic construct
  misc_feature 1..20: note = chemically synthesized
  source 1..20: mol_type = other DNA
gttctgttcccaggaacttt

SEQ ID NO: 29381 - DNA, 20 bp, synthetic construct
  misc_feature 1..20: note = chemically synthesized
  source 1..20: mol_type = other DNA
ctttgggcatatttaaaaac

SEQ ID NO: 29382 - DNA, 20 bp, synthetic construct
  misc_feature 1..20: note = chemically synthesized
  source 1..20: mol_type = other DNA
ggcatatttaaaaactggac

SEQ ID NO: 29383 - DNA, 20 bp, synthetic construct
  misc_feature 1..20: note = chemically synthesized
  source 1..20: mol_type = other DNA
ggactggaaaaatttgtgac

SEQ ID NO: 29384 - DNA, 20 bp, synthetic construct
  misc_feature 1..20: note = chemically synthesized
  source 1..20: mol_type = other DNA
gaaaaatttgtgactagaaa

SEQ ID NO: 29385 - DNA, 20 bp, synthetic construct
  misc_feature 1..20: note = chemically synthesized
  source 1..20: mol_type = other DNA
aaaaatttgtgactagaaaa

SEQ ID NO: 29386 - DNA, 20 bp, synthetic construct
  misc_feature 1..20: note = chemically synthesized
  source 1..20: mol_type = other DNA
ttaaaaacacatgctcattt

SEQ ID NO: 29387 - DNA, 20 bp, synthetic construct
  misc_feature 1..20: note = chemically synthesized
  source 1..20: mol_type = other DNA
taaaaacacatgctcatttc

SEQ ID NO: 29388 - DNA, 20 bp, synthetic construct
  misc_feature 1..20: note = chemically synthesized
  source 1..20: mol_type = other DNA
cacatgctcatttcaggata

SEQ ID NO: 29389 - DNA, 20 bp, synthetic construct
  misc_feature 1..20: note = chemically synthesized
  source 1..20: mol_type = other DNA
atttcaggataaagatctct

SEQ ID NO: 29390 - DNA, 20 bp, synthetic construct
  misc_feature 1..20: note = chemically synthesized
  source 1..20: mol_type = other DNA
tttcaggataaagatctctg

SEQ ID NO: 29391 - DNA, 20 bp, synthetic construct
  misc_feature 1..20: note = chemically synthesized
  source 1..20: mol_type = other DNA
ggataaagatctctgaggaa

SEQ ID NO: 29392 - DNA, 20 bp, synthetic construct
  misc_feature 1..20: note = chemically synthesized
  source 1..20: mol_type = other DNA
agaatacaaaataatttaaa

SEQ ID NO: 29393 - DNA, 20 bp, synthetic construct
  misc_feature 1..20: note = chemically synthesized
  source 1..20: mol_type = other DNA
aataatttaaaaagaaacaa

SEQ ID NO: 29394 - DNA, 20 bp, synthetic construct
  misc_feature 1..20: note = chemically synthesized
  source 1..20: mol_type = other DNA
ttaaaaagaaacaacagaaa

SEQ ID NO: 29395 - DNA, 20 bp, synthetic construct
  misc_feature 1..20: note = chemically synthesized
  source 1..20: mol_type = other DNA
taaaaagaaacaacagaaac

SEQ ID NO: 29396 - DNA, 20 bp, synthetic construct
  misc_feature 1..20: note = chemically synthesized
  source 1..20: mol_type = other DNA
atacttcacttctctgtaat

SEQ ID NO: 29397 - DNA, 20 bp, synthetic construct
  misc_feature 1..20: note = chemically synthesized
  source 1..20: mol_type = other DNA
tacttcacttctctgtaata

SEQ ID NO: 29398 - DNA, 20 bp, synthetic construct
  misc_feature 1..20: note = chemically synthesized
  source 1..20: mol_type = other DNA
taataaggtttctgtcctcc

SEQ ID NO: 29399 - DNA, 20 bp, synthetic construct
  misc_feature 1..20: note = chemically synthesized
  source 1..20: mol_type = other DNA
gattctttctcactaaacta

SEQ ID NO: 29400 - DNA, 20 bp, synthetic construct
  misc_feature 1..20: note = chemically synthesized
  source 1..20: mol_type = other DNA
ttctttctcactaaactaca

SEQ ID NO: 29401 - DNA, 20 bp, synthetic construct
  misc_feature 1..20: note = chemically synthesized
  source 1..20: mol_type = other DNA
ctcactaaactacagagaat

SEQ ID NO: 29402 - DNA, 20 bp, synthetic construct
  misc_feature 1..20: note = chemically synthesized
  source 1..20: mol_type = other DNA
gcattctgtccacttctaca

SEQ ID NO: 29403 - DNA, 20 bp, synthetic construct
  misc_feature 1..20: note = chemically synthesized
  source 1..20: mol_type = other DNA
cattctgtccacttctacat

SEQ ID NO: 29404 - DNA, 20 bp, synthetic construct
  misc_feature 1..20: note = chemically synthesized
  source 1..20: mol_type = other DNA
ttttatgaatgcatacacac

SEQ ID NO: 29405 - DNA, 20 bp, synthetic construct
  misc_feature 1..20: note = chemically synthesized
  source 1..20: mol_type = other DNA
atacacacgagaactttgaa

SEQ ID NO: 29406 - DNA, 20 bp, synthetic construct
  misc_feature 1..20: note = chemically synthesized
  source 1..20: mol_type = other DNA
acacgagaactttgaacagt

SEQ ID NO: 29407 - DNA, 20 bp, synthetic construct
  misc_feature 1..20: note = chemically synthesized
  source 1..20: mol_type = other DNA
gaactttgaacagttagtat

SEQ ID NO: 29408 - DNA, 20 bp, synthetic construct
  misc_feature 1..20: note = chemically synthesized
  source 1..20: mol_type = other DNA
aactttgaacagttagtata

SEQ ID NO: 29409 - DNA, 20 bp, synthetic construct
  misc_feature 1..20: note = chemically synthesized
  source 1..20: mol_type = other DNA
taaggtgaattctgattttt

SEQ ID NO: 29410 - DNA, 20 bp, synthetic construct
  misc_feature 1..20: note = chemically synthesized
  source 1..20: mol_type = other DNA
tatataatgcatttaatttt

SEQ ID NO: 29411 - DNA, 20 bp, synthetic construct
  misc_feature 1..20: note = chemically synthesized
  source 1..20: mol_type = other DNA
atttaattttgagattatgc

SEQ ID NO: 29412 - DNA, 20 bp, synthetic construct
  misc_feature 1..20: note = chemically synthesized
  source 1..20: mol_type = other DNA
gagattatgctggctctgat

SEQ ID NO: 29413 - DNA, 20 bp, synthetic construct
  misc_feature 1..20: note = chemically synthesized
  source 1..20: mol_type = other DNA
tgctggctctgattagccaa

SEQ ID NO: 29414 - DNA, 20 bp, synthetic construct
  misc_feature 1..20: note = chemically synthesized
  source 1..20: mol_type = other DNA
tggctctgattagccaaaag

SEQ ID NO: 29415 - DNA, 20 bp, synthetic construct
  misc_feature 1..20: note = chemically synthesized
  source 1..20: mol_type = other DNA
ggctctgattagccaaaaga

SEQ ID NO: 29416 - DNA, 20 bp, synthetic construct
  misc_feature 1..20: note = chemically synthesized
  source 1..20: mol_type = other DNA
tctgattagccaaaagaagg

SEQ ID NO: 29417 - DNA, 20 bp, synthetic construct
  misc_feature 1..20: note = chemically synthesized
  source 1..20: mol_type = other DNA
ggaagtaatatatcacattc

SEQ ID NO: 29418 - DNA, 20 bp, synthetic construct
  misc_feature 1..20: note = chemically synthesized
  source 1..20: mol_type = other DNA
tcacattctggttattattt

SEQ ID NO: 29419 - DNA, 20 bp, synthetic construct
  misc_feature 1..20: note = chemically synthesized
  source 1..20: mol_type = other DNA
ggttattatttcagatcctt

SEQ ID NO: 29420 - DNA, 20 bp, synthetic construct
  misc_feature 1..20: note = chemically synthesized
  source 1..20: mol_type = other DNA
gatcctttagattactgtaa

SEQ ID NO: 29421 - DNA, 20 bp, synthetic construct
  misc_feature 1..20: note = chemically synthesized
  source 1..20: mol_type = other DNA
ttactgtaatagacatgaaa

SEQ ID NO: 29422 - DNA, 20 bp, synthetic construct
  misc_feature 1..20: note = chemically synthesized
  source 1..20: mol_type = other DNA
cacaacacatgacataattt

SEQ ID NO: 29423 - DNA, 20 bp, synthetic construct
  misc_feature 1..20: note = chemically synthesized
  source 1..20: mol_type = other DNA
tcagatcgtttaaatcacac

SEQ ID NO: 29424 - DNA, 20 bp, synthetic construct
  misc_feature 1..20: note = chemically synthesized
  source 1..20: mol_type = other DNA
agtcatcactgccatttacc

SEQ ID NO: 29425 - DNA, 20 bp, synthetic construct
  misc_feature 1..20: note = chemically synthesized
  source 1..20: mol_type = other DNA
actgccatttacccagcaat

SEQ ID NO: 29426 - DNA, 20 bp, synthetic construct
  misc_feature 1..20: note = chemically synthesized
  source 1..20: mol_type = other DNA
ccatttacccagcaatcagt

SEQ ID NO: 29427 - DNA, 20 bp, synthetic construct
  misc_feature 1..20: note = chemically synthesized
  source 1..20: mol_type = other DNA
atcagttggcttgattcttc

SEQ ID NO: 29428 - DNA, 20 bp, synthetic construct
  misc_feature 1..20: note = chemically synthesized
  source 1..20: mol_type = other DNA
gcttgattcttcaagatctt

SEQ ID NO: 29429 - DNA, 20 bp, synthetic construct
  misc_feature 1..20: note = chemically synthesized
  source 1..20: mol_type = other DNA
cttgattcttcaagatcttg

SEQ ID NO: 29430 - DNA, 20 bp, synthetic construct
  misc_feature 1..20: note = chemically synthesized
  source 1..20: mol_type = other DNA
cttcaagatcttgaggaact

SEQ ID NO: 29431 - DNA, 20 bp, synthetic construct
  misc_feature 1..20: note = chemically synthesized
  source 1..20: mol_type = other DNA
ctttgctaatgttccttcaa

SEQ ID NO: 29432 - DNA, 20 bp, synthetic construct
  misc_feature 1..20: note = chemically synthesized
  source 1..20: mol_type = other DNA
tagtcttgacacttttaaac

SEQ ID NO: 29433 - DNA, 20 bp, synthetic construct
  misc_feature 1..20: note = chemically synthesized
  source 1..20: mol_type = other DNA
gtcttgacacttttaaacta

SEQ ID NO: 29434 - DNA, 20 bp, synthetic construct
  misc_feature 1..20: note = chemically synthesized
  source 1..20: mol_type = other DNA
cttgacacttttaaactaga

SEQ ID NO: 29435 - DNA, 20 bp, synthetic construct
  misc_feature 1..20: note = chemically synthesized
  source 1..20: mol_type = other DNA
actagagagtataaacccac

SEQ ID NO: 29436 - DNA, 20 bp, synthetic construct
  misc_feature 1..20: note = chemically synthesized
  source 1..20: mol_type = other DNA
ctagagagtataaacccaca

SEQ ID NO: 29437 - DNA, 20 bp, synthetic construct
  misc_feature 1..20: note = chemically synthesized
  source 1..20: mol_type = other DNA
ggaattgttttataatttta

SEQ ID NO: 29438 - DNA, 20 bp, synthetic construct
  misc_feature 1..20: note = chemically synthesized
  source 1..20: mol_type = other DNA
tttcaaaatcatttacattg

SEQ ID NO: 29439 - DNA, 20 bp, synthetic construct
  misc_feature 1..20: note = chemically synthesized
  source 1..20: mol_type = other DNA
ctaccttgccttctcttacc

SEQ ID NO: 29440 - DNA, 20 bp, synthetic construct
  misc_feature 1..20: note = chemically synthesized
  source 1..20: mol_type = other DNA
ttgccttctcttacccagca

SEQ ID NO: 29441 - DNA, 20 bp, synthetic construct
  misc_feature 1..20: note = chemically synthesized
  source 1..20: mol_type = other DNA
ttctcttacccagcacagat

SEQ ID NO: 29442 - DNA, 20 bp, synthetic construct
  misc_feature 1..20: note = chemically synthesized
  source 1..20: mol_type = other DNA
tctcttacccagcacagatg

SEQ ID NO: 29443 - DNA, 20 bp, synthetic construct
  misc_feature 1..20: note = chemically synthesized
  source 1..20: mol_type = other DNA
ttattttataattcctacat

SEQ ID NO: 29444 - DNA, 20 bp, synthetic construct
  misc_feature 1..20: note = chemically synthesized
  source 1..20: mol_type = other DNA
ttataattcctacataagca

SEQ ID NO: 29445 - DNA, 20 bp, synthetic construct
  misc_feature 1..20: note = chemically synthesized
  source 1..20: mol_type = other DNA
cctacataagcatagcattg

SEQ ID NO: 29446 - DNA, 20 bp, synthetic construct
  misc_feature 1..20: note = chemically synthesized
  source 1..20: mol_type = other DNA
aaaaattactttcattctga

SEQ ID NO: 29447 - DNA, 20 bp, synthetic construct
  misc_feature 1..20: note = chemically synthesized
  source 1..20: mol_type = other DNA
aaaattactttcattctgaa

SEQ ID NO: 29448 - DNA, 20 bp, synthetic construct
  misc_feature 1..20: note = chemically synthesized
  source 1..20: mol_type = other DNA
aattactttcattctgaaag

SEQ ID NO: 29449 - DNA, 20 bp, synthetic construct
  misc_feature 1..20: note = chemically synthesized
  source 1..20: mol_type = other DNA
ctttcattctgaaaggagca

SEQ ID NO: 29450 - DNA, 20 bp, synthetic construct
  misc_feature 1..20: note = chemically synthesized
  source 1..20: mol_type = other DNA
agcacagtattttgcctttt

SEQ ID NO: 29451 - DNA, 20 bp, synthetic construct
  misc_feature 1..20: note = chemically synthesized
  source 1..20: mol_type = other DNA
acagtattttgccttttgag

SEQ ID NO: 29452 - DNA, 20 bp, synthetic construct
  misc_feature 1..20: note = chemically synthesized
  source 1..20: mol_type = other DNA
tgaattaaaacattaattcc

SEQ ID NO: 29453 - DNA, 20 bp, synthetic construct
  misc_feature 1..20: note = chemically synthesized
  source 1..20: mol_type = other DNA
tgtgaatatgaaacattctt

SEQ ID NO: 29454 - DNA, 20 bp, synthetic construct
  misc_feature 1..20: note = chemically synthesized
  source 1..20: mol_type = other DNA
gcatttcatataattactaa

SEQ ID NO: 29455 - DNA, 20 bp, synthetic construct
  misc_feature 1..20: note = chemically synthesized
  source 1..20: mol_type = other DNA
atataattactaacagaatg

SEQ ID NO: 29456 - DNA, 20 bp, synthetic construct
  misc_feature 1..20: note = chemically synthesized
  source 1..20: mol_type = other DNA
ataattactaacagaatgta

SEQ ID NO: 29457 - DNA, 20 bp, synthetic construct
  misc_feature 1..20: note = chemically synthesized
  source 1..20: mol_type = other DNA
tactaacagaatgtagagtt

SEQ ID NO: 29458 - DNA, 20 bp, synthetic construct
  misc_feature 1..20: note = chemically synthesized
  source 1..20: mol_type = other DNA
actaacagaatgtagagttg

SEQ ID NO: 29459 - DNA, 20 bp, synthetic construct
  misc_feature 1..20: note = chemically synthesized
  source 1..20: mol_type = other DNA
gtagagttgaggtttccaac

SEQ ID NO: 29460 - DNA, 20 bp, synthetic construct
  misc_feature 1..20: note = chemically synthesized
  source 1..20: mol_type = other DNA
tttaattatactattttgct

SEQ ID NO: 29461 - DNA, 20 bp, synthetic construct
  misc_feature 1..20: note = chemically synthesized
  source 1..20: mol_type = other DNA
atttctatgttgtcataata

SEQ ID NO: 29462 - DNA, 20 bp, synthetic construct
  misc_feature 1..20: note = chemically synthesized
  source 1..20: mol_type = other DNA
taatttaaatgcacattcca

SEQ ID NO: 29463 - DNA, 20 bp, synthetic construct
  misc_feature 1..20: note = chemically synthesized
  source 1..20: mol_type = other DNA
aaatgcacattccatggcaa

SEQ ID NO: 29464 - DNA, 20 bp, synthetic construct
  misc_feature 1..20: note = chemically synthesized
  source 1..20: mol_type = other DNA
tccctcttcaacacatacac

SEQ ID NO: 29465 - DNA, 20 bp, synthetic construct
  misc_feature 1..20: note = chemically synthesized
  source 1..20: mol_type = other DNA
catacacaagtctgtattca

SEQ ID NO: 29466 - DNA, 20 bp, synthetic construct
  misc_feature 1..20: note = chemically synthesized
  source 1..20: mol_type = other DNA
gtattcatagcctgttgtaa

SEQ ID NO: 29467 - DNA, 20 bp, synthetic construct
  misc_feature 1..20: note = chemically synthesized
  source 1..20: mol_type = other DNA
catagcctgttgtaatagac

SEQ ID NO: 29468 - DNA, 20 bp, synthetic construct
  misc_feature 1..20: note = chemically synthesized
  source 1..20: mol_type = other DNA
atagcctgttgtaatagaca

SEQ ID NO: 29469 - DNA, 20 bp, synthetic construct
  misc_feature 1..20: note = chemically synthesized
  source 1..20: mol_type = other DNA
gtaatagacaaggttaaatg

SEQ ID NO: 29470 - DNA, 20 bp, synthetic construct
  misc_feature 1..20: note = chemically synthesized
  source 1..20: mol_type = other DNA
taaatgctttcctcactcac

SEQ ID NO: 29471 - DNA, 20 bp, synthetic construct
  misc_feature 1..20: note = chemically synthesized
  source 1..20: mol_type = other DNA
tttcctcactcactagcaat

SEQ ID NO: 29472 - DNA, 20 bp, synthetic construct
  misc_feature 1..20: note = chemically synthesized
  source 1..20: mol_type = other DNA
cactagcaattggttatcac

SEQ ID NO: 29473 - DNA, 20 bp, synthetic construct
  misc_feature 1..20: note = chemically synthesized
  source 1..20: mol_type = other DNA
ctagcaattggttatcacta

SEQ ID NO: 29474 - DNA, 20 bp, synthetic construct
  misc_feature 1..20: note = chemically synthesized
  source 1..20: mol_type = other DNA
agcaattggttatcactaga

SEQ ID NO: 29475 - DNA, 20 bp, synthetic construct
  misc_feature 1..20: note = chemically synthesized
  source 1..20: mol_type = other DNA
aaatcttactctacattcct

SEQ ID NO: 29476 - DNA, 20 bp, synthetic construct
  misc_feature 1..20: note = chemically synthesized
  source 1..20: mol_type = other DNA
ctctacattcctcagtcacc

SEQ ID NO: 29477 - DNA, 20 bp, synthetic construct
  misc_feature 1..20: note = chemically synthesized
  source 1..20: mol_type = other DNA
cattcctcagtcacctagtg

SEQ ID NO: 29478 - DNA, 20 bp, synthetic construct
  misc_feature 1..20: note = chemically synthesized
  source 1..20: mol_type = other DNA
attcctcagtcacctagtga

SEQ ID NO: 29479 - DNA, 20 bp, synthetic construct
  misc_feature 1..20: note = chemically synthesized
  source 1..20: mol_type = other DNA
aaggtgtactgatccacctt

SEQ ID NO: 29480 - DNA, 20 bp, synthetic construct
  misc_feature 1..20: note = chemically synthesized
  source 1..20: mol_type = other DNA
aggtgtactgatccaccttc

SEQ ID NO: 29481 - DNA, 20 bp, synthetic construct
  misc_feature 1..20: note = chemically synthesized
  source 1..20: mol_type = other DNA
gtgtactgatccaccttcag

SEQ ID NO: 29482 - DNA, 20 bp, synthetic construct
  misc_feature 1..20: note = chemically synthesized
  source 1..20: mol_type = other DNA
tactgatccaccttcaggag

SEQ ID NO: 29483 - DNA, 20 bp, synthetic construct
  misc_feature 1..20: note = chemically synthesized
  source 1..20: mol_type = other DNA
ggagcagtacaaacctttat

SEQ ID NO: 29484 - DNA, 20 bp, synthetic construct
  misc_feature 1..20: note = chemically synthesized
  source 1..20: mol_type = other DNA
acctttattggtcacttccc

SEQ ID NO: 29485 - DNA, 20 bp, synthetic construct
  misc_feature 1..20: note = chemically synthesized
  source 1..20: mol_type = other DNA
tcacttcccaagcaacttca

SEQ ID NO: 29486 - DNA, 20 bp, synthetic construct
  misc_feature 1..20: note = chemically synthesized
  source 1..20: mol_type = other DNA
acttcccaagcaacttcaaa

SEQ ID NO: 29487 - DNA, 20 bp, synthetic construct
  misc_feature 1..20: note = chemically synthesized
  source 1..20: mol_type = other DNA
tcccaagcaacttcaaagag

SEQ ID NO: 29488 - DNA, 20 bp, synthetic construct
  misc_feature 1..20: note = chemically synthesized
  source 1..20: mol_type = other DNA
aaagagcagtaactcctcca

SEQ ID NO: 29489 - DNA, 20 bp, synthetic construct
  misc_feature 1..20: note = chemically synthesized
  source 1..20: mol_type = other DNA
aagagcagtaactcctccac

SEQ ID NO: 29490 - DNA, 20 bp, synthetic construct
  misc_feature 1..20: note = chemically synthesized
  source 1..20: mol_type = other DNA
agcagtaactcctccacagg

SEQ ID NO: 29491 - DNA, 20 bp, synthetic construct
  misc_feature 1..20: note = chemically synthesized
  source 1..20: mol_type = other DNA
gaagttcttcgacttcccac

SEQ ID NO: 29492 - DNA, 20 bp, synthetic construct
  misc_feature 1..20: note = chemically synthesized
  source 1..20: mol_type = other DNA
aagttcttcgacttcccact

SEQ ID NO: 29493 - DNA, 20 bp, synthetic construct
  misc_feature 1..20: note = chemically synthesized
  source 1..20: mol_type = other DNA
agttcttcgacttcccactg

SEQ ID NO: 29494 - DNA, 20 bp, synthetic construct
  misc_feature 1..20: note = chemically synthesized
  source 1..20: mol_type = other DNA
tcttcgacttcccactgggg

SEQ ID NO: 29495 - DNA, 20 bp, synthetic construct
  misc_feature 1..20: note = chemically synthesized
  source 1..20: mol_type = other DNA
tcccactggggaagcccacc

SEQ ID NO: 29496 - DNA, 20 bp, synthetic construct
  misc_feature 1..20: note = chemically synthesized
  source 1..20: mol_type = other DNA
cccactggggaagcccaccc

SEQ ID NO: 29497 - DNA, 20 bp, synthetic construct
  misc_feature 1..20: note = chemically synthesized
  source 1..20: mol_type = other DNA
ccactggggaagcccaccca

SEQ ID NO: 29498 - DNA, 20 bp, synthetic construct
  misc_feature 1..20: note = chemically synthesized
  source 1..20: mol_type = other DNA
aagcccacccagggatgtta

SEQ ID NO: 29499 - DNA, 20 bp, synthetic construct
  misc_feature 1..20: note = chemically synthesized
  source 1..20: mol_type = other DNA
gcccacccagggatgttaca

SEQ ID NO: 29500 - DNA, 20 bp, synthetic construct
  misc_feature 1..20: note = chemically synthesized
  source 1..20: mol_type = other DNA
ccacccagggatgttacaga

SEQ ID NO: 29501 - DNA, 20 bp, synthetic construct
  misc_feature 1..20: note = chemically synthesized
  source 1..20: mol_type = other DNA
cacccagggatgttacagag

SEQ ID NO: 29502 - DNA, 20 bp, synthetic construct
  misc_feature 1..20: note = chemically synthesized
  source 1..20: mol_type = other DNA
acccagggatgttacagaga

SEQ ID NO: 29503 - DNA, 20 bp, synthetic construct
  misc_feature 1..20: note = chemically synthesized
  source 1..20: mol_type = other DNA
gggatgttacagagagggat

SEQ ID NO: 29504 - DNA, 20 bp, synthetic construct
  misc_feature 1..20: note = chemically synthesized
  source 1..20: mol_type = other DNA
acagagagggatcggcctcg

SEQ ID NO: 29505 - DNA, 20 bp, synthetic construct
  misc_feature 1..20: note = chemically synthesized
  source 1..20: mol_type = other DNA
gcctcgaagcattcttctta

SEQ ID NO: 29506 - DNA, 20 bp, synthetic construct
  misc_feature 1..20: note = chemically synthesized
  source 1..20: mol_type = other DNA
cattcttcttacagtcctcc

SEQ ID NO: 29507 - DNA, 20 bp, synthetic construct
  misc_feature 1..20: note = chemically synthesized
  source 1..20: mol_type = other DNA
ctttgaattcctgtttcaat

SEQ ID NO: 29508 - DNA, 20 bp, synthetic construct
  misc_feature 1..20: note = chemically synthesized
  source 1..20: mol_type = other DNA
gtttcaattagttgtaatcc

SEQ ID NO: 29509 - DNA, 20 bp, synthetic construct
  misc_feature 1..20: note = chemically synthesized
  source 1..20: mol_type = other DNA
tttcaattagttgtaatccc

SEQ ID NO: 29510 - DNA, 20 bp, synthetic construct
  misc_feature 1..20: note = chemically synthesized
  source 1..20: mol_type = other DNA
tcaattagttgtaatcccag

SEQ ID NO: 29511 - DNA, 20 bp, synthetic construct
  misc_feature 1..20: note = chemically synthesized
  source 1..20: mol_type = other DNA
attagttgtaatcccaggag

SEQ ID NO: 29512 - DNA, 20 bp, synthetic construct
  misc_feature 1..20: note = chemically synthesized
  source 1..20: mol_type = other DNA
tagttgtaatcccaggagaa

SEQ ID NO: 29513 - DNA, 20 bp, synthetic construct
  misc_feature 1..20: note = chemically synthesized
  source 1..20: mol_type = other DNA
tcccaggagaagagaactta

SEQ ID NO: 29514 - DNA, 20 bp, synthetic construct
  misc_feature 1..20: note = chemically synthesized
  source 1..20: mol_type = other DNA
cccaggagaagagaacttac

SEQ ID NO: 29515 - DNA, 20 bp, synthetic construct
  misc_feature 1..20: note = chemically synthesized
  source 1..20: mol_type = other DNA
aagagaacttacaggcacaa

SEQ ID NO: 29516 - DNA, 20 bp, synthetic construct
  misc_feature 1..20: note = chemically synthesized
  source 1..20: mol_type = other DNA
gaacttacaggcacaaaagt

SEQ ID NO: 29517 - DNA, 20 bp, synthetic construct
  misc_feature 1..20: note = chemically synthesized
  source 1..20: mol_type = other DNA
acttacaggcacaaaagtta

SEQ ID NO: 29518 - DNA, 20 bp, synthetic construct
  misc_feature 1..20: note = chemically synthesized
  source 1..20: mol_type = other DNA
acaggcacaaaagttagagt

SEQ ID NO: 29519 - DNA, 20 bp, synthetic construct
  misc_feature 1..20: note = chemically synthesized
  source 1..20: mol_type = other DNA
ggcacaaaagttagagttgg

SEQ ID NO: 29520 - DNA, 20 bp, synthetic construct
  misc_feature 1..20: note = chemically synthesized
  source 1..20: mol_type = other DNA
cacaaaagttagagttggta

SEQ ID NO: 29521 - DNA, 20 bp, synthetic construct
  misc_feature 1..20: note = chemically synthesized
  source 1..20: mol_type = other DNA
gttagagttggtagagttac

SEQ ID NO: 29522 - DNA, 20 bp, synthetic construct
  misc_feature 1..20: note = chemically synthesized
  source 1..20: mol_type = other DNA
ttagagttggtagagttacc

SEQ ID NO: 29523 - DNA, 20 bp, synthetic construct
  misc_feature 1..20: note = chemically synthesized
  source 1..20: mol_type = other DNA
ttggtagagttaccaggctt

SEQ ID NO: 29524 - DNA, 20 bp, synthetic construct
  misc_feature 1..20: note = chemically synthesized
  source 1..20: mol_type = other DNA
gtagagttaccaggctttgg

SEQ ID NO: 29525 - DNA, 20 bp, synthetic construct
  misc_feature 1..20: note = chemically synthesized
  source 1..20: mol_type = other DNA
caggctttggtagcttctct

SEQ ID NO: 29526 - DNA, 20 bp, synthetic construct
  misc_feature 1..20: note = chemically synthesized
  source 1..20: mol_type = other DNA
aggctttggtagcttctctt

SEQ ID NO: 29527 - DNA, 20 bp, synthetic construct
  misc_feature 1..20: note = chemically synthesized
  source 1..20: mol_type = other DNA
agcttctcttgggaataaac

SEQ ID NO: 29528 - DNA, 20 bp, synthetic construct
  misc_feature 1..20: note = chemically synthesized
  source 1..20: mol_type = other DNA
ttctcttgggaataaactag

SEQ ID NO: 29529 - DNA, 20 bp, synthetic construct
  misc_feature 1..20: note = chemically synthesized
  source 1..20: mol_type = other DNA
gaaatcttatgtgcttccca

SEQ ID NO: 29530 - DNA, 20 bp, synthetic construct
  misc_feature 1..20: note = chemically synthesized
  source 1..20: mol_type = other DNA
tgtgcttcccacagaattcc

SEQ ID NO: 29531 - DNA, 20 bp, synthetic construct
  misc_feature 1..20: note = chemically synthesized
  source 1..20: mol_type = other DNA
gcttcccacagaattcctgg

SEQ ID NO: 29532 - DNA, 20 bp, synthetic construct
  misc_feature 1..20: note = chemically synthesized
  source 1..20: mol_type = other DNA
tcccacagaattcctggtgg

SEQ ID NO: 29533 - DNA, 20 bp, synthetic construct
  misc_feature 1..20: note = chemically synthesized
  source 1..20: mol_type = other DNA
cccacagaattcctggtgga

SEQ ID NO: 29534 - DNA, 20 bp, synthetic construct
  misc_feature 1..20: note = chemically synthesized
  source 1..20: mol_type = other DNA
cacagaattcctggtggaag

SEQ ID NO: 29535 - DNA, 20 bp, synthetic construct
  misc_feature 1..20: note = chemically synthesized
  source 1..20: mol_type = other DNA
acagaattcctggtggaagg

SEQ ID NO: 29536 - DNA, 20 bp, synthetic construct
  misc_feature 1..20: note = chemically synthesized
  source 1..20: mol_type = other DNA
cctcctctttctcgtctttc

SEQ ID NO: 29537 - DNA, 20 bp, synthetic construct
  misc_feature 1..20: note = chemically synthesized
  source 1..20: mol_type = other DNA
ctcctctttctcgtctttct

SEQ ID NO: 29538 - DNA, 20 bp, synthetic construct
  misc_feature 1..20: note = chemically synthesized
  source 1..20: mol_type = other DNA
ctctttctcgtctttctggg

SEQ ID NO: 29539 - DNA, 20 bp, synthetic construct
  misc_feature 1..20: note = chemically synthesized
  source 1..20: mol_type = other DNA
tctttctcgtctttctgggc

SEQ ID NO: 29540 - DNA, 20 bp, synthetic construct
  misc_feature 1..20: note = chemically synthesized
  source 1..20: mol_type = other DNA
tctttctgggcaggtattgt

SEQ ID NO: 29541 - DNA, 20 bp, synthetic construct
  misc_feature 1..20: note = chemically synthesized
  source 1..20: mol_type = other DNA
ctttctgggcaggtattgtg

SEQ ID NO: 29542 - DNA, 20 bp, synthetic construct
  misc_feature 1..20: note = chemically synthesized
  source 1..20: mol_type = other DNA
ctgggcaggtattgtgagga

SEQ ID NO: 29543 - DNA, 20 bp, synthetic construct
  misc_feature 1..20: note = chemically synthesized
  source 1..20: mol_type = other DNA
gaggacggtatctgccctgt

SEQ ID NO: 29544 - DNA, 20 bp, synthetic construct
  misc_feature 1..20: note = chemically synthesized
  source 1..20: mol_type = other DNA
ccgtcctcacaatacctgcc

SEQ ID NO: 29545 - DNA, 20 bp, synthetic construct
  misc_feature 1..20: note = chemically synthesized
  source 1..20: mol_type = other DNA
cctcacaatacctgcccaga

SEQ ID NO: 29546 - DNA, 20 bp, synthetic construct
  misc_feature 1..20: note = chemically synthesized
  source 1..20: mol_type = other DNA
caatacctgcccagaaagac

SEQ ID NO: 29547 - DNA, 20 bp, synthetic construct
  misc_feature 1..20: note = chemically synthesized
  source 1..20: mol_type = other DNA
acctgcccagaaagacgaga

SEQ ID NO: 29548 - DNA, 20 bp, synthetic construct
  misc_feature 1..20: note = chemically synthesized
  source 1..20: mol_type = other DNA
ctgcccagaaagacgagaaa

SEQ ID NO: 29549 - DNA, 20 bp, synthetic construct
  misc_feature 1..20: note = chemically synthesized
  source 1..20: mol_type = other DNA
tgcccagaaagacgagaaag

SEQ ID NO: 29550 - DNA, 20 bp, synthetic construct
  misc_feature 1..20: note = chemically synthesized
  source 1..20: mol_type = other DNA
cccagaaagacgagaaagag

SEQ ID NO: 29551 - DNA, 20 bp, synthetic construct
  misc_feature 1..20: note = chemically synthesized
  source 1..20: mol_type = other DNA
ccagaaagacgagaaagagg

SEQ ID NO: 29552 - DNA, 20 bp, synthetic construct
  misc_feature 1..20: note = chemically synthesized
  source 1..20: mol_type = other DNA
gaaagacgagaaagaggagg

SEQ ID NO: 29553 - DNA, 20 bp, synthetic construct
  misc_feature 1..20: note = chemically synthesized
  source 1..20: mol_type = other DNA
ggaagaattcctccttccac

SEQ ID NO: 29554 - DNA, 20 bp, synthetic construct
  misc_feature 1..20: note = chemically synthesized
  source 1..20: mol_type = other DNA
gaagaattcctccttccacc

SEQ ID NO: 29555 - DNA, 20 bp, synthetic construct
  misc_feature 1..20: note = chemically synthesized
  source 1..20: mol_type = other DNA
tccttccaccaggaattctg

SEQ ID NO: 29556 - DNA, 20 bp, synthetic construct
  misc_feature 1..20: note = chemically synthesized
  source 1..20: mol_type = other DNA
ccttccaccaggaattctgt

SEQ ID NO: 29557 - DNA, 20 bp, synthetic construct
  misc_feature 1..20: note = chemically synthesized
  source 1..20: mol_type = other DNA
tccaccaggaattctgtggg

SEQ ID NO: 29558 - DNA, 20 bp, synthetic construct
  misc_feature 1..20: note = chemically synthesized
  source 1..20: mol_type = other DNA
gaattctgtgggaagcacat

SEQ ID NO: 29559 - DNA, 20 bp, synthetic construct
  misc_feature 1..20: note = chemically synthesized
  source 1..20: mol_type = other DNA
cacataagatttcatgctac

SEQ ID NO: 29560 - DNA, 20 bp, synthetic construct
  misc_feature 1..20: note = chemically synthesized
  source 1..20: mol_type = other DNA
catgctactagtttattccc

SEQ ID NO: 29561 - DNA, 20 bp, synthetic construct
  misc_feature 1..20: note = chemically synthesized
  source 1..20: mol_type = other DNA
tgctactagtttattcccaa

SEQ ID NO: 29562 - DNA, 20 bp, synthetic construct
  misc_feature 1..20: note = chemically synthesized
  source 1..20: mol_type = other DNA
tactagtttattcccaagag

SEQ ID NO: 29563 - DNA, 20 bp, synthetic construct
  misc_feature 1..20: note = chemically synthesized
  source 1..20: mol_type = other DNA
attcccaagagaagctacca

SEQ ID NO: 29564 - DNA, 20 bp, synthetic construct
  misc_feature 1..20: note = chemically synthesized
  source 1..20: mol_type = other DNA
caagagaagctaccaaagcc

SEQ ID NO: 29565 - DNA, 20 bp, synthetic construct
  misc_feature 1..20: note = chemically synthesized
  source 1..20: mol_type = other DNA
actctaacttttgtgcctgt

SEQ ID NO: 29566 - DNA, 20 bp, synthetic construct
  misc_feature 1..20: note = chemically synthesized
  source 1..20: mol_type = other DNA
gcctgtaagttctcttctcc

SEQ ID NO: 29567 - DNA, 20 bp, synthetic construct
  misc_feature 1..20: note = chemically synthesized
  source 1..20: mol_type = other DNA
cctgtaagttctcttctcct

SEQ ID NO: 29568 - DNA, 20 bp, synthetic construct
  misc_feature 1..20: note = chemically synthesized
  source 1..20: mol_type = other DNA
gggattacaactaattgaaa

SEQ ID NO: 29569 - DNA, 20 bp, synthetic construct
  misc_feature 1..20: note = chemically synthesized
  source 1..20: mol_type = other DNA
ggattacaactaattgaaac

SEQ ID NO: 29570 - DNA, 20 bp, synthetic construct
  misc_feature 1..20: note = chemically synthesized
  source 1..20: mol_type = other DNA
ctaattgaaacaggaattca

SEQ ID NO: 29571 - DNA, 20 bp, synthetic construct
  misc_feature 1..20: note = chemically synthesized
  source 1..20: mol_type = other DNA
taattgaaacaggaattcaa

SEQ ID NO: 29572 - DNA, 20 bp, synthetic construct
  misc_feature 1..20: note = chemically synthesized
  source 1..20: mol_type = other DNA
attgaaacaggaattcaaag

SEQ ID NO: 29573 - DNA, 20 bp, synthetic construct
  misc_feature 1..20: note = chemically synthesized
  source 1..20: mol_type = other DNA
acaggaattcaaaggagtct

SEQ ID NO: 29574 - DNA, 20 bp, synthetic construct
  misc_feature 1..20: note = chemically synthesized
  source 1..20: mol_type = other DNA
aggaattcaaaggagtctcg

SEQ ID NO: 29575 - DNA, 20 bp, synthetic construct
  misc_feature 1..20: note = chemically synthesized
  source 1..20: mol_type = other DNA
ggaattcaaaggagtctcgg

SEQ ID NO: 29576 - DNA, 20 bp, synthetic construct
  misc_feature 1..20: note = chemically synthesized
  source 1..20: mol_type = other DNA
aaggagtctcggaggactgt

SEQ ID NO: 29577 - DNA, 20 bp, synthetic construct
  misc_feature 1..20: note = chemically synthesized
  source 1..20: mol_type = other DNA
gagtctcggaggactgtaag

SEQ ID NO: 29578 - DNA, 20 bp, synthetic construct
  misc_feature 1..20: note = chemically synthesized
  source 1..20: mol_type = other DNA
gactgtaagaagaatgcttc

SEQ ID NO: 29579 - DNA, 20 bp, synthetic construct
  misc_feature 1..20: note = chemically synthesized
  source 1..20: mol_type = other DNA
actgtaagaagaatgcttcg

SEQ ID NO: 29580 - DNA, 20 bp, synthetic construct
  misc_feature 1..20: note = chemically synthesized
  source 1..20: mol_type = other DNA
atccctctctgtaacatccc

SEQ ID NO: 29581 - DNA, 20 bp, synthetic construct
  misc_feature 1..20: note = chemically synthesized
  source 1..20: mol_type = other DNA
tccctctctgtaacatccct

SEQ ID NO: 29582 - DNA, 20 bp, synthetic construct
  misc_feature 1..20: note = chemically synthesized
  source 1..20: mol_type = other DNA
ctctctgtaacatccctggg

SEQ ID NO: 29583 - DNA, 20 bp, synthetic construct
  misc_feature 1..20: note = chemically synthesized
  source 1..20: mol_type = other DNA
tctctgtaacatccctgggt

SEQ ID NO: 29584 - DNA, 20 bp, synthetic construct
  misc_feature 1..20: note = chemically synthesized
  source 1..20: mol_type = other DNA
catccctgggtgggcttccc

SEQ ID NO: 29585 - DNA, 20 bp, synthetic construct
  misc_feature 1..20: note = chemically synthesized
  source 1..20: mol_type = other DNA
ccctgggtgggcttccccag

SEQ ID NO: 29586 - DNA, 20 bp, synthetic construct
  misc_feature 1..20: note = chemically synthesized
  source 1..20: mol_type = other DNA
cctgggtgggcttccccagt

SEQ ID NO: 29587 - DNA, 20 bp, synthetic construct
  misc_feature 1..20: note = chemically synthesized
  source 1..20: mol_type = other DNA
gggtgggcttccccagtggg

SEQ ID NO: 29588 - DNA, 20 bp, synthetic construct
  misc_feature 1..20: note = chemically synthesized
  source 1..20: mol_type = other DNA
gcttccccagtgggaagtcg

SEQ ID NO: 29589 - DNA, 20 bp, synthetic construct
  misc_feature 1..20: note = chemically synthesized
  source 1..20: mol_type = other DNA
ggaagtcgaagaacttcctg

SEQ ID NO: 29590 - DNA, 20 bp, synthetic construct
  misc_feature 1..20: note = chemically synthesized
  source 1..20: mol_type = other DNA
aagtcgaagaacttcctgtg

SEQ ID NO: 29591 - DNA, 20 bp, synthetic construct
  misc_feature 1..20: note = chemically synthesized
  source 1..20: mol_type = other DNA
agtcgaagaacttcctgtgg

SEQ ID NO: 29592 - DNA, 20 bp, synthetic construct
  misc_feature 1..20: note = chemically synthesized
  source 1..20: mol_type = other DNA
tcgaagaacttcctgtggag

SEQ ID NO: 29593 - DNA, 20 bp, synthetic construct
  misc_feature 1..20: note = chemically synthesized
  source 1..20: mol_type = other DNA
ggaggagttactgctctttg

SEQ ID NO: 29594 - DNA, 20 bp, synthetic construct
  misc_feature 1..20: note = chemically synthesized
  source 1..20: mol_type = other DNA
tactgctctttgaagttgct

SEQ ID NO: 29595 - DNA, 20 bp, synthetic construct
  misc_feature 1..20: note = chemically synthesized
  source 1..20: mol_type = other DNA
actgctctttgaagttgctt

SEQ ID NO: 29596 - DNA, 20 bp, synthetic construct
  misc_feature 1..20: note = chemically synthesized
  source 1..20: mol_type = other DNA
gctctttgaagttgcttggg

SEQ ID NO: 29597 - DNA, 20 bp, synthetic construct
  misc_feature 1..20: note = chemically synthesized
  source 1..20: mol_type = other DNA
tgcttgggaagtgaccaata

SEQ ID NO: 29598 - DNA, 20 bp, synthetic construct
  misc_feature 1..20: note = chemically synthesized
  source 1..20: mol_type = other DNA
gcttgggaagtgaccaataa

SEQ ID NO: 29599 - DNA, 20 bp, synthetic construct
  misc_feature 1..20: note = chemically synthesized
  source 1..20: mol_type = other DNA
aaaggtttgtactgctcctg

SEQ ID NO: 29600 - DNA, 20 bp, synthetic construct
  misc_feature 1..20: note = chemically synthesized
  source 1..20: mol_type = other DNA
aaggtttgtactgctcctga

SEQ ID NO: 29601 - DNA, 20 bp, synthetic construct
  misc_feature 1..20: note = chemically synthesized
  source 1..20: mol_type = other DNA
gtttgtactgctcctgaagg

SEQ ID NO: 29602 - DNA, 20 bp, synthetic construct
  misc_feature 1..20: note = chemically synthesized
  source 1..20: mol_type = other DNA
tactgctcctgaaggtggat

SEQ ID NO: 29603 - DNA, 20 bp, synthetic construct
  misc_feature 1..20: note = chemically synthesized
  source 1..20: mol_type = other DNA
gtggatcagtacaccttcac

SEQ ID NO: 29604 - DNA, 20 bp, synthetic construct
  misc_feature 1..20: note = chemically synthesized
  source 1..20: mol_type = other DNA
tggatcagtacaccttcact

SEQ ID NO: 29605 - DNA, 20 bp, synthetic construct
  misc_feature 1..20: note = chemically synthesized
  source 1..20: mol_type = other DNA
tacaccttcactaggtgact

SEQ ID NO: 29606 - DNA, 20 bp, synthetic construct
  misc_feature 1..20: note = chemically synthesized
  source 1..20: mol_type = other DNA
acaccttcactaggtgactg

SEQ ID NO: 29607 - DNA, 20 bp, synthetic construct
  misc_feature 1..20: note = chemically synthesized
  source 1..20: mol_type = other DNA
cactaggtgactgaggaatg

SEQ ID NO: 29608 - DNA, 20 bp, synthetic construct
  misc_feature 1..20: note = chemically synthesized
  source 1..20: mol_type = other DNA
ctaggtgactgaggaatgta

SEQ ID NO: 29609 - DNA, 20 bp, synthetic construct
  misc_feature 1..20: note = chemically synthesized
  source 1..20: mol_type = other DNA
gtgactgaggaatgtagagt

SEQ ID NO: 29610 - DNA, 20 bp, synthetic construct
  misc_feature 1..20: note = chemically synthesized
  source 1..20: mol_type = other DNA
gaatgtagagtaagatttca

SEQ ID NO: 29611 - DNA, 20 bp, synthetic construct
  misc_feature 1..20: note = chemically synthesized
  source 1..20: mol_type = other DNA
agatttcacagataactctc

SEQ ID NO: 29612 - DNA, 20 bp, synthetic construct
  misc_feature 1..20: note = chemically synthesized
  source 1..20: mol_type = other DNA
ctctagtgataaccaattgc

SEQ ID NO: 29613 - DNA, 20 bp, synthetic construct
  misc_feature 1..20: note = chemically synthesized
  source 1..20: mol_type = other DNA
agtgataaccaattgctagt

SEQ ID NO: 29614 - DNA, 20 bp, synthetic construct
  misc_feature 1..20: note = chemically synthesized
  source 1..20: mol_type = other DNA
ataaccaattgctagtgagt

SEQ ID NO: 29615 - DNA, 20 bp, synthetic construct
  misc_feature 1..20: note = chemically synthesized
  source 1..20: mol_type = other DNA
taaccaattgctagtgagtg

SEQ ID NO: 29616 - DNA, 20 bp, synthetic construct
  misc_feature 1..20: note = chemically synthesized
  source 1..20: mol_type = other DNA
caattgctagtgagtgagga

SEQ ID NO: 29617 - DNA, 20 bp, synthetic construct
  misc_feature 1..20: note = chemically synthesized
  source 1..20: mol_type = other DNA
gagtgaggaaagcatttaaa

SEQ ID NO: 29618 - DNA, 20 bp, synthetic construct
  misc_feature 1..20: note = chemically synthesized
  source 1..20: mol_type = other DNA
atttaaacggaatatatatt

SEQ ID NO: 29619 - DNA, 20 bp, synthetic construct
  misc_feature 1..20: note = chemically synthesized
  source 1..20: mol_type = other DNA
tttaaacggaatatatattt

SEQ ID NO: 29620 - DNA, 20 bp, synthetic construct
  misc_feature 1..20: note = chemically synthesized
  source 1..20: mol_type = other DNA
tttaaccttgtctattacaa

SEQ ID NO: 29621 - DNA, 20 bp, synthetic construct
  misc_feature 1..20: note = chemically synthesized
  source 1..20: mol_type = other DNA
ttaaccttgtctattacaac

SEQ ID NO: 29622 - DNA, 20 bp, synthetic construct
  misc_feature 1..20: note = chemically synthesized
  source 1..20: mol_type = other DNA
attacaacaggctatgaata

SEQ ID NO: 29623 - DNA, 20 bp, synthetic construct
  misc_feature 1..20: note = chemically synthesized
  source 1..20: mol_type = other DNA
acagacttgtgtatgtgttg

SEQ ID NO: 29624 - DNA, 20 bp, synthetic construct
  misc_feature 1..20: note = chemically synthesized
  source 1..20: mol_type = other DNA
agacttgtgtatgtgttgaa

SEQ ID NO: 29625 - DNA, 20 bp, synthetic construct
  misc_feature 1..20: note = chemically synthesized
  source 1..20: mol_type = other DNA
gacttgtgtatgtgttgaag

SEQ ID NO: 29626 - DNA, 20 bp, synthetic construct
  misc_feature 1..20: note = chemically synthesized
  source 1..20: mol_type = other DNA
acttgtgtatgtgttgaaga

SEQ ID NO: 29627 - DNA, 20 bp, synthetic construct
  misc_feature 1..20: note = chemically synthesized
  source 1..20: mol_type = other DNA
ttgtgtatgtgttgaagagg

SEQ ID NO: 29628 - DNA, 20 bp, synthetic construct
  misc_feature 1..20: note = chemically synthesized
  source 1..20: mol_type = other DNA
gtatgtgttgaagagggaga

SEQ ID NO: 29629 - DNA, 20 bp, synthetic construct
  misc_feature 1..20: note = chemically synthesized
  source 1..20: mol_type = other DNA
agggagaaagttgaaaatat

SEQ ID NO: 29630 - DNA, 20 bp, synthetic construct
  misc_feature 1..20: note = chemically synthesized
  source 1..20: mol_type = other DNA
gaaaatattagccattgcca

SEQ ID NO: 29631 - DNA, 20 bp, synthetic construct
  misc_feature 1..20: note = chemically synthesized
  source 1..20: mol_type = other DNA
aaatccatattatgacaaca

SEQ ID NO: 29632 - DNA, 20 bp, synthetic construct
  misc_feature 1..20: note = chemically synthesized
  source 1..20: mol_type = other DNA
tatgacaacatagaaataaa

SEQ ID NO: 29633 - DNA, 20 bp, synthetic construct
  misc_feature 1..20: note = chemically synthesized
  source 1..20: mol_type = other DNA
ttttgttttaaaatttttct

SEQ ID NO: 29634 - DNA, 20 bp, synthetic construct
  misc_feature 1..20: note = chemically synthesized
  source 1..20: mol_type = other DNA
taaaatttttctcagcaaaa

SEQ ID NO: 29635 - DNA, 20 bp, synthetic construct
  misc_feature 1..20: note = chemically synthesized
  source 1..20: mol_type = other DNA
tataattaaacattttattt

SEQ ID NO: 29636 - DNA, 20 bp, synthetic construct
  misc_feature 1..20: note = chemically synthesized
  source 1..20: mol_type = other DNA
ataattaaacattttatttt

SEQ ID NO: 29637 - DNA, 20 bp, synthetic construct
  misc_feature 1..20: note = chemically synthesized
  source 1..20: mol_type = other DNA
attaaacattttattttagg

SEQ ID NO: 29638 - DNA, 20 bp, synthetic construct
  misc_feature 1..20: note = chemically synthesized
  source 1..20: mol_type = other DNA
taggaagatgtatatgtgat

SEQ ID NO: 29639 - DNA, 20 bp, synthetic construct
  misc_feature 1..20: note = chemically synthesized
  source 1..20: mol_type = other DNA
gatgtatatgtgattagaac

SEQ ID NO: 29640 - DNA, 20 bp, synthetic construct
  misc_feature 1..20: note = chemically synthesized
  source 1..20: mol_type = other DNA
tatatgtgattagaaccagt

SEQ ID NO: 29641 - DNA, 20 bp, synthetic construct
  misc_feature 1..20: note = chemically synthesized
  source 1..20: mol_type = other DNA
acctcaactctacattctgt

SEQ ID NO: 29642 - DNA, 20 bp, synthetic construct
  misc_feature 1..20: note = chemically synthesized
  source 1..20: mol_type = other DNA
agtaattatatgaaatgctt

SEQ ID NO: 29643 - DNA, 20 bp, synthetic construct
  misc_feature 1..20: note = chemically synthesized
  source 1..20: mol_type = other DNA
gaatgtttcatattcacaat

SEQ ID NO: 29644 - DNA, 20 bp, synthetic construct
  misc_feature 1..20: note = chemically synthesized
  source 1..20: mol_type = other DNA
tttcatattcacaattagct

SEQ ID NO: 29645 - DNA, 20 bp, synthetic construct
  misc_feature 1..20: note = chemically synthesized
  source 1..20: mol_type = other DNA
ttggaattaatgttttaatt

SEQ ID NO: 29646 - DNA, 20 bp, synthetic construct
  misc_feature 1..20: note = chemically synthesized
  source 1..20: mol_type = other DNA
tggaattaatgttttaattc

SEQ ID NO: 29647 - DNA, 20 bp, synthetic construct
  misc_feature 1..20: note = chemically synthesized
  source 1..20: mol_type = other DNA
gaattaatgttttaattcag

SEQ ID NO: 29648 - DNA, 20 bp, synthetic construct
  misc_feature 1..20: note = chemically synthesized
  source 1..20: mol_type = other DNA
ttaattcaggagcttctcaa

SEQ ID NO: 29649 - DNA, 20 bp, synthetic construct
  misc_feature 1..20: note = chemically synthesized
  source 1..20: mol_type = other DNA
taattcaggagcttctcaaa

SEQ ID NO: 29650 - DNA, 20 bp, synthetic construct
  misc_feature 1..20: note = chemically synthesized
  source 1..20: mol_type = other DNA
gcaaaatactgtgctccttt

SEQ ID NO: 29651 - DNA, 20 bp, synthetic construct
  misc_feature 1..20: note = chemically synthesized
  source 1..20: mol_type = other DNA
ctgtgctcctttcagaatga

SEQ ID NO: 29652 - DNA, 20 bp, synthetic construct
  misc_feature 1..20: note = chemically synthesized
  source 1..20: mol_type = other DNA
tcttcaatgctatgcttatg

SEQ ID NO: 29653 - DNA, 20 bp, synthetic construct
  misc_feature 1..20: note = chemically synthesized
  source 1..20: mol_type = other DNA
cttcaatgctatgcttatgt

SEQ ID NO: 29654 - DNA, 20 bp, synthetic construct
  misc_feature 1..20: note = chemically synthesized
  source 1..20: mol_type = other DNA
tatgtaggaattataaaata

SEQ ID NO: 29655 - DNA, 20 bp, synthetic construct
  misc_feature 1..20: note = chemically synthesized
  source 1..20: mol_type = other DNA
aaattgataaaacaatttgc

SEQ ID NO: 29656 - DNA, 20 bp, synthetic construct
  misc_feature 1..20: note = chemically synthesized
  source 1..20: mol_type = other DNA
tgataaaacaatttgcgagt

SEQ ID NO: 29657 - DNA, 20 bp, synthetic construct
  misc_feature 1..20: note = chemically synthesized
  source 1..20: mol_type = other DNA
gataaaacaatttgcgagtg

SEQ ID NO: 29658 - DNA, 20 bp, synthetic construct
  misc_feature 1..20: note = chemically synthesized
  source 1..20: mol_type = other DNA
aggtataacctcatctgtgc

SEQ ID NO: 29659 - DNA, 20 bp, synthetic construct
  misc_feature 1..20: note = chemically synthesized
  source 1..20: mol_type = other DNA
ggtataacctcatctgtgct

SEQ ID NO: 29660 - DNA, 20 bp, synthetic construct
  misc_feature 1..20: note = chemically synthesized
  source 1..20: mol_type = other DNA
taacctcatctgtgctgggt

SEQ ID NO: 29661 - DNA, 20 bp, synthetic construct
  misc_feature 1..20: note = chemically synthesized
  source 1..20: mol_type = other DNA
acctcatctgtgctgggtaa

SEQ ID NO: 29662 - DNA, 20 bp, synthetic construct
  misc_feature 1..20: note = chemically synthesized
  source 1..20: mol_type = other DNA
tcatctgtgctgggtaagag

SEQ ID NO: 29663 - DNA, 20 bp, synthetic construct
  misc_feature 1..20: note = chemically synthesized
  source 1..20: mol_type = other DNA
catctgtgctgggtaagaga

SEQ ID NO: 29664 - DNA, 20 bp, synthetic construct
  misc_feature 1..20: note = chemically synthesized
  source 1..20: mol_type = other DNA
tgtgctgggtaagagaaggc

SEQ ID NO: 29665 - DNA, 20 bp, synthetic construct
  misc_feature 1..20: note = chemically synthesized
  source 1..20: mol_type = other DNA
gtgctgggtaagagaaggca

SEQ ID NO: 29666 - DNA, 20 bp, synthetic construct
  misc_feature 1..20: note = chemically synthesized
  source 1..20: mol_type = other DNA
ctgggtaagagaaggcaagg

SEQ ID NO: 29667 - DNA, 20 bp, synthetic construct
  misc_feature 1..20: note = chemically synthesized
  source 1..20: mol_type = other DNA
gggtaagagaaggcaaggta

SEQ ID NO: 29668 - DNA, 20 bp, synthetic construct
  misc_feature 1..20: note = chemically synthesized
  source 1..20: mol_type = other DNA
tgtaaatgattttgaaaata

SEQ ID NO: 29669 - DNA, 20 bp, synthetic construct
  misc_feature 1..20: note = chemically synthesized
  source 1..20: mol_type = other DNA
aattataaaacaattccttg

SEQ ID NO: 29670 - DNA, 20 bp, synthetic construct
  misc_feature 1..20: note = chemically synthesized
  source 1..20: mol_type = other DNA
attataaaacaattccttgt

SEQ ID NO: 29671 - DNA, 20 bp, synthetic construct
  misc_feature 1..20: note = chemically synthesized
  source 1..20: mol_type = other DNA
ccttgtgggtttatactctc

SEQ ID NO: 29672 - DNA, 20 bp, synthetic construct
  misc_feature 1..20: note = chemically synthesized
  source 1..20: mol_type = other DNA
gtttatactctctagtttaa

SEQ ID NO: 29673 - DNA, 20 bp, synthetic construct
  misc_feature 1..20: note = chemically synthesized
  source 1..20: mol_type = other DNA
ctctctagtttaaaagtgtc

SEQ ID NO: 29674 - DNA, 20 bp, synthetic construct
  misc_feature 1..20: note = chemically synthesized
  source 1..20: mol_type = other DNA
taaaagtgtcaagactattg

SEQ ID NO: 29675 - DNA, 20 bp, synthetic construct
  misc_feature 1..20: note = chemically synthesized
  source 1..20: mol_type = other DNA
aaaagtgtcaagactattga

SEQ ID NO: 29676 - DNA, 20 bp, synthetic construct
  misc_feature 1..20: note = chemically synthesized
  source 1..20: mol_type = other DNA
caagactattgaaggaacat

SEQ ID NO: 29677 - DNA, 20 bp, synthetic construct
  misc_feature 1..20: note = chemically synthesized
  source 1..20: mol_type = other DNA
ctattgaaggaacattagca

SEQ ID NO: 29678 - DNA, 20 bp, synthetic construct
  misc_feature 1..20: note = chemically synthesized
  source 1..20: mol_type = other DNA
aaggaacattagcaaagaaa

SEQ ID NO: 29679 - DNA, 20 bp, synthetic construct
  misc_feature 1..20: note = chemically synthesized
  source 1..20: mol_type = other DNA
cattagcaaagaaaaagtca

SEQ ID NO: 29680 - DNA, 20 bp, synthetic construct
  misc_feature 1..20: note = chemically synthesized
  source 1..20: mol_type = other DNA
aagaaaaagtcatggttttg

SEQ ID NO: 29681 - DNA, 20 bp, synthetic construct
  misc_feature 1..20: note = chemically synthesized
  source 1..20: mol_type = other DNA
agaaaaagtcatggttttga

SEQ ID NO: 29682 - DNA, 20 bp, synthetic construct
  misc_feature 1..20: note = chemically synthesized
  source 1..20: mol_type = other DNA
aagtcatggttttgaaggct

SEQ ID NO: 29683 - DNA, 20 bp, synthetic construct
  misc_feature 1..20: note = chemically synthesized
  source 1..20: mol_type = other DNA
ttttgaaggctgagttcctc

SEQ ID NO: 29684 - DNA, 20 bp, synthetic construct
  misc_feature 1..20: note = chemically synthesized
  source 1..20: mol_type = other DNA
ctgagttcctcaagatcttg

SEQ ID NO: 29685 - DNA, 20 bp, synthetic construct
  misc_feature 1..20: note = chemically synthesized
  source 1..20: mol_type = other DNA
cctcaagatcttgaagaatc

SEQ ID NO: 29686 - DNA, 20 bp, synthetic construct
  misc_feature 1..20: note = chemically synthesized
  source 1..20: mol_type = other DNA
gaatcaagccaactgattgc

SEQ ID NO: 29687 - DNA, 20 bp, synthetic construct
  misc_feature 1..20: note = chemically synthesized
  source 1..20: mol_type = other DNA
aatcaagccaactgattgct

SEQ ID NO: 29688 - DNA, 20 bp, synthetic construct
  misc_feature 1..20: note = chemically synthesized
  source 1..20: mol_type = other DNA
ccaactgattgctgggtaaa

SEQ ID NO: 29689 - DNA, 20 bp, synthetic construct
  misc_feature 1..20: note = chemically synthesized
  source 1..20: mol_type = other DNA
actgattgctgggtaaatgg

SEQ ID NO: 29690 - DNA, 20 bp, synthetic construct
  misc_feature 1..20: note = chemically synthesized
  source 1..20: mol_type = other DNA
ttactatttcatgtctatta

SEQ ID NO: 29691 - DNA, 20 bp, synthetic construct
  misc_feature 1..20: note = chemically synthesized
  source 1..20: mol_type = other DNA
atgtctattacagtaatcta

SEQ ID NO: 29692 - DNA, 20 bp, synthetic construct
  misc_feature 1..20: note = chemically synthesized
  source 1..20: mol_type = other DNA
tgtctattacagtaatctaa

SEQ ID NO: 29693 - DNA, 20 bp, synthetic construct
  misc_feature 1..20: note = chemically synthesized
  source 1..20: mol_type = other DNA
aaaggatctgaaataataac

SEQ ID NO: 29694 - DNA, 20 bp, synthetic construct
  misc_feature 1..20: note = chemically synthesized
  source 1..20: mol_type = other DNA
gatatattacttccttcttt

SEQ ID NO: 29695 - DNA, 20 bp, synthetic construct
  misc_feature 1..20: note = chemically synthesized
  source 1..20: mol_type = other DNA
acttccttcttttggctaat

SEQ ID NO: 29696 - DNA, 20 bp, synthetic construct
  misc_feature 1..20: note = chemically synthesized
  source 1..20: mol_type = other DNA
ttccttcttttggctaatca

SEQ ID NO: 29697 - DNA, 20 bp, synthetic construct
  misc_feature 1..20: note = chemically synthesized
  source 1..20: mol_type = other DNA
ttcttttggctaatcagagc

SEQ ID NO: 29698 - DNA, 20 bp, synthetic construct
  misc_feature 1..20: note = chemically synthesized
  source 1..20: mol_type = other DNA
aaaattaaatgcattatata

SEQ ID NO: 29699 - DNA, 20 bp, synthetic construct
  misc_feature 1..20: note = chemically synthesized
  source 1..20: mol_type = other DNA
tggcatgcattctgaaaaat

SEQ ID NO: 29700 - DNA, 20 bp, synthetic construct
  misc_feature 1..20: note = chemically synthesized
  source 1..20: mol_type = other DNA
caccttatactaactgttca

SEQ ID NO: 29701 - DNA, 20 bp, synthetic construct
  misc_feature 1..20: note = chemically synthesized
  source 1..20: mol_type = other DNA
attcataaaatcaaaattaa

SEQ ID NO: 29702 - DNA, 20 bp, synthetic construct
  misc_feature 1..20: note = chemically synthesized
  source 1..20: mol_type = other DNA
aaaagtcaattttgcctatg

SEQ ID NO: 29703 - DNA, 20 bp, synthetic construct
  misc_feature 1..20: note = chemically synthesized
  source 1..20: mol_type = other DNA
agtcaattttgcctatgtag

SEQ ID NO: 29704 - DNA, 20 bp, synthetic construct
  misc_feature 1..20: note = chemically synthesized
  source 1..20: mol_type = other DNA
caattttgcctatgtagaag

SEQ ID NO: 29705 - DNA, 20 bp, synthetic construct
  misc_feature 1..20: note = chemically synthesized
  source 1..20: mol_type = other DNA
tttgcctatgtagaagtgga

SEQ ID NO: 29706 - DNA, 20 bp, synthetic construct
  misc_feature 1..20: note = chemically synthesized
  source 1..20: mol_type = other DNA
gaagtggacagaatgcatat

SEQ ID NO: 29707 - DNA, 20 bp, synthetic construct
  misc_feature 1..20: note = chemically synthesized
  source 1..20: mol_type = other DNA
agtggacagaatgcatataa

SEQ ID NO: 29708 - DNA, 20 bp, synthetic construct
  misc_feature 1..20: note = chemically synthesized
  source 1..20: mol_type = other DNA
agaatgcatataagagaaca

SEQ ID NO: 29709 - DNA, 20 bp, synthetic construct
  misc_feature 1..20: note = chemically synthesized
  source 1..20: mol_type = other DNA
gcatataagagaacaaagca

SEQ ID NO: 29710 - DNA, 20 bp, synthetic construct
  misc_feature 1..20: note = chemically synthesized
  source 1..20: mol_type = other DNA
aagcacggtcttattctctg

SEQ ID NO: 29711 - DNA, 20 bp, synthetic construct
  misc_feature 1..20: note = chemically synthesized
  source 1..20: mol_type = other DNA
cggtcttattctctgtagtt

SEQ ID NO: 29712 - DNA, 20 bp, synthetic construct
  misc_feature 1..20: note = chemically synthesized
  source 1..20: mol_type = other DNA
cttattctctgtagtttagt

SEQ ID NO: 29713 - DNA, 20 bp, synthetic construct
  misc_feature 1..20: note = chemically synthesized
  source 1..20: mol_type = other DNA
ttctctgtagtttagtgaga

SEQ ID NO: 29714 - DNA, 20 bp, synthetic construct
  misc_feature 1..20: note = chemically synthesized
  source 1..20: mol_type = other DNA
tagtttagtgagaaagaatc

SEQ ID NO: 29715 - DNA, 20 bp, synthetic construct
  misc_feature 1..20: note = chemically synthesized
  source 1..20: mol_type = other DNA
agtttagtgagaaagaatct

SEQ ID NO: 29716 - DNA, 20 bp, synthetic construct
  misc_feature 1..20: note = chemically synthesized
  source 1..20: mol_type = other DNA
tttagtgagaaagaatctag

SEQ ID NO: 29717 - DNA, 20 bp, synthetic construct
  misc_feature 1..20: note = chemically synthesized
  source 1..20: mol_type = other DNA
ttagtgagaaagaatctagg

SEQ ID NO: 29718 - DNA, 20 bp, synthetic construct
  misc_feature 1..20: note = chemically synthesized
  source 1..20: mol_type = other DNA
tgagaaagaatctaggagga

SEQ ID NO: 29719 - DNA, 20 bp, synthetic construct
  misc_feature 1..20: note = chemically synthesized
  source 1..20: mol_type = other DNA
ggaggacagaaaccttatta

SEQ ID NO: 29720 - DNA, 20 bp, synthetic construct
  misc_feature 1..20: note = chemically synthesized
  source 1..20: mol_type = other DNA
aggacagaaaccttattaca

SEQ ID NO: 29721 - DNA, 20 bp, synthetic construct
  misc_feature 1..20: note = chemically synthesized
  source 1..20: mol_type = other DNA
acagaaaccttattacagag

SEQ ID NO: 29722 - DNA, 20 bp, synthetic construct
  misc_feature 1..20: note = chemically synthesized
  source 1..20: mol_type = other DNA
aaccttattacagagaagtg

SEQ ID NO: 29723 - DNA, 20 bp, synthetic construct
  misc_feature 1..20: note = chemically synthesized
  source 1..20: mol_type = other DNA
ttattttgtattcttttcct

SEQ ID NO: 29724 - DNA, 20 bp, synthetic construct
  misc_feature 1..20: note = chemically synthesized
  source 1..20: mol_type = other DNA
attttgtattcttttcctca

SEQ ID NO: 29725 - DNA, 20 bp, synthetic construct
  misc_feature 1..20: note = chemically synthesized
  source 1..20: mol_type = other DNA
agagatctttatcctgaaat

SEQ ID NO: 29726 - DNA, 20 bp, synthetic construct
  misc_feature 1..20: note = chemically synthesized
  source 1..20: mol_type = other DNA
tgtttttaatgtcctttttc

SEQ ID NO: 29727 - DNA, 20 bp, synthetic construct
  misc_feature 1..20: note = chemically synthesized
  source 1..20: mol_type = other DNA
tttctagtcacaaatttttc

SEQ ID NO: 29728 - DNA, 20 bp, synthetic construct
  misc_feature 1..20: note = chemically synthesized
  source 1..20: mol_type = other DNA
agtcacaaatttttccagtc

SEQ ID NO: 29729 - DNA, 20 bp, synthetic construct
  misc_feature 1..20: note = chemically synthesized
  source 1..20: mol_type = other DNA
ccagtttttaaatatgccca

SEQ ID NO: 29730 - DNA, 20 bp, synthetic construct
  misc_feature 1..20: note = chemically synthesized
  source 1..20: mol_type = other DNA
ttaaatatgcccaaagttcc

SEQ ID NO: 29731 - DNA, 20 bp, synthetic construct
  misc_feature 1..20: note = chemically synthesized
  source 1..20: mol_type = other DNA
taaatatgcccaaagttcct

SEQ ID NO: 29732 - DNA, 20 bp, synthetic construct
  misc_feature 1..20: note = chemically synthesized
  source 1..20: mol_type = other DNA
atgcccaaagttcctgggaa

SEQ ID NO: 29733 - DNA, 20 bp, synthetic construct
  misc_feature 1..20: note = chemically synthesized
  source 1..20: mol_type = other DNA
tctctatcacatgtgaatcc

SEQ ID NO: 29734 - DNA, 20 bp, synthetic construct
  misc_feature 1..20: note = chemically synthesized
  source 1..20: mol_type = other DNA
tctatcacatgtgaatcccg

SEQ ID NO: 29735 - DNA, 20 bp, synthetic construct
  misc_feature 1..20: note = chemically synthesized
  source 1..20: mol_type = other DNA
cggagtatgccttgaaataa

SEQ ID NO: 29736 - DNA, 20 bp, synthetic construct
  misc_feature 1..20: note = chemically synthesized
  source 1..20: mol_type = other DNA
cttgaaataaaagttttctc

SEQ ID NO: 29737 - DNA, 20 bp, synthetic construct
  misc_feature 1..20: note = chemically synthesized
  source 1..20: mol_type = other DNA
tgaaataaaagttttctcta

SEQ ID NO: 29738 - DNA, 20 bp, synthetic construct
  misc_feature 1..20: note = chemically synthesized
  source 1..20: mol_type = other DNA
aaataaaagttttctctaga

SEQ ID NO: 29739 - DNA, 20 bp, synthetic construct
  misc_feature 1..20: note = chemically synthesized
  source 1..20: mol_type = other DNA
taaaagttttctctagagag

SEQ ID NO: 29740 - DNA, 20 bp, synthetic construct
  misc_feature 1..20: note = chemically synthesized
  source 1..20: mol_type = other DNA
aaaagttttctctagagagt

SEQ ID NO: 29741 - DNA, 20 bp, synthetic construct
  misc_feature 1..20: note = chemically synthesized
  source 1..20: mol_type = other DNA
agttttctctagagagtggg

SEQ ID NO: 29742 - DNA, 20 bp, synthetic construct
  misc_feature 1..20: note = chemically synthesized
  source 1..20: mol_type = other DNA
gttttctctagagagtgggc

SEQ ID NO: 29743 - DNA, 20 bp, synthetic construct
  misc_feature 1..20: note = chemically synthesized
  source 1..20: mol_type = other DNA
tttctctagagagtgggcag

SEQ ID NO: 29744 - DNA, 20 bp, synthetic construct
  misc_feature 1..20: note = chemically synthesized
  source 1..20: mol_type = other DNA
tagagagtgggcaggagctc

SEQ ID NO: 29745 - DNA, 20 bp, synthetic construct
  misc_feature 1..20: note = chemically synthesized
  source 1..20: mol_type = other DNA
agagagtgggcaggagctca

SEQ ID NO: 29746 - DNA, 20 bp, synthetic construct
  misc_feature 1..20: note = chemically synthesized
  source 1..20: mol_type = other DNA
tgggcaggagctcaaggaca

SEQ ID NO: 29747 - DNA, 20 bp, synthetic construct
  misc_feature 1..20: note = chemically synthesized
  source 1..20: mol_type = other DNA
agctcaaggacatagcttat

SEQ ID NO: 29748 - DNA, 20 bp, synthetic construct
  misc_feature 1..20: note = chemically synthesized
  source 1..20: mol_type = other DNA
tcaaggacatagcttattgg

SEQ ID NO: 29749 - DNA, 20 bp, synthetic construct
  misc_feature 1..20: note = chemically synthesized
  source 1..20: mol_type = other DNA
agcttattggtggataaaac

SEQ ID NO: 29750 - DNA, 20 bp, synthetic construct
  misc_feature 1..20: note = chemically synthesized
  source 1..20: mol_type = other DNA
ttattggtggataaaactgg

SEQ ID NO: 29751 - DNA, 20 bp, synthetic construct
  misc_feature 1..20: note = chemically synthesized
  source 1..20: mol_type = other DNA
tattggtggataaaactgga

SEQ ID NO: 29752 - DNA, 20 bp, synthetic construct
  misc_feature 1..20: note = chemically synthesized
  source 1..20: mol_type = other DNA
attggtggataaaactggaa

SEQ ID NO: 29753 - DNA, 20 bp, synthetic construct
  misc_feature 1..20: note = chemically synthesized
  source 1..20: mol_type = other DNA
taaaactggaagggacttgt

SEQ ID NO: 29754 - DNA, 20 bp, synthetic construct
  misc_feature 1..20: note = chemically synthesized
  source 1..20: mol_type = other DNA
tggaagggacttgttagcac

SEQ ID NO: 29755 - DNA, 20 bp, synthetic construct
  misc_feature 1..20: note = chemically synthesized
  source 1..20: mol_type = other DNA
ggaagggacttgttagcact

SEQ ID NO: 29756 - DNA, 20 bp, synthetic construct
  misc_feature 1..20: note = chemically synthesized
  source 1..20: mol_type = other DNA
gacttgttagcactgggaat

SEQ ID NO: 29757 - DNA, 20 bp, synthetic construct
  misc_feature 1..20: note = chemically synthesized
  source 1..20: mol_type = other DNA
gttagcactgggaatcagtc

SEQ ID NO: 29758 - DNA, 20 bp, synthetic construct
  misc_feature 1..20: note = chemically synthesized
  source 1..20: mol_type = other DNA
agcactgggaatcagtccag

SEQ ID NO: 29759 - DNA, 20 bp, synthetic construct
  misc_feature 1..20: note = chemically synthesized
  source 1..20: mol_type = other DNA
agtccagaagatctctgcac

SEQ ID NO: 29760 - DNA, 20 bp, synthetic construct
  misc_feature 1..20: note = chemically synthesized
  source 1..20: mol_type = other DNA
ctgcacaagttcctgcacct

SEQ ID NO: 29761 - DNA, 20 bp, synthetic construct
  misc_feature 1..20: note = chemically synthesized
  source 1..20: mol_type = other DNA
cacaagttcctgcacctgag

SEQ ID NO: 29762 - DNA, 20 bp, synthetic construct
  misc_feature 1..20: note = chemically synthesized
  source 1..20: mol_type = other DNA
caagttcctgcacctgagca

SEQ ID NO: 29763 - DNA, 20 bp, synthetic construct
  misc_feature 1..20: note = chemically synthesized
  source 1..20: mol_type = other DNA
catcatttaacaaacattaa

SEQ ID NO: 29764 - DNA, 20 bp, synthetic construct
  misc_feature 1..20: note = chemically synthesized
  source 1..20: mol_type = other DNA
tcatttaacaaacattaatg

SEQ ID NO: 29765 - DNA, 20 bp, synthetic construct
  misc_feature 1..20: note = chemically synthesized
  source 1..20: mol_type = other DNA
attaatggagcactgttacc

SEQ ID NO: 29766 - DNA, 20 bp, synthetic construct
  misc_feature 1..20: note = chemically synthesized
  source 1..20: mol_type = other DNA
ttaatggagcactgttacct

SEQ ID NO: 29767 - DNA, 20 bp, synthetic construct
  misc_feature 1..20: note = chemically synthesized
  source 1..20: mol_type = other DNA
gagcactgttacctgggcac

SEQ ID NO: 29768 - DNA, 20 bp, synthetic construct
  misc_feature 1..20: note = chemically synthesized
  source 1..20: mol_type = other DNA
agcactgttacctgggcact

SEQ ID NO: 29769 - DNA, 20 bp, synthetic construct
  misc_feature 1..20: note = chemically synthesized
  source 1..20: mol_type = other DNA
cctgggcactgggaacacgc

SEQ ID NO: 29770 - DNA, 20 bp, synthetic construct
  misc_feature 1..20: note = chemically synthesized
  source 1..20: mol_type = other DNA
gggaacacgccagtgaaact

SEQ ID NO: 29771 - DNA, 20 bp, synthetic construct
  misc_feature 1..20: note = chemically synthesized
  source 1..20: mol_type = other DNA
agtgaaactaagttatttta

SEQ ID NO: 29772 - DNA, 20 bp, synthetic construct
  misc_feature 1..20: note = chemically synthesized
  source 1..20: mol_type = other DNA
tattttatggatcttataat

SEQ ID NO: 29773 - DNA, 20 bp, synthetic construct
  misc_feature 1..20: note = chemically synthesized
  source 1..20: mol_type = other DNA
tttatggatcttataatcag

SEQ ID NO: 29774 - DNA, 20 bp, synthetic construct
  misc_feature 1..20: note = chemically synthesized
  source 1..20: mol_type = other DNA
agtagcatgtgtgttgatct

SEQ ID NO: 29775 - DNA, 20 bp, synthetic construct
  misc_feature 1..20: note = chemically synthesized
  source 1..20: mol_type = other DNA
gtagcatgtgtgttgatctc

SEQ ID NO: 29776 - DNA, 20 bp, synthetic construct
  misc_feature 1..20: note = chemically synthesized
  source 1..20: mol_type = other DNA
tagcatgtgtgttgatctca

SEQ ID NO: 29777 - DNA, 20 bp, synthetic construct
  misc_feature 1..20: note = chemically synthesized
  source 1..20: mol_type = other DNA
tgtgtgttgatctcagggtc

SEQ ID NO: 29778 - DNA, 20 bp, synthetic construct
  misc_feature 1..20: note = chemically synthesized
  source 1..20: mol_type = other DNA
gttgatctcagggtctagaa

SEQ ID NO: 29779 - DNA, 20 bp, synthetic construct
  misc_feature 1..20: note = chemically synthesized
  source 1..20: mol_type = other DNA
tcagggtctagaacagtgcc

SEQ ID NO: 29780 - DNA, 20 bp, synthetic construct
  misc_feature 1..20: note = chemically synthesized
  source 1..20: mol_type = other DNA
ctagaacagtgcctggtaca

SEQ ID NO: 29781 - DNA, 20 bp, synthetic construct
  misc_feature 1..20: note = chemically synthesized
  source 1..20: mol_type = other DNA
ggtacatagaaaatgctcaa

SEQ ID NO: 29782 - DNA, 20 bp, synthetic construct
  misc_feature 1..20: note = chemically synthesized
  source 1..20: mol_type = other DNA
aaatttgtttttcaacccct

SEQ ID NO: 29783 - DNA, 20 bp, synthetic construct
  misc_feature 1..20: note = chemically synthesized
  source 1..20: mol_type = other DNA
ttttctatcatttccctttc

SEQ ID NO: 29784 - DNA, 20 bp, synthetic construct
  misc_feature 1..20: note = chemically synthesized
  source 1..20: mol_type = other DNA
tttctatcatttccctttca

SEQ ID NO: 29785 - DNA, 20 bp, synthetic construct
  misc_feature 1..20: note = chemically synthesized
  source 1..20: mol_type = other DNA
ttctatcatttccctttcaa

SEQ ID NO: 29786 - DNA, 20 bp, synthetic construct
  misc_feature 1..20: note = chemically synthesized
  source 1..20: mol_type = other DNA
tctatcatttccctttcaag

SEQ ID NO: 29787 - DNA, 20 bp, synthetic construct
  misc_feature 1..20: note = chemically synthesized
  source 1..20: mol_type = other DNA
atcatttccctttcaagggg

SEQ ID NO: 29788 - DNA, 20 bp, synthetic construct
  misc_feature 1..20: note = chemically synthesized
  source 1..20: mol_type = other DNA
tcatttccctttcaagggga

SEQ ID NO: 29789 - DNA, 20 bp, synthetic construct
  misc_feature 1..20: note = chemically synthesized
  source 1..20: mol_type = other DNA
catttccctttcaaggggaa

SEQ ID NO: 29790 - DNA, 20 bp, synthetic construct
  misc_feature 1..20: note = chemically synthesized
  source 1..20: mol_type = other DNA
ttccctttcaaggggaaggg

SEQ ID NO: 29791 - DNA, 20 bp, synthetic construct
  misc_feature 1..20: note = chemically synthesized
  source 1..20: mol_type = other DNA
ggggaagggaagtgtttttg

SEQ ID NO: 29792 - DNA, 20 bp, synthetic construct
  misc_feature 1..20: note = chemically synthesized
  source 1..20: mol_type = other DNA
ggaagggaagtgtttttgtg

SEQ ID NO: 29793 - DNA, 20 bp, synthetic construct
  misc_feature 1..20: note = chemically synthesized
  source 1..20: mol_type = other DNA
aagggaagtgtttttgtgga

SEQ ID NO: 29794 - DNA, 20 bp, synthetic construct
  misc_feature 1..20: note = chemically synthesized
  source 1..20: mol_type = other DNA
agggaagtgtttttgtggag

SEQ ID NO: 29795 - DNA, 20 bp, synthetic construct
  misc_feature 1..20: note = chemically synthesized
  source 1..20: mol_type = other DNA
ccccacaatgtgatttacac

SEQ ID NO: 29796 - DNA, 20 bp, synthetic construct
  misc_feature 1..20: note = chemically synthesized
  source 1..20: mol_type = other DNA
tctttattttaatattatca

SEQ ID NO: 29797 - DNA, 20 bp, synthetic construct
  misc_feature 1..20: note = chemically synthesized
  source 1..20: mol_type = other DNA
attttaatattatcatagcc

SEQ ID NO: 29798 - DNA, 20 bp, synthetic construct
  misc_feature 1..20: note = chemically synthesized
  source 1..20: mol_type = other DNA
aatattatcatagcctggta

SEQ ID NO: 29799 - DNA, 20 bp, synthetic construct
  misc_feature 1..20: note = chemically synthesized
  source 1..20: mol_type = other DNA
atcatagcctggtatggttt

SEQ ID NO: 29800 - DNA, 20 bp, synthetic construct
  misc_feature 1..20: note = chemically synthesized
  source 1..20: mol_type = other DNA
tatggtttgagattttcata

SEQ ID NO: 29801 - DNA, 20 bp, synthetic construct
  misc_feature 1..20: note = chemically synthesized
  source 1..20: mol_type = other DNA
gtttgagattttcatataga

SEQ ID NO: 29802 - DNA, 20 bp, synthetic construct
  misc_feature 1..20: note = chemically synthesized
  source 1..20: mol_type = other DNA
ctaataatacattgccacta

SEQ ID NO: 29803 - DNA, 20 bp, synthetic construct
  misc_feature 1..20: note = chemically synthesized
  source 1..20: mol_type = other DNA
ttttacttccctgcatttca

SEQ ID NO: 29804 - DNA, 20 bp, synthetic construct
  misc_feature 1..20: note = chemically synthesized
  source 1..20: mol_type = other DNA
tacttccctgcatttcatag

SEQ ID NO: 29805 - DNA, 20 bp, synthetic construct
  misc_feature 1..20: note = chemically synthesized
  source 1..20: mol_type = other DNA
gcatttcatagtagtgatat

SEQ ID NO: 29806 - DNA, 20 bp, synthetic construct
  misc_feature 1..20: note = chemically synthesized
  source 1..20: mol_type = other DNA
catttcatagtagtgatatg

SEQ ID NO: 29807 - DNA, 20 bp, synthetic construct
  misc_feature 1..20: note = chemically synthesized
  source 1..20: mol_type = other DNA
agtagtgatatgaggtatct

SEQ ID NO: 29808 - DNA, 20 bp, synthetic construct
  misc_feature 1..20: note = chemically synthesized
  source 1..20: mol_type = other DNA
tagtgatatgaggtatctta

SEQ ID NO: 29809 - DNA, 20 bp, synthetic construct
  misc_feature 1..20: note = chemically synthesized
  source 1..20: mol_type = other DNA
gatcatgaatcccactcctc

SEQ ID NO: 29810 - DNA, 20 bp, synthetic construct
  misc_feature 1..20: note = chemically synthesized
  source 1..20: mol_type = other DNA
aatcccactcctccagttca

SEQ ID NO: 29811 - DNA, 20 bp, synthetic construct
  misc_feature 1..20: note = chemically synthesized
  source 1..20: mol_type = other DNA
tcccactcctccagttcata

SEQ ID NO: 29812 - DNA, 20 bp, synthetic construct
  misc_feature 1..20: note = chemically synthesized
  source 1..20: mol_type = other DNA
tcatagagcaaattgattcg

SEQ ID NO: 29813 - DNA, 20 bp, synthetic construct
  misc_feature 1..20: note = chemically synthesized
  source 1..20: mol_type = other DNA
atagagcaaattgattcgta

SEQ ID NO: 29814 - DNA, 20 bp, synthetic construct
  misc_feature 1..20: note = chemically synthesized
  source 1..20: mol_type = other DNA
tagagcaaattgattcgtag

SEQ ID NO: 29815 - DNA, 20 bp, synthetic construct
  misc_feature 1..20: note = chemically synthesized
  source 1..20: mol_type = other DNA
cgtagaggtatttaatgatc

SEQ ID NO: 29816 - DNA, 20 bp, synthetic construct
  misc_feature 1..20: note = chemically synthesized
  source 1..20: mol_type = other DNA
gtatttaatgatcaagcaaa

SEQ ID NO: 29817 - DNA, 20 bp, synthetic construct
  misc_feature 1..20: note = chemically synthesized
  source 1..20: mol_type = other DNA
tttaatgatcaagcaaatgg

SEQ ID NO: 29818 - DNA, 20 bp, synthetic construct
  misc_feature 1..20: note = chemically synthesized
  source 1..20: mol_type = other DNA
taatgatcaagcaaatggca

SEQ ID NO: 29819 - DNA, 20 bp, synthetic construct
  misc_feature 1..20: note = chemically synthesized
  source 1..20: mol_type = other DNA
gatcaagcaaatggcagagt

SEQ ID NO: 29820 - DNA, 20 bp, synthetic construct
  misc_feature 1..20: note = chemically synthesized
  source 1..20: mol_type = other DNA
atcaagcaaatggcagagtt

SEQ ID NO: 29821 - DNA, 20 bp, synthetic construct
  misc_feature 1..20: note = chemically synthesized
  source 1..20: mol_type = other DNA
gcaaatggcagagttaggac

SEQ ID NO: 29822 - DNA, 20 bp, synthetic construct
  misc_feature 1..20: note = chemically synthesized
  source 1..20: mol_type = other DNA
caaatggcagagttaggacc

SEQ ID NO: 29823 - DNA, 20 bp, synthetic construct
  misc_feature 1..20: note = chemically synthesized
  source 1..20: mol_type = other DNA
gcagagttaggaccaggatt

SEQ ID NO: 29824 - DNA, 20 bp, synthetic construct
  misc_feature 1..20: note = chemically synthesized
  source 1..20: mol_type = other DNA
cagagttaggaccaggattt

SEQ ID NO: 29825 - DNA, 20 bp, synthetic construct
  misc_feature 1..20: note = chemically synthesized
  source 1..20: mol_type = other DNA
ccaggatttaggtcttttcc

SEQ ID NO: 29826 - DNA, 20 bp, synthetic construct
  misc_feature 1..20: note = chemically synthesized
  source 1..20: mol_type = other DNA
caggatttaggtcttttcca

SEQ ID NO: 29827 - DNA, 20 bp, synthetic construct
  misc_feature 1..20: note = chemically synthesized
  source 1..20: mol_type = other DNA
tcacttttttactattatgt

SEQ ID NO: 29828 - DNA, 20 bp, synthetic construct
  misc_feature 1..20: note = chemically synthesized
  source 1..20: mol_type = other DNA
agaattaaatattaaaacct

SEQ ID NO: 29829 - DNA, 20 bp, synthetic construct
  misc_feature 1..20: note = chemically synthesized
  source 1..20: mol_type = other DNA
tattaaaacctcagttttca

SEQ ID NO: 29830 - DNA, 20 bp, synthetic construct
  misc_feature 1..20: note = chemically synthesized
  source 1..20: mol_type = other DNA
attaaaacctcagttttcaa

SEQ ID NO: 29831 - DNA, 20 bp, synthetic construct
  misc_feature 1..20: note = chemically synthesized
  source 1..20: mol_type = other DNA
ttttcaaaggaaatgtccta

SEQ ID NO: 29832 - DNA, 20 bp, synthetic construct
  misc_feature 1..20: note = chemically synthesized
  source 1..20: mol_type = other DNA
aggaaatgtcctatagatga

SEQ ID NO: 29833 - DNA, 20 bp, synthetic construct
  misc_feature 1..20: note = chemically synthesized
  source 1..20: mol_type = other DNA
gtcctatagatgaaagaaca

SEQ ID NO: 29834 - DNA, 20 bp, synthetic construct
  misc_feature 1..20: note = chemically synthesized
  source 1..20: mol_type = other DNA
atgaaagaacacagtacttg

SEQ ID NO: 29835 - DNA, 20 bp, synthetic construct
  misc_feature 1..20: note = chemically synthesized
  source 1..20: mol_type = other DNA
gaacacagtacttgcagtca

SEQ ID NO: 29836 - DNA, 20 bp, synthetic construct
  misc_feature 1..20: note = chemically synthesized
  source 1..20: mol_type = other DNA
aacacagtacttgcagtcaa

SEQ ID NO: 29837 - DNA, 20 bp, synthetic construct
  misc_feature 1..20: note = chemically synthesized
  source 1..20: mol_type = other DNA
gtacttgcagtcaaaggtct

SEQ ID NO: 29838 - DNA, 20 bp, synthetic construct
  misc_feature 1..20: note = chemically synthesized
  source 1..20: mol_type = other DNA
atttctgaaactttctgaaa

SEQ ID NO: 29839 - DNA, 20 bp, synthetic construct
  misc_feature 1..20: note = chemically synthesized
  source 1..20: mol_type = other DNA
gaaccccttaaactgaataa

SEQ ID NO: 29840 - DNA, 20 bp, synthetic construct
  misc_feature 1..20: note = chemically synthesized
  source 1..20: mol_type = other DNA
aaaatgaatgttatactctc

SEQ ID NO: 29841 - DNA, 20 bp, synthetic construct
  misc_feature 1..20: note = chemically synthesized
  source 1..20: mol_type = other DNA
agttatcttaccatgttttc

SEQ ID NO: 29842 - DNA, 20 bp, synthetic construct
  misc_feature 1..20: note = chemically synthesized
  source 1..20: mol_type = other DNA
taccatgttttctggcaaac

SEQ ID NO: 29843 - DNA, 20 bp, synthetic construct
  misc_feature 1..20: note = chemically synthesized
  source 1..20: mol_type = other DNA
accatgttttctggcaaaca

SEQ ID NO: 29844 - DNA, 20 bp, synthetic construct
  misc_feature 1..20: note = chemically synthesized
  source 1..20: mol_type = other DNA
aaggaaatgtattcacatcc

SEQ ID NO: 29845 - DNA, 20 bp, synthetic construct
  misc_feature 1..20: note = chemically synthesized
  source 1..20: mol_type = other DNA
attcacatccaagaaaacaa

SEQ ID NO: 29846 - DNA, 20 bp, synthetic construct
  misc_feature 1..20: note = chemically synthesized
  source 1..20: mol_type = other DNA
ttcacatccaagaaaacaaa

SEQ ID NO: 29847 - DNA, 20 bp, synthetic construct
  misc_feature 1..20: note = chemically synthesized
  source 1..20: mol_type = other DNA
caagaaaacaaaaggtttct

SEQ ID NO: 29848 - DNA, 20 bp, synthetic construct
  misc_feature 1..20: note = chemically synthesized
  source 1..20: mol_type = other DNA
aagaaaacaaaaggtttctt

SEQ ID NO: 29849 - DNA, 20 bp, synthetic construct
  misc_feature 1..20: note = chemically synthesized
  source 1..20: mol_type = other DNA
gaaaacaaaaggtttcttag

SEQ ID NO: 29850 - DNA, 20 bp, synthetic construct
  misc_feature 1..20: note = chemically synthesized
  source 1..20: mol_type = other DNA
aacaaaaggtttcttaggag

SEQ ID NO: 29851 - DNA, 20 bp, synthetic construct
  misc_feature 1..20: note = chemically synthesized
  source 1..20: mol_type = other DNA
ggagaagaatcccttgctgc

SEQ ID NO: 29852 - DNA, 20 bp, synthetic construct
  misc_feature 1..20: note = chemically synthesized
  source 1..20: mol_type = other DNA
agaattttgcccatgaacaa

SEQ ID NO: 29853 - DNA, 20 bp, synthetic construct
  misc_feature 1..20: note = chemically synthesized
  source 1..20: mol_type = other DNA
tggaaacgtgaaaaacataa

SEQ ID NO: 29854 - DNA, 20 bp, synthetic construct
  misc_feature 1..20: note = chemically synthesized
  source 1..20: mol_type = other DNA
acgtgaaaaacataacagat

SEQ ID NO: 29855 - DNA, 20 bp, synthetic construct
  misc_feature 1..20: note = chemically synthesized
  source 1..20: mol_type = other DNA
gtgaaaaacataacagatga

SEQ ID NO: 29856 - DNA, 20 bp, synthetic construct
  misc_feature 1..20: note = chemically synthesized
  source 1..20: mol_type = other DNA
gaaaaacataacagatgaga

SEQ ID NO: 29857 - DNA, 20 bp, synthetic construct
  misc_feature 1..20: note = chemically synthesized
  source 1..20: mol_type = other DNA
cataacagatgagagagtca

SEQ ID NO: 29858 - DNA, 20 bp, synthetic construct
  misc_feature 1..20: note = chemically synthesized
  source 1..20: mol_type = other DNA
acagatgagagagtcacagt

SEQ ID NO: 29859 - DNA, 20 bp, synthetic construct
  misc_feature 1..20: note = chemically synthesized
  source 1..20: mol_type = other DNA
gagagagtcacagttagttt

SEQ ID NO: 29860 - DNA, 20 bp, synthetic construct
  misc_feature 1..20: note = chemically synthesized
  source 1..20: mol_type = other DNA
agagagtcacagttagtttt

SEQ ID NO: 29861 - DNA, 20 bp, synthetic construct
  misc_feature 1..20: note = chemically synthesized
  source 1..20: mol_type = other DNA
tagttttgggtactaattct

SEQ ID NO: 29862 - DNA, 20 bp, synthetic construct
  misc_feature 1..20: note = chemically synthesized
  source 1..20: mol_type = other DNA
cattaatccattttattatt

SEQ ID NO: 29863 - DNA, 20 bp, synthetic construct
  misc_feature 1..20: note = chemically synthesized
  source 1..20: mol_type = other DNA
aatccattttattattcagt

SEQ ID NO: 29864 - DNA, 20 bp, synthetic construct
  misc_feature 1..20: note = chemically synthesized
  source 1..20: mol_type = other DNA
atccattttattattcagta

SEQ ID NO: 29865 - DNA, 20 bp, synthetic construct
  misc_feature 1..20: note = chemically synthesized
  source 1..20: mol_type = other DNA
ttattcagtaaggattcatc

SEQ ID NO: 29866 - DNA, 20 bp, synthetic construct
  misc_feature 1..20: note = chemically synthesized
  source 1..20: mol_type = other DNA
aggattcatcaagtgtctat

SEQ ID NO: 29867 - DNA, 20 bp, synthetic construct
  misc_feature 1..20: note = chemically synthesized
  source 1..20: mol_type = other DNA
ggattcatcaagtgtctatt

SEQ ID NO: 29868 - DNA, 20 bp, synthetic construct
  misc_feature 1..20: note = chemically synthesized
  source 1..20: mol_type = other DNA
atcaagtgtctattaggtat

SEQ ID NO: 29869 - DNA, 20 bp, synthetic construct
  misc_feature 1..20: note = chemically synthesized
  source 1..20: mol_type = other DNA
tcaagtgtctattaggtatc

SEQ ID NO: 29870 - DNA, 20 bp, synthetic construct
  misc_feature 1..20: note = chemically synthesized
  source 1..20: mol_type = other DNA
tctattaggtatcaggcact

SEQ ID NO: 29871 - DNA, 20 bp, synthetic construct
  misc_feature 1..20: note = chemically synthesized
  source 1..20: mol_type = other DNA
tattaggtatcaggcactga

SEQ ID NO: 29872 - DNA, 20 bp, synthetic construct
  misc_feature 1..20: note = chemically synthesized
  source 1..20: mol_type = other DNA
attaggtatcaggcactgag

SEQ ID NO: 29873 - DNA, 20 bp, synthetic construct
  misc_feature 1..20: note = chemically synthesized
  source 1..20: mol_type = other DNA
ggtatcaggcactgagaggc

SEQ ID NO: 29874 - DNA, 20 bp, synthetic construct
  misc_feature 1..20: note = chemically synthesized
  source 1..20: mol_type = other DNA
gtatcaggcactgagaggcg

SEQ ID NO: 29875 - DNA, 20 bp, synthetic construct
  misc_feature 1..20: note = chemically synthesized
  source 1..20: mol_type = other DNA
tatcaggcactgagaggcga

SEQ ID NO: 29876 - DNA, 20 bp, synthetic construct
  misc_feature 1..20: note = chemically synthesized
  source 1..20: mol_type = other DNA
tcaggcactgagaggcgagg

SEQ ID NO: 29877 - DNA, 20 bp, synthetic construct
  misc_feature 1..20: note = chemically synthesized
  source 1..20: mol_type = other DNA
gcactgagaggcgagggaga

SEQ ID NO: 29878 - DNA, 20 bp, synthetic construct
  misc_feature 1..20: note = chemically synthesized
  source 1..20: mol_type = other DNA
actgagaggcgagggagata

SEQ ID NO: 29879 - DNA, 20 bp, synthetic construct
  misc_feature 1..20: note = chemically synthesized
  source 1..20: mol_type = other DNA
gaggcgagggagatagagtt

SEQ ID NO: 29880 - DNA, 20 bp, synthetic construct
  misc_feature 1..20: note = chemically synthesized
  source 1..20: mol_type = other DNA
gggagatagagttaagaata

SEQ ID NO: 29881 - DNA, 20 bp, synthetic construct
  misc_feature 1..20: note = chemically synthesized
  source 1..20: mol_type = other DNA
agaactgattcttaatcttc

SEQ ID NO: 29882 - DNA, 20 bp, synthetic construct
  misc_feature 1..20: note = chemically synthesized
  source 1..20: mol_type = other DNA
ttcaagaattgacaaatttg

SEQ ID NO: 29883 - DNA, 20 bp, synthetic construct
  misc_feature 1..20: note = chemically synthesized
  source 1..20: mol_type = other DNA
aagaattgacaaatttgtag

SEQ ID NO: 29884 - DNA, 20 bp, synthetic construct
  misc_feature 1..20: note = chemically synthesized
  source 1..20: mol_type = other DNA
agaattgacaaatttgtaga

SEQ ID NO: 29885 - DNA, 20 bp, synthetic construct
  misc_feature 1..20: note = chemically synthesized
  source 1..20: mol_type = other DNA
attgacaaatttgtagaagg

SEQ ID NO: 29886 - DNA, 20 bp, synthetic construct
  misc_feature 1..20: note = chemically synthesized
  source 1..20: mol_type = other DNA
tagacattgaacatacaata

SEQ ID NO: 29887 - DNA, 20 bp, synthetic construct
  misc_feature 1..20: note = chemically synthesized
  source 1..20: mol_type = other DNA
acaatacagtcaaatgtgat

SEQ ID NO: 29888 - DNA, 20 bp, synthetic construct
  misc_feature 1..20: note = chemically synthesized
  source 1..20: mol_type = other DNA
cagtcaaatgtgatgagtgt

SEQ ID NO: 29889 - DNA, 20 bp, synthetic construct
  misc_feature 1..20: note = chemically synthesized
  source 1..20: mol_type = other DNA
aatgtgatgagtgtgagact

SEQ ID NO: 29890 - DNA, 20 bp, synthetic construct
  misc_feature 1..20: note = chemically synthesized
  source 1..20: mol_type = other DNA
atgtgatgagtgtgagacta

SEQ ID NO: 29891 - DNA, 20 bp, synthetic construct
  misc_feature 1..20: note = chemically synthesized
  source 1..20: mol_type = other DNA
tgtgatgagtgtgagactaa

SEQ ID NO: 29892 - DNA, 20 bp, synthetic construct
  misc_feature 1..20: note = chemically synthesized
  source 1..20: mol_type = other DNA
gagtgtgagactaagggaac

SEQ ID NO: 29893 - DNA, 20 bp, synthetic construct
  misc_feature 1..20: note = chemically synthesized
  source 1..20: mol_type = other DNA
agtgtgagactaagggaacc

SEQ ID NO: 29894 - DNA, 20 bp, synthetic construct
  misc_feature 1..20: note = chemically synthesized
  source 1..20: mol_type = other DNA
ctaagggaaccaggtgtcct

SEQ ID NO: 29895 - DNA, 20 bp, synthetic construct
  misc_feature 1..20: note = chemically synthesized
  source 1..20: mol_type = other DNA
ccaggtgtcctaagactata

SEQ ID NO: 29896 - DNA, 20 bp, synthetic construct
  misc_feature 1..20: note = chemically synthesized
  source 1..20: mol_type = other DNA
taagactatacagtgtaccg

SEQ ID NO: 29897 - DNA, 20 bp, synthetic construct
  misc_feature 1..20: note = chemically synthesized
  source 1..20: mol_type = other DNA
ctatacagtgtaccgtggaa

SEQ ID NO: 29898 - DNA, 20 bp, synthetic construct
  misc_feature 1..20: note = chemically synthesized
  source 1..20: mol_type = other DNA
tatacagtgtaccgtggaat

SEQ ID NO: 29899 - DNA, 20 bp, synthetic construct
  misc_feature 1..20: note = chemically synthesized
  source 1..20: mol_type = other DNA
atacagtgtaccgtggaatg

SEQ ID NO: 29900 - DNA, 20 bp, synthetic construct
  misc_feature 1..20: note = chemically synthesized
  source 1..20: mol_type = other DNA
acagtgtaccgtggaatggg

SEQ ID NO: 29901 - DNA, 20 bp, synthetic construct
  misc_feature 1..20: note = chemically synthesized
  source 1..20: mol_type = other DNA
gtgtaccgtggaatggggag

SEQ ID NO: 29902 - DNA, 20 bp, synthetic construct
  misc_feature 1..20: note = chemically synthesized
  source 1..20: mol_type = other DNA
atggggagtggtttctaacc

SEQ ID NO: 29903 - DNA, 20 bp, synthetic construct
  misc_feature 1..20: note = chemically synthesized
  source 1..20: mol_type = other DNA
tggtttctaacctagttacc

SEQ ID NO: 29904 - DNA, 20 bp, synthetic construct
  misc_feature 1..20: note = chemically synthesized
  source 1..20: mol_type = other DNA
gtttctaacctagttaccta

SEQ ID NO: 29905 - DNA, 20 bp, synthetic construct
  misc_feature 1..20: note = chemically synthesized
  source 1..20: mol_type = other DNA
tttctaacctagttacctag

SEQ ID NO: 29906 - DNA, 20 bp, synthetic construct
  misc_feature 1..20: note = chemically synthesized
  source 1..20: mol_type = other DNA
aacctagttacctagaggtt

SEQ ID NO: 29907 - DNA, 20 bp, synthetic construct
  misc_feature 1..20: note = chemically synthesized
  source 1..20: mol_type = other DNA
acctagttacctagaggttt

SEQ ID NO: 29908 - DNA, 20 bp, synthetic construct
  misc_feature 1..20: note = chemically synthesized
  source 1..20: mol_type = other DNA
ggaaaaacctctctaatgat

SEQ ID NO: 29909 - DNA, 20 bp, synthetic construct
  misc_feature 1..20: note = chemically synthesized
  source 1..20: mol_type = other DNA
tctctaatgatgagatgttt

SEQ ID NO: 29910 - DNA, 20 bp, synthetic construct
  misc_feature 1..20: note = chemically synthesized
  source 1..20: mol_type = other DNA
gatgtttgagctgacacttg

SEQ ID NO: 29911 - DNA, 20 bp, synthetic construct
  misc_feature 1..20: note = chemically synthesized
  source 1..20: mol_type = other DNA
atgtttgagctgacacttga

SEQ ID NO: 29912 - DNA, 20 bp, synthetic construct
  misc_feature 1..20: note = chemically synthesized
  source 1..20: mol_type = other DNA
gctgacacttgaaggataaa

SEQ ID NO: 29913 - DNA, 20 bp, synthetic construct
  misc_feature 1..20: note = chemically synthesized
  source 1..20: mol_type = other DNA
acttgaaggataaatagcta

SEQ ID NO: 29914 - DNA, 20 bp, synthetic construct
  misc_feature 1..20: note = chemically synthesized
  source 1..20: mol_type = other DNA
cttgaaggataaatagctaa

SEQ ID NO: 29915 - DNA, 20 bp, synthetic construct
  misc_feature 1..20: note = chemically synthesized
  source 1..20: mol_type = other DNA
ttgaaggataaatagctaaa

SEQ ID NO: 29916 - DNA, 20 bp, synthetic construct
  misc_feature 1..20: note = chemically synthesized
  source 1..20: mol_type = other DNA
tgaaggataaatagctaaag

SEQ ID NO: 29917 - DNA, 20 bp, synthetic construct
  misc_feature 1..20: note = chemically synthesized
  source 1..20: mol_type = other DNA
aaggataaatagctaaaggg

SEQ ID NO: 29918 - DNA, 20 bp, synthetic construct
  misc_feature 1..20: note = chemically synthesized
  source 1..20: mol_type = other DNA
ataaatagctaaaggggaga

SEQ ID NO: 29919 - DNA, 20 bp, synthetic construct
  misc_feature 1..20: note = chemically synthesized
  source 1..20: mol_type = other DNA
ggggagaaagcgttctatgt

SEQ ID NO: 29920 - DNA, 20 bp, synthetic construct
  misc_feature 1..20: note = chemically synthesized
  source 1..20: mol_type = other DNA
ggagaaagcgttctatgtga

SEQ ID NO: 29921 - DNA, 20 bp, synthetic construct
  misc_feature 1..20: note = chemically synthesized
  source 1..20: mol_type = other DNA
gtgagagaactatatatgcc

SEQ ID NO: 29922 - DNA, 20 bp, synthetic construct
  misc_feature 1..20: note = chemically synthesized
  source 1..20: mol_type = other DNA
gaactatatatgccaagatg

SEQ ID NO: 29923 - DNA, 20 bp, synthetic construct
  misc_feature 1..20: note = chemically synthesized
  source 1..20: mol_type = other DNA
ctatatatgccaagatgcag

SEQ ID NO: 29924 - DNA, 20 bp, synthetic construct
  misc_feature 1..20: note = chemically synthesized
  source 1..20: mol_type = other DNA
gcagaagtgttctctgttcg

SEQ ID NO: 29925 - DNA, 20 bp, synthetic construct
  misc_feature 1..20: note = chemically synthesized
  source 1..20: mol_type = other DNA
tgttctctgttcgaagatct

SEQ ID NO: 29926 - DNA, 20 bp, synthetic construct
  misc_feature 1..20: note = chemically synthesized
  source 1..20: mol_type = other DNA
tctctgttcgaagatctgag

SEQ ID NO: 29927 - DNA, 20 bp, synthetic construct
  misc_feature 1..20: note = chemically synthesized
  source 1..20: mol_type = other DNA
ctctgttcgaagatctgagc

SEQ ID NO: 29928 - DNA, 20 bp, synthetic construct
  misc_feature 1..20: note = chemically synthesized
  source 1..20: mol_type = other DNA
tctgttcgaagatctgagcg

SEQ ID NO: 29929 - DNA, 20 bp, synthetic construct
  misc_feature 1..20: note = chemically synthesized
  source 1..20: mol_type = other DNA
tcgaagatctgagcggggct

SEQ ID NO: 29930 - DNA, 20 bp, synthetic construct
  misc_feature 1..20: note = chemically synthesized
  source 1..20: mol_type = other DNA
gaagatctgagcggggctca

SEQ ID NO: 29931 - DNA, 20 bp, synthetic construct
  misc_feature 1..20: note = chemically synthesized
  source 1..20: mol_type = other DNA
agatctgagcggggctcaga

SEQ ID NO: 29932 - DNA, 20 bp, synthetic construct
  misc_feature 1..20: note = chemically synthesized
  source 1..20: mol_type = other DNA
gatctgagcggggctcagag

SEQ ID NO: 29933 - DNA, 20 bp, synthetic construct
  misc_feature 1..20: note = chemically synthesized
  source 1..20: mol_type = other DNA
atctgagcggggctcagaga

SEQ ID NO: 29934 - DNA, 20 bp, synthetic construct
  misc_feature 1..20: note = chemically synthesized
  source 1..20: mol_type = other DNA
agcggggctcagagagggaa

SEQ ID NO: 29935 - DNA, 20 bp, synthetic construct
  misc_feature 1..20: note = chemically synthesized
  source 1..20: mol_type = other DNA
gcggggctcagagagggaaa

SEQ ID NO: 29936 - DNA, 20 bp, synthetic construct
  misc_feature 1..20: note = chemically synthesized
  source 1..20: mol_type = other DNA
ggggctcagagagggaaaag

SEQ ID NO: 29937 - DNA, 20 bp, synthetic construct
  misc_feature 1..20: note = chemically synthesized
  source 1..20: mol_type = other DNA
ggctcagagagggaaaagga

SEQ ID NO: 29938 - DNA, 20 bp, synthetic construct
  misc_feature 1..20: note = chemically synthesized
  source 1..20: mol_type = other DNA
gctcagagagggaaaaggag

SEQ ID NO: 29939 - DNA, 20 bp, synthetic construct
  misc_feature 1..20: note = chemically synthesized
  source 1..20: mol_type = other DNA
tcagagagggaaaaggagag

SEQ ID NO: 29940 - DNA, 20 bp, synthetic construct
  misc_feature 1..20: note = chemically synthesized
  source 1..20: mol_type = other DNA
agggaaaaggagaggagtat

SEQ ID NO: 29941 - DNA, 20 bp, synthetic construct
  misc_feature 1..20: note = chemically synthesized
  source 1..20: mol_type = other DNA
ggaaaaggagaggagtatga

SEQ ID NO: 29942 - DNA, 20 bp, synthetic construct
  misc_feature 1..20: note = chemically synthesized
  source 1..20: mol_type = other DNA
aaaggagaggagtatgagag

SEQ ID NO: 29943 - DNA, 20 bp, synthetic construct
  misc_feature 1..20: note = chemically synthesized
  source 1..20: mol_type = other DNA
gagaggagtatgagagaaga

SEQ ID NO: 29944 - DNA, 20 bp, synthetic construct
  misc_feature 1..20: note = chemically synthesized
  source 1..20: mol_type = other DNA
agaggagtatgagagaagat

SEQ ID NO: 29945 - DNA, 20 bp, synthetic construct
  misc_feature 1..20: note = chemically synthesized
  source 1..20: mol_type = other DNA
aggagtatgagagaagatgg

SEQ ID NO: 29946 - DNA, 20 bp, synthetic construct
  misc_feature 1..20: note = chemically synthesized
  source 1..20: mol_type = other DNA
gagtatgagagaagatggga

SEQ ID NO: 29947 - DNA, 20 bp, synthetic construct
  misc_feature 1..20: note = chemically synthesized
  source 1..20: mol_type = other DNA
gagaagatgggagagacctg

SEQ ID NO: 29948 - DNA, 20 bp, synthetic construct
  misc_feature 1..20: note = chemically synthesized
  source 1..20: mol_type = other DNA
agaagatgggagagacctgc

SEQ ID NO: 29949 - DNA, 20 bp, synthetic construct
  misc_feature 1..20: note = chemically synthesized
  source 1..20: mol_type = other DNA
gaagatgggagagacctgca

SEQ ID NO: 29950 - DNA, 20 bp, synthetic construct
  misc_feature 1..20: note = chemically synthesized
  source 1..20: mol_type = other DNA
tgggagagacctgcagggac

SEQ ID NO: 29951 - DNA, 20 bp, synthetic construct
  misc_feature 1..20: note = chemically synthesized
  source 1..20: mol_type = other DNA
cctgcagggactagattgtg

SEQ ID NO: 29952 - DNA, 20 bp, synthetic construct
  misc_feature 1..20: note = chemically synthesized
  source 1..20: mol_type = other DNA
agggactagattgtgaagct

SEQ ID NO: 29953 - DNA, 20 bp, synthetic construct
  misc_feature 1..20: note = chemically synthesized
  source 1..20: mol_type = other DNA
gggactagattgtgaagctc

SEQ ID NO: 29954 - DNA, 20 bp, synthetic construct
  misc_feature 1..20: note = chemically synthesized
  source 1..20: mol_type = other DNA
ggactagattgtgaagctca

SEQ ID NO: 29955 - DNA, 20 bp, synthetic construct
  misc_feature 1..20: note = chemically synthesized
  source 1..20: mol_type = other DNA
gactagattgtgaagctcag

SEQ ID NO: 29956 - DNA, 20 bp, synthetic construct
  misc_feature 1..20: note = chemically synthesized
  source 1..20: mol_type = other DNA
actagattgtgaagctcagg

SEQ ID NO: 29957 - DNA, 20 bp, synthetic construct
  misc_feature 1..20: note = chemically synthesized
  source 1..20: mol_type = other DNA
tagattgtgaagctcagggg

SEQ ID NO: 29958 - DNA, 20 bp, synthetic construct
  misc_feature 1..20: note = chemically synthesized
  source 1..20: mol_type = other DNA
tgaagctcagggggagttaa

SEQ ID NO: 29959 - DNA, 20 bp, synthetic construct
  misc_feature 1..20: note = chemically synthesized
  source 1..20: mol_type = other DNA
cagggggagttaatagcctt

SEQ ID NO: 29960 - DNA, 20 bp, synthetic construct
  misc_feature 1..20: note = chemically synthesized
  source 1..20: mol_type = other DNA
agggggagttaatagcctta

SEQ ID NO: 29961 - DNA, 20 bp, synthetic construct
  misc_feature 1..20: note = chemically synthesized
  source 1..20: mol_type = other DNA
ggggagttaatagccttaag

SEQ ID NO: 29962 - DNA, 20 bp, synthetic construct
  misc_feature 1..20: note = chemically synthesized
  source 1..20: mol_type = other DNA
gccttaaggagttttgtctc

SEQ ID NO: 29963 - DNA, 20 bp, synthetic construct
  misc_feature 1..20: note = chemically synthesized
  source 1..20: mol_type = other DNA
ccttaaggagttttgtctcc

SEQ ID NO: 29964 - DNA, 20 bp, synthetic construct
  misc_feature 1..20: note = chemically synthesized
  source 1..20: mol_type = other DNA
cttaaggagttttgtctcca

SEQ ID NO: 29965 - DNA, 20 bp, synthetic construct
  misc_feature 1..20: note = chemically synthesized
  source 1..20: mol_type = other DNA
ccagggtatgaacaatgaat

SEQ ID NO: 29966 - DNA, 20 bp, synthetic construct
  misc_feature 1..20: note = chemically synthesized
  source 1..20: mol_type = other DNA
cagggtatgaacaatgaatg

SEQ ID NO: 29967 - DNA, 20 bp, synthetic construct
  misc_feature 1..20: note = chemically synthesized
  source 1..20: mol_type = other DNA
gggtatgaacaatgaatgag

SEQ ID NO: 29968 - DNA, 20 bp, synthetic construct
  misc_feature 1..20: note = chemically synthesized
  source 1..20: mol_type = other DNA
agtcactgaaattctatcca

SEQ ID NO: 29969 - DNA, 20 bp, synthetic construct
  misc_feature 1..20: note = chemically synthesized
  source 1..20: mol_type = other DNA
cactgaaattctatccacag

SEQ ID NO: 29970 - DNA, 20 bp, synthetic construct
  misc_feature 1..20: note = chemically synthesized
  source 1..20: mol_type = other DNA
tgaaattctatccacagtag

SEQ ID NO: 29971 - DNA, 20 bp, synthetic construct
  misc_feature 1..20: note = chemically synthesized
  source 1..20: mol_type = other DNA
gaaattctatccacagtagt

SEQ ID NO: 29972 - DNA, 20 bp, synthetic construct
  misc_feature 1..20: note = chemically synthesized
  source 1..20: mol_type = other DNA
attctatccacagtagtggg

SEQ ID NO: 29973 - DNA, 20 bp, synthetic construct
  misc_feature 1..20: note = chemically synthesized
  source 1..20: mol_type = other DNA
ccacagtagtgggaagtact

SEQ ID NO: 29974 - DNA, 20 bp, synthetic construct
  misc_feature 1..20: note = chemically synthesized
  source 1..20: mol_type = other DNA
cagtagtgggaagtactaag

SEQ ID NO: 29975 - DNA, 20 bp, synthetic construct
  misc_feature 1..20: note = chemically synthesized
  source 1..20: mol_type = other DNA
agtgggaagtactaagtagt

SEQ ID NO: 29976 - DNA, 20 bp, synthetic construct
  misc_feature 1..20: note = chemically synthesized
  source 1..20: mol_type = other DNA
gtgggaagtactaagtagtc

SEQ ID NO: 29977 - DNA, 20 bp, synthetic construct
  misc_feature 1..20: note = chemically synthesized
  source 1..20: mol_type = other DNA
ctaagtagtcaggtatgttt

SEQ ID NO: 29978 - DNA, 20 bp, synthetic construct
  misc_feature 1..20: note = chemically synthesized
  source 1..20: mol_type = other DNA
agtagtcaggtatgttttgg

SEQ ID NO: 29979 - DNA, 20 bp, synthetic construct
  misc_feature 1..20: note = chemically synthesized
  source 1..20: mol_type = other DNA
agtcaggtatgttttggaag

SEQ ID NO: 29980 - DNA, 20 bp, synthetic construct
  misc_feature 1..20: note = chemically synthesized
  source 1..20: mol_type = other DNA
tttggaagaagcactgttac

SEQ ID NO: 29981 - DNA, 20 bp, synthetic construct
  misc_feature 1..20: note = chemically synthesized
  source 1..20: mol_type = other DNA
aagaagcactgttaccagtt

SEQ ID NO: 29982 - DNA, 20 bp, synthetic construct
  misc_feature 1..20: note = chemically synthesized
  source 1..20: mol_type = other DNA
agaagcactgttaccagttg

SEQ ID NO: 29983 - DNA, 20 bp, synthetic construct
  misc_feature 1..20: note = chemically synthesized
  source 1..20: mol_type = other DNA
gaagcactgttaccagttga

SEQ ID NO: 29984 - DNA, 20 bp, synthetic construct
  misc_feature 1..20: note = chemically synthesized
  source 1..20: mol_type = other DNA
agcactgttaccagttgagg

SEQ ID NO: 29985 - DNA, 20 bp, synthetic construct
  misc_feature 1..20: note = chemically synthesized
  source 1..20: mol_type = other DNA
cactgttaccagttgaggga

SEQ ID NO: 29986 - DNA, 20 bp, synthetic construct
  misc_feature 1..20: note = chemically synthesized
  source 1..20: mol_type = other DNA
actgttaccagttgagggag

SEQ ID NO: 29987 - DNA, 20 bp, synthetic construct
  misc_feature 1..20: note = chemically synthesized
  source 1..20: mol_type = other DNA
tgttaccagttgagggagag

SEQ ID NO: 29988 - DNA, 20 bp, synthetic construct
  misc_feature 1..20: note = chemically synthesized
  source 1..20: mol_type = other DNA
ttaccagttgagggagagga

SEQ ID NO: 29989 - DNA, 20 bp, synthetic construct
  misc_feature 1..20: note = chemically synthesized
  source 1..20: mol_type = other DNA
taccagttgagggagaggag

SEQ ID NO: 29990 - DNA, 20 bp, synthetic construct
  misc_feature 1..20: note = chemically synthesized
  source 1..20: mol_type = other DNA
ccagttgagggagaggagag

SEQ ID NO: 29991 - DNA, 20 bp, synthetic construct
  misc_feature 1..20: note = chemically synthesized
  source 1..20: mol_type = other DNA
cagttgagggagaggagagg

SEQ ID NO: 29992 - DNA, 20 bp, synthetic construct
  misc_feature 1..20: note = chemically synthesized
  source 1..20: mol_type = other DNA
agttgagggagaggagagga

SEQ ID NO: 29993 - DNA, 20 bp, synthetic construct
  misc_feature 1..20: note = chemically synthesized
  source 1..20: mol_type = other DNA
ggagaggagaggagggaaat

SEQ ID NO: 29994 - DNA, 20 bp, synthetic construct
  misc_feature 1..20: note = chemically synthesized
  source 1..20: mol_type = other DNA
agaggagggaaattagactg

SEQ ID NO: 29995 - DNA, 20 bp, synthetic construct
  misc_feature 1..20: note = chemically synthesized
  source 1..20: mol_type = other DNA
aattagactgtggtgtgacc

SEQ ID NO: 29996 - DNA, 20 bp, synthetic construct
  misc_feature 1..20: note = chemically synthesized
  source 1..20: mol_type = other DNA
attagactgtggtgtgaccc

SEQ ID NO: 29997 - DNA, 20 bp, synthetic construct
  misc_feature 1..20: note = chemically synthesized
  source 1..20: mol_type = other DNA
gactgtggtgtgacccagga

SEQ ID NO: 29998 - DNA, 20 bp, synthetic construct
  misc_feature 1..20: note = chemically synthesized
  source 1..20: mol_type = other DNA
gtggtgtgacccaggatgga

SEQ ID NO: 29999 - DNA, 20 bp, synthetic construct
  misc_feature 1..20: note = chemically synthesized
  source 1..20: mol_type = other DNA
tggaaagttttgcccaaatg

SEQ ID NO: 30000 - DNA, 20 bp, synthetic construct
  misc_feature 1..20: note = chemically synthesized
  source 1..20: mol_type = other DNA
ggaaagttttgcccaaatgt

SEQ ID NO: 30001 - DNA, 20 bp, synthetic construct
  misc_feature 1..20: note = chemically synthesized
  source 1..20: mol_type = other DNA
gaaagttttgcccaaatgtg

SEQ ID NO: 30002 - DNA, 20 bp, synthetic construct
  misc_feature 1..20: note = chemically synthesized
  source 1..20: mol_type = other DNA
aaagttttgcccaaatgtgg

SEQ ID NO: 30003 - DNA, 20 bp, synthetic construct
  misc_feature 1..20: note = chemically synthesized
  source 1..20: mol_type = other DNA
tgtttactctctcctttgcc

SEQ ID NO: 30004 - DNA, 20 bp, synthetic construct
  misc_feature 1..20: note = chemically synthesized
  source 1..20: mol_type = other DNA
gtttactctctcctttgccc

SEQ ID NO: 30005 - DNA, 20 bp, synthetic construct
  misc_feature 1..20: note = chemically synthesized
  source 1..20: mol_type = other DNA
ttcttctgcacacacttgct

SEQ ID NO: 30006 - DNA, 20 bp, synthetic construct
  misc_feature 1..20: note = chemically synthesized
  source 1..20: mol_type = other DNA
gctcagaacattacaaactc

SEQ ID NO: 30007 - DNA, 20 bp, synthetic construct
  misc_feature 1..20: note = chemically synthesized
  source 1..20: mol_type = other DNA
tcagaacattacaaactctg

SEQ ID NO: 30008 - DNA, 20 bp, synthetic construct
  misc_feature 1..20: note = chemically synthesized
  source 1..20: mol_type = other DNA
tctggagaaattaacatgtt

SEQ ID NO: 30009 - DNA, 20 bp, synthetic construct
  misc_feature 1..20: note = chemically synthesized
  source 1..20: mol_type = other DNA
ctggagaaattaacatgtta

SEQ ID NO: 30010 - DNA, 20 bp, synthetic construct
  misc_feature 1..20: note = chemically synthesized
  source 1..20: mol_type = other DNA
attaacatgttaaggatatt

SEQ ID NO: 30011 - DNA, 20 bp, synthetic construct
  misc_feature 1..20: note = chemically synthesized
  source 1..20: mol_type = other DNA
ttaacatgttaaggatattt

SEQ ID NO: 30012 - DNA, 20 bp, synthetic construct
  misc_feature 1..20: note = chemically synthesized
  source 1..20: mol_type = other DNA
gatatttaggatcattaaaa

SEQ ID NO: 30013 - DNA, 20 bp, synthetic construct
  misc_feature 1..20: note = chemically synthesized
  source 1..20: mol_type = other DNA
aatgttgtcacacataatga

SEQ ID NO: 30014 - DNA, 20 bp, synthetic construct
  misc_feature 1..20: note = chemically synthesized
  source 1..20: mol_type = other DNA
cacataatgaaagttaattt

SEQ ID NO: 30015 - DNA, 20 bp, synthetic construct
  misc_feature 1..20: note = chemically synthesized
  source 1..20: mol_type = other DNA
aagttaatttaagaattgta

SEQ ID NO: 30016 - DNA, 20 bp, synthetic construct
  misc_feature 1..20: note = chemically synthesized
  source 1..20: mol_type = other DNA
tttaagaattgtaaagactt

SEQ ID NO: 30017 - DNA, 20 bp, synthetic construct
  misc_feature 1..20: note = chemically synthesized
  source 1..20: mol_type = other DNA
ttgtaaagacttgagcgatg

SEQ ID NO: 30018 - DNA, 20 bp, synthetic construct
  misc_feature 1..20: note = chemically synthesized
  source 1..20: mol_type = other DNA
taaatgcttccctcttaaaa

SEQ ID NO: 30019 - DNA, 20 bp, synthetic construct
  misc_feature 1..20: note = chemically synthesized
  source 1..20: mol_type = other DNA
gcttccctcttaaaatggac

SEQ ID NO: 30020 - DNA, 20 bp, synthetic construct
  misc_feature 1..20: note = chemically synthesized
  source 1..20: mol_type = other DNA
gaaacaatttgtttttgcct

SEQ ID NO: 30021 - DNA, 20 bp, synthetic construct
  misc_feature 1..20: note = chemically synthesized
  source 1..20: mol_type = other DNA
tgcctaagccaacgtattgc

SEQ ID NO: 30022 - DNA, 20 bp, synthetic construct
  misc_feature 1..20: note = chemically synthesized
  source 1..20: mol_type = other DNA
taatttacctgcttcctcct

SEQ ID NO: 30023 - DNA, 20 bp, synthetic construct
  misc_feature 1..20: note = chemically synthesized
  source 1..20: mol_type = other DNA
cactacacctctgaattaca

SEQ ID NO: 30024 - DNA, 20 bp, synthetic construct
  misc_feature 1..20: note = chemically synthesized
  source 1..20: mol_type = other DNA
acctctgaattacatggtac

SEQ ID NO: 30025 - DNA, 20 bp, synthetic construct
  misc_feature 1..20: note = chemically synthesized
  source 1..20: mol_type = other DNA
tctgaattacatggtacaag

SEQ ID NO: 30026 - DNA, 20 bp, synthetic construct
  misc_feature 1..20: note = chemically synthesized
  source 1..20: mol_type = other DNA
attacatggtacaagtggca

SEQ ID NO: 30027 - DNA, 20 bp, synthetic construct
  misc_feature 1..20: note = chemically synthesized
  source 1..20: mol_type = other DNA
ttacatggtacaagtggcac

SEQ ID NO: 30028 - DNA, 20 bp, synthetic construct
  misc_feature 1..20: note = chemically synthesized
  source 1..20: mol_type = other DNA
tacatggtacaagtggcaca

SEQ ID NO: 30029 - DNA, 20 bp, synthetic construct
  misc_feature 1..20: note = chemically synthesized
  source 1..20: mol_type = other DNA
atggtacaagtggcacaggg

SEQ ID NO: 30030 - DNA, 20 bp, synthetic construct
  misc_feature 1..20: note = chemically synthesized
  source 1..20: mol_type = other DNA
aagtggcacagggaagaatt

SEQ ID NO: 30031 - DNA, 20 bp, synthetic construct
  misc_feature 1..20: note = chemically synthesized
  source 1..20: mol_type = other DNA
cagggaagaattcagaaaac

SEQ ID NO: 30032 - DNA, 20 bp, synthetic construct
  misc_feature 1..20: note = chemically synthesized
  source 1..20: mol_type = other DNA
gggaagaattcagaaaacta

SEQ ID NO: 30033 - DNA, 20 bp, synthetic construct
  misc_feature 1..20: note = chemically synthesized
  source 1..20: mol_type = other DNA
aattcagaaaactagagtca

SEQ ID NO: 30034 - DNA, 20 bp, synthetic construct
  misc_feature 1..20: note = chemically synthesized
  source 1..20: mol_type = other DNA
tcagaaaactagagtcaaag

SEQ ID NO: 30035 - DNA, 20 bp, synthetic construct
  misc_feature 1..20: note = chemically synthesized
  source 1..20: mol_type = other DNA
aactagagtcaaagtggtta

SEQ ID NO: 30036 - DNA, 20 bp, synthetic construct
  misc_feature 1..20: note = chemically synthesized
  source 1..20: mol_type = other DNA
tagagtcaaagtggttatgg

SEQ ID NO: 30037 - DNA, 20 bp, synthetic construct
  misc_feature 1..20: note = chemically synthesized
  source 1..20: mol_type = other DNA
atggaagaaattataataat

SEQ ID NO: 30038 - DNA, 20 bp, synthetic construct
  misc_feature 1..20: note = chemically synthesized
  source 1..20: mol_type = other DNA
taataatgagtccactcttc

SEQ ID NO: 30039 - DNA, 20 bp, synthetic construct
  misc_feature 1..20: note = chemically synthesized
  source 1..20: mol_type = other DNA
aataatgagtccactcttct

SEQ ID NO: 30040 - DNA, 20 bp, synthetic construct
  misc_feature 1..20: note = chemically synthesized
  source 1..20: mol_type = other DNA
atgagtccactcttctagga

SEQ ID NO: 30041 - DNA, 20 bp, synthetic construct
  misc_feature 1..20: note = chemically synthesized
  source 1..20: mol_type = other DNA
tgagtccactcttctaggac

SEQ ID NO: 30042 - DNA, 20 bp, synthetic construct
  misc_feature 1..20: note = chemically synthesized
  source 1..20: mol_type = other DNA
agtccactcttctaggacag

SEQ ID NO: 30043 - DNA, 20 bp, synthetic construct
  misc_feature 1..20: note = chemically synthesized
  source 1..20: mol_type = other DNA
cttctaggacaggagttcta

SEQ ID NO: 30044 - DNA, 20 bp, synthetic construct
  misc_feature 1..20: note = chemically synthesized
  source 1..20: mol_type = other DNA
ttctaggacaggagttctaa

SEQ ID NO: 30045 - DNA, 20 bp, synthetic construct
  misc_feature 1..20: note = chemically synthesized
  source 1..20: mol_type = other DNA
aggacaggagttctaaaggt

SEQ ID NO: 30046 - DNA, 20 bp, synthetic construct
  misc_feature 1..20: note = chemically synthesized
  source 1..20: mol_type = other DNA
ggacaggagttctaaaggtg

SEQ ID NO: 30047 - DNA, 20 bp, synthetic construct
  misc_feature 1..20: note = chemically synthesized
  source 1..20: mol_type = other DNA
aaaggtgaggactttgatat

SEQ ID NO: 30048 - DNA, 20 bp, synthetic construct
  misc_feature 1..20: note = chemically synthesized
  source 1..20: mol_type = other DNA
actttgatataagtgaactc

SEQ ID NO: 30049 - DNA, 20 bp, synthetic construct
  misc_feature 1..20: note = chemically synthesized
  source 1..20: mol_type = other DNA
ctttgatataagtgaactca

SEQ ID NO: 30050 - DNA, 20 bp, synthetic construct
  misc_feature 1..20: note = chemically synthesized
  source 1..20: mol_type = other DNA
ttgatataagtgaactcaag

SEQ ID NO: 30051 - DNA, 20 bp, synthetic construct
  misc_feature 1..20: note = chemically synthesized
  source 1..20: mol_type = other DNA
tcaaggagtttctaaacctt

SEQ ID NO: 30052 - DNA, 20 bp, synthetic construct
  misc_feature 1..20: note = chemically synthesized
  source 1..20: mol_type = other DNA
cagaaattatatctaaaaat

SEQ ID NO: 30053 - DNA, 20 bp, synthetic construct
  misc_feature 1..20: note = chemically synthesized
  source 1..20: mol_type = other DNA
agaaattatatctaaaaatt

SEQ ID NO: 30054 - DNA, 20 bp, synthetic construct
  misc_feature 1..20: note = chemically synthesized
  source 1..20: mol_type = other DNA
aaaaattaggtgcacgtata

SEQ ID NO: 30055 - DNA, 20 bp, synthetic construct
  misc_feature 1..20: note = chemically synthesized
  source 1..20: mol_type = other DNA
aattaggtgcacgtatatag

SEQ ID NO: 30056 - DNA, 20 bp, synthetic construct
  misc_feature 1..20: note = chemically synthesized
  source 1..20: mol_type = other DNA
atatagaagtacttttctct

SEQ ID NO: 30057 - DNA, 20 bp, synthetic construct
  misc_feature 1..20: note = chemically synthesized
  source 1..20: mol_type = other DNA
tagaagtacttttctctgag

SEQ ID NO: 30058 - DNA, 20 bp, synthetic construct
  misc_feature 1..20: note = chemically synthesized
  source 1..20: mol_type = other DNA
gaagtacttttctctgagaa

SEQ ID NO: 30059 - DNA, 20 bp, synthetic construct
  misc_feature 1..20: note = chemically synthesized
  source 1..20: mol_type = other DNA
aagtacttttctctgagaag

SEQ ID NO: 30060 - DNA, 20 bp, synthetic construct
  misc_feature 1..20: note = chemically synthesized
  source 1..20: mol_type = other DNA
agaggacttcacacttccat

SEQ ID NO: 30061 - DNA, 20 bp, synthetic construct
  misc_feature 1..20: note = chemically synthesized
  source 1..20: mol_type = other DNA
acacttccatcagcttcctg

SEQ ID NO: 30062 - DNA, 20 bp, synthetic construct
  misc_feature 1..20: note = chemically synthesized
  source 1..20: mol_type = other DNA
cacttccatcagcttcctga

SEQ ID NO: 30063 - DNA, 20 bp, synthetic construct
  misc_feature 1..20: note = chemically synthesized
  source 1..20: mol_type = other DNA
aggcccctgtaattgccgta

SEQ ID NO: 30064 - DNA, 20 bp, synthetic construct
  misc_feature 1..20: note = chemically synthesized
  source 1..20: mol_type = other DNA
cgtaaagaacaactgctcta

SEQ ID NO: 30065 - DNA, 20 bp, synthetic construct
  misc_feature 1..20: note = chemically synthesized
  source 1..20: mol_type = other DNA
actgctctaaagtttaatac

SEQ ID NO: 30066 - DNA, 20 bp, synthetic construct
  misc_feature 1..20: note = chemically synthesized
  source 1..20: mol_type = other DNA
ctgctctaaagtttaatact

SEQ ID NO: 30067 - DNA, 20 bp, synthetic construct
  misc_feature 1..20: note = chemically synthesized
  source 1..20: mol_type = other DNA
aagtttaatactaggctact

SEQ ID NO: 30068 - DNA, 20 bp, synthetic construct
  misc_feature 1..20: note = chemically synthesized
  source 1..20: mol_type = other DNA
tcggctgttttttgttaaca

SEQ ID NO: 30069 - DNA, 20 bp, synthetic construct
  misc_feature 1..20: note = chemically synthesized
  source 1..20: mol_type = other DNA
gctgttttttgttaacacag

SEQ ID NO: 30070 - DNA, 20 bp, synthetic construct
  misc_feature 1..20: note = chemically synthesized
  source 1..20: mol_type = other DNA
taacacagaagttttccaaa

SEQ ID NO: 30071 - DNA, 20 bp, synthetic construct
  misc_feature 1..20: note = chemically synthesized
  source 1..20: mol_type = other DNA
ttttccaaatggcttttctc

SEQ ID NO: 30072 - DNA, 20 bp, synthetic construct
  misc_feature 1..20: note = chemically synthesized
  source 1..20: mol_type = other DNA
ttccaaatggcttttctcta

SEQ ID NO: 30073 - DNA, 20 bp, synthetic construct
  misc_feature 1..20: note = chemically synthesized
  source 1..20: mol_type = other DNA
tttctctagagcaaaatgaa

SEQ ID NO: 30074 - DNA, 20 bp, synthetic construct
  misc_feature 1..20: note = chemically synthesized
  source 1..20: mol_type = other DNA
ttctctagagcaaaatgaaa

SEQ ID NO: 30075 - DNA, 20 bp, synthetic construct
  misc_feature 1..20: note = chemically synthesized
  source 1..20: mol_type = other DNA
aaaaggatcccatccttccc

SEQ ID NO: 30076 - DNA, 20 bp, synthetic construct
  misc_feature 1..20: note = chemically synthesized
  source 1..20: mol_type = other DNA
cctaccccccaccactttta

SEQ ID NO: 30077 - DNA, 20 bp, synthetic construct
  misc_feature 1..20: note = chemically synthesized
  source 1..20: mol_type = other DNA
accacttttaaagatccatc

SEQ ID NO: 30078 - DNA, 20 bp, synthetic construct
  misc_feature 1..20: note = chemically synthesized
  source 1..20: mol_type = other DNA
ccacttttaaagatccatca

SEQ ID NO: 30079 - DNA, 20 bp, synthetic construct
  misc_feature 1..20: note = chemically synthesized
  source 1..20: mol_type = other DNA
tttaaagatccatcaaggcc

SEQ ID NO: 30080 - DNA, 20 bp, synthetic construct
  misc_feature 1..20: note = chemically synthesized
  source 1..20: mol_type = other DNA
agatccatcaaggcccagca

SEQ ID NO: 30081 - DNA, 20 bp, synthetic construct
  misc_feature 1..20: note = chemically synthesized
  source 1..20: mol_type = other DNA
ctgtaatctcaacacttttc

SEQ ID NO: 30082 - DNA, 20 bp, synthetic construct
  misc_feature 1..20: note = chemically synthesized
  source 1..20: mol_type = other DNA
tgtaatctcaacacttttca

SEQ ID NO: 30083 - DNA, 20 bp, synthetic construct
  misc_feature 1..20: note = chemically synthesized
  source 1..20: mol_type = other DNA
tctcaacacttttcaaggct

SEQ ID NO: 30084 - DNA, 20 bp, synthetic construct
  misc_feature 1..20: note = chemically synthesized
  source 1..20: mol_type = other DNA
ctcaacacttttcaaggctg

SEQ ID NO: 30085 - DNA, 20 bp, synthetic construct
  misc_feature 1..20: note = chemically synthesized
  source 1..20: mol_type = other DNA
aacacttttcaaggctgagg

SEQ ID NO: 30086 - DNA, 20 bp, synthetic construct
  misc_feature 1..20: note = chemically synthesized
  source 1..20: mol_type = other DNA
acacttttcaaggctgaggt

SEQ ID NO: 30087 - DNA, 20 bp, synthetic construct
  misc_feature 1..20: note = chemically synthesized
  source 1..20: mol_type = other DNA
acttttcaaggctgaggtgg

SEQ ID NO: 30088 - DNA, 20 bp, synthetic construct
  misc_feature 1..20: note = chemically synthesized
  source 1..20: mol_type = other DNA
ctgaggtgggagaattgttt

SEQ ID NO: 30089 - DNA, 20 bp, synthetic construct
  misc_feature 1..20: note = chemically synthesized
  source 1..20: mol_type = other DNA
tgggagaattgtttgagacc

SEQ ID NO: 30090 - DNA, 20 bp, synthetic construct
  misc_feature 1..20: note = chemically synthesized
  source 1..20: mol_type = other DNA
ggagaattgtttgagaccaa

SEQ ID NO: 30091 - DNA, 20 bp, synthetic construct
  misc_feature 1..20: note = chemically synthesized
  source 1..20: mol_type = other DNA
aattgtttgagaccaagagt

SEQ ID NO: 30092 - DNA, 20 bp, synthetic construct
  misc_feature 1..20: note = chemically synthesized
  source 1..20: mol_type = other DNA
tgagaccaagagttggatac

SEQ ID NO: 30093 - DNA, 20 bp, synthetic construct
  misc_feature 1..20: note = chemically synthesized
  source 1..20: mol_type = other DNA
ccaagagttggataccagcc

SEQ ID NO: 30094 - DNA, 20 bp, synthetic construct
  misc_feature 1..20: note = chemically synthesized
  source 1..20: mol_type = other DNA
caagagttggataccagcct

SEQ ID NO: 30095 - DNA, 20 bp, synthetic construct
  misc_feature 1..20: note = chemically synthesized
  source 1..20: mol_type = other DNA
aagagttggataccagcctg

SEQ ID NO: 30096 - DNA, 20 bp, synthetic construct
  misc_feature 1..20: note = chemically synthesized
  source 1..20: mol_type = other DNA
ggataccagcctggggaaca

SEQ ID NO: 30097 - DNA, 20 bp, synthetic construct
  misc_feature 1..20: note = chemically synthesized
  source 1..20: mol_type = other DNA
gataccagcctggggaacat

SEQ ID NO: 30098 - DNA, 20 bp, synthetic construct
  misc_feature 1..20: note = chemically synthesized
  source 1..20: mol_type = other DNA
ataccagcctggggaacata

SEQ ID NO: 30099 - DNA, 20 bp, synthetic construct
  misc_feature 1..20: note = chemically synthesized
  source 1..20: mol_type = other DNA
accagcctggggaacatagg

SEQ ID NO: 30100 - DNA, 20 bp, synthetic construct
  misc_feature 1..20: note = chemically synthesized
  source 1..20: mol_type = other DNA
atagggagaccctgtttcta

SEQ ID NO: 30101 - DNA, 20 bp, synthetic construct
  misc_feature 1..20: note = chemically synthesized
  source 1..20: mol_type = other DNA
agaaatttaaaaaatttctc

SEQ ID NO: 30102 - DNA, 20 bp, synthetic construct
  misc_feature 1..20: note = chemically synthesized
  source 1..20: mol_type = other DNA
atttaaaaaatttctctagc

SEQ ID NO: 30103 - DNA, 20 bp, synthetic construct
  misc_feature 1..20: note = chemically synthesized
  source 1..20: mol_type = other DNA
aaaatttctctagctggcca

SEQ ID NO: 30104 - DNA, 20 bp, synthetic construct
  misc_feature 1..20: note = chemically synthesized
  source 1..20: mol_type = other DNA
aatttctctagctggccatg

SEQ ID NO: 30105 - DNA, 20 bp, synthetic construct
  misc_feature 1..20: note = chemically synthesized
  source 1..20: mol_type = other DNA
atttctctagctggccatgg

SEQ ID NO: 30106 - DNA, 20 bp, synthetic construct
  misc_feature 1..20: note = chemically synthesized
  source 1..20: mol_type = other DNA
gccatggaggctcacacctg

SEQ ID NO: 30107 - DNA, 20 bp, synthetic construct
  misc_feature 1..20: note = chemically synthesized
  source 1..20: mol_type = other DNA
gaggctcacacctgtagtcc

SEQ ID NO: 30108 - DNA, 20 bp, synthetic construct
  misc_feature 1..20: note = chemically synthesized
  source 1..20: mol_type = other DNA
acctgtagtcctagctacct

SEQ ID NO: 30109 - DNA, 20 bp, synthetic construct
  misc_feature 1..20: note = chemically synthesized
  source 1..20: mol_type = other DNA
ctgtagtcctagctacctga

SEQ ID NO: 30110 - DNA, 20 bp, synthetic construct
  misc_feature 1..20: note = chemically synthesized
  source 1..20: mol_type = other DNA
tgtagtcctagctacctgag

SEQ ID NO: 30111 - DNA, 20 bp, synthetic construct
  misc_feature 1..20: note = chemically synthesized
  source 1..20: mol_type = other DNA
cctagctacctgagaggcta

SEQ ID NO: 30112 - DNA, 20 bp, synthetic construct
  misc_feature 1..20: note = chemically synthesized
  source 1..20: mol_type = other DNA
agctacctgagaggctaaag

SEQ ID NO: 30113 - DNA, 20 bp, synthetic construct
  misc_feature 1..20: note = chemically synthesized
  source 1..20: mol_type = other DNA
gctacctgagaggctaaagc

SEQ ID NO: 30114 - DNA, 20 bp, synthetic construct
  misc_feature 1..20: note = chemically synthesized
  source 1..20: mol_type = other DNA
tacctgagaggctaaagcag

SEQ ID NO: 30115 - DNA, 20 bp, synthetic construct
  misc_feature 1..20: note = chemically synthesized
  source 1..20: mol_type = other DNA
acctgagaggctaaagcagg

SEQ ID NO: 30116 - DNA, 20 bp, synthetic construct
  misc_feature 1..20: note = chemically synthesized
  source 1..20: mol_type = other DNA
gcaggaggatcaattgaatc

SEQ ID NO: 30117 - DNA, 20 bp, synthetic construct
  misc_feature 1..20: note = chemically synthesized
  source 1..20: mol_type = other DNA
caggaggatcaattgaatcc

SEQ ID NO: 30118 - DNA, 20 bp, synthetic construct
  misc_feature 1..20: note = chemically synthesized
  source 1..20: mol_type = other DNA
tcaattgaatccaggcgttc

SEQ ID NO: 30119 - DNA, 20 bp, synthetic construct
  misc_feature 1..20: note = chemically synthesized
  source 1..20: mol_type = other DNA
ttgaatccaggcgttctagt

SEQ ID NO: 30120 - DNA, 20 bp, synthetic construct
  misc_feature 1..20: note = chemically synthesized
  source 1..20: mol_type = other DNA
tgaatccaggcgttctagtg

SEQ ID NO: 30121 - DNA, 20 bp, synthetic construct
  misc_feature 1..20: note = chemically synthesized
  source 1..20: mol_type = other DNA
caggcgttctagtgaggctt

SEQ ID NO: 30122 - DNA, 20 bp, synthetic construct
  misc_feature 1..20: note = chemically synthesized
  source 1..20: mol_type = other DNA
cgttctagtgaggcttcagt

SEQ ID NO: 30123 - DNA, 20 bp, synthetic construct
  misc_feature 1..20: note = chemically synthesized
  source 1..20: mol_type = other DNA
ctagtgaggcttcagtgagc

SEQ ID NO: 30124 - DNA, 20 bp, synthetic construct
  misc_feature 1..20: note = chemically synthesized
  source 1..20: mol_type = other DNA
aagattgcaccattgcactc

SEQ ID NO: 30125 - DNA, 20 bp, synthetic construct
  misc_feature 1..20: note = chemically synthesized
  source 1..20: mol_type = other DNA
ttgcaccattgcactccagc

SEQ ID NO: 30126 - DNA, 20 bp, synthetic construct
  misc_feature 1..20: note = chemically synthesized
  source 1..20: mol_type = other DNA
tgcaccattgcactccagcc

SEQ ID NO: 30127 - DNA, 20 bp, synthetic construct
  misc_feature 1..20: note = chemically synthesized
  source 1..20: mol_type = other DNA
gcaccattgcactccagccg

SEQ ID NO: 30128 - DNA, 20 bp, synthetic construct
  misc_feature 1..20: note = chemically synthesized
  source 1..20: mol_type = other DNA
ttgcactccagccggggtga

SEQ ID NO: 30129 - DNA, 20 bp, synthetic construct
  misc_feature 1..20: note = chemically synthesized
  source 1..20: mol_type = other DNA
gcactccagccggggtgaca

SEQ ID NO: 30130 - DNA, 20 bp, synthetic construct
  misc_feature 1..20: note = chemically synthesized
  source 1..20: mol_type = other DNA
tccagccggggtgacagagt

SEQ ID NO: 30131 - DNA, 20 bp, synthetic construct
  misc_feature 1..20: note = chemically synthesized
  source 1..20: mol_type = other DNA
agaccctgtttcaaacaaac

SEQ ID NO: 30132 - DNA, 20 bp, synthetic construct
  misc_feature 1..20: note = chemically synthesized
  source 1..20: mol_type = other DNA
tgtttcaaacaaacaagcaa

SEQ ID NO: 30133 - DNA, 20 bp, synthetic construct
  misc_feature 1..20: note = chemically synthesized
  source 1..20: mol_type = other DNA
aacaaacaagcaaaagcaaa

SEQ ID NO: 30134 - DNA, 20 bp, synthetic construct
  misc_feature 1..20: note = chemically synthesized
  source 1..20: mol_type = other DNA
acttactatcttgctgtcta

SEQ ID NO: 30135 - DNA, 20 bp, synthetic construct
  misc_feature 1..20: note = chemically synthesized
  source 1..20: mol_type = other DNA
tatcttgctgtctacagcta

SEQ ID NO: 30136 - DNA, 20 bp, synthetic construct
  misc_feature 1..20: note = chemically synthesized
  source 1..20: mol_type = other DNA
ttgctgtctacagctaaagt

SEQ ID NO: 30137 - DNA, 20 bp, synthetic construct
  misc_feature 1..20: note = chemically synthesized
  source 1..20: mol_type = other DNA
taaagtcagactgcatgatt

SEQ ID NO: 30138 - DNA, 20 bp, synthetic construct
  misc_feature 1..20: note = chemically synthesized
  source 1..20: mol_type = other DNA
attccaactccaccatcacc

SEQ ID NO: 30139 - DNA, 20 bp, synthetic construct
  misc_feature 1..20: note = chemically synthesized
  source 1..20: mol_type = other DNA
ttccaactccaccatcacct

SEQ ID NO: 30140 - DNA, 20 bp, synthetic construct
  misc_feature 1..20: note = chemically synthesized
  source 1..20: mol_type = other DNA
accatcacctgggtaatgtt

SEQ ID NO: 30141 - DNA, 20 bp, synthetic construct
  misc_feature 1..20: note = chemically synthesized
  source 1..20: mol_type = other DNA
taatgttgagatttattaca

SEQ ID NO: 30142 - DNA, 20 bp, synthetic construct
  misc_feature 1..20: note = chemically synthesized
  source 1..20: mol_type = other DNA
tacatagcatctctgtgcct

SEQ ID NO: 30143 - DNA, 20 bp, synthetic construct
  misc_feature 1..20: note = chemically synthesized
  source 1..20: mol_type = other DNA
aataatgttgtgaaaattaa

SEQ ID NO: 30144 - DNA, 20 bp, synthetic construct
  misc_feature 1..20: note = chemically synthesized
  source 1..20: mol_type = other DNA
gtgaaaattaaaagaaatac

SEQ ID NO: 30145 - DNA, 20 bp, synthetic construct
  misc_feature 1..20: note = chemically synthesized
  source 1..20: mol_type = other DNA
aataccagttgtaaatcact

SEQ ID NO: 30146 - DNA, 20 bp, synthetic construct
  misc_feature 1..20: note = chemically synthesized
  source 1..20: mol_type = other DNA
aaatcactcagaactgtgcc

SEQ ID NO: 30147 - DNA, 20 bp, synthetic construct
  misc_feature 1..20: note = chemically synthesized
  source 1..20: mol_type = other DNA
agcatttaataaacactctg

SEQ ID NO: 30148 - DNA, 20 bp, synthetic construct
  misc_feature 1..20: note = chemically synthesized
  source 1..20: mol_type = other DNA
gcatttaataaacactctgt

SEQ ID NO: 30149 - DNA, 20 bp, synthetic construct
  misc_feature 1..20: note = chemically synthesized
  source 1..20: mol_type = other DNA
aataaacactctgtaggtat

SEQ ID NO: 30150 - DNA, 20 bp, synthetic construct
  misc_feature 1..20: note = chemically synthesized
  source 1..20: mol_type = other DNA
ataaaatttattcataaaat

SEQ ID NO: 30151 - DNA, 20 bp, synthetic construct
  misc_feature 1..20: note = chemically synthesized
  source 1..20: mol_type = other DNA
taaaatttattcataaaatg

SEQ ID NO: 30152 - DNA, 20 bp, synthetic construct
  misc_feature 1..20: note = chemically synthesized
  source 1..20: mol_type = other DNA
aatttattcataaaatgagg

SEQ ID NO: 30153 - DNA, 20 bp, synthetic construct
  misc_feature 1..20: note = chemically synthesized
  source 1..20: mol_type = other DNA
tattcataaaatgaggaagt

SEQ ID NO: 30154 - DNA, 20 bp, synthetic construct
  misc_feature 1..20: note = chemically synthesized
  source 1..20: mol_type = other DNA
tagctcatgtattgtcatac

SEQ ID NO: 30155 - DNA, 20 bp, synthetic construct
  misc_feature 1..20: note = chemically synthesized
  source 1..20: mol_type = other DNA
taccagctttcactttgaat

SEQ ID NO: 30156 - DNA, 20 bp, synthetic construct
  misc_feature 1..20: note = chemically synthesized
  source 1..20: mol_type = other DNA
attgcatttttaaacacaaa

SEQ ID NO: 30157 - DNA, 20 bp, synthetic construct
  misc_feature 1..20: note = chemically synthesized
  source 1..20: mol_type = other DNA
tgcatttttaaacacaaaaa

SEQ ID NO: 30158 - DNA, 20 bp, synthetic construct
  misc_feature 1..20: note = chemically synthesized
  source 1..20: mol_type = other DNA
aaacacaaaaagagaaataa

SEQ ID NO: 30159 - DNA, 20 bp, synthetic construct
  misc_feature 1..20: note = chemically synthesized
  source 1..20: mol_type = other DNA
aacacaaaaagagaaataat

SEQ ID NO: 30160 - DNA, 20 bp, synthetic construct
  misc_feature 1..20: note = chemically synthesized
  source 1..20: mol_type = other DNA
catcaatgttacttcaatca

SEQ ID NO: 30161 - DNA, 20 bp, synthetic construct
  misc_feature 1..20: note = chemically synthesized
  source 1..20: mol_type = other DNA
atcaatgttacttcaatcac

SEQ ID NO: 30162 - DNA, 20 bp, synthetic construct
  misc_feature 1..20: note = chemically synthesized
  source 1..20: mol_type = other DNA
tacttcaatcacgggatgca

SEQ ID NO: 30163 - DNA, 20 bp, synthetic construct
  misc_feature 1..20: note = chemically synthesized
  source 1..20: mol_type = other DNA
atcacgggatgcatagtaat

SEQ ID NO: 30164 - DNA, 20 bp, synthetic construct
  misc_feature 1..20: note = chemically synthesized
  source 1..20: mol_type = other DNA
tcacgggatgcatagtaatt

SEQ ID NO: 30165 - DNA, 20 bp, synthetic construct
  misc_feature 1..20: note = chemically synthesized
  source 1..20: mol_type = other DNA
ctttgccctaattactgatg

SEQ ID NO: 30166 - DNA, 20 bp, synthetic construct
  misc_feature 1..20: note = chemically synthesized
  source 1..20: mol_type = other DNA
ccctaattactgatgtggat

SEQ ID NO: 30167 - DNA, 20 bp, synthetic construct
  misc_feature 1..20: note = chemically synthesized
  source 1..20: mol_type = other DNA
aattactgatgtggataagc

SEQ ID NO: 30168 - DNA, 20 bp, synthetic construct
  misc_feature 1..20: note = chemically synthesized
  source 1..20: mol_type = other DNA
tactgatgtggataagccgg

SEQ ID NO: 30169 - DNA, 20 bp, synthetic construct
  misc_feature 1..20: note = chemically synthesized
  source 1..20: mol_type = other DNA
actgatgtggataagccggt

SEQ ID NO: 30170 - DNA, 20 bp, synthetic construct
  misc_feature 1..20: note = chemically synthesized
  source 1..20: mol_type = other DNA
aagccggtgggccatgtcaa

SEQ ID NO: 30171 - DNA, 20 bp, synthetic construct
  misc_feature 1..20: note = chemically synthesized
  source 1..20: mol_type = other DNA
ggccatgtcaatggcatctc

SEQ ID NO: 30172 - DNA, 20 bp, synthetic construct
  misc_feature 1..20: note = chemically synthesized
  source 1..20: mol_type = other DNA
atctatgtaaaaactatgct

SEQ ID NO: 30173 - DNA, 20 bp, synthetic construct
  misc_feature 1..20: note = chemically synthesized
  source 1..20: mol_type = other DNA
aaaaactatgcttggttgca

SEQ ID NO: 30174 - DNA, 20 bp, synthetic construct
  misc_feature 1..20: note = chemically synthesized
  source 1..20: mol_type = other DNA
atgcttggttgcacagcttc

SEQ ID NO: 30175 - DNA, 20 bp, synthetic construct
  misc_feature 1..20: note = chemically synthesized
  source 1..20: mol_type = other DNA
tgcttggttgcacagcttca

SEQ ID NO: 30176 - DNA, 20 bp, synthetic construct
  misc_feature 1..20: note = chemically synthesized
  source 1..20: mol_type = other DNA
tggttgcacagcttcaagga

SEQ ID NO: 30177 - DNA, 20 bp, synthetic construct
  misc_feature 1..20: note = chemically synthesized
  source 1..20: mol_type = other DNA
cacagcttcaaggaaagcac

SEQ ID NO: 30178 - DNA, 20 bp, synthetic construct
  misc_feature 1..20: note = chemically synthesized
  source 1..20: mol_type = other DNA
ctactcacttccttttcatt

SEQ ID NO: 30179 - DNA, 20 bp, synthetic construct
  misc_feature 1..20: note = chemically synthesized
  source 1..20: mol_type = other DNA
ttcattcagcatgctatgtc

SEQ ID NO: 30180 - DNA, 20 bp, synthetic construct
  misc_feature 1..20: note = chemically synthesized
  source 1..20: mol_type = other DNA
tcattcagcatgctatgtct

SEQ ID NO: 30181 - DNA, 20 bp, synthetic construct
  misc_feature 1..20: note = chemically synthesized
  source 1..20: mol_type = other DNA
cccctttcatataaaatatt

SEQ ID NO: 30182 - DNA, 20 bp, synthetic construct
  misc_feature 1..20: note = chemically synthesized
  source 1..20: mol_type = other DNA
cctttcatataaaatatttg

SEQ ID NO: 30183 - DNA, 20 bp, synthetic construct
  misc_feature 1..20: note = chemically synthesized
  source 1..20: mol_type = other DNA
aatatttggagctgccattg

SEQ ID NO: 30184 - DNA, 20 bp, synthetic construct
  misc_feature 1..20: note = chemically synthesized
  source 1..20: mol_type = other DNA
atatttggagctgccattgt

SEQ ID NO: 30185 - DNA, 20 bp, synthetic construct
  misc_feature 1..20: note = chemically synthesized
  source 1..20: mol_type = other DNA
tttggagctgccattgtagg

SEQ ID NO: 30186 - DNA, 20 bp, synthetic construct
  misc_feature 1..20: note = chemically synthesized
  source 1..20: mol_type = other DNA
agctgccattgtaggtagtg

SEQ ID NO: 30187 - DNA, 20 bp, synthetic construct
  misc_feature 1..20: note = chemically synthesized
  source 1..20: mol_type = other DNA
gctgccattgtaggtagtgc

SEQ ID NO: 30188 - DNA, 20 bp, synthetic construct
  misc_feature 1..20: note = chemically synthesized
  source 1..20: mol_type = other DNA
gccattgtaggtagtgcagg

SEQ ID NO: 30189 - DNA, 20 bp, synthetic construct
  misc_feature 1..20: note = chemically synthesized
  source 1..20: mol_type = other DNA
agtgcaggtggtcttgttca

SEQ ID NO: 30190 - DNA, 20 bp, synthetic construct
  misc_feature 1..20: note = chemically synthesized
  source 1..20: mol_type = other DNA
ggtggtcttgttcaaagtgt

SEQ ID NO: 30191 - DNA, 20 bp, synthetic construct
  misc_feature 1..20: note = chemically synthesized
  source 1..20: mol_type = other DNA
gagtatcacctcccactgcc

SEQ ID NO: 30192 - DNA, 20 bp, synthetic construct
  misc_feature 1..20: note = chemically synthesized
  source 1..20: mol_type = other DNA
acctcccactgccaagactg

SEQ ID NO: 30193 - DNA, 20 bp, synthetic construct
  misc_feature 1..20: note = chemically synthesized
  source 1..20: mol_type = other DNA
cagctgctttgattttaact

SEQ ID NO: 30194 - DNA, 20 bp, synthetic construct
  misc_feature 1..20: note = chemically synthesized
  source 1..20: mol_type = other DNA
agctgctttgattttaactg

SEQ ID NO: 30195 - DNA, 20 bp, synthetic construct
  misc_feature 1..20: note = chemically synthesized
  source 1..20: mol_type = other DNA
tttgattttaactgaggatc

SEQ ID NO: 30196 - DNA, 20 bp, synthetic construct
  misc_feature 1..20: note = chemically synthesized
  source 1..20: mol_type = other DNA
ttttaactgaggatctagaa

SEQ ID NO: 30197 - DNA, 20 bp, synthetic construct
  misc_feature 1..20: note = chemically synthesized
  source 1..20: mol_type = other DNA
ctgaggatctagaaaagtgc

SEQ ID NO: 30198 - DNA, 20 bp, synthetic construct
  misc_feature 1..20: note = chemically synthesized
  source 1..20: mol_type = other DNA
tgaggatctagaaaagtgct

SEQ ID NO: 30199 - DNA, 20 bp, synthetic construct
  misc_feature 1..20: note = chemically synthesized
  source 1..20: mol_type = other DNA
tatttgctgacctttgtcac

SEQ ID NO: 30200 - DNA, 20 bp, synthetic construct
  misc_feature 1..20: note = chemically synthesized
  source 1..20: mol_type = other DNA
ttgctgacctttgtcacaag

SEQ ID NO: 30201 - DNA, 20 bp, synthetic construct
  misc_feature 1..20: note = chemically synthesized
  source 1..20: mol_type = other DNA
gcacctaatctccttcctac

SEQ ID NO: 30202 - DNA, 20 bp, synthetic construct
  misc_feature 1..20: note = chemically synthesized
  source 1..20: mol_type = other DNA
gccttataaaatgatgttct

SEQ ID NO: 30203 - DNA, 20 bp, synthetic construct
  misc_feature 1..20: note = chemically synthesized
  source 1..20: mol_type = other DNA
ctgcttctgcaactgtgttt

SEQ ID NO: 30204 - DNA, 20 bp, synthetic construct
  misc_feature 1..20: note = chemically synthesized
  source 1..20: mol_type = other DNA
tctgcaactgtgttttggaa

SEQ ID NO: 30205 - DNA, 20 bp, synthetic construct
  misc_feature 1..20: note = chemically synthesized
  source 1..20: mol_type = other DNA
ctgcaactgtgttttggaac

SEQ ID NO: 30206 - DNA, 20 bp, synthetic construct
  misc_feature 1..20: note = chemically synthesized
  source 1..20: mol_type = other DNA
gcaactgtgttttggaacag

SEQ ID NO: 30207 - DNA, 20 bp, synthetic construct
  misc_feature 1..20: note = chemically synthesized
  source 1..20: mol_type = other DNA
caactgtgttttggaacagg

SEQ ID NO: 30208 - DNA, 20 bp, synthetic construct
  misc_feature 1..20: note = chemically synthesized
  source 1..20: mol_type = other DNA
aactgtgttttggaacagga

SEQ ID NO: 30209 - DNA, 20 bp, synthetic construct
  misc_feature 1..20: note = chemically synthesized
  source 1..20: mol_type = other DNA
gtgttttggaacaggagggt

SEQ ID NO: 30210 - DNA, 20 bp, synthetic construct
  misc_feature 1..20: note = chemically synthesized
  source 1..20: mol_type = other DNA
ttggaacaggagggtgagat

SEQ ID NO: 30211 - DNA, 20 bp, synthetic construct
  misc_feature 1..20: note = chemically synthesized
  source 1..20: mol_type = other DNA
gaacaggagggtgagattag

SEQ ID NO: 30212 - DNA, 20 bp, synthetic construct
  misc_feature 1..20: note = chemically synthesized
  source 1..20: mol_type = other DNA
agtagccacacacactgaaa

SEQ ID NO: 30213 - DNA, 20 bp, synthetic construct
  misc_feature 1..20: note = chemically synthesized
  source 1..20: mol_type = other DNA
aaatagtcatatgacttcca

SEQ ID NO: 30214 - DNA, 20 bp, synthetic construct
  misc_feature 1..20: note = chemically synthesized
  source 1..20: mol_type = other DNA
ttccaaagtctgtaattttt

SEQ ID NO: 30215 - DNA, 20 bp, synthetic construct
  misc_feature 1..20: note = chemically synthesized
  source 1..20: mol_type = other DNA
atttttaagcatatacaaaa

SEQ ID NO: 30216 - DNA, 20 bp, synthetic construct
  misc_feature 1..20: note = chemically synthesized
  source 1..20: mol_type = other DNA
tatgtgtgtatacatatata

SEQ ID NO: 30217 - DNA, 20 bp, synthetic construct
  misc_feature 1..20: note = chemically synthesized
  source 1..20: mol_type = other DNA
tgtgtgtatacatatatata

SEQ ID NO: 30218 - DNA, 20 bp, synthetic construct
  misc_feature 1..20: note = chemically synthesized
  source 1..20: mol_type = other DNA
tgtgtatacatatatataga

SEQ ID NO: 30219 - DNA, 20 bp, synthetic construct
  misc_feature 1..20: note = chemically synthesized
  source 1..20: mol_type = other DNA
tgtatacatatatatagaga

SEQ ID NO: 30220 - DNA, 20 bp, synthetic construct
  misc_feature 1..20: note = chemically synthesized
  source 1..20: mol_type = other DNA
tatacatatatatagagaga

SEQ ID NO: 30221 - DNA, 20 bp, synthetic construct
  misc_feature 1..20: note = chemically synthesized
  source 1..20: mol_type = other DNA
catatatatagagagagaga

SEQ ID NO: 30222 - DNA, 20 bp, synthetic construct
  misc_feature 1..20: note = chemically synthesized
  source 1..20: mol_type = other DNA
tatatatagagagagagaca

SEQ ID NO: 30223 - DNA, 20 bp, synthetic construct
  misc_feature 1..20: note = chemically synthesized
  source 1..20: mol_type = other DNA
tatatagagagagagacaga

SEQ ID NO: 30224 - DNA, 20 bp, synthetic construct
  misc_feature 1..20: note = chemically synthesized
  source 1..20: mol_type = other DNA
tatagagagagagacagaga

SEQ ID NO: 30225 - DNA, 20 bp, synthetic construct
  misc_feature 1..20: note = chemically synthesized
  source 1..20: mol_type = other DNA
gagagagagacagagagaga

SEQ ID NO: 30226 - DNA, 20 bp, synthetic construct
  misc_feature 1..20: note = chemically synthesized
  source 1..20: mol_type = other DNA
agagagagacagagagagat

SEQ ID NO: 30227 - DNA, 20 bp, synthetic construct
  misc_feature 1..20: note = chemically synthesized
  source 1..20: mol_type = other DNA
gagagagacagagagagatg

SEQ ID NO: 30228 - DNA, 20 bp, synthetic construct
  misc_feature 1..20: note = chemically synthesized
  source 1..20: mol_type = other DNA
agagagacagagagagatgg

SEQ ID NO: 30229 - DNA, 20 bp, synthetic construct
  misc_feature 1..20: note = chemically synthesized
  source 1..20: mol_type = other DNA
agagacagagagagatgggg

SEQ ID NO: 30230 - DNA, 20 bp, synthetic construct
  misc_feature 1..20: note = chemically synthesized
  source 1..20: mol_type = other DNA
agacagagagagatggggga

SEQ ID NO: 30231 - DNA, 20 bp, synthetic construct
  misc_feature 1..20: note = chemically synthesized
  source 1..20: mol_type = other DNA
acagagagagatgggggaga

SEQ ID NO: 30232 - DNA, 20 bp, synthetic construct
  misc_feature 1..20: note = chemically synthesized
  source 1..20: mol_type = other DNA
agagagagatgggggagaga

SEQ ID NO: 30233 - DNA, 20 bp, synthetic construct
  misc_feature 1..20: note = chemically synthesized
  source 1..20: mol_type = other DNA
agagagatgggggagagaga

SEQ ID NO: 30234 - DNA, 20 bp, synthetic construct
  misc_feature 1..20: note = chemically synthesized
  source 1..20: mol_type = other DNA
agagatgggggagagagaga

SEQ ID NO: 30235 - DNA, 20 bp, synthetic construct
  misc_feature 1..20: note = chemically synthesized
  source 1..20: mol_type = other DNA
agatgggggagagagagaga

SEQ ID NO: 30236 - DNA, 20 bp, synthetic construct
  misc_feature 1..20: note = chemically synthesized
  source 1..20: mol_type = other DNA
atgggggagagagagagaga

SEQ ID NO: 30237 - DNA, 20 bp, synthetic construct
  misc_feature 1..20: note = chemically synthesized
  source 1..20: mol_type = other DNA
gggagagagagagagagagc

SEQ ID NO: 30238 - DNA, 20 bp, synthetic construct
  misc_feature 1..20: note = chemically synthesized
  source 1..20: mol_type = other DNA
gagagagagagagagagcga

SEQ ID NO: 30239 - DNA, 20 bp, synthetic construct
  misc_feature 1..20: note = chemically synthesized
  source 1..20: mol_type = other DNA
gagagagagagagagcgaga

SEQ ID NO: 30240 - DNA, 20 bp, synthetic construct
  misc_feature 1..20: note = chemically synthesized
  source 1..20: mol_type = other DNA
gagagagagagagcgagaga

SEQ ID NO: 30241 - DNA, 20 bp, synthetic construct
  misc_feature 1..20: note = chemically synthesized
  source 1..20: mol_type = other DNA
agagagagagagcgagagag

SEQ ID NO: 30242 - DNA, 20 bp, synthetic construct
  misc_feature 1..20: note = chemically synthesized
  source 1..20: mol_type = other DNA
gagagagagcgagagagagg

SEQ ID NO: 30243 - DNA, 20 bp, synthetic construct
  misc_feature 1..20: note = chemically synthesized
  source 1..20: mol_type = other DNA
gagagagcgagagagaggca

SEQ ID NO: 30244 - DNA, 20 bp, synthetic construct
  misc_feature 1..20: note = chemically synthesized
  source 1..20: mol_type = other DNA
gagcgagagagaggcagaga

SEQ ID NO: 30245 - DNA, 20 bp, synthetic construct
  misc_feature 1..20: note = chemically synthesized
  source 1..20: mol_type = other DNA
gcgagagagaggcagagaaa

SEQ ID NO: 30246 - DNA, 20 bp, synthetic construct
  misc_feature 1..20: note = chemically synthesized
  source 1..20: mol_type = other DNA
agagaaagagatccttattt

SEQ ID NO: 30247 - DNA, 20 bp, synthetic construct
  misc_feature 1..20: note = chemically synthesized
  source 1..20: mol_type = other DNA
tattctatacttctttgaaa

SEQ ID NO: 30248 - DNA, 20 bp, synthetic construct
  misc_feature 1..20: note = chemically synthesized
  source 1..20: mol_type = other DNA
ttctttgaaatagtgatttt

SEQ ID NO: 30249 - DNA, 20 bp, synthetic construct
  misc_feature 1..20: note = chemically synthesized
  source 1..20: mol_type = other DNA
aatagtgatttttagtaaat

SEQ ID NO: 30250 - DNA, 20 bp, synthetic construct
  misc_feature 1..20: note = chemically synthesized
  source 1..20: mol_type = other DNA
agtgatttttagtaaattgg

SEQ ID NO: 30251 - DNA, 20 bp, synthetic construct
  misc_feature 1..20: note = chemically synthesized
  source 1..20: mol_type = other DNA
tagtaaattggcagtgttgc

SEQ ID NO: 30252 - DNA, 20 bp, synthetic construct
  misc_feature 1..20: note = chemically synthesized
  source 1..20: mol_type = other DNA
agtgttgccagatgacgact

SEQ ID NO: 30253 - DNA, 20 bp, synthetic construct
  misc_feature 1..20: note = chemically synthesized
  source 1..20: mol_type = other DNA
tgttgccagatgacgactta

SEQ ID NO: 30254 - DNA, 20 bp, synthetic construct
  misc_feature 1..20: note = chemically synthesized
  source 1..20: mol_type = other DNA
cctcattgttatatgtacca

SEQ ID NO: 30255 - DNA, 20 bp, synthetic construct
  misc_feature 1..20: note = chemically synthesized
  source 1..20: mol_type = other DNA
cattgttatatgtaccatgg

SEQ ID NO: 30256 - DNA, 20 bp, synthetic construct
  misc_feature 1..20: note = chemically synthesized
  source 1..20: mol_type = other DNA
tggtagctcatcttttcttt

SEQ ID NO: 30257 - DNA, 20 bp, synthetic construct
  misc_feature 1..20: note = chemically synthesized
  source 1..20: mol_type = other DNA
ggtagctcatcttttctttc

SEQ ID NO: 30258 - DNA, 20 bp, synthetic construct
  misc_feature 1..20: note = chemically synthesized
  source 1..20: mol_type = other DNA
tcatcttttctttcaggtga

SEQ ID NO: 30259 - DNA, 20 bp, synthetic construct
  misc_feature 1..20: note = chemically synthesized
  source 1..20: mol_type = other DNA
ctttgtcctcacgctaaaca

SEQ ID NO: 30260 - DNA, 20 bp, synthetic construct
  misc_feature 1..20: note = chemically synthesized
  source 1..20: mol_type = other DNA
acatagcccccatgttgttc

SEQ ID NO: 30261 - DNA, 20 bp, synthetic construct
  misc_feature 1..20: note = chemically synthesized
  source 1..20: mol_type = other DNA
catagcccccatgttgttcc

SEQ ID NO: 30262 - DNA, 20 bp, synthetic construct
  misc_feature 1..20: note = chemically synthesized
  source 1..20: mol_type = other DNA
cccatgttgttccaggaaaa

SEQ ID NO: 30263 - DNA, 20 bp, synthetic construct
  misc_feature 1..20: note = chemically synthesized
  source 1..20: mol_type = other DNA
catgttgttccaggaaaata

SEQ ID NO: 30264 - DNA, 20 bp, synthetic construct
  misc_feature 1..20: note = chemically synthesized
  source 1..20: mol_type = other DNA
atagagatcaataaaataca

SEQ ID NO: 30265 - DNA, 20 bp, synthetic construct
  misc_feature 1..20: note = chemically synthesized
  source 1..20: mol_type = other DNA
aatacaaagtacttgtttga

SEQ ID NO: 30266 - DNA, 20 bp, synthetic construct
  misc_feature 1..20: note = chemically synthesized
  source 1..20: mol_type = other DNA
aaagtacttgtttgaaagtg

SEQ ID NO: 30267 - DNA, 20 bp, synthetic construct
  misc_feature 1..20: note = chemically synthesized
  source 1..20: mol_type = other DNA
aagtacttgtttgaaagtga

SEQ ID NO: 30268 - DNA, 20 bp, synthetic construct
  misc_feature 1..20: note = chemically synthesized
  source 1..20: mol_type = other DNA
cttgtttgaaagtgaaggtt

SEQ ID NO: 30269 - DNA, 20 bp, synthetic construct
  misc_feature 1..20: note = chemically synthesized
  source 1..20: mol_type = other DNA
aaattcaatgacctacgctg

SEQ ID NO: 30270 - DNA, 20 bp, synthetic construct
  misc_feature 1..20: note = chemically synthesized
  source 1..20: mol_type = other DNA
gatcattcattaatgatatt

SEQ ID NO: 30271 - DNA, 20 bp, synthetic construct
  misc_feature 1..20: note = chemically synthesized
  source 1..20: mol_type = other DNA
agtattttcttttttaatgt

SEQ ID NO: 30272 - DNA, 20 bp, synthetic construct
  misc_feature 1..20: note = chemically synthesized
  source 1..20: mol_type = other DNA
agaataaaaccatttatttg

SEQ ID NO: 30273 - DNA, 20 bp, synthetic construct
  misc_feature 1..20: note = chemically synthesized
  source 1..20: mol_type = other DNA
tatgtgtatgtaaatctcct

SEQ ID NO: 30274 - DNA, 20 bp, synthetic construct
  misc_feature 1..20: note = chemically synthesized
  source 1..20: mol_type = other DNA
ttatacctcaaatatgaaaa

SEQ ID NO: 30275 - DNA, 20 bp, synthetic construct
  misc_feature 1..20: note = chemically synthesized
  source 1..20: mol_type = other DNA
tatacctcaaatatgaaaat

SEQ ID NO: 30276 - DNA, 20 bp, synthetic construct
  misc_feature 1..20: note = chemically synthesized
  source 1..20: mol_type = other DNA
tcttgcattcacttatattc

SEQ ID NO: 30277 - DNA, 20 bp, synthetic construct
  misc_feature 1..20: note = chemically synthesized
  source 1..20: mol_type = other DNA
cacttatattctagcttgtt

SEQ ID NO: 30278 - DNA, 20 bp, synthetic construct
  misc_feature 1..20: note = chemically synthesized
  source 1..20: mol_type = other DNA
cttatattctagcttgttaa

SEQ ID NO: 30279 - DNA, 20 bp, synthetic construct
  misc_feature 1..20: note = chemically synthesized
  source 1..20: mol_type = other DNA
tatattctagcttgttaaga

SEQ ID NO: 30280 - DNA, 20 bp, synthetic construct
  misc_feature 1..20: note = chemically synthesized
  source 1..20: mol_type = other DNA
attctagcttgttaagagag

SEQ ID NO: 30281 - DNA, 20 bp, synthetic construct
  misc_feature 1..20: note = chemically synthesized
  source 1..20: mol_type = other DNA
agcttgttaagagagaagtt

SEQ ID NO: 30282 - DNA, 20 bp, synthetic construct
  misc_feature 1..20: note = chemically synthesized
  source 1..20: mol_type = other DNA
gcttgttaagagagaagttt

SEQ ID NO: 30283 - DNA, 20 bp, synthetic construct
  misc_feature 1..20: note = chemically synthesized
  source 1..20: mol_type = other DNA
cttgttaagagagaagtttg

SEQ ID NO: 30284 - DNA, 20 bp, synthetic construct
  misc_feature 1..20: note = chemically synthesized
  source 1..20: mol_type = other DNA
ggcaaaatgtgctttataaa

SEQ ID NO: 30285 - DNA, 20 bp, synthetic construct
  misc_feature 1..20: note = chemically synthesized
  source 1..20: mol_type = other DNA
ctttataaatagtaaaaact

SEQ ID NO: 30286 - DNA, 20 bp, synthetic construct
  misc_feature 1..20: note = chemically synthesized
  source 1..20: mol_type = other DNA
tttataaatagtaaaaactg

SEQ ID NO: 30287 - DNA, 20 bp, synthetic construct
  misc_feature 1..20: note = chemically synthesized
  source 1..20: mol_type = other DNA
gtaaaaactgaggtaaacta

SEQ ID NO: 30288 - DNA, 20 bp, synthetic construct
  misc_feature 1..20: note = chemically synthesized
  source 1..20: mol_type = other DNA
ctgaggtaaactatagcaca

SEQ ID NO: 30289 - DNA, 20 bp, synthetic construct
  misc_feature 1..20: note = chemically synthesized
  source 1..20: mol_type = other DNA
cacaaagtgtgctatataaa

SEQ ID NO: 30290 - DNA, 20 bp, synthetic construct
  misc_feature 1..20: note = chemically synthesized
  source 1..20: mol_type = other DNA
ctatataaacagtaaaaacc

SEQ ID NO: 30291 - DNA, 20 bp, synthetic construct
  misc_feature 1..20: note = chemically synthesized
  source 1..20: mol_type = other DNA
tatataaacagtaaaaaccg

SEQ ID NO: 30292 - DNA, 20 bp, synthetic construct
  misc_feature 1..20: note = chemically synthesized
  source 1..20: mol_type = other DNA
taaaaaccgaggtaaaaata

SEQ ID NO: 30293 - DNA, 20 bp, synthetic construct
  misc_feature 1..20: note = chemically synthesized
  source 1..20: mol_type = other DNA
aaaaaccgaggtaaaaatat

SEQ ID NO: 30294 - DNA, 20 bp, synthetic construct
  misc_feature 1..20: note = chemically synthesized
  source 1..20: mol_type = other DNA
aaaaccgaggtaaaaatatg

SEQ ID NO: 30295 - DNA, 20 bp, synthetic construct
  misc_feature 1..20: note = chemically synthesized
  source 1..20: mol_type = other DNA
aaccgaggtaaaaatatggg

SEQ ID NO: 30296 - DNA, 20 bp, synthetic construct
  misc_feature 1..20: note = chemically synthesized
  source 1..20: mol_type = other DNA
accgaggtaaaaatatgggg

SEQ ID NO: 30297 - DNA, 20 bp, synthetic construct
  misc_feature 1..20: note = chemically synthesized
  source 1..20: mol_type = other DNA
aaaatatggggaggacaaaa

SEQ ID NO: 30298 - DNA, 20 bp, synthetic construct
  misc_feature 1..20: note = chemically synthesized
  source 1..20: mol_type = other DNA
aaatatggggaggacaaaaa

SEQ ID NO: 30299 - DNA, 20 bp, synthetic construct
  misc_feature 1..20: note = chemically synthesized
  source 1..20: mol_type = other DNA
aatatggggaggacaaaaaa

SEQ ID NO: 30300 - DNA, 20 bp, synthetic construct
  misc_feature 1..20: note = chemically synthesized
  source 1..20: mol_type = other DNA
aggacaaaaaagggctaaaa

SEQ ID NO: 30301 - DNA, 20 bp, synthetic construct
  misc_feature 1..20: note = chemically synthesized
  source 1..20: mol_type = other DNA
aaaaagggctaaaatggtgt

SEQ ID NO: 30302 - DNA, 20 bp, synthetic construct
  misc_feature 1..20: note = chemically synthesized
  source 1..20: mol_type = other DNA
ctaaaatggtgttggaatat

SEQ ID NO: 30303 - DNA, 20 bp, synthetic construct
  misc_feature 1..20: note = chemically synthesized
  source 1..20: mol_type = other DNA
tggtgttggaatataagaaa

SEQ ID NO: 30304 - DNA, 20 bp, synthetic construct
  misc_feature 1..20: note = chemically synthesized
  source 1..20: mol_type = other DNA
tgttggaatataagaaatag

SEQ ID NO: 30305 - DNA, 20 bp, synthetic construct
  misc_feature 1..20: note = chemically synthesized
  source 1..20: mol_type = other DNA
aatataagaaatagcagtaa

SEQ ID NO: 30306 - DNA, 20 bp, synthetic construct
  misc_feature 1..20: note = chemically synthesized
  source 1..20: mol_type = other DNA
ataagaaatagcagtaaaag

SEQ ID NO: 30307 - DNA, 20 bp, synthetic construct
  misc_feature 1..20: note = chemically synthesized
  source 1..20: mol_type = other DNA
gcagtaaaagaagctcctca

SEQ ID NO: 30308 - DNA, 20 bp, synthetic construct
  misc_feature 1..20: note = chemically synthesized
  source 1..20: mol_type = other DNA
taaaagaagctcctcacagc

SEQ ID NO: 30309 - DNA, 20 bp, synthetic construct
  misc_feature 1..20: note = chemically synthesized
  source 1..20: mol_type = other DNA
agaagctcctcacagcaaga

SEQ ID NO: 30310 - DNA, 20 bp, synthetic construct
  misc_feature 1..20: note = chemically synthesized
  source 1..20: mol_type = other DNA
ctcctcacagcaagacagta

SEQ ID NO: 30311 - DNA, 20 bp, synthetic construct
  misc_feature 1..20: note = chemically synthesized
  source 1..20: mol_type = other DNA
tcctcacagcaagacagtac

SEQ ID NO: 30312 - DNA, 20 bp, synthetic construct
  misc_feature 1..20: note = chemically synthesized
  source 1..20: mol_type = other DNA
cctcacagcaagacagtaca

SEQ ID NO: 30313 - DNA, 20 bp, synthetic construct
  misc_feature 1..20: note = chemically synthesized
  source 1..20: mol_type = other DNA
agacagtacagggaaatgtc

SEQ ID NO: 30314 - DNA, 20 bp, synthetic construct
  misc_feature 1..20: note = chemically synthesized
  source 1..20: mol_type = other DNA
acagtacagggaaatgtctg

SEQ ID NO: 30315 - DNA, 20 bp, synthetic construct
  misc_feature 1..20: note = chemically synthesized
  source 1..20: mol_type = other DNA
cagtacagggaaatgtctgg

SEQ ID NO: 30316 - DNA, 20 bp, synthetic construct
  misc_feature 1..20: note = chemically synthesized
  source 1..20: mol_type = other DNA
agtacagggaaatgtctgga

SEQ ID NO: 30317 - DNA, 20 bp, synthetic construct
  misc_feature 1..20: note = chemically synthesized
  source 1..20: mol_type = other DNA
gggaaatgtctggagggaca

SEQ ID NO: 30318 - DNA, 20 bp, synthetic construct
  misc_feature 1..20: note = chemically synthesized
  source 1..20: mol_type = other DNA
gacaaagatttacttacaat

SEQ ID NO: 30319 - DNA, 20 bp, synthetic construct
  misc_feature 1..20: note = chemically synthesized
  source 1..20: mol_type = other DNA
acaaagatttacttacaatc

SEQ ID NO: 30320 - DNA, 20 bp, synthetic construct
  misc_feature 1..20: note = chemically synthesized
  source 1..20: mol_type = other DNA
aatcaggcctcaaccaatat

SEQ ID NO: 30321 - DNA, 20 bp, synthetic construct
  misc_feature 1..20: note = chemically synthesized
  source 1..20: mol_type = other DNA
tatgacgtgtttatatgtat

SEQ ID NO: 30322 - DNA, 20 bp, synthetic construct
  misc_feature 1..20: note = chemically synthesized
  source 1..20: mol_type = other DNA
atgacgtgtttatatgtatc

SEQ ID NO: 30323 - DNA, 20 bp, synthetic construct
  misc_feature 1..20: note = chemically synthesized
  source 1..20: mol_type = other DNA
gcatataatgtataatgatc

SEQ ID NO: 30324 - DNA, 20 bp, synthetic construct
  misc_feature 1..20: note = chemically synthesized
  source 1..20: mol_type = other DNA
ataatgtataatgatcaagt

SEQ ID NO: 30325 - DNA, 20 bp, synthetic construct
  misc_feature 1..20: note = chemically synthesized
  source 1..20: mol_type = other DNA
taatgtataatgatcaagtc

SEQ ID NO: 30326 - DNA, 20 bp, synthetic construct
  misc_feature 1..20: note = chemically synthesized
  source 1..20: mol_type = other DNA
taatgatcaagtcaggtatt

SEQ ID NO: 30327 - DNA, 20 bp, synthetic construct
  misc_feature 1..20: note = chemically synthesized
  source 1..20: mol_type = other DNA
aatgatcaagtcaggtattt

SEQ ID NO: 30328 - DNA, 20 bp, synthetic construct
  misc_feature 1..20: note = chemically synthesized
  source 1..20: mol_type = other DNA
atgatcaagtcaggtatttg

SEQ ID NO: 30329 - DNA, 20 bp, synthetic construct
  misc_feature 1..20: note = chemically synthesized
  source 1..20: mol_type = other DNA
tttggggtattcatcacctc

SEQ ID NO: 30330 - DNA, 20 bp, synthetic construct
  misc_feature 1..20: note = chemically synthesized
  source 1..20: mol_type = other DNA
tatttatcgtttctatgtgt

SEQ ID NO: 30331 - DNA, 20 bp, synthetic construct
  misc_feature 1..20: note = chemically synthesized
  source 1..20: mol_type = other DNA
atttatcgtttctatgtgtt

SEQ ID NO: 30332 - DNA, 20 bp, synthetic construct
  misc_feature 1..20: note = chemically synthesized
  source 1..20: mol_type = other DNA
ctatgtgttaggaacatttc

SEQ ID NO: 30333 - DNA, 20 bp, synthetic construct
  misc_feature 1..20: note = chemically synthesized
  source 1..20: mol_type = other DNA
cctactttgctattgaacat

SEQ ID NO: 30334 - DNA, 20 bp, synthetic construct
  misc_feature 1..20: note = chemically synthesized
  source 1..20: mol_type = other DNA
tacacacctttctctacctc

SEQ ID NO: 30335 - DNA, 20 bp, synthetic construct
  misc_feature 1..20: note = chemically synthesized
  source 1..20: mol_type = other DNA
ctacatgatattaacttttt

SEQ ID NO: 30336 - DNA, 20 bp, synthetic construct
  misc_feature 1..20: note = chemically synthesized
  source 1..20: mol_type = other DNA
cttttttagctcccacatat

SEQ ID NO: 30337 - DNA, 20 bp, synthetic construct
  misc_feature 1..20: note = chemically synthesized
  source 1..20: mol_type = other DNA
tttagctcccacatatcagt

SEQ ID NO: 30338 - DNA, 20 bp, synthetic construct
  misc_feature 1..20: note = chemically synthesized
  source 1..20: mol_type = other DNA
aaaatttgtctttctatgcc

SEQ ID NO: 30339 - DNA, 20 bp, synthetic construct
  misc_feature 1..20: note = chemically synthesized
  source 1..20: mol_type = other DNA
tcgtttaacataatgacttc

SEQ ID NO: 30340 - DNA, 20 bp, synthetic construct
  misc_feature 1..20: note = chemically synthesized
  source 1..20: mol_type = other DNA
gaaatgattttatatttgta

SEQ ID NO: 30341 - DNA, 20 bp, synthetic construct
  misc_feature 1..20: note = chemically synthesized
  source 1..20: mol_type = other DNA
tttcttcattcatccattga

SEQ ID NO: 30342 - DNA, 20 bp, synthetic construct
  misc_feature 1..20: note = chemically synthesized
  source 1..20: mol_type = other DNA
ttcatccattgatggacact

SEQ ID NO: 30343 - DNA, 20 bp, synthetic construct
  misc_feature 1..20: note = chemically synthesized
  source 1..20: mol_type = other DNA
tcatccattgatggacactt

SEQ ID NO: 30344 - DNA, 20 bp, synthetic construct
  misc_feature 1..20: note = chemically synthesized
  source 1..20: mol_type = other DNA
gtgaatcgtgctgcaataaa

SEQ ID NO: 30345 - DNA, 20 bp, synthetic construct
  misc_feature 1..20: note = chemically synthesized
  source 1..20: mol_type = other DNA
tcgtgctgcaataaacagtg

SEQ ID NO: 30346 - DNA, 20 bp, synthetic construct
  misc_feature 1..20: note = chemically synthesized
  source 1..20: mol_type = other DNA
tgcaataaacagtgtggtac

SEQ ID NO: 30347 - DNA, 20 bp, synthetic construct
  misc_feature 1..20: note = chemically synthesized
  source 1..20: mol_type = other DNA
tattctgaattcttttcctt

SEQ ID NO: 30348 - DNA, 20 bp, synthetic construct
  misc_feature 1..20: note = chemically synthesized
  source 1..20: mol_type = other DNA
ttttcctttggataaatacc

SEQ ID NO: 30349 - DNA, 20 bp, synthetic construct
  misc_feature 1..20: note = chemically synthesized
  source 1..20: mol_type = other DNA
ttggataaatacccagtaat

SEQ ID NO: 30350 - DNA, 20 bp, synthetic construct
  misc_feature 1..20: note = chemically synthesized
  source 1..20: mol_type = other DNA
atacccagtaataagattgc

SEQ ID NO: 30351 - DNA, 20 bp, synthetic construct
  misc_feature 1..20: note = chemically synthesized
  source 1..20: mol_type = other DNA
aagattgctggatcttatga

SEQ ID NO: 30352 - DNA, 20 bp, synthetic construct
  misc_feature 1..20: note = chemically synthesized
  source 1..20: mol_type = other DNA
tcttatgatagttcaatttt

SEQ ID NO: 30353 - DNA, 20 bp, synthetic construct
  misc_feature 1..20: note = chemically synthesized
  source 1..20: mol_type = other DNA
tagttcaatttttagctttt

SEQ ID NO: 30354 - DNA, 20 bp, synthetic construct
  misc_feature 1..20: note = chemically synthesized
  source 1..20: mol_type = other DNA
aatctacatattgttttcca

SEQ ID NO: 30355 - DNA, 20 bp, synthetic construct
  misc_feature 1..20: note = chemically synthesized
  source 1..20: mol_type = other DNA
ctacatattgttttccatag

SEQ ID NO: 30356 - DNA, 20 bp, synthetic construct
  misc_feature 1..20: note = chemically synthesized
  source 1..20: mol_type = other DNA
ctaatttgcatgcttaccaa

SEQ ID NO: 30357 - DNA, 20 bp, synthetic construct
  misc_feature 1..20: note = chemically synthesized
  source 1..20: mol_type = other DNA
tgcttaccaatagtgcctac

SEQ ID NO: 30358 - DNA, 20 bp, synthetic construct
  misc_feature 1..20: note = chemically synthesized
  source 1..20: mol_type = other DNA
cttttccttcacatccttgc

SEQ ID NO: 30359 - DNA, 20 bp, synthetic construct
  misc_feature 1..20: note = chemically synthesized
  source 1..20: mol_type = other DNA
taaatcatgatgattctaac

SEQ ID NO: 30360 - DNA, 20 bp, synthetic construct
  misc_feature 1..20: note = chemically synthesized
  source 1..20: mol_type = other DNA
atgatgattctaactggcat

SEQ ID NO: 30361 - DNA, 20 bp, synthetic construct
  misc_feature 1..20: note = chemically synthesized
  source 1..20: mol_type = other DNA
cataagatgatatctcattg

SEQ ID NO: 30362 - DNA, 20 bp, synthetic construct
  misc_feature 1..20: note = chemically synthesized
  source 1..20: mol_type = other DNA
atttgcatttctctgatgat

SEQ ID NO: 30363 - DNA, 20 bp, synthetic construct
  misc_feature 1..20: note = chemically synthesized
  source 1..20: mol_type = other DNA
ctctgatgattagtaatgtt

SEQ ID NO: 30364 - DNA, 20 bp, synthetic construct
  misc_feature 1..20: note = chemically synthesized
  source 1..20: mol_type = other DNA
tcctttgccaattttttaat

SEQ ID NO: 30365 - DNA, 20 bp, synthetic construct
  misc_feature 1..20: note = chemically synthesized
  source 1..20: mol_type = other DNA
ttatttgtttttccactgtt

SEQ ID NO: 30366 - DNA, 20 bp, synthetic construct
  misc_feature 1..20: note = chemically synthesized
  source 1..20: mol_type = other DNA
tttccactgttgagttgttt

SEQ ID NO: 30367 - DNA, 20 bp, synthetic construct
  misc_feature 1..20: note = chemically synthesized
  source 1..20: mol_type = other DNA
tttgagtttcttatatattc

SEQ ID NO: 30368 - DNA, 20 bp, synthetic construct
  misc_feature 1..20: note = chemically synthesized
  source 1..20: mol_type = other DNA
tgagtttcttatatattctg

SEQ ID NO: 30369 - DNA, 20 bp, synthetic construct
  misc_feature 1..20: note = chemically synthesized
  source 1..20: mol_type = other DNA
aaatattttctcgcattcaa

SEQ ID NO: 30370 - DNA, 20 bp, synthetic construct
  misc_feature 1..20: note = chemically synthesized
  source 1..20: mol_type = other DNA
tgattgtttcctttactgtg

SEQ ID NO: 30371 - DNA, 20 bp, synthetic construct
  misc_feature 1..20: note = chemically synthesized
  source 1..20: mol_type = other DNA
tttactgtgcagatgtattt

SEQ ID NO: 30372 - DNA, 20 bp, synthetic construct
  misc_feature 1..20: note = chemically synthesized
  source 1..20: mol_type = other DNA
agatgtattttagcttaata

SEQ ID NO: 30373 - DNA, 20 bp, synthetic construct
  misc_feature 1..20: note = chemically synthesized
  source 1..20: mol_type = other DNA
cttttgttgcctgtgctttt

SEQ ID NO: 30374 - DNA, 20 bp, synthetic construct
  misc_feature 1..20: note = chemically synthesized
  source 1..20: mol_type = other DNA
ttttgttgcctgtgcttttg

SEQ ID NO: 30375 - DNA, 20 bp, synthetic construct
  misc_feature 1..20: note = chemically synthesized
  source 1..20: mol_type = other DNA
tgcctgtgcttttgaggtct

SEQ ID NO: 30376 - DNA, 20 bp, synthetic construct
  misc_feature 1..20: note = chemically synthesized
  source 1..20: mol_type = other DNA
ggccataaaatctttgccca

SEQ ID NO: 30377 - DNA, 20 bp, synthetic construct
  misc_feature 1..20: note = chemically synthesized
  source 1..20: mol_type = other DNA
ttgcccaaagccatgtcttg

SEQ ID NO: 30378 - DNA, 20 bp, synthetic construct
  misc_feature 1..20: note = chemically synthesized
  source 1..20: mol_type = other DNA
gtctcccttatgttttcttt

SEQ ID NO: 30379 - DNA, 20 bp, synthetic construct
  misc_feature 1..20: note = chemically synthesized
  source 1..20: mol_type = other DNA
tcccttatgttttcttttag

SEQ ID NO: 30380 - DNA, 20 bp, synthetic construct
  misc_feature 1..20: note = chemically synthesized
  source 1..20: mol_type = other DNA
gttttcttttagtagtttta

SEQ ID NO: 30381 - DNA, 20 bp, synthetic construct
  misc_feature 1..20: note = chemically synthesized
  source 1..20: mol_type = other DNA
tttagtagttttatagtttt

SEQ ID NO: 30382 - DNA, 20 bp, synthetic construct
  misc_feature 1..20: note = chemically synthesized
  source 1..20: mol_type = other DNA
tagttttaagttttatattt

SEQ ID NO: 30383 - DNA, 20 bp, synthetic construct
  misc_feature 1..20: note = chemically synthesized
  source 1..20: mol_type = other DNA
ttaagtctttaatccatctt

SEQ ID NO: 30384 - DNA, 20 bp, synthetic construct
  misc_feature 1..20: note = chemically synthesized
  source 1..20: mol_type = other DNA
aagtctttaatccatcttga

SEQ ID NO: 30385 - DNA, 20 bp, synthetic construct
  misc_feature 1..20: note = chemically synthesized
  source 1..20: mol_type = other DNA
tcttgagagtacgttttata

SEQ ID NO: 30386 - DNA, 20 bp, synthetic construct
  misc_feature 1..20: note = chemically synthesized
  source 1..20: mol_type = other DNA
acgttttatatggcaataaa

SEQ ID NO: 30387 - DNA, 20 bp, synthetic construct
  misc_feature 1..20: note = chemically synthesized
  source 1..20: mol_type = other DNA
cgttttatatggcaataaat

SEQ ID NO: 30388 - DNA, 20 bp, synthetic construct
  misc_feature 1..20: note = chemically synthesized
  source 1..20: mol_type = other DNA
gttttatatggcaataaata

SEQ ID NO: 30389 - DNA, 20 bp, synthetic construct
  misc_feature 1..20: note = chemically synthesized
  source 1..20: mol_type = other DNA
ttttatatggcaataaatag

SEQ ID NO: 30390 - DNA, 20 bp, synthetic construct
  misc_feature 1..20: note = chemically synthesized
  source 1..20: mol_type = other DNA
gcaataaataggggttgtat

SEQ ID NO: 30391 - DNA, 20 bp, synthetic construct
  misc_feature 1..20: note = chemically synthesized
  source 1..20: mol_type = other DNA
caataaataggggttgtatt

SEQ ID NO: 30392 - DNA, 20 bp, synthetic construct
  misc_feature 1..20: note = chemically synthesized
  source 1..20: mol_type = other DNA
catttttgcatctattgtac

SEQ ID NO: 30393 - DNA, 20 bp, synthetic construct
  misc_feature 1..20: note = chemically synthesized
  source 1..20: mol_type = other DNA
atttttgcatctattgtaca

SEQ ID NO: 30394 - DNA, 20 bp, synthetic construct
  misc_feature 1..20: note = chemically synthesized
  source 1..20: mol_type = other DNA
tttttgcatctattgtacaa

SEQ ID NO: 30395 - DNA, 20 bp, synthetic construct
  misc_feature 1..20: note = chemically synthesized
  source 1..20: mol_type = other DNA
ttttgcatctattgtacaag

SEQ ID NO: 30396 - DNA, 20 bp, synthetic construct
  misc_feature 1..20: note = chemically synthesized
  source 1..20: mol_type = other DNA
catctattgtacaaggggtt

SEQ ID NO: 30397 - DNA, 20 bp, synthetic construct
  misc_feature 1..20: note = chemically synthesized
  source 1..20: mol_type = other DNA
tcttgatttgattctccatt

SEQ ID NO: 30398 - DNA, 20 bp, synthetic construct
  misc_feature 1..20: note = chemically synthesized
  source 1..20: mol_type = other DNA
attctccatttggttgctgt

SEQ ID NO: 30399 - DNA, 20 bp, synthetic construct
  misc_feature 1..20: note = chemically synthesized
  source 1..20: mol_type = other DNA
atttggttgctgttggtgta

SEQ ID NO: 30400 - DNA, 20 bp, synthetic construct
  misc_feature 1..20: note = chemically synthesized
  source 1..20: mol_type = other DNA
tggttgctgttggtgtatag

SEQ ID NO: 30401 - DNA, 20 bp, synthetic construct
  misc_feature 1..20: note = chemically synthesized
  source 1..20: mol_type = other DNA
gttgctgttggtgtatagaa

SEQ ID NO: 30402 - DNA, 20 bp, synthetic construct
  misc_feature 1..20: note = chemically synthesized
  source 1..20: mol_type = other DNA
gtgtgcattcatcttgtatc

SEQ ID NO: 30403 - DNA, 20 bp, synthetic construct
  misc_feature 1..20: note = chemically synthesized
  source 1..20: mol_type = other DNA
actttgctgaattattttat

SEQ ID NO: 30404 - DNA, 20 bp, synthetic construct
  misc_feature 1..20: note = chemically synthesized
  source 1..20: mol_type = other DNA
ctgaattattttatcagttc

SEQ ID NO: 30405 - DNA, 20 bp, synthetic construct
  misc_feature 1..20: note = chemically synthesized
  source 1..20: mol_type = other DNA
tgaattattttatcagttct

SEQ ID NO: 30406 - DNA, 20 bp, synthetic construct
  misc_feature 1..20: note = chemically synthesized
  source 1..20: mol_type = other DNA
aattattttatcagttctag

SEQ ID NO: 30407 - DNA, 20 bp, synthetic construct
  misc_feature 1..20: note = chemically synthesized
  source 1..20: mol_type = other DNA
tatcagttctaggagctttc

SEQ ID NO: 30408 - DNA, 20 bp, synthetic construct
  misc_feature 1..20: note = chemically synthesized
  source 1..20: mol_type = other DNA
tcagttctaggagctttctg

SEQ ID NO: 30409 - DNA, 20 bp, synthetic construct
  misc_feature 1..20: note = chemically synthesized
  source 1..20: mol_type = other DNA
cagttctaggagctttctgg

SEQ ID NO: 30410 - DNA, 20 bp, synthetic construct
  misc_feature 1..20: note = chemically synthesized
  source 1..20: mol_type = other DNA
gttctaggagctttctggag

SEQ ID NO: 30411 - DNA, 20 bp, synthetic construct
  misc_feature 1..20: note = chemically synthesized
  source 1..20: mol_type = other DNA
gagctttctggaggagtctt

SEQ ID NO: 30412 - DNA, 20 bp, synthetic construct
  misc_feature 1..20: note = chemically synthesized
  source 1..20: mol_type = other DNA
agctttctggaggagtcttt

SEQ ID NO: 30413 - DNA, 20 bp, synthetic construct
  misc_feature 1..20: note = chemically synthesized
  source 1..20: mol_type = other DNA
gctttctggaggagtcttta

SEQ ID NO: 30414 - DNA, 20 bp, synthetic construct
  misc_feature 1..20: note = chemically synthesized
  source 1..20: mol_type = other DNA
gaggagtctttagggtttta

SEQ ID NO: 30415 - DNA, 20 bp, synthetic construct
  misc_feature 1..20: note = chemically synthesized
  source 1..20: mol_type = other DNA
aggagtctttagggttttaa

SEQ ID NO: 30416 - DNA, 20 bp, synthetic construct
  misc_feature 1..20: note = chemically synthesized
  source 1..20: mol_type = other DNA
aaggtaaatgatcatatcat

SEQ ID NO: 30417 - DNA, 20 bp, synthetic construct
  misc_feature 1..20: note = chemically synthesized
  source 1..20: mol_type = other DNA
atgatcatatcatcagcaaa

SEQ ID NO: 30418 - DNA, 20 bp, synthetic construct
  misc_feature 1..20: note = chemically synthesized
  source 1..20: mol_type = other DNA
atatcatcagcaaacagtga

SEQ ID NO: 30419 - DNA, 20 bp, synthetic construct
  misc_feature 1..20: note = chemically synthesized
  source 1..20: mol_type = other DNA
tttgttttgtctgattgccc

SEQ ID NO: 30420 - DNA, 20 bp, synthetic construct
  misc_feature 1..20: note = chemically synthesized
  source 1..20: mol_type = other DNA
ttttgtctgattgccctggc

SEQ ID NO: 30421 - DNA, 20 bp, synthetic construct
  misc_feature 1..20: note = chemically synthesized
  source 1..20: mol_type = other DNA
tttgtctgattgccctggct

SEQ ID NO: 30422 - DNA, 20 bp, synthetic construct
  misc_feature 1..20: note = chemically synthesized
  source 1..20: mol_type = other DNA
attgccctggctaggacttc

SEQ ID NO: 30423 - DNA, 20 bp, synthetic construct
  misc_feature 1..20: note = chemically synthesized
  source 1..20: mol_type = other DNA
ggacttccagtactatgttg

SEQ ID NO: 30424 - DNA, 20 bp, synthetic construct
  misc_feature 1..20: note = chemically synthesized
  source 1..20: mol_type = other DNA
acttccagtactatgttgaa

SEQ ID NO: 30425 - DNA, 20 bp, synthetic construct
  misc_feature 1..20: note = chemically synthesized
  source 1..20: mol_type = other DNA
cttccagtactatgttgaag

SEQ ID NO: 30426 - DNA, 20 bp, synthetic construct
  misc_feature 1..20: note = chemically synthesized
  source 1..20: mol_type = other DNA
tccagtactatgttgaagag

SEQ ID NO: 30427 - DNA, 20 bp, synthetic construct
  misc_feature 1..20: note = chemically synthesized
  source 1..20: mol_type = other DNA
agtactatgttgaagaggag

SEQ ID NO: 30428 - DNA, 20 bp, synthetic construct
  misc_feature 1..20: note = chemically synthesized
  source 1..20: mol_type = other DNA
ctatgttgaagaggagtggt

SEQ ID NO: 30429 - DNA, 20 bp, synthetic construct
  misc_feature 1..20: note = chemically synthesized
  source 1..20: mol_type = other DNA
atgttgaagaggagtggtga

SEQ ID NO: 30430 - DNA, 20 bp, synthetic construct
  misc_feature 1..20: note = chemically synthesized
  source 1..20: mol_type = other DNA
ttgaagaggagtggtgagag

SEQ ID NO: 30431 - DNA, 20 bp, synthetic construct
  misc_feature 1..20: note = chemically synthesized
  source 1..20: mol_type = other DNA
tgaagaggagtggtgagagt

SEQ ID NO: 30432 - DNA, 20 bp, synthetic construct
  misc_feature 1..20: note = chemically synthesized
  source 1..20: mol_type = other DNA
tgggcatccttgtcttgttc

SEQ ID NO: 30433 - DNA, 20 bp, synthetic construct
  misc_feature 1..20: note = chemically synthesized
  source 1..20: mol_type = other DNA
ccttgtcttgttccagttct

SEQ ID NO: 30434 - DNA, 20 bp, synthetic construct
  misc_feature 1..20: note = chemically synthesized
  source 1..20: mol_type = other DNA
ttgtcttgttccagttctca

SEQ ID NO: 30435 - DNA, 20 bp, synthetic construct
  misc_feature 1..20: note = chemically synthesized
  source 1..20: mol_type = other DNA
tgtcttgttccagttctcag

SEQ ID NO: 30436 - DNA, 20 bp, synthetic construct
  misc_feature 1..20: note = chemically synthesized
  source 1..20: mol_type = other DNA
gtcttgttccagttctcaga

SEQ ID NO: 30437 - DNA, 20 bp, synthetic construct
  misc_feature 1..20: note = chemically synthesized
  source 1..20: mol_type = other DNA
ttccccattcaatattatgt

SEQ ID NO: 30438 - DNA, 20 bp, synthetic construct
  misc_feature 1..20: note = chemically synthesized
  source 1..20: mol_type = other DNA
attcaatattatgttggctg

SEQ ID NO: 30439 - DNA, 20 bp, synthetic construct
  misc_feature 1..20: note = chemically synthesized
  source 1..20: mol_type = other DNA
ttcaatattatgttggctgt

SEQ ID NO: 30440 - DNA, 20 bp, synthetic construct
  misc_feature 1..20: note = chemically synthesized
  source 1..20: mol_type = other DNA
tgttggctgtgggtttgtca

SEQ ID NO: 30441 - DNA, 20 bp, synthetic construct
  misc_feature 1..20: note = chemically synthesized
  source 1..20: mol_type = other DNA
ggctgtgggtttgtcacaga

SEQ ID NO: 30442 - DNA, 20 bp, synthetic construct
  misc_feature 1..20: note = chemically synthesized
  source 1..20: mol_type = other DNA
cagatggcttttattacact

SEQ ID NO: 30443 - DNA, 20 bp, synthetic construct
  misc_feature 1..20: note = chemically synthesized
  source 1..20: mol_type = other DNA
agatggcttttattacactg

SEQ ID NO: 30444 - DNA, 20 bp, synthetic construct
  misc_feature 1..20: note = chemically synthesized
  source 1..20: mol_type = other DNA
tcttgtatgctgattttgct

SEQ ID NO: 30445 - DNA, 20 bp, synthetic construct
  misc_feature 1..20: note = chemically synthesized
  source 1..20: mol_type = other DNA
ttttaatcataaatgtatgc

SEQ ID NO: 30446 - DNA, 20 bp, synthetic construct
  misc_feature 1..20: note = chemically synthesized
  source 1..20: mol_type = other DNA
atgctttttctgcatctatt

SEQ ID NO: 30447 - DNA, 20 bp, synthetic construct
  misc_feature 1..20: note = chemically synthesized
  source 1..20: mol_type = other DNA
tgtttttaaatctgtttatg

SEQ ID NO: 30448 - DNA, 20 bp, synthetic construct
  misc_feature 1..20: note = chemically synthesized
  source 1..20: mol_type = other DNA
gtatcacacttattgacttg

SEQ ID NO: 30449 - DNA, 20 bp, synthetic construct
  misc_feature 1..20: note = chemically synthesized
  source 1..20: mol_type = other DNA
tcaaaccaaccctgcatccc

SEQ ID NO: 30450 - DNA, 20 bp, synthetic construct
  misc_feature 1..20: note = chemically synthesized
  source 1..20: mol_type = other DNA
ccaaccctgcatccctggca

SEQ ID NO: 30451 - DNA, 20 bp, synthetic construct
  misc_feature 1..20: note = chemically synthesized
  source 1..20: mol_type = other DNA
gcatggaacctgcttgatca

SEQ ID NO: 30452 - DNA, 20 bp, synthetic construct
  misc_feature 1..20: note = chemically synthesized
  source 1..20: mol_type = other DNA
tggaacctgcttgatcatgg

SEQ ID NO: 30453 - DNA, 20 bp, synthetic construct
  misc_feature 1..20: note = chemically synthesized
  source 1..20: mol_type = other DNA
ttttgttatgttgttgaatt

SEQ ID NO: 30454 - DNA, 20 bp, synthetic construct
  misc_feature 1..20: note = chemically synthesized
  source 1..20: mol_type = other DNA
tgttgttgaatttggttatc

SEQ ID NO: 30455 - DNA, 20 bp, synthetic construct
  misc_feature 1..20: note = chemically synthesized
  source 1..20: mol_type = other DNA
tggttatctagtattttgtt

SEQ ID NO: 30456 - DNA, 20 bp, synthetic construct
  misc_feature 1..20: note = chemically synthesized
  source 1..20: mol_type = other DNA
ggttatctagtattttgtta

SEQ ID NO: 30457 - DNA, 20 bp, synthetic construct
  misc_feature 1..20: note = chemically synthesized
  source 1..20: mol_type = other DNA
tagtattttgttaaggattt

SEQ ID NO: 30458 - DNA, 20 bp, synthetic construct
  misc_feature 1..20: note = chemically synthesized
  source 1..20: mol_type = other DNA
ttttagcatctatgttcatc

SEQ ID NO: 30459 - DNA, 20 bp, synthetic construct
  misc_feature 1..20: note = chemically synthesized
  source 1..20: mol_type = other DNA
tttagcatctatgttcatca

SEQ ID NO: 30460 - DNA, 20 bp, synthetic construct
  misc_feature 1..20: note = chemically synthesized
  source 1..20: mol_type = other DNA
tctatgttcatcaaggctat

SEQ ID NO: 30461 - DNA, 20 bp, synthetic construct
  misc_feature 1..20: note = chemically synthesized
  source 1..20: mol_type = other DNA
tcatcaaggctatcagtctg

SEQ ID NO: 30462 - DNA, 20 bp, synthetic construct
  misc_feature 1..20: note = chemically synthesized
  source 1..20: mol_type = other DNA
cagtctgtagttttcttttt

SEQ ID NO: 30463 - DNA, 20 bp, synthetic construct
  misc_feature 1..20: note = chemically synthesized
  source 1..20: mol_type = other DNA
tttttggttatgtccttccc

SEQ ID NO: 30464 - DNA, 20 bp, synthetic construct
  misc_feature 1..20: note = chemically synthesized
  source 1..20: mol_type = other DNA
gttatgtccttccctggttt

SEQ ID NO: 30465 - DNA, 20 bp, synthetic construct
  misc_feature 1..20: note = chemically synthesized
  source 1..20: mol_type = other DNA
ccctggttttggtgtgatgc

SEQ ID NO: 30466 - DNA, 20 bp, synthetic construct
  misc_feature 1..20: note = chemically synthesized
  source 1..20: mol_type = other DNA
ttggtgtgatgctggcttca

SEQ ID NO: 30467 - DNA, 20 bp, synthetic construct
  misc_feature 1..20: note = chemically synthesized
  source 1..20: mol_type = other DNA
gctggcttcatagaatgaat

SEQ ID NO: 30468 - DNA, 20 bp, synthetic construct
  misc_feature 1..20: note = chemically synthesized
  source 1..20: mol_type = other DNA
ctggcttcatagaatgaatt

SEQ ID NO: 30469 - DNA, 20 bp, synthetic construct
  misc_feature 1..20: note = chemically synthesized
  source 1..20: mol_type = other DNA
tggcttcatagaatgaatta

SEQ ID NO: 30470 - DNA, 20 bp, synthetic construct
  misc_feature 1..20: note = chemically synthesized
  source 1..20: mol_type = other DNA
cttcatagaatgaattaggg

SEQ ID NO: 30471 - DNA, 20 bp, synthetic construct
  misc_feature 1..20: note = chemically synthesized
  source 1..20: mol_type = other DNA
ttcatagaatgaattagggc

SEQ ID NO: 30472 - DNA, 20 bp, synthetic construct
  misc_feature 1..20: note = chemically synthesized
  source 1..20: mol_type = other DNA
ttccttctttatctgtcttg

SEQ ID NO: 30473 - DNA, 20 bp, synthetic construct
  misc_feature 1..20: note = chemically synthesized
  source 1..20: mol_type = other DNA
tctttatctgtcttgtagaa

SEQ ID NO: 30474 - DNA, 20 bp, synthetic construct
  misc_feature 1..20: note = chemically synthesized
  source 1..20: mol_type = other DNA
tcttgtagaatagtgtcaaa

SEQ ID NO: 30475 - DNA, 20 bp, synthetic construct
  misc_feature 1..20: note = chemically synthesized
  source 1..20: mol_type = other DNA
gtagaatagtgtcaaaaaga

SEQ ID NO: 30476 - DNA, 20 bp, synthetic construct
  misc_feature 1..20: note = chemically synthesized
  source 1..20: mol_type = other DNA
tagaatagtgtcaaaaagat

SEQ ID NO: 30477 - DNA, 20 bp, synthetic construct
  misc_feature 1..20: note = chemically synthesized
  source 1..20: mol_type = other DNA
agaatagtgtcaaaaagatg

SEQ ID NO: 30478 - DNA, 20 bp, synthetic construct
  misc_feature 1..20: note = chemically synthesized
  source 1..20: mol_type = other DNA
ccaattcctctttgaatgtc

SEQ ID NO: 30479 - DNA, 20 bp, synthetic construct
  misc_feature 1..20: note = chemically synthesized
  source 1..20: mol_type = other DNA
attcctctttgaatgtctag

SEQ ID NO: 30480 - DNA, 20 bp, synthetic construct
  misc_feature 1..20: note = chemically synthesized
  source 1..20: mol_type = other DNA
aattctgttgtgaatccatc

SEQ ID NO: 30481 - DNA, 20 bp, synthetic construct
  misc_feature 1..20: note = chemically synthesized
  source 1..20: mol_type = other DNA
tctggtcctgaacttttttt

SEQ ID NO: 30482 - DNA, 20 bp, synthetic construct
  misc_feature 1..20: note = chemically synthesized
  source 1..20: mol_type = other DNA
gtcctgaacttttttttggt

SEQ ID NO: 30483 - DNA, 20 bp, synthetic construct
  misc_feature 1..20: note = chemically synthesized
  source 1..20: mol_type = other DNA
taaatctcactgcttgttat

SEQ ID NO: 30484 - DNA, 20 bp, synthetic construct
  misc_feature 1..20: note = chemically synthesized
  source 1..20: mol_type = other DNA
actgcttgttattggtctgt

SEQ ID NO: 30485 - DNA, 20 bp, synthetic construct
  misc_feature 1..20: note = chemically synthesized
  source 1..20: mol_type = other DNA
ggtctgttagtaaatttatt

SEQ ID NO: 30486 - DNA, 20 bp, synthetic construct
  misc_feature 1..20: note = chemically synthesized
  source 1..20: mol_type = other DNA
gtctgttagtaaatttattg

SEQ ID NO: 30487 - DNA, 20 bp, synthetic construct
  misc_feature 1..20: note = chemically synthesized
  source 1..20: mol_type = other DNA
atttattgaggctcatttca

SEQ ID NO: 30488 - DNA, 20 bp, synthetic construct
  misc_feature 1..20: note = chemically synthesized
  source 1..20: mol_type = other DNA
tcatttcatggcctatcata

SEQ ID NO: 30489 - DNA, 20 bp, synthetic construct
  misc_feature 1..20: note = chemically synthesized
  source 1..20: mol_type = other DNA
gcctatcatatggtctacct

SEQ ID NO: 30490 - DNA, 20 bp, synthetic construct
  misc_feature 1..20: note = chemically synthesized
  source 1..20: mol_type = other DNA
ctatcatatggtctaccttg

SEQ ID NO: 30491 - DNA, 20 bp, synthetic construct
  misc_feature 1..20: note = chemically synthesized
  source 1..20: mol_type = other DNA
aatttccacgcgctgttgaa

SEQ ID NO: 30492 - DNA, 20 bp, synthetic construct
  misc_feature 1..20: note = chemically synthesized
  source 1..20: mol_type = other DNA
tgaatagaatgtgtgttctg

SEQ ID NO: 30493 - DNA, 20 bp, synthetic construct
  misc_feature 1..20: note = chemically synthesized
  source 1..20: mol_type = other DNA
aatgtgtgttctgtggttat

SEQ ID NO: 30494 - DNA, 20 bp, synthetic construct
  misc_feature 1..20: note = chemically synthesized
  source 1..20: mol_type = other DNA
atgttctgtatataactgtt

SEQ ID NO: 30495 - DNA, 20 bp, synthetic construct
  misc_feature 1..20: note = chemically synthesized
  source 1..20: mol_type = other DNA
ctgttaagtccatttgttct

SEQ ID NO: 30496 - DNA, 20 bp, synthetic construct
  misc_feature 1..20: note = chemically synthesized
  source 1..20: mol_type = other DNA
tgttaagtccatttgttcta

SEQ ID NO: 30497 - DNA, 20 bp, synthetic construct
  misc_feature 1..20: note = chemically synthesized
  source 1..20: mol_type = other DNA
ttctgtcttgatgaactgtc

SEQ ID NO: 30498 - DNA, 20 bp, synthetic construct
  misc_feature 1..20: note = chemically synthesized
  source 1..20: mol_type = other DNA
actgtctagtgctgtcaatg

SEQ ID NO: 30499 - DNA, 20 bp, synthetic construct
  misc_feature 1..20: note = chemically synthesized
  source 1..20: mol_type = other DNA
gtgctgtcaatgaagtattg

SEQ ID NO: 30500 - DNA, 20 bp, synthetic construct
  misc_feature 1..20: note = chemically synthesized
  source 1..20: mol_type = other DNA
ttgctgtctatctcatttct

SEQ ID NO: 30501 - DNA, 20 bp, synthetic construct
  misc_feature 1..20: note = chemically synthesized
  source 1..20: mol_type = other DNA
tgctgtctatctcatttctt

SEQ ID NO: 30502 - DNA, 20 bp, synthetic construct
  misc_feature 1..20: note = chemically synthesized
  source 1..20: mol_type = other DNA
atctcatttcttaggtctat

SEQ ID NO: 30503 - DNA, 20 bp, synthetic construct
  misc_feature 1..20: note = chemically synthesized
  source 1..20: mol_type = other DNA
tagtaattgttctataaatt

SEQ ID NO: 30504 - DNA, 20 bp, synthetic construct
  misc_feature 1..20: note = chemically synthesized
  source 1..20: mol_type = other DNA
agtaattgttctataaattt

SEQ ID NO: 30505 - DNA, 20 bp, synthetic construct
  misc_feature 1..20: note = chemically synthesized
  source 1..20: mol_type = other DNA
taattgttctataaatttgg

SEQ ID NO: 30506 - DNA, 20 bp, synthetic construct
  misc_feature 1..20: note = chemically synthesized
  source 1..20: mol_type = other DNA
ttctataaatttgggagctc

SEQ ID NO: 30507 - DNA, 20 bp, synthetic construct
  misc_feature 1..20: note = chemically synthesized
  source 1..20: mol_type = other DNA
aaatttgggagctccagtgt

SEQ ID NO: 30508 - DNA, 20 bp, synthetic construct
  misc_feature 1..20: note = chemically synthesized
  source 1..20: mol_type = other DNA
aatttgggagctccagtgtt

SEQ ID NO: 30509 - DNA, 20 bp, synthetic construct
  misc_feature 1..20: note = chemically synthesized
  source 1..20: mol_type = other DNA
tgttaggtgcatatatgttt

SEQ ID NO: 30510 - DNA, 20 bp, synthetic construct
  misc_feature 1..20: note = chemically synthesized
  source 1..20: mol_type = other DNA
agattgtgatattttcctgt

SEQ ID NO: 30511 - DNA, 20 bp, synthetic construct
  misc_feature 1..20: note = chemically synthesized
  source 1..20: mol_type = other DNA
gtgatattttcctgttggac

SEQ ID NO: 30512 - DNA, 20 bp, synthetic construct
  misc_feature 1..20: note = chemically synthesized
  source 1..20: mol_type = other DNA
tgatattttcctgttggaca

SEQ ID NO: 30513 - DNA, 20 bp, synthetic construct
  misc_feature 1..20: note = chemically synthesized
  source 1..20: mol_type = other DNA
ttttaactgctgttgcttta

SEQ ID NO: 30514 - DNA, 20 bp, synthetic construct
  misc_feature 1..20: note = chemically synthesized
  source 1..20: mol_type = other DNA
ttgttttgcctactcacttt

SEQ ID NO: 30515 - DNA, 20 bp, synthetic construct
  misc_feature 1..20: note = chemically synthesized
  source 1..20: mol_type = other DNA
ttttgcctactcacttttgg

SEQ ID NO: 30516 - DNA, 20 bp, synthetic construct
  misc_feature 1..20: note = chemically synthesized
  source 1..20: mol_type = other DNA
aatacctttttcaccctttt

SEQ ID NO: 30517 - DNA, 20 bp, synthetic construct
  misc_feature 1..20: note = chemically synthesized
  source 1..20: mol_type = other DNA
acctttttcacccttttaag

SEQ ID NO: 30518 - DNA, 20 bp, synthetic construct
  misc_feature 1..20: note = chemically synthesized
  source 1..20: mol_type = other DNA
ctttttcacccttttaagtg

SEQ ID NO: 30519 - DNA, 20 bp, synthetic construct
  misc_feature 1..20: note = chemically synthesized
  source 1..20: mol_type = other DNA
acccttttaagtggagcatt

SEQ ID NO: 30520 - DNA, 20 bp, synthetic construct
  misc_feature 1..20: note = chemically synthesized
  source 1..20: mol_type = other DNA
cccttttaagtggagcattt

SEQ ID NO: 30521 - DNA, 20 bp, synthetic construct
  misc_feature 1..20: note = chemically synthesized
  source 1..20: mol_type = other DNA
aggccatttacattcaatgt

SEQ ID NO: 30522 - DNA, 20 bp, synthetic construct
  misc_feature 1..20: note = chemically synthesized
  source 1..20: mol_type = other DNA
atgttagtaatgtaaatgcc

SEQ ID NO: 30523 - DNA, 20 bp, synthetic construct
  misc_feature 1..20: note = chemically synthesized
  source 1..20: mol_type = other DNA
atgtaaatgcctggctatgc

SEQ ID NO: 30524 - DNA, 20 bp, synthetic construct
  misc_feature 1..20: note = chemically synthesized
  source 1..20: mol_type = other DNA
tgtaaatgcctggctatgcc

SEQ ID NO: 30525 - DNA, 20 bp, synthetic construct
  misc_feature 1..20: note = chemically synthesized
  source 1..20: mol_type = other DNA
aaatgcctggctatgccagg

SEQ ID NO: 30526 - DNA, 20 bp, synthetic construct
  misc_feature 1..20: note = chemically synthesized
  source 1..20: mol_type = other DNA
aatgcctggctatgccaggc

SEQ ID NO: 30527 - DNA, 20 bp, synthetic construct
  misc_feature 1..20: note = chemically synthesized
  source 1..20: mol_type = other DNA
ctggctatgccaggcaggaa

SEQ ID NO: 30528 - DNA, 20 bp, synthetic construct
  misc_feature 1..20: note = chemically synthesized
  source 1..20: mol_type = other DNA
ccaggcaggaatggcctgct

SEQ ID NO: 30529 - DNA, 20 bp, synthetic construct
  misc_feature 1..20: note = chemically synthesized
  source 1..20: mol_type = other DNA
caggcaggaatggcctgctc

SEQ ID NO: 30530 - DNA, 20 bp, synthetic construct
  misc_feature 1..20: note = chemically synthesized
  source 1..20: mol_type = other DNA
aggcaggaatggcctgctca

SEQ ID NO: 30531 - DNA, 20 bp, synthetic construct
  misc_feature 1..20: note = chemically synthesized
  source 1..20: mol_type = other DNA
gaatggcctgctcagggacc

SEQ ID NO: 30532 - DNA, 20 bp, synthetic construct
  misc_feature 1..20: note = chemically synthesized
  source 1..20: mol_type = other DNA
ggcctgctcagggacccagt

SEQ ID NO: 30533 - DNA, 20 bp, synthetic construct
  misc_feature 1..20: note = chemically synthesized
  source 1..20: mol_type = other DNA
tcagggacccagtgagctcc

SEQ ID NO: 30534 - DNA, 20 bp, synthetic construct
  misc_feature 1..20: note = chemically synthesized
  source 1..20: mol_type = other DNA
cagggacccagtgagctccc

SEQ ID NO: 30535 - DNA, 20 bp, synthetic construct
  misc_feature 1..20: note = chemically synthesized
  source 1..20: mol_type = other DNA
agggacccagtgagctccca

SEQ ID NO: 30536 - DNA, 20 bp, synthetic construct
  misc_feature 1..20: note = chemically synthesized
  source 1..20: mol_type = other DNA
ctctacacctgtattttgct

SEQ ID NO: 30537 - DNA, 20 bp, synthetic construct
  misc_feature 1..20: note = chemically synthesized
  source 1..20: mol_type = other DNA
tgtattttgctcagctctct

SEQ ID NO: 30538 - DNA, 20 bp, synthetic construct
  misc_feature 1..20: note = chemically synthesized
  source 1..20: mol_type = other DNA
tctctaagttaactcaactc

SEQ ID NO: 30539 - DNA, 20 bp, synthetic construct
  misc_feature 1..20: note = chemically synthesized
  source 1..20: mol_type = other DNA
ctctaagttaactcaactcc

SEQ ID NO: 30540 - DNA, 20 bp, synthetic construct
  misc_feature 1..20: note = chemically synthesized
  source 1..20: mol_type = other DNA
aagttaactcaactccaggt

SEQ ID NO: 30541 - DNA, 20 bp, synthetic construct
  misc_feature 1..20: note = chemically synthesized
  source 1..20: mol_type = other DNA
agttaactcaactccaggta

SEQ ID NO: 30542 - DNA, 20 bp, synthetic construct
  misc_feature 1..20: note = chemically synthesized
  source 1..20: mol_type = other DNA
aactcaactccaggtaaggt

SEQ ID NO: 30543 - DNA, 20 bp, synthetic construct
  misc_feature 1..20: note = chemically synthesized
  source 1..20: mol_type = other DNA
tcagaaacttctcccacaaa

SEQ ID NO: 30544 - DNA, 20 bp, synthetic construct
  misc_feature 1..20: note = chemically synthesized
  source 1..20: mol_type = other DNA
ttctcccacaaacagacctt

SEQ ID NO: 30545 - DNA, 20 bp, synthetic construct
  misc_feature 1..20: note = chemically synthesized
  source 1..20: mol_type = other DNA
aaacagaccttcagtttctc

SEQ ID NO: 30546 - DNA, 20 bp, synthetic construct
  misc_feature 1..20: note = chemically synthesized
  source 1..20: mol_type = other DNA
cagaccttcagtttctccag

SEQ ID NO: 30547 - DNA, 20 bp, synthetic construct
  misc_feature 1..20: note = chemically synthesized
  source 1..20: mol_type = other DNA
agaccttcagtttctccagt

SEQ ID NO: 30548 - DNA, 20 bp, synthetic construct
  misc_feature 1..20: note = chemically synthesized
  source 1..20: mol_type = other DNA
accttcagtttctccagtgg

SEQ ID NO: 30549 - DNA, 20 bp, synthetic construct
  misc_feature 1..20: note = chemically synthesized
  source 1..20: mol_type = other DNA
ctccagtgggagtgtgtgtt

SEQ ID NO: 30550 - DNA, 20 bp, synthetic construct
  misc_feature 1..20: note = chemically synthesized
  source 1..20: mol_type = other DNA
tccagtgggagtgtgtgttt

SEQ ID NO: 30551 - DNA, 20 bp, synthetic construct
  misc_feature 1..20: note = chemically synthesized
  source 1..20: mol_type = other DNA
cagtgggagtgtgtgtttag

SEQ ID NO: 30552 - DNA, 20 bp, synthetic construct
  misc_feature 1..20: note = chemically synthesized
  source 1..20: mol_type = other DNA
gtgggagtgtgtgtttagga

SEQ ID NO: 30553 - DNA, 20 bp, synthetic construct
  misc_feature 1..20: note = chemically synthesized
  source 1..20: mol_type = other DNA
tgggagtgtgtgtttaggag

SEQ ID NO: 30554 - DNA, 20 bp, synthetic construct
  misc_feature 1..20: note = chemically synthesized
  source 1..20: mol_type = other DNA
ggagtgtgtgtttaggagag

SEQ ID NO: 30555 - DNA, 20 bp, synthetic construct
  misc_feature 1..20: note = chemically synthesized
  source 1..20: mol_type = other DNA
gagtgtgtgtttaggagagg

SEQ ID NO: 30556 - DNA, 20 bp, synthetic construct
  misc_feature 1..20: note = chemically synthesized
  source 1..20: mol_type = other DNA
atctccctttcccacttccg

SEQ ID NO: 30557 - DNA, 20 bp, synthetic construct
  misc_feature 1..20: note = chemically synthesized
  source 1..20: mol_type = other DNA
ccctttcccacttccgcagt

SEQ ID NO: 30558 - DNA, 20 bp, synthetic construct
  misc_feature 1..20: note = chemically synthesized
  source 1..20: mol_type = other DNA
cctttcccacttccgcagtt

SEQ ID NO: 30559 - DNA, 20 bp, synthetic construct
  misc_feature 1..20: note = chemically synthesized
  source 1..20: mol_type = other DNA
ctttcccacttccgcagttg

SEQ ID NO: 30560 - DNA, 20 bp, synthetic construct
  misc_feature 1..20: note = chemically synthesized
  source 1..20: mol_type = other DNA
ttccgcagttggggcactca

SEQ ID NO: 30561 - DNA, 20 bp, synthetic construct
  misc_feature 1..20: note = chemically synthesized
  source 1..20: mol_type = other DNA
gttggggcactcacagtatt

SEQ ID NO: 30562 - DNA, 20 bp, synthetic construct
  misc_feature 1..20: note = chemically synthesized
  source 1..20: mol_type = other DNA
ttggggcactcacagtattt

SEQ ID NO: 30563 - DNA, 20 bp, synthetic construct
  misc_feature 1..20: note = chemically synthesized
  source 1..20: mol_type = other DNA
tggggcactcacagtatttg

SEQ ID NO: 30564 - DNA, 20 bp, synthetic construct
  misc_feature 1..20: note = chemically synthesized
  source 1..20: mol_type = other DNA
acagtatttggggtgtctcc

SEQ ID NO: 30565 - DNA, 20 bp, synthetic construct
  misc_feature 1..20: note = chemically synthesized
  source 1..20: mol_type = other DNA
cagtatttggggtgtctcct

SEQ ID NO: 30566 - DNA, 20 bp, synthetic construct
  misc_feature 1..20: note = chemically synthesized
  source 1..20: mol_type = other DNA
ggggtgtctcctgggtcctg

SEQ ID NO: 30567 - DNA, 20 bp, synthetic construct
  misc_feature 1..20: note = chemically synthesized
  source 1..20: mol_type = other DNA
gggtgtctcctgggtcctgc

SEQ ID NO: 30568 - DNA, 20 bp, synthetic construct
  misc_feature 1..20: note = chemically synthesized
  source 1..20: mol_type = other DNA
gtgtctcctgggtcctgcag

SEQ ID NO: 30569 - DNA, 20 bp, synthetic construct
  misc_feature 1..20: note = chemically synthesized
  source 1..20: mol_type = other DNA
caggagcaatctacttcctt

SEQ ID NO: 30570 - DNA, 20 bp, synthetic construct
  misc_feature 1..20: note = chemically synthesized
  source 1..20: mol_type = other DNA
ggagcaatctacttccttca

SEQ ID NO: 30571 - DNA, 20 bp, synthetic construct
  misc_feature 1..20: note = chemically synthesized
  source 1..20: mol_type = other DNA
gagcaatctacttccttcag

SEQ ID NO: 30572 - DNA, 20 bp, synthetic construct
  misc_feature 1..20: note = chemically synthesized
  source 1..20: mol_type = other DNA
agcaatctacttccttcaga

SEQ ID NO: 30573 - DNA, 20 bp, synthetic construct
  misc_feature 1..20: note = chemically synthesized
  source 1..20: mol_type = other DNA
tacttccttcagagggtctg

SEQ ID NO: 30574 - DNA, 20 bp, synthetic construct
  misc_feature 1..20: note = chemically synthesized
  source 1..20: mol_type = other DNA
acttccttcagagggtctgt

SEQ ID NO: 30575 - DNA, 20 bp, synthetic construct
  misc_feature 1..20: note = chemically synthesized
  source 1..20: mol_type = other DNA
agagggtctgtgggtcctct

SEQ ID NO: 30576 - DNA, 20 bp, synthetic construct
  misc_feature 1..20: note = chemically synthesized
  source 1..20: mol_type = other DNA
gagggtctgtgggtcctctc

SEQ ID NO: 30577 - DNA, 20 bp, synthetic construct
  misc_feature 1..20: note = chemically synthesized
  source 1..20: mol_type = other DNA
gtgggtcctctcaggattgc

SEQ ID NO: 30578 - DNA, 20 bp, synthetic construct
  misc_feature 1..20: note = chemically synthesized
  source 1..20: mol_type = other DNA
ggattgctggtttgttcttg

SEQ ID NO: 30579 - DNA, 20 bp, synthetic construct
  misc_feature 1..20: note = chemically synthesized
  source 1..20: mol_type = other DNA
ttgttcttgcagtctatctg

SEQ ID NO: 30580 - DNA, 20 bp, synthetic construct
  misc_feature 1..20: note = chemically synthesized
  source 1..20: mol_type = other DNA
gcagctaaaattcacaatgc

SEQ ID NO: 30581 - DNA, 20 bp, synthetic construct
  misc_feature 1..20: note = chemically synthesized
  source 1..20: mol_type = other DNA
acatgctgctctgtccatct

SEQ ID NO: 30582 - DNA, 20 bp, synthetic construct
  misc_feature 1..20: note = chemically synthesized
  source 1..20: mol_type = other DNA
gctgctctgtccatctgagt

SEQ ID NO: 30583 - DNA, 20 bp, synthetic construct
  misc_feature 1..20: note = chemically synthesized
  source 1..20: mol_type = other DNA
tgctctgtccatctgagttg

SEQ ID NO: 30584 - DNA, 20 bp, synthetic construct
  misc_feature 1..20: note = chemically synthesized
  source 1..20: mol_type = other DNA
tctgagttggagctgcaatc

SEQ ID NO: 30585 - DNA, 20 bp, synthetic construct
  misc_feature 1..20: note = chemically synthesized
  source 1..20: mol_type = other DNA
ctgagttggagctgcaatct

SEQ ID NO: 30586 - DNA, 20 bp, synthetic construct
  misc_feature 1..20: note = chemically synthesized
  source 1..20: mol_type = other DNA
aggcctacctcccatccgcc

SEQ ID NO: 30587 - DNA, 20 bp, synthetic construct
  misc_feature 1..20: note = chemically synthesized
  source 1..20: mol_type = other DNA
ctcccatccgccaagatcct

SEQ ID NO: 30588 - DNA, 20 bp, synthetic construct
  misc_feature 1..20: note = chemically synthesized
  source 1..20: mol_type = other DNA
ccatccgccaagatcctgag

SEQ ID NO: 30589 - DNA, 20 bp, synthetic construct
  misc_feature 1..20: note = chemically synthesized
  source 1..20: mol_type = other DNA
ccgccaagatcctgagaagt

SEQ ID NO: 30590 - DNA, 20 bp, synthetic construct
  misc_feature 1..20: note = chemically synthesized
  source 1..20: mol_type = other DNA
cgccaagatcctgagaagtt

SEQ ID NO: 30591 - DNA, 20 bp, synthetic construct
  misc_feature 1..20: note = chemically synthesized
  source 1..20: mol_type = other DNA
gccaagatcctgagaagttg

SEQ ID NO: 30592 - DNA, 20 bp, synthetic construct
  misc_feature 1..20: note = chemically synthesized
  source 1..20: mol_type = other DNA
tggggattatatttcaacat

SEQ ID NO: 30593 - DNA, 20 bp, synthetic construct
  misc_feature 1..20: note = chemically synthesized
  source 1..20: mol_type = other DNA
ttatatttcaacatgagatt

SEQ ID NO: 30594 - DNA, 20 bp, synthetic construct
  misc_feature 1..20: note = chemically synthesized
  source 1..20: mol_type = other DNA
atatttcaacatgagatttg

SEQ ID NO: 30595 - DNA, 20 bp, synthetic construct
  misc_feature 1..20: note = chemically synthesized
  source 1..20: mol_type = other DNA
tatttcaacatgagatttgg

SEQ ID NO: 30596 - DNA, 20 bp, synthetic construct
  misc_feature 1..20: note = chemically synthesized
  source 1..20: mol_type = other DNA
atttcaacatgagatttgga

SEQ ID NO: 30597 - DNA, 20 bp, synthetic construct
  misc_feature 1..20: note = chemically synthesized
  source 1..20: mol_type = other DNA
aacaaacatccaaaccatat

SEQ ID NO: 30598 - DNA, 20 bp, synthetic construct
  misc_feature 1..20: note = chemically synthesized
  source 1..20: mol_type = other DNA
aaacatccaaaccatatcag

SEQ ID NO: 30599 - DNA, 20 bp, synthetic construct
  misc_feature 1..20: note = chemically synthesized
  source 1..20: mol_type = other DNA
tccaaaccatatcagcagtc

SEQ ID NO: 30600 - DNA, 20 bp, synthetic construct
  misc_feature 1..20: note = chemically synthesized
  source 1..20: mol_type = other DNA
cagttttattcttttgcaca

SEQ ID NO: 30601 - DNA, 20 bp, synthetic construct
  misc_feature 1..20: note = chemically synthesized
  source 1..20: mol_type = other DNA
ttttgcacatggatatccaa

SEQ ID NO: 30602 - DNA, 20 bp, synthetic construct
  misc_feature 1..20: note = chemically synthesized
  source 1..20: mol_type = other DNA
caatggatatccaatttttt

SEQ ID NO: 30603 - DNA, 20 bp, synthetic construct
  misc_feature 1..20: note = chemically synthesized
  source 1..20: mol_type = other DNA
cacctttgttgaaaatctgt

SEQ ID NO: 30604 - DNA, 20 bp, synthetic construct
  misc_feature 1..20: note = chemically synthesized
  source 1..20: mol_type = other DNA
atctgttggctataaatatg

SEQ ID NO: 30605 - DNA, 20 bp, synthetic construct
  misc_feature 1..20: note = chemically synthesized
  source 1..20: mol_type = other DNA
taaatatgtggatgcatttc

SEQ ID NO: 30606 - DNA, 20 bp, synthetic construct
  misc_feature 1..20: note = chemically synthesized
  source 1..20: mol_type = other DNA
aaatatgtggatgcatttct

SEQ ID NO: 30607 - DNA, 20 bp, synthetic construct
  misc_feature 1..20: note = chemically synthesized
  source 1..20: mol_type = other DNA
ggttctctattctcttccat

SEQ ID NO: 30608 - DNA, 20 bp, synthetic construct
  misc_feature 1..20: note = chemically synthesized
  source 1..20: mol_type = other DNA
ctattctcttccattggtct

SEQ ID NO: 30609 - DNA, 20 bp, synthetic construct
  misc_feature 1..20: note = chemically synthesized
  source 1..20: mol_type = other DNA
ctaagtgtctgttctaatgt

SEQ ID NO: 30610 - DNA, 20 bp, synthetic construct
  misc_feature 1..20: note = chemically synthesized
  source 1..20: mol_type = other DNA
aatgtcagtatcatgctgtt

SEQ ID NO: 30611 - DNA, 20 bp, synthetic construct
  misc_feature 1..20: note = chemically synthesized
  source 1..20: mol_type = other DNA
atgtcagtatcatgctgttt

SEQ ID NO: 30612 - DNA, 20 bp, synthetic construct
  misc_feature 1..20: note = chemically synthesized
  source 1..20: mol_type = other DNA
tttgtaatatactttgaaat

SEQ ID NO: 30613 - DNA, 20 bp, synthetic construct
  misc_feature 1..20: note = chemically synthesized
  source 1..20: mol_type = other DNA
ttgtaatatactttgaaatc

SEQ ID NO: 30614 - DNA, 20 bp, synthetic construct
  misc_feature 1..20: note = chemically synthesized
  source 1..20: mol_type = other DNA
taatatactttgaaatcagg

SEQ ID NO: 30615 - DNA, 20 bp, synthetic construct
  misc_feature 1..20: note = chemically synthesized
  source 1..20: mol_type = other DNA
atcaggtagtatgatacctc

SEQ ID NO: 30616 - DNA, 20 bp, synthetic construct
  misc_feature 1..20: note = chemically synthesized
  source 1..20: mol_type = other DNA
ctagcattgttcttttttca

SEQ ID NO: 30617 - DNA, 20 bp, synthetic construct
  misc_feature 1..20: note = chemically synthesized
  source 1..20: mol_type = other DNA
tagcattgttcttttttcac

SEQ ID NO: 30618 - DNA, 20 bp, synthetic construct
  misc_feature 1..20: note = chemically synthesized
  source 1..20: mol_type = other DNA
cttttttcacaggatgactt

SEQ ID NO: 30619 - DNA, 20 bp, synthetic construct
  misc_feature 1..20: note = chemically synthesized
  source 1..20: mol_type = other DNA
cacaggatgactttggctac

SEQ ID NO: 30620 - DNA, 20 bp, synthetic construct
  misc_feature 1..20: note = chemically synthesized
  source 1..20: mol_type = other DNA
caggatgactttggctactg

SEQ ID NO: 30621 - DNA, 20 bp, synthetic construct
  misc_feature 1..20: note = chemically synthesized
  source 1..20: mol_type = other DNA
ttttaatttcatacaaattt

SEQ ID NO: 30622 - DNA, 20 bp, synthetic construct
  misc_feature 1..20: note = chemically synthesized
  source 1..20: mol_type = other DNA
atttcatacaaattttagat

SEQ ID NO: 30623 - DNA, 20 bp, synthetic construct
  misc_feature 1..20: note = chemically synthesized
  source 1..20: mol_type = other DNA
aaatgacattgctattttga

SEQ ID NO: 30624 - DNA, 20 bp, synthetic construct
  misc_feature 1..20: note = chemically synthesized
  source 1..20: mol_type = other DNA
tgacattgctattttgatag

SEQ ID NO: 30625 - DNA, 20 bp, synthetic construct
  misc_feature 1..20: note = chemically synthesized
  source 1..20: mol_type = other DNA
ctattttgatagcggtcata

SEQ ID NO: 30626 - DNA, 20 bp, synthetic construct
  misc_feature 1..20: note = chemically synthesized
  source 1..20: mol_type = other DNA
tagcggtcatatagaatctg

SEQ ID NO: 30627 - DNA, 20 bp, synthetic construct
  misc_feature 1..20: note = chemically synthesized
  source 1..20: mol_type = other DNA
atagaatctgtagattgctt

SEQ ID NO: 30628 - DNA, 20 bp, synthetic construct
  misc_feature 1..20: note = chemically synthesized
  source 1..20: mol_type = other DNA
tagaatctgtagattgcttt

SEQ ID NO: 30629 - DNA, 20 bp, synthetic construct
  misc_feature 1..20: note = chemically synthesized
  source 1..20: mol_type = other DNA
aatctgtagattgctttggg

SEQ ID NO: 30630 - DNA, 20 bp, synthetic construct
  misc_feature 1..20: note = chemically synthesized
  source 1..20: mol_type = other DNA
gtagattgctttgggtagta

SEQ ID NO: 30631 - DNA, 20 bp, synthetic construct
  misc_feature 1..20: note = chemically synthesized
  source 1..20: mol_type = other DNA
atttttctgatccatgaaca

SEQ ID NO: 30632 - DNA, 20 bp, synthetic construct
  misc_feature 1..20: note = chemically synthesized
  source 1..20: mol_type = other DNA
tttttctgatccatgaacat

SEQ ID NO: 30633 - DNA, 20 bp, synthetic construct
  misc_feature 1..20: note = chemically synthesized
  source 1..20: mol_type = other DNA
gtccttttcaattcttttat

SEQ ID NO: 30634 - DNA, 20 bp, synthetic construct
  misc_feature 1..20: note = chemically synthesized
  source 1..20: mol_type = other DNA
attcttttatcagtgttttg

SEQ ID NO: 30635 - DNA, 20 bp, synthetic construct
  misc_feature 1..20: note = chemically synthesized
  source 1..20: mol_type = other DNA
gtgttttgtagttttccgaa

SEQ ID NO: 30636 - DNA, 20 bp, synthetic construct
  misc_feature 1..20: note = chemically synthesized
  source 1..20: mol_type = other DNA
gttttgtagttttccgaata

SEQ ID NO: 30637 - DNA, 20 bp, synthetic construct
  misc_feature 1..20: note = chemically synthesized
  source 1..20: mol_type = other DNA
ttttgtagttttccgaatag

SEQ ID NO: 30638 - DNA, 20 bp, synthetic construct
  misc_feature 1..20: note = chemically synthesized
  source 1..20: mol_type = other DNA
ttttccgaatagaggttttt

SEQ ID NO: 30639 - DNA, 20 bp, synthetic construct
  misc_feature 1..20: note = chemically synthesized
  source 1..20: mol_type = other DNA
atagaggtttttcggttcct

SEQ ID NO: 30640 - DNA, 20 bp, synthetic construct
  misc_feature 1..20: note = chemically synthesized
  source 1..20: mol_type = other DNA
tccctaaatattttattttt

SEQ ID NO: 30641 - DNA, 20 bp, synthetic construct
  misc_feature 1..20: note = chemically synthesized
  source 1..20: mol_type = other DNA
tattttttagctattgtaaa

SEQ ID NO: 30642 - DNA, 20 bp, synthetic construct
  misc_feature 1..20: note = chemically synthesized
  source 1..20: mol_type = other DNA
attttttagctattgtaaat

SEQ ID NO: 30643 - DNA, 20 bp, synthetic construct
  misc_feature 1..20: note = chemically synthesized
  source 1..20: mol_type = other DNA
tgccttcttaatttccttct

SEQ ID NO: 30644 - DNA, 20 bp, synthetic construct
  misc_feature 1..20: note = chemically synthesized
  source 1..20: mol_type = other DNA
ttcttaatttccttctcagc

SEQ ID NO: 30645 - DNA, 20 bp, synthetic construct
  misc_feature 1..20: note = chemically synthesized
  source 1..20: mol_type = other DNA
cttctcagctagtttattat

SEQ ID NO: 30646 - DNA, 20 bp, synthetic construct
  misc_feature 1..20: note = chemically synthesized
  source 1..20: mol_type = other DNA
gctagtttattattggtgtg

SEQ ID NO: 30647 - DNA, 20 bp, synthetic construct
  misc_feature 1..20: note = chemically synthesized
  source 1..20: mol_type = other DNA
actttactgaatttattttt

SEQ ID NO: 30648 - DNA, 20 bp, synthetic construct
  misc_feature 1..20: note = chemically synthesized
  source 1..20: mol_type = other DNA
tgaatttatttttcagcgct

SEQ ID NO: 30649 - DNA, 20 bp, synthetic construct
  misc_feature 1..20: note = chemically synthesized
  source 1..20: mol_type = other DNA
aatttatttttcagcgctaa

SEQ ID NO: 30650 - DNA, 20 bp, synthetic construct
  misc_feature 1..20: note = chemically synthesized
  source 1..20: mol_type = other DNA
tttcagcgctaagagtgctt

SEQ ID NO: 30651 - DNA, 20 bp, synthetic construct
  misc_feature 1..20: note = chemically synthesized
  source 1..20: mol_type = other DNA
cagcgctaagagtgctttgg

SEQ ID NO: 30652 - DNA, 20 bp, synthetic construct
  misc_feature 1..20: note = chemically synthesized
  source 1..20: mol_type = other DNA
gcgctaagagtgctttggtg

SEQ ID NO: 30653 - DNA, 20 bp, synthetic construct
  misc_feature 1..20: note = chemically synthesized
  source 1..20: mol_type = other DNA
agagtgctttggtggagtct

SEQ ID NO: 30654 - DNA, 20 bp, synthetic construct
  misc_feature 1..20: note = chemically synthesized
  source 1..20: mol_type = other DNA
tggtggagtcttggtttttc

SEQ ID NO: 30655 - DNA, 20 bp, synthetic construct
  misc_feature 1..20: note = chemically synthesized
  source 1..20: mol_type = other DNA
ggtggagtcttggtttttct

SEQ ID NO: 30656 - DNA, 20 bp, synthetic construct
  misc_feature 1..20: note = chemically synthesized
  source 1..20: mol_type = other DNA
aggtataaaatcatgtcatc

SEQ ID NO: 30657 - DNA, 20 bp, synthetic construct
  misc_feature 1..20: note = chemically synthesized
  source 1..20: mol_type = other DNA
ataaaatcatgtcatctgga

SEQ ID NO: 30658 - DNA, 20 bp, synthetic construct
  misc_feature 1..20: note = chemically synthesized
  source 1..20: mol_type = other DNA
aatcatgtcatctggaaaga

SEQ ID NO: 30659 - DNA, 20 bp, synthetic construct
  misc_feature 1..20: note = chemically synthesized
  source 1..20: mol_type = other DNA
atgtcatctggaaagatgga

SEQ ID NO: 30660 - DNA, 20 bp, synthetic construct
  misc_feature 1..20: note = chemically synthesized
  source 1..20: mol_type = other DNA
tctttctttctctgacctga

SEQ ID NO: 30661 - DNA, 20 bp, synthetic construct
  misc_feature 1..20: note = chemically synthesized
  source 1..20: mol_type = other DNA
tttctctgacctgaaagctg

SEQ ID NO: 30662 - DNA, 20 bp, synthetic construct
  misc_feature 1..20: note = chemically synthesized
  source 1..20: mol_type = other DNA
tctgacctgaaagctgtggc

SEQ ID NO: 30663 - DNA, 20 bp, synthetic construct
  misc_feature 1..20: note = chemically synthesized
  source 1..20: mol_type = other DNA
ctgacctgaaagctgtggct

SEQ ID NO: 30664 - DNA, 20 bp, synthetic construct
  misc_feature 1..20: note = chemically synthesized
  source 1..20: mol_type = other DNA
aaagctgtggctaggacttc

SEQ ID NO: 30665 - DNA, 20 bp, synthetic construct
  misc_feature 1..20: note = chemically synthesized
  source 1..20: mol_type = other DNA
acttccagtattatattgaa

SEQ ID NO: 30666 - DNA, 20 bp, synthetic construct
  misc_feature 1..20: note = chemically synthesized
  source 1..20: mol_type = other DNA
cttccagtattatattgaat

SEQ ID NO: 30667 - DNA, 20 bp, synthetic construct
  misc_feature 1..20: note = chemically synthesized
  source 1..20: mol_type = other DNA
tccagtattatattgaatag

SEQ ID NO: 30668 - DNA, 20 bp, synthetic construct
  misc_feature 1..20: note = chemically synthesized
  source 1..20: mol_type = other DNA
attatattgaataggagtga

SEQ ID NO: 30669 - DNA, 20 bp, synthetic construct
  misc_feature 1..20: note = chemically synthesized
  source 1..20: mol_type = other DNA
atattgaataggagtgatgg

SEQ ID NO: 30670 - DNA, 20 bp, synthetic construct
  misc_feature 1..20: note = chemically synthesized
  source 1..20: mol_type = other DNA
ttgaataggagtgatggaag

SEQ ID NO: 30671 - DNA, 20 bp, synthetic construct
  misc_feature 1..20: note = chemically synthesized
  source 1..20: mol_type = other DNA
tgaataggagtgatggaagt

SEQ ID NO: 30672 - DNA, 20 bp, synthetic construct
  misc_feature 1..20: note = chemically synthesized
  source 1..20: mol_type = other DNA
tgggcatccttattttgttt

SEQ ID NO: 30673 - DNA, 20 bp, synthetic construct
  misc_feature 1..20: note = chemically synthesized
  source 1..20: mol_type = other DNA
ccttattttgtttcagttct

SEQ ID NO: 30674 - DNA, 20 bp, synthetic construct
  misc_feature 1..20: note = chemically synthesized
  source 1..20: mol_type = other DNA
ttattttgtttcagttctta

SEQ ID NO: 30675 - DNA, 20 bp, synthetic construct
  misc_feature 1..20: note = chemically synthesized
  source 1..20: mol_type = other DNA
tattttgtttcagttcttag

SEQ ID NO: 30676 - DNA, 20 bp, synthetic construct
  misc_feature 1..20: note = chemically synthesized
  source 1..20: mol_type = other DNA
ttgtttcagttcttagagga

SEQ ID NO: 30677 - DNA, 20 bp, synthetic construct
  misc_feature 1..20: note = chemically synthesized
  source 1..20: mol_type = other DNA
tgtttcagttcttagaggaa

SEQ ID NO: 30678 - DNA, 20 bp, synthetic construct
  misc_feature 1..20: note = chemically synthesized
  source 1..20: mol_type = other DNA
gttcttagaggaaaggcttc

SEQ ID NO: 30679 - DNA, 20 bp, synthetic construct
  misc_feature 1..20: note = chemically synthesized
  source 1..20: mol_type = other DNA
gcttccagcttttcccaatt

SEQ ID NO: 30680 - DNA, 20 bp, synthetic construct
  misc_feature 1..20: note = chemically synthesized
  source 1..20: mol_type = other DNA
ttcccaattcagtatgatgt

SEQ ID NO: 30681 - DNA, 20 bp, synthetic construct
  misc_feature 1..20: note = chemically synthesized
  source 1..20: mol_type = other DNA
attcagtatgatgttagctg

SEQ ID NO: 30682 - DNA, 20 bp, synthetic construct
  misc_feature 1..20: note = chemically synthesized
  source 1..20: mol_type = other DNA
ttcagtatgatgttagctgt

SEQ ID NO: 30683 - DNA, 20 bp, synthetic construct
  misc_feature 1..20: note = chemically synthesized
  source 1..20: mol_type = other DNA
tatatgacttttattatatt

SEQ ID NO: 30684 - DNA, 20 bp, synthetic construct
  misc_feature 1..20: note = chemically synthesized
  source 1..20: mol_type = other DNA
agatatgttccttctatgat

SEQ ID NO: 30685 - DNA, 20 bp, synthetic construct
  misc_feature 1..20: note = chemically synthesized
  source 1..20: mol_type = other DNA
gttccttctatgattggctg

SEQ ID NO: 30686 - DNA, 20 bp, synthetic construct
  misc_feature 1..20: note = chemically synthesized
  source 1..20: mol_type = other DNA
cttctatgattggctgcaga

SEQ ID NO: 30687 - DNA, 20 bp, synthetic construct
  misc_feature 1..20: note = chemically synthesized
  source 1..20: mol_type = other DNA
tgcagatagtttttatcatg

SEQ ID NO: 30688 - DNA, 20 bp, synthetic construct
  misc_feature 1..20: note = chemically synthesized
  source 1..20: mol_type = other DNA
gcagatagtttttatcatga

SEQ ID NO: 30689 - DNA, 20 bp, synthetic construct
  misc_feature 1..20: note = chemically synthesized
  source 1..20: mol_type = other DNA
atactttttctgtatctatt

SEQ ID NO: 30690 - DNA, 20 bp, synthetic construct
  misc_feature 1..20: note = chemically synthesized
  source 1..20: mol_type = other DNA
tatctattgagatgatcata

SEQ ID NO: 30691 - DNA, 20 bp, synthetic construct
  misc_feature 1..20: note = chemically synthesized
  source 1..20: mol_type = other DNA
ttgaactgttcttgcaaccc

SEQ ID NO: 30692 - DNA, 20 bp, synthetic construct
  misc_feature 1..20: note = chemically synthesized
  source 1..20: mol_type = other DNA
gtataaatcccacttgatca

SEQ ID NO: 30693 - DNA, 20 bp, synthetic construct
  misc_feature 1..20: note = chemically synthesized
  source 1..20: mol_type = other DNA
gatcatggtgtattatcttt

SEQ ID NO: 30694 - DNA, 20 bp, synthetic construct
  misc_feature 1..20: note = chemically synthesized
  source 1..20: mol_type = other DNA
ttatcttttggatgtactgt

SEQ ID NO: 30695 - DNA, 20 bp, synthetic construct
  misc_feature 1..20: note = chemically synthesized
  source 1..20: mol_type = other DNA
tttggatgtactgttggatt

SEQ ID NO: 30696 - DNA, 20 bp, synthetic construct
  misc_feature 1..20: note = chemically synthesized
  source 1..20: mol_type = other DNA
tactgttggattcagtttgc

SEQ ID NO: 30697 - DNA, 20 bp, synthetic construct
  misc_feature 1..20: note = chemically synthesized
  source 1..20: mol_type = other DNA
cagtttgctagtattttgtt

SEQ ID NO: 30698 - DNA, 20 bp, synthetic construct
  misc_feature 1..20: note = chemically synthesized
  source 1..20: mol_type = other DNA
agtttgctagtattttgttg

SEQ ID NO: 30699 - DNA, 20 bp, synthetic construct
  misc_feature 1..20: note = chemically synthesized
  source 1..20: mol_type = other DNA
ttttcacacctatgttccat

SEQ ID NO: 30700 - DNA, 20 bp, synthetic construct
  misc_feature 1..20: note = chemically synthesized
  source 1..20: mol_type = other DNA
tttcacacctatgttccatc

SEQ ID NO: 30701 - DNA, 20 bp, synthetic construct
  misc_feature 1..20: note = chemically synthesized
  source 1..20: mol_type = other DNA
ttcacacctatgttccatca

SEQ ID NO: 30702 - DNA, 20 bp, synthetic construct
  misc_feature 1..20: note = chemically synthesized
  source 1..20: mol_type = other DNA
ccatcagggatattgacctg

SEQ ID NO: 30703 - DNA, 20 bp, synthetic construct
  misc_feature 1..20: note = chemically synthesized
  source 1..20: mol_type = other DNA
tttttacttgcatccttgtc

SEQ ID NO: 30704 - DNA, 20 bp, synthetic construct
  misc_feature 1..20: note = chemically synthesized
  source 1..20: mol_type = other DNA
cttgcatccttgtctggtta

SEQ ID NO: 30705 - DNA, 20 bp, synthetic construct
  misc_feature 1..20: note = chemically synthesized
  source 1..20: mol_type = other DNA
tccttgtctggttatggaat

SEQ ID NO: 30706 - DNA, 20 bp, synthetic construct
  misc_feature 1..20: note = chemically synthesized
  source 1..20: mol_type = other DNA
ccttgtctggttatggaatc

SEQ ID NO: 30707 - DNA, 20 bp, synthetic construct
  misc_feature 1..20: note = chemically synthesized
  source 1..20: mol_type = other DNA
ttatggaatcaggataatac

SEQ ID NO: 30708 - DNA, 20 bp, synthetic construct
  misc_feature 1..20: note = chemically synthesized
  source 1..20: mol_type = other DNA
aatcaggataatactggcct

SEQ ID NO: 30709 - DNA, 20 bp, synthetic construct
  misc_feature 1..20: note = chemically synthesized
  source 1..20: mol_type = other DNA
tcaggataatactggcctca

SEQ ID NO: 30710 - DNA, 20 bp, synthetic construct
  misc_feature 1..20: note = chemically synthesized
  source 1..20: mol_type = other DNA
taatactggcctcagagaat

SEQ ID NO: 30711 - DNA, 20 bp, synthetic construct
  misc_feature 1..20: note = chemically synthesized
  source 1..20: mol_type = other DNA
actggcctcagagaatgagt

SEQ ID NO: 30712 - DNA, 20 bp, synthetic construct
  misc_feature 1..20: note = chemically synthesized
  source 1..20: mol_type = other DNA
ctggcctcagagaatgagtt

SEQ ID NO: 30713 - DNA, 20 bp, synthetic construct
  misc_feature 1..20: note = chemically synthesized
  source 1..20: mol_type = other DNA
tggcctcagagaatgagtta

SEQ ID NO: 30714 - DNA, 20 bp, synthetic construct
  misc_feature 1..20: note = chemically synthesized
  source 1..20: mol_type = other DNA
gcctcagagaatgagttagg

SEQ ID NO: 30715 - DNA, 20 bp, synthetic construct
  misc_feature 1..20: note = chemically synthesized
  source 1..20: mol_type = other DNA
ccttcctgtttaatttttaa

SEQ ID NO: 30716 - DNA, 20 bp, synthetic construct
  misc_feature 1..20: note = chemically synthesized
  source 1..20: mol_type = other DNA
tttaatttttaaaagaattt

SEQ ID NO: 30717 - DNA, 20 bp, synthetic construct
  misc_feature 1..20: note = chemically synthesized
  source 1..20: mol_type = other DNA
ttaatttttaaaagaattta

SEQ ID NO: 30718 - DNA, 20 bp, synthetic construct
  misc_feature 1..20: note = chemically synthesized
  source 1..20: mol_type = other DNA
aatttttaaaagaatttaag

SEQ ID NO: 30719 - DNA, 20 bp, synthetic construct
  misc_feature 1..20: note = chemically synthesized
  source 1..20: mol_type = other DNA
aagaatttaaggagacttgt

SEQ ID NO: 30720 - DNA, 20 bp, synthetic construct
  misc_feature 1..20: note = chemically synthesized
  source 1..20: mol_type = other DNA
gacttgttagttttctttga

SEQ ID NO: 30721 - DNA, 20 bp, synthetic construct
  misc_feature 1..20: note = chemically synthesized
  source 1..20: mol_type = other DNA
gttagttttctttgaaagtt

SEQ ID NO: 30722 - DNA, 20 bp, synthetic construct
  misc_feature 1..20: note = chemically synthesized
  source 1..20: mol_type = other DNA
gaaagtttggtaaaatttga

SEQ ID NO: 30723 - DNA, 20 bp, synthetic construct
  misc_feature 1..20: note = chemically synthesized
  source 1..20: mol_type = other DNA
tttggtaaaatttgacagta

SEQ ID NO: 30724 - DNA, 20 bp, synthetic construct
  misc_feature 1..20: note = chemically synthesized
  source 1..20: mol_type = other DNA
aatttgacagtaaagccatc

SEQ ID NO: 30725 - DNA, 20 bp, synthetic construct
  misc_feature 1..20: note = chemically synthesized
  source 1..20: mol_type = other DNA
ggtcttgaaattttcttttt

SEQ ID NO: 30726 - DNA, 20 bp, synthetic construct
  misc_feature 1..20: note = chemically synthesized
  source 1..20: mol_type = other DNA
gtcttgaaattttctttttt

SEQ ID NO: 30727 - DNA, 20 bp, synthetic construct
  misc_feature 1..20: note = chemically synthesized
  source 1..20: mol_type = other DNA
cttgaaattttcttttttgg

SEQ ID NO: 30728 - DNA, 20 bp, synthetic construct
  misc_feature 1..20: note = chemically synthesized
  source 1..20: mol_type = other DNA
tcaatttcattattcattac

SEQ ID NO: 30729 - DNA, 20 bp, synthetic construct
  misc_feature 1..20: note = chemically synthesized
  source 1..20: mol_type = other DNA
ttattcattactggtctgtt

SEQ ID NO: 30730 - DNA, 20 bp, synthetic construct
  misc_feature 1..20: note = chemically synthesized
  source 1..20: mol_type = other DNA
tattcattactggtctgttc

SEQ ID NO: 30731 - DNA, 20 bp, synthetic construct
  misc_feature 1..20: note = chemically synthesized
  source 1..20: mol_type = other DNA
attctttcttaattcaatct

SEQ ID NO: 30732 - DNA, 20 bp, synthetic construct
  misc_feature 1..20: note = chemically synthesized
  source 1..20: mol_type = other DNA
ctttcttaattcaatcttgg

SEQ ID NO: 30733 - DNA, 20 bp, synthetic construct
  misc_feature 1..20: note = chemically synthesized
  source 1..20: mol_type = other DNA
tttcttaattcaatcttggt

SEQ ID NO: 30734 - DNA, 20 bp, synthetic construct
  misc_feature 1..20: note = chemically synthesized
  source 1..20: mol_type = other DNA
cttaattcaatcttggtagg

SEQ ID NO: 30735 - DNA, 20 bp, synthetic construct
  misc_feature 1..20: note = chemically synthesized
  source 1..20: mol_type = other DNA
cttggtaggtggtatgtgtc

SEQ ID NO: 30736 - DNA, 20 bp, synthetic construct
  misc_feature 1..20: note = chemically synthesized
  source 1..20: mol_type = other DNA
agaaatttattaatttcctc

SEQ ID NO: 30737 - DNA, 20 bp, synthetic construct
  misc_feature 1..20: note = chemically synthesized
  source 1..20: mol_type = other DNA
ttaatttcctctagattttt

SEQ ID NO: 30738 - DNA, 20 bp, synthetic construct
  misc_feature 1..20: note = chemically synthesized
  source 1..20: mol_type = other DNA
ctctagatttttcagttttt

SEQ ID NO: 30739 - DNA, 20 bp, synthetic construct
  misc_feature 1..20: note = chemically synthesized
  source 1..20: mol_type = other DNA
tttttcagttttttagtgta

SEQ ID NO: 30740 - DNA, 20 bp, synthetic construct
  misc_feature 1..20: note = chemically synthesized
  source 1..20: mol_type = other DNA
tagtgtatggttgttcataa

SEQ ID NO: 30741 - DNA, 20 bp, synthetic construct
  misc_feature 1..20: note = chemically synthesized
  source 1..20: mol_type = other DNA
gataatcttttctatttctg

SEQ ID NO: 30742 - DNA, 20 bp, synthetic construct
  misc_feature 1..20: note = chemically synthesized
  source 1..20: mol_type = other DNA
cttttctatttctgtggtat

SEQ ID NO: 30743 - DNA, 20 bp, synthetic construct
  misc_feature 1..20: note = chemically synthesized
  source 1..20: mol_type = other DNA
atttctgattttctttattt

SEQ ID NO: 30744 - DNA, 20 bp, synthetic construct
  misc_feature 1..20: note = chemically synthesized
  source 1..20: mol_type = other DNA
tcagtctcttctctttttct

SEQ ID NO: 30745 - DNA, 20 bp, synthetic construct
  misc_feature 1..20: note = chemically synthesized
  source 1..20: mol_type = other DNA
tctcttctctttttcttggt

SEQ ID NO: 30746 - DNA, 20 bp, synthetic construct
  misc_feature 1..20: note = chemically synthesized
  source 1..20: mol_type = other DNA
tctctttttcttggttagtc

SEQ ID NO: 30747 - DNA, 20 bp, synthetic construct
  misc_feature 1..20: note = chemically synthesized
  source 1..20: mol_type = other DNA
tttttcttggttagtctagc

SEQ ID NO: 30748 - DNA, 20 bp, synthetic construct
  misc_feature 1..20: note = chemically synthesized
  source 1..20: mol_type = other DNA
tttcttggttagtctagcta

SEQ ID NO: 30749 - DNA, 20 bp, synthetic construct
  misc_feature 1..20: note = chemically synthesized
  source 1..20: mol_type = other DNA
ttgtttttctctatttcatt

SEQ ID NO: 30750 - DNA, 20 bp, synthetic construct
  misc_feature 1..20: note = chemically synthesized
  source 1..20: mol_type = other DNA
cattttttctttccttctgc

SEQ ID NO: 30751 - DNA, 20 bp, synthetic construct
  misc_feature 1..20: note = chemically synthesized
  source 1..20: mol_type = other DNA
ttctttccttctgctagttt

SEQ ID NO: 30752 - DNA, 20 bp, synthetic construct
  misc_feature 1..20: note = chemically synthesized
  source 1..20: mol_type = other DNA
tctttccttctgctagtttt

SEQ ID NO: 30753 - DNA, 20 bp, synthetic construct
  misc_feature 1..20: note = chemically synthesized
  source 1..20: mol_type = other DNA
gggttttgttcttgcttttc

SEQ ID NO: 30754 - DNA, 20 bp, synthetic construct
  misc_feature 1..20: note = chemically synthesized
  source 1..20: mol_type = other DNA
tcttgcttttctagcttgtt

SEQ ID NO: 30755 - DNA, 20 bp, synthetic construct
  misc_feature 1..20: note = chemically synthesized
  source 1..20: mol_type = other DNA
cttgcttttctagcttgttg

SEQ ID NO: 30756 - DNA, 20 bp, synthetic construct
  misc_feature 1..20: note = chemically synthesized
  source 1..20: mol_type = other DNA
agcttgttgaggtacatgat

SEQ ID NO: 30757 - DNA, 20 bp, synthetic construct
  misc_feature 1..20: note = chemically synthesized
  source 1..20: mol_type = other DNA
tctttctatgtttttaattt

SEQ ID NO: 30758 - DNA, 20 bp, synthetic construct
  misc_feature 1..20: note = chemically synthesized
  source 1..20: mol_type = other DNA
taatttaagtgtttattgat

SEQ ID NO: 30759 - DNA, 20 bp, synthetic construct
  misc_feature 1..20: note = chemically synthesized
  source 1..20: mol_type = other DNA
ttattgataagcttctctct

SEQ ID NO: 30760 - DNA, 20 bp, synthetic construct
  misc_feature 1..20: note = chemically synthesized
  source 1..20: mol_type = other DNA
actgcttttgctgtatccca

SEQ ID NO: 30761 - DNA, 20 bp, synthetic construct
  misc_feature 1..20: note = chemically synthesized
  source 1..20: mol_type = other DNA
ttcttgacataacgttcatt

SEQ ID NO: 30762 - DNA, 20 bp, synthetic construct
  misc_feature 1..20: note = chemically synthesized
  source 1..20: mol_type = other DNA
tcttgacataacgttcattc

SEQ ID NO: 30763 - DNA, 20 bp, synthetic construct
  misc_feature 1..20: note = chemically synthesized
  source 1..20: mol_type = other DNA
ttgacataacgttcattcag

SEQ ID NO: 30764 - DNA, 20 bp, synthetic construct
  misc_feature 1..20: note = chemically synthesized
  source 1..20: mol_type = other DNA
ttaatttccatgtatttgta

SEQ ID NO: 30765 - DNA, 20 bp, synthetic construct
  misc_feature 1..20: note = chemically synthesized
  source 1..20: mol_type = other DNA
taatttccatgtatttgtat

SEQ ID NO: 30766 - DNA, 20 bp, synthetic construct
  misc_feature 1..20: note = chemically synthesized
  source 1..20: mol_type = other DNA
atgtatttgtataggtttta

SEQ ID NO: 30767 - DNA, 20 bp, synthetic construct
  misc_feature 1..20: note = chemically synthesized
  source 1..20: mol_type = other DNA
tttttcttgttattgatttc

SEQ ID NO: 30768 - DNA, 20 bp, synthetic construct
  misc_feature 1..20: note = chemically synthesized
  source 1..20: mol_type = other DNA
tttctagttttattccattg

SEQ ID NO: 30769 - DNA, 20 bp, synthetic construct
  misc_feature 1..20: note = chemically synthesized
  source 1..20: mol_type = other DNA
gttttattccattgtggtct

SEQ ID NO: 30770 - DNA, 20 bp, synthetic construct
  misc_feature 1..20: note = chemically synthesized
  source 1..20: mol_type = other DNA
ttattccattgtggtctgag

SEQ ID NO: 30771 - DNA, 20 bp, synthetic construct
  misc_feature 1..20: note = chemically synthesized
  source 1..20: mol_type = other DNA
tgatttcaaatatttcaaat

SEQ ID NO: 30772 - DNA, 20 bp, synthetic construct
  misc_feature 1..20: note = chemically synthesized
  source 1..20: mol_type = other DNA
tcaaatatttcaaattagtt

SEQ ID NO: 30773 - DNA, 20 bp, synthetic construct
  misc_feature 1..20: note = chemically synthesized
  source 1..20: mol_type = other DNA
ttcttttgtgttctaacata

SEQ ID NO: 30774 - DNA, 20 bp, synthetic construct
  misc_feature 1..20: note = chemically synthesized
  source 1..20: mol_type = other DNA
ttctaacatatggtgtatcc

SEQ ID NO: 30775 - DNA, 20 bp, synthetic construct
  misc_feature 1..20: note = chemically synthesized
  source 1..20: mol_type = other DNA
tctaacatatggtgtatcct

SEQ ID NO: 30776 - DNA, 20 bp, synthetic construct
  misc_feature 1..20: note = chemically synthesized
  source 1..20: mol_type = other DNA
ctaacatatggtgtatcctg

SEQ ID NO: 30777 - DNA, 20 bp, synthetic construct
  misc_feature 1..20: note = chemically synthesized
  source 1..20: mol_type = other DNA
ggaatgcgtcatgtgctgat

SEQ ID NO: 30778 - DNA, 20 bp, synthetic construct
  misc_feature 1..20: note = chemically synthesized
  source 1..20: mol_type = other DNA
gatgagataaatatattctg

SEQ ID NO: 30779 - DNA, 20 bp, synthetic construct
  misc_feature 1..20: note = chemically synthesized
  source 1..20: mol_type = other DNA
taaatatattctgtagctgt

SEQ ID NO: 30780 - DNA, 20 bp, synthetic construct
  misc_feature 1..20: note = chemically synthesized
  source 1..20: mol_type = other DNA
atgaaatattgtgtaaatgt

SEQ ID NO: 30781 - DNA, 20 bp, synthetic construct
  misc_feature 1..20: note = chemically synthesized
  source 1..20: mol_type = other DNA
gtgtaaatgttagatccatt

SEQ ID NO: 30782 - DNA, 20 bp, synthetic construct
  misc_feature 1..20: note = chemically synthesized
  source 1..20: mol_type = other DNA
tgttagatccatttggtcta

SEQ ID NO: 30783 - DNA, 20 bp, synthetic construct
  misc_feature 1..20: note = chemically synthesized
  source 1..20: mol_type = other DNA
gatccatttggtctaaagtc

SEQ ID NO: 30784 - DNA, 20 bp, synthetic construct
  misc_feature 1..20: note = chemically synthesized
  source 1..20: mol_type = other DNA
ttctttgttaattttctgtc

SEQ ID NO: 30785 - DNA, 20 bp, synthetic construct
  misc_feature 1..20: note = chemically synthesized
  source 1..20: mol_type = other DNA
tagatgatctatctgatgct

SEQ ID NO: 30786 - DNA, 20 bp, synthetic construct
  misc_feature 1..20: note = chemically synthesized
  source 1..20: mol_type = other DNA
gatctatctgatgctgagat

SEQ ID NO: 30787 - DNA, 20 bp, synthetic construct
  misc_feature 1..20: note = chemically synthesized
  source 1..20: mol_type = other DNA
atccccaactattattgtat

SEQ ID NO: 30788 - DNA, 20 bp, synthetic construct
  misc_feature 1..20: note = chemically synthesized
  source 1..20: mol_type = other DNA
taacatttgctttacatatc

SEQ ID NO: 30789 - DNA, 20 bp, synthetic construct
  misc_feature 1..20: note = chemically synthesized
  source 1..20: mol_type = other DNA
ctttacatatctggatgctc

SEQ ID NO: 30790 - DNA, 20 bp, synthetic construct
  misc_feature 1..20: note = chemically synthesized
  source 1..20: mol_type = other DNA
tatctggatgctctggtgtt

SEQ ID NO: 30791 - DNA, 20 bp, synthetic construct
  misc_feature 1..20: note = chemically synthesized
  source 1..20: mol_type = other DNA
tggtgttgagtgtgaatgtt

SEQ ID NO: 30792 - DNA, 20 bp, synthetic construct
  misc_feature 1..20: note = chemically synthesized
  source 1..20: mol_type = other DNA
atgtaatgacttttgtctct

SEQ ID NO: 30793 - DNA, 20 bp, synthetic construct
  misc_feature 1..20: note = chemically synthesized
  source 1..20: mol_type = other DNA
ctcttagtgttttttattta

SEQ ID NO: 30794 - DNA, 20 bp, synthetic construct
  misc_feature 1..20: note = chemically synthesized
  source 1..20: mol_type = other DNA
aaagtcaattttatctgtta

SEQ ID NO: 30795 - DNA, 20 bp, synthetic construct
  misc_feature 1..20: note = chemically synthesized
  source 1..20: mol_type = other DNA
aagtcaattttatctgttat

SEQ ID NO: 30796 - DNA, 20 bp, synthetic construct
  misc_feature 1..20: note = chemically synthesized
  source 1..20: mol_type = other DNA
taactacttttgctcatttt

SEQ ID NO: 30797 - DNA, 20 bp, synthetic construct
  misc_feature 1..20: note = chemically synthesized
  source 1..20: mol_type = other DNA
atttttggtttctctttgta

SEQ ID NO: 30798 - DNA, 20 bp, synthetic construct
  misc_feature 1..20: note = chemically synthesized
  source 1..20: mol_type = other DNA
tttggtttctctttgtatgg

SEQ ID NO: 30799 - DNA, 20 bp, synthetic construct
  misc_feature 1..20: note = chemically synthesized
  source 1..20: mol_type = other DNA
atctttcatctttttacttt

SEQ ID NO: 30800 - DNA, 20 bp, synthetic construct
  misc_feature 1..20: note = chemically synthesized
  source 1..20: mol_type = other DNA
cagtctatatttatctttac

SEQ ID NO: 30801 - DNA, 20 bp, synthetic construct
  misc_feature 1..20: note = chemically synthesized
  source 1..20: mol_type = other DNA
ctatatttatctttacaagt

SEQ ID NO: 30802 - DNA, 20 bp, synthetic construct
  misc_feature 1..20: note = chemically synthesized
  source 1..20: mol_type = other DNA
tttatctttacaagtgagat

SEQ ID NO: 30803 - DNA, 20 bp, synthetic construct
  misc_feature 1..20: note = chemically synthesized
  source 1..20: mol_type = other DNA
caagtgagataagtttctta

SEQ ID NO: 30804 - DNA, 20 bp, synthetic construct
  misc_feature 1..20: note = chemically synthesized
  source 1..20: mol_type = other DNA
aagtgagataagtttcttat

SEQ ID NO: 30805 - DNA, 20 bp, synthetic construct
  misc_feature 1..20: note = chemically synthesized
  source 1..20: mol_type = other DNA
tgagataagtttcttatagg

SEQ ID NO: 30806 - DNA, 20 bp, synthetic construct
  misc_feature 1..20: note = chemically synthesized
  source 1..20: mol_type = other DNA
tcttataggcagcttacaac

SEQ ID NO: 30807 - DNA, 20 bp, synthetic construct
  misc_feature 1..20: note = chemically synthesized
  source 1..20: mol_type = other DNA
cttataggcagcttacaact

SEQ ID NO: 30808 - DNA, 20 bp, synthetic construct
  misc_feature 1..20: note = chemically synthesized
  source 1..20: mol_type = other DNA
atttttgttttaaatctatt

SEQ ID NO: 30809 - DNA, 20 bp, synthetic construct
  misc_feature 1..20: note = chemically synthesized
  source 1..20: mol_type = other DNA
ttgttttaaatctatttagc

SEQ ID NO: 30810 - DNA, 20 bp, synthetic construct
  misc_feature 1..20: note = chemically synthesized
  source 1..20: mol_type = other DNA
ttagccagtctatatctttc

SEQ ID NO: 30811 - DNA, 20 bp, synthetic construct
  misc_feature 1..20: note = chemically synthesized
  source 1..20: mol_type = other DNA
aatttaatccatttacatgc

SEQ ID NO: 30812 - DNA, 20 bp, synthetic construct
  misc_feature 1..20: note = chemically synthesized
  source 1..20: mol_type = other DNA
atttaatccatttacatgca

SEQ ID NO: 30813 - DNA, 20 bp, synthetic construct
  misc_feature 1..20: note = chemically synthesized
  source 1..20: mol_type = other DNA
caaggctattattgacatgt

SEQ ID NO: 30814 - DNA, 20 bp, synthetic construct
  misc_feature 1..20: note = chemically synthesized
  source 1..20: mol_type = other DNA
aggctattattgacatgtga

SEQ ID NO: 30815 - DNA, 20 bp, synthetic construct
  misc_feature 1..20: note = chemically synthesized
  source 1..20: mol_type = other DNA
ccattttgttaattgattcc

SEQ ID NO: 30816 - DNA, 20 bp, synthetic construct
  misc_feature 1..20: note = chemically synthesized
  source 1..20: mol_type = other DNA
tggttgttttgttttttttt

SEQ ID NO: 30817 - DNA, 20 bp, synthetic construct
  misc_feature 1..20: note = chemically synthesized
  source 1..20: mol_type = other DNA
tttcttattatttatgattg

SEQ ID NO: 30818 - DNA, 20 bp, synthetic construct
  misc_feature 1..20: note = chemically synthesized
  source 1..20: mol_type = other DNA
tattatttatgattgtggtt

SEQ ID NO: 30819 - DNA, 20 bp, synthetic construct
  misc_feature 1..20: note = chemically synthesized
  source 1..20: mol_type = other DNA
tgtggtttggtgattttctg

SEQ ID NO: 30820 - DNA, 20 bp, synthetic construct
  misc_feature 1..20: note = chemically synthesized
  source 1..20: mol_type = other DNA
ggtttggtgattttctgtag

SEQ ID NO: 30821 - DNA, 20 bp, synthetic construct
  misc_feature 1..20: note = chemically synthesized
  source 1..20: mol_type = other DNA
tttctgtagtggtaacgttt

SEQ ID NO: 30822 - DNA, 20 bp, synthetic construct
  misc_feature 1..20: note = chemically synthesized
  source 1..20: mol_type = other DNA
ttatttgtgttttgctctac

SEQ ID NO: 30823 - DNA, 20 bp, synthetic construct
  misc_feature 1..20: note = chemically synthesized
  source 1..20: mol_type = other DNA
ttgtgttttgctctaccagt

SEQ ID NO: 30824 - DNA, 20 bp, synthetic construct
  misc_feature 1..20: note = chemically synthesized
  source 1..20: mol_type = other DNA
acctttgtgtgtcttcataa

SEQ ID NO: 30825 - DNA, 20 bp, synthetic construct
  misc_feature 1..20: note = chemically synthesized
  source 1..20: mol_type = other DNA
tttgtgtgtcttcataatgg

SEQ ID NO: 30826 - DNA, 20 bp, synthetic construct
  misc_feature 1..20: note = chemically synthesized
  source 1..20: mol_type = other DNA
tgtcctgtcactttcatgtg

SEQ ID NO: 30827 - DNA, 20 bp, synthetic construct
  misc_feature 1..20: note = chemically synthesized
  source 1..20: mol_type = other DNA
gtcctgtcactttcatgtgt

SEQ ID NO: 30828 - DNA, 20 bp, synthetic construct
  misc_feature 1..20: note = chemically synthesized
  source 1..20: mol_type = other DNA
tcccttaaatatttcttgta

SEQ ID NO: 30829 - DNA, 20 bp, synthetic construct
  misc_feature 1..20: note = chemically synthesized
  source 1..20: mol_type = other DNA
ttaaatatttcttgtaaagc

SEQ ID NO: 30830 - DNA, 20 bp, synthetic construct
  misc_feature 1..20: note = chemically synthesized
  source 1..20: mol_type = other DNA
tatttcttgtaaagccagtc

SEQ ID NO: 30831 - DNA, 20 bp, synthetic construct
  misc_feature 1..20: note = chemically synthesized
  source 1..20: mol_type = other DNA
ttgtaaagccagtctagtga

SEQ ID NO: 30832 - DNA, 20 bp, synthetic construct
  misc_feature 1..20: note = chemically synthesized
  source 1..20: mol_type = other DNA
tccttcaaatttttcttgcc

SEQ ID NO: 30833 - DNA, 20 bp, synthetic construct
  misc_feature 1..20: note = chemically synthesized
  source 1..20: mol_type = other DNA
caaatttttcttgcccagaa

SEQ ID NO: 30834 - DNA, 20 bp, synthetic construct
  misc_feature 1..20: note = chemically synthesized
  source 1..20: mol_type = other DNA
ttatttatccttcatttttg

SEQ ID NO: 30835 - DNA, 20 bp, synthetic construct
  misc_feature 1..20: note = chemically synthesized
  source 1..20: mol_type = other DNA
tttttgaagaacaatgttgc

SEQ ID NO: 30836 - DNA, 20 bp, synthetic construct
  misc_feature 1..20: note = chemically synthesized
  source 1..20: mol_type = other DNA
ttttgaagaacaatgttgct

SEQ ID NO: 30837 - DNA, 20 bp, synthetic construct
  misc_feature 1..20: note = chemically synthesized
  source 1..20: mol_type = other DNA
gttgctgggtataacatcct

SEQ ID NO: 30838 - DNA, 20 bp, synthetic construct
  misc_feature 1..20: note = chemically synthesized
  source 1..20: mol_type = other DNA
tatatcatcccatcttctcc

SEQ ID NO: 30839 - DNA, 20 bp, synthetic construct
  misc_feature 1..20: note = chemically synthesized
  source 1..20: mol_type = other DNA
cccatcttctcctggcctgt

SEQ ID NO: 30840 - DNA, 20 bp, synthetic construct
  misc_feature 1..20: note = chemically synthesized
  source 1..20: mol_type = other DNA
ccatcttctcctggcctgtg

SEQ ID NO: 30841 - DNA, 20 bp, synthetic construct
  misc_feature 1..20: note = chemically synthesized
  source 1..20: mol_type = other DNA
tggcctgtgaggtttctgct

SEQ ID NO: 30842 - DNA, 20 bp, synthetic construct
  misc_feature 1..20: note = chemically synthesized
  source 1..20: mol_type = other DNA
ctgttaatctgttaatcttg

SEQ ID NO: 30843 - DNA, 20 bp, synthetic construct
  misc_feature 1..20: note = chemically synthesized
  source 1..20: mol_type = other DNA
ttaatctgttaatcttgtgg

SEQ ID NO: 30844 - DNA, 20 bp, synthetic construct
  misc_feature 1..20: note = chemically synthesized
  source 1..20: mol_type = other DNA
tcttgtggaagttcccttat

SEQ ID NO: 30845 - DNA, 20 bp, synthetic construct
  misc_feature 1..20: note = chemically synthesized
  source 1..20: mol_type = other DNA
gaagttcccttataagtgac

SEQ ID NO: 30846 - DNA, 20 bp, synthetic construct
  misc_feature 1..20: note = chemically synthesized
  source 1..20: mol_type = other DNA
agacattttgcttgctgttt

SEQ ID NO: 30847 - DNA, 20 bp, synthetic construct
  misc_feature 1..20: note = chemically synthesized
  source 1..20: mol_type = other DNA
acattttgcttgctgtttta

SEQ ID NO: 30848 - DNA, 20 bp, synthetic construct
  misc_feature 1..20: note = chemically synthesized
  source 1..20: mol_type = other DNA
gttttagagttcttactctt

SEQ ID NO: 30849 - DNA, 20 bp, synthetic construct
  misc_feature 1..20: note = chemically synthesized
  source 1..20: mol_type = other DNA
tcttactctttggcttttga

SEQ ID NO: 30850 - DNA, 20 bp, synthetic construct
  misc_feature 1..20: note = chemically synthesized
  source 1..20: mol_type = other DNA
agtttgactataatgtgctg

SEQ ID NO: 30851 - DNA, 20 bp, synthetic construct
  misc_feature 1..20: note = chemically synthesized
  source 1..20: mol_type = other DNA
tttgactataatgtgctgtg

SEQ ID NO: 30852 - DNA, 20 bp, synthetic construct
  misc_feature 1..20: note = chemically synthesized
  source 1..20: mol_type = other DNA
gactataatgtgctgtggag

SEQ ID NO: 30853 - DNA, 20 bp, synthetic construct
  misc_feature 1..20: note = chemically synthesized
  source 1..20: mol_type = other DNA
ctataatgtgctgtggagaa

SEQ ID NO: 30854 - DNA, 20 bp, synthetic construct
  misc_feature 1..20: note = chemically synthesized
  source 1..20: mol_type = other DNA
gctttttgcattatattatt

SEQ ID NO: 30855 - DNA, 20 bp, synthetic construct
  misc_feature 1..20: note = chemically synthesized
  source 1..20: mol_type = other DNA
ctttttgcattatattattt

SEQ ID NO: 30856 - DNA, 20 bp, synthetic construct
  misc_feature 1..20: note = chemically synthesized
  source 1..20: mol_type = other DNA
atttctgattttcatttgtc

SEQ ID NO: 30857 - DNA, 20 bp, synthetic construct
  misc_feature 1..20: note = chemically synthesized
  source 1..20: mol_type = other DNA
tggatgtctacatttcttgc

SEQ ID NO: 30858 - DNA, 20 bp, synthetic construct
  misc_feature 1..20: note = chemically synthesized
  source 1..20: mol_type = other DNA
catttcttgctagacttgac

SEQ ID NO: 30859 - DNA, 20 bp, synthetic construct
  misc_feature 1..20: note = chemically synthesized
  source 1..20: mol_type = other DNA
tgctagacttgacaagtttt

SEQ ID NO: 30860 - DNA, 20 bp, synthetic construct
  misc_feature 1..20: note = chemically synthesized
  source 1..20: mol_type = other DNA
tcagctattgtgttgttacg

SEQ ID NO: 30861 - DNA, 20 bp, synthetic construct
  misc_feature 1..20: note = chemically synthesized
  source 1..20: mol_type = other DNA
cagctattgtgttgttacgt

SEQ ID NO: 30862 - DNA, 20 bp, synthetic construct
  misc_feature 1..20: note = chemically synthesized
  source 1..20: mol_type = other DNA
ttcatgttctctttaccttc

SEQ ID NO: 30863 - DNA, 20 bp, synthetic construct
  misc_feature 1..20: note = chemically synthesized
  source 1..20: mol_type = other DNA
tcatgttctctttaccttct

SEQ ID NO: 30864 - DNA, 20 bp, synthetic construct
  misc_feature 1..20: note = chemically synthesized
  source 1..20: mol_type = other DNA
ttgaatatttgttcacttta

SEQ ID NO: 30865 - DNA, 20 bp, synthetic construct
  misc_feature 1..20: note = chemically synthesized
  source 1..20: mol_type = other DNA
tttcctttctatcatttgac

SEQ ID NO: 30866 - DNA, 20 bp, synthetic construct
  misc_feature 1..20: note = chemically synthesized
  source 1..20: mol_type = other DNA
atttgaccagctaattttaa

SEQ ID NO: 30867 - DNA, 20 bp, synthetic construct
  misc_feature 1..20: note = chemically synthesized
  source 1..20: mol_type = other DNA
attttaaaagacctgtcttc

SEQ ID NO: 30868 - DNA, 20 bp, synthetic construct
  misc_feature 1..20: note = chemically synthesized
  source 1..20: mol_type = other DNA
cttgatctgatctattgttg

SEQ ID NO: 30869 - DNA, 20 bp, synthetic construct
  misc_feature 1..20: note = chemically synthesized
  source 1..20: mol_type = other DNA
atttctttcaataaactctt

SEQ ID NO: 30870 - DNA, 20 bp, synthetic construct
  misc_feature 1..20: note = chemically synthesized
  source 1..20: mol_type = other DNA
ttcaataaactcttcagtta

SEQ ID NO: 30871 - DNA, 20 bp, synthetic construct
  misc_feature 1..20: note = chemically synthesized
  source 1..20: mol_type = other DNA
tcagttacagaatttctgtt

SEQ ID NO: 30872 - DNA, 20 bp, synthetic construct
  misc_feature 1..20: note = chemically synthesized
  source 1..20: mol_type = other DNA
ttcttgttgtatctatctct

SEQ ID NO: 30873 - DNA, 20 bp, synthetic construct
  misc_feature 1..20: note = chemically synthesized
  source 1..20: mol_type = other DNA
tcttgttgtatctatctctt

SEQ ID NO: 30874 - DNA, 20 bp, synthetic construct
  misc_feature 1..20: note = chemically synthesized
  source 1..20: mol_type = other DNA
tttctttttattgtttatct

SEQ ID NO: 30875 - DNA, 20 bp, synthetic construct
  misc_feature 1..20: note = chemically synthesized
  source 1..20: mol_type = other DNA
gagttctcttgtgtctcact

SEQ ID NO: 30876 - DNA, 20 bp, synthetic construct
  misc_feature 1..20: note = chemically synthesized
  source 1..20: mol_type = other DNA
cttccttaatatcaacattt

SEQ ID NO: 30877 - DNA, 20 bp, synthetic construct
  misc_feature 1..20: note = chemically synthesized
  source 1..20: mol_type = other DNA
acattttggattcttttttc

SEQ ID NO: 30878 - DNA, 20 bp, synthetic construct
  misc_feature 1..20: note = chemically synthesized
  source 1..20: mol_type = other DNA
taaatgtcttttttttccac

SEQ ID NO: 30879 - DNA, 20 bp, synthetic construct
  misc_feature 1..20: note = chemically synthesized
  source 1..20: mol_type = other DNA
tccactggcttatgttgctg

SEQ ID NO: 30880 - DNA, 20 bp, synthetic construct
  misc_feature 1..20: note = chemically synthesized
  source 1..20: mol_type = other DNA
gaagaattattaaattcctt

SEQ ID NO: 30881 - DNA, 20 bp, synthetic construct
  misc_feature 1..20: note = chemically synthesized
  source 1..20: mol_type = other DNA
gaattattaaattcctttgg

SEQ ID NO: 30882 - DNA, 20 bp, synthetic construct
  misc_feature 1..20: note = chemically synthesized
  source 1..20: mol_type = other DNA
tgcattgatatctctgcatc

SEQ ID NO: 30883 - DNA, 20 bp, synthetic construct
  misc_feature 1..20: note = chemically synthesized
  source 1..20: mol_type = other DNA
ggtgtaatgattgctgcttc

SEQ ID NO: 30884 - DNA, 20 bp, synthetic construct
  misc_feature 1..20: note = chemically synthesized
  source 1..20: mol_type = other DNA
gttttgtaaatttgtttttg

SEQ ID NO: 30885 - DNA, 20 bp, synthetic construct
  misc_feature 1..20: note = chemically synthesized
  source 1..20: mol_type = other DNA
ttttgtaaatttgtttttgt

SEQ ID NO: 30886 - DNA, 20 bp, synthetic construct
  misc_feature 1..20: note = chemically synthesized
  source 1..20: mol_type = other DNA
tttgtaaatttgtttttgta

SEQ ID NO: 30887 - DNA, 20 bp, synthetic construct
  misc_feature 1..20: note = chemically synthesized
  source 1..20: mol_type = other DNA
ttgtaaatttgtttttgtag

SEQ ID NO: 30888 - DNA, 20 bp, synthetic construct
  misc_feature 1..20: note = chemically synthesized
  source 1..20: mol_type = other DNA
taaatttgtttttgtagggg

SEQ ID NO: 30889 - DNA, 20 bp, synthetic construct
  misc_feature 1..20: note = chemically synthesized
  source 1..20: mol_type = other DNA
taggggaagacttttttctg

SEQ ID NO: 30890 - DNA, 20 bp, synthetic construct
  misc_feature 1..20: note = chemically synthesized
  source 1..20: mol_type = other DNA
ttttttctgaagatgtatct

SEQ ID NO: 30891 - DNA, 20 bp, synthetic construct
  misc_feature 1..20: note = chemically synthesized
  source 1..20: mol_type = other DNA
gatgtatcttggtgttgatt

SEQ ID NO: 30892 - DNA, 20 bp, synthetic construct
  misc_feature 1..20: note = chemically synthesized
  source 1..20: mol_type = other DNA
gtatcttggtgttgattgag

SEQ ID NO: 30893 - DNA, 20 bp, synthetic construct
  misc_feature 1..20: note = chemically synthesized
  source 1..20: mol_type = other DNA
tatcttggtgttgattgagt

SEQ ID NO: 30894 - DNA, 20 bp, synthetic construct
  misc_feature 1..20: note = chemically synthesized
  source 1..20: mol_type = other DNA
atcttggtgttgattgagta

SEQ ID NO: 30895 - DNA, 20 bp, synthetic construct
  misc_feature 1..20: note = chemically synthesized
  source 1..20: mol_type = other DNA
ggcactttgattttgatttc

SEQ ID NO: 30896 - DNA, 20 bp, synthetic construct
  misc_feature 1..20: note = chemically synthesized
  source 1..20: mol_type = other DNA
gcactttgattttgatttct

SEQ ID NO: 30897 - DNA, 20 bp, synthetic construct
  misc_feature 1..20: note = chemically synthesized
  source 1..20: mol_type = other DNA
ttttgatttctaggtgcata

SEQ ID NO: 30898 - DNA, 20 bp, synthetic construct
  misc_feature 1..20: note = chemically synthesized
  source 1..20: mol_type = other DNA
tgatttctaggtgcatacag

SEQ ID NO: 30899 - DNA, 20 bp, synthetic construct
  misc_feature 1..20: note = chemically synthesized
  source 1..20: mol_type = other DNA
tctaggtgcatacagcagca

SEQ ID NO: 30900 - DNA, 20 bp, synthetic construct
  misc_feature 1..20: note = chemically synthesized
  source 1..20: mol_type = other DNA
gtcttcatattatttttttt

SEQ ID NO: 30901 - DNA, 20 bp, synthetic construct
  misc_feature 1..20: note = chemically synthesized
  source 1..20: mol_type = other DNA
tattttttttcagctgccaa

SEQ ID NO: 30902 - DNA, 20 bp, synthetic construct
  misc_feature 1..20: note = chemically synthesized
  source 1..20: mol_type = other DNA
tcagctgccaacagtatcat

SEQ ID NO: 30903 - DNA, 20 bp, synthetic construct
  misc_feature 1..20: note = chemically synthesized
  source 1..20: mol_type = other DNA
atcagtgtctgtgatttttt

SEQ ID NO: 30904 - DNA, 20 bp, synthetic construct
  misc_feature 1..20: note = chemically synthesized
  source 1..20: mol_type = other DNA
agtgtctgtgattttttcag

SEQ ID NO: 30905 - DNA, 20 bp, synthetic construct
  misc_feature 1..20: note = chemically synthesized
  source 1..20: mol_type = other DNA
ctgtgattttttcagtggct

SEQ ID NO: 30906 - DNA, 20 bp, synthetic construct
  misc_feature 1..20: note = chemically synthesized
  source 1..20: mol_type = other DNA
tgtgattttttcagtggctt

SEQ ID NO: 30907 - DNA, 20 bp, synthetic construct
  misc_feature 1..20: note = chemically synthesized
  source 1..20: mol_type = other DNA
gtgattttttcagtggctta

SEQ ID NO: 30908 - DNA, 20 bp, synthetic construct
  misc_feature 1..20: note = chemically synthesized
  source 1..20: mol_type = other DNA
gtggcttagggtgcatttgt

SEQ ID NO: 30909 - DNA, 20 bp, synthetic construct
  misc_feature 1..20: note = chemically synthesized
  source 1..20: mol_type = other DNA
ttagggtgcatttgttagtg

SEQ ID NO: 30910 - DNA, 20 bp, synthetic construct
  misc_feature 1..20: note = chemically synthesized
  source 1..20: mol_type = other DNA
tagggtgcatttgttagtga

SEQ ID NO: 30911 - DNA, 20 bp, synthetic construct
  misc_feature 1..20: note = chemically synthesized
  source 1..20: mol_type = other DNA
ggtgcatttgttagtgaagg

SEQ ID NO: 30912 - DNA, 20 bp, synthetic construct
  misc_feature 1..20: note = chemically synthesized
  source 1..20: mol_type = other DNA
ttgttagtgaaggtggtgat

SEQ ID NO: 30913 - DNA, 20 bp, synthetic construct
  misc_feature 1..20: note = chemically synthesized
  source 1..20: mol_type = other DNA
tgttagtgaaggtggtgatg

SEQ ID NO: 30914 - DNA, 20 bp, synthetic construct
  misc_feature 1..20: note = chemically synthesized
  source 1..20: mol_type = other DNA
aggtggtgatgaggttgtgc

SEQ ID NO: 30915 - DNA, 20 bp, synthetic construct
  misc_feature 1..20: note = chemically synthesized
  source 1..20: mol_type = other DNA
gtggtgatgaggttgtgctg

SEQ ID NO: 30916 - DNA, 20 bp, synthetic construct
  misc_feature 1..20: note = chemically synthesized
  source 1..20: mol_type = other DNA
gatgaggttgtgctggagac

SEQ ID NO: 30917 - DNA, 20 bp, synthetic construct
  misc_feature 1..20: note = chemically synthesized
  source 1..20: mol_type = other DNA
gtgctggagacaagaatatc

SEQ ID NO: 30918 - DNA, 20 bp, synthetic construct
  misc_feature 1..20: note = chemically synthesized
  source 1..20: mol_type = other DNA
ctggagacaagaatatcaag

SEQ ID NO: 30919 - DNA, 20 bp, synthetic construct
  misc_feature 1..20: note = chemically synthesized
  source 1..20: mol_type = other DNA
tggagacaagaatatcaagt

SEQ ID NO: 30920 - DNA, 20 bp, synthetic construct
  misc_feature 1..20: note = chemically synthesized
  source 1..20: mol_type = other DNA
gacaagaatatcaagtgggc

SEQ ID NO: 30921 - DNA, 20 bp, synthetic construct
  misc_feature 1..20: note = chemically synthesized
  source 1..20: mol_type = other DNA
atatcaagtgggccagtcct

SEQ ID NO: 30922 - DNA, 20 bp, synthetic construct
  misc_feature 1..20: note = chemically synthesized
  source 1..20: mol_type = other DNA
agtgggccagtccttggccc

SEQ ID NO: 30923 - DNA, 20 bp, synthetic construct
  misc_feature 1..20: note = chemically synthesized
  source 1..20: mol_type = other DNA
gggccagtccttggccccag

SEQ ID NO: 30924 - DNA, 20 bp, synthetic construct
  misc_feature 1..20: note = chemically synthesized
  source 1..20: mol_type = other DNA
ccagtccttggccccagtgg

SEQ ID NO: 30925 - DNA, 20 bp, synthetic construct
  misc_feature 1..20: note = chemically synthesized
  source 1..20: mol_type = other DNA
gtccttggccccagtggtgg

SEQ ID NO: 30926 - DNA, 20 bp, synthetic construct
  misc_feature 1..20: note = chemically synthesized
  source 1..20: mol_type = other DNA
cttggccccagtggtggtgg

SEQ ID NO: 30927 - DNA, 20 bp, synthetic construct
  misc_feature 1..20: note = chemically synthesized
  source 1..20: mol_type = other DNA
ttggccccagtggtggtggt

SEQ ID NO: 30928 - DNA, 20 bp, synthetic construct
  misc_feature 1..20: note = chemically synthesized
  source 1..20: mol_type = other DNA
cccagtggtggtggtgggcc

SEQ ID NO: 30929 - DNA, 20 bp, synthetic construct
  misc_feature 1..20: note = chemically synthesized
  source 1..20: mol_type = other DNA
gggcctagcattcctgtcct

SEQ ID NO: 30930 - DNA, 20 bp, synthetic construct
  misc_feature 1..20: note = chemically synthesized
  source 1..20: mol_type = other DNA
ggcctagcattcctgtcctt

SEQ ID NO: 30931 - DNA, 20 bp, synthetic construct
  misc_feature 1..20: note = chemically synthesized
  source 1..20: mol_type = other DNA
attcctgtccttgggcccca

SEQ ID NO: 30932 - DNA, 20 bp, synthetic construct
  misc_feature 1..20: note = chemically synthesized
  source 1..20: mol_type = other DNA
ggccccatggctgtgtacat

SEQ ID NO: 30933 - DNA, 20 bp, synthetic construct
  misc_feature 1..20: note = chemically synthesized
  source 1..20: mol_type = other DNA
gctgtgtacattggcactga

SEQ ID NO: 30934 - DNA, 20 bp, synthetic construct
  misc_feature 1..20: note = chemically synthesized
  source 1..20: mol_type = other DNA
acattggcactgatggtaat

SEQ ID NO: 30935 - DNA, 20 bp, synthetic construct
  misc_feature 1..20: note = chemically synthesized
  source 1..20: mol_type = other DNA
ggcactgatggtaatgagtc

SEQ ID NO: 30936 - DNA, 20 bp, synthetic construct
  misc_feature 1..20: note = chemically synthesized
  source 1..20: mol_type = other DNA
ctgatggtaatgagtctagt

SEQ ID NO: 30937 - DNA, 20 bp, synthetic construct
  misc_feature 1..20: note = chemically synthesized
  source 1..20: mol_type = other DNA
tgatggtaatgagtctagtt

SEQ ID NO: 30938 - DNA, 20 bp, synthetic construct
  misc_feature 1..20: note = chemically synthesized
  source 1..20: mol_type = other DNA
gtctagttgggttgattctt

SEQ ID NO: 30939 - DNA, 20 bp, synthetic construct
  misc_feature 1..20: note = chemically synthesized
  source 1..20: mol_type = other DNA
tgggttgattctttggcctt

SEQ ID NO: 30940 - DNA, 20 bp, synthetic construct
  misc_feature 1..20: note = chemically synthesized
  source 1..20: mol_type = other DNA
gggttgattctttggccttc

SEQ ID NO: 30941 - DNA, 20 bp, synthetic construct
  misc_feature 1..20: note = chemically synthesized
  source 1..20: mol_type = other DNA
ttgattctttggccttcagg

SEQ ID NO: 30942 - DNA, 20 bp, synthetic construct
  misc_feature 1..20: note = chemically synthesized
  source 1..20: mol_type = other DNA
tggccttcaggcagtttgct

SEQ ID NO: 30943 - DNA, 20 bp, synthetic construct
  misc_feature 1..20: note = chemically synthesized
  source 1..20: mol_type = other DNA
ggccttcaggcagtttgctt

SEQ ID NO: 30944 - DNA, 20 bp, synthetic construct
  misc_feature 1..20: note = chemically synthesized
  source 1..20: mol_type = other DNA
caggcagtttgcttgggtgt

SEQ ID NO: 30945 - DNA, 20 bp, synthetic construct
  misc_feature 1..20: note = chemically synthesized
  source 1..20: mol_type = other DNA
gcagtttgcttgggtgtcag

SEQ ID NO: 30946 - DNA, 20 bp, synthetic construct
  misc_feature 1..20: note = chemically synthesized
  source 1..20: mol_type = other DNA
gtttgcttgggtgtcagtag

SEQ ID NO: 30947 - DNA, 20 bp, synthetic construct
  misc_feature 1..20: note = chemically synthesized
  source 1..20: mol_type = other DNA
ttgggtgtcagtagtggcca

SEQ ID NO: 30948 - DNA, 20 bp, synthetic construct
  misc_feature 1..20: note = chemically synthesized
  source 1..20: mol_type = other DNA
ggtgtcagtagtggccatag

SEQ ID NO: 30949 - DNA, 20 bp, synthetic construct
  misc_feature 1..20: note = chemically synthesized
  source 1..20: mol_type = other DNA
cagtagtggccatagtagac

SEQ ID NO: 30950 - DNA, 20 bp, synthetic construct
  misc_feature 1..20: note = chemically synthesized
  source 1..20: mol_type = other DNA
agtagtggccatagtagact

SEQ ID NO: 30951 - DNA, 20 bp, synthetic construct
  misc_feature 1..20: note = chemically synthesized
  source 1..20: mol_type = other DNA
gtggccatagtagactgggc

SEQ ID NO: 30952 - DNA, 20 bp, synthetic construct
  misc_feature 1..20: note = chemically synthesized
  source 1..20: mol_type = other DNA
tagtagactgggctggtgtg

SEQ ID NO: 30953 - DNA, 20 bp, synthetic construct
  misc_feature 1..20: note = chemically synthesized
  source 1..20: mol_type = other DNA
agtagactgggctggtgtgt

SEQ ID NO: 30954 - DNA, 20 bp, synthetic construct
  misc_feature 1..20: note = chemically synthesized
  source 1..20: mol_type = other DNA
tgggctggtgtgtgggtcct

SEQ ID NO: 30955 - DNA, 20 bp, synthetic construct
  misc_feature 1..20: note = chemically synthesized
  source 1..20: mol_type = other DNA
gggctggtgtgtgggtcctc

SEQ ID NO: 30956 - DNA, 20 bp, synthetic construct
  misc_feature 1..20: note = chemically synthesized
  source 1..20: mol_type = other DNA
tgtgtgggtcctcaggcttc

SEQ ID NO: 30957 - DNA, 20 bp, synthetic construct
  misc_feature 1..20: note = chemically synthesized
  source 1..20: mol_type = other DNA
tgggtcctcaggcttctgga

SEQ ID NO: 30958 - DNA, 20 bp, synthetic construct
  misc_feature 1..20: note = chemically synthesized
  source 1..20: mol_type = other DNA
gtcctcaggcttctggacag

SEQ ID NO: 30959 - DNA, 20 bp, synthetic construct
  misc_feature 1..20: note = chemically synthesized
  source 1..20: mol_type = other DNA
tcctcaggcttctggacagt

SEQ ID NO: 30960 - DNA, 20 bp, synthetic construct
  misc_feature 1..20: note = chemically synthesized
  source 1..20: mol_type = other DNA
aggcttctggacagtgggtg

SEQ ID NO: 30961 - DNA, 20 bp, synthetic construct
  misc_feature 1..20: note = chemically synthesized
  source 1..20: mol_type = other DNA
tctggacagtgggtgtggtg

SEQ ID NO: 30962 - DNA, 20 bp, synthetic construct
  misc_feature 1..20: note = chemically synthesized
  source 1..20: mol_type = other DNA
ctggacagtgggtgtggtgt

SEQ ID NO: 30963 - DNA, 20 bp, synthetic construct
  misc_feature 1..20: note = chemically synthesized
  source 1..20: mol_type = other DNA
agtgggtgtggtgtgggtga

SEQ ID NO: 30964 - DNA, 20 bp, synthetic construct
  misc_feature 1..20: note = chemically synthesized
  source 1..20: mol_type = other DNA
tgtggtgtgggtgatggctg

SEQ ID NO: 30965 - DNA, 20 bp, synthetic construct
  misc_feature 1..20: note = chemically synthesized
  source 1..20: mol_type = other DNA
ggtgatggctgtagcaactg

SEQ ID NO: 30966 - DNA, 20 bp, synthetic construct
  misc_feature 1..20: note = chemically synthesized
  source 1..20: mol_type = other DNA
gtgatggctgtagcaactgc

SEQ ID NO: 30967 - DNA, 20 bp, synthetic construct
  misc_feature 1..20: note = chemically synthesized
  source 1..20: mol_type = other DNA
gcaactgcaggacaaccctc

SEQ ID NO: 30968 - DNA, 20 bp, synthetic construct
  misc_feature 1..20: note = chemically synthesized
  source 1..20: mol_type = other DNA
aggacaaccctctggctccc

SEQ ID NO: 30969 - DNA, 20 bp, synthetic construct
  misc_feature 1..20: note = chemically synthesized
  source 1..20: mol_type = other DNA
acaaccctctggctcccaag

SEQ ID NO: 30970 - DNA, 20 bp, synthetic construct
  misc_feature 1..20: note = chemically synthesized
  source 1..20: mol_type = other DNA
ggctcccaagcagtctgcac

SEQ ID NO: 30971 - DNA, 20 bp, synthetic construct
  misc_feature 1..20: note = chemically synthesized
  source 1..20: mol_type = other DNA
caagcagtctgcactggtgt

SEQ ID NO: 30972 - DNA, 20 bp, synthetic construct
  misc_feature 1..20: note = chemically synthesized
  source 1..20: mol_type = other DNA
gcagtctgcactggtgttgg

SEQ ID NO: 30973 - DNA, 20 bp, synthetic construct
  misc_feature 1..20: note = chemically synthesized
  source 1..20: mol_type = other DNA
gtctgcactggtgttggtgg

SEQ ID NO: 30974 - DNA, 20 bp, synthetic construct
  misc_feature 1..20: note = chemically synthesized
  source 1..20: mol_type = other DNA
ctggtgttggtggtggctgc

SEQ ID NO: 30975 - DNA, 20 bp, synthetic construct
  misc_feature 1..20: note = chemically synthesized
  source 1..20: mol_type = other DNA
tggtgttggtggtggctgca

SEQ ID NO: 30976 - DNA, 20 bp, synthetic construct
  misc_feature 1..20: note = chemically synthesized
  source 1..20: mol_type = other DNA
ggtgttggtggtggctgcaa

SEQ ID NO: 30977 - DNA, 20 bp, synthetic construct
  misc_feature 1..20: note = chemically synthesized
  source 1..20: mol_type = other DNA
ggtggctgcaagggctgaat

SEQ ID NO: 30978 - DNA, 20 bp, synthetic construct
  misc_feature 1..20: note = chemically synthesized
  source 1..20: mol_type = other DNA
gctgcaagggctgaatgagc

SEQ ID NO: 30979 - DNA, 20 bp, synthetic construct
  misc_feature 1..20: note = chemically synthesized
  source 1..20: mol_type = other DNA
gggctgaatgagccagtctt

SEQ ID NO: 30980 - DNA, 20 bp, synthetic construct
  misc_feature 1..20: note = chemically synthesized
  source 1..20: mol_type = other DNA
tgagccagtcttcagaccca

SEQ ID NO: 30981 - DNA, 20 bp, synthetic construct
  misc_feature 1..20: note = chemically synthesized
  source 1..20: mol_type = other DNA
gagccagtcttcagacccac

SEQ ID NO: 30982 - DNA, 20 bp, synthetic construct
  misc_feature 1..20: note = chemically synthesized
  source 1..20: mol_type = other DNA
ccagtcttcagacccacagg

SEQ ID NO: 30983 - DNA, 20 bp, synthetic construct
  misc_feature 1..20: note = chemically synthesized
  source 1..20: mol_type = other DNA
agacccacaggtggcacatg

SEQ ID NO: 30984 - DNA, 20 bp, synthetic construct
  misc_feature 1..20: note = chemically synthesized
  source 1..20: mol_type = other DNA
gacccacaggtggcacatgc

SEQ ID NO: 30985 - DNA, 20 bp, synthetic construct
  misc_feature 1..20: note = chemically synthesized
  source 1..20: mol_type = other DNA
cccacaggtggcacatgcag

SEQ ID NO: 30986 - DNA, 20 bp, synthetic construct
  misc_feature 1..20: note = chemically synthesized
  source 1..20: mol_type = other DNA
ccacaggtggcacatgcagg

SEQ ID NO: 30987 - DNA, 20 bp, synthetic construct
  misc_feature 1..20: note = chemically synthesized
  source 1..20: mol_type = other DNA
gtggcacatgcaggaggtgc

SEQ ID NO: 30988 - DNA, 20 bp, synthetic construct
  misc_feature 1..20: note = chemically synthesized
  source 1..20: mol_type = other DNA
gcaggaggtgccagttgtga

SEQ ID NO: 30989 - DNA, 20 bp, synthetic construct
  misc_feature 1..20: note = chemically synthesized
  source 1..20: mol_type = other DNA
ggaggtgccagttgtgatgg

SEQ ID NO: 30990 - DNA, 20 bp, synthetic construct
  misc_feature 1..20: note = chemically synthesized
  source 1..20: mol_type = other DNA
ggtgccagttgtgatggcag

SEQ ID NO: 30991 - DNA, 20 bp, synthetic construct
  misc_feature 1..20: note = chemically synthesized
  source 1..20: mol_type = other DNA
gccagttgtgatggcagtgg

SEQ ID NO: 30992 - DNA, 20 bp, synthetic construct
  misc_feature 1..20: note = chemically synthesized
  source 1..20: mol_type = other DNA
ttgtgatggcagtggcagat

SEQ ID NO: 30993 - DNA, 20 bp, synthetic construct
  misc_feature 1..20: note = chemically synthesized
  source 1..20: mol_type = other DNA
tgtgatggcagtggcagatt

SEQ ID NO: 30994 - DNA, 20 bp, synthetic construct
  misc_feature 1..20: note = chemically synthesized
  source 1..20: mol_type = other DNA
gatggcagtggcagattggg

SEQ ID NO: 30995 - DNA, 20 bp, synthetic construct
  misc_feature 1..20: note = chemically synthesized
  source 1..20: mol_type = other DNA
atggcagtggcagattgggt

SEQ ID NO: 30996 - DNA, 20 bp, synthetic construct
  misc_feature 1..20: note = chemically synthesized
  source 1..20: mol_type = other DNA
agattgggtaggcccatcat

SEQ ID NO: 30997 - DNA, 20 bp, synthetic construct
  misc_feature 1..20: note = chemically synthesized
  source 1..20: mol_type = other DNA
gattgggtaggcccatcatc

SEQ ID NO: 30998 - DNA, 20 bp, synthetic construct
  misc_feature 1..20: note = chemically synthesized
  source 1..20: mol_type = other DNA
taggcccatcatcaggcttc

SEQ ID NO: 30999 - DNA, 20 bp, synthetic construct
  misc_feature 1..20: note = chemically synthesized
  source 1..20: mol_type = other DNA
aggcccatcatcaggcttct

SEQ ID NO: 31000 - DNA, 20 bp, synthetic construct
  misc_feature 1..20: note = chemically synthesized
  source 1..20: mol_type = other DNA
gcccatcatcaggcttctgg

SEQ ID NO: 31001 - DNA, 20 bp, synthetic construct
  misc_feature 1..20: note = chemically synthesized
  source 1..20: mol_type = other DNA
cccatcatcaggcttctggg

SEQ ID NO: 31002 - DNA, 20 bp, synthetic construct
  misc_feature 1..20: note = chemically synthesized
  source 1..20: mol_type = other DNA
ccatcatcaggcttctggga

SEQ ID NO: 31003 - DNA, 20 bp, synthetic construct
  misc_feature 1..20: note = chemically synthesized
  source 1..20: mol_type = other DNA
aggcttctgggagggttgct

SEQ ID NO: 31004 - DNA, 20 bp, synthetic construct
  misc_feature 1..20: note = chemically synthesized
  source 1..20: mol_type = other DNA
ggcttctgggagggttgctt

SEQ ID NO: 31005 - DNA, 20 bp, synthetic construct
  misc_feature 1..20: note = chemically synthesized
  source 1..20: mol_type = other DNA
tgggagggttgcttaggtac

SEQ ID NO: 31006 - DNA, 20 bp, synthetic construct
  misc_feature 1..20: note = chemically synthesized
  source 1..20: mol_type = other DNA
ggttgcttaggtaccagtca

SEQ ID NO: 31007 - DNA, 20 bp, synthetic construct
  misc_feature 1..20: note = chemically synthesized
  source 1..20: mol_type = other DNA
tgcttaggtaccagtcatgg

SEQ ID NO: 31008 - DNA, 20 bp, synthetic construct
  misc_feature 1..20: note = chemically synthesized
  source 1..20: mol_type = other DNA
taggtaccagtcatggtgga

SEQ ID NO: 31009 - DNA, 20 bp, synthetic construct
  misc_feature 1..20: note = chemically synthesized
  source 1..20: mol_type = other DNA
ccagtcatggtggatggcac

SEQ ID NO: 31010 - DNA, 20 bp, synthetic construct
  misc_feature 1..20: note = chemically synthesized
  source 1..20: mol_type = other DNA
cagtcatggtggatggcaca

SEQ ID NO: 31011 - DNA, 20 bp, synthetic construct
  misc_feature 1..20: note = chemically synthesized
  source 1..20: mol_type = other DNA
ggatggcacaaggctgtctc

SEQ ID NO: 31012 - DNA, 20 bp, synthetic construct
  misc_feature 1..20: note = chemically synthesized
  source 1..20: mol_type = other DNA
gatggcacaaggctgtctct

SEQ ID NO: 31013 - DNA, 20 bp, synthetic construct
  misc_feature 1..20: note = chemically synthesized
  source 1..20: mol_type = other DNA
caaggctgtctctgggttcc

SEQ ID NO: 31014 - DNA, 20 bp, synthetic construct
  misc_feature 1..20: note = chemically synthesized
  source 1..20: mol_type = other DNA
gggttcccagacaacttgct

SEQ ID NO: 31015 - DNA, 20 bp, synthetic construct
  misc_feature 1..20: note = chemically synthesized
  source 1..20: mol_type = other DNA
ggttcccagacaacttgctt

SEQ ID NO: 31016 - DNA, 20 bp, synthetic construct
  misc_feature 1..20: note = chemically synthesized
  source 1..20: mol_type = other DNA
agacaacttgcttaggcatt

SEQ ID NO: 31017 - DNA, 20 bp, synthetic construct
  misc_feature 1..20: note = chemically synthesized
  source 1..20: mol_type = other DNA
gacaacttgcttaggcattg

SEQ ID NO: 31018 - DNA, 20 bp, synthetic construct
  misc_feature 1..20: note = chemically synthesized
  source 1..20: mol_type = other DNA
aacttgcttaggcattgagg

SEQ ID NO: 31019 - DNA, 20 bp, synthetic construct
  misc_feature 1..20: note = chemically synthesized
  source 1..20: mol_type = other DNA
acttgcttaggcattgagga

SEQ ID NO: 31020 - DNA, 20 bp, synthetic construct
  misc_feature 1..20: note = chemically synthesized
  source 1..20: mol_type = other DNA
cttaggcattgaggaaggca

SEQ ID NO: 31021 - DNA, 20 bp, synthetic construct
  misc_feature 1..20: note = chemically synthesized
  source 1..20: mol_type = other DNA
ggcattgaggaaggcaaagc

SEQ ID NO: 31022 - DNA, 20 bp, synthetic construct
  misc_feature 1..20: note = chemically synthesized
  source 1..20: mol_type = other DNA
gcattgaggaaggcaaagcc

SEQ ID NO: 31023 - DNA, 20 bp, synthetic construct
  misc_feature 1..20: note = chemically synthesized
  source 1..20: mol_type = other DNA
tgaggaaggcaaagccaggc

SEQ ID NO: 31024 - DNA, 20 bp, synthetic construct
  misc_feature 1..20: note = chemically synthesized
  source 1..20: mol_type = other DNA
gaggaaggcaaagccaggct

SEQ ID NO: 31025 - DNA, 20 bp, synthetic construct
  misc_feature 1..20: note = chemically synthesized
  source 1..20: mol_type = other DNA
aggctgggtgttcctgacct

SEQ ID NO: 31026 - DNA, 20 bp, synthetic construct
  misc_feature 1..20: note = chemically synthesized
  source 1..20: mol_type = other DNA
ggctgggtgttcctgacctc

SEQ ID NO: 31027 - DNA, 20 bp, synthetic construct
  misc_feature 1..20: note = chemically synthesized
  source 1..20: mol_type = other DNA
gttcctgacctcaggccact

SEQ ID NO: 31028 - DNA, 20 bp, synthetic construct
  misc_feature 1..20: note = chemically synthesized
  source 1..20: mol_type = other DNA
cctgacctcaggccactcag

SEQ ID NO: 31029 - DNA, 20 bp, synthetic construct
  misc_feature 1..20: note = chemically synthesized
  source 1..20: mol_type = other DNA
aggccactcagtggtgtgtg

SEQ ID NO: 31030 - DNA, 20 bp, synthetic construct
  misc_feature 1..20: note = chemically synthesized
  source 1..20: mol_type = other DNA
tcagtggtgtgtgtggacac

SEQ ID NO: 31031 - DNA, 20 bp, synthetic construct
  misc_feature 1..20: note = chemically synthesized
  source 1..20: mol_type = other DNA
tgtgtggacaccggctatca

SEQ ID NO: 31032 - DNA, 20 bp, synthetic construct
  misc_feature 1..20: note = chemically synthesized
  source 1..20: mol_type = other DNA
gtgtggacaccggctatcat

SEQ ID NO: 31033 - DNA, 20 bp, synthetic construct
  misc_feature 1..20: note = chemically synthesized
  source 1..20: mol_type = other DNA
ggacaccggctatcataggc

SEQ ID NO: 31034 - DNA, 20 bp, synthetic construct
  misc_feature 1..20: note = chemically synthesized
  source 1..20: mol_type = other DNA
acaccggctatcataggctg

SEQ ID NO: 31035 - DNA, 20 bp, synthetic construct
  misc_feature 1..20: note = chemically synthesized
  source 1..20: mol_type = other DNA
ccggctatcataggctggag

SEQ ID NO: 31036 - DNA, 20 bp, synthetic construct
  misc_feature 1..20: note = chemically synthesized
  source 1..20: mol_type = other DNA
ggctatcataggctggagtg

SEQ ID NO: 31037 - DNA, 20 bp, synthetic construct
  misc_feature 1..20: note = chemically synthesized
  source 1..20: mol_type = other DNA
ggctggagtggagtgatcct

SEQ ID NO: 31038 - DNA, 20 bp, synthetic construct
  misc_feature 1..20: note = chemically synthesized
  source 1..20: mol_type = other DNA
gctggagtggagtgatcctc

SEQ ID NO: 31039 - DNA, 20 bp, synthetic construct
  misc_feature 1..20: note = chemically synthesized
  source 1..20: mol_type = other DNA
tggagtgatcctcaggcccc

SEQ ID NO: 31040 - DNA, 20 bp, synthetic construct
  misc_feature 1..20: note = chemically synthesized
  source 1..20: mol_type = other DNA
agtgatcctcaggcccccag

SEQ ID NO: 31041 - DNA, 20 bp, synthetic construct
  misc_feature 1..20: note = chemically synthesized
  source 1..20: mol_type = other DNA
aggcccccagcagaatgcct

SEQ ID NO: 31042 - DNA, 20 bp, synthetic construct
  misc_feature 1..20: note = chemically synthesized
  source 1..20: mol_type = other DNA
agcagaatgcctgagtgaat

SEQ ID NO: 31043 - DNA, 20 bp, synthetic construct
  misc_feature 1..20: note = chemically synthesized
  source 1..20: mol_type = other DNA
agaatgcctgagtgaattag

SEQ ID NO: 31044 - DNA, 20 bp, synthetic construct
  misc_feature 1..20: note = chemically synthesized
  source 1..20: mol_type = other DNA
gcattgttgccctgctcttg

SEQ ID NO: 31045 - DNA, 20 bp, synthetic construct
  misc_feature 1..20: note = chemically synthesized
  source 1..20: mol_type = other DNA
cattgttgccctgctcttga

SEQ ID NO: 31046 - DNA, 20 bp, synthetic construct
  misc_feature 1..20: note = chemically synthesized
  source 1..20: mol_type = other DNA
attgttgccctgctcttgaa

SEQ ID NO: 31047 - DNA, 20 bp, synthetic construct
  misc_feature 1..20: note = chemically synthesized
  source 1..20: mol_type = other DNA
ttgttgccctgctcttgaag

SEQ ID NO: 31048 - DNA, 20 bp, synthetic construct
  misc_feature 1..20: note = chemically synthesized
  source 1..20: mol_type = other DNA
gccctgctcttgaaggggtg

SEQ ID NO: 31049 - DNA, 20 bp, synthetic construct
  misc_feature 1..20: note = chemically synthesized
  source 1..20: mol_type = other DNA
ccctgctcttgaaggggtgc

SEQ ID NO: 31050 - DNA, 20 bp, synthetic construct
  misc_feature 1..20: note = chemically synthesized
  source 1..20: mol_type = other DNA
cctgctcttgaaggggtgcg

SEQ ID NO: 31051 - DNA, 20 bp, synthetic construct
  misc_feature 1..20: note = chemically synthesized
  source 1..20: mol_type = other DNA
ggtgcggggtgtgttgcttt

SEQ ID NO: 31052 - DNA, 20 bp, synthetic construct
  misc_feature 1..20: note = chemically synthesized
  source 1..20: mol_type = other DNA
gcggggtgtgttgctttcag

SEQ ID NO: 31053 - DNA, 20 bp, synthetic construct
  misc_feature 1..20: note = chemically synthesized
  source 1..20: mol_type = other DNA
gggtgtgttgctttcagtgg

SEQ ID NO: 31054 - DNA, 20 bp, synthetic construct
  misc_feature 1..20: note = chemically synthesized
  source 1..20: mol_type = other DNA
tgtgttgctttcagtggcag

SEQ ID NO: 31055 - DNA, 20 bp, synthetic construct
  misc_feature 1..20: note = chemically synthesized
  source 1..20: mol_type = other DNA
tcagtggcagcagctataaa

SEQ ID NO: 31056 - DNA, 20 bp, synthetic construct
  misc_feature 1..20: note = chemically synthesized
  source 1..20: mol_type = other DNA
cagtggcagcagctataaat

SEQ ID NO: 31057 - DNA, 20 bp, synthetic construct
  misc_feature 1..20: note = chemically synthesized
  source 1..20: mol_type = other DNA
agcagctataaatgggttgc

SEQ ID NO: 31058 - DNA, 20 bp, synthetic construct
  misc_feature 1..20: note = chemically synthesized
  source 1..20: mol_type = other DNA
agctataaatgggttgctgg

SEQ ID NO: 31059 - DNA, 20 bp, synthetic construct
  misc_feature 1..20: note = chemically synthesized
  source 1..20: mol_type = other DNA
gctataaatgggttgctggt

SEQ ID NO: 31060 - DNA, 20 bp, synthetic construct
  misc_feature 1..20: note = chemically synthesized
  source 1..20: mol_type = other DNA
ttgctggtgggcatgtgttt

SEQ ID NO: 31061 - DNA, 20 bp, synthetic construct
  misc_feature 1..20: note = chemically synthesized
  source 1..20: mol_type = other DNA
gtgggcatgtgtttcagccc

SEQ ID NO: 31062 - DNA, 20 bp, synthetic construct
  misc_feature 1..20: note = chemically synthesized
  source 1..20: mol_type = other DNA
gcatgtgtttcagccccaga

SEQ ID NO: 31063 - DNA, 20 bp, synthetic construct
  misc_feature 1..20: note = chemically synthesized
  source 1..20: mol_type = other DNA
tgtgtttcagccccagatgg

SEQ ID NO: 31064 - DNA, 20 bp, synthetic construct
  misc_feature 1..20: note = chemically synthesized
  source 1..20: mol_type = other DNA
cagccccagatggtggctgc

SEQ ID NO: 31065 - DNA, 20 bp, synthetic construct
  misc_feature 1..20: note = chemically synthesized
  source 1..20: mol_type = other DNA
ccccagatggtggctgcaag

SEQ ID NO: 31066 - DNA, 20 bp, synthetic construct
  misc_feature 1..20: note = chemically synthesized
  source 1..20: mol_type = other DNA
cccagatggtggctgcaagt

SEQ ID NO: 31067 - DNA, 20 bp, synthetic construct
  misc_feature 1..20: note = chemically synthesized
  source 1..20: mol_type = other DNA
ccagatggtggctgcaagtg

SEQ ID NO: 31068 - DNA, 20 bp, synthetic construct
  misc_feature 1..20: note = chemically synthesized
  source 1..20: mol_type = other DNA
gatggtggctgcaagtgggg

SEQ ID NO: 31069 - DNA, 20 bp, synthetic construct
  misc_feature 1..20: note = chemically synthesized
  source 1..20: mol_type = other DNA
caagtggggtagcattttct

SEQ ID NO: 31070 - DNA, 20 bp, synthetic construct
  misc_feature 1..20: note = chemically synthesized
  source 1..20: mol_type = other DNA
aagtggggtagcattttctt

SEQ ID NO: 31071 - DNA, 20 bp, synthetic construct
  misc_feature 1..20: note = chemically synthesized
  source 1..20: mol_type = other DNA
agtggggtagcattttctta

SEQ ID NO: 31072 - DNA, 20 bp, synthetic construct
  misc_feature 1..20: note = chemically synthesized
  source 1..20: mol_type = other DNA
tggggtagcattttcttagg

SEQ ID NO: 31073 - DNA, 20 bp, synthetic construct
  misc_feature 1..20: note = chemically synthesized
  source 1..20: mol_type = other DNA
ttagggagcttataaatgtg

SEQ ID NO: 31074 - DNA, 20 bp, synthetic construct
  misc_feature 1..20: note = chemically synthesized
  source 1..20: mol_type = other DNA
gggagcttataaatgtgtag

SEQ ID NO: 31075 - DNA, 20 bp, synthetic construct
  misc_feature 1..20: note = chemically synthesized
  source 1..20: mol_type = other DNA
atgtgtagcagccctgctac

SEQ ID NO: 31076 - DNA, 20 bp, synthetic construct
  misc_feature 1..20: note = chemically synthesized
  source 1..20: mol_type = other DNA
tgtgtagcagccctgctact

SEQ ID NO: 31077 - DNA, 20 bp, synthetic construct
  misc_feature 1..20: note = chemically synthesized
  source 1..20: mol_type = other DNA
gtgtagcagccctgctactg

SEQ ID NO: 31078 - DNA, 20 bp, synthetic construct
  misc_feature 1..20: note = chemically synthesized
  source 1..20: mol_type = other DNA
tgtagcagccctgctactgg

SEQ ID NO: 31079 - DNA, 20 bp, synthetic construct
  misc_feature 1..20: note = chemically synthesized
  source 1..20: mol_type = other DNA
agcagccctgctactggggg

SEQ ID NO: 31080 - DNA, 20 bp, synthetic construct
  misc_feature 1..20: note = chemically synthesized
  source 1..20: mol_type = other DNA
gcagccctgctactgggggt

SEQ ID NO: 31081 - DNA, 20 bp, synthetic construct
  misc_feature 1..20: note = chemically synthesized
  source 1..20: mol_type = other DNA
cagccctgctactgggggtg

SEQ ID NO: 31082 - DNA, 20 bp, synthetic construct
  misc_feature 1..20: note = chemically synthesized
  source 1..20: mol_type = other DNA
agccctgctactgggggtgg

SEQ ID NO: 31083 - DNA, 20 bp, synthetic construct
  misc_feature 1..20: note = chemically synthesized
  source 1..20: mol_type = other DNA
ccctgctactgggggtgggg

SEQ ID NO: 31084 - DNA, 20 bp, synthetic construct
  misc_feature 1..20: note = chemically synthesized
  source 1..20: mol_type = other DNA
ctaatgacacactttatccc

SEQ ID NO: 31085 - DNA, 20 bp, synthetic construct
  misc_feature 1..20: note = chemically synthesized
  source 1..20: mol_type = other DNA
acacactttatccctggtga

SEQ ID NO: 31086 - DNA, 20 bp, synthetic construct
  misc_feature 1..20: note = chemically synthesized
  source 1..20: mol_type = other DNA
cactttatccctggtgacag

SEQ ID NO: 31087 - DNA, 20 bp, synthetic construct
  misc_feature 1..20: note = chemically synthesized
  source 1..20: mol_type = other DNA
ttatccctggtgacagcagc

SEQ ID NO: 31088 - DNA, 20 bp, synthetic construct
  misc_feature 1..20: note = chemically synthesized
  source 1..20: mol_type = other DNA
tccctggtgacagcagccag

SEQ ID NO: 31089 - DNA, 20 bp, synthetic construct
  misc_feature 1..20: note = chemically synthesized
  source 1..20: mol_type = other DNA
ctggtgacagcagccagcag

SEQ ID NO: 31090 - DNA, 20 bp, synthetic construct
  misc_feature 1..20: note = chemically synthesized
  source 1..20: mol_type = other DNA
cagcagccagcagtagcact

SEQ ID NO: 31091 - DNA, 20 bp, synthetic construct
  misc_feature 1..20: note = chemically synthesized
  source 1..20: mol_type = other DNA
ccagcagtagcactcagctg

SEQ ID NO: 31092 - DNA, 20 bp, synthetic construct
  misc_feature 1..20: note = chemically synthesized
  source 1..20: mol_type = other DNA
cagcagtagcactcagctgt

SEQ ID NO: 31093 - DNA, 20 bp, synthetic construct
  misc_feature 1..20: note = chemically synthesized
  source 1..20: mol_type = other DNA
cagtagcactcagctgtggg

SEQ ID NO: 31094 - DNA, 20 bp, synthetic construct
  misc_feature 1..20: note = chemically synthesized
  source 1..20: mol_type = other DNA
agtagcactcagctgtgggt

SEQ ID NO: 31095 - DNA, 20 bp, synthetic construct
  misc_feature 1..20: note = chemically synthesized
  source 1..20: mol_type = other DNA
gtagcactcagctgtgggtg

SEQ ID NO: 31096 - DNA, 20 bp, synthetic construct
  misc_feature 1..20: note = chemically synthesized
  source 1..20: mol_type = other DNA
tagcactcagctgtgggtgg

SEQ ID NO: 31097 - DNA, 20 bp, synthetic construct
  misc_feature 1..20: note = chemically synthesized
  source 1..20: mol_type = other DNA
cagctgtgggtgggggatgt

SEQ ID NO: 31098 - DNA, 20 bp, synthetic construct
  misc_feature 1..20: note = chemically synthesized
  source 1..20: mol_type = other DNA
ctgtgggtgggggatgtcag

SEQ ID NO: 31099 - DNA, 20 bp, synthetic construct
  misc_feature 1..20: note = chemically synthesized
  source 1..20: mol_type = other DNA
gtgggtgggggatgtcagca

SEQ ID NO: 31100 - DNA, 20 bp, synthetic construct
  misc_feature 1..20: note = chemically synthesized
  source 1..20: mol_type = other DNA
gggggatgtcagcagagctt

SEQ ID NO: 31101 - DNA, 20 bp, synthetic construct
  misc_feature 1..20: note = chemically synthesized
  source 1..20: mol_type = other DNA
ggggatgtcagcagagcttc

SEQ ID NO: 31102 - DNA, 20 bp, synthetic construct
  misc_feature 1..20: note = chemically synthesized
  source 1..20: mol_type = other DNA
gggatgtcagcagagcttca

SEQ ID NO: 31103 - DNA, 20 bp, synthetic construct
  misc_feature 1..20: note = chemically synthesized
  source 1..20: mol_type = other DNA
tcagcagagcttcagggatg

SEQ ID NO: 31104 - DNA, 20 bp, synthetic construct
  misc_feature 1..20: note = chemically synthesized
  source 1..20: mol_type = other DNA
agcagagcttcagggatgta

SEQ ID NO: 31105 - DNA, 20 bp, synthetic construct
  misc_feature 1..20: note = chemically synthesized
  source 1..20: mol_type = other DNA
gcttcagggatgtagagatg

SEQ ID NO: 31106 - DNA, 20 bp, synthetic construct
  misc_feature 1..20: note = chemically synthesized
  source 1..20: mol_type = other DNA
tgtagagatgcagatgatgt

SEQ ID NO: 31107 - DNA, 20 bp, synthetic construct
  misc_feature 1..20: note = chemically synthesized
  source 1..20: mol_type = other DNA
gtagagatgcagatgatgtt

SEQ ID NO: 31108 - DNA, 20 bp, synthetic construct
  misc_feature 1..20: note = chemically synthesized
  source 1..20: mol_type = other DNA
tagagatgcagatgatgttg

SEQ ID NO: 31109 - DNA, 20 bp, synthetic construct
  misc_feature 1..20: note = chemically synthesized
  source 1..20: mol_type = other DNA
tgcagatgatgttggggtct

SEQ ID NO: 31110 - DNA, 20 bp, synthetic construct
  misc_feature 1..20: note = chemically synthesized
  source 1..20: mol_type = other DNA
gcagatgatgttggggtctg

SEQ ID NO: 31111 - DNA, 20 bp, synthetic construct
  misc_feature 1..20: note = chemically synthesized
  source 1..20: mol_type = other DNA
gtctgaggaacgatgtcatc

SEQ ID NO: 31112 - DNA, 20 bp, synthetic construct
  misc_feature 1..20: note = chemically synthesized
  source 1..20: mol_type = other DNA
tgaggaacgatgtcatctgg

SEQ ID NO: 31113 - DNA, 20 bp, synthetic construct
  misc_feature 1..20: note = chemically synthesized
  source 1..20: mol_type = other DNA
gaggaacgatgtcatctggt

SEQ ID NO: 31114 - DNA, 20 bp, synthetic construct
  misc_feature 1..20: note = chemically synthesized
  source 1..20: mol_type = other DNA
cgatgtcatctggtgggtgt

SEQ ID NO: 31115 - DNA, 20 bp, synthetic construct
  misc_feature 1..20: note = chemically synthesized
  source 1..20: mol_type = other DNA
gatgtcatctggtgggtgtt

SEQ ID NO: 31116 - DNA, 20 bp, synthetic construct
  misc_feature 1..20: note = chemically synthesized
  source 1..20: mol_type = other DNA
tgggtgttgggctctcaaaa

SEQ ID NO: 31117 - DNA, 20 bp, synthetic construct
  misc_feature 1..20: note = chemically synthesized
  source 1..20: mol_type = other DNA
caaaatggcaccttgctgct

SEQ ID NO: 31118 - DNA, 20 bp, synthetic construct
  misc_feature 1..20: note = chemically synthesized
  source 1..20: mol_type = other DNA
ggcaccttgctgctcagtaa

SEQ ID NO: 31119 - DNA, 20 bp, synthetic construct
  misc_feature 1..20: note = chemically synthesized
  source 1..20: mol_type = other DNA
gcaccttgctgctcagtaat

SEQ ID NO: 31120 - DNA, 20 bp, synthetic construct
  misc_feature 1..20: note = chemically synthesized
  source 1..20: mol_type = other DNA
caccttgctgctcagtaatg

SEQ ID NO: 31121 - DNA, 20 bp, synthetic construct
  misc_feature 1..20: note = chemically synthesized
  source 1..20: mol_type = other DNA
ttgctgctcagtaatgggga

SEQ ID NO: 31122 - DNA, 20 bp, synthetic construct
  misc_feature 1..20: note = chemically synthesized
  source 1..20: mol_type = other DNA
ctgctcagtaatggggatgg

SEQ ID NO: 31123 - DNA, 20 bp, synthetic construct
  misc_feature 1..20: note = chemically synthesized
  source 1..20: mol_type = other DNA
tgctcagtaatggggatggc

SEQ ID NO: 31124 - DNA, 20 bp, synthetic construct
  misc_feature 1..20: note = chemically synthesized
  source 1..20: mol_type = other DNA
gctcagtaatggggatggca

SEQ ID NO: 31125 - DNA, 20 bp, synthetic construct
  misc_feature 1..20: note = chemically synthesized
  source 1..20: mol_type = other DNA
ctcagtaatggggatggcag

SEQ ID NO: 31126 - DNA, 20 bp, synthetic construct
  misc_feature 1..20: note = chemically synthesized
  source 1..20: mol_type = other DNA
agtaatggggatggcagggg

SEQ ID NO: 31127 - DNA, 20 bp, synthetic construct
  misc_feature 1..20: note = chemically synthesized
  source 1..20: mol_type = other DNA
gtaatggggatggcaggggt

SEQ ID NO: 31128 - DNA, 20 bp, synthetic construct
  misc_feature 1..20: note = chemically synthesized
  source 1..20: mol_type = other DNA
gggatggcaggggtgggacc

SEQ ID NO: 31129 - DNA, 20 bp, synthetic construct
  misc_feature 1..20: note = chemically synthesized
  source 1..20: mol_type = other DNA
tggcaggggtgggacccagt

SEQ ID NO: 31130 - DNA, 20 bp, synthetic construct
  misc_feature 1..20: note = chemically synthesized
  source 1..20: mol_type = other DNA
gcaggggtgggacccagtga

SEQ ID NO: 31131 - DNA, 20 bp, synthetic construct
  misc_feature 1..20: note = chemically synthesized
  source 1..20: mol_type = other DNA
cccagtgagagctccttctc

SEQ ID NO: 31132 - DNA, 20 bp, synthetic construct
  misc_feature 1..20: note = chemically synthesized
  source 1..20: mol_type = other DNA
cagtgagagctccttctctg

SEQ ID NO: 31133 - DNA, 20 bp, synthetic construct
  misc_feature 1..20: note = chemically synthesized
  source 1..20: mol_type = other DNA
caatgcctttgtgcgattgc

SEQ ID NO: 31134 - DNA, 20 bp, synthetic construct
  misc_feature 1..20: note = chemically synthesized
  source 1..20: mol_type = other DNA
aatgcctttgtgcgattgct

SEQ ID NO: 31135 - DNA, 20 bp, synthetic construct
  misc_feature 1..20: note = chemically synthesized
  source 1..20: mol_type = other DNA
gcctttgtgcgattgctggg

SEQ ID NO: 31136 - DNA, 20 bp, synthetic construct
  misc_feature 1..20: note = chemically synthesized
  source 1..20: mol_type = other DNA
tgctgggcagttccttatga

SEQ ID NO: 31137 - DNA, 20 bp, synthetic construct
  misc_feature 1..20: note = chemically synthesized
  source 1..20: mol_type = other DNA
cagttccttatgatagtctc

SEQ ID NO: 31138 - DNA, 20 bp, synthetic construct
  misc_feature 1..20: note = chemically synthesized
  source 1..20: mol_type = other DNA
agttccttatgatagtctca

SEQ ID NO: 31139 - DNA, 20 bp, synthetic construct
  misc_feature 1..20: note = chemically synthesized
  source 1..20: mol_type = other DNA
tgatagtctcaaggcctgca

SEQ ID NO: 31140 - DNA, 20 bp, synthetic construct
  misc_feature 1..20: note = chemically synthesized
  source 1..20: mol_type = other DNA
gtctcaaggcctgcatggtc

SEQ ID NO: 31141 - DNA, 20 bp, synthetic construct
  misc_feature 1..20: note = chemically synthesized
  source 1..20: mol_type = other DNA
tctcaaggcctgcatggtca

SEQ ID NO: 31142 - DNA, 20 bp, synthetic construct
  misc_feature 1..20: note = chemically synthesized
  source 1..20: mol_type = other DNA
ctcaaggcctgcatggtcaa

SEQ ID NO: 31143 - DNA, 20 bp, synthetic construct
  misc_feature 1..20: note = chemically synthesized
  source 1..20: mol_type = other DNA
atggtcaagggactctcctg

SEQ ID NO: 31144 - DNA, 20 bp, synthetic construct
  misc_feature 1..20: note = chemically synthesized
  source 1..20: mol_type = other DNA
tcaagggactctcctgtggc

SEQ ID NO: 31145 - DNA, 20 bp, synthetic construct
  misc_feature 1..20: note = chemically synthesized
  source 1..20: mol_type = other DNA
caagggactctcctgtggct

SEQ ID NO: 31146 - DNA, 20 bp, synthetic construct
  misc_feature 1..20: note = chemically synthesized
  source 1..20: mol_type = other DNA
tctcctgtggctaggattcc

SEQ ID NO: 31147 - DNA, 20 bp, synthetic construct
  misc_feature 1..20: note = chemically synthesized
  source 1..20: mol_type = other DNA
tcctgtggctaggattcctg

SEQ ID NO: 31148 - DNA, 20 bp, synthetic construct
  misc_feature 1..20: note = chemically synthesized
  source 1..20: mol_type = other DNA
gattcctggagtccataatg

SEQ ID NO: 31149 - DNA, 20 bp, synthetic construct
  misc_feature 1..20: note = chemically synthesized
  source 1..20: mol_type = other DNA
tggagtccataatgcagatg

SEQ ID NO: 31150 - DNA, 20 bp, synthetic construct
  misc_feature 1..20: note = chemically synthesized
  source 1..20: mol_type = other DNA
ataatgcagatgtggaccac

SEQ ID NO: 31151 - DNA, 20 bp, synthetic construct
  misc_feature 1..20: note = chemically synthesized
  source 1..20: mol_type = other DNA
taatgcagatgtggaccact

SEQ ID NO: 31152 - DNA, 20 bp, synthetic construct
  misc_feature 1..20: note = chemically synthesized
  source 1..20: mol_type = other DNA
atgcagatgtggaccactgg

SEQ ID NO: 31153 - DNA, 20 bp, synthetic construct
  misc_feature 1..20: note = chemically synthesized
  source 1..20: mol_type = other DNA
agatgtggaccactgggagt

SEQ ID NO: 31154 - DNA, 20 bp, synthetic construct
  misc_feature 1..20: note = chemically synthesized
  source 1..20: mol_type = other DNA
tcacttaactttcgatgcac

SEQ ID NO: 31155 - DNA, 20 bp, synthetic construct
  misc_feature 1..20: note = chemically synthesized
  source 1..20: mol_type = other DNA
cacttaactttcgatgcact

SEQ ID NO: 31156 - DNA, 20 bp, synthetic construct
  misc_feature 1..20: note = chemically synthesized
  source 1..20: mol_type = other DNA
acttaactttcgatgcactg

SEQ ID NO: 31157 - DNA, 20 bp, synthetic construct
  misc_feature 1..20: note = chemically synthesized
  source 1..20: mol_type = other DNA
ttaactttcgatgcactggg

SEQ ID NO: 31158 - DNA, 20 bp, synthetic construct
  misc_feature 1..20: note = chemically synthesized
  source 1..20: mol_type = other DNA
gatgcactggggagcctctc

SEQ ID NO: 31159 - DNA, 20 bp, synthetic construct
  misc_feature 1..20: note = chemically synthesized
  source 1..20: mol_type = other DNA
ggggagcctctctggcctca

SEQ ID NO: 31160 - DNA, 20 bp, synthetic construct
  misc_feature 1..20: note = chemically synthesized
  source 1..20: mol_type = other DNA
ggagcctctctggcctcaca

SEQ ID NO: 31161 - DNA, 20 bp, synthetic construct
  misc_feature 1..20: note = chemically synthesized
  source 1..20: mol_type = other DNA
gagcctctctggcctcacag

SEQ ID NO: 31162 - DNA, 20 bp, synthetic construct
  misc_feature 1..20: note = chemically synthesized
  source 1..20: mol_type = other DNA
gcctcacagaggatccctac

SEQ ID NO: 31163 - DNA, 20 bp, synthetic construct
  misc_feature 1..20: note = chemically synthesized
  source 1..20: mol_type = other DNA
cctcacagaggatccctact

SEQ ID NO: 31164 - DNA, 20 bp, synthetic construct
  misc_feature 1..20: note = chemically synthesized
  source 1..20: mol_type = other DNA
cacagaggatccctactggg

SEQ ID NO: 31165 - DNA, 20 bp, synthetic construct
  misc_feature 1..20: note = chemically synthesized
  source 1..20: mol_type = other DNA
acagaggatccctactgggt

SEQ ID NO: 31166 - DNA, 20 bp, synthetic construct
  misc_feature 1..20: note = chemically synthesized
  source 1..20: mol_type = other DNA
ttccctccccttcattgcct

SEQ ID NO: 31167 - DNA, 20 bp, synthetic construct
  misc_feature 1..20: note = chemically synthesized
  source 1..20: mol_type = other DNA
gtcacttctctgttgaattc

SEQ ID NO: 31168 - DNA, 20 bp, synthetic construct
  misc_feature 1..20: note = chemically synthesized
  source 1..20: mol_type = other DNA
ttccagaattctctcttatg

SEQ ID NO: 31169 - DNA, 20 bp, synthetic construct
  misc_feature 1..20: note = chemically synthesized
  source 1..20: mol_type = other DNA
tccagaattctctcttatgt

SEQ ID NO: 31170 - DNA, 20 bp, synthetic construct
  misc_feature 1..20: note = chemically synthesized
  source 1..20: mol_type = other DNA
ggattttctacttactattt

SEQ ID NO: 31171 - DNA, 20 bp, synthetic construct
  misc_feature 1..20: note = chemically synthesized
  source 1..20: mol_type = other DNA
cttactattttggttctttg

SEQ ID NO: 31172 - DNA, 20 bp, synthetic construct
  misc_feature 1..20: note = chemically synthesized
  source 1..20: mol_type = other DNA
tactattttggttctttgtg

SEQ ID NO: 31173 - DNA, 20 bp, synthetic construct
  misc_feature 1..20: note = chemically synthesized
  source 1..20: mol_type = other DNA
actattttggttctttgtgg

SEQ ID NO: 31174 - DNA, 20 bp, synthetic construct
  misc_feature 1..20: note = chemically synthesized
  source 1..20: mol_type = other DNA
tattttggttctttgtggag

SEQ ID NO: 31175 - DNA, 20 bp, synthetic construct
  misc_feature 1..20: note = chemically synthesized
  source 1..20: mol_type = other DNA
attttggttctttgtggagg

SEQ ID NO: 31176 - DNA, 20 bp, synthetic construct
  misc_feature 1..20: note = chemically synthesized
  source 1..20: mol_type = other DNA
tggttctttgtggaggaggt

SEQ ID NO: 31177 - DNA, 20 bp, synthetic construct
  misc_feature 1..20: note = chemically synthesized
  source 1..20: mol_type = other DNA
tttgtggaggaggtgagtgt

SEQ ID NO: 31178 - DNA, 20 bp, synthetic construct
  misc_feature 1..20: note = chemically synthesized
  source 1..20: mol_type = other DNA
aggtgagtgtcagctgccct

SEQ ID NO: 31179 - DNA, 20 bp, synthetic construct
  misc_feature 1..20: note = chemically synthesized
  source 1..20: mol_type = other DNA
gagtgtcagctgcccttagt

SEQ ID NO: 31180 - DNA, 20 bp, synthetic construct
  misc_feature 1..20: note = chemically synthesized
  source 1..20: mol_type = other DNA
gcccttagtcagtaatcttc

SEQ ID NO: 31181 - DNA, 20 bp, synthetic construct
  misc_feature 1..20: note = chemically synthesized
  source 1..20: mol_type = other DNA
cccttcccttgaaatttttt

SEQ ID NO: 31182 - DNA, 20 bp, synthetic construct
  misc_feature 1..20: note = chemically synthesized
  source 1..20: mol_type = other DNA
ctttatgtttttatttctaa

SEQ ID NO: 31183 - DNA, 20 bp, synthetic construct
  misc_feature 1..20: note = chemically synthesized
  source 1..20: mol_type = other DNA
ttttatttctaatagactga

SEQ ID NO: 31184 - DNA, 20 bp, synthetic construct
  misc_feature 1..20: note = chemically synthesized
  source 1..20: mol_type = other DNA
ttatttctaatagactgaaa

SEQ ID NO: 31185 - DNA, 20 bp, synthetic construct
  misc_feature 1..20: note = chemically synthesized
  source 1..20: mol_type = other DNA
aatcatattttaaacactct

SEQ ID NO: 31186 - DNA, 20 bp, synthetic construct
  misc_feature 1..20: note = chemically synthesized
  source 1..20: mol_type = other DNA
atcatattttaaacactcta

SEQ ID NO: 31187 - DNA, 20 bp, synthetic construct
  misc_feature 1..20: note = chemically synthesized
  source 1..20: mol_type = other DNA
ttaaacactctaaggctata

SEQ ID NO: 31188 - DNA, 20 bp, synthetic construct
  misc_feature 1..20: note = chemically synthesized
  source 1..20: mol_type = other DNA
taaacactctaaggctatat

SEQ ID NO: 31189 - DNA, 20 bp, synthetic construct
  misc_feature 1..20: note = chemically synthesized
  source 1..20: mol_type = other DNA
aaacactctaaggctatatg

SEQ ID NO: 31190 - DNA, 20 bp, synthetic construct
  misc_feature 1..20: note = chemically synthesized
  source 1..20: mol_type = other DNA
aacactctaaggctatatgg

SEQ ID NO: 31191 - DNA, 20 bp, synthetic construct
  misc_feature 1..20: note = chemically synthesized
  source 1..20: mol_type = other DNA
gctatatgggggactatctg

SEQ ID NO: 31192 - DNA, 20 bp, synthetic construct
  misc_feature 1..20: note = chemically synthesized
  source 1..20: mol_type = other DNA
ctatatgggggactatctga

SEQ ID NO: 31193 - DNA, 20 bp, synthetic construct
  misc_feature 1..20: note = chemically synthesized
  source 1..20: mol_type = other DNA
gggggactatctgaaggcct

SEQ ID NO: 31194 - DNA, 20 bp, synthetic construct
  misc_feature 1..20: note = chemically synthesized
  source 1..20: mol_type = other DNA
actatctgaaggcctcagat

SEQ ID NO: 31195 - DNA, 20 bp, synthetic construct
  misc_feature 1..20: note = chemically synthesized
  source 1..20: mol_type = other DNA
tgaaggcctcagatgagtaa

SEQ ID NO: 31196 - DNA, 20 bp, synthetic construct
  misc_feature 1..20: note = chemically synthesized
  source 1..20: mol_type = other DNA
aggcctcagatgagtaaaag

SEQ ID NO: 31197 - DNA, 20 bp, synthetic construct
  misc_feature 1..20: note = chemically synthesized
  source 1..20: mol_type = other DNA
cctcagatgagtaaaagaag

SEQ ID NO: 31198 - DNA, 20 bp, synthetic construct
  misc_feature 1..20: note = chemically synthesized
  source 1..20: mol_type = other DNA
gagtaaaagaagtagcgaat

SEQ ID NO: 31199 - DNA, 20 bp, synthetic construct
  misc_feature 1..20: note = chemically synthesized
  source 1..20: mol_type = other DNA
atcatttgtttcttcaaata

SEQ ID NO: 31200 - DNA, 20 bp, synthetic construct
  misc_feature 1..20: note = chemically synthesized
  source 1..20: mol_type = other DNA
tatttcccccttatgttctt

SEQ ID NO: 31201 - DNA, 20 bp, synthetic construct
  misc_feature 1..20: note = chemically synthesized
  source 1..20: mol_type = other DNA
aaaaatgtttgcatctacca

SEQ ID NO: 31202 - DNA, 20 bp, synthetic construct
  misc_feature 1..20: note = chemically synthesized
  source 1..20: mol_type = other DNA
aaatacgtaatctaacaaac

SEQ ID NO: 31203 - DNA, 20 bp, synthetic construct
  misc_feature 1..20: note = chemically synthesized
  source 1..20: mol_type = other DNA
aatacgtaatctaacaaaca

SEQ ID NO: 31204 - DNA, 20 bp, synthetic construct
  misc_feature 1..20: note = chemically synthesized
  source 1..20: mol_type = other DNA
ctaacaaacaaggatgtttt

SEQ ID NO: 31205 - DNA, 20 bp, synthetic construct
  misc_feature 1..20: note = chemically synthesized
  source 1..20: mol_type = other DNA
aaggatgttttaagatctct

SEQ ID NO: 31206 - DNA, 20 bp, synthetic construct
  misc_feature 1..20: note = chemically synthesized
  source 1..20: mol_type = other DNA
atgttttaagatctctgagt

SEQ ID NO: 31207 - DNA, 20 bp, synthetic construct
  misc_feature 1..20: note = chemically synthesized
  source 1..20: mol_type = other DNA
agatctctgagtaagatgca

SEQ ID NO: 31208 - DNA, 20 bp, synthetic construct
  misc_feature 1..20: note = chemically synthesized
  source 1..20: mol_type = other DNA
agatgcatagttgcaaataa

SEQ ID NO: 31209 - DNA, 20 bp, synthetic construct
  misc_feature 1..20: note = chemically synthesized
  source 1..20: mol_type = other DNA
gatgcatagttgcaaataaa

SEQ ID NO: 31210 - DNA, 20 bp, synthetic construct
  misc_feature 1..20: note = chemically synthesized
  source 1..20: mol_type = other DNA
tgcatagttgcaaataaaag

SEQ ID NO: 31211 - DNA, 20 bp, synthetic construct
  misc_feature 1..20: note = chemically synthesized
  source 1..20: mol_type = other DNA
tgcaaataaaaggagttttc

SEQ ID NO: 31212 - DNA, 20 bp, synthetic construct
  misc_feature 1..20: note = chemically synthesized
  source 1..20: mol_type = other DNA
gcaaataaaaggagttttca

SEQ ID NO: 31213 - DNA, 20 bp, synthetic construct
  misc_feature 1..20: note = chemically synthesized
  source 1..20: mol_type = other DNA
atctaataaatgtgtaccat

SEQ ID NO: 31214 - DNA, 20 bp, synthetic construct
  misc_feature 1..20: note = chemically synthesized
  source 1..20: mol_type = other DNA
tgtgtaccatcagaaactta

SEQ ID NO: 31215 - DNA, 20 bp, synthetic construct
  misc_feature 1..20: note = chemically synthesized
  source 1..20: mol_type = other DNA
aaacttatggtatattctcc

SEQ ID NO: 31216 - DNA, 20 bp, synthetic construct
  misc_feature 1..20: note = chemically synthesized
  source 1..20: mol_type = other DNA
tatggtatattctcctggaa

SEQ ID NO: 31217 - DNA, 20 bp, synthetic construct
  misc_feature 1..20: note = chemically synthesized
  source 1..20: mol_type = other DNA
atattctcctggaaaagatg

SEQ ID NO: 31218 - DNA, 20 bp, synthetic construct
  misc_feature 1..20: note = chemically synthesized
  source 1..20: mol_type = other DNA
tcctggaaaagatgaagatg

SEQ ID NO: 31219 - DNA, 20 bp, synthetic construct
  misc_feature 1..20: note = chemically synthesized
  source 1..20: mol_type = other DNA
aagatgaagatgaagaaaat

SEQ ID NO: 31220 - DNA, 20 bp, synthetic construct
  misc_feature 1..20: note = chemically synthesized
  source 1..20: mol_type = other DNA
agatgaagaaaataagtcta

SEQ ID NO: 31221 - DNA, 20 bp, synthetic construct
  misc_feature 1..20: note = chemically synthesized
  source 1..20: mol_type = other DNA
tgaagaaaataagtctacag

SEQ ID NO: 31222 - DNA, 20 bp, synthetic construct
  misc_feature 1..20: note = chemically synthesized
  source 1..20: mol_type = other DNA
aagaaaataagtctacagaa

SEQ ID NO: 31223 - DNA, 20 bp, synthetic construct
  misc_feature 1..20: note = chemically synthesized
  source 1..20: mol_type = other DNA
agaaaataagtctacagaag

SEQ ID NO: 31224 - DNA, 20 bp, synthetic construct
  misc_feature 1..20: note = chemically synthesized
  source 1..20: mol_type = other DNA
aaaataagtctacagaagag

SEQ ID NO: 31225 - DNA, 20 bp, synthetic construct
  misc_feature 1..20: note = chemically synthesized
  source 1..20: mol_type = other DNA
acagaagaggagaaattctt

SEQ ID NO: 31226 - DNA, 20 bp, synthetic construct
  misc_feature 1..20: note = chemically synthesized
  source 1..20: mol_type = other DNA
ttggaaattttgcatttttg

SEQ ID NO: 31227 - DNA, 20 bp, synthetic construct
  misc_feature 1..20: note = chemically synthesized
  source 1..20: mol_type = other DNA
aaattttgcatttttgtgga

SEQ ID NO: 31228 - DNA, 20 bp, synthetic construct
  misc_feature 1..20: note = chemically synthesized
  source 1..20: mol_type = other DNA
ttttgcatttttgtggatag

SEQ ID NO: 31229 - DNA, 20 bp, synthetic construct
  misc_feature 1..20: note = chemically synthesized
  source 1..20: mol_type = other DNA
ttttgtggatagtggttttg

SEQ ID NO: 31230 - DNA, 20 bp, synthetic construct
  misc_feature 1..20: note = chemically synthesized
  source 1..20: mol_type = other DNA
gtggatagtggttttgaaga

SEQ ID NO: 31231 - DNA, 20 bp, synthetic construct
  misc_feature 1..20: note = chemically synthesized
  source 1..20: mol_type = other DNA
tagtggttttgaagaaagct

SEQ ID NO: 31232 - DNA, 20 bp, synthetic construct
  misc_feature 1..20: note = chemically synthesized
  source 1..20: mol_type = other DNA
atatatttaaatatgttgct

SEQ ID NO: 31233 - DNA, 20 bp, synthetic construct
  misc_feature 1..20: note = chemically synthesized
  source 1..20: mol_type = other DNA
gatgtgactcccacacttta

SEQ ID NO: 31234 - DNA, 20 bp, synthetic construct
  misc_feature 1..20: note = chemically synthesized
  source 1..20: mol_type = other DNA
gactcccacactttaaagaa

SEQ ID NO: 31235 - DNA, 20 bp, synthetic construct
  misc_feature 1..20: note = chemically synthesized
  source 1..20: mol_type = other DNA
taaagaaaagttcttcattt

SEQ ID NO: 31236 - DNA, 20 bp, synthetic construct
  misc_feature 1..20: note = chemically synthesized
  source 1..20: mol_type = other DNA
ttttagttgcccttgcaaat

SEQ ID NO: 31237 - DNA, 20 bp, synthetic construct
  misc_feature 1..20: note = chemically synthesized
  source 1..20: mol_type = other DNA
gttgcccttgcaaattggct

SEQ ID NO: 31238 - DNA, 20 bp, synthetic construct
  misc_feature 1..20: note = chemically synthesized
  source 1..20: mol_type = other DNA
tcctcaacaaataattttga

SEQ ID NO: 31239 - DNA, 20 bp, synthetic construct
  misc_feature 1..20: note = chemically synthesized
  source 1..20: mol_type = other DNA
tgatggtttctaaaattgtc

SEQ ID NO: 31240 - DNA, 20 bp, synthetic construct
  misc_feature 1..20: note = chemically synthesized
  source 1..20: mol_type = other DNA
tctaaaattgtccagaattt

SEQ ID NO: 31241 - DNA, 20 bp, synthetic construct
  misc_feature 1..20: note = chemically synthesized
  source 1..20: mol_type = other DNA
ctaaaattgtccagaatttg

SEQ ID NO: 31242 - DNA, 20 bp, synthetic construct
  misc_feature 1..20: note = chemically synthesized
  source 1..20: mol_type = other DNA
ccagaatttgaggaaatact

SEQ ID NO: 31243 - DNA, 20 bp, synthetic construct
  misc_feature 1..20: note = chemically synthesized
  source 1..20: mol_type = other DNA
tttgaggaaatacttagatg

SEQ ID NO: 31244 - DNA, 20 bp, synthetic construct
  misc_feature 1..20: note = chemically synthesized
  source 1..20: mol_type = other DNA
gaggaaatacttagatgtag

SEQ ID NO: 31245 - DNA, 20 bp, synthetic construct
  misc_feature 1..20: note = chemically synthesized
  source 1..20: mol_type = other DNA
gacatcaatttatgttaact

SEQ ID NO: 31246 - DNA, 20 bp, synthetic construct
  misc_feature 1..20: note = chemically synthesized
  source 1..20: mol_type = other DNA
tgttaacttagatttattgt

SEQ ID NO: 31247 - DNA, 20 bp, synthetic construct
  misc_feature 1..20: note = chemically synthesized
  source 1..20: mol_type = other DNA
aacttagatttattgttgga

SEQ ID NO: 31248 - DNA, 20 bp, synthetic construct
  misc_feature 1..20: note = chemically synthesized
  source 1..20: mol_type = other DNA
agatttattgttggatggtt

SEQ ID NO: 31249 - DNA, 20 bp, synthetic construct
  misc_feature 1..20: note = chemically synthesized
  source 1..20: mol_type = other DNA
taatcatgtctgttcttgtc

SEQ ID NO: 31250 - DNA, 20 bp, synthetic construct
  misc_feature 1..20: note = chemically synthesized
  source 1..20: mol_type = other DNA
atgtctgttcttgtccagtc

SEQ ID NO: 31251 - DNA, 20 bp, synthetic construct
  misc_feature 1..20: note = chemically synthesized
  source 1..20: mol_type = other DNA
tctgttcttgtccagtctag

SEQ ID NO: 31252 - DNA, 20 bp, synthetic construct
  misc_feature 1..20: note = chemically synthesized
  source 1..20: mol_type = other DNA
acatctgaactgtgatttga

SEQ ID NO: 31253 - DNA, 20 bp, synthetic construct
  misc_feature 1..20: note = chemically synthesized
  source 1..20: mol_type = other DNA
tttgacagtgtccttattat

SEQ ID NO: 31254 - DNA, 20 bp, synthetic construct
  misc_feature 1..20: note = chemically synthesized
  source 1..20: mol_type = other DNA
tatcagactctgctcaatga

SEQ ID NO: 31255 - DNA, 20 bp, synthetic construct
  misc_feature 1..20: note = chemically synthesized
  source 1..20: mol_type = other DNA
gtttaaacttctttttgata

SEQ ID NO: 31256 - DNA, 20 bp, synthetic construct
  misc_feature 1..20: note = chemically synthesized
  source 1..20: mol_type = other DNA
cagtaaaaaacttttcctta

SEQ ID NO: 31257 - DNA, 20 bp, synthetic construct
  misc_feature 1..20: note = chemically synthesized
  source 1..20: mol_type = other DNA
tccttaaagatgaaattctt

SEQ ID NO: 31258 - DNA, 20 bp, synthetic construct
  misc_feature 1..20: note = chemically synthesized
  source 1..20: mol_type = other DNA
ccttaaagatgaaattctta

SEQ ID NO: 31259 - DNA, 20 bp, synthetic construct
  misc_feature 1..20: note = chemically synthesized
  source 1..20: mol_type = other DNA
atgaaattcttaaggacaat

SEQ ID NO: 31260 - DNA, 20 bp, synthetic construct
  misc_feature 1..20: note = chemically synthesized
  source 1..20: mol_type = other DNA
ttaaggacaattagcttgtg

SEQ ID NO: 31261 - DNA, 20 bp, synthetic construct
  misc_feature 1..20: note = chemically synthesized
  source 1..20: mol_type = other DNA
tatgaaaattgcttgcattt

SEQ ID NO: 31262 - DNA, 20 bp, synthetic construct
  misc_feature 1..20: note = chemically synthesized
  source 1..20: mol_type = other DNA
tgaaaattgcttgcattttg

SEQ ID NO: 31263 - DNA, 20 bp, synthetic construct
  misc_feature 1..20: note = chemically synthesized
  source 1..20: mol_type = other DNA
cttgcattttggagttacat

SEQ ID NO: 31264 - DNA, 20 bp, synthetic construct
  misc_feature 1..20: note = chemically synthesized
  source 1..20: mol_type = other DNA
tataaattaatgaatcctat

SEQ ID NO: 31265 - DNA, 20 bp, synthetic construct
  misc_feature 1..20: note = chemically synthesized
  source 1..20: mol_type = other DNA
atcctattggtaccatataa

SEQ ID NO: 31266 - DNA, 20 bp, synthetic construct
  misc_feature 1..20: note = chemically synthesized
  source 1..20: mol_type = other DNA
cttttgtgtctcgcctttca

SEQ ID NO: 31267 - DNA, 20 bp, synthetic construct
  misc_feature 1..20: note = chemically synthesized
  source 1..20: mol_type = other DNA
ttttgtgtctcgcctttcaa

SEQ ID NO: 31268 - DNA, 20 bp, synthetic construct
  misc_feature 1..20: note = chemically synthesized
  source 1..20: mol_type = other DNA
tttgtgtctcgcctttcaaa

SEQ ID NO: 31269 - DNA, 20 bp, synthetic construct
  misc_feature 1..20: note = chemically synthesized
  source 1..20: mol_type = other DNA
tcaaagggcaattttccaaa

SEQ ID NO: 31270 - DNA, 20 bp, synthetic construct
  misc_feature 1..20: note = chemically synthesized
  source 1..20: mol_type = other DNA
tccaaaaagtatattttgca

SEQ ID NO: 31271 - DNA, 20 bp, synthetic construct
  misc_feature 1..20: note = chemically synthesized
  source 1..20: mol_type = other DNA
aaagtatattttgcatggct

SEQ ID NO: 31272 - DNA, 20 bp, synthetic construct
  misc_feature 1..20: note = chemically synthesized
  source 1..20: mol_type = other DNA
aagtatattttgcatggctc

SEQ ID NO: 31273 - DNA, 20 bp, synthetic construct
  misc_feature 1..20: note = chemically synthesized
  source 1..20: mol_type = other DNA
ttttgcatggctcaggctaa

SEQ ID NO: 31274 - DNA, 20 bp, synthetic construct
  misc_feature 1..20: note = chemically synthesized
  source 1..20: mol_type = other DNA
caggctaaaagtaatgtctc

SEQ ID NO: 31275 - DNA, 20 bp, synthetic construct
  misc_feature 1..20: note = chemically synthesized
  source 1..20: mol_type = other DNA
aaaagtaatgtctccagatg

SEQ ID NO: 31276 - DNA, 20 bp, synthetic construct
  misc_feature 1..20: note = chemically synthesized
  source 1..20: mol_type = other DNA
cattgattgtgactattgat

SEQ ID NO: 31277 - DNA, 20 bp, synthetic construct
  misc_feature 1..20: note = chemically synthesized
  source 1..20: mol_type = other DNA
ttgataagatttactatgta

SEQ ID NO: 31278 - DNA, 20 bp, synthetic construct
  misc_feature 1..20: note = chemically synthesized
  source 1..20: mol_type = other DNA
agatttactatgtaaagtat

SEQ ID NO: 31279 - DNA, 20 bp, synthetic construct
  misc_feature 1..20: note = chemically synthesized
  source 1..20: mol_type = other DNA
ctatgtaaagtataagttac

SEQ ID NO: 31280 - DNA, 20 bp, synthetic construct
  misc_feature 1..20: note = chemically synthesized
  source 1..20: mol_type = other DNA
gttactggaataatacattt

SEQ ID NO: 31281 - DNA, 20 bp, synthetic construct
  misc_feature 1..20: note = chemically synthesized
  source 1..20: mol_type = other DNA
aataatacatttaagaaata

SEQ ID NO: 31282 - DNA, 20 bp, synthetic construct
  misc_feature 1..20: note = chemically synthesized
  source 1..20: mol_type = other DNA
aatacatttaagaaatatag

SEQ ID NO: 31283 - DNA, 20 bp, synthetic construct
  misc_feature 1..20: note = chemically synthesized
  source 1..20: mol_type = other DNA
atagtagctattaaaacctg

SEQ ID NO: 31284 - DNA, 20 bp, synthetic construct
  misc_feature 1..20: note = chemically synthesized
  source 1..20: mol_type = other DNA
aaacctgtagtctgatgaaa

SEQ ID NO: 31285 - DNA, 20 bp, synthetic construct
  misc_feature 1..20: note = chemically synthesized
  source 1..20: mol_type = other DNA
tgaaatggaatatgttttga

SEQ ID NO: 31286 - DNA, 20 bp, synthetic construct
  misc_feature 1..20: note = chemically synthesized
  source 1..20: mol_type = other DNA
atggaatatgttttgaaaga

SEQ ID NO: 31287 - DNA, 20 bp, synthetic construct
  misc_feature 1..20: note = chemically synthesized
  source 1..20: mol_type = other DNA
gaatatgttttgaaagacag

SEQ ID NO: 31288 - DNA, 20 bp, synthetic construct
  misc_feature 1..20: note = chemically synthesized
  source 1..20: mol_type = other DNA
gaaagacagcagtgaaaaat

SEQ ID NO: 31289 - DNA, 20 bp, synthetic construct
  misc_feature 1..20: note = chemically synthesized
  source 1..20: mol_type = other DNA
agacagcagtgaaaaatgag

SEQ ID NO: 31290 - DNA, 20 bp, synthetic construct
  misc_feature 1..20: note = chemically synthesized
  source 1..20: mol_type = other DNA
aaaaatgagaagtaatatat

SEQ ID NO: 31291 - DNA, 20 bp, synthetic construct
  misc_feature 1..20: note = chemically synthesized
  source 1..20: mol_type = other DNA
taaaattgctttttgcaatt

SEQ ID NO: 31292 - DNA, 20 bp, synthetic construct
  misc_feature 1..20: note = chemically synthesized
  source 1..20: mol_type = other DNA
tgctttttgcaattgagttg

SEQ ID NO: 31293 - DNA, 20 bp, synthetic construct
  misc_feature 1..20: note = chemically synthesized
  source 1..20: mol_type = other DNA
attgagttgaagattgatgc

SEQ ID NO: 31294 - DNA, 20 bp, synthetic construct
  misc_feature 1..20: note = chemically synthesized
  source 1..20: mol_type = other DNA
ttgagttgaagattgatgcc

SEQ ID NO: 31295 - DNA, 20 bp, synthetic construct
  misc_feature 1..20: note = chemically synthesized
  source 1..20: mol_type = other DNA
tgccaggatcttattacctc

SEQ ID NO: 31296 - DNA, 20 bp, synthetic construct
  misc_feature 1..20: note = chemically synthesized
  source 1..20: mol_type = other DNA
gccaggatcttattacctcc

SEQ ID NO: 31297 - DNA, 20 bp, synthetic construct
  misc_feature 1..20: note = chemically synthesized
  source 1..20: mol_type = other DNA
attacctccaggatttcaca

SEQ ID NO: 31298 - DNA, 20 bp, synthetic construct
  misc_feature 1..20: note = chemically synthesized
  source 1..20: mol_type = other DNA
ttacctccaggatttcacaa

SEQ ID NO: 31299 - DNA, 20 bp, synthetic construct
  misc_feature 1..20: note = chemically synthesized
  source 1..20: mol_type = other DNA
gatttcacaaaggatttctt

SEQ ID NO: 31300 - DNA, 20 bp, synthetic construct
  misc_feature 1..20: note = chemically synthesized
  source 1..20: mol_type = other DNA
cttgagtcatccccttgctc

SEQ ID NO: 31301 - DNA, 20 bp, synthetic construct
  misc_feature 1..20: note = chemically synthesized
  source 1..20: mol_type = other DNA
cttgctctagctcatgaaca

SEQ ID NO: 31302 - DNA, 20 bp, synthetic construct
  misc_feature 1..20: note = chemically synthesized
  source 1..20: mol_type = other DNA
tcatgaacaaagtattgctc

SEQ ID NO: 31303 - DNA, 20 bp, synthetic construct
  misc_feature 1..20: note = chemically synthesized
  source 1..20: mol_type = other DNA
agtattgctcaagtaatcga

SEQ ID NO: 31304 - DNA, 20 bp, synthetic construct
  misc_feature 1..20: note = chemically synthesized
  source 1..20: mol_type = other DNA
tctcacatgtgattattatt

SEQ ID NO: 31305 - DNA, 20 bp, synthetic construct
  misc_feature 1..20: note = chemically synthesized
  source 1..20: mol_type = other DNA
attattatttagtgctgtca

SEQ ID NO: 31306 - DNA, 20 bp, synthetic construct
  misc_feature 1..20: note = chemically synthesized
  source 1..20: mol_type = other DNA
ttattatttagtgctgtcac

SEQ ID NO: 31307 - DNA, 20 bp, synthetic construct
  misc_feature 1..20: note = chemically synthesized
  source 1..20: mol_type = other DNA
tcacgggaaatatcctgcct

SEQ ID NO: 31308 - DNA, 20 bp, synthetic construct
  misc_feature 1..20: note = chemically synthesized
  source 1..20: mol_type = other DNA
aatatcctgcctaagtttac

SEQ ID NO: 31309 - DNA, 20 bp, synthetic construct
  misc_feature 1..20: note = chemically synthesized
  source 1..20: mol_type = other DNA
tatcctgcctaagtttactg

SEQ ID NO: 31310 - DNA, 20 bp, synthetic construct
  misc_feature 1..20: note = chemically synthesized
  source 1..20: mol_type = other DNA
atcctgcctaagtttactgg

SEQ ID NO: 31311 - DNA, 20 bp, synthetic construct
  misc_feature 1..20: note = chemically synthesized
  source 1..20: mol_type = other DNA
cctccctatgtcctcctacc

SEQ ID NO: 31312 - DNA, 20 bp, synthetic construct
  misc_feature 1..20: note = chemically synthesized
  source 1..20: mol_type = other DNA
tttccttgcacactctactc

SEQ ID NO: 31313 - DNA, 20 bp, synthetic construct
  misc_feature 1..20: note = chemically synthesized
  source 1..20: mol_type = other DNA
ttgcacactctactccagct

SEQ ID NO: 31314 - DNA, 20 bp, synthetic construct
  misc_feature 1..20: note = chemically synthesized
  source 1..20: mol_type = other DNA
tgcacactctactccagctt

SEQ ID NO: 31315 - DNA, 20 bp, synthetic construct
  misc_feature 1..20: note = chemically synthesized
  source 1..20: mol_type = other DNA
gcacactctactccagctta

SEQ ID NO: 31316 - DNA, 20 bp, synthetic construct
  misc_feature 1..20: note = chemically synthesized
  source 1..20: mol_type = other DNA
ctctactccagcttagggcc

SEQ ID NO: 31317 - DNA, 20 bp, synthetic construct
  misc_feature 1..20: note = chemically synthesized
  source 1..20: mol_type = other DNA
tctactccagcttagggcct

SEQ ID NO: 31318 - DNA, 20 bp, synthetic construct
  misc_feature 1..20: note = chemically synthesized
  source 1..20: mol_type = other DNA
acccttttaattaccccatt

SEQ ID NO: 31319 - DNA, 20 bp, synthetic construct
  misc_feature 1..20: note = chemically synthesized
  source 1..20: mol_type = other DNA
tcaatttttgccttttcaat

SEQ ID NO: 31320 - DNA, 20 bp, synthetic construct
  misc_feature 1..20: note = chemically synthesized
  source 1..20: mol_type = other DNA
aaaatttatttatatatatt

SEQ ID NO: 31321 - DNA, 20 bp, synthetic construct
  misc_feature 1..20: note = chemically synthesized
  source 1..20: mol_type = other DNA
atttatttatatatatttag

SEQ ID NO: 31322 - DNA, 20 bp, synthetic construct
  misc_feature 1..20: note = chemically synthesized
  source 1..20: mol_type = other DNA
tttatttatatatatttaga

SEQ ID NO: 31323 - DNA, 20 bp, synthetic construct
  misc_feature 1..20: note = chemically synthesized
  source 1..20: mol_type = other DNA
tatatttagaaggtatgtac

SEQ ID NO: 31324 - DNA, 20 bp, synthetic construct
  misc_feature 1..20: note = chemically synthesized
  source 1..20: mol_type = other DNA
tcgttatcatgctgcttata

SEQ ID NO: 31325 - DNA, 20 bp, synthetic construct
  misc_feature 1..20: note = chemically synthesized
  source 1..20: mol_type = other DNA
ctgcttataaagacatacct

SEQ ID NO: 31326 - DNA, 20 bp, synthetic construct
  misc_feature 1..20: note = chemically synthesized
  source 1..20: mol_type = other DNA
tataaagacatacctgagac

SEQ ID NO: 31327 - DNA, 20 bp, synthetic construct
  misc_feature 1..20: note = chemically synthesized
  source 1..20: mol_type = other DNA
ataaagacatacctgagact

SEQ ID NO: 31328 - DNA, 20 bp, synthetic construct
  misc_feature 1..20: note = chemically synthesized
  source 1..20: mol_type = other DNA
cctgagactgggtaatttat

SEQ ID NO: 31329 - DNA, 20 bp, synthetic construct
  misc_feature 1..20: note = chemically synthesized
  source 1..20: mol_type = other DNA
ctgagactgggtaatttata

SEQ ID NO: 31330 - DNA, 20 bp, synthetic construct
  misc_feature 1..20: note = chemically synthesized
  source 1..20: mol_type = other DNA
aaaaacgtttaattgtctca

SEQ ID NO: 31331 - DNA, 20 bp, synthetic construct
  misc_feature 1..20: note = chemically synthesized
  source 1..20: mol_type = other DNA
ttaattgtctcacagttcca

SEQ ID NO: 31332 - DNA, 20 bp, synthetic construct
  misc_feature 1..20: note = chemically synthesized
  source 1..20: mol_type = other DNA
taattgtctcacagttccac

SEQ ID NO: 31333 - DNA, 20 bp, synthetic construct
  misc_feature 1..20: note = chemically synthesized
  source 1..20: mol_type = other DNA
aattgtctcacagttccaca

SEQ ID NO: 31334 - DNA, 20 bp, synthetic construct
  misc_feature 1..20: note = chemically synthesized
  source 1..20: mol_type = other DNA
gtctcacagttccacagggc

SEQ ID NO: 31335 - DNA, 20 bp, synthetic construct
  misc_feature 1..20: note = chemically synthesized
  source 1..20: mol_type = other DNA
tctcacagttccacagggct

SEQ ID NO: 31336 - DNA, 20 bp, synthetic construct
  misc_feature 1..20: note = chemically synthesized
  source 1..20: mol_type = other DNA
ctcacagttccacagggctg

SEQ ID NO: 31337 - DNA, 20 bp, synthetic construct
  misc_feature 1..20: note = chemically synthesized
  source 1..20: mol_type = other DNA
cacagttccacagggctggg

SEQ ID NO: 31338 - DNA, 20 bp, synthetic construct
  misc_feature 1..20: note = chemically synthesized
  source 1..20: mol_type = other DNA
acagttccacagggctgggg

SEQ ID NO: 31339 - DNA, 20 bp, synthetic construct
  misc_feature 1..20: note = chemically synthesized
  source 1..20: mol_type = other DNA
ccacagggctggggaggcct

SEQ ID NO: 31340 - DNA, 20 bp, synthetic construct
  misc_feature 1..20: note = chemically synthesized
  source 1..20: mol_type = other DNA
cacagggctggggaggcctc

SEQ ID NO: 31341 - DNA, 20 bp, synthetic construct
  misc_feature 1..20: note = chemically synthesized
  source 1..20: mol_type = other DNA
cctcgggaaacttacaatca

SEQ ID NO: 31342 - DNA, 20 bp, synthetic construct
  misc_feature 1..20: note = chemically synthesized
  source 1..20: mol_type = other DNA
cgggaaacttacaatcatgg

SEQ ID NO: 31343 - DNA, 20 bp, synthetic construct
  misc_feature 1..20: note = chemically synthesized
  source 1..20: mol_type = other DNA
gaaacttacaatcatggcag

SEQ ID NO: 31344 - DNA, 20 bp, synthetic construct
  misc_feature 1..20: note = chemically synthesized
  source 1..20: mol_type = other DNA
acttacaatcatggcagaag

SEQ ID NO: 31345 - DNA, 20 bp, synthetic construct
  misc_feature 1..20: note = chemically synthesized
  source 1..20: mol_type = other DNA
caaacatgtccttcttcaca

SEQ ID NO: 31346 - DNA, 20 bp, synthetic construct
  misc_feature 1..20: note = chemically synthesized
  source 1..20: mol_type = other DNA
acatgtccttcttcacatgg

SEQ ID NO: 31347 - DNA, 20 bp, synthetic construct
  misc_feature 1..20: note = chemically synthesized
  source 1..20: mol_type = other DNA
tgtccttcttcacatggcag

SEQ ID NO: 31348 - DNA, 20 bp, synthetic construct
  misc_feature 1..20: note = chemically synthesized
  source 1..20: mol_type = other DNA
cttcttcacatggcagcagc

SEQ ID NO: 31349 - DNA, 20 bp, synthetic construct
  misc_feature 1..20: note = chemically synthesized
  source 1..20: mol_type = other DNA
cttcacatggcagcagcaag

SEQ ID NO: 31350 - DNA, 20 bp, synthetic construct
  misc_feature 1..20: note = chemically synthesized
  source 1..20: mol_type = other DNA
cacatggcagcagcaagtag

SEQ ID NO: 31351 - DNA, 20 bp, synthetic construct
  misc_feature 1..20: note = chemically synthesized
  source 1..20: mol_type = other DNA
cagcagcaagtagaagtgcc

SEQ ID NO: 31352 - DNA, 20 bp, synthetic construct
  misc_feature 1..20: note = chemically synthesized
  source 1..20: mol_type = other DNA
caagtagaagtgccaagcaa

SEQ ID NO: 31353 - DNA, 20 bp, synthetic construct
  misc_feature 1..20: note = chemically synthesized
  source 1..20: mol_type = other DNA
aagtagaagtgccaagcaaa

SEQ ID NO: 31354 - DNA, 20 bp, synthetic construct
  misc_feature 1..20: note = chemically synthesized
  source 1..20: mol_type = other DNA
agtagaagtgccaagcaaaa

SEQ ID NO: 31355 - DNA, 20 bp, synthetic construct
  misc_feature 1..20: note = chemically synthesized
  source 1..20: mol_type = other DNA
gtagaagtgccaagcaaaag

SEQ ID NO: 31356 - DNA, 20 bp, synthetic construct
  misc_feature 1..20: note = chemically synthesized
  source 1..20: mol_type = other DNA
tagaagtgccaagcaaaagg

SEQ ID NO: 31357 - DNA, 20 bp, synthetic construct
  misc_feature 1..20: note = chemically synthesized
  source 1..20: mol_type = other DNA
gtgccaagcaaaagggggaa

SEQ ID NO: 31358 - DNA, 20 bp, synthetic construct
  misc_feature 1..20: note = chemically synthesized
  source 1..20: mol_type = other DNA
aaagccgcttataaaaccat

SEQ ID NO: 31359 - DNA, 20 bp, synthetic construct
  misc_feature 1..20: note = chemically synthesized
  source 1..20: mol_type = other DNA
ataaaaccatcagatcttgt

SEQ ID NO: 31360 - DNA, 20 bp, synthetic construct
  misc_feature 1..20: note = chemically synthesized
  source 1..20: mol_type = other DNA
ttgtaagaactcactatcac

SEQ ID NO: 31361 - DNA, 20 bp, synthetic construct
  misc_feature 1..20: note = chemically synthesized
  source 1..20: mol_type = other DNA
taagaactcactatcacgag

SEQ ID NO: 31362 - DNA, 20 bp, synthetic construct
  misc_feature 1..20: note = chemically synthesized
  source 1..20: mol_type = other DNA
agaactcactatcacgagaa

SEQ ID NO: 31363 - DNA, 20 bp, synthetic construct
  misc_feature 1..20: note = chemically synthesized
  source 1..20: mol_type = other DNA
cactatcacgagaagagcat

SEQ ID NO: 31364 - DNA, 20 bp, synthetic construct
  misc_feature 1..20: note = chemically synthesized
  source 1..20: mol_type = other DNA
ctatcacgagaagagcatga

SEQ ID NO: 31365 - DNA, 20 bp, synthetic construct
  misc_feature 1..20: note = chemically synthesized
  source 1..20: mol_type = other DNA
aaatccctcccacaacacgt

SEQ ID NO: 31366 - DNA, 20 bp, synthetic construct
  misc_feature 1..20: note = chemically synthesized
  source 1..20: mol_type = other DNA
aatccctcccacaacacgtg

SEQ ID NO: 31367 - DNA, 20 bp, synthetic construct
  misc_feature 1..20: note = chemically synthesized
  source 1..20: mol_type = other DNA
cccacaacacgtgaggatta

SEQ ID NO: 31368 - DNA, 20 bp, synthetic construct
  misc_feature 1..20: note = chemically synthesized
  source 1..20: mol_type = other DNA
ccacaacacgtgaggattat

SEQ ID NO: 31369 - DNA, 20 bp, synthetic construct
  misc_feature 1..20: note = chemically synthesized
  source 1..20: mol_type = other DNA
gattatgggaactacaattc

SEQ ID NO: 31370 - DNA, 20 bp, synthetic construct
  misc_feature 1..20: note = chemically synthesized
  source 1..20: mol_type = other DNA
tgggaactacaattcaagat

SEQ ID NO: 31371 - DNA, 20 bp, synthetic construct
  misc_feature 1..20: note = chemically synthesized
  source 1..20: mol_type = other DNA
ctacaattcaagatgagatt

SEQ ID NO: 31372 - DNA, 20 bp, synthetic construct
  misc_feature 1..20: note = chemically synthesized
  source 1..20: mol_type = other DNA
tacaattcaagatgagattt

SEQ ID NO: 31373 - DNA, 20 bp, synthetic construct
  misc_feature 1..20: note = chemically synthesized
  source 1..20: mol_type = other DNA
aattcaagatgagatttggg

SEQ ID NO: 31374 - DNA, 20 bp, synthetic construct
  misc_feature 1..20: note = chemically synthesized
  source 1..20: mol_type = other DNA
attcaagatgagatttgggt

SEQ ID NO: 31375 - DNA, 20 bp, synthetic construct
  misc_feature 1..20: note = chemically synthesized
  source 1..20: mol_type = other DNA
ttcaagatgagatttgggtg

SEQ ID NO: 31376 - DNA, 20 bp, synthetic construct
  misc_feature 1..20: note = chemically synthesized
  source 1..20: mol_type = other DNA
atgagatttgggtggggaca

SEQ ID NO: 31377 - DNA, 20 bp, synthetic construct
  misc_feature 1..20: note = chemically synthesized
  source 1..20: mol_type = other DNA
atttgggtggggacacagtc

SEQ ID NO: 31378 - DNA, 20 bp, synthetic construct
  misc_feature 1..20: note = chemically synthesized
  source 1..20: mol_type = other DNA
gggacacagtcaagctgtat

SEQ ID NO: 31379 - DNA, 20 bp, synthetic construct
  misc_feature 1..20: note = chemically synthesized
  source 1..20: mol_type = other DNA
ggacacagtcaagctgtatc

SEQ ID NO: 31380 - DNA, 20 bp, synthetic construct
  misc_feature 1..20: note = chemically synthesized
  source 1..20: mol_type = other DNA
gacacagtcaagctgtatca

SEQ ID NO: 31381 - DNA, 20 bp, synthetic construct
  misc_feature 1..20: note = chemically synthesized
  source 1..20: mol_type = other DNA
gtcaagctgtatcagggtac

SEQ ID NO: 31382 - DNA, 20 bp, synthetic construct
  misc_feature 1..20: note = chemically synthesized
  source 1..20: mol_type = other DNA
gctgtatcagggtacaagct

SEQ ID NO: 31383 - DNA, 20 bp, synthetic construct
  misc_feature 1..20: note = chemically synthesized
  source 1..20: mol_type = other DNA
ctgtatcagggtacaagctc

SEQ ID NO: 31384 - DNA, 20 bp, synthetic construct
  misc_feature 1..20: note = chemically synthesized
  source 1..20: mol_type = other DNA
ccttacatatgtatgttgca

SEQ ID NO: 31385 - DNA, 20 bp, synthetic construct
  misc_feature 1..20: note = chemically synthesized
  source 1..20: mol_type = other DNA
tacatatgtatgttgcatag

SEQ ID NO: 31386 - DNA, 20 bp, synthetic construct
  misc_feature 1..20: note = chemically synthesized
  source 1..20: mol_type = other DNA
atgtatgttgcatagtggtg

SEQ ID NO: 31387 - DNA, 20 bp, synthetic construct
  misc_feature 1..20: note = chemically synthesized
  source 1..20: mol_type = other DNA
gttgcatagtggtgaagtct

SEQ ID NO: 31388 - DNA, 20 bp, synthetic construct
  misc_feature 1..20: note = chemically synthesized
  source 1..20: mol_type = other DNA
agtggtgaagtctgagcttt

SEQ ID NO: 31389 - DNA, 20 bp, synthetic construct
  misc_feature 1..20: note = chemically synthesized
  source 1..20: mol_type = other DNA
ggtgaagtctgagcttttag

SEQ ID NO: 31390 - DNA, 20 bp, synthetic construct
  misc_feature 1..20: note = chemically synthesized
  source 1..20: mol_type = other DNA
ttagtggaccatcacctgaa

SEQ ID NO: 31391 - DNA, 20 bp, synthetic construct
  misc_feature 1..20: note = chemically synthesized
  source 1..20: mol_type = other DNA
tgaatgttgtatccaatccg

SEQ ID NO: 31392 - DNA, 20 bp, synthetic construct
  misc_feature 1..20: note = chemically synthesized
  source 1..20: mol_type = other DNA
gtatccaatccgtagttttt

SEQ ID NO: 31393 - DNA, 20 bp, synthetic construct
  misc_feature 1..20: note = chemically synthesized
  source 1..20: mol_type = other DNA
cctatcctcccacctttctc

SEQ ID NO: 31394 - DNA, 20 bp, synthetic construct
  misc_feature 1..20: note = chemically synthesized
  source 1..20: mol_type = other DNA
tcccacctttctctagtctc

SEQ ID NO: 31395 - DNA, 20 bp, synthetic construct
  misc_feature 1..20: note = chemically synthesized
  source 1..20: mol_type = other DNA
gtctatgcttactcatcgtt

SEQ ID NO: 31396 - DNA, 20 bp, synthetic construct
  misc_feature 1..20: note = chemically synthesized
  source 1..20: mol_type = other DNA
ctcatcgtttagctcccact

SEQ ID NO: 31397 - DNA, 20 bp, synthetic construct
  misc_feature 1..20: note = chemically synthesized
  source 1..20: mol_type = other DNA
ccacttggctctcactaaat

SEQ ID NO: 31398 - DNA, 20 bp, synthetic construct
  misc_feature 1..20: note = chemically synthesized
  source 1..20: mol_type = other DNA
gtgtttgactttctgtttct

SEQ ID NO: 31399 - DNA, 20 bp, synthetic construct
  misc_feature 1..20: note = chemically synthesized
  source 1..20: mol_type = other DNA
tgtttctgagttatttcact

SEQ ID NO: 31400 - DNA, 20 bp, synthetic construct
  misc_feature 1..20: note = chemically synthesized
  source 1..20: mol_type = other DNA
gtttctgagttatttcactg

SEQ ID NO: 31401 - DNA, 20 bp, synthetic construct
  misc_feature 1..20: note = chemically synthesized
  source 1..20: mol_type = other DNA
tcactgaggataatgtcctc

SEQ ID NO: 31402 - DNA, 20 bp, synthetic construct
  misc_feature 1..20: note = chemically synthesized
  source 1..20: mol_type = other DNA
tccagttctaaccatgtttc

SEQ ID NO: 31403 - DNA, 20 bp, synthetic construct
  misc_feature 1..20: note = chemically synthesized
  source 1..20: mol_type = other DNA
cagttctaaccatgtttcta

SEQ ID NO: 31404 - DNA, 20 bp, synthetic construct
  misc_feature 1..20: note = chemically synthesized
  source 1..20: mol_type = other DNA
ttctaaccatgtttctagag

SEQ ID NO: 31405 - DNA, 20 bp, synthetic construct
  misc_feature 1..20: note = chemically synthesized
  source 1..20: mol_type = other DNA
catgatttcattctttttta

SEQ ID NO: 31406 - DNA, 20 bp, synthetic construct
  misc_feature 1..20: note = chemically synthesized
  source 1..20: mol_type = other DNA
tttcattcttttttatggct

SEQ ID NO: 31407 - DNA, 20 bp, synthetic construct
  misc_feature 1..20: note = chemically synthesized
  source 1..20: mol_type = other DNA
ttctttatccaatcgtccat

SEQ ID NO: 31408 - DNA, 20 bp, synthetic construct
  misc_feature 1..20: note = chemically synthesized
  source 1..20: mol_type = other DNA
tttatccaatcgtccattgg

SEQ ID NO: 31409 - DNA, 20 bp, synthetic construct
  misc_feature 1..20: note = chemically synthesized
  source 1..20: mol_type = other DNA
atcgtccattggtagacatt

SEQ ID NO: 31410 - DNA, 20 bp, synthetic construct
  misc_feature 1..20: note = chemically synthesized
  source 1..20: mol_type = other DNA
tcgtccattggtagacattt

SEQ ID NO: 31411 - DNA, 20 bp, synthetic construct
  misc_feature 1..20: note = chemically synthesized
  source 1..20: mol_type = other DNA
tgattccatatctttgctat

SEQ ID NO: 31412 - DNA, 20 bp, synthetic construct
  misc_feature 1..20: note = chemically synthesized
  source 1..20: mol_type = other DNA
gattccatatctttgctatt

SEQ ID NO: 31413 - DNA, 20 bp, synthetic construct
  misc_feature 1..20: note = chemically synthesized
  source 1..20: mol_type = other DNA
catatctttgctattgggaa

SEQ ID NO: 31414 - DNA, 20 bp, synthetic construct
  misc_feature 1..20: note = chemically synthesized
  source 1..20: mol_type = other DNA
ctactttgaacatactaatg

SEQ ID NO: 31415 - DNA, 20 bp, synthetic construct
  misc_feature 1..20: note = chemically synthesized
  source 1..20: mol_type = other DNA
taatatgatctctttcactt

SEQ ID NO: 31416 - DNA, 20 bp, synthetic construct
  misc_feature 1..20: note = chemically synthesized
  source 1..20: mol_type = other DNA
aatatgatctctttcacttt

SEQ ID NO: 31417 - DNA, 20 bp, synthetic construct
  misc_feature 1..20: note = chemically synthesized
  source 1..20: mol_type = other DNA
tttcactttgggtccatacc

SEQ ID NO: 31418 - DNA, 20 bp, synthetic construct
  misc_feature 1..20: note = chemically synthesized
  source 1..20: mol_type = other DNA
cactttgggtccatacccag

SEQ ID NO: 31419 - DNA, 20 bp, synthetic construct
  misc_feature 1..20: note = chemically synthesized
  source 1..20: mol_type = other DNA
tttgggtccatacccagtag

SEQ ID NO: 31420 - DNA, 20 bp, synthetic construct
  misc_feature 1..20: note = chemically synthesized
  source 1..20: mol_type = other DNA
ttgggtccatacccagtagt

SEQ ID NO: 31421 - DNA, 20 bp, synthetic construct
  misc_feature 1..20: note = chemically synthesized
  source 1..20: mol_type = other DNA
catacccagtagtgggattg

SEQ ID NO: 31422 - DNA, 20 bp, synthetic construct
  misc_feature 1..20: note = chemically synthesized
  source 1..20: mol_type = other DNA
atacccagtagtgggattgc

SEQ ID NO: 31423 - DNA, 20 bp, synthetic construct
  misc_feature 1..20: note = chemically synthesized
  source 1..20: mol_type = other DNA
agtgggattgcaggattgaa

SEQ ID NO: 31424 - DNA, 20 bp, synthetic construct
  misc_feature 1..20: note = chemically synthesized
  source 1..20: mol_type = other DNA
gggattgcaggattgaatgg

SEQ ID NO: 31425 - DNA, 20 bp, synthetic construct
  misc_feature 1..20: note = chemically synthesized
  source 1..20: mol_type = other DNA
ttgaatggtagttctgtttc

SEQ ID NO: 31426 - DNA, 20 bp, synthetic construct
  misc_feature 1..20: note = chemically synthesized
  source 1..20: mol_type = other DNA
agttctgtttctagttcttt

SEQ ID NO: 31427 - DNA, 20 bp, synthetic construct
  misc_feature 1..20: note = chemically synthesized
  source 1..20: mol_type = other DNA
tcttcatgctgtcttccata

SEQ ID NO: 31428 - DNA, 20 bp, synthetic construct
  misc_feature 1..20: note = chemically synthesized
  source 1..20: mol_type = other DNA
ctaatttacattcttaccaa

SEQ ID NO: 31429 - DNA, 20 bp, synthetic construct
  misc_feature 1..20: note = chemically synthesized
  source 1..20: mol_type = other DNA
cattcttaccaacagtgtat

SEQ ID NO: 31430 - DNA, 20 bp, synthetic construct
  misc_feature 1..20: note = chemically synthesized
  source 1..20: mol_type = other DNA
gtttttgaactttataatga

SEQ ID NO: 31431 - DNA, 20 bp, synthetic construct
  misc_feature 1..20: note = chemically synthesized
  source 1..20: mol_type = other DNA
ataatgatagccattctgac

SEQ ID NO: 31432 - DNA, 20 bp, synthetic construct
  misc_feature 1..20: note = chemically synthesized
  source 1..20: mol_type = other DNA
atagccattctgactggcat

SEQ ID NO: 31433 - DNA, 20 bp, synthetic construct
  misc_feature 1..20: note = chemically synthesized
  source 1..20: mol_type = other DNA
tagccattctgactggcata

SEQ ID NO: 31434 - DNA, 20 bp, synthetic construct
  misc_feature 1..20: note = chemically synthesized
  source 1..20: mol_type = other DNA
gccattctgactggcataag

SEQ ID NO: 31435 - DNA, 20 bp, synthetic construct
  misc_feature 1..20: note = chemically synthesized
  source 1..20: mol_type = other DNA
ccattctgactggcataagg

SEQ ID NO: 31436 - DNA, 20 bp, synthetic construct
  misc_feature 1..20: note = chemically synthesized
  source 1..20: mol_type = other DNA
tggcataaggaggtatcata

SEQ ID NO: 31437 - DNA, 20 bp, synthetic construct
  misc_feature 1..20: note = chemically synthesized
  source 1..20: mol_type = other DNA
cataaggaggtatcatatgg

SEQ ID NO: 31438 - DNA, 20 bp, synthetic construct
  misc_feature 1..20: note = chemically synthesized
  source 1..20: mol_type = other DNA
aatttgcattctctgattat

SEQ ID NO: 31439 - DNA, 20 bp, synthetic construct
  misc_feature 1..20: note = chemically synthesized
  source 1..20: mol_type = other DNA
aacttttttttgacgtttat

SEQ ID NO: 31440 - DNA, 20 bp, synthetic construct
  misc_feature 1..20: note = chemically synthesized
  source 1..20: mol_type = other DNA
gccacttgtatgtcttcttt

SEQ ID NO: 31441 - DNA, 20 bp, synthetic construct
  misc_feature 1..20: note = chemically synthesized
  source 1..20: mol_type = other DNA
tcttttggaaaatgtctgct

SEQ ID NO: 31442 - DNA, 20 bp, synthetic construct
  misc_feature 1..20: note = chemically synthesized
  source 1..20: mol_type = other DNA
cttttggaaaatgtctgctc

SEQ ID NO: 31443 - DNA, 20 bp, synthetic construct
  misc_feature 1..20: note = chemically synthesized
  source 1..20: mol_type = other DNA
aaaatgtctgctcaggacct

SEQ ID NO: 31444 - DNA, 20 bp, synthetic construct
  misc_feature 1..20: note = chemically synthesized
  source 1..20: mol_type = other DNA
cctgagctcactgtatttgt

SEQ ID NO: 31445 - DNA, 20 bp, synthetic construct
  misc_feature 1..20: note = chemically synthesized
  source 1..20: mol_type = other DNA
ctgagctcactgtatttgtc

SEQ ID NO: 31446 - DNA, 20 bp, synthetic construct
  misc_feature 1..20: note = chemically synthesized
  source 1..20: mol_type = other DNA
tgagctcactgtatttgtca

SEQ ID NO: 31447 - DNA, 20 bp, synthetic construct
  misc_feature 1..20: note = chemically synthesized
  source 1..20: mol_type = other DNA
ctgtatttgtcagggttccc

SEQ ID NO: 31448 - DNA, 20 bp, synthetic construct
  misc_feature 1..20: note = chemically synthesized
  source 1..20: mol_type = other DNA
gtatttgtcagggttcccta

SEQ ID NO: 31449 - DNA, 20 bp, synthetic construct
  misc_feature 1..20: note = chemically synthesized
  source 1..20: mol_type = other DNA
atttgtcagggttccctaga

SEQ ID NO: 31450 - DNA, 20 bp, synthetic construct
  misc_feature 1..20: note = chemically synthesized
  source 1..20: mol_type = other DNA
gtcagggttccctagagaga

SEQ ID NO: 31451 - DNA, 20 bp, synthetic construct
  misc_feature 1..20: note = chemically synthesized
  source 1..20: mol_type = other DNA
ccctagagagacagaactaa

SEQ ID NO: 31452 - DNA, 20 bp, synthetic construct
  misc_feature 1..20: note = chemically synthesized
  source 1..20: mol_type = other DNA
cctagagagacagaactaat

SEQ ID NO: 31453 - DNA, 20 bp, synthetic construct
  misc_feature 1..20: note = chemically synthesized
  source 1..20: mol_type = other DNA
tagagagacagaactaatag

SEQ ID NO: 31454 - DNA, 20 bp, synthetic construct
  misc_feature 1..20: note = chemically synthesized
  source 1..20: mol_type = other DNA
gagacagaactaataggaga

SEQ ID NO: 31455 - DNA, 20 bp, synthetic construct
  misc_feature 1..20: note = chemically synthesized
  source 1..20: mol_type = other DNA
cagaactaataggagataga

SEQ ID NO: 31456 - DNA, 20 bp, synthetic construct
  misc_feature 1..20: note = chemically synthesized
  source 1..20: mol_type = other DNA
actaataggagatagataga

SEQ ID NO: 31457 - DNA, 20 bp, synthetic construct
  misc_feature 1..20: note = chemically synthesized
  source 1..20: mol_type = other DNA
ataggagatagatagataga

SEQ ID NO: 31458 - DNA, 20 bp, synthetic construct
  misc_feature 1..20: note = chemically synthesized
  source 1..20: mol_type = other DNA
gagatagatagatagataga

SEQ ID NO: 31459 - DNA, 20 bp, synthetic construct
  misc_feature 1..20: note = chemically synthesized
  source 1..20: mol_type = other DNA
tagatagatagatagataga

SEQ ID NO: 31460 - DNA, 20 bp, synthetic construct
  misc_feature 1..20: note = chemically synthesized
  source 1..20: mol_type = other DNA
tagatagatagatagataga

SEQ ID NO: 31461 - DNA, 20 bp, synthetic construct
  misc_feature 1..20: note = chemically synthesized
  source 1..20: mol_type = other DNA
tagatagatagatagataga

SEQ ID NO: 31462 - DNA, 20 bp, synthetic construct
  misc_feature 1..20: note = chemically synthesized
  source 1..20: mol_type = other DNA
tagatagatagatagataga

SEQ ID NO: 31463 - DNA, 20 bp, synthetic construct
  misc_feature 1..20: note = chemically synthesized
  source 1..20: mol_type = other DNA
tagatagatagatagataga

SEQ ID NO: 31464 - DNA, 20 bp, synthetic construct
  misc_feature 1..20: note = chemically synthesized
  source 1..20: mol_type = other DNA
gatagatagatagatagata

SEQ ID NO: 31465 - DNA, 20 bp, synthetic construct
  misc_feature 1..20: note = chemically synthesized
  source 1..20: mol_type = other DNA
tagatagatagatatagatt

SEQ ID NO: 31466 - DNA, 20 bp, synthetic construct
  misc_feature 1..20: note = chemically synthesized
  source 1..20: mol_type = other DNA
agatatagatttagatataa

SEQ ID NO: 31467 - DNA, 20 bp, synthetic construct
  misc_feature 1..20: note = chemically synthesized
  source 1..20: mol_type = other DNA
gatatagatttagatataaa

SEQ ID NO: 31468 - DNA, 20 bp, synthetic construct
  misc_feature 1..20: note = chemically synthesized
  source 1..20: mol_type = other DNA
atatagatttagatataaaa

SEQ ID NO: 31469 - DNA, 20 bp, synthetic construct
  misc_feature 1..20: note = chemically synthesized
  source 1..20: mol_type = other DNA
atagatttagatataaaagg

SEQ ID NO: 31470 - DNA, 20 bp, synthetic construct
  misc_feature 1..20: note = chemically synthesized
  source 1..20: mol_type = other DNA
gatataaaagggagtttatt

SEQ ID NO: 31471 - DNA, 20 bp, synthetic construct
  misc_feature 1..20: note = chemically synthesized
  source 1..20: mol_type = other DNA
ataaaagggagtttattaag

SEQ ID NO: 31472 - DNA, 20 bp, synthetic construct
  misc_feature 1..20: note = chemically synthesized
  source 1..20: mol_type = other DNA
gtgttaacttacacaatcac

SEQ ID NO: 31473 - DNA, 20 bp, synthetic construct
  misc_feature 1..20: note = chemically synthesized
  source 1..20: mol_type = other DNA
tgttaacttacacaatcaca

SEQ ID NO: 31474 - DNA, 20 bp, synthetic construct
  misc_feature 1..20: note = chemically synthesized
  source 1..20: mol_type = other DNA
acaatcacaaggtcccacaa

SEQ ID NO: 31475 - DNA, 20 bp, synthetic construct
  misc_feature 1..20: note = chemically synthesized
  source 1..20: mol_type = other DNA
caatcacaaggtcccacaat

SEQ ID NO: 31476 - DNA, 20 bp, synthetic construct
  misc_feature 1..20: note = chemically synthesized
  source 1..20: mol_type = other DNA
tcccacaataggccatctgc

SEQ ID NO: 31477 - DNA, 20 bp, synthetic construct
  misc_feature 1..20: note = chemically synthesized
  source 1..20: mol_type = other DNA
cacaataggccatctgcaag

SEQ ID NO: 31478 - DNA, 20 bp, synthetic construct
  misc_feature 1..20: note = chemically synthesized
  source 1..20: mol_type = other DNA
caataggccatctgcaagca

SEQ ID NO: 31479 - DNA, 20 bp, synthetic construct
  misc_feature 1..20: note = chemically synthesized
  source 1..20: mol_type = other DNA
aataggccatctgcaagcag

SEQ ID NO: 31480 - DNA, 20 bp, synthetic construct
  misc_feature 1..20: note = chemically synthesized
  source 1..20: mol_type = other DNA
taggccatctgcaagcagag

SEQ ID NO: 31481 - DNA, 20 bp, synthetic construct
  misc_feature 1..20: note = chemically synthesized
  source 1..20: mol_type = other DNA
ccatctgcaagcagaggagc

SEQ ID NO: 31482 - DNA, 20 bp, synthetic construct
  misc_feature 1..20: note = chemically synthesized
  source 1..20: mol_type = other DNA
catctgcaagcagaggagca

SEQ ID NO: 31483 - DNA, 20 bp, synthetic construct
  misc_feature 1..20: note = chemically synthesized
  source 1..20: mol_type = other DNA
ctgcaagcagaggagcaagg

SEQ ID NO: 31484 - DNA, 20 bp, synthetic construct
  misc_feature 1..20: note = chemically synthesized
  source 1..20: mol_type = other DNA
aagcagaggagcaaggaagc

SEQ ID NO: 31485 - DNA, 20 bp, synthetic construct
  misc_feature 1..20: note = chemically synthesized
  source 1..20: mol_type = other DNA
aggagcaaggaagccagtcc

SEQ ID NO: 31486 - DNA, 20 bp, synthetic construct
  misc_feature 1..20: note = chemically synthesized
  source 1..20: mol_type = other DNA
ggaagccagtccaagtccca

SEQ ID NO: 31487 - DNA, 20 bp, synthetic construct
  misc_feature 1..20: note = chemically synthesized
  source 1..20: mol_type = other DNA
cagtccaagtcccaaagctg

SEQ ID NO: 31488 - DNA, 20 bp, synthetic construct
  misc_feature 1..20: note = chemically synthesized
  source 1..20: mol_type = other DNA
agtccaagtcccaaagctga

SEQ ID NO: 31489 - DNA, 20 bp, synthetic construct
  misc_feature 1..20: note = chemically synthesized
  source 1..20: mol_type = other DNA
agtcccaaagctgaaggact

SEQ ID NO: 31490 - DNA, 20 bp, synthetic construct
  misc_feature 1..20: note = chemically synthesized
  source 1..20: mol_type = other DNA
tcccaaagctgaaggacttg

SEQ ID NO: 31491 - DNA, 20 bp, synthetic construct
  misc_feature 1..20: note = chemically synthesized
  source 1..20: mol_type = other DNA
ggacttggagtccaatgttt

SEQ ID NO: 31492 - DNA, 20 bp, synthetic construct
  misc_feature 1..20: note = chemically synthesized
  source 1..20: mol_type = other DNA
gacttggagtccaatgtttg

SEQ ID NO: 31493 - DNA, 20 bp, synthetic construct
  misc_feature 1..20: note = chemically synthesized
  source 1..20: mol_type = other DNA
acttggagtccaatgtttga

SEQ ID NO: 31494 - DNA, 20 bp, synthetic construct
  misc_feature 1..20: note = chemically synthesized
  source 1..20: mol_type = other DNA
tggagtccaatgtttgaggg

SEQ ID NO: 31495 - DNA, 20 bp, synthetic construct
  misc_feature 1..20: note = chemically synthesized
  source 1..20: mol_type = other DNA
ggagtccaatgtttgagggc

SEQ ID NO: 31496 - DNA, 20 bp, synthetic construct
  misc_feature 1..20: note = chemically synthesized
  source 1..20: mol_type = other DNA
gtccaatgtttgagggcagg

SEQ ID NO: 31497 - DNA, 20 bp, synthetic construct
  misc_feature 1..20: note = chemically synthesized
  source 1..20: mol_type = other DNA
gtttgagggcaggaagcatc

SEQ ID NO: 31498 - DNA, 20 bp, synthetic construct
  misc_feature 1..20: note = chemically synthesized
  source 1..20: mol_type = other DNA
agggcaggaagcatccagca

SEQ ID NO: 31499 - DNA, 20 bp, synthetic construct
  misc_feature 1..20: note = chemically synthesized
  source 1..20: mol_type = other DNA
gggcaggaagcatccagcat

SEQ ID NO: 31500 - DNA, 20 bp, synthetic construct
  misc_feature 1..20: note = chemically synthesized
  source 1..20: mol_type = other DNA
gcaggaagcatccagcatgg

SEQ ID NO: 31501 - DNA, 20 bp, synthetic construct
  misc_feature 1..20: note = chemically synthesized
  source 1..20: mol_type = other DNA
gaagcatccagcatgggaga

SEQ ID NO: 31502 - DNA, 20 bp, synthetic construct
  misc_feature 1..20: note = chemically synthesized
  source 1..20: mol_type = other DNA
tccagcatgggagaaagatg

SEQ ID NO: 31503 - DNA, 20 bp, synthetic construct
  misc_feature 1..20: note = chemically synthesized
  source 1..20: mol_type = other DNA
ccagcatgggagaaagatgt

SEQ ID NO: 31504 - DNA, 20 bp, synthetic construct
  misc_feature 1..20: note = chemically synthesized
  source 1..20: mol_type = other DNA
atgggagaaagatgtaggct

SEQ ID NO: 31505 - DNA, 20 bp, synthetic construct
  misc_feature 1..20: note = chemically synthesized
  source 1..20: mol_type = other DNA
gggagaaagatgtaggcttg

SEQ ID NO: 31506 - DNA, 20 bp, synthetic construct
  misc_feature 1..20: note = chemically synthesized
  source 1..20: mol_type = other DNA
ggagaaagatgtaggcttgg

SEQ ID NO: 31507 - DNA, 20 bp, synthetic construct
  misc_feature 1..20: note = chemically synthesized
  source 1..20: mol_type = other DNA
aagatgtaggcttggaggct

SEQ ID NO: 31508 - DNA, 20 bp, synthetic construct
  misc_feature 1..20: note = chemically synthesized
  source 1..20: mol_type = other DNA
tgtaggcttggaggctaagc

SEQ ID NO: 31509 - DNA, 20 bp, synthetic construct
  misc_feature 1..20: note = chemically synthesized
  source 1..20: mol_type = other DNA
gcttggaggctaagccagtc

SEQ ID NO: 31510 - DNA, 20 bp, synthetic construct
  misc_feature 1..20: note = chemically synthesized
  source 1..20: mol_type = other DNA
cttggaggctaagccagtcc

SEQ ID NO: 31511 - DNA, 20 bp, synthetic construct
  misc_feature 1..20: note = chemically synthesized
  source 1..20: mol_type = other DNA
tttctgcctgctttatatcc

SEQ ID NO: 31512 - DNA, 20 bp, synthetic construct
  misc_feature 1..20: note = chemically synthesized
  source 1..20: mol_type = other DNA
gctttatatcctggccacac

SEQ ID NO: 31513 - DNA, 20 bp, synthetic construct
  misc_feature 1..20: note = chemically synthesized
  source 1..20: mol_type = other DNA
tggccacactggcaactgat

SEQ ID NO: 31514 - DNA, 20 bp, synthetic construct
  misc_feature 1..20: note = chemically synthesized
  source 1..20: mol_type = other DNA
cacactggcaactgattaga

SEQ ID NO: 31515 - DNA, 20 bp, synthetic construct
  misc_feature 1..20: note = chemically synthesized
  source 1..20: mol_type = other DNA
ctgattagatggtgcccacc

SEQ ID NO: 31516 - DNA, 20 bp, synthetic construct
  misc_feature 1..20: note = chemically synthesized
  source 1..20: mol_type = other DNA
agatggtgcccacccagatt

SEQ ID NO: 31517 - DNA, 20 bp, synthetic construct
  misc_feature 1..20: note = chemically synthesized
  source 1..20: mol_type = other DNA
gatggtgcccacccagatta

SEQ ID NO: 31518 - DNA, 20 bp, synthetic construct
  misc_feature 1..20: note = chemically synthesized
  source 1..20: mol_type = other DNA
atggtgcccacccagattaa

SEQ ID NO: 31519 - DNA, 20 bp, synthetic construct
  misc_feature 1..20: note = chemically synthesized
  source 1..20: mol_type = other DNA
gtgcccacccagattaaggg

SEQ ID NO: 31520 - DNA, 20 bp, synthetic construct
  misc_feature 1..20: note = chemically synthesized
  source 1..20: mol_type = other DNA
tgcccacccagattaagggt

SEQ ID NO: 31521 - DNA, 20 bp, synthetic construct
  misc_feature 1..20: note = chemically synthesized
  source 1..20: mol_type = other DNA
aagggtgggtctgcctttcc

SEQ ID NO: 31522 - DNA, 20 bp, synthetic construct
  misc_feature 1..20: note = chemically synthesized
  source 1..20: mol_type = other DNA
actaaaatgttaatctcctt

SEQ ID NO: 31523 - DNA, 20 bp, synthetic construct
  misc_feature 1..20: note = chemically synthesized
  source 1..20: mol_type = other DNA
ctcctttggcaataccctca

SEQ ID NO: 31524 - DNA, 20 bp, synthetic construct
  misc_feature 1..20: note = chemically synthesized
  source 1..20: mol_type = other DNA
aataccctcacagacacact

SEQ ID NO: 31525 - DNA, 20 bp, synthetic construct
  misc_feature 1..20: note = chemically synthesized
  source 1..20: mol_type = other DNA
ataccctcacagacacactc

SEQ ID NO: 31526 - DNA, 20 bp, synthetic construct
  misc_feature 1..20: note = chemically synthesized
  source 1..20: mol_type = other DNA
ttgcacacttcaatccaatc

SEQ ID NO: 31527 - DNA, 20 bp, synthetic construct
  misc_feature 1..20: note = chemically synthesized
  source 1..20: mol_type = other DNA
aatccaatcaagttgacact

SEQ ID NO: 31528 - DNA, 20 bp, synthetic construct
  misc_feature 1..20: note = chemically synthesized
  source 1..20: mol_type = other DNA
cactcagtattaaccatcac

SEQ ID NO: 31529 - DNA, 20 bp, synthetic construct
  misc_feature 1..20: note = chemically synthesized
  source 1..20: mol_type = other DNA
agtccatcgcttgtcaactt

SEQ ID NO: 31530 - DNA, 20 bp, synthetic construct
  misc_feature 1..20: note = chemically synthesized
  source 1..20: mol_type = other DNA
tgagcctatacacatcccct

SEQ ID NO: 31531 - DNA, 20 bp, synthetic construct
  misc_feature 1..20: note = chemically synthesized
  source 1..20: mol_type = other DNA
gagcctatacacatcccctg

SEQ ID NO: 31532 - DNA, 20 bp, synthetic construct
  misc_feature 1..20: note = chemically synthesized
  source 1..20: mol_type = other DNA
tcatacattatcttcaaata

SEQ ID NO: 31533 - DNA, 20 bp, synthetic construct
  misc_feature 1..20: note = chemically synthesized
  source 1..20: mol_type = other DNA
cttcaaataaagacaacaat

SEQ ID NO: 31534 - DNA, 20 bp, synthetic construct
  misc_feature 1..20: note = chemically synthesized
  source 1..20: mol_type = other DNA
aatacttaaatgctgatatg

SEQ ID NO: 31535 - DNA, 20 bp, synthetic construct
  misc_feature 1..20: note = chemically synthesized
  source 1..20: mol_type = other DNA
aaatcttatgtcacatgata

SEQ ID NO: 31536 - DNA, 20 bp, synthetic construct
  misc_feature 1..20: note = chemically synthesized
  source 1..20: mol_type = other DNA
aatcttatgtcacatgataa

SEQ ID NO: 31537 - DNA, 20 bp, synthetic construct
  misc_feature 1..20: note = chemically synthesized
  source 1..20: mol_type = other DNA
atgtcacatgataaaggaaa

SEQ ID NO: 31538 - DNA, 20 bp, synthetic construct
  misc_feature 1..20: note = chemically synthesized
  source 1..20: mol_type = other DNA
tgtcacatgataaaggaaaa

SEQ ID NO: 31539 - DNA, 20 bp, synthetic construct
  misc_feature 1..20: note = chemically synthesized
  source 1..20: mol_type = other DNA
cacatgataaaggaaaaagg

SEQ ID NO: 31540 - DNA, 20 bp, synthetic construct
  misc_feature 1..20: note = chemically synthesized
  source 1..20: mol_type = other DNA
gtaaaatgtatatattttct

SEQ ID NO: 31541 - DNA, 20 bp, synthetic construct
  misc_feature 1..20: note = chemically synthesized
  source 1..20: mol_type = other DNA
tgtatatattttcttagtac

SEQ ID NO: 31542 - DNA, 20 bp, synthetic construct
  misc_feature 1..20: note = chemically synthesized
  source 1..20: mol_type = other DNA
tttcttagtacaagtgtata

SEQ ID NO: 31543 - DNA, 20 bp, synthetic construct
  misc_feature 1..20: note = chemically synthesized
  source 1..20: mol_type = other DNA
tacaagtgtatacagacacg

SEQ ID NO: 31544 - DNA, 20 bp, synthetic construct
  misc_feature 1..20: note = chemically synthesized
  source 1..20: mol_type = other DNA
acaagtgtatacagacacga

SEQ ID NO: 31545 - DNA, 20 bp, synthetic construct
  misc_feature 1..20: note = chemically synthesized
  source 1..20: mol_type = other DNA
cacgaaggtgtttttaacaa

SEQ ID NO: 31546 - DNA, 20 bp, synthetic construct
  misc_feature 1..20: note = chemically synthesized
  source 1..20: mol_type = other DNA
gaaggtgtttttaacaaaag

SEQ ID NO: 31547 - DNA, 20 bp, synthetic construct
  misc_feature 1..20: note = chemically synthesized
  source 1..20: mol_type = other DNA
aaggtgtttttaacaaaaga

SEQ ID NO: 31548 - DNA, 20 bp, synthetic construct
  misc_feature 1..20: note = chemically synthesized
  source 1..20: mol_type = other DNA
ggtgtttttaacaaaagaag

SEQ ID NO: 31549 - DNA, 20 bp, synthetic construct
  misc_feature 1..20: note = chemically synthesized
  source 1..20: mol_type = other DNA
gtgtttttaacaaaagaagg

SEQ ID NO: 31550 - DNA, 20 bp, synthetic construct
  misc_feature 1..20: note = chemically synthesized
  source 1..20: mol_type = other DNA
ggaaatactcatgacaatta

SEQ ID NO: 31551 - DNA, 20 bp, synthetic construct
  misc_feature 1..20: note = chemically synthesized
  source 1..20: mol_type = other DNA
acagtccttgtatctgcaat

SEQ ID NO: 31552 - DNA, 20 bp, synthetic construct
  misc_feature 1..20: note = chemically synthesized
  source 1..20: mol_type = other DNA
tgcaattggtcacgtgatcg

SEQ ID NO: 31553 - DNA, 20 bp, synthetic construct
  misc_feature 1..20: note = chemically synthesized
  source 1..20: mol_type = other DNA
attggtcacgtgatcgtagc

SEQ ID NO: 31554 - DNA, 20 bp, synthetic construct
  misc_feature 1..20: note = chemically synthesized
  source 1..20: mol_type = other DNA
ttctgtattccctttgccct

SEQ ID NO: 31555 - DNA, 20 bp, synthetic construct
  misc_feature 1..20: note = chemically synthesized
  source 1..20: mol_type = other DNA
gtattccctttgccctcagc

SEQ ID NO: 31556 - DNA, 20 bp, synthetic construct
  misc_feature 1..20: note = chemically synthesized
  source 1..20: mol_type = other DNA
tttgccctcagcaagcacct

SEQ ID NO: 31557 - DNA, 20 bp, synthetic construct
  misc_feature 1..20: note = chemically synthesized
  source 1..20: mol_type = other DNA
gccctcagcaagcacctcag

SEQ ID NO: 31558 - DNA, 20 bp, synthetic construct
  misc_feature 1..20: note = chemically synthesized
  source 1..20: mol_type = other DNA
ccctcagcaagcacctcagc

SEQ ID NO: 31559 - DNA, 20 bp, synthetic construct
  misc_feature 1..20: note = chemically synthesized
  source 1..20: mol_type = other DNA
ttttttttttttttttttcc

SEQ ID NO: 31560 - DNA, 20 bp, synthetic construct
  misc_feature 1..20: note = chemically synthesized
  source 1..20: mol_type = other DNA
tttttttttttttttcctgg

SEQ ID NO: 31561 - DNA, 20 bp, synthetic construct
  misc_feature 1..20: note = chemically synthesized
  source 1..20: mol_type = other DNA
tttttttttttttcctggtg

SEQ ID NO: 31562 - DNA, 20 bp, synthetic construct
  misc_feature 1..20: note = chemically synthesized
  source 1..20: mol_type = other DNA
gtgacccaaacctttatttg

SEQ ID NO: 31563 - DNA, 20 bp, synthetic construct
  misc_feature 1..20: note = chemically synthesized
  source 1..20: mol_type = other DNA
cctttatttgtagtcctgcc

SEQ ID NO: 31564 - DNA, 20 bp, synthetic construct
  misc_feature 1..20: note = chemically synthesized
  source 1..20: mol_type = other DNA
atttgtagtcctgcctggaa

SEQ ID NO: 31565 - DNA, 20 bp, synthetic construct
  misc_feature 1..20: note = chemically synthesized
  source 1..20: mol_type = other DNA
gtcctgcctggaatggcctg

SEQ ID NO: 31566 - DNA, 20 bp, synthetic construct
  misc_feature 1..20: note = chemically synthesized
  source 1..20: mol_type = other DNA
ctgcctggaatggcctgtag

SEQ ID NO: 31567 - DNA, 20 bp, synthetic construct
  misc_feature 1..20: note = chemically synthesized
  source 1..20: mol_type = other DNA
tttcccactgaccttaattc

SEQ ID NO: 31568 - DNA, 20 bp, synthetic construct
  misc_feature 1..20: note = chemically synthesized
  source 1..20: mol_type = other DNA
ttcccactgaccttaattcc

SEQ ID NO: 31569 - DNA, 20 bp, synthetic construct
  misc_feature 1..20: note = chemically synthesized
  source 1..20: mol_type = other DNA
ctgaccttaattccaggaca

SEQ ID NO: 31570 - DNA, 20 bp, synthetic construct
  misc_feature 1..20: note = chemically synthesized
  source 1..20: mol_type = other DNA
ttccaggacatggtaaaact

SEQ ID NO: 31571 - DNA, 20 bp, synthetic construct
  misc_feature 1..20: note = chemically synthesized
  source 1..20: mol_type = other DNA
ccaggacatggtaaaactaa

SEQ ID NO: 31572 - DNA, 20 bp, synthetic construct
  misc_feature 1..20: note = chemically synthesized
  source 1..20: mol_type = other DNA
aaaactaagagacaccctaa

SEQ ID NO: 31573 - DNA, 20 bp, synthetic construct
  misc_feature 1..20: note = chemically synthesized
  source 1..20: mol_type = other DNA
acgcttccttacctccattg

SEQ ID NO: 31574 - DNA, 20 bp, synthetic construct
  misc_feature 1..20: note = chemically synthesized
  source 1..20: mol_type = other DNA
gcttccttacctccattgtg

SEQ ID NO: 31575 - DNA, 20 bp, synthetic construct
  misc_feature 1..20: note = chemically synthesized
  source 1..20: mol_type = other DNA
ttacctccattgtggagttg

SEQ ID NO: 31576 - DNA, 20 bp, synthetic construct
  misc_feature 1..20: note = chemically synthesized
  source 1..20: mol_type = other DNA
gtagactgatttcatcttga

SEQ ID NO: 31577 - DNA, 20 bp, synthetic construct
  misc_feature 1..20: note = chemically synthesized
  source 1..20: mol_type = other DNA
ctgatttcatcttgatagtc

SEQ ID NO: 31578 - DNA, 20 bp, synthetic construct
  misc_feature 1..20: note = chemically synthesized
  source 1..20: mol_type = other DNA
tgatttcatcttgatagtct

SEQ ID NO: 31579 - DNA, 20 bp, synthetic construct
  misc_feature 1..20: note = chemically synthesized
  source 1..20: mol_type = other DNA
atagtctgggttaatcaccg

SEQ ID NO: 31580 - DNA, 20 bp, synthetic construct
  misc_feature 1..20: note = chemically synthesized
  source 1..20: mol_type = other DNA
caacactgtaactctcttct

SEQ ID NO: 31581 - DNA, 20 bp, synthetic construct
  misc_feature 1..20: note = chemically synthesized
  source 1..20: mol_type = other DNA
cttcttagcctgttgactta

SEQ ID NO: 31582 - DNA, 20 bp, synthetic construct
  misc_feature 1..20: note = chemically synthesized
  source 1..20: mol_type = other DNA
ttcttagcctgttgacttaa

SEQ ID NO: 31583 - DNA, 20 bp, synthetic construct
  misc_feature 1..20: note = chemically synthesized
  source 1..20: mol_type = other DNA
ttagcctgttgacttaaagg

SEQ ID NO: 31584 - DNA, 20 bp, synthetic construct
  misc_feature 1..20: note = chemically synthesized
  source 1..20: mol_type = other DNA
tagcctgttgacttaaaggt

SEQ ID NO: 31585 - DNA, 20 bp, synthetic construct
  misc_feature 1..20: note = chemically synthesized
  source 1..20: mol_type = other DNA
gcctgttgacttaaaggtgg

SEQ ID NO: 31586 - DNA, 20 bp, synthetic construct
  misc_feature 1..20: note = chemically synthesized
  source 1..20: mol_type = other DNA
cctgttgacttaaaggtggg

SEQ ID NO: 31587 - DNA, 20 bp, synthetic construct
  misc_feature 1..20: note = chemically synthesized
  source 1..20: mol_type = other DNA
tgttgacttaaaggtgggag

SEQ ID NO: 31588 - DNA, 20 bp, synthetic construct
  misc_feature 1..20: note = chemically synthesized
  source 1..20: mol_type = other DNA
ttaaaggtgggaggagccca

SEQ ID NO: 31589 - DNA, 20 bp, synthetic construct
  misc_feature 1..20: note = chemically synthesized
  source 1..20: mol_type = other DNA
tgggaggagcccaaagtgtc

SEQ ID NO: 31590 - DNA, 20 bp, synthetic construct
  misc_feature 1..20: note = chemically synthesized
  source 1..20: mol_type = other DNA
gggaggagcccaaagtgtcc

SEQ ID NO: 31591 - DNA, 20 bp, synthetic construct
  misc_feature 1..20: note = chemically synthesized
  source 1..20: mol_type = other DNA
aggagcccaaagtgtccagg

SEQ ID NO: 31592 - DNA, 20 bp, synthetic construct
  misc_feature 1..20: note = chemically synthesized
  source 1..20: mol_type = other DNA
caggtggcaatcttaatttg

SEQ ID NO: 31593 - DNA, 20 bp, synthetic construct
  misc_feature 1..20: note = chemically synthesized
  source 1..20: mol_type = other DNA
aatcttaatttgcagtttaa

SEQ ID NO: 31594 - DNA, 20 bp, synthetic construct
  misc_feature 1..20: note = chemically synthesized
  source 1..20: mol_type = other DNA
ggaatcattattgtgtcacc

SEQ ID NO: 31595 - DNA, 20 bp, synthetic construct
  misc_feature 1..20: note = chemically synthesized
  source 1..20: mol_type = other DNA
atcattattgtgtcacctgg

SEQ ID NO: 31596 - DNA, 20 bp, synthetic construct
  misc_feature 1..20: note = chemically synthesized
  source 1..20: mol_type = other DNA
attattgtgtcacctggcgg

SEQ ID NO: 31597 - DNA, 20 bp, synthetic construct
  misc_feature 1..20: note = chemically synthesized
  source 1..20: mol_type = other DNA
ggcggcagtgttcctccctc

SEQ ID NO: 31598 - DNA, 20 bp, synthetic construct
  misc_feature 1..20: note = chemically synthesized
  source 1..20: mol_type = other DNA
gtgttcctccctctggaact

SEQ ID NO: 31599 - DNA, 20 bp, synthetic construct
  misc_feature 1..20: note = chemically synthesized
  source 1..20: mol_type = other DNA
cctctggaactaagacctct

SEQ ID NO: 31600 - DNA, 20 bp, synthetic construct
  misc_feature 1..20: note = chemically synthesized
  source 1..20: mol_type = other DNA
tggaactaagacctctaagc

SEQ ID NO: 31601 - DNA, 20 bp, synthetic construct
  misc_feature 1..20: note = chemically synthesized
  source 1..20: mol_type = other DNA
aactaagacctctaagccag

SEQ ID NO: 31602 - DNA, 20 bp, synthetic construct
  misc_feature 1..20: note = chemically synthesized
  source 1..20: mol_type = other DNA
gccagcagaacataatgcca

SEQ ID NO: 31603 - DNA, 20 bp, synthetic construct
  misc_feature 1..20: note = chemically synthesized
  source 1..20: mol_type = other DNA
ccagcagaacataatgccat

SEQ ID NO: 31604 - DNA, 20 bp, synthetic construct
  misc_feature 1..20: note = chemically synthesized
  source 1..20: mol_type = other DNA
agaacataatgccatgggaa

SEQ ID NO: 31605 - DNA, 20 bp, synthetic construct
  misc_feature 1..20: note = chemically synthesized
  source 1..20: mol_type = other DNA
gaacataatgccatgggaac

SEQ ID NO: 31606 - DNA, 20 bp, synthetic construct
  misc_feature 1..20: note = chemically synthesized
  source 1..20: mol_type = other DNA
cataatgccatgggaacagg

SEQ ID NO: 31607 - DNA, 20 bp, synthetic construct
  misc_feature 1..20: note = chemically synthesized
  source 1..20: mol_type = other DNA
acaggaagcaaaaattttgc

SEQ ID NO: 31608 - DNA, 20 bp, synthetic construct
  misc_feature 1..20: note = chemically synthesized
  source 1..20: mol_type = other DNA
ggaagcaaaaattttgctag

SEQ ID NO: 31609 - DNA, 20 bp, synthetic construct
  misc_feature 1..20: note = chemically synthesized
  source 1..20: mol_type = other DNA
aaattttgctagtggaacac

SEQ ID NO: 31610 - DNA, 20 bp, synthetic construct
  misc_feature 1..20: note = chemically synthesized
  source 1..20: mol_type = other DNA
aattttgctagtggaacact

SEQ ID NO: 31611 - DNA, 20 bp, synthetic construct
  misc_feature 1..20: note = chemically synthesized
  source 1..20: mol_type = other DNA
attttgctagtggaacacta

SEQ ID NO: 31612 - DNA, 20 bp, synthetic construct
  misc_feature 1..20: note = chemically synthesized
  source 1..20: mol_type = other DNA
ttttgctagtggaacactag

SEQ ID NO: 31613 - DNA, 20 bp, synthetic construct
  misc_feature 1..20: note = chemically synthesized
  source 1..20: mol_type = other DNA
tagtggaacactaggggtga

SEQ ID NO: 31614 - DNA, 20 bp, synthetic construct
  misc_feature 1..20: note = chemically synthesized
  source 1..20: mol_type = other DNA
ggaacactaggggtgatggt

SEQ ID NO: 31615 - DNA, 20 bp, synthetic construct
  misc_feature 1..20: note = chemically synthesized
  source 1..20: mol_type = other DNA
acactaggggtgatggtgag

SEQ ID NO: 31616 - DNA, 20 bp, synthetic construct
  misc_feature 1..20: note = chemically synthesized
  source 1..20: mol_type = other DNA
cacttccaccctttgattcc

SEQ ID NO: 31617 - DNA, 20 bp, synthetic construct
  misc_feature 1..20: note = chemically synthesized
  source 1..20: mol_type = other DNA
ggacccgtgaatcctgtcta

SEQ ID NO: 31618 - DNA, 20 bp, synthetic construct
  misc_feature 1..20: note = chemically synthesized
  source 1..20: mol_type = other DNA
gacccgtgaatcctgtctat

SEQ ID NO: 31619 - DNA, 20 bp, synthetic construct
  misc_feature 1..20: note = chemically synthesized
  source 1..20: mol_type = other DNA
cccgtgaatcctgtctatgg

SEQ ID NO: 31620 - DNA, 20 bp, synthetic construct
  misc_feature 1..20: note = chemically synthesized
  source 1..20: mol_type = other DNA
aatcctgtctatgggagaaa

SEQ ID NO: 31621 - DNA, 20 bp, synthetic construct
  misc_feature 1..20: note = chemically synthesized
  source 1..20: mol_type = other DNA
ggagaaacagtaccatatat

SEQ ID NO: 31622 - DNA, 20 bp, synthetic construct
  misc_feature 1..20: note = chemically synthesized
  source 1..20: mol_type = other DNA
ccatatattggacactgatt

SEQ ID NO: 31623 - DNA, 20 bp, synthetic construct
  misc_feature 1..20: note = chemically synthesized
  source 1..20: mol_type = other DNA
atatattggacactgattca

SEQ ID NO: 31624 - DNA, 20 bp, synthetic construct
  misc_feature 1..20: note = chemically synthesized
  source 1..20: mol_type = other DNA
acactgattcagagcataca

SEQ ID NO: 31625 - DNA, 20 bp, synthetic construct
  misc_feature 1..20: note = chemically synthesized
  source 1..20: mol_type = other DNA
tcagagcatacacagccttc

SEQ ID NO: 31626 - DNA, 20 bp, synthetic construct
  misc_feature 1..20: note = chemically synthesized
  source 1..20: mol_type = other DNA
agagcatacacagccttctg

SEQ ID NO: 31627 - DNA, 20 bp, synthetic construct
  misc_feature 1..20: note = chemically synthesized
  source 1..20: mol_type = other DNA
ccttctggagaactttgccc

SEQ ID NO: 31628 - DNA, 20 bp, synthetic construct
  misc_feature 1..20: note = chemically synthesized
  source 1..20: mol_type = other DNA
cttctggagaactttgcccc

SEQ ID NO: 31629 - DNA, 20 bp, synthetic construct
  misc_feature 1..20: note = chemically synthesized
  source 1..20: mol_type = other DNA
aactttgccccaggcctgca

SEQ ID NO: 31630 - DNA, 20 bp, synthetic construct
  misc_feature 1..20: note = chemically synthesized
  source 1..20: mol_type = other DNA
gcctgcaaagtattgtcacc

SEQ ID NO: 31631 - DNA, 20 bp, synthetic construct
  misc_feature 1..20: note = chemically synthesized
  source 1..20: mol_type = other DNA
gcaaagtattgtcacctagt

SEQ ID NO: 31632 - DNA, 20 bp, synthetic construct
  misc_feature 1..20: note = chemically synthesized
  source 1..20: mol_type = other DNA
cattgtaatcgtgacttcaa

SEQ ID NO: 31633 - DNA, 20 bp, synthetic construct
  misc_feature 1..20: note = chemically synthesized
  source 1..20: mol_type = other DNA
attgtaatcgtgacttcaaa

SEQ ID NO: 31634 - DNA, 20 bp, synthetic construct
  misc_feature 1..20: note = chemically synthesized
  source 1..20: mol_type = other DNA
gacttcaaaaggccattcaa

SEQ ID NO: 31635 - DNA, 20 bp, synthetic construct
  misc_feature 1..20: note = chemically synthesized
  source 1..20: mol_type = other DNA
aggccattcaaaagctgctt

SEQ ID NO: 31636 - DNA, 20 bp, synthetic construct
  misc_feature 1..20: note = chemically synthesized
  source 1..20: mol_type = other DNA
ggccattcaaaagctgcttc

SEQ ID NO: 31637 - DNA, 20 bp, synthetic construct
  misc_feature 1..20: note = chemically synthesized
  source 1..20: mol_type = other DNA
caaaagctgcttcaggatga

SEQ ID NO: 31638 - DNA, 20 bp, synthetic construct
  misc_feature 1..20: note = chemically synthesized
  source 1..20: mol_type = other DNA
aaaagctgcttcaggatgat

SEQ ID NO: 31639 - DNA, 20 bp, synthetic construct
  misc_feature 1..20: note = chemically synthesized
  source 1..20: mol_type = other DNA
aaagctgcttcaggatgata

SEQ ID NO: 31640 - DNA, 20 bp, synthetic construct
  misc_feature 1..20: note = chemically synthesized
  source 1..20: mol_type = other DNA
cttcaggatgatagggatca

SEQ ID NO: 31641 - DNA, 20 bp, synthetic construct
  misc_feature 1..20: note = chemically synthesized
  source 1..20: mol_type = other DNA
aggatgatagggatcatggt

SEQ ID NO: 31642 - DNA, 20 bp, synthetic construct
  misc_feature 1..20: note = chemically synthesized
  source 1..20: mol_type = other DNA
gatagggatcatggtaagac

SEQ ID NO: 31643 - DNA, 20 bp, synthetic construct
  misc_feature 1..20: note = chemically synthesized
  source 1..20: mol_type = other DNA
gtaagaccagtaaattccat

SEQ ID NO: 31644 - DNA, 20 bp, synthetic construct
  misc_feature 1..20: note = chemically synthesized
  source 1..20: mol_type = other DNA
ccagtaaattccatgagcat

SEQ ID NO: 31645 - DNA, 20 bp, synthetic construct
  misc_feature 1..20: note = chemically synthesized
  source 1..20: mol_type = other DNA
agcccactgtcacacttctt

SEQ ID NO: 31646 - DNA, 20 bp, synthetic construct
  misc_feature 1..20: note = chemically synthesized
  source 1..20: mol_type = other DNA
gtcacacttctttagccata

SEQ ID NO: 31647 - DNA, 20 bp, synthetic construct
  misc_feature 1..20: note = chemically synthesized
  source 1..20: mol_type = other DNA
cacttctttagccataaagt

SEQ ID NO: 31648 - DNA, 20 bp, synthetic construct
  misc_feature 1..20: note = chemically synthesized
  source 1..20: mol_type = other DNA
ttctttagccataaagtgag

SEQ ID NO: 31649 - DNA, 20 bp, synthetic construct
  misc_feature 1..20: note = chemically synthesized
  source 1..20: mol_type = other DNA
tagccataaagtgagtggct

SEQ ID NO: 31650 - DNA, 20 bp, synthetic construct
  misc_feature 1..20: note = chemically synthesized
  source 1..20: mol_type = other DNA
cataaagtgagtggcttggt

SEQ ID NO: 31651 - DNA, 20 bp, synthetic construct
  misc_feature 1..20: note = chemically synthesized
  source 1..20: mol_type = other DNA
aaagtgagtggcttggtcag

SEQ ID NO: 31652 - DNA, 20 bp, synthetic construct
  misc_feature 1..20: note = chemically synthesized
  source 1..20: mol_type = other DNA
tggtcagaagcaatgctgtg

SEQ ID NO: 31653 - DNA, 20 bp, synthetic construct
  misc_feature 1..20: note = chemically synthesized
  source 1..20: mol_type = other DNA
tgctgtgtggaataccatga

SEQ ID NO: 31654 - DNA, 20 bp, synthetic construct
  misc_feature 1..20: note = chemically synthesized
  source 1..20: mol_type = other DNA
tgtgtggaataccatgacag

SEQ ID NO: 31655 - DNA, 20 bp, synthetic construct
  misc_feature 1..20: note = chemically synthesized
  source 1..20: mol_type = other DNA
gaataccatgacagtggata

SEQ ID NO: 31656 - DNA, 20 bp, synthetic construct
  misc_feature 1..20: note = chemically synthesized
  source 1..20: mol_type = other DNA
tacggcattctgtgattcca

SEQ ID NO: 31657 - DNA, 20 bp, synthetic construct
  misc_feature 1..20: note = chemically synthesized
  source 1..20: mol_type = other DNA
gcattctgtgattccatgga

SEQ ID NO: 31658 - DNA, 20 bp, synthetic construct
  misc_feature 1..20: note = chemically synthesized
  source 1..20: mol_type = other DNA
ttctgtgattccatggatgg

SEQ ID NO: 31659 - DNA, 20 bp, synthetic construct
  misc_feature 1..20: note = chemically synthesized
  source 1..20: mol_type = other DNA
gattccatggatggtagtct

SEQ ID NO: 31660 - DNA, 20 bp, synthetic construct
  misc_feature 1..20: note = chemically synthesized
  source 1..20: mol_type = other DNA
atggatggtagtcttggcat

SEQ ID NO: 31661 - DNA, 20 bp, synthetic construct
  misc_feature 1..20: note = chemically synthesized
  source 1..20: mol_type = other DNA
gtagtcttggcataagcatt

SEQ ID NO: 31662 - DNA, 20 bp, synthetic construct
  misc_feature 1..20: note = chemically synthesized
  source 1..20: mol_type = other DNA
cttggcataagcattgagtt

SEQ ID NO: 31663 - DNA, 20 bp, synthetic construct
  misc_feature 1..20: note = chemically synthesized
  source 1..20: mol_type = other DNA
ttggcataagcattgagttc

SEQ ID NO: 31664 - DNA, 20 bp, synthetic construct
  misc_feature 1..20: note = chemically synthesized
  source 1..20: mol_type = other DNA
ataagcattgagttcaggat

SEQ ID NO: 31665 - DNA, 20 bp, synthetic construct
  misc_feature 1..20: note = chemically synthesized
  source 1..20: mol_type = other DNA
taagcattgagttcaggatt

SEQ ID NO: 31666 - DNA, 20 bp, synthetic construct
  misc_feature 1..20: note = chemically synthesized
  source 1..20: mol_type = other DNA
aggattgggaaacccatatc

SEQ ID NO: 31667 - DNA, 20 bp, synthetic construct
  misc_feature 1..20: note = chemically synthesized
  source 1..20: mol_type = other DNA
gattgggaaacccatatcca

SEQ ID NO: 31668 - DNA, 20 bp, synthetic construct
  misc_feature 1..20: note = chemically synthesized
  source 1..20: mol_type = other DNA
gggaaacccatatccagagt

SEQ ID NO: 31669 - DNA, 20 bp, synthetic construct
  misc_feature 1..20: note = chemically synthesized
  source 1..20: mol_type = other DNA
tccagagtaagtgtctattc

SEQ ID NO: 31670 - DNA, 20 bp, synthetic construct
  misc_feature 1..20: note = chemically synthesized
  source 1..20: mol_type = other DNA
gagtaagtgtctattccagt

SEQ ID NO: 31671 - DNA, 20 bp, synthetic construct
  misc_feature 1..20: note = chemically synthesized
  source 1..20: mol_type = other DNA
agtaagtgtctattccagtg

SEQ ID NO: 31672 - DNA, 20 bp, synthetic construct
  misc_feature 1..20: note = chemically synthesized
  source 1..20: mol_type = other DNA
gtgtctattccagtgaggac

SEQ ID NO: 31673 - DNA, 20 bp, synthetic construct
  misc_feature 1..20: note = chemically synthesized
  source 1..20: mol_type = other DNA
agcctctgccctttccatga

SEQ ID NO: 31674 - DNA, 20 bp, synthetic construct
  misc_feature 1..20: note = chemically synthesized
  source 1..20: mol_type = other DNA
ctctgccctttccatgatgg

SEQ ID NO: 31675 - DNA, 20 bp, synthetic construct
  misc_feature 1..20: note = chemically synthesized
  source 1..20: mol_type = other DNA
ctgccctttccatgatggaa

SEQ ID NO: 31676 - DNA, 20 bp, synthetic construct
  misc_feature 1..20: note = chemically synthesized
  source 1..20: mol_type = other DNA
tgccctttccatgatggaag

SEQ ID NO: 31677 - DNA, 20 bp, synthetic construct
  misc_feature 1..20: note = chemically synthesized
  source 1..20: mol_type = other DNA
caatataatcaacctgccac

SEQ ID NO: 31678 - DNA, 20 bp, synthetic construct
  misc_feature 1..20: note = chemically synthesized
  source 1..20: mol_type = other DNA
aatataatcaacctgccacc

SEQ ID NO: 31679 - DNA, 20 bp, synthetic construct
  misc_feature 1..20: note = chemically synthesized
  source 1..20: mol_type = other DNA
ataatcaacctgccaccagg

SEQ ID NO: 31680 - DNA, 20 bp, synthetic construct
  misc_feature 1..20: note = chemically synthesized
  source 1..20: mol_type = other DNA
tcaacctgccaccaggtagc

SEQ ID NO: 31681 - DNA, 20 bp, synthetic construct
  misc_feature 1..20: note = chemically synthesized
  source 1..20: mol_type = other DNA
ggtagctggctgatcacccc

SEQ ID NO: 31682 - DNA, 20 bp, synthetic construct
  misc_feature 1..20: note = chemically synthesized
  source 1..20: mol_type = other DNA
gtagctggctgatcaccccg

SEQ ID NO: 31683 - DNA, 20 bp, synthetic construct
  misc_feature 1..20: note = chemically synthesized
  source 1..20: mol_type = other DNA
tggctgatcaccccgaggaa

SEQ ID NO: 31684 - DNA, 20 bp, synthetic construct
  misc_feature 1..20: note = chemically synthesized
  source 1..20: mol_type = other DNA
ccgaggaatggtgccatatc

SEQ ID NO: 31685 - DNA, 20 bp, synthetic construct
  misc_feature 1..20: note = chemically synthesized
  source 1..20: mol_type = other DNA
cgaggaatggtgccatatca

SEQ ID NO: 31686 - DNA, 20 bp, synthetic construct
  misc_feature 1..20: note = chemically synthesized
  source 1..20: mol_type = other DNA
gaggaatggtgccatatcaa

SEQ ID NO: 31687 - DNA, 20 bp, synthetic construct
  misc_feature 1..20: note = chemically synthesized
  source 1..20: mol_type = other DNA
atggtgccatatcaagggct

SEQ ID NO: 31688 - DNA, 20 bp, synthetic construct
  misc_feature 1..20: note = chemically synthesized
  source 1..20: mol_type = other DNA
ccatatcaagggcttagtgt

SEQ ID NO: 31689 - DNA, 20 bp, synthetic construct
  misc_feature 1..20: note = chemically synthesized
  source 1..20: mol_type = other DNA
ttagtgttggtctctgatgc

SEQ ID NO: 31690 - DNA, 20 bp, synthetic construct
  misc_feature 1..20: note = chemically synthesized
  source 1..20: mol_type = other DNA
tgttggtctctgatgctggc

SEQ ID NO: 31691 - DNA, 20 bp, synthetic construct
  misc_feature 1..20: note = chemically synthesized
  source 1..20: mol_type = other DNA
tggtctctgatgctggcaag

SEQ ID NO: 31692 - DNA, 20 bp, synthetic construct
  misc_feature 1..20: note = chemically synthesized
  source 1..20: mol_type = other DNA
tctctgatgctggcaagcag

SEQ ID NO: 31693 - DNA, 20 bp, synthetic construct
  misc_feature 1..20: note = chemically synthesized
  source 1..20: mol_type = other DNA
atgctggcaagcagtggctg

SEQ ID NO: 31694 - DNA, 20 bp, synthetic construct
  misc_feature 1..20: note = chemically synthesized
  source 1..20: mol_type = other DNA
tggcaagcagtggctgtggc

SEQ ID NO: 31695 - DNA, 20 bp, synthetic construct
  misc_feature 1..20: note = chemically synthesized
  source 1..20: mol_type = other DNA
ggcaagcagtggctgtggcc

SEQ ID NO: 31696 - DNA, 20 bp, synthetic construct
  misc_feature 1..20: note = chemically synthesized
  source 1..20: mol_type = other DNA
agcagtggctgtggccaggt

SEQ ID NO: 31697 - DNA, 20 bp, synthetic construct
  misc_feature 1..20: note = chemically synthesized
  source 1..20: mol_type = other DNA
ggctgtggccaggtcagctt

SEQ ID NO: 31698 - DNA, 20 bp, synthetic construct
  misc_feature 1..20: note = chemically synthesized
  source 1..20: mol_type = other DNA
gtggccaggtcagctttggt

SEQ ID NO: 31699 - DNA, 20 bp, synthetic construct
  misc_feature 1..20: note = chemically synthesized
  source 1..20: mol_type = other DNA
gccaggtcagctttggtgag

SEQ ID NO: 31700 - DNA, 20 bp, synthetic construct
  misc_feature 1..20: note = chemically synthesized
  source 1..20: mol_type = other DNA
aggtcagctttggtgagtgg

SEQ ID NO: 31701 - DNA, 20 bp, synthetic construct
  misc_feature 1..20: note = chemically synthesized
  source 1..20: mol_type = other DNA
gagtggaagtccatgttgct

SEQ ID NO: 31702 - DNA, 20 bp, synthetic construct
  misc_feature 1..20: note = chemically synthesized
  source 1..20: mol_type = other DNA
aagtccatgttgctgagccc

SEQ ID NO: 31703 - DNA, 20 bp, synthetic construct
  misc_feature 1..20: note = chemically synthesized
  source 1..20: mol_type = other DNA
aacttccatccctgcaactg

SEQ ID NO: 31704 - DNA, 20 bp, synthetic construct
  misc_feature 1..20: note = chemically synthesized
  source 1..20: mol_type = other DNA
aactgtggccactttgttca

SEQ ID NO: 31705 - DNA, 20 bp, synthetic construct
  misc_feature 1..20: note = chemically synthesized
  source 1..20: mol_type = other DNA
actgtggccactttgttcat

SEQ ID NO: 31706 - DNA, 20 bp, synthetic construct
  misc_feature 1..20: note = chemically synthesized
  source 1..20: mol_type = other DNA
cactttgttcatgggtccat

SEQ ID NO: 31707 - DNA, 20 bp, synthetic construct
  misc_feature 1..20: note = chemically synthesized
  source 1..20: mol_type = other DNA
ggtccattggacgatgacat

SEQ ID NO: 31708 - DNA, 20 bp, synthetic construct
  misc_feature 1..20: note = chemically synthesized
  source 1..20: mol_type = other DNA
ccattggacgatgacatgag

SEQ ID NO: 31709 - DNA, 20 bp, synthetic construct
  misc_feature 1..20: note = chemically synthesized
  source 1..20: mol_type = other DNA
ggacgatgacatgagtggcc

SEQ ID NO: 31710 - DNA, 20 bp, synthetic construct
  misc_feature 1..20: note = chemically synthesized
  source 1..20: mol_type = other DNA
gacgatgacatgagtggcct

SEQ ID NO: 31711 - DNA, 20 bp, synthetic construct
  misc_feature 1..20: note = chemically synthesized
  source 1..20: mol_type = other DNA
tgacatgagtggcctgggaa

SEQ ID NO: 31712 - DNA, 20 bp, synthetic construct
  misc_feature 1..20: note = chemically synthesized
  source 1..20: mol_type = other DNA
gacatgagtggcctgggaaa

SEQ ID NO: 31713 - DNA, 20 bp, synthetic construct
  misc_feature 1..20: note = chemically synthesized
  source 1..20: mol_type = other DNA
gagtggcctgggaaaaggct

SEQ ID NO: 31714 - DNA, 20 bp, synthetic construct
  misc_feature 1..20: note = chemically synthesized
  source 1..20: mol_type = other DNA
tggcctgggaaaaggctgag

SEQ ID NO: 31715 - DNA, 20 bp, synthetic construct
  misc_feature 1..20: note = chemically synthesized
  source 1..20: mol_type = other DNA
aaaaggctgagtggtgtcca

SEQ ID NO: 31716 - DNA, 20 bp, synthetic construct
  misc_feature 1..20: note = chemically synthesized
  source 1..20: mol_type = other DNA
tattaaaatcctcttctgct

SEQ ID NO: 31717 - DNA, 20 bp, synthetic construct
  misc_feature 1..20: note = chemically synthesized
  source 1..20: mol_type = other DNA
attaaaatcctcttctgctg

SEQ ID NO: 31718 - DNA, 20 bp, synthetic construct
  misc_feature 1..20: note = chemically synthesized
  source 1..20: mol_type = other DNA
cttctgctgaggtcacccat

SEQ ID NO: 31719 - DNA, 20 bp, synthetic construct
  misc_feature 1..20: note = chemically synthesized
  source 1..20: mol_type = other DNA
tgctgaggtcacccattggt

SEQ ID NO: 31720 - DNA, 20 bp, synthetic construct
  misc_feature 1..20: note = chemically synthesized
  source 1..20: mol_type = other DNA
cccattggtgagcactcaca

SEQ ID NO: 31721 - DNA, 20 bp, synthetic construct
  misc_feature 1..20: note = chemically synthesized
  source 1..20: mol_type = other DNA
ccattggtgagcactcacat

SEQ ID NO: 31722 - DNA, 20 bp, synthetic construct
  misc_feature 1..20: note = chemically synthesized
  source 1..20: mol_type = other DNA
atgggatgaaaatatctttg

SEQ ID NO: 31723 - DNA, 20 bp, synthetic construct
  misc_feature 1..20: note = chemically synthesized
  source 1..20: mol_type = other DNA
ttgtagtttttgactaatca

SEQ ID NO: 31724 - DNA, 20 bp, synthetic construct
  misc_feature 1..20: note = chemically synthesized
  source 1..20: mol_type = other DNA
gtagtttttgactaatcata

SEQ ID NO: 31725 - DNA, 20 bp, synthetic construct
  misc_feature 1..20: note = chemically synthesized
  source 1..20: mol_type = other DNA
tagtttttgactaatcatag

SEQ ID NO: 31726 - DNA, 20 bp, synthetic construct
  misc_feature 1..20: note = chemically synthesized
  source 1..20: mol_type = other DNA
tttctttgtcatcaattttc

SEQ ID NO: 31727 - DNA, 20 bp, synthetic construct
  misc_feature 1..20: note = chemically synthesized
  source 1..20: mol_type = other DNA
tttccagtcatgctttttcc

SEQ ID NO: 31728 - DNA, 20 bp, synthetic construct
  misc_feature 1..20: note = chemically synthesized
  source 1..20: mol_type = other DNA
tttccaagtccctgaccatc

SEQ ID NO: 31729 - DNA, 20 bp, synthetic construct
  misc_feature 1..20: note = chemically synthesized
  source 1..20: mol_type = other DNA
tgaccatctagccaaacctt

SEQ ID NO: 31730 - DNA, 20 bp, synthetic construct
  misc_feature 1..20: note = chemically synthesized
  source 1..20: mol_type = other DNA
tctagccaaacctttggcta

SEQ ID NO: 31731 - DNA, 20 bp, synthetic construct
  misc_feature 1..20: note = chemically synthesized
  source 1..20: mol_type = other DNA
tttggctacagcccatgaat

SEQ ID NO: 31732 - DNA, 20 bp, synthetic construct
  misc_feature 1..20: note = chemically synthesized
  source 1..20: mol_type = other DNA
taagtatataatcgcaaatc

SEQ ID NO: 31733 - DNA, 20 bp, synthetic construct
  misc_feature 1..20: note = chemically synthesized
  source 1..20: mol_type = other DNA
gccatttctccttctgtgca

SEQ ID NO: 31734 - DNA, 20 bp, synthetic construct
  misc_feature 1..20: note = chemically synthesized
  source 1..20: mol_type = other DNA
ttctgtgcaaagtgcacaac

SEQ ID NO: 31735 - DNA, 20 bp, synthetic construct
  misc_feature 1..20: note = chemically synthesized
  source 1..20: mol_type = other DNA
tctgtgcaaagtgcacaacc

SEQ ID NO: 31736 - DNA, 20 bp, synthetic construct
  misc_feature 1..20: note = chemically synthesized
  source 1..20: mol_type = other DNA
acaaccaggcacactgctca

SEQ ID NO: 31737 - DNA, 20 bp, synthetic construct
  misc_feature 1..20: note = chemically synthesized
  source 1..20: mol_type = other DNA
ctgctcaaagttctgccaac

SEQ ID NO: 31738 - DNA, 20 bp, synthetic construct
  misc_feature 1..20: note = chemically synthesized
  source 1..20: mol_type = other DNA
tgctcaaagttctgccaact

SEQ ID NO: 31739 - DNA, 20 bp, synthetic construct
  misc_feature 1..20: note = chemically synthesized
  source 1..20: mol_type = other DNA
tcaaagttctgccaactagg

SEQ ID NO: 31740 - DNA, 20 bp, synthetic construct
  misc_feature 1..20: note = chemically synthesized
  source 1..20: mol_type = other DNA
ttcccttcaccgttgtcctt

SEQ ID NO: 31741 - DNA, 20 bp, synthetic construct
  misc_feature 1..20: note = chemically synthesized
  source 1..20: mol_type = other DNA
tcccttcaccgttgtccttc

SEQ ID NO: 31742 - DNA, 20 bp, synthetic construct
  misc_feature 1..20: note = chemically synthesized
  source 1..20: mol_type = other DNA
cccttcaccgttgtccttca

SEQ ID NO: 31743 - DNA, 20 bp, synthetic construct
  misc_feature 1..20: note = chemically synthesized
  source 1..20: mol_type = other DNA
gttgtccttcagggatgtcc

SEQ ID NO: 31744 - DNA, 20 bp, synthetic construct
  misc_feature 1..20: note = chemically synthesized
  source 1..20: mol_type = other DNA
tccttcagggatgtcctaga

SEQ ID NO: 31745 - DNA, 20 bp, synthetic construct
  misc_feature 1..20: note = chemically synthesized
  source 1..20: mol_type = other DNA
ccttcagggatgtcctagaa

SEQ ID NO: 31746 - DNA, 20 bp, synthetic construct
  misc_feature 1..20: note = chemically synthesized
  source 1..20: mol_type = other DNA
cttcagggatgtcctagaaa

SEQ ID NO: 31747 - DNA, 20 bp, synthetic construct
  misc_feature 1..20: note = chemically synthesized
  source 1..20: mol_type = other DNA
ttcagggatgtcctagaaag

SEQ ID NO: 31748 - DNA, 20 bp, synthetic construct
  misc_feature 1..20: note = chemically synthesized
  source 1..20: mol_type = other DNA
gatgtcctagaaaggggctg

SEQ ID NO: 31749 - DNA, 20 bp, synthetic construct
  misc_feature 1..20: note = chemically synthesized
  source 1..20: mol_type = other DNA
agaaaggggctgtagtgctg

SEQ ID NO: 31750 - DNA, 20 bp, synthetic construct
  misc_feature 1..20: note = chemically synthesized
  source 1..20: mol_type = other DNA
gtgctgcggctgtccacttt

SEQ ID NO: 31751 - DNA, 20 bp, synthetic construct
  misc_feature 1..20: note = chemically synthesized
  source 1..20: mol_type = other DNA
tgctgcggctgtccactttt

SEQ ID NO: 31752 - DNA, 20 bp, synthetic construct
  misc_feature 1..20: note = chemically synthesized
  source 1..20: mol_type = other DNA
tgcggctgtccacttttggg

SEQ ID NO: 31753 - DNA, 20 bp, synthetic construct
  misc_feature 1..20: note = chemically synthesized
  source 1..20: mol_type = other DNA
ggtggtgcctgcatatcgtg

SEQ ID NO: 31754 - DNA, 20 bp, synthetic construct
  misc_feature 1..20: note = chemically synthesized
  source 1..20: mol_type = other DNA
gtgcagaactatctgtgaac

SEQ ID NO: 31755 - DNA, 20 bp, synthetic construct
  misc_feature 1..20: note = chemically synthesized
  source 1..20: mol_type = other DNA
tgcagaactatctgtgaacc

SEQ ID NO: 31756 - DNA, 20 bp, synthetic construct
  misc_feature 1..20: note = chemically synthesized
  source 1..20: mol_type = other DNA
actatctgtgaaccaggacc

SEQ ID NO: 31757 - DNA, 20 bp, synthetic construct
  misc_feature 1..20: note = chemically synthesized
  source 1..20: mol_type = other DNA
ctagtcttctcttcctctgt

SEQ ID NO: 31758 - DNA, 20 bp, synthetic construct
  misc_feature 1..20: note = chemically synthesized
  source 1..20: mol_type = other DNA
cttcctctgtcagctgatca

SEQ ID NO: 31759 - DNA, 20 bp, synthetic construct
  misc_feature 1..20: note = chemically synthesized
  source 1..20: mol_type = other DNA
ttcctctgtcagctgatcat

SEQ ID NO: 31760 - DNA, 20 bp, synthetic construct
  misc_feature 1..20: note = chemically synthesized
  source 1..20: mol_type = other DNA
tcctctgtcagctgatcata

SEQ ID NO: 31761 - DNA, 20 bp, synthetic construct
  misc_feature 1..20: note = chemically synthesized
  source 1..20: mol_type = other DNA
gatcatagggaactccccat

SEQ ID NO: 31762 - DNA, 20 bp, synthetic construct
  misc_feature 1..20: note = chemically synthesized
  source 1..20: mol_type = other DNA
ggaactccccatgagaccat

SEQ ID NO: 31763 - DNA, 20 bp, synthetic construct
  misc_feature 1..20: note = chemically synthesized
  source 1..20: mol_type = other DNA
tccccatgagaccatcggtg

SEQ ID NO: 31764 - DNA, 20 bp, synthetic construct
  misc_feature 1..20: note = chemically synthesized
  source 1..20: mol_type = other DNA
tgagaccatcggtgcagtct

SEQ ID NO: 31765 - DNA, 20 bp, synthetic construct
  misc_feature 1..20: note = chemically synthesized
  source 1..20: mol_type = other DNA
gagaccatcggtgcagtctc

SEQ ID NO: 31766 - DNA, 20 bp, synthetic construct
  misc_feature 1..20: note = chemically synthesized
  source 1..20: mol_type = other DNA
agaccatcggtgcagtctca

SEQ ID NO: 31767 - DNA, 20 bp, synthetic construct
  misc_feature 1..20: note = chemically synthesized
  source 1..20: mol_type = other DNA
accatcggtgcagtctcagg

SEQ ID NO: 31768 - DNA, 20 bp, synthetic construct
  misc_feature 1..20: note = chemically synthesized
  source 1..20: mol_type = other DNA
catcggtgcagtctcaggga

SEQ ID NO: 31769 - DNA, 20 bp, synthetic construct
  misc_feature 1..20: note = chemically synthesized
  source 1..20: mol_type = other DNA
ggtgcagtctcagggagaga

SEQ ID NO: 31770 - DNA, 20 bp, synthetic construct
  misc_feature 1..20: note = chemically synthesized
  source 1..20: mol_type = other DNA
gcagtctcagggagagaaag

SEQ ID NO: 31771 - DNA, 20 bp, synthetic construct
  misc_feature 1..20: note = chemically synthesized
  source 1..20: mol_type = other DNA
agggagagaaagcagtgtgt

SEQ ID NO: 31772 - DNA, 20 bp, synthetic construct
  misc_feature 1..20: note = chemically synthesized
  source 1..20: mol_type = other DNA
gggagagaaagcagtgtgtc

SEQ ID NO: 31773 - DNA, 20 bp, synthetic construct
  misc_feature 1..20: note = chemically synthesized
  source 1..20: mol_type = other DNA
gagagaaagcagtgtgtcag

SEQ ID NO: 31774 - DNA, 20 bp, synthetic construct
  misc_feature 1..20: note = chemically synthesized
  source 1..20: mol_type = other DNA
agaaagcagtgtgtcaggag

SEQ ID NO: 31775 - DNA, 20 bp, synthetic construct
  misc_feature 1..20: note = chemically synthesized
  source 1..20: mol_type = other DNA
aaagcagtgtgtcaggagtg

SEQ ID NO: 31776 - DNA, 20 bp, synthetic construct
  misc_feature 1..20: note = chemically synthesized
  source 1..20: mol_type = other DNA
tgtgtcaggagtggagacca

SEQ ID NO: 31777 - DNA, 20 bp, synthetic construct
  misc_feature 1..20: note = chemically synthesized
  source 1..20: mol_type = other DNA
gtgtcaggagtggagaccat

SEQ ID NO: 31778 - DNA, 20 bp, synthetic construct
  misc_feature 1..20: note = chemically synthesized
  source 1..20: mol_type = other DNA
agtggagaccatgggcattt

SEQ ID NO: 31779 - DNA, 20 bp, synthetic construct
  misc_feature 1..20: note = chemically synthesized
  source 1..20: mol_type = other DNA
ccctttctcatgtaacttac

SEQ ID NO: 31780 - DNA, 20 bp, synthetic construct
  misc_feature 1..20: note = chemically synthesized
  source 1..20: mol_type = other DNA
atgtaacttactagtgcctt

SEQ ID NO: 31781 - DNA, 20 bp, synthetic construct
  misc_feature 1..20: note = chemically synthesized
  source 1..20: mol_type = other DNA
tgtaacttactagtgccttc

SEQ ID NO: 31782 - DNA, 20 bp, synthetic construct
  misc_feature 1..20: note = chemically synthesized
  source 1..20: mol_type = other DNA
agtgccttcaggatctgctc

SEQ ID NO: 31783 - DNA, 20 bp, synthetic construct
  misc_feature 1..20: note = chemically synthesized
  source 1..20: mol_type = other DNA
tgatgcaatgctgctgtgca

SEQ ID NO: 31784 - DNA, 20 bp, synthetic construct
  misc_feature 1..20: note = chemically synthesized
  source 1..20: mol_type = other DNA
gctgtgcacagcccacttta

SEQ ID NO: 31785 - DNA, 20 bp, synthetic construct
  misc_feature 1..20: note = chemically synthesized
  source 1..20: mol_type = other DNA
tgcacagcccactttatggc

SEQ ID NO: 31786 - DNA, 20 bp, synthetic construct
  misc_feature 1..20: note = chemically synthesized
  source 1..20: mol_type = other DNA
cagcccactttatggctaga

SEQ ID NO: 31787 - DNA, 20 bp, synthetic construct
  misc_feature 1..20: note = chemically synthesized
  source 1..20: mol_type = other DNA
cactttatggctagatggat

SEQ ID NO: 31788 - DNA, 20 bp, synthetic construct
  misc_feature 1..20: note = chemically synthesized
  source 1..20: mol_type = other DNA
ttatggctagatggatcaga

SEQ ID NO: 31789 - DNA, 20 bp, synthetic construct
  misc_feature 1..20: note = chemically synthesized
  source 1..20: mol_type = other DNA
tagatggatcagaaagcacc

SEQ ID NO: 31790 - DNA, 20 bp, synthetic construct
  misc_feature 1..20: note = chemically synthesized
  source 1..20: mol_type = other DNA
agaaagcacccagttcatga

SEQ ID NO: 31791 - DNA, 20 bp, synthetic construct
  misc_feature 1..20: note = chemically synthesized
  source 1..20: mol_type = other DNA
gaaagcacccagttcatgat

SEQ ID NO: 31792 - DNA, 20 bp, synthetic construct
  misc_feature 1..20: note = chemically synthesized
  source 1..20: mol_type = other DNA
agcacccagttcatgatagg

SEQ ID NO: 31793 - DNA, 20 bp, synthetic construct
  misc_feature 1..20: note = chemically synthesized
  source 1..20: mol_type = other DNA
ccagttcatgataggcagtt

SEQ ID NO: 31794 - DNA, 20 bp, synthetic construct
  misc_feature 1..20: note = chemically synthesized
  source 1..20: mol_type = other DNA
cagttcatgataggcagttc

SEQ ID NO: 31795 - DNA, 20 bp, synthetic construct
  misc_feature 1..20: note = chemically synthesized
  source 1..20: mol_type = other DNA
gataggcagttcaggtcaca

SEQ ID NO: 31796 - DNA, 20 bp, synthetic construct
  misc_feature 1..20: note = chemically synthesized
  source 1..20: mol_type = other DNA
catggtgacttgatgactca

SEQ ID NO: 31797 - DNA, 20 bp, synthetic construct
  misc_feature 1..20: note = chemically synthesized
  source 1..20: mol_type = other DNA
caaatatttcgtttccacca

SEQ ID NO: 31798 - DNA, 20 bp, synthetic construct
  misc_feature 1..20: note = chemically synthesized
  source 1..20: mol_type = other DNA
atttcgtttccaccaaagcc

SEQ ID NO: 31799 - DNA, 20 bp, synthetic construct
  misc_feature 1..20: note = chemically synthesized
  source 1..20: mol_type = other DNA
tttccaccaaagcccagtaa

SEQ ID NO: 31800 - DNA, 20 bp, synthetic construct
  misc_feature 1..20: note = chemically synthesized
  source 1..20: mol_type = other DNA
ttccaccaaagcccagtaac

SEQ ID NO: 31801 - DNA, 20 bp, synthetic construct
  misc_feature 1..20: note = chemically synthesized
  source 1..20: mol_type = other DNA
ccaaagcccagtaacaggcc

SEQ ID NO: 31802 - DNA, 20 bp, synthetic construct
  misc_feature 1..20: note = chemically synthesized
  source 1..20: mol_type = other DNA
aaagcccagtaacaggccaa

SEQ ID NO: 31803 - DNA, 20 bp, synthetic construct
  misc_feature 1..20: note = chemically synthesized
  source 1..20: mol_type = other DNA
gccaagagctttctccctaa

SEQ ID NO: 31804 - DNA, 20 bp, synthetic construct
  misc_feature 1..20: note = chemically synthesized
  source 1..20: mol_type = other DNA
caagagctttctccctaaaa

SEQ ID NO: 31805 - DNA, 20 bp, synthetic construct
  misc_feature 1..20: note = chemically synthesized
  source 1..20: mol_type = other DNA
agagctttctccctaaaaga

SEQ ID NO: 31806 - DNA, 20 bp, synthetic construct
  misc_feature 1..20: note = chemically synthesized
  source 1..20: mol_type = other DNA
gctttctccctaaaagagag

SEQ ID NO: 31807 - DNA, 20 bp, synthetic construct
  misc_feature 1..20: note = chemically synthesized
  source 1..20: mol_type = other DNA
taaaagagagtagttatctg

SEQ ID NO: 31808 - DNA, 20 bp, synthetic construct
  misc_feature 1..20: note = chemically synthesized
  source 1..20: mol_type = other DNA
aagagagtagttatctgcag

SEQ ID NO: 31809 - DNA, 20 bp, synthetic construct
  misc_feature 1..20: note = chemically synthesized
  source 1..20: mol_type = other DNA
gagtagttatctgcagaaga

SEQ ID NO: 31810 - DNA, 20 bp, synthetic construct
  misc_feature 1..20: note = chemically synthesized
  source 1..20: mol_type = other DNA
tagttatctgcagaagatgg

SEQ ID NO: 31811 - DNA, 20 bp, synthetic construct
  misc_feature 1..20: note = chemically synthesized
  source 1..20: mol_type = other DNA
agttatctgcagaagatggc

SEQ ID NO: 31812 - DNA, 20 bp, synthetic construct
  misc_feature 1..20: note = chemically synthesized
  source 1..20: mol_type = other DNA
gttatctgcagaagatggca

SEQ ID NO: 31813 - DNA, 20 bp, synthetic construct
  misc_feature 1..20: note = chemically synthesized
  source 1..20: mol_type = other DNA
agggccttgctccaaaatcc

SEQ ID NO: 31814 - DNA, 20 bp, synthetic construct
  misc_feature 1..20: note = chemically synthesized
  source 1..20: mol_type = other DNA
ggccttgctccaaaatccta

SEQ ID NO: 31815 - DNA, 20 bp, synthetic construct
  misc_feature 1..20: note = chemically synthesized
  source 1..20: mol_type = other DNA
gccttgctccaaaatcctag

SEQ ID NO: 31816 - DNA, 20 bp, synthetic construct
  misc_feature 1..20: note = chemically synthesized
  source 1..20: mol_type = other DNA
tagaggcctccgctgtgatt

SEQ ID NO: 31817 - DNA, 20 bp, synthetic construct
  misc_feature 1..20: note = chemically synthesized
  source 1..20: mol_type = other DNA
agcctgccaaatgctccaaa

SEQ ID NO: 31818 - DNA, 20 bp, synthetic construct
  misc_feature 1..20: note = chemically synthesized
  source 1..20: mol_type = other DNA
ctccaaacagcatccctatc

SEQ ID NO: 31819 - DNA, 20 bp, synthetic construct
  misc_feature 1..20: note = chemically synthesized
  source 1..20: mol_type = other DNA
ctatctggcactgacacctc

SEQ ID NO: 31820 - DNA, 20 bp, synthetic construct
  misc_feature 1..20: note = chemically synthesized
  source 1..20: mol_type = other DNA
actgacacctcaagcatcat

SEQ ID NO: 31821 - DNA, 20 bp, synthetic construct
  misc_feature 1..20: note = chemically synthesized
  source 1..20: mol_type = other DNA
tcaagcatcattggatctgc

SEQ ID NO: 31822 - DNA, 20 bp, synthetic construct
  misc_feature 1..20: note = chemically synthesized
  source 1..20: mol_type = other DNA
caagcatcattggatctgct

SEQ ID NO: 31823 - DNA, 20 bp, synthetic construct
  misc_feature 1..20: note = chemically synthesized
  source 1..20: mol_type = other DNA
attggatctgctaggtcata

SEQ ID NO: 31824 - DNA, 20 bp, synthetic construct
  misc_feature 1..20: note = chemically synthesized
  source 1..20: mol_type = other DNA
tctgctaggtcatatggccc

SEQ ID NO: 31825 - DNA, 20 bp, synthetic construct
  misc_feature 1..20: note = chemically synthesized
  source 1..20: mol_type = other DNA
gctaggtcatatggcccaag

SEQ ID NO: 31826 - DNA, 20 bp, synthetic construct
  misc_feature 1..20: note = chemically synthesized
  source 1..20: mol_type = other DNA
gtcatatggcccaagtggca

SEQ ID NO: 31827 - DNA, 20 bp, synthetic construct
  misc_feature 1..20: note = chemically synthesized
  source 1..20: mol_type = other DNA
atatggcccaagtggcatag

SEQ ID NO: 31828 - DNA, 20 bp, synthetic construct
  misc_feature 1..20: note = chemically synthesized
  source 1..20: mol_type = other DNA
aagtggcatagcagcttgca

SEQ ID NO: 31829 - DNA, 20 bp, synthetic construct
  misc_feature 1..20: note = chemically synthesized
  source 1..20: mol_type = other DNA
tggcatagcagcttgcacag

SEQ ID NO: 31830 - DNA, 20 bp, synthetic construct
  misc_feature 1..20: note = chemically synthesized
  source 1..20: mol_type = other DNA
tagcagcttgcacagcagcc

SEQ ID NO: 31831 - DNA, 20 bp, synthetic construct
  misc_feature 1..20: note = chemically synthesized
  source 1..20: mol_type = other DNA
tgcacagcagcctggacctg

SEQ ID NO: 31832 - DNA, 20 bp, synthetic construct
  misc_feature 1..20: note = chemically synthesized
  source 1..20: mol_type = other DNA
acagcagcctggacctgtgg

SEQ ID NO: 31833 - DNA, 20 bp, synthetic construct
  misc_feature 1..20: note = chemically synthesized
  source 1..20: mol_type = other DNA
agcagcctggacctgtggca

SEQ ID NO: 31834 - DNA, 20 bp, synthetic construct
  misc_feature 1..20: note = chemically synthesized
  source 1..20: mol_type = other DNA
tgtggcagagccttctgttc

SEQ ID NO: 31835 - DNA, 20 bp, synthetic construct
  misc_feature 1..20: note = chemically synthesized
  source 1..20: mol_type = other DNA
ttctggactccactcaaaac

SEQ ID NO: 31836 - DNA, 20 bp, synthetic construct
  misc_feature 1..20: note = chemically synthesized
  source 1..20: mol_type = other DNA
tggactccactcaaaactgg

SEQ ID NO: 31837 - DNA, 20 bp, synthetic construct
  misc_feature 1..20: note = chemically synthesized
  source 1..20: mol_type = other DNA
actcaaaactggcagccttt

SEQ ID NO: 31838 - DNA, 20 bp, synthetic construct
  misc_feature 1..20: note = chemically synthesized
  source 1..20: mol_type = other DNA
cttttggatcactcgataaa

SEQ ID NO: 31839 - DNA, 20 bp, synthetic construct
  misc_feature 1..20: note = chemically synthesized
  source 1..20: mol_type = other DNA
ttttggatcactcgataaat

SEQ ID NO: 31840 - DNA, 20 bp, synthetic construct
  misc_feature 1..20: note = chemically synthesized
  source 1..20: mol_type = other DNA
ggatcactcgataaatgggc

SEQ ID NO: 31841 - DNA, 20 bp, synthetic construct
  misc_feature 1..20: note = chemically synthesized
  source 1..20: mol_type = other DNA
atcactcgataaatgggcca

SEQ ID NO: 31842 - DNA, 20 bp, synthetic construct
  misc_feature 1..20: note = chemically synthesized
  source 1..20: mol_type = other DNA
ccagagtaacacacccaaat

SEQ ID NO: 31843 - DNA, 20 bp, synthetic construct
  misc_feature 1..20: note = chemically synthesized
  source 1..20: mol_type = other DNA
cagagtaacacacccaaatc

SEQ ID NO: 31844 - DNA, 20 bp, synthetic construct
  misc_feature 1..20: note = chemically synthesized
  source 1..20: mol_type = other DNA
tgttgcctccaaaatccaaa

SEQ ID NO: 31845 - DNA, 20 bp, synthetic construct
  misc_feature 1..20: note = chemically synthesized
  source 1..20: mol_type = other DNA
gttgcctccaaaatccaaat

SEQ ID NO: 31846 - DNA, 20 bp, synthetic construct
  misc_feature 1..20: note = chemically synthesized
  source 1..20: mol_type = other DNA
caaaatccaaataggcccac

SEQ ID NO: 31847 - DNA, 20 bp, synthetic construct
  misc_feature 1..20: note = chemically synthesized
  source 1..20: mol_type = other DNA
aaaatccaaataggcccact

SEQ ID NO: 31848 - DNA, 20 bp, synthetic construct
  misc_feature 1..20: note = chemically synthesized
  source 1..20: mol_type = other DNA
taggcgttgtgcctatttct

SEQ ID NO: 31849 - DNA, 20 bp, synthetic construct
  misc_feature 1..20: note = chemically synthesized
  source 1..20: mol_type = other DNA
tgtgcctatttcttggttgt

SEQ ID NO: 31850 - DNA, 20 bp, synthetic construct
  misc_feature 1..20: note = chemically synthesized
  source 1..20: mol_type = other DNA
tgcctatttcttggttgtaa

SEQ ID NO: 31851 - DNA, 20 bp, synthetic construct
  misc_feature 1..20: note = chemically synthesized
  source 1..20: mol_type = other DNA
ctatttcttggttgtaagag

SEQ ID NO: 31852 - DNA, 20 bp, synthetic construct
  misc_feature 1..20: note = chemically synthesized
  source 1..20: mol_type = other DNA
gttgtaagagtggccaaatg

SEQ ID NO: 31853 - DNA, 20 bp, synthetic construct
  misc_feature 1..20: note = chemically synthesized
  source 1..20: mol_type = other DNA
cagcaaattatccttcactt

SEQ ID NO: 31854 - DNA, 20 bp, synthetic construct
  misc_feature 1..20: note = chemically synthesized
  source 1..20: mol_type = other DNA
caaattatccttcactttag

SEQ ID NO: 31855 - DNA, 20 bp, synthetic construct
  misc_feature 1..20: note = chemically synthesized
  source 1..20: mol_type = other DNA
aaattatccttcactttaga

SEQ ID NO: 31856 - DNA, 20 bp, synthetic construct
  misc_feature 1..20: note = chemically synthesized
  source 1..20: mol_type = other DNA
actttagaaggaatatctca

SEQ ID NO: 31857 - DNA, 20 bp, synthetic construct
  misc_feature 1..20: note = chemically synthesized
  source 1..20: mol_type = other DNA
tttagaaggaatatctcaaa

SEQ ID NO: 31858 - DNA, 20 bp, synthetic construct
  misc_feature 1..20: note = chemically synthesized
  source 1..20: mol_type = other DNA
ctcaaagagccccaaaccat

SEQ ID NO: 31859 - DNA, 20 bp, synthetic construct
  misc_feature 1..20: note = chemically synthesized
  source 1..20: mol_type = other DNA
ggacccctataaattttact

SEQ ID NO: 31860 - DNA, 20 bp, synthetic construct
  misc_feature 1..20: note = chemically synthesized
  source 1..20: mol_type = other DNA
gacccctataaattttactg

SEQ ID NO: 31861 - DNA, 20 bp, synthetic construct
  misc_feature 1..20: note = chemically synthesized
  source 1..20: mol_type = other DNA
ccctataaattttactgagg

SEQ ID NO: 31862 - DNA, 20 bp, synthetic construct
  misc_feature 1..20: note = chemically synthesized
  source 1..20: mol_type = other DNA
tataaattttactgaggtag

SEQ ID NO: 31863 - DNA, 20 bp, synthetic construct
  misc_feature 1..20: note = chemically synthesized
  source 1..20: mol_type = other DNA
ataaattttactgaggtaga

SEQ ID NO: 31864 - DNA, 20 bp, synthetic construct
  misc_feature 1..20: note = chemically synthesized
  source 1..20: mol_type = other DNA
agaaggtccctgaatttaat

SEQ ID NO: 31865 - DNA, 20 bp, synthetic construct
  misc_feature 1..20: note = chemically synthesized
  source 1..20: mol_type = other DNA
aaatgtctcatcaataaatc

SEQ ID NO: 31866 - DNA, 20 bp, synthetic construct
  misc_feature 1..20: note = chemically synthesized
  source 1..20: mol_type = other DNA
gtttgctacttcttgctcac

SEQ ID NO: 31867 - DNA, 20 bp, synthetic construct
  misc_feature 1..20: note = chemically synthesized
  source 1..20: mol_type = other DNA
tacttcttgctcactagttc

SEQ ID NO: 31868 - DNA, 20 bp, synthetic construct
  misc_feature 1..20: note = chemically synthesized
  source 1..20: mol_type = other DNA
tcttgctcactagttccagt

SEQ ID NO: 31869 - DNA, 20 bp, synthetic construct
  misc_feature 1..20: note = chemically synthesized
  source 1..20: mol_type = other DNA
tcagcatgtcatcaatgtaa

SEQ ID NO: 31870 - DNA, 20 bp, synthetic construct
  misc_feature 1..20: note = chemically synthesized
  source 1..20: mol_type = other DNA
tggaccactgtgatatcttg

SEQ ID NO: 31871 - DNA, 20 bp, synthetic construct
  misc_feature 1..20: note = chemically synthesized
  source 1..20: mol_type = other DNA
accactgtgatatcttgtgg

SEQ ID NO: 31872 - DNA, 20 bp, synthetic construct
  misc_feature 1..20: note = chemically synthesized
  source 1..20: mol_type = other DNA
gtgatatcttgtggaagtga

SEQ ID NO: 31873 - DNA, 20 bp, synthetic construct
  misc_feature 1..20: note = chemically synthesized
  source 1..20: mol_type = other DNA
tgatatcttgtggaagtgaa

SEQ ID NO: 31874 - DNA, 20 bp, synthetic construct
  misc_feature 1..20: note = chemically synthesized
  source 1..20: mol_type = other DNA
atcttgtggaagtgaaaggt

SEQ ID NO: 31875 - DNA, 20 bp, synthetic construct
  misc_feature 1..20: note = chemically synthesized
  source 1..20: mol_type = other DNA
tgtggaagtgaaaggtgagc

SEQ ID NO: 31876 - DNA, 20 bp, synthetic construct
  misc_feature 1..20: note = chemically synthesized
  source 1..20: mol_type = other DNA
tgagcaagttctctccaaat

SEQ ID NO: 31877 - DNA, 20 bp, synthetic construct
  misc_feature 1..20: note = chemically synthesized
  source 1..20: mol_type = other DNA
gttctctccaaataagatta

SEQ ID NO: 31878 - DNA, 20 bp, synthetic construct
  misc_feature 1..20: note = chemically synthesized
  source 1..20: mol_type = other DNA
ccaaataagattatggcaca

SEQ ID NO: 31879 - DNA, 20 bp, synthetic construct
  misc_feature 1..20: note = chemically synthesized
  source 1..20: mol_type = other DNA
ataagattatggcacaaagc

SEQ ID NO: 31880 - DNA, 20 bp, synthetic construct
  misc_feature 1..20: note = chemically synthesized
  source 1..20: mol_type = other DNA
aagattatggcacaaagctg

SEQ ID NO: 31881 - DNA, 20 bp, synthetic construct
  misc_feature 1..20: note = chemically synthesized
  source 1..20: mol_type = other DNA
gattatggcacaaagctgga

SEQ ID NO: 31882 - DNA, 20 bp, synthetic construct
  misc_feature 1..20: note = chemically synthesized
  source 1..20: mol_type = other DNA
tggagagttgatatactcct

SEQ ID NO: 31883 - DNA, 20 bp, synthetic construct
  misc_feature 1..20: note = chemically synthesized
  source 1..20: mol_type = other DNA
ttttctttcatcactttgtc

SEQ ID NO: 31884 - DNA, 20 bp, synthetic construct
  misc_feature 1..20: note = chemically synthesized
  source 1..20: mol_type = other DNA
actttgtccagcgaacttac

SEQ ID NO: 31885 - DNA, 20 bp, synthetic construct
  misc_feature 1..20: note = chemically synthesized
  source 1..20: mol_type = other DNA
gttccttgattctccacata

SEQ ID NO: 31886 - DNA, 20 bp, synthetic construct
  misc_feature 1..20: note = chemically synthesized
  source 1..20: mol_type = other DNA
gattctccacatatagtcaa

SEQ ID NO: 31887 - DNA, 20 bp, synthetic construct
  misc_feature 1..20: note = chemically synthesized
  source 1..20: mol_type = other DNA
agtcaaaagtattatgtata

SEQ ID NO: 31888 - DNA, 20 bp, synthetic construct
  misc_feature 1..20: note = chemically synthesized
  source 1..20: mol_type = other DNA
caaaagtattatgtatacag

SEQ ID NO: 31889 - DNA, 20 bp, synthetic construct
  misc_feature 1..20: note = chemically synthesized
  source 1..20: mol_type = other DNA
ctaaattccttgcctctcac

SEQ ID NO: 31890 - DNA, 20 bp, synthetic construct
  misc_feature 1..20: note = chemically synthesized
  source 1..20: mol_type = other DNA
cctctcacaagcgttgaatc

SEQ ID NO: 31891 - DNA, 20 bp, synthetic construct
  misc_feature 1..20: note = chemically synthesized
  source 1..20: mol_type = other DNA
tctcacaagcgttgaatcaa

SEQ ID NO: 31892 - DNA, 20 bp, synthetic construct
  misc_feature 1..20: note = chemically synthesized
  source 1..20: mol_type = other DNA
ctctctaaacaattgatgcc

SEQ ID NO: 31893 - DNA, 20 bp, synthetic construct
  misc_feature 1..20: note = chemically synthesized
  source 1..20: mol_type = other DNA
tctctaaacaattgatgcca

SEQ ID NO: 31894 - DNA, 20 bp, synthetic construct
  misc_feature 1..20: note = chemically synthesized
  source 1..20: mol_type = other DNA
caattgatgccaaggattat

SEQ ID NO: 31895 - DNA, 20 bp, synthetic construct
  misc_feature 1..20: note = chemically synthesized
  source 1..20: mol_type = other DNA
atcagtgttctccataccat

SEQ ID NO: 31896 - DNA, 20 bp, synthetic construct
  misc_feature 1..20: note = chemically synthesized
  source 1..20: mol_type = other DNA
agtgttctccataccattag

SEQ ID NO: 31897 - DNA, 20 bp, synthetic construct
  misc_feature 1..20: note = chemically synthesized
  source 1..20: mol_type = other DNA
gttctccataccattagaag

SEQ ID NO: 31898 - DNA, 20 bp, synthetic construct
  misc_feature 1..20: note = chemically synthesized
  source 1..20: mol_type = other DNA
tctccataccattagaagaa

SEQ ID NO: 31899 - DNA, 20 bp, synthetic construct
  misc_feature 1..20: note = chemically synthesized
  source 1..20: mol_type = other DNA
accattagaagaagagtcct

SEQ ID NO: 31900 - DNA, 20 bp, synthetic construct
  misc_feature 1..20: note = chemically synthesized
  source 1..20: mol_type = other DNA
agaagagtccttagcatatt

SEQ ID NO: 31901 - DNA, 20 bp, synthetic construct
  misc_feature 1..20: note = chemically synthesized
  source 1..20: mol_type = other DNA
gaagagtccttagcatattt

SEQ ID NO: 31902 - DNA, 20 bp, synthetic construct
  misc_feature 1..20: note = chemically synthesized
  source 1..20: mol_type = other DNA
tatttgggtctaatcatatt

SEQ ID NO: 31903 - DNA, 20 bp, synthetic construct
  misc_feature 1..20: note = chemically synthesized
  source 1..20: mol_type = other DNA
ttgggtctaatcatattaag

SEQ ID NO: 31904 - DNA, 20 bp, synthetic construct
  misc_feature 1..20: note = chemically synthesized
  source 1..20: mol_type = other DNA
tcatattaagcagccaactc

SEQ ID NO: 31905 - DNA, 20 bp, synthetic construct
  misc_feature 1..20: note = chemically synthesized
  source 1..20: mol_type = other DNA
agaaaccccaaaaccaatga

SEQ ID NO: 31906 - DNA, 20 bp, synthetic construct
  misc_feature 1..20: note = chemically synthesized
  source 1..20: mol_type = other DNA
tccttaatattctgttcctc

SEQ ID NO: 31907 - DNA, 20 bp, synthetic construct
  misc_feature 1..20: note = chemically synthesized
  source 1..20: mol_type = other DNA
tgttcctctagaaccactcc

SEQ ID NO: 31908 - DNA, 20 bp, synthetic construct
  misc_feature 1..20: note = chemically synthesized
  source 1..20: mol_type = other DNA
cctggtaccaaaatctgtat

SEQ ID NO: 31909 - DNA, 20 bp, synthetic construct
  misc_feature 1..20: note = chemically synthesized
  source 1..20: mol_type = other DNA
ctggtaccaaaatctgtatt

SEQ ID NO: 31910 - DNA, 20 bp, synthetic construct
  misc_feature 1..20: note = chemically synthesized
  source 1..20: mol_type = other DNA
tggtaccaaaatctgtatta

SEQ ID NO: 31911 - DNA, 20 bp, synthetic construct
  misc_feature 1..20: note = chemically synthesized
  source 1..20: mol_type = other DNA
aaatctgtattagggttcta

SEQ ID NO: 31912 - DNA, 20 bp, synthetic construct
  misc_feature 1..20: note = chemically synthesized
  source 1..20: mol_type = other DNA
atctgtattagggttctaca

SEQ ID NO: 31913 - DNA, 20 bp, synthetic construct
  misc_feature 1..20: note = chemically synthesized
  source 1..20: mol_type = other DNA
attagggttctacagagaaa

SEQ ID NO: 31914 - DNA, 20 bp, synthetic construct
  misc_feature 1..20: note = chemically synthesized
  source 1..20: mol_type = other DNA
ctacagagaaacagaattaa

SEQ ID NO: 31915 - DNA, 20 bp, synthetic construct
  misc_feature 1..20: note = chemically synthesized
  source 1..20: mol_type = other DNA
tacagagaaacagaattaat

SEQ ID NO: 31916 - DNA, 20 bp, synthetic construct
  misc_feature 1..20: note = chemically synthesized
  source 1..20: mol_type = other DNA
cagagaaacagaattaatag

SEQ ID NO: 31917 - DNA, 20 bp, synthetic construct
  misc_feature 1..20: note = chemically synthesized
  source 1..20: mol_type = other DNA
ctctatatctatatctatat

SEQ ID NO: 31918 - DNA, 20 bp, synthetic construct
  misc_feature 1..20: note = chemically synthesized
  source 1..20: mol_type = other DNA
ctatatctatatctatatga

SEQ ID NO: 31919 - DNA, 20 bp, synthetic construct
  misc_feature 1..20: note = chemically synthesized
  source 1..20: mol_type = other DNA
ctatatgagagtttattatg

SEQ ID NO: 31920 - DNA, 20 bp, synthetic construct
  misc_feature 1..20: note = chemically synthesized
  source 1..20: mol_type = other DNA
gtattgactcacatgttcac

SEQ ID NO: 31921 - DNA, 20 bp, synthetic construct
  misc_feature 1..20: note = chemically synthesized
  source 1..20: mol_type = other DNA
tattgactcacatgttcaca

SEQ ID NO: 31922 - DNA, 20 bp, synthetic construct
  misc_feature 1..20: note = chemically synthesized
  source 1..20: mol_type = other DNA
atgttcacaaggtcccaaaa

SEQ ID NO: 31923 - DNA, 20 bp, synthetic construct
  misc_feature 1..20: note = chemically synthesized
  source 1..20: mol_type = other DNA
tgttcacaaggtcccaaaac

SEQ ID NO: 31924 - DNA, 20 bp, synthetic construct
  misc_feature 1..20: note = chemically synthesized
  source 1..20: mol_type = other DNA
tcccaaaacaggccatctgc

SEQ ID NO: 31925 - DNA, 20 bp, synthetic construct
  misc_feature 1..20: note = chemically synthesized
  source 1..20: mol_type = other DNA
aaacaggccatctgccagct

SEQ ID NO: 31926 - DNA, 20 bp, synthetic construct
  misc_feature 1..20: note = chemically synthesized
  source 1..20: mol_type = other DNA
aacaggccatctgccagctg

SEQ ID NO: 31927 - DNA, 20 bp, synthetic construct
  misc_feature 1..20: note = chemically synthesized
  source 1..20: mol_type = other DNA
ccatctgccagctgaggaac

SEQ ID NO: 31928 - DNA, 20 bp, synthetic construct
  misc_feature 1..20: note = chemically synthesized
  source 1..20: mol_type = other DNA
catctgccagctgaggaaca

SEQ ID NO: 31929 - DNA, 20 bp, synthetic construct
  misc_feature 1..20: note = chemically synthesized
  source 1..20: mol_type = other DNA
ctgccagctgaggaacaagg

SEQ ID NO: 31930 - DNA, 20 bp, synthetic construct
  misc_feature 1..20: note = chemically synthesized
  source 1..20: mol_type = other DNA
cagctgaggaacaaggaagc

SEQ ID NO: 31931 - DNA, 20 bp, synthetic construct
  misc_feature 1..20: note = chemically synthesized
  source 1..20: mol_type = other DNA
tgaggaacaaggaagctagt

SEQ ID NO: 31932 - DNA, 20 bp, synthetic construct
  misc_feature 1..20: note = chemically synthesized
  source 1..20: mol_type = other DNA
aggaacaaggaagctagtcg

SEQ ID NO: 31933 - DNA, 20 bp, synthetic construct
  misc_feature 1..20: note = chemically synthesized
  source 1..20: mol_type = other DNA
ggaagctagtcggagtccca

SEQ ID NO: 31934 - DNA, 20 bp, synthetic construct
  misc_feature 1..20: note = chemically synthesized
  source 1..20: mol_type = other DNA
tagtcggagtcccaaagctg

SEQ ID NO: 31935 - DNA, 20 bp, synthetic construct
  misc_feature 1..20: note = chemically synthesized
  source 1..20: mol_type = other DNA
agtcccaaagctgaagaacc

SEQ ID NO: 31936 - DNA, 20 bp, synthetic construct
  misc_feature 1..20: note = chemically synthesized
  source 1..20: mol_type = other DNA
tcccaaagctgaagaacctg

SEQ ID NO: 31937 - DNA, 20 bp, synthetic construct
  misc_feature 1..20: note = chemically synthesized
  source 1..20: mol_type = other DNA
gaacctggagttcaatgttc

SEQ ID NO: 31938 - DNA, 20 bp, synthetic construct
  misc_feature 1..20: note = chemically synthesized
  source 1..20: mol_type = other DNA
aacctggagttcaatgttcc

SEQ ID NO: 31939 - DNA, 20 bp, synthetic construct
  misc_feature 1..20: note = chemically synthesized
  source 1..20: mol_type = other DNA
acctggagttcaatgttcca

SEQ ID NO: 31940 - DNA, 20 bp, synthetic construct
  misc_feature 1..20: note = chemically synthesized
  source 1..20: mol_type = other DNA
tggagttcaatgttccaggg

SEQ ID NO: 31941 - DNA, 20 bp, synthetic construct
  misc_feature 1..20: note = chemically synthesized
  source 1..20: mol_type = other DNA
ggagttcaatgttccagggc

SEQ ID NO: 31942 - DNA, 20 bp, synthetic construct
  misc_feature 1..20: note = chemically synthesized
  source 1..20: mol_type = other DNA
gttcaatgttccagggcagg

SEQ ID NO: 31943 - DNA, 20 bp, synthetic construct
  misc_feature 1..20: note = chemically synthesized
  source 1..20: mol_type = other DNA
gttccagggcaggaagaatc

SEQ ID NO: 31944 - DNA, 20 bp, synthetic construct
  misc_feature 1..20: note = chemically synthesized
  source 1..20: mol_type = other DNA
agggcaggaagaatccagca

SEQ ID NO: 31945 - DNA, 20 bp, synthetic construct
  misc_feature 1..20: note = chemically synthesized
  source 1..20: mol_type = other DNA
gggcaggaagaatccagcat

SEQ ID NO: 31946 - DNA, 20 bp, synthetic construct
  misc_feature 1..20: note = chemically synthesized
  source 1..20: mol_type = other DNA
gcaggaagaatccagcatgg

SEQ ID NO: 31947 - DNA, 20 bp, synthetic construct
  misc_feature 1..20: note = chemically synthesized
  source 1..20: mol_type = other DNA
tccagcatgggagaaaaatg

SEQ ID NO: 31948 - DNA, 20 bp, synthetic construct
  misc_feature 1..20: note = chemically synthesized
  source 1..20: mol_type = other DNA
ccagcatgggagaaaaatgt

SEQ ID NO: 31949 - DNA, 20 bp, synthetic construct
  misc_feature 1..20: note = chemically synthesized
  source 1..20: mol_type = other DNA
catgggagaaaaatgtaggc

SEQ ID NO: 31950 - DNA, 20 bp, synthetic construct
  misc_feature 1..20: note = chemically synthesized
  source 1..20: mol_type = other DNA
atgggagaaaaatgtaggct

SEQ ID NO: 31951 - DNA, 20 bp, synthetic construct
  misc_feature 1..20: note = chemically synthesized
  source 1..20: mol_type = other DNA
aaaatgtaggctgggatgcc

SEQ ID NO: 31952 - DNA, 20 bp, synthetic construct
  misc_feature 1..20: note = chemically synthesized
  source 1..20: mol_type = other DNA
gctgggatgccaagccaatc

SEQ ID NO: 31953 - DNA, 20 bp, synthetic construct
  misc_feature 1..20: note = chemically synthesized
  source 1..20: mol_type = other DNA
tttctgcctgctttatatcc

SEQ ID NO: 31954 - DNA, 20 bp, synthetic construct
  misc_feature 1..20: note = chemically synthesized
  source 1..20: mol_type = other DNA
gctttatatcctggctgtgc

SEQ ID NO: 31955 - DNA, 20 bp, synthetic construct
  misc_feature 1..20: note = chemically synthesized
  source 1..20: mol_type = other DNA
tggctgtgctggcaactgat

SEQ ID NO: 31956 - DNA, 20 bp, synthetic construct
  misc_feature 1..20: note = chemically synthesized
  source 1..20: mol_type = other DNA
tgtgctggcaactgattaga

SEQ ID NO: 31957 - DNA, 20 bp, synthetic construct
  misc_feature 1..20: note = chemically synthesized
  source 1..20: mol_type = other DNA
ctgattagatggtgcccacc

SEQ ID NO: 31958 - DNA, 20 bp, synthetic construct
  misc_feature 1..20: note = chemically synthesized
  source 1..20: mol_type = other DNA
agatggtgcccacccagatt

SEQ ID NO: 31959 - DNA, 20 bp, synthetic construct
  misc_feature 1..20: note = chemically synthesized
  source 1..20: mol_type = other DNA
gatggtgcccacccagatta

SEQ ID NO: 31960 - DNA, 20 bp, synthetic construct
  misc_feature 1..20: note = chemically synthesized
  source 1..20: mol_type = other DNA
atggtgcccacccagattaa

SEQ ID NO: 31961 - DNA, 20 bp, synthetic construct
  misc_feature 1..20: note = chemically synthesized
  source 1..20: mol_type = other DNA
gtgcccacccagattaaggg

SEQ ID NO: 31962 - DNA, 20 bp, synthetic construct
  misc_feature 1..20: note = chemically synthesized
  source 1..20: mol_type = other DNA
tgcccacccagattaagggt

SEQ ID NO: 31963 - DNA, 20 bp, synthetic construct
  misc_feature 1..20: note = chemically synthesized
  source 1..20: mol_type = other DNA
aagggtgggtctgccttccc

SEQ ID NO: 31964 - DNA, 20 bp, synthetic construct
  misc_feature 1..20: note = chemically synthesized
  source 1..20: mol_type = other DNA
actgaaatattaatctcctt

SEQ ID NO: 31965 - DNA, 20 bp, synthetic construct
  misc_feature 1..20: note = chemically synthesized
  source 1..20: mol_type = other DNA
ctcctttggtaacaccctca

SEQ ID NO: 31966 - DNA, 20 bp, synthetic construct
  misc_feature 1..20: note = chemically synthesized
  source 1..20: mol_type = other DNA
acaccctcacagacacaccc

SEQ ID NO: 31967 - DNA, 20 bp, synthetic construct
  misc_feature 1..20: note = chemically synthesized
  source 1..20: mol_type = other DNA
gatcattactttgcatcctt

SEQ ID NO: 31968 - DNA, 20 bp, synthetic construct
  misc_feature 1..20: note = chemically synthesized
  source 1..20: mol_type = other DNA
ttgcatccttcagtccaatc

SEQ ID NO: 31969 - DNA, 20 bp, synthetic construct
  misc_feature 1..20: note = chemically synthesized
  source 1..20: mol_type = other DNA
agtccaatcaagttgacact

SEQ ID NO: 31970 - DNA, 20 bp, synthetic construct
  misc_feature 1..20: note = chemically synthesized
  source 1..20: mol_type = other DNA
acactcagtattaaccatca

SEQ ID NO: 31971 - DNA, 20 bp, synthetic construct
  misc_feature 1..20: note = chemically synthesized
  source 1..20: mol_type = other DNA
catcacagtcactttctaat

SEQ ID NO: 31972 - DNA, 20 bp, synthetic construct
  misc_feature 1..20: note = chemically synthesized
  source 1..20: mol_type = other DNA
atcacagtcactttctaatg

SEQ ID NO: 31973 - DNA, 20 bp, synthetic construct
  misc_feature 1..20: note = chemically synthesized
  source 1..20: mol_type = other DNA
cagtcactttctaatgaggt

SEQ ID NO: 31974 - DNA, 20 bp, synthetic construct
  misc_feature 1..20: note = chemically synthesized
  source 1..20: mol_type = other DNA
aggttggtttttttgttgtt

SEQ ID NO: 31975 - DNA, 20 bp, synthetic construct
  misc_feature 1..20: note = chemically synthesized
  source 1..20: mol_type = other DNA
ttttgttgttgagttccttg

SEQ ID NO: 31976 - DNA, 20 bp, synthetic construct
  misc_feature 1..20: note = chemically synthesized
  source 1..20: mol_type = other DNA
tccttgtagattctgtatat

SEQ ID NO: 31977 - DNA, 20 bp, synthetic construct
  misc_feature 1..20: note = chemically synthesized
  source 1..20: mol_type = other DNA
ttagccttttgttgcattca

SEQ ID NO: 31978 - DNA, 20 bp, synthetic construct
  misc_feature 1..20: note = chemically synthesized
  source 1..20: mol_type = other DNA
aatttttttttctcattctg

SEQ ID NO: 31979 - DNA, 20 bp, synthetic construct
  misc_feature 1..20: note = chemically synthesized
  source 1..20: mol_type = other DNA
atttttttttctcattctgt

SEQ ID NO: 31980 - DNA, 20 bp, synthetic construct
  misc_feature 1..20: note = chemically synthesized
  source 1..20: mol_type = other DNA
atccgtttactctgttgatt

SEQ ID NO: 31981 - DNA, 20 bp, synthetic construct
  misc_feature 1..20: note = chemically synthesized
  source 1..20: mol_type = other DNA
tctgttgattcggtcttttg

SEQ ID NO: 31982 - DNA, 20 bp, synthetic construct
  misc_feature 1..20: note = chemically synthesized
  source 1..20: mol_type = other DNA
tgattcggtcttttgcggtg

SEQ ID NO: 31983 - DNA, 20 bp, synthetic construct
  misc_feature 1..20: note = chemically synthesized
  source 1..20: mol_type = other DNA
ttcggtcttttgcggtgcag

SEQ ID NO: 31984 - DNA, 20 bp, synthetic construct
  misc_feature 1..20: note = chemically synthesized
  source 1..20: mol_type = other DNA
tttgcggtgcagaagcattt

SEQ ID NO: 31985 - DNA, 20 bp, synthetic construct
  misc_feature 1..20: note = chemically synthesized
  source 1..20: mol_type = other DNA
agaagcattttagtttaatt

SEQ ID NO: 31986 - DNA, 20 bp, synthetic construct
  misc_feature 1..20: note = chemically synthesized
  source 1..20: mol_type = other DNA
gtttttgtttttgttgtgtt

SEQ ID NO: 31987 - DNA, 20 bp, synthetic construct
  misc_feature 1..20: note = chemically synthesized
  source 1..20: mol_type = other DNA
tttttgttgtgtttagtttt

SEQ ID NO: 31988 - DNA, 20 bp, synthetic construct
  misc_feature 1..20: note = chemically synthesized
  source 1..20: mol_type = other DNA
ttttgttgtgtttagttttg

SEQ ID NO: 31989 - DNA, 20 bp, synthetic construct
  misc_feature 1..20: note = chemically synthesized
  source 1..20: mol_type = other DNA
tgtgtttagttttgaggact

SEQ ID NO: 31990 - DNA, 20 bp, synthetic construct
  misc_feature 1..20: note = chemically synthesized
  source 1..20: mol_type = other DNA
ttggtcataaattctttgcc

SEQ ID NO: 31991 - DNA, 20 bp, synthetic construct
  misc_feature 1..20: note = chemically synthesized
  source 1..20: mol_type = other DNA
tggtcataaattctttgcct

SEQ ID NO: 31992 - DNA, 20 bp, synthetic construct
  misc_feature 1..20: note = chemically synthesized
  source 1..20: mol_type = other DNA
tctaatttttaatcctcttt

SEQ ID NO: 31993 - DNA, 20 bp, synthetic construct
  misc_feature 1..20: note = chemically synthesized
  source 1..20: mol_type = other DNA
taatttttaatcctctttta

SEQ ID NO: 31994 - DNA, 20 bp, synthetic construct
  misc_feature 1..20: note = chemically synthesized
  source 1..20: mol_type = other DNA
tttacccccatttgacacat

SEQ ID NO: 31995 - DNA, 20 bp, synthetic construct
  misc_feature 1..20: note = chemically synthesized
  source 1..20: mol_type = other DNA
atttgacacatgagctaatt

SEQ ID NO: 31996 - DNA, 20 bp, synthetic construct
  misc_feature 1..20: note = chemically synthesized
  source 1..20: mol_type = other DNA
aattgagccttctgtctgtt

SEQ ID NO: 31997 - DNA, 20 bp, synthetic construct
  misc_feature 1..20: note = chemically synthesized
  source 1..20: mol_type = other DNA
gagccttctgtctgttaagt

SEQ ID NO: 31998 - DNA, 20 bp, synthetic construct
  misc_feature 1..20: note = chemically synthesized
  source 1..20: mol_type = other DNA
tgtctgttaagtaagttgac

SEQ ID NO: 31999 - DNA, 20 bp, synthetic construct
  misc_feature 1..20: note = chemically synthesized
  source 1..20: mol_type = other DNA
gttaagtaagttgactagtt

SEQ ID NO: 32000 - DNA, 20 bp, synthetic construct
  misc_feature 1..20: note = chemically synthesized
  source 1..20: mol_type = other DNA
taagttgactagttcagtgt

SEQ ID NO: 32001 - DNA, 20 bp, synthetic construct
  misc_feature 1..20: note = chemically synthesized
  source 1..20: mol_type = other DNA
tttttgccatcataatgctt

SEQ ID NO: 32002 - DNA, 20 bp, synthetic construct
  misc_feature 1..20: note = chemically synthesized
  source 1..20: mol_type = other DNA
tactctccttaattttcccc

SEQ ID NO: 32003 - DNA, 20 bp, synthetic construct
  misc_feature 1..20: note = chemically synthesized
  source 1..20: mol_type = other DNA
actctccttaattttccccc

SEQ ID NO: 32004 - DNA, 20 bp, synthetic construct
  misc_feature 1..20: note = chemically synthesized
  source 1..20: mol_type = other DNA
tccttaattttcccccagga

SEQ ID NO: 32005 - DNA, 20 bp, synthetic construct
  misc_feature 1..20: note = chemically synthesized
  source 1..20: mol_type = other DNA
tttcccccaggatggttttc

SEQ ID NO: 32006 - DNA, 20 bp, synthetic construct
  misc_feature 1..20: note = chemically synthesized
  source 1..20: mol_type = other DNA
ccaggatggttttctagatg

SEQ ID NO: 32007 - DNA, 20 bp, synthetic construct
  misc_feature 1..20: note = chemically synthesized
  source 1..20: mol_type = other DNA
ttttctagatgtggacttgc

SEQ ID NO: 32008 - DNA, 20 bp, synthetic construct
  misc_feature 1..20: note = chemically synthesized
  source 1..20: mol_type = other DNA
atgtggacttgctggatcca

SEQ ID NO: 32009 - DNA, 20 bp, synthetic construct
  misc_feature 1..20: note = chemically synthesized
  source 1..20: mol_type = other DNA
ccaaatgtatccatatattg

SEQ ID NO: 32010 - DNA, 20 bp, synthetic construct
  misc_feature 1..20: note = chemically synthesized
  source 1..20: mol_type = other DNA
attgtggctttgtgttttaa

SEQ ID NO: 32011 - DNA, 20 bp, synthetic construct
  misc_feature 1..20: note = chemically synthesized
  source 1..20: mol_type = other DNA
tgtggctttgtgttttaata

SEQ ID NO: 32012 - DNA, 20 bp, synthetic construct
  misc_feature 1..20: note = chemically synthesized
  source 1..20: mol_type = other DNA
gtggctttgtgttttaatag

SEQ ID NO: 32013 - DNA, 20 bp, synthetic construct
  misc_feature 1..20: note = chemically synthesized
  source 1..20: mol_type = other DNA
gctttgtgttttaatagagg

SEQ ID NO: 32014 - DNA, 20 bp, synthetic construct
  misc_feature 1..20: note = chemically synthesized
  source 1..20: mol_type = other DNA
ttgtgttttaatagaggtag

SEQ ID NO: 32015 - DNA, 20 bp, synthetic construct
  misc_feature 1..20: note = chemically synthesized
  source 1..20: mol_type = other DNA
aatagaggtagcagcaatat

SEQ ID NO: 32016 - DNA, 20 bp, synthetic construct
  misc_feature 1..20: note = chemically synthesized
  source 1..20: mol_type = other DNA
tagaggtagcagcaatatta

SEQ ID NO: 32017 - DNA, 20 bp, synthetic construct
  misc_feature 1..20: note = chemically synthesized
  source 1..20: mol_type = other DNA
agaggtagcagcaatattag

SEQ ID NO: 32018 - DNA, 20 bp, synthetic construct
  misc_feature 1..20: note = chemically synthesized
  source 1..20: mol_type = other DNA
aggtagcagcaatattagag

SEQ ID NO: 32019 - DNA, 20 bp, synthetic construct
  misc_feature 1..20: note = chemically synthesized
  source 1..20: mol_type = other DNA
gtagcagcaatattagagga

SEQ ID NO: 32020 - DNA, 20 bp, synthetic construct
  misc_feature 1..20: note = chemically synthesized
  source 1..20: mol_type = other DNA
caatattagaggagagaatt

SEQ ID NO: 32021 - DNA, 20 bp, synthetic construct
  misc_feature 1..20: note = chemically synthesized
  source 1..20: mol_type = other DNA
aatattagaggagagaatta

SEQ ID NO: 32022 - DNA, 20 bp, synthetic construct
  misc_feature 1..20: note = chemically synthesized
  source 1..20: mol_type = other DNA
agagaattaaggaacgattc

SEQ ID NO: 32023 - DNA, 20 bp, synthetic construct
  misc_feature 1..20: note = chemically synthesized
  source 1..20: mol_type = other DNA
attaaggaacgattctagtg

SEQ ID NO: 32024 - DNA, 20 bp, synthetic construct
  misc_feature 1..20: note = chemically synthesized
  source 1..20: mol_type = other DNA
aaggaacgattctagtgtag

SEQ ID NO: 32025 - DNA, 20 bp, synthetic construct
  misc_feature 1..20: note = chemically synthesized
  source 1..20: mol_type = other DNA
aggaacgattctagtgtagc

SEQ ID NO: 32026 - DNA, 20 bp, synthetic construct
  misc_feature 1..20: note = chemically synthesized
  source 1..20: mol_type = other DNA
cgattctagtgtagcaggac

SEQ ID NO: 32027 - DNA, 20 bp, synthetic construct
  misc_feature 1..20: note = chemically synthesized
  source 1..20: mol_type = other DNA
aagctgcatacaaaacccct

SEQ ID NO: 32028 - DNA, 20 bp, synthetic construct
  misc_feature 1..20: note = chemically synthesized
  source 1..20: mol_type = other DNA
tacaaaacccctcagacacc

SEQ ID NO: 32029 - DNA, 20 bp, synthetic construct
  misc_feature 1..20: note = chemically synthesized
  source 1..20: mol_type = other DNA
acccctcagacaccgagtta

SEQ ID NO: 32030 - DNA, 20 bp, synthetic construct
  misc_feature 1..20: note = chemically synthesized
  source 1..20: mol_type = other DNA
cctcagacaccgagttaaag

SEQ ID NO: 32031 - DNA, 20 bp, synthetic construct
  misc_feature 1..20: note = chemically synthesized
  source 1..20: mol_type = other DNA
ctcagacaccgagttaaaga

SEQ ID NO: 32032 - DNA, 20 bp, synthetic construct
  misc_feature 1..20: note = chemically synthesized
  source 1..20: mol_type = other DNA
agacaccgagttaaagaagg

SEQ ID NO: 32033 - DNA, 20 bp, synthetic construct
  misc_feature 1..20: note = chemically synthesized
  source 1..20: mol_type = other DNA
gacaccgagttaaagaagga

SEQ ID NO: 32034 - DNA, 20 bp, synthetic construct
  misc_feature 1..20: note = chemically synthesized
  source 1..20: mol_type = other DNA
acaccgagttaaagaaggaa

SEQ ID NO: 32035 - DNA, 20 bp, synthetic construct
  misc_feature 1..20: note = chemically synthesized
  source 1..20: mol_type = other DNA
aaagaaggaagggctttatt

SEQ ID NO: 32036 - DNA, 20 bp, synthetic construct
  misc_feature 1..20: note = chemically synthesized
  source 1..20: mol_type = other DNA
aaggaagggctttattcggc

SEQ ID NO: 32037 - DNA, 20 bp, synthetic construct
  misc_feature 1..20: note = chemically synthesized
  source 1..20: mol_type = other DNA
aggaagggctttattcggct

SEQ ID NO: 32038 - DNA, 20 bp, synthetic construct
  misc_feature 1..20: note = chemically synthesized
  source 1..20: mol_type = other DNA
gaagggctttattcggctgg

SEQ ID NO: 32039 - DNA, 20 bp, synthetic construct
  misc_feature 1..20: note = chemically synthesized
  source 1..20: mol_type = other DNA
gctttattcggctgggagct

SEQ ID NO: 32040 - DNA, 20 bp, synthetic construct
  misc_feature 1..20: note = chemically synthesized
  source 1..20: mol_type = other DNA
ctttattcggctgggagctt

SEQ ID NO: 32041 - DNA, 20 bp, synthetic construct
  misc_feature 1..20: note = chemically synthesized
  source 1..20: mol_type = other DNA
attcggctgggagcttgggc

SEQ ID NO: 32042 - DNA, 20 bp, synthetic construct
  misc_feature 1..20: note = chemically synthesized
  source 1..20: mol_type = other DNA
gactcacatctccaacaacc

SEQ ID NO: 32043 - DNA, 20 bp, synthetic construct
  misc_feature 1..20: note = chemically synthesized
  source 1..20: mol_type = other DNA
atctccaacaaccaagctct

SEQ ID NO: 32044 - DNA, 20 bp, synthetic construct
  misc_feature 1..20: note = chemically synthesized
  source 1..20: mol_type = other DNA
ctccaacaaccaagctctca

SEQ ID NO: 32045 - DNA, 20 bp, synthetic construct
  misc_feature 1..20: note = chemically synthesized
  source 1..20: mol_type = other DNA
aacaaccaagctctcagagt

SEQ ID NO: 32046 - DNA, 20 bp, synthetic construct
  misc_feature 1..20: note = chemically synthesized
  source 1..20: mol_type = other DNA
gagcaattcctgtccctttt

SEQ ID NO: 32047 - DNA, 20 bp, synthetic construct
  misc_feature 1..20: note = chemically synthesized
  source 1..20: mol_type = other DNA
agcaattcctgtccctttta

SEQ ID NO: 32048 - DNA, 20 bp, synthetic construct
  misc_feature 1..20: note = chemically synthesized
  source 1..20: mol_type = other DNA
gcaattcctgtcccttttaa

SEQ ID NO: 32049 - DNA, 20 bp, synthetic construct
  misc_feature 1..20: note = chemically synthesized
  source 1..20: mol_type = other DNA
ttttaagggcttacaactct

SEQ ID NO: 32050 - DNA, 20 bp, synthetic construct
  misc_feature 1..20: note = chemically synthesized
  source 1..20: mol_type = other DNA
tttaagggcttacaactcta

SEQ ID NO: 32051 - DNA, 20 bp, synthetic construct
  misc_feature 1..20: note = chemically synthesized
  source 1..20: mol_type = other DNA
ttaagggcttacaactctaa

SEQ ID NO: 32052 - DNA, 20 bp, synthetic construct
  misc_feature 1..20: note = chemically synthesized
  source 1..20: mol_type = other DNA
taagggcttacaactctaag

SEQ ID NO: 32053 - DNA, 20 bp, synthetic construct
  misc_feature 1..20: note = chemically synthesized
  source 1..20: mol_type = other DNA
aagggcttacaactctaagg

SEQ ID NO: 32054 - DNA, 20 bp, synthetic construct
  misc_feature 1..20: note = chemically synthesized
  source 1..20: mol_type = other DNA
actctaagggggtacatgac

SEQ ID NO: 32055 - DNA, 20 bp, synthetic construct
  misc_feature 1..20: note = chemically synthesized
  source 1..20: mol_type = other DNA
ctctaagggggtacatgact

SEQ ID NO: 32056 - DNA, 20 bp, synthetic construct
  misc_feature 1..20: note = chemically synthesized
  source 1..20: mol_type = other DNA
tctaagggggtacatgactg

SEQ ID NO: 32057 - DNA, 20 bp, synthetic construct
  misc_feature 1..20: note = chemically synthesized
  source 1..20: mol_type = other DNA
ctaagggggtacatgactgg

SEQ ID NO: 32058 - DNA, 20 bp, synthetic construct
  misc_feature 1..20: note = chemically synthesized
  source 1..20: mol_type = other DNA
tgactgggggctgcatgcac

SEQ ID NO: 32059 - DNA, 20 bp, synthetic construct
  misc_feature 1..20: note = chemically synthesized
  source 1..20: mol_type = other DNA
gggctgcatgcactggtcat

SEQ ID NO: 32060 - DNA, 20 bp, synthetic construct
  misc_feature 1..20: note = chemically synthesized
  source 1..20: mol_type = other DNA
gcatgcactggtcatcagaa

SEQ ID NO: 32061 - DNA, 20 bp, synthetic construct
  misc_feature 1..20: note = chemically synthesized
  source 1..20: mol_type = other DNA
cactggtcatcagaatggaa

SEQ ID NO: 32062 - DNA, 20 bp, synthetic construct
  misc_feature 1..20: note = chemically synthesized
  source 1..20: mol_type = other DNA
gtcatcagaatggaacagaa

SEQ ID NO: 32063 - DNA, 20 bp, synthetic construct
  misc_feature 1..20: note = chemically synthesized
  source 1..20: mol_type = other DNA
tcatcagaatggaacagaac

SEQ ID NO: 32064 - DNA, 20 bp, synthetic construct
  misc_feature 1..20: note = chemically synthesized
  source 1..20: mol_type = other DNA
cagaatggaacagaacagga

SEQ ID NO: 32065 - DNA, 20 bp, synthetic construct
  misc_feature 1..20: note = chemically synthesized
  source 1..20: mol_type = other DNA
agaatggaacagaacaggac

SEQ ID NO: 32066 - DNA, 20 bp, synthetic construct
  misc_feature 1..20: note = chemically synthesized
  source 1..20: mol_type = other DNA
gaatggaacagaacaggaca

SEQ ID NO: 32067 - DNA, 20 bp, synthetic construct
  misc_feature 1..20: note = chemically synthesized
  source 1..20: mol_type = other DNA
tttcacactgcttttccata

SEQ ID NO: 32068 - DNA, 20 bp, synthetic construct
  misc_feature 1..20: note = chemically synthesized
  source 1..20: mol_type = other DNA
ctgcttttccatacagtgtc

SEQ ID NO: 32069 - DNA, 20 bp, synthetic construct
  misc_feature 1..20: note = chemically synthesized
  source 1..20: mol_type = other DNA
catacagtgtctggaatcta

SEQ ID NO: 32070 - DNA, 20 bp, synthetic construct
  misc_feature 1..20: note = chemically synthesized
  source 1..20: mol_type = other DNA
gaatctatagataacataac

SEQ ID NO: 32071 - DNA, 20 bp, synthetic construct
  misc_feature 1..20: note = chemically synthesized
  source 1..20: mol_type = other DNA
ctatagataacataactggc

SEQ ID NO: 32072 - DNA, 20 bp, synthetic construct
  misc_feature 1..20: note = chemically synthesized
  source 1..20: mol_type = other DNA
tatagataacataactggcc

SEQ ID NO: 32073 - DNA, 20 bp, synthetic construct
  misc_feature 1..20: note = chemically synthesized
  source 1..20: mol_type = other DNA
gataacataactggccaggt

SEQ ID NO: 32074 - DNA, 20 bp, synthetic construct
  misc_feature 1..20: note = chemically synthesized
  source 1..20: mol_type = other DNA
ataacataactggccaggtc

SEQ ID NO: 32075 - DNA, 20 bp, synthetic construct
  misc_feature 1..20: note = chemically synthesized
  source 1..20: mol_type = other DNA
taacataactggccaggtca

SEQ ID NO: 32076 - DNA, 20 bp, synthetic construct
  misc_feature 1..20: note = chemically synthesized
  source 1..20: mol_type = other DNA
aacataactggccaggtcag

SEQ ID NO: 32077 - DNA, 20 bp, synthetic construct
  misc_feature 1..20: note = chemically synthesized
  source 1..20: mol_type = other DNA
gtcaggggtctatctttaac

SEQ ID NO: 32078 - DNA, 20 bp, synthetic construct
  misc_feature 1..20: note = chemically synthesized
  source 1..20: mol_type = other DNA
tcaggggtctatctttaacc

SEQ ID NO: 32079 - DNA, 20 bp, synthetic construct
  misc_feature 1..20: note = chemically synthesized
  source 1..20: mol_type = other DNA
ggtctatctttaaccaggcc

SEQ ID NO: 32080 - DNA, 20 bp, synthetic construct
  misc_feature 1..20: note = chemically synthesized
  source 1..20: mol_type = other DNA
gtctatctttaaccaggccc

SEQ ID NO: 32081 - DNA, 20 bp, synthetic construct
  misc_feature 1..20: note = chemically synthesized
  source 1..20: mol_type = other DNA
ctttaaccaggcccaggatg

SEQ ID NO: 32082 - DNA, 20 bp, synthetic construct
  misc_feature 1..20: note = chemically synthesized
  source 1..20: mol_type = other DNA
ccaggcccaggatgtggtct

SEQ ID NO: 32083 - DNA, 20 bp, synthetic construct
  misc_feature 1..20: note = chemically synthesized
  source 1..20: mol_type = other DNA
caggcccaggatgtggtctc

SEQ ID NO: 32084 - DNA, 20 bp, synthetic construct
  misc_feature 1..20: note = chemically synthesized
  source 1..20: mol_type = other DNA
ggtctcaggctgtttgcctg

SEQ ID NO: 32085 - DNA, 20 bp, synthetic construct
  misc_feature 1..20: note = chemically synthesized
  source 1..20: mol_type = other DNA
tggatttcatttctgccttt

SEQ ID NO: 32086 - DNA, 20 bp, synthetic construct
  misc_feature 1..20: note = chemically synthesized
  source 1..20: mol_type = other DNA
gtttttacttcttctttctt

SEQ ID NO: 32087 - DNA, 20 bp, synthetic construct
  misc_feature 1..20: note = chemically synthesized
  source 1..20: mol_type = other DNA
ttttacttcttctttctttg

SEQ ID NO: 32088 - DNA, 20 bp, synthetic construct
  misc_feature 1..20: note = chemically synthesized
  source 1..20: mol_type = other DNA
tttacttcttctttctttgg

SEQ ID NO: 32089 - DNA, 20 bp, synthetic construct
  misc_feature 1..20: note = chemically synthesized
  source 1..20: mol_type = other DNA
acttcttctttctttggagg

SEQ ID NO: 32090 - DNA, 20 bp, synthetic construct
  misc_feature 1..20: note = chemically synthesized
  source 1..20: mol_type = other DNA
ctttctttggaggcagaaat

SEQ ID NO: 32091 - DNA, 20 bp, synthetic construct
  misc_feature 1..20: note = chemically synthesized
  source 1..20: mol_type = other DNA
tttctttggaggcagaaatt

SEQ ID NO: 32092 - DNA, 20 bp, synthetic construct
  misc_feature 1..20: note = chemically synthesized
  source 1..20: mol_type = other DNA
attgggcataaaacaatatg

SEQ ID NO: 32093 - DNA, 20 bp, synthetic construct
  misc_feature 1..20: note = chemically synthesized
  source 1..20: mol_type = other DNA
ttgggcataaaacaatatga

SEQ ID NO: 32094 - DNA, 20 bp, synthetic construct
  misc_feature 1..20: note = chemically synthesized
  source 1..20: mol_type = other DNA
tgggcataaaacaatatgaa

SEQ ID NO: 32095 - DNA, 20 bp, synthetic construct
  misc_feature 1..20: note = chemically synthesized
  source 1..20: mol_type = other DNA
gcataaaacaatatgaaggg

SEQ ID NO: 32096 - DNA, 20 bp, synthetic construct
  misc_feature 1..20: note = chemically synthesized
  source 1..20: mol_type = other DNA
agggtggtctcctcccttac

SEQ ID NO: 32097 - DNA, 20 bp, synthetic construct
  misc_feature 1..20: note = chemically synthesized
  source 1..20: mol_type = other DNA
gggtggtctcctcccttact

SEQ ID NO: 32098 - DNA, 20 bp, synthetic construct
  misc_feature 1..20: note = chemically synthesized
  source 1..20: mol_type = other DNA
tggtctcctcccttactagg

SEQ ID NO: 32099 - DNA, 20 bp, synthetic construct
  misc_feature 1..20: note = chemically synthesized
  source 1..20: mol_type = other DNA
gtctcctcccttactaggaa

SEQ ID NO: 32100 - DNA, 20 bp, synthetic construct
  misc_feature 1..20: note = chemically synthesized
  source 1..20: mol_type = other DNA
ctcctcccttactaggaaga

SEQ ID NO: 32101 - DNA, 20 bp, synthetic construct
  misc_feature 1..20: note = chemically synthesized
  source 1..20: mol_type = other DNA
ggaagagagaaataccatgt

SEQ ID NO: 32102 - DNA, 20 bp, synthetic construct
  misc_feature 1..20: note = chemically synthesized
  source 1..20: mol_type = other DNA
gaaatacgtatttgtgttat

SEQ ID NO: 32103 - DNA, 20 bp, synthetic construct
  misc_feature 1..20: note = chemically synthesized
  source 1..20: mol_type = other DNA
tgtgttattggatttgacat

SEQ ID NO: 32104 - DNA, 20 bp, synthetic construct
  misc_feature 1..20: note = chemically synthesized
  source 1..20: mol_type = other DNA
gtgttattggatttgacatc

SEQ ID NO: 32105 - DNA, 20 bp, synthetic construct
  misc_feature 1..20: note = chemically synthesized
  source 1..20: mol_type = other DNA
tgttattggatttgacatcg

SEQ ID NO: 32106 - DNA, 20 bp, synthetic construct
  misc_feature 1..20: note = chemically synthesized
  source 1..20: mol_type = other DNA
attggatttgacatcggggt

SEQ ID NO: 32107 - DNA, 20 bp, synthetic construct
  misc_feature 1..20: note = chemically synthesized
  source 1..20: mol_type = other DNA
tttgacatcggggttggacc

SEQ ID NO: 32108 - DNA, 20 bp, synthetic construct
  misc_feature 1..20: note = chemically synthesized
  source 1..20: mol_type = other DNA
catcttctatgaacatctat

SEQ ID NO: 32109 - DNA, 20 bp, synthetic construct
  misc_feature 1..20: note = chemically synthesized
  source 1..20: mol_type = other DNA
aagcacgttctccttatcaa

SEQ ID NO: 32110 - DNA, 20 bp, synthetic construct
  misc_feature 1..20: note = chemically synthesized
  source 1..20: mol_type = other DNA
agcacgttctccttatcaaa

SEQ ID NO: 32111 - DNA, 20 bp, synthetic construct
  misc_feature 1..20: note = chemically synthesized
  source 1..20: mol_type = other DNA
ttatcaaaaggtactttgct

SEQ ID NO: 32112 - DNA, 20 bp, synthetic construct
  misc_feature 1..20: note = chemically synthesized
  source 1..20: mol_type = other DNA
tactttgcttggtgctttaa

SEQ ID NO: 32113 - DNA, 20 bp, synthetic construct
  misc_feature 1..20: note = chemically synthesized
  source 1..20: mol_type = other DNA
ttaaaagataaatgactatg

SEQ ID NO: 32114 - DNA, 20 bp, synthetic construct
  misc_feature 1..20: note = chemically synthesized
  source 1..20: mol_type = other DNA
agataaatgactatgtagct

SEQ ID NO: 32115 - DNA, 20 bp, synthetic construct
  misc_feature 1..20: note = chemically synthesized
  source 1..20: mol_type = other DNA
gataaatgactatgtagctt

SEQ ID NO: 32116 - DNA, 20 bp, synthetic construct
  misc_feature 1..20: note = chemically synthesized
  source 1..20: mol_type = other DNA
taaatgactatgtagcttag

SEQ ID NO: 32117 - DNA, 20 bp, synthetic construct
  misc_feature 1..20: note = chemically synthesized
  source 1..20: mol_type = other DNA
ttcttcataattgaaaacca

SEQ ID NO: 32118 - DNA, 20 bp, synthetic construct
  misc_feature 1..20: note = chemically synthesized
  source 1..20: mol_type = other DNA
ttcataattgaaaaccacag

SEQ ID NO: 32119 - DNA, 20 bp, synthetic construct
  misc_feature 1..20: note = chemically synthesized
  source 1..20: mol_type = other DNA
gctgttatttgaacatacct

SEQ ID NO: 32120 - DNA, 20 bp, synthetic construct
  misc_feature 1..20: note = chemically synthesized
  source 1..20: mol_type = other DNA
gaacatacctgagccccttc

SEQ ID NO: 32121 - DNA, 20 bp, synthetic construct
  misc_feature 1..20: note = chemically synthesized
  source 1..20: mol_type = other DNA
gagccccttctggaccactg

SEQ ID NO: 32122 - DNA, 20 bp, synthetic construct
  misc_feature 1..20: note = chemically synthesized
  source 1..20: mol_type = other DNA
agccccttctggaccactgt

SEQ ID NO: 32123 - DNA, 20 bp, synthetic construct
  misc_feature 1..20: note = chemically synthesized
  source 1..20: mol_type = other DNA
ccccttctggaccactgtag

SEQ ID NO: 32124 - DNA, 20 bp, synthetic construct
  misc_feature 1..20: note = chemically synthesized
  source 1..20: mol_type = other DNA
cttctggaccactgtaggag

SEQ ID NO: 32125 - DNA, 20 bp, synthetic construct
  misc_feature 1..20: note = chemically synthesized
  source 1..20: mol_type = other DNA
ttctggaccactgtaggaga

SEQ ID NO: 32126 - DNA, 20 bp, synthetic construct
  misc_feature 1..20: note = chemically synthesized
  source 1..20: mol_type = other DNA
ctggaccactgtaggagaag

SEQ ID NO: 32127 - DNA, 20 bp, synthetic construct
  misc_feature 1..20: note = chemically synthesized
  source 1..20: mol_type = other DNA
tggaccactgtaggagaagg

SEQ ID NO: 32128 - DNA, 20 bp, synthetic construct
  misc_feature 1..20: note = chemically synthesized
  source 1..20: mol_type = other DNA
accactgtaggagaaggagg

SEQ ID NO: 32129 - DNA, 20 bp, synthetic construct
  misc_feature 1..20: note = chemically synthesized
  source 1..20: mol_type = other DNA
cactgtaggagaaggaggaa

SEQ ID NO: 32130 - DNA, 20 bp, synthetic construct
  misc_feature 1..20: note = chemically synthesized
  source 1..20: mol_type = other DNA
ctgtaggagaaggaggaaga

SEQ ID NO: 32131 - DNA, 20 bp, synthetic construct
  misc_feature 1..20: note = chemically synthesized
  source 1..20: mol_type = other DNA
tgtaggagaaggaggaagag

SEQ ID NO: 32132 - DNA, 20 bp, synthetic construct
  misc_feature 1..20: note = chemically synthesized
  source 1..20: mol_type = other DNA
agaaggaggaagagaggtga

SEQ ID NO: 32133 - DNA, 20 bp, synthetic construct
  misc_feature 1..20: note = chemically synthesized
  source 1..20: mol_type = other DNA
tgaaagtgatttctgctgct

SEQ ID NO: 32134 - DNA, 20 bp, synthetic construct
  misc_feature 1..20: note = chemically synthesized
  source 1..20: mol_type = other DNA
gaaagtgatttctgctgctg

SEQ ID NO: 32135 - DNA, 20 bp, synthetic construct
  misc_feature 1..20: note = chemically synthesized
  source 1..20: mol_type = other DNA
aaagtgatttctgctgctga

SEQ ID NO: 32136 - DNA, 20 bp, synthetic construct
  misc_feature 1..20: note = chemically synthesized
  source 1..20: mol_type = other DNA
gagggcatgtatgatgacaa

SEQ ID NO: 32137 - DNA, 20 bp, synthetic construct
  misc_feature 1..20: note = chemically synthesized
  source 1..20: mol_type = other DNA
agggcatgtatgatgacaat

SEQ ID NO: 32138 - DNA, 20 bp, synthetic construct
  misc_feature 1..20: note = chemically synthesized
  source 1..20: mol_type = other DNA
gtcctaactttgacactaca

SEQ ID NO: 32139 - DNA, 20 bp, synthetic construct
  misc_feature 1..20: note = chemically synthesized
  source 1..20: mol_type = other DNA
ctttgacactacaaagtgac

SEQ ID NO: 32140 - DNA, 20 bp, synthetic construct
  misc_feature 1..20: note = chemically synthesized
  source 1..20: mol_type = other DNA
ttgacactacaaagtgactg

SEQ ID NO: 32141 - DNA, 20 bp, synthetic construct
  misc_feature 1..20: note = chemically synthesized
  source 1..20: mol_type = other DNA
ctacaaagtgactggagctt

SEQ ID NO: 32142 - DNA, 20 bp, synthetic construct
  misc_feature 1..20: note = chemically synthesized
  source 1..20: mol_type = other DNA
tacaaagtgactggagcttt

SEQ ID NO: 32143 - DNA, 20 bp, synthetic construct
  misc_feature 1..20: note = chemically synthesized
  source 1..20: mol_type = other DNA
aagtgactggagctttaggc

SEQ ID NO: 32144 - DNA, 20 bp, synthetic construct
  misc_feature 1..20: note = chemically synthesized
  source 1..20: mol_type = other DNA
tgactggagctttaggcaag

SEQ ID NO: 32145 - DNA, 20 bp, synthetic construct
  misc_feature 1..20: note = chemically synthesized
  source 1..20: mol_type = other DNA
agttactccaattgtctttt

SEQ ID NO: 32146 - DNA, 20 bp, synthetic construct
  misc_feature 1..20: note = chemically synthesized
  source 1..20: mol_type = other DNA
ttttcagactctttcttttt

SEQ ID NO: 32147 - DNA, 20 bp, synthetic construct
  misc_feature 1..20: note = chemically synthesized
  source 1..20: mol_type = other DNA
tttcagactctttctttttg

SEQ ID NO: 32148 - DNA, 20 bp, synthetic construct
  misc_feature 1..20: note = chemically synthesized
  source 1..20: mol_type = other DNA
tgaggtatttgacctctttg

SEQ ID NO: 32149 - DNA, 20 bp, synthetic construct
  misc_feature 1..20: note = chemically synthesized
  source 1..20: mol_type = other DNA
atttgacctctttgcggcat

SEQ ID NO: 32150 - DNA, 20 bp, synthetic construct
  misc_feature 1..20: note = chemically synthesized
  source 1..20: mol_type = other DNA
gctgctatttcacatgcacc

SEQ ID NO: 32151 - DNA, 20 bp, synthetic construct
  misc_feature 1..20: note = chemically synthesized
  source 1..20: mol_type = other DNA
gctatttcacatgcacctag

SEQ ID NO: 32152 - DNA, 20 bp, synthetic construct
  misc_feature 1..20: note = chemically synthesized
  source 1..20: mol_type = other DNA
ctatttcacatgcacctaga

SEQ ID NO: 32153 - DNA, 20 bp, synthetic construct
  misc_feature 1..20: note = chemically synthesized
  source 1..20: mol_type = other DNA
tatttcacatgcacctagaa

SEQ ID NO: 32154 - DNA, 20 bp, synthetic construct
  misc_feature 1..20: note = chemically synthesized
  source 1..20: mol_type = other DNA
aagggactttaaaacatgca

SEQ ID NO: 32155 - DNA, 20 bp, synthetic construct
  misc_feature 1..20: note = chemically synthesized
  source 1..20: mol_type = other DNA
aacatgcacagaattgaaca

SEQ ID NO: 32156 - DNA, 20 bp, synthetic construct
  misc_feature 1..20: note = chemically synthesized
  source 1..20: mol_type = other DNA
atgcacagaattgaacaaag

SEQ ID NO: 32157 - DNA, 20 bp, synthetic construct
  misc_feature 1..20: note = chemically synthesized
  source 1..20: mol_type = other DNA
acaaagcagtaaccattcgt

SEQ ID NO: 32158 - DNA, 20 bp, synthetic construct
  misc_feature 1..20: note = chemically synthesized
  source 1..20: mol_type = other DNA
tcaaatactattatttttga

SEQ ID NO: 32159 - DNA, 20 bp, synthetic construct
  misc_feature 1..20: note = chemically synthesized
  source 1..20: mol_type = other DNA
caaatactattatttttgaa

SEQ ID NO: 32160 - DNA, 20 bp, synthetic construct
  misc_feature 1..20: note = chemically synthesized
  source 1..20: mol_type = other DNA
ttgaaaggtaaataaatcct

SEQ ID NO: 32161 - DNA, 20 bp, synthetic construct
  misc_feature 1..20: note = chemically synthesized
  source 1..20: mol_type = other DNA
tgaaaggtaaataaatcctt

SEQ ID NO: 32162 - DNA, 20 bp, synthetic construct
  misc_feature 1..20: note = chemically synthesized
  source 1..20: mol_type = other DNA
ggtaaataaatccttgggct

SEQ ID NO: 32163 - DNA, 20 bp, synthetic construct
  misc_feature 1..20: note = chemically synthesized
  source 1..20: mol_type = other DNA
aaataaatccttgggcttag

SEQ ID NO: 32164 - DNA, 20 bp, synthetic construct
  misc_feature 1..20: note = chemically synthesized
  source 1..20: mol_type = other DNA
attgctaacctgaatgataa

SEQ ID NO: 32165 - DNA, 20 bp, synthetic construct
  misc_feature 1..20: note = chemically synthesized
  source 1..20: mol_type = other DNA
agaaacttttttccttttaa

SEQ ID NO: 32166 - DNA, 20 bp, synthetic construct
  misc_feature 1..20: note = chemically synthesized
  source 1..20: mol_type = other DNA
acttttttccttttaacagt

SEQ ID NO: 32167 - DNA, 20 bp, synthetic construct
  misc_feature 1..20: note = chemically synthesized
  source 1..20: mol_type = other DNA
ttttttccttttaacagttg

SEQ ID NO: 32168 - DNA, 20 bp, synthetic construct
  misc_feature 1..20: note = chemically synthesized
  source 1..20: mol_type = other DNA
tttttccttttaacagttgg

SEQ ID NO: 32169 - DNA, 20 bp, synthetic construct
  misc_feature 1..20: note = chemically synthesized
  source 1..20: mol_type = other DNA
gaggcatctatactgtgatt

SEQ ID NO: 32170 - DNA, 20 bp, synthetic construct
  misc_feature 1..20: note = chemically synthesized
  source 1..20: mol_type = other DNA
tctatactgtgattcagaca

SEQ ID NO: 32171 - DNA, 20 bp, synthetic construct
  misc_feature 1..20: note = chemically synthesized
  source 1..20: mol_type = other DNA
ctatactgtgattcagacaa

SEQ ID NO: 32172 - DNA, 20 bp, synthetic construct
  misc_feature 1..20: note = chemically synthesized
  source 1..20: mol_type = other DNA
tcagacaaaggccaaaacaa

SEQ ID NO: 32173 - DNA, 20 bp, synthetic construct
  misc_feature 1..20: note = chemically synthesized
  source 1..20: mol_type = other DNA
gacaaaggccaaaacaacag

SEQ ID NO: 32174 - DNA, 20 bp, synthetic construct
  misc_feature 1..20: note = chemically synthesized
  source 1..20: mol_type = other DNA
ccaaaacaacagcagatgaa

SEQ ID NO: 32175 - DNA, 20 bp, synthetic construct
  misc_feature 1..20: note = chemically synthesized
  source 1..20: mol_type = other DNA
caaaacaacagcagatgaat

SEQ ID NO: 32176 - DNA, 20 bp, synthetic construct
  misc_feature 1..20: note = chemically synthesized
  source 1..20: mol_type = other DNA
aaaacaacagcagatgaatg

SEQ ID NO: 32177 - DNA, 20 bp, synthetic construct
  misc_feature 1..20: note = chemically synthesized
  source 1..20: mol_type = other DNA
aacaacagcagatgaatggg

SEQ ID NO: 32178 - DNA, 20 bp, synthetic construct
  misc_feature 1..20: note = chemically synthesized
  source 1..20: mol_type = other DNA
caacagcagatgaatgggga

SEQ ID NO: 32179 - DNA, 20 bp, synthetic construct
  misc_feature 1..20: note = chemically synthesized
  source 1..20: mol_type = other DNA
gggagagaactattttctga

SEQ ID NO: 32180 - DNA, 20 bp, synthetic construct
  misc_feature 1..20: note = chemically synthesized
  source 1..20: mol_type = other DNA
ggagagaactattttctgat

SEQ ID NO: 32181 - DNA, 20 bp, synthetic construct
  misc_feature 1..20: note = chemically synthesized
  source 1..20: mol_type = other DNA
ttctgataggtccatatttt

SEQ ID NO: 32182 - DNA, 20 bp, synthetic construct
  misc_feature 1..20: note = chemically synthesized
  source 1..20: mol_type = other DNA
catattttgagcataatatg

SEQ ID NO: 32183 - DNA, 20 bp, synthetic construct
  misc_feature 1..20: note = chemically synthesized
  source 1..20: mol_type = other DNA
ttgagcataatatgaagact

SEQ ID NO: 32184 - DNA, 20 bp, synthetic construct
  misc_feature 1..20: note = chemically synthesized
  source 1..20: mol_type = other DNA
tgagcataatatgaagactc

SEQ ID NO: 32185 - DNA, 20 bp, synthetic construct
  misc_feature 1..20: note = chemically synthesized
  source 1..20: mol_type = other DNA
gcataatatgaagactcagg

SEQ ID NO: 32186 - DNA, 20 bp, synthetic construct
  misc_feature 1..20: note = chemically synthesized
  source 1..20: mol_type = other DNA
atatgaagactcaggtggaa

SEQ ID NO: 32187 - DNA, 20 bp, synthetic construct
  misc_feature 1..20: note = chemically synthesized
  source 1..20: mol_type = other DNA
gaacctgtaaatgatgctgt

SEQ ID NO: 32188 - DNA, 20 bp, synthetic construct
  misc_feature 1..20: note = chemically synthesized
  source 1..20: mol_type = other DNA
cctgtaaatgatgctgtcag

SEQ ID NO: 32189 - DNA, 20 bp, synthetic construct
  misc_feature 1..20: note = chemically synthesized
  source 1..20: mol_type = other DNA
tgtaaatgatgctgtcagaa

SEQ ID NO: 32190 - DNA, 20 bp, synthetic construct
  misc_feature 1..20: note = chemically synthesized
  source 1..20: mol_type = other DNA
aaatgatgctgtcagaagag

SEQ ID NO: 32191 - DNA, 20 bp, synthetic construct
  misc_feature 1..20: note = chemically synthesized
  source 1..20: mol_type = other DNA
tgatgctgtcagaagagcag

SEQ ID NO: 32192 - DNA, 20 bp, synthetic construct
  misc_feature 1..20: note = chemically synthesized
  source 1..20: mol_type = other DNA
gagcagtggacgcaatgaat

SEQ ID NO: 32193 - DNA, 20 bp, synthetic construct
  misc_feature 1..20: note = chemically synthesized
  source 1..20: mol_type = other DNA
gtggacgcaatgaataagca

SEQ ID NO: 32194 - DNA, 20 bp, synthetic construct
  misc_feature 1..20: note = chemically synthesized
  source 1..20: mol_type = other DNA
caatgaataagcatggctgc

SEQ ID NO: 32195 - DNA, 20 bp, synthetic construct
  misc_feature 1..20: note = chemically synthesized
  source 1..20: mol_type = other DNA
acaggttcacactgttccac

SEQ ID NO: 32196 - DNA, 20 bp, synthetic construct
  misc_feature 1..20: note = chemically synthesized
  source 1..20: mol_type = other DNA
gctgttgttttggcctttgt

SEQ ID NO: 32197 - DNA, 20 bp, synthetic construct
  misc_feature 1..20: note = chemically synthesized
  source 1..20: mol_type = other DNA
gcaatttgtttaaagtaata

SEQ ID NO: 32198 - DNA, 20 bp, synthetic construct
  misc_feature 1..20: note = chemically synthesized
  source 1..20: mol_type = other DNA
taaagtaataagggatggaa

SEQ ID NO: 32199 - DNA, 20 bp, synthetic construct
  misc_feature 1..20: note = chemically synthesized
  source 1..20: mol_type = other DNA
cagatttttaaattagcatt

SEQ ID NO: 32200 - DNA, 20 bp, synthetic construct
  misc_feature 1..20: note = chemically synthesized
  source 1..20: mol_type = other DNA
atttaggatccactaagccc

SEQ ID NO: 32201 - DNA, 20 bp, synthetic construct
  misc_feature 1..20: note = chemically synthesized
  source 1..20: mol_type = other DNA
catattgttaagggacacca

SEQ ID NO: 32202 - DNA, 20 bp, synthetic construct
  misc_feature 1..20: note = chemically synthesized
  source 1..20: mol_type = other DNA
ggtcaaatacctcaaaaaga

SEQ ID NO: 32203 - DNA, 20 bp, synthetic construct
  misc_feature 1..20: note = chemically synthesized
  source 1..20: mol_type = other DNA
aaagagtctgaaaagacaat

SEQ ID NO: 32204 - DNA, 20 bp, synthetic construct
  misc_feature 1..20: note = chemically synthesized
  source 1..20: mol_type = other DNA
cccccagtcatgtaccccct

SEQ ID NO: 32205 - DNA, 20 bp, synthetic construct
  misc_feature 1..20: note = chemically synthesized
  source 1..20: mol_type = other DNA
tgtaagcccttaaaagggac

SEQ ID NO: 32206 - DNA, 20 bp, synthetic construct
  misc_feature 1..20: note = chemically synthesized
  source 1..20: mol_type = other DNA
agagcttggttgttggagat

SEQ ID NO: 32207 - DNA, 20 bp, synthetic construct
  misc_feature 1..20: note = chemically synthesized
  source 1..20: mol_type = other DNA
agtcttgcccaagctcccag

SEQ ID NO: 32208 - DNA, 20 bp, synthetic construct
  misc_feature 1..20: note = chemically synthesized
  source 1..20: mol_type = other DNA
cttctttaactcggtgtctg

SEQ ID NO: 32209 - DNA, 20 bp, synthetic construct
  misc_feature 1..20: note = chemically synthesized
  source 1..20: mol_type = other DNA
tgcagcttgtcctgctacac

SEQ ID NO: 32210 - DNA, 20 bp, synthetic construct
  misc_feature 1..20: note = chemically synthesized
  source 1..20: mol_type = other DNA
aaaacacaaagccacaatat

SEQ ID NO: 32211 - DNA, 20 bp, synthetic construct
  misc_feature 1..20: note = chemically synthesized
  source 1..20: mol_type = other DNA
atttggaaaatatgcacact

SEQ ID NO: 32212 - DNA, 20 bp, synthetic construct
  misc_feature 1..20: note = chemically synthesized
  source 1..20: mol_type = other DNA
catcctgggggaaaattaag

SEQ ID NO: 32213 - DNA, 20 bp, synthetic construct
  misc_feature 1..20: note = chemically synthesized
  source 1..20: mol_type = other DNA
aaaattaaggagagtatgaa

SEQ ID NO: 32214 - DNA, 20 bp, synthetic construct
  misc_feature 1..20: note = chemically synthesized
  source 1..20: mol_type = other DNA
aattagctcatgtgtcaaat

SEQ ID NO: 32215 - DNA, 20 bp, synthetic construct
  misc_feature 1..20: note = chemically synthesized
  source 1..20: mol_type = other DNA
gggaaagacaggctctaaaa

SEQ ID NO: 32216 - DNA, 20 bp, synthetic construct
  misc_feature 1..20: note = chemically synthesized
  source 1..20: mol_type = other DNA
aattagatgtggcctaggca

SEQ ID NO: 32217 - DNA, 20 bp, synthetic construct
  misc_feature 1..20: note = chemically synthesized
  source 1..20: mol_type = other DNA
tgcttctgcaccgcaaaaga

SEQ ID NO: 32218 - DNA, 20 bp, synthetic construct
  misc_feature 1..20: note = chemically synthesized
  source 1..20: mol_type = other DNA
accgcaaaagaccgaatcaa

SEQ ID NO: 32219 - DNA, 20 bp, synthetic construct
  misc_feature 1..20: note = chemically synthesized
  source 1..20: mol_type = other DNA
agaccgaatcaacagagtaa

SEQ ID NO: 32220 - DNA, 20 bp, synthetic construct
  misc_feature 1..20: note = chemically synthesized
  source 1..20: mol_type = other DNA
cagagtaaacggataaccta

SEQ ID NO: 32221 - DNA, 20 bp, synthetic construct
  misc_feature 1..20: note = chemically synthesized
  source 1..20: mol_type = other DNA
agaaaaaaaaattgcaaact

SEQ ID NO: 32222 - DNA, 20 bp, synthetic construct
  misc_feature 1..20: note = chemically synthesized
  source 1..20: mol_type = other DNA
tgcaacaaaaggctaatata

SEQ ID NO: 32223 - DNA, 20 bp, synthetic construct
  misc_feature 1..20: note = chemically synthesized
  source 1..20: mol_type = other DNA
agtgactgtgatggttaata

SEQ ID NO: 32224 - DNA, 20 bp, synthetic construct
  misc_feature 1..20: note = chemically synthesized
  source 1..20: mol_type = other DNA
gtgtcaacttgattggactg

SEQ ID NO: 32225 - DNA, 20 bp, synthetic construct
  misc_feature 1..20: note = chemically synthesized
  source 1..20: mol_type = other DNA
aaggatgcaaagtaatgatc

SEQ ID NO: 32226 - DNA, 20 bp, synthetic construct
  misc_feature 1..20: note = chemically synthesized
  source 1..20: mol_type = other DNA
atgatcttgggtgtgtctgt

SEQ ID NO: 32227 - DNA, 20 bp, synthetic construct
  misc_feature 1..20: note = chemically synthesized
  source 1..20: mol_type = other DNA
aaggcagacccacccttaat

SEQ ID NO: 32228 - DNA, 20 bp, synthetic construct
  misc_feature 1..20: note = chemically synthesized
  source 1..20: mol_type = other DNA
taatcagttgccagcacagc

SEQ ID NO: 32229 - DNA, 20 bp, synthetic construct
  misc_feature 1..20: note = chemically synthesized
  source 1..20: mol_type = other DNA
gcctacatttttctcccatg

SEQ ID NO: 32230 - DNA, 20 bp, synthetic construct
  misc_feature 1..20: note = chemically synthesized
  source 1..20: mol_type = other DNA
ttttgggaccttgtgaacat

SEQ ID NO: 32231 - DNA, 20 bp, synthetic construct
  misc_feature 1..20: note = chemically synthesized
  source 1..20: mol_type = other DNA
ctaatacagattttggtacc

SEQ ID NO: 32232 - DNA, 20 bp, synthetic construct
  misc_feature 1..20: note = chemically synthesized
  source 1..20: mol_type = other DNA
caggagtggttctagaggaa

SEQ ID NO: 32233 - DNA, 20 bp, synthetic construct
  misc_feature 1..20: note = chemically synthesized
  source 1..20: mol_type = other DNA
ttctagaggaacagaatatt

SEQ ID NO: 32234 - DNA, 20 bp, synthetic construct
  misc_feature 1..20: note = chemically synthesized
  source 1..20: mol_type = other DNA
gaggaacagaatattaagga

SEQ ID NO: 32235 - DNA, 20 bp, synthetic construct
  misc_feature 1..20: note = chemically synthesized
  source 1..20: mol_type = other DNA
tggagttctttcattggttt

SEQ ID NO: 32236 - DNA, 20 bp, synthetic construct
  misc_feature 1..20: note = chemically synthesized
  source 1..20: mol_type = other DNA
ttcattggttttggggtttc

SEQ ID NO: 32237 - DNA, 20 bp, synthetic construct
  misc_feature 1..20: note = chemically synthesized
  source 1..20: mol_type = other DNA
tccttggcatcaattgttta

SEQ ID NO: 32238 - DNA, 20 bp, synthetic construct
  misc_feature 1..20: note = chemically synthesized
  source 1..20: mol_type = other DNA
ttcaacgcttgtgagaggca

SEQ ID NO: 32239 - DNA, 20 bp, synthetic construct
  misc_feature 1..20: note = chemically synthesized
  source 1..20: mol_type = other DNA
aatacttttgactatatgtg

SEQ ID NO: 32240 - DNA, 20 bp, synthetic construct
  misc_feature 1..20: note = chemically synthesized
  source 1..20: mol_type = other DNA
tgaaagaaaatgatgaactc

SEQ ID NO: 32241 - DNA, 20 bp, synthetic construct
  misc_feature 1..20: note = chemically synthesized
  source 1..20: mol_type = other DNA
agcaagaagtagcaaacaca

SEQ ID NO: 32242 - DNA, 20 bp, synthetic construct
  misc_feature 1..20: note = chemically synthesized
  source 1..20: mol_type = other DNA
gatgagacatttgtgggaca

SEQ ID NO: 32243 - DNA, 20 bp, synthetic construct
  misc_feature 1..20: note = chemically synthesized
  source 1..20: mol_type = other DNA
tctacctcagtaaaatttat

SEQ ID NO: 32244 - DNA, 20 bp, synthetic construct
  misc_feature 1..20: note = chemically synthesized
  source 1..20: mol_type = other DNA
gagatattccttctaaagtg

SEQ ID NO: 32245 - DNA, 20 bp, synthetic construct
  misc_feature 1..20: note = chemically synthesized
  source 1..20: mol_type = other DNA
acaacgcctagtgggcctat

SEQ ID NO: 32246 - DNA, 20 bp, synthetic construct
  misc_feature 1..20: note = chemically synthesized
  source 1..20: mol_type = other DNA
ggaggcaacatattcctgat

SEQ ID NO: 32247 - DNA, 20 bp, synthetic construct
  misc_feature 1..20: note = chemically synthesized
  source 1..20: mol_type = other DNA
gtgttactctggcccattta

SEQ ID NO: 32248 - DNA, 20 bp, synthetic construct
  misc_feature 1..20: note = chemically synthesized
  source 1..20: mol_type = other DNA
gatccaaaaggctgccagtt

SEQ ID NO: 32249 - DNA, 20 bp, synthetic construct
  misc_feature 1..20: note = chemically synthesized
  source 1..20: mol_type = other DNA
aaaaggctgccagttttgag

SEQ ID NO: 32250 - DNA, 20 bp, synthetic construct
  misc_feature 1..20: note = chemically synthesized
  source 1..20: mol_type = other DNA
ttgaggtgtcagtgccagat

SEQ ID NO: 32251 - DNA, 20 bp, synthetic construct
  misc_feature 1..20: note = chemically synthesized
  source 1..20: mol_type = other DNA
tgtttggagcatttggcagg

SEQ ID NO: 32252 - DNA, 20 bp, synthetic construct
  misc_feature 1..20: note = chemically synthesized
  source 1..20: mol_type = other DNA
tgaatcacagcggaggcctc

SEQ ID NO: 32253 - DNA, 20 bp, synthetic construct
  misc_feature 1..20: note = chemically synthesized
  source 1..20: mol_type = other DNA
tggaaacgaaatatttgact

SEQ ID NO: 32254 - DNA, 20 bp, synthetic construct
  misc_feature 1..20: note = chemically synthesized
  source 1..20: mol_type = other DNA
cctgaactgcctatcatgaa

SEQ ID NO: 32255 - DNA, 20 bp, synthetic construct
  misc_feature 1..20: note = chemically synthesized
  source 1..20: mol_type = other DNA
actgcaccgatggtctcatg

SEQ ID NO: 32256 - DNA, 20 bp, synthetic construct
  misc_feature 1..20: note = chemically synthesized
  source 1..20: mol_type = other DNA
gaaatttggggaagaggtat

SEQ ID NO: 32257 - DNA, 20 bp, synthetic construct
  misc_feature 1..20: note = chemically synthesized
  source 1..20: mol_type = other DNA
caaagatattttcatcccat

SEQ ID NO: 32258 - DNA, 20 bp, synthetic construct
  misc_feature 1..20: note = chemically synthesized
  source 1..20: mol_type = other DNA
tcccatgtgagtgctcacca

SEQ ID NO: 32259 - DNA, 20 bp, synthetic construct
  misc_feature 1..20: note = chemically synthesized
  source 1..20: mol_type = other DNA
aatgggtgacctcagcagaa

SEQ ID NO: 32260 - DNA, 20 bp, synthetic construct
  misc_feature 1..20: note = chemically synthesized
  source 1..20: mol_type = other DNA
aagaggattttaataatcaa

SEQ ID NO: 32261 - DNA, 20 bp, synthetic construct
  misc_feature 1..20: note = chemically synthesized
  source 1..20: mol_type = other DNA
gattttaataatcaagtgga

SEQ ID NO: 32262 - DNA, 20 bp, synthetic construct
  misc_feature 1..20: note = chemically synthesized
  source 1..20: mol_type = other DNA
aacaaagtggccacagttgc

SEQ ID NO: 32263 - DNA, 20 bp, synthetic construct
  misc_feature 1..20: note = chemically synthesized
  source 1..20: mol_type = other DNA
cttgatatggcaccattcct

SEQ ID NO: 32264 - DNA, 20 bp, synthetic construct
  misc_feature 1..20: note = chemically synthesized
  source 1..20: mol_type = other DNA
gggcagaggcttgtcctcac

SEQ ID NO: 32265 - DNA, 20 bp, synthetic construct
  misc_feature 1..20: note = chemically synthesized
  source 1..20: mol_type = other DNA
cactggaatagacacttact

SEQ ID NO: 32266 - DNA, 20 bp, synthetic construct
  misc_feature 1..20: note = chemically synthesized
  source 1..20: mol_type = other DNA
aatagacacttactctggat

SEQ ID NO: 32267 - DNA, 20 bp, synthetic construct
  misc_feature 1..20: note = chemically synthesized
  source 1..20: mol_type = other DNA
tatgccaagactaccatcca

SEQ ID NO: 32268 - DNA, 20 bp, synthetic construct
  misc_feature 1..20: note = chemically synthesized
  source 1..20: mol_type = other DNA
gactaccatccatggaatca

SEQ ID NO: 32269 - DNA, 20 bp, synthetic construct
  misc_feature 1..20: note = chemically synthesized
  source 1..20: mol_type = other DNA
tgacagtgggctcatgctca

SEQ ID NO: 32270 - DNA, 20 bp, synthetic construct
  misc_feature 1..20: note = chemically synthesized
  source 1..20: mol_type = other DNA
ctatcatcctgaagcagctt

SEQ ID NO: 32271 - DNA, 20 bp, synthetic construct
  misc_feature 1..20: note = chemically synthesized
  source 1..20: mol_type = other DNA
tccagaaggctgtgtatgct

SEQ ID NO: 32272 - DNA, 20 bp, synthetic construct
  misc_feature 1..20: note = chemically synthesized
  source 1..20: mol_type = other DNA
ggtactgtttctcccataga

SEQ ID NO: 32273 - DNA, 20 bp, synthetic construct
  misc_feature 1..20: note = chemically synthesized
  source 1..20: mol_type = other DNA
ttctcccatagacaggattc

SEQ ID NO: 32274 - DNA, 20 bp, synthetic construct
  misc_feature 1..20: note = chemically synthesized
  source 1..20: mol_type = other DNA
tagacaggattcacgggtcc

SEQ ID NO: 32275 - DNA, 20 bp, synthetic construct
  misc_feature 1..20: note = chemically synthesized
  source 1..20: mol_type = other DNA
attcacgggtccaggaatca

SEQ ID NO: 32276 - DNA, 20 bp, synthetic construct
  misc_feature 1..20: note = chemically synthesized
  source 1..20: mol_type = other DNA
ttaagtcaacaggctaagaa

SEQ ID NO: 32277 - DNA, 20 bp, synthetic construct
  misc_feature 1..20: note = chemically synthesized
  source 1..20: mol_type = other DNA
gaggtaaggaagcgtatgca

SEQ ID NO: 32278 - DNA, 20 bp, synthetic construct
  misc_feature 1..20: note = chemically synthesized
  source 1..20: mol_type = other DNA
atggaatataggagatccat

SEQ ID NO: 32279 - DNA, 20 bp, synthetic construct
  misc_feature 1..20: note = chemically synthesized
  source 1..20: mol_type = other DNA
ctcttagttttaccatgtcc

SEQ ID NO: 32280 - DNA, 20 bp, synthetic construct
  misc_feature 1..20: note = chemically synthesized
  source 1..20: mol_type = other DNA
gcaggactacaaataaaggt

SEQ ID NO: 32281 - DNA, 20 bp, synthetic construct
  misc_feature 1..20: note = chemically synthesized
  source 1..20: mol_type = other DNA
aggtgcttgctgagggcaaa

SEQ ID NO: 32282 - DNA, 20 bp, synthetic construct
  misc_feature 1..20: note = chemically synthesized
  source 1..20: mol_type = other DNA
tgctgagggcaaagggaata

SEQ ID NO: 32283 - DNA, 20 bp, synthetic construct
  misc_feature 1..20: note = chemically synthesized
  source 1..20: mol_type = other DNA
atacaaggactgtaattgtc

SEQ ID NO: 32284 - DNA, 20 bp, synthetic construct
  misc_feature 1..20: note = chemically synthesized
  source 1..20: mol_type = other DNA
tatgtaatagcatttgcaat

SEQ ID NO: 32285 - DNA, 20 bp, synthetic construct
  misc_feature 1..20: note = chemically synthesized
  source 1..20: mol_type = other DNA
ggtgcattttcaattgcacg

SEQ ID NO: 32286 - DNA, 20 bp, synthetic construct
  misc_feature 1..20: note = chemically synthesized
  source 1..20: mol_type = other DNA
gaagataatgtatgacctca

SEQ ID NO: 32287 - DNA, 20 bp, synthetic construct
  misc_feature 1..20: note = chemically synthesized
  source 1..20: mol_type = other DNA
tggacttgtgatggttaata

SEQ ID NO: 32288 - DNA, 20 bp, synthetic construct
  misc_feature 1..20: note = chemically synthesized
  source 1..20: mol_type = other DNA
aatactgagtgtcaacttga

SEQ ID NO: 32289 - DNA, 20 bp, synthetic construct
  misc_feature 1..20: note = chemically synthesized
  source 1..20: mol_type = other DNA
aagtgtgcaaagtattgatc

SEQ ID NO: 32290 - DNA, 20 bp, synthetic construct
  misc_feature 1..20: note = chemically synthesized
  source 1..20: mol_type = other DNA
ttgatcctgagtgtgtctgt

SEQ ID NO: 32291 - DNA, 20 bp, synthetic construct
  misc_feature 1..20: note = chemically synthesized
  source 1..20: mol_type = other DNA
aaggcagacccacccttaat

SEQ ID NO: 32292 - DNA, 20 bp, synthetic construct
  misc_feature 1..20: note = chemically synthesized
  source 1..20: mol_type = other DNA
taatcagttgccagtgtggc

SEQ ID NO: 32293 - DNA, 20 bp, synthetic construct
  misc_feature 1..20: note = chemically synthesized
  source 1..20: mol_type = other DNA
gcctacatctttctcccatg

SEQ ID NO: 32294 - DNA, 20 bp, synthetic construct
  misc_feature 1..20: note = chemically synthesized
  source 1..20: mol_type = other DNA
ttcaacatcactaataatca

SEQ ID NO: 32295 - DNA, 20 bp, synthetic construct
  misc_feature 1..20: note = chemically synthesized
  source 1..20: mol_type = other DNA
tgatacctccttatgccagt

SEQ ID NO: 32296 - DNA, 20 bp, synthetic construct
  misc_feature 1..20: note = chemically synthesized
  source 1..20: mol_type = other DNA
caaaaacagcagatgttggt

SEQ ID NO: 32297 - DNA, 20 bp, synthetic construct
  misc_feature 1..20: note = chemically synthesized
  source 1..20: mol_type = other DNA
aatgcttatacactgttggt

SEQ ID NO: 32298 - DNA, 20 bp, synthetic construct
  misc_feature 1..20: note = chemically synthesized
  source 1..20: mol_type = other DNA
tcaatcctgcaatcccacta

SEQ ID NO: 32299 - DNA, 20 bp, synthetic construct
  misc_feature 1..20: note = chemically synthesized
  source 1..20: mol_type = other DNA
tgttcccaatagcaaagata

SEQ ID NO: 32300 - DNA, 20 bp, synthetic construct
  misc_feature 1..20: note = chemically synthesized
  source 1..20: mol_type = other DNA
aaatgtctaccaatggacga

SEQ ID NO: 32301 - DNA, 20 bp, synthetic construct
  misc_feature 1..20: note = chemically synthesized
  source 1..20: mol_type = other DNA
tatattactcagccataaaa

SEQ ID NO: 32302 - DNA, 20 bp, synthetic construct
  misc_feature 1..20: note = chemically synthesized
  source 1..20: mol_type = other DNA
agccaagtgggagctaaacg

SEQ ID NO: 32303 - DNA, 20 bp, synthetic construct
  misc_feature 1..20: note = chemically synthesized
  source 1..20: mol_type = other DNA
gatgagtaagcatagacata

SEQ ID NO: 32304 - DNA, 20 bp, synthetic construct
  misc_feature 1..20: note = chemically synthesized
  source 1..20: mol_type = other DNA
ttgagactagagaaaggtgg

SEQ ID NO: 32305 - DNA, 20 bp, synthetic construct
  misc_feature 1..20: note = chemically synthesized
  source 1..20: mol_type = other DNA
ctagagaaaggtgggaggat

SEQ ID NO: 32306 - DNA, 20 bp, synthetic construct
  misc_feature 1..20: note = chemically synthesized
  source 1..20: mol_type = other DNA
atggtgaggactgaaaaact

SEQ ID NO: 32307 - DNA, 20 bp, synthetic construct
  misc_feature 1..20: note = chemically synthesized
  source 1..20: mol_type = other DNA
gaggactgaaaaactacgga

SEQ ID NO: 32308 - DNA, 20 bp, synthetic construct
  misc_feature 1..20: note = chemically synthesized
  source 1..20: mol_type = other DNA
gtccccacccaaatctcatc

SEQ ID NO: 32309 - DNA, 20 bp, synthetic construct
  misc_feature 1..20: note = chemically synthesized
  source 1..20: mol_type = other DNA
taatcctcacgtgttgtggg

SEQ ID NO: 32310 - DNA, 20 bp, synthetic construct
  misc_feature 1..20: note = chemically synthesized
  source 1..20: mol_type = other DNA
agggatttggagggaggtaa

SEQ ID NO: 32311 - DNA, 20 bp, synthetic construct
  misc_feature 1..20: note = chemically synthesized
  source 1..20: mol_type = other DNA
ctcatgctcttctcgtgata

SEQ ID NO: 32312 - DNA, 20 bp, synthetic construct
  misc_feature 1..20: note = chemically synthesized
  source 1..20: mol_type = other DNA
gcaagcaaaatatcacttaa

SEQ ID NO: 32313 - DNA, 20 bp, synthetic construct
  misc_feature 1..20: note = chemically synthesized
  source 1..20: mol_type = other DNA
tcacttaatggggtaattaa

SEQ ID NO: 32314 - DNA, 20 bp, synthetic construct
  misc_feature 1..20: note = chemically synthesized
  source 1..20: mol_type = other DNA
agggtgaagaaattgggcaa

SEQ ID NO: 32315 - DNA, 20 bp, synthetic construct
  misc_feature 1..20: note = chemically synthesized
  source 1..20: mol_type = other DNA
ggcaaatggatgtcatgagg

SEQ ID NO: 32316 - DNA, 20 bp, synthetic construct
  misc_feature 1..20: note = chemically synthesized
  source 1..20: mol_type = other DNA
tcagagcccaggccctaagc

SEQ ID NO: 32317 - DNA, 20 bp, synthetic construct
  misc_feature 1..20: note = chemically synthesized
  source 1..20: mol_type = other DNA
gcccaggccctaagctggag

SEQ ID NO: 32318 - DNA, 20 bp, synthetic construct
  misc_feature 1..20: note = chemically synthesized
  source 1..20: mol_type = other DNA
tggagtagagtgtgcaagga

SEQ ID NO: 32319 - DNA, 20 bp, synthetic construct
  misc_feature 1..20: note = chemically synthesized
  source 1..20: mol_type = other DNA
agtgtgcaaggaaagagtaa

SEQ ID NO: 32320 - DNA, 20 bp, synthetic construct
  misc_feature 1..20: note = chemically synthesized
  source 1..20: mol_type = other DNA
gaaagagtaataggattgaa

SEQ ID NO: 32321 - DNA, 20 bp, synthetic construct
  misc_feature 1..20: note = chemically synthesized
  source 1..20: mol_type = other DNA
ccaggtaggaggacataggg

SEQ ID NO: 32322 - DNA, 20 bp, synthetic construct
  misc_feature 1..20: note = chemically synthesized
  source 1..20: mol_type = other DNA
agacctccagtaaacttagg

SEQ ID NO: 32323 - DNA, 20 bp, synthetic construct
  misc_feature 1..20: note = chemically synthesized
  source 1..20: mol_type = other DNA
actaaataataatcacatgt

SEQ ID NO: 32324 - DNA, 20 bp, synthetic construct
  misc_feature 1..20: note = chemically synthesized
  source 1..20: mol_type = other DNA
ttgttcatgagctagagcaa

SEQ ID NO: 32325 - DNA, 20 bp, synthetic construct
  misc_feature 1..20: note = chemically synthesized
  source 1..20: mol_type = other DNA
atgctattatatggtaccaa

SEQ ID NO: 32326 - DNA, 20 bp, synthetic construct
  misc_feature 1..20: note = chemically synthesized
  source 1..20: mol_type = other DNA
aaaatgcaagcaattttcat

SEQ ID NO: 32327 - DNA, 20 bp, synthetic construct
  misc_feature 1..20: note = chemically synthesized
  source 1..20: mol_type = other DNA
tacacaagctaattgtcctt

SEQ ID NO: 32328 - DNA, 20 bp, synthetic construct
  misc_feature 1..20: note = chemically synthesized
  source 1..20: mol_type = other DNA
aagtttaaactgtcattgag

SEQ ID NO: 32329 - DNA, 20 bp, synthetic construct
  misc_feature 1..20: note = chemically synthesized
  source 1..20: mol_type = other DNA
cagatgttatgtgatgagga

SEQ ID NO: 32330 - DNA, 20 bp, synthetic construct
  misc_feature 1..20: note = chemically synthesized
  source 1..20: mol_type = other DNA
agaacttttctttaaagtgt

SEQ ID NO: 32331 - DNA, 20 bp, synthetic construct
  misc_feature 1..20: note = chemically synthesized
  source 1..20: mol_type = other DNA
acaaaaatgcaaaatttcca

SEQ ID NO: 32332 - DNA, 20 bp, synthetic construct
  misc_feature 1..20: note = chemically synthesized
  source 1..20: mol_type = other DNA
ttcatcttcatcttttccag

SEQ ID NO: 32333 - DNA, 20 bp, synthetic construct
  misc_feature 1..20: note = chemically synthesized
  source 1..20: mol_type = other DNA
gatagtcccccatatagcct

SEQ ID NO: 32334 - DNA, 20 bp, synthetic construct
  misc_feature 1..20: note = chemically synthesized
  source 1..20: mol_type = other DNA
gtagaaaatcccacataaga

SEQ ID NO: 32335 - DNA, 20 bp, synthetic construct
  misc_feature 1..20: note = chemically synthesized
  source 1..20: mol_type = other DNA
tcccacataagagagaattc

SEQ ID NO: 32336 - DNA, 20 bp, synthetic construct
  misc_feature 1..20: note = chemically synthesized
  source 1..20: mol_type = other DNA
agcaaggaagcctacccagt

SEQ ID NO: 32337 - DNA, 20 bp, synthetic construct
  misc_feature 1..20: note = chemically synthesized
  source 1..20: mol_type = other DNA
acatctgcattatggactcc

SEQ ID NO: 32338 - DNA, 20 bp, synthetic construct
  misc_feature 1..20: note = chemically synthesized
  source 1..20: mol_type = other DNA
tccaggaatcctagccacag

SEQ ID NO: 32339 - DNA, 20 bp, synthetic construct
  misc_feature 1..20: note = chemically synthesized
  source 1..20: mol_type = other DNA
ctccagagaaggagctctca

SEQ ID NO: 32340 - DNA, 20 bp, synthetic construct
  misc_feature 1..20: note = chemically synthesized
  source 1..20: mol_type = other DNA
ctgacatcccccacccacag

SEQ ID NO: 32341 - DNA, 20 bp, synthetic construct
  misc_feature 1..20: note = chemically synthesized
  source 1..20: mol_type = other DNA
tactgctggctgctgtcacc

SEQ ID NO: 32342 - DNA, 20 bp, synthetic construct
  misc_feature 1..20: note = chemically synthesized
  source 1..20: mol_type = other DNA
aggcattctgctgggggcct

SEQ ID NO: 32343 - DNA, 20 bp, synthetic construct
  misc_feature 1..20: note = chemically synthesized
  source 1..20: mol_type = other DNA
gccggtgtccacacacacca

SEQ ID NO: 32344 - DNA, 20 bp, synthetic construct
  misc_feature 1..20: note = chemically synthesized
  source 1..20: mol_type = other DNA
acctcctgcatgtgccacct

SEQ ID NO: 32345 - DNA, 20 bp, synthetic construct
  misc_feature 1..20: note = chemically synthesized
  source 1..20: mol_type = other DNA
tgcagactgcttgggagcca

SEQ ID NO: 32346 - DNA, 20 bp, synthetic construct
  misc_feature 1..20: note = chemically synthesized
  source 1..20: mol_type = other DNA
agcaaactgcctgaaggcca

SEQ ID NO: 32347 - DNA, 20 bp, synthetic construct
  misc_feature 1..20: note = chemically synthesized
  source 1..20: mol_type = other DNA
cagccatggggcccaaggac

SEQ ID NO: 32348 - DNA, 20 bp, synthetic construct
  misc_feature 1..20: note = chemically synthesized
  source 1..20: mol_type = other DNA
aagaaatatgacacttccaa

SEQ ID NO: 32349 - DNA, 20 bp, synthetic construct
  misc_feature 1..20: note = chemically synthesized
  source 1..20: mol_type = other DNA
atttataaaattctggaaaa

SEQ ID NO: 32350 - DNA, 20 bp, synthetic construct
  misc_feature 1..20: note = chemically synthesized
  source 1..20: mol_type = other DNA
aagaaatcagaaaaacaatt

SEQ ID NO: 32351 - DNA, 20 bp, synthetic construct
  misc_feature 1..20: note = chemically synthesized
  source 1..20: mol_type = other DNA
tcagaaaaacaattcaggat

SEQ ID NO: 32352 - DNA, 20 bp, synthetic construct
  misc_feature 1..20: note = chemically synthesized
  source 1..20: mol_type = other DNA
acccaagagatagatacaac

SEQ ID NO: 32353 - DNA, 20 bp, synthetic construct
  misc_feature 1..20: note = chemically synthesized
  source 1..20: mol_type = other DNA
aaacagaaattctgtaactg

SEQ ID NO: 32354 - DNA, 20 bp, synthetic construct
  misc_feature 1..20: note = chemically synthesized
  source 1..20: mol_type = other DNA
aatgatagaaaggaaaaaaa

SEQ ID NO: 32355 - DNA, 20 bp, synthetic construct
  misc_feature 1..20: note = chemically synthesized
  source 1..20: mol_type = other DNA
agtcaaactgtcaaaagcca

SEQ ID NO: 32356 - DNA, 20 bp, synthetic construct
  misc_feature 1..20: note = chemically synthesized
  source 1..20: mol_type = other DNA
cctcacaggccaggagaaga

SEQ ID NO: 32357 - DNA, 20 bp, synthetic construct
  misc_feature 1..20: note = chemically synthesized
  source 1..20: mol_type = other DNA
tgaaagaaaaaaatgacacc

SEQ ID NO: 32358 - DNA, 20 bp, synthetic construct
  misc_feature 1..20: note = chemically synthesized
  source 1..20: mol_type = other DNA
aacattgttcttcaaaaatg

SEQ ID NO: 32359 - DNA, 20 bp, synthetic construct
  misc_feature 1..20: note = chemically synthesized
  source 1..20: mol_type = other DNA
tctgggcaagaaaaatttga

SEQ ID NO: 32360 - DNA, 20 bp, synthetic construct
  misc_feature 1..20: note = chemically synthesized
  source 1..20: mol_type = other DNA
gctttacaagaaatatttaa

SEQ ID NO: 32361 - DNA, 20 bp, synthetic construct
  misc_feature 1..20: note = chemically synthesized
  source 1..20: mol_type = other DNA
gaaagaaagagagagagaga

SEQ ID NO: 32362 - DNA, 20 bp, synthetic construct
  misc_feature 1..20: note = chemically synthesized
  source 1..20: mol_type = other DNA
aaaaaaaaaacaaaacaacc

SEQ ID NO: 32363 - DNA, 20 bp, synthetic construct
  misc_feature 1..20: note = chemically synthesized
  source 1..20: mol_type = other DNA
gaatcaattaacaaaatggc

SEQ ID NO: 32364 - DNA, 20 bp, synthetic construct
  misc_feature 1..20: note = chemically synthesized
  source 1..20: mol_type = other DNA
aataatagccttgcatgtaa

SEQ ID NO: 32365 - DNA, 20 bp, synthetic construct
  misc_feature 1..20: note = chemically synthesized
  source 1..20: mol_type = other DNA
gataaaaggaacaattcagc

SEQ ID NO: 32366 - DNA, 20 bp, synthetic construct
  misc_feature 1..20: note = chemically synthesized
  source 1..20: mol_type = other DNA
agcaaatgttattagatata

SEQ ID NO: 32367 - DNA, 20 bp, synthetic construct
  misc_feature 1..20: note = chemically synthesized
  source 1..20: mol_type = other DNA
attagatataaagggtgaaa

SEQ ID NO: 32368 - DNA, 20 bp, synthetic construct
  misc_feature 1..20: note = chemically synthesized
  source 1..20: mol_type = other DNA
aatccaatacaataatagtt

SEQ ID NO: 32369 - DNA, 20 bp, synthetic construct
  misc_feature 1..20: note = chemically synthesized
  source 1..20: mol_type = other DNA
agaaaattaacaaagaaaca

SEQ ID NO: 32370 - DNA, 20 bp, synthetic construct
  misc_feature 1..20: note = chemically synthesized
  source 1..20: mol_type = other DNA
taaacttgactttagaccaa

SEQ ID NO: 32371 - DNA, 20 bp, synthetic construct
  misc_feature 1..20: note = chemically synthesized
  source 1..20: mol_type = other DNA
aatatttcatccaacagcta

SEQ ID NO: 32372 - DNA, 20 bp, synthetic construct
  misc_feature 1..20: note = chemically synthesized
  source 1..20: mol_type = other DNA
tcagcacatgacgcattccc

SEQ ID NO: 32373 - DNA, 20 bp, synthetic construct
  misc_feature 1..20: note = chemically synthesized
  source 1..20: mol_type = other DNA
agcatcttctcagaccacaa

SEQ ID NO: 32374 - DNA, 20 bp, synthetic construct
  misc_feature 1..20: note = chemically synthesized
  source 1..20: mol_type = other DNA
ggaaattaaacaacatgctc

SEQ ID NO: 32375 - DNA, 20 bp, synthetic construct
  misc_feature 1..20: note = chemically synthesized
  source 1..20: mol_type = other DNA
atacaacataggaaaagcca

SEQ ID NO: 32376 - DNA, 20 bp, synthetic construct
  misc_feature 1..20: note = chemically synthesized
  source 1..20: mol_type = other DNA
aatagagaaaaacaacaaca

SEQ ID NO: 32377 - DNA, 20 bp, synthetic construct
  misc_feature 1..20: note = chemically synthesized
  source 1..20: mol_type = other DNA
tgttatttaaaaaagataaa

SEQ ID NO: 32378 - DNA, 20 bp, synthetic construct
  misc_feature 1..20: note = chemically synthesized
  source 1..20: mol_type = other DNA
acacataccacctaccaaga

SEQ ID NO: 32379 - DNA, 20 bp, synthetic construct
  misc_feature 1..20: note = chemically synthesized
  source 1..20: mol_type = other DNA
ctaccaagattgaattaaga

SEQ ID NO: 32380 - DNA, 20 bp, synthetic construct
  misc_feature 1..20: note = chemically synthesized
  source 1..20: mol_type = other DNA
aaaacctgaacagaccagta

SEQ ID NO: 32381 - DNA, 20 bp, synthetic construct
  misc_feature 1..20: note = chemically synthesized
  source 1..20: mol_type = other DNA
accagtaatgaataatgaaa

SEQ ID NO: 32382 - DNA, 20 bp, synthetic construct
  misc_feature 1..20: note = chemically synthesized
  source 1..20: mol_type = other DNA
cttttaaaaattaaacagga

SEQ ID NO: 32383 - DNA, 20 bp, synthetic construct
  misc_feature 1..20: note = chemically synthesized
  source 1..20: mol_type = other DNA
tcctgattccataaccagac

SEQ ID NO: 32384 - DNA, 20 bp, synthetic construct
  misc_feature 1..20: note = chemically synthesized
  source 1..20: mol_type = other DNA
ctcaacaaaatactagcaaa

SEQ ID NO: 32385 - DNA, 20 bp, synthetic construct
  misc_feature 1..20: note = chemically synthesized
  source 1..20: mol_type = other DNA
gataatacaccatgatcaag

SEQ ID NO: 32386 - DNA, 20 bp, synthetic construct
  misc_feature 1..20: note = chemically synthesized
  source 1..20: mol_type = other DNA
tgatcaagtgggatttatac

SEQ ID NO: 32387 - DNA, 20 bp, synthetic construct
  misc_feature 1..20: note = chemically synthesized
  source 1..20: mol_type = other DNA
aacccacagctaacatcata

SEQ ID NO: 32388 - DNA, 20 bp, synthetic construct
  misc_feature 1..20: note = chemically synthesized
  source 1..20: mol_type = other DNA
tctaagaactgaaacaaaat

SEQ ID NO: 32389 - DNA, 20 bp, synthetic construct
  misc_feature 1..20: note = chemically synthesized
  source 1..20: mol_type = other DNA
agctaaaaaataaaatattt

SEQ ID NO: 32390 - DNA, 20 bp, synthetic construct
  misc_feature 1..20: note = chemically synthesized
  source 1..20: mol_type = other DNA
aaactacaaaacactgataa

SEQ ID NO: 32391 - DNA, 20 bp, synthetic construct
  misc_feature 1..20: note = chemically synthesized
  source 1..20: mol_type = other DNA
tggagagatatcctatgttc

SEQ ID NO: 32392 - DNA, 20 bp, synthetic construct
  misc_feature 1..20: note = chemically synthesized
  source 1..20: mol_type = other DNA
agacacttagaccaatggaa

SEQ ID NO: 32393 - DNA, 20 bp, synthetic construct
  misc_feature 1..20: note = chemically synthesized
  source 1..20: mol_type = other DNA
agattttcaacaaaggtgac

SEQ ID NO: 32394 - DNA, 20 bp, synthetic construct
  misc_feature 1..20: note = chemically synthesized
  source 1..20: mol_type = other DNA
aagaaatggtgctgaaaaaa

SEQ ID NO: 32395 - DNA, 20 bp, synthetic construct
  misc_feature 1..20: note = chemically synthesized
  source 1..20: mol_type = other DNA
ctgaaaaaattggatatcca

SEQ ID NO: 32396 - DNA, 20 bp, synthetic construct
  misc_feature 1..20: note = chemically synthesized
  source 1..20: mol_type = other DNA
cattggatatccatgtgcaa

SEQ ID NO: 32397 - DNA, 20 bp, synthetic construct
  misc_feature 1..20: note = chemically synthesized
  source 1..20: mol_type = other DNA
aactggactgctgatatggt

SEQ ID NO: 32398 - DNA, 20 bp, synthetic construct
  misc_feature 1..20: note = chemically synthesized
  source 1..20: mol_type = other DNA
aaatataatccccaacttct

SEQ ID NO: 32399 - DNA, 20 bp, synthetic construct
  misc_feature 1..20: note = chemically synthesized
  source 1..20: mol_type = other DNA
cccaacttctcaggatcttg

SEQ ID NO: 32400 - DNA, 20 bp, synthetic construct
  misc_feature 1..20: note = chemically synthesized
  source 1..20: mol_type = other DNA
agcatgtggaggctcgcatt

SEQ ID NO: 32401 - DNA, 20 bp, synthetic construct
  misc_feature 1..20: note = chemically synthesized
  source 1..20: mol_type = other DNA
caggagacaccccaaatact

SEQ ID NO: 32402 - DNA, 20 bp, synthetic construct
  misc_feature 1..20: note = chemically synthesized
  source 1..20: mol_type = other DNA
gagaagtttctgaccttacc

SEQ ID NO: 32403 - DNA, 20 bp, synthetic construct
  misc_feature 1..20: note = chemically synthesized
  source 1..20: mol_type = other DNA
gtttctgaccttacctggag

SEQ ID NO: 32404 - DNA, 20 bp, synthetic construct
  misc_feature 1..20: note = chemically synthesized
  source 1..20: mol_type = other DNA
agaaaggccctgggagctca

SEQ ID NO: 32405 - DNA, 20 bp, synthetic construct
  misc_feature 1..20: note = chemically synthesized
  source 1..20: mol_type = other DNA
aggcatttacattactaaca

SEQ ID NO: 32406 - DNA, 20 bp, synthetic construct
  misc_feature 1..20: note = chemically synthesized
  source 1..20: mol_type = other DNA
ggcctaaatgctccacttaa

SEQ ID NO: 32407 - DNA, 20 bp, synthetic construct
  misc_feature 1..20: note = chemically synthesized
  source 1..20: mol_type = other DNA
catgcaaatggccaccaaaa

SEQ ID NO: 32408 - DNA, 20 bp, synthetic construct
  misc_feature 1..20: note = chemically synthesized
  source 1..20: mol_type = other DNA
agaaagtcaacaaaaaaata

SEQ ID NO: 32409 - DNA, 20 bp, synthetic construct
  misc_feature 1..20: note = chemically synthesized
  source 1..20: mol_type = other DNA
aaaaaaaagttcaggaccag

SEQ ID NO: 32410 - DNA, 20 bp, synthetic construct
  misc_feature 1..20: note = chemically synthesized
  source 1..20: mol_type = other DNA
aggaccagatggattcacaa

SEQ ID NO: 32411 - DNA, 20 bp, synthetic construct
  misc_feature 1..20: note = chemically synthesized
  source 1..20: mol_type = other DNA
attctactagacattcaaag

SEQ ID NO: 32412 - DNA, 20 bp, synthetic construct
  misc_feature 1..20: note = chemically synthesized
  source 1..20: mol_type = other DNA
gatcaagcaggttccatgcc

SEQ ID NO: 32413 - DNA, 20 bp, synthetic construct
  misc_feature 1..20: note = chemically synthesized
  source 1..20: mol_type = other DNA
caggttccatgccagggatg

SEQ ID NO: 32414 - DNA, 20 bp, synthetic construct
  misc_feature 1..20: note = chemically synthesized
  source 1..20: mol_type = other DNA
aacccacagccaacataata

SEQ ID NO: 32415 - DNA, 20 bp, synthetic construct
  misc_feature 1..20: note = chemically synthesized
  source 1..20: mol_type = other DNA
tctgagaactggaacaagac

SEQ ID NO: 32416 - DNA, 20 bp, synthetic construct
  misc_feature 1..20: note = chemically synthesized
  source 1..20: mol_type = other DNA
gcaaagtttccagatacaag

SEQ ID NO: 32417 - DNA, 20 bp, synthetic construct
  misc_feature 1..20: note = chemically synthesized
  source 1..20: mol_type = other DNA
acaccaacagcaaccaaatg

SEQ ID NO: 32418 - DNA, 20 bp, synthetic construct
  misc_feature 1..20: note = chemically synthesized
  source 1..20: mol_type = other DNA
atataaaacgtactctcaag

SEQ ID NO: 32419 - DNA, 20 bp, synthetic construct
  misc_feature 1..20: note = chemically synthesized
  source 1..20: mol_type = other DNA
cacagtgaagagacaagctg

SEQ ID NO: 32420 - DNA, 20 bp, synthetic construct
  misc_feature 1..20: note = chemically synthesized
  source 1..20: mol_type = other DNA
atatttgcatacatttgaca

SEQ ID NO: 32421 - DNA, 20 bp, synthetic construct
  misc_feature 1..20: note = chemically synthesized
  source 1..20: mol_type = other DNA
tttgacaaggaattaatctc

SEQ ID NO: 32422 - DNA, 20 bp, synthetic construct
  misc_feature 1..20: note = chemically synthesized
  source 1..20: mol_type = other DNA
atctcattaaaaaattggca

SEQ ID NO: 32423 - DNA, 20 bp, synthetic construct
  misc_feature 1..20: note = chemically synthesized
  source 1..20: mol_type = other DNA
agaagacatacaaatgcaca

SEQ ID NO: 32424 - DNA, 20 bp, synthetic construct
  misc_feature 1..20: note = chemically synthesized
  source 1..20: mol_type = other DNA
agatatcatcttatgccagt

SEQ ID NO: 32425 - DNA, 20 bp, synthetic construct
  misc_feature 1..20: note = chemically synthesized
  source 1..20: mol_type = other DNA
aataaataacacatgctggc

SEQ ID NO: 32426 - DNA, 20 bp, synthetic construct
  misc_feature 1..20: note = chemically synthesized
  source 1..20: mol_type = other DNA
aagatccagcaatcttatta

SEQ ID NO: 32427 - DNA, 20 bp, synthetic construct
  misc_feature 1..20: note = chemically synthesized
  source 1..20: mol_type = other DNA
tgggtatttatccaaaggaa

SEQ ID NO: 32428 - DNA, 20 bp, synthetic construct
  misc_feature 1..20: note = chemically synthesized
  source 1..20: mol_type = other DNA
ttatccaaaggaaaagaatt

SEQ ID NO: 32429 - DNA, 20 bp, synthetic construct
  misc_feature 1..20: note = chemically synthesized
  source 1..20: mol_type = other DNA
gattcacattagcaaagata

SEQ ID NO: 32430 - DNA, 20 bp, synthetic construct
  misc_feature 1..20: note = chemically synthesized
  source 1..20: mol_type = other DNA
atcaacctaagtgtccatca

SEQ ID NO: 32431 - DNA, 20 bp, synthetic construct
  misc_feature 1..20: note = chemically synthesized
  source 1..20: mol_type = other DNA
acctaagtgtccatcaatgg

SEQ ID NO: 32432 - DNA, 20 bp, synthetic construct
  misc_feature 1..20: note = chemically synthesized
  source 1..20: mol_type = other DNA
aatgtggtgtatacacacaa

SEQ ID NO: 32433 - DNA, 20 bp, synthetic construct
  misc_feature 1..20: note = chemically synthesized
  source 1..20: mol_type = other DNA
atcatttcatttgcagcaac

SEQ ID NO: 32434 - DNA, 20 bp, synthetic construct
  misc_feature 1..20: note = chemically synthesized
  source 1..20: mol_type = other DNA
aagttaatatcatgtaggta

SEQ ID NO: 32435 - DNA, 20 bp, synthetic construct
  misc_feature 1..20: note = chemically synthesized
  source 1..20: mol_type = other DNA
aatatcatgtaggtagagag

SEQ ID NO: 32436 - DNA, 20 bp, synthetic construct
  misc_feature 1..20: note = chemically synthesized
  source 1..20: mol_type = other DNA
gaaacaggcagttagataga

SEQ ID NO: 32437 - DNA, 20 bp, synthetic construct
  misc_feature 1..20: note = chemically synthesized
  source 1..20: mol_type = other DNA
tctgatgttcaatagcaaag

SEQ ID NO: 32438 - DNA, 20 bp, synthetic construct
  misc_feature 1..20: note = chemically synthesized
  source 1..20: mol_type = other DNA
aacgataaatacttgaggtg

SEQ ID NO: 32439 - DNA, 20 bp, synthetic construct
  misc_feature 1..20: note = chemically synthesized
  source 1..20: mol_type = other DNA
aaacttctctcttaacaagc

SEQ ID NO: 32440 - DNA, 20 bp, synthetic construct
  misc_feature 1..20: note = chemically synthesized
  source 1..20: mol_type = other DNA
cttaacaagctagaatataa

SEQ ID NO: 32441 - DNA, 20 bp, synthetic construct
  misc_feature 1..20: note = chemically synthesized
  source 1..20: mol_type = other DNA
tgaatgcaagagcatagaga

SEQ ID NO: 32442 - DNA, 20 bp, synthetic construct
  misc_feature 1..20: note = chemically synthesized
  source 1..20: mol_type = other DNA
gaaaatacttaatatcatta

SEQ ID NO: 32443 - DNA, 20 bp, synthetic construct
  misc_feature 1..20: note = chemically synthesized
  source 1..20: mol_type = other DNA
ttttaccacagcgtaggtca

SEQ ID NO: 32444 - DNA, 20 bp, synthetic construct
  misc_feature 1..20: note = chemically synthesized
  source 1..20: mol_type = other DNA
atcactatttcaaagaagta

SEQ ID NO: 32445 - DNA, 20 bp, synthetic construct
  misc_feature 1..20: note = chemically synthesized
  source 1..20: mol_type = other DNA
gaatagatatcagccaaaat

SEQ ID NO: 32446 - DNA, 20 bp, synthetic construct
  misc_feature 1..20: note = chemically synthesized
  source 1..20: mol_type = other DNA
aggggcctagacatagcatg

SEQ ID NO: 32447 - DNA, 20 bp, synthetic construct
  misc_feature 1..20: note = chemically synthesized
  source 1..20: mol_type = other DNA
gcatgctgaatgaaaaggaa

SEQ ID NO: 32448 - DNA, 20 bp, synthetic construct
  misc_feature 1..20: note = chemically synthesized
  source 1..20: mol_type = other DNA
tgagctaacttcctcatttt

SEQ ID NO: 32449 - DNA, 20 bp, synthetic construct
  misc_feature 1..20: note = chemically synthesized
  source 1..20: mol_type = other DNA
aagaaataagctaataccta

SEQ ID NO: 32450 - DNA, 20 bp, synthetic construct
  misc_feature 1..20: note = chemically synthesized
  source 1..20: mol_type = other DNA
attaaatgctaggcacagtt

SEQ ID NO: 32451 - DNA, 20 bp, synthetic construct
  misc_feature 1..20: note = chemically synthesized
  source 1..20: mol_type = other DNA
caacattacccaggtgatgg

SEQ ID NO: 32452 - DNA, 20 bp, synthetic construct
  misc_feature 1..20: note = chemically synthesized
  source 1..20: mol_type = other DNA
tacccaggtgatggtggagt

SEQ ID NO: 32453 - DNA, 20 bp, synthetic construct
  misc_feature 1..20: note = chemically synthesized
  source 1..20: mol_type = other DNA
gacagcaagatagtaagtaa

SEQ ID NO: 32454 - DNA, 20 bp, synthetic construct
  misc_feature 1..20: note = chemically synthesized
  source 1..20: mol_type = other DNA
aggaatggagcaacaaattg

SEQ ID NO: 32455 - DNA, 20 bp, synthetic construct
  misc_feature 1..20: note = chemically synthesized
  source 1..20: mol_type = other DNA
ttttgcttgtttgtttgaaa

SEQ ID NO: 32456 - DNA, 20 bp, synthetic construct
  misc_feature 1..20: note = chemically synthesized
  source 1..20: mol_type = other DNA
tctcactctgtcaccccggc

SEQ ID NO: 32457 - DNA, 20 bp, synthetic construct
  misc_feature 1..20: note = chemically synthesized
  source 1..20: mol_type = other DNA
ctgaagcctcactagaacgc

SEQ ID NO: 32458 - DNA, 20 bp, synthetic construct
  misc_feature 1..20: note = chemically synthesized
  source 1..20: mol_type = other DNA
tttttaaatttctgtagaaa

SEQ ID NO: 32459 - DNA, 20 bp, synthetic construct
  misc_feature 1..20: note = chemically synthesized
  source 1..20: mol_type = other DNA
aaagtgttgagattacaggt

SEQ ID NO: 32460 - DNA, 20 bp, synthetic construct
  misc_feature 1..20: note = chemically synthesized
  source 1..20: mol_type = other DNA
aatcaccatgctgggccttg

SEQ ID NO: 32461 - DNA, 20 bp, synthetic construct
  misc_feature 1..20: note = chemically synthesized
  source 1..20: mol_type = other DNA
atggatctttaaaagtggtg

SEQ ID NO: 32462 - DNA, 20 bp, synthetic construct
  misc_feature 1..20: note = chemically synthesized
  source 1..20: mol_type = other DNA
aaacatcgttaggtctcggg

SEQ ID NO: 32463 - DNA, 20 bp, synthetic construct
  misc_feature 1..20: note = chemically synthesized
  source 1..20: mol_type = other DNA
tcgttaggtctcgggaagga

SEQ ID NO: 32464 - DNA, 20 bp, synthetic construct
  misc_feature 1..20: note = chemically synthesized
  source 1..20: mol_type = other DNA
tctgtgttaacaaaaaacag

SEQ ID NO: 32465 - DNA, 20 bp, synthetic construct
  misc_feature 1..20: note = chemically synthesized
  source 1..20: mol_type = other DNA
tctgaaggtttagaaactcc

SEQ ID NO: 32466 - DNA, 20 bp, synthetic construct
  misc_feature 1..20: note = chemically synthesized
  source 1..20: mol_type = other DNA
ctttagaactcctgtcctag

SEQ ID NO: 32467 - DNA, 20 bp, synthetic construct
  misc_feature 1..20: note = chemically synthesized
  source 1..20: mol_type = other DNA
accactttgactctagtttt

SEQ ID NO: 32468 - DNA, 20 bp, synthetic construct
  misc_feature 1..20: note = chemically synthesized
  source 1..20: mol_type = other DNA
ccttaacatgttaatttctc

SEQ ID NO: 32469 - DNA, 20 bp, synthetic construct
  misc_feature 1..20: note = chemically synthesized
  source 1..20: mol_type = other DNA
agtaagacctgggcaaagga

SEQ ID NO: 32470 - DNA, 20 bp, synthetic construct
  misc_feature 1..20: note = chemically synthesized
  source 1..20: mol_type = other DNA
tttgggcaaaactttccatc

SEQ ID NO: 32471 - DNA, 20 bp, synthetic construct
  misc_feature 1..20: note = chemically synthesized
  source 1..20: mol_type = other DNA
acttagtacttcccactact

SEQ ID NO: 32472 - DNA, 20 bp, synthetic construct
  misc_feature 1..20: note = chemically synthesized
  source 1..20: mol_type = other DNA
gtacttcccactactgtgga

SEQ ID NO: 32473 - DNA, 20 bp, synthetic construct
  misc_feature 1..20: note = chemically synthesized
  source 1..20: mol_type = other DNA
tttgtcaattcttgaagatt

SEQ ID NO: 32474 - DNA, 20 bp, synthetic construct
  misc_feature 1..20: note = chemically synthesized
  source 1..20: mol_type = other DNA
tgatacctaatagacacttg

SEQ ID NO: 32475 - DNA, 20 bp, synthetic construct
  misc_feature 1..20: note = chemically synthesized
  source 1..20: mol_type = other DNA
agacacttgatgaatcctta

SEQ ID NO: 32476 - DNA, 20 bp, synthetic construct
  misc_feature 1..20: note = chemically synthesized
  source 1..20: mol_type = other DNA
aatccttactgaataataaa

SEQ ID NO: 32477 - DNA, 20 bp, synthetic construct
  misc_feature 1..20: note = chemically synthesized
  source 1..20: mol_type = other DNA
ctgaataataaaatggatta

SEQ ID NO: 32478 - DNA, 20 bp, synthetic construct
  misc_feature 1..20: note = chemically synthesized
  source 1..20: mol_type = other DNA
aaaaggttattttgaagtct

SEQ ID NO: 32479 - DNA, 20 bp, synthetic construct
  misc_feature 1..20: note = chemically synthesized
  source 1..20: mol_type = other DNA
tgggcaaaattctggcagca

SEQ ID NO: 32480 - DNA, 20 bp, synthetic construct
  misc_feature 1..20: note = chemically synthesized
  source 1..20: mol_type = other DNA
ctaagaaaccttttgttttc

SEQ ID NO: 32481 - DNA, 20 bp, synthetic construct
  misc_feature 1..20: note = chemically synthesized
  source 1..20: mol_type = other DNA
aaccttttgttttcttggat

SEQ ID NO: 32482 - DNA, 20 bp, synthetic construct
  misc_feature 1..20: note = chemically synthesized
  source 1..20: mol_type = other DNA
aaaacatggtaagataactg

SEQ ID NO: 32483 - DNA, 20 bp, synthetic construct
  misc_feature 1..20: note = chemically synthesized
  source 1..20: mol_type = other DNA
agaaactgttattcagttta

SEQ ID NO: 32484 - DNA, 20 bp, synthetic construct
  misc_feature 1..20: note = chemically synthesized
  source 1..20: mol_type = other DNA
tcttacataatagtaaaaaa

SEQ ID NO: 32485 - DNA, 20 bp, synthetic construct
  misc_feature 1..20: note = chemically synthesized
  source 1..20: mol_type = other DNA
cttgatcattaaatacctct

SEQ ID NO: 32486 - DNA, 20 bp, synthetic construct
  misc_feature 1..20: note = chemically synthesized
  source 1..20: mol_type = other DNA
caatttgctctatgaactgg

SEQ ID NO: 32487 - DNA, 20 bp, synthetic construct
  misc_feature 1..20: note = chemically synthesized
  source 1..20: mol_type = other DNA
tgctctatgaactggaggag

SEQ ID NO: 32488 - DNA, 20 bp, synthetic construct
  misc_feature 1..20: note = chemically synthesized
  source 1..20: mol_type = other DNA
tatagtggcaatgtattatt

SEQ ID NO: 32489 - DNA, 20 bp, synthetic construct
  misc_feature 1..20: note = chemically synthesized
  source 1..20: mol_type = other DNA
ataagtattaaaggcagctt

SEQ ID NO: 32490 - DNA, 20 bp, synthetic construct
  misc_feature 1..20: note = chemically synthesized
  source 1..20: mol_type = other DNA
ttttatttcaaggcatactc

SEQ ID NO: 32491 - DNA, 20 bp, synthetic construct
  misc_feature 1..20: note = chemically synthesized
  source 1..20: mol_type = other DNA
ttaaaaacacatgctcattt

SEQ ID NO: 32492 - DNA, 20 bp, synthetic construct
  misc_feature 1..20: note = chemically synthesized
  source 1..20: mol_type = other DNA
ggataaagatctctgaggaa

SEQ ID NO: 32493 - DNA, 20 bp, synthetic construct
  misc_feature 1..20: note = chemically synthesized
  source 1..20: mol_type = other DNA
ttctttctcactaaactaca

SEQ ID NO: 32494 - DNA, 20 bp, synthetic construct
  misc_feature 1..20: note = chemically synthesized
  source 1..20: mol_type = other DNA
tgacttttaattttgatttt

SEQ ID NO: 32495 - DNA, 20 bp, synthetic construct
  misc_feature 1..20: note = chemically synthesized
  source 1..20: mol_type = other DNA
ctttgaacagttagtataag

SEQ ID NO: 32496 - DNA, 20 bp, synthetic construct
  misc_feature 1..20: note = chemically synthesized
  source 1..20: mol_type = other DNA
taaggtgaattctgattttt

SEQ ID NO: 32497 - DNA, 20 bp, synthetic construct
  misc_feature 1..20: note = chemically synthesized
  source 1..20: mol_type = other DNA
gtcttgacacttttaaacta

SEQ ID NO: 32498 - DNA, 20 bp, synthetic construct
  misc_feature 1..20: note = chemically synthesized
  source 1..20: mol_type = other DNA
ctagagagtataaacccaca

SEQ ID NO: 32499 - DNA, 20 bp, synthetic construct
  misc_feature 1..20: note = chemically synthesized
  source 1..20: mol_type = other DNA
ttttgccttttgagaagctc

SEQ ID NO: 32500 - DNA, 20 bp, synthetic construct
  misc_feature 1..20: note = chemically synthesized
  source 1..20: mol_type = other DNA
acattaattccaagctaatt

SEQ ID NO: 32501 - DNA, 20 bp, synthetic construct
  misc_feature 1..20: note = chemically synthesized
  source 1..20: mol_type = other DNA
gcatttcatataattactaa

SEQ ID NO: 32502 - DNA, 20 bp, synthetic construct
  misc_feature 1..20: note = chemically synthesized
  source 1..20: mol_type = other DNA
atataattactaacagaatg

SEQ ID NO: 32503 - DNA, 20 bp, synthetic construct
  misc_feature 1..20: note = chemically synthesized
  source 1..20: mol_type = other DNA
tatttctatgttgtcataat

SEQ ID NO: 32504 - DNA, 20 bp, synthetic construct
  misc_feature 1..20: note = chemically synthesized
  source 1..20: mol_type = other DNA
ctagcaattggttatcacta

SEQ ID NO: 32505 - DNA, 20 bp, synthetic construct
  misc_feature 1..20: note = chemically synthesized
  source 1..20: mol_type = other DNA
cccactggggaagcccaccc

SEQ ID NO: 32506 - DNA, 20 bp, synthetic construct
  misc_feature 1..20: note = chemically synthesized
  source 1..20: mol_type = other DNA
cacccagggatgttacagag

SEQ ID NO: 32507 - DNA, 20 bp, synthetic construct
  misc_feature 1..20: note = chemically synthesized
  source 1..20: mol_type = other DNA
tacagtcctccgagactcct

SEQ ID NO: 32508 - DNA, 20 bp, synthetic construct
  misc_feature 1..20: note = chemically synthesized
  source 1..20: mol_type = other DNA
gaacttacaggcacaaaagt

SEQ ID NO: 32509 - DNA, 20 bp, synthetic construct
  misc_feature 1..20: note = chemically synthesized
  source 1..20: mol_type = other DNA
ggcacaaaagttagagttgg

SEQ ID NO: 32510 - DNA, 20 bp, synthetic construct
  misc_feature 1..20: note = chemically synthesized
  source 1..20: mol_type = other DNA
aggctttggtagcttctctt

SEQ ID NO: 32511 - DNA, 20 bp, synthetic construct
  misc_feature 1..20: note = chemically synthesized
  source 1..20: mol_type = other DNA
gaaatcttatgtgcttccca

SEQ ID NO: 32512 - DNA, 20 bp, synthetic construct
  misc_feature 1..20: note = chemically synthesized
  source 1..20: mol_type = other DNA
acagaattcctggtggaagg

SEQ ID NO: 32513 - DNA, 20 bp, synthetic construct
  misc_feature 1..20: note = chemically synthesized
  source 1..20: mol_type = other DNA
gaaagacgagaaagaggagg

SEQ ID NO: 32514 - DNA, 20 bp, synthetic construct
  misc_feature 1..20: note = chemically synthesized
  source 1..20: mol_type = other DNA
gaagaattcctccttccacc

SEQ ID NO: 32515 - DNA, 20 bp, synthetic construct
  misc_feature 1..20: note = chemically synthesized
  source 1..20: mol_type = other DNA
gcctgtaagttctcttctcc

SEQ ID NO: 32516 - DNA, 20 bp, synthetic construct
  misc_feature 1..20: note = chemically synthesized
  source 1..20: mol_type = other DNA
ggattacaactaattgaaac

SEQ ID NO: 32517 - DNA, 20 bp, synthetic construct
  misc_feature 1..20: note = chemically synthesized
  source 1..20: mol_type = other DNA
taattgaaacaggaattcaa

SEQ ID NO: 32518 - DNA, 20 bp, synthetic construct
  misc_feature 1..20: note = chemically synthesized
  source 1..20: mol_type = other DNA
gagtctcggaggactgtaag

SEQ ID NO: 32519 - DNA, 20 bp, synthetic construct
  misc_feature 1..20: note = chemically synthesized
  source 1..20: mol_type = other DNA
gatccctctctgtaacatcc

SEQ ID NO: 32520 - DNA, 20 bp, synthetic construct
  misc_feature 1..20: note = chemically synthesized
  source 1..20: mol_type = other DNA
agtcgaagaacttcctgtgg

SEQ ID NO: 32521 - DNA, 20 bp, synthetic construct
  misc_feature 1..20: note = chemically synthesized
  source 1..20: mol_type = other DNA
ggtttgtactgctcctgaag

SEQ ID NO: 32522 - DNA, 20 bp, synthetic construct
  misc_feature 1..20: note = chemically synthesized
  source 1..20: mol_type = other DNA
acaccttcactaggtgactg

SEQ ID NO: 32523 - DNA, 20 bp, synthetic construct
  misc_feature 1..20: note = chemically synthesized
  source 1..20: mol_type = other DNA
cactaggtgactgaggaatg

SEQ ID NO: 32524 - DNA, 20 bp, synthetic construct
  misc_feature 1..20: note = chemically synthesized
  source 1..20: mol_type = other DNA
ctagtgataaccaattgcta

SEQ ID NO: 32525 - DNA, 20 bp, synthetic construct
  misc_feature 1..20: note = chemically synthesized
  source 1..20: mol_type = other DNA
gagtgaggaaagcatttaaa

SEQ ID NO: 32526 - DNA, 20 bp, synthetic construct
  misc_feature 1..20: note = chemically synthesized
  source 1..20: mol_type = other DNA
cttgtctattacaacaggct

SEQ ID NO: 32527 - DNA, 20 bp, synthetic construct
  misc_feature 1..20: note = chemically synthesized
  source 1..20: mol_type = other DNA
gaaaatattagccattgcca

SEQ ID NO: 32528 - DNA, 20 bp, synthetic construct
  misc_feature 1..20: note = chemically synthesized
  source 1..20: mol_type = other DNA
agtaattatatgaaatgctt

SEQ ID NO: 32529 - DNA, 20 bp, synthetic construct
  misc_feature 1..20: note = chemically synthesized
  source 1..20: mol_type = other DNA
tttcatattcacaattagct

SEQ ID NO: 32530 - DNA, 20 bp, synthetic construct
  misc_feature 1..20: note = chemically synthesized
  source 1..20: mol_type = other DNA
gcaaaatactgtgctccttt

SEQ ID NO: 32531 - DNA, 20 bp, synthetic construct
  misc_feature 1..20: note = chemically synthesized
  source 1..20: mol_type = other DNA
cttcaatgctatgcttatgt

SEQ ID NO: 32532 - DNA, 20 bp, synthetic construct
  misc_feature 1..20: note = chemically synthesized
  source 1..20: mol_type = other DNA
tcaaattgataaaacaattt

SEQ ID NO: 32533 - DNA, 20 bp, synthetic construct
  misc_feature 1..20: note = chemically synthesized
  source 1..20: mol_type = other DNA
gaggtataacctcatctgtg

SEQ ID NO: 32534 - DNA, 20 bp, synthetic construct
  misc_feature 1..20: note = chemically synthesized
  source 1..20: mol_type = other DNA
aaattataaaacaattcctt

SEQ ID NO: 32535 - DNA, 20 bp, synthetic construct
  misc_feature 1..20: note = chemically synthesized
  source 1..20: mol_type = other DNA
aaaagtcatggttttgaagg

SEQ ID NO: 32536 - DNA, 20 bp, synthetic construct
  misc_feature 1..20: note = chemically synthesized
  source 1..20: mol_type = other DNA
ctgagttcctcaagatcttg

SEQ ID NO: 32537 - DNA, 20 bp, synthetic construct
  misc_feature 1..20: note = chemically synthesized
  source 1..20: mol_type = other DNA
agaatcaagccaactgattg

SEQ ID NO: 32538 - DNA, 20 bp, synthetic construct
  misc_feature 1..20: note = chemically synthesized
  source 1..20: mol_type = other DNA
atgtctattacagtaatcta

SEQ ID NO: 32539 - DNA, 20 bp, synthetic construct
  misc_feature 1..20: note = chemically synthesized
  source 1..20: mol_type = other DNA
aaaggatctgaaataataac

SEQ ID NO: 32540 - DNA, 20 bp, synthetic construct
  misc_feature 1..20: note = chemically synthesized
  source 1..20: mol_type = other DNA
tggcatgcattctgaaaaat

SEQ ID NO: 32541 - DNA, 20 bp, synthetic construct
  misc_feature 1..20: note = chemically synthesized
  source 1..20: mol_type = other DNA
tttgcctatgtagaagtgga

SEQ ID NO: 32542 - DNA, 20 bp, synthetic construct
  misc_feature 1..20: note = chemically synthesized
  source 1..20: mol_type = other DNA
ttctctgtagtttagtgaga

SEQ ID NO: 32543 - DNA, 20 bp, synthetic construct
  misc_feature 1..20: note = chemically synthesized
  source 1..20: mol_type = other DNA
cagaaccatctctatcacat

SEQ ID NO: 32544 - DNA, 20 bp, synthetic construct
  misc_feature 1..20: note = chemically synthesized
  source 1..20: mol_type = other DNA
tctctatcacatgtgaatcc

SEQ ID NO: 32545 - DNA, 20 bp, synthetic construct
  misc_feature 1..20: note = chemically synthesized
  source 1..20: mol_type = other DNA
tgaaataaaagttttctcta

SEQ ID NO: 32546 - DNA, 20 bp, synthetic construct
  misc_feature 1..20: note = chemically synthesized
  source 1..20: mol_type = other DNA
ctcaaggacatagcttattg

SEQ ID NO: 32547 - DNA, 20 bp, synthetic construct
  misc_feature 1..20: note = chemically synthesized
  source 1..20: mol_type = other DNA
ggaagggacttgttagcact

SEQ ID NO: 32548 - DNA, 20 bp, synthetic construct
  misc_feature 1..20: note = chemically synthesized
  source 1..20: mol_type = other DNA
cagtgaaactaagttatttt

SEQ ID NO: 32549 - DNA, 20 bp, synthetic construct
  misc_feature 1..20: note = chemically synthesized
  source 1..20: mol_type = other DNA
agtagcatgtgtgttgatct

SEQ ID NO: 32550 - DNA, 20 bp, synthetic construct
  misc_feature 1..20: note = chemically synthesized
  source 1..20: mol_type = other DNA
tggtacatagaaaatgctca

SEQ ID NO: 32551 - DNA, 20 bp, synthetic construct
  misc_feature 1..20: note = chemically synthesized
  source 1..20: mol_type = other DNA
ggtttgagattttcatatag

SEQ ID NO: 32552 - DNA, 20 bp, synthetic construct
  misc_feature 1..20: note = chemically synthesized
  source 1..20: mol_type = other DNA
gtttctttaaatttaatgat

SEQ ID NO: 32553 - DNA, 20 bp, synthetic construct
  misc_feature 1..20: note = chemically synthesized
  source 1..20: mol_type = other DNA
tatgaggtatcttagagatc

SEQ ID NO: 32554 - DNA, 20 bp, synthetic construct
  misc_feature 1..20: note = chemically synthesized
  source 1..20: mol_type = other DNA
tttaatgatcaagcaaatgg

SEQ ID NO: 32555 - DNA, 20 bp, synthetic construct
  misc_feature 1..20: note = chemically synthesized
  source 1..20: mol_type = other DNA
gcaaatggcagagttaggac

SEQ ID NO: 32556 - DNA, 20 bp, synthetic construct
  misc_feature 1..20: note = chemically synthesized
  source 1..20: mol_type = other DNA
tcacttttttactattatgt

SEQ ID NO: 32557 - DNA, 20 bp, synthetic construct
  misc_feature 1..20: note = chemically synthesized
  source 1..20: mol_type = other DNA
agtacttgcagtcaaaggtc

SEQ ID NO: 32558 - DNA, 20 bp, synthetic construct
  misc_feature 1..20: note = chemically synthesized
  source 1..20: mol_type = other DNA
ctgaaaaagaaccccttaaa

SEQ ID NO: 32559 - DNA, 20 bp, synthetic construct
  misc_feature 1..20: note = chemically synthesized
  source 1..20: mol_type = other DNA
aactgaataacagtttcttc

SEQ ID NO: 32560 - DNA, 20 bp, synthetic construct
  misc_feature 1..20: note = chemically synthesized
  source 1..20: mol_type = other DNA
acagtttcttcatgaataaa

SEQ ID NO: 32561 - DNA, 20 bp, synthetic construct
  misc_feature 1..20: note = chemically synthesized
  source 1..20: mol_type = other DNA
aacaaaaggtttcttaggag

SEQ ID NO: 32562 - DNA, 20 bp, synthetic construct
  misc_feature 1..20: note = chemically synthesized
  source 1..20: mol_type = other DNA
ggagaagaatcccttgctgc

SEQ ID NO: 32563 - DNA, 20 bp, synthetic construct
  misc_feature 1..20: note = chemically synthesized
  source 1..20: mol_type = other DNA
gtgaaaaacataacagatga

SEQ ID NO: 32564 - DNA, 20 bp, synthetic construct
  misc_feature 1..20: note = chemically synthesized
  source 1..20: mol_type = other DNA
tgagagagtcacagttagtt

SEQ ID NO: 32565 - DNA, 20 bp, synthetic construct
  misc_feature 1..20: note = chemically synthesized
  source 1..20: mol_type = other DNA
aatccattttattattcagt

SEQ ID NO: 32566 - DNA, 20 bp, synthetic construct
  misc_feature 1..20: note = chemically synthesized
  source 1..20: mol_type = other DNA
gcactgagaggcgagggaga

SEQ ID NO: 32567 - DNA, 20 bp, synthetic construct
  misc_feature 1..20: note = chemically synthesized
  source 1..20: mol_type = other DNA
gaggcgagggagatagagtt

SEQ ID NO: 32568 - DNA, 20 bp, synthetic construct
  misc_feature 1..20: note = chemically synthesized
  source 1..20: mol_type = other DNA
agaactgattcttaatcttc

SEQ ID NO: 32569 - DNA, 20 bp, synthetic construct
  misc_feature 1..20: note = chemically synthesized
  source 1..20: mol_type = other DNA
atacaatacagtcaaatgtg

SEQ ID NO: 32570 - DNA, 20 bp, synthetic construct
  misc_feature 1..20: note = chemically synthesized
  source 1..20: mol_type = other DNA
taagactatacagtgtaccg

SEQ ID NO: 32571 - DNA, 20 bp, synthetic construct
  misc_feature 1..20: note = chemically synthesized
  source 1..20: mol_type = other DNA
atacagtgtaccgtggaatg

SEQ ID NO: 32572 - DNA, 20 bp, synthetic construct
  misc_feature 1..20: note = chemically synthesized
  source 1..20: mol_type = other DNA
gatgtttgagctgacacttg

SEQ ID NO: 32573 - DNA, 20 bp, synthetic construct
  misc_feature 1..20: note = chemically synthesized
  source 1..20: mol_type = other DNA
gctcagagagggaaaaggag

SEQ ID NO: 32574 - DNA, 20 bp, synthetic construct
  misc_feature 1..20: note = chemically synthesized
  source 1..20: mol_type = other DNA
actagattgtgaagctcagg

SEQ ID NO: 32575 - DNA, 20 bp, synthetic construct
  misc_feature 1..20: note = chemically synthesized
  source 1..20: mol_type = other DNA
agggggagttaatagcctta

SEQ ID NO: 32576 - DNA, 20 bp, synthetic construct
  misc_feature 1..20: note = chemically synthesized
  source 1..20: mol_type = other DNA
gccttaaggagttttgtctc

SEQ ID NO: 32577 - DNA, 20 bp, synthetic construct
  misc_feature 1..20: note = chemically synthesized
  source 1..20: mol_type = other DNA
ttgtctccagggtatgaaca

SEQ ID NO: 32578 - DNA, 20 bp, synthetic construct
  misc_feature 1..20: note = chemically synthesized
  source 1..20: mol_type = other DNA
cagggtatgaacaatgaatg

SEQ ID NO: 32579 - DNA, 20 bp, synthetic construct
  misc_feature 1..20: note = chemically synthesized
  source 1..20: mol_type = other DNA
aattagactgtggtgtgacc

SEQ ID NO: 32580 - DNA, 20 bp, synthetic construct
  misc_feature 1..20: note = chemically synthesized
  source 1..20: mol_type = other DNA
tctggagaaattaacatgtt

SEQ ID NO: 32581 - DNA, 20 bp, synthetic construct
  misc_feature 1..20: note = chemically synthesized
  source 1..20: mol_type = other DNA
attaacatgttaaggatatt

SEQ ID NO: 32582 - DNA, 20 bp, synthetic construct
  misc_feature 1..20: note = chemically synthesized
  source 1..20: mol_type = other DNA
cacataatgaaagttaattt

SEQ ID NO: 32583 - DNA, 20 bp, synthetic construct
  misc_feature 1..20: note = chemically synthesized
  source 1..20: mol_type = other DNA
tcagtcttgacactacacct

SEQ ID NO: 32584 - DNA, 20 bp, synthetic construct
  misc_feature 1..20: note = chemically synthesized
  source 1..20: mol_type = other DNA
atggtacaagtggcacaggg

SEQ ID NO: 32585 - DNA, 20 bp, synthetic construct
  misc_feature 1..20: note = chemically synthesized
  source 1..20: mol_type = other DNA
cagggaagaattcagaaaac

SEQ ID NO: 32586 - DNA, 20 bp, synthetic construct
  misc_feature 1..20: note = chemically synthesized
  source 1..20: mol_type = other DNA
ttatggaagaaattataata

SEQ ID NO: 32587 - DNA, 20 bp, synthetic construct
  misc_feature 1..20: note = chemically synthesized
  source 1..20: mol_type = other DNA
tgagtccactcttctaggac

SEQ ID NO: 32588 - DNA, 20 bp, synthetic construct
  misc_feature 1..20: note = chemically synthesized
  source 1..20: mol_type = other DNA
ctttgatataagtgaactca

SEQ ID NO: 32589 - DNA, 20 bp, synthetic construct
  misc_feature 1..20: note = chemically synthesized
  source 1..20: mol_type = other DNA
tttctctagagcaaaatgaa

SEQ ID NO: 32590 - DNA, 20 bp, synthetic construct
  misc_feature 1..20: note = chemically synthesized
  source 1..20: mol_type = other DNA
acttttcaaggctgaggtgg

SEQ ID NO: 32591 - DNA, 20 bp, synthetic construct
  misc_feature 1..20: note = chemically synthesized
  source 1..20: mol_type = other DNA
tgggagaattgtttgagacc

SEQ ID NO: 32592 - DNA, 20 bp, synthetic construct
  misc_feature 1..20: note = chemically synthesized
  source 1..20: mol_type = other DNA
gaattgtttgagaccaagag

SEQ ID NO: 32593 - DNA, 20 bp, synthetic construct
  misc_feature 1..20: note = chemically synthesized
  source 1..20: mol_type = other DNA
tacctgagaggctaaagcag

SEQ ID NO: 32594 - DNA, 20 bp, synthetic construct
  misc_feature 1..20: note = chemically synthesized
  source 1..20: mol_type = other DNA
ggctaaagcaggaggatcaa

SEQ ID NO: 32595 - DNA, 20 bp, synthetic construct
  misc_feature 1..20: note = chemically synthesized
  source 1..20: mol_type = other DNA
ttgcaccattgcactccagc

SEQ ID NO: 32596 - DNA, 20 bp, synthetic construct
  misc_feature 1..20: note = chemically synthesized
  source 1..20: mol_type = other DNA
ttgcactccagccggggtga

SEQ ID NO: 32597 - DNA, 20 bp, synthetic construct
  misc_feature 1..20: note = chemically synthesized
  source 1..20: mol_type = other DNA
taaagtcagactgcatgatt

SEQ ID NO: 32598 - DNA, 20 bp, synthetic construct
  misc_feature 1..20: note = chemically synthesized
  source 1..20: mol_type = other DNA
aattccaactccaccatcac

SEQ ID NO: 32599 - DNA, 20 bp, synthetic construct
  misc_feature 1..20: note = chemically synthesized
  source 1..20: mol_type = other DNA
ttgtcataccagctttcact

SEQ ID NO: 32600 - DNA, 20 bp, synthetic construct
  misc_feature 1..20: note = chemically synthesized
  source 1..20: mol_type = other DNA
cataccagctttcactttga

SEQ ID NO: 32601 - DNA, 20 bp, synthetic construct
  misc_feature 1..20: note = chemically synthesized
  source 1..20: mol_type = other DNA
catcaatgttacttcaatca

SEQ ID NO: 32602 - DNA, 20 bp, synthetic construct
  misc_feature 1..20: note = chemically synthesized
  source 1..20: mol_type = other DNA
atcacgggatgcatagtaat

SEQ ID NO: 32603 - DNA, 20 bp, synthetic construct
  misc_feature 1..20: note = chemically synthesized
  source 1..20: mol_type = other DNA
tctttgccctaattactgat

SEQ ID NO: 32604 - DNA, 20 bp, synthetic construct
  misc_feature 1..20: note = chemically synthesized
  source 1..20: mol_type = other DNA
caggtggtcttgttcaaagt

SEQ ID NO: 32605 - DNA, 20 bp, synthetic construct
  misc_feature 1..20: note = chemically synthesized
  source 1..20: mol_type = other DNA
cagctgctttgattttaact

SEQ ID NO: 32606 - DNA, 20 bp, synthetic construct
  misc_feature 1..20: note = chemically synthesized
  source 1..20: mol_type = other DNA
gcaactgtgttttggaacag

SEQ ID NO: 32607 - DNA, 20 bp, synthetic construct
  misc_feature 1..20: note = chemically synthesized
  source 1..20: mol_type = other DNA
agtgttgccagatgacgact

SEQ ID NO: 32608 - DNA, 20 bp, synthetic construct
  misc_feature 1..20: note = chemically synthesized
  source 1..20: mol_type = other DNA
agtattttcttttttaatgt

SEQ ID NO: 32609 - DNA, 20 bp, synthetic construct
  misc_feature 1..20: note = chemically synthesized
  source 1..20: mol_type = other DNA
tatacctcaaatatgaaaat

SEQ ID NO: 32610 - DNA, 20 bp, synthetic construct
  misc_feature 1..20: note = chemically synthesized
  source 1..20: mol_type = other DNA
aaaaagggctaaaatggtgt

SEQ ID NO: 32611 - DNA, 20 bp, synthetic construct
  misc_feature 1..20: note = chemically synthesized
  source 1..20: mol_type = other DNA
taatgatcaagtcaggtatt

SEQ ID NO: 32612 - DNA, 20 bp, synthetic construct
  misc_feature 1..20: note = chemically synthesized
  source 1..20: mol_type = other DNA
atgattttatatttgtatgg

SEQ ID NO: 32613 - DNA, 20 bp, synthetic construct
  misc_feature 1..20: note = chemically synthesized
  source 1..20: mol_type = other DNA
gattccatatctttgctaat

SEQ ID NO: 32614 - DNA, 20 bp, synthetic construct
  misc_feature 1..20: note = chemically synthesized
  source 1..20: mol_type = other DNA
accagtatctgtttattatt

SEQ ID NO: 32615 - DNA, 20 bp, synthetic construct
  misc_feature 1..20: note = chemically synthesized
  source 1..20: mol_type = other DNA
ttattctgaattcttttcct

SEQ ID NO: 32616 - DNA, 20 bp, synthetic construct
  misc_feature 1..20: note = chemically synthesized
  source 1..20: mol_type = other DNA
aatacccagtaataagattg

SEQ ID NO: 32617 - DNA, 20 bp, synthetic construct
  misc_feature 1..20: note = chemically synthesized
  source 1..20: mol_type = other DNA
catgcttaccaatagtgcct

SEQ ID NO: 32618 - DNA, 20 bp, synthetic construct
  misc_feature 1..20: note = chemically synthesized
  source 1..20: mol_type = other DNA
gattatttgtttttccactg

SEQ ID NO: 32619 - DNA, 20 bp, synthetic construct
  misc_feature 1..20: note = chemically synthesized
  source 1..20: mol_type = other DNA
tttttccactgttgagttgt

SEQ ID NO: 32620 - DNA, 20 bp, synthetic construct
  misc_feature 1..20: note = chemically synthesized
  source 1..20: mol_type = other DNA
ttaagtctttaatccatctt

SEQ ID NO: 32621 - DNA, 20 bp, synthetic construct
  misc_feature 1..20: note = chemically synthesized
  source 1..20: mol_type = other DNA
cgttttatatggcaataaat

SEQ ID NO: 32622 - DNA, 20 bp, synthetic construct
  misc_feature 1..20: note = chemically synthesized
  source 1..20: mol_type = other DNA
atttttgcatctattgtaca

SEQ ID NO: 32623 - DNA, 20 bp, synthetic construct
  misc_feature 1..20: note = chemically synthesized
  source 1..20: mol_type = other DNA
tgcatctattgtacaagggg

SEQ ID NO: 32624 - DNA, 20 bp, synthetic construct
  misc_feature 1..20: note = chemically synthesized
  source 1..20: mol_type = other DNA
tggttgctgttggtgtatag

SEQ ID NO: 32625 - DNA, 20 bp, synthetic construct
  misc_feature 1..20: note = chemically synthesized
  source 1..20: mol_type = other DNA
tcttgtatctggaaactttg

SEQ ID NO: 32626 - DNA, 20 bp, synthetic construct
  misc_feature 1..20: note = chemically synthesized
  source 1..20: mol_type = other DNA
cagttctaggagctttctgg

SEQ ID NO: 32627 - DNA, 20 bp, synthetic construct
  misc_feature 1..20: note = chemically synthesized
  source 1..20: mol_type = other DNA
gagctttctggaggagtctt

SEQ ID NO: 32628 - DNA, 20 bp, synthetic construct
  misc_feature 1..20: note = chemically synthesized
  source 1..20: mol_type = other DNA
ttgacttcctctttactgat

SEQ ID NO: 32629 - DNA, 20 bp, synthetic construct
  misc_feature 1..20: note = chemically synthesized
  source 1..20: mol_type = other DNA
cttccagtactatgttgaag

SEQ ID NO: 32630 - DNA, 20 bp, synthetic construct
  misc_feature 1..20: note = chemically synthesized
  source 1..20: mol_type = other DNA
ctatgttgaagaggagtggt

SEQ ID NO: 32631 - DNA, 20 bp, synthetic construct
  misc_feature 1..20: note = chemically synthesized
  source 1..20: mol_type = other DNA
gtcttgttccagttctcaga

SEQ ID NO: 32632 - DNA, 20 bp, synthetic construct
  misc_feature 1..20: note = chemically synthesized
  source 1..20: mol_type = other DNA
cattcaatattatgttggct

SEQ ID NO: 32633 - DNA, 20 bp, synthetic construct
  misc_feature 1..20: note = chemically synthesized
  source 1..20: mol_type = other DNA
attttaatcataaatgtatg

SEQ ID NO: 32634 - DNA, 20 bp, synthetic construct
  misc_feature 1..20: note = chemically synthesized
  source 1..20: mol_type = other DNA
taaatgtatgctggattttg

SEQ ID NO: 32635 - DNA, 20 bp, synthetic construct
  misc_feature 1..20: note = chemically synthesized
  source 1..20: mol_type = other DNA
atggaacctgcttgatcatg

SEQ ID NO: 32636 - DNA, 20 bp, synthetic construct
  misc_feature 1..20: note = chemically synthesized
  source 1..20: mol_type = other DNA
attatctttttgttatgttg

SEQ ID NO: 32637 - DNA, 20 bp, synthetic construct
  misc_feature 1..20: note = chemically synthesized
  source 1..20: mol_type = other DNA
tggttatctagtattttgtt

SEQ ID NO: 32638 - DNA, 20 bp, synthetic construct
  misc_feature 1..20: note = chemically synthesized
  source 1..20: mol_type = other DNA
ttggtgtgatgctggcttca

SEQ ID NO: 32639 - DNA, 20 bp, synthetic construct
  misc_feature 1..20: note = chemically synthesized
  source 1..20: mol_type = other DNA
tgtgatgctggcttcataga

SEQ ID NO: 32640 - DNA, 20 bp, synthetic construct
  misc_feature 1..20: note = chemically synthesized
  source 1..20: mol_type = other DNA
ttccttctttatctgtcttg

SEQ ID NO: 32641 - DNA, 20 bp, synthetic construct
  misc_feature 1..20: note = chemically synthesized
  source 1..20: mol_type = other DNA
agatggggaccaattcctct

SEQ ID NO: 32642 - DNA, 20 bp, synthetic construct
  misc_feature 1..20: note = chemically synthesized
  source 1..20: mol_type = other DNA
attcctctttgaatgtctag

SEQ ID NO: 32643 - DNA, 20 bp, synthetic construct
  misc_feature 1..20: note = chemically synthesized
  source 1..20: mol_type = other DNA
atgtctagtagaattctgtt

SEQ ID NO: 32644 - DNA, 20 bp, synthetic construct
  misc_feature 1..20: note = chemically synthesized
  source 1..20: mol_type = other DNA
ggagaaatttccacgcgctg

SEQ ID NO: 32645 - DNA, 20 bp, synthetic construct
  misc_feature 1..20: note = chemically synthesized
  source 1..20: mol_type = other DNA
aatttccacgcgctgttgaa

SEQ ID NO: 32646 - DNA, 20 bp, synthetic construct
  misc_feature 1..20: note = chemically synthesized
  source 1..20: mol_type = other DNA
gaatgtgtgttctgtggtta

SEQ ID NO: 32647 - DNA, 20 bp, synthetic construct
  misc_feature 1..20: note = chemically synthesized
  source 1..20: mol_type = other DNA
aatgcctggctatgccaggc

SEQ ID NO: 32648 - DNA, 20 bp, synthetic construct
  misc_feature 1..20: note = chemically synthesized
  source 1..20: mol_type = other DNA
agaccttcagtttctccagt

SEQ ID NO: 32649 - DNA, 20 bp, synthetic construct
  misc_feature 1..20: note = chemically synthesized
  source 1..20: mol_type = other DNA
ggagtgtgtgtttaggagag

SEQ ID NO: 32650 - DNA, 20 bp, synthetic construct
  misc_feature 1..20: note = chemically synthesized
  source 1..20: mol_type = other DNA
gttggggcactcacagtatt

SEQ ID NO: 32651 - DNA, 20 bp, synthetic construct
  misc_feature 1..20: note = chemically synthesized
  source 1..20: mol_type = other DNA
cacagtatttggggtgtctc

SEQ ID NO: 32652 - DNA, 20 bp, synthetic construct
  misc_feature 1..20: note = chemically synthesized
  source 1..20: mol_type = other DNA
ggagcaatctacttccttca

SEQ ID NO: 32653 - DNA, 20 bp, synthetic construct
  misc_feature 1..20: note = chemically synthesized
  source 1..20: mol_type = other DNA
ctacttccttcagagggtct

SEQ ID NO: 32654 - DNA, 20 bp, synthetic construct
  misc_feature 1..20: note = chemically synthesized
  source 1..20: mol_type = other DNA
agagggtctgtgggtcctct

SEQ ID NO: 32655 - DNA, 20 bp, synthetic construct
  misc_feature 1..20: note = chemically synthesized
  source 1..20: mol_type = other DNA
ccacatgctgctctgtccat

SEQ ID NO: 32656 - DNA, 20 bp, synthetic construct
  misc_feature 1..20: note = chemically synthesized
  source 1..20: mol_type = other DNA
cgccaagatcctgagaagtt

SEQ ID NO: 32657 - DNA, 20 bp, synthetic construct
  misc_feature 1..20: note = chemically synthesized
  source 1..20: mol_type = other DNA
ccagttttattcttttgcac

SEQ ID NO: 32658 - DNA, 20 bp, synthetic construct
  misc_feature 1..20: note = chemically synthesized
  source 1..20: mol_type = other DNA
cttttgcacatggatatcca

SEQ ID NO: 32659 - DNA, 20 bp, synthetic construct
  misc_feature 1..20: note = chemically synthesized
  source 1..20: mol_type = other DNA
aatctgttggctataaatat

SEQ ID NO: 32660 - DNA, 20 bp, synthetic construct
  misc_feature 1..20: note = chemically synthesized
  source 1..20: mol_type = other DNA
ctagcattgttcttttttca

SEQ ID NO: 32661 - DNA, 20 bp, synthetic construct
  misc_feature 1..20: note = chemically synthesized
  source 1..20: mol_type = other DNA
ctattttgatagcggtcata

SEQ ID NO: 32662 - DNA, 20 bp, synthetic construct
  misc_feature 1..20: note = chemically synthesized
  source 1..20: mol_type = other DNA
tatagaatctgtagattgct

SEQ ID NO: 32663 - DNA, 20 bp, synthetic construct
  misc_feature 1..20: note = chemically synthesized
  source 1..20: mol_type = other DNA
atttttctgatccatgaaca

SEQ ID NO: 32664 - DNA, 20 bp, synthetic construct
  misc_feature 1..20: note = chemically synthesized
  source 1..20: mol_type = other DNA
tatcagtgttttgtagtttt

SEQ ID NO: 32665 - DNA, 20 bp, synthetic construct
  misc_feature 1..20: note = chemically synthesized
  source 1..20: mol_type = other DNA
tattttttagctattgtaaa

SEQ ID NO: 32666 - DNA, 20 bp, synthetic construct
  misc_feature 1..20: note = chemically synthesized
  source 1..20: mol_type = other DNA
ttttgtctcctgtaacttta

SEQ ID NO: 32667 - DNA, 20 bp, synthetic construct
  misc_feature 1..20: note = chemically synthesized
  source 1..20: mol_type = other DNA
tgaatttatttttcagcgct

SEQ ID NO: 32668 - DNA, 20 bp, synthetic construct
  misc_feature 1..20: note = chemically synthesized
  source 1..20: mol_type = other DNA
cagcgctaagagtgctttgg

SEQ ID NO: 32669 - DNA, 20 bp, synthetic construct
  misc_feature 1..20: note = chemically synthesized
  source 1..20: mol_type = other DNA
ctaggacttccagtattata

SEQ ID NO: 32670 - DNA, 20 bp, synthetic construct
  misc_feature 1..20: note = chemically synthesized
  source 1..20: mol_type = other DNA
cttccagtattatattgaat

SEQ ID NO: 32671 - DNA, 20 bp, synthetic construct
  misc_feature 1..20: note = chemically synthesized
  source 1..20: mol_type = other DNA
aattcagtatgatgttagct

SEQ ID NO: 32672 - DNA, 20 bp, synthetic construct
  misc_feature 1..20: note = chemically synthesized
  source 1..20: mol_type = other DNA
gcagatagtttttatcatga

SEQ ID NO: 32673 - DNA, 20 bp, synthetic construct
  misc_feature 1..20: note = chemically synthesized
  source 1..20: mol_type = other DNA
tgatcatggtgtattatctt

SEQ ID NO: 32674 - DNA, 20 bp, synthetic construct
  misc_feature 1..20: note = chemically synthesized
  source 1..20: mol_type = other DNA
attatcttttggatgtactg

SEQ ID NO: 32675 - DNA, 20 bp, synthetic construct
  misc_feature 1..20: note = chemically synthesized
  source 1..20: mol_type = other DNA
cagtttgctagtattttgtt

SEQ ID NO: 32676 - DNA, 20 bp, synthetic construct
  misc_feature 1..20: note = chemically synthesized
  source 1..20: mol_type = other DNA
tttcacacctatgttccatc

SEQ ID NO: 32677 - DNA, 20 bp, synthetic construct
  misc_feature 1..20: note = chemically synthesized
  source 1..20: mol_type = other DNA
cttgcatccttgtctggtta

SEQ ID NO: 32678 - DNA, 20 bp, synthetic construct
  misc_feature 1..20: note = chemically synthesized
  source 1..20: mol_type = other DNA
tccttgtctggttatggaat

SEQ ID NO: 32679 - DNA, 20 bp, synthetic construct
  misc_feature 1..20: note = chemically synthesized
  source 1..20: mol_type = other DNA
tcaggataatactggcctca

SEQ ID NO: 32680 - DNA, 20 bp, synthetic construct
  misc_feature 1..20: note = chemically synthesized
  source 1..20: mol_type = other DNA
gataatactggcctcagaga

SEQ ID NO: 32681 - DNA, 20 bp, synthetic construct
  misc_feature 1..20: note = chemically synthesized
  source 1..20: mol_type = other DNA
gcctcagagaatgagttagg

SEQ ID NO: 32682 - DNA, 20 bp, synthetic construct
  misc_feature 1..20: note = chemically synthesized
  source 1..20: mol_type = other DNA
ccttcctgtttaatttttaa

SEQ ID NO: 32683 - DNA, 20 bp, synthetic construct
  misc_feature 1..20: note = chemically synthesized
  source 1..20: mol_type = other DNA
tttctttccttctgctagtt

SEQ ID NO: 32684 - DNA, 20 bp, synthetic construct
  misc_feature 1..20: note = chemically synthesized
  source 1..20: mol_type = other DNA
ctaacatatggtgtatcctg

SEQ ID NO: 32685 - DNA, 20 bp, synthetic construct
  misc_feature 1..20: note = chemically synthesized
  source 1..20: mol_type = other DNA
ataaatatattctgtagctg

SEQ ID NO: 32686 - DNA, 20 bp, synthetic construct
  misc_feature 1..20: note = chemically synthesized
  source 1..20: mol_type = other DNA
gatctatctgatgctgagat

SEQ ID NO: 32687 - DNA, 20 bp, synthetic construct
  misc_feature 1..20: note = chemically synthesized
  source 1..20: mol_type = other DNA
aatccccaactattattgta

SEQ ID NO: 32688 - DNA, 20 bp, synthetic construct
  misc_feature 1..20: note = chemically synthesized
  source 1..20: mol_type = other DNA
ataacatttgctttacatat

SEQ ID NO: 32689 - DNA, 20 bp, synthetic construct
  misc_feature 1..20: note = chemically synthesized
  source 1..20: mol_type = other DNA
catatctggatgctctggtg

SEQ ID NO: 32690 - DNA, 20 bp, synthetic construct
  misc_feature 1..20: note = chemically synthesized
  source 1..20: mol_type = other DNA
tggatgctctggtgttgagt

SEQ ID NO: 32691 - DNA, 20 bp, synthetic construct
  misc_feature 1..20: note = chemically synthesized
  source 1..20: mol_type = other DNA
tggtgttgagtgtgaatgtt

SEQ ID NO: 32692 - DNA, 20 bp, synthetic construct
  misc_feature 1..20: note = chemically synthesized
  source 1..20: mol_type = other DNA
agaattgttatatactcttg

SEQ ID NO: 32693 - DNA, 20 bp, synthetic construct
  misc_feature 1..20: note = chemically synthesized
  source 1..20: mol_type = other DNA
ttcttataggcagcttacaa

SEQ ID NO: 32694 - DNA, 20 bp, synthetic construct
  misc_feature 1..20: note = chemically synthesized
  source 1..20: mol_type = other DNA
attttctgtagtggtaacgt

SEQ ID NO: 32695 - DNA, 20 bp, synthetic construct
  misc_feature 1..20: note = chemically synthesized
  source 1..20: mol_type = other DNA
gtaaagccagtctagtgata

SEQ ID NO: 32696 - DNA, 20 bp, synthetic construct
  misc_feature 1..20: note = chemically synthesized
  source 1..20: mol_type = other DNA
atttttgaagaacaatgttg

SEQ ID NO: 32697 - DNA, 20 bp, synthetic construct
  misc_feature 1..20: note = chemically synthesized
  source 1..20: mol_type = other DNA
catttttttctttcactatt

SEQ ID NO: 32698 - DNA, 20 bp, synthetic construct
  misc_feature 1..20: note = chemically synthesized
  source 1..20: mol_type = other DNA
agacattttgcttgctgttt

SEQ ID NO: 32699 - DNA, 20 bp, synthetic construct
  misc_feature 1..20: note = chemically synthesized
  source 1..20: mol_type = other DNA
ctttttgcattatattattt

SEQ ID NO: 32700 - DNA, 20 bp, synthetic construct
  misc_feature 1..20: note = chemically synthesized
  source 1..20: mol_type = other DNA
aatttctgattttcatttgt

SEQ ID NO: 32701 - DNA, 20 bp, synthetic construct
  misc_feature 1..20: note = chemically synthesized
  source 1..20: mol_type = other DNA
ccttctgggaaactgcaaat

SEQ ID NO: 32702 - DNA, 20 bp, synthetic construct
  misc_feature 1..20: note = chemically synthesized
  source 1..20: mol_type = other DNA
ctgatctattgttgaagttt

SEQ ID NO: 32703 - DNA, 20 bp, synthetic construct
  misc_feature 1..20: note = chemically synthesized
  source 1..20: mol_type = other DNA
ttcaataaactcttcagtta

SEQ ID NO: 32704 - DNA, 20 bp, synthetic construct
  misc_feature 1..20: note = chemically synthesized
  source 1..20: mol_type = other DNA
attcttgttgtatctatctc

SEQ ID NO: 32705 - DNA, 20 bp, synthetic construct
  misc_feature 1..20: note = chemically synthesized
  source 1..20: mol_type = other DNA
gtaaatttctcattcatatc

SEQ ID NO: 32706 - DNA, 20 bp, synthetic construct
  misc_feature 1..20: note = chemically synthesized
  source 1..20: mol_type = other DNA
gatttctttttattgtttat

SEQ ID NO: 32707 - DNA, 20 bp, synthetic construct
  misc_feature 1..20: note = chemically synthesized
  source 1..20: mol_type = other DNA
gcttccttaatatcaacatt

SEQ ID NO: 32708 - DNA, 20 bp, synthetic construct
  misc_feature 1..20: note = chemically synthesized
  source 1..20: mol_type = other DNA
acattttggattcttttttc

SEQ ID NO: 32709 - DNA, 20 bp, synthetic construct
  misc_feature 1..20: note = chemically synthesized
  source 1..20: mol_type = other DNA
tccactggcttatgttgctg

SEQ ID NO: 32710 - DNA, 20 bp, synthetic construct
  misc_feature 1..20: note = chemically synthesized
  source 1..20: mol_type = other DNA
aagatgtatcttggtgttga

SEQ ID NO: 32711 - DNA, 20 bp, synthetic construct
  misc_feature 1..20: note = chemically synthesized
  source 1..20: mol_type = other DNA
ctgtgattttttcagtggct

SEQ ID NO: 32712 - DNA, 20 bp, synthetic construct
  misc_feature 1..20: note = chemically synthesized
  source 1..20: mol_type = other DNA
gatgaggttgtgctggagac

SEQ ID NO: 32713 - DNA, 20 bp, synthetic construct
  misc_feature 1..20: note = chemically synthesized
  source 1..20: mol_type = other DNA
gtacattggcactgatggta

SEQ ID NO: 32714 - DNA, 20 bp, synthetic construct
  misc_feature 1..20: note = chemically synthesized
  source 1..20: mol_type = other DNA
actgatggtaatgagtctag

SEQ ID NO: 32715 - DNA, 20 bp, synthetic construct
  misc_feature 1..20: note = chemically synthesized
  source 1..20: mol_type = other DNA
ttggccttcaggcagtttgc

SEQ ID NO: 32716 - DNA, 20 bp, synthetic construct
  misc_feature 1..20: note = chemically synthesized
  source 1..20: mol_type = other DNA
atagtagactgggctggtgt

SEQ ID NO: 32717 - DNA, 20 bp, synthetic construct
  misc_feature 1..20: note = chemically synthesized
  source 1..20: mol_type = other DNA
ggtcctcaggcttctggaca

SEQ ID NO: 32718 - DNA, 20 bp, synthetic construct
  misc_feature 1..20: note = chemically synthesized
  source 1..20: mol_type = other DNA
ttctggacagtgggtgtggt

SEQ ID NO: 32719 - DNA, 20 bp, synthetic construct
  misc_feature 1..20: note = chemically synthesized
  source 1..20: mol_type = other DNA
gttggtggtggctgcaaggg

SEQ ID NO: 32720 - DNA, 20 bp, synthetic construct
  misc_feature 1..20: note = chemically synthesized
  source 1..20: mol_type = other DNA
gttgtgatggcagtggcaga

SEQ ID NO: 32721 - DNA, 20 bp, synthetic construct
  misc_feature 1..20: note = chemically synthesized
  source 1..20: mol_type = other DNA
gcccatcatcaggcttctgg

SEQ ID NO: 32722 - DNA, 20 bp, synthetic construct
  misc_feature 1..20: note = chemically synthesized
  source 1..20: mol_type = other DNA
ttgcttaggtaccagtcatg

SEQ ID NO: 32723 - DNA, 20 bp, synthetic construct
  misc_feature 1..20: note = chemically synthesized
  source 1..20: mol_type = other DNA
tggatggcacaaggctgtct

SEQ ID NO: 32724 - DNA, 20 bp, synthetic construct
  misc_feature 1..20: note = chemically synthesized
  source 1..20: mol_type = other DNA
ttgaggaaggcaaagccagg

SEQ ID NO: 32725 - DNA, 20 bp, synthetic construct
  misc_feature 1..20: note = chemically synthesized
  source 1..20: mol_type = other DNA
ggacaccggctatcataggc

SEQ ID NO: 32726 - DNA, 20 bp, synthetic construct
  misc_feature 1..20: note = chemically synthesized
  source 1..20: mol_type = other DNA
ccggctatcataggctggag

SEQ ID NO: 32727 - DNA, 20 bp, synthetic construct
  misc_feature 1..20: note = chemically synthesized
  source 1..20: mol_type = other DNA
agtgatcctcaggcccccag

SEQ ID NO: 32728 - DNA, 20 bp, synthetic construct
  misc_feature 1..20: note = chemically synthesized
  source 1..20: mol_type = other DNA
tcaggcccccagcagaatgc

SEQ ID NO: 32729 - DNA, 20 bp, synthetic construct
  misc_feature 1..20: note = chemically synthesized
  source 1..20: mol_type = other DNA
gcccccagcagaatgcctga

SEQ ID NO: 32730 - DNA, 20 bp, synthetic construct
  misc_feature 1..20: note = chemically synthesized
  source 1..20: mol_type = other DNA
cattgttgccctgctcttga

SEQ ID NO: 32731 - DNA, 20 bp, synthetic construct
  misc_feature 1..20: note = chemically synthesized
  source 1..20: mol_type = other DNA
gccctgctcttgaaggggtg

SEQ ID NO: 32732 - DNA, 20 bp, synthetic construct
  misc_feature 1..20: note = chemically synthesized
  source 1..20: mol_type = other DNA
ttcagtggcagcagctataa

SEQ ID NO: 32733 - DNA, 20 bp, synthetic construct
  misc_feature 1..20: note = chemically synthesized
  source 1..20: mol_type = other DNA
ccccagatggtggctgcaag

SEQ ID NO: 32734 - DNA, 20 bp, synthetic construct
  misc_feature 1..20: note = chemically synthesized
  source 1..20: mol_type = other DNA
tgtgtagcagccctgctact

SEQ ID NO: 32735 - DNA, 20 bp, synthetic construct
  misc_feature 1..20: note = chemically synthesized
  source 1..20: mol_type = other DNA
agccctgctactgggggtgg

SEQ ID NO: 32736 - DNA, 20 bp, synthetic construct
  misc_feature 1..20: note = chemically synthesized
  source 1..20: mol_type = other DNA
gccagcagtagcactcagct

SEQ ID NO: 32737 - DNA, 20 bp, synthetic construct
  misc_feature 1..20: note = chemically synthesized
  source 1..20: mol_type = other DNA
gtagcactcagctgtgggtg

SEQ ID NO: 32738 - DNA, 20 bp, synthetic construct
  misc_feature 1..20: note = chemically synthesized
  source 1..20: mol_type = other DNA
ggggatgtcagcagagcttc

SEQ ID NO: 32739 - DNA, 20 bp, synthetic construct
  misc_feature 1..20: note = chemically synthesized
  source 1..20: mol_type = other DNA
tgtagagatgcagatgatgt

SEQ ID NO: 32740 - DNA, 20 bp, synthetic construct
  misc_feature 1..20: note = chemically synthesized
  source 1..20: mol_type = other DNA
ctgaggaacgatgtcatctg

SEQ ID NO: 32741 - DNA, 20 bp, synthetic construct
  misc_feature 1..20: note = chemically synthesized
  source 1..20: mol_type = other DNA
gcaccttgctgctcagtaat

SEQ ID NO: 32742 - DNA, 20 bp, synthetic construct
  misc_feature 1..20: note = chemically synthesized
  source 1..20: mol_type = other DNA
tgctcagtaatggggatggc

SEQ ID NO: 32743 - DNA, 20 bp, synthetic construct
  misc_feature 1..20: note = chemically synthesized
  source 1..20: mol_type = other DNA
tcaagggactctcctgtggc

SEQ ID NO: 32744 - DNA, 20 bp, synthetic construct
  misc_feature 1..20: note = chemically synthesized
  source 1..20: mol_type = other DNA
tctcctgtggctaggattcc

SEQ ID NO: 32745 - DNA, 20 bp, synthetic construct
  misc_feature 1..20: note = chemically synthesized
  source 1..20: mol_type = other DNA
taatgcagatgtggaccact

SEQ ID NO: 32746 - DNA, 20 bp, synthetic construct
  misc_feature 1..20: note = chemically synthesized
  source 1..20: mol_type = other DNA
ggagcctctctggcctcaca

SEQ ID NO: 32747 - DNA, 20 bp, synthetic construct
  misc_feature 1..20: note = chemically synthesized
  source 1..20: mol_type = other DNA
ggcctcacagaggatcccta

SEQ ID NO: 32748 - DNA, 20 bp, synthetic construct
  misc_feature 1..20: note = chemically synthesized
  source 1..20: mol_type = other DNA
tgcttcctgtcacttctctg

SEQ ID NO: 32749 - DNA, 20 bp, synthetic construct
  misc_feature 1..20: note = chemically synthesized
  source 1..20: mol_type = other DNA
gtcacttctctgttgaattc

SEQ ID NO: 32750 - DNA, 20 bp, synthetic construct
  misc_feature 1..20: note = chemically synthesized
  source 1..20: mol_type = other DNA
ttccagaattctctcttatg

SEQ ID NO: 32751 - DNA, 20 bp, synthetic construct
  misc_feature 1..20: note = chemically synthesized
  source 1..20: mol_type = other DNA
tttggttctttgtggaggag

SEQ ID NO: 32752 - DNA, 20 bp, synthetic construct
  misc_feature 1..20: note = chemically synthesized
  source 1..20: mol_type = other DNA
ggactatctgaaggcctcag

SEQ ID NO: 32753 - DNA, 20 bp, synthetic construct
  misc_feature 1..20: note = chemically synthesized
  source 1..20: mol_type = other DNA
tcagatgagtaaaagaagta

SEQ ID NO: 32754 - DNA, 20 bp, synthetic construct
  misc_feature 1..20: note = chemically synthesized
  source 1..20: mol_type = other DNA
atcatttgtttcttcaaata

SEQ ID NO: 32755 - DNA, 20 bp, synthetic construct
  misc_feature 1..20: note = chemically synthesized
  source 1..20: mol_type = other DNA
ttgcatctaccaaagtgtat

SEQ ID NO: 32756 - DNA, 20 bp, synthetic construct
  misc_feature 1..20: note = chemically synthesized
  source 1..20: mol_type = other DNA
aaatacgtaatctaacaaac

SEQ ID NO: 32757 - DNA, 20 bp, synthetic construct
  misc_feature 1..20: note = chemically synthesized
  source 1..20: mol_type = other DNA
acaaggatgttttaagatct

SEQ ID NO: 32758 - DNA, 20 bp, synthetic construct
  misc_feature 1..20: note = chemically synthesized
  source 1..20: mol_type = other DNA
gatgcatagttgcaaataaa

SEQ ID NO: 32759 - DNA, 20 bp, synthetic construct
  misc_feature 1..20: note = chemically synthesized
  source 1..20: mol_type = other DNA
tgcaaataaaaggagttttc

SEQ ID NO: 32760 - DNA, 20 bp, synthetic construct
  misc_feature 1..20: note = chemically synthesized
  source 1..20: mol_type = other DNA
tttggaaattttgcattttt

SEQ ID NO: 32761 - DNA, 20 bp, synthetic construct
  misc_feature 1..20: note = chemically synthesized
  source 1..20: mol_type = other DNA
tgatggtttctaaaattgtc

SEQ ID NO: 32762 - DNA, 20 bp, synthetic construct
  misc_feature 1..20: note = chemically synthesized
  source 1..20: mol_type = other DNA
atgttaacttagatttattg

SEQ ID NO: 32763 - DNA, 20 bp, synthetic construct
  misc_feature 1..20: note = chemically synthesized
  source 1..20: mol_type = other DNA
tatgaaaattgcttgcattt

SEQ ID NO: 32764 - DNA, 20 bp, synthetic construct
  misc_feature 1..20: note = chemically synthesized
  source 1..20: mol_type = other DNA
ctcttctcctttataaatta

SEQ ID NO: 32765 - DNA, 20 bp, synthetic construct
  misc_feature 1..20: note = chemically synthesized
  source 1..20: mol_type = other DNA
ctatgtaaagtataagttac

SEQ ID NO: 32766 - DNA, 20 bp, synthetic construct
  misc_feature 1..20: note = chemically synthesized
  source 1..20: mol_type = other DNA
aaacctgtagtctgatgaaa

SEQ ID NO: 32767 - DNA, 20 bp, synthetic construct
  misc_feature 1..20: note = chemically synthesized
  source 1..20: mol_type = other DNA
aataaaattgctttttgcaa

SEQ ID NO: 32768 - DNA, 20 bp, synthetic construct
  misc_feature 1..20: note = chemically synthesized
  source 1..20: mol_type = other DNA
attgagttgaagattgatgc

SEQ ID NO: 32769 - DNA, 20 bp, synthetic construct
  misc_feature 1..20: note = chemically synthesized
  source 1..20: mol_type = other DNA
tgccaggatcttattacctc

SEQ ID NO: 32770 - DNA, 20 bp, synthetic construct
  misc_feature 1..20: note = chemically synthesized
  source 1..20: mol_type = other DNA
attacctccaggatttcaca

SEQ ID NO: 32771 - DNA, 20 bp, synthetic construct
  misc_feature 1..20: note = chemically synthesized
  source 1..20: mol_type = other DNA
aggatttcacaaaggatttc

SEQ ID NO: 32772 - DNA, 20 bp, synthetic construct
  misc_feature 1..20: note = chemically synthesized
  source 1..20: mol_type = other DNA
ttataaagacatacctgaga

SEQ ID NO: 32773 - DNA, 20 bp, synthetic construct
  misc_feature 1..20: note = chemically synthesized
  source 1..20: mol_type = other DNA
cactatcacgagaagagcat

SEQ ID NO: 32774 - DNA, 20 bp, synthetic construct
  misc_feature 1..20: note = chemically synthesized
  source 1..20: mol_type = other DNA
aaatccctcccacaacacgt

SEQ ID NO: 32775 - DNA, 20 bp, synthetic construct
  misc_feature 1..20: note = chemically synthesized
  source 1..20: mol_type = other DNA
actacaattcaagatgagat

SEQ ID NO: 32776 - DNA, 20 bp, synthetic construct
  misc_feature 1..20: note = chemically synthesized
  source 1..20: mol_type = other DNA
gggacacagtcaagctgtat

SEQ ID NO: 32777 - DNA, 20 bp, synthetic construct
  misc_feature 1..20: note = chemically synthesized
  source 1..20: mol_type = other DNA
agctgtatcagggtacaagc

SEQ ID NO: 32778 - DNA, 20 bp, synthetic construct
  misc_feature 1..20: note = chemically synthesized
  source 1..20: mol_type = other DNA
agtggaccatcacctgaaaa

SEQ ID NO: 32779 - DNA, 20 bp, synthetic construct
  misc_feature 1..20: note = chemically synthesized
  source 1..20: mol_type = other DNA
ctgtgtttgactttctgttt

SEQ ID NO: 32780 - DNA, 20 bp, synthetic construct
  misc_feature 1..20: note = chemically synthesized
  source 1..20: mol_type = other DNA
tgtttctgagttatttcact

SEQ ID NO: 32781 - DNA, 20 bp, synthetic construct
  misc_feature 1..20: note = chemically synthesized
  source 1..20: mol_type = other DNA
gatttcattcttttttatgg

SEQ ID NO: 32782 - DNA, 20 bp, synthetic construct
  misc_feature 1..20: note = chemically synthesized
  source 1..20: mol_type = other DNA
ttaatatgatctctttcact

SEQ ID NO: 32783 - DNA, 20 bp, synthetic construct
  misc_feature 1..20: note = chemically synthesized
  source 1..20: mol_type = other DNA
tttgggtccatacccagtag

SEQ ID NO: 32784 - DNA, 20 bp, synthetic construct
  misc_feature 1..20: note = chemically synthesized
  source 1..20: mol_type = other DNA
catacccagtagtgggattg

SEQ ID NO: 32785 - DNA, 20 bp, synthetic construct
  misc_feature 1..20: note = chemically synthesized
  source 1..20: mol_type = other DNA
ccagtagtgggattgcagga

SEQ ID NO: 32786 - DNA, 20 bp, synthetic construct
  misc_feature 1..20: note = chemically synthesized
  source 1..20: mol_type = other DNA
cctgagctcactgtatttgt

SEQ ID NO: 32787 - DNA, 20 bp, synthetic construct
  misc_feature 1..20: note = chemically synthesized
  source 1..20: mol_type = other DNA
atatagatttagatataaaa

SEQ ID NO: 32788 - DNA, 20 bp, synthetic construct
  misc_feature 1..20: note = chemically synthesized
  source 1..20: mol_type = other DNA
agtcccaaagctgaaggact

SEQ ID NO: 32789 - DNA, 20 bp, synthetic construct
  misc_feature 1..20: note = chemically synthesized
  source 1..20: mol_type = other DNA
gcttggaggctaagccagtc

SEQ ID NO: 32790 - DNA, 20 bp, synthetic construct
  misc_feature 1..20: note = chemically synthesized
  source 1..20: mol_type = other DNA
agatggtgcccacccagatt

SEQ ID NO: 32791 - DNA, 20 bp, synthetic construct
  misc_feature 1..20: note = chemically synthesized
  source 1..20: mol_type = other DNA
ggtgcccacccagattaagg

SEQ ID NO: 32792 - DNA, 20 bp, synthetic construct
  misc_feature 1..20: note = chemically synthesized
  source 1..20: mol_type = other DNA
aataccctcacagacacact

SEQ ID NO: 32793 - DNA, 20 bp, synthetic construct
  misc_feature 1..20: note = chemically synthesized
  source 1..20: mol_type = other DNA
tttttttttttttttcctgg

SEQ ID NO: 32794 - DNA, 20 bp, synthetic construct
  misc_feature 1..20: note = chemically synthesized
  source 1..20: mol_type = other DNA
cctttatttgtagtcctgcc

SEQ ID NO: 32795 - DNA, 20 bp, synthetic construct
  misc_feature 1..20: note = chemically synthesized
  source 1..20: mol_type = other DNA
taaaactaagagacacccta

SEQ ID NO: 32796 - DNA, 20 bp, synthetic construct
  misc_feature 1..20: note = chemically synthesized
  source 1..20: mol_type = other DNA
acgcttccttacctccattg

SEQ ID NO: 32797 - DNA, 20 bp, synthetic construct
  misc_feature 1..20: note = chemically synthesized
  source 1..20: mol_type = other DNA
actgatttcatcttgatagt

SEQ ID NO: 32798 - DNA, 20 bp, synthetic construct
  misc_feature 1..20: note = chemically synthesized
  source 1..20: mol_type = other DNA
aatcttaatttgcagtttaa

SEQ ID NO: 32799 - DNA, 20 bp, synthetic construct
  misc_feature 1..20: note = chemically synthesized
  source 1..20: mol_type = other DNA
aattttgctagtggaacact

SEQ ID NO: 32800 - DNA, 20 bp, synthetic construct
  misc_feature 1..20: note = chemically synthesized
  source 1..20: mol_type = other DNA
gtggaacactaggggtgatg

SEQ ID NO: 32801 - DNA, 20 bp, synthetic construct
  misc_feature 1..20: note = chemically synthesized
  source 1..20: mol_type = other DNA
accctttgattcctggaccc

SEQ ID NO: 32802 - DNA, 20 bp, synthetic construct
  misc_feature 1..20: note = chemically synthesized
  source 1..20: mol_type = other DNA
aggccattcaaaagctgctt

SEQ ID NO: 32803 - DNA, 20 bp, synthetic construct
  misc_feature 1..20: note = chemically synthesized
  source 1..20: mol_type = other DNA
aaaagctgcttcaggatgat

SEQ ID NO: 32804 - DNA, 20 bp, synthetic construct
  misc_feature 1..20: note = chemically synthesized
  source 1..20: mol_type = other DNA
cacacttctttagccataaa

SEQ ID NO: 32805 - DNA, 20 bp, synthetic construct
  misc_feature 1..20: note = chemically synthesized
  source 1..20: mol_type = other DNA
tggtcagaagcaatgctgtg

SEQ ID NO: 32806 - DNA, 20 bp, synthetic construct
  misc_feature 1..20: note = chemically synthesized
  source 1..20: mol_type = other DNA
ctgtgtggaataccatgaca

SEQ ID NO: 32807 - DNA, 20 bp, synthetic construct
  misc_feature 1..20: note = chemically synthesized
  source 1..20: mol_type = other DNA
atacggcattctgtgattcc

SEQ ID NO: 32808 - DNA, 20 bp, synthetic construct
  misc_feature 1..20: note = chemically synthesized
  source 1..20: mol_type = other DNA
tggtagtcttggcataagca

SEQ ID NO: 32809 - DNA, 20 bp, synthetic construct
  misc_feature 1..20: note = chemically synthesized
  source 1..20: mol_type = other DNA
cttggcataagcattgagtt

SEQ ID NO: 32810 - DNA, 20 bp, synthetic construct
  misc_feature 1..20: note = chemically synthesized
  source 1..20: mol_type = other DNA
aggattgggaaacccatatc

SEQ ID NO: 32811 - DNA, 20 bp, synthetic construct
  misc_feature 1..20: note = chemically synthesized
  source 1..20: mol_type = other DNA
gtagctggctgatcaccccg

SEQ ID NO: 32812 - DNA, 20 bp, synthetic construct
  misc_feature 1..20: note = chemically synthesized
  source 1..20: mol_type = other DNA
ctgtggccaggtcagctttg

SEQ ID NO: 32813 - DNA, 20 bp, synthetic construct
  misc_feature 1..20: note = chemically synthesized
  source 1..20: mol_type = other DNA
caactgtggccactttgttc

SEQ ID NO: 32814 - DNA, 20 bp, synthetic construct
  misc_feature 1..20: note = chemically synthesized
  source 1..20: mol_type = other DNA
tgggtccattggacgatgac

SEQ ID NO: 32815 - DNA, 20 bp, synthetic construct
  misc_feature 1..20: note = chemically synthesized
  source 1..20: mol_type = other DNA
atgagtggcctgggaaaagg

SEQ ID NO: 32816 - DNA, 20 bp, synthetic construct
  misc_feature 1..20: note = chemically synthesized
  source 1..20: mol_type = other DNA
aaaaggctgagtggtgtcca

SEQ ID NO: 32817 - DNA, 20 bp, synthetic construct
  misc_feature 1..20: note = chemically synthesized
  source 1..20: mol_type = other DNA
cccattggtgagcactcaca

SEQ ID NO: 32818 - DNA, 20 bp, synthetic construct
  misc_feature 1..20: note = chemically synthesized
  source 1..20: mol_type = other DNA
caaacctttggctacagccc

SEQ ID NO: 32819 - DNA, 20 bp, synthetic construct
  misc_feature 1..20: note = chemically synthesized
  source 1..20: mol_type = other DNA
tcccttcaccgttgtccttc

SEQ ID NO: 32820 - DNA, 20 bp, synthetic construct
  misc_feature 1..20: note = chemically synthesized
  source 1..20: mol_type = other DNA
agtgctgcggctgtccactt

SEQ ID NO: 32821 - DNA, 20 bp, synthetic construct
  misc_feature 1..20: note = chemically synthesized
  source 1..20: mol_type = other DNA
gggagagaaagcagtgtgtc

SEQ ID NO: 32822 - DNA, 20 bp, synthetic construct
  misc_feature 1..20: note = chemically synthesized
  source 1..20: mol_type = other DNA
atgtaacttactagtgcctt

SEQ ID NO: 32823 - DNA, 20 bp, synthetic construct
  misc_feature 1..20: note = chemically synthesized
  source 1..20: mol_type = other DNA
acagcccactttatggctag

SEQ ID NO: 32824 - DNA, 20 bp, synthetic construct
  misc_feature 1..20: note = chemically synthesized
  source 1..20: mol_type = other DNA
caagagctttctccctaaaa

SEQ ID NO: 32825 - DNA, 20 bp, synthetic construct
  misc_feature 1..20: note = chemically synthesized
  source 1..20: mol_type = other DNA
cactgacacctcaagcatca

SEQ ID NO: 32826 - DNA, 20 bp, synthetic construct
  misc_feature 1..20: note = chemically synthesized
  source 1..20: mol_type = other DNA
cactcaaaactggcagcctt

SEQ ID NO: 32827 - DNA, 20 bp, synthetic construct
  misc_feature 1..20: note = chemically synthesized
  source 1..20: mol_type = other DNA
ggatcactcgataaatgggc

SEQ ID NO: 32828 - DNA, 20 bp, synthetic construct
  misc_feature 1..20: note = chemically synthesized
  source 1..20: mol_type = other DNA
cagagtaacacacccaaatc

SEQ ID NO: 32829 - DNA, 20 bp, synthetic construct
  misc_feature 1..20: note = chemically synthesized
  source 1..20: mol_type = other DNA
tgtgcctatttcttggttgt

SEQ ID NO: 32830 - DNA, 20 bp, synthetic construct
  misc_feature 1..20: note = chemically synthesized
  source 1..20: mol_type = other DNA
aaattatccttcactttaga

SEQ ID NO: 32831 - DNA, 20 bp, synthetic construct
  misc_feature 1..20: note = chemically synthesized
  source 1..20: mol_type = other DNA
tttactgaggtagaaggtcc

SEQ ID NO: 32832 - DNA, 20 bp, synthetic construct
  misc_feature 1..20: note = chemically synthesized
  source 1..20: mol_type = other DNA
aagattatggcacaaagctg

SEQ ID NO: 32833 - DNA, 20 bp, synthetic construct
  misc_feature 1..20: note = chemically synthesized
  source 1..20: mol_type = other DNA
gctggagagttgatatactc

SEQ ID NO: 32834 - DNA, 20 bp, synthetic construct
  misc_feature 1..20: note = chemically synthesized
  source 1..20: mol_type = other DNA
ttccttgcctctcacaagcg

SEQ ID NO: 32835 - DNA, 20 bp, synthetic construct
  misc_feature 1..20: note = chemically synthesized
  source 1..20: mol_type = other DNA
cctctcacaagcgttgaatc

SEQ ID NO: 32836 - DNA, 20 bp, synthetic construct
  misc_feature 1..20: note = chemically synthesized
  source 1..20: mol_type = other DNA
ctctctaaacaattgatgcc

SEQ ID NO: 32837 - DNA, 20 bp, synthetic construct
  misc_feature 1..20: note = chemically synthesized
  source 1..20: mol_type = other DNA
gttctccataccattagaag

SEQ ID NO: 32838 - DNA, 20 bp, synthetic construct
  misc_feature 1..20: note = chemically synthesized
  source 1..20: mol_type = other DNA
aagaagagtccttagcatat

SEQ ID NO: 32839 - DNA, 20 bp, synthetic construct
  misc_feature 1..20: note = chemically synthesized
  source 1..20: mol_type = other DNA
cctggtaccaaaatctgtat

SEQ ID NO: 32840 - DNA, 20 bp, synthetic construct
  misc_feature 1..20: note = chemically synthesized
  source 1..20: mol_type = other DNA
attagggttctacagagaaa

SEQ ID NO: 32841 - DNA, 20 bp, synthetic construct
  misc_feature 1..20: note = chemically synthesized
  source 1..20: mol_type = other DNA
ctctatatctatatctatat

SEQ ID NO: 32842 - DNA, 20 bp, synthetic construct
  misc_feature 1..20: note = chemically synthesized
  source 1..20: mol_type = other DNA
tgaggaacaaggaagctagt

SEQ ID NO: 32843 - DNA, 20 bp, synthetic construct
  misc_feature 1..20: note = chemically synthesized
  source 1..20: mol_type = other DNA
agtcccaaagctgaagaacc

SEQ ID NO: 32844 - DNA, 20 bp, synthetic construct
  misc_feature 1..20: note = chemically synthesized
  source 1..20: mol_type = other DNA
gttcaatgttccagggcagg

SEQ ID NO: 32845 - DNA, 20 bp, synthetic construct
  misc_feature 1..20: note = chemically synthesized
  source 1..20: mol_type = other DNA
catgggagaaaaatgtaggc

SEQ ID NO: 32846 - DNA, 20 bp, synthetic construct
  misc_feature 1..20: note = chemically synthesized
  source 1..20: mol_type = other DNA
agatggtgcccacccagatt

SEQ ID NO: 32847 - DNA, 20 bp, synthetic construct
  misc_feature 1..20: note = chemically synthesized
  source 1..20: mol_type = other DNA
ggtgcccacccagattaagg

SEQ ID NO: 32848 - DNA, 20 bp, synthetic construct
  misc_feature 1..20: note = chemically synthesized
  source 1..20: mol_type = other DNA
tgaggttggtttttttgttg

SEQ ID NO: 32849 - DNA, 20 bp, synthetic construct
  misc_feature 1..20: note = chemically synthesized
  source 1..20: mol_type = other DNA
tactctccttaattttcccc

SEQ ID NO: 32850 - DNA, 20 bp, synthetic construct
  misc_feature 1..20: note = chemically synthesized
  source 1..20: mol_type = other DNA
gttttctagatgtggacttg

SEQ ID NO: 32851 - DNA, 20 bp, synthetic construct
  misc_feature 1..20: note = chemically synthesized
  source 1..20: mol_type = other DNA
gtagcagcaatattagagga

SEQ ID NO: 32852 - DNA, 20 bp, synthetic construct
  misc_feature 1..20: note = chemically synthesized
  source 1..20: mol_type = other DNA
catacaaaacccctcagaca

SEQ ID NO: 32853 - DNA, 20 bp, synthetic construct
  misc_feature 1..20: note = chemically synthesized
  source 1..20: mol_type = other DNA
atctccaacaaccaagctct

SEQ ID NO: 32854 - DNA, 20 bp, synthetic construct
  misc_feature 1..20: note = chemically synthesized
  source 1..20: mol_type = other DNA
ttaagggcttacaactctaa

SEQ ID NO: 32855 - DNA, 20 bp, synthetic construct
  misc_feature 1..20: note = chemically synthesized
  source 1..20: mol_type = other DNA
gggctgcatgcactggtcat

SEQ ID NO: 32856 - DNA, 20 bp, synthetic construct
  misc_feature 1..20: note = chemically synthesized
  source 1..20: mol_type = other DNA
agaatggaacagaacaggac

SEQ ID NO: 32857 - DNA, 20 bp, synthetic construct
  misc_feature 1..20: note = chemically synthesized
  source 1..20: mol_type = other DNA
ctgcttttccatacagtgtc

SEQ ID NO: 32858 - DNA, 20 bp, synthetic construct
  misc_feature 1..20: note = chemically synthesized
  source 1..20: mol_type = other DNA
ataacataactggccaggtc

SEQ ID NO: 32859 - DNA, 20 bp, synthetic construct
  misc_feature 1..20: note = chemically synthesized
  source 1..20: mol_type = other DNA
ggtctatctttaaccaggcc

SEQ ID NO: 32860 - DNA, 20 bp, synthetic construct
  misc_feature 1..20: note = chemically synthesized
  source 1..20: mol_type = other DNA
tggtctcaggctgtttgcct

SEQ ID NO: 32861 - DNA, 20 bp, synthetic construct
  misc_feature 1..20: note = chemically synthesized
  source 1..20: mol_type = other DNA
attgggcataaaacaatatg

SEQ ID NO: 32862 - DNA, 20 bp, synthetic construct
  misc_feature 1..20: note = chemically synthesized
  source 1..20: mol_type = other DNA
ggaagagagaaataccatgt

SEQ ID NO: 32863 - DNA, 20 bp, synthetic construct
  misc_feature 1..20: note = chemically synthesized
  source 1..20: mol_type = other DNA
tgaaatacgtatttgtgtta

SEQ ID NO: 32864 - DNA, 20 bp, synthetic construct
  misc_feature 1..20: note = chemically synthesized
  source 1..20: mol_type = other DNA
tgtgttattggatttgacat

SEQ ID NO: 32865 - DNA, 20 bp, synthetic construct
  misc_feature 1..20: note = chemically synthesized
  source 1..20: mol_type = other DNA
tgagggcatgtatgatgaca

SEQ ID NO: 32866 - DNA, 20 bp, synthetic construct
  misc_feature 1..20: note = chemically synthesized
  source 1..20: mol_type = other DNA
aagggactttaaaacatgca

SEQ ID NO: 32867 - DNA, 20 bp, synthetic construct
  misc_feature 1..20: note = chemically synthesized
  source 1..20: mol_type = other DNA
taaataaatccttgggctta

SEQ ID NO: 32868 - DNA, 20 bp, synthetic construct
  misc_feature 1..20: note = chemically synthesized
  source 1..20: mol_type = other DNA
actttaaacaaattgctaac

SEQ ID NO: 32869 - DNA, 20 bp, synthetic construct
  misc_feature 1..20: note = chemically synthesized
  source 1..20: mol_type = other DNA
aaaggccaaaacaacagcag

SEQ ID NO: 32870 - DNA, 20 bp, synthetic construct
  misc_feature 1..20: note = chemically synthesized
  source 1..20: mol_type = other DNA
tcagaagagcagtggacgca

SEQ ID NO: 32871 - DNA, 20 bp, synthetic construct
  misc_feature 1..20: note = chemically synthesized
  source 1..20: mol_type = other DNA
atgctcaaaatatggaccta

SEQ ID NO: 32872 - DNA, 20 bp, synthetic construct
  misc_feature 1..20: note = chemically synthesized
  source 1..20: mol_type = other DNA
aaagaggtcaaatacctcaa

SEQ ID NO: 32873 - DNA, 20 bp, synthetic construct
  misc_feature 1..20: note = chemically synthesized
  source 1..20: mol_type = other DNA
catcatacatgccctcagca

SEQ ID NO: 32874 - DNA, 20 bp, synthetic construct
  misc_feature 1..20: note = chemically synthesized
  source 1..20: mol_type = other DNA
ctgctgtggttttcaattat

SEQ ID NO: 32875 - DNA, 20 bp, synthetic construct
  misc_feature 1..20: note = chemically synthesized
  source 1..20: mol_type = other DNA
tatgcccaatttctgcctcc

SEQ ID NO: 32876 - DNA, 20 bp, synthetic construct
  misc_feature 1..20: note = chemically synthesized
  source 1..20: mol_type = other DNA
gaagaagtaaaaactaaaag

SEQ ID NO: 32877 - DNA, 20 bp, synthetic construct
  misc_feature 1..20: note = chemically synthesized
  source 1..20: mol_type = other DNA
atgcagcttgtcctgctaca

SEQ ID NO: 32878 - DNA, 20 bp, synthetic construct
  misc_feature 1..20: note = chemically synthesized
  source 1..20: mol_type = other DNA
tggatccagcaagtccacat

SEQ ID NO: 32879 - DNA, 20 bp, synthetic construct
  misc_feature 1..20: note = chemically synthesized
  source 1..20: mol_type = other DNA
agcattatgatggcaaaaaa

SEQ ID NO: 32880 - DNA, 20 bp, synthetic construct
  misc_feature 1..20: note = chemically synthesized
  source 1..20: mol_type = other DNA
aaattagatgtggcctaggc

SEQ ID NO: 32881 - DNA, 20 bp, synthetic construct
  misc_feature 1..20: note = chemically synthesized
  source 1..20: mol_type = other DNA
acagagtaaacggataacct

SEQ ID NO: 32882 - DNA, 20 bp, synthetic construct
  misc_feature 1..20: note = chemically synthesized
  source 1..20: mol_type = other DNA
taaacggataacctacagaa

SEQ ID NO: 32883 - DNA, 20 bp, synthetic construct
  misc_feature 1..20: note = chemically synthesized
  source 1..20: mol_type = other DNA
atgcaacaaaaggctaatat

SEQ ID NO: 32884 - DNA, 20 bp, synthetic construct
  misc_feature 1..20: note = chemically synthesized
  source 1..20: mol_type = other DNA
caacaaaaaaaccaacctca

SEQ ID NO: 32885 - DNA, 20 bp, synthetic construct
  misc_feature 1..20: note = chemically synthesized
  source 1..20: mol_type = other DNA
acagccaggatataaagcag

SEQ ID NO: 32886 - DNA, 20 bp, synthetic construct
  misc_feature 1..20: note = chemically synthesized
  source 1..20: mol_type = other DNA
ccaggagtggttctagagga

SEQ ID NO: 32887 - DNA, 20 bp, synthetic construct
  misc_feature 1..20: note = chemically synthesized
  source 1..20: mol_type = other DNA
taatacttttgactatatgt

SEQ ID NO: 32888 - DNA, 20 bp, synthetic construct
  misc_feature 1..20: note = chemically synthesized
  source 1..20: mol_type = other DNA
gttcgctggacaaagtgatg

SEQ ID NO: 32889 - DNA, 20 bp, synthetic construct
  misc_feature 1..20: note = chemically synthesized
  source 1..20: mol_type = other DNA
catttggccactcttacaac

SEQ ID NO: 32890 - DNA, 20 bp, synthetic construct
  misc_feature 1..20: note = chemically synthesized
  source 1..20: mol_type = other DNA
agataactactctcttttag

SEQ ID NO: 32891 - DNA, 20 bp, synthetic construct
  misc_feature 1..20: note = chemically synthesized
  source 1..20: mol_type = other DNA
gaaggcactagtaagttaca

SEQ ID NO: 32892 - DNA, 20 bp, synthetic construct
  misc_feature 1..20: note = chemically synthesized
  source 1..20: mol_type = other DNA
gttgtgcactttgcacagaa

SEQ ID NO: 32893 - DNA, 20 bp, synthetic construct
  misc_feature 1..20: note = chemically synthesized
  source 1..20: mol_type = other DNA
atgactggaaaattgatgac

SEQ ID NO: 32894 - DNA, 20 bp, synthetic construct
  misc_feature 1..20: note = chemically synthesized
  source 1..20: mol_type = other DNA
agactaccatccatggaatc

SEQ ID NO: 32895 - DNA, 20 bp, synthetic construct
  misc_feature 1..20: note = chemically synthesized
  source 1..20: mol_type = other DNA
ttgctgagggcaaagggaat

SEQ ID NO: 32896 - DNA, 20 bp, synthetic construct
  misc_feature 1..20: note = chemically synthesized
  source 1..20: mol_type = other DNA
gtgtctgtatacacttgtac

SEQ ID NO: 32897 - DNA, 20 bp, synthetic construct
  misc_feature 1..20: note = chemically synthesized
  source 1..20: mol_type = other DNA
gtggccaggatataaagcag

SEQ ID NO: 32898 - DNA, 20 bp, synthetic construct
  misc_feature 1..20: note = chemically synthesized
  source 1..20: mol_type = other DNA
gttcaacatcactaataatc

SEQ ID NO: 32899 - DNA, 20 bp, synthetic construct
  misc_feature 1..20: note = chemically synthesized
  source 1..20: mol_type = other DNA
atgatacctccttatgccag

SEQ ID NO: 32900 - DNA, 20 bp, synthetic construct
  misc_feature 1..20: note = chemically synthesized
  source 1..20: mol_type = other DNA
tgttggtgaggatgtggaga

SEQ ID NO: 32901 - DNA, 20 bp, synthetic construct
  misc_feature 1..20: note = chemically synthesized
  source 1..20: mol_type = other DNA
aaatgcttatacactgttgg

SEQ ID NO: 32902 - DNA, 20 bp, synthetic construct
  misc_feature 1..20: note = chemically synthesized
  source 1..20: mol_type = other DNA
catgaagatttcttaaagaa

SEQ ID NO: 32903 - DNA, 20 bp, synthetic construct
  misc_feature 1..20: note = chemically synthesized
  source 1..20: mol_type = other DNA
ctaccaatggacgattggat

SEQ ID NO: 32904 - DNA, 20 bp, synthetic construct
  misc_feature 1..20: note = chemically synthesized
  source 1..20: mol_type = other DNA
atatattactcagccataaa

SEQ ID NO: 32905 - DNA, 20 bp, synthetic construct
  misc_feature 1..20: note = chemically synthesized
  source 1..20: mol_type = other DNA
agaatgaaatcatgtcttct

SEQ ID NO: 32906 - DNA, 20 bp, synthetic construct
  misc_feature 1..20: note = chemically synthesized
  source 1..20: mol_type = other DNA
attatcctcagtgaaataac

SEQ ID NO: 32907 - DNA, 20 bp, synthetic construct
  misc_feature 1..20: note = chemically synthesized
  source 1..20: mol_type = other DNA
ctcagtgaaataactcagaa

SEQ ID NO: 32908 - DNA, 20 bp, synthetic construct
  misc_feature 1..20: note = chemically synthesized
  source 1..20: mol_type = other DNA
cgatgagtaagcatagacat

SEQ ID NO: 32909 - DNA, 20 bp, synthetic construct
  misc_feature 1..20: note = chemically synthesized
  source 1..20: mol_type = other DNA
aataatagacacttgagact

SEQ ID NO: 32910 - DNA, 20 bp, synthetic construct
  misc_feature 1..20: note = chemically synthesized
  source 1..20: mol_type = other DNA
aatggggtaattaaaagggt

SEQ ID NO: 32911 - DNA, 20 bp, synthetic construct
  misc_feature 1..20: note = chemically synthesized
  source 1..20: mol_type = other DNA
cactaaataataatcacatg

SEQ ID NO: 32912 - DNA, 20 bp, synthetic construct
  misc_feature 1..20: note = chemically synthesized
  source 1..20: mol_type = other DNA
gctagagcaaggggatgact

SEQ ID NO: 32913 - DNA, 20 bp, synthetic construct
  misc_feature 1..20: note = chemically synthesized
  source 1..20: mol_type = other DNA
ctacacaagctaattgtcct

SEQ ID NO: 32914 - DNA, 20 bp, synthetic construct
  misc_feature 1..20: note = chemically synthesized
  source 1..20: mol_type = other DNA
tcagatgttatgtgatgagg

SEQ ID NO: 32915 - DNA, 20 bp, synthetic construct
  misc_feature 1..20: note = chemically synthesized
  source 1..20: mol_type = other DNA
atagaacacatgaggaggaa

SEQ ID NO: 32916 - DNA, 20 bp, synthetic construct
  misc_feature 1..20: note = chemically synthesized
  source 1..20: mol_type = other DNA
tcctcaaattctggacaatt

SEQ ID NO: 32917 - DNA, 20 bp, synthetic construct
  misc_feature 1..20: note = chemically synthesized
  source 1..20: mol_type = other DNA
cacaaaaatgcaaaatttcc

SEQ ID NO: 32918 - DNA, 20 bp, synthetic construct
  misc_feature 1..20: note = chemically synthesized
  source 1..20: mol_type = other DNA
cttcatcttcatcttttcca

SEQ ID NO: 32919 - DNA, 20 bp, synthetic construct
  misc_feature 1..20: note = chemically synthesized
  source 1..20: mol_type = other DNA
gaaatagagattctttattt

SEQ ID NO: 32920 - DNA, 20 bp, synthetic construct
  misc_feature 1..20: note = chemically synthesized
  source 1..20: mol_type = other DNA
tgatttgggaaatgaaatga

SEQ ID NO: 32921 - DNA, 20 bp, synthetic construct
  misc_feature 1..20: note = chemically synthesized
  source 1..20: mol_type = other DNA
gattatgctctttcagtcta

SEQ ID NO: 32922 - DNA, 20 bp, synthetic construct
  misc_feature 1..20: note = chemically synthesized
  source 1..20: mol_type = other DNA
acaaagaaccaaaatagtaa

SEQ ID NO: 32923 - DNA, 20 bp, synthetic construct
  misc_feature 1..20: note = chemically synthesized
  source 1..20: mol_type = other DNA
agtagaaaatcccacataag

SEQ ID NO: 32924 - DNA, 20 bp, synthetic construct
  misc_feature 1..20: note = chemically synthesized
  source 1..20: mol_type = other DNA
ctacacatttataagctccc

SEQ ID NO: 32925 - DNA, 20 bp, synthetic construct
  misc_feature 1..20: note = chemically synthesized
  source 1..20: mol_type = other DNA
aagcaaactgcctgaaggcc

SEQ ID NO: 32926 - DNA, 20 bp, synthetic construct
  misc_feature 1..20: note = chemically synthesized
  source 1..20: mol_type = other DNA
gactatgctgctgtatgcac

SEQ ID NO: 32927 - DNA, 20 bp, synthetic construct
  misc_feature 1..20: note = chemically synthesized
  source 1..20: mol_type = other DNA
atcaacaccaagatacatct

SEQ ID NO: 32928 - DNA, 20 bp, synthetic construct
  misc_feature 1..20: note = chemically synthesized
  source 1..20: mol_type = other DNA
caaaataaacataaaaaggt

SEQ ID NO: 32929 - DNA, 20 bp, synthetic construct
  misc_feature 1..20: note = chemically synthesized
  source 1..20: mol_type = other DNA
catttataaaattctggaaa

SEQ ID NO: 32930 - DNA, 20 bp, synthetic construct
  misc_feature 1..20: note = chemically synthesized
  source 1..20: mol_type = other DNA
agaactcagataaacaataa

SEQ ID NO: 32931 - DNA, 20 bp, synthetic construct
  misc_feature 1..20: note = chemically synthesized
  source 1..20: mol_type = other DNA
agataaacaataaaaagaaa

SEQ ID NO: 32932 - DNA, 20 bp, synthetic construct
  misc_feature 1..20: note = chemically synthesized
  source 1..20: mol_type = other DNA
aaaacaattcaggatatgaa

SEQ ID NO: 32933 - DNA, 20 bp, synthetic construct
  misc_feature 1..20: note = chemically synthesized
  source 1..20: mol_type = other DNA
tacccaagagatagatacaa

SEQ ID NO: 32934 - DNA, 20 bp, synthetic construct
  misc_feature 1..20: note = chemically synthesized
  source 1..20: mol_type = other DNA
atacaacaagaatgaaccaa

SEQ ID NO: 32935 - DNA, 20 bp, synthetic construct
  misc_feature 1..20: note = chemically synthesized
  source 1..20: mol_type = other DNA
tgtaactgaagagtttattg

SEQ ID NO: 32936 - DNA, 20 bp, synthetic construct
  misc_feature 1..20: note = chemically synthesized
  source 1..20: mol_type = other DNA
acaatagatcagatcaagca

SEQ ID NO: 32937 - DNA, 20 bp, synthetic construct
  misc_feature 1..20: note = chemically synthesized
  source 1..20: mol_type = other DNA
taaaattagctggtcaaatg

SEQ ID NO: 32938 - DNA, 20 bp, synthetic construct
  misc_feature 1..20: note = chemically synthesized
  source 1..20: mol_type = other DNA
aaatgatagaaaggaaaaaa

SEQ ID NO: 32939 - DNA, 20 bp, synthetic construct
  misc_feature 1..20: note = chemically synthesized
  source 1..20: mol_type = other DNA
tgaaaacttgtcaagtctag

SEQ ID NO: 32940 - DNA, 20 bp, synthetic construct
  misc_feature 1..20: note = chemically synthesized
  source 1..20: mol_type = other DNA
gacatccagacaaatgaaaa

SEQ ID NO: 32941 - DNA, 20 bp, synthetic construct
  misc_feature 1..20: note = chemically synthesized
  source 1..20: mol_type = other DNA
gattaacagcagatttctca

SEQ ID NO: 32942 - DNA, 20 bp, synthetic construct
  misc_feature 1..20: note = chemically synthesized
  source 1..20: mol_type = other DNA
atgatatattcaaaatagtg

SEQ ID NO: 32943 - DNA, 20 bp, synthetic construct
  misc_feature 1..20: note = chemically synthesized
  source 1..20: mol_type = other DNA
taaataaaatcttttctggg

SEQ ID NO: 32944 - DNA, 20 bp, synthetic construct
  misc_feature 1..20: note = chemically synthesized
  source 1..20: mol_type = other DNA
ctatcactagactggcttta

SEQ ID NO: 32945 - DNA, 20 bp, synthetic construct
  misc_feature 1..20: note = chemically synthesized
  source 1..20: mol_type = other DNA
gagcaaaacacaaataaaga

SEQ ID NO: 32946 - DNA, 20 bp, synthetic construct
  misc_feature 1..20: note = chemically synthesized
  source 1..20: mol_type = other DNA
agaactcaaacgttaccact

SEQ ID NO: 32947 - DNA, 20 bp, synthetic construct
  misc_feature 1..20: note = chemically synthesized
  source 1..20: mol_type = other DNA
caaaccacaatcataaataa

SEQ ID NO: 32948 - DNA, 20 bp, synthetic construct
  misc_feature 1..20: note = chemically synthesized
  source 1..20: mol_type = other DNA
ccacaatcataaataataag

SEQ ID NO: 32949 - DNA, 20 bp, synthetic construct
  misc_feature 1..20: note = chemically synthesized
  source 1..20: mol_type = other DNA
aatcataaataataagaaag

SEQ ID NO: 32950 - DNA, 20 bp, synthetic construct
  misc_feature 1..20: note = chemically synthesized
  source 1..20: mol_type = other DNA
ataaataataagaaagaaag

SEQ ID NO: 32951 - DNA, 20 bp, synthetic construct
  misc_feature 1..20: note = chemically synthesized
  source 1..20: mol_type = other DNA
ataataagaaagaaagaaag

SEQ ID NO: 32952 - DNA, 20 bp, synthetic construct
  misc_feature 1..20: note = chemically synthesized
  source 1..20: mol_type = other DNA
agaaagaaagagagagagag

SEQ ID NO: 32953 - DNA, 20 bp, synthetic construct
  misc_feature 1..20: note = chemically synthesized
  source 1..20: mol_type = other DNA
agagagagagagagagaatg

SEQ ID NO: 32954 - DNA, 20 bp, synthetic construct
  misc_feature 1..20: note = chemically synthesized
  source 1..20: mol_type = other DNA
agagagagagagaatgaaag

SEQ ID NO: 32955 - DNA, 20 bp, synthetic construct
  misc_feature 1..20: note = chemically synthesized
  source 1..20: mol_type = other DNA
aagaaagaaaaggaaggaag

SEQ ID NO: 32956 - DNA, 20 bp, synthetic construct
  misc_feature 1..20: note = chemically synthesized
  source 1..20: mol_type = other DNA
acccagttgtaagctgccta

SEQ ID NO: 32957 - DNA, 20 bp, synthetic construct
  misc_feature 1..20: note = chemically synthesized
  source 1..20: mol_type = other DNA
atgaaagatcttccatacaa

SEQ ID NO: 32958 - DNA, 20 bp, synthetic construct
  misc_feature 1..20: note = chemically synthesized
  source 1..20: mol_type = other DNA
tattagatataaagggtgaa

SEQ ID NO: 32959 - DNA, 20 bp, synthetic construct
  misc_feature 1..20: note = chemically synthesized
  source 1..20: mol_type = other DNA
gcatcagatagatcatctag

SEQ ID NO: 32960 - DNA, 20 bp, synthetic construct
  misc_feature 1..20: note = chemically synthesized
  source 1..20: mol_type = other DNA
catctagacagaaaattaac

SEQ ID NO: 32961 - DNA, 20 bp, synthetic construct
  misc_feature 1..20: note = chemically synthesized
  source 1..20: mol_type = other DNA
caatatttcatccaacagct

SEQ ID NO: 32962 - DNA, 20 bp, synthetic construct
  misc_feature 1..20: note = chemically synthesized
  source 1..20: mol_type = other DNA
cagaccacaatggaataaaa

SEQ ID NO: 32963 - DNA, 20 bp, synthetic construct
  misc_feature 1..20: note = chemically synthesized
  source 1..20: mol_type = other DNA
ataaaactagaaatcaataa

SEQ ID NO: 32964 - DNA, 20 bp, synthetic construct
  misc_feature 1..20: note = chemically synthesized
  source 1..20: mol_type = other DNA
ctgaatgaacgttatgtcaa

SEQ ID NO: 32965 - DNA, 20 bp, synthetic construct
  misc_feature 1..20: note = chemically synthesized
  source 1..20: mol_type = other DNA
taaacacttaaattaaaaac

SEQ ID NO: 32966 - DNA, 20 bp, synthetic construct
  misc_feature 1..20: note = chemically synthesized
  source 1..20: mol_type = other DNA
taatcatgtacctcaacaag

SEQ ID NO: 32967 - DNA, 20 bp, synthetic construct
  misc_feature 1..20: note = chemically synthesized
  source 1..20: mol_type = other DNA
aacccaaaactagcagaagg

SEQ ID NO: 32968 - DNA, 20 bp, synthetic construct
  misc_feature 1..20: note = chemically synthesized
  source 1..20: mol_type = other DNA
acagaagaacttaatgaaat

SEQ ID NO: 32969 - DNA, 20 bp, synthetic construct
  misc_feature 1..20: note = chemically synthesized
  source 1..20: mol_type = other DNA
atagctctagctagactaac

SEQ ID NO: 32970 - DNA, 20 bp, synthetic construct
  misc_feature 1..20: note = chemically synthesized
  source 1..20: mol_type = other DNA
aaaagagaagagactgaaat

SEQ ID NO: 32971 - DNA, 20 bp, synthetic construct
  misc_feature 1..20: note = chemically synthesized
  source 1..20: mol_type = other DNA
agagactgaaataaagaaaa

SEQ ID NO: 32972 - DNA, 20 bp, synthetic construct
  misc_feature 1..20: note = chemically synthesized
  source 1..20: mol_type = other DNA
taaagaaaatcagaaataaa

SEQ ID NO: 32973 - DNA, 20 bp, synthetic construct
  misc_feature 1..20: note = chemically synthesized
  source 1..20: mol_type = other DNA
aatatattacaaccgatacc

SEQ ID NO: 32974 - DNA, 20 bp, synthetic construct
  misc_feature 1..20: note = chemically synthesized
  source 1..20: mol_type = other DNA
ttacaaccgataccacagaa

SEQ ID NO: 32975 - DNA, 20 bp, synthetic construct
  misc_feature 1..20: note = chemically synthesized
  source 1..20: mol_type = other DNA
accacctaccaagattgaat

SEQ ID NO: 32976 - DNA, 20 bp, synthetic construct
  misc_feature 1..20: note = chemically synthesized
  source 1..20: mol_type = other DNA
cctaccaagattgaattaag

SEQ ID NO: 32977 - DNA, 20 bp, synthetic construct
  misc_feature 1..20: note = chemically synthesized
  source 1..20: mol_type = other DNA
caagattgaattaagaaaga

SEQ ID NO: 32978 - DNA, 20 bp, synthetic construct
  misc_feature 1..20: note = chemically synthesized
  source 1..20: mol_type = other DNA
gtagtaaaaagtctcccaaa

SEQ ID NO: 32979 - DNA, 20 bp, synthetic construct
  misc_feature 1..20: note = chemically synthesized
  source 1..20: mol_type = other DNA
tcaaattttaccaaactttc

SEQ ID NO: 32980 - DNA, 20 bp, synthetic construct
  misc_feature 1..20: note = chemically synthesized
  source 1..20: mol_type = other DNA
atatgatcatctcaatagat

SEQ ID NO: 32981 - DNA, 20 bp, synthetic construct
  misc_feature 1..20: note = chemically synthesized
  source 1..20: mol_type = other DNA
ctagccacagctttcaggtc

SEQ ID NO: 32982 - DNA, 20 bp, synthetic construct
  misc_feature 1..20: note = chemically synthesized
  source 1..20: mol_type = other DNA
ccacagctttcaggtcagag

SEQ ID NO: 32983 - DNA, 20 bp, synthetic construct
  misc_feature 1..20: note = chemically synthesized
  source 1..20: mol_type = other DNA
agctttcaggtcagagaaag

SEQ ID NO: 32984 - DNA, 20 bp, synthetic construct
  misc_feature 1..20: note = chemically synthesized
  source 1..20: mol_type = other DNA
ttcaggtcagagaaagaaag

SEQ ID NO: 32985 - DNA, 20 bp, synthetic construct
  misc_feature 1..20: note = chemically synthesized
  source 1..20: mol_type = other DNA
cagatgacatgattttatac

SEQ ID NO: 32986 - DNA, 20 bp, synthetic construct
  misc_feature 1..20: note = chemically synthesized
  source 1..20: mol_type = other DNA
aaaactacaaaacactgata

SEQ ID NO: 32987 - DNA, 20 bp, synthetic construct
  misc_feature 1..20: note = chemically synthesized
  source 1..20: mol_type = other DNA
tgataaaagaattgaaaagg

SEQ ID NO: 32988 - DNA, 20 bp, synthetic construct
  misc_feature 1..20: note = chemically synthesized
  source 1..20: mol_type = other DNA
agatatcctatgttcatgga

SEQ ID NO: 32989 - DNA, 20 bp, synthetic construct
  misc_feature 1..20: note = chemically synthesized
  source 1..20: mol_type = other DNA
aaatagcaatgtcatttttc

SEQ ID NO: 32990 - DNA, 20 bp, synthetic construct
  misc_feature 1..20: note = chemically synthesized
  source 1..20: mol_type = other DNA
cagacacttagaccaatgga

SEQ ID NO: 32991 - DNA, 20 bp, synthetic construct
  misc_feature 1..20: note = chemically synthesized
  source 1..20: mol_type = other DNA
aatggaagagaatagagaac

SEQ ID NO: 32992 - DNA, 20 bp, synthetic construct
  misc_feature 1..20: note = chemically synthesized
  source 1..20: mol_type = other DNA
cagattttcaacaaaggtga

SEQ ID NO: 32993 - DNA, 20 bp, synthetic construct
  misc_feature 1..20: note = chemically synthesized
  source 1..20: mol_type = other DNA
tgaggaaaggacacagtgtt

SEQ ID NO: 32994 - DNA, 20 bp, synthetic construct
  misc_feature 1..20: note = chemically synthesized
  source 1..20: mol_type = other DNA
ccattggatatccatgtgca

SEQ ID NO: 32995 - DNA, 20 bp, synthetic construct
  misc_feature 1..20: note = chemically synthesized
  source 1..20: mol_type = other DNA
cctaaacacacactcccact

SEQ ID NO: 32996 - DNA, 20 bp, synthetic construct
  misc_feature 1..20: note = chemically synthesized
  source 1..20: mol_type = other DNA
tacaggtgtagaggaagcag

SEQ ID NO: 32997 - DNA, 20 bp, synthetic construct
  misc_feature 1..20: note = chemically synthesized
  source 1..20: mol_type = other DNA
agaacaattactaatagacc

SEQ ID NO: 32998 - DNA, 20 bp, synthetic construct
  misc_feature 1..20: note = chemically synthesized
  source 1..20: mol_type = other DNA
gcactagacagttcatcaag

SEQ ID NO: 32999 - DNA, 20 bp, synthetic construct
  misc_feature 1..20: note = chemically synthesized
  source 1..20: mol_type = other DNA
caggaccagatggattcaca

SEQ ID NO: 33000 - DNA, 20 bp, synthetic construct
  misc_feature 1..20: note = chemically synthesized
  source 1..20: mol_type = other DNA
cagggaaggacataaccaaa

SEQ ID NO: 33001 - DNA, 20 bp, synthetic construct
  misc_feature 1..20: note = chemically synthesized
  source 1..20: mol_type = other DNA
acatgatcatctcaatagat

SEQ ID NO: 33002 - DNA, 20 bp, synthetic construct
  misc_feature 1..20: note = chemically synthesized
  source 1..20: mol_type = other DNA
ccagggcaatcagacaaaac

SEQ ID NO: 33003 - DNA, 20 bp, synthetic construct
  misc_feature 1..20: note = chemically synthesized
  source 1..20: mol_type = other DNA
ttaaaaccctaaagactcct

SEQ ID NO: 33004 - DNA, 20 bp, synthetic construct
  misc_feature 1..20: note = chemically synthesized
  source 1..20: mol_type = other DNA
tacaccaacagcaaccaaat

SEQ ID NO: 33005 - DNA, 20 bp, synthetic construct
  misc_feature 1..20: note = chemically synthesized
  source 1..20: mol_type = other DNA
ttaaaactataaaactacta

SEQ ID NO: 33006 - DNA, 20 bp, synthetic construct
  misc_feature 1..20: note = chemically synthesized
  source 1..20: mol_type = other DNA
aagagacaagctgttgaatg

SEQ ID NO: 33007 - DNA, 20 bp, synthetic construct
  misc_feature 1..20: note = chemically synthesized
  source 1..20: mol_type = other DNA
atttgacaaggaattaatct

SEQ ID NO: 33008 - DNA, 20 bp, synthetic construct
  misc_feature 1..20: note = chemically synthesized
  source 1..20: mol_type = other DNA
gaattaatctccagaatata

SEQ ID NO: 33009 - DNA, 20 bp, synthetic construct
  misc_feature 1..20: note = chemically synthesized
  source 1..20: mol_type = other DNA
gctcaacattactaatcatc

SEQ ID NO: 33010 - DNA, 20 bp, synthetic construct
  misc_feature 1..20: note = chemically synthesized
  source 1..20: mol_type = other DNA
gagatatcatcttatgccag

SEQ ID NO: 33011 - DNA, 20 bp, synthetic construct
  misc_feature 1..20: note = chemically synthesized
  source 1..20: mol_type = other DNA
ctgggtatttatccaaagga

SEQ ID NO: 33012 - DNA, 20 bp, synthetic construct
  misc_feature 1..20: note = chemically synthesized
  source 1..20: mol_type = other DNA
tttatccaaaggaaaagaat

SEQ ID NO: 33013 - DNA, 20 bp, synthetic construct
  misc_feature 1..20: note = chemically synthesized
  source 1..20: mol_type = other DNA
gtgtccatcaatggatgaat

SEQ ID NO: 33014 - DNA, 20 bp, synthetic construct
  misc_feature 1..20: note = chemically synthesized
  source 1..20: mol_type = other DNA
ttaaacgaaataagccaggc

SEQ ID NO: 33015 - DNA, 20 bp, synthetic construct
  misc_feature 1..20: note = chemically synthesized
  source 1..20: mol_type = other DNA
taatatcatgtaggtagaga

SEQ ID NO: 33016 - DNA, 20 bp, synthetic construct
  misc_feature 1..20: note = chemically synthesized
  source 1..20: mol_type = other DNA
tgtaggtagagagtagaatg

SEQ ID NO: 33017 - DNA, 20 bp, synthetic construct
  misc_feature 1..20: note = chemically synthesized
  source 1..20: mol_type = other DNA
gaatgacagaaaccagaggt

SEQ ID NO: 33018 - DNA, 20 bp, synthetic construct
  misc_feature 1..20: note = chemically synthesized
  source 1..20: mol_type = other DNA
ttgtatatttcaaaatagta

SEQ ID NO: 33019 - DNA, 20 bp, synthetic construct
  misc_feature 1..20: note = chemically synthesized
  source 1..20: mol_type = other DNA
tcttgaaatgttcctaacac

SEQ ID NO: 33020 - DNA, 20 bp, synthetic construct
  misc_feature 1..20: note = chemically synthesized
  source 1..20: mol_type = other DNA
aaacacgtcatatatcaata

SEQ ID NO: 33021 - DNA, 20 bp, synthetic construct
  misc_feature 1..20: note = chemically synthesized
  source 1..20: mol_type = other DNA
caaacttctctcttaacaag

SEQ ID NO: 33022 - DNA, 20 bp, synthetic construct
  misc_feature 1..20: note = chemically synthesized
  source 1..20: mol_type = other DNA
ggttttattctgacattaaa

SEQ ID NO: 33023 - DNA, 20 bp, synthetic construct
  misc_feature 1..20: note = chemically synthesized
  source 1..20: mol_type = other DNA
agtatcacaactttcacctg

SEQ ID NO: 33024 - DNA, 20 bp, synthetic construct
  misc_feature 1..20: note = chemically synthesized
  source 1..20: mol_type = other DNA
aatcactatttcaaagaagt

SEQ ID NO: 33025 - DNA, 20 bp, synthetic construct
  misc_feature 1..20: note = chemically synthesized
  source 1..20: mol_type = other DNA
tatacatattatacacatat

SEQ ID NO: 33026 - DNA, 20 bp, synthetic construct
  misc_feature 1..20: note = chemically synthesized
  source 1..20: mol_type = other DNA
tccacatcagtaattagggc

SEQ ID NO: 33027 - DNA, 20 bp, synthetic construct
  misc_feature 1..20: note = chemically synthesized
  source 1..20: mol_type = other DNA
attttatgaataaattttat

SEQ ID NO: 33028 - DNA, 20 bp, synthetic construct
  misc_feature 1..20: note = chemically synthesized
  source 1..20: mol_type = other DNA
tacaggtagattttatatat

SEQ ID NO: 33029 - DNA, 20 bp, synthetic construct
  misc_feature 1..20: note = chemically synthesized
  source 1..20: mol_type = other DNA
gtgagcctccatggccagct

SEQ ID NO: 33030 - DNA, 20 bp, synthetic construct
  misc_feature 1..20: note = chemically synthesized
  source 1..20: mol_type = other DNA
gagaaattttttaaatttct

SEQ ID NO: 33031 - DNA, 20 bp, synthetic construct
  misc_feature 1..20: note = chemically synthesized
  source 1..20: mol_type = other DNA
tttaaaagtggtggggggta

SEQ ID NO: 33032 - DNA, 20 bp, synthetic construct
  misc_feature 1..20: note = chemically synthesized
  source 1..20: mol_type = other DNA
gatccttttcattttgctct

SEQ ID NO: 33033 - DNA, 20 bp, synthetic construct
  misc_feature 1..20: note = chemically synthesized
  source 1..20: mol_type = other DNA
aagtgtgaagtcctcttctc

SEQ ID NO: 33034 - DNA, 20 bp, synthetic construct
  misc_feature 1..20: note = chemically synthesized
  source 1..20: mol_type = other DNA
tagatataatttctgaaggt

SEQ ID NO: 33035 - DNA, 20 bp, synthetic construct
  misc_feature 1..20: note = chemically synthesized
  source 1..20: mol_type = other DNA
gttctgagcaagtgtgtgca

SEQ ID NO: 33036 - DNA, 20 bp, synthetic construct
  misc_feature 1..20: note = chemically synthesized
  source 1..20: mol_type = other DNA
agtacttcccactactgtgg

SEQ ID NO: 33037 - DNA, 20 bp, synthetic construct
  misc_feature 1..20: note = chemically synthesized
  source 1..20: mol_type = other DNA
caaacctctaggtaactagg

SEQ ID NO: 33038 - DNA, 20 bp, synthetic construct
  misc_feature 1..20: note = chemically synthesized
  source 1..20: mol_type = other DNA
atttgtcaattcttgaagat

SEQ ID NO: 33039 - DNA, 20 bp, synthetic construct
  misc_feature 1..20: note = chemically synthesized
  source 1..20: mol_type = other DNA
aaaaaggttattttgaagtc

SEQ ID NO: 33040 - DNA, 20 bp, synthetic construct
  misc_feature 1..20: note = chemically synthesized
  source 1..20: mol_type = other DNA
gcagcaagggattcttctcc

SEQ ID NO: 33041 - DNA, 20 bp, synthetic construct
  misc_feature 1..20: note = chemically synthesized
  source 1..20: mol_type = other DNA
tgaatacatttccttgtttg

SEQ ID NO: 33042 - DNA, 20 bp, synthetic construct
  misc_feature 1..20: note = chemically synthesized
  source 1..20: mol_type = other DNA
ataacattcattttattcat

SEQ ID NO: 33043 - DNA, 20 bp, synthetic construct
  misc_feature 1..20: note = chemically synthesized
  source 1..20: mol_type = other DNA
tcagtttaaggggttctttt

SEQ ID NO: 33044 - DNA, 20 bp, synthetic construct
  misc_feature 1..20: note = chemically synthesized
  source 1..20: mol_type = other DNA
gggttctttttcagaaagtt

SEQ ID NO: 33045 - DNA, 20 bp, synthetic construct
  misc_feature 1..20: note = chemically synthesized
  source 1..20: mol_type = other DNA
aaattcaaatcattaaattt

SEQ ID NO: 33046 - DNA, 20 bp, synthetic construct
  misc_feature 1..20: note = chemically synthesized
  source 1..20: mol_type = other DNA
ttccccttgaaagggaaatg

SEQ ID NO: 33047 - DNA, 20 bp, synthetic construct
  misc_feature 1..20: note = chemically synthesized
  source 1..20: mol_type = other DNA
cattaatgtttgttaaatga

SEQ ID NO: 33048 - DNA, 20 bp, synthetic construct
  misc_feature 1..20: note = chemically synthesized
  source 1..20: mol_type = other DNA
tgagctcctgcccactctct

SEQ ID NO: 33049 - DNA, 20 bp, synthetic construct
  misc_feature 1..20: note = chemically synthesized
  source 1..20: mol_type = other DNA
tggactggaaaaatttgtga

SEQ ID NO: 33050 - DNA, 20 bp, synthetic construct
  misc_feature 1..20: note = chemically synthesized
  source 1..20: mol_type = other DNA
aggataaagatctctgagga

SEQ ID NO: 33051 - DNA, 20 bp, synthetic construct
  misc_feature 1..20: note = chemically synthesized
  source 1..20: mol_type = other DNA
aagaatacaaaataatttaa

SEQ ID NO: 33052 - DNA, 20 bp, synthetic construct
  misc_feature 1..20: note = chemically synthesized
  source 1..20: mol_type = other DNA
aaataatttaaaaagaaaca

SEQ ID NO: 33053 - DNA, 20 bp, synthetic construct
  misc_feature 1..20: note = chemically synthesized
  source 1..20: mol_type = other DNA
attctttctcactaaactac

SEQ ID NO: 33054 - DNA, 20 bp, synthetic construct
  misc_feature 1..20: note = chemically synthesized
  source 1..20: mol_type = other DNA
ataaggtgaattctgatttt

SEQ ID NO: 33055 - DNA, 20 bp, synthetic construct
  misc_feature 1..20: note = chemically synthesized
  source 1..20: mol_type = other DNA
tcctacataagcatagcatt

SEQ ID NO: 33056 - DNA, 20 bp, synthetic construct
  misc_feature 1..20: note = chemically synthesized
  source 1..20: mol_type = other DNA
agcatttcatataattacta

SEQ ID NO: 33057 - DNA, 20 bp, synthetic construct
  misc_feature 1..20: note = chemically synthesized
  source 1..20: mol_type = other DNA
gtttaattatactattttgc

SEQ ID NO: 33058 - DNA, 20 bp, synthetic construct
  misc_feature 1..20: note = chemically synthesized
  source 1..20: mol_type = other DNA
tgaaatcttatgtgcttccc

SEQ ID NO: 33059 - DNA, 20 bp, synthetic construct
  misc_feature 1..20: note = chemically synthesized
  source 1..20: mol_type = other DNA
accgtcctcacaatacctgc

SEQ ID NO: 33060 - DNA, 20 bp, synthetic construct
  misc_feature 1..20: note = chemically synthesized
  source 1..20: mol_type = other DNA
acaatacctgcccagaaaga

SEQ ID NO: 33061 - DNA, 20 bp, synthetic construct
  misc_feature 1..20: note = chemically synthesized
  source 1..20: mol_type = other DNA
agaaagacgagaaagaggag

SEQ ID NO: 33062 - DNA, 20 bp, synthetic construct
  misc_feature 1..20: note = chemically synthesized
  source 1..20: mol_type = other DNA
ggagtctcggaggactgtaa

SEQ ID NO: 33063 - DNA, 20 bp, synthetic construct
  misc_feature 1..20: note = chemically synthesized
  source 1..20: mol_type = other DNA
cttgtgtatgtgttgaagag

SEQ ID NO: 33064 - DNA, 20 bp, synthetic construct
  misc_feature 1..20: note = chemically synthesized
  source 1..20: mol_type = other DNA
aaaatccatattatgacaac

SEQ ID NO: 33065 - DNA, 20 bp, synthetic construct
  misc_feature 1..20: note = chemically synthesized
  source 1..20: mol_type = other DNA
tagtaattatatgaaatgct

SEQ ID NO: 33066 - DNA, 20 bp, synthetic construct
  misc_feature 1..20: note = chemically synthesized
  source 1..20: mol_type = other DNA
ggcaaaatactgtgctcctt

SEQ ID NO: 33067 - DNA, 20 bp, synthetic construct
  misc_feature 1..20: note = chemically synthesized
  source 1..20: mol_type = other DNA
ttatgtaggaattataaaat

SEQ ID NO: 33068 - DNA, 20 bp, synthetic construct
  misc_feature 1..20: note = chemically synthesized
  source 1..20: mol_type = other DNA
actattgaaggaacattagc

SEQ ID NO: 33069 - DNA, 20 bp, synthetic construct
  misc_feature 1..20: note = chemically synthesized
  source 1..20: mol_type = other DNA
gctgagttcctcaagatctt

SEQ ID NO: 33070 - DNA, 20 bp, synthetic construct
  misc_feature 1..20: note = chemically synthesized
  source 1..20: mol_type = other DNA
taaaggatctgaaataataa

SEQ ID NO: 33071 - DNA, 20 bp, synthetic construct
  misc_feature 1..20: note = chemically synthesized
  source 1..20: mol_type = other DNA
atggcatgcattctgaaaaa

SEQ ID NO: 33072 - DNA, 20 bp, synthetic construct
  misc_feature 1..20: note = chemically synthesized
  source 1..20: mol_type = other DNA
ttttgcctatgtagaagtgg

SEQ ID NO: 33073 - DNA, 20 bp, synthetic construct
  misc_feature 1..20: note = chemically synthesized
  source 1..20: mol_type = other DNA
tcttattctctgtagtttag

SEQ ID NO: 33074 - DNA, 20 bp, synthetic construct
  misc_feature 1..20: note = chemically synthesized
  source 1..20: mol_type = other DNA
attctctgtagtttagtgag

SEQ ID NO: 33075 - DNA, 20 bp, synthetic construct
  misc_feature 1..20: note = chemically synthesized
  source 1..20: mol_type = other DNA
gtgagaaagaatctaggagg

SEQ ID NO: 33076 - DNA, 20 bp, synthetic construct
  misc_feature 1..20: note = chemically synthesized
  source 1..20: mol_type = other DNA
tctagaacagtgcctggtac

SEQ ID NO: 33077 - DNA, 20 bp, synthetic construct
  misc_feature 1..20: note = chemically synthesized
  source 1..20: mol_type = other DNA
ttcacttttttactattatg

SEQ ID NO: 33078 - DNA, 20 bp, synthetic construct
  misc_feature 1..20: note = chemically synthesized
  source 1..20: mol_type = other DNA
caaggaaatgtattcacatc

SEQ ID NO: 33079 - DNA, 20 bp, synthetic construct
  misc_feature 1..20: note = chemically synthesized
  source 1..20: mol_type = other DNA
aaacaaaaggtttcttagga

SEQ ID NO: 33080 - DNA, 20 bp, synthetic construct
  misc_feature 1..20: note = chemically synthesized
  source 1..20: mol_type = other DNA
aggagaagaatcccttgctg

SEQ ID NO: 33081 - DNA, 20 bp, synthetic construct
  misc_feature 1..20: note = chemically synthesized
  source 1..20: mol_type = other DNA
agaggcgagggagatagagt

SEQ ID NO: 33082 - DNA, 20 bp, synthetic construct
  misc_feature 1..20: note = chemically synthesized
  source 1..20: mol_type = other DNA
cagaactgattcttaatctt

SEQ ID NO: 33083 - DNA, 20 bp, synthetic construct
  misc_feature 1..20: note = chemically synthesized
  source 1..20: mol_type = other DNA
gaaggataaatagctaaagg

SEQ ID NO: 33084 - DNA, 20 bp, synthetic construct
  misc_feature 1..20: note = chemically synthesized
  source 1..20: mol_type = other DNA
ctcagaacattacaaactct

SEQ ID NO: 33085 - DNA, 20 bp, synthetic construct
  misc_feature 1..20: note = chemically synthesized
  source 1..20: mol_type = other DNA
acacataatgaaagttaatt

SEQ ID NO: 33086 - DNA, 20 bp, synthetic construct
  misc_feature 1..20: note = chemically synthesized
  source 1..20: mol_type = other DNA
tgcttccctcttaaaatgga

SEQ ID NO: 33087 - DNA, 20 bp, synthetic construct
  misc_feature 1..20: note = chemically synthesized
  source 1..20: mol_type = other DNA
catggtacaagtggcacagg

SEQ ID NO: 33088 - DNA, 20 bp, synthetic construct
  misc_feature 1..20: note = chemically synthesized
  source 1..20: mol_type = other DNA
caagtggcacagggaagaat

SEQ ID NO: 33089 - DNA, 20 bp, synthetic construct
  misc_feature 1..20: note = chemically synthesized
  source 1..20: mol_type = other DNA
ctagagtcaaagtggttatg

SEQ ID NO: 33090 - DNA, 20 bp, synthetic construct
  misc_feature 1..20: note = chemically synthesized
  source 1..20: mol_type = other DNA
ctcaaggagtttctaaacct

SEQ ID NO: 33091 - DNA, 20 bp, synthetic construct
  misc_feature 1..20: note = chemically synthesized
  source 1..20: mol_type = other DNA
cacttttcaaggctgaggtg

SEQ ID NO: 33092 - DNA, 20 bp, synthetic construct
  misc_feature 1..20: note = chemically synthesized
  source 1..20: mol_type = other DNA
catagggagaccctgtttct

SEQ ID NO: 33093 - DNA, 20 bp, synthetic construct
  misc_feature 1..20: note = chemically synthesized
  source 1..20: mol_type = other DNA
taataatgttgtgaaaatta

SEQ ID NO: 33094 - DNA, 20 bp, synthetic construct
  misc_feature 1..20: note = chemically synthesized
  source 1..20: mol_type = other DNA
ttgcatttttaaacacaaaa

SEQ ID NO: 33095 - DNA, 20 bp, synthetic construct
  misc_feature 1..20: note = chemically synthesized
  source 1..20: mol_type = other DNA
ctttgattttaactgaggat

SEQ ID NO: 33096 - DNA, 20 bp, synthetic construct
  misc_feature 1..20: note = chemically synthesized
  source 1..20: mol_type = other DNA
agagagagcgagagagaggc

SEQ ID NO: 33097 - DNA, 20 bp, synthetic construct
  misc_feature 1..20: note = chemically synthesized
  source 1..20: mol_type = other DNA
aagtattttcttttttaatg

SEQ ID NO: 33098 - DNA, 20 bp, synthetic construct
  misc_feature 1..20: note = chemically synthesized
  source 1..20: mol_type = other DNA
gctaaaatggtgttggaata

SEQ ID NO: 33099 - DNA, 20 bp, synthetic construct
  misc_feature 1..20: note = chemically synthesized
  source 1..20: mol_type = other DNA
tttggtgtgatgctggcttc

SEQ ID NO: 33100 - DNA, 20 bp, synthetic construct
  misc_feature 1..20: note = chemically synthesized
  source 1..20: mol_type = other DNA
gttccttctttatctgtctt

SEQ ID NO: 33101 - DNA, 20 bp, synthetic construct
  misc_feature 1..20: note = chemically synthesized
  source 1..20: mol_type = other DNA
aattcctctttgaatgtcta

SEQ ID NO: 33102 - DNA, 20 bp, synthetic construct
  misc_feature 1..20: note = chemically synthesized
  source 1..20: mol_type = other DNA
cctatcatatggtctacctt

SEQ ID NO: 33103 - DNA, 20 bp, synthetic construct
  misc_feature 1..20: note = chemically synthesized
  source 1..20: mol_type = other DNA
aaatttccacgcgctgttga

SEQ ID NO: 33104 - DNA, 20 bp, synthetic construct
  misc_feature 1..20: note = chemically synthesized
  source 1..20: mol_type = other DNA
taactcaactccaggtaagg

SEQ ID NO: 33105 - DNA, 20 bp, synthetic construct
  misc_feature 1..20: note = chemically synthesized
  source 1..20: mol_type = other DNA
gctattttgatagcggtcat

SEQ ID NO: 33106 - DNA, 20 bp, synthetic construct
  misc_feature 1..20: note = chemically synthesized
  source 1..20: mol_type = other DNA
agctagtttattattggtgt

SEQ ID NO: 33107 - DNA, 20 bp, synthetic construct
  misc_feature 1..20: note = chemically synthesized
  source 1..20: mol_type = other DNA
atcaggataatactggcctc

SEQ ID NO: 33108 - DNA, 20 bp, synthetic construct
  misc_feature 1..20: note = chemically synthesized
  source 1..20: mol_type = other DNA
ggcctcagagaatgagttag

SEQ ID NO: 33109 - DNA, 20 bp, synthetic construct
  misc_feature 1..20: note = chemically synthesized
  source 1..20: mol_type = other DNA
tccttcctgtttaattttta

SEQ ID NO: 33110 - DNA, 20 bp, synthetic construct
  misc_feature 1..20: note = chemically synthesized
  source 1..20: mol_type = other DNA
tcttggtaggtggtatgtgt

SEQ ID NO: 33111 - DNA, 20 bp, synthetic construct
  misc_feature 1..20: note = chemically synthesized
  source 1..20: mol_type = other DNA
tgatctatctgatgctgaga

SEQ ID NO: 33112 - DNA, 20 bp, synthetic construct
  misc_feature 1..20: note = chemically synthesized
  source 1..20: mol_type = other DNA
ctggtgttgagtgtgaatgt

SEQ ID NO: 33113 - DNA, 20 bp, synthetic construct
  misc_feature 1..20: note = chemically synthesized
  source 1..20: mol_type = other DNA
ttccttcaaatttttcttgc

SEQ ID NO: 33114 - DNA, 20 bp, synthetic construct
  misc_feature 1..20: note = chemically synthesized
  source 1..20: mol_type = other DNA
ctggcctgtgaggtttctgc

SEQ ID NO: 33115 - DNA, 20 bp, synthetic construct
  misc_feature 1..20: note = chemically synthesized
  source 1..20: mol_type = other DNA
tttcaataaactcttcagtt

SEQ ID NO: 33116 - DNA, 20 bp, synthetic construct
  misc_feature 1..20: note = chemically synthesized
  source 1..20: mol_type = other DNA
aacattttggattctttttt

SEQ ID NO: 33117 - DNA, 20 bp, synthetic construct
  misc_feature 1..20: note = chemically synthesized
  source 1..20: mol_type = other DNA
ttccactggcttatgttgct

SEQ ID NO: 33118 - DNA, 20 bp, synthetic construct
  misc_feature 1..20: note = chemically synthesized
  source 1..20: mol_type = other DNA
tgatgaggttgtgctggaga

SEQ ID NO: 33119 - DNA, 20 bp, synthetic construct
  misc_feature 1..20: note = chemically synthesized
  source 1..20: mol_type = other DNA
gagtgatcctcaggccccca

SEQ ID NO: 33120 - DNA, 20 bp, synthetic construct
  misc_feature 1..20: note = chemically synthesized
  source 1..20: mol_type = other DNA
tgtcacttctctgttgaatt

SEQ ID NO: 33121 - DNA, 20 bp, synthetic construct
  misc_feature 1..20: note = chemically synthesized
  source 1..20: mol_type = other DNA
aatcatttgtttcttcaaat

SEQ ID NO: 33122 - DNA, 20 bp, synthetic construct
  misc_feature 1..20: note = chemically synthesized
  source 1..20: mol_type = other DNA
catctaataaatgtgtacca

SEQ ID NO: 33123 - DNA, 20 bp, synthetic construct
  misc_feature 1..20: note = chemically synthesized
  source 1..20: mol_type = other DNA
ctcctggaaaagatgaagat

SEQ ID NO: 33124 - DNA, 20 bp, synthetic construct
  misc_feature 1..20: note = chemically synthesized
  source 1..20: mol_type = other DNA
gaaaataagtctacagaaga

SEQ ID NO: 33125 - DNA, 20 bp, synthetic construct
  misc_feature 1..20: note = chemically synthesized
  source 1..20: mol_type = other DNA
tttttgtggatagtggtttt

SEQ ID NO: 33126 - DNA, 20 bp, synthetic construct
  misc_feature 1..20: note = chemically synthesized
  source 1..20: mol_type = other DNA
agatgtgactcccacacttt

SEQ ID NO: 33127 - DNA, 20 bp, synthetic construct
  misc_feature 1..20: note = chemically synthesized
  source 1..20: mol_type = other DNA
ttgatggtttctaaaattgt

SEQ ID NO: 33128 - DNA, 20 bp, synthetic construct
  misc_feature 1..20: note = chemically synthesized
  source 1..20: mol_type = other DNA
agttactggaataatacatt

SEQ ID NO: 33129 - DNA, 20 bp, synthetic construct
  misc_feature 1..20: note = chemically synthesized
  source 1..20: mol_type = other DNA
aacttacaatcatggcagaa

SEQ ID NO: 33130 - DNA, 20 bp, synthetic construct
  misc_feature 1..20: note = chemically synthesized
  source 1..20: mol_type = other DNA
tagttctgtttctagttctt

SEQ ID NO: 33131 - DNA, 20 bp, synthetic construct
  misc_feature 1..20: note = chemically synthesized
  source 1..20: mol_type = other DNA
ggcaggaagcatccagcatg

SEQ ID NO: 33132 - DNA, 20 bp, synthetic construct
  misc_feature 1..20: note = chemically synthesized
  source 1..20: mol_type = other DNA
acccgtgaatcctgtctatg

SEQ ID NO: 33133 - DNA, 20 bp, synthetic construct
  misc_feature 1..20: note = chemically synthesized
  source 1..20: mol_type = other DNA
gaaaaggctgagtggtgtcc

SEQ ID NO: 33134 - DNA, 20 bp, synthetic construct
  misc_feature 1..20: note = chemically synthesized
  source 1..20: mol_type = other DNA
cgttgtccttcagggatgtc

SEQ ID NO: 33135 - DNA, 20 bp, synthetic construct
  misc_feature 1..20: note = chemically synthesized
  source 1..20: mol_type = other DNA
ccatcggtgcagtctcaggg

SEQ ID NO: 33136 - DNA, 20 bp, synthetic construct
  misc_feature 1..20: note = chemically synthesized
  source 1..20: mol_type = other DNA
ccactttatggctagatgga

SEQ ID NO: 33137 - DNA, 20 bp, synthetic construct
  misc_feature 1..20: note = chemically synthesized
  source 1..20: mol_type = other DNA
atcatattaagcagccaact

SEQ ID NO: 33138 - DNA, 20 bp, synthetic construct
  misc_feature 1..20: note = chemically synthesized
  source 1..20: mol_type = other DNA
aatctgtattagggttctac

SEQ ID NO: 33139 - DNA, 20 bp, synthetic construct
  misc_feature 1..20: note = chemically synthesized
  source 1..20: mol_type = other DNA
tattagggttctacagagaa

SEQ ID NO: 33140 - DNA, 20 bp, synthetic construct
  misc_feature 1..20: note = chemically synthesized
  source 1..20: mol_type = other DNA
agttcaatgttccagggcag

SEQ ID NO: 33141 - DNA, 20 bp, synthetic construct
  misc_feature 1..20: note = chemically synthesized
  source 1..20: mol_type = other DNA
ggcaggaagaatccagcatg

SEQ ID NO: 33142 - DNA, 20 bp, synthetic construct
  misc_feature 1..20: note = chemically synthesized
  source 1..20: mol_type = other DNA
ggtagcagcaatattagagg

SEQ ID NO: 33143 - DNA, 20 bp, synthetic construct
  misc_feature 1..20: note = chemically synthesized
  source 1..20: mol_type = other DNA
ggggctgcatgcactggtca

SEQ ID NO: 33144 - DNA, 20 bp, synthetic construct
  misc_feature 1..20: note = chemically synthesized
  source 1..20: mol_type = other DNA
tacttcttctttctttggag

SEQ ID NO: 33145 - DNA, 20 bp, synthetic construct
  misc_feature 1..20: note = chemically synthesized
  source 1..20: mol_type = other DNA
tctcctcccttactaggaag

SEQ ID NO: 33146 - DNA, 20 bp, synthetic construct
  misc_feature 1..20: note = chemically synthesized
  source 1..20: mol_type = other DNA
aggaagagagaaataccatg

SEQ ID NO: 33147 - DNA, 20 bp, synthetic construct
  misc_feature 1..20: note = chemically synthesized
  source 1..20: mol_type = other DNA
gaagggactttaaaacatgc

SEQ ID NO: 33148 - DNA, 20 bp, synthetic construct
  misc_feature 1..20: note = chemically synthesized
  source 1..20: mol_type = other DNA
aattgctaacctgaatgata

SEQ ID NO: 33149 - DNA, 20 bp, synthetic construct
  misc_feature 1..20: note = chemically synthesized
  source 1..20: mol_type = other DNA
cctccaaagaaagaagaagt

SEQ ID NO: 33150 - DNA, 20 bp, synthetic construct
  misc_feature 1..20: note = chemically synthesized
  source 1..20: mol_type = other DNA
aatattgctgctacctctat

SEQ ID NO: 33151 - DNA, 20 bp, synthetic construct
  misc_feature 1..20: note = chemically synthesized
  source 1..20: mol_type = other DNA
atccagcaagtccacatcta

SEQ ID NO: 33152 - DNA, 20 bp, synthetic construct
  misc_feature 1..20: note = chemically synthesized
  source 1..20: mol_type = other DNA
agaatttatgaccaagtcct

SEQ ID NO: 33153 - DNA, 20 bp, synthetic construct
  misc_feature 1..20: note = chemically synthesized
  source 1..20: mol_type = other DNA
tcctcaaaactaaacacaac

SEQ ID NO: 33154 - DNA, 20 bp, synthetic construct
  misc_feature 1..20: note = chemically synthesized
  source 1..20: mol_type = other DNA
aaactaaacacaacaaaaac

SEQ ID NO: 33155 - DNA, 20 bp, synthetic construct
  misc_feature 1..20: note = chemically synthesized
  source 1..20: mol_type = other DNA
tacaaggaactcaacaacaa

SEQ ID NO: 33156 - DNA, 20 bp, synthetic construct
  misc_feature 1..20: note = chemically synthesized
  source 1..20: mol_type = other DNA
atggacctctatgattagtc

SEQ ID NO: 33157 - DNA, 20 bp, synthetic construct
  misc_feature 1..20: note = chemically synthesized
  source 1..20: mol_type = other DNA
tatttcctccttcttttgtt

SEQ ID NO: 33158 - DNA, 20 bp, synthetic construct
  misc_feature 1..20: note = chemically synthesized
  source 1..20: mol_type = other DNA
ggatataaagcaggcagaaa

SEQ ID NO: 33159 - DNA, 20 bp, synthetic construct
  misc_feature 1..20: note = chemically synthesized
  source 1..20: mol_type = other DNA
aataatcagagaatgcaaat

SEQ ID NO: 33160 - DNA, 20 bp, synthetic construct
  misc_feature 1..20: note = chemically synthesized
  source 1..20: mol_type = other DNA
tggctatcattataaagttc

SEQ ID NO: 33161 - DNA, 20 bp, synthetic construct
  misc_feature 1..20: note = chemically synthesized
  source 1..20: mol_type = other DNA
taggagtatggtgaggactg

SEQ ID NO: 33162 - DNA, 20 bp, synthetic construct
  misc_feature 1..20: note = chemically synthesized
  source 1..20: mol_type = other DNA
catttttcactgctgtcttt

SEQ ID NO: 33163 - DNA, 20 bp, synthetic construct
  misc_feature 1..20: note = chemically synthesized
  source 1..20: mol_type = other DNA
aaatatatctaagctttctt

SEQ ID NO: 33164 - DNA, 20 bp, synthetic construct
  misc_feature 1..20: note = chemically synthesized
  source 1..20: mol_type = other DNA
tatttacattttttatcctt

SEQ ID NO: 33165 - DNA, 20 bp, synthetic construct
  misc_feature 1..20: note = chemically synthesized
  source 1..20: mol_type = other DNA
tgcatcttactcagagatct

SEQ ID NO: 33166 - DNA, 20 bp, synthetic construct
  misc_feature 1..20: note = chemically synthesized
  source 1..20: mol_type = other DNA
ttgggaaatgaaatgaaaag

SEQ ID NO: 33167 - DNA, 20 bp, synthetic construct
  misc_feature 1..20: note = chemically synthesized
  source 1..20: mol_type = other DNA
tctttcagtctattagaaat

SEQ ID NO: 33168 - DNA, 20 bp, synthetic construct
  misc_feature 1..20: note = chemically synthesized
  source 1..20: mol_type = other DNA
agaaaaaagtcttcccctac

SEQ ID NO: 33169 - DNA, 20 bp, synthetic construct
  misc_feature 1..20: note = chemically synthesized
  source 1..20: mol_type = other DNA
cccctacaaaaacaaattta

SEQ ID NO: 33170 - DNA, 20 bp, synthetic construct
  misc_feature 1..20: note = chemically synthesized
  source 1..20: mol_type = other DNA
aaacaataaaaagaaatcag

SEQ ID NO: 33171 - DNA, 20 bp, synthetic construct
  misc_feature 1..20: note = chemically synthesized
  source 1..20: mol_type = other DNA
aagaaatacaaaatacattc

SEQ ID NO: 33172 - DNA, 20 bp, synthetic construct
  misc_feature 1..20: note = chemically synthesized
  source 1..20: mol_type = other DNA
tacgtaacaacacaatagct

SEQ ID NO: 33173 - DNA, 20 bp, synthetic construct
  misc_feature 1..20: note = chemically synthesized
  source 1..20: mol_type = other DNA
aagccaaagagtaagaactc

SEQ ID NO: 33174 - DNA, 20 bp, synthetic construct
  misc_feature 1..20: note = chemically synthesized
  source 1..20: mol_type = other DNA
tatacaactaactggtagag

SEQ ID NO: 33175 - DNA, 20 bp, synthetic construct
  misc_feature 1..20: note = chemically synthesized
  source 1..20: mol_type = other DNA
gaaaaggaaggaaggaagaa

SEQ ID NO: 33176 - DNA, 20 bp, synthetic construct
  misc_feature 1..20: note = chemically synthesized
  source 1..20: mol_type = other DNA
aaggaaggaagaaaaaaaca

SEQ ID NO: 33177 - DNA, 20 bp, synthetic construct
  misc_feature 1..20: note = chemically synthesized
  source 1..20: mol_type = other DNA
caaaacaaacaaactaaaaa

SEQ ID NO: 33178 - DNA, 20 bp, synthetic construct
  misc_feature 1..20: note = chemically synthesized
  source 1..20: mol_type = other DNA
caaacaaactaaaaaaaaaa

SEQ ID NO: 33179 - DNA, 20 bp, synthetic construct
  misc_feature 1..20: note = chemically synthesized
  source 1..20: mol_type = other DNA
atagactggctaaatagatt

SEQ ID NO: 33180 - DNA, 20 bp, synthetic construct
  misc_feature 1..20: note = chemically synthesized
  source 1..20: mol_type = other DNA
gataaaattgactttaaata

SEQ ID NO: 33181 - DNA, 20 bp, synthetic construct
  misc_feature 1..20: note = chemically synthesized
  source 1..20: mol_type = other DNA
cttctcagaccacaatggaa

SEQ ID NO: 33182 - DNA, 20 bp, synthetic construct
  misc_feature 1..20: note = chemically synthesized
  source 1..20: mol_type = other DNA
aactagaaatcaataacaag

SEQ ID NO: 33183 - DNA, 20 bp, synthetic construct
  misc_feature 1..20: note = chemically synthesized
  source 1..20: mol_type = other DNA
atcaataacaagaaaaactt

SEQ ID NO: 33184 - DNA, 20 bp, synthetic construct
  misc_feature 1..20: note = chemically synthesized
  source 1..20: mol_type = other DNA
tatcaataaacacttaaatt

SEQ ID NO: 33185 - DNA, 20 bp, synthetic construct
  misc_feature 1..20: note = chemically synthesized
  source 1..20: mol_type = other DNA
acaagctagaaaagcaagaa

SEQ ID NO: 33186 - DNA, 20 bp, synthetic construct
  misc_feature 1..20: note = chemically synthesized
  source 1..20: mol_type = other DNA
agaaaagcaagaacaaaacc

SEQ ID NO: 33187 - DNA, 20 bp, synthetic construct
  misc_feature 1..20: note = chemically synthesized
  source 1..20: mol_type = other DNA
aagaacttaatgaaatagag

SEQ ID NO: 33188 - DNA, 20 bp, synthetic construct
  misc_feature 1..20: note = chemically synthesized
  source 1..20: mol_type = other DNA
ttatgaacaaccatacacta

SEQ ID NO: 33189 - DNA, 20 bp, synthetic construct
  misc_feature 1..20: note = chemically synthesized
  source 1..20: mol_type = other DNA
gattgaattaagaaagaata

SEQ ID NO: 33190 - DNA, 20 bp, synthetic construct
  misc_feature 1..20: note = chemically synthesized
  source 1..20: mol_type = other DNA
aattttaccaaactttcaaa

SEQ ID NO: 33191 - DNA, 20 bp, synthetic construct
  misc_feature 1..20: note = chemically synthesized
  source 1..20: mol_type = other DNA
gacaaggatgcaagtaaaaa

SEQ ID NO: 33192 - DNA, 20 bp, synthetic construct
  misc_feature 1..20: note = chemically synthesized
  source 1..20: mol_type = other DNA
atcacatcaacaaaaagaac

SEQ ID NO: 33193 - DNA, 20 bp, synthetic construct
  misc_feature 1..20: note = chemically synthesized
  source 1..20: mol_type = other DNA
atttaacattccttcatgat

SEQ ID NO: 33194 - DNA, 20 bp, synthetic construct
  misc_feature 1..20: note = chemically synthesized
  source 1..20: mol_type = other DNA
tgacatgattttatacctag

SEQ ID NO: 33195 - DNA, 20 bp, synthetic construct
  misc_feature 1..20: note = chemically synthesized
  source 1..20: mol_type = other DNA
taaatttaaccaaggaaccg

SEQ ID NO: 33196 - DNA, 20 bp, synthetic construct
  misc_feature 1..20: note = chemically synthesized
  source 1..20: mol_type = other DNA
aaccgaaaaacctctattcg

SEQ ID NO: 33197 - DNA, 20 bp, synthetic construct
  misc_feature 1..20: note = chemically synthesized
  source 1..20: mol_type = other DNA
aacctctattcggaaaacta

SEQ ID NO: 33198 - DNA, 20 bp, synthetic construct
  misc_feature 1..20: note = chemically synthesized
  source 1..20: mol_type = other DNA
gtcatttttcacagaaatgg

SEQ ID NO: 33199 - DNA, 20 bp, synthetic construct
  misc_feature 1..20: note = chemically synthesized
  source 1..20: mol_type = other DNA
gatatccatgtgcaaaagaa

SEQ ID NO: 33200 - DNA, 20 bp, synthetic construct
  misc_feature 1..20: note = chemically synthesized
  source 1..20: mol_type = other DNA
ggccaccaaaagtgagtagg

SEQ ID NO: 33201 - DNA, 20 bp, synthetic construct
  misc_feature 1..20: note = chemically synthesized
  source 1..20: mol_type = other DNA
ctatgaagccagcatcacac

SEQ ID NO: 33202 - DNA, 20 bp, synthetic construct
  misc_feature 1..20: note = chemically synthesized
  source 1..20: mol_type = other DNA
ggaaggacataaccaaaaaa

SEQ ID NO: 33203 - DNA, 20 bp, synthetic construct
  misc_feature 1..20: note = chemically synthesized
  source 1..20: mol_type = other DNA
tacaccacataaacagattt

SEQ ID NO: 33204 - DNA, 20 bp, synthetic construct
  misc_feature 1..20: note = chemically synthesized
  source 1..20: mol_type = other DNA
tcctagccagggcaatcaga

SEQ ID NO: 33205 - DNA, 20 bp, synthetic construct
  misc_feature 1..20: note = chemically synthesized
  source 1..20: mol_type = other DNA
atgatatgatcatttacctt

SEQ ID NO: 33206 - DNA, 20 bp, synthetic construct
  misc_feature 1..20: note = chemically synthesized
  source 1..20: mol_type = other DNA
aacccctatttattgccata

SEQ ID NO: 33207 - DNA, 20 bp, synthetic construct
  misc_feature 1..20: note = chemically synthesized
  source 1..20: mol_type = other DNA
atggattaaagacttaaata

SEQ ID NO: 33208 - DNA, 20 bp, synthetic construct
  misc_feature 1..20: note = chemically synthesized
  source 1..20: mol_type = other DNA
aaagacttaaatataaaact

SEQ ID NO: 33209 - DNA, 20 bp, synthetic construct
  misc_feature 1..20: note = chemically synthesized
  source 1..20: mol_type = other DNA
aaatataaaacttaaaacta

SEQ ID NO: 33210 - DNA, 20 bp, synthetic construct
  misc_feature 1..20: note = chemically synthesized
  source 1..20: mol_type = other DNA
aaactataaaactactaaaa

SEQ ID NO: 33211 - DNA, 20 bp, synthetic construct
  misc_feature 1..20: note = chemically synthesized
  source 1..20: mol_type = other DNA
ctcaaacaactcaacagtgg

SEQ ID NO: 33212 - DNA, 20 bp, synthetic construct
  misc_feature 1..20: note = chemically synthesized
  source 1..20: mol_type = other DNA
atcatcagagaaatgcaaat

SEQ ID NO: 33213 - DNA, 20 bp, synthetic construct
  misc_feature 1..20: note = chemically synthesized
  source 1..20: mol_type = other DNA
aaattagtatagccactatg

SEQ ID NO: 33214 - DNA, 20 bp, synthetic construct
  misc_feature 1..20: note = chemically synthesized
  source 1..20: mol_type = other DNA
aaagtagggtgattatagtt

SEQ ID NO: 33215 - DNA, 20 bp, synthetic construct
  misc_feature 1..20: note = chemically synthesized
  source 1..20: mol_type = other DNA
acatataacaatgaggtggt

SEQ ID NO: 33216 - DNA, 20 bp, synthetic construct
  misc_feature 1..20: note = chemically synthesized
  source 1..20: mol_type = other DNA
ctaatctcaccctcctgttc

SEQ ID NO: 33217 - DNA, 20 bp, synthetic construct
  misc_feature 1..20: note = chemically synthesized
  source 1..20: mol_type = other DNA
aggagaaaaagaggaagaac

SEQ ID NO: 33218 - DNA, 20 bp, synthetic construct
  misc_feature 1..20: note = chemically synthesized
  source 1..20: mol_type = other DNA
ctctagagaaaagccatttg

SEQ ID NO: 33219 - DNA, 20 bp, synthetic construct
  misc_feature 1..20: note = chemically synthesized
  source 1..20: mol_type = other DNA
ggaaaacttctgtgttaaca

SEQ ID NO: 33220 - DNA, 20 bp, synthetic construct
  misc_feature 1..20: note = chemically synthesized
  source 1..20: mol_type = other DNA
agcaatacgttggcttaggc

SEQ ID NO: 33221 - DNA, 20 bp, synthetic construct
  misc_feature 1..20: note = chemically synthesized
  source 1..20: mol_type = other DNA
atttttcccccacatttggg

SEQ ID NO: 33222 - DNA, 20 bp, synthetic construct
  misc_feature 1..20: note = chemically synthesized
  source 1..20: mol_type = other DNA
actggtaacagtgcttcttc

SEQ ID NO: 33223 - DNA, 20 bp, synthetic construct
  misc_feature 1..20: note = chemically synthesized
  source 1..20: mol_type = other DNA
cattgttcataccctggaga

SEQ ID NO: 33224 - DNA, 20 bp, synthetic construct
  misc_feature 1..20: note = chemically synthesized
  source 1..20: mol_type = other DNA
gaagtctgagaattagtacc

SEQ ID NO: 33225 - DNA, 20 bp, synthetic construct
  misc_feature 1..20: note = chemically synthesized
  source 1..20: mol_type = other DNA
atacatttccttgtttgcca

SEQ ID NO: 33226 - DNA, 20 bp, synthetic construct
  misc_feature 1..20: note = chemically synthesized
  source 1..20: mol_type = other DNA
atctataggacatttccttt

SEQ ID NO: 33227 - DNA, 20 bp, synthetic construct
  misc_feature 1..20: note = chemically synthesized
  source 1..20: mol_type = other DNA
cattgtggggacctctccac

SEQ ID NO: 33228 - DNA, 20 bp, synthetic construct
  misc_feature 1..20: note = chemically synthesized
  source 1..20: mol_type = other DNA
taaaggcagcttaggggttg

SEQ ID NO: 33229 - DNA, 20 bp, synthetic construct
  misc_feature 1..20: note = chemically synthesized
  source 1..20: mol_type = other DNA
gctcctgcccactctctaga

SEQ ID NO: 33230 - DNA, 20 bp, synthetic construct
  misc_feature 1..20: note = chemically synthesized
  source 1..20: mol_type = other DNA
caggaactttgggcatattt

SEQ ID NO: 33231 - DNA, 20 bp, synthetic construct
  misc_feature 1..20: note = chemically synthesized
  source 1..20: mol_type = other DNA
gtgactagaaaaaggacatt

SEQ ID NO: 33232 - DNA, 20 bp, synthetic construct
  misc_feature 1..20: note = chemically synthesized
  source 1..20: mol_type = other DNA
atcttgaggaactcagcctt

SEQ ID NO: 33233 - DNA, 20 bp, synthetic construct
  misc_feature 1..20: note = chemically synthesized
  source 1..20: mol_type = other DNA
cttttgagaagctcctgaat

SEQ ID NO: 33234 - DNA, 20 bp, synthetic construct
  misc_feature 1..20: note = chemically synthesized
  source 1..20: mol_type = other DNA
tattttgctgagaaaaattt

SEQ ID NO: 33235 - DNA, 20 bp, synthetic construct
  misc_feature 1..20: note = chemically synthesized
  source 1..20: mol_type = other DNA
aataaagaaaatcaaattga

SEQ ID NO: 33236 - DNA, 20 bp, synthetic construct
  misc_feature 1..20: note = chemically synthesized
  source 1..20: mol_type = other DNA
taaagacatctgtaaaatta

SEQ ID NO: 33237 - DNA, 20 bp, synthetic construct
  misc_feature 1..20: note = chemically synthesized
  source 1..20: mol_type = other DNA
ggacatagcttattggtgga

SEQ ID NO: 33238 - DNA, 20 bp, synthetic construct
  misc_feature 1..20: note = chemically synthesized
  source 1..20: mol_type = other DNA
attatgtaagaattaaatat

SEQ ID NO: 33239 - DNA, 20 bp, synthetic construct
  misc_feature 1..20: note = chemically synthesized
  source 1..20: mol_type = other DNA
ggaaatgtattcacatccaa

SEQ ID NO: 33240 - DNA, 20 bp, synthetic construct
  misc_feature 1..20: note = chemically synthesized
  source 1..20: mol_type = other DNA
ccatgaacaatggaaacgtg

SEQ ID NO: 33241 - DNA, 20 bp, synthetic construct
  misc_feature 1..20: note = chemically synthesized
  source 1..20: mol_type = other DNA
tagttacctagaggtttggg

SEQ ID NO: 33242 - DNA, 20 bp, synthetic construct
  misc_feature 1..20: note = chemically synthesized
  source 1..20: mol_type = other DNA
gtggcacagggaagaattca

SEQ ID NO: 33243 - DNA, 20 bp, synthetic construct
  misc_feature 1..20: note = chemically synthesized
  source 1..20: mol_type = other DNA
gtgaaacacacgatctatgt

SEQ ID NO: 33244 - DNA, 20 bp, synthetic construct
  misc_feature 1..20: note = chemically synthesized
  source 1..20: mol_type = other DNA
ttcaatgacctacgctgtgg

SEQ ID NO: 33245 - DNA, 20 bp, synthetic construct
  misc_feature 1..20: note = chemically synthesized
  source 1..20: mol_type = other DNA
tttcttttttaatgtcagaa

SEQ ID NO: 33246 - DNA, 20 bp, synthetic construct
  misc_feature 1..20: note = chemically synthesized
  source 1..20: mol_type = other DNA
aaatgtgctttataaatagt

SEQ ID NO: 33247 - DNA, 20 bp, synthetic construct
  misc_feature 1..20: note = chemically synthesized
  source 1..20: mol_type = other DNA
aagtgtgctatataaacagt

SEQ ID NO: 33248 - DNA, 20 bp, synthetic construct
  misc_feature 1..20: note = chemically synthesized
  source 1..20: mol_type = other DNA
tcaaggataaaaaatgtaaa

SEQ ID NO: 33249 - DNA, 20 bp, synthetic construct
  misc_feature 1..20: note = chemically synthesized
  source 1..20: mol_type = other DNA
aacttctttttgatacagta

SEQ ID NO: 33250 - DNA, 20 bp, synthetic construct
  misc_feature 1..20: note = chemically synthesized
  source 1..20: mol_type = other DNA
ttaagaaatatagtagctat

SEQ ID NO: 33251 - DNA, 20 bp, synthetic construct
  misc_feature 1..20: note = chemically synthesized
  source 1..20: mol_type = other DNA
gactgggtaatttataagga

SEQ ID NO: 33252 - DNA, 20 bp, synthetic construct
  misc_feature 1..20: note = chemically synthesized
  source 1..20: mol_type = other DNA
aaagggggaaaagccgctta

SEQ ID NO: 33253 - DNA, 20 bp, synthetic construct
  misc_feature 1..20: note = chemically synthesized
  source 1..20: mol_type = other DNA
cataattatgcctaacatac

SEQ ID NO: 33254 - DNA, 20 bp, synthetic construct
  misc_feature 1..20: note = chemically synthesized
  source 1..20: mol_type = other DNA
accttaattccaggacatgg

SEQ ID NO: 33255 - DNA, 20 bp, synthetic construct
  misc_feature 1..20: note = chemically synthesized
  source 1..20: mol_type = other DNA
cttctgttctggactccact

SEQ ID NO: 33256 - DNA, 20 bp, synthetic construct
  misc_feature 1..20: note = chemically synthesized
  source 1..20: mol_type = other DNA
gcagccaactccagaaaccc

SEQ ID NO: 33257 - DNA, 20 bp, synthetic construct
  misc_feature 1..20: note = chemically synthesized
  source 1..20: mol_type = other DNA
ctcacatgttcacaaggtcc

SEQ ID NO: 33258 - DNA, 20 bp, synthetic construct
  misc_feature 1..20: note = chemically synthesized
  source 1..20: mol_type = other DNA
gtagcaggacaagctgcata

SEQ ID NO: 33259 - DNA, 20 bp, synthetic construct
  misc_feature 1..20: note = chemically synthesized
  source 1..20: mol_type = other DNA
ttggaggcagaaattgggca

SEQ ID NO: 33260 - DNA, 20 bp, synthetic construct
  misc_feature 1..20: note = chemically synthesized
  source 1..20: mol_type = other DNA
taggagatttcttcataatt

SEQ ID NO: 33261 - DNA, 20 bp, synthetic construct
  misc_feature 1..20: note = chemically synthesized
  source 1..20: mol_type = other DNA
catgcacctagaagggactt

SEQ ID NO: 33262 - DNA, 20 bp, synthetic construct
  misc_feature 1..20: note = chemically synthesized
  source 1..20: mol_type = other DNA
actgtgattcagacaaaggc

SEQ ID NO: 33263 - DNA, 20 bp, synthetic construct
  misc_feature 1..20: note = chemically synthesized
  source 1..20: mol_type = other DNA
ttctctccccattcatctgc

SEQ ID NO: 33264 - DNA, 20 bp, synthetic construct
  misc_feature 1..20: note = chemically synthesized
  source 1..20: mol_type = other DNA
cctccaactgttaaaaggaa

SEQ ID NO: 33265 - DNA, 20 bp, synthetic construct
  misc_feature 1..20: note = chemically synthesized
  source 1..20: mol_type = other DNA
tattatcattcaggttagca

SEQ ID NO: 33266 - DNA, 20 bp, synthetic construct
  misc_feature 1..20: note = chemically synthesized
  source 1..20: mol_type = other DNA
taataagggatggaaatgag

SEQ ID NO: 33267 - DNA, 20 bp, synthetic construct
  misc_feature 1..20: note = chemically synthesized
  source 1..20: mol_type = other DNA
catttaggatccactaagcc

SEQ ID NO: 33268 - DNA, 20 bp, synthetic construct
  misc_feature 1..20: note = chemically synthesized
  source 1..20: mol_type = other DNA
aagggacaccaacgaatggt

SEQ ID NO: 33269 - DNA, 20 bp, synthetic construct
  misc_feature 1..20: note = chemically synthesized
  source 1..20: mol_type = other DNA
actgctttgttcaattctgt

SEQ ID NO: 33270 - DNA, 20 bp, synthetic construct
  misc_feature 1..20: note = chemically synthesized
  source 1..20: mol_type = other DNA
tatgttcaaataacagctgc

SEQ ID NO: 33271 - DNA, 20 bp, synthetic construct
  misc_feature 1..20: note = chemically synthesized
  source 1..20: mol_type = other DNA
agtaccttttgataaggaga

SEQ ID NO: 33272 - DNA, 20 bp, synthetic construct
  misc_feature 1..20: note = chemically synthesized
  source 1..20: mol_type = other DNA
tgcttatagatgttcataga

SEQ ID NO: 33273 - DNA, 20 bp, synthetic construct
  misc_feature 1..20: note = chemically synthesized
  source 1..20: mol_type = other DNA
agggaggagaccacccttca

SEQ ID NO: 33274 - DNA, 20 bp, synthetic construct
  misc_feature 1..20: note = chemically synthesized
  source 1..20: mol_type = other DNA
acctggccagttatgttatc

SEQ ID NO: 33275 - DNA, 20 bp, synthetic construct
  misc_feature 1..20: note = chemically synthesized
  source 1..20: mol_type = other DNA
ggacaggaattgctcactct

SEQ ID NO: 33276 - DNA, 20 bp, synthetic construct
  misc_feature 1..20: note = chemically synthesized
  source 1..20: mol_type = other DNA
cttctttaactcggtgtctg

SEQ ID NO: 33277 - DNA, 20 bp, synthetic construct
  misc_feature 1..20: note = chemically synthesized
  source 1..20: mol_type = other DNA
ggtgtctgaggggttttgta

SEQ ID NO: 33278 - DNA, 20 bp, synthetic construct
  misc_feature 1..20: note = chemically synthesized
  source 1..20: mol_type = other DNA
aattaaggagagtatgaaaa

SEQ ID NO: 33279 - DNA, 20 bp, synthetic construct
  misc_feature 1..20: note = chemically synthesized
  source 1..20: mol_type = other DNA
caaatgggggtaaaataata

SEQ ID NO: 33280 - DNA, 20 bp, synthetic construct
  misc_feature 1..20: note = chemically synthesized
  source 1..20: mol_type = other DNA
agggaaagacaggctctaaa

SEQ ID NO: 33281 - DNA, 20 bp, synthetic construct
  misc_feature 1..20: note = chemically synthesized
  source 1..20: mol_type = other DNA
aatgggacttaattaaacta

SEQ ID NO: 33282 - DNA, 20 bp, synthetic construct
  misc_feature 1..20: note = chemically synthesized
  source 1..20: mol_type = other DNA
atggttaatactgagtgtca

SEQ ID NO: 33283 - DNA, 20 bp, synthetic construct
  misc_feature 1..20: note = chemically synthesized
  source 1..20: mol_type = other DNA
gtctgtgagggtgttaccaa

SEQ ID NO: 33284 - DNA, 20 bp, synthetic construct
  misc_feature 1..20: note = chemically synthesized
  source 1..20: mol_type = other DNA
aggcagaaaaatgtgaaaag

SEQ ID NO: 33285 - DNA, 20 bp, synthetic construct
  misc_feature 1..20: note = chemically synthesized
  source 1..20: mol_type = other DNA
gaaaaatgtgaaaaggctag

SEQ ID NO: 33286 - DNA, 20 bp, synthetic construct
  misc_feature 1..20: note = chemically synthesized
  source 1..20: mol_type = other DNA
agcctacatttttctcccat

SEQ ID NO: 33287 - DNA, 20 bp, synthetic construct
  misc_feature 1..20: note = chemically synthesized
  source 1..20: mol_type = other DNA
gaacattgaactccaggttc

SEQ ID NO: 33288 - DNA, 20 bp, synthetic construct
  misc_feature 1..20: note = chemically synthesized
  source 1..20: mol_type = other DNA
tcttcagctttgggactccg

SEQ ID NO: 33289 - DNA, 20 bp, synthetic construct
  misc_feature 1..20: note = chemically synthesized
  source 1..20: mol_type = other DNA
tgttcctcagctggcagatg

SEQ ID NO: 33290 - DNA, 20 bp, synthetic construct
  misc_feature 1..20: note = chemically synthesized
  source 1..20: mol_type = other DNA
agatatatatctcctattaa

SEQ ID NO: 33291 - DNA, 20 bp, synthetic construct
  misc_feature 1..20: note = chemically synthesized
  source 1..20: mol_type = other DNA
gtttctctgtagaaccctaa

SEQ ID NO: 33292 - DNA, 20 bp, synthetic construct
  misc_feature 1..20: note = chemically synthesized
  source 1..20: mol_type = other DNA
attaaggatggagttctttc

SEQ ID NO: 33293 - DNA, 20 bp, synthetic construct
  misc_feature 1..20: note = chemically synthesized
  source 1..20: mol_type = other DNA
tggagttctttcattggttt

SEQ ID NO: 33294 - DNA, 20 bp, synthetic construct
  misc_feature 1..20: note = chemically synthesized
  source 1..20: mol_type = other DNA
gttttggggtttctggagtt

SEQ ID NO: 33295 - DNA, 20 bp, synthetic construct
  misc_feature 1..20: note = chemically synthesized
  source 1..20: mol_type = other DNA
tttctggagttggctgctta

SEQ ID NO: 33296 - DNA, 20 bp, synthetic construct
  misc_feature 1..20: note = chemically synthesized
  source 1..20: mol_type = other DNA
cactgataatccttggcatc

SEQ ID NO: 33297 - DNA, 20 bp, synthetic construct
  misc_feature 1..20: note = chemically synthesized
  source 1..20: mol_type = other DNA
aaaataaatgcatttgacac

SEQ ID NO: 33298 - DNA, 20 bp, synthetic construct
  misc_feature 1..20: note = chemically synthesized
  source 1..20: mol_type = other DNA
tgcatttgacactcttgatt

SEQ ID NO: 33299 - DNA, 20 bp, synthetic construct
  misc_feature 1..20: note = chemically synthesized
  source 1..20: mol_type = other DNA
ggaacatagtgaagttggtt

SEQ ID NO: 33300 - DNA, 20 bp, synthetic construct
  misc_feature 1..20: note = chemically synthesized
  source 1..20: mol_type = other DNA
actcaggagtatatcaactc

SEQ ID NO: 33301 - DNA, 20 bp, synthetic construct
  misc_feature 1..20: note = chemically synthesized
  source 1..20: mol_type = other DNA
gagcaagaagtagcaaacac

SEQ ID NO: 33302 - DNA, 20 bp, synthetic construct
  misc_feature 1..20: note = chemically synthesized
  source 1..20: mol_type = other DNA
ggacagaggatgggaaataa

SEQ ID NO: 33303 - DNA, 20 bp, synthetic construct
  misc_feature 1..20: note = chemically synthesized
  source 1..20: mol_type = other DNA
agtaaaatttataggggtcc

SEQ ID NO: 33304 - DNA, 20 bp, synthetic construct
  misc_feature 1..20: note = chemically synthesized
  source 1..20: mol_type = other DNA
cacaacgcctagtgggccta

SEQ ID NO: 33305 - DNA, 20 bp, synthetic construct
  misc_feature 1..20: note = chemically synthesized
  source 1..20: mol_type = other DNA
ggattttggaggcaacatat

SEQ ID NO: 33306 - DNA, 20 bp, synthetic construct
  misc_feature 1..20: note = chemically synthesized
  source 1..20: mol_type = other DNA
atcgagtgatccaaaaggct

SEQ ID NO: 33307 - DNA, 20 bp, synthetic construct
  misc_feature 1..20: note = chemically synthesized
  source 1..20: mol_type = other DNA
atatgacctagcagatccaa

SEQ ID NO: 33308 - DNA, 20 bp, synthetic construct
  misc_feature 1..20: note = chemically synthesized
  source 1..20: mol_type = other DNA
gtgtcagtgccagataggga

SEQ ID NO: 33309 - DNA, 20 bp, synthetic construct
  misc_feature 1..20: note = chemically synthesized
  source 1..20: mol_type = other DNA
ctgaatcacagcggaggcct

SEQ ID NO: 33310 - DNA, 20 bp, synthetic construct
  misc_feature 1..20: note = chemically synthesized
  source 1..20: mol_type = other DNA
agaaagctcttggcctgtta

SEQ ID NO: 33311 - DNA, 20 bp, synthetic construct
  misc_feature 1..20: note = chemically synthesized
  source 1..20: mol_type = other DNA
tgaactgcctatcatgaact

SEQ ID NO: 33312 - DNA, 20 bp, synthetic construct
  misc_feature 1..20: note = chemically synthesized
  source 1..20: mol_type = other DNA
agcaaatggaagtggtatat

SEQ ID NO: 33313 - DNA, 20 bp, synthetic construct
  misc_feature 1..20: note = chemically synthesized
  source 1..20: mol_type = other DNA
tggaagtggtatatatgcga

SEQ ID NO: 33314 - DNA, 20 bp, synthetic construct
  misc_feature 1..20: note = chemically synthesized
  source 1..20: mol_type = other DNA
catggtctccactcctgaca

SEQ ID NO: 33315 - DNA, 20 bp, synthetic construct
  misc_feature 1..20: note = chemically synthesized
  source 1..20: mol_type = other DNA
tttgcacagaaggagaaatg

SEQ ID NO: 33316 - DNA, 20 bp, synthetic construct
  misc_feature 1..20: note = chemically synthesized
  source 1..20: mol_type = other DNA
agaaggagaaatggccagat

SEQ ID NO: 33317 - DNA, 20 bp, synthetic construct
  misc_feature 1..20: note = chemically synthesized
  source 1..20: mol_type = other DNA
cttattcatgggctgtagcc

SEQ ID NO: 33318 - DNA, 20 bp, synthetic construct
  misc_feature 1..20: note = chemically synthesized
  source 1..20: mol_type = other DNA
agaggtatgtggatggacct

SEQ ID NO: 33319 - DNA, 20 bp, synthetic construct
  misc_feature 1..20: note = chemically synthesized
  source 1..20: mol_type = other DNA
caatgggtgacctcagcaga

SEQ ID NO: 33320 - DNA, 20 bp, synthetic construct
  misc_feature 1..20: note = chemically synthesized
  source 1..20: mol_type = other DNA
cacagttgcagggatggaag

SEQ ID NO: 33321 - DNA, 20 bp, synthetic construct
  misc_feature 1..20: note = chemically synthesized
  source 1..20: mol_type = other DNA
aaagctgacctggccacagc

SEQ ID NO: 33322 - DNA, 20 bp, synthetic construct
  misc_feature 1..20: note = chemically synthesized
  source 1..20: mol_type = other DNA
cagccagctacctggtggca

SEQ ID NO: 33323 - DNA, 20 bp, synthetic construct
  misc_feature 1..20: note = chemically synthesized
  source 1..20: mol_type = other DNA
tcttccatcatggaaagggc

SEQ ID NO: 33324 - DNA, 20 bp, synthetic construct
  misc_feature 1..20: note = chemically synthesized
  source 1..20: mol_type = other DNA
aatagacacttactctggat

SEQ ID NO: 33325 - DNA, 20 bp, synthetic construct
  misc_feature 1..20: note = chemically synthesized
  source 1..20: mol_type = other DNA
gggtttcccaatcctgaact

SEQ ID NO: 33326 - DNA, 20 bp, synthetic construct
  misc_feature 1..20: note = chemically synthesized
  source 1..20: mol_type = other DNA
tgtcatggtattccacacag

SEQ ID NO: 33327 - DNA, 20 bp, synthetic construct
  misc_feature 1..20: note = chemically synthesized
  source 1..20: mol_type = other DNA
catgatccctatcatcctga

SEQ ID NO: 33328 - DNA, 20 bp, synthetic construct
  misc_feature 1..20: note = chemically synthesized
  source 1..20: mol_type = other DNA
ttttgaatggccttttgaag

SEQ ID NO: 33329 - DNA, 20 bp, synthetic construct
  misc_feature 1..20: note = chemically synthesized
  source 1..20: mol_type = other DNA
aatcagtgtccaatatatgg

SEQ ID NO: 33330 - DNA, 20 bp, synthetic construct
  misc_feature 1..20: note = chemically synthesized
  source 1..20: mol_type = other DNA
tggtactgtttctcccatag

SEQ ID NO: 33331 - DNA, 20 bp, synthetic construct
  misc_feature 1..20: note = chemically synthesized
  source 1..20: mol_type = other DNA
tagtgttccactagcaaaat

SEQ ID NO: 33332 - DNA, 20 bp, synthetic construct
  misc_feature 1..20: note = chemically synthesized
  source 1..20: mol_type = other DNA
ttcccatggcattatgttct

SEQ ID NO: 33333 - DNA, 20 bp, synthetic construct
  misc_feature 1..20: note = chemically synthesized
  source 1..20: mol_type = other DNA
actgccgccaggtgacacaa

SEQ ID NO: 33334 - DNA, 20 bp, synthetic construct
  misc_feature 1..20: note = chemically synthesized
  source 1..20: mol_type = other DNA
tgattccattaaactgcaaa

SEQ ID NO: 33335 - DNA, 20 bp, synthetic construct
  misc_feature 1..20: note = chemically synthesized
  source 1..20: mol_type = other DNA
gagagttacagtgttggctg

SEQ ID NO: 33336 - DNA, 20 bp, synthetic construct
  misc_feature 1..20: note = chemically synthesized
  source 1..20: mol_type = other DNA
ggagatccattagggtgtct

SEQ ID NO: 33337 - DNA, 20 bp, synthetic construct
  misc_feature 1..20: note = chemically synthesized
  source 1..20: mol_type = other DNA
ttccaggcaggactacaaat

SEQ ID NO: 33338 - DNA, 20 bp, synthetic construct
  misc_feature 1..20: note = chemically synthesized
  source 1..20: mol_type = other DNA
aaaaaagacaagacctgctg

SEQ ID NO: 33339 - DNA, 20 bp, synthetic construct
  misc_feature 1..20: note = chemically synthesized
  source 1..20: mol_type = other DNA
tttttcctttatcatgtgac

SEQ ID NO: 33340 - DNA, 20 bp, synthetic construct
  misc_feature 1..20: note = chemically synthesized
  source 1..20: mol_type = other DNA
atatcagcatttaagtattg

SEQ ID NO: 33341 - DNA, 20 bp, synthetic construct
  misc_feature 1..20: note = chemically synthesized
  source 1..20: mol_type = other DNA
ttatgtaatagcatttgcaa

SEQ ID NO: 33342 - DNA, 20 bp, synthetic construct
  misc_feature 1..20: note = chemically synthesized
  source 1..20: mol_type = other DNA
gcattttcaattgcacgaag

SEQ ID NO: 33343 - DNA, 20 bp, synthetic construct
  misc_feature 1..20: note = chemically synthesized
  source 1..20: mol_type = other DNA
atggttaatactgagtgtca

SEQ ID NO: 33344 - DNA, 20 bp, synthetic construct
  misc_feature 1..20: note = chemically synthesized
  source 1..20: mol_type = other DNA
taatactgagtgtcaacttg

SEQ ID NO: 33345 - DNA, 20 bp, synthetic construct
  misc_feature 1..20: note = chemically synthesized
  source 1..20: mol_type = other DNA
gtctgtgagggtattgccaa

SEQ ID NO: 33346 - DNA, 20 bp, synthetic construct
  misc_feature 1..20: note = chemically synthesized
  source 1..20: mol_type = other DNA
aaaacatgtgaaaatcctgg

SEQ ID NO: 33347 - DNA, 20 bp, synthetic construct
  misc_feature 1..20: note = chemically synthesized
  source 1..20: mol_type = other DNA
ctacatctttctcccatgct

SEQ ID NO: 33348 - DNA, 20 bp, synthetic construct
  misc_feature 1..20: note = chemically synthesized
  source 1..20: mol_type = other DNA
aaacattggactccaagtcc

SEQ ID NO: 33349 - DNA, 20 bp, synthetic construct
  misc_feature 1..20: note = chemically synthesized
  source 1..20: mol_type = other DNA
ccttcagctttgggacttgg

SEQ ID NO: 33350 - DNA, 20 bp, synthetic construct
  misc_feature 1..20: note = chemically synthesized
  source 1..20: mol_type = other DNA
ttggactggcttccttgctc

SEQ ID NO: 33351 - DNA, 20 bp, synthetic construct
  misc_feature 1..20: note = chemically synthesized
  source 1..20: mol_type = other DNA
agatggcctattgtgggacc

SEQ ID NO: 33352 - DNA, 20 bp, synthetic construct
  misc_feature 1..20: note = chemically synthesized
  source 1..20: mol_type = other DNA
gtgaggatgtggagacaaga

SEQ ID NO: 33353 - DNA, 20 bp, synthetic construct
  misc_feature 1..20: note = chemically synthesized
  source 1..20: mol_type = other DNA
aaactttatggaagacagca

SEQ ID NO: 33354 - DNA, 20 bp, synthetic construct
  misc_feature 1..20: note = chemically synthesized
  source 1..20: mol_type = other DNA
caacctaaatgtctaccaat

SEQ ID NO: 33355 - DNA, 20 bp, synthetic construct
  misc_feature 1..20: note = chemically synthesized
  source 1..20: mol_type = other DNA
tatggtgaggactgaaaaac

SEQ ID NO: 33356 - DNA, 20 bp, synthetic construct
  misc_feature 1..20: note = chemically synthesized
  source 1..20: mol_type = other DNA
aacatacatatgtaaggaac

SEQ ID NO: 33357 - DNA, 20 bp, synthetic construct
  misc_feature 1..20: note = chemically synthesized
  source 1..20: mol_type = other DNA
aacccgagcttgtaccctga

SEQ ID NO: 33358 - DNA, 20 bp, synthetic construct
  misc_feature 1..20: note = chemically synthesized
  source 1..20: mol_type = other DNA
ataatcctcacgtgttgtgg

SEQ ID NO: 33359 - DNA, 20 bp, synthetic construct
  misc_feature 1..20: note = chemically synthesized
  source 1..20: mol_type = other DNA
agtgagttcttacaagatct

SEQ ID NO: 33360 - DNA, 20 bp, synthetic construct
  misc_feature 1..20: note = chemically synthesized
  source 1..20: mol_type = other DNA
caagatctgatggttttata

SEQ ID NO: 33361 - DNA, 20 bp, synthetic construct
  misc_feature 1..20: note = chemically synthesized
  source 1..20: mol_type = other DNA
ttataagcggcttttccccc

SEQ ID NO: 33362 - DNA, 20 bp, synthetic construct
  misc_feature 1..20: note = chemically synthesized
  source 1..20: mol_type = other DNA
ctgctgccatgtgaagaagg

SEQ ID NO: 33363 - DNA, 20 bp, synthetic construct
  misc_feature 1..20: note = chemically synthesized
  source 1..20: mol_type = other DNA
tgccatgtgaagaaggacat

SEQ ID NO: 33364 - DNA, 20 bp, synthetic construct
  misc_feature 1..20: note = chemically synthesized
  source 1..20: mol_type = other DNA
catgtttgtttcttcttctg

SEQ ID NO: 33365 - DNA, 20 bp, synthetic construct
  misc_feature 1..20: note = chemically synthesized
  source 1..20: mol_type = other DNA
tttcttcttctgccatgatt

SEQ ID NO: 33366 - DNA, 20 bp, synthetic construct
  misc_feature 1..20: note = chemically synthesized
  source 1..20: mol_type = other DNA
tgtggaactgtgagacaatt

SEQ ID NO: 33367 - DNA, 20 bp, synthetic construct
  misc_feature 1..20: note = chemically synthesized
  source 1..20: mol_type = other DNA
aaaaatataaaataaattag

SEQ ID NO: 33368 - DNA, 20 bp, synthetic construct
  misc_feature 1..20: note = chemically synthesized
  source 1..20: mol_type = other DNA
gagtgtgcaaggaaagagta

SEQ ID NO: 33369 - DNA, 20 bp, synthetic construct
  misc_feature 1..20: note = chemically synthesized
  source 1..20: mol_type = other DNA
gtgagaatacacaaataatc

SEQ ID NO: 33370 - DNA, 20 bp, synthetic construct
  misc_feature 1..20: note = chemically synthesized
  source 1..20: mol_type = other DNA
atattccatttcatcagact

SEQ ID NO: 33371 - DNA, 20 bp, synthetic construct
  misc_feature 1..20: note = chemically synthesized
  source 1..20: mol_type = other DNA
gatgctattatatggtacca

SEQ ID NO: 33372 - DNA, 20 bp, synthetic construct
  misc_feature 1..20: note = chemically synthesized
  source 1..20: mol_type = other DNA
taagaatttcatctttaagg

SEQ ID NO: 33373 - DNA, 20 bp, synthetic construct
  misc_feature 1..20: note = chemically synthesized
  source 1..20: mol_type = other DNA
agttttttactgtatcaaaa

SEQ ID NO: 33374 - DNA, 20 bp, synthetic construct
  misc_feature 1..20: note = chemically synthesized
  source 1..20: mol_type = other DNA
tctagactggacaagaacag

SEQ ID NO: 33375 - DNA, 20 bp, synthetic construct
  misc_feature 1..20: note = chemically synthesized
  source 1..20: mol_type = other DNA
agcaacatatttaaatatat

SEQ ID NO: 33376 - DNA, 20 bp, synthetic construct
  misc_feature 1..20: note = chemically synthesized
  source 1..20: mol_type = other DNA
cttttccaggagaatatacc

SEQ ID NO: 33377 - DNA, 20 bp, synthetic construct
  misc_feature 1..20: note = chemically synthesized
  source 1..20: mol_type = other DNA
tctgatggtacacatttatt

SEQ ID NO: 33378 - DNA, 20 bp, synthetic construct
  misc_feature 1..20: note = chemically synthesized
  source 1..20: mol_type = other DNA
actcagagatcttaaaacat

SEQ ID NO: 33379 - DNA, 20 bp, synthetic construct
  misc_feature 1..20: note = chemically synthesized
  source 1..20: mol_type = other DNA
atcttaaaacatccttgttt

SEQ ID NO: 33380 - DNA, 20 bp, synthetic construct
  misc_feature 1..20: note = chemically synthesized
  source 1..20: mol_type = other DNA
tgaagaacataagggggaaa

SEQ ID NO: 33381 - DNA, 20 bp, synthetic construct
  misc_feature 1..20: note = chemically synthesized
  source 1..20: mol_type = other DNA
gattctttatttgaagaaac

SEQ ID NO: 33382 - DNA, 20 bp, synthetic construct
  misc_feature 1..20: note = chemically synthesized
  source 1..20: mol_type = other DNA
tttatttgaagaaacaaatg

SEQ ID NO: 33383 - DNA, 20 bp, synthetic construct
  misc_feature 1..20: note = chemically synthesized
  source 1..20: mol_type = other DNA
tagtcccccatatagcctta

SEQ ID NO: 33384 - DNA, 20 bp, synthetic construct
  misc_feature 1..20: note = chemically synthesized
  source 1..20: mol_type = other DNA
atagccttagagtgtttaaa

SEQ ID NO: 33385 - DNA, 20 bp, synthetic construct
  misc_feature 1..20: note = chemically synthesized
  source 1..20: mol_type = other DNA
gtctattagaaataaaaaca

SEQ ID NO: 33386 - DNA, 20 bp, synthetic construct
  misc_feature 1..20: note = chemically synthesized
  source 1..20: mol_type = other DNA
gcttaaaaaatttcaaggga

SEQ ID NO: 33387 - DNA, 20 bp, synthetic construct
  misc_feature 1..20: note = chemically synthesized
  source 1..20: mol_type = other DNA
aaatttcaagggaaggggct

SEQ ID NO: 33388 - DNA, 20 bp, synthetic construct
  misc_feature 1..20: note = chemically synthesized
  source 1..20: mol_type = other DNA
ctgaggtcaggaacacccag

SEQ ID NO: 33389 - DNA, 20 bp, synthetic construct
  misc_feature 1..20: note = chemically synthesized
  source 1..20: mol_type = other DNA
ccaccaccaacaccagtgca

SEQ ID NO: 33390 - DNA, 20 bp, synthetic construct
  misc_feature 1..20: note = chemically synthesized
  source 1..20: mol_type = other DNA
aaacagaaattctgtaactg

SEQ ID NO: 33391 - DNA, 20 bp, synthetic construct
  misc_feature 1..20: note = chemically synthesized
  source 1..20: mol_type = other DNA
agtgaacaaatattcaaatt

SEQ ID NO: 33392 - DNA, 20 bp, synthetic construct
  misc_feature 1..20: note = chemically synthesized
  source 1..20: mol_type = other DNA
tcacttataagggaacttcc

SEQ ID NO: 33393 - DNA, 20 bp, synthetic construct
  misc_feature 1..20: note = chemically synthesized
  source 1..20: mol_type = other DNA
aagggaacttccacaagatt

SEQ ID NO: 33394 - DNA, 20 bp, synthetic construct
  misc_feature 1..20: note = chemically synthesized
  source 1..20: mol_type = other DNA
cacaagattaacagattaac

SEQ ID NO: 33395 - DNA, 20 bp, synthetic construct
  misc_feature 1..20: note = chemically synthesized
  source 1..20: mol_type = other DNA
aaggaattcactatcactag

SEQ ID NO: 33396 - DNA, 20 bp, synthetic construct
  misc_feature 1..20: note = chemically synthesized
  source 1..20: mol_type = other DNA
caataatagccttgcatgta

SEQ ID NO: 33397 - DNA, 20 bp, synthetic construct
  misc_feature 1..20: note = chemically synthesized
  source 1..20: mol_type = other DNA
tgaaagatatagactggcta

SEQ ID NO: 33398 - DNA, 20 bp, synthetic construct
  misc_feature 1..20: note = chemically synthesized
  source 1..20: mol_type = other DNA
gaatccaatacaataatagt

SEQ ID NO: 33399 - DNA, 20 bp, synthetic construct
  misc_feature 1..20: note = chemically synthesized
  source 1..20: mol_type = other DNA
cagaaaattaacaaagaaac

SEQ ID NO: 33400 - DNA, 20 bp, synthetic construct
  misc_feature 1..20: note = chemically synthesized
  source 1..20: mol_type = other DNA
agcaaaagcagtgctaagag

SEQ ID NO: 33401 - DNA, 20 bp, synthetic construct
  misc_feature 1..20: note = chemically synthesized
  source 1..20: mol_type = other DNA
acacttaaattaaaaacata

SEQ ID NO: 33402 - DNA, 20 bp, synthetic construct
  misc_feature 1..20: note = chemically synthesized
  source 1..20: mol_type = other DNA
aaatagagaaaaacaacaac

SEQ ID NO: 33403 - DNA, 20 bp, synthetic construct
  misc_feature 1..20: note = chemically synthesized
  source 1..20: mol_type = other DNA
aaccgataccacagaaatag

SEQ ID NO: 33404 - DNA, 20 bp, synthetic construct
  misc_feature 1..20: note = chemically synthesized
  source 1..20: mol_type = other DNA
ttctggacacataccaccta

SEQ ID NO: 33405 - DNA, 20 bp, synthetic construct
  misc_feature 1..20: note = chemically synthesized
  source 1..20: mol_type = other DNA
aaaagaaaatttcaagacca

SEQ ID NO: 33406 - DNA, 20 bp, synthetic construct
  misc_feature 1..20: note = chemically synthesized
  source 1..20: mol_type = other DNA
attctctgaggccagtatta

SEQ ID NO: 33407 - DNA, 20 bp, synthetic construct
  misc_feature 1..20: note = chemically synthesized
  source 1..20: mol_type = other DNA
agataatacaccatgatcaa

SEQ ID NO: 33408 - DNA, 20 bp, synthetic construct
  misc_feature 1..20: note = chemically synthesized
  source 1..20: mol_type = other DNA
ataatactggaagtcctagc

SEQ ID NO: 33409 - DNA, 20 bp, synthetic construct
  misc_feature 1..20: note = chemically synthesized
  source 1..20: mol_type = other DNA
actgtccatctttccagatg

SEQ ID NO: 33410 - DNA, 20 bp, synthetic construct
  misc_feature 1..20: note = chemically synthesized
  source 1..20: mol_type = other DNA
aaatcagcatatgaaacaag

SEQ ID NO: 33411 - DNA, 20 bp, synthetic construct
  misc_feature 1..20: note = chemically synthesized
  source 1..20: mol_type = other DNA
ccatactacccaaagcaatc

SEQ ID NO: 33412 - DNA, 20 bp, synthetic construct
  misc_feature 1..20: note = chemically synthesized
  source 1..20: mol_type = other DNA
aatgctagaggtatcatact

SEQ ID NO: 33413 - DNA, 20 bp, synthetic construct
  misc_feature 1..20: note = chemically synthesized
  source 1..20: mol_type = other DNA
gcatccacatatttatagcc

SEQ ID NO: 33414 - DNA, 20 bp, synthetic construct
  misc_feature 1..20: note = chemically synthesized
  source 1..20: mol_type = other DNA
gaataaaactggactgctga

SEQ ID NO: 33415 - DNA, 20 bp, synthetic construct
  misc_feature 1..20: note = chemically synthesized
  source 1..20: mol_type = other DNA
ctggactgctgatatggttt

SEQ ID NO: 33416 - DNA, 20 bp, synthetic construct
  misc_feature 1..20: note = chemically synthesized
  source 1..20: mol_type = other DNA
cttggcggatgggaggtagg

SEQ ID NO: 33417 - DNA, 20 bp, synthetic construct
  misc_feature 1..20: note = chemically synthesized
  source 1..20: mol_type = other DNA
cccacagaccctctgaagga

SEQ ID NO: 33418 - DNA, 20 bp, synthetic construct
  misc_feature 1..20: note = chemically synthesized
  source 1..20: mol_type = other DNA
tcccactggagaaactgaag

SEQ ID NO: 33419 - DNA, 20 bp, synthetic construct
  misc_feature 1..20: note = chemically synthesized
  source 1..20: mol_type = other DNA
actgaaggtctgtttgtggg

SEQ ID NO: 33420 - DNA, 20 bp, synthetic construct
  misc_feature 1..20: note = chemically synthesized
  source 1..20: mol_type = other DNA
cagaaagtcaacaaaaaaat

SEQ ID NO: 33421 - DNA, 20 bp, synthetic construct
  misc_feature 1..20: note = chemically synthesized
  source 1..20: mol_type = other DNA
taacagaccaataacaagca

SEQ ID NO: 33422 - DNA, 20 bp, synthetic construct
  misc_feature 1..20: note = chemically synthesized
  source 1..20: mol_type = other DNA
caaaaaaaagttcaggacca

SEQ ID NO: 33423 - DNA, 20 bp, synthetic construct
  misc_feature 1..20: note = chemically synthesized
  source 1..20: mol_type = other DNA
ttccatgccagggatgcagg

SEQ ID NO: 33424 - DNA, 20 bp, synthetic construct
  misc_feature 1..20: note = chemically synthesized
  source 1..20: mol_type = other DNA
taagtgtgatacaccacata

SEQ ID NO: 33425 - DNA, 20 bp, synthetic construct
  misc_feature 1..20: note = chemically synthesized
  source 1..20: mol_type = other DNA
caacaaaatccagcatacat

SEQ ID NO: 33426 - DNA, 20 bp, synthetic construct
  misc_feature 1..20: note = chemically synthesized
  source 1..20: mol_type = other DNA
taaagaggaagtcaaactgt

SEQ ID NO: 33427 - DNA, 20 bp, synthetic construct
  misc_feature 1..20: note = chemically synthesized
  source 1..20: mol_type = other DNA
gaactgataaaataattcag

SEQ ID NO: 33428 - DNA, 20 bp, synthetic construct
  misc_feature 1..20: note = chemically synthesized
  source 1..20: mol_type = other DNA
catataaaacgtactctcaa

SEQ ID NO: 33429 - DNA, 20 bp, synthetic construct
  misc_feature 1..20: note = chemically synthesized
  source 1..20: mol_type = other DNA
ataagggagacacttcaaga

SEQ ID NO: 33430 - DNA, 20 bp, synthetic construct
  misc_feature 1..20: note = chemically synthesized
  source 1..20: mol_type = other DNA
cttcaagacatggctttggg

SEQ ID NO: 33431 - DNA, 20 bp, synthetic construct
  misc_feature 1..20: note = chemically synthesized
  source 1..20: mol_type = other DNA
tcttatgccagttagaatca

SEQ ID NO: 33432 - DNA, 20 bp, synthetic construct
  misc_feature 1..20: note = chemically synthesized
  source 1..20: mol_type = other DNA
agccactatggaaaacaata

SEQ ID NO: 33433 - DNA, 20 bp, synthetic construct
  misc_feature 1..20: note = chemically synthesized
  source 1..20: mol_type = other DNA
ataaacagatactggtacca

SEQ ID NO: 33434 - DNA, 20 bp, synthetic construct
  misc_feature 1..20: note = chemically synthesized
  source 1..20: mol_type = other DNA
gtaccacactgtttattgca

SEQ ID NO: 33435 - DNA, 20 bp, synthetic construct
  misc_feature 1..20: note = chemically synthesized
  source 1..20: mol_type = other DNA
tgatgttcaatagcaaagta

SEQ ID NO: 33436 - DNA, 20 bp, synthetic construct
  misc_feature 1..20: note = chemically synthesized
  source 1..20: mol_type = other DNA
tcgatctcatattggttgag

SEQ ID NO: 33437 - DNA, 20 bp, synthetic construct
  misc_feature 1..20: note = chemically synthesized
  source 1..20: mol_type = other DNA
ccctgtactgtcttgctgtg

SEQ ID NO: 33438 - DNA, 20 bp, synthetic construct
  misc_feature 1..20: note = chemically synthesized
  source 1..20: mol_type = other DNA
tgtcctccccatatttttac

SEQ ID NO: 33439 - DNA, 20 bp, synthetic construct
  misc_feature 1..20: note = chemically synthesized
  source 1..20: mol_type = other DNA
catatttttacctcggtttt

SEQ ID NO: 33440 - DNA, 20 bp, synthetic construct
  misc_feature 1..20: note = chemically synthesized
  source 1..20: mol_type = other DNA
ttatatagcacactttgtgc

SEQ ID NO: 33441 - DNA, 20 bp, synthetic construct
  misc_feature 1..20: note = chemically synthesized
  source 1..20: mol_type = other DNA
cactttgtgctatagtttac

SEQ ID NO: 33442 - DNA, 20 bp, synthetic construct
  misc_feature 1..20: note = chemically synthesized
  source 1..20: mol_type = other DNA
catatttgaggtataaacca

SEQ ID NO: 33443 - DNA, 20 bp, synthetic construct
  misc_feature 1..20: note = chemically synthesized
  source 1..20: mol_type = other DNA
tatttttaaatctgcaaata

SEQ ID NO: 33444 - DNA, 20 bp, synthetic construct
  misc_feature 1..20: note = chemically synthesized
  source 1..20: mol_type = other DNA
acttaatatcattaatgaat

SEQ ID NO: 33445 - DNA, 20 bp, synthetic construct
  misc_feature 1..20: note = chemically synthesized
  source 1..20: mol_type = other DNA
ttcctggaacaacatggggg

SEQ ID NO: 33446 - DNA, 20 bp, synthetic construct
  misc_feature 1..20: note = chemically synthesized
  source 1..20: mol_type = other DNA
gagaaatttcactattttgt

SEQ ID NO: 33447 - DNA, 20 bp, synthetic construct
  misc_feature 1..20: note = chemically synthesized
  source 1..20: mol_type = other DNA
aggcagcaggtctggtagga

SEQ ID NO: 33448 - DNA, 20 bp, synthetic construct
  misc_feature 1..20: note = chemically synthesized
  source 1..20: mol_type = other DNA
tgaaaaggaagtgagtagac

SEQ ID NO: 33449 - DNA, 20 bp, synthetic construct
  misc_feature 1..20: note = chemically synthesized
  source 1..20: mol_type = other DNA
cttgaagctgtgcaaccaag

SEQ ID NO: 33450 - DNA, 20 bp, synthetic construct
  misc_feature 1..20: note = chemically synthesized
  source 1..20: mol_type = other DNA
gcatagtttttacatagatc

SEQ ID NO: 33451 - DNA, 20 bp, synthetic construct
  misc_feature 1..20: note = chemically synthesized
  source 1..20: mol_type = other DNA
tgtgtttcacatggtgtgat

SEQ ID NO: 33452 - DNA, 20 bp, synthetic construct
  misc_feature 1..20: note = chemically synthesized
  source 1..20: mol_type = other DNA
agatgccattgacatggccc

SEQ ID NO: 33453 - DNA, 20 bp, synthetic construct
  misc_feature 1..20: note = chemically synthesized
  source 1..20: mol_type = other DNA
aatcctaattactatgcatc

SEQ ID NO: 33454 - DNA, 20 bp, synthetic construct
  misc_feature 1..20: note = chemically synthesized
  source 1..20: mol_type = other DNA
ttttcctattatttctcttt

SEQ ID NO: 33455 - DNA, 20 bp, synthetic construct
  misc_feature 1..20: note = chemically synthesized
  source 1..20: mol_type = other DNA
gaaataagctaatacctaca

SEQ ID NO: 33456 - DNA, 20 bp, synthetic construct
  misc_feature 1..20: note = chemically synthesized
  source 1..20: mol_type = other DNA
taaatgctaggcacagttct

SEQ ID NO: 33457 - DNA, 20 bp, synthetic construct
  misc_feature 1..20: note = chemically synthesized
  source 1..20: mol_type = other DNA
attttcacaacattattaca

SEQ ID NO: 33458 - DNA, 20 bp, synthetic construct
  misc_feature 1..20: note = chemically synthesized
  source 1..20: mol_type = other DNA
agcaacaaattgatggatct

SEQ ID NO: 33459 - DNA, 20 bp, synthetic construct
  misc_feature 1..20: note = chemically synthesized
  source 1..20: mol_type = other DNA
aaattgatggatctttttgc

SEQ ID NO: 33460 - DNA, 20 bp, synthetic construct
  misc_feature 1..20: note = chemically synthesized
  source 1..20: mol_type = other DNA
tgatggatctttttgctttt

SEQ ID NO: 33461 - DNA, 20 bp, synthetic construct
  misc_feature 1..20: note = chemically synthesized
  source 1..20: mol_type = other DNA
ggatctttttgcttttgctt

SEQ ID NO: 33462 - DNA, 20 bp, synthetic construct
  misc_feature 1..20: note = chemically synthesized
  source 1..20: mol_type = other DNA
actgaagcctcactagaacg

SEQ ID NO: 33463 - DNA, 20 bp, synthetic construct
  misc_feature 1..20: note = chemically synthesized
  source 1..20: mol_type = other DNA
cgcctggattcaattgatcc

SEQ ID NO: 33464 - DNA, 20 bp, synthetic construct
  misc_feature 1..20: note = chemically synthesized
  source 1..20: mol_type = other DNA
cacctcagccttgaaaagtg

SEQ ID NO: 33465 - DNA, 20 bp, synthetic construct
  misc_feature 1..20: note = chemically synthesized
  source 1..20: mol_type = other DNA
aatttttagatataatttct

SEQ ID NO: 33466 - DNA, 20 bp, synthetic construct
  misc_feature 1..20: note = chemically synthesized
  source 1..20: mol_type = other DNA
tcttccataaccactttgac

SEQ ID NO: 33467 - DNA, 20 bp, synthetic construct
  misc_feature 1..20: note = chemically synthesized
  source 1..20: mol_type = other DNA
taaattatgtccagcaatac

SEQ ID NO: 33468 - DNA, 20 bp, synthetic construct
  misc_feature 1..20: note = chemically synthesized
  source 1..20: mol_type = other DNA
cgttggcttaggcaaaaaca

SEQ ID NO: 33469 - DNA, 20 bp, synthetic construct
  misc_feature 1..20: note = chemically synthesized
  source 1..20: mol_type = other DNA
ccttaacatgttaatttctc

SEQ ID NO: 33470 - DNA, 20 bp, synthetic construct
  misc_feature 1..20: note = chemically synthesized
  source 1..20: mol_type = other DNA
tgagcaagtgtgtgcagaag

SEQ ID NO: 33471 - DNA, 20 bp, synthetic construct
  misc_feature 1..20: note = chemically synthesized
  source 1..20: mol_type = other DNA
tcctctccctcaactggtaa

SEQ ID NO: 33472 - DNA, 20 bp, synthetic construct
  misc_feature 1..20: note = chemically synthesized
  source 1..20: mol_type = other DNA
cttaaggctattaactcccc

SEQ ID NO: 33473 - DNA, 20 bp, synthetic construct
  misc_feature 1..20: note = chemically synthesized
  source 1..20: mol_type = other DNA
atatatagttctctcacata

SEQ ID NO: 33474 - DNA, 20 bp, synthetic construct
  misc_feature 1..20: note = chemically synthesized
  source 1..20: mol_type = other DNA
ctcaaacatctcatcattag

SEQ ID NO: 33475 - DNA, 20 bp, synthetic construct
  misc_feature 1..20: note = chemically synthesized
  source 1..20: mol_type = other DNA
tctacaaatttgtcaattct

SEQ ID NO: 33476 - DNA, 20 bp, synthetic construct
  misc_feature 1..20: note = chemically synthesized
  source 1..20: mol_type = other DNA
gaatccttactgaataataa

SEQ ID NO: 33477 - DNA, 20 bp, synthetic construct
  misc_feature 1..20: note = chemically synthesized
  source 1..20: mol_type = other DNA
aactgtgactctctcatctg

SEQ ID NO: 33478 - DNA, 20 bp, synthetic construct
  misc_feature 1..20: note = chemically synthesized
  source 1..20: mol_type = other DNA
tctctcatctgttatgtttt

SEQ ID NO: 33479 - DNA, 20 bp, synthetic construct
  misc_feature 1..20: note = chemically synthesized
  source 1..20: mol_type = other DNA
atgggcaaaattctggcagc

SEQ ID NO: 33480 - DNA, 20 bp, synthetic construct
  misc_feature 1..20: note = chemically synthesized
  source 1..20: mol_type = other DNA
gattcttctcctaagaaacc

SEQ ID NO: 33481 - DNA, 20 bp, synthetic construct
  misc_feature 1..20: note = chemically synthesized
  source 1..20: mol_type = other DNA
tcttggatgtgaatacattt

SEQ ID NO: 33482 - DNA, 20 bp, synthetic construct
  misc_feature 1..20: note = chemically synthesized
  source 1..20: mol_type = other DNA
tattcatgaagaaactgtta

SEQ ID NO: 33483 - DNA, 20 bp, synthetic construct
  misc_feature 1..20: note = chemically synthesized
  source 1..20: mol_type = other DNA
gtttaaggggttctttttca

SEQ ID NO: 33484 - DNA, 20 bp, synthetic construct
  misc_feature 1..20: note = chemically synthesized
  source 1..20: mol_type = other DNA
aggacatttcctttgaaaac

SEQ ID NO: 33485 - DNA, 20 bp, synthetic construct
  misc_feature 1..20: note = chemically synthesized
  source 1..20: mol_type = other DNA
atcctggtcctaactctgcc

SEQ ID NO: 33486 - DNA, 20 bp, synthetic construct
  misc_feature 1..20: note = chemically synthesized
  source 1..20: mol_type = other DNA
ttgctctatgaactggagga

SEQ ID NO: 33487 - DNA, 20 bp, synthetic construct
  misc_feature 1..20: note = chemically synthesized
  source 1..20: mol_type = other DNA
gatagaaaataagtattaaa

SEQ ID NO: 33488 - DNA, 20 bp, synthetic construct
  misc_feature 1..20: note = chemically synthesized
  source 1..20: mol_type = other DNA
cctgagatcaacacacatgc

SEQ ID NO: 33489 - DNA, 20 bp, synthetic construct
  misc_feature 1..20: note = chemically synthesized
  source 1..20: mol_type = other DNA
ttataagatccataaaataa

SEQ ID NO: 33490 - DNA, 20 bp, synthetic construct
  misc_feature 1..20: note = chemically synthesized
  source 1..20: mol_type = other DNA
cccaggtaacagtgctccat

SEQ ID NO: 33491 - DNA, 20 bp, synthetic construct
  misc_feature 1..20: note = chemically synthesized
  source 1..20: mol_type = other DNA
acttgtgcagagatcttctg

SEQ ID NO: 33492 - DNA, 20 bp, synthetic construct
  misc_feature 1..20: note = chemically synthesized
  source 1..20: mol_type = other DNA
cccagtgctaacaagtccct

SEQ ID NO: 33493 - DNA, 20 bp, synthetic construct
  misc_feature 1..20: note = chemically synthesized
  source 1..20: mol_type = other DNA
cttttatttcaaggcatact

SEQ ID NO: 33494 - DNA, 20 bp, synthetic construct
  misc_feature 1..20: note = chemically synthesized
  source 1..20: mol_type = other DNA
aatacttcacttctctgtaa

SEQ ID NO: 33495 - DNA, 20 bp, synthetic construct
  misc_feature 1..20: note = chemically synthesized
  source 1..20: mol_type = other DNA
tgtaataaggtttctgtcct

SEQ ID NO: 33496 - DNA, 20 bp, synthetic construct
  misc_feature 1..20: note = chemically synthesized
  source 1..20: mol_type = other DNA
ctaaactacagagaataaga

SEQ ID NO: 33497 - DNA, 20 bp, synthetic construct
  misc_feature 1..20: note = chemically synthesized
  source 1..20: mol_type = other DNA
taggcaaaattgacttttaa

SEQ ID NO: 33498 - DNA, 20 bp, synthetic construct
  misc_feature 1..20: note = chemically synthesized
  source 1..20: mol_type = other DNA
aacagttagtataaggtgaa

SEQ ID NO: 33499 - DNA, 20 bp, synthetic construct
  misc_feature 1..20: note = chemically synthesized
  source 1..20: mol_type = other DNA
catatataatgcatttaatt

SEQ ID NO: 33500 - DNA, 20 bp, synthetic construct
  misc_feature 1..20: note = chemically synthesized
  source 1..20: mol_type = other DNA
taattttgagattatgctgg

SEQ ID NO: 33501 - DNA, 20 bp, synthetic construct
  misc_feature 1..20: note = chemically synthesized
  source 1..20: mol_type = other DNA
ctggttattatttcagatcc

SEQ ID NO: 33502 - DNA, 20 bp, synthetic construct
  misc_feature 1..20: note = chemically synthesized
  source 1..20: mol_type = other DNA
caacacatgacataatttca

SEQ ID NO: 33503 - DNA, 20 bp, synthetic construct
  misc_feature 1..20: note = chemically synthesized
  source 1..20: mol_type = other DNA
tgccatttacccagcaatca

SEQ ID NO: 33504 - DNA, 20 bp, synthetic construct
  misc_feature 1..20: note = chemically synthesized
  source 1..20: mol_type = other DNA
atttacccagcaatcagttg

SEQ ID NO: 33505 - DNA, 20 bp, synthetic construct
  misc_feature 1..20: note = chemically synthesized
  source 1..20: mol_type = other DNA
gagagtataaacccacaagg

SEQ ID NO: 33506 - DNA, 20 bp, synthetic construct
  misc_feature 1..20: note = chemically synthesized
  source 1..20: mol_type = other DNA
gaggttatacctcactcgca

SEQ ID NO: 33507 - DNA, 20 bp, synthetic construct
  misc_feature 1..20: note = chemically synthesized
  source 1..20: mol_type = other DNA
actcgcaaattgttttatca

SEQ ID NO: 33508 - DNA, 20 bp, synthetic construct
  misc_feature 1..20: note = chemically synthesized
  source 1..20: mol_type = other DNA
ttactaacagaatgtagagt

SEQ ID NO: 33509 - DNA, 20 bp, synthetic construct
  misc_feature 1..20: note = chemically synthesized
  source 1..20: mol_type = other DNA
atatacatcttcctaaaata

SEQ ID NO: 33510 - DNA, 20 bp, synthetic construct
  misc_feature 1..20: note = chemically synthesized
  source 1..20: mol_type = other DNA
ttatttctatgttgtcataa

SEQ ID NO: 33511 - DNA, 20 bp, synthetic construct
  misc_feature 1..20: note = chemically synthesized
  source 1..20: mol_type = other DNA
aaatgtagcctaaatatata

SEQ ID NO: 33512 - DNA, 20 bp, synthetic construct
  misc_feature 1..20: note = chemically synthesized
  source 1..20: mol_type = other DNA
cctaaatatatattccgttt

SEQ ID NO: 33513 - DNA, 20 bp, synthetic construct
  misc_feature 1..20: note = chemically synthesized
  source 1..20: mol_type = other DNA
cctccgagactcctttgaat

SEQ ID NO: 33514 - DNA, 20 bp, synthetic construct
  misc_feature 1..20: note = chemically synthesized
  source 1..20: mol_type = other DNA
agttagagttggtagagtta

SEQ ID NO: 33515 - DNA, 20 bp, synthetic construct
  misc_feature 1..20: note = chemically synthesized
  source 1..20: mol_type = other DNA
tggtagagttaccaggcttt

SEQ ID NO: 33516 - DNA, 20 bp, synthetic construct
  misc_feature 1..20: note = chemically synthesized
  source 1..20: mol_type = other DNA
aactagtagcatgaaatctt

SEQ ID NO: 33517 - DNA, 20 bp, synthetic construct
  misc_feature 1..20: note = chemically synthesized
  source 1..20: mol_type = other DNA
aggaattctgtgggaagcac

SEQ ID NO: 33518 - DNA, 20 bp, synthetic construct
  misc_feature 1..20: note = chemically synthesized
  source 1..20: mol_type = other DNA
agcacataagatttcatgct

SEQ ID NO: 33519 - DNA, 20 bp, synthetic construct
  misc_feature 1..20: note = chemically synthesized
  source 1..20: mol_type = other DNA
tgcctgtaagttctcttctc

SEQ ID NO: 33520 - DNA, 20 bp, synthetic construct
  misc_feature 1..20: note = chemically synthesized
  source 1..20: mol_type = other DNA
gtctcggaggactgtaagaa

SEQ ID NO: 33521 - DNA, 20 bp, synthetic construct
  misc_feature 1..20: note = chemically synthesized
  source 1..20: mol_type = other DNA
cctctctgtaacatccctgg

SEQ ID NO: 33522 - DNA, 20 bp, synthetic construct
  misc_feature 1..20: note = chemically synthesized
  source 1..20: mol_type = other DNA
gaggagttactgctctttga

SEQ ID NO: 33523 - DNA, 20 bp, synthetic construct
  misc_feature 1..20: note = chemically synthesized
  source 1..20: mol_type = other DNA
ttgcttgggaagtgaccaat

SEQ ID NO: 33524 - DNA, 20 bp, synthetic construct
  misc_feature 1..20: note = chemically synthesized
  source 1..20: mol_type = other DNA
aggtgactgaggaatgtaga

SEQ ID NO: 33525 - DNA, 20 bp, synthetic construct
  misc_feature 1..20: note = chemically synthesized
  source 1..20: mol_type = other DNA
aaaaagttaatatttacatt

SEQ ID NO: 33526 - DNA, 20 bp, synthetic construct
  misc_feature 1..20: note = chemically synthesized
  source 1..20: mol_type = other DNA
tttattttaggaagatgtat

SEQ ID NO: 33527 - DNA, 20 bp, synthetic construct
  misc_feature 1..20: note = chemically synthesized
  source 1..20: mol_type = other DNA
attctgttagtaattatatg

SEQ ID NO: 33528 - DNA, 20 bp, synthetic construct
  misc_feature 1..20: note = chemically synthesized
  source 1..20: mol_type = other DNA
taattatatgaaatgcttaa

SEQ ID NO: 33529 - DNA, 20 bp, synthetic construct
  misc_feature 1..20: note = chemically synthesized
  source 1..20: mol_type = other DNA
aagaatgtttcatattcaca

SEQ ID NO: 33530 - DNA, 20 bp, synthetic construct
  misc_feature 1..20: note = chemically synthesized
  source 1..20: mol_type = other DNA
attcacaattagcttggaat

SEQ ID NO: 33531 - DNA, 20 bp, synthetic construct
  misc_feature 1..20: note = chemically synthesized
  source 1..20: mol_type = other DNA
tggaattaatgttttaattc

SEQ ID NO: 33532 - DNA, 20 bp, synthetic construct
  misc_feature 1..20: note = chemically synthesized
  source 1..20: mol_type = other DNA
agtaatttttttcttcaatg

SEQ ID NO: 33533 - DNA, 20 bp, synthetic construct
  misc_feature 1..20: note = chemically synthesized
  source 1..20: mol_type = other DNA
aaggtagagaaccacaatgt

SEQ ID NO: 33534 - DNA, 20 bp, synthetic construct
  misc_feature 1..20: note = chemically synthesized
  source 1..20: mol_type = other DNA
aaattataaaacaattcctt

SEQ ID NO: 33535 - DNA, 20 bp, synthetic construct
  misc_feature 1..20: note = chemically synthesized
  source 1..20: mol_type = other DNA
ttccttgtgggtttatactc

SEQ ID NO: 33536 - DNA, 20 bp, synthetic construct
  misc_feature 1..20: note = chemically synthesized
  source 1..20: mol_type = other DNA
aacattagcaaagaaaaagt

SEQ ID NO: 33537 - DNA, 20 bp, synthetic construct
  misc_feature 1..20: note = chemically synthesized
  source 1..20: mol_type = other DNA
agatcttgaagaatcaagcc

SEQ ID NO: 33538 - DNA, 20 bp, synthetic construct
  misc_feature 1..20: note = chemically synthesized
  source 1..20: mol_type = other DNA
gtaaatggcagtgatgactt

SEQ ID NO: 33539 - DNA, 20 bp, synthetic construct
  misc_feature 1..20: note = chemically synthesized
  source 1..20: mol_type = other DNA
taacacatttatttttcatt

SEQ ID NO: 33540 - DNA, 20 bp, synthetic construct
  misc_feature 1..20: note = chemically synthesized
  source 1..20: mol_type = other DNA
caaagcacggtcttattctc

SEQ ID NO: 33541 - DNA, 20 bp, synthetic construct
  misc_feature 1..20: note = chemically synthesized
  source 1..20: mol_type = other DNA
aagtgaagtattttatgtgt

SEQ ID NO: 33542 - DNA, 20 bp, synthetic construct
  misc_feature 1..20: note = chemically synthesized
  source 1..20: mol_type = other DNA
attttatgtgtacctgtttc

SEQ ID NO: 33543 - DNA, 20 bp, synthetic construct
  misc_feature 1..20: note = chemically synthesized
  source 1..20: mol_type = other DNA
atctttatcctgaaatgagc

SEQ ID NO: 33544 - DNA, 20 bp, synthetic construct
  misc_feature 1..20: note = chemically synthesized
  source 1..20: mol_type = other DNA
ctagtcacaaatttttccag

SEQ ID NO: 33545 - DNA, 20 bp, synthetic construct
  misc_feature 1..20: note = chemically synthesized
  source 1..20: mol_type = other DNA
cccggagtatgccttgaaat

SEQ ID NO: 33546 - DNA, 20 bp, synthetic construct
  misc_feature 1..20: note = chemically synthesized
  source 1..20: mol_type = other DNA
agtgggcaggagctcaagga

SEQ ID NO: 33547 - DNA, 20 bp, synthetic construct
  misc_feature 1..20: note = chemically synthesized
  source 1..20: mol_type = other DNA
ctgcacctgagcagagcccc

SEQ ID NO: 33548 - DNA, 20 bp, synthetic construct
  misc_feature 1..20: note = chemically synthesized
  source 1..20: mol_type = other DNA
ctggtacatagaaaatgctc

SEQ ID NO: 33549 - DNA, 20 bp, synthetic construct
  misc_feature 1..20: note = chemically synthesized
  source 1..20: mol_type = other DNA
atggatttttttttgaaaaa

SEQ ID NO: 33550 - DNA, 20 bp, synthetic construct
  misc_feature 1..20: note = chemically synthesized
  source 1..20: mol_type = other DNA
ttccctttcaaggggaaggg

SEQ ID NO: 33551 - DNA, 20 bp, synthetic construct
  misc_feature 1..20: note = chemically synthesized
  source 1..20: mol_type = other DNA
tttgtggagaggtccccaca

SEQ ID NO: 33552 - DNA, 20 bp, synthetic construct
  misc_feature 1..20: note = chemically synthesized
  source 1..20: mol_type = other DNA
ttaatattatcatagcctgg

SEQ ID NO: 33553 - DNA, 20 bp, synthetic construct
  misc_feature 1..20: note = chemically synthesized
  source 1..20: mol_type = other DNA
ttatcatagcctggtatggt

SEQ ID NO: 33554 - DNA, 20 bp, synthetic construct
  misc_feature 1..20: note = chemically synthesized
  source 1..20: mol_type = other DNA
ttcatatagatggataatta

SEQ ID NO: 33555 - DNA, 20 bp, synthetic construct
  misc_feature 1..20: note = chemically synthesized
  source 1..20: mol_type = other DNA
tcctaataatacattgccac

SEQ ID NO: 33556 - DNA, 20 bp, synthetic construct
  misc_feature 1..20: note = chemically synthesized
  source 1..20: mol_type = other DNA
cactatagtttctttaaatt

SEQ ID NO: 33557 - DNA, 20 bp, synthetic construct
  misc_feature 1..20: note = chemically synthesized
  source 1..20: mol_type = other DNA
ctcctccagttcatagagca

SEQ ID NO: 33558 - DNA, 20 bp, synthetic construct
  misc_feature 1..20: note = chemically synthesized
  source 1..20: mol_type = other DNA
agcaaatggcagagttagga

SEQ ID NO: 33559 - DNA, 20 bp, synthetic construct
  misc_feature 1..20: note = chemically synthesized
  source 1..20: mol_type = other DNA
taagaattaaatattaaaac

SEQ ID NO: 33560 - DNA, 20 bp, synthetic construct
  misc_feature 1..20: note = chemically synthesized
  source 1..20: mol_type = other DNA
cagtacttgcagtcaaaggt

SEQ ID NO: 33561 - DNA, 20 bp, synthetic construct
  misc_feature 1..20: note = chemically synthesized
  source 1..20: mol_type = other DNA
aagaaccccttaaactgaat

SEQ ID NO: 33562 - DNA, 20 bp, synthetic construct
  misc_feature 1..20: note = chemically synthesized
  source 1..20: mol_type = other DNA
tatactctccagttatctta

SEQ ID NO: 33563 - DNA, 20 bp, synthetic construct
  misc_feature 1..20: note = chemically synthesized
  source 1..20: mol_type = other DNA
tattcacatccaagaaaaca

SEQ ID NO: 33564 - DNA, 20 bp, synthetic construct
  misc_feature 1..20: note = chemically synthesized
  source 1..20: mol_type = other DNA
taacagatgagagagtcaca

SEQ ID NO: 33565 - DNA, 20 bp, synthetic construct
  misc_feature 1..20: note = chemically synthesized
  source 1..20: mol_type = other DNA
ttaatattaaccttgaaatt

SEQ ID NO: 33566 - DNA, 20 bp, synthetic construct
  misc_feature 1..20: note = chemically synthesized
  source 1..20: mol_type = other DNA
taatccattttattattcag

SEQ ID NO: 33567 - DNA, 20 bp, synthetic construct
  misc_feature 1..20: note = chemically synthesized
  source 1..20: mol_type = other DNA
agatagagttaagaatacag

SEQ ID NO: 33568 - DNA, 20 bp, synthetic construct
  misc_feature 1..20: note = chemically synthesized
  source 1..20: mol_type = other DNA
cagtgtaccgtggaatgggg

SEQ ID NO: 33569 - DNA, 20 bp, synthetic construct
  misc_feature 1..20: note = chemically synthesized
  source 1..20: mol_type = other DNA
ggtttctaacctagttacct

SEQ ID NO: 33570 - DNA, 20 bp, synthetic construct
  misc_feature 1..20: note = chemically synthesized
  source 1..20: mol_type = other DNA
gaaaaacctctctaatgatg

SEQ ID NO: 33571 - DNA, 20 bp, synthetic construct
  misc_feature 1..20: note = chemically synthesized
  source 1..20: mol_type = other DNA
gatgggagagacctgcaggg

SEQ ID NO: 33572 - DNA, 20 bp, synthetic construct
  misc_feature 1..20: note = chemically synthesized
  source 1..20: mol_type = other DNA
agggggagttaatagcctta

SEQ ID NO: 33573 - DNA, 20 bp, synthetic construct
  misc_feature 1..20: note = chemically synthesized
  source 1..20: mol_type = other DNA
gggaagtactaagtagtcag

SEQ ID NO: 33574 - DNA, 20 bp, synthetic construct
  misc_feature 1..20: note = chemically synthesized
  source 1..20: mol_type = other DNA
ctgtggtgtgacccaggatg

SEQ ID NO: 33575 - DNA, 20 bp, synthetic construct
  misc_feature 1..20: note = chemically synthesized
  source 1..20: mol_type = other DNA
tttgcccaaatgtgggggaa

SEQ ID NO: 33576 - DNA, 20 bp, synthetic construct
  misc_feature 1..20: note = chemically synthesized
  source 1..20: mol_type = other DNA
aggatatttaggatcattaa

SEQ ID NO: 33577 - DNA, 20 bp, synthetic construct
  misc_feature 1..20: note = chemically synthesized
  source 1..20: mol_type = other DNA
gagcgatgtagtccctaaat

SEQ ID NO: 33578 - DNA, 20 bp, synthetic construct
  misc_feature 1..20: note = chemically synthesized
  source 1..20: mol_type = other DNA
cttaaaatggactagaaaca

SEQ ID NO: 33579 - DNA, 20 bp, synthetic construct
  misc_feature 1..20: note = chemically synthesized
  source 1..20: mol_type = other DNA
cgtattgctggacataattt

SEQ ID NO: 33580 - DNA, 20 bp, synthetic construct
  misc_feature 1..20: note = chemically synthesized
  source 1..20: mol_type = other DNA
ctttgatataagtgaactca

SEQ ID NO: 33581 - DNA, 20 bp, synthetic construct
  misc_feature 1..20: note = chemically synthesized
  source 1..20: mol_type = other DNA
gaagaggacttcacacttcc

SEQ ID NO: 33582 - DNA, 20 bp, synthetic construct
  misc_feature 1..20: note = chemically synthesized
  source 1..20: mol_type = other DNA
gccgtaaagaacaactgctc

SEQ ID NO: 33583 - DNA, 20 bp, synthetic construct
  misc_feature 1..20: note = chemically synthesized
  source 1..20: mol_type = other DNA
agtttaatactaggctactc

SEQ ID NO: 33584 - DNA, 20 bp, synthetic construct
  misc_feature 1..20: note = chemically synthesized
  source 1..20: mol_type = other DNA
cggctgttttttgttaacac

SEQ ID NO: 33585 - DNA, 20 bp, synthetic construct
  misc_feature 1..20: note = chemically synthesized
  source 1..20: mol_type = other DNA
gttaacacagaagttttcca

SEQ ID NO: 33586 - DNA, 20 bp, synthetic construct
  misc_feature 1..20: note = chemically synthesized
  source 1..20: mol_type = other DNA
ccatccttcccgagacctaa

SEQ ID NO: 33587 - DNA, 20 bp, synthetic construct
  misc_feature 1..20: note = chemically synthesized
  source 1..20: mol_type = other DNA
acgatgtttatctttcgtga

SEQ ID NO: 33588 - DNA, 20 bp, synthetic construct
  misc_feature 1..20: note = chemically synthesized
  source 1..20: mol_type = other DNA
agatccatcaaggcccagca

SEQ ID NO: 33589 - DNA, 20 bp, synthetic construct
  misc_feature 1..20: note = chemically synthesized
  source 1..20: mol_type = other DNA
tttcaaggctgaggtgggag

SEQ ID NO: 33590 - DNA, 20 bp, synthetic construct
  misc_feature 1..20: note = chemically synthesized
  source 1..20: mol_type = other DNA
gcctggggaacatagggaga

SEQ ID NO: 33591 - DNA, 20 bp, synthetic construct
  misc_feature 1..20: note = chemically synthesized
  source 1..20: mol_type = other DNA
attgaatccaggcgttctag

SEQ ID NO: 33592 - DNA, 20 bp, synthetic construct
  misc_feature 1..20: note = chemically synthesized
  source 1..20: mol_type = other DNA
ttctagtgaggcttcagtga

SEQ ID NO: 33593 - DNA, 20 bp, synthetic construct
  misc_feature 1..20: note = chemically synthesized
  source 1..20: mol_type = other DNA
gccggggtgacagagtgaga

SEQ ID NO: 33594 - DNA, 20 bp, synthetic construct
  misc_feature 1..20: note = chemically synthesized
  source 1..20: mol_type = other DNA
tctacagctaaagtcagact

SEQ ID NO: 33595 - DNA, 20 bp, synthetic construct
  misc_feature 1..20: note = chemically synthesized
  source 1..20: mol_type = other DNA
ccaccatcacctgggtaatg

SEQ ID NO: 33596 - DNA, 20 bp, synthetic construct
  misc_feature 1..20: note = chemically synthesized
  source 1..20: mol_type = other DNA
attacatagcatctctgtgc

SEQ ID NO: 33597 - DNA, 20 bp, synthetic construct
  misc_feature 1..20: note = chemically synthesized
  source 1..20: mol_type = other DNA
ttaataaacactctgtaggt

SEQ ID NO: 33598 - DNA, 20 bp, synthetic construct
  misc_feature 1..20: note = chemically synthesized
  source 1..20: mol_type = other DNA
gttagctcatgtattgtcat

SEQ ID NO: 33599 - DNA, 20 bp, synthetic construct
  misc_feature 1..20: note = chemically synthesized
  source 1..20: mol_type = other DNA
aatcacgggatgcatagtaa

SEQ ID NO: 33600 - DNA, 20 bp, synthetic construct
  misc_feature 1..20: note = chemically synthesized
  source 1..20: mol_type = other DNA
acacacgatctatgtaaaaa

SEQ ID NO: 33601 - DNA, 20 bp, synthetic construct
  misc_feature 1..20: note = chemically synthesized
  source 1..20: mol_type = other DNA
gtaaaaactatgcttggttg

SEQ ID NO: 33602 - DNA, 20 bp, synthetic construct
  misc_feature 1..20: note = chemically synthesized
  source 1..20: mol_type = other DNA
cctcccactgccaagactgc

SEQ ID NO: 33603 - DNA, 20 bp, synthetic construct
  misc_feature 1..20: note = chemically synthesized
  source 1..20: mol_type = other DNA
cactgccaagactgcagctg

SEQ ID NO: 33604 - DNA, 20 bp, synthetic construct
  misc_feature 1..20: note = chemically synthesized
  source 1..20: mol_type = other DNA
tctaagtgtataatgacttc

SEQ ID NO: 33605 - DNA, 20 bp, synthetic construct
  misc_feature 1..20: note = chemically synthesized
  source 1..20: mol_type = other DNA
gacttcctctgcttctgcaa

SEQ ID NO: 33606 - DNA, 20 bp, synthetic construct
  misc_feature 1..20: note = chemically synthesized
  source 1..20: mol_type = other DNA
ctgtgttttggaacaggagg

SEQ ID NO: 33607 - DNA, 20 bp, synthetic construct
  misc_feature 1..20: note = chemically synthesized
  source 1..20: mol_type = other DNA
tattctatacttctttgaaa

SEQ ID NO: 33608 - DNA, 20 bp, synthetic construct
  misc_feature 1..20: note = chemically synthesized
  source 1..20: mol_type = other DNA
agtgttgccagatgacgact

SEQ ID NO: 33609 - DNA, 20 bp, synthetic construct
  misc_feature 1..20: note = chemically synthesized
  source 1..20: mol_type = other DNA
agatcaataaaatacaaagt

SEQ ID NO: 33610 - DNA, 20 bp, synthetic construct
  misc_feature 1..20: note = chemically synthesized
  source 1..20: mol_type = other DNA
tcagaataaaaccatttatt

SEQ ID NO: 33611 - DNA, 20 bp, synthetic construct
  misc_feature 1..20: note = chemically synthesized
  source 1..20: mol_type = other DNA
tatatgtgtatgtaaatctc

SEQ ID NO: 33612 - DNA, 20 bp, synthetic construct
  misc_feature 1..20: note = chemically synthesized
  source 1..20: mol_type = other DNA
gctcttgcattcacttatat

SEQ ID NO: 33613 - DNA, 20 bp, synthetic construct
  misc_feature 1..20: note = chemically synthesized
  source 1..20: mol_type = other DNA
atattctagcttgttaagag

SEQ ID NO: 33614 - DNA, 20 bp, synthetic construct
  misc_feature 1..20: note = chemically synthesized
  source 1..20: mol_type = other DNA
agagagaagtttggggcaaa

SEQ ID NO: 33615 - DNA, 20 bp, synthetic construct
  misc_feature 1..20: note = chemically synthesized
  source 1..20: mol_type = other DNA
cagggaaatgtctggaggga

SEQ ID NO: 33616 - DNA, 20 bp, synthetic construct
  misc_feature 1..20: note = chemically synthesized
  source 1..20: mol_type = other DNA
ctttcttttattgatatatg

SEQ ID NO: 33617 - DNA, 20 bp, synthetic construct
  misc_feature 1..20: note = chemically synthesized
  source 1..20: mol_type = other DNA
tattcatcacctcaagtatt

SEQ ID NO: 33618 - DNA, 20 bp, synthetic construct
  misc_feature 1..20: note = chemically synthesized
  source 1..20: mol_type = other DNA
ctattttgaaatatacaata

SEQ ID NO: 33619 - DNA, 20 bp, synthetic construct
  misc_feature 1..20: note = chemically synthesized
  source 1..20: mol_type = other DNA
catattccttctatctaact

SEQ ID NO: 33620 - DNA, 20 bp, synthetic construct
  misc_feature 1..20: note = chemically synthesized
  source 1..20: mol_type = other DNA
cgtacacacctttctctacc

SEQ ID NO: 33621 - DNA, 20 bp, synthetic construct
  misc_feature 1..20: note = chemically synthesized
  source 1..20: mol_type = other DNA
gcaaaatttgtctttctatg

SEQ ID NO: 33622 - DNA, 20 bp, synthetic construct
  misc_feature 1..20: note = chemically synthesized
  source 1..20: mol_type = other DNA
gtctttctatgcctggctta

SEQ ID NO: 33623 - DNA, 20 bp, synthetic construct
  misc_feature 1..20: note = chemically synthesized
  source 1..20: mol_type = other DNA
tttcgtttaacataatgact

SEQ ID NO: 33624 - DNA, 20 bp, synthetic construct
  misc_feature 1..20: note = chemically synthesized
  source 1..20: mol_type = other DNA
catccatgttgctgcaaatg

SEQ ID NO: 33625 - DNA, 20 bp, synthetic construct
  misc_feature 1..20: note = chemically synthesized
  source 1..20: mol_type = other DNA
catccattgatggacactta

SEQ ID NO: 33626 - DNA, 20 bp, synthetic construct
  misc_feature 1..20: note = chemically synthesized
  source 1..20: mol_type = other DNA
ataaacagtgtggtaccagt

SEQ ID NO: 33627 - DNA, 20 bp, synthetic construct
  misc_feature 1..20: note = chemically synthesized
  source 1..20: mol_type = other DNA
ctttggataaatacccagta

SEQ ID NO: 33628 - DNA, 20 bp, synthetic construct
  misc_feature 1..20: note = chemically synthesized
  source 1..20: mol_type = other DNA
gatcttatgatagttcaatt

SEQ ID NO: 33629 - DNA, 20 bp, synthetic construct
  misc_feature 1..20: note = chemically synthesized
  source 1..20: mol_type = other DNA
agctttttggtaaatctaca

SEQ ID NO: 33630 - DNA, 20 bp, synthetic construct
  misc_feature 1..20: note = chemically synthesized
  source 1..20: mol_type = other DNA
catagtggctatactaattt

SEQ ID NO: 33631 - DNA, 20 bp, synthetic construct
  misc_feature 1..20: note = chemically synthesized
  source 1..20: mol_type = other DNA
ttattaatttatttaaatca

SEQ ID NO: 33632 - DNA, 20 bp, synthetic construct
  misc_feature 1..20: note = chemically synthesized
  source 1..20: mol_type = other DNA
ggcataagatgatatctcat

SEQ ID NO: 33633 - DNA, 20 bp, synthetic construct
  misc_feature 1..20: note = chemically synthesized
  source 1..20: mol_type = other DNA
aagatgatatctcattgtgg

SEQ ID NO: 33634 - DNA, 20 bp, synthetic construct
  misc_feature 1..20: note = chemically synthesized
  source 1..20: mol_type = other DNA
ggttttgatttgcatttctc

SEQ ID NO: 33635 - DNA, 20 bp, synthetic construct
  misc_feature 1..20: note = chemically synthesized
  source 1..20: mol_type = other DNA
tatcctttgccaatttttta

SEQ ID NO: 33636 - DNA, 20 bp, synthetic construct
  misc_feature 1..20: note = chemically synthesized
  source 1..20: mol_type = other DNA
gccaattttttaatgagatt

SEQ ID NO: 33637 - DNA, 20 bp, synthetic construct
  misc_feature 1..20: note = chemically synthesized
  source 1..20: mol_type = other DNA
tatttgtttttccactgttg

SEQ ID NO: 33638 - DNA, 20 bp, synthetic construct
  misc_feature 1..20: note = chemically synthesized
  source 1..20: mol_type = other DNA
tttttccactgttgagttgt

SEQ ID NO: 33639 - DNA, 20 bp, synthetic construct
  misc_feature 1..20: note = chemically synthesized
  source 1..20: mol_type = other DNA
tttgagtttcttatatattc

SEQ ID NO: 33640 - DNA, 20 bp, synthetic construct
  misc_feature 1..20: note = chemically synthesized
  source 1..20: mol_type = other DNA
gcaaatattttctcgcattc

SEQ ID NO: 33641 - DNA, 20 bp, synthetic construct
  misc_feature 1..20: note = chemically synthesized
  source 1..20: mol_type = other DNA
aacagcttgtctcttcactg

SEQ ID NO: 33642 - DNA, 20 bp, synthetic construct
  misc_feature 1..20: note = chemically synthesized
  source 1..20: mol_type = other DNA
gcttgtctcttcactgtgtt

SEQ ID NO: 33643 - DNA, 20 bp, synthetic construct
  misc_feature 1..20: note = chemically synthesized
  source 1..20: mol_type = other DNA
cctttactgtgcagatgtat

SEQ ID NO: 33644 - DNA, 20 bp, synthetic construct
  misc_feature 1..20: note = chemically synthesized
  source 1..20: mol_type = other DNA
atatagtcccatttgtctat

SEQ ID NO: 33645 - DNA, 20 bp, synthetic construct
  misc_feature 1..20: note = chemically synthesized
  source 1..20: mol_type = other DNA
tctatttttgcttttgttgc

SEQ ID NO: 33646 - DNA, 20 bp, synthetic construct
  misc_feature 1..20: note = chemically synthesized
  source 1..20: mol_type = other DNA
catgtcttgaagtgtctccc

SEQ ID NO: 33647 - DNA, 20 bp, synthetic construct
  misc_feature 1..20: note = chemically synthesized
  source 1..20: mol_type = other DNA
tctcccttatgttttctttt

SEQ ID NO: 33648 - DNA, 20 bp, synthetic construct
  misc_feature 1..20: note = chemically synthesized
  source 1..20: mol_type = other DNA
atgttttcttttagtagttt

SEQ ID NO: 33649 - DNA, 20 bp, synthetic construct
  misc_feature 1..20: note = chemically synthesized
  source 1..20: mol_type = other DNA
cttttagtagttttatagtt

SEQ ID NO: 33650 - DNA, 20 bp, synthetic construct
  misc_feature 1..20: note = chemically synthesized
  source 1..20: mol_type = other DNA
gtctttaatccatcttgaga

SEQ ID NO: 33651 - DNA, 20 bp, synthetic construct
  misc_feature 1..20: note = chemically synthesized
  source 1..20: mol_type = other DNA
tattgtacaaggggttgagt

SEQ ID NO: 33652 - DNA, 20 bp, synthetic construct
  misc_feature 1..20: note = chemically synthesized
  source 1..20: mol_type = other DNA
tacaaggggttgagttcttg

SEQ ID NO: 33653 - DNA, 20 bp, synthetic construct
  misc_feature 1..20: note = chemically synthesized
  source 1..20: mol_type = other DNA
ctgttggtgtatagaagagt

SEQ ID NO: 33654 - DNA, 20 bp, synthetic construct
  misc_feature 1..20: note = chemically synthesized
  source 1..20: mol_type = other DNA
tgaattattttatcagttct

SEQ ID NO: 33655 - DNA, 20 bp, synthetic construct
  misc_feature 1..20: note = chemically synthesized
  source 1..20: mol_type = other DNA
gagctttctggaggagtctt

SEQ ID NO: 33656 - DNA, 20 bp, synthetic construct
  misc_feature 1..20: note = chemically synthesized
  source 1..20: mol_type = other DNA
tcatatcatcagcaaacagt

SEQ ID NO: 33657 - DNA, 20 bp, synthetic construct
  misc_feature 1..20: note = chemically synthesized
  source 1..20: mol_type = other DNA
tgacagtttgacttcctctt

SEQ ID NO: 33658 - DNA, 20 bp, synthetic construct
  misc_feature 1..20: note = chemically synthesized
  source 1..20: mol_type = other DNA
gatttgaatgccctttattt

SEQ ID NO: 33659 - DNA, 20 bp, synthetic construct
  misc_feature 1..20: note = chemically synthesized
  source 1..20: mol_type = other DNA
gccctttatttctttgtttt

SEQ ID NO: 33660 - DNA, 20 bp, synthetic construct
  misc_feature 1..20: note = chemically synthesized
  source 1..20: mol_type = other DNA
cttgttccagttctcagagg

SEQ ID NO: 33661 - DNA, 20 bp, synthetic construct
  misc_feature 1..20: note = chemically synthesized
  source 1..20: mol_type = other DNA
cattcaatattatgttggct

SEQ ID NO: 33662 - DNA, 20 bp, synthetic construct
  misc_feature 1..20: note = chemically synthesized
  source 1..20: mol_type = other DNA
ttggctgtgggtttgtcaca

SEQ ID NO: 33663 - DNA, 20 bp, synthetic construct
  misc_feature 1..20: note = chemically synthesized
  source 1..20: mol_type = other DNA
actgaggtatgtctcttgta

SEQ ID NO: 33664 - DNA, 20 bp, synthetic construct
  misc_feature 1..20: note = chemically synthesized
  source 1..20: mol_type = other DNA
cattttaatcataaatgtat

SEQ ID NO: 33665 - DNA, 20 bp, synthetic construct
  misc_feature 1..20: note = chemically synthesized
  source 1..20: mol_type = other DNA
aatgtatgctggattttgtt

SEQ ID NO: 33666 - DNA, 20 bp, synthetic construct
  misc_feature 1..20: note = chemically synthesized
  source 1..20: mol_type = other DNA
tattgagatgatcatgtaat

SEQ ID NO: 33667 - DNA, 20 bp, synthetic construct
  misc_feature 1..20: note = chemically synthesized
  source 1..20: mol_type = other DNA
catgtaatttttgtttttaa

SEQ ID NO: 33668 - DNA, 20 bp, synthetic construct
  misc_feature 1..20: note = chemically synthesized
  source 1..20: mol_type = other DNA
ccctgcatccctggcatgga

SEQ ID NO: 33669 - DNA, 20 bp, synthetic construct
  misc_feature 1..20: note = chemically synthesized
  source 1..20: mol_type = other DNA
catggaacctgcttgatcat

SEQ ID NO: 33670 - DNA, 20 bp, synthetic construct
  misc_feature 1..20: note = chemically synthesized
  source 1..20: mol_type = other DNA
ttggttatctagtattttgt

SEQ ID NO: 33671 - DNA, 20 bp, synthetic construct
  misc_feature 1..20: note = chemically synthesized
  source 1..20: mol_type = other DNA
gttcatcaaggctatcagtc

SEQ ID NO: 33672 - DNA, 20 bp, synthetic construct
  misc_feature 1..20: note = chemically synthesized
  source 1..20: mol_type = other DNA
cttttttggttatgtccttc

SEQ ID NO: 33673 - DNA, 20 bp, synthetic construct
  misc_feature 1..20: note = chemically synthesized
  source 1..20: mol_type = other DNA
ttccctggttttggtgtgat

SEQ ID NO: 33674 - DNA, 20 bp, synthetic construct
  misc_feature 1..20: note = chemically synthesized
  source 1..20: mol_type = other DNA
tttaattaccaattaaatct

SEQ ID NO: 33675 - DNA, 20 bp, synthetic construct
  misc_feature 1..20: note = chemically synthesized
  source 1..20: mol_type = other DNA
agctccagtgttaggtgcat

SEQ ID NO: 33676 - DNA, 20 bp, synthetic construct
  misc_feature 1..20: note = chemically synthesized
  source 1..20: mol_type = other DNA
agtgttaggtgcatatatgt

SEQ ID NO: 33677 - DNA, 20 bp, synthetic construct
  misc_feature 1..20: note = chemically synthesized
  source 1..20: mol_type = other DNA
tctttgtctcttttaactgc

SEQ ID NO: 33678 - DNA, 20 bp, synthetic construct
  misc_feature 1..20: note = chemically synthesized
  source 1..20: mol_type = other DNA
tcttttaactgctgttgctt

SEQ ID NO: 33679 - DNA, 20 bp, synthetic construct
  misc_feature 1..20: note = chemically synthesized
  source 1..20: mol_type = other DNA
ttaactgctgttgctttaaa

SEQ ID NO: 33680 - DNA, 20 bp, synthetic construct
  misc_feature 1..20: note = chemically synthesized
  source 1..20: mol_type = other DNA
tgagctcccagggcctttct

SEQ ID NO: 33681 - DNA, 20 bp, synthetic construct
  misc_feature 1..20: note = chemically synthesized
  source 1..20: mol_type = other DNA
acttctcccacaaacagacc

SEQ ID NO: 33682 - DNA, 20 bp, synthetic construct
  misc_feature 1..20: note = chemically synthesized
  source 1..20: mol_type = other DNA
tcagtttctccagtgggagt

SEQ ID NO: 33683 - DNA, 20 bp, synthetic construct
  misc_feature 1..20: note = chemically synthesized
  source 1..20: mol_type = other DNA
cagagggtctgtgggtcctc

SEQ ID NO: 33684 - DNA, 20 bp, synthetic construct
  misc_feature 1..20: note = chemically synthesized
  source 1..20: mol_type = other DNA
ctgtgggtcctctcaggatt

SEQ ID NO: 33685 - DNA, 20 bp, synthetic construct
  misc_feature 1..20: note = chemically synthesized
  source 1..20: mol_type = other DNA
ccgccaagatcctgagaagt

SEQ ID NO: 33686 - DNA, 20 bp, synthetic construct
  misc_feature 1..20: note = chemically synthesized
  source 1..20: mol_type = other DNA
gttggggattatatttcaac

SEQ ID NO: 33687 - DNA, 20 bp, synthetic construct
  misc_feature 1..20: note = chemically synthesized
  source 1..20: mol_type = other DNA
catccaaaccatatcagcag

SEQ ID NO: 33688 - DNA, 20 bp, synthetic construct
  misc_feature 1..20: note = chemically synthesized
  source 1..20: mol_type = other DNA
ctgttctaatgtcagtatca

SEQ ID NO: 33689 - DNA, 20 bp, synthetic construct
  misc_feature 1..20: note = chemically synthesized
  source 1..20: mol_type = other DNA
ttttttaatttcatacaaat

SEQ ID NO: 33690 - DNA, 20 bp, synthetic construct
  misc_feature 1..20: note = chemically synthesized
  source 1..20: mol_type = other DNA
taatttcatacaaattttag

SEQ ID NO: 33691 - DNA, 20 bp, synthetic construct
  misc_feature 1..20: note = chemically synthesized
  source 1..20: mol_type = other DNA
gatagcggtcatatagaatc

SEQ ID NO: 33692 - DNA, 20 bp, synthetic construct
  misc_feature 1..20: note = chemically synthesized
  source 1..20: mol_type = other DNA
gcggtcatatagaatctgta

SEQ ID NO: 33693 - DNA, 20 bp, synthetic construct
  misc_feature 1..20: note = chemically synthesized
  source 1..20: mol_type = other DNA
tgaacataggatatctctcc

SEQ ID NO: 33694 - DNA, 20 bp, synthetic construct
  misc_feature 1..20: note = chemically synthesized
  source 1..20: mol_type = other DNA
gtccttttcaattcttttat

SEQ ID NO: 33695 - DNA, 20 bp, synthetic construct
  misc_feature 1..20: note = chemically synthesized
  source 1..20: mol_type = other DNA
caattcttttatcagtgttt

SEQ ID NO: 33696 - DNA, 20 bp, synthetic construct
  misc_feature 1..20: note = chemically synthesized
  source 1..20: mol_type = other DNA
tgttttgtagttttccgaat

SEQ ID NO: 33697 - DNA, 20 bp, synthetic construct
  misc_feature 1..20: note = chemically synthesized
  source 1..20: mol_type = other DNA
ttattttttagctattgtaa

SEQ ID NO: 33698 - DNA, 20 bp, synthetic construct
  misc_feature 1..20: note = chemically synthesized
  source 1..20: mol_type = other DNA
ccttcttaatttccttctca

SEQ ID NO: 33699 - DNA, 20 bp, synthetic construct
  misc_feature 1..20: note = chemically synthesized
  source 1..20: mol_type = other DNA
ttattattggtgtgtagaaa

SEQ ID NO: 33700 - DNA, 20 bp, synthetic construct
  misc_feature 1..20: note = chemically synthesized
  source 1..20: mol_type = other DNA
tattggtgtgtagaaacatt

SEQ ID NO: 33701 - DNA, 20 bp, synthetic construct
  misc_feature 1..20: note = chemically synthesized
  source 1..20: mol_type = other DNA
gaaacattgcttgtttcata

SEQ ID NO: 33702 - DNA, 20 bp, synthetic construct
  misc_feature 1..20: note = chemically synthesized
  source 1..20: mol_type = other DNA
aatttatttttcagcgctaa

SEQ ID NO: 33703 - DNA, 20 bp, synthetic construct
  misc_feature 1..20: note = chemically synthesized
  source 1..20: mol_type = other DNA
taagagtgctttggtggagt

SEQ ID NO: 33704 - DNA, 20 bp, synthetic construct
  misc_feature 1..20: note = chemically synthesized
  source 1..20: mol_type = other DNA
tcatgtcatctggaaagatg

SEQ ID NO: 33705 - DNA, 20 bp, synthetic construct
  misc_feature 1..20: note = chemically synthesized
  source 1..20: mol_type = other DNA
gatggaagtgggcatcctta

SEQ ID NO: 33706 - DNA, 20 bp, synthetic construct
  misc_feature 1..20: note = chemically synthesized
  source 1..20: mol_type = other DNA
tttgtttcagttcttagagg

SEQ ID NO: 33707 - DNA, 20 bp, synthetic construct
  misc_feature 1..20: note = chemically synthesized
  source 1..20: mol_type = other DNA
cagttcttagaggaaaggct

SEQ ID NO: 33708 - DNA, 20 bp, synthetic construct
  misc_feature 1..20: note = chemically synthesized
  source 1..20: mol_type = other DNA
aattcagtatgatgttagct

SEQ ID NO: 33709 - DNA, 20 bp, synthetic construct
  misc_feature 1..20: note = chemically synthesized
  source 1..20: mol_type = other DNA
tatattgagatatgttcctt

SEQ ID NO: 33710 - DNA, 20 bp, synthetic construct
  misc_feature 1..20: note = chemically synthesized
  source 1..20: mol_type = other DNA
tccttctatgattggctgca

SEQ ID NO: 33711 - DNA, 20 bp, synthetic construct
  misc_feature 1..20: note = chemically synthesized
  source 1..20: mol_type = other DNA
tgtatctattgagatgatca

SEQ ID NO: 33712 - DNA, 20 bp, synthetic construct
  misc_feature 1..20: note = chemically synthesized
  source 1..20: mol_type = other DNA
ttgatgtgatgtatcacatt

SEQ ID NO: 33713 - DNA, 20 bp, synthetic construct
  misc_feature 1..20: note = chemically synthesized
  source 1..20: mol_type = other DNA
tattatcttttggatgtact

SEQ ID NO: 33714 - DNA, 20 bp, synthetic construct
  misc_feature 1..20: note = chemically synthesized
  source 1..20: mol_type = other DNA
cttttggatgtactgttgga

SEQ ID NO: 33715 - DNA, 20 bp, synthetic construct
  misc_feature 1..20: note = chemically synthesized
  source 1..20: mol_type = other DNA
tcagtttgctagtattttgt

SEQ ID NO: 33716 - DNA, 20 bp, synthetic construct
  misc_feature 1..20: note = chemically synthesized
  source 1..20: mol_type = other DNA
ttccatcagggatattgacc

SEQ ID NO: 33717 - DNA, 20 bp, synthetic construct
  misc_feature 1..20: note = chemically synthesized
  source 1..20: mol_type = other DNA
atgagttagggagaattcct

SEQ ID NO: 33718 - DNA, 20 bp, synthetic construct
  misc_feature 1..20: note = chemically synthesized
  source 1..20: mol_type = other DNA
aaaagaatttaaggagactt

SEQ ID NO: 33719 - DNA, 20 bp, synthetic construct
  misc_feature 1..20: note = chemically synthesized
  source 1..20: mol_type = other DNA
gagacttgttagttttcttt

SEQ ID NO: 33720 - DNA, 20 bp, synthetic construct
  misc_feature 1..20: note = chemically synthesized
  source 1..20: mol_type = other DNA
ttttttgggagactttttac

SEQ ID NO: 33721 - DNA, 20 bp, synthetic construct
  misc_feature 1..20: note = chemically synthesized
  source 1..20: mol_type = other DNA
attattcattactggtctgt

SEQ ID NO: 33722 - DNA, 20 bp, synthetic construct
  misc_feature 1..20: note = chemically synthesized
  source 1..20: mol_type = other DNA
ccagaaatttattaatttcc

SEQ ID NO: 33723 - DNA, 20 bp, synthetic construct
  misc_feature 1..20: note = chemically synthesized
  source 1..20: mol_type = other DNA
tattaatttcctctagattt

SEQ ID NO: 33724 - DNA, 20 bp, synthetic construct
  misc_feature 1..20: note = chemically synthesized
  source 1..20: mol_type = other DNA
taatatattttcttttttat

SEQ ID NO: 33725 - DNA, 20 bp, synthetic construct
  misc_feature 1..20: note = chemically synthesized
  source 1..20: mol_type = other DNA
tcattttgctaatcccttgt

SEQ ID NO: 33726 - DNA, 20 bp, synthetic construct
  misc_feature 1..20: note = chemically synthesized
  source 1..20: mol_type = other DNA
ttcattttttctttccttct

SEQ ID NO: 33727 - DNA, 20 bp, synthetic construct
  misc_feature 1..20: note = chemically synthesized
  source 1..20: mol_type = other DNA
tttctttccttctgctagtt

SEQ ID NO: 33728 - DNA, 20 bp, synthetic construct
  misc_feature 1..20: note = chemically synthesized
  source 1..20: mol_type = other DNA
ctgctagttttgggttttgt

SEQ ID NO: 33729 - DNA, 20 bp, synthetic construct
  misc_feature 1..20: note = chemically synthesized
  source 1..20: mol_type = other DNA
ttgggttttgttcttgcttt

SEQ ID NO: 33730 - DNA, 20 bp, synthetic construct
  misc_feature 1..20: note = chemically synthesized
  source 1..20: mol_type = other DNA
cttttctagcttgttgaggt

SEQ ID NO: 33731 - DNA, 20 bp, synthetic construct
  misc_feature 1..20: note = chemically synthesized
  source 1..20: mol_type = other DNA
ctagcttgttgaggtacatg

SEQ ID NO: 33732 - DNA, 20 bp, synthetic construct
  misc_feature 1..20: note = chemically synthesized
  source 1..20: mol_type = other DNA
attatatatttgaaatcttt

SEQ ID NO: 33733 - DNA, 20 bp, synthetic construct
  misc_feature 1..20: note = chemically synthesized
  source 1..20: mol_type = other DNA
tctttctatgtttttaattt

SEQ ID NO: 33734 - DNA, 20 bp, synthetic construct
  misc_feature 1..20: note = chemically synthesized
  source 1..20: mol_type = other DNA
tttaatttaagtgtttattg

SEQ ID NO: 33735 - DNA, 20 bp, synthetic construct
  misc_feature 1..20: note = chemically synthesized
  source 1..20: mol_type = other DNA
ttgataagcttctctcttag

SEQ ID NO: 33736 - DNA, 20 bp, synthetic construct
  misc_feature 1..20: note = chemically synthesized
  source 1..20: mol_type = other DNA
gcactgcttttgctgtatcc

SEQ ID NO: 33737 - DNA, 20 bp, synthetic construct
  misc_feature 1..20: note = chemically synthesized
  source 1..20: mol_type = other DNA
tatgttgtatttcaattttc

SEQ ID NO: 33738 - DNA, 20 bp, synthetic construct
  misc_feature 1..20: note = chemically synthesized
  source 1..20: mol_type = other DNA
tttcatttgtttcaaaaaat

SEQ ID NO: 33739 - DNA, 20 bp, synthetic construct
  misc_feature 1..20: note = chemically synthesized
  source 1..20: mol_type = other DNA
ataacgttcattcaggagca

SEQ ID NO: 33740 - DNA, 20 bp, synthetic construct
  misc_feature 1..20: note = chemically synthesized
  source 1..20: mol_type = other DNA
tttaatttccatgtatttgt

SEQ ID NO: 33741 - DNA, 20 bp, synthetic construct
  misc_feature 1..20: note = chemically synthesized
  source 1..20: mol_type = other DNA
ccatgtatttgtataggttt

SEQ ID NO: 33742 - DNA, 20 bp, synthetic construct
  misc_feature 1..20: note = chemically synthesized
  source 1..20: mol_type = other DNA
ggttttaaagtttttcttgt

SEQ ID NO: 33743 - DNA, 20 bp, synthetic construct
  misc_feature 1..20: note = chemically synthesized
  source 1..20: mol_type = other DNA
agtttttcttgttattgatt

SEQ ID NO: 33744 - DNA, 20 bp, synthetic construct
  misc_feature 1..20: note = chemically synthesized
  source 1..20: mol_type = other DNA
tattccattgtggtctgaga

SEQ ID NO: 33745 - DNA, 20 bp, synthetic construct
  misc_feature 1..20: note = chemically synthesized
  source 1..20: mol_type = other DNA
gtggtctgagaagatgctta

SEQ ID NO: 33746 - DNA, 20 bp, synthetic construct
  misc_feature 1..20: note = chemically synthesized
  source 1..20: mol_type = other DNA
tagatccatttggtctaaag

SEQ ID NO: 33747 - DNA, 20 bp, synthetic construct
  misc_feature 1..20: note = chemically synthesized
  source 1..20: mol_type = other DNA
tctaaagtcaagtttaaatc

SEQ ID NO: 33748 - DNA, 20 bp, synthetic construct
  misc_feature 1..20: note = chemically synthesized
  source 1..20: mol_type = other DNA
tctagatgatctatctgatg

SEQ ID NO: 33749 - DNA, 20 bp, synthetic construct
  misc_feature 1..20: note = chemically synthesized
  source 1..20: mol_type = other DNA
aaatccccaactattattgt

SEQ ID NO: 33750 - DNA, 20 bp, synthetic construct
  misc_feature 1..20: note = chemically synthesized
  source 1..20: mol_type = other DNA
caccctttatatctaataac

SEQ ID NO: 33751 - DNA, 20 bp, synthetic construct
  misc_feature 1..20: note = chemically synthesized
  source 1..20: mol_type = other DNA
gatgctctggtgttgagtgt

SEQ ID NO: 33752 - DNA, 20 bp, synthetic construct
  misc_feature 1..20: note = chemically synthesized
  source 1..20: mol_type = other DNA
atgtaatgacttttgtctct

SEQ ID NO: 33753 - DNA, 20 bp, synthetic construct
  misc_feature 1..20: note = chemically synthesized
  source 1..20: mol_type = other DNA
tataactacttttgctcatt

SEQ ID NO: 33754 - DNA, 20 bp, synthetic construct
  misc_feature 1..20: note = chemically synthesized
  source 1..20: mol_type = other DNA
tatttatctttacaagtgag

SEQ ID NO: 33755 - DNA, 20 bp, synthetic construct
  misc_feature 1..20: note = chemically synthesized
  source 1..20: mol_type = other DNA
agtgagataagtttcttata

SEQ ID NO: 33756 - DNA, 20 bp, synthetic construct
  misc_feature 1..20: note = chemically synthesized
  source 1..20: mol_type = other DNA
agcttacaactgggtcatat

SEQ ID NO: 33757 - DNA, 20 bp, synthetic construct
  misc_feature 1..20: note = chemically synthesized
  source 1..20: mol_type = other DNA
caaggctattattgacatgt

SEQ ID NO: 33758 - DNA, 20 bp, synthetic construct
  misc_feature 1..20: note = chemically synthesized
  source 1..20: mol_type = other DNA
cttattcctgccattttgtt

SEQ ID NO: 33759 - DNA, 20 bp, synthetic construct
  misc_feature 1..20: note = chemically synthesized
  source 1..20: mol_type = other DNA
cattttgttaattgattcct

SEQ ID NO: 33760 - DNA, 20 bp, synthetic construct
  misc_feature 1..20: note = chemically synthesized
  source 1..20: mol_type = other DNA
tgttaattgattcctggttg

SEQ ID NO: 33761 - DNA, 20 bp, synthetic construct
  misc_feature 1..20: note = chemically synthesized
  source 1..20: mol_type = other DNA
cctggttgttttgttttttt

SEQ ID NO: 33762 - DNA, 20 bp, synthetic construct
  misc_feature 1..20: note = chemically synthesized
  source 1..20: mol_type = other DNA
gttgttttgtttttttttta

SEQ ID NO: 33763 - DNA, 20 bp, synthetic construct
  misc_feature 1..20: note = chemically synthesized
  source 1..20: mol_type = other DNA
ttttgttttttttttagttt

SEQ ID NO: 33764 - DNA, 20 bp, synthetic construct
  misc_feature 1..20: note = chemically synthesized
  source 1..20: mol_type = other DNA
ttttttttagtttgtttgtt

SEQ ID NO: 33765 - DNA, 20 bp, synthetic construct
  misc_feature 1..20: note = chemically synthesized
  source 1..20: mol_type = other DNA
ctttctttctttcttattat

SEQ ID NO: 33766 - DNA, 20 bp, synthetic construct
  misc_feature 1..20: note = chemically synthesized
  source 1..20: mol_type = other DNA
tctttcttattatttatgat

SEQ ID NO: 33767 - DNA, 20 bp, synthetic construct
  misc_feature 1..20: note = chemically synthesized
  source 1..20: mol_type = other DNA
tattatttatgattgtggtt

SEQ ID NO: 33768 - DNA, 20 bp, synthetic construct
  misc_feature 1..20: note = chemically synthesized
  source 1..20: mol_type = other DNA
ttggtgattttctgtagtgg

SEQ ID NO: 33769 - DNA, 20 bp, synthetic construct
  misc_feature 1..20: note = chemically synthesized
  source 1..20: mol_type = other DNA
gagttctttctcttctttat

SEQ ID NO: 33770 - DNA, 20 bp, synthetic construct
  misc_feature 1..20: note = chemically synthesized
  source 1..20: mol_type = other DNA
ttcaaatttttcttgcccag

SEQ ID NO: 33771 - DNA, 20 bp, synthetic construct
  misc_feature 1..20: note = chemically synthesized
  source 1..20: mol_type = other DNA
tcccatcttctcctggcctg

SEQ ID NO: 33772 - DNA, 20 bp, synthetic construct
  misc_feature 1..20: note = chemically synthesized
  source 1..20: mol_type = other DNA
cccttataagtgactagaca

SEQ ID NO: 33773 - DNA, 20 bp, synthetic construct
  misc_feature 1..20: note = chemically synthesized
  source 1..20: mol_type = other DNA
aagtgactagacattttgct

SEQ ID NO: 33774 - DNA, 20 bp, synthetic construct
  misc_feature 1..20: note = chemically synthesized
  source 1..20: mol_type = other DNA
ctgttttagagttcttactc

SEQ ID NO: 33775 - DNA, 20 bp, synthetic construct
  misc_feature 1..20: note = chemically synthesized
  source 1..20: mol_type = other DNA
gttcttactctttggctttt

SEQ ID NO: 33776 - DNA, 20 bp, synthetic construct
  misc_feature 1..20: note = chemically synthesized
  source 1..20: mol_type = other DNA
gactataatgtgctgtggag

SEQ ID NO: 33777 - DNA, 20 bp, synthetic construct
  misc_feature 1..20: note = chemically synthesized
  source 1..20: mol_type = other DNA
gcattatattatttgggaat

SEQ ID NO: 33778 - DNA, 20 bp, synthetic construct
  misc_feature 1..20: note = chemically synthesized
  source 1..20: mol_type = other DNA
tacatttcttgctagacttg

SEQ ID NO: 33779 - DNA, 20 bp, synthetic construct
  misc_feature 1..20: note = chemically synthesized
  source 1..20: mol_type = other DNA
ttcagctattgtgttgttac

SEQ ID NO: 33780 - DNA, 20 bp, synthetic construct
  misc_feature 1..20: note = chemically synthesized
  source 1..20: mol_type = other DNA
ttcaagttctgaaatttttc

SEQ ID NO: 33781 - DNA, 20 bp, synthetic construct
  misc_feature 1..20: note = chemically synthesized
  source 1..20: mol_type = other DNA
tgcttgatctgatctattgt

SEQ ID NO: 33782 - DNA, 20 bp, synthetic construct
  misc_feature 1..20: note = chemically synthesized
  source 1..20: mol_type = other DNA
aaactcttcagttacagaat

SEQ ID NO: 33783 - DNA, 20 bp, synthetic construct
  misc_feature 1..20: note = chemically synthesized
  source 1..20: mol_type = other DNA
aatttctcattcatatcctg

SEQ ID NO: 33784 - DNA, 20 bp, synthetic construct
  misc_feature 1..20: note = chemically synthesized
  source 1..20: mol_type = other DNA
attcatatcctgaattgttt

SEQ ID NO: 33785 - DNA, 20 bp, synthetic construct
  misc_feature 1..20: note = chemically synthesized
  source 1..20: mol_type = other DNA
ttgtttttctgatttctttt

SEQ ID NO: 33786 - DNA, 20 bp, synthetic construct
  misc_feature 1..20: note = chemically synthesized
  source 1..20: mol_type = other DNA
ctgagttctcttgtgtctca

SEQ ID NO: 33787 - DNA, 20 bp, synthetic construct
  misc_feature 1..20: note = chemically synthesized
  source 1..20: mol_type = other DNA
agcttccttaatatcaacat

SEQ ID NO: 33788 - DNA, 20 bp, synthetic construct
  misc_feature 1..20: note = chemically synthesized
  source 1..20: mol_type = other DNA
tataaatgtcttttttttcc

SEQ ID NO: 33789 - DNA, 20 bp, synthetic construct
  misc_feature 1..20: note = chemically synthesized
  source 1..20: mol_type = other DNA
tgtcatatttcttcaccttt

SEQ ID NO: 33790 - DNA, 20 bp, synthetic construct
  misc_feature 1..20: note = chemically synthesized
  source 1..20: mol_type = other DNA
tgatatctctgcatctggtg

SEQ ID NO: 33791 - DNA, 20 bp, synthetic construct
  misc_feature 1..20: note = chemically synthesized
  source 1..20: mol_type = other DNA
tctgcatctggtgtaatgat

SEQ ID NO: 33792 - DNA, 20 bp, synthetic construct
  misc_feature 1..20: note = chemically synthesized
  source 1..20: mol_type = other DNA
ctggtgtaatgattgctgct

SEQ ID NO: 33793 - DNA, 20 bp, synthetic construct
  misc_feature 1..20: note = chemically synthesized
  source 1..20: mol_type = other DNA
tgctgcttccagttttgtaa

SEQ ID NO: 33794 - DNA, 20 bp, synthetic construct
  misc_feature 1..20: note = chemically synthesized
  source 1..20: mol_type = other DNA
tttctgaagatgtatcttgg

SEQ ID NO: 33795 - DNA, 20 bp, synthetic construct
  misc_feature 1..20: note = chemically synthesized
  source 1..20: mol_type = other DNA
ggtgttgattgagtagggca

SEQ ID NO: 33796 - DNA, 20 bp, synthetic construct
  misc_feature 1..20: note = chemically synthesized
  source 1..20: mol_type = other DNA
gattgagtagggcactttga

SEQ ID NO: 33797 - DNA, 20 bp, synthetic construct
  misc_feature 1..20: note = chemically synthesized
  source 1..20: mol_type = other DNA
gccaacagtatcatcagtgt

SEQ ID NO: 33798 - DNA, 20 bp, synthetic construct
  misc_feature 1..20: note = chemically synthesized
  source 1..20: mol_type = other DNA
tcagtgtctgtgattttttc

SEQ ID NO: 33799 - DNA, 20 bp, synthetic construct
  misc_feature 1..20: note = chemically synthesized
  source 1..20: mol_type = other DNA
gatggtaatgagtctagttg

SEQ ID NO: 33800 - DNA, 20 bp, synthetic construct
  misc_feature 1..20: note = chemically synthesized
  source 1..20: mol_type = other DNA
ggttgattctttggccttca

SEQ ID NO: 33801 - DNA, 20 bp, synthetic construct
  misc_feature 1..20: note = chemically synthesized
  source 1..20: mol_type = other DNA
gattctttggccttcaggca

SEQ ID NO: 33802 - DNA, 20 bp, synthetic construct
  misc_feature 1..20: note = chemically synthesized
  source 1..20: mol_type = other DNA
ctgggctggtgtgtgggtcc

SEQ ID NO: 33803 - DNA, 20 bp, synthetic construct
  misc_feature 1..20: note = chemically synthesized
  source 1..20: mol_type = other DNA
gtgccagttgtgatggcagt

SEQ ID NO: 33804 - DNA, 20 bp, synthetic construct
  misc_feature 1..20: note = chemically synthesized
  source 1..20: mol_type = other DNA
cagattgggtaggcccatca

SEQ ID NO: 33805 - DNA, 20 bp, synthetic construct
  misc_feature 1..20: note = chemically synthesized
  source 1..20: mol_type = other DNA
catcatcaggcttctgggag

SEQ ID NO: 33806 - DNA, 20 bp, synthetic construct
  misc_feature 1..20: note = chemically synthesized
  source 1..20: mol_type = other DNA
tgtctctgggttcccagaca

SEQ ID NO: 33807 - DNA, 20 bp, synthetic construct
  misc_feature 1..20: note = chemically synthesized
  source 1..20: mol_type = other DNA
tcttgaaggggtgcggggtg

SEQ ID NO: 33808 - DNA, 20 bp, synthetic construct
  misc_feature 1..20: note = chemically synthesized
  source 1..20: mol_type = other DNA
taaatgggttgctggtgggc

SEQ ID NO: 33809 - DNA, 20 bp, synthetic construct
  misc_feature 1..20: note = chemically synthesized
  source 1..20: mol_type = other DNA
agtggggtagcattttctta

SEQ ID NO: 33810 - DNA, 20 bp, synthetic construct
  misc_feature 1..20: note = chemically synthesized
  source 1..20: mol_type = other DNA
ctgtgggtgggggatgtcag

SEQ ID NO: 33811 - DNA, 20 bp, synthetic construct
  misc_feature 1..20: note = chemically synthesized
  source 1..20: mol_type = other DNA
ttctctggagcaatgccttt

SEQ ID NO: 33812 - DNA, 20 bp, synthetic construct
  misc_feature 1..20: note = chemically synthesized
  source 1..20: mol_type = other DNA
gtcaagggactctcctgtgg

SEQ ID NO: 33813 - DNA, 20 bp, synthetic construct
  misc_feature 1..20: note = chemically synthesized
  source 1..20: mol_type = other DNA
tcacagaggatccctactgg

SEQ ID NO: 33814 - DNA, 20 bp, synthetic construct
  misc_feature 1..20: note = chemically synthesized
  source 1..20: mol_type = other DNA
gatccctactgggtaggctt

SEQ ID NO: 33815 - DNA, 20 bp, synthetic construct
  misc_feature 1..20: note = chemically synthesized
  source 1..20: mol_type = other DNA
tccctccccttcattgcctt

SEQ ID NO: 33816 - DNA, 20 bp, synthetic construct
  misc_feature 1..20: note = chemically synthesized
  source 1..20: mol_type = other DNA
attccagaattctctcttat

SEQ ID NO: 33817 - DNA, 20 bp, synthetic construct
  misc_feature 1..20: note = chemically synthesized
  source 1..20: mol_type = other DNA
gccccttcccttgaaatttt

SEQ ID NO: 33818 - DNA, 20 bp, synthetic construct
  misc_feature 1..20: note = chemically synthesized
  source 1..20: mol_type = other DNA
cccttgaaattttttaagct

SEQ ID NO: 33819 - DNA, 20 bp, synthetic construct
  misc_feature 1..20: note = chemically synthesized
  source 1..20: mol_type = other DNA
agaagtagcgaattagttaa

SEQ ID NO: 33820 - DNA, 20 bp, synthetic construct
  misc_feature 1..20: note = chemically synthesized
  source 1..20: mol_type = other DNA
ttcatttcccaaatcaaatc

SEQ ID NO: 33821 - DNA, 20 bp, synthetic construct
  misc_feature 1..20: note = chemically synthesized
  source 1..20: mol_type = other DNA
ttatgttcttcagcaaataa

SEQ ID NO: 33822 - DNA, 20 bp, synthetic construct
  misc_feature 1..20: note = chemically synthesized
  source 1..20: mol_type = other DNA
atacgtaatctaacaaacaa

SEQ ID NO: 33823 - DNA, 20 bp, synthetic construct
  misc_feature 1..20: note = chemically synthesized
  source 1..20: mol_type = other DNA
gatgcatagttgcaaataaa

SEQ ID NO: 33824 - DNA, 20 bp, synthetic construct
  misc_feature 1..20: note = chemically synthesized
  source 1..20: mol_type = other DNA
aattttgcatttttgtggat

SEQ ID NO: 33825 - DNA, 20 bp, synthetic construct
  misc_feature 1..20: note = chemically synthesized
  source 1..20: mol_type = other DNA
ttgtggatagtggttttgaa

SEQ ID NO: 33826 - DNA, 20 bp, synthetic construct
  misc_feature 1..20: note = chemically synthesized
  source 1..20: mol_type = other DNA
tagttgcccttgcaaattgg

SEQ ID NO: 33827 - DNA, 20 bp, synthetic construct
  misc_feature 1..20: note = chemically synthesized
  source 1..20: mol_type = other DNA
tttcctcaacaaataatttt

SEQ ID NO: 33828 - DNA, 20 bp, synthetic construct
  misc_feature 1..20: note = chemically synthesized
  source 1..20: mol_type = other DNA
atgacatcaatttatgttaa

SEQ ID NO: 33829 - DNA, 20 bp, synthetic construct
  misc_feature 1..20: note = chemically synthesized
  source 1..20: mol_type = other DNA
tgtctgttcttgtccagtct

SEQ ID NO: 33830 - DNA, 20 bp, synthetic construct
  misc_feature 1..20: note = chemically synthesized
  source 1..20: mol_type = other DNA
ttcttgtccagtctagaagt

SEQ ID NO: 33831 - DNA, 20 bp, synthetic construct
  misc_feature 1..20: note = chemically synthesized
  source 1..20: mol_type = other DNA
ctcatcacataacatctgaa

SEQ ID NO: 33832 - DNA, 20 bp, synthetic construct
  misc_feature 1..20: note = chemically synthesized
  source 1..20: mol_type = other DNA
attatcagactctgctcaat

SEQ ID NO: 33833 - DNA, 20 bp, synthetic construct
  misc_feature 1..20: note = chemically synthesized
  source 1..20: mol_type = other DNA
agatgaaattcttaaggaca

SEQ ID NO: 33834 - DNA, 20 bp, synthetic construct
  misc_feature 1..20: note = chemically synthesized
  source 1..20: mol_type = other DNA
cttgtgtagactcatatgaa

SEQ ID NO: 33835 - DNA, 20 bp, synthetic construct
  misc_feature 1..20: note = chemically synthesized
  source 1..20: mol_type = other DNA
atgaagttctactttgtgac

SEQ ID NO: 33836 - DNA, 20 bp, synthetic construct
  misc_feature 1..20: note = chemically synthesized
  source 1..20: mol_type = other DNA
accattgattgtgactattg

SEQ ID NO: 33837 - DNA, 20 bp, synthetic construct
  misc_feature 1..20: note = chemically synthesized
  source 1..20: mol_type = other DNA
ctgtagtctgatgaaatgga

SEQ ID NO: 33838 - DNA, 20 bp, synthetic construct
  misc_feature 1..20: note = chemically synthesized
  source 1..20: mol_type = other DNA
aagtaatatataagtaataa

SEQ ID NO: 33839 - DNA, 20 bp, synthetic construct
  misc_feature 1..20: note = chemically synthesized
  source 1..20: mol_type = other DNA
attgctttttgcaattgagt

SEQ ID NO: 33840 - DNA, 20 bp, synthetic construct
  misc_feature 1..20: note = chemically synthesized
  source 1..20: mol_type = other DNA
atgccaggatcttattacct

SEQ ID NO: 33841 - DNA, 20 bp, synthetic construct
  misc_feature 1..20: note = chemically synthesized
  source 1..20: mol_type = other DNA
tattacctccaggatttcac

SEQ ID NO: 33842 - DNA, 20 bp, synthetic construct
  misc_feature 1..20: note = chemically synthesized
  source 1..20: mol_type = other DNA
aaagtattgctcaagtaatc

SEQ ID NO: 33843 - DNA, 20 bp, synthetic construct
  misc_feature 1..20: note = chemically synthesized
  source 1..20: mol_type = other DNA
gattatttgtgtattctcac

SEQ ID NO: 33844 - DNA, 20 bp, synthetic construct
  misc_feature 1..20: note = chemically synthesized
  source 1..20: mol_type = other DNA
tgtcacgggaaatatcctgc

SEQ ID NO: 33845 - DNA, 20 bp, synthetic construct
  misc_feature 1..20: note = chemically synthesized
  source 1..20: mol_type = other DNA
tctttccttgcacactctac

SEQ ID NO: 33846 - DNA, 20 bp, synthetic construct
  misc_feature 1..20: note = chemically synthesized
  source 1..20: mol_type = other DNA
aattaccccattaagtgata

SEQ ID NO: 33847 - DNA, 20 bp, synthetic construct
  misc_feature 1..20: note = chemically synthesized
  source 1..20: mol_type = other DNA
tatgtactagttcgttatca

SEQ ID NO: 33848 - DNA, 20 bp, synthetic construct
  misc_feature 1..20: note = chemically synthesized
  source 1..20: mol_type = other DNA
ctgggtaatttataaggaaa

SEQ ID NO: 33849 - DNA, 20 bp, synthetic construct
  misc_feature 1..20: note = chemically synthesized
  source 1..20: mol_type = other DNA
tgccaagcaaaagggggaaa

SEQ ID NO: 33850 - DNA, 20 bp, synthetic construct
  misc_feature 1..20: note = chemically synthesized
  source 1..20: mol_type = other DNA
gagcatgagagtaacctcct

SEQ ID NO: 33851 - DNA, 20 bp, synthetic construct
  misc_feature 1..20: note = chemically synthesized
  source 1..20: mol_type = other DNA
caaatccctcccacaacacg

SEQ ID NO: 33852 - DNA, 20 bp, synthetic construct
  misc_feature 1..20: note = chemically synthesized
  source 1..20: mol_type = other DNA
tatgggaactacaattcaag

SEQ ID NO: 33853 - DNA, 20 bp, synthetic construct
  misc_feature 1..20: note = chemically synthesized
  source 1..20: mol_type = other DNA
atgttgcatagtggtgaagt

SEQ ID NO: 33854 - DNA, 20 bp, synthetic construct
  misc_feature 1..20: note = chemically synthesized
  source 1..20: mol_type = other DNA
agtgaatgttgtatccaatc

SEQ ID NO: 33855 - DNA, 20 bp, synthetic construct
  misc_feature 1..20: note = chemically synthesized
  source 1..20: mol_type = other DNA
tattatttcattctatatgt

SEQ ID NO: 33856 - DNA, 20 bp, synthetic construct
  misc_feature 1..20: note = chemically synthesized
  source 1..20: mol_type = other DNA
tctatatgtctatgcttact

SEQ ID NO: 33857 - DNA, 20 bp, synthetic construct
  misc_feature 1..20: note = chemically synthesized
  source 1..20: mol_type = other DNA
tctcactaaatgagaacata

SEQ ID NO: 33858 - DNA, 20 bp, synthetic construct
  misc_feature 1..20: note = chemically synthesized
  source 1..20: mol_type = other DNA
agaacatactgtgtttgact

SEQ ID NO: 33859 - DNA, 20 bp, synthetic construct
  misc_feature 1..20: note = chemically synthesized
  source 1..20: mol_type = other DNA
ataatgtcctccagttctaa

SEQ ID NO: 33860 - DNA, 20 bp, synthetic construct
  misc_feature 1..20: note = chemically synthesized
  source 1..20: mol_type = other DNA
taaccatgtttctagagaag

SEQ ID NO: 33861 - DNA, 20 bp, synthetic construct
  misc_feature 1..20: note = chemically synthesized
  source 1..20: mol_type = other DNA
cgtccattggtagacattta

SEQ ID NO: 33862 - DNA, 20 bp, synthetic construct
  misc_feature 1..20: note = chemically synthesized
  source 1..20: mol_type = other DNA
ctttgggtccatacccagta

SEQ ID NO: 33863 - DNA, 20 bp, synthetic construct
  misc_feature 1..20: note = chemically synthesized
  source 1..20: mol_type = other DNA
ccatacccagtagtgggatt

SEQ ID NO: 33864 - DNA, 20 bp, synthetic construct
  misc_feature 1..20: note = chemically synthesized
  source 1..20: mol_type = other DNA
attgcaggattgaatggtag

SEQ ID NO: 33865 - DNA, 20 bp, synthetic construct
  misc_feature 1..20: note = chemically synthesized
  source 1..20: mol_type = other DNA
aatcttcatgctgtcttcca

SEQ ID NO: 33866 - DNA, 20 bp, synthetic construct
  misc_feature 1..20: note = chemically synthesized
  source 1..20: mol_type = other DNA
tccacatcctcaccaacatc

SEQ ID NO: 33867 - DNA, 20 bp, synthetic construct
  misc_feature 1..20: note = chemically synthesized
  source 1..20: mol_type = other DNA
ggcataaggaggtatcatat

SEQ ID NO: 33868 - DNA, 20 bp, synthetic construct
  misc_feature 1..20: note = chemically synthesized
  source 1..20: mol_type = other DNA
tggtggttttaatttgcatt

SEQ ID NO: 33869 - DNA, 20 bp, synthetic construct
  misc_feature 1..20: note = chemically synthesized
  source 1..20: mol_type = other DNA
agtgatgttgaacttttttt

SEQ ID NO: 33870 - DNA, 20 bp, synthetic construct
  misc_feature 1..20: note = chemically synthesized
  source 1..20: mol_type = other DNA
tagatagatagatagataga

SEQ ID NO: 33871 - DNA, 20 bp, synthetic construct
  misc_feature 1..20: note = chemically synthesized
  source 1..20: mol_type = other DNA
atatagatttagatataaaa

SEQ ID NO: 33872 - DNA, 20 bp, synthetic construct
  misc_feature 1..20: note = chemically synthesized
  source 1..20: mol_type = other DNA
aagctgaaggacttggagtc

SEQ ID NO: 33873 - DNA, 20 bp, synthetic construct
  misc_feature 1..20: note = chemically synthesized
  source 1..20: mol_type = other DNA
atccagcatgggagaaagat

SEQ ID NO: 33874 - DNA, 20 bp, synthetic construct
  misc_feature 1..20: note = chemically synthesized
  source 1..20: mol_type = other DNA
ggcttggaggctaagccagt

SEQ ID NO: 33875 - DNA, 20 bp, synthetic construct
  misc_feature 1..20: note = chemically synthesized
  source 1..20: mol_type = other DNA
taagccagtccaggattttc

SEQ ID NO: 33876 - DNA, 20 bp, synthetic construct
  misc_feature 1..20: note = chemically synthesized
  source 1..20: mol_type = other DNA
ttttcacatgttttttttct

SEQ ID NO: 33877 - DNA, 20 bp, synthetic construct
  misc_feature 1..20: note = chemically synthesized
  source 1..20: mol_type = other DNA
tatatcctggccacactggc

SEQ ID NO: 33878 - DNA, 20 bp, synthetic construct
  misc_feature 1..20: note = chemically synthesized
  source 1..20: mol_type = other DNA
aactgattagatggtgccca

SEQ ID NO: 33879 - DNA, 20 bp, synthetic construct
  misc_feature 1..20: note = chemically synthesized
  source 1..20: mol_type = other DNA
agtattaaccatcacaagtc

SEQ ID NO: 33880 - DNA, 20 bp, synthetic construct
  misc_feature 1..20: note = chemically synthesized
  source 1..20: mol_type = other DNA
acaagtgtatacagacacga

SEQ ID NO: 33881 - DNA, 20 bp, synthetic construct
  misc_feature 1..20: note = chemically synthesized
  source 1..20: mol_type = other DNA
tcctgcctggaatggcctgt

SEQ ID NO: 33882 - DNA, 20 bp, synthetic construct
  misc_feature 1..20: note = chemically synthesized
  source 1..20: mol_type = other DNA
ggatctcctatattccatgc

SEQ ID NO: 33883 - DNA, 20 bp, synthetic construct
  misc_feature 1..20: note = chemically synthesized
  source 1..20: mol_type = other DNA
acctccattgtggagttgta

SEQ ID NO: 33884 - DNA, 20 bp, synthetic construct
  misc_feature 1..20: note = chemically synthesized
  source 1..20: mol_type = other DNA
tccaggtggcaatcttaatt

SEQ ID NO: 33885 - DNA, 20 bp, synthetic construct
  misc_feature 1..20: note = chemically synthesized
  source 1..20: mol_type = other DNA
cttccacttccacttccacc

SEQ ID NO: 33886 - DNA, 20 bp, synthetic construct
  misc_feature 1..20: note = chemically synthesized
  source 1..20: mol_type = other DNA
aaacagtaccatatattgga

SEQ ID NO: 33887 - DNA, 20 bp, synthetic construct
  misc_feature 1..20: note = chemically synthesized
  source 1..20: mol_type = other DNA
acttcaaaaggccattcaaa

SEQ ID NO: 33888 - DNA, 20 bp, synthetic construct
  misc_feature 1..20: note = chemically synthesized
  source 1..20: mol_type = other DNA
acttctttagccataaagtg

SEQ ID NO: 33889 - DNA, 20 bp, synthetic construct
  misc_feature 1..20: note = chemically synthesized
  source 1..20: mol_type = other DNA
atgacagtggatacggcatt

SEQ ID NO: 33890 - DNA, 20 bp, synthetic construct
  misc_feature 1..20: note = chemically synthesized
  source 1..20: mol_type = other DNA
tcttggcataagcattgagt

SEQ ID NO: 33891 - DNA, 20 bp, synthetic construct
  misc_feature 1..20: note = chemically synthesized
  source 1..20: mol_type = other DNA
ccgaggaatggtgccatatc

SEQ ID NO: 33892 - DNA, 20 bp, synthetic construct
  misc_feature 1..20: note = chemically synthesized
  source 1..20: mol_type = other DNA
caagcagtggctgtggccag

SEQ ID NO: 33893 - DNA, 20 bp, synthetic construct
  misc_feature 1..20: note = chemically synthesized
  source 1..20: mol_type = other DNA
cagaattgatcatcctatcc

SEQ ID NO: 33894 - DNA, 20 bp, synthetic construct
  misc_feature 1..20: note = chemically synthesized
  source 1..20: mol_type = other DNA
acatgggatgaaaatatctt

SEQ ID NO: 33895 - DNA, 20 bp, synthetic construct
  misc_feature 1..20: note = chemically synthesized
  source 1..20: mol_type = other DNA
ctttgtcatcaattttccag

SEQ ID NO: 33896 - DNA, 20 bp, synthetic construct
  misc_feature 1..20: note = chemically synthesized
  source 1..20: mol_type = other DNA
gctcaaagttctgccaacta

SEQ ID NO: 33897 - DNA, 20 bp, synthetic construct
  misc_feature 1..20: note = chemically synthesized
  source 1..20: mol_type = other DNA
tgatgactcatagtcaaata

SEQ ID NO: 33898 - DNA, 20 bp, synthetic construct
  misc_feature 1..20: note = chemically synthesized
  source 1..20: mol_type = other DNA
ccaaagcccagtaacaggcc

SEQ ID NO: 33899 - DNA, 20 bp, synthetic construct
  misc_feature 1..20: note = chemically synthesized
  source 1..20: mol_type = other DNA
caaaatcctagaggcctccg

SEQ ID NO: 33900 - DNA, 20 bp, synthetic construct
  misc_feature 1..20: note = chemically synthesized
  source 1..20: mol_type = other DNA
tcatatggcccaagtggcat

SEQ ID NO: 33901 - DNA, 20 bp, synthetic construct
  misc_feature 1..20: note = chemically synthesized
  source 1..20: mol_type = other DNA
gtagaaggtccctgaattta

SEQ ID NO: 33902 - DNA, 20 bp, synthetic construct
  misc_feature 1..20: note = chemically synthesized
  source 1..20: mol_type = other DNA
atgtctcatcaataaatcca

SEQ ID NO: 33903 - DNA, 20 bp, synthetic construct
  misc_feature 1..20: note = chemically synthesized
  source 1..20: mol_type = other DNA
ggtgagcaagttctctccaa

SEQ ID NO: 33904 - DNA, 20 bp, synthetic construct
  misc_feature 1..20: note = chemically synthesized
  source 1..20: mol_type = other DNA
ccaaccaacttcactatgtt

SEQ ID NO: 33905 - DNA, 20 bp, synthetic construct
  misc_feature 1..20: note = chemically synthesized
  source 1..20: mol_type = other DNA
actctctaaacaattgatgc

SEQ ID NO: 33906 - DNA, 20 bp, synthetic construct
  misc_feature 1..20: note = chemically synthesized
  source 1..20: mol_type = other DNA
ctctatatctatatctatat

SEQ ID NO: 33907 - DNA, 20 bp, synthetic construct
  misc_feature 1..20: note = chemically synthesized
  source 1..20: mol_type = other DNA
tagccttttcacatttttct

SEQ ID NO: 33908 - DNA, 20 bp, synthetic construct
  misc_feature 1..20: note = chemically synthesized
  source 1..20: mol_type = other DNA
tatatcctggctgtgctggc

SEQ ID NO: 33909 - DNA, 20 bp, synthetic construct
  misc_feature 1..20: note = chemically synthesized
  source 1..20: mol_type = other DNA
aactgattagatggtgccca

SEQ ID NO: 33910 - DNA, 20 bp, synthetic construct
  misc_feature 1..20: note = chemically synthesized
  source 1..20: mol_type = other DNA
cacagtcactttctaatgag

SEQ ID NO: 33911 - DNA, 20 bp, synthetic construct
  misc_feature 1..20: note = chemically synthesized
  source 1..20: mol_type = other DNA
ttttttgttgttgagttcct

SEQ ID NO: 33912 - DNA, 20 bp, synthetic construct
  misc_feature 1..20: note = chemically synthesized
  source 1..20: mol_type = other DNA
tattagccttttgttgcatt

SEQ ID NO: 33913 - DNA, 20 bp, synthetic construct
  misc_feature 1..20: note = chemically synthesized
  source 1..20: mol_type = other DNA
tttttctcattctgtaggtt

SEQ ID NO: 33914 - DNA, 20 bp, synthetic construct
  misc_feature 1..20: note = chemically synthesized
  source 1..20: mol_type = other DNA
tgtaggttatccgtttactc

SEQ ID NO: 33915 - DNA, 20 bp, synthetic construct
  misc_feature 1..20: note = chemically synthesized
  source 1..20: mol_type = other DNA
cttttgcggtgcagaagcat

SEQ ID NO: 33916 - DNA, 20 bp, synthetic construct
  misc_feature 1..20: note = chemically synthesized
  source 1..20: mol_type = other DNA
agtttaattaagtcccattt

SEQ ID NO: 33917 - DNA, 20 bp, synthetic construct
  misc_feature 1..20: note = chemically synthesized
  source 1..20: mol_type = other DNA
attaagtcccatttgtctgt

SEQ ID NO: 33918 - DNA, 20 bp, synthetic construct
  misc_feature 1..20: note = chemically synthesized
  source 1..20: mol_type = other DNA
tttgtctgtttttgtttttg

SEQ ID NO: 33919 - DNA, 20 bp, synthetic construct
  misc_feature 1..20: note = chemically synthesized
  source 1..20: mol_type = other DNA
ctgtttttgtttttgttgtg

SEQ ID NO: 33920 - DNA, 20 bp, synthetic construct
  misc_feature 1..20: note = chemically synthesized
  source 1..20: mol_type = other DNA
aagttgactagttcagtgta

SEQ ID NO: 33921 - DNA, 20 bp, synthetic construct
  misc_feature 1..20: note = chemically synthesized
  source 1..20: mol_type = other DNA
tttctaattttttgccatca

SEQ ID NO: 33922 - DNA, 20 bp, synthetic construct
  misc_feature 1..20: note = chemically synthesized
  source 1..20: mol_type = other DNA
tctccttaattttcccccag

SEQ ID NO: 33923 - DNA, 20 bp, synthetic construct
  misc_feature 1..20: note = chemically synthesized
  source 1..20: mol_type = other DNA
ttccaaatgtatccatatat

SEQ ID NO: 33924 - DNA, 20 bp, synthetic construct
  misc_feature 1..20: note = chemically synthesized
  source 1..20: mol_type = other DNA
tgtatccatatattgtggct

SEQ ID NO: 33925 - DNA, 20 bp, synthetic construct
  misc_feature 1..20: note = chemically synthesized
  source 1..20: mol_type = other DNA
tattagaggagagaattaag

SEQ ID NO: 33926 - DNA, 20 bp, synthetic construct
  misc_feature 1..20: note = chemically synthesized
  source 1..20: mol_type = other DNA
agacaccgagttaaagaagg

SEQ ID NO: 33927 - DNA, 20 bp, synthetic construct
  misc_feature 1..20: note = chemically synthesized
  source 1..20: mol_type = other DNA
aggaagggctttattcggct

SEQ ID NO: 33928 - DNA, 20 bp, synthetic construct
  misc_feature 1..20: note = chemically synthesized
  source 1..20: mol_type = other DNA
gagcaattcctgtccctttt

SEQ ID NO: 33929 - DNA, 20 bp, synthetic construct
  misc_feature 1..20: note = chemically synthesized
  source 1..20: mol_type = other DNA
cagaatggaacagaacagga

SEQ ID NO: 33930 - DNA, 20 bp, synthetic construct
  misc_feature 1..20: note = chemically synthesized
  source 1..20: mol_type = other DNA
gaacaggacagggattttca

SEQ ID NO: 33931 - DNA, 20 bp, synthetic construct
  misc_feature 1..20: note = chemically synthesized
  source 1..20: mol_type = other DNA
aggcccaggatgtggtctca

SEQ ID NO: 33932 - DNA, 20 bp, synthetic construct
  misc_feature 1..20: note = chemically synthesized
  source 1..20: mol_type = other DNA
gtggtctcaggctgtttgcc

SEQ ID NO: 33933 - DNA, 20 bp, synthetic construct
  misc_feature 1..20: note = chemically synthesized
  source 1..20: mol_type = other DNA
tgtggatttcatttctgcct

SEQ ID NO: 33934 - DNA, 20 bp, synthetic construct
  misc_feature 1..20: note = chemically synthesized
  source 1..20: mol_type = other DNA
atgaaatacgtatttgtgtt

SEQ ID NO: 33935 - DNA, 20 bp, synthetic construct
  misc_feature 1..20: note = chemically synthesized
  source 1..20: mol_type = other DNA
gttctccttatcaaaaggta

SEQ ID NO: 33936 - DNA, 20 bp, synthetic construct
  misc_feature 1..20: note = chemically synthesized
  source 1..20: mol_type = other DNA
ttatcaaaaggtactttgct

SEQ ID NO: 33937 - DNA, 20 bp, synthetic construct
  misc_feature 1..20: note = chemically synthesized
  source 1..20: mol_type = other DNA
ctttaaaagataaatgacta

SEQ ID NO: 33938 - DNA, 20 bp, synthetic construct
  misc_feature 1..20: note = chemically synthesized
  source 1..20: mol_type = other DNA
gataaatgactatgtagctt

SEQ ID NO: 33939 - DNA, 20 bp, synthetic construct
  misc_feature 1..20: note = chemically synthesized
  source 1..20: mol_type = other DNA
agaaggaggaagagaggtga

SEQ ID NO: 33940 - DNA, 20 bp, synthetic construct
  misc_feature 1..20: note = chemically synthesized
  source 1..20: mol_type = other DNA
ctttgacactacaaagtgac

SEQ ID NO: 33941 - DNA, 20 bp, synthetic construct
  misc_feature 1..20: note = chemically synthesized
  source 1..20: mol_type = other DNA
tttgaaaggtaaataaatcc

SEQ ID NO: 33942 - DNA, 20 bp, synthetic construct
  misc_feature 1..20: note = chemically synthesized
  source 1..20: mol_type = other DNA
aacagttggaggcatctata

SEQ ID NO: 33943 - DNA, 22 bp, synthetic construct
  misc_feature 1..22: note = chemically synthesized
  source 1..22: mol_type = other DNA
gcagccatgcttattcattgcg

SEQ ID NO: 33944 - DNA, 22 bp, synthetic construct
  misc_feature 1..22: note = chemically synthesized
  source 1..22: mol_type = other DNA
attcattgcgtccactgctctt

SEQ ID NO: 33945 - DNA, 22 bp, synthetic construct
  misc_feature 1..22: note = chemically synthesized
  source 1..22: mol_type = other DNA
ttcattgcgtccactgctcttc

SEQ ID NO: 33946 - DNA, 22 bp, synthetic construct
  misc_feature 1..22: note = chemically synthesized
  source 1..22: mol_type = other DNA
attgcgtccactgctcttctga

SEQ ID NO: 33947 - DNA, 22 bp, synthetic construct
  misc_feature 1..22: note = chemically synthesized
  source 1..22: mol_type = other DNA
cgtccactgctcttctgacagc

SEQ ID NO: 33948 - DNA, 22 bp, synthetic construct
  misc_feature 1..22: note = chemically synthesized
  source 1..22: mol_type = other DNA
ctcttctgacagcatcatttac

SEQ ID NO: 33949 - DNA, 22 bp, synthetic construct
  misc_feature 1..22: note = chemically synthesized
  source 1..22: mol_type = other DNA
ttctgacagcatcatttacagg

SEQ ID NO: 33950 - DNA, 22 bp, synthetic construct
  misc_feature 1..22: note = chemically synthesized
  source 1..22: mol_type = other DNA
ctgacagcatcatttacaggtt

SEQ ID NO: 33951 - DNA, 22 bp, synthetic construct
  misc_feature 1..22: note = chemically synthesized
  source 1..22: mol_type = other DNA
tgacagcatcatttacaggttc

SEQ ID NO: 33952 - DNA, 22 bp, synthetic construct
  misc_feature 1..22: note = chemically synthesized
  source 1..22: mol_type = other DNA
acagcatcatttacaggttcac

SEQ ID NO: 33953 - DNA, 22 bp, synthetic construct
  misc_feature 1..22: note = chemically synthesized
  source 1..22: mol_type = other DNA
acaggttcacactgttccacct

SEQ ID NO: 33954 - DNA, 22 bp, synthetic construct
  misc_feature 1..22: note = chemically synthesized
  source 1..22: mol_type = other DNA
caggttcacactgttccacctg

SEQ ID NO: 33955 - DNA, 22 bp, synthetic construct
  misc_feature 1..22: note = chemically synthesized
  source 1..22: mol_type = other DNA
acactgttccacctgagtcttc

SEQ ID NO: 33956 - DNA, 22 bp, synthetic construct
  misc_feature 1..22: note = chemically synthesized
  source 1..22: mol_type = other DNA
ttccacctgagtcttcatatta

SEQ ID NO: 33957 - DNA, 22 bp, synthetic construct
  misc_feature 1..22: note = chemically synthesized
  source 1..22: mol_type = other DNA
cacctgagtcttcatattatgc

SEQ ID NO: 33958 - DNA, 22 bp, synthetic construct
  misc_feature 1..22: note = chemically synthesized
  source 1..22: mol_type = other DNA
agtcttcatattatgctcaaaa

SEQ ID NO: 33959 - DNA, 22 bp, synthetic construct
  misc_feature 1..22: note = chemically synthesized
  source 1..22: mol_type = other DNA
catattatgctcaaaatatgga

SEQ ID NO: 33960 - DNA, 22 bp, synthetic construct
  misc_feature 1..22: note = chemically synthesized
  source 1..22: mol_type = other DNA
atattatgctcaaaatatggac

SEQ ID NO: 33961 - DNA, 22 bp, synthetic construct
  misc_feature 1..22: note = chemically synthesized
  source 1..22: mol_type = other DNA
tgctcaaaatatggacctatca

SEQ ID NO: 33962 - DNA, 22 bp, synthetic construct
  misc_feature 1..22: note = chemically synthesized
  source 1..22: mol_type = other DNA
aaaatatggacctatcagaaaa

SEQ ID NO: 33963 - DNA, 22 bp, synthetic construct
  misc_feature 1..22: note = chemically synthesized
  source 1..22: mol_type = other DNA
tcagaaaatagttctctcccca

SEQ ID NO: 33964 - DNA, 22 bp, synthetic construct
  misc_feature 1..22: note = chemically synthesized
  source 1..22: mol_type = other DNA
tctccccattcatctgctgttg

SEQ ID NO: 33965 - DNA, 22 bp, synthetic construct
  misc_feature 1..22: note = chemically synthesized
  source 1..22: mol_type = other DNA
tccccattcatctgctgttgtt

SEQ ID NO: 33966 - DNA, 22 bp, synthetic construct
  misc_feature 1..22: note = chemically synthesized
  source 1..22: mol_type = other DNA
cccattcatctgctgttgtttt

SEQ ID NO: 33967 - DNA, 22 bp, synthetic construct
  misc_feature 1..22: note = chemically synthesized
  source 1..22: mol_type = other DNA
atctgctgttgttttggccttt

SEQ ID NO: 33968 - DNA, 22 bp, synthetic construct
  misc_feature 1..22: note = chemically synthesized
  source 1..22: mol_type = other DNA
ctgttgttttggcctttgtctg

SEQ ID NO: 33969 - DNA, 22 bp, synthetic construct
  misc_feature 1..22: note = chemically synthesized
  source 1..22: mol_type = other DNA
ttgttttggcctttgtctgaat

SEQ ID NO: 33970 - DNA, 22 bp, synthetic construct
  misc_feature 1..22: note = chemically synthesized
  source 1..22: mol_type = other DNA
ttttggcctttgtctgaatcac

SEQ ID NO: 33971 - DNA, 22 bp, synthetic construct
  misc_feature 1..22: note = chemically synthesized
  source 1..22: mol_type = other DNA
tggcctttgtctgaatcacagt

SEQ ID NO: 33972 - DNA, 22 bp, synthetic construct
  misc_feature 1..22: note = chemically synthesized
  source 1..22: mol_type = other DNA
ggcctttgtctgaatcacagta

SEQ ID NO: 33973 - DNA, 22 bp, synthetic construct
  misc_feature 1..22: note = chemically synthesized
  source 1..22: mol_type = other DNA
gcctttgtctgaatcacagtat

SEQ ID NO: 33974 - DNA, 22 bp, synthetic construct
  misc_feature 1..22: note = chemically synthesized
  source 1..22: mol_type = other DNA
tgtctgaatcacagtatagatg

SEQ ID NO: 33975 - DNA, 22 bp, synthetic construct
  misc_feature 1..22: note = chemically synthesized
  source 1..22: mol_type = other DNA
gtctgaatcacagtatagatgc

SEQ ID NO: 33976 - DNA, 22 bp, synthetic construct
  misc_feature 1..22: note = chemically synthesized
  source 1..22: mol_type = other DNA
tctgaatcacagtatagatgcc

SEQ ID NO: 33977 - DNA, 22 bp, synthetic construct
  misc_feature 1..22: note = chemically synthesized
  source 1..22: mol_type = other DNA
aatcacagtatagatgcctcca

SEQ ID NO: 33978 - DNA, 22 bp, synthetic construct
  misc_feature 1..22: note = chemically synthesized
  source 1..22: mol_type = other DNA
caactgttaaaaggaaaaaagt

SEQ ID NO: 33979 - DNA, 22 bp, synthetic construct
  misc_feature 1..22: note = chemically synthesized
  source 1..22: mol_type = other DNA
ttaaaaggaaaaaagtttctat

SEQ ID NO: 33980 - DNA, 22 bp, synthetic construct
  misc_feature 1..22: note = chemically synthesized
  source 1..22: mol_type = other DNA
aaaggaaaaaagtttctattat

SEQ ID NO: 33981 - DNA, 22 bp, synthetic construct
  misc_feature 1..22: note = chemically synthesized
  source 1..22: mol_type = other DNA
ctattatcattcaggttagcaa

SEQ ID NO: 33982 - DNA, 22 bp, synthetic construct
  misc_feature 1..22: note = chemically synthesized
  source 1..22: mol_type = other DNA
tattatcattcaggttagcaat

SEQ ID NO: 33983 - DNA, 22 bp, synthetic construct
  misc_feature 1..22: note = chemically synthesized
  source 1..22: mol_type = other DNA
ttatcattcaggttagcaattt

SEQ ID NO: 33984 - DNA, 22 bp, synthetic construct
  misc_feature 1..22: note = chemically synthesized
  source 1..22: mol_type = other DNA
tcattcaggttagcaatttgtt

SEQ ID NO: 33985 - DNA, 22 bp, synthetic construct
  misc_feature 1..22: note = chemically synthesized
  source 1..22: mol_type = other DNA
aggttagcaatttgtttaaagt

SEQ ID NO: 33986 - DNA, 22 bp, synthetic construct
  misc_feature 1..22: note = chemically synthesized
  source 1..22: mol_type = other DNA
gcaatttgtttaaagtaataag

SEQ ID NO: 33987 - DNA, 22 bp, synthetic construct
  misc_feature 1..22: note = chemically synthesized
  source 1..22: mol_type = other DNA
gtttaaagtaataagggatgga

SEQ ID NO: 33988 - DNA, 22 bp, synthetic construct
  misc_feature 1..22: note = chemically synthesized
  source 1..22: mol_type = other DNA
tttaaagtaataagggatggaa

SEQ ID NO: 33989 - DNA, 22 bp, synthetic construct
  misc_feature 1..22: note = chemically synthesized
  source 1..22: mol_type = other DNA
aaagtaataagggatggaaatg

SEQ ID NO: 33990 - DNA, 22 bp, synthetic construct
  misc_feature 1..22: note = chemically synthesized
  source 1..22: mol_type = other DNA
aagtaataagggatggaaatga

SEQ ID NO: 33991 - DNA, 22 bp, synthetic construct
  misc_feature 1..22: note = chemically synthesized
  source 1..22: mol_type = other DNA
agatttttaaattagcatttag

SEQ ID NO: 33992 - DNA, 22 bp, synthetic construct
  misc_feature 1..22: note = chemically synthesized
  source 1..22: mol_type = other DNA
ttaaattagcatttaggatcca

SEQ ID NO: 33993 - DNA, 22 bp, synthetic construct
  misc_feature 1..22: note = chemically synthesized
  source 1..22: mol_type = other DNA
taaattagcatttaggatccac

SEQ ID NO: 33994 - DNA, 22 bp, synthetic construct
  misc_feature 1..22: note = chemically synthesized
  source 1..22: mol_type = other DNA
aaattagcatttaggatccact

SEQ ID NO: 33995 - DNA, 22 bp, synthetic construct
  misc_feature 1..22: note = chemically synthesized
  source 1..22: mol_type = other DNA
aattagcatttaggatccacta

SEQ ID NO: 33996 - DNA, 22 bp, synthetic construct
  misc_feature 1..22: note = chemically synthesized
  source 1..22: mol_type = other DNA
gcatttaggatccactaagccc

SEQ ID NO: 33997 - DNA, 22 bp, synthetic construct
  misc_feature 1..22: note = chemically synthesized
  source 1..22: mol_type = other DNA
aggatccactaagcccaaggat

SEQ ID NO: 33998 - DNA, 22 bp, synthetic construct
  misc_feature 1..22: note = chemically synthesized
  source 1..22: mol_type = other DNA
ggatccactaagcccaaggatt

SEQ ID NO: 33999 - DNA, 22 bp, synthetic construct
  misc_feature 1..22: note = chemically synthesized
  source 1..22: mol_type = other DNA
agcccaaggatttatttacctt

SEQ ID NO: 34000 - DNA, 22 bp, synthetic construct
  misc_feature 1..22: note = chemically synthesized
  source 1..22: mol_type = other DNA
atttacctttcaaaaataatag

SEQ ID NO: 34001 - DNA, 22 bp, synthetic construct
  misc_feature 1..22: note = chemically synthesized
  source 1..22: mol_type = other DNA
tttacctttcaaaaataatagt

SEQ ID NO: 34002 - DNA, 22 bp, synthetic construct
  misc_feature 1..22: note = chemically synthesized
  source 1..22: mol_type = other DNA
acctttcaaaaataatagtatt

SEQ ID NO: 34003 - DNA, 22 bp, synthetic construct
  misc_feature 1..22: note = chemically synthesized
  source 1..22: mol_type = other DNA
cctttcaaaaataatagtattt

SEQ ID NO: 34004 - DNA, 22 bp, synthetic construct
  misc_feature 1..22: note = chemically synthesized
  source 1..22: mol_type = other DNA
tcaaaaataatagtatttgaca

SEQ ID NO: 34005 - DNA, 22 bp, synthetic construct
  misc_feature 1..22: note = chemically synthesized
  source 1..22: mol_type = other DNA
caaaaataatagtatttgacat

SEQ ID NO: 34006 - DNA, 22 bp, synthetic construct
  misc_feature 1..22: note = chemically synthesized
  source 1..22: mol_type = other DNA
aaaaataatagtatttgacata

SEQ ID NO: 34007 - DNA, 22 bp, synthetic construct
  misc_feature 1..22: note = chemically synthesized
  source 1..22: mol_type = other DNA
gacatattgttaagggacacca

SEQ ID NO: 34008 - DNA, 22 bp, synthetic construct
  misc_feature 1..22: note = chemically synthesized
  source 1..22: mol_type = other DNA
acatattgttaagggacaccaa

SEQ ID NO: 34009 - DNA, 22 bp, synthetic construct
  misc_feature 1..22: note = chemically synthesized
  source 1..22: mol_type = other DNA
ttaagggacaccaacgaatggt

SEQ ID NO: 34010 - DNA, 22 bp, synthetic construct
  misc_feature 1..22: note = chemically synthesized
  source 1..22: mol_type = other DNA
agggacaccaacgaatggttac

SEQ ID NO: 34011 - DNA, 22 bp, synthetic construct
  misc_feature 1..22: note = chemically synthesized
  source 1..22: mol_type = other DNA
ctgctttgttcaattctgtgca

SEQ ID NO: 34012 - DNA, 22 bp, synthetic construct
  misc_feature 1..22: note = chemically synthesized
  source 1..22: mol_type = other DNA
ctttgttcaattctgtgcatgt

SEQ ID NO: 34013 - DNA, 22 bp, synthetic construct
  misc_feature 1..22: note = chemically synthesized
  source 1..22: mol_type = other DNA
tgttcaattctgtgcatgtttt

SEQ ID NO: 34014 - DNA, 22 bp, synthetic construct
  misc_feature 1..22: note = chemically synthesized
  source 1..22: mol_type = other DNA
gttcaattctgtgcatgtttta

SEQ ID NO: 34015 - DNA, 22 bp, synthetic construct
  misc_feature 1..22: note = chemically synthesized
  source 1..22: mol_type = other DNA
ttcaattctgtgcatgttttaa

SEQ ID NO: 34016 - DNA, 22 bp, synthetic construct
  misc_feature 1..22: note = chemically synthesized
  source 1..22: mol_type = other DNA
aattctgtgcatgttttaaagt

SEQ ID NO: 34017 - DNA, 22 bp, synthetic construct
  misc_feature 1..22: note = chemically synthesized
  source 1..22: mol_type = other DNA
tgtgcatgttttaaagtccctt

SEQ ID NO: 34018 - DNA, 22 bp, synthetic construct
  misc_feature 1..22: note = chemically synthesized
  source 1..22: mol_type = other DNA
tgcatgttttaaagtcccttct

SEQ ID NO: 34019 - DNA, 22 bp, synthetic construct
  misc_feature 1..22: note = chemically synthesized
  source 1..22: mol_type = other DNA
taaagtcccttctaggtgcatg

SEQ ID NO: 34020 - DNA, 22 bp, synthetic construct
  misc_feature 1..22: note = chemically synthesized
  source 1..22: mol_type = other DNA
aaagtcccttctaggtgcatgt

SEQ ID NO: 34021 - DNA, 22 bp, synthetic construct
  misc_feature 1..22: note = chemically synthesized
  source 1..22: mol_type = other DNA
aagtcccttctaggtgcatgtg

SEQ ID NO: 34022 - DNA, 22 bp, synthetic construct
  misc_feature 1..22: note = chemically synthesized
  source 1..22: mol_type = other DNA
ctaggtgcatgtgaaatagcag

SEQ ID NO: 34023 - DNA, 22 bp, synthetic construct
  misc_feature 1..22: note = chemically synthesized
  source 1..22: mol_type = other DNA
taggtgcatgtgaaatagcagc

SEQ ID NO: 34024 - DNA, 22 bp, synthetic construct
  misc_feature 1..22: note = chemically synthesized
  source 1..22: mol_type = other DNA
ggtgcatgtgaaatagcagcag

SEQ ID NO: 34025 - DNA, 22 bp, synthetic construct
  misc_feature 1..22: note = chemically synthesized
  source 1..22: mol_type = other DNA
atgccgcaaagaggtcaaatac

SEQ ID NO: 34026 - DNA, 22 bp, synthetic construct
  misc_feature 1..22: note = chemically synthesized
  source 1..22: mol_type = other DNA
aaaaagaaagagtctgaaaaga

SEQ ID NO: 34027 - DNA, 22 bp, synthetic construct
  misc_feature 1..22: note = chemically synthesized
  source 1..22: mol_type = other DNA
aaaagacaattggagtaactac

SEQ ID NO: 34028 - DNA, 22 bp, synthetic construct
  misc_feature 1..22: note = chemically synthesized
  source 1..22: mol_type = other DNA
gagtaactacttgcctaaagct

SEQ ID NO: 34029 - DNA, 22 bp, synthetic construct
  misc_feature 1..22: note = chemically synthesized
  source 1..22: mol_type = other DNA
cttgcctaaagctccagtcact

SEQ ID NO: 34030 - DNA, 22 bp, synthetic construct
  misc_feature 1..22: note = chemically synthesized
  source 1..22: mol_type = other DNA
gcctaaagctccagtcactttg

SEQ ID NO: 34031 - DNA, 22 bp, synthetic construct
  misc_feature 1..22: note = chemically synthesized
  source 1..22: mol_type = other DNA
cctaaagctccagtcactttgt

SEQ ID NO: 34032 - DNA, 22 bp, synthetic construct
  misc_feature 1..22: note = chemically synthesized
  source 1..22: mol_type = other DNA
aagctccagtcactttgtagtg

SEQ ID NO: 34033 - DNA, 22 bp, synthetic construct
  misc_feature 1..22: note = chemically synthesized
  source 1..22: mol_type = other DNA
cagtcactttgtagtgtcaaag

SEQ ID NO: 34034 - DNA, 22 bp, synthetic construct
  misc_feature 1..22: note = chemically synthesized
  source 1..22: mol_type = other DNA
tgtagtgtcaaagttaggacaa

SEQ ID NO: 34035 - DNA, 22 bp, synthetic construct
  misc_feature 1..22: note = chemically synthesized
  source 1..22: mol_type = other DNA
gtagtgtcaaagttaggacaaa

SEQ ID NO: 34036 - DNA, 22 bp, synthetic construct
  misc_feature 1..22: note = chemically synthesized
  source 1..22: mol_type = other DNA
tagtgtcaaagttaggacaaat

SEQ ID NO: 34037 - DNA, 22 bp, synthetic construct
  misc_feature 1..22: note = chemically synthesized
  source 1..22: mol_type = other DNA
ggacaaatacccattgtcatca

SEQ ID NO: 34038 - DNA, 22 bp, synthetic construct
  misc_feature 1..22: note = chemically synthesized
  source 1..22: mol_type = other DNA
tcatcatacatgccctcagcag

SEQ ID NO: 34039 - DNA, 22 bp, synthetic construct
  misc_feature 1..22: note = chemically synthesized
  source 1..22: mol_type = other DNA
agcagcagaaatcactttcacc

SEQ ID NO: 34040 - DNA, 22 bp, synthetic construct
  misc_feature 1..22: note = chemically synthesized
  source 1..22: mol_type = other DNA
tcacctctcttcctccttctcc

SEQ ID NO: 34041 - DNA, 22 bp, synthetic construct
  misc_feature 1..22: note = chemically synthesized
  source 1..22: mol_type = other DNA
cacctctcttcctccttctcct

SEQ ID NO: 34042 - DNA, 22 bp, synthetic construct
  misc_feature 1..22: note = chemically synthesized
  source 1..22: mol_type = other DNA
acctctcttcctccttctccta

SEQ ID NO: 34043 - DNA, 22 bp, synthetic construct
  misc_feature 1..22: note = chemically synthesized
  source 1..22: mol_type = other DNA
tcttcctccttctcctacagtg

SEQ ID NO: 34044 - DNA, 22 bp, synthetic construct
  misc_feature 1..22: note = chemically synthesized
  source 1..22: mol_type = other DNA
ttcctccttctcctacagtggt

SEQ ID NO: 34045 - DNA, 22 bp, synthetic construct
  misc_feature 1..22: note = chemically synthesized
  source 1..22: mol_type = other DNA
cctccttctcctacagtggtcc

SEQ ID NO: 34046 - DNA, 22 bp, synthetic construct
  misc_feature 1..22: note = chemically synthesized
  source 1..22: mol_type = other DNA
ctccttctcctacagtggtcca

SEQ ID NO: 34047 - DNA, 22 bp, synthetic construct
  misc_feature 1..22: note = chemically synthesized
  source 1..22: mol_type = other DNA
cttctcctacagtggtccagaa

SEQ ID NO: 34048 - DNA, 22 bp, synthetic construct
  misc_feature 1..22: note = chemically synthesized
  source 1..22: mol_type = other DNA
ctcctacagtggtccagaaggg

SEQ ID NO: 34049 - DNA, 22 bp, synthetic construct
  misc_feature 1..22: note = chemically synthesized
  source 1..22: mol_type = other DNA
tcctacagtggtccagaagggg

SEQ ID NO: 34050 - DNA, 22 bp, synthetic construct
  misc_feature 1..22: note = chemically synthesized
  source 1..22: mol_type = other DNA
ctacagtggtccagaaggggct

SEQ ID NO: 34051 - DNA, 22 bp, synthetic construct
  misc_feature 1..22: note = chemically synthesized
  source 1..22: mol_type = other DNA
cagtggtccagaaggggctcag

SEQ ID NO: 34052 - DNA, 22 bp, synthetic construct
  misc_feature 1..22: note = chemically synthesized
  source 1..22: mol_type = other DNA
aggtatgttcaaataacagctg

SEQ ID NO: 34053 - DNA, 22 bp, synthetic construct
  misc_feature 1..22: note = chemically synthesized
  source 1..22: mol_type = other DNA
aaataacagctgctgtggtttt

SEQ ID NO: 34054 - DNA, 22 bp, synthetic construct
  misc_feature 1..22: note = chemically synthesized
  source 1..22: mol_type = other DNA
ctgtggttttcaattatgaaga

SEQ ID NO: 34055 - DNA, 22 bp, synthetic construct
  misc_feature 1..22: note = chemically synthesized
  source 1..22: mol_type = other DNA
tggttttcaattatgaagaaat

SEQ ID NO: 34056 - DNA, 22 bp, synthetic construct
  misc_feature 1..22: note = chemically synthesized
  source 1..22: mol_type = other DNA
tcaattatgaagaaatctccta

SEQ ID NO: 34057 - DNA, 22 bp, synthetic construct
  misc_feature 1..22: note = chemically synthesized
  source 1..22: mol_type = other DNA
caattatgaagaaatctcctaa

SEQ ID NO: 34058 - DNA, 22 bp, synthetic construct
  misc_feature 1..22: note = chemically synthesized
  source 1..22: mol_type = other DNA
aattatgaagaaatctcctaag

SEQ ID NO: 34059 - DNA, 22 bp, synthetic construct
  misc_feature 1..22: note = chemically synthesized
  source 1..22: mol_type = other DNA
tgaagaaatctcctaagctaca

SEQ ID NO: 34060 - DNA, 22 bp, synthetic construct
  misc_feature 1..22: note = chemically synthesized
  source 1..22: mol_type = other DNA
ctaagctacatagtcatttatc

SEQ ID NO: 34061 - DNA, 22 bp, synthetic construct
  misc_feature 1..22: note = chemically synthesized
  source 1..22: mol_type = other DNA
agctacatagtcatttatcttt

SEQ ID NO: 34062 - DNA, 22 bp, synthetic construct
  misc_feature 1..22: note = chemically synthesized
  source 1..22: mol_type = other DNA
catagtcatttatcttttaaag

SEQ ID NO: 34063 - DNA, 22 bp, synthetic construct
  misc_feature 1..22: note = chemically synthesized
  source 1..22: mol_type = other DNA
atcttttaaagcaccaagcaaa

SEQ ID NO: 34064 - DNA, 22 bp, synthetic construct
  misc_feature 1..22: note = chemically synthesized
  source 1..22: mol_type = other DNA
tcttttaaagcaccaagcaaag

SEQ ID NO: 34065 - DNA, 22 bp, synthetic construct
  misc_feature 1..22: note = chemically synthesized
  source 1..22: mol_type = other DNA
ttaaagcaccaagcaaagtacc

SEQ ID NO: 34066 - DNA, 22 bp, synthetic construct
  misc_feature 1..22: note = chemically synthesized
  source 1..22: mol_type = other DNA
taaagcaccaagcaaagtacct

SEQ ID NO: 34067 - DNA, 22 bp, synthetic construct
  misc_feature 1..22: note = chemically synthesized
  source 1..22: mol_type = other DNA
aaagcaccaagcaaagtacctt

SEQ ID NO: 34068 - DNA, 22 bp, synthetic construct
  misc_feature 1..22: note = chemically synthesized
  source 1..22: mol_type = other DNA
aagcaccaagcaaagtaccttt

SEQ ID NO: 34069 - DNA, 22 bp, synthetic construct
  misc_feature 1..22: note = chemically synthesized
  source 1..22: mol_type = other DNA
ttgataaggagaacgtgcttat

SEQ ID NO: 34070 - DNA, 22 bp, synthetic construct
  misc_feature 1..22: note = chemically synthesized
  source 1..22: mol_type = other DNA
tgataaggagaacgtgcttata

SEQ ID NO: 34071 - DNA, 22 bp, synthetic construct
  misc_feature 1..22: note = chemically synthesized
  source 1..22: mol_type = other DNA
gataaggagaacgtgcttatag

SEQ ID NO: 34072 - DNA, 22 bp, synthetic construct
  misc_feature 1..22: note = chemically synthesized
  source 1..22: mol_type = other DNA
ataaggagaacgtgcttataga

SEQ ID NO: 34073 - DNA, 22 bp, synthetic construct
  misc_feature 1..22: note = chemically synthesized
  source 1..22: mol_type = other DNA
atagatgttcatagaagatgct

SEQ ID NO: 34074 - DNA, 22 bp, synthetic construct
  misc_feature 1..22: note = chemically synthesized
  source 1..22: mol_type = other DNA
tagatgttcatagaagatgctt

SEQ ID NO: 34075 - DNA, 22 bp, synthetic construct
  misc_feature 1..22: note = chemically synthesized
  source 1..22: mol_type = other DNA
atagaagatgcttggtccaacc

SEQ ID NO: 34076 - DNA, 22 bp, synthetic construct
  misc_feature 1..22: note = chemically synthesized
  source 1..22: mol_type = other DNA
ggtccaaccccgatgtcaaatc

SEQ ID NO: 34077 - DNA, 22 bp, synthetic construct
  misc_feature 1..22: note = chemically synthesized
  source 1..22: mol_type = other DNA
gtccaaccccgatgtcaaatcc

SEQ ID NO: 34078 - DNA, 22 bp, synthetic construct
  misc_feature 1..22: note = chemically synthesized
  source 1..22: mol_type = other DNA
cattctcacatggtatttctct

SEQ ID NO: 34079 - DNA, 22 bp, synthetic construct
  misc_feature 1..22: note = chemically synthesized
  source 1..22: mol_type = other DNA
attctcacatggtatttctctc

SEQ ID NO: 34080 - DNA, 22 bp, synthetic construct
  misc_feature 1..22: note = chemically synthesized
  source 1..22: mol_type = other DNA
tcacatggtatttctctcttcc

SEQ ID NO: 34081 - DNA, 22 bp, synthetic construct
  misc_feature 1..22: note = chemically synthesized
  source 1..22: mol_type = other DNA
acatggtatttctctcttccta

SEQ ID NO: 34082 - DNA, 22 bp, synthetic construct
  misc_feature 1..22: note = chemically synthesized
  source 1..22: mol_type = other DNA
ctctcttcctagtaagggagga

SEQ ID NO: 34083 - DNA, 22 bp, synthetic construct
  misc_feature 1..22: note = chemically synthesized
  source 1..22: mol_type = other DNA
tctcttcctagtaagggaggag

SEQ ID NO: 34084 - DNA, 22 bp, synthetic construct
  misc_feature 1..22: note = chemically synthesized
  source 1..22: mol_type = other DNA
tcttcctagtaagggaggagac

SEQ ID NO: 34085 - DNA, 22 bp, synthetic construct
  misc_feature 1..22: note = chemically synthesized
  source 1..22: mol_type = other DNA
ttcctagtaagggaggagacca

SEQ ID NO: 34086 - DNA, 22 bp, synthetic construct
  misc_feature 1..22: note = chemically synthesized
  source 1..22: mol_type = other DNA
cctagtaagggaggagaccacc

SEQ ID NO: 34087 - DNA, 22 bp, synthetic construct
  misc_feature 1..22: note = chemically synthesized
  source 1..22: mol_type = other DNA
ctagtaagggaggagaccaccc

SEQ ID NO: 34088 - DNA, 22 bp, synthetic construct
  misc_feature 1..22: note = chemically synthesized
  source 1..22: mol_type = other DNA
gtaagggaggagaccacccttc

SEQ ID NO: 34089 - DNA, 22 bp, synthetic construct
  misc_feature 1..22: note = chemically synthesized
  source 1..22: mol_type = other DNA
catattgttttatgcccaattt

SEQ ID NO: 34090 - DNA, 22 bp, synthetic construct
  misc_feature 1..22: note = chemically synthesized
  source 1..22: mol_type = other DNA
atattgttttatgcccaatttc

SEQ ID NO: 34091 - DNA, 22 bp, synthetic construct
  misc_feature 1..22: note = chemically synthesized
  source 1..22: mol_type = other DNA
ttttatgcccaatttctgcctc

SEQ ID NO: 34092 - DNA, 22 bp, synthetic construct
  misc_feature 1..22: note = chemically synthesized
  source 1..22: mol_type = other DNA
tatgcccaatttctgcctccaa

SEQ ID NO: 34093 - DNA, 22 bp, synthetic construct
  misc_feature 1..22: note = chemically synthesized
  source 1..22: mol_type = other DNA
atgcccaatttctgcctccaaa

SEQ ID NO: 34094 - DNA, 22 bp, synthetic construct
  misc_feature 1..22: note = chemically synthesized
  source 1..22: mol_type = other DNA
tgcccaatttctgcctccaaag

SEQ ID NO: 34095 - DNA, 22 bp, synthetic construct
  misc_feature 1..22: note = chemically synthesized
  source 1..22: mol_type = other DNA
ctgcctccaaagaaagaagaag

SEQ ID NO: 34096 - DNA, 22 bp, synthetic construct
  misc_feature 1..22: note = chemically synthesized
  source 1..22: mol_type = other DNA
tgcctccaaagaaagaagaagt

SEQ ID NO: 34097 - DNA, 22 bp, synthetic construct
  misc_feature 1..22: note = chemically synthesized
  source 1..22: mol_type = other DNA
cctccaaagaaagaagaagtaa

SEQ ID NO: 34098 - DNA, 22 bp, synthetic construct
  misc_feature 1..22: note = chemically synthesized
  source 1..22: mol_type = other DNA
caaagaaagaagaagtaaaaac

SEQ ID NO: 34099 - DNA, 22 bp, synthetic construct
  misc_feature 1..22: note = chemically synthesized
  source 1..22: mol_type = other DNA
aaaggcagaaatgaaatccaca

SEQ ID NO: 34100 - DNA, 22 bp, synthetic construct
  misc_feature 1..22: note = chemically synthesized
  source 1..22: mol_type = other DNA
agaccacatcctgggcctggtt

SEQ ID NO: 34101 - DNA, 22 bp, synthetic construct
  misc_feature 1..22: note = chemically synthesized
  source 1..22: mol_type = other DNA
ggcctggttaaagatagacccc

SEQ ID NO: 34102 - DNA, 22 bp, synthetic construct
  misc_feature 1..22: note = chemically synthesized
  source 1..22: mol_type = other DNA
gttaaagatagacccctgacct

SEQ ID NO: 34103 - DNA, 22 bp, synthetic construct
  misc_feature 1..22: note = chemically synthesized
  source 1..22: mol_type = other DNA
aagatagacccctgacctggcc

SEQ ID NO: 34104 - DNA, 22 bp, synthetic construct
  misc_feature 1..22: note = chemically synthesized
  source 1..22: mol_type = other DNA
acctggccagttatgttatcta

SEQ ID NO: 34105 - DNA, 22 bp, synthetic construct
  misc_feature 1..22: note = chemically synthesized
  source 1..22: mol_type = other DNA
gccagttatgttatctatagat

SEQ ID NO: 34106 - DNA, 22 bp, synthetic construct
  misc_feature 1..22: note = chemically synthesized
  source 1..22: mol_type = other DNA
tgttatctatagattccagaca

SEQ ID NO: 34107 - DNA, 22 bp, synthetic construct
  misc_feature 1..22: note = chemically synthesized
  source 1..22: mol_type = other DNA
tctatagattccagacactgta

SEQ ID NO: 34108 - DNA, 22 bp, synthetic construct
  misc_feature 1..22: note = chemically synthesized
  source 1..22: mol_type = other DNA
tagattccagacactgtatgga

SEQ ID NO: 34109 - DNA, 22 bp, synthetic construct
  misc_feature 1..22: note = chemically synthesized
  source 1..22: mol_type = other DNA
cagacactgtatggaaaagcag

SEQ ID NO: 34110 - DNA, 22 bp, synthetic construct
  misc_feature 1..22: note = chemically synthesized
  source 1..22: mol_type = other DNA
tatggaaaagcagtgtgaaaat

SEQ ID NO: 34111 - DNA, 22 bp, synthetic construct
  misc_feature 1..22: note = chemically synthesized
  source 1..22: mol_type = other DNA
tcctgttctgttccattctgat

SEQ ID NO: 34112 - DNA, 22 bp, synthetic construct
  misc_feature 1..22: note = chemically synthesized
  source 1..22: mol_type = other DNA
ttctgttccattctgatgacca

SEQ ID NO: 34113 - DNA, 22 bp, synthetic construct
  misc_feature 1..22: note = chemically synthesized
  source 1..22: mol_type = other DNA
tgttccattctgatgaccagtg

SEQ ID NO: 34114 - DNA, 22 bp, synthetic construct
  misc_feature 1..22: note = chemically synthesized
  source 1..22: mol_type = other DNA
ttccattctgatgaccagtgca

SEQ ID NO: 34115 - DNA, 22 bp, synthetic construct
  misc_feature 1..22: note = chemically synthesized
  source 1..22: mol_type = other DNA
cattctgatgaccagtgcatgc

SEQ ID NO: 34116 - DNA, 22 bp, synthetic construct
  misc_feature 1..22: note = chemically synthesized
  source 1..22: mol_type = other DNA
tgatgaccagtgcatgcagccc

SEQ ID NO: 34117 - DNA, 22 bp, synthetic construct
  misc_feature 1..22: note = chemically synthesized
  source 1..22: mol_type = other DNA
atgaccagtgcatgcagccccc

SEQ ID NO: 34118 - DNA, 22 bp, synthetic construct
  misc_feature 1..22: note = chemically synthesized
  source 1..22: mol_type = other DNA
agagttgtaagcccttaaaagg

SEQ ID NO: 34119 - DNA, 22 bp, synthetic construct
  misc_feature 1..22: note = chemically synthesized
  source 1..22: mol_type = other DNA
gagttgtaagcccttaaaaggg

SEQ ID NO: 34120 - DNA, 22 bp, synthetic construct
  misc_feature 1..22: note = chemically synthesized
  source 1..22: mol_type = other DNA
taagcccttaaaagggacagga

SEQ ID NO: 34121 - DNA, 22 bp, synthetic construct
  misc_feature 1..22: note = chemically synthesized
  source 1..22: mol_type = other DNA
aaaagggacaggaattgctcac

SEQ ID NO: 34122 - DNA, 22 bp, synthetic construct
  misc_feature 1..22: note = chemically synthesized
  source 1..22: mol_type = other DNA
aaagggacaggaattgctcact

SEQ ID NO: 34123 - DNA, 22 bp, synthetic construct
  misc_feature 1..22: note = chemically synthesized
  source 1..22: mol_type = other DNA
ctcactctgagagcttggttgt

SEQ ID NO: 34124 - DNA, 22 bp, synthetic construct
  misc_feature 1..22: note = chemically synthesized
  source 1..22: mol_type = other DNA
actctgagagcttggttgttgg

SEQ ID NO: 34125 - DNA, 22 bp, synthetic construct
  misc_feature 1..22: note = chemically synthesized
  source 1..22: mol_type = other DNA
tgagagcttggttgttggagat

SEQ ID NO: 34126 - DNA, 22 bp, synthetic construct
  misc_feature 1..22: note = chemically synthesized
  source 1..22: mol_type = other DNA
agagcttggttgttggagatgt

SEQ ID NO: 34127 - DNA, 22 bp, synthetic construct
  misc_feature 1..22: note = chemically synthesized
  source 1..22: mol_type = other DNA
ggttgttggagatgtgagtctt

SEQ ID NO: 34128 - DNA, 22 bp, synthetic construct
  misc_feature 1..22: note = chemically synthesized
  source 1..22: mol_type = other DNA
gttgttggagatgtgagtcttg

SEQ ID NO: 34129 - DNA, 22 bp, synthetic construct
  misc_feature 1..22: note = chemically synthesized
  source 1..22: mol_type = other DNA
ttggagatgtgagtcttgccca

SEQ ID NO: 34130 - DNA, 22 bp, synthetic construct
  misc_feature 1..22: note = chemically synthesized
  source 1..22: mol_type = other DNA
gagatgtgagtcttgcccaagc

SEQ ID NO: 34131 - DNA, 22 bp, synthetic construct
  misc_feature 1..22: note = chemically synthesized
  source 1..22: mol_type = other DNA
gcccaagctcccagccgaataa

SEQ ID NO: 34132 - DNA, 22 bp, synthetic construct
  misc_feature 1..22: note = chemically synthesized
  source 1..22: mol_type = other DNA
cccaagctcccagccgaataaa

SEQ ID NO: 34133 - DNA, 22 bp, synthetic construct
  misc_feature 1..22: note = chemically synthesized
  source 1..22: mol_type = other DNA
ccagccgaataaagcccttcct

SEQ ID NO: 34134 - DNA, 22 bp, synthetic construct
  misc_feature 1..22: note = chemically synthesized
  source 1..22: mol_type = other DNA
ccttctttaactcggtgtctga

SEQ ID NO: 34135 - DNA, 22 bp, synthetic construct
  misc_feature 1..22: note = chemically synthesized
  source 1..22: mol_type = other DNA
cttctttaactcggtgtctgag

SEQ ID NO: 34136 - DNA, 22 bp, synthetic construct
  misc_feature 1..22: note = chemically synthesized
  source 1..22: mol_type = other DNA
ctttaactcggtgtctgagggg

SEQ ID NO: 34137 - DNA, 22 bp, synthetic construct
  misc_feature 1..22: note = chemically synthesized
  source 1..22: mol_type = other DNA
tttaactcggtgtctgaggggt

SEQ ID NO: 34138 - DNA, 22 bp, synthetic construct
  misc_feature 1..22: note = chemically synthesized
  source 1..22: mol_type = other DNA
taactcggtgtctgaggggttt

SEQ ID NO: 34139 - DNA, 22 bp, synthetic construct
  misc_feature 1..22: note = chemically synthesized
  source 1..22: mol_type = other DNA
aactcggtgtctgaggggtttt

SEQ ID NO: 34140 - DNA, 22 bp, synthetic construct
  misc_feature 1..22: note = chemically synthesized
  source 1..22: mol_type = other DNA
actcggtgtctgaggggttttg

SEQ ID NO: 34141 - DNA, 22 bp, synthetic construct
  misc_feature 1..22: note = chemically synthesized
  source 1..22: mol_type = other DNA
ggtgtctgaggggttttgtatg

SEQ ID NO: 34142 - DNA, 22 bp, synthetic construct
  misc_feature 1..22: note = chemically synthesized
  source 1..22: mol_type = other DNA
aggggttttgtatgcagcttgt

SEQ ID NO: 34143 - DNA, 22 bp, synthetic construct
  misc_feature 1..22: note = chemically synthesized
  source 1..22: mol_type = other DNA
tgtatgcagcttgtcctgctac

SEQ ID NO: 34144 - DNA, 22 bp, synthetic construct
  misc_feature 1..22: note = chemically synthesized
  source 1..22: mol_type = other DNA
gtatgcagcttgtcctgctaca

SEQ ID NO: 34145 - DNA, 22 bp, synthetic construct
  misc_feature 1..22: note = chemically synthesized
  source 1..22: mol_type = other DNA
tatgcagcttgtcctgctacac

SEQ ID NO: 34146 - DNA, 22 bp, synthetic construct
  misc_feature 1..22: note = chemically synthesized
  source 1..22: mol_type = other DNA
gtcctgctacactagaatcgtt

SEQ ID NO: 34147 - DNA, 22 bp, synthetic construct
  misc_feature 1..22: note = chemically synthesized
  source 1..22: mol_type = other DNA
tcctgctacactagaatcgttc

SEQ ID NO: 34148 - DNA, 22 bp, synthetic construct
  misc_feature 1..22: note = chemically synthesized
  source 1..22: mol_type = other DNA
ctacactagaatcgttccttaa

SEQ ID NO: 34149 - DNA, 22 bp, synthetic construct
  misc_feature 1..22: note = chemically synthesized
  source 1..22: mol_type = other DNA
cactagaatcgttccttaattc

SEQ ID NO: 34150 - DNA, 22 bp, synthetic construct
  misc_feature 1..22: note = chemically synthesized
  source 1..22: mol_type = other DNA
gaatcgttccttaattctctcc

SEQ ID NO: 34151 - DNA, 22 bp, synthetic construct
  misc_feature 1..22: note = chemically synthesized
  source 1..22: mol_type = other DNA
cttaattctctcctctaatatt

SEQ ID NO: 34152 - DNA, 22 bp, synthetic construct
  misc_feature 1..22: note = chemically synthesized
  source 1..22: mol_type = other DNA
aattctctcctctaatattgct

SEQ ID NO: 34153 - DNA, 22 bp, synthetic construct
  misc_feature 1..22: note = chemically synthesized
  source 1..22: mol_type = other DNA
attctctcctctaatattgctg

SEQ ID NO: 34154 - DNA, 22 bp, synthetic construct
  misc_feature 1..22: note = chemically synthesized
  source 1..22: mol_type = other DNA
tctcctctaatattgctgctac

SEQ ID NO: 34155 - DNA, 22 bp, synthetic construct
  misc_feature 1..22: note = chemically synthesized
  source 1..22: mol_type = other DNA
tcctctaatattgctgctacct

SEQ ID NO: 34156 - DNA, 22 bp, synthetic construct
  misc_feature 1..22: note = chemically synthesized
  source 1..22: mol_type = other DNA
ctctaatattgctgctacctct

SEQ ID NO: 34157 - DNA, 22 bp, synthetic construct
  misc_feature 1..22: note = chemically synthesized
  source 1..22: mol_type = other DNA
taatattgctgctacctctatt

SEQ ID NO: 34158 - DNA, 22 bp, synthetic construct
  misc_feature 1..22: note = chemically synthesized
  source 1..22: mol_type = other DNA
atattgctgctacctctattaa

SEQ ID NO: 34159 - DNA, 22 bp, synthetic construct
  misc_feature 1..22: note = chemically synthesized
  source 1..22: mol_type = other DNA
ctgctacctctattaaaacaca

SEQ ID NO: 34160 - DNA, 22 bp, synthetic construct
  misc_feature 1..22: note = chemically synthesized
  source 1..22: mol_type = other DNA
ctacctctattaaaacacaaag

SEQ ID NO: 34161 - DNA, 22 bp, synthetic construct
  misc_feature 1..22: note = chemically synthesized
  source 1..22: mol_type = other DNA
cctctattaaaacacaaagcca

SEQ ID NO: 34162 - DNA, 22 bp, synthetic construct
  misc_feature 1..22: note = chemically synthesized
  source 1..22: mol_type = other DNA
tattaaaacacaaagccacaat

SEQ ID NO: 34163 - DNA, 22 bp, synthetic construct
  misc_feature 1..22: note = chemically synthesized
  source 1..22: mol_type = other DNA
ttaaaacacaaagccacaatat

SEQ ID NO: 34164 - DNA, 22 bp, synthetic construct
  misc_feature 1..22: note = chemically synthesized
  source 1..22: mol_type = other DNA
aaacacaaagccacaatatatg

SEQ ID NO: 34165 - DNA, 22 bp, synthetic construct
  misc_feature 1..22: note = chemically synthesized
  source 1..22: mol_type = other DNA
ggaaaatatgcacactttggat

SEQ ID NO: 34166 - DNA, 22 bp, synthetic construct
  misc_feature 1..22: note = chemically synthesized
  source 1..22: mol_type = other DNA
gaaaatatgcacactttggatc

SEQ ID NO: 34167 - DNA, 22 bp, synthetic construct
  misc_feature 1..22: note = chemically synthesized
  source 1..22: mol_type = other DNA
tggatccagcaagtccacatct

SEQ ID NO: 34168 - DNA, 22 bp, synthetic construct
  misc_feature 1..22: note = chemically synthesized
  source 1..22: mol_type = other DNA
ggatccagcaagtccacatcta

SEQ ID NO: 34169 - DNA, 22 bp, synthetic construct
  misc_feature 1..22: note = chemically synthesized
  source 1..22: mol_type = other DNA
gatccagcaagtccacatctag

SEQ ID NO: 34170 - DNA, 22 bp, synthetic construct
  misc_feature 1..22: note = chemically synthesized
  source 1..22: mol_type = other DNA
gaaaaccatcctgggggaaaat

SEQ ID NO: 34171 - DNA, 22 bp, synthetic construct
  misc_feature 1..22: note = chemically synthesized
  source 1..22: mol_type = other DNA
ggggaaaattaaggagagtatg

SEQ ID NO: 34172 - DNA, 22 bp, synthetic construct
  misc_feature 1..22: note = chemically synthesized
  source 1..22: mol_type = other DNA
aggagagtatgaaaaggatgtt

SEQ ID NO: 34173 - DNA, 22 bp, synthetic construct
  misc_feature 1..22: note = chemically synthesized
  source 1..22: mol_type = other DNA
actaaagcattatgatggcaaa

SEQ ID NO: 34174 - DNA, 22 bp, synthetic construct
  misc_feature 1..22: note = chemically synthesized
  source 1..22: mol_type = other DNA
ctaaagcattatgatggcaaaa

SEQ ID NO: 34175 - DNA, 22 bp, synthetic construct
  misc_feature 1..22: note = chemically synthesized
  source 1..22: mol_type = other DNA
aagcattatgatggcaaaaaat

SEQ ID NO: 34176 - DNA, 22 bp, synthetic construct
  misc_feature 1..22: note = chemically synthesized
  source 1..22: mol_type = other DNA
tgatggcaaaaaattagaaaca

SEQ ID NO: 34177 - DNA, 22 bp, synthetic construct
  misc_feature 1..22: note = chemically synthesized
  source 1..22: mol_type = other DNA
gaaacaacttacactgaactag

SEQ ID NO: 34178 - DNA, 22 bp, synthetic construct
  misc_feature 1..22: note = chemically synthesized
  source 1..22: mol_type = other DNA
acactgaactagtcaacttact

SEQ ID NO: 34179 - DNA, 22 bp, synthetic construct
  misc_feature 1..22: note = chemically synthesized
  source 1..22: mol_type = other DNA
cactgaactagtcaacttactt

SEQ ID NO: 34180 - DNA, 22 bp, synthetic construct
  misc_feature 1..22: note = chemically synthesized
  source 1..22: mol_type = other DNA
aactagtcaacttacttaacag

SEQ ID NO: 34181 - DNA, 22 bp, synthetic construct
  misc_feature 1..22: note = chemically synthesized
  source 1..22: mol_type = other DNA
gtcaacttacttaacagacaga

SEQ ID NO: 34182 - DNA, 22 bp, synthetic construct
  misc_feature 1..22: note = chemically synthesized
  source 1..22: mol_type = other DNA
acttaacagacagaaggctcaa

SEQ ID NO: 34183 - DNA, 22 bp, synthetic construct
  misc_feature 1..22: note = chemically synthesized
  source 1..22: mol_type = other DNA
cttaacagacagaaggctcaat

SEQ ID NO: 34184 - DNA, 22 bp, synthetic construct
  misc_feature 1..22: note = chemically synthesized
  source 1..22: mol_type = other DNA
aacagacagaaggctcaattag

SEQ ID NO: 34185 - DNA, 22 bp, synthetic construct
  misc_feature 1..22: note = chemically synthesized
  source 1..22: mol_type = other DNA
acagacagaaggctcaattagc

SEQ ID NO: 34186 - DNA, 22 bp, synthetic construct
  misc_feature 1..22: note = chemically synthesized
  source 1..22: mol_type = other DNA
aattagctcatgtgtcaaatgg

SEQ ID NO: 34187 - DNA, 22 bp, synthetic construct
  misc_feature 1..22: note = chemically synthesized
  source 1..22: mol_type = other DNA
gctcatgtgtcaaatgggggta

SEQ ID NO: 34188 - DNA, 22 bp, synthetic construct
  misc_feature 1..22: note = chemically synthesized
  source 1..22: mol_type = other DNA
atgtgtcaaatgggggtaaaat

SEQ ID NO: 34189 - DNA, 22 bp, synthetic construct
  misc_feature 1..22: note = chemically synthesized
  source 1..22: mol_type = other DNA
agtttggagggaaagacaggct

SEQ ID NO: 34190 - DNA, 22 bp, synthetic construct
  misc_feature 1..22: note = chemically synthesized
  source 1..22: mol_type = other DNA
gtttggagggaaagacaggctc

SEQ ID NO: 34191 - DNA, 22 bp, synthetic construct
  misc_feature 1..22: note = chemically synthesized
  source 1..22: mol_type = other DNA
ggagggaaagacaggctctaaa

SEQ ID NO: 34192 - DNA, 22 bp, synthetic construct
  misc_feature 1..22: note = chemically synthesized
  source 1..22: mol_type = other DNA
gagggaaagacaggctctaaaa

SEQ ID NO: 34193 - DNA, 22 bp, synthetic construct
  misc_feature 1..22: note = chemically synthesized
  source 1..22: mol_type = other DNA
taaaagaggattaaaaattaga

SEQ ID NO: 34194 - DNA, 22 bp, synthetic construct
  misc_feature 1..22: note = chemically synthesized
  source 1..22: mol_type = other DNA
aaagaggattaaaaattagatg

SEQ ID NO: 34195 - DNA, 22 bp, synthetic construct
  misc_feature 1..22: note = chemically synthesized
  source 1..22: mol_type = other DNA
aaaattagatgtggcctaggca

SEQ ID NO: 34196 - DNA, 22 bp, synthetic construct
  misc_feature 1..22: note = chemically synthesized
  source 1..22: mol_type = other DNA
gatgtggcctaggcaaagaatt

SEQ ID NO: 34197 - DNA, 22 bp, synthetic construct
  misc_feature 1..22: note = chemically synthesized
  source 1..22: mol_type = other DNA
ggcaaagaatttatgaccaagt

SEQ ID NO: 34198 - DNA, 22 bp, synthetic construct
  misc_feature 1..22: note = chemically synthesized
  source 1..22: mol_type = other DNA
atgaccaagtcctcaaaactaa

SEQ ID NO: 34199 - DNA, 22 bp, synthetic construct
  misc_feature 1..22: note = chemically synthesized
  source 1..22: mol_type = other DNA
tgaccaagtcctcaaaactaaa

SEQ ID NO: 34200 - DNA, 22 bp, synthetic construct
  misc_feature 1..22: note = chemically synthesized
  source 1..22: mol_type = other DNA
aaaactaaacacaacaaaaaca

SEQ ID NO: 34201 - DNA, 22 bp, synthetic construct
  misc_feature 1..22: note = chemically synthesized
  source 1..22: mol_type = other DNA
aacacaacaaaaacaaaaacag

SEQ ID NO: 34202 - DNA, 22 bp, synthetic construct
  misc_feature 1..22: note = chemically synthesized
  source 1..22: mol_type = other DNA
aattaaactaaaatgcttctgc

SEQ ID NO: 34203 - DNA, 22 bp, synthetic construct
  misc_feature 1..22: note = chemically synthesized
  source 1..22: mol_type = other DNA
attaaactaaaatgcttctgca

SEQ ID NO: 34204 - DNA, 22 bp, synthetic construct
  misc_feature 1..22: note = chemically synthesized
  source 1..22: mol_type = other DNA
aactaaaatgcttctgcaccgc

SEQ ID NO: 34205 - DNA, 22 bp, synthetic construct
  misc_feature 1..22: note = chemically synthesized
  source 1..22: mol_type = other DNA
aaatgcttctgcaccgcaaaag

SEQ ID NO: 34206 - DNA, 22 bp, synthetic construct
  misc_feature 1..22: note = chemically synthesized
  source 1..22: mol_type = other DNA
ctgcaccgcaaaagaccgaatc

SEQ ID NO: 34207 - DNA, 22 bp, synthetic construct
  misc_feature 1..22: note = chemically synthesized
  source 1..22: mol_type = other DNA
tgcaccgcaaaagaccgaatca

SEQ ID NO: 34208 - DNA, 22 bp, synthetic construct
  misc_feature 1..22: note = chemically synthesized
  source 1..22: mol_type = other DNA
caccgcaaaagaccgaatcaac

SEQ ID NO: 34209 - DNA, 22 bp, synthetic construct
  misc_feature 1..22: note = chemically synthesized
  source 1..22: mol_type = other DNA
cagaatgagaaaaaaaaattgc

SEQ ID NO: 34210 - DNA, 22 bp, synthetic construct
  misc_feature 1..22: note = chemically synthesized
  source 1..22: mol_type = other DNA
caaactatgaatgcaacaaaag

SEQ ID NO: 34211 - DNA, 22 bp, synthetic construct
  misc_feature 1..22: note = chemically synthesized
  source 1..22: mol_type = other DNA
tgaatgcaacaaaaggctaata

SEQ ID NO: 34212 - DNA, 22 bp, synthetic construct
  misc_feature 1..22: note = chemically synthesized
  source 1..22: mol_type = other DNA
atatacagaatctacaaggaac

SEQ ID NO: 34213 - DNA, 22 bp, synthetic construct
  misc_feature 1..22: note = chemically synthesized
  source 1..22: mol_type = other DNA
caaggaactcaacaacaaaaaa

SEQ ID NO: 34214 - DNA, 22 bp, synthetic construct
  misc_feature 1..22: note = chemically synthesized
  source 1..22: mol_type = other DNA
aacaacaaaaaaaccaacctca

SEQ ID NO: 34215 - DNA, 22 bp, synthetic construct
  misc_feature 1..22: note = chemically synthesized
  source 1..22: mol_type = other DNA
attagaaagtgactgtgatggt

SEQ ID NO: 34216 - DNA, 22 bp, synthetic construct
  misc_feature 1..22: note = chemically synthesized
  source 1..22: mol_type = other DNA
gaaagtgactgtgatggttaat

SEQ ID NO: 34217 - DNA, 22 bp, synthetic construct
  misc_feature 1..22: note = chemically synthesized
  source 1..22: mol_type = other DNA
tgatggttaatactgagtgtca

SEQ ID NO: 34218 - DNA, 22 bp, synthetic construct
  misc_feature 1..22: note = chemically synthesized
  source 1..22: mol_type = other DNA
atactgagtgtcaacttgattg

SEQ ID NO: 34219 - DNA, 22 bp, synthetic construct
  misc_feature 1..22: note = chemically synthesized
  source 1..22: mol_type = other DNA
agtgtcaacttgattggactga

SEQ ID NO: 34220 - DNA, 22 bp, synthetic construct
  misc_feature 1..22: note = chemically synthesized
  source 1..22: mol_type = other DNA
gattggactgaaggatgcaaag

SEQ ID NO: 34221 - DNA, 22 bp, synthetic construct
  misc_feature 1..22: note = chemically synthesized
  source 1..22: mol_type = other DNA
attggactgaaggatgcaaagt

SEQ ID NO: 34222 - DNA, 22 bp, synthetic construct
  misc_feature 1..22: note = chemically synthesized
  source 1..22: mol_type = other DNA
gactgaaggatgcaaagtaatg

SEQ ID NO: 34223 - DNA, 22 bp, synthetic construct
  misc_feature 1..22: note = chemically synthesized
  source 1..22: mol_type = other DNA
aaggatgcaaagtaatgatctt

SEQ ID NO: 34224 - DNA, 22 bp, synthetic construct
  misc_feature 1..22: note = chemically synthesized
  source 1..22: mol_type = other DNA
gggtgtgtctgtgagggtgtta

SEQ ID NO: 34225 - DNA, 22 bp, synthetic construct
  misc_feature 1..22: note = chemically synthesized
  source 1..22: mol_type = other DNA
ggtgtgtctgtgagggtgttac

SEQ ID NO: 34226 - DNA, 22 bp, synthetic construct
  misc_feature 1..22: note = chemically synthesized
  source 1..22: mol_type = other DNA
tgagggtgttaccaaaggagat

SEQ ID NO: 34227 - DNA, 22 bp, synthetic construct
  misc_feature 1..22: note = chemically synthesized
  source 1..22: mol_type = other DNA
ccaaaggagattaatatttcag

SEQ ID NO: 34228 - DNA, 22 bp, synthetic construct
  misc_feature 1..22: note = chemically synthesized
  source 1..22: mol_type = other DNA
atatttcagtcagtgggctggg

SEQ ID NO: 34229 - DNA, 22 bp, synthetic construct
  misc_feature 1..22: note = chemically synthesized
  source 1..22: mol_type = other DNA
cagtcagtgggctggggaaggc

SEQ ID NO: 34230 - DNA, 22 bp, synthetic construct
  misc_feature 1..22: note = chemically synthesized
  source 1..22: mol_type = other DNA
agtcagtgggctggggaaggca

SEQ ID NO: 34231 - DNA, 22 bp, synthetic construct
  misc_feature 1..22: note = chemically synthesized
  source 1..22: mol_type = other DNA
gggaaggcagacccacccttaa

SEQ ID NO: 34232 - DNA, 22 bp, synthetic construct
  misc_feature 1..22: note = chemically synthesized
  source 1..22: mol_type = other DNA
aatctgggtgggcaccatctaa

SEQ ID NO: 34233 - DNA, 22 bp, synthetic construct
  misc_feature 1..22: note = chemically synthesized
  source 1..22: mol_type = other DNA
atctgggtgggcaccatctaat

SEQ ID NO: 34234 - DNA, 22 bp, synthetic construct
  misc_feature 1..22: note = chemically synthesized
  source 1..22: mol_type = other DNA
ggtgggcaccatctaatcagtt

SEQ ID NO: 34235 - DNA, 22 bp, synthetic construct
  misc_feature 1..22: note = chemically synthesized
  source 1..22: mol_type = other DNA
atcagttgccagcacagccagg

SEQ ID NO: 34236 - DNA, 22 bp, synthetic construct
  misc_feature 1..22: note = chemically synthesized
  source 1..22: mol_type = other DNA
ccagcacagccaggatataaag

SEQ ID NO: 34237 - DNA, 22 bp, synthetic construct
  misc_feature 1..22: note = chemically synthesized
  source 1..22: mol_type = other DNA
gattggcttggcatcccagcct

SEQ ID NO: 34238 - DNA, 22 bp, synthetic construct
  misc_feature 1..22: note = chemically synthesized
  source 1..22: mol_type = other DNA
gcttggcatcccagcctacatt

SEQ ID NO: 34239 - DNA, 22 bp, synthetic construct
  misc_feature 1..22: note = chemically synthesized
  source 1..22: mol_type = other DNA
ggcatcccagcctacatttttc

SEQ ID NO: 34240 - DNA, 22 bp, synthetic construct
  misc_feature 1..22: note = chemically synthesized
  source 1..22: mol_type = other DNA
gcatcccagcctacatttttct

SEQ ID NO: 34241 - DNA, 22 bp, synthetic construct
  misc_feature 1..22: note = chemically synthesized
  source 1..22: mol_type = other DNA
catttttctcccatgctggatt

SEQ ID NO: 34242 - DNA, 22 bp, synthetic construct
  misc_feature 1..22: note = chemically synthesized
  source 1..22: mol_type = other DNA
ttctcccatgctggattcttcc

SEQ ID NO: 34243 - DNA, 22 bp, synthetic construct
  misc_feature 1..22: note = chemically synthesized
  source 1..22: mol_type = other DNA
tctcccatgctggattcttcct

SEQ ID NO: 34244 - DNA, 22 bp, synthetic construct
  misc_feature 1..22: note = chemically synthesized
  source 1..22: mol_type = other DNA
ctcccatgctggattcttcctg

SEQ ID NO: 34245 - DNA, 22 bp, synthetic construct
  misc_feature 1..22: note = chemically synthesized
  source 1..22: mol_type = other DNA
tcccatgctggattcttcctgc

SEQ ID NO: 34246 - DNA, 22 bp, synthetic construct
  misc_feature 1..22: note = chemically synthesized
  source 1..22: mol_type = other DNA
ccatgctggattcttcctgccc

SEQ ID NO: 34247 - DNA, 22 bp, synthetic construct
  misc_feature 1..22: note = chemically synthesized
  source 1..22: mol_type = other DNA
gattcttcctgccctggaacat

SEQ ID NO: 34248 - DNA, 22 bp, synthetic construct
  misc_feature 1..22: note = chemically synthesized
  source 1..22: mol_type = other DNA
ttcctgccctggaacattgaac

SEQ ID NO: 34249 - DNA, 22 bp, synthetic construct
  misc_feature 1..22: note = chemically synthesized
  source 1..22: mol_type = other DNA
cctgccctggaacattgaactc

SEQ ID NO: 34250 - DNA, 22 bp, synthetic construct
  misc_feature 1..22: note = chemically synthesized
  source 1..22: mol_type = other DNA
ctgccctggaacattgaactcc

SEQ ID NO: 34251 - DNA, 22 bp, synthetic construct
  misc_feature 1..22: note = chemically synthesized
  source 1..22: mol_type = other DNA
ccctggaacattgaactccagg

SEQ ID NO: 34252 - DNA, 22 bp, synthetic construct
  misc_feature 1..22: note = chemically synthesized
  source 1..22: mol_type = other DNA
gaacattgaactccaggttctt

SEQ ID NO: 34253 - DNA, 22 bp, synthetic construct
  misc_feature 1..22: note = chemically synthesized
  source 1..22: mol_type = other DNA
aactccaggttcttcagctttg

SEQ ID NO: 34254 - DNA, 22 bp, synthetic construct
  misc_feature 1..22: note = chemically synthesized
  source 1..22: mol_type = other DNA
caggttcttcagctttgggact

SEQ ID NO: 34255 - DNA, 22 bp, synthetic construct
  misc_feature 1..22: note = chemically synthesized
  source 1..22: mol_type = other DNA
ttcagctttgggactccgacta

SEQ ID NO: 34256 - DNA, 22 bp, synthetic construct
  misc_feature 1..22: note = chemically synthesized
  source 1..22: mol_type = other DNA
cagctttgggactccgactagc

SEQ ID NO: 34257 - DNA, 22 bp, synthetic construct
  misc_feature 1..22: note = chemically synthesized
  source 1..22: mol_type = other DNA
agctttgggactccgactagct

SEQ ID NO: 34258 - DNA, 22 bp, synthetic construct
  misc_feature 1..22: note = chemically synthesized
  source 1..22: mol_type = other DNA
tgggactccgactagcttcctt

SEQ ID NO: 34259 - DNA, 22 bp, synthetic construct
  misc_feature 1..22: note = chemically synthesized
  source 1..22: mol_type = other DNA
gggactccgactagcttccttg

SEQ ID NO: 34260 - DNA, 22 bp, synthetic construct
  misc_feature 1..22: note = chemically synthesized
  source 1..22: mol_type = other DNA
ggactccgactagcttccttgt

SEQ ID NO: 34261 - DNA, 22 bp, synthetic construct
  misc_feature 1..22: note = chemically synthesized
  source 1..22: mol_type = other DNA
cgactagcttccttgttcctca

SEQ ID NO: 34262 - DNA, 22 bp, synthetic construct
  misc_feature 1..22: note = chemically synthesized
  source 1..22: mol_type = other DNA
gcttccttgttcctcagctggc

SEQ ID NO: 34263 - DNA, 22 bp, synthetic construct
  misc_feature 1..22: note = chemically synthesized
  source 1..22: mol_type = other DNA
ccttgttcctcagctggcagat

SEQ ID NO: 34264 - DNA, 22 bp, synthetic construct
  misc_feature 1..22: note = chemically synthesized
  source 1..22: mol_type = other DNA
cttgttcctcagctggcagatg

SEQ ID NO: 34265 - DNA, 22 bp, synthetic construct
  misc_feature 1..22: note = chemically synthesized
  source 1..22: mol_type = other DNA
gttcctcagctggcagatggcc

SEQ ID NO: 34266 - DNA, 22 bp, synthetic construct
  misc_feature 1..22: note = chemically synthesized
  source 1..22: mol_type = other DNA
ttcctcagctggcagatggcct

SEQ ID NO: 34267 - DNA, 22 bp, synthetic construct
  misc_feature 1..22: note = chemically synthesized
  source 1..22: mol_type = other DNA
ctcagctggcagatggcctgtt

SEQ ID NO: 34268 - DNA, 22 bp, synthetic construct
  misc_feature 1..22: note = chemically synthesized
  source 1..22: mol_type = other DNA
agctggcagatggcctgttttg

SEQ ID NO: 34269 - DNA, 22 bp, synthetic construct
  misc_feature 1..22: note = chemically synthesized
  source 1..22: mol_type = other DNA
gcagatggcctgttttgggacc

SEQ ID NO: 34270 - DNA, 22 bp, synthetic construct
  misc_feature 1..22: note = chemically synthesized
  source 1..22: mol_type = other DNA
ttttgggaccttgtgaacatgt

SEQ ID NO: 34271 - DNA, 22 bp, synthetic construct
  misc_feature 1..22: note = chemically synthesized
  source 1..22: mol_type = other DNA
tgggaccttgtgaacatgtgag

SEQ ID NO: 34272 - DNA, 22 bp, synthetic construct
  misc_feature 1..22: note = chemically synthesized
  source 1..22: mol_type = other DNA
gggaccttgtgaacatgtgagt

SEQ ID NO: 34273 - DNA, 22 bp, synthetic construct
  misc_feature 1..22: note = chemically synthesized
  source 1..22: mol_type = other DNA
ggaccttgtgaacatgtgagtc

SEQ ID NO: 34274 - DNA, 22 bp, synthetic construct
  misc_feature 1..22: note = chemically synthesized
  source 1..22: mol_type = other DNA
gtgaacatgtgagtcaatacta

SEQ ID NO: 34275 - DNA, 22 bp, synthetic construct
  misc_feature 1..22: note = chemically synthesized
  source 1..22: mol_type = other DNA
tgaacatgtgagtcaatactac

SEQ ID NO: 34276 - DNA, 22 bp, synthetic construct
  misc_feature 1..22: note = chemically synthesized
  source 1..22: mol_type = other DNA
cataataaactctcatatagat

SEQ ID NO: 34277 - DNA, 22 bp, synthetic construct
  misc_feature 1..22: note = chemically synthesized
  source 1..22: mol_type = other DNA
tcatatagatatagatatagag

SEQ ID NO: 34278 - DNA, 22 bp, synthetic construct
  misc_feature 1..22: note = chemically synthesized
  source 1..22: mol_type = other DNA
atatagatatagatatagagat

SEQ ID NO: 34279 - DNA, 22 bp, synthetic construct
  misc_feature 1..22: note = chemically synthesized
  source 1..22: mol_type = other DNA
ctattaattctgtttctctgta

SEQ ID NO: 34280 - DNA, 22 bp, synthetic construct
  misc_feature 1..22: note = chemically synthesized
  source 1..22: mol_type = other DNA
ttaattctgtttctctgtagaa

SEQ ID NO: 34281 - DNA, 22 bp, synthetic construct
  misc_feature 1..22: note = chemically synthesized
  source 1..22: mol_type = other DNA
attctgtttctctgtagaaccc

SEQ ID NO: 34282 - DNA, 22 bp, synthetic construct
  misc_feature 1..22: note = chemically synthesized
  source 1..22: mol_type = other DNA
tgtttctctgtagaaccctaat

SEQ ID NO: 34283 - DNA, 22 bp, synthetic construct
  misc_feature 1..22: note = chemically synthesized
  source 1..22: mol_type = other DNA
tttctctgtagaaccctaatac

SEQ ID NO: 34284 - DNA, 22 bp, synthetic construct
  misc_feature 1..22: note = chemically synthesized
  source 1..22: mol_type = other DNA
ctctgtagaaccctaatacaga

SEQ ID NO: 34285 - DNA, 22 bp, synthetic construct
  misc_feature 1..22: note = chemically synthesized
  source 1..22: mol_type = other DNA
tctgtagaaccctaatacagat

SEQ ID NO: 34286 - DNA, 22 bp, synthetic construct
  misc_feature 1..22: note = chemically synthesized
  source 1..22: mol_type = other DNA
tgtagaaccctaatacagattt

SEQ ID NO: 34287 - DNA, 22 bp, synthetic construct
  misc_feature 1..22: note = chemically synthesized
  source 1..22: mol_type = other DNA
tagaaccctaatacagattttg

SEQ ID NO: 34288 - DNA, 22 bp, synthetic construct
  misc_feature 1..22: note = chemically synthesized
  source 1..22: mol_type = other DNA
atacagattttggtaccaggag

SEQ ID NO: 34289 - DNA, 22 bp, synthetic construct
  misc_feature 1..22: note = chemically synthesized
  source 1..22: mol_type = other DNA
tggtaccaggagtggttctaga

SEQ ID NO: 34290 - DNA, 22 bp, synthetic construct
  misc_feature 1..22: note = chemically synthesized
  source 1..22: mol_type = other DNA
ggtaccaggagtggttctagag

SEQ ID NO: 34291 - DNA, 22 bp, synthetic construct
  misc_feature 1..22: note = chemically synthesized
  source 1..22: mol_type = other DNA
gtaccaggagtggttctagagg

SEQ ID NO: 34292 - DNA, 22 bp, synthetic construct
  misc_feature 1..22: note = chemically synthesized
  source 1..22: mol_type = other DNA
tagaggaacagaatattaagga

SEQ ID NO: 34293 - DNA, 22 bp, synthetic construct
  misc_feature 1..22: note = chemically synthesized
  source 1..22: mol_type = other DNA
gaggaacagaatattaaggatg

SEQ ID NO: 34294 - DNA, 22 bp, synthetic construct
  misc_feature 1..22: note = chemically synthesized
  source 1..22: mol_type = other DNA
aggatggagttctttcattggt

SEQ ID NO: 34295 - DNA, 22 bp, synthetic construct
  misc_feature 1..22: note = chemically synthesized
  source 1..22: mol_type = other DNA
tttcattggttttggggtttct

SEQ ID NO: 34296 - DNA, 22 bp, synthetic construct
  misc_feature 1..22: note = chemically synthesized
  source 1..22: mol_type = other DNA
tcattggttttggggtttctgg

SEQ ID NO: 34297 - DNA, 22 bp, synthetic construct
  misc_feature 1..22: note = chemically synthesized
  source 1..22: mol_type = other DNA
cattggttttggggtttctgga

SEQ ID NO: 34298 - DNA, 22 bp, synthetic construct
  misc_feature 1..22: note = chemically synthesized
  source 1..22: mol_type = other DNA
attggttttggggtttctggag

SEQ ID NO: 34299 - DNA, 22 bp, synthetic construct
  misc_feature 1..22: note = chemically synthesized
  source 1..22: mol_type = other DNA
gttttggggtttctggagttgg

SEQ ID NO: 34300 - DNA, 22 bp, synthetic construct
  misc_feature 1..22: note = chemically synthesized
  source 1..22: mol_type = other DNA
tggggtttctggagttggctgc

SEQ ID NO: 34301 - DNA, 22 bp, synthetic construct
  misc_feature 1..22: note = chemically synthesized
  source 1..22: mol_type = other DNA
ggggtttctggagttggctgct

SEQ ID NO: 34302 - DNA, 22 bp, synthetic construct
  misc_feature 1..22: note = chemically synthesized
  source 1..22: mol_type = other DNA
gggtttctggagttggctgctt

SEQ ID NO: 34303 - DNA, 22 bp, synthetic construct
  misc_feature 1..22: note = chemically synthesized
  source 1..22: mol_type = other DNA
ctggagttggctgcttaatatg

SEQ ID NO: 34304 - DNA, 22 bp, synthetic construct
  misc_feature 1..22: note = chemically synthesized
  source 1..22: mol_type = other DNA
tggagttggctgcttaatatga

SEQ ID NO: 34305 - DNA, 22 bp, synthetic construct
  misc_feature 1..22: note = chemically synthesized
  source 1..22: mol_type = other DNA
gagttggctgcttaatatgatt

SEQ ID NO: 34306 - DNA, 22 bp, synthetic construct
  misc_feature 1..22: note = chemically synthesized
  source 1..22: mol_type = other DNA
gctgcttaatatgattagaccc

SEQ ID NO: 34307 - DNA, 22 bp, synthetic construct
  misc_feature 1..22: note = chemically synthesized
  source 1..22: mol_type = other DNA
cttaatatgattagacccaaat

SEQ ID NO: 34308 - DNA, 22 bp, synthetic construct
  misc_feature 1..22: note = chemically synthesized
  source 1..22: mol_type = other DNA
aatatgattagacccaaatatg

SEQ ID NO: 34309 - DNA, 22 bp, synthetic construct
  misc_feature 1..22: note = chemically synthesized
  source 1..22: mol_type = other DNA
atatgattagacccaaatatgc

SEQ ID NO: 34310 - DNA, 22 bp, synthetic construct
  misc_feature 1..22: note = chemically synthesized
  source 1..22: mol_type = other DNA
gacccaaatatgctaaggactc

SEQ ID NO: 34311 - DNA, 22 bp, synthetic construct
  misc_feature 1..22: note = chemically synthesized
  source 1..22: mol_type = other DNA
aggactcttcttctaatggtat

SEQ ID NO: 34312 - DNA, 22 bp, synthetic construct
  misc_feature 1..22: note = chemically synthesized
  source 1..22: mol_type = other DNA
ttcttctaatggtatggagaac

SEQ ID NO: 34313 - DNA, 22 bp, synthetic construct
  misc_feature 1..22: note = chemically synthesized
  source 1..22: mol_type = other DNA
cttctaatggtatggagaacac

SEQ ID NO: 34314 - DNA, 22 bp, synthetic construct
  misc_feature 1..22: note = chemically synthesized
  source 1..22: mol_type = other DNA
ttctaatggtatggagaacact

SEQ ID NO: 34315 - DNA, 22 bp, synthetic construct
  misc_feature 1..22: note = chemically synthesized
  source 1..22: mol_type = other DNA
ctaatggtatggagaacactga

SEQ ID NO: 34316 - DNA, 22 bp, synthetic construct
  misc_feature 1..22: note = chemically synthesized
  source 1..22: mol_type = other DNA
taatggtatggagaacactgat

SEQ ID NO: 34317 - DNA, 22 bp, synthetic construct
  misc_feature 1..22: note = chemically synthesized
  source 1..22: mol_type = other DNA
atggtatggagaacactgataa

SEQ ID NO: 34318 - DNA, 22 bp, synthetic construct
  misc_feature 1..22: note = chemically synthesized
  source 1..22: mol_type = other DNA
ataatccttggcatcaattgtt

SEQ ID NO: 34319 - DNA, 22 bp, synthetic construct
  misc_feature 1..22: note = chemically synthesized
  source 1..22: mol_type = other DNA
ggcatcaattgtttagagagtt

SEQ ID NO: 34320 - DNA, 22 bp, synthetic construct
  misc_feature 1..22: note = chemically synthesized
  source 1..22: mol_type = other DNA
gcatcaattgtttagagagtta

SEQ ID NO: 34321 - DNA, 22 bp, synthetic construct
  misc_feature 1..22: note = chemically synthesized
  source 1..22: mol_type = other DNA
tttagagagttatgcaaaataa

SEQ ID NO: 34322 - DNA, 22 bp, synthetic construct
  misc_feature 1..22: note = chemically synthesized
  source 1..22: mol_type = other DNA
agagagttatgcaaaataaatg

SEQ ID NO: 34323 - DNA, 22 bp, synthetic construct
  misc_feature 1..22: note = chemically synthesized
  source 1..22: mol_type = other DNA
gagagttatgcaaaataaatgc

SEQ ID NO: 34324 - DNA, 22 bp, synthetic construct
  misc_feature 1..22: note = chemically synthesized
  source 1..22: mol_type = other DNA
tgcaaaataaatgcatttgaca

SEQ ID NO: 34325 - DNA, 22 bp, synthetic construct
  misc_feature 1..22: note = chemically synthesized
  source 1..22: mol_type = other DNA
gacactcttgattcaacgcttg

SEQ ID NO: 34326 - DNA, 22 bp, synthetic construct
  misc_feature 1..22: note = chemically synthesized
  source 1..22: mol_type = other DNA
acactcttgattcaacgcttgt

SEQ ID NO: 34327 - DNA, 22 bp, synthetic construct
  misc_feature 1..22: note = chemically synthesized
  source 1..22: mol_type = other DNA
ttgattcaacgcttgtgagagg

SEQ ID NO: 34328 - DNA, 22 bp, synthetic construct
  misc_feature 1..22: note = chemically synthesized
  source 1..22: mol_type = other DNA
gattcaacgcttgtgagaggca

SEQ ID NO: 34329 - DNA, 22 bp, synthetic construct
  misc_feature 1..22: note = chemically synthesized
  source 1..22: mol_type = other DNA
attcaacgcttgtgagaggcaa

SEQ ID NO: 34330 - DNA, 22 bp, synthetic construct
  misc_feature 1..22: note = chemically synthesized
  source 1..22: mol_type = other DNA
aacgcttgtgagaggcaaggaa

SEQ ID NO: 34331 - DNA, 22 bp, synthetic construct
  misc_feature 1..22: note = chemically synthesized
  source 1..22: mol_type = other DNA
gtgagaggcaaggaatttagct

SEQ ID NO: 34332 - DNA, 22 bp, synthetic construct
  misc_feature 1..22: note = chemically synthesized
  source 1..22: mol_type = other DNA
tgagaggcaaggaatttagcta

SEQ ID NO: 34333 - DNA, 22 bp, synthetic construct
  misc_feature 1..22: note = chemically synthesized
  source 1..22: mol_type = other DNA
agctactgtatacataatactt

SEQ ID NO: 34334 - DNA, 22 bp, synthetic construct
  misc_feature 1..22: note = chemically synthesized
  source 1..22: mol_type = other DNA
gctactgtatacataatacttt

SEQ ID NO: 34335 - DNA, 22 bp, synthetic construct
  misc_feature 1..22: note = chemically synthesized
  source 1..22: mol_type = other DNA
ctgtatacataatacttttgac

SEQ ID NO: 34336 - DNA, 22 bp, synthetic construct
  misc_feature 1..22: note = chemically synthesized
  source 1..22: mol_type = other DNA
tatacataatacttttgactat

SEQ ID NO: 34337 - DNA, 22 bp, synthetic construct
  misc_feature 1..22: note = chemically synthesized
  source 1..22: mol_type = other DNA
ttgactatatgtggagaatcaa

SEQ ID NO: 34338 - DNA, 22 bp, synthetic construct
  misc_feature 1..22: note = chemically synthesized
  source 1..22: mol_type = other DNA
tgactatatgtggagaatcaag

SEQ ID NO: 34339 - DNA, 22 bp, synthetic construct
  misc_feature 1..22: note = chemically synthesized
  source 1..22: mol_type = other DNA
gactatatgtggagaatcaagg

SEQ ID NO: 34340 - DNA, 22 bp, synthetic construct
  misc_feature 1..22: note = chemically synthesized
  source 1..22: mol_type = other DNA
actatatgtggagaatcaagga

SEQ ID NO: 34341 - DNA, 22 bp, synthetic construct
  misc_feature 1..22: note = chemically synthesized
  source 1..22: mol_type = other DNA
tatgtggagaatcaaggaacat

SEQ ID NO: 34342 - DNA, 22 bp, synthetic construct
  misc_feature 1..22: note = chemically synthesized
  source 1..22: mol_type = other DNA
gttggttgcttgtaagttcgct

SEQ ID NO: 34343 - DNA, 22 bp, synthetic construct
  misc_feature 1..22: note = chemically synthesized
  source 1..22: mol_type = other DNA
gttgcttgtaagttcgctggac

SEQ ID NO: 34344 - DNA, 22 bp, synthetic construct
  misc_feature 1..22: note = chemically synthesized
  source 1..22: mol_type = other DNA
cttgtaagttcgctggacaaag

SEQ ID NO: 34345 - DNA, 22 bp, synthetic construct
  misc_feature 1..22: note = chemically synthesized
  source 1..22: mol_type = other DNA
gtaagttcgctggacaaagtga

SEQ ID NO: 34346 - DNA, 22 bp, synthetic construct
  misc_feature 1..22: note = chemically synthesized
  source 1..22: mol_type = other DNA
taagttcgctggacaaagtgat

SEQ ID NO: 34347 - DNA, 22 bp, synthetic construct
  misc_feature 1..22: note = chemically synthesized
  source 1..22: mol_type = other DNA
gctggacaaagtgatgaaagaa

SEQ ID NO: 34348 - DNA, 22 bp, synthetic construct
  misc_feature 1..22: note = chemically synthesized
  source 1..22: mol_type = other DNA
gacaaagtgatgaaagaaaatg

SEQ ID NO: 34349 - DNA, 22 bp, synthetic construct
  misc_feature 1..22: note = chemically synthesized
  source 1..22: mol_type = other DNA
aggagtatatcaactctccagc

SEQ ID NO: 34350 - DNA, 22 bp, synthetic construct
  misc_feature 1..22: note = chemically synthesized
  source 1..22: mol_type = other DNA
tccagctttgtgccataatctt

SEQ ID NO: 34351 - DNA, 22 bp, synthetic construct
  misc_feature 1..22: note = chemically synthesized
  source 1..22: mol_type = other DNA
cagctttgtgccataatcttat

SEQ ID NO: 34352 - DNA, 22 bp, synthetic construct
  misc_feature 1..22: note = chemically synthesized
  source 1..22: mol_type = other DNA
tgtgccataatcttatttggag

SEQ ID NO: 34353 - DNA, 22 bp, synthetic construct
  misc_feature 1..22: note = chemically synthesized
  source 1..22: mol_type = other DNA
gtgccataatcttatttggaga

SEQ ID NO: 34354 - DNA, 22 bp, synthetic construct
  misc_feature 1..22: note = chemically synthesized
  source 1..22: mol_type = other DNA
tgccataatcttatttggagag

SEQ ID NO: 34355 - DNA, 22 bp, synthetic construct
  misc_feature 1..22: note = chemically synthesized
  source 1..22: mol_type = other DNA
atttggagagaacttgctcacc

SEQ ID NO: 34356 - DNA, 22 bp, synthetic construct
  misc_feature 1..22: note = chemically synthesized
  source 1..22: mol_type = other DNA
tttggagagaacttgctcacct

SEQ ID NO: 34357 - DNA, 22 bp, synthetic construct
  misc_feature 1..22: note = chemically synthesized
  source 1..22: mol_type = other DNA
ggagagaacttgctcacctttc

SEQ ID NO: 34358 - DNA, 22 bp, synthetic construct
  misc_feature 1..22: note = chemically synthesized
  source 1..22: mol_type = other DNA
gagagaacttgctcacctttca

SEQ ID NO: 34359 - DNA, 22 bp, synthetic construct
  misc_feature 1..22: note = chemically synthesized
  source 1..22: mol_type = other DNA
gctcacctttcacttccacaag

SEQ ID NO: 34360 - DNA, 22 bp, synthetic construct
  misc_feature 1..22: note = chemically synthesized
  source 1..22: mol_type = other DNA
ctcacctttcacttccacaaga

SEQ ID NO: 34361 - DNA, 22 bp, synthetic construct
  misc_feature 1..22: note = chemically synthesized
  source 1..22: mol_type = other DNA
acctttcacttccacaagatat

SEQ ID NO: 34362 - DNA, 22 bp, synthetic construct
  misc_feature 1..22: note = chemically synthesized
  source 1..22: mol_type = other DNA
tcacttccacaagatatcacag

SEQ ID NO: 34363 - DNA, 22 bp, synthetic construct
  misc_feature 1..22: note = chemically synthesized
  source 1..22: mol_type = other DNA
cacttccacaagatatcacagt

SEQ ID NO: 34364 - DNA, 22 bp, synthetic construct
  misc_feature 1..22: note = chemically synthesized
  source 1..22: mol_type = other DNA
acttccacaagatatcacagtg

SEQ ID NO: 34365 - DNA, 22 bp, synthetic construct
  misc_feature 1..22: note = chemically synthesized
  source 1..22: mol_type = other DNA
ccacaagatatcacagtggtcc

SEQ ID NO: 34366 - DNA, 22 bp, synthetic construct
  misc_feature 1..22: note = chemically synthesized
  source 1..22: mol_type = other DNA
cacaagatatcacagtggtcca

SEQ ID NO: 34367 - DNA, 22 bp, synthetic construct
  misc_feature 1..22: note = chemically synthesized
  source 1..22: mol_type = other DNA
cattgatgacatgctgactgga

SEQ ID NO: 34368 - DNA, 22 bp, synthetic construct
  misc_feature 1..22: note = chemically synthesized
  source 1..22: mol_type = other DNA
atgacatgctgactggaactag

SEQ ID NO: 34369 - DNA, 22 bp, synthetic construct
  misc_feature 1..22: note = chemically synthesized
  source 1..22: mol_type = other DNA
actggaactagtgagcaagaag

SEQ ID NO: 34370 - DNA, 22 bp, synthetic construct
  misc_feature 1..22: note = chemically synthesized
  source 1..22: mol_type = other DNA
gaactagtgagcaagaagtagc

SEQ ID NO: 34371 - DNA, 22 bp, synthetic construct
  misc_feature 1..22: note = chemically synthesized
  source 1..22: mol_type = other DNA
gtgagcaagaagtagcaaacac

SEQ ID NO: 34372 - DNA, 22 bp, synthetic construct
  misc_feature 1..22: note = chemically synthesized
  source 1..22: mol_type = other DNA
gatttattgatgagacatttgt

SEQ ID NO: 34373 - DNA, 22 bp, synthetic construct
  misc_feature 1..22: note = chemically synthesized
  source 1..22: mol_type = other DNA
attgatgagacatttgtgggac

SEQ ID NO: 34374 - DNA, 22 bp, synthetic construct
  misc_feature 1..22: note = chemically synthesized
  source 1..22: mol_type = other DNA
ttgatgagacatttgtgggaca

SEQ ID NO: 34375 - DNA, 22 bp, synthetic construct
  misc_feature 1..22: note = chemically synthesized
  source 1..22: mol_type = other DNA
atgagacatttgtgggacagag

SEQ ID NO: 34376 - DNA, 22 bp, synthetic construct
  misc_feature 1..22: note = chemically synthesized
  source 1..22: mol_type = other DNA
gtgggacagaggatgggaaata

SEQ ID NO: 34377 - DNA, 22 bp, synthetic construct
  misc_feature 1..22: note = chemically synthesized
  source 1..22: mol_type = other DNA
tgggacagaggatgggaaataa

SEQ ID NO: 34378 - DNA, 22 bp, synthetic construct
  misc_feature 1..22: note = chemically synthesized
  source 1..22: mol_type = other DNA
attaaattcagggaccttctac

SEQ ID NO: 34379 - DNA, 22 bp, synthetic construct
  misc_feature 1..22: note = chemically synthesized
  source 1..22: mol_type = other DNA
aattcagggaccttctacctca

SEQ ID NO: 34380 - DNA, 22 bp, synthetic construct
  misc_feature 1..22: note = chemically synthesized
  source 1..22: mol_type = other DNA
agggaccttctacctcagtaaa

SEQ ID NO: 34381 - DNA, 22 bp, synthetic construct
  misc_feature 1..22: note = chemically synthesized
  source 1..22: mol_type = other DNA
ctacctcagtaaaatttatagg

SEQ ID NO: 34382 - DNA, 22 bp, synthetic construct
  misc_feature 1..22: note = chemically synthesized
  source 1..22: mol_type = other DNA
tacctcagtaaaatttataggg

SEQ ID NO: 34383 - DNA, 22 bp, synthetic construct
  misc_feature 1..22: note = chemically synthesized
  source 1..22: mol_type = other DNA
cctcagtaaaatttataggggt

SEQ ID NO: 34384 - DNA, 22 bp, synthetic construct
  misc_feature 1..22: note = chemically synthesized
  source 1..22: mol_type = other DNA
agtaaaatttataggggtccaa

SEQ ID NO: 34385 - DNA, 22 bp, synthetic construct
  misc_feature 1..22: note = chemically synthesized
  source 1..22: mol_type = other DNA
ataggggtccaatggtttgggg

SEQ ID NO: 34386 - DNA, 22 bp, synthetic construct
  misc_feature 1..22: note = chemically synthesized
  source 1..22: mol_type = other DNA
taggggtccaatggtttggggc

SEQ ID NO: 34387 - DNA, 22 bp, synthetic construct
  misc_feature 1..22: note = chemically synthesized
  source 1..22: mol_type = other DNA
ggggctctttgagatattcctt

SEQ ID NO: 34388 - DNA, 22 bp, synthetic construct
  misc_feature 1..22: note = chemically synthesized
  source 1..22: mol_type = other DNA
gggctctttgagatattccttc

SEQ ID NO: 34389 - DNA, 22 bp, synthetic construct
  misc_feature 1..22: note = chemically synthesized
  source 1..22: mol_type = other DNA
tttgagatattccttctaaagt

SEQ ID NO: 34390 - DNA, 22 bp, synthetic construct
  misc_feature 1..22: note = chemically synthesized
  source 1..22: mol_type = other DNA
tgagatattccttctaaagtga

SEQ ID NO: 34391 - DNA, 22 bp, synthetic construct
  misc_feature 1..22: note = chemically synthesized
  source 1..22: mol_type = other DNA
gagatattccttctaaagtgaa

SEQ ID NO: 34392 - DNA, 22 bp, synthetic construct
  misc_feature 1..22: note = chemically synthesized
  source 1..22: mol_type = other DNA
agatattccttctaaagtgaag

SEQ ID NO: 34393 - DNA, 22 bp, synthetic construct
  misc_feature 1..22: note = chemically synthesized
  source 1..22: mol_type = other DNA
cttctaaagtgaaggataattt

SEQ ID NO: 34394 - DNA, 22 bp, synthetic construct
  misc_feature 1..22: note = chemically synthesized
  source 1..22: mol_type = other DNA
ctaaagtgaaggataatttgct

SEQ ID NO: 34395 - DNA, 22 bp, synthetic construct
  misc_feature 1..22: note = chemically synthesized
  source 1..22: mol_type = other DNA
taaagtgaaggataatttgctg

SEQ ID NO: 34396 - DNA, 22 bp, synthetic construct
  misc_feature 1..22: note = chemically synthesized
  source 1..22: mol_type = other DNA
aagtgaaggataatttgctgca

SEQ ID NO: 34397 - DNA, 22 bp, synthetic construct
  misc_feature 1..22: note = chemically synthesized
  source 1..22: mol_type = other DNA
gctgcatttggccactcttaca

SEQ ID NO: 34398 - DNA, 22 bp, synthetic construct
  misc_feature 1..22: note = chemically synthesized
  source 1..22: mol_type = other DNA
ctgcatttggccactcttacaa

SEQ ID NO: 34399 - DNA, 22 bp, synthetic construct
  misc_feature 1..22: note = chemically synthesized
  source 1..22: mol_type = other DNA
catttggccactcttacaacca

SEQ ID NO: 34400 - DNA, 22 bp, synthetic construct
  misc_feature 1..22: note = chemically synthesized
  source 1..22: mol_type = other DNA
ggccactcttacaaccaagaaa

SEQ ID NO: 34401 - DNA, 22 bp, synthetic construct
  misc_feature 1..22: note = chemically synthesized
  source 1..22: mol_type = other DNA
gccactcttacaaccaagaaat

SEQ ID NO: 34402 - DNA, 22 bp, synthetic construct
  misc_feature 1..22: note = chemically synthesized
  source 1..22: mol_type = other DNA
ttacaaccaagaaataggcaca

SEQ ID NO: 34403 - DNA, 22 bp, synthetic construct
  misc_feature 1..22: note = chemically synthesized
  source 1..22: mol_type = other DNA
acaaccaagaaataggcacaac

SEQ ID NO: 34404 - DNA, 22 bp, synthetic construct
  misc_feature 1..22: note = chemically synthesized
  source 1..22: mol_type = other DNA
caaccaagaaataggcacaacg

SEQ ID NO: 34405 - DNA, 22 bp, synthetic construct
  misc_feature 1..22: note = chemically synthesized
  source 1..22: mol_type = other DNA
gtgggcctatttggattttgga

SEQ ID NO: 34406 - DNA, 22 bp, synthetic construct
  misc_feature 1..22: note = chemically synthesized
  source 1..22: mol_type = other DNA
tttggattttggaggcaacata

SEQ ID NO: 34407 - DNA, 22 bp, synthetic construct
  misc_feature 1..22: note = chemically synthesized
  source 1..22: mol_type = other DNA
ggattttggaggcaacatattc

SEQ ID NO: 34408 - DNA, 22 bp, synthetic construct
  misc_feature 1..22: note = chemically synthesized
  source 1..22: mol_type = other DNA
gattttggaggcaacatattcc

SEQ ID NO: 34409 - DNA, 22 bp, synthetic construct
  misc_feature 1..22: note = chemically synthesized
  source 1..22: mol_type = other DNA
tggaggcaacatattcctgatt

SEQ ID NO: 34410 - DNA, 22 bp, synthetic construct
  misc_feature 1..22: note = chemically synthesized
  source 1..22: mol_type = other DNA
ggaggcaacatattcctgattt

SEQ ID NO: 34411 - DNA, 22 bp, synthetic construct
  misc_feature 1..22: note = chemically synthesized
  source 1..22: mol_type = other DNA
gaggcaacatattcctgatttg

SEQ ID NO: 34412 - DNA, 22 bp, synthetic construct
  misc_feature 1..22: note = chemically synthesized
  source 1..22: mol_type = other DNA
ctgatttgggtgtgttactctg

SEQ ID NO: 34413 - DNA, 22 bp, synthetic construct
  misc_feature 1..22: note = chemically synthesized
  source 1..22: mol_type = other DNA
atttgggtgtgttactctggcc

SEQ ID NO: 34414 - DNA, 22 bp, synthetic construct
  misc_feature 1..22: note = chemically synthesized
  source 1..22: mol_type = other DNA
gggtgtgttactctggcccatt

SEQ ID NO: 34415 - DNA, 22 bp, synthetic construct
  misc_feature 1..22: note = chemically synthesized
  source 1..22: mol_type = other DNA
ggtgtgttactctggcccattt

SEQ ID NO: 34416 - DNA, 22 bp, synthetic construct
  misc_feature 1..22: note = chemically synthesized
  source 1..22: mol_type = other DNA
ctctggcccatttatcgagtga

SEQ ID NO: 34417 - DNA, 22 bp, synthetic construct
  misc_feature 1..22: note = chemically synthesized
  source 1..22: mol_type = other DNA
tggcccatttatcgagtgatcc

SEQ ID NO: 34418 - DNA, 22 bp, synthetic construct
  misc_feature 1..22: note = chemically synthesized
  source 1..22: mol_type = other DNA
gcccatttatcgagtgatccaa

SEQ ID NO: 34419 - DNA, 22 bp, synthetic construct
  misc_feature 1..22: note = chemically synthesized
  source 1..22: mol_type = other DNA
atcgagtgatccaaaaggctgc

SEQ ID NO: 34420 - DNA, 22 bp, synthetic construct
  misc_feature 1..22: note = chemically synthesized
  source 1..22: mol_type = other DNA
tcgagtgatccaaaaggctgcc

SEQ ID NO: 34421 - DNA, 22 bp, synthetic construct
  misc_feature 1..22: note = chemically synthesized
  source 1..22: mol_type = other DNA
ccagttttgagtggagtccaga

SEQ ID NO: 34422 - DNA, 22 bp, synthetic construct
  misc_feature 1..22: note = chemically synthesized
  source 1..22: mol_type = other DNA
tgagtggagtccagaacagaag

SEQ ID NO: 34423 - DNA, 22 bp, synthetic construct
  misc_feature 1..22: note = chemically synthesized
  source 1..22: mol_type = other DNA
gagtggagtccagaacagaagg

SEQ ID NO: 34424 - DNA, 22 bp, synthetic construct
  misc_feature 1..22: note = chemically synthesized
  source 1..22: mol_type = other DNA
agtggagtccagaacagaaggc

SEQ ID NO: 34425 - DNA, 22 bp, synthetic construct
  misc_feature 1..22: note = chemically synthesized
  source 1..22: mol_type = other DNA
tgccacaggtccaggctgctgt

SEQ ID NO: 34426 - DNA, 22 bp, synthetic construct
  misc_feature 1..22: note = chemically synthesized
  source 1..22: mol_type = other DNA
ccacaggtccaggctgctgtgc

SEQ ID NO: 34427 - DNA, 22 bp, synthetic construct
  misc_feature 1..22: note = chemically synthesized
  source 1..22: mol_type = other DNA
ctgtgcaagctgctatgccact

SEQ ID NO: 34428 - DNA, 22 bp, synthetic construct
  misc_feature 1..22: note = chemically synthesized
  source 1..22: mol_type = other DNA
tgcaagctgctatgccacttgg

SEQ ID NO: 34429 - DNA, 22 bp, synthetic construct
  misc_feature 1..22: note = chemically synthesized
  source 1..22: mol_type = other DNA
ctatgccacttgggccatatga

SEQ ID NO: 34430 - DNA, 22 bp, synthetic construct
  misc_feature 1..22: note = chemically synthesized
  source 1..22: mol_type = other DNA
tgccacttgggccatatgacct

SEQ ID NO: 34431 - DNA, 22 bp, synthetic construct
  misc_feature 1..22: note = chemically synthesized
  source 1..22: mol_type = other DNA
gggccatatgacctagcagatc

SEQ ID NO: 34432 - DNA, 22 bp, synthetic construct
  misc_feature 1..22: note = chemically synthesized
  source 1..22: mol_type = other DNA
ggccatatgacctagcagatcc

SEQ ID NO: 34433 - DNA, 22 bp, synthetic construct
  misc_feature 1..22: note = chemically synthesized
  source 1..22: mol_type = other DNA
gcagatccaatgatgcttgagg

SEQ ID NO: 34434 - DNA, 22 bp, synthetic construct
  misc_feature 1..22: note = chemically synthesized
  source 1..22: mol_type = other DNA
gaggtgtcagtgccagataggg

SEQ ID NO: 34435 - DNA, 22 bp, synthetic construct
  misc_feature 1..22: note = chemically synthesized
  source 1..22: mol_type = other DNA
aggtgtcagtgccagataggga

SEQ ID NO: 34436 - DNA, 22 bp, synthetic construct
  misc_feature 1..22: note = chemically synthesized
  source 1..22: mol_type = other DNA
tttggagcatttggcaggctga

SEQ ID NO: 34437 - DNA, 22 bp, synthetic construct
  misc_feature 1..22: note = chemically synthesized
  source 1..22: mol_type = other DNA
ggagcatttggcaggctgaatc

SEQ ID NO: 34438 - DNA, 22 bp, synthetic construct
  misc_feature 1..22: note = chemically synthesized
  source 1..22: mol_type = other DNA
gagcatttggcaggctgaatca

SEQ ID NO: 34439 - DNA, 22 bp, synthetic construct
  misc_feature 1..22: note = chemically synthesized
  source 1..22: mol_type = other DNA
ggcaggctgaatcacagcggag

SEQ ID NO: 34440 - DNA, 22 bp, synthetic construct
  misc_feature 1..22: note = chemically synthesized
  source 1..22: mol_type = other DNA
gcaggctgaatcacagcggagg

SEQ ID NO: 34441 - DNA, 22 bp, synthetic construct
  misc_feature 1..22: note = chemically synthesized
  source 1..22: mol_type = other DNA
aatcacagcggaggcctctagg

SEQ ID NO: 34442 - DNA, 22 bp, synthetic construct
  misc_feature 1..22: note = chemically synthesized
  source 1..22: mol_type = other DNA
taggattttggagcaaggccct

SEQ ID NO: 34443 - DNA, 22 bp, synthetic construct
  misc_feature 1..22: note = chemically synthesized
  source 1..22: mol_type = other DNA
ggattttggagcaaggccctgc

SEQ ID NO: 34444 - DNA, 22 bp, synthetic construct
  misc_feature 1..22: note = chemically synthesized
  source 1..22: mol_type = other DNA
tggagcaaggccctgccatctt

SEQ ID NO: 34445 - DNA, 22 bp, synthetic construct
  misc_feature 1..22: note = chemically synthesized
  source 1..22: mol_type = other DNA
ggagcaaggccctgccatcttc

SEQ ID NO: 34446 - DNA, 22 bp, synthetic construct
  misc_feature 1..22: note = chemically synthesized
  source 1..22: mol_type = other DNA
gagcaaggccctgccatcttct

SEQ ID NO: 34447 - DNA, 22 bp, synthetic construct
  misc_feature 1..22: note = chemically synthesized
  source 1..22: mol_type = other DNA
ccatcttctgcagataactact

SEQ ID NO: 34448 - DNA, 22 bp, synthetic construct
  misc_feature 1..22: note = chemically synthesized
  source 1..22: mol_type = other DNA
ctgcagataactactctctttt

SEQ ID NO: 34449 - DNA, 22 bp, synthetic construct
  misc_feature 1..22: note = chemically synthesized
  source 1..22: mol_type = other DNA
tgcagataactactctctttta

SEQ ID NO: 34450 - DNA, 22 bp, synthetic construct
  misc_feature 1..22: note = chemically synthesized
  source 1..22: mol_type = other DNA
cagataactactctcttttagg

SEQ ID NO: 34451 - DNA, 22 bp, synthetic construct
  misc_feature 1..22: note = chemically synthesized
  source 1..22: mol_type = other DNA
ctctcttttagggagaaagctc

SEQ ID NO: 34452 - DNA, 22 bp, synthetic construct
  misc_feature 1..22: note = chemically synthesized
  source 1..22: mol_type = other DNA
tcttttagggagaaagctcttg

SEQ ID NO: 34453 - DNA, 22 bp, synthetic construct
  misc_feature 1..22: note = chemically synthesized
  source 1..22: mol_type = other DNA
ttttagggagaaagctcttggc

SEQ ID NO: 34454 - DNA, 22 bp, synthetic construct
  misc_feature 1..22: note = chemically synthesized
  source 1..22: mol_type = other DNA
ttagggagaaagctcttggcct

SEQ ID NO: 34455 - DNA, 22 bp, synthetic construct
  misc_feature 1..22: note = chemically synthesized
  source 1..22: mol_type = other DNA
tagggagaaagctcttggcctg

SEQ ID NO: 34456 - DNA, 22 bp, synthetic construct
  misc_feature 1..22: note = chemically synthesized
  source 1..22: mol_type = other DNA
agggagaaagctcttggcctgt

SEQ ID NO: 34457 - DNA, 22 bp, synthetic construct
  misc_feature 1..22: note = chemically synthesized
  source 1..22: mol_type = other DNA
gggagaaagctcttggcctgtt

SEQ ID NO: 34458 - DNA, 22 bp, synthetic construct
  misc_feature 1..22: note = chemically synthesized
  source 1..22: mol_type = other DNA
ttggcctgttactgggctttgg

SEQ ID NO: 34459 - DNA, 22 bp, synthetic construct
  misc_feature 1..22: note = chemically synthesized
  source 1..22: mol_type = other DNA
ggcctgttactgggctttggtg

SEQ ID NO: 34460 - DNA, 22 bp, synthetic construct
  misc_feature 1..22: note = chemically synthesized
  source 1..22: mol_type = other DNA
gcctgttactgggctttggtgg

SEQ ID NO: 34461 - DNA, 22 bp, synthetic construct
  misc_feature 1..22: note = chemically synthesized
  source 1..22: mol_type = other DNA
ttactgggctttggtggaaacg

SEQ ID NO: 34462 - DNA, 22 bp, synthetic construct
  misc_feature 1..22: note = chemically synthesized
  source 1..22: mol_type = other DNA
ctgggctttggtggaaacgaaa

SEQ ID NO: 34463 - DNA, 22 bp, synthetic construct
  misc_feature 1..22: note = chemically synthesized
  source 1..22: mol_type = other DNA
ggctttggtggaaacgaaatat

SEQ ID NO: 34464 - DNA, 22 bp, synthetic construct
  misc_feature 1..22: note = chemically synthesized
  source 1..22: mol_type = other DNA
tggtggaaacgaaatatttgac

SEQ ID NO: 34465 - DNA, 22 bp, synthetic construct
  misc_feature 1..22: note = chemically synthesized
  source 1..22: mol_type = other DNA
ggtggaaacgaaatatttgact

SEQ ID NO: 34466 - DNA, 22 bp, synthetic construct
  misc_feature 1..22: note = chemically synthesized
  source 1..22: mol_type = other DNA
gtggaaacgaaatatttgacta

SEQ ID NO: 34467 - DNA, 22 bp, synthetic construct
  misc_feature 1..22: note = chemically synthesized
  source 1..22: mol_type = other DNA
gactatgagtcatcaagtcacc

SEQ ID NO: 34468 - DNA, 22 bp, synthetic construct
  misc_feature 1..22: note = chemically synthesized
  source 1..22: mol_type = other DNA
actatgagtcatcaagtcacca

SEQ ID NO: 34469 - DNA, 22 bp, synthetic construct
  misc_feature 1..22: note = chemically synthesized
  source 1..22: mol_type = other DNA
tgagtcatcaagtcaccatgtg

SEQ ID NO: 34470 - DNA, 22 bp, synthetic construct
  misc_feature 1..22: note = chemically synthesized
  source 1..22: mol_type = other DNA
aactgcctatcatgaactgggt

SEQ ID NO: 34471 - DNA, 22 bp, synthetic construct
  misc_feature 1..22: note = chemically synthesized
  source 1..22: mol_type = other DNA
cctatcatgaactgggtgcttt

SEQ ID NO: 34472 - DNA, 22 bp, synthetic construct
  misc_feature 1..22: note = chemically synthesized
  source 1..22: mol_type = other DNA
tcatgaactgggtgctttctga

SEQ ID NO: 34473 - DNA, 22 bp, synthetic construct
  misc_feature 1..22: note = chemically synthesized
  source 1..22: mol_type = other DNA
ggtgctttctgatccatctagc

SEQ ID NO: 34474 - DNA, 22 bp, synthetic construct
  misc_feature 1..22: note = chemically synthesized
  source 1..22: mol_type = other DNA
tctgatccatctagccataaag

SEQ ID NO: 34475 - DNA, 22 bp, synthetic construct
  misc_feature 1..22: note = chemically synthesized
  source 1..22: mol_type = other DNA
ctgatccatctagccataaagt

SEQ ID NO: 34476 - DNA, 22 bp, synthetic construct
  misc_feature 1..22: note = chemically synthesized
  source 1..22: mol_type = other DNA
tgatccatctagccataaagtg

SEQ ID NO: 34477 - DNA, 22 bp, synthetic construct
  misc_feature 1..22: note = chemically synthesized
  source 1..22: mol_type = other DNA
atccatctagccataaagtggg

SEQ ID NO: 34478 - DNA, 22 bp, synthetic construct
  misc_feature 1..22: note = chemically synthesized
  source 1..22: mol_type = other DNA
gccataaagtgggctgtgcaca

SEQ ID NO: 34479 - DNA, 22 bp, synthetic construct
  misc_feature 1..22: note = chemically synthesized
  source 1..22: mol_type = other DNA
tgcacagcagcattgcatcagc

SEQ ID NO: 34480 - DNA, 22 bp, synthetic construct
  misc_feature 1..22: note = chemically synthesized
  source 1..22: mol_type = other DNA
catcagcaaatggaagtggtat

SEQ ID NO: 34481 - DNA, 22 bp, synthetic construct
  misc_feature 1..22: note = chemically synthesized
  source 1..22: mol_type = other DNA
ggcttgagcagatcctgaaggc

SEQ ID NO: 34482 - DNA, 22 bp, synthetic construct
  misc_feature 1..22: note = chemically synthesized
  source 1..22: mol_type = other DNA
gagcagatcctgaaggcactag

SEQ ID NO: 34483 - DNA, 22 bp, synthetic construct
  misc_feature 1..22: note = chemically synthesized
  source 1..22: mol_type = other DNA
agcagatcctgaaggcactagt

SEQ ID NO: 34484 - DNA, 22 bp, synthetic construct
  misc_feature 1..22: note = chemically synthesized
  source 1..22: mol_type = other DNA
aaggcactagtaagttacatga

SEQ ID NO: 34485 - DNA, 22 bp, synthetic construct
  misc_feature 1..22: note = chemically synthesized
  source 1..22: mol_type = other DNA
gtaagttacatgagaaaggggc

SEQ ID NO: 34486 - DNA, 22 bp, synthetic construct
  misc_feature 1..22: note = chemically synthesized
  source 1..22: mol_type = other DNA
catgagaaaggggctcaaatgc

SEQ ID NO: 34487 - DNA, 22 bp, synthetic construct
  misc_feature 1..22: note = chemically synthesized
  source 1..22: mol_type = other DNA
aaatgcccatggtctccactcc

SEQ ID NO: 34488 - DNA, 22 bp, synthetic construct
  misc_feature 1..22: note = chemically synthesized
  source 1..22: mol_type = other DNA
cactcctgacacactgctttct

SEQ ID NO: 34489 - DNA, 22 bp, synthetic construct
  misc_feature 1..22: note = chemically synthesized
  source 1..22: mol_type = other DNA
ctgacacactgctttctctccc

SEQ ID NO: 34490 - DNA, 22 bp, synthetic construct
  misc_feature 1..22: note = chemically synthesized
  source 1..22: mol_type = other DNA
acacactgctttctctccctga

SEQ ID NO: 34491 - DNA, 22 bp, synthetic construct
  misc_feature 1..22: note = chemically synthesized
  source 1..22: mol_type = other DNA
ctttctctccctgagactgcac

SEQ ID NO: 34492 - DNA, 22 bp, synthetic construct
  misc_feature 1..22: note = chemically synthesized
  source 1..22: mol_type = other DNA
tctctccctgagactgcaccga

SEQ ID NO: 34493 - DNA, 22 bp, synthetic construct
  misc_feature 1..22: note = chemically synthesized
  source 1..22: mol_type = other DNA
ctctccctgagactgcaccgat

SEQ ID NO: 34494 - DNA, 22 bp, synthetic construct
  misc_feature 1..22: note = chemically synthesized
  source 1..22: mol_type = other DNA
tctccctgagactgcaccgatg

SEQ ID NO: 34495 - DNA, 22 bp, synthetic construct
  misc_feature 1..22: note = chemically synthesized
  source 1..22: mol_type = other DNA
tccctgagactgcaccgatggt

SEQ ID NO: 34496 - DNA, 22 bp, synthetic construct
  misc_feature 1..22: note = chemically synthesized
  source 1..22: mol_type = other DNA
cctgagactgcaccgatggtct

SEQ ID NO: 34497 - DNA, 22 bp, synthetic construct
  misc_feature 1..22: note = chemically synthesized
  source 1..22: mol_type = other DNA
agactgcaccgatggtctcatg

SEQ ID NO: 34498 - DNA, 22 bp, synthetic construct
  misc_feature 1..22: note = chemically synthesized
  source 1..22: mol_type = other DNA
caccgatggtctcatggggagt

SEQ ID NO: 34499 - DNA, 22 bp, synthetic construct
  misc_feature 1..22: note = chemically synthesized
  source 1..22: mol_type = other DNA
atggggagttccctatgatcag

SEQ ID NO: 34500 - DNA, 22 bp, synthetic construct
  misc_feature 1..22: note = chemically synthesized
  source 1..22: mol_type = other DNA
cctatgatcagctgacagagga

SEQ ID NO: 34501 - DNA, 22 bp, synthetic construct
  misc_feature 1..22: note = chemically synthesized
  source 1..22: mol_type = other DNA
tgatcagctgacagaggaagag

SEQ ID NO: 34502 - DNA, 22 bp, synthetic construct
  misc_feature 1..22: note = chemically synthesized
  source 1..22: mol_type = other DNA
acagaggaagagaagactaggt

SEQ ID NO: 34503 - DNA, 22 bp, synthetic construct
  misc_feature 1..22: note = chemically synthesized
  source 1..22: mol_type = other DNA
ggtcctggttcacagatagttc

SEQ ID NO: 34504 - DNA, 22 bp, synthetic construct
  misc_feature 1..22: note = chemically synthesized
  source 1..22: mol_type = other DNA
gttcacagatagttctgcacga

SEQ ID NO: 34505 - DNA, 22 bp, synthetic construct
  misc_feature 1..22: note = chemically synthesized
  source 1..22: mol_type = other DNA
acagatagttctgcacgatatg

SEQ ID NO: 34506 - DNA, 22 bp, synthetic construct
  misc_feature 1..22: note = chemically synthesized
  source 1..22: mol_type = other DNA
tgcacgatatgcaggcaccacc

SEQ ID NO: 34507 - DNA, 22 bp, synthetic construct
  misc_feature 1..22: note = chemically synthesized
  source 1..22: mol_type = other DNA
cacgatatgcaggcaccaccca

SEQ ID NO: 34508 - DNA, 22 bp, synthetic construct
  misc_feature 1..22: note = chemically synthesized
  source 1..22: mol_type = other DNA
cagcccctttctaggacatccc

SEQ ID NO: 34509 - DNA, 22 bp, synthetic construct
  misc_feature 1..22: note = chemically synthesized
  source 1..22: mol_type = other DNA
tctaggacatccctgaaggaca

SEQ ID NO: 34510 - DNA, 22 bp, synthetic construct
  misc_feature 1..22: note = chemically synthesized
  source 1..22: mol_type = other DNA
ctaggacatccctgaaggacaa

SEQ ID NO: 34511 - DNA, 22 bp, synthetic construct
  misc_feature 1..22: note = chemically synthesized
  source 1..22: mol_type = other DNA
taggacatccctgaaggacaac

SEQ ID NO: 34512 - DNA, 22 bp, synthetic construct
  misc_feature 1..22: note = chemically synthesized
  source 1..22: mol_type = other DNA
ggacatccctgaaggacaacgg

SEQ ID NO: 34513 - DNA, 22 bp, synthetic construct
  misc_feature 1..22: note = chemically synthesized
  source 1..22: mol_type = other DNA
aaggacaacggtgaagggaaat

SEQ ID NO: 34514 - DNA, 22 bp, synthetic construct
  misc_feature 1..22: note = chemically synthesized
  source 1..22: mol_type = other DNA
cctagttggcagaactttgagc

SEQ ID NO: 34515 - DNA, 22 bp, synthetic construct
  misc_feature 1..22: note = chemically synthesized
  source 1..22: mol_type = other DNA
ctagttggcagaactttgagca

SEQ ID NO: 34516 - DNA, 22 bp, synthetic construct
  misc_feature 1..22: note = chemically synthesized
  source 1..22: mol_type = other DNA
gttggcagaactttgagcagtg

SEQ ID NO: 34517 - DNA, 22 bp, synthetic construct
  misc_feature 1..22: note = chemically synthesized
  source 1..22: mol_type = other DNA
gcagaactttgagcagtgtgcc

SEQ ID NO: 34518 - DNA, 22 bp, synthetic construct
  misc_feature 1..22: note = chemically synthesized
  source 1..22: mol_type = other DNA
tgagcagtgtgcctggttgtgc

SEQ ID NO: 34519 - DNA, 22 bp, synthetic construct
  misc_feature 1..22: note = chemically synthesized
  source 1..22: mol_type = other DNA
gagcagtgtgcctggttgtgca

SEQ ID NO: 34520 - DNA, 22 bp, synthetic construct
  misc_feature 1..22: note = chemically synthesized
  source 1..22: mol_type = other DNA
agcagtgtgcctggttgtgcac

SEQ ID NO: 34521 - DNA, 22 bp, synthetic construct
  misc_feature 1..22: note = chemically synthesized
  source 1..22: mol_type = other DNA
gttgtgcactttgcacagaagg

SEQ ID NO: 34522 - DNA, 22 bp, synthetic construct
  misc_feature 1..22: note = chemically synthesized
  source 1..22: mol_type = other DNA
tgcactttgcacagaaggagaa

SEQ ID NO: 34523 - DNA, 22 bp, synthetic construct
  misc_feature 1..22: note = chemically synthesized
  source 1..22: mol_type = other DNA
tgcacagaaggagaaatggcca

SEQ ID NO: 34524 - DNA, 22 bp, synthetic construct
  misc_feature 1..22: note = chemically synthesized
  source 1..22: mol_type = other DNA
gcacagaaggagaaatggccag

SEQ ID NO: 34525 - DNA, 22 bp, synthetic construct
  misc_feature 1..22: note = chemically synthesized
  source 1..22: mol_type = other DNA
cacagaaggagaaatggccaga

SEQ ID NO: 34526 - DNA, 22 bp, synthetic construct
  misc_feature 1..22: note = chemically synthesized
  source 1..22: mol_type = other DNA
gcgattatatacttattcatgg

SEQ ID NO: 34527 - DNA, 22 bp, synthetic construct
  misc_feature 1..22: note = chemically synthesized
  source 1..22: mol_type = other DNA
cgattatatacttattcatggg

SEQ ID NO: 34528 - DNA, 22 bp, synthetic construct
  misc_feature 1..22: note = chemically synthesized
  source 1..22: mol_type = other DNA
tatacttattcatgggctgtag

SEQ ID NO: 34529 - DNA, 22 bp, synthetic construct
  misc_feature 1..22: note = chemically synthesized
  source 1..22: mol_type = other DNA
attcatgggctgtagccaaagg

SEQ ID NO: 34530 - DNA, 22 bp, synthetic construct
  misc_feature 1..22: note = chemically synthesized
  source 1..22: mol_type = other DNA
ttcatgggctgtagccaaaggt

SEQ ID NO: 34531 - DNA, 22 bp, synthetic construct
  misc_feature 1..22: note = chemically synthesized
  source 1..22: mol_type = other DNA
atgggctgtagccaaaggtttg

SEQ ID NO: 34532 - DNA, 22 bp, synthetic construct
  misc_feature 1..22: note = chemically synthesized
  source 1..22: mol_type = other DNA
tagccaaaggtttggctagatg

SEQ ID NO: 34533 - DNA, 22 bp, synthetic construct
  misc_feature 1..22: note = chemically synthesized
  source 1..22: mol_type = other DNA
ggctagatggtcagggacttgg

SEQ ID NO: 34534 - DNA, 22 bp, synthetic construct
  misc_feature 1..22: note = chemically synthesized
  source 1..22: mol_type = other DNA
gctagatggtcagggacttgga

SEQ ID NO: 34535 - DNA, 22 bp, synthetic construct
  misc_feature 1..22: note = chemically synthesized
  source 1..22: mol_type = other DNA
gatggtcagggacttggaaaaa

SEQ ID NO: 34536 - DNA, 22 bp, synthetic construct
  misc_feature 1..22: note = chemically synthesized
  source 1..22: mol_type = other DNA
ggaaaaagcatgactggaaaat

SEQ ID NO: 34537 - DNA, 22 bp, synthetic construct
  misc_feature 1..22: note = chemically synthesized
  source 1..22: mol_type = other DNA
gaaaaagcatgactggaaaatt

SEQ ID NO: 34538 - DNA, 22 bp, synthetic construct
  misc_feature 1..22: note = chemically synthesized
  source 1..22: mol_type = other DNA
gaaaattgatgacaaagaaatt

SEQ ID NO: 34539 - DNA, 22 bp, synthetic construct
  misc_feature 1..22: note = chemically synthesized
  source 1..22: mol_type = other DNA
atgacaaagaaatttggggaag

SEQ ID NO: 34540 - DNA, 22 bp, synthetic construct
  misc_feature 1..22: note = chemically synthesized
  source 1..22: mol_type = other DNA
ggggaagaggtatgtggatgga

SEQ ID NO: 34541 - DNA, 22 bp, synthetic construct
  misc_feature 1..22: note = chemically synthesized
  source 1..22: mol_type = other DNA
gggaagaggtatgtggatggac

SEQ ID NO: 34542 - DNA, 22 bp, synthetic construct
  misc_feature 1..22: note = chemically synthesized
  source 1..22: mol_type = other DNA
tatgattagtcaaaaactacaa

SEQ ID NO: 34543 - DNA, 22 bp, synthetic construct
  misc_feature 1..22: note = chemically synthesized
  source 1..22: mol_type = other DNA
tgattagtcaaaaactacaaag

SEQ ID NO: 34544 - DNA, 22 bp, synthetic construct
  misc_feature 1..22: note = chemically synthesized
  source 1..22: mol_type = other DNA
gtcaaaaactacaaagatattt

SEQ ID NO: 34545 - DNA, 22 bp, synthetic construct
  misc_feature 1..22: note = chemically synthesized
  source 1..22: mol_type = other DNA
caaagatattttcatcccatgt

SEQ ID NO: 34546 - DNA, 22 bp, synthetic construct
  misc_feature 1..22: note = chemically synthesized
  source 1..22: mol_type = other DNA
tcatcccatgtgagtgctcacc

SEQ ID NO: 34547 - DNA, 22 bp, synthetic construct
  misc_feature 1..22: note = chemically synthesized
  source 1..22: mol_type = other DNA
catcccatgtgagtgctcacca

SEQ ID NO: 34548 - DNA, 22 bp, synthetic construct
  misc_feature 1..22: note = chemically synthesized
  source 1..22: mol_type = other DNA
atcccatgtgagtgctcaccaa

SEQ ID NO: 34549 - DNA, 22 bp, synthetic construct
  misc_feature 1..22: note = chemically synthesized
  source 1..22: mol_type = other DNA
accaatgggtgacctcagcaga

SEQ ID NO: 34550 - DNA, 22 bp, synthetic construct
  misc_feature 1..22: note = chemically synthesized
  source 1..22: mol_type = other DNA
agcagaagaggattttaataat

SEQ ID NO: 34551 - DNA, 22 bp, synthetic construct
  misc_feature 1..22: note = chemically synthesized
  source 1..22: mol_type = other DNA
taataatcaagtggataggatg

SEQ ID NO: 34552 - DNA, 22 bp, synthetic construct
  misc_feature 1..22: note = chemically synthesized
  source 1..22: mol_type = other DNA
aataatcaagtggataggatga

SEQ ID NO: 34553 - DNA, 22 bp, synthetic construct
  misc_feature 1..22: note = chemically synthesized
  source 1..22: mol_type = other DNA
ataatcaagtggataggatgat

SEQ ID NO: 34554 - DNA, 22 bp, synthetic construct
  misc_feature 1..22: note = chemically synthesized
  source 1..22: mol_type = other DNA
tgtggacaccactcagcctttt

SEQ ID NO: 34555 - DNA, 22 bp, synthetic construct
  misc_feature 1..22: note = chemically synthesized
  source 1..22: mol_type = other DNA
tggacaccactcagccttttcc

SEQ ID NO: 34556 - DNA, 22 bp, synthetic construct
  misc_feature 1..22: note = chemically synthesized
  source 1..22: mol_type = other DNA
agccttttcccaggccactcat

SEQ ID NO: 34557 - DNA, 22 bp, synthetic construct
  misc_feature 1..22: note = chemically synthesized
  source 1..22: mol_type = other DNA
ttcccaggccactcatgtcatc

SEQ ID NO: 34558 - DNA, 22 bp, synthetic construct
  misc_feature 1..22: note = chemically synthesized
  source 1..22: mol_type = other DNA
tcccaggccactcatgtcatcg

SEQ ID NO: 34559 - DNA, 22 bp, synthetic construct
  misc_feature 1..22: note = chemically synthesized
  source 1..22: mol_type = other DNA
cccaggccactcatgtcatcgt

SEQ ID NO: 34560 - DNA, 22 bp, synthetic construct
  misc_feature 1..22: note = chemically synthesized
  source 1..22: mol_type = other DNA
ccaggccactcatgtcatcgtc

SEQ ID NO: 34561 - DNA, 22 bp, synthetic construct
  misc_feature 1..22: note = chemically synthesized
  source 1..22: mol_type = other DNA
atgtcatcgtccaatggaccca

SEQ ID NO: 34562 - DNA, 22 bp, synthetic construct
  misc_feature 1..22: note = chemically synthesized
  source 1..22: mol_type = other DNA
cagggatggaagttatgcttgg

SEQ ID NO: 34563 - DNA, 22 bp, synthetic construct
  misc_feature 1..22: note = chemically synthesized
  source 1..22: mol_type = other DNA
tgcttgggctcagcaacatgga

SEQ ID NO: 34564 - DNA, 22 bp, synthetic construct
  misc_feature 1..22: note = chemically synthesized
  source 1..22: mol_type = other DNA
gggctcagcaacatggacttcc

SEQ ID NO: 34565 - DNA, 22 bp, synthetic construct
  misc_feature 1..22: note = chemically synthesized
  source 1..22: mol_type = other DNA
ggctcagcaacatggacttcca

SEQ ID NO: 34566 - DNA, 22 bp, synthetic construct
  misc_feature 1..22: note = chemically synthesized
  source 1..22: mol_type = other DNA
agcaacatggacttccactcac

SEQ ID NO: 34567 - DNA, 22 bp, synthetic construct
  misc_feature 1..22: note = chemically synthesized
  source 1..22: mol_type = other DNA
ccactcaccaaagctgacctgg

SEQ ID NO: 34568 - DNA, 22 bp, synthetic construct
  misc_feature 1..22: note = chemically synthesized
  source 1..22: mol_type = other DNA
cactcaccaaagctgacctggc

SEQ ID NO: 34569 - DNA, 22 bp, synthetic construct
  misc_feature 1..22: note = chemically synthesized
  source 1..22: mol_type = other DNA
accaaagctgacctggccacag

SEQ ID NO: 34570 - DNA, 22 bp, synthetic construct
  misc_feature 1..22: note = chemically synthesized
  source 1..22: mol_type = other DNA
acctggccacagccactgcttg

SEQ ID NO: 34571 - DNA, 22 bp, synthetic construct
  misc_feature 1..22: note = chemically synthesized
  source 1..22: mol_type = other DNA
gccacagccactgcttgccagc

SEQ ID NO: 34572 - DNA, 22 bp, synthetic construct
  misc_feature 1..22: note = chemically synthesized
  source 1..22: mol_type = other DNA
cttgccagcatcagagaccaac

SEQ ID NO: 34573 - DNA, 22 bp, synthetic construct
  misc_feature 1..22: note = chemically synthesized
  source 1..22: mol_type = other DNA
gccagcatcagagaccaacact

SEQ ID NO: 34574 - DNA, 22 bp, synthetic construct
  misc_feature 1..22: note = chemically synthesized
  source 1..22: mol_type = other DNA
ccagcatcagagaccaacacta

SEQ ID NO: 34575 - DNA, 22 bp, synthetic construct
  misc_feature 1..22: note = chemically synthesized
  source 1..22: mol_type = other DNA
agcccttgatatggcaccattc

SEQ ID NO: 34576 - DNA, 22 bp, synthetic construct
  misc_feature 1..22: note = chemically synthesized
  source 1..22: mol_type = other DNA
gatatggcaccattcctcgggg

SEQ ID NO: 34577 - DNA, 22 bp, synthetic construct
  misc_feature 1..22: note = chemically synthesized
  source 1..22: mol_type = other DNA
atatggcaccattcctcggggt

SEQ ID NO: 34578 - DNA, 22 bp, synthetic construct
  misc_feature 1..22: note = chemically synthesized
  source 1..22: mol_type = other DNA
ctcggggtgatcagccagctac

SEQ ID NO: 34579 - DNA, 22 bp, synthetic construct
  misc_feature 1..22: note = chemically synthesized
  source 1..22: mol_type = other DNA
ggggtgatcagccagctacctg

SEQ ID NO: 34580 - DNA, 22 bp, synthetic construct
  misc_feature 1..22: note = chemically synthesized
  source 1..22: mol_type = other DNA
cctggtggcaggttgattatat

SEQ ID NO: 34581 - DNA, 22 bp, synthetic construct
  misc_feature 1..22: note = chemically synthesized
  source 1..22: mol_type = other DNA
gtggcaggttgattatattgga

SEQ ID NO: 34582 - DNA, 22 bp, synthetic construct
  misc_feature 1..22: note = chemically synthesized
  source 1..22: mol_type = other DNA
attatattggacctcttccatc

SEQ ID NO: 34583 - DNA, 22 bp, synthetic construct
  misc_feature 1..22: note = chemically synthesized
  source 1..22: mol_type = other DNA
tattggacctcttccatcatgg

SEQ ID NO: 34584 - DNA, 22 bp, synthetic construct
  misc_feature 1..22: note = chemically synthesized
  source 1..22: mol_type = other DNA
gacctcttccatcatggaaagg

SEQ ID NO: 34585 - DNA, 22 bp, synthetic construct
  misc_feature 1..22: note = chemically synthesized
  source 1..22: mol_type = other DNA
ttccatcatggaaagggcagag

SEQ ID NO: 34586 - DNA, 22 bp, synthetic construct
  misc_feature 1..22: note = chemically synthesized
  source 1..22: mol_type = other DNA
ccatcatggaaagggcagaggc

SEQ ID NO: 34587 - DNA, 22 bp, synthetic construct
  misc_feature 1..22: note = chemically synthesized
  source 1..22: mol_type = other DNA
catcatggaaagggcagaggct

SEQ ID NO: 34588 - DNA, 22 bp, synthetic construct
  misc_feature 1..22: note = chemically synthesized
  source 1..22: mol_type = other DNA
gtcctcactggaatagacactt

SEQ ID NO: 34589 - DNA, 22 bp, synthetic construct
  misc_feature 1..22: note = chemically synthesized
  source 1..22: mol_type = other DNA
tcctcactggaatagacactta

SEQ ID NO: 34590 - DNA, 22 bp, synthetic construct
  misc_feature 1..22: note = chemically synthesized
  source 1..22: mol_type = other DNA
actggaatagacacttactctg

SEQ ID NO: 34591 - DNA, 22 bp, synthetic construct
  misc_feature 1..22: note = chemically synthesized
  source 1..22: mol_type = other DNA
gaatagacacttactctggata

SEQ ID NO: 34592 - DNA, 22 bp, synthetic construct
  misc_feature 1..22: note = chemically synthesized
  source 1..22: mol_type = other DNA
actctggatatgggtttcccaa

SEQ ID NO: 34593 - DNA, 22 bp, synthetic construct
  misc_feature 1..22: note = chemically synthesized
  source 1..22: mol_type = other DNA
ctctggatatgggtttcccaat

SEQ ID NO: 34594 - DNA, 22 bp, synthetic construct
  misc_feature 1..22: note = chemically synthesized
  source 1..22: mol_type = other DNA
tggatatgggtttcccaatcct

SEQ ID NO: 34595 - DNA, 22 bp, synthetic construct
  misc_feature 1..22: note = chemically synthesized
  source 1..22: mol_type = other DNA
gatatgggtttcccaatcctga

SEQ ID NO: 34596 - DNA, 22 bp, synthetic construct
  misc_feature 1..22: note = chemically synthesized
  source 1..22: mol_type = other DNA
cccaatcctgaactcaatgctt

SEQ ID NO: 34597 - DNA, 22 bp, synthetic construct
  misc_feature 1..22: note = chemically synthesized
  source 1..22: mol_type = other DNA
ccaatcctgaactcaatgctta

SEQ ID NO: 34598 - DNA, 22 bp, synthetic construct
  misc_feature 1..22: note = chemically synthesized
  source 1..22: mol_type = other DNA
aactcaatgcttatgccaagac

SEQ ID NO: 34599 - DNA, 22 bp, synthetic construct
  misc_feature 1..22: note = chemically synthesized
  source 1..22: mol_type = other DNA
aatgcttatgccaagactacca

SEQ ID NO: 34600 - DNA, 22 bp, synthetic construct
  misc_feature 1..22: note = chemically synthesized
  source 1..22: mol_type = other DNA
atgccaagactaccatccatgg

SEQ ID NO: 34601 - DNA, 22 bp, synthetic construct
  misc_feature 1..22: note = chemically synthesized
  source 1..22: mol_type = other DNA
tgccaagactaccatccatgga

SEQ ID NO: 34602 - DNA, 22 bp, synthetic construct
  misc_feature 1..22: note = chemically synthesized
  source 1..22: mol_type = other DNA
ccatccatggaatcacagaatg

SEQ ID NO: 34603 - DNA, 22 bp, synthetic construct
  misc_feature 1..22: note = chemically synthesized
  source 1..22: mol_type = other DNA
tcatggtattccacacagcatt

SEQ ID NO: 34604 - DNA, 22 bp, synthetic construct
  misc_feature 1..22: note = chemically synthesized
  source 1..22: mol_type = other DNA
cacacagcattgcttctgacca

SEQ ID NO: 34605 - DNA, 22 bp, synthetic construct
  misc_feature 1..22: note = chemically synthesized
  source 1..22: mol_type = other DNA
cttctgaccaagccactcactt

SEQ ID NO: 34606 - DNA, 22 bp, synthetic construct
  misc_feature 1..22: note = chemically synthesized
  source 1..22: mol_type = other DNA
ctgaccaagccactcactttat

SEQ ID NO: 34607 - DNA, 22 bp, synthetic construct
  misc_feature 1..22: note = chemically synthesized
  source 1..22: mol_type = other DNA
tgaccaagccactcactttatg

SEQ ID NO: 34608 - DNA, 22 bp, synthetic construct
  misc_feature 1..22: note = chemically synthesized
  source 1..22: mol_type = other DNA
accaagccactcactttatggc

SEQ ID NO: 34609 - DNA, 22 bp, synthetic construct
  misc_feature 1..22: note = chemically synthesized
  source 1..22: mol_type = other DNA
actttatggctaaagaagtgtg

SEQ ID NO: 34610 - DNA, 22 bp, synthetic construct
  misc_feature 1..22: note = chemically synthesized
  source 1..22: mol_type = other DNA
tatggctaaagaagtgtgacag

SEQ ID NO: 34611 - DNA, 22 bp, synthetic construct
  misc_feature 1..22: note = chemically synthesized
  source 1..22: mol_type = other DNA
atggctaaagaagtgtgacagt

SEQ ID NO: 34612 - DNA, 22 bp, synthetic construct
  misc_feature 1..22: note = chemically synthesized
  source 1..22: mol_type = other DNA
tggctaaagaagtgtgacagtg

SEQ ID NO: 34613 - DNA, 22 bp, synthetic construct
  misc_feature 1..22: note = chemically synthesized
  source 1..22: mol_type = other DNA
aagaagtgtgacagtgggctca

SEQ ID NO: 34614 - DNA, 22 bp, synthetic construct
  misc_feature 1..22: note = chemically synthesized
  source 1..22: mol_type = other DNA
atgctcatggaatttactggtc

SEQ ID NO: 34615 - DNA, 22 bp, synthetic construct
  misc_feature 1..22: note = chemically synthesized
  source 1..22: mol_type = other DNA
atggaatttactggtcttacca

SEQ ID NO: 34616 - DNA, 22 bp, synthetic construct
  misc_feature 1..22: note = chemically synthesized
  source 1..22: mol_type = other DNA
actggtcttaccatgatcccta

SEQ ID NO: 34617 - DNA, 22 bp, synthetic construct
  misc_feature 1..22: note = chemically synthesized
  source 1..22: mol_type = other DNA
ctggtcttaccatgatccctat

SEQ ID NO: 34618 - DNA, 22 bp, synthetic construct
  misc_feature 1..22: note = chemically synthesized
  source 1..22: mol_type = other DNA
gtcttaccatgatccctatcat

SEQ ID NO: 34619 - DNA, 22 bp, synthetic construct
  misc_feature 1..22: note = chemically synthesized
  source 1..22: mol_type = other DNA
accatgatccctatcatcctga

SEQ ID NO: 34620 - DNA, 22 bp, synthetic construct
  misc_feature 1..22: note = chemically synthesized
  source 1..22: mol_type = other DNA
ccatgatccctatcatcctgaa

SEQ ID NO: 34621 - DNA, 22 bp, synthetic construct
  misc_feature 1..22: note = chemically synthesized
  source 1..22: mol_type = other DNA
tcatcctgaagcagcttttgaa

SEQ ID NO: 34622 - DNA, 22 bp, synthetic construct
  misc_feature 1..22: note = chemically synthesized
  source 1..22: mol_type = other DNA
aagcagcttttgaatggccttt

SEQ ID NO: 34623 - DNA, 22 bp, synthetic construct
  misc_feature 1..22: note = chemically synthesized
  source 1..22: mol_type = other DNA
ttgaatggccttttgaagtcac

SEQ ID NO: 34624 - DNA, 22 bp, synthetic construct
  misc_feature 1..22: note = chemically synthesized
  source 1..22: mol_type = other DNA
tgaatggccttttgaagtcacg

SEQ ID NO: 34625 - DNA, 22 bp, synthetic construct
  misc_feature 1..22: note = chemically synthesized
  source 1..22: mol_type = other DNA
gaatggccttttgaagtcacga

SEQ ID NO: 34626 - DNA, 22 bp, synthetic construct
  misc_feature 1..22: note = chemically synthesized
  source 1..22: mol_type = other DNA
aatggccttttgaagtcacgat

SEQ ID NO: 34627 - DNA, 22 bp, synthetic construct
  misc_feature 1..22: note = chemically synthesized
  source 1..22: mol_type = other DNA
ttgaagtcacgattacaatgcc

SEQ ID NO: 34628 - DNA, 22 bp, synthetic construct
  misc_feature 1..22: note = chemically synthesized
  source 1..22: mol_type = other DNA
tgaagtcacgattacaatgcca

SEQ ID NO: 34629 - DNA, 22 bp, synthetic construct
  misc_feature 1..22: note = chemically synthesized
  source 1..22: mol_type = other DNA
gaagtcacgattacaatgccaa

SEQ ID NO: 34630 - DNA, 22 bp, synthetic construct
  misc_feature 1..22: note = chemically synthesized
  source 1..22: mol_type = other DNA
aagtcacgattacaatgccaac

SEQ ID NO: 34631 - DNA, 22 bp, synthetic construct
  misc_feature 1..22: note = chemically synthesized
  source 1..22: mol_type = other DNA
caatgccaactaggtgacaata

SEQ ID NO: 34632 - DNA, 22 bp, synthetic construct
  misc_feature 1..22: note = chemically synthesized
  source 1..22: mol_type = other DNA
ggtgacaatactttgcaggcct

SEQ ID NO: 34633 - DNA, 22 bp, synthetic construct
  misc_feature 1..22: note = chemically synthesized
  source 1..22: mol_type = other DNA
tgcaggcctggggcaaagttct

SEQ ID NO: 34634 - DNA, 22 bp, synthetic construct
  misc_feature 1..22: note = chemically synthesized
  source 1..22: mol_type = other DNA
gcaggcctggggcaaagttctc

SEQ ID NO: 34635 - DNA, 22 bp, synthetic construct
  misc_feature 1..22: note = chemically synthesized
  source 1..22: mol_type = other DNA
caggcctggggcaaagttctcc

SEQ ID NO: 34636 - DNA, 22 bp, synthetic construct
  misc_feature 1..22: note = chemically synthesized
  source 1..22: mol_type = other DNA
gggcaaagttctccagaaggct

SEQ ID NO: 34637 - DNA, 22 bp, synthetic construct
  misc_feature 1..22: note = chemically synthesized
  source 1..22: mol_type = other DNA
tccagaaggctgtgtatgctct

SEQ ID NO: 34638 - DNA, 22 bp, synthetic construct
  misc_feature 1..22: note = chemically synthesized
  source 1..22: mol_type = other DNA
cagaaggctgtgtatgctctga

SEQ ID NO: 34639 - DNA, 22 bp, synthetic construct
  misc_feature 1..22: note = chemically synthesized
  source 1..22: mol_type = other DNA
tgtatgctctgaatcagtgtcc

SEQ ID NO: 34640 - DNA, 22 bp, synthetic construct
  misc_feature 1..22: note = chemically synthesized
  source 1..22: mol_type = other DNA
tgaatcagtgtccaatatatgg

SEQ ID NO: 34641 - DNA, 22 bp, synthetic construct
  misc_feature 1..22: note = chemically synthesized
  source 1..22: mol_type = other DNA
aatcagtgtccaatatatggta

SEQ ID NO: 34642 - DNA, 22 bp, synthetic construct
  misc_feature 1..22: note = chemically synthesized
  source 1..22: mol_type = other DNA
tttctcccatagacaggattca

SEQ ID NO: 34643 - DNA, 22 bp, synthetic construct
  misc_feature 1..22: note = chemically synthesized
  source 1..22: mol_type = other DNA
ctcccatagacaggattcacgg

SEQ ID NO: 34644 - DNA, 22 bp, synthetic construct
  misc_feature 1..22: note = chemically synthesized
  source 1..22: mol_type = other DNA
tcccatagacaggattcacggg

SEQ ID NO: 34645 - DNA, 22 bp, synthetic construct
  misc_feature 1..22: note = chemically synthesized
  source 1..22: mol_type = other DNA
ccatagacaggattcacgggtc

SEQ ID NO: 34646 - DNA, 22 bp, synthetic construct
  misc_feature 1..22: note = chemically synthesized
  source 1..22: mol_type = other DNA
acgggtccaggaatcaaagggt

SEQ ID NO: 34647 - DNA, 22 bp, synthetic construct
  misc_feature 1..22: note = chemically synthesized
  source 1..22: mol_type = other DNA
accatcacccctagtgttccac

SEQ ID NO: 34648 - DNA, 22 bp, synthetic construct
  misc_feature 1..22: note = chemically synthesized
  source 1..22: mol_type = other DNA
gtgttccactagcaaaattttt

SEQ ID NO: 34649 - DNA, 22 bp, synthetic construct
  misc_feature 1..22: note = chemically synthesized
  source 1..22: mol_type = other DNA
cactagcaaaatttttgcttcc

SEQ ID NO: 34650 - DNA, 22 bp, synthetic construct
  misc_feature 1..22: note = chemically synthesized
  source 1..22: mol_type = other DNA
gcaaaatttttgcttcctgttc

SEQ ID NO: 34651 - DNA, 22 bp, synthetic construct
  misc_feature 1..22: note = chemically synthesized
  source 1..22: mol_type = other DNA
ttgcttcctgttcccatggcat

SEQ ID NO: 34652 - DNA, 22 bp, synthetic construct
  misc_feature 1..22: note = chemically synthesized
  source 1..22: mol_type = other DNA
tgcttcctgttcccatggcatt

SEQ ID NO: 34653 - DNA, 22 bp, synthetic construct
  misc_feature 1..22: note = chemically synthesized
  source 1..22: mol_type = other DNA
gcttcctgttcccatggcatta

SEQ ID NO: 34654 - DNA, 22 bp, synthetic construct
  misc_feature 1..22: note = chemically synthesized
  source 1..22: mol_type = other DNA
cttcctgttcccatggcattat

SEQ ID NO: 34655 - DNA, 22 bp, synthetic construct
  misc_feature 1..22: note = chemically synthesized
  source 1..22: mol_type = other DNA
cctgttcccatggcattatgtt

SEQ ID NO: 34656 - DNA, 22 bp, synthetic construct
  misc_feature 1..22: note = chemically synthesized
  source 1..22: mol_type = other DNA
ctgttcccatggcattatgttc

SEQ ID NO: 34657 - DNA, 22 bp, synthetic construct
  misc_feature 1..22: note = chemically synthesized
  source 1..22: mol_type = other DNA
ttcccatggcattatgttctgc

SEQ ID NO: 34658 - DNA, 22 bp, synthetic construct
  misc_feature 1..22: note = chemically synthesized
  source 1..22: mol_type = other DNA
ccatggcattatgttctgctgg

SEQ ID NO: 34659 - DNA, 22 bp, synthetic construct
  misc_feature 1..22: note = chemically synthesized
  source 1..22: mol_type = other DNA
tgttctgctggcttagaggtct

SEQ ID NO: 34660 - DNA, 22 bp, synthetic construct
  misc_feature 1..22: note = chemically synthesized
  source 1..22: mol_type = other DNA
tgctggcttagaggtcttagtt

SEQ ID NO: 34661 - DNA, 22 bp, synthetic construct
  misc_feature 1..22: note = chemically synthesized
  source 1..22: mol_type = other DNA
ctggcttagaggtcttagttcc

SEQ ID NO: 34662 - DNA, 22 bp, synthetic construct
  misc_feature 1..22: note = chemically synthesized
  source 1..22: mol_type = other DNA
gcttagaggtcttagttccaga

SEQ ID NO: 34663 - DNA, 22 bp, synthetic construct
  misc_feature 1..22: note = chemically synthesized
  source 1..22: mol_type = other DNA
agaggtcttagttccagaggga

SEQ ID NO: 34664 - DNA, 22 bp, synthetic construct
  misc_feature 1..22: note = chemically synthesized
  source 1..22: mol_type = other DNA
gaggtcttagttccagagggag

SEQ ID NO: 34665 - DNA, 22 bp, synthetic construct
  misc_feature 1..22: note = chemically synthesized
  source 1..22: mol_type = other DNA
agttccagagggaggaacactg

SEQ ID NO: 34666 - DNA, 22 bp, synthetic construct
  misc_feature 1..22: note = chemically synthesized
  source 1..22: mol_type = other DNA
gttccagagggaggaacactgc

SEQ ID NO: 34667 - DNA, 22 bp, synthetic construct
  misc_feature 1..22: note = chemically synthesized
  source 1..22: mol_type = other DNA
cagagggaggaacactgccgcc

SEQ ID NO: 34668 - DNA, 22 bp, synthetic construct
  misc_feature 1..22: note = chemically synthesized
  source 1..22: mol_type = other DNA
ccgccaggtgacacaataatga

SEQ ID NO: 34669 - DNA, 22 bp, synthetic construct
  misc_feature 1..22: note = chemically synthesized
  source 1..22: mol_type = other DNA
cattaaactgcaaattaagatt

SEQ ID NO: 34670 - DNA, 22 bp, synthetic construct
  misc_feature 1..22: note = chemically synthesized
  source 1..22: mol_type = other DNA
aactgcaaattaagattgccac

SEQ ID NO: 34671 - DNA, 22 bp, synthetic construct
  misc_feature 1..22: note = chemically synthesized
  source 1..22: mol_type = other DNA
caaattaagattgccacctgga

SEQ ID NO: 34672 - DNA, 22 bp, synthetic construct
  misc_feature 1..22: note = chemically synthesized
  source 1..22: mol_type = other DNA
agattgccacctggacactttg

SEQ ID NO: 34673 - DNA, 22 bp, synthetic construct
  misc_feature 1..22: note = chemically synthesized
  source 1..22: mol_type = other DNA
ccacctggacactttgggctcc

SEQ ID NO: 34674 - DNA, 22 bp, synthetic construct
  misc_feature 1..22: note = chemically synthesized
  source 1..22: mol_type = other DNA
gacactttgggctcctcccacc

SEQ ID NO: 34675 - DNA, 22 bp, synthetic construct
  misc_feature 1..22: note = chemically synthesized
  source 1..22: mol_type = other DNA
tgggctcctcccacctttaagt

SEQ ID NO: 34676 - DNA, 22 bp, synthetic construct
  misc_feature 1..22: note = chemically synthesized
  source 1..22: mol_type = other DNA
gggctcctcccacctttaagtc

SEQ ID NO: 34677 - DNA, 22 bp, synthetic construct
  misc_feature 1..22: note = chemically synthesized
  source 1..22: mol_type = other DNA
ggctcctcccacctttaagtca

SEQ ID NO: 34678 - DNA, 22 bp, synthetic construct
  misc_feature 1..22: note = chemically synthesized
  source 1..22: mol_type = other DNA
ctcccacctttaagtcaacagg

SEQ ID NO: 34679 - DNA, 22 bp, synthetic construct
  misc_feature 1..22: note = chemically synthesized
  source 1..22: mol_type = other DNA
ccacctttaagtcaacaggcta

SEQ ID NO: 34680 - DNA, 22 bp, synthetic construct
  misc_feature 1..22: note = chemically synthesized
  source 1..22: mol_type = other DNA
taagtcaacaggctaagaagag

SEQ ID NO: 34681 - DNA, 22 bp, synthetic construct
  misc_feature 1..22: note = chemically synthesized
  source 1..22: mol_type = other DNA
aagtcaacaggctaagaagaga

SEQ ID NO: 34682 - DNA, 22 bp, synthetic construct
  misc_feature 1..22: note = chemically synthesized
  source 1..22: mol_type = other DNA
agtcaacaggctaagaagagag

SEQ ID NO: 34683 - DNA, 22 bp, synthetic construct
  misc_feature 1..22: note = chemically synthesized
  source 1..22: mol_type = other DNA
agaagagagttacagtgttggc

SEQ ID NO: 34684 - DNA, 22 bp, synthetic construct
  misc_feature 1..22: note = chemically synthesized
  source 1..22: mol_type = other DNA
cagtgttggctgcggtgattaa

SEQ ID NO: 34685 - DNA, 22 bp, synthetic construct
  misc_feature 1..22: note = chemically synthesized
  source 1..22: mol_type = other DNA
gctgcggtgattaacccagact

SEQ ID NO: 34686 - DNA, 22 bp, synthetic construct
  misc_feature 1..22: note = chemically synthesized
  source 1..22: mol_type = other DNA
cggtgattaacccagactatca

SEQ ID NO: 34687 - DNA, 22 bp, synthetic construct
  misc_feature 1..22: note = chemically synthesized
  source 1..22: mol_type = other DNA
acccagactatcaagatgaaat

SEQ ID NO: 34688 - DNA, 22 bp, synthetic construct
  misc_feature 1..22: note = chemically synthesized
  source 1..22: mol_type = other DNA
tcaagatgaaatcagtctacaa

SEQ ID NO: 34689 - DNA, 22 bp, synthetic construct
  misc_feature 1..22: note = chemically synthesized
  source 1..22: mol_type = other DNA
caactccacaatggaggtaagg

SEQ ID NO: 34690 - DNA, 22 bp, synthetic construct
  misc_feature 1..22: note = chemically synthesized
  source 1..22: mol_type = other DNA
cacaatggaggtaaggaagcgt

SEQ ID NO: 34691 - DNA, 22 bp, synthetic construct
  misc_feature 1..22: note = chemically synthesized
  source 1..22: mol_type = other DNA
gggtgtctcttagttttaccat

SEQ ID NO: 34692 - DNA, 22 bp, synthetic construct
  misc_feature 1..22: note = chemically synthesized
  source 1..22: mol_type = other DNA
ttagttttaccatgtcctggaa

SEQ ID NO: 34693 - DNA, 22 bp, synthetic construct
  misc_feature 1..22: note = chemically synthesized
  source 1..22: mol_type = other DNA
agttttaccatgtcctggaatt

SEQ ID NO: 34694 - DNA, 22 bp, synthetic construct
  misc_feature 1..22: note = chemically synthesized
  source 1..22: mol_type = other DNA
gttttaccatgtcctggaatta

SEQ ID NO: 34695 - DNA, 22 bp, synthetic construct
  misc_feature 1..22: note = chemically synthesized
  source 1..22: mol_type = other DNA
taccatgtcctggaattaaggt

SEQ ID NO: 34696 - DNA, 22 bp, synthetic construct
  misc_feature 1..22: note = chemically synthesized
  source 1..22: mol_type = other DNA
accatgtcctggaattaaggtc

SEQ ID NO: 34697 - DNA, 22 bp, synthetic construct
  misc_feature 1..22: note = chemically synthesized
  source 1..22: mol_type = other DNA
ccatgtcctggaattaaggtca

SEQ ID NO: 34698 - DNA, 22 bp, synthetic construct
  misc_feature 1..22: note = chemically synthesized
  source 1..22: mol_type = other DNA
gaattaaggtcagtgggaaact

SEQ ID NO: 34699 - DNA, 22 bp, synthetic construct
  misc_feature 1..22: note = chemically synthesized
  source 1..22: mol_type = other DNA
aggtcagtgggaaactactaca

SEQ ID NO: 34700 - DNA, 22 bp, synthetic construct
  misc_feature 1..22: note = chemically synthesized
  source 1..22: mol_type = other DNA
ctacaggccattccaggcagga

SEQ ID NO: 34701 - DNA, 22 bp, synthetic construct
  misc_feature 1..22: note = chemically synthesized
  source 1..22: mol_type = other DNA
caggccattccaggcaggacta

SEQ ID NO: 34702 - DNA, 22 bp, synthetic construct
  misc_feature 1..22: note = chemically synthesized
  source 1..22: mol_type = other DNA
caggcaggactacaaataaagg

SEQ ID NO: 34703 - DNA, 22 bp, synthetic construct
  misc_feature 1..22: note = chemically synthesized
  source 1..22: mol_type = other DNA
caaataaaggtttgggtcactc

SEQ ID NO: 34704 - DNA, 22 bp, synthetic construct
  misc_feature 1..22: note = chemically synthesized
  source 1..22: mol_type = other DNA
gggtcactccaccaggaaaaaa

SEQ ID NO: 34705 - DNA, 22 bp, synthetic construct
  misc_feature 1..22: note = chemically synthesized
  source 1..22: mol_type = other DNA
ggtcactccaccaggaaaaaaa

SEQ ID NO: 34706 - DNA, 22 bp, synthetic construct
  misc_feature 1..22: note = chemically synthesized
  source 1..22: mol_type = other DNA
caccaggaaaaaaaaaaaaaaa

SEQ ID NO: 34707 - DNA, 22 bp, synthetic construct
  misc_feature 1..22: note = chemically synthesized
  source 1..22: mol_type = other DNA
ctgaggtgcttgctgagggcaa

SEQ ID NO: 34708 - DNA, 22 bp, synthetic construct
  misc_feature 1..22: note = chemically synthesized
  source 1..22: mol_type = other DNA
aggtgcttgctgagggcaaagg

SEQ ID NO: 34709 - DNA, 22 bp, synthetic construct
  misc_feature 1..22: note = chemically synthesized
  source 1..22: mol_type = other DNA
gctgagggcaaagggaatacag

SEQ ID NO: 34710 - DNA, 22 bp, synthetic construct
  misc_feature 1..22: note = chemically synthesized
  source 1..22: mol_type = other DNA
ctgagggcaaagggaatacaga

SEQ ID NO: 34711 - DNA, 22 bp, synthetic construct
  misc_feature 1..22: note = chemically synthesized
  source 1..22: mol_type = other DNA
agggcaaagggaatacagaata

SEQ ID NO: 34712 - DNA, 22 bp, synthetic construct
  misc_feature 1..22: note = chemically synthesized
  source 1..22: mol_type = other DNA
cgatcacgtgaccaattgcaga

SEQ ID NO: 34713 - DNA, 22 bp, synthetic construct
  misc_feature 1..22: note = chemically synthesized
  source 1..22: mol_type = other DNA
cagatacaaggactgtaattgt

SEQ ID NO: 34714 - DNA, 22 bp, synthetic construct
  misc_feature 1..22: note = chemically synthesized
  source 1..22: mol_type = other DNA
taattgtcatgagtatttcctc

SEQ ID NO: 34715 - DNA, 22 bp, synthetic construct
  misc_feature 1..22: note = chemically synthesized
  source 1..22: mol_type = other DNA
tcatgagtatttcctccttctt

SEQ ID NO: 34716 - DNA, 22 bp, synthetic construct
  misc_feature 1..22: note = chemically synthesized
  source 1..22: mol_type = other DNA
cctccttcttttgttaaaaaca

SEQ ID NO: 34717 - DNA, 22 bp, synthetic construct
  misc_feature 1..22: note = chemically synthesized
  source 1..22: mol_type = other DNA
ctccttcttttgttaaaaacac

SEQ ID NO: 34718 - DNA, 22 bp, synthetic construct
  misc_feature 1..22: note = chemically synthesized
  source 1..22: mol_type = other DNA
cttcttttgttaaaaacacctt

SEQ ID NO: 34719 - DNA, 22 bp, synthetic construct
  misc_feature 1..22: note = chemically synthesized
  source 1..22: mol_type = other DNA
cttttgttaaaaacaccttcgt

SEQ ID NO: 34720 - DNA, 22 bp, synthetic construct
  misc_feature 1..22: note = chemically synthesized
  source 1..22: mol_type = other DNA
ttttgttaaaaacaccttcgtg

SEQ ID NO: 34721 - DNA, 22 bp, synthetic construct
  misc_feature 1..22: note = chemically synthesized
  source 1..22: mol_type = other DNA
ttgttaaaaacaccttcgtgtc

SEQ ID NO: 34722 - DNA, 22 bp, synthetic construct
  misc_feature 1..22: note = chemically synthesized
  source 1..22: mol_type = other DNA
tgttaaaaacaccttcgtgtct

SEQ ID NO: 34723 - DNA, 22 bp, synthetic construct
  misc_feature 1..22: note = chemically synthesized
  source 1..22: mol_type = other DNA
gttaaaaacaccttcgtgtctg

SEQ ID NO: 34724 - DNA, 22 bp, synthetic construct
  misc_feature 1..22: note = chemically synthesized
  source 1..22: mol_type = other DNA
ttaaaaacaccttcgtgtctgt

SEQ ID NO: 34725 - DNA, 22 bp, synthetic construct
  misc_feature 1..22: note = chemically synthesized
  source 1..22: mol_type = other DNA
aaaacaccttcgtgtctgtata

SEQ ID NO: 34726 - DNA, 22 bp, synthetic construct
  misc_feature 1..22: note = chemically synthesized
  source 1..22: mol_type = other DNA
cgtgtctgtatacacttgtact

SEQ ID NO: 34727 - DNA, 22 bp, synthetic construct
  misc_feature 1..22: note = chemically synthesized
  source 1..22: mol_type = other DNA
gtgtctgtatacacttgtacta

SEQ ID NO: 34728 - DNA, 22 bp, synthetic construct
  misc_feature 1..22: note = chemically synthesized
  source 1..22: mol_type = other DNA
tatacacttgtactaagaaaat

SEQ ID NO: 34729 - DNA, 22 bp, synthetic construct
  misc_feature 1..22: note = chemically synthesized
  source 1..22: mol_type = other DNA
gtactaagaaaatatatacatt

SEQ ID NO: 34730 - DNA, 22 bp, synthetic construct
  misc_feature 1..22: note = chemically synthesized
  source 1..22: mol_type = other DNA
tactaagaaaatatatacattt

SEQ ID NO: 34731 - DNA, 22 bp, synthetic construct
  misc_feature 1..22: note = chemically synthesized
  source 1..22: mol_type = other DNA
agaaaatatatacattttactt

SEQ ID NO: 34732 - DNA, 22 bp, synthetic construct
  misc_feature 1..22: note = chemically synthesized
  source 1..22: mol_type = other DNA
tacttcctttttcctttatcat

SEQ ID NO: 34733 - DNA, 22 bp, synthetic construct
  misc_feature 1..22: note = chemically synthesized
  source 1..22: mol_type = other DNA
acttcctttttcctttatcatg

SEQ ID NO: 34734 - DNA, 22 bp, synthetic construct
  misc_feature 1..22: note = chemically synthesized
  source 1..22: mol_type = other DNA
cttcctttttcctttatcatgt

SEQ ID NO: 34735 - DNA, 22 bp, synthetic construct
  misc_feature 1..22: note = chemically synthesized
  source 1..22: mol_type = other DNA
cctttttcctttatcatgtgac

SEQ ID NO: 34736 - DNA, 22 bp, synthetic construct
  misc_feature 1..22: note = chemically synthesized
  source 1..22: mol_type = other DNA
ctttttcctttatcatgtgaca

SEQ ID NO: 34737 - DNA, 22 bp, synthetic construct
  misc_feature 1..22: note = chemically synthesized
  source 1..22: mol_type = other DNA
tttcctttatcatgtgacataa

SEQ ID NO: 34738 - DNA, 22 bp, synthetic construct
  misc_feature 1..22: note = chemically synthesized
  source 1..22: mol_type = other DNA
ttcctttatcatgtgacataag

SEQ ID NO: 34739 - DNA, 22 bp, synthetic construct
  misc_feature 1..22: note = chemically synthesized
  source 1..22: mol_type = other DNA
tcctttatcatgtgacataaga

SEQ ID NO: 34740 - DNA, 22 bp, synthetic construct
  misc_feature 1..22: note = chemically synthesized
  source 1..22: mol_type = other DNA
cctttatcatgtgacataagat

SEQ ID NO: 34741 - DNA, 22 bp, synthetic construct
  misc_feature 1..22: note = chemically synthesized
  source 1..22: mol_type = other DNA
ctttatcatgtgacataagatt

SEQ ID NO: 34742 - DNA, 22 bp, synthetic construct
  misc_feature 1..22: note = chemically synthesized
  source 1..22: mol_type = other DNA
tatcatgtgacataagatttat

SEQ ID NO: 34743 - DNA, 22 bp, synthetic construct
  misc_feature 1..22: note = chemically synthesized
  source 1..22: mol_type = other DNA
atcatgtgacataagatttatt

SEQ ID NO: 34744 - DNA, 22 bp, synthetic construct
  misc_feature 1..22: note = chemically synthesized
  source 1..22: mol_type = other DNA
tcatgtgacataagatttattg

SEQ ID NO: 34745 - DNA, 22 bp, synthetic construct
  misc_feature 1..22: note = chemically synthesized
  source 1..22: mol_type = other DNA
attgacttcatatcagcattta

SEQ ID NO: 34746 - DNA, 22 bp, synthetic construct
  misc_feature 1..22: note = chemically synthesized
  source 1..22: mol_type = other DNA
ttgacttcatatcagcatttaa

SEQ ID NO: 34747 - DNA, 22 bp, synthetic construct
  misc_feature 1..22: note = chemically synthesized
  source 1..22: mol_type = other DNA
acttcatatcagcatttaagta

SEQ ID NO: 34748 - DNA, 22 bp, synthetic construct
  misc_feature 1..22: note = chemically synthesized
  source 1..22: mol_type = other DNA
catatcagcatttaagtattgt

SEQ ID NO: 34749 - DNA, 22 bp, synthetic construct
  misc_feature 1..22: note = chemically synthesized
  source 1..22: mol_type = other DNA
atatcagcatttaagtattgtt

SEQ ID NO: 34750 - DNA, 22 bp, synthetic construct
  misc_feature 1..22: note = chemically synthesized
  source 1..22: mol_type = other DNA
aagtattgttaagtttatgtaa

SEQ ID NO: 34751 - DNA, 22 bp, synthetic construct
  misc_feature 1..22: note = chemically synthesized
  source 1..22: mol_type = other DNA
agtattgttaagtttatgtaat

SEQ ID NO: 34752 - DNA, 22 bp, synthetic construct
  misc_feature 1..22: note = chemically synthesized
  source 1..22: mol_type = other DNA
ttaagtttatgtaatagcattt

SEQ ID NO: 34753 - DNA, 22 bp, synthetic construct
  misc_feature 1..22: note = chemically synthesized
  source 1..22: mol_type = other DNA
agtttatgtaatagcatttgca

SEQ ID NO: 34754 - DNA, 22 bp, synthetic construct
  misc_feature 1..22: note = chemically synthesized
  source 1..22: mol_type = other DNA
atgtaatagcatttgcaatggg

SEQ ID NO: 34755 - DNA, 22 bp, synthetic construct
  misc_feature 1..22: note = chemically synthesized
  source 1..22: mol_type = other DNA
tgtaatagcatttgcaatgggg

SEQ ID NO: 34756 - DNA, 22 bp, synthetic construct
  misc_feature 1..22: note = chemically synthesized
  source 1..22: mol_type = other DNA
gcaatggggattggtgcatttt

SEQ ID NO: 34757 - DNA, 22 bp, synthetic construct
  misc_feature 1..22: note = chemically synthesized
  source 1..22: mol_type = other DNA
caatggggattggtgcattttc

SEQ ID NO: 34758 - DNA, 22 bp, synthetic construct
  misc_feature 1..22: note = chemically synthesized
  source 1..22: mol_type = other DNA
gtgcattttcaattgcacgaag

SEQ ID NO: 34759 - DNA, 22 bp, synthetic construct
  misc_feature 1..22: note = chemically synthesized
  source 1..22: mol_type = other DNA
tcaattgcacgaaggatagttt

SEQ ID NO: 34760 - DNA, 22 bp, synthetic construct
  misc_feature 1..22: note = chemically synthesized
  source 1..22: mol_type = other DNA
caattgcacgaaggatagtttt

SEQ ID NO: 34761 - DNA, 22 bp, synthetic construct
  misc_feature 1..22: note = chemically synthesized
  source 1..22: mol_type = other DNA
aattgcacgaaggatagtttta

SEQ ID NO: 34762 - DNA, 22 bp, synthetic construct
  misc_feature 1..22: note = chemically synthesized
  source 1..22: mol_type = other DNA
cacgaaggatagttttagtatg

SEQ ID NO: 34763 - DNA, 22 bp, synthetic construct
  misc_feature 1..22: note = chemically synthesized
  source 1..22: mol_type = other DNA
tagtatgttaggcataattatg

SEQ ID NO: 34764 - DNA, 22 bp, synthetic construct
  misc_feature 1..22: note = chemically synthesized
  source 1..22: mol_type = other DNA
agtatgttaggcataattatga

SEQ ID NO: 34765 - DNA, 22 bp, synthetic construct
  misc_feature 1..22: note = chemically synthesized
  source 1..22: mol_type = other DNA
gtatgttaggcataattatgac

SEQ ID NO: 34766 - DNA, 22 bp, synthetic construct
  misc_feature 1..22: note = chemically synthesized
  source 1..22: mol_type = other DNA
ggcataattatgacttattgtt

SEQ ID NO: 34767 - DNA, 22 bp, synthetic construct
  misc_feature 1..22: note = chemically synthesized
  source 1..22: mol_type = other DNA
tgacttattgttgtctttattt

SEQ ID NO: 34768 - DNA, 22 bp, synthetic construct
  misc_feature 1..22: note = chemically synthesized
  source 1..22: mol_type = other DNA
attgttgtctttatttgaagat

SEQ ID NO: 34769 - DNA, 22 bp, synthetic construct
  misc_feature 1..22: note = chemically synthesized
  source 1..22: mol_type = other DNA
ttgttgtctttatttgaagata

SEQ ID NO: 34770 - DNA, 22 bp, synthetic construct
  misc_feature 1..22: note = chemically synthesized
  source 1..22: mol_type = other DNA
ttgtctttatttgaagataatg

SEQ ID NO: 34771 - DNA, 22 bp, synthetic construct
  misc_feature 1..22: note = chemically synthesized
  source 1..22: mol_type = other DNA
tctttatttgaagataatgtat

SEQ ID NO: 34772 - DNA, 22 bp, synthetic construct
  misc_feature 1..22: note = chemically synthesized
  source 1..22: mol_type = other DNA
tatttgaagataatgtatgacc

SEQ ID NO: 34773 - DNA, 22 bp, synthetic construct
  misc_feature 1..22: note = chemically synthesized
  source 1..22: mol_type = other DNA
atttgaagataatgtatgacct

SEQ ID NO: 34774 - DNA, 22 bp, synthetic construct
  misc_feature 1..22: note = chemically synthesized
  source 1..22: mol_type = other DNA
tttgaagataatgtatgacctc

SEQ ID NO: 34775 - DNA, 22 bp, synthetic construct
  misc_feature 1..22: note = chemically synthesized
  source 1..22: mol_type = other DNA
gaagataatgtatgacctcagg

SEQ ID NO: 34776 - DNA, 22 bp, synthetic construct
  misc_feature 1..22: note = chemically synthesized
  source 1..22: mol_type = other DNA
aagataatgtatgacctcaggg

SEQ ID NO: 34777 - DNA, 22 bp, synthetic construct
  misc_feature 1..22: note = chemically synthesized
  source 1..22: mol_type = other DNA
aggggatgtgtataggctcaag

SEQ ID NO: 34778 - DNA, 22 bp, synthetic construct
  misc_feature 1..22: note = chemically synthesized
  source 1..22: mol_type = other DNA
aagttgacaagcgatggacttg

SEQ ID NO: 34779 - DNA, 22 bp, synthetic construct
  misc_feature 1..22: note = chemically synthesized
  source 1..22: mol_type = other DNA
acaagcgatggacttgtgatgg

SEQ ID NO: 34780 - DNA, 22 bp, synthetic construct
  misc_feature 1..22: note = chemically synthesized
  source 1..22: mol_type = other DNA
gtgatggttaatactgagtgtc

SEQ ID NO: 34781 - DNA, 22 bp, synthetic construct
  misc_feature 1..22: note = chemically synthesized
  source 1..22: mol_type = other DNA
tgatggttaatactgagtgtca

SEQ ID NO: 34782 - DNA, 22 bp, synthetic construct
  misc_feature 1..22: note = chemically synthesized
  source 1..22: mol_type = other DNA
atactgagtgtcaacttgattg

SEQ ID NO: 34783 - DNA, 22 bp, synthetic construct
  misc_feature 1..22: note = chemically synthesized
  source 1..22: mol_type = other DNA
agtgtcaacttgattggattga

SEQ ID NO: 34784 - DNA, 22 bp, synthetic construct
  misc_feature 1..22: note = chemically synthesized
  source 1..22: mol_type = other DNA
gattggattgaagtgtgcaaag

SEQ ID NO: 34785 - DNA, 22 bp, synthetic construct
  misc_feature 1..22: note = chemically synthesized
  source 1..22: mol_type = other DNA
attggattgaagtgtgcaaagt

SEQ ID NO: 34786 - DNA, 22 bp, synthetic construct
  misc_feature 1..22: note = chemically synthesized
  source 1..22: mol_type = other DNA
gattgaagtgtgcaaagtattg

SEQ ID NO: 34787 - DNA, 22 bp, synthetic construct
  misc_feature 1..22: note = chemically synthesized
  source 1..22: mol_type = other DNA
aagtgtgcaaagtattgatcct

SEQ ID NO: 34788 - DNA, 22 bp, synthetic construct
  misc_feature 1..22: note = chemically synthesized
  source 1..22: mol_type = other DNA
atcctgagtgtgtctgtgaggg

SEQ ID NO: 34789 - DNA, 22 bp, synthetic construct
  misc_feature 1..22: note = chemically synthesized
  source 1..22: mol_type = other DNA
agtgtgtctgtgagggtattgc

SEQ ID NO: 34790 - DNA, 22 bp, synthetic construct
  misc_feature 1..22: note = chemically synthesized
  source 1..22: mol_type = other DNA
tgagggtattgccaaaggagat

SEQ ID NO: 34791 - DNA, 22 bp, synthetic construct
  misc_feature 1..22: note = chemically synthesized
  source 1..22: mol_type = other DNA
ccaaaggagattaacattttag

SEQ ID NO: 34792 - DNA, 22 bp, synthetic construct
  misc_feature 1..22: note = chemically synthesized
  source 1..22: mol_type = other DNA
acattttagtcagtgggctggg

SEQ ID NO: 34793 - DNA, 22 bp, synthetic construct
  misc_feature 1..22: note = chemically synthesized
  source 1..22: mol_type = other DNA
tagtcagtgggctgggaaaggc

SEQ ID NO: 34794 - DNA, 22 bp, synthetic construct
  misc_feature 1..22: note = chemically synthesized
  source 1..22: mol_type = other DNA
agtcagtgggctgggaaaggca

SEQ ID NO: 34795 - DNA, 22 bp, synthetic construct
  misc_feature 1..22: note = chemically synthesized
  source 1..22: mol_type = other DNA
gtcagtgggctgggaaaggcag

SEQ ID NO: 34796 - DNA, 22 bp, synthetic construct
  misc_feature 1..22: note = chemically synthesized
  source 1..22: mol_type = other DNA
ggaaaggcagacccacccttaa

SEQ ID NO: 34797 - DNA, 22 bp, synthetic construct
  misc_feature 1..22: note = chemically synthesized
  source 1..22: mol_type = other DNA
aatctgggtgggcaccatctaa

SEQ ID NO: 34798 - DNA, 22 bp, synthetic construct
  misc_feature 1..22: note = chemically synthesized
  source 1..22: mol_type = other DNA
atctgggtgggcaccatctaat

SEQ ID NO: 34799 - DNA, 22 bp, synthetic construct
  misc_feature 1..22: note = chemically synthesized
  source 1..22: mol_type = other DNA
ggtgggcaccatctaatcagtt

SEQ ID NO: 34800 - DNA, 22 bp, synthetic construct
  misc_feature 1..22: note = chemically synthesized
  source 1..22: mol_type = other DNA
atcagttgccagtgtggccagg

SEQ ID NO: 34801 - DNA, 22 bp, synthetic construct
  misc_feature 1..22: note = chemically synthesized
  source 1..22: mol_type = other DNA
ccagtgtggccaggatataaag

SEQ ID NO: 34802 - DNA, 22 bp, synthetic construct
  misc_feature 1..22: note = chemically synthesized
  source 1..22: mol_type = other DNA
gactggcttagcctccaagcct

SEQ ID NO: 34803 - DNA, 22 bp, synthetic construct
  misc_feature 1..22: note = chemically synthesized
  source 1..22: mol_type = other DNA
gcttagcctccaagcctacatc

SEQ ID NO: 34804 - DNA, 22 bp, synthetic construct
  misc_feature 1..22: note = chemically synthesized
  source 1..22: mol_type = other DNA
agcctccaagcctacatctttc

SEQ ID NO: 34805 - DNA, 22 bp, synthetic construct
  misc_feature 1..22: note = chemically synthesized
  source 1..22: mol_type = other DNA
gcctccaagcctacatctttct

SEQ ID NO: 34806 - DNA, 22 bp, synthetic construct
  misc_feature 1..22: note = chemically synthesized
  source 1..22: mol_type = other DNA
caagcctacatctttctcccat

SEQ ID NO: 34807 - DNA, 22 bp, synthetic construct
  misc_feature 1..22: note = chemically synthesized
  source 1..22: mol_type = other DNA
catctttctcccatgctggatg

SEQ ID NO: 34808 - DNA, 22 bp, synthetic construct
  misc_feature 1..22: note = chemically synthesized
  source 1..22: mol_type = other DNA
tctcccatgctggatgcttcct

SEQ ID NO: 34809 - DNA, 22 bp, synthetic construct
  misc_feature 1..22: note = chemically synthesized
  source 1..22: mol_type = other DNA
ctcccatgctggatgcttcctg

SEQ ID NO: 34810 - DNA, 22 bp, synthetic construct
  misc_feature 1..22: note = chemically synthesized
  source 1..22: mol_type = other DNA
tcccatgctggatgcttcctgc

SEQ ID NO: 34811 - DNA, 22 bp, synthetic construct
  misc_feature 1..22: note = chemically synthesized
  source 1..22: mol_type = other DNA
ccatgctggatgcttcctgccc

SEQ ID NO: 34812 - DNA, 22 bp, synthetic construct
  misc_feature 1..22: note = chemically synthesized
  source 1..22: mol_type = other DNA
gatgcttcctgccctcaaacat

SEQ ID NO: 34813 - DNA, 22 bp, synthetic construct
  misc_feature 1..22: note = chemically synthesized
  source 1..22: mol_type = other DNA
cctgccctcaaacattggactc

SEQ ID NO: 34814 - DNA, 22 bp, synthetic construct
  misc_feature 1..22: note = chemically synthesized
  source 1..22: mol_type = other DNA
ctgccctcaaacattggactcc

SEQ ID NO: 34815 - DNA, 22 bp, synthetic construct
  misc_feature 1..22: note = chemically synthesized
  source 1..22: mol_type = other DNA
ccctcaaacattggactccaag

SEQ ID NO: 34816 - DNA, 22 bp, synthetic construct
  misc_feature 1..22: note = chemically synthesized
  source 1..22: mol_type = other DNA
aaacattggactccaagtcctt

SEQ ID NO: 34817 - DNA, 22 bp, synthetic construct
  misc_feature 1..22: note = chemically synthesized
  source 1..22: mol_type = other DNA
gactccaagtccttcagctttg

SEQ ID NO: 34818 - DNA, 22 bp, synthetic construct
  misc_feature 1..22: note = chemically synthesized
  source 1..22: mol_type = other DNA
caagtccttcagctttgggact

SEQ ID NO: 34819 - DNA, 22 bp, synthetic construct
  misc_feature 1..22: note = chemically synthesized
  source 1..22: mol_type = other DNA
cagctttgggacttggactggc

SEQ ID NO: 34820 - DNA, 22 bp, synthetic construct
  misc_feature 1..22: note = chemically synthesized
  source 1..22: mol_type = other DNA
agctttgggacttggactggct

SEQ ID NO: 34821 - DNA, 22 bp, synthetic construct
  misc_feature 1..22: note = chemically synthesized
  source 1..22: mol_type = other DNA
tgggacttggactggcttcctt

SEQ ID NO: 34822 - DNA, 22 bp, synthetic construct
  misc_feature 1..22: note = chemically synthesized
  source 1..22: mol_type = other DNA
gggacttggactggcttccttg

SEQ ID NO: 34823 - DNA, 22 bp, synthetic construct
  misc_feature 1..22: note = chemically synthesized
  source 1..22: mol_type = other DNA
ggacttggactggcttccttgc

SEQ ID NO: 34824 - DNA, 22 bp, synthetic construct
  misc_feature 1..22: note = chemically synthesized
  source 1..22: mol_type = other DNA
ggactggcttccttgctcctct

SEQ ID NO: 34825 - DNA, 22 bp, synthetic construct
  misc_feature 1..22: note = chemically synthesized
  source 1..22: mol_type = other DNA
gactggcttccttgctcctctg

SEQ ID NO: 34826 - DNA, 22 bp, synthetic construct
  misc_feature 1..22: note = chemically synthesized
  source 1..22: mol_type = other DNA
gcttccttgctcctctgcttgc

SEQ ID NO: 34827 - DNA, 22 bp, synthetic construct
  misc_feature 1..22: note = chemically synthesized
  source 1..22: mol_type = other DNA
ccttgctcctctgcttgcagat

SEQ ID NO: 34828 - DNA, 22 bp, synthetic construct
  misc_feature 1..22: note = chemically synthesized
  source 1..22: mol_type = other DNA
cttgctcctctgcttgcagatg

SEQ ID NO: 34829 - DNA, 22 bp, synthetic construct
  misc_feature 1..22: note = chemically synthesized
  source 1..22: mol_type = other DNA
gctcctctgcttgcagatggcc

SEQ ID NO: 34830 - DNA, 22 bp, synthetic construct
  misc_feature 1..22: note = chemically synthesized
  source 1..22: mol_type = other DNA
ctcctctgcttgcagatggcct

SEQ ID NO: 34831 - DNA, 22 bp, synthetic construct
  misc_feature 1..22: note = chemically synthesized
  source 1..22: mol_type = other DNA
ctctgcttgcagatggcctatt

SEQ ID NO: 34832 - DNA, 22 bp, synthetic construct
  misc_feature 1..22: note = chemically synthesized
  source 1..22: mol_type = other DNA
tgcttgcagatggcctattgtg

SEQ ID NO: 34833 - DNA, 22 bp, synthetic construct
  misc_feature 1..22: note = chemically synthesized
  source 1..22: mol_type = other DNA
cttgcagatggcctattgtggg

SEQ ID NO: 34834 - DNA, 22 bp, synthetic construct
  misc_feature 1..22: note = chemically synthesized
  source 1..22: mol_type = other DNA
gcagatggcctattgtgggacc

SEQ ID NO: 34835 - DNA, 22 bp, synthetic construct
  misc_feature 1..22: note = chemically synthesized
  source 1..22: mol_type = other DNA
cagatggcctattgtgggacct

SEQ ID NO: 34836 - DNA, 22 bp, synthetic construct
  misc_feature 1..22: note = chemically synthesized
  source 1..22: mol_type = other DNA
ttgtgggaccttgtgattgtgt

SEQ ID NO: 34837 - DNA, 22 bp, synthetic construct
  misc_feature 1..22: note = chemically synthesized
  source 1..22: mol_type = other DNA
tgggaccttgtgattgtgtaag

SEQ ID NO: 34838 - DNA, 22 bp, synthetic construct
  misc_feature 1..22: note = chemically synthesized
  source 1..22: mol_type = other DNA
gtgattgtgtaagttaacacta

SEQ ID NO: 34839 - DNA, 22 bp, synthetic construct
  misc_feature 1..22: note = chemically synthesized
  source 1..22: mol_type = other DNA
tgattgtgtaagttaacactac

SEQ ID NO: 34840 - DNA, 22 bp, synthetic construct
  misc_feature 1..22: note = chemically synthesized
  source 1..22: mol_type = other DNA
tgtaagttaacactacttaata

SEQ ID NO: 34841 - DNA, 22 bp, synthetic construct
  misc_feature 1..22: note = chemically synthesized
  source 1..22: mol_type = other DNA
acactacttaataaactccctt

SEQ ID NO: 34842 - DNA, 22 bp, synthetic construct
  misc_feature 1..22: note = chemically synthesized
  source 1..22: mol_type = other DNA
cttaataaactcccttttatat

SEQ ID NO: 34843 - DNA, 22 bp, synthetic construct
  misc_feature 1..22: note = chemically synthesized
  source 1..22: mol_type = other DNA
aataaactcccttttatatcta

SEQ ID NO: 34844 - DNA, 22 bp, synthetic construct
  misc_feature 1..22: note = chemically synthesized
  source 1..22: mol_type = other DNA
ataaactcccttttatatctaa

SEQ ID NO: 34845 - DNA, 22 bp, synthetic construct
  misc_feature 1..22: note = chemically synthesized
  source 1..22: mol_type = other DNA
ccttttatatctaaatctatat

SEQ ID NO: 34846 - DNA, 22 bp, synthetic construct
  misc_feature 1..22: note = chemically synthesized
  source 1..22: mol_type = other DNA
ttatatctaaatctatatctat

SEQ ID NO: 34847 - DNA, 22 bp, synthetic construct
  misc_feature 1..22: note = chemically synthesized
  source 1..22: mol_type = other DNA
tatatctaaatctatatctatc

SEQ ID NO: 34848 - DNA, 22 bp, synthetic construct
  misc_feature 1..22: note = chemically synthesized
  source 1..22: mol_type = other DNA
atatctaaatctatatctatct

SEQ ID NO: 34849 - DNA, 22 bp, synthetic construct
  misc_feature 1..22: note = chemically synthesized
  source 1..22: mol_type = other DNA
tatctaaatctatatctatcta

SEQ ID NO: 34850 - DNA, 22 bp, synthetic construct
  misc_feature 1..22: note = chemically synthesized
  source 1..22: mol_type = other DNA
aatctatatctatctatctatc

SEQ ID NO: 34851 - DNA, 22 bp, synthetic construct
  misc_feature 1..22: note = chemically synthesized
  source 1..22: mol_type = other DNA
tatctatctatctatctatcta

SEQ ID NO: 34852 - DNA, 22 bp, synthetic construct
  misc_feature 1..22: note = chemically synthesized
  source 1..22: mol_type = other DNA
tctatctatctatctatctatc

SEQ ID NO: 34853 - DNA, 22 bp, synthetic construct
  misc_feature 1..22: note = chemically synthesized
  source 1..22: mol_type = other DNA
tctatctatctatctatctatc

SEQ ID NO: 34854 - DNA, 22 bp, synthetic construct
  misc_feature 1..22: note = chemically synthesized
  source 1..22: mol_type = other DNA
tctatctatctatctatctatc

SEQ ID NO: 34855 - DNA, 22 bp, synthetic construct
  misc_feature 1..22: note = chemically synthesized
  source 1..22: mol_type = other DNA
tctatctatctatctatctatc

SEQ ID NO: 34856 - DNA, 22 bp, synthetic construct
  misc_feature 1..22: note = chemically synthesized
  source 1..22: mol_type = other DNA
tctatctatctatctatctatc

SEQ ID NO: 34857 - DNA, 22 bp, synthetic construct
  misc_feature 1..22: note = chemically synthesized
  source 1..22: mol_type = other DNA
tctatctatctatctatctcct

SEQ ID NO: 34858 - DNA, 22 bp, synthetic construct
  misc_feature 1..22: note = chemically synthesized
  source 1..22: mol_type = other DNA
tctatctatctatctcctatta

SEQ ID NO: 34859 - DNA, 22 bp, synthetic construct
  misc_feature 1..22: note = chemically synthesized
  source 1..22: mol_type = other DNA
tctatctatctcctattagttc

SEQ ID NO: 34860 - DNA, 22 bp, synthetic construct
  misc_feature 1..22: note = chemically synthesized
  source 1..22: mol_type = other DNA
tctatctcctattagttctgtc

SEQ ID NO: 34861 - DNA, 22 bp, synthetic construct
  misc_feature 1..22: note = chemically synthesized
  source 1..22: mol_type = other DNA
tctcctattagttctgtctctc

SEQ ID NO: 34862 - DNA, 22 bp, synthetic construct
  misc_feature 1..22: note = chemically synthesized
  source 1..22: mol_type = other DNA
ctattagttctgtctctctagg

SEQ ID NO: 34863 - DNA, 22 bp, synthetic construct
  misc_feature 1..22: note = chemically synthesized
  source 1..22: mol_type = other DNA
ttagttctgtctctctagggaa

SEQ ID NO: 34864 - DNA, 22 bp, synthetic construct
  misc_feature 1..22: note = chemically synthesized
  source 1..22: mol_type = other DNA
gttctgtctctctagggaaccc

SEQ ID NO: 34865 - DNA, 22 bp, synthetic construct
  misc_feature 1..22: note = chemically synthesized
  source 1..22: mol_type = other DNA
tgtctctctagggaaccctgac

SEQ ID NO: 34866 - DNA, 22 bp, synthetic construct
  misc_feature 1..22: note = chemically synthesized
  source 1..22: mol_type = other DNA
tctctctagggaaccctgacaa

SEQ ID NO: 34867 - DNA, 22 bp, synthetic construct
  misc_feature 1..22: note = chemically synthesized
  source 1..22: mol_type = other DNA
tctagggaaccctgacaaatac

SEQ ID NO: 34868 - DNA, 22 bp, synthetic construct
  misc_feature 1..22: note = chemically synthesized
  source 1..22: mol_type = other DNA
tagggaaccctgacaaatacag

SEQ ID NO: 34869 - DNA, 22 bp, synthetic construct
  misc_feature 1..22: note = chemically synthesized
  source 1..22: mol_type = other DNA
gggaaccctgacaaatacagtg

SEQ ID NO: 34870 - DNA, 22 bp, synthetic construct
  misc_feature 1..22: note = chemically synthesized
  source 1..22: mol_type = other DNA
acaaatacagtgagctcaggtc

SEQ ID NO: 34871 - DNA, 22 bp, synthetic construct
  misc_feature 1..22: note = chemically synthesized
  source 1..22: mol_type = other DNA
aggtcctgagcagacattttcc

SEQ ID NO: 34872 - DNA, 22 bp, synthetic construct
  misc_feature 1..22: note = chemically synthesized
  source 1..22: mol_type = other DNA
agcagacattttccaaaagaag

SEQ ID NO: 34873 - DNA, 22 bp, synthetic construct
  misc_feature 1..22: note = chemically synthesized
  source 1..22: mol_type = other DNA
tccaaaagaagacatacaagtg

SEQ ID NO: 34874 - DNA, 22 bp, synthetic construct
  misc_feature 1..22: note = chemically synthesized
  source 1..22: mol_type = other DNA
ccaaaagaagacatacaagtgg

SEQ ID NO: 34875 - DNA, 22 bp, synthetic construct
  misc_feature 1..22: note = chemically synthesized
  source 1..22: mol_type = other DNA
caaaagaagacatacaagtggc

SEQ ID NO: 34876 - DNA, 22 bp, synthetic construct
  misc_feature 1..22: note = chemically synthesized
  source 1..22: mol_type = other DNA
aacatcactaataatcagagaa

SEQ ID NO: 34877 - DNA, 22 bp, synthetic construct
  misc_feature 1..22: note = chemically synthesized
  source 1..22: mol_type = other DNA
ataatcagagaatgcaaattaa

SEQ ID NO: 34878 - DNA, 22 bp, synthetic construct
  misc_feature 1..22: note = chemically synthesized
  source 1..22: mol_type = other DNA
aaaccaccatatgatacctcct

SEQ ID NO: 34879 - DNA, 22 bp, synthetic construct
  misc_feature 1..22: note = chemically synthesized
  source 1..22: mol_type = other DNA
cttatgccagtcagaatggcta

SEQ ID NO: 34880 - DNA, 22 bp, synthetic construct
  misc_feature 1..22: note = chemically synthesized
  source 1..22: mol_type = other DNA
atgccagtcagaatggctatca

SEQ ID NO: 34881 - DNA, 22 bp, synthetic construct
  misc_feature 1..22: note = chemically synthesized
  source 1..22: mol_type = other DNA
tgccagtcagaatggctatcat

SEQ ID NO: 34882 - DNA, 22 bp, synthetic construct
  misc_feature 1..22: note = chemically synthesized
  source 1..22: mol_type = other DNA
tcattataaagttcaaaaacag

SEQ ID NO: 34883 - DNA, 22 bp, synthetic construct
  misc_feature 1..22: note = chemically synthesized
  source 1..22: mol_type = other DNA
taaagttcaaaaacagcagatg

SEQ ID NO: 34884 - DNA, 22 bp, synthetic construct
  misc_feature 1..22: note = chemically synthesized
  source 1..22: mol_type = other DNA
aaaaacagcagatgttggtgag

SEQ ID NO: 34885 - DNA, 22 bp, synthetic construct
  misc_feature 1..22: note = chemically synthesized
  source 1..22: mol_type = other DNA
gtgaggatgtggagacaagaaa

SEQ ID NO: 34886 - DNA, 22 bp, synthetic construct
  misc_feature 1..22: note = chemically synthesized
  source 1..22: mol_type = other DNA
atacactgttggtaagaatgta

SEQ ID NO: 34887 - DNA, 22 bp, synthetic construct
  misc_feature 1..22: note = chemically synthesized
  source 1..22: mol_type = other DNA
tacactgttggtaagaatgtaa

SEQ ID NO: 34888 - DNA, 22 bp, synthetic construct
  misc_feature 1..22: note = chemically synthesized
  source 1..22: mol_type = other DNA
ttggtaagaatgtaaattagta

SEQ ID NO: 34889 - DNA, 22 bp, synthetic construct
  misc_feature 1..22: note = chemically synthesized
  source 1..22: mol_type = other DNA
gtaagaatgtaaattagtacaa

SEQ ID NO: 34890 - DNA, 22 bp, synthetic construct
  misc_feature 1..22: note = chemically synthesized
  source 1..22: mol_type = other DNA
gtacaaactttatggaagacag

SEQ ID NO: 34891 - DNA, 22 bp, synthetic construct
  misc_feature 1..22: note = chemically synthesized
  source 1..22: mol_type = other DNA
tatggaagacagcatgaagatt

SEQ ID NO: 34892 - DNA, 22 bp, synthetic construct
  misc_feature 1..22: note = chemically synthesized
  source 1..22: mol_type = other DNA
atggaagacagcatgaagattt

SEQ ID NO: 34893 - DNA, 22 bp, synthetic construct
  misc_feature 1..22: note = chemically synthesized
  source 1..22: mol_type = other DNA
tggaagacagcatgaagatttc

SEQ ID NO: 34894 - DNA, 22 bp, synthetic construct
  misc_feature 1..22: note = chemically synthesized
  source 1..22: mol_type = other DNA
cttaaagaactagaaacagaac

SEQ ID NO: 34895 - DNA, 22 bp, synthetic construct
  misc_feature 1..22: note = chemically synthesized
  source 1..22: mol_type = other DNA
ttaaagaactagaaacagaact

SEQ ID NO: 34896 - DNA, 22 bp, synthetic construct
  misc_feature 1..22: note = chemically synthesized
  source 1..22: mol_type = other DNA
aaagaactagaaacagaactac

SEQ ID NO: 34897 - DNA, 22 bp, synthetic construct
  misc_feature 1..22: note = chemically synthesized
  source 1..22: mol_type = other DNA
aagaactagaaacagaactacc

SEQ ID NO: 34898 - DNA, 22 bp, synthetic construct
  misc_feature 1..22: note = chemically synthesized
  source 1..22: mol_type = other DNA
gaaacagaactaccattcaatc

SEQ ID NO: 34899 - DNA, 22 bp, synthetic construct
  misc_feature 1..22: note = chemically synthesized
  source 1..22: mol_type = other DNA
ccattcaatcctgcaatcccac

SEQ ID NO: 34900 - DNA, 22 bp, synthetic construct
  misc_feature 1..22: note = chemically synthesized
  source 1..22: mol_type = other DNA
aatcctgcaatcccactactgg

SEQ ID NO: 34901 - DNA, 22 bp, synthetic construct
  misc_feature 1..22: note = chemically synthesized
  source 1..22: mol_type = other DNA
caatcccactactgggtatgga

SEQ ID NO: 34902 - DNA, 22 bp, synthetic construct
  misc_feature 1..22: note = chemically synthesized
  source 1..22: mol_type = other DNA
ctgggtatggacccaaagtgaa

SEQ ID NO: 34903 - DNA, 22 bp, synthetic construct
  misc_feature 1..22: note = chemically synthesized
  source 1..22: mol_type = other DNA
ggtatggacccaaagtgaaaga

SEQ ID NO: 34904 - DNA, 22 bp, synthetic construct
  misc_feature 1..22: note = chemically synthesized
  source 1..22: mol_type = other DNA
aaaaagatatctgcattagtat

SEQ ID NO: 34905 - DNA, 22 bp, synthetic construct
  misc_feature 1..22: note = chemically synthesized
  source 1..22: mol_type = other DNA
cattagtatgttcaaagtagca

SEQ ID NO: 34906 - DNA, 22 bp, synthetic construct
  misc_feature 1..22: note = chemically synthesized
  source 1..22: mol_type = other DNA
gtatgttcaaagtagcactgtt

SEQ ID NO: 34907 - DNA, 22 bp, synthetic construct
  misc_feature 1..22: note = chemically synthesized
  source 1..22: mol_type = other DNA
aaagtagcactgttcccaatag

SEQ ID NO: 34908 - DNA, 22 bp, synthetic construct
  misc_feature 1..22: note = chemically synthesized
  source 1..22: mol_type = other DNA
ttcccaatagcaaagatatgga

SEQ ID NO: 34909 - DNA, 22 bp, synthetic construct
  misc_feature 1..22: note = chemically synthesized
  source 1..22: mol_type = other DNA
ccaatagcaaagatatggaatc

SEQ ID NO: 34910 - DNA, 22 bp, synthetic construct
  misc_feature 1..22: note = chemically synthesized
  source 1..22: mol_type = other DNA
aatgtctaccaatggacgattg

SEQ ID NO: 34911 - DNA, 22 bp, synthetic construct
  misc_feature 1..22: note = chemically synthesized
  source 1..22: mol_type = other DNA
ccaatggacgattggataaaga

SEQ ID NO: 34912 - DNA, 22 bp, synthetic construct
  misc_feature 1..22: note = chemically synthesized
  source 1..22: mol_type = other DNA
gataaagaaaatgtggtgtata

SEQ ID NO: 34913 - DNA, 22 bp, synthetic construct
  misc_feature 1..22: note = chemically synthesized
  source 1..22: mol_type = other DNA
atatacatatatattactcagc

SEQ ID NO: 34914 - DNA, 22 bp, synthetic construct
  misc_feature 1..22: note = chemically synthesized
  source 1..22: mol_type = other DNA
tatacatatatattactcagcc

SEQ ID NO: 34915 - DNA, 22 bp, synthetic construct
  misc_feature 1..22: note = chemically synthesized
  source 1..22: mol_type = other DNA
ctcagccataaaaaagaatgaa

SEQ ID NO: 34916 - DNA, 22 bp, synthetic construct
  misc_feature 1..22: note = chemically synthesized
  source 1..22: mol_type = other DNA
agccataaaaaagaatgaaatc

SEQ ID NO: 34917 - DNA, 22 bp, synthetic construct
  misc_feature 1..22: note = chemically synthesized
  source 1..22: mol_type = other DNA
ctctagaaacatggttagaact

SEQ ID NO: 34918 - DNA, 22 bp, synthetic construct
  misc_feature 1..22: note = chemically synthesized
  source 1..22: mol_type = other DNA
tctagaaacatggttagaactg

SEQ ID NO: 34919 - DNA, 22 bp, synthetic construct
  misc_feature 1..22: note = chemically synthesized
  source 1..22: mol_type = other DNA
tagaaacatggttagaactgga

SEQ ID NO: 34920 - DNA, 22 bp, synthetic construct
  misc_feature 1..22: note = chemically synthesized
  source 1..22: mol_type = other DNA
gaaacatggttagaactggagg

SEQ ID NO: 34921 - DNA, 22 bp, synthetic construct
  misc_feature 1..22: note = chemically synthesized
  source 1..22: mol_type = other DNA
gaactggaggacattatcctca

SEQ ID NO: 34922 - DNA, 22 bp, synthetic construct
  misc_feature 1..22: note = chemically synthesized
  source 1..22: mol_type = other DNA
gaggacattatcctcagtgaaa

SEQ ID NO: 34923 - DNA, 22 bp, synthetic construct
  misc_feature 1..22: note = chemically synthesized
  source 1..22: mol_type = other DNA
tcctcagtgaaataactcagaa

SEQ ID NO: 34924 - DNA, 22 bp, synthetic construct
  misc_feature 1..22: note = chemically synthesized
  source 1..22: mol_type = other DNA
agtgaaataactcagaaacaga

SEQ ID NO: 34925 - DNA, 22 bp, synthetic construct
  misc_feature 1..22: note = chemically synthesized
  source 1..22: mol_type = other DNA
agaaacagaaagtcaaacacag

SEQ ID NO: 34926 - DNA, 22 bp, synthetic construct
  misc_feature 1..22: note = chemically synthesized
  source 1..22: mol_type = other DNA
tcatttagtgagagccaagtgg

SEQ ID NO: 34927 - DNA, 22 bp, synthetic construct
  misc_feature 1..22: note = chemically synthesized
  source 1..22: mol_type = other DNA
atttagtgagagccaagtggga

SEQ ID NO: 34928 - DNA, 22 bp, synthetic construct
  misc_feature 1..22: note = chemically synthesized
  source 1..22: mol_type = other DNA
agtgagagccaagtgggagcta

SEQ ID NO: 34929 - DNA, 22 bp, synthetic construct
  misc_feature 1..22: note = chemically synthesized
  source 1..22: mol_type = other DNA
gtgagagccaagtgggagctaa

SEQ ID NO: 34930 - DNA, 22 bp, synthetic construct
  misc_feature 1..22: note = chemically synthesized
  source 1..22: mol_type = other DNA
aacgatgagtaagcatagacat

SEQ ID NO: 34931 - DNA, 22 bp, synthetic construct
  misc_feature 1..22: note = chemically synthesized
  source 1..22: mol_type = other DNA
gagactagagaaaggtgggagg

SEQ ID NO: 34932 - DNA, 22 bp, synthetic construct
  misc_feature 1..22: note = chemically synthesized
  source 1..22: mol_type = other DNA
agactagagaaaggtgggagga

SEQ ID NO: 34933 - DNA, 22 bp, synthetic construct
  misc_feature 1..22: note = chemically synthesized
  source 1..22: mol_type = other DNA
gagaaaggtgggaggataggag

SEQ ID NO: 34934 - DNA, 22 bp, synthetic construct
  misc_feature 1..22: note = chemically synthesized
  source 1..22: mol_type = other DNA
aaaaactacggattggatacaa

SEQ ID NO: 34935 - DNA, 22 bp, synthetic construct
  misc_feature 1..22: note = chemically synthesized
  source 1..22: mol_type = other DNA
cggattggatacaacattcact

SEQ ID NO: 34936 - DNA, 22 bp, synthetic construct
  misc_feature 1..22: note = chemically synthesized
  source 1..22: mol_type = other DNA
gatacaacattcacttttcagg

SEQ ID NO: 34937 - DNA, 22 bp, synthetic construct
  misc_feature 1..22: note = chemically synthesized
  source 1..22: mol_type = other DNA
acttttcaggtgatggtccact

SEQ ID NO: 34938 - DNA, 22 bp, synthetic construct
  misc_feature 1..22: note = chemically synthesized
  source 1..22: mol_type = other DNA
ttcaggtgatggtccactaaaa

SEQ ID NO: 34939 - DNA, 22 bp, synthetic construct
  misc_feature 1..22: note = chemically synthesized
  source 1..22: mol_type = other DNA
tcaggtgatggtccactaaaag

SEQ ID NO: 34940 - DNA, 22 bp, synthetic construct
  misc_feature 1..22: note = chemically synthesized
  source 1..22: mol_type = other DNA
caggtgatggtccactaaaagc

SEQ ID NO: 34941 - DNA, 22 bp, synthetic construct
  misc_feature 1..22: note = chemically synthesized
  source 1..22: mol_type = other DNA
aggtgatggtccactaaaagct

SEQ ID NO: 34942 - DNA, 22 bp, synthetic construct
  misc_feature 1..22: note = chemically synthesized
  source 1..22: mol_type = other DNA
aaagctcagacttcaccactat

SEQ ID NO: 34943 - DNA, 22 bp, synthetic construct
  misc_feature 1..22: note = chemically synthesized
  source 1..22: mol_type = other DNA
agacttcaccactatgcaacat

SEQ ID NO: 34944 - DNA, 22 bp, synthetic construct
  misc_feature 1..22: note = chemically synthesized
  source 1..22: mol_type = other DNA
caccactatgcaacatacatat

SEQ ID NO: 34945 - DNA, 22 bp, synthetic construct
  misc_feature 1..22: note = chemically synthesized
  source 1..22: mol_type = other DNA
accactatgcaacatacatatg

SEQ ID NO: 34946 - DNA, 22 bp, synthetic construct
  misc_feature 1..22: note = chemically synthesized
  source 1..22: mol_type = other DNA
tgcaacatacatatgtaaggaa

SEQ ID NO: 34947 - DNA, 22 bp, synthetic construct
  misc_feature 1..22: note = chemically synthesized
  source 1..22: mol_type = other DNA
gtaccctgatacagcttgactg

SEQ ID NO: 34948 - DNA, 22 bp, synthetic construct
  misc_feature 1..22: note = chemically synthesized
  source 1..22: mol_type = other DNA
taccctgatacagcttgactgt

SEQ ID NO: 34949 - DNA, 22 bp, synthetic construct
  misc_feature 1..22: note = chemically synthesized
  source 1..22: mol_type = other DNA
atacagcttgactgtgtcccca

SEQ ID NO: 34950 - DNA, 22 bp, synthetic construct
  misc_feature 1..22: note = chemically synthesized
  source 1..22: mol_type = other DNA
gactgtgtccccacccaaatct

SEQ ID NO: 34951 - DNA, 22 bp, synthetic construct
  misc_feature 1..22: note = chemically synthesized
  source 1..22: mol_type = other DNA
actgtgtccccacccaaatctc

SEQ ID NO: 34952 - DNA, 22 bp, synthetic construct
  misc_feature 1..22: note = chemically synthesized
  source 1..22: mol_type = other DNA
tgtccccacccaaatctcatct

SEQ ID NO: 34953 - DNA, 22 bp, synthetic construct
  misc_feature 1..22: note = chemically synthesized
  source 1..22: mol_type = other DNA
atcttgaattgtagttcccata

SEQ ID NO: 34954 - DNA, 22 bp, synthetic construct
  misc_feature 1..22: note = chemically synthesized
  source 1..22: mol_type = other DNA
gaattgtagttcccataatcct

SEQ ID NO: 34955 - DNA, 22 bp, synthetic construct
  misc_feature 1..22: note = chemically synthesized
  source 1..22: mol_type = other DNA
aattgtagttcccataatcctc

SEQ ID NO: 34956 - DNA, 22 bp, synthetic construct
  misc_feature 1..22: note = chemically synthesized
  source 1..22: mol_type = other DNA
tagttcccataatcctcacgtg

SEQ ID NO: 34957 - DNA, 22 bp, synthetic construct
  misc_feature 1..22: note = chemically synthesized
  source 1..22: mol_type = other DNA
ccataatcctcacgtgttgtgg

SEQ ID NO: 34958 - DNA, 22 bp, synthetic construct
  misc_feature 1..22: note = chemically synthesized
  source 1..22: mol_type = other DNA
acgtgttgtgggagggatttgg

SEQ ID NO: 34959 - DNA, 22 bp, synthetic construct
  misc_feature 1..22: note = chemically synthesized
  source 1..22: mol_type = other DNA
tgggagggatttggagggaggt

SEQ ID NO: 34960 - DNA, 22 bp, synthetic construct
  misc_feature 1..22: note = chemically synthesized
  source 1..22: mol_type = other DNA
ggagggaggtaattgaatcata

SEQ ID NO: 34961 - DNA, 22 bp, synthetic construct
  misc_feature 1..22: note = chemically synthesized
  source 1..22: mol_type = other DNA
gagggaggtaattgaatcatag

SEQ ID NO: 34962 - DNA, 22 bp, synthetic construct
  misc_feature 1..22: note = chemically synthesized
  source 1..22: mol_type = other DNA
aatcatagaggaggttactctc

SEQ ID NO: 34963 - DNA, 22 bp, synthetic construct
  misc_feature 1..22: note = chemically synthesized
  source 1..22: mol_type = other DNA
ctctcatgctcttctcgtgata

SEQ ID NO: 34964 - DNA, 22 bp, synthetic construct
  misc_feature 1..22: note = chemically synthesized
  source 1..22: mol_type = other DNA
tcatgctcttctcgtgatagtg

SEQ ID NO: 34965 - DNA, 22 bp, synthetic construct
  misc_feature 1..22: note = chemically synthesized
  source 1..22: mol_type = other DNA
atgctcttctcgtgatagtgag

SEQ ID NO: 34966 - DNA, 22 bp, synthetic construct
  misc_feature 1..22: note = chemically synthesized
  source 1..22: mol_type = other DNA
ttctcgtgatagtgagttctta

SEQ ID NO: 34967 - DNA, 22 bp, synthetic construct
  misc_feature 1..22: note = chemically synthesized
  source 1..22: mol_type = other DNA
ctcgtgatagtgagttcttaca

SEQ ID NO: 34968 - DNA, 22 bp, synthetic construct
  misc_feature 1..22: note = chemically synthesized
  source 1..22: mol_type = other DNA
tcgtgatagtgagttcttacaa

SEQ ID NO: 34969 - DNA, 22 bp, synthetic construct
  misc_feature 1..22: note = chemically synthesized
  source 1..22: mol_type = other DNA
gtgatagtgagttcttacaaga

SEQ ID NO: 34970 - DNA, 22 bp, synthetic construct
  misc_feature 1..22: note = chemically synthesized
  source 1..22: mol_type = other DNA
ttacaagatctgatggttttat

SEQ ID NO: 34971 - DNA, 22 bp, synthetic construct
  misc_feature 1..22: note = chemically synthesized
  source 1..22: mol_type = other DNA
acaagatctgatggttttataa

SEQ ID NO: 34972 - DNA, 22 bp, synthetic construct
  misc_feature 1..22: note = chemically synthesized
  source 1..22: mol_type = other DNA
caagatctgatggttttataag

SEQ ID NO: 34973 - DNA, 22 bp, synthetic construct
  misc_feature 1..22: note = chemically synthesized
  source 1..22: mol_type = other DNA
atggttttataagcggcttttc

SEQ ID NO: 34974 - DNA, 22 bp, synthetic construct
  misc_feature 1..22: note = chemically synthesized
  source 1..22: mol_type = other DNA
tataagcggcttttcccccttt

SEQ ID NO: 34975 - DNA, 22 bp, synthetic construct
  misc_feature 1..22: note = chemically synthesized
  source 1..22: mol_type = other DNA
ataagcggcttttccccctttt

SEQ ID NO: 34976 - DNA, 22 bp, synthetic construct
  misc_feature 1..22: note = chemically synthesized
  source 1..22: mol_type = other DNA
taagcggcttttcccccttttg

SEQ ID NO: 34977 - DNA, 22 bp, synthetic construct
  misc_feature 1..22: note = chemically synthesized
  source 1..22: mol_type = other DNA
ttcccccttttgcttggcactt

SEQ ID NO: 34978 - DNA, 22 bp, synthetic construct
  misc_feature 1..22: note = chemically synthesized
  source 1..22: mol_type = other DNA
tcccccttttgcttggcacttc

SEQ ID NO: 34979 - DNA, 22 bp, synthetic construct
  misc_feature 1..22: note = chemically synthesized
  source 1..22: mol_type = other DNA
cccccttttgcttggcacttct

SEQ ID NO: 34980 - DNA, 22 bp, synthetic construct
  misc_feature 1..22: note = chemically synthesized
  source 1..22: mol_type = other DNA
ccccttttgcttggcacttcta

SEQ ID NO: 34981 - DNA, 22 bp, synthetic construct
  misc_feature 1..22: note = chemically synthesized
  source 1..22: mol_type = other DNA
ttgcttggcacttctacttgct

SEQ ID NO: 34982 - DNA, 22 bp, synthetic construct
  misc_feature 1..22: note = chemically synthesized
  source 1..22: mol_type = other DNA
tgcttggcacttctacttgctg

SEQ ID NO: 34983 - DNA, 22 bp, synthetic construct
  misc_feature 1..22: note = chemically synthesized
  source 1..22: mol_type = other DNA
gcttggcacttctacttgctgc

SEQ ID NO: 34984 - DNA, 22 bp, synthetic construct
  misc_feature 1..22: note = chemically synthesized
  source 1..22: mol_type = other DNA
cttggcacttctacttgctgct

SEQ ID NO: 34985 - DNA, 22 bp, synthetic construct
  misc_feature 1..22: note = chemically synthesized
  source 1..22: mol_type = other DNA
ggcacttctacttgctgctgcc

SEQ ID NO: 34986 - DNA, 22 bp, synthetic construct
  misc_feature 1..22: note = chemically synthesized
  source 1..22: mol_type = other DNA
gcacttctacttgctgctgcca

SEQ ID NO: 34987 - DNA, 22 bp, synthetic construct
  misc_feature 1..22: note = chemically synthesized
  source 1..22: mol_type = other DNA
ctacttgctgctgccatgtgaa

SEQ ID NO: 34988 - DNA, 22 bp, synthetic construct
  misc_feature 1..22: note = chemically synthesized
  source 1..22: mol_type = other DNA
tacttgctgctgccatgtgaag

SEQ ID NO: 34989 - DNA, 22 bp, synthetic construct
  misc_feature 1..22: note = chemically synthesized
  source 1..22: mol_type = other DNA
cttgctgctgccatgtgaagaa

SEQ ID NO: 34990 - DNA, 22 bp, synthetic construct
  misc_feature 1..22: note = chemically synthesized
  source 1..22: mol_type = other DNA
gctgctgccatgtgaagaagga

SEQ ID NO: 34991 - DNA, 22 bp, synthetic construct
  misc_feature 1..22: note = chemically synthesized
  source 1..22: mol_type = other DNA
ctgctgccatgtgaagaaggac

SEQ ID NO: 34992 - DNA, 22 bp, synthetic construct
  misc_feature 1..22: note = chemically synthesized
  source 1..22: mol_type = other DNA
ctgccatgtgaagaaggacatg

SEQ ID NO: 34993 - DNA, 22 bp, synthetic construct
  misc_feature 1..22: note = chemically synthesized
  source 1..22: mol_type = other DNA
ccatgtgaagaaggacatgttt

SEQ ID NO: 34994 - DNA, 22 bp, synthetic construct
  misc_feature 1..22: note = chemically synthesized
  source 1..22: mol_type = other DNA
gtttcttcttctgccatgattg

SEQ ID NO: 34995 - DNA, 22 bp, synthetic construct
  misc_feature 1..22: note = chemically synthesized
  source 1..22: mol_type = other DNA
tttcttcttctgccatgattgt

SEQ ID NO: 34996 - DNA, 22 bp, synthetic construct
  misc_feature 1..22: note = chemically synthesized
  source 1..22: mol_type = other DNA
cttcttctgccatgattgtaag

SEQ ID NO: 34997 - DNA, 22 bp, synthetic construct
  misc_feature 1..22: note = chemically synthesized
  source 1..22: mol_type = other DNA
ttcttctgccatgattgtaagt

SEQ ID NO: 34998 - DNA, 22 bp, synthetic construct
  misc_feature 1..22: note = chemically synthesized
  source 1..22: mol_type = other DNA
cttctgccatgattgtaagttt

SEQ ID NO: 34999 - DNA, 22 bp, synthetic construct
  misc_feature 1..22: note = chemically synthesized
  source 1..22: mol_type = other DNA
ttctgccatgattgtaagtttc

SEQ ID NO: 35000 - DNA, 22 bp, synthetic construct
  misc_feature 1..22: note = chemically synthesized
  source 1..22: mol_type = other DNA
ctgccatgattgtaagtttccc

SEQ ID NO: 35001 - DNA, 22 bp, synthetic construct
  misc_feature 1..22: note = chemically synthesized
  source 1..22: mol_type = other DNA
tgccatgattgtaagtttcccg

SEQ ID NO: 35002 - DNA, 22 bp, synthetic construct
  misc_feature 1..22: note = chemically synthesized
  source 1..22: mol_type = other DNA
ccatgattgtaagtttcccgag

SEQ ID NO: 35003 - DNA, 22 bp, synthetic construct
  misc_feature 1..22: note = chemically synthesized
  source 1..22: mol_type = other DNA
taagtttcccgaggcctcccca

SEQ ID NO: 35004 - DNA, 22 bp, synthetic construct
  misc_feature 1..22: note = chemically synthesized
  source 1..22: mol_type = other DNA
cccgaggcctccccagccctgt

SEQ ID NO: 35005 - DNA, 22 bp, synthetic construct
  misc_feature 1..22: note = chemically synthesized
  source 1..22: mol_type = other DNA
ccgaggcctccccagccctgtg

SEQ ID NO: 35006 - DNA, 22 bp, synthetic construct
  misc_feature 1..22: note = chemically synthesized
  source 1..22: mol_type = other DNA
cccagccctgtggaactgtgag

SEQ ID NO: 35007 - DNA, 22 bp, synthetic construct
  misc_feature 1..22: note = chemically synthesized
  source 1..22: mol_type = other DNA
tggaactgtgagacaattaaac

SEQ ID NO: 35008 - DNA, 22 bp, synthetic construct
  misc_feature 1..22: note = chemically synthesized
  source 1..22: mol_type = other DNA
tgagacaattaaacgttttttc

SEQ ID NO: 35009 - DNA, 22 bp, synthetic construct
  misc_feature 1..22: note = chemically synthesized
  source 1..22: mol_type = other DNA
aacgttttttccttataaatta

SEQ ID NO: 35010 - DNA, 22 bp, synthetic construct
  misc_feature 1..22: note = chemically synthesized
  source 1..22: mol_type = other DNA
tttccttataaattacccagtc

SEQ ID NO: 35011 - DNA, 22 bp, synthetic construct
  misc_feature 1..22: note = chemically synthesized
  source 1..22: mol_type = other DNA
ttccttataaattacccagtct

SEQ ID NO: 35012 - DNA, 22 bp, synthetic construct
  misc_feature 1..22: note = chemically synthesized
  source 1..22: mol_type = other DNA
tccttataaattacccagtctc

SEQ ID NO: 35013 - DNA, 22 bp, synthetic construct
  misc_feature 1..22: note = chemically synthesized
  source 1..22: mol_type = other DNA
ccttataaattacccagtctca

SEQ ID NO: 35014 - DNA, 22 bp, synthetic construct
  misc_feature 1..22: note = chemically synthesized
  source 1..22: mol_type = other DNA
cttataaattacccagtctcag

SEQ ID NO: 35015 - DNA, 22 bp, synthetic construct
  misc_feature 1..22: note = chemically synthesized
  source 1..22: mol_type = other DNA
ataaattacccagtctcaggta

SEQ ID NO: 35016 - DNA, 22 bp, synthetic construct
  misc_feature 1..22: note = chemically synthesized
  source 1..22: mol_type = other DNA
taaattacccagtctcaggtat

SEQ ID NO: 35017 - DNA, 22 bp, synthetic construct
  misc_feature 1..22: note = chemically synthesized
  source 1..22: mol_type = other DNA
cccagtctcaggtatgtcttta

SEQ ID NO: 35018 - DNA, 22 bp, synthetic construct
  misc_feature 1..22: note = chemically synthesized
  source 1..22: mol_type = other DNA
aggtatgtctttataagcagca

SEQ ID NO: 35019 - DNA, 22 bp, synthetic construct
  misc_feature 1..22: note = chemically synthesized
  source 1..22: mol_type = other DNA
tataagcagcatgataacgaac

SEQ ID NO: 35020 - DNA, 22 bp, synthetic construct
  misc_feature 1..22: note = chemically synthesized
  source 1..22: mol_type = other DNA
ataagcagcatgataacgaact

SEQ ID NO: 35021 - DNA, 22 bp, synthetic construct
  misc_feature 1..22: note = chemically synthesized
  source 1..22: mol_type = other DNA
taagcagcatgataacgaacta

SEQ ID NO: 35022 - DNA, 22 bp, synthetic construct
  misc_feature 1..22: note = chemically synthesized
  source 1..22: mol_type = other DNA
gtacataccttctaaatatata

SEQ ID NO: 35023 - DNA, 22 bp, synthetic construct
  misc_feature 1..22: note = chemically synthesized
  source 1..22: mol_type = other DNA
ctaaatatatataaataaattt

SEQ ID NO: 35024 - DNA, 22 bp, synthetic construct
  misc_feature 1..22: note = chemically synthesized
  source 1..22: mol_type = other DNA
taaatatatataaataaatttt

SEQ ID NO: 35025 - DNA, 22 bp, synthetic construct
  misc_feature 1..22: note = chemically synthesized
  source 1..22: mol_type = other DNA
aatatatataaataaattttaa

SEQ ID NO: 35026 - DNA, 22 bp, synthetic construct
  misc_feature 1..22: note = chemically synthesized
  source 1..22: mol_type = other DNA
taaaaatataaaataaattaga

SEQ ID NO: 35027 - DNA, 22 bp, synthetic construct
  misc_feature 1..22: note = chemically synthesized
  source 1..22: mol_type = other DNA
aaaaatataaaataaattagat

SEQ ID NO: 35028 - DNA, 22 bp, synthetic construct
  misc_feature 1..22: note = chemically synthesized
  source 1..22: mol_type = other DNA
aaaatataaaataaattagatc

SEQ ID NO: 35029 - DNA, 22 bp, synthetic construct
  misc_feature 1..22: note = chemically synthesized
  source 1..22: mol_type = other DNA
gatctgattgaaaaggcaaaaa

SEQ ID NO: 35030 - DNA, 22 bp, synthetic construct
  misc_feature 1..22: note = chemically synthesized
  source 1..22: mol_type = other DNA
attgaaaaggcaaaaattgagc

SEQ ID NO: 35031 - DNA, 22 bp, synthetic construct
  misc_feature 1..22: note = chemically synthesized
  source 1..22: mol_type = other DNA
aaaaggcaaaaattgagcaagc

SEQ ID NO: 35032 - DNA, 22 bp, synthetic construct
  misc_feature 1..22: note = chemically synthesized
  source 1..22: mol_type = other DNA
agcaagcaaaatatcacttaat

SEQ ID NO: 35033 - DNA, 22 bp, synthetic construct
  misc_feature 1..22: note = chemically synthesized
  source 1..22: mol_type = other DNA
aatggggtaattaaaagggtga

SEQ ID NO: 35034 - DNA, 22 bp, synthetic construct
  misc_feature 1..22: note = chemically synthesized
  source 1..22: mol_type = other DNA
atggggtaattaaaagggtgaa

SEQ ID NO: 35035 - DNA, 22 bp, synthetic construct
  misc_feature 1..22: note = chemically synthesized
  source 1..22: mol_type = other DNA
aaagggtgaagaaattgggcaa

SEQ ID NO: 35036 - DNA, 22 bp, synthetic construct
  misc_feature 1..22: note = chemically synthesized
  source 1..22: mol_type = other DNA
ggcaaatggatgtcatgaggag

SEQ ID NO: 35037 - DNA, 22 bp, synthetic construct
  misc_feature 1..22: note = chemically synthesized
  source 1..22: mol_type = other DNA
ttaggcagaggtaatggtcaga

SEQ ID NO: 35038 - DNA, 22 bp, synthetic construct
  misc_feature 1..22: note = chemically synthesized
  source 1..22: mol_type = other DNA
taggcagaggtaatggtcagag

SEQ ID NO: 35039 - DNA, 22 bp, synthetic construct
  misc_feature 1..22: note = chemically synthesized
  source 1..22: mol_type = other DNA
aggcagaggtaatggtcagagc

SEQ ID NO: 35040 - DNA, 22 bp, synthetic construct
  misc_feature 1..22: note = chemically synthesized
  source 1..22: mol_type = other DNA
ggcagaggtaatggtcagagcc

SEQ ID NO: 35041 - DNA, 22 bp, synthetic construct
  misc_feature 1..22: note = chemically synthesized
  source 1..22: mol_type = other DNA
agctggagtagagtgtgcaagg

SEQ ID NO: 35042 - DNA, 22 bp, synthetic construct
  misc_feature 1..22: note = chemically synthesized
  source 1..22: mol_type = other DNA
gagtagagtgtgcaaggaaaga

SEQ ID NO: 35043 - DNA, 22 bp, synthetic construct
  misc_feature 1..22: note = chemically synthesized
  source 1..22: mol_type = other DNA
aaaaggataaccaggtaggagg

SEQ ID NO: 35044 - DNA, 22 bp, synthetic construct
  misc_feature 1..22: note = chemically synthesized
  source 1..22: mol_type = other DNA
cagtaaacttaggcaggatatt

SEQ ID NO: 35045 - DNA, 22 bp, synthetic construct
  misc_feature 1..22: note = chemically synthesized
  source 1..22: mol_type = other DNA
aggcaggatatttcccgtgaca

SEQ ID NO: 35046 - DNA, 22 bp, synthetic construct
  misc_feature 1..22: note = chemically synthesized
  source 1..22: mol_type = other DNA
ggcaggatatttcccgtgacag

SEQ ID NO: 35047 - DNA, 22 bp, synthetic construct
  misc_feature 1..22: note = chemically synthesized
  source 1..22: mol_type = other DNA
cccgtgacagcactaaataata

SEQ ID NO: 35048 - DNA, 22 bp, synthetic construct
  misc_feature 1..22: note = chemically synthesized
  source 1..22: mol_type = other DNA
ccgtgacagcactaaataataa

SEQ ID NO: 35049 - DNA, 22 bp, synthetic construct
  misc_feature 1..22: note = chemically synthesized
  source 1..22: mol_type = other DNA
aataataatcacatgtgagaat

SEQ ID NO: 35050 - DNA, 22 bp, synthetic construct
  misc_feature 1..22: note = chemically synthesized
  source 1..22: mol_type = other DNA
tcgattacttgagcaatacttt

SEQ ID NO: 35051 - DNA, 22 bp, synthetic construct
  misc_feature 1..22: note = chemically synthesized
  source 1..22: mol_type = other DNA
cttgagcaatactttgttcatg

SEQ ID NO: 35052 - DNA, 22 bp, synthetic construct
  misc_feature 1..22: note = chemically synthesized
  source 1..22: mol_type = other DNA
gagcaatactttgttcatgagc

SEQ ID NO: 35053 - DNA, 22 bp, synthetic construct
  misc_feature 1..22: note = chemically synthesized
  source 1..22: mol_type = other DNA
agcaatactttgttcatgagct

SEQ ID NO: 35054 - DNA, 22 bp, synthetic construct
  misc_feature 1..22: note = chemically synthesized
  source 1..22: mol_type = other DNA
tgttcatgagctagagcaaggg

SEQ ID NO: 35055 - DNA, 22 bp, synthetic construct
  misc_feature 1..22: note = chemically synthesized
  source 1..22: mol_type = other DNA
gttcatgagctagagcaagggg

SEQ ID NO: 35056 - DNA, 22 bp, synthetic construct
  misc_feature 1..22: note = chemically synthesized
  source 1..22: mol_type = other DNA
ttcatgagctagagcaagggga

SEQ ID NO: 35057 - DNA, 22 bp, synthetic construct
  misc_feature 1..22: note = chemically synthesized
  source 1..22: mol_type = other DNA
atgagctagagcaaggggatga

SEQ ID NO: 35058 - DNA, 22 bp, synthetic construct
  misc_feature 1..22: note = chemically synthesized
  source 1..22: mol_type = other DNA
gagcaaggggatgactcaagaa

SEQ ID NO: 35059 - DNA, 22 bp, synthetic construct
  misc_feature 1..22: note = chemically synthesized
  source 1..22: mol_type = other DNA
aagaaatcctttgtgaaatcct

SEQ ID NO: 35060 - DNA, 22 bp, synthetic construct
  misc_feature 1..22: note = chemically synthesized
  source 1..22: mol_type = other DNA
tgtgaaatcctggaggtaataa

SEQ ID NO: 35061 - DNA, 22 bp, synthetic construct
  misc_feature 1..22: note = chemically synthesized
  source 1..22: mol_type = other DNA
gtgaaatcctggaggtaataag

SEQ ID NO: 35062 - DNA, 22 bp, synthetic construct
  misc_feature 1..22: note = chemically synthesized
  source 1..22: mol_type = other DNA
tgaaatcctggaggtaataaga

SEQ ID NO: 35063 - DNA, 22 bp, synthetic construct
  misc_feature 1..22: note = chemically synthesized
  source 1..22: mol_type = other DNA
gaggtaataagatcctggcatc

SEQ ID NO: 35064 - DNA, 22 bp, synthetic construct
  misc_feature 1..22: note = chemically synthesized
  source 1..22: mol_type = other DNA
gcatcaatcttcaactcaattg

SEQ ID NO: 35065 - DNA, 22 bp, synthetic construct
  misc_feature 1..22: note = chemically synthesized
  source 1..22: mol_type = other DNA
caactcaattgcaaaaagcaat

SEQ ID NO: 35066 - DNA, 22 bp, synthetic construct
  misc_feature 1..22: note = chemically synthesized
  source 1..22: mol_type = other DNA
aactcaattgcaaaaagcaatt

SEQ ID NO: 35067 - DNA, 22 bp, synthetic construct
  misc_feature 1..22: note = chemically synthesized
  source 1..22: mol_type = other DNA
aattgcaaaaagcaattttatt

SEQ ID NO: 35068 - DNA, 22 bp, synthetic construct
  misc_feature 1..22: note = chemically synthesized
  source 1..22: mol_type = other DNA
caaaaagcaattttattactta

SEQ ID NO: 35069 - DNA, 22 bp, synthetic construct
  misc_feature 1..22: note = chemically synthesized
  source 1..22: mol_type = other DNA
tattacttatatattacttctc

SEQ ID NO: 35070 - DNA, 22 bp, synthetic construct
  misc_feature 1..22: note = chemically synthesized
  source 1..22: mol_type = other DNA
attacttatatattacttctca

SEQ ID NO: 35071 - DNA, 22 bp, synthetic construct
  misc_feature 1..22: note = chemically synthesized
  source 1..22: mol_type = other DNA
ttacttatatattacttctcat

SEQ ID NO: 35072 - DNA, 22 bp, synthetic construct
  misc_feature 1..22: note = chemically synthesized
  source 1..22: mol_type = other DNA
cttatatattacttctcatttt

SEQ ID NO: 35073 - DNA, 22 bp, synthetic construct
  misc_feature 1..22: note = chemically synthesized
  source 1..22: mol_type = other DNA
atatattacttctcatttttca

SEQ ID NO: 35074 - DNA, 22 bp, synthetic construct
  misc_feature 1..22: note = chemically synthesized
  source 1..22: mol_type = other DNA
tatattacttctcatttttcac

SEQ ID NO: 35075 - DNA, 22 bp, synthetic construct
  misc_feature 1..22: note = chemically synthesized
  source 1..22: mol_type = other DNA
cttctcatttttcactgctgtc

SEQ ID NO: 35076 - DNA, 22 bp, synthetic construct
  misc_feature 1..22: note = chemically synthesized
  source 1..22: mol_type = other DNA
ctcatttttcactgctgtcttt

SEQ ID NO: 35077 - DNA, 22 bp, synthetic construct
  misc_feature 1..22: note = chemically synthesized
  source 1..22: mol_type = other DNA
tcatttttcactgctgtctttc

SEQ ID NO: 35078 - DNA, 22 bp, synthetic construct
  misc_feature 1..22: note = chemically synthesized
  source 1..22: mol_type = other DNA
atttttcactgctgtctttcaa

SEQ ID NO: 35079 - DNA, 22 bp, synthetic construct
  misc_feature 1..22: note = chemically synthesized
  source 1..22: mol_type = other DNA
ttcactgctgtctttcaaaaca

SEQ ID NO: 35080 - DNA, 22 bp, synthetic construct
  misc_feature 1..22: note = chemically synthesized
  source 1..22: mol_type = other DNA
tcactgctgtctttcaaaacat

SEQ ID NO: 35081 - DNA, 22 bp, synthetic construct
  misc_feature 1..22: note = chemically synthesized
  source 1..22: mol_type = other DNA
cactgctgtctttcaaaacata

SEQ ID NO: 35082 - DNA, 22 bp, synthetic construct
  misc_feature 1..22: note = chemically synthesized
  source 1..22: mol_type = other DNA
actgctgtctttcaaaacatat

SEQ ID NO: 35083 - DNA, 22 bp, synthetic construct
  misc_feature 1..22: note = chemically synthesized
  source 1..22: mol_type = other DNA
ctgtctttcaaaacatattcca

SEQ ID NO: 35084 - DNA, 22 bp, synthetic construct
  misc_feature 1..22: note = chemically synthesized
  source 1..22: mol_type = other DNA
tctttcaaaacatattccattt

SEQ ID NO: 35085 - DNA, 22 bp, synthetic construct
  misc_feature 1..22: note = chemically synthesized
  source 1..22: mol_type = other DNA
tcaaaacatattccatttcatc

SEQ ID NO: 35086 - DNA, 22 bp, synthetic construct
  misc_feature 1..22: note = chemically synthesized
  source 1..22: mol_type = other DNA
caaaacatattccatttcatca

SEQ ID NO: 35087 - DNA, 22 bp, synthetic construct
  misc_feature 1..22: note = chemically synthesized
  source 1..22: mol_type = other DNA
aaaacatattccatttcatcag

SEQ ID NO: 35088 - DNA, 22 bp, synthetic construct
  misc_feature 1..22: note = chemically synthesized
  source 1..22: mol_type = other DNA
catttcatcagactacaggttt

SEQ ID NO: 35089 - DNA, 22 bp, synthetic construct
  misc_feature 1..22: note = chemically synthesized
  source 1..22: mol_type = other DNA
catcagactacaggttttaata

SEQ ID NO: 35090 - DNA, 22 bp, synthetic construct
  misc_feature 1..22: note = chemically synthesized
  source 1..22: mol_type = other DNA
atcagactacaggttttaatag

SEQ ID NO: 35091 - DNA, 22 bp, synthetic construct
  misc_feature 1..22: note = chemically synthesized
  source 1..22: mol_type = other DNA
caggttttaatagctactatat

SEQ ID NO: 35092 - DNA, 22 bp, synthetic construct
  misc_feature 1..22: note = chemically synthesized
  source 1..22: mol_type = other DNA
taatagctactatatttcttaa

SEQ ID NO: 35093 - DNA, 22 bp, synthetic construct
  misc_feature 1..22: note = chemically synthesized
  source 1..22: mol_type = other DNA
aatagctactatatttcttaaa

SEQ ID NO: 35094 - DNA, 22 bp, synthetic construct
  misc_feature 1..22: note = chemically synthesized
  source 1..22: mol_type = other DNA
atagctactatatttcttaaat

SEQ ID NO: 35095 - DNA, 22 bp, synthetic construct
  misc_feature 1..22: note = chemically synthesized
  source 1..22: mol_type = other DNA
ctatatttcttaaatgtattat

SEQ ID NO: 35096 - DNA, 22 bp, synthetic construct
  misc_feature 1..22: note = chemically synthesized
  source 1..22: mol_type = other DNA
tatttcttaaatgtattattcc

SEQ ID NO: 35097 - DNA, 22 bp, synthetic construct
  misc_feature 1..22: note = chemically synthesized
  source 1..22: mol_type = other DNA
cttaaatgtattattccagtaa

SEQ ID NO: 35098 - DNA, 22 bp, synthetic construct
  misc_feature 1..22: note = chemically synthesized
  source 1..22: mol_type = other DNA
ttaaatgtattattccagtaac

SEQ ID NO: 35099 - DNA, 22 bp, synthetic construct
  misc_feature 1..22: note = chemically synthesized
  source 1..22: mol_type = other DNA
aaatgtattattccagtaactt

SEQ ID NO: 35100 - DNA, 22 bp, synthetic construct
  misc_feature 1..22: note = chemically synthesized
  source 1..22: mol_type = other DNA
aatgtattattccagtaactta

SEQ ID NO: 35101 - DNA, 22 bp, synthetic construct
  misc_feature 1..22: note = chemically synthesized
  source 1..22: mol_type = other DNA
ttccagtaacttatactttaca

SEQ ID NO: 35102 - DNA, 22 bp, synthetic construct
  misc_feature 1..22: note = chemically synthesized
  source 1..22: mol_type = other DNA
cagtaacttatactttacatag

SEQ ID NO: 35103 - DNA, 22 bp, synthetic construct
  misc_feature 1..22: note = chemically synthesized
  source 1..22: mol_type = other DNA
atactttacatagtaaatctta

SEQ ID NO: 35104 - DNA, 22 bp, synthetic construct
  misc_feature 1..22: note = chemically synthesized
  source 1..22: mol_type = other DNA
tactttacatagtaaatcttat

SEQ ID NO: 35105 - DNA, 22 bp, synthetic construct
  misc_feature 1..22: note = chemically synthesized
  source 1..22: mol_type = other DNA
tacatagtaaatcttatcaata

SEQ ID NO: 35106 - DNA, 22 bp, synthetic construct
  misc_feature 1..22: note = chemically synthesized
  source 1..22: mol_type = other DNA
acatagtaaatcttatcaatag

SEQ ID NO: 35107 - DNA, 22 bp, synthetic construct
  misc_feature 1..22: note = chemically synthesized
  source 1..22: mol_type = other DNA
catagtaaatcttatcaatagt

SEQ ID NO: 35108 - DNA, 22 bp, synthetic construct
  misc_feature 1..22: note = chemically synthesized
  source 1..22: mol_type = other DNA
atcaatagtcacaatcaatggt

SEQ ID NO: 35109 - DNA, 22 bp, synthetic construct
  misc_feature 1..22: note = chemically synthesized
  source 1..22: mol_type = other DNA
tcaatagtcacaatcaatggtc

SEQ ID NO: 35110 - DNA, 22 bp, synthetic construct
  misc_feature 1..22: note = chemically synthesized
  source 1..22: mol_type = other DNA
catctggagacattacttttag

SEQ ID NO: 35111 - DNA, 22 bp, synthetic construct
  misc_feature 1..22: note = chemically synthesized
  source 1..22: mol_type = other DNA
atctggagacattacttttagc

SEQ ID NO: 35112 - DNA, 22 bp, synthetic construct
  misc_feature 1..22: note = chemically synthesized
  source 1..22: mol_type = other DNA
gagacattacttttagcctgag

SEQ ID NO: 35113 - DNA, 22 bp, synthetic construct
  misc_feature 1..22: note = chemically synthesized
  source 1..22: mol_type = other DNA
cttttagcctgagccatgcaaa

SEQ ID NO: 35114 - DNA, 22 bp, synthetic construct
  misc_feature 1..22: note = chemically synthesized
  source 1..22: mol_type = other DNA
ttagcctgagccatgcaaaata

SEQ ID NO: 35115 - DNA, 22 bp, synthetic construct
  misc_feature 1..22: note = chemically synthesized
  source 1..22: mol_type = other DNA
tagcctgagccatgcaaaatat

SEQ ID NO: 35116 - DNA, 22 bp, synthetic construct
  misc_feature 1..22: note = chemically synthesized
  source 1..22: mol_type = other DNA
agcctgagccatgcaaaatata

SEQ ID NO: 35117 - DNA, 22 bp, synthetic construct
  misc_feature 1..22: note = chemically synthesized
  source 1..22: mol_type = other DNA
gcctgagccatgcaaaatatac

SEQ ID NO: 35118 - DNA, 22 bp, synthetic construct
  misc_feature 1..22: note = chemically synthesized
  source 1..22: mol_type = other DNA
agccatgcaaaatatacttttt

SEQ ID NO: 35119 - DNA, 22 bp, synthetic construct
  misc_feature 1..22: note = chemically synthesized
  source 1..22: mol_type = other DNA
tttggaaaattgccctttgaaa

SEQ ID NO: 35120 - DNA, 22 bp, synthetic construct
  misc_feature 1..22: note = chemically synthesized
  source 1..22: mol_type = other DNA
ttggaaaattgccctttgaaag

SEQ ID NO: 35121 - DNA, 22 bp, synthetic construct
  misc_feature 1..22: note = chemically synthesized
  source 1..22: mol_type = other DNA
tggaaaattgccctttgaaagg

SEQ ID NO: 35122 - DNA, 22 bp, synthetic construct
  misc_feature 1..22: note = chemically synthesized
  source 1..22: mol_type = other DNA
ggaaaattgccctttgaaaggc

SEQ ID NO: 35123 - DNA, 22 bp, synthetic construct
  misc_feature 1..22: note = chemically synthesized
  source 1..22: mol_type = other DNA
gaaaattgccctttgaaaggcg

SEQ ID NO: 35124 - DNA, 22 bp, synthetic construct
  misc_feature 1..22: note = chemically synthesized
  source 1..22: mol_type = other DNA
ccctttgaaaggcgagacacaa

SEQ ID NO: 35125 - DNA, 22 bp, synthetic construct
  misc_feature 1..22: note = chemically synthesized
  source 1..22: mol_type = other DNA
tgaaaggcgagacacaaaaggc

SEQ ID NO: 35126 - DNA, 22 bp, synthetic construct
  misc_feature 1..22: note = chemically synthesized
  source 1..22: mol_type = other DNA
gaaaggcgagacacaaaaggca

SEQ ID NO: 35127 - DNA, 22 bp, synthetic construct
  misc_feature 1..22: note = chemically synthesized
  source 1..22: mol_type = other DNA
aaaggcgagacacaaaaggcaa

SEQ ID NO: 35128 - DNA, 22 bp, synthetic construct
  misc_feature 1..22: note = chemically synthesized
  source 1..22: mol_type = other DNA
atgctattatatggtaccaata

SEQ ID NO: 35129 - DNA, 22 bp, synthetic construct
  misc_feature 1..22: note = chemically synthesized
  source 1..22: mol_type = other DNA
ttatatggtaccaataggattc

SEQ ID NO: 35130 - DNA, 22 bp, synthetic construct
  misc_feature 1..22: note = chemically synthesized
  source 1..22: mol_type = other DNA
tatggtaccaataggattcatt

SEQ ID NO: 35131 - DNA, 22 bp, synthetic construct
  misc_feature 1..22: note = chemically synthesized
  source 1..22: mol_type = other DNA
attaatttataaaggagaagag

SEQ ID NO: 35132 - DNA, 22 bp, synthetic construct
  misc_feature 1..22: note = chemically synthesized
  source 1..22: mol_type = other DNA
atttataaaggagaagagctaa

SEQ ID NO: 35133 - DNA, 22 bp, synthetic construct
  misc_feature 1..22: note = chemically synthesized
  source 1..22: mol_type = other DNA
ataaaggagaagagctaatgta

SEQ ID NO: 35134 - DNA, 22 bp, synthetic construct
  misc_feature 1..22: note = chemically synthesized
  source 1..22: mol_type = other DNA
taaaggagaagagctaatgtaa

SEQ ID NO: 35135 - DNA, 22 bp, synthetic construct
  misc_feature 1..22: note = chemically synthesized
  source 1..22: mol_type = other DNA
atgtaactccaaaatgcaagca

SEQ ID NO: 35136 - DNA, 22 bp, synthetic construct
  misc_feature 1..22: note = chemically synthesized
  source 1..22: mol_type = other DNA
caaaatgcaagcaattttcata

SEQ ID NO: 35137 - DNA, 22 bp, synthetic construct
  misc_feature 1..22: note = chemically synthesized
  source 1..22: mol_type = other DNA
tcatatgagtctacacaagcta

SEQ ID NO: 35138 - DNA, 22 bp, synthetic construct
  misc_feature 1..22: note = chemically synthesized
  source 1..22: mol_type = other DNA
catatgagtctacacaagctaa

SEQ ID NO: 35139 - DNA, 22 bp, synthetic construct
  misc_feature 1..22: note = chemically synthesized
  source 1..22: mol_type = other DNA
atatgagtctacacaagctaat

SEQ ID NO: 35140 - DNA, 22 bp, synthetic construct
  misc_feature 1..22: note = chemically synthesized
  source 1..22: mol_type = other DNA
cacaagctaattgtccttaaga

SEQ ID NO: 35141 - DNA, 22 bp, synthetic construct
  misc_feature 1..22: note = chemically synthesized
  source 1..22: mol_type = other DNA
attgtccttaagaatttcatct

SEQ ID NO: 35142 - DNA, 22 bp, synthetic construct
  misc_feature 1..22: note = chemically synthesized
  source 1..22: mol_type = other DNA
tccttaagaatttcatctttaa

SEQ ID NO: 35143 - DNA, 22 bp, synthetic construct
  misc_feature 1..22: note = chemically synthesized
  source 1..22: mol_type = other DNA
aagaatttcatctttaaggaaa

SEQ ID NO: 35144 - DNA, 22 bp, synthetic construct
  misc_feature 1..22: note = chemically synthesized
  source 1..22: mol_type = other DNA
agaatttcatctttaaggaaaa

SEQ ID NO: 35145 - DNA, 22 bp, synthetic construct
  misc_feature 1..22: note = chemically synthesized
  source 1..22: mol_type = other DNA
catctttaaggaaaagtttttt

SEQ ID NO: 35146 - DNA, 22 bp, synthetic construct
  misc_feature 1..22: note = chemically synthesized
  source 1..22: mol_type = other DNA
atctttaaggaaaagtttttta

SEQ ID NO: 35147 - DNA, 22 bp, synthetic construct
  misc_feature 1..22: note = chemically synthesized
  source 1..22: mol_type = other DNA
taaggaaaagttttttactgta

SEQ ID NO: 35148 - DNA, 22 bp, synthetic construct
  misc_feature 1..22: note = chemically synthesized
  source 1..22: mol_type = other DNA
aaggaaaagttttttactgtat

SEQ ID NO: 35149 - DNA, 22 bp, synthetic construct
  misc_feature 1..22: note = chemically synthesized
  source 1..22: mol_type = other DNA
aggaaaagttttttactgtatc

SEQ ID NO: 35150 - DNA, 22 bp, synthetic construct
  misc_feature 1..22: note = chemically synthesized
  source 1..22: mol_type = other DNA
tttactgtatcaaaaagaagtt

SEQ ID NO: 35151 - DNA, 22 bp, synthetic construct
  misc_feature 1..22: note = chemically synthesized
  source 1..22: mol_type = other DNA
ttactgtatcaaaaagaagttt

SEQ ID NO: 35152 - DNA, 22 bp, synthetic construct
  misc_feature 1..22: note = chemically synthesized
  source 1..22: mol_type = other DNA
tactgtatcaaaaagaagttta

SEQ ID NO: 35153 - DNA, 22 bp, synthetic construct
  misc_feature 1..22: note = chemically synthesized
  source 1..22: mol_type = other DNA
actgtatcaaaaagaagtttaa

SEQ ID NO: 35154 - DNA, 22 bp, synthetic construct
  misc_feature 1..22: note = chemically synthesized
  source 1..22: mol_type = other DNA
ctgtatcaaaaagaagtttaaa

SEQ ID NO: 35155 - DNA, 22 bp, synthetic construct
  misc_feature 1..22: note = chemically synthesized
  source 1..22: mol_type = other DNA
tatcaaaaagaagtttaaactg

SEQ ID NO: 35156 - DNA, 22 bp, synthetic construct
  misc_feature 1..22: note = chemically synthesized
  source 1..22: mol_type = other DNA
aaactgtcattgagcagagtct

SEQ ID NO: 35157 - DNA, 22 bp, synthetic construct
  misc_feature 1..22: note = chemically synthesized
  source 1..22: mol_type = other DNA
aactgtcattgagcagagtctg

SEQ ID NO: 35158 - DNA, 22 bp, synthetic construct
  misc_feature 1..22: note = chemically synthesized
  source 1..22: mol_type = other DNA
tcattgagcagagtctgataat

SEQ ID NO: 35159 - DNA, 22 bp, synthetic construct
  misc_feature 1..22: note = chemically synthesized
  source 1..22: mol_type = other DNA
agcagagtctgataataaggac

SEQ ID NO: 35160 - DNA, 22 bp, synthetic construct
  misc_feature 1..22: note = chemically synthesized
  source 1..22: mol_type = other DNA
ataataaggacactgtcaaatc

SEQ ID NO: 35161 - DNA, 22 bp, synthetic construct
  misc_feature 1..22: note = chemically synthesized
  source 1..22: mol_type = other DNA
tcaaatcacagttcagatgtta

SEQ ID NO: 35162 - DNA, 22 bp, synthetic construct
  misc_feature 1..22: note = chemically synthesized
  source 1..22: mol_type = other DNA
agatgttatgtgatgaggacag

SEQ ID NO: 35163 - DNA, 22 bp, synthetic construct
  misc_feature 1..22: note = chemically synthesized
  source 1..22: mol_type = other DNA
tgtgatgaggacagaatagaac

SEQ ID NO: 35164 - DNA, 22 bp, synthetic construct
  misc_feature 1..22: note = chemically synthesized
  source 1..22: mol_type = other DNA
ctagactggacaagaacagaca

SEQ ID NO: 35165 - DNA, 22 bp, synthetic construct
  misc_feature 1..22: note = chemically synthesized
  source 1..22: mol_type = other DNA
tagactggacaagaacagacat

SEQ ID NO: 35166 - DNA, 22 bp, synthetic construct
  misc_feature 1..22: note = chemically synthesized
  source 1..22: mol_type = other DNA
gactggacaagaacagacatga

SEQ ID NO: 35167 - DNA, 22 bp, synthetic construct
  misc_feature 1..22: note = chemically synthesized
  source 1..22: mol_type = other DNA
gacaagaacagacatgattaac

SEQ ID NO: 35168 - DNA, 22 bp, synthetic construct
  misc_feature 1..22: note = chemically synthesized
  source 1..22: mol_type = other DNA
acttaaccatccaacaataaat

SEQ ID NO: 35169 - DNA, 22 bp, synthetic construct
  misc_feature 1..22: note = chemically synthesized
  source 1..22: mol_type = other DNA
aaccatccaacaataaatctaa

SEQ ID NO: 35170 - DNA, 22 bp, synthetic construct
  misc_feature 1..22: note = chemically synthesized
  source 1..22: mol_type = other DNA
accatccaacaataaatctaag

SEQ ID NO: 35171 - DNA, 22 bp, synthetic construct
  misc_feature 1..22: note = chemically synthesized
  source 1..22: mol_type = other DNA
agttaacataaattgatgtcat

SEQ ID NO: 35172 - DNA, 22 bp, synthetic construct
  misc_feature 1..22: note = chemically synthesized
  source 1..22: mol_type = other DNA
acataaattgatgtcatctact

SEQ ID NO: 35173 - DNA, 22 bp, synthetic construct
  misc_feature 1..22: note = chemically synthesized
  source 1..22: mol_type = other DNA
atgtcatctactacatctaagt

SEQ ID NO: 35174 - DNA, 22 bp, synthetic construct
  misc_feature 1..22: note = chemically synthesized
  source 1..22: mol_type = other DNA
ctacatctaagtatttcctcaa

SEQ ID NO: 35175 - DNA, 22 bp, synthetic construct
  misc_feature 1..22: note = chemically synthesized
  source 1..22: mol_type = other DNA
catctaagtatttcctcaaatt

SEQ ID NO: 35176 - DNA, 22 bp, synthetic construct
  misc_feature 1..22: note = chemically synthesized
  source 1..22: mol_type = other DNA
agtatttcctcaaattctggac

SEQ ID NO: 35177 - DNA, 22 bp, synthetic construct
  misc_feature 1..22: note = chemically synthesized
  source 1..22: mol_type = other DNA
cctcaaattctggacaatttta

SEQ ID NO: 35178 - DNA, 22 bp, synthetic construct
  misc_feature 1..22: note = chemically synthesized
  source 1..22: mol_type = other DNA
ctcaaattctggacaattttag

SEQ ID NO: 35179 - DNA, 22 bp, synthetic construct
  misc_feature 1..22: note = chemically synthesized
  source 1..22: mol_type = other DNA
aaattctggacaattttagaaa

SEQ ID NO: 35180 - DNA, 22 bp, synthetic construct
  misc_feature 1..22: note = chemically synthesized
  source 1..22: mol_type = other DNA
tggacaattttagaaaccatca

SEQ ID NO: 35181 - DNA, 22 bp, synthetic construct
  misc_feature 1..22: note = chemically synthesized
  source 1..22: mol_type = other DNA
gacaattttagaaaccatcaaa

SEQ ID NO: 35182 - DNA, 22 bp, synthetic construct
  misc_feature 1..22: note = chemically synthesized
  source 1..22: mol_type = other DNA
tagaaaccatcaaaattatttg

SEQ ID NO: 35183 - DNA, 22 bp, synthetic construct
  misc_feature 1..22: note = chemically synthesized
  source 1..22: mol_type = other DNA
agaaaccatcaaaattatttgt

SEQ ID NO: 35184 - DNA, 22 bp, synthetic construct
  misc_feature 1..22: note = chemically synthesized
  source 1..22: mol_type = other DNA
gaaaccatcaaaattatttgtt

SEQ ID NO: 35185 - DNA, 22 bp, synthetic construct
  misc_feature 1..22: note = chemically synthesized
  source 1..22: mol_type = other DNA
tttgttgaggaaaaataaactt

SEQ ID NO: 35186 - DNA, 22 bp, synthetic construct
  misc_feature 1..22: note = chemically synthesized
  source 1..22: mol_type = other DNA
gttgaggaaaaataaacttagc

SEQ ID NO: 35187 - DNA, 22 bp, synthetic construct
  misc_feature 1..22: note = chemically synthesized
  source 1..22: mol_type = other DNA
ttgaggaaaaataaacttagcc

SEQ ID NO: 35188 - DNA, 22 bp, synthetic construct
  misc_feature 1..22: note = chemically synthesized
  source 1..22: mol_type = other DNA
aggaaaaataaacttagccaat

SEQ ID NO: 35189 - DNA, 22 bp, synthetic construct
  misc_feature 1..22: note = chemically synthesized
  source 1..22: mol_type = other DNA
agccaatttgcaagggcaacta

SEQ ID NO: 35190 - DNA, 22 bp, synthetic construct
  misc_feature 1..22: note = chemically synthesized
  source 1..22: mol_type = other DNA
gccaatttgcaagggcaactaa

SEQ ID NO: 35191 - DNA, 22 bp, synthetic construct
  misc_feature 1..22: note = chemically synthesized
  source 1..22: mol_type = other DNA
gcaagggcaactaaaatgaaga

SEQ ID NO: 35192 - DNA, 22 bp, synthetic construct
  misc_feature 1..22: note = chemically synthesized
  source 1..22: mol_type = other DNA
caagggcaactaaaatgaagaa

SEQ ID NO: 35193 - DNA, 22 bp, synthetic construct
  misc_feature 1..22: note = chemically synthesized
  source 1..22: mol_type = other DNA
aaatgaagaacttttctttaaa

SEQ ID NO: 35194 - DNA, 22 bp, synthetic construct
  misc_feature 1..22: note = chemically synthesized
  source 1..22: mol_type = other DNA
ttctttaaagtgtgggagtcac

SEQ ID NO: 35195 - DNA, 22 bp, synthetic construct
  misc_feature 1..22: note = chemically synthesized
  source 1..22: mol_type = other DNA
tctttaaagtgtgggagtcaca

SEQ ID NO: 35196 - DNA, 22 bp, synthetic construct
  misc_feature 1..22: note = chemically synthesized
  source 1..22: mol_type = other DNA
ctttaaagtgtgggagtcacat

SEQ ID NO: 35197 - DNA, 22 bp, synthetic construct
  misc_feature 1..22: note = chemically synthesized
  source 1..22: mol_type = other DNA
tttaaagtgtgggagtcacatc

SEQ ID NO: 35198 - DNA, 22 bp, synthetic construct
  misc_feature 1..22: note = chemically synthesized
  source 1..22: mol_type = other DNA
taaagtgtgggagtcacatctt

SEQ ID NO: 35199 - DNA, 22 bp, synthetic construct
  misc_feature 1..22: note = chemically synthesized
  source 1..22: mol_type = other DNA
aaagtgtgggagtcacatctta

SEQ ID NO: 35200 - DNA, 22 bp, synthetic construct
  misc_feature 1..22: note = chemically synthesized
  source 1..22: mol_type = other DNA
aagtgtgggagtcacatcttag

SEQ ID NO: 35201 - DNA, 22 bp, synthetic construct
  misc_feature 1..22: note = chemically synthesized
  source 1..22: mol_type = other DNA
agcaacatatttaaatatatct

SEQ ID NO: 35202 - DNA, 22 bp, synthetic construct
  misc_feature 1..22: note = chemically synthesized
  source 1..22: mol_type = other DNA
gcaacatatttaaatatatcta

SEQ ID NO: 35203 - DNA, 22 bp, synthetic construct
  misc_feature 1..22: note = chemically synthesized
  source 1..22: mol_type = other DNA
aaatatatctaagctttcttca

SEQ ID NO: 35204 - DNA, 22 bp, synthetic construct
  misc_feature 1..22: note = chemically synthesized
  source 1..22: mol_type = other DNA
aatatatctaagctttcttcaa

SEQ ID NO: 35205 - DNA, 22 bp, synthetic construct
  misc_feature 1..22: note = chemically synthesized
  source 1..22: mol_type = other DNA
agctttcttcaaaaccactatc

SEQ ID NO: 35206 - DNA, 22 bp, synthetic construct
  misc_feature 1..22: note = chemically synthesized
  source 1..22: mol_type = other DNA
tcttcaaaaccactatccacaa

SEQ ID NO: 35207 - DNA, 22 bp, synthetic construct
  misc_feature 1..22: note = chemically synthesized
  source 1..22: mol_type = other DNA
cttcaaaaccactatccacaaa

SEQ ID NO: 35208 - DNA, 22 bp, synthetic construct
  misc_feature 1..22: note = chemically synthesized
  source 1..22: mol_type = other DNA
ttcaaaaccactatccacaaaa

SEQ ID NO: 35209 - DNA, 22 bp, synthetic construct
  misc_feature 1..22: note = chemically synthesized
  source 1..22: mol_type = other DNA
caaaaccactatccacaaaaat

SEQ ID NO: 35210 - DNA, 22 bp, synthetic construct
  misc_feature 1..22: note = chemically synthesized
  source 1..22: mol_type = other DNA
aaaaccactatccacaaaaatg

SEQ ID NO: 35211 - DNA, 22 bp, synthetic construct
  misc_feature 1..22: note = chemically synthesized
  source 1..22: mol_type = other DNA
tccacaaaaatgcaaaatttcc

SEQ ID NO: 35212 - DNA, 22 bp, synthetic construct
  misc_feature 1..22: note = chemically synthesized
  source 1..22: mol_type = other DNA
ccaaagaatttctcctcttctg

SEQ ID NO: 35213 - DNA, 22 bp, synthetic construct
  misc_feature 1..22: note = chemically synthesized
  source 1..22: mol_type = other DNA
caaagaatttctcctcttctgt

SEQ ID NO: 35214 - DNA, 22 bp, synthetic construct
  misc_feature 1..22: note = chemically synthesized
  source 1..22: mol_type = other DNA
ctcctcttctgtagacttattt

SEQ ID NO: 35215 - DNA, 22 bp, synthetic construct
  misc_feature 1..22: note = chemically synthesized
  source 1..22: mol_type = other DNA
tcctcttctgtagacttatttt

SEQ ID NO: 35216 - DNA, 22 bp, synthetic construct
  misc_feature 1..22: note = chemically synthesized
  source 1..22: mol_type = other DNA
ctcttctgtagacttattttct

SEQ ID NO: 35217 - DNA, 22 bp, synthetic construct
  misc_feature 1..22: note = chemically synthesized
  source 1..22: mol_type = other DNA
ttctgtagacttattttcttca

SEQ ID NO: 35218 - DNA, 22 bp, synthetic construct
  misc_feature 1..22: note = chemically synthesized
  source 1..22: mol_type = other DNA
ctgtagacttattttcttcatc

SEQ ID NO: 35219 - DNA, 22 bp, synthetic construct
  misc_feature 1..22: note = chemically synthesized
  source 1..22: mol_type = other DNA
tgtagacttattttcttcatct

SEQ ID NO: 35220 - DNA, 22 bp, synthetic construct
  misc_feature 1..22: note = chemically synthesized
  source 1..22: mol_type = other DNA
tagacttattttcttcatcttc

SEQ ID NO: 35221 - DNA, 22 bp, synthetic construct
  misc_feature 1..22: note = chemically synthesized
  source 1..22: mol_type = other DNA
attttcttcatcttcatctttt

SEQ ID NO: 35222 - DNA, 22 bp, synthetic construct
  misc_feature 1..22: note = chemically synthesized
  source 1..22: mol_type = other DNA
ttttcttcatcttcatcttttc

SEQ ID NO: 35223 - DNA, 22 bp, synthetic construct
  misc_feature 1..22: note = chemically synthesized
  source 1..22: mol_type = other DNA
tcttcatcttcatcttttccag

SEQ ID NO: 35224 - DNA, 22 bp, synthetic construct
  misc_feature 1..22: note = chemically synthesized
  source 1..22: mol_type = other DNA
cttcatcttcatcttttccagg

SEQ ID NO: 35225 - DNA, 22 bp, synthetic construct
  misc_feature 1..22: note = chemically synthesized
  source 1..22: mol_type = other DNA
ttcatcttcatcttttccagga

SEQ ID NO: 35226 - DNA, 22 bp, synthetic construct
  misc_feature 1..22: note = chemically synthesized
  source 1..22: mol_type = other DNA
catcttcatcttttccaggaga

SEQ ID NO: 35227 - DNA, 22 bp, synthetic construct
  misc_feature 1..22: note = chemically synthesized
  source 1..22: mol_type = other DNA
atcttcatcttttccaggagaa

SEQ ID NO: 35228 - DNA, 22 bp, synthetic construct
  misc_feature 1..22: note = chemically synthesized
  source 1..22: mol_type = other DNA
catcttttccaggagaatatac

SEQ ID NO: 35229 - DNA, 22 bp, synthetic construct
  misc_feature 1..22: note = chemically synthesized
  source 1..22: mol_type = other DNA
atcttttccaggagaatatacc

SEQ ID NO: 35230 - DNA, 22 bp, synthetic construct
  misc_feature 1..22: note = chemically synthesized
  source 1..22: mol_type = other DNA
ttccaggagaatataccataag

SEQ ID NO: 35231 - DNA, 22 bp, synthetic construct
  misc_feature 1..22: note = chemically synthesized
  source 1..22: mol_type = other DNA
tccaggagaatataccataagt

SEQ ID NO: 35232 - DNA, 22 bp, synthetic construct
  misc_feature 1..22: note = chemically synthesized
  source 1..22: mol_type = other DNA
ccaggagaatataccataagtt

SEQ ID NO: 35233 - DNA, 22 bp, synthetic construct
  misc_feature 1..22: note = chemically synthesized
  source 1..22: mol_type = other DNA
caggagaatataccataagttt

SEQ ID NO: 35234 - DNA, 22 bp, synthetic construct
  misc_feature 1..22: note = chemically synthesized
  source 1..22: mol_type = other DNA
ctgatggtacacatttattaga

SEQ ID NO: 35235 - DNA, 22 bp, synthetic construct
  misc_feature 1..22: note = chemically synthesized
  source 1..22: mol_type = other DNA
tgatggtacacatttattagat

SEQ ID NO: 35236 - DNA, 22 bp, synthetic construct
  misc_feature 1..22: note = chemically synthesized
  source 1..22: mol_type = other DNA
atggtacacatttattagatgt

SEQ ID NO: 35237 - DNA, 22 bp, synthetic construct
  misc_feature 1..22: note = chemically synthesized
  source 1..22: mol_type = other DNA
attagatgttttatttacattt

SEQ ID NO: 35238 - DNA, 22 bp, synthetic construct
  misc_feature 1..22: note = chemically synthesized
  source 1..22: mol_type = other DNA
ttagatgttttatttacatttt

SEQ ID NO: 35239 - DNA, 22 bp, synthetic construct
  misc_feature 1..22: note = chemically synthesized
  source 1..22: mol_type = other DNA
gatgttttatttacatttttta

SEQ ID NO: 35240 - DNA, 22 bp, synthetic construct
  misc_feature 1..22: note = chemically synthesized
  source 1..22: mol_type = other DNA
tatttacattttttatccttga

SEQ ID NO: 35241 - DNA, 22 bp, synthetic construct
  misc_feature 1..22: note = chemically synthesized
  source 1..22: mol_type = other DNA
atttacattttttatccttgaa

SEQ ID NO: 35242 - DNA, 22 bp, synthetic construct
  misc_feature 1..22: note = chemically synthesized
  source 1..22: mol_type = other DNA
tttacattttttatccttgaaa

SEQ ID NO: 35243 - DNA, 22 bp, synthetic construct
  misc_feature 1..22: note = chemically synthesized
  source 1..22: mol_type = other DNA
acattttttatccttgaaaact

SEQ ID NO: 35244 - DNA, 22 bp, synthetic construct
  misc_feature 1..22: note = chemically synthesized
  source 1..22: mol_type = other DNA
cattttttatccttgaaaactc

SEQ ID NO: 35245 - DNA, 22 bp, synthetic construct
  misc_feature 1..22: note = chemically synthesized
  source 1..22: mol_type = other DNA
tttatccttgaaaactcctttt

SEQ ID NO: 35246 - DNA, 22 bp, synthetic construct
  misc_feature 1..22: note = chemically synthesized
  source 1..22: mol_type = other DNA
ttatccttgaaaactcctttta

SEQ ID NO: 35247 - DNA, 22 bp, synthetic construct
  misc_feature 1..22: note = chemically synthesized
  source 1..22: mol_type = other DNA
tatccttgaaaactccttttat

SEQ ID NO: 35248 - DNA, 22 bp, synthetic construct
  misc_feature 1..22: note = chemically synthesized
  source 1..22: mol_type = other DNA
atccttgaaaactccttttatt

SEQ ID NO: 35249 - DNA, 22 bp, synthetic construct
  misc_feature 1..22: note = chemically synthesized
  source 1..22: mol_type = other DNA
tccttgaaaactccttttattt

SEQ ID NO: 35250 - DNA, 22 bp, synthetic construct
  misc_feature 1..22: note = chemically synthesized
  source 1..22: mol_type = other DNA
gaaaactccttttatttgcaac

SEQ ID NO: 35251 - DNA, 22 bp, synthetic construct
  misc_feature 1..22: note = chemically synthesized
  source 1..22: mol_type = other DNA
aaaactccttttatttgcaact

SEQ ID NO: 35252 - DNA, 22 bp, synthetic construct
  misc_feature 1..22: note = chemically synthesized
  source 1..22: mol_type = other DNA
cttttatttgcaactatgcatc

SEQ ID NO: 35253 - DNA, 22 bp, synthetic construct
  misc_feature 1..22: note = chemically synthesized
  source 1..22: mol_type = other DNA
ttatttgcaactatgcatctta

SEQ ID NO: 35254 - DNA, 22 bp, synthetic construct
  misc_feature 1..22: note = chemically synthesized
  source 1..22: mol_type = other DNA
tatttgcaactatgcatcttac

SEQ ID NO: 35255 - DNA, 22 bp, synthetic construct
  misc_feature 1..22: note = chemically synthesized
  source 1..22: mol_type = other DNA
atttgcaactatgcatcttact

SEQ ID NO: 35256 - DNA, 22 bp, synthetic construct
  misc_feature 1..22: note = chemically synthesized
  source 1..22: mol_type = other DNA
tttgcaactatgcatcttactc

SEQ ID NO: 35257 - DNA, 22 bp, synthetic construct
  misc_feature 1..22: note = chemically synthesized
  source 1..22: mol_type = other DNA
gcaactatgcatcttactcaga

SEQ ID NO: 35258 - DNA, 22 bp, synthetic construct
  misc_feature 1..22: note = chemically synthesized
  source 1..22: mol_type = other DNA
caactatgcatcttactcagag

SEQ ID NO: 35259 - DNA, 22 bp, synthetic construct
  misc_feature 1..22: note = chemically synthesized
  source 1..22: mol_type = other DNA
tgcatcttactcagagatctta

SEQ ID NO: 35260 - DNA, 22 bp, synthetic construct
  misc_feature 1..22: note = chemically synthesized
  source 1..22: mol_type = other DNA
actcagagatcttaaaacatcc

SEQ ID NO: 35261 - DNA, 22 bp, synthetic construct
  misc_feature 1..22: note = chemically synthesized
  source 1..22: mol_type = other DNA
ctcagagatcttaaaacatcct

SEQ ID NO: 35262 - DNA, 22 bp, synthetic construct
  misc_feature 1..22: note = chemically synthesized
  source 1..22: mol_type = other DNA
agagatcttaaaacatccttgt

SEQ ID NO: 35263 - DNA, 22 bp, synthetic construct
  misc_feature 1..22: note = chemically synthesized
  source 1..22: mol_type = other DNA
aaaacatccttgtttgttagat

SEQ ID NO: 35264 - DNA, 22 bp, synthetic construct
  misc_feature 1..22: note = chemically synthesized
  source 1..22: mol_type = other DNA
aaacatccttgtttgttagatt

SEQ ID NO: 35265 - DNA, 22 bp, synthetic construct
  misc_feature 1..22: note = chemically synthesized
  source 1..22: mol_type = other DNA
gtttgttagattacgtatttca

SEQ ID NO: 35266 - DNA, 22 bp, synthetic construct
  misc_feature 1..22: note = chemically synthesized
  source 1..22: mol_type = other DNA
tttgttagattacgtatttcaa

SEQ ID NO: 35267 - DNA, 22 bp, synthetic construct
  misc_feature 1..22: note = chemically synthesized
  source 1..22: mol_type = other DNA
gttagattacgtatttcaaatt

SEQ ID NO: 35268 - DNA, 22 bp, synthetic construct
  misc_feature 1..22: note = chemically synthesized
  source 1..22: mol_type = other DNA
ttagattacgtatttcaaattc

SEQ ID NO: 35269 - DNA, 22 bp, synthetic construct
  misc_feature 1..22: note = chemically synthesized
  source 1..22: mol_type = other DNA
gattacgtatttcaaattcata

SEQ ID NO: 35270 - DNA, 22 bp, synthetic construct
  misc_feature 1..22: note = chemically synthesized
  source 1..22: mol_type = other DNA
cgtatttcaaattcatatacac

SEQ ID NO: 35271 - DNA, 22 bp, synthetic construct
  misc_feature 1..22: note = chemically synthesized
  source 1..22: mol_type = other DNA
caaattcatatacactttggta

SEQ ID NO: 35272 - DNA, 22 bp, synthetic construct
  misc_feature 1..22: note = chemically synthesized
  source 1..22: mol_type = other DNA
aaattcatatacactttggtag

SEQ ID NO: 35273 - DNA, 22 bp, synthetic construct
  misc_feature 1..22: note = chemically synthesized
  source 1..22: mol_type = other DNA
atatacactttggtagatgcaa

SEQ ID NO: 35274 - DNA, 22 bp, synthetic construct
  misc_feature 1..22: note = chemically synthesized
  source 1..22: mol_type = other DNA
tggtagatgcaaacatttttat

SEQ ID NO: 35275 - DNA, 22 bp, synthetic construct
  misc_feature 1..22: note = chemically synthesized
  source 1..22: mol_type = other DNA
ggtagatgcaaacatttttatt

SEQ ID NO: 35276 - DNA, 22 bp, synthetic construct
  misc_feature 1..22: note = chemically synthesized
  source 1..22: mol_type = other DNA
gtagatgcaaacatttttattt

SEQ ID NO: 35277 - DNA, 22 bp, synthetic construct
  misc_feature 1..22: note = chemically synthesized
  source 1..22: mol_type = other DNA
ttatttgctgaagaacataagg

SEQ ID NO: 35278 - DNA, 22 bp, synthetic construct
  misc_feature 1..22: note = chemically synthesized
  source 1..22: mol_type = other DNA
tatttgctgaagaacataaggg

SEQ ID NO: 35279 - DNA, 22 bp, synthetic construct
  misc_feature 1..22: note = chemically synthesized
  source 1..22: mol_type = other DNA
atttgctgaagaacataagggg

SEQ ID NO: 35280 - DNA, 22 bp, synthetic construct
  misc_feature 1..22: note = chemically synthesized
  source 1..22: mol_type = other DNA
tttgctgaagaacataaggggg

SEQ ID NO: 35281 - DNA, 22 bp, synthetic construct
  misc_feature 1..22: note = chemically synthesized
  source 1..22: mol_type = other DNA
gctgaagaacataagggggaaa

SEQ ID NO: 35282 - DNA, 22 bp, synthetic construct
  misc_feature 1..22: note = chemically synthesized
  source 1..22: mol_type = other DNA
ctgaagaacataagggggaaat

SEQ ID NO: 35283 - DNA, 22 bp, synthetic construct
  misc_feature 1..22: note = chemically synthesized
  source 1..22: mol_type = other DNA
aagaacataagggggaaataga

SEQ ID NO: 35284 - DNA, 22 bp, synthetic construct
  misc_feature 1..22: note = chemically synthesized
  source 1..22: mol_type = other DNA
tttatttgaagaaacaaatgat

SEQ ID NO: 35285 - DNA, 22 bp, synthetic construct
  misc_feature 1..22: note = chemically synthesized
  source 1..22: mol_type = other DNA
tatttgaagaaacaaatgattt

SEQ ID NO: 35286 - DNA, 22 bp, synthetic construct
  misc_feature 1..22: note = chemically synthesized
  source 1..22: mol_type = other DNA
atttgaagaaacaaatgatttg

SEQ ID NO: 35287 - DNA, 22 bp, synthetic construct
  misc_feature 1..22: note = chemically synthesized
  source 1..22: mol_type = other DNA
tttgaagaaacaaatgatttga

SEQ ID NO: 35288 - DNA, 22 bp, synthetic construct
  misc_feature 1..22: note = chemically synthesized
  source 1..22: mol_type = other DNA
gaagaaacaaatgatttgattt

SEQ ID NO: 35289 - DNA, 22 bp, synthetic construct
  misc_feature 1..22: note = chemically synthesized
  source 1..22: mol_type = other DNA
aagaaacaaatgatttgatttg

SEQ ID NO: 35290 - DNA, 22 bp, synthetic construct
  misc_feature 1..22: note = chemically synthesized
  source 1..22: mol_type = other DNA
gatttgggaaatgaaatgaaaa

SEQ ID NO: 35291 - DNA, 22 bp, synthetic construct
  misc_feature 1..22: note = chemically synthesized
  source 1..22: mol_type = other DNA
atttgggaaatgaaatgaaaag

SEQ ID NO: 35292 - DNA, 22 bp, synthetic construct
  misc_feature 1..22: note = chemically synthesized
  source 1..22: mol_type = other DNA
gggaaatgaaatgaaaagaaaa

SEQ ID NO: 35293 - DNA, 22 bp, synthetic construct
  misc_feature 1..22: note = chemically synthesized
  source 1..22: mol_type = other DNA
ggaaatgaaatgaaaagaaaaa

SEQ ID NO: 35294 - DNA, 22 bp, synthetic construct
  misc_feature 1..22: note = chemically synthesized
  source 1..22: mol_type = other DNA
actaattcgctacttcttttac

SEQ ID NO: 35295 - DNA, 22 bp, synthetic construct
  misc_feature 1..22: note = chemically synthesized
  source 1..22: mol_type = other DNA
attcgctacttcttttactcat

SEQ ID NO: 35296 - DNA, 22 bp, synthetic construct
  misc_feature 1..22: note = chemically synthesized
  source 1..22: mol_type = other DNA
gctacttcttttactcatctga

SEQ ID NO: 35297 - DNA, 22 bp, synthetic construct
  misc_feature 1..22: note = chemically synthesized
  source 1..22: mol_type = other DNA
cttcttttactcatctgaggcc

SEQ ID NO: 35298 - DNA, 22 bp, synthetic construct
  misc_feature 1..22: note = chemically synthesized
  source 1..22: mol_type = other DNA
cttttactcatctgaggccttc

SEQ ID NO: 35299 - DNA, 22 bp, synthetic construct
  misc_feature 1..22: note = chemically synthesized
  source 1..22: mol_type = other DNA
ttttactcatctgaggccttca

SEQ ID NO: 35300 - DNA, 22 bp, synthetic construct
  misc_feature 1..22: note = chemically synthesized
  source 1..22: mol_type = other DNA
ttactcatctgaggccttcaga

SEQ ID NO: 35301 - DNA, 22 bp, synthetic construct
  misc_feature 1..22: note = chemically synthesized
  source 1..22: mol_type = other DNA
tactcatctgaggccttcagat

SEQ ID NO: 35302 - DNA, 22 bp, synthetic construct
  misc_feature 1..22: note = chemically synthesized
  source 1..22: mol_type = other DNA
actcatctgaggccttcagata

SEQ ID NO: 35303 - DNA, 22 bp, synthetic construct
  misc_feature 1..22: note = chemically synthesized
  source 1..22: mol_type = other DNA
ctcatctgaggccttcagatag

SEQ ID NO: 35304 - DNA, 22 bp, synthetic construct
  misc_feature 1..22: note = chemically synthesized
  source 1..22: mol_type = other DNA
atctgaggccttcagatagtcc

SEQ ID NO: 35305 - DNA, 22 bp, synthetic construct
  misc_feature 1..22: note = chemically synthesized
  source 1..22: mol_type = other DNA
aggccttcagatagtcccccat

SEQ ID NO: 35306 - DNA, 22 bp, synthetic construct
  misc_feature 1..22: note = chemically synthesized
  source 1..22: mol_type = other DNA
cagatagtcccccatatagcct

SEQ ID NO: 35307 - DNA, 22 bp, synthetic construct
  misc_feature 1..22: note = chemically synthesized
  source 1..22: mol_type = other DNA
agatagtcccccatatagcctt

SEQ ID NO: 35308 - DNA, 22 bp, synthetic construct
  misc_feature 1..22: note = chemically synthesized
  source 1..22: mol_type = other DNA
agagtgtttaaaatatgattat

SEQ ID NO: 35309 - DNA, 22 bp, synthetic construct
  misc_feature 1..22: note = chemically synthesized
  source 1..22: mol_type = other DNA
gagtgtttaaaatatgattatg

SEQ ID NO: 35310 - DNA, 22 bp, synthetic construct
  misc_feature 1..22: note = chemically synthesized
  source 1..22: mol_type = other DNA
aaaatatgattatgctctttca

SEQ ID NO: 35311 - DNA, 22 bp, synthetic construct
  misc_feature 1..22: note = chemically synthesized
  source 1..22: mol_type = other DNA
aaatatgattatgctctttcag

SEQ ID NO: 35312 - DNA, 22 bp, synthetic construct
  misc_feature 1..22: note = chemically synthesized
  source 1..22: mol_type = other DNA
tgctctttcagtctattagaaa

SEQ ID NO: 35313 - DNA, 22 bp, synthetic construct
  misc_feature 1..22: note = chemically synthesized
  source 1..22: mol_type = other DNA
tttcagtctattagaaataaaa

SEQ ID NO: 35314 - DNA, 22 bp, synthetic construct
  misc_feature 1..22: note = chemically synthesized
  source 1..22: mol_type = other DNA
tcagtctattagaaataaaaac

SEQ ID NO: 35315 - DNA, 22 bp, synthetic construct
  misc_feature 1..22: note = chemically synthesized
  source 1..22: mol_type = other DNA
cagtctattagaaataaaaaca

SEQ ID NO: 35316 - DNA, 22 bp, synthetic construct
  misc_feature 1..22: note = chemically synthesized
  source 1..22: mol_type = other DNA
agtctattagaaataaaaacat

SEQ ID NO: 35317 - DNA, 22 bp, synthetic construct
  misc_feature 1..22: note = chemically synthesized
  source 1..22: mol_type = other DNA
ttagaaataaaaacataaagct

SEQ ID NO: 35318 - DNA, 22 bp, synthetic construct
  misc_feature 1..22: note = chemically synthesized
  source 1..22: mol_type = other DNA
gaaataaaaacataaagcttaa

SEQ ID NO: 35319 - DNA, 22 bp, synthetic construct
  misc_feature 1..22: note = chemically synthesized
  source 1..22: mol_type = other DNA
aaaaaatttcaagggaaggggc

SEQ ID NO: 35320 - DNA, 22 bp, synthetic construct
  misc_feature 1..22: note = chemically synthesized
  source 1..22: mol_type = other DNA
aaaaatttcaagggaaggggct

SEQ ID NO: 35321 - DNA, 22 bp, synthetic construct
  misc_feature 1..22: note = chemically synthesized
  source 1..22: mol_type = other DNA
caagggaaggggcttgaagatt

SEQ ID NO: 35322 - DNA, 22 bp, synthetic construct
  misc_feature 1..22: note = chemically synthesized
  source 1..22: mol_type = other DNA
aagggaaggggcttgaagatta

SEQ ID NO: 35323 - DNA, 22 bp, synthetic construct
  misc_feature 1..22: note = chemically synthesized
  source 1..22: mol_type = other DNA
gaagattactgactaagggcag

SEQ ID NO: 35324 - DNA, 22 bp, synthetic construct
  misc_feature 1..22: note = chemically synthesized
  source 1..22: mol_type = other DNA
aagattactgactaagggcagc

SEQ ID NO: 35325 - DNA, 22 bp, synthetic construct
  misc_feature 1..22: note = chemically synthesized
  source 1..22: mol_type = other DNA
ctgactaagggcagctgacact

SEQ ID NO: 35326 - DNA, 22 bp, synthetic construct
  misc_feature 1..22: note = chemically synthesized
  source 1..22: mol_type = other DNA
actaagggcagctgacactcac

SEQ ID NO: 35327 - DNA, 22 bp, synthetic construct
  misc_feature 1..22: note = chemically synthesized
  source 1..22: mol_type = other DNA
agggcagctgacactcacctcc

SEQ ID NO: 35328 - DNA, 22 bp, synthetic construct
  misc_feature 1..22: note = chemically synthesized
  source 1..22: mol_type = other DNA
acactcacctcctccacaaaga

SEQ ID NO: 35329 - DNA, 22 bp, synthetic construct
  misc_feature 1..22: note = chemically synthesized
  source 1..22: mol_type = other DNA
acctcctccacaaagaaccaaa

SEQ ID NO: 35330 - DNA, 22 bp, synthetic construct
  misc_feature 1..22: note = chemically synthesized
  source 1..22: mol_type = other DNA
ctccacaaagaaccaaaatagt

SEQ ID NO: 35331 - DNA, 22 bp, synthetic construct
  misc_feature 1..22: note = chemically synthesized
  source 1..22: mol_type = other DNA
cacaaagaaccaaaatagtaag

SEQ ID NO: 35332 - DNA, 22 bp, synthetic construct
  misc_feature 1..22: note = chemically synthesized
  source 1..22: mol_type = other DNA
tggaattcaacagagaagtgac

SEQ ID NO: 35333 - DNA, 22 bp, synthetic construct
  misc_feature 1..22: note = chemically synthesized
  source 1..22: mol_type = other DNA
gaattcaacagagaagtgacag

SEQ ID NO: 35334 - DNA, 22 bp, synthetic construct
  misc_feature 1..22: note = chemically synthesized
  source 1..22: mol_type = other DNA
aacagagaagtgacaggaagca

SEQ ID NO: 35335 - DNA, 22 bp, synthetic construct
  misc_feature 1..22: note = chemically synthesized
  source 1..22: mol_type = other DNA
aggcaatgaaggggagggaagc

SEQ ID NO: 35336 - DNA, 22 bp, synthetic construct
  misc_feature 1..22: note = chemically synthesized
  source 1..22: mol_type = other DNA
cccagtagggatcctctgtgag

SEQ ID NO: 35337 - DNA, 22 bp, synthetic construct
  misc_feature 1..22: note = chemically synthesized
  source 1..22: mol_type = other DNA
tgtgaggccagagaggctcccc

SEQ ID NO: 35338 - DNA, 22 bp, synthetic construct
  misc_feature 1..22: note = chemically synthesized
  source 1..22: mol_type = other DNA
tgaggccagagaggctccccag

SEQ ID NO: 35339 - DNA, 22 bp, synthetic construct
  misc_feature 1..22: note = chemically synthesized
  source 1..22: mol_type = other DNA
cccagtgcatcgaaagttaagt

SEQ ID NO: 35340 - DNA, 22 bp, synthetic construct
  misc_feature 1..22: note = chemically synthesized
  source 1..22: mol_type = other DNA
agtgactgactcccagtggtcc

SEQ ID NO: 35341 - DNA, 22 bp, synthetic construct
  misc_feature 1..22: note = chemically synthesized
  source 1..22: mol_type = other DNA
actcccagtggtccacatctgc

SEQ ID NO: 35342 - DNA, 22 bp, synthetic construct
  misc_feature 1..22: note = chemically synthesized
  source 1..22: mol_type = other DNA
ccagtggtccacatctgcatta

SEQ ID NO: 35343 - DNA, 22 bp, synthetic construct
  misc_feature 1..22: note = chemically synthesized
  source 1..22: mol_type = other DNA
cattatggactccaggaatcct

SEQ ID NO: 35344 - DNA, 22 bp, synthetic construct
  misc_feature 1..22: note = chemically synthesized
  source 1..22: mol_type = other DNA
tggactccaggaatcctagcca

SEQ ID NO: 35345 - DNA, 22 bp, synthetic construct
  misc_feature 1..22: note = chemically synthesized
  source 1..22: mol_type = other DNA
caggaatcctagccacaggaga

SEQ ID NO: 35346 - DNA, 22 bp, synthetic construct
  misc_feature 1..22: note = chemically synthesized
  source 1..22: mol_type = other DNA
gccacaggagagtcccttgacc

SEQ ID NO: 35347 - DNA, 22 bp, synthetic construct
  misc_feature 1..22: note = chemically synthesized
  source 1..22: mol_type = other DNA
gaccatgcaggccttgagacta

SEQ ID NO: 35348 - DNA, 22 bp, synthetic construct
  misc_feature 1..22: note = chemically synthesized
  source 1..22: mol_type = other DNA
accatgcaggccttgagactat

SEQ ID NO: 35349 - DNA, 22 bp, synthetic construct
  misc_feature 1..22: note = chemically synthesized
  source 1..22: mol_type = other DNA
gagactatcataaggaactgcc

SEQ ID NO: 35350 - DNA, 22 bp, synthetic construct
  misc_feature 1..22: note = chemically synthesized
  source 1..22: mol_type = other DNA
agactatcataaggaactgccc

SEQ ID NO: 35351 - DNA, 22 bp, synthetic construct
  misc_feature 1..22: note = chemically synthesized
  source 1..22: mol_type = other DNA
tcataaggaactgcccagcaat

SEQ ID NO: 35352 - DNA, 22 bp, synthetic construct
  misc_feature 1..22: note = chemically synthesized
  source 1..22: mol_type = other DNA
cccagcaatcgcacaaaggcat

SEQ ID NO: 35353 - DNA, 22 bp, synthetic construct
  misc_feature 1..22: note = chemically synthesized
  source 1..22: mol_type = other DNA
ctccagagaaggagctctcact

SEQ ID NO: 35354 - DNA, 22 bp, synthetic construct
  misc_feature 1..22: note = chemically synthesized
  source 1..22: mol_type = other DNA
cagagaaggagctctcactggg

SEQ ID NO: 35355 - DNA, 22 bp, synthetic construct
  misc_feature 1..22: note = chemically synthesized
  source 1..22: mol_type = other DNA
tcactgggtcccacccctgcca

SEQ ID NO: 35356 - DNA, 22 bp, synthetic construct
  misc_feature 1..22: note = chemically synthesized
  source 1..22: mol_type = other DNA
actgggtcccacccctgccatc

SEQ ID NO: 35357 - DNA, 22 bp, synthetic construct
  misc_feature 1..22: note = chemically synthesized
  source 1..22: mol_type = other DNA
ggtcccacccctgccatcccca

SEQ ID NO: 35358 - DNA, 22 bp, synthetic construct
  misc_feature 1..22: note = chemically synthesized
  source 1..22: mol_type = other DNA
ccatccccattactgagcagca

SEQ ID NO: 35359 - DNA, 22 bp, synthetic construct
  misc_feature 1..22: note = chemically synthesized
  source 1..22: mol_type = other DNA
ctgagcagcaaggtgccatttt

SEQ ID NO: 35360 - DNA, 22 bp, synthetic construct
  misc_feature 1..22: note = chemically synthesized
  source 1..22: mol_type = other DNA
agcagcaaggtgccattttgag

SEQ ID NO: 35361 - DNA, 22 bp, synthetic construct
  misc_feature 1..22: note = chemically synthesized
  source 1..22: mol_type = other DNA
tgagagcccaacacccaccaga

SEQ ID NO: 35362 - DNA, 22 bp, synthetic construct
  misc_feature 1..22: note = chemically synthesized
  source 1..22: mol_type = other DNA
gagagcccaacacccaccagat

SEQ ID NO: 35363 - DNA, 22 bp, synthetic construct
  misc_feature 1..22: note = chemically synthesized
  source 1..22: mol_type = other DNA
agagcccaacacccaccagatg

SEQ ID NO: 35364 - DNA, 22 bp, synthetic construct
  misc_feature 1..22: note = chemically synthesized
  source 1..22: mol_type = other DNA
ctcagaccccaacatcatctgc

SEQ ID NO: 35365 - DNA, 22 bp, synthetic construct
  misc_feature 1..22: note = chemically synthesized
  source 1..22: mol_type = other DNA
agaccccaacatcatctgcatc

SEQ ID NO: 35366 - DNA, 22 bp, synthetic construct
  misc_feature 1..22: note = chemically synthesized
  source 1..22: mol_type = other DNA
catctctacatccctgaagctc

SEQ ID NO: 35367 - DNA, 22 bp, synthetic construct
  misc_feature 1..22: note = chemically synthesized
  source 1..22: mol_type = other DNA
tacatccctgaagctctgctga

SEQ ID NO: 35368 - DNA, 22 bp, synthetic construct
  misc_feature 1..22: note = chemically synthesized
  source 1..22: mol_type = other DNA
catccctgaagctctgctgaca

SEQ ID NO: 35369 - DNA, 22 bp, synthetic construct
  misc_feature 1..22: note = chemically synthesized
  source 1..22: mol_type = other DNA
aagctctgctgacatcccccac

SEQ ID NO: 35370 - DNA, 22 bp, synthetic construct
  misc_feature 1..22: note = chemically synthesized
  source 1..22: mol_type = other DNA
tgctgacatcccccacccacag

SEQ ID NO: 35371 - DNA, 22 bp, synthetic construct
  misc_feature 1..22: note = chemically synthesized
  source 1..22: mol_type = other DNA
ctgacatcccccacccacagct

SEQ ID NO: 35372 - DNA, 22 bp, synthetic construct
  misc_feature 1..22: note = chemically synthesized
  source 1..22: mol_type = other DNA
acatcccccacccacagctgag

SEQ ID NO: 35373 - DNA, 22 bp, synthetic construct
  misc_feature 1..22: note = chemically synthesized
  source 1..22: mol_type = other DNA
agtgctactgctggctgctgtc

SEQ ID NO: 35374 - DNA, 22 bp, synthetic construct
  misc_feature 1..22: note = chemically synthesized
  source 1..22: mol_type = other DNA
ctgctggctgctgtcaccaggg

SEQ ID NO: 35375 - DNA, 22 bp, synthetic construct
  misc_feature 1..22: note = chemically synthesized
  source 1..22: mol_type = other DNA
ctggctgctgtcaccagggata

SEQ ID NO: 35376 - DNA, 22 bp, synthetic construct
  misc_feature 1..22: note = chemically synthesized
  source 1..22: mol_type = other DNA
gctgctgtcaccagggataaag

SEQ ID NO: 35377 - DNA, 22 bp, synthetic construct
  misc_feature 1..22: note = chemically synthesized
  source 1..22: mol_type = other DNA
ctgtcaccagggataaagtgtg

SEQ ID NO: 35378 - DNA, 22 bp, synthetic construct
  misc_feature 1..22: note = chemically synthesized
  source 1..22: mol_type = other DNA
tcaccagggataaagtgtgtca

SEQ ID NO: 35379 - DNA, 22 bp, synthetic construct
  misc_feature 1..22: note = chemically synthesized
  source 1..22: mol_type = other DNA
gaagtggactcccccaccccca

SEQ ID NO: 35380 - DNA, 22 bp, synthetic construct
  misc_feature 1..22: note = chemically synthesized
  source 1..22: mol_type = other DNA
ccccacccccagtagcagggct

SEQ ID NO: 35381 - DNA, 22 bp, synthetic construct
  misc_feature 1..22: note = chemically synthesized
  source 1..22: mol_type = other DNA
ctacacatttataagctcccta

SEQ ID NO: 35382 - DNA, 22 bp, synthetic construct
  misc_feature 1..22: note = chemically synthesized
  source 1..22: mol_type = other DNA
cacatttataagctccctaaga

SEQ ID NO: 35383 - DNA, 22 bp, synthetic construct
  misc_feature 1..22: note = chemically synthesized
  source 1..22: mol_type = other DNA
ataagctccctaagaaaatgct

SEQ ID NO: 35384 - DNA, 22 bp, synthetic construct
  misc_feature 1..22: note = chemically synthesized
  source 1..22: mol_type = other DNA
taagctccctaagaaaatgcta

SEQ ID NO: 35385 - DNA, 22 bp, synthetic construct
  misc_feature 1..22: note = chemically synthesized
  source 1..22: mol_type = other DNA
cctaagaaaatgctaccccact

SEQ ID NO: 35386 - DNA, 22 bp, synthetic construct
  misc_feature 1..22: note = chemically synthesized
  source 1..22: mol_type = other DNA
agaaaatgctaccccacttgca

SEQ ID NO: 35387 - DNA, 22 bp, synthetic construct
  misc_feature 1..22: note = chemically synthesized
  source 1..22: mol_type = other DNA
ccccacttgcagccaccatctg

SEQ ID NO: 35388 - DNA, 22 bp, synthetic construct
  misc_feature 1..22: note = chemically synthesized
  source 1..22: mol_type = other DNA
gcagccaccatctggggctgaa

SEQ ID NO: 35389 - DNA, 22 bp, synthetic construct
  misc_feature 1..22: note = chemically synthesized
  source 1..22: mol_type = other DNA
cagccaccatctggggctgaaa

SEQ ID NO: 35390 - DNA, 22 bp, synthetic construct
  misc_feature 1..22: note = chemically synthesized
  source 1..22: mol_type = other DNA
gggctgaaacacatgcccacca

SEQ ID NO: 35391 - DNA, 22 bp, synthetic construct
  misc_feature 1..22: note = chemically synthesized
  source 1..22: mol_type = other DNA
aaacacatgcccaccagcaacc

SEQ ID NO: 35392 - DNA, 22 bp, synthetic construct
  misc_feature 1..22: note = chemically synthesized
  source 1..22: mol_type = other DNA
atagctgctgccactgaaagca

SEQ ID NO: 35393 - DNA, 22 bp, synthetic construct
  misc_feature 1..22: note = chemically synthesized
  source 1..22: mol_type = other DNA
tagctgctgccactgaaagcaa

SEQ ID NO: 35394 - DNA, 22 bp, synthetic construct
  misc_feature 1..22: note = chemically synthesized
  source 1..22: mol_type = other DNA
ctgccactgaaagcaacacacc

SEQ ID NO: 35395 - DNA, 22 bp, synthetic construct
  misc_feature 1..22: note = chemically synthesized
  source 1..22: mol_type = other DNA
ccactgaaagcaacacaccccg

SEQ ID NO: 35396 - DNA, 22 bp, synthetic construct
  misc_feature 1..22: note = chemically synthesized
  source 1..22: mol_type = other DNA
aaagcaacacaccccgcacccc

SEQ ID NO: 35397 - DNA, 22 bp, synthetic construct
  misc_feature 1..22: note = chemically synthesized
  source 1..22: mol_type = other DNA
caagagcagggcaacaatgcag

SEQ ID NO: 35398 - DNA, 22 bp, synthetic construct
  misc_feature 1..22: note = chemically synthesized
  source 1..22: mol_type = other DNA
aagagcagggcaacaatgcagt

SEQ ID NO: 35399 - DNA, 22 bp, synthetic construct
  misc_feature 1..22: note = chemically synthesized
  source 1..22: mol_type = other DNA
ctaattcactcaggcattctgc

SEQ ID NO: 35400 - DNA, 22 bp, synthetic construct
  misc_feature 1..22: note = chemically synthesized
  source 1..22: mol_type = other DNA
attcactcaggcattctgctgg

SEQ ID NO: 35401 - DNA, 22 bp, synthetic construct
  misc_feature 1..22: note = chemically synthesized
  source 1..22: mol_type = other DNA
actcaggcattctgctgggggc

SEQ ID NO: 35402 - DNA, 22 bp, synthetic construct
  misc_feature 1..22: note = chemically synthesized
  source 1..22: mol_type = other DNA
aggcattctgctgggggcctga

SEQ ID NO: 35403 - DNA, 22 bp, synthetic construct
  misc_feature 1..22: note = chemically synthesized
  source 1..22: mol_type = other DNA
tgctgggggcctgaggatcact

SEQ ID NO: 35404 - DNA, 22 bp, synthetic construct
  misc_feature 1..22: note = chemically synthesized
  source 1..22: mol_type = other DNA
ctgggggcctgaggatcactcc

SEQ ID NO: 35405 - DNA, 22 bp, synthetic construct
  misc_feature 1..22: note = chemically synthesized
  source 1..22: mol_type = other DNA
ggggcctgaggatcactccact

SEQ ID NO: 35406 - DNA, 22 bp, synthetic construct
  misc_feature 1..22: note = chemically synthesized
  source 1..22: mol_type = other DNA
aggatcactccactccagccta

SEQ ID NO: 35407 - DNA, 22 bp, synthetic construct
  misc_feature 1..22: note = chemically synthesized
  source 1..22: mol_type = other DNA
cactccagcctatgatagccgg

SEQ ID NO: 35408 - DNA, 22 bp, synthetic construct
  misc_feature 1..22: note = chemically synthesized
  source 1..22: mol_type = other DNA
cagcctatgatagccggtgtcc

SEQ ID NO: 35409 - DNA, 22 bp, synthetic construct
  misc_feature 1..22: note = chemically synthesized
  source 1..22: mol_type = other DNA
tgatagccggtgtccacacaca

SEQ ID NO: 35410 - DNA, 22 bp, synthetic construct
  misc_feature 1..22: note = chemically synthesized
  source 1..22: mol_type = other DNA
agtggcctgaggtcaggaacac

SEQ ID NO: 35411 - DNA, 22 bp, synthetic construct
  misc_feature 1..22: note = chemically synthesized
  source 1..22: mol_type = other DNA
aggtcaggaacacccagcctgg

SEQ ID NO: 35412 - DNA, 22 bp, synthetic construct
  misc_feature 1..22: note = chemically synthesized
  source 1..22: mol_type = other DNA
gctttgccttcctcaatgccta

SEQ ID NO: 35413 - DNA, 22 bp, synthetic construct
  misc_feature 1..22: note = chemically synthesized
  source 1..22: mol_type = other DNA
tgccttcctcaatgcctaagca

SEQ ID NO: 35414 - DNA, 22 bp, synthetic construct
  misc_feature 1..22: note = chemically synthesized
  source 1..22: mol_type = other DNA
gccttcctcaatgcctaagcaa

SEQ ID NO: 35415 - DNA, 22 bp, synthetic construct
  misc_feature 1..22: note = chemically synthesized
  source 1..22: mol_type = other DNA
ccttcctcaatgcctaagcaag

SEQ ID NO: 35416 - DNA, 22 bp, synthetic construct
  misc_feature 1..22: note = chemically synthesized
  source 1..22: mol_type = other DNA
cctcaatgcctaagcaagttgt

SEQ ID NO: 35417 - DNA, 22 bp, synthetic construct
  misc_feature 1..22: note = chemically synthesized
  source 1..22: mol_type = other DNA
ctcaatgcctaagcaagttgtc

SEQ ID NO: 35418 - DNA, 22 bp, synthetic construct
  misc_feature 1..22: note = chemically synthesized
  source 1..22: mol_type = other DNA
aatgcctaagcaagttgtctgg

SEQ ID NO: 35419 - DNA, 22 bp, synthetic construct
  misc_feature 1..22: note = chemically synthesized
  source 1..22: mol_type = other DNA
agcaagttgtctgggaacccag

SEQ ID NO: 35420 - DNA, 22 bp, synthetic construct
  misc_feature 1..22: note = chemically synthesized
  source 1..22: mol_type = other DNA
tctgggaacccagagacagcct

SEQ ID NO: 35421 - DNA, 22 bp, synthetic construct
  misc_feature 1..22: note = chemically synthesized
  source 1..22: mol_type = other DNA
ggaacccagagacagccttgtg

SEQ ID NO: 35422 - DNA, 22 bp, synthetic construct
  misc_feature 1..22: note = chemically synthesized
  source 1..22: mol_type = other DNA
gtgccatccaccatgactggta

SEQ ID NO: 35423 - DNA, 22 bp, synthetic construct
  misc_feature 1..22: note = chemically synthesized
  source 1..22: mol_type = other DNA
tgccatccaccatgactggtac

SEQ ID NO: 35424 - DNA, 22 bp, synthetic construct
  misc_feature 1..22: note = chemically synthesized
  source 1..22: mol_type = other DNA
gtacctaagcaaccctcccaga

SEQ ID NO: 35425 - DNA, 22 bp, synthetic construct
  misc_feature 1..22: note = chemically synthesized
  source 1..22: mol_type = other DNA
agcaaccctcccagaagcctga

SEQ ID NO: 35426 - DNA, 22 bp, synthetic construct
  misc_feature 1..22: note = chemically synthesized
  source 1..22: mol_type = other DNA
ccagaagcctgatgatgggcct

SEQ ID NO: 35427 - DNA, 22 bp, synthetic construct
  misc_feature 1..22: note = chemically synthesized
  source 1..22: mol_type = other DNA
atgatgggcctacccaatctgc

SEQ ID NO: 35428 - DNA, 22 bp, synthetic construct
  misc_feature 1..22: note = chemically synthesized
  source 1..22: mol_type = other DNA
cccaatctgccactgccatcac

SEQ ID NO: 35429 - DNA, 22 bp, synthetic construct
  misc_feature 1..22: note = chemically synthesized
  source 1..22: mol_type = other DNA
ccactgccatcacaactggcac

SEQ ID NO: 35430 - DNA, 22 bp, synthetic construct
  misc_feature 1..22: note = chemically synthesized
  source 1..22: mol_type = other DNA
ccatcacaactggcacctcctg

SEQ ID NO: 35431 - DNA, 22 bp, synthetic construct
  misc_feature 1..22: note = chemically synthesized
  source 1..22: mol_type = other DNA
gcacctcctgcatgtgccacct

SEQ ID NO: 35432 - DNA, 22 bp, synthetic construct
  misc_feature 1..22: note = chemically synthesized
  source 1..22: mol_type = other DNA
ctgcatgtgccacctgtgggtc

SEQ ID NO: 35433 - DNA, 22 bp, synthetic construct
  misc_feature 1..22: note = chemically synthesized
  source 1..22: mol_type = other DNA
catgtgccacctgtgggtctga

SEQ ID NO: 35434 - DNA, 22 bp, synthetic construct
  misc_feature 1..22: note = chemically synthesized
  source 1..22: mol_type = other DNA
tgggtctgaagactggctcatt

SEQ ID NO: 35435 - DNA, 22 bp, synthetic construct
  misc_feature 1..22: note = chemically synthesized
  source 1..22: mol_type = other DNA
aagactggctcattcagccctt

SEQ ID NO: 35436 - DNA, 22 bp, synthetic construct
  misc_feature 1..22: note = chemically synthesized
  source 1..22: mol_type = other DNA
gctcattcagcccttgcagcca

SEQ ID NO: 35437 - DNA, 22 bp, synthetic construct
  misc_feature 1..22: note = chemically synthesized
  source 1..22: mol_type = other DNA
attcagcccttgcagccaccac

SEQ ID NO: 35438 - DNA, 22 bp, synthetic construct
  misc_feature 1..22: note = chemically synthesized
  source 1..22: mol_type = other DNA
agcccttgcagccaccaccaac

SEQ ID NO: 35439 - DNA, 22 bp, synthetic construct
  misc_feature 1..22: note = chemically synthesized
  source 1..22: mol_type = other DNA
gcagccaccaccaacaccagtg

SEQ ID NO: 35440 - DNA, 22 bp, synthetic construct
  misc_feature 1..22: note = chemically synthesized
  source 1..22: mol_type = other DNA
cagccaccaccaacaccagtgc

SEQ ID NO: 35441 - DNA, 22 bp, synthetic construct
  misc_feature 1..22: note = chemically synthesized
  source 1..22: mol_type = other DNA
cttgggagccagagggttgtcc

SEQ ID NO: 35442 - DNA, 22 bp, synthetic construct
  misc_feature 1..22: note = chemically synthesized
  source 1..22: mol_type = other DNA
gggagccagagggttgtcctgc

SEQ ID NO: 35443 - DNA, 22 bp, synthetic construct
  misc_feature 1..22: note = chemically synthesized
  source 1..22: mol_type = other DNA
ggagccagagggttgtcctgca

SEQ ID NO: 35444 - DNA, 22 bp, synthetic construct
  misc_feature 1..22: note = chemically synthesized
  source 1..22: mol_type = other DNA
tcctgcagttgctacagccatc

SEQ ID NO: 35445 - DNA, 22 bp, synthetic construct
  misc_feature 1..22: note = chemically synthesized
  source 1..22: mol_type = other DNA
cagttgctacagccatcaccca

SEQ ID NO: 35446 - DNA, 22 bp, synthetic construct
  misc_feature 1..22: note = chemically synthesized
  source 1..22: mol_type = other DNA
ctacagccatcacccacaccac

SEQ ID NO: 35447 - DNA, 22 bp, synthetic construct
  misc_feature 1..22: note = chemically synthesized
  source 1..22: mol_type = other DNA
cagccatcacccacaccacacc

SEQ ID NO: 35448 - DNA, 22 bp, synthetic construct
  misc_feature 1..22: note = chemically synthesized
  source 1..22: mol_type = other DNA
tccagaagcctgaggacccaca

SEQ ID NO: 35449 - DNA, 22 bp, synthetic construct
  misc_feature 1..22: note = chemically synthesized
  source 1..22: mol_type = other DNA
aggacccacacaccagcccagt

SEQ ID NO: 35450 - DNA, 22 bp, synthetic construct
  misc_feature 1..22: note = chemically synthesized
  source 1..22: mol_type = other DNA
ctatggccactactgacaccca

SEQ ID NO: 35451 - DNA, 22 bp, synthetic construct
  misc_feature 1..22: note = chemically synthesized
  source 1..22: mol_type = other DNA
tggccactactgacacccaagc

SEQ ID NO: 35452 - DNA, 22 bp, synthetic construct
  misc_feature 1..22: note = chemically synthesized
  source 1..22: mol_type = other DNA
ctgacacccaagcaaactgcct

SEQ ID NO: 35453 - DNA, 22 bp, synthetic construct
  misc_feature 1..22: note = chemically synthesized
  source 1..22: mol_type = other DNA
acacccaagcaaactgcctgaa

SEQ ID NO: 35454 - DNA, 22 bp, synthetic construct
  misc_feature 1..22: note = chemically synthesized
  source 1..22: mol_type = other DNA
cctgaaggccaaagaatcaacc

SEQ ID NO: 35455 - DNA, 22 bp, synthetic construct
  misc_feature 1..22: note = chemically synthesized
  source 1..22: mol_type = other DNA
aaggccaaagaatcaacccaac

SEQ ID NO: 35456 - DNA, 22 bp, synthetic construct
  misc_feature 1..22: note = chemically synthesized
  source 1..22: mol_type = other DNA
gactcattaccatcagtgccaa

SEQ ID NO: 35457 - DNA, 22 bp, synthetic construct
  misc_feature 1..22: note = chemically synthesized
  source 1..22: mol_type = other DNA
attaccatcagtgccaatgtac

SEQ ID NO: 35458 - DNA, 22 bp, synthetic construct
  misc_feature 1..22: note = chemically synthesized
  source 1..22: mol_type = other DNA
ccatcagtgccaatgtacacag

SEQ ID NO: 35459 - DNA, 22 bp, synthetic construct
  misc_feature 1..22: note = chemically synthesized
  source 1..22: mol_type = other DNA
ggcccaccaccaccactggggc

SEQ ID NO: 35460 - DNA, 22 bp, synthetic construct
  misc_feature 1..22: note = chemically synthesized
  source 1..22: mol_type = other DNA
gggccaaggactggcccacttg

SEQ ID NO: 35461 - DNA, 22 bp, synthetic construct
  misc_feature 1..22: note = chemically synthesized
  source 1..22: mol_type = other DNA
gcccacttgatattcttgtctc

SEQ ID NO: 35462 - DNA, 22 bp, synthetic construct
  misc_feature 1..22: note = chemically synthesized
  source 1..22: mol_type = other DNA
gatattcttgtctccagcacaa

SEQ ID NO: 35463 - DNA, 22 bp, synthetic construct
  misc_feature 1..22: note = chemically synthesized
  source 1..22: mol_type = other DNA
atattcttgtctccagcacaac

SEQ ID NO: 35464 - DNA, 22 bp, synthetic construct
  misc_feature 1..22: note = chemically synthesized
  source 1..22: mol_type = other DNA
ttgtctccagcacaacctcatc

SEQ ID NO: 35465 - DNA, 22 bp, synthetic construct
  misc_feature 1..22: note = chemically synthesized
  source 1..22: mol_type = other DNA
gtctccagcacaacctcatcac

SEQ ID NO: 35466 - DNA, 22 bp, synthetic construct
  misc_feature 1..22: note = chemically synthesized
  source 1..22: mol_type = other DNA
tctccagcacaacctcatcacc

SEQ ID NO: 35467 - DNA, 22 bp, synthetic construct
  misc_feature 1..22: note = chemically synthesized
  source 1..22: mol_type = other DNA
cagcacaacctcatcaccacct

SEQ ID NO: 35468 - DNA, 22 bp, synthetic construct
  misc_feature 1..22: note = chemically synthesized
  source 1..22: mol_type = other DNA
atcaccaccttcactaacaaat

SEQ ID NO: 35469 - DNA, 22 bp, synthetic construct
  misc_feature 1..22: note = chemically synthesized
  source 1..22: mol_type = other DNA
cactaacaaatgcaccctaagc

SEQ ID NO: 35470 - DNA, 22 bp, synthetic construct
  misc_feature 1..22: note = chemically synthesized
  source 1..22: mol_type = other DNA
actaacaaatgcaccctaagcc

SEQ ID NO: 35471 - DNA, 22 bp, synthetic construct
  misc_feature 1..22: note = chemically synthesized
  source 1..22: mol_type = other DNA
acaaatgcaccctaagccactg

SEQ ID NO: 35472 - DNA, 22 bp, synthetic construct
  misc_feature 1..22: note = chemically synthesized
  source 1..22: mol_type = other DNA
agccactgaaaaaatcacagac

SEQ ID NO: 35473 - DNA, 22 bp, synthetic construct
  misc_feature 1..22: note = chemically synthesized
  source 1..22: mol_type = other DNA
aaaaaatcacagacactgatga

SEQ ID NO: 35474 - DNA, 22 bp, synthetic construct
  misc_feature 1..22: note = chemically synthesized
  source 1..22: mol_type = other DNA
atgatactgttggcagctgaaa

SEQ ID NO: 35475 - DNA, 22 bp, synthetic construct
  misc_feature 1..22: note = chemically synthesized
  source 1..22: mol_type = other DNA
ttggcagctgaaaaaaaataat

SEQ ID NO: 35476 - DNA, 22 bp, synthetic construct
  misc_feature 1..22: note = chemically synthesized
  source 1..22: mol_type = other DNA
gcagctgaaaaaaaataatatg

SEQ ID NO: 35477 - DNA, 22 bp, synthetic construct
  misc_feature 1..22: note = chemically synthesized
  source 1..22: mol_type = other DNA
aaaaaaaataatatgaagacta

SEQ ID NO: 35478 - DNA, 22 bp, synthetic construct
  misc_feature 1..22: note = chemically synthesized
  source 1..22: mol_type = other DNA
tgctgctgtatgcacctagaaa

SEQ ID NO: 35479 - DNA, 22 bp, synthetic construct
  misc_feature 1..22: note = chemically synthesized
  source 1..22: mol_type = other DNA
ctgtatgcacctagaaatcaaa

SEQ ID NO: 35480 - DNA, 22 bp, synthetic construct
  misc_feature 1..22: note = chemically synthesized
  source 1..22: mol_type = other DNA
tatgcacctagaaatcaaaatc

SEQ ID NO: 35481 - DNA, 22 bp, synthetic construct
  misc_feature 1..22: note = chemically synthesized
  source 1..22: mol_type = other DNA
gaaatcaaaatcaaagtgccct

SEQ ID NO: 35482 - DNA, 22 bp, synthetic construct
  misc_feature 1..22: note = chemically synthesized
  source 1..22: mol_type = other DNA
ctcaatcaacaccaagatacat

SEQ ID NO: 35483 - DNA, 22 bp, synthetic construct
  misc_feature 1..22: note = chemically synthesized
  source 1..22: mol_type = other DNA
aatcaacaccaagatacatctt

SEQ ID NO: 35484 - DNA, 22 bp, synthetic construct
  misc_feature 1..22: note = chemically synthesized
  source 1..22: mol_type = other DNA
cagaaaaaagtcttcccctaca

SEQ ID NO: 35485 - DNA, 22 bp, synthetic construct
  misc_feature 1..22: note = chemically synthesized
  source 1..22: mol_type = other DNA
agaaaaaagtcttcccctacaa

SEQ ID NO: 35486 - DNA, 22 bp, synthetic construct
  misc_feature 1..22: note = chemically synthesized
  source 1..22: mol_type = other DNA
cccctacaaaaacaaatttaca

SEQ ID NO: 35487 - DNA, 22 bp, synthetic construct
  misc_feature 1..22: note = chemically synthesized
  source 1..22: mol_type = other DNA
ccctacaaaaacaaatttacaa

SEQ ID NO: 35488 - DNA, 22 bp, synthetic construct
  misc_feature 1..22: note = chemically synthesized
  source 1..22: mol_type = other DNA
caaaaacaaatttacaaaactg

SEQ ID NO: 35489 - DNA, 22 bp, synthetic construct
  misc_feature 1..22: note = chemically synthesized
  source 1..22: mol_type = other DNA
acaaaactggaagcagcaatca

SEQ ID NO: 35490 - DNA, 22 bp, synthetic construct
  misc_feature 1..22: note = chemically synthesized
  source 1..22: mol_type = other DNA
caaaactggaagcagcaatcat

SEQ ID NO: 35491 - DNA, 22 bp, synthetic construct
  misc_feature 1..22: note = chemically synthesized
  source 1..22: mol_type = other DNA
gaagcagcaatcattacaccag

SEQ ID NO: 35492 - DNA, 22 bp, synthetic construct
  misc_feature 1..22: note = chemically synthesized
  source 1..22: mol_type = other DNA
caccagatgcagagatatcaat

SEQ ID NO: 35493 - DNA, 22 bp, synthetic construct
  misc_feature 1..22: note = chemically synthesized
  source 1..22: mol_type = other DNA
ccaaaggaatttaataattctt

SEQ ID NO: 35494 - DNA, 22 bp, synthetic construct
  misc_feature 1..22: note = chemically synthesized
  source 1..22: mol_type = other DNA
caaaggaatttaataattcttc

SEQ ID NO: 35495 - DNA, 22 bp, synthetic construct
  misc_feature 1..22: note = chemically synthesized
  source 1..22: mol_type = other DNA
aataattcttcagcaacataag

SEQ ID NO: 35496 - DNA, 22 bp, synthetic construct
  misc_feature 1..22: note = chemically synthesized
  source 1..22: mol_type = other DNA
ataattcttcagcaacataagc

SEQ ID NO: 35497 - DNA, 22 bp, synthetic construct
  misc_feature 1..22: note = chemically synthesized
  source 1..22: mol_type = other DNA
ttcagcaacataagccagtgga

SEQ ID NO: 35498 - DNA, 22 bp, synthetic construct
  misc_feature 1..22: note = chemically synthesized
  source 1..22: mol_type = other DNA
cagcaacataagccagtggaaa

SEQ ID NO: 35499 - DNA, 22 bp, synthetic construct
  misc_feature 1..22: note = chemically synthesized
  source 1..22: mol_type = other DNA
agcaacataagccagtggaaaa

SEQ ID NO: 35500 - DNA, 22 bp, synthetic construct
  misc_feature 1..22: note = chemically synthesized
  source 1..22: mol_type = other DNA
ataaaattctggaaaaaagaat

SEQ ID NO: 35501 - DNA, 22 bp, synthetic construct
  misc_feature 1..22: note = chemically synthesized
  source 1..22: mol_type = other DNA
taaaattctggaaaaaagaatc

SEQ ID NO: 35502 - DNA, 22 bp, synthetic construct
  misc_feature 1..22: note = chemically synthesized
  source 1..22: mol_type = other DNA
tggaaaaaagaatccaaaatgt

SEQ ID NO: 35503 - DNA, 22 bp, synthetic construct
  misc_feature 1..22: note = chemically synthesized
  source 1..22: mol_type = other DNA
gaaaaaagaatccaaaatgttg

SEQ ID NO: 35504 - DNA, 22 bp, synthetic construct
  misc_feature 1..22: note = chemically synthesized
  source 1..22: mol_type = other DNA
atattaaggaagctcagtgaga

SEQ ID NO: 35505 - DNA, 22 bp, synthetic construct
  misc_feature 1..22: note = chemically synthesized
  source 1..22: mol_type = other DNA
aggaagctcagtgagacacaag

SEQ ID NO: 35506 - DNA, 22 bp, synthetic construct
  misc_feature 1..22: note = chemically synthesized
  source 1..22: mol_type = other DNA
agtgagacacaagagaactcag

SEQ ID NO: 35507 - DNA, 22 bp, synthetic construct
  misc_feature 1..22: note = chemically synthesized
  source 1..22: mol_type = other DNA
agataaacaataaaaagaaatc

SEQ ID NO: 35508 - DNA, 22 bp, synthetic construct
  misc_feature 1..22: note = chemically synthesized
  source 1..22: mol_type = other DNA
aggatatgaatgagaaatttac

SEQ ID NO: 35509 - DNA, 22 bp, synthetic construct
  misc_feature 1..22: note = chemically synthesized
  source 1..22: mol_type = other DNA
acccaagagatagatacaacaa

SEQ ID NO: 35510 - DNA, 22 bp, synthetic construct
  misc_feature 1..22: note = chemically synthesized
  source 1..22: mol_type = other DNA
cccaagagatagatacaacaag

SEQ ID NO: 35511 - DNA, 22 bp, synthetic construct
  misc_feature 1..22: note = chemically synthesized
  source 1..22: mol_type = other DNA
tgtaactgaagagtttattgaa

SEQ ID NO: 35512 - DNA, 22 bp, synthetic construct
  misc_feature 1..22: note = chemically synthesized
  source 1..22: mol_type = other DNA
taactgaagagtttattgaaag

SEQ ID NO: 35513 - DNA, 22 bp, synthetic construct
  misc_feature 1..22: note = chemically synthesized
  source 1..22: mol_type = other DNA
aagagtttattgaaagaaatac

SEQ ID NO: 35514 - DNA, 22 bp, synthetic construct
  misc_feature 1..22: note = chemically synthesized
  source 1..22: mol_type = other DNA
attgaaagaaatacaaaataca

SEQ ID NO: 35515 - DNA, 22 bp, synthetic construct
  misc_feature 1..22: note = chemically synthesized
  source 1..22: mol_type = other DNA
ttgaaagaaatacaaaatacat

SEQ ID NO: 35516 - DNA, 22 bp, synthetic construct
  misc_feature 1..22: note = chemically synthesized
  source 1..22: mol_type = other DNA
aaagaaatacaaaatacattca

SEQ ID NO: 35517 - DNA, 22 bp, synthetic construct
  misc_feature 1..22: note = chemically synthesized
  source 1..22: mol_type = other DNA
aaaaacttcaacaatagatcag

SEQ ID NO: 35518 - DNA, 22 bp, synthetic construct
  misc_feature 1..22: note = chemically synthesized
  source 1..22: mol_type = other DNA
caacaatagatcagatcaagca

SEQ ID NO: 35519 - DNA, 22 bp, synthetic construct
  misc_feature 1..22: note = chemically synthesized
  source 1..22: mol_type = other DNA
aacaatagatcagatcaagcag

SEQ ID NO: 35520 - DNA, 22 bp, synthetic construct
  misc_feature 1..22: note = chemically synthesized
  source 1..22: mol_type = other DNA
cagaacttgaagacaggtcttt

SEQ ID NO: 35521 - DNA, 22 bp, synthetic construct
  misc_feature 1..22: note = chemically synthesized
  source 1..22: mol_type = other DNA
agaacttgaagacaggtctttt

SEQ ID NO: 35522 - DNA, 22 bp, synthetic construct
  misc_feature 1..22: note = chemically synthesized
  source 1..22: mol_type = other DNA
gaagacaggtcttttaaaatta

SEQ ID NO: 35523 - DNA, 22 bp, synthetic construct
  misc_feature 1..22: note = chemically synthesized
  source 1..22: mol_type = other DNA
aagacaggtcttttaaaattag

SEQ ID NO: 35524 - DNA, 22 bp, synthetic construct
  misc_feature 1..22: note = chemically synthesized
  source 1..22: mol_type = other DNA
ttaaaattagctggtcaaatga

SEQ ID NO: 35525 - DNA, 22 bp, synthetic construct
  misc_feature 1..22: note = chemically synthesized
  source 1..22: mol_type = other DNA
taaaattagctggtcaaatgat

SEQ ID NO: 35526 - DNA, 22 bp, synthetic construct
  misc_feature 1..22: note = chemically synthesized
  source 1..22: mol_type = other DNA
aaaattagctggtcaaatgata

SEQ ID NO: 35527 - DNA, 22 bp, synthetic construct
  misc_feature 1..22: note = chemically synthesized
  source 1..22: mol_type = other DNA
aaattagctggtcaaatgatag

SEQ ID NO: 35528 - DNA, 22 bp, synthetic construct
  misc_feature 1..22: note = chemically synthesized
  source 1..22: mol_type = other DNA
gctggtcaaatgatagaaagga

SEQ ID NO: 35529 - DNA, 22 bp, synthetic construct
  misc_feature 1..22: note = chemically synthesized
  source 1..22: mol_type = other DNA
gtcaaatgatagaaaggaaaaa

SEQ ID NO: 35530 - DNA, 22 bp, synthetic construct
  misc_feature 1..22: note = chemically synthesized
  source 1..22: mol_type = other DNA
taaagtgaacaaatattcaaat

SEQ ID NO: 35531 - DNA, 22 bp, synthetic construct
  misc_feature 1..22: note = chemically synthesized
  source 1..22: mol_type = other DNA
aaatttgcagtttcccagaagg

SEQ ID NO: 35532 - DNA, 22 bp, synthetic construct
  misc_feature 1..22: note = chemically synthesized
  source 1..22: mol_type = other DNA
gcagtttcccagaaggtaaaga

SEQ ID NO: 35533 - DNA, 22 bp, synthetic construct
  misc_feature 1..22: note = chemically synthesized
  source 1..22: mol_type = other DNA
cagtttcccagaaggtaaagag

SEQ ID NO: 35534 - DNA, 22 bp, synthetic construct
  misc_feature 1..22: note = chemically synthesized
  source 1..22: mol_type = other DNA
cccagaaggtaaagagaacatg

SEQ ID NO: 35535 - DNA, 22 bp, synthetic construct
  misc_feature 1..22: note = chemically synthesized
  source 1..22: mol_type = other DNA
ccagaaggtaaagagaacatga

SEQ ID NO: 35536 - DNA, 22 bp, synthetic construct
  misc_feature 1..22: note = chemically synthesized
  source 1..22: mol_type = other DNA
cgtaacaacacaatagctgaaa

SEQ ID NO: 35537 - DNA, 22 bp, synthetic construct
  misc_feature 1..22: note = chemically synthesized
  source 1..22: mol_type = other DNA
aaaacttgtcaagtctagcaag

SEQ ID NO: 35538 - DNA, 22 bp, synthetic construct
  misc_feature 1..22: note = chemically synthesized
  source 1..22: mol_type = other DNA
gtcaagtctagcaagaaatgta

SEQ ID NO: 35539 - DNA, 22 bp, synthetic construct
  misc_feature 1..22: note = chemically synthesized
  source 1..22: mol_type = other DNA
tcaagtctagcaagaaatgtag

SEQ ID NO: 35540 - DNA, 22 bp, synthetic construct
  misc_feature 1..22: note = chemically synthesized
  source 1..22: mol_type = other DNA
gcaagaaatgtagacatccaga

SEQ ID NO: 35541 - DNA, 22 bp, synthetic construct
  misc_feature 1..22: note = chemically synthesized
  source 1..22: mol_type = other DNA
ccaaataatataatgcaaaaag

SEQ ID NO: 35542 - DNA, 22 bp, synthetic construct
  misc_feature 1..22: note = chemically synthesized
  source 1..22: mol_type = other DNA
ttctccacagcacattatagtc

SEQ ID NO: 35543 - DNA, 22 bp, synthetic construct
  misc_feature 1..22: note = chemically synthesized
  source 1..22: mol_type = other DNA
ctccacagcacattatagtcaa

SEQ ID NO: 35544 - DNA, 22 bp, synthetic construct
  misc_feature 1..22: note = chemically synthesized
  source 1..22: mol_type = other DNA
tccacagcacattatagtcaaa

SEQ ID NO: 35545 - DNA, 22 bp, synthetic construct
  misc_feature 1..22: note = chemically synthesized
  source 1..22: mol_type = other DNA
cacagcacattatagtcaaact

SEQ ID NO: 35546 - DNA, 22 bp, synthetic construct
  misc_feature 1..22: note = chemically synthesized
  source 1..22: mol_type = other DNA
tagtcaaactgtcaaaagccaa

SEQ ID NO: 35547 - DNA, 22 bp, synthetic construct
  misc_feature 1..22: note = chemically synthesized
  source 1..22: mol_type = other DNA
tcaaaagccaaagagtaagaac

SEQ ID NO: 35548 - DNA, 22 bp, synthetic construct
  misc_feature 1..22: note = chemically synthesized
  source 1..22: mol_type = other DNA
taaaacagcaagcaaaatgtct

SEQ ID NO: 35549 - DNA, 22 bp, synthetic construct
  misc_feature 1..22: note = chemically synthesized
  source 1..22: mol_type = other DNA
aaacagcaagcaaaatgtctag

SEQ ID NO: 35550 - DNA, 22 bp, synthetic construct
  misc_feature 1..22: note = chemically synthesized
  source 1..22: mol_type = other DNA
gtcacttataagggaacttcca

SEQ ID NO: 35551 - DNA, 22 bp, synthetic construct
  misc_feature 1..22: note = chemically synthesized
  source 1..22: mol_type = other DNA
ataagggaacttccacaagatt

SEQ ID NO: 35552 - DNA, 22 bp, synthetic construct
  misc_feature 1..22: note = chemically synthesized
  source 1..22: mol_type = other DNA
taagggaacttccacaagatta

SEQ ID NO: 35553 - DNA, 22 bp, synthetic construct
  misc_feature 1..22: note = chemically synthesized
  source 1..22: mol_type = other DNA
ccacaagattaacagattaaca

SEQ ID NO: 35554 - DNA, 22 bp, synthetic construct
  misc_feature 1..22: note = chemically synthesized
  source 1..22: mol_type = other DNA
cacaagattaacagattaacag

SEQ ID NO: 35555 - DNA, 22 bp, synthetic construct
  misc_feature 1..22: note = chemically synthesized
  source 1..22: mol_type = other DNA
acagattaacagcagatttctc

SEQ ID NO: 35556 - DNA, 22 bp, synthetic construct
  misc_feature 1..22: note = chemically synthesized
  source 1..22: mol_type = other DNA
acagcagatttctcagcagaaa

SEQ ID NO: 35557 - DNA, 22 bp, synthetic construct
  misc_feature 1..22: note = chemically synthesized
  source 1..22: mol_type = other DNA
ctcagcagaaacctcacaggcc

SEQ ID NO: 35558 - DNA, 22 bp, synthetic construct
  misc_feature 1..22: note = chemically synthesized
  source 1..22: mol_type = other DNA
tcagcagaaacctcacaggcca

SEQ ID NO: 35559 - DNA, 22 bp, synthetic construct
  misc_feature 1..22: note = chemically synthesized
  source 1..22: mol_type = other DNA
agcagaaacctcacaggccagg

SEQ ID NO: 35560 - DNA, 22 bp, synthetic construct
  misc_feature 1..22: note = chemically synthesized
  source 1..22: mol_type = other DNA
acaggccaggagaagatgggat

SEQ ID NO: 35561 - DNA, 22 bp, synthetic construct
  misc_feature 1..22: note = chemically synthesized
  source 1..22: mol_type = other DNA
aaaatagtgaaagaaaaaaatg

SEQ ID NO: 35562 - DNA, 22 bp, synthetic construct
  misc_feature 1..22: note = chemically synthesized
  source 1..22: mol_type = other DNA
tacccagcaacattgttcttca

SEQ ID NO: 35563 - DNA, 22 bp, synthetic construct
  misc_feature 1..22: note = chemically synthesized
  source 1..22: mol_type = other DNA
ttcttcaaaaatgaaggataaa

SEQ ID NO: 35564 - DNA, 22 bp, synthetic construct
  misc_feature 1..22: note = chemically synthesized
  source 1..22: mol_type = other DNA
ttcaaaaatgaaggataaataa

SEQ ID NO: 35565 - DNA, 22 bp, synthetic construct
  misc_feature 1..22: note = chemically synthesized
  source 1..22: mol_type = other DNA
caaaaatgaaggataaataaaa

SEQ ID NO: 35566 - DNA, 22 bp, synthetic construct
  misc_feature 1..22: note = chemically synthesized
  source 1..22: mol_type = other DNA
aaaaatgaaggataaataaaat

SEQ ID NO: 35567 - DNA, 22 bp, synthetic construct
  misc_feature 1..22: note = chemically synthesized
  source 1..22: mol_type = other DNA
ttctgggcaagaaaaatttgaa

SEQ ID NO: 35568 - DNA, 22 bp, synthetic construct
  misc_feature 1..22: note = chemically synthesized
  source 1..22: mol_type = other DNA
tctgggcaagaaaaatttgaag

SEQ ID NO: 35569 - DNA, 22 bp, synthetic construct
  misc_feature 1..22: note = chemically synthesized
  source 1..22: mol_type = other DNA
ctgggcaagaaaaatttgaagg

SEQ ID NO: 35570 - DNA, 22 bp, synthetic construct
  misc_feature 1..22: note = chemically synthesized
  source 1..22: mol_type = other DNA
tgggcaagaaaaatttgaagga

SEQ ID NO: 35571 - DNA, 22 bp, synthetic construct
  misc_feature 1..22: note = chemically synthesized
  source 1..22: mol_type = other DNA
ggcaagaaaaatttgaaggaat

SEQ ID NO: 35572 - DNA, 22 bp, synthetic construct
  misc_feature 1..22: note = chemically synthesized
  source 1..22: mol_type = other DNA
gaaggaattcactatcactaga

SEQ ID NO: 35573 - DNA, 22 bp, synthetic construct
  misc_feature 1..22: note = chemically synthesized
  source 1..22: mol_type = other DNA
aaggaattcactatcactagac

SEQ ID NO: 35574 - DNA, 22 bp, synthetic construct
  misc_feature 1..22: note = chemically synthesized
  source 1..22: mol_type = other DNA
actatcactagactggctttac

SEQ ID NO: 35575 - DNA, 22 bp, synthetic construct
  misc_feature 1..22: note = chemically synthesized
  source 1..22: mol_type = other DNA
tcactagactggctttacaaga

SEQ ID NO: 35576 - DNA, 22 bp, synthetic construct
  misc_feature 1..22: note = chemically synthesized
  source 1..22: mol_type = other DNA
gactggctttacaagaaatatt

SEQ ID NO: 35577 - DNA, 22 bp, synthetic construct
  misc_feature 1..22: note = chemically synthesized
  source 1..22: mol_type = other DNA
gctttacaagaaatatttaagg

SEQ ID NO: 35578 - DNA, 22 bp, synthetic construct
  misc_feature 1..22: note = chemically synthesized
  source 1..22: mol_type = other DNA
tacaagaaatatttaagggagt

SEQ ID NO: 35579 - DNA, 22 bp, synthetic construct
  misc_feature 1..22: note = chemically synthesized
  source 1..22: mol_type = other DNA
acaagaaatatttaagggagtc

SEQ ID NO: 35580 - DNA, 22 bp, synthetic construct
  misc_feature 1..22: note = chemically synthesized
  source 1..22: mol_type = other DNA
caagaaatatttaagggagtcc

SEQ ID NO: 35581 - DNA, 22 bp, synthetic construct
  misc_feature 1..22: note = chemically synthesized
  source 1..22: mol_type = other DNA
aagggagtcctacacatgaaag

SEQ ID NO: 35582 - DNA, 22 bp, synthetic construct
  misc_feature 1..22: note = chemically synthesized
  source 1..22: mol_type = other DNA
agggagtcctacacatgaaagt

SEQ ID NO: 35583 - DNA, 22 bp, synthetic construct
  misc_feature 1..22: note = chemically synthesized
  source 1..22: mol_type = other DNA
cacatgaaagtgacaggacact

SEQ ID NO: 35584 - DNA, 22 bp, synthetic construct
  misc_feature 1..22: note = chemically synthesized
  source 1..22: mol_type = other DNA
ccattatgaagacacacaaagg

SEQ ID NO: 35585 - DNA, 22 bp, synthetic construct
  misc_feature 1..22: note = chemically synthesized
  source 1..22: mol_type = other DNA
tgaagacacacaaaggtataca

SEQ ID NO: 35586 - DNA, 22 bp, synthetic construct
  misc_feature 1..22: note = chemically synthesized
  source 1..22: mol_type = other DNA
actggtagagcaaaacacaaat

SEQ ID NO: 35587 - DNA, 22 bp, synthetic construct
  misc_feature 1..22: note = chemically synthesized
  source 1..22: mol_type = other DNA
gtagagcaaaacacaaataaag

SEQ ID NO: 35588 - DNA, 22 bp, synthetic construct
  misc_feature 1..22: note = chemically synthesized
  source 1..22: mol_type = other DNA
aaacgttaccactacagaaaat

SEQ ID NO: 35589 - DNA, 22 bp, synthetic construct
  misc_feature 1..22: note = chemically synthesized
  source 1..22: mol_type = other DNA
ccactacagaaaatcaccaaac

SEQ ID NO: 35590 - DNA, 22 bp, synthetic construct
  misc_feature 1..22: note = chemically synthesized
  source 1..22: mol_type = other DNA
cagaaaatcaccaaaccacaat

SEQ ID NO: 35591 - DNA, 22 bp, synthetic construct
  misc_feature 1..22: note = chemically synthesized
  source 1..22: mol_type = other DNA
aaaaaaaaacaaaacaaccagg

SEQ ID NO: 35592 - DNA, 22 bp, synthetic construct
  misc_feature 1..22: note = chemically synthesized
  source 1..22: mol_type = other DNA
acaaaatggcaggaataagctc

SEQ ID NO: 35593 - DNA, 22 bp, synthetic construct
  misc_feature 1..22: note = chemically synthesized
  source 1..22: mol_type = other DNA
tcacatgtcaataatagccttg

SEQ ID NO: 35594 - DNA, 22 bp, synthetic construct
  misc_feature 1..22: note = chemically synthesized
  source 1..22: mol_type = other DNA
acatgtcaataatagccttgca

SEQ ID NO: 35595 - DNA, 22 bp, synthetic construct
  misc_feature 1..22: note = chemically synthesized
  source 1..22: mol_type = other DNA
gcatgtaaatggattaaattgt

SEQ ID NO: 35596 - DNA, 22 bp, synthetic construct
  misc_feature 1..22: note = chemically synthesized
  source 1..22: mol_type = other DNA
catgtaaatggattaaattgtt

SEQ ID NO: 35597 - DNA, 22 bp, synthetic construct
  misc_feature 1..22: note = chemically synthesized
  source 1..22: mol_type = other DNA
aattgttacttgaaagatatag

SEQ ID NO: 35598 - DNA, 22 bp, synthetic construct
  misc_feature 1..22: note = chemically synthesized
  source 1..22: mol_type = other DNA
ttacttgaaagatatagactgg

SEQ ID NO: 35599 - DNA, 22 bp, synthetic construct
  misc_feature 1..22: note = chemically synthesized
  source 1..22: mol_type = other DNA
cttgaaagatatagactggcta

SEQ ID NO: 35600 - DNA, 22 bp, synthetic construct
  misc_feature 1..22: note = chemically synthesized
  source 1..22: mol_type = other DNA
gaaagatatagactggctaaat

SEQ ID NO: 35601 - DNA, 22 bp, synthetic construct
  misc_feature 1..22: note = chemically synthesized
  source 1..22: mol_type = other DNA
aaagatatagactggctaaata

SEQ ID NO: 35602 - DNA, 22 bp, synthetic construct
  misc_feature 1..22: note = chemically synthesized
  source 1..22: mol_type = other DNA
gctaaatagatttaaaacaaaa

SEQ ID NO: 35603 - DNA, 22 bp, synthetic construct
  misc_feature 1..22: note = chemically synthesized
  source 1..22: mol_type = other DNA
aatagatttaaaacaaaaatat

SEQ ID NO: 35604 - DNA, 22 bp, synthetic construct
  misc_feature 1..22: note = chemically synthesized
  source 1..22: mol_type = other DNA
aaaacaaaaatatgacccagtt

SEQ ID NO: 35605 - DNA, 22 bp, synthetic construct
  misc_feature 1..22: note = chemically synthesized
  source 1..22: mol_type = other DNA
aaacaaaaatatgacccagttg

SEQ ID NO: 35606 - DNA, 22 bp, synthetic construct
  misc_feature 1..22: note = chemically synthesized
  source 1..22: mol_type = other DNA
taagctgcctataagaaactta

SEQ ID NO: 35607 - DNA, 22 bp, synthetic construct
  misc_feature 1..22: note = chemically synthesized
  source 1..22: mol_type = other DNA
cctataagaaacttatctcact

SEQ ID NO: 35608 - DNA, 22 bp, synthetic construct
  misc_feature 1..22: note = chemically synthesized
  source 1..22: mol_type = other DNA
taagaaacttatctcacttgta

SEQ ID NO: 35609 - DNA, 22 bp, synthetic construct
  misc_feature 1..22: note = chemically synthesized
  source 1..22: mol_type = other DNA
atctcacttgtaaagataaata

SEQ ID NO: 35610 - DNA, 22 bp, synthetic construct
  misc_feature 1..22: note = chemically synthesized
  source 1..22: mol_type = other DNA
tctcacttgtaaagataaatat

SEQ ID NO: 35611 - DNA, 22 bp, synthetic construct
  misc_feature 1..22: note = chemically synthesized
  source 1..22: mol_type = other DNA
acttgtaaagataaatatagac

SEQ ID NO: 35612 - DNA, 22 bp, synthetic construct
  misc_feature 1..22: note = chemically synthesized
  source 1..22: mol_type = other DNA
gtaaagataaatatagactgaa

SEQ ID NO: 35613 - DNA, 22 bp, synthetic construct
  misc_feature 1..22: note = chemically synthesized
  source 1..22: mol_type = other DNA
taaagataaatatagactgaaa

SEQ ID NO: 35614 - DNA, 22 bp, synthetic construct
  misc_feature 1..22: note = chemically synthesized
  source 1..22: mol_type = other DNA
aaagtaaaaagatgaaagatct

SEQ ID NO: 35615 - DNA, 22 bp, synthetic construct
  misc_feature 1..22: note = chemically synthesized
  source 1..22: mol_type = other DNA
ccatacaaagagaaaccaaaaa

SEQ ID NO: 35616 - DNA, 22 bp, synthetic construct
  misc_feature 1..22: note = chemically synthesized
  source 1..22: mol_type = other DNA
catacaaagagaaaccaaaaat

SEQ ID NO: 35617 - DNA, 22 bp, synthetic construct
  misc_feature 1..22: note = chemically synthesized
  source 1..22: mol_type = other DNA
tacctataacagataaaattga

SEQ ID NO: 35618 - DNA, 22 bp, synthetic construct
  misc_feature 1..22: note = chemically synthesized
  source 1..22: mol_type = other DNA
taacagataaaattgactttaa

SEQ ID NO: 35619 - DNA, 22 bp, synthetic construct
  misc_feature 1..22: note = chemically synthesized
  source 1..22: mol_type = other DNA
actttaaataaaaaacactaag

SEQ ID NO: 35620 - DNA, 22 bp, synthetic construct
  misc_feature 1..22: note = chemically synthesized
  source 1..22: mol_type = other DNA
taaataaaaaacactaagagac

SEQ ID NO: 35621 - DNA, 22 bp, synthetic construct
  misc_feature 1..22: note = chemically synthesized
  source 1..22: mol_type = other DNA
aaataaaaaacactaagagaca

SEQ ID NO: 35622 - DNA, 22 bp, synthetic construct
  misc_feature 1..22: note = chemically synthesized
  source 1..22: mol_type = other DNA
aataaaaaacactaagagacaa

SEQ ID NO: 35623 - DNA, 22 bp, synthetic construct
  misc_feature 1..22: note = chemically synthesized
  source 1..22: mol_type = other DNA
agagacaaaagtcattacataa

SEQ ID NO: 35624 - DNA, 22 bp, synthetic construct
  misc_feature 1..22: note = chemically synthesized
  source 1..22: mol_type = other DNA
cataatgataaaaggaacaatt

SEQ ID NO: 35625 - DNA, 22 bp, synthetic construct
  misc_feature 1..22: note = chemically synthesized
  source 1..22: mol_type = other DNA
agcaagagtatataacaattct

SEQ ID NO: 35626 - DNA, 22 bp, synthetic construct
  misc_feature 1..22: note = chemically synthesized
  source 1..22: mol_type = other DNA
taaacattcacactcaacacca

SEQ ID NO: 35627 - DNA, 22 bp, synthetic construct
  misc_feature 1..22: note = chemically synthesized
  source 1..22: mol_type = other DNA
aacattcacactcaacaccaga

SEQ ID NO: 35628 - DNA, 22 bp, synthetic construct
  misc_feature 1..22: note = chemically synthesized
  source 1..22: mol_type = other DNA
acactcaacaccagagcatcca

SEQ ID NO: 35629 - DNA, 22 bp, synthetic construct
  misc_feature 1..22: note = chemically synthesized
  source 1..22: mol_type = other DNA
aacaccagagcatccagatatg

SEQ ID NO: 35630 - DNA, 22 bp, synthetic construct
  misc_feature 1..22: note = chemically synthesized
  source 1..22: mol_type = other DNA
ttagatataaagggtgaaatag

SEQ ID NO: 35631 - DNA, 22 bp, synthetic construct
  misc_feature 1..22: note = chemically synthesized
  source 1..22: mol_type = other DNA
gatataaagggtgaaatagaat

SEQ ID NO: 35632 - DNA, 22 bp, synthetic construct
  misc_feature 1..22: note = chemically synthesized
  source 1..22: mol_type = other DNA
gggatttcaacattctaatctc

SEQ ID NO: 35633 - DNA, 22 bp, synthetic construct
  misc_feature 1..22: note = chemically synthesized
  source 1..22: mol_type = other DNA
caacattctaatctcagcatca

SEQ ID NO: 35634 - DNA, 22 bp, synthetic construct
  misc_feature 1..22: note = chemically synthesized
  source 1..22: mol_type = other DNA
aacattctaatctcagcatcag

SEQ ID NO: 35635 - DNA, 22 bp, synthetic construct
  misc_feature 1..22: note = chemically synthesized
  source 1..22: mol_type = other DNA
taatctcagcatcagatagatc

SEQ ID NO: 35636 - DNA, 22 bp, synthetic construct
  misc_feature 1..22: note = chemically synthesized
  source 1..22: mol_type = other DNA
atctcagcatcagatagatcat

SEQ ID NO: 35637 - DNA, 22 bp, synthetic construct
  misc_feature 1..22: note = chemically synthesized
  source 1..22: mol_type = other DNA
agcatcagatagatcatctaga

SEQ ID NO: 35638 - DNA, 22 bp, synthetic construct
  misc_feature 1..22: note = chemically synthesized
  source 1..22: mol_type = other DNA
gacagaaaattaacaaagaaac

SEQ ID NO: 35639 - DNA, 22 bp, synthetic construct
  misc_feature 1..22: note = chemically synthesized
  source 1..22: mol_type = other DNA
acaaagaaacattggatttaaa

SEQ ID NO: 35640 - DNA, 22 bp, synthetic construct
  misc_feature 1..22: note = chemically synthesized
  source 1..22: mol_type = other DNA
gatttaaacttgactttagacc

SEQ ID NO: 35641 - DNA, 22 bp, synthetic construct
  misc_feature 1..22: note = chemically synthesized
  source 1..22: mol_type = other DNA
aaacttgactttagaccaaatg

SEQ ID NO: 35642 - DNA, 22 bp, synthetic construct
  misc_feature 1..22: note = chemically synthesized
  source 1..22: mol_type = other DNA
aacttgactttagaccaaatgg

SEQ ID NO: 35643 - DNA, 22 bp, synthetic construct
  misc_feature 1..22: note = chemically synthesized
  source 1..22: mol_type = other DNA
gactttagaccaaatggatcta

SEQ ID NO: 35644 - DNA, 22 bp, synthetic construct
  misc_feature 1..22: note = chemically synthesized
  source 1..22: mol_type = other DNA
actttagaccaaatggatctaa

SEQ ID NO: 35645 - DNA, 22 bp, synthetic construct
  misc_feature 1..22: note = chemically synthesized
  source 1..22: mol_type = other DNA
tagaccaaatggatctaacatt

SEQ ID NO: 35646 - DNA, 22 bp, synthetic construct
  misc_feature 1..22: note = chemically synthesized
  source 1..22: mol_type = other DNA
agaccaaatggatctaacattt

SEQ ID NO: 35647 - DNA, 22 bp, synthetic construct
  misc_feature 1..22: note = chemically synthesized
  source 1..22: mol_type = other DNA
gaccaaatggatctaacattta

SEQ ID NO: 35648 - DNA, 22 bp, synthetic construct
  misc_feature 1..22: note = chemically synthesized
  source 1..22: mol_type = other DNA
acatttacacaatatttcatcc

SEQ ID NO: 35649 - DNA, 22 bp, synthetic construct
  misc_feature 1..22: note = chemically synthesized
  source 1..22: mol_type = other DNA
acacaatatttcatccaacagc

SEQ ID NO: 35650 - DNA, 22 bp, synthetic construct
  misc_feature 1..22: note = chemically synthesized
  source 1..22: mol_type = other DNA
cacaatatttcatccaacagct

SEQ ID NO: 35651 - DNA, 22 bp, synthetic construct
  misc_feature 1..22: note = chemically synthesized
  source 1..22: mol_type = other DNA
catccaacagctacagaatata

SEQ ID NO: 35652 - DNA, 22 bp, synthetic construct
  misc_feature 1..22: note = chemically synthesized
  source 1..22: mol_type = other DNA
atccaacagctacagaatatat

SEQ ID NO: 35653 - DNA, 22 bp, synthetic construct
  misc_feature 1..22: note = chemically synthesized
  source 1..22: mol_type = other DNA
cagaatatatttatctcatcag

SEQ ID NO: 35654 - DNA, 22 bp, synthetic construct
  misc_feature 1..22: note = chemically synthesized
  source 1..22: mol_type = other DNA
atctcatcagcacatgacgcat

SEQ ID NO: 35655 - DNA, 22 bp, synthetic construct
  misc_feature 1..22: note = chemically synthesized
  source 1..22: mol_type = other DNA
tctcatcagcacatgacgcatt

SEQ ID NO: 35656 - DNA, 22 bp, synthetic construct
  misc_feature 1..22: note = chemically synthesized
  source 1..22: mol_type = other DNA
atcagcacatgacgcattcccc

SEQ ID NO: 35657 - DNA, 22 bp, synthetic construct
  misc_feature 1..22: note = chemically synthesized
  source 1..22: mol_type = other DNA
cccaggatacaccatatgttag

SEQ ID NO: 35658 - DNA, 22 bp, synthetic construct
  misc_feature 1..22: note = chemically synthesized
  source 1..22: mol_type = other DNA
gaacacaaaagaagtctcaact

SEQ ID NO: 35659 - DNA, 22 bp, synthetic construct
  misc_feature 1..22: note = chemically synthesized
  source 1..22: mol_type = other DNA
aactaatttgaaatatttgaaa

SEQ ID NO: 35660 - DNA, 22 bp, synthetic construct
  misc_feature 1..22: note = chemically synthesized
  source 1..22: mol_type = other DNA
atttgaaatatttgaaatcata

SEQ ID NO: 35661 - DNA, 22 bp, synthetic construct
  misc_feature 1..22: note = chemically synthesized
  source 1..22: mol_type = other DNA
gaaatatttgaaatcatattaa

SEQ ID NO: 35662 - DNA, 22 bp, synthetic construct
  misc_feature 1..22: note = chemically synthesized
  source 1..22: mol_type = other DNA
aaatatttgaaatcatattaag

SEQ ID NO: 35663 - DNA, 22 bp, synthetic construct
  misc_feature 1..22: note = chemically synthesized
  source 1..22: mol_type = other DNA
gaaatcatattaagcatcttct

SEQ ID NO: 35664 - DNA, 22 bp, synthetic construct
  misc_feature 1..22: note = chemically synthesized
  source 1..22: mol_type = other DNA
aaatcatattaagcatcttctc

SEQ ID NO: 35665 - DNA, 22 bp, synthetic construct
  misc_feature 1..22: note = chemically synthesized
  source 1..22: mol_type = other DNA
agcatcttctcagaccacaatg

SEQ ID NO: 35666 - DNA, 22 bp, synthetic construct
  misc_feature 1..22: note = chemically synthesized
  source 1..22: mol_type = other DNA
ctcagaccacaatggaataaaa

SEQ ID NO: 35667 - DNA, 22 bp, synthetic construct
  misc_feature 1..22: note = chemically synthesized
  source 1..22: mol_type = other DNA
tcagaccacaatggaataaaac

SEQ ID NO: 35668 - DNA, 22 bp, synthetic construct
  misc_feature 1..22: note = chemically synthesized
  source 1..22: mol_type = other DNA
agaccacaatggaataaaacta

SEQ ID NO: 35669 - DNA, 22 bp, synthetic construct
  misc_feature 1..22: note = chemically synthesized
  source 1..22: mol_type = other DNA
gaaatcaataacaagaaaaact

SEQ ID NO: 35670 - DNA, 22 bp, synthetic construct
  misc_feature 1..22: note = chemically synthesized
  source 1..22: mol_type = other DNA
taaaacctatacaaatacatgg

SEQ ID NO: 35671 - DNA, 22 bp, synthetic construct
  misc_feature 1..22: note = chemically synthesized
  source 1..22: mol_type = other DNA
aaaacctatacaaatacatgga

SEQ ID NO: 35672 - DNA, 22 bp, synthetic construct
  misc_feature 1..22: note = chemically synthesized
  source 1..22: mol_type = other DNA
aaacctatacaaatacatggaa

SEQ ID NO: 35673 - DNA, 22 bp, synthetic construct
  misc_feature 1..22: note = chemically synthesized
  source 1..22: mol_type = other DNA
tacaaatacatggaaattaaac

SEQ ID NO: 35674 - DNA, 22 bp, synthetic construct
  misc_feature 1..22: note = chemically synthesized
  source 1..22: mol_type = other DNA
aacaacatgctcctgaatgaac

SEQ ID NO: 35675 - DNA, 22 bp, synthetic construct
  misc_feature 1..22: note = chemically synthesized
  source 1..22: mol_type = other DNA
ctgaatgaacgttatgtcaaga

SEQ ID NO: 35676 - DNA, 22 bp, synthetic construct
  misc_feature 1..22: note = chemically synthesized
  source 1..22: mol_type = other DNA
aatgaacgttatgtcaagaaga

SEQ ID NO: 35677 - DNA, 22 bp, synthetic construct
  misc_feature 1..22: note = chemically synthesized
  source 1..22: mol_type = other DNA
tgtcaagaagaaaattaagaag

SEQ ID NO: 35678 - DNA, 22 bp, synthetic construct
  misc_feature 1..22: note = chemically synthesized
  source 1..22: mol_type = other DNA
agaaggaaatcaaaaatttttt

SEQ ID NO: 35679 - DNA, 22 bp, synthetic construct
  misc_feature 1..22: note = chemically synthesized
  source 1..22: mol_type = other DNA
tttgaaacaaatgaaaattgaa

SEQ ID NO: 35680 - DNA, 22 bp, synthetic construct
  misc_feature 1..22: note = chemically synthesized
  source 1..22: mol_type = other DNA
ttgaaacaaatgaaaattgaaa

SEQ ID NO: 35681 - DNA, 22 bp, synthetic construct
  misc_feature 1..22: note = chemically synthesized
  source 1..22: mol_type = other DNA
tgaaacaaatgaaaattgaaat

SEQ ID NO: 35682 - DNA, 22 bp, synthetic construct
  misc_feature 1..22: note = chemically synthesized
  source 1..22: mol_type = other DNA
gaaacaaatgaaaattgaaata

SEQ ID NO: 35683 - DNA, 22 bp, synthetic construct
  misc_feature 1..22: note = chemically synthesized
  source 1..22: mol_type = other DNA
aaacaaatgaaaattgaaatac

SEQ ID NO: 35684 - DNA, 22 bp, synthetic construct
  misc_feature 1..22: note = chemically synthesized
  source 1..22: mol_type = other DNA
aaatacaacataggaaaagcca

SEQ ID NO: 35685 - DNA, 22 bp, synthetic construct
  misc_feature 1..22: note = chemically synthesized
  source 1..22: mol_type = other DNA
agagagaagcttatcaataaac

SEQ ID NO: 35686 - DNA, 22 bp, synthetic construct
  misc_feature 1..22: note = chemically synthesized
  source 1..22: mol_type = other DNA
atcaataaacacttaaattaaa

SEQ ID NO: 35687 - DNA, 22 bp, synthetic construct
  misc_feature 1..22: note = chemically synthesized
  source 1..22: mol_type = other DNA
tcaataaacacttaaattaaaa

SEQ ID NO: 35688 - DNA, 22 bp, synthetic construct
  misc_feature 1..22: note = chemically synthesized
  source 1..22: mol_type = other DNA
aaattaaaaacatagaaagatt

SEQ ID NO: 35689 - DNA, 22 bp, synthetic construct
  misc_feature 1..22: note = chemically synthesized
  source 1..22: mol_type = other DNA
aattaaaaacatagaaagattt

SEQ ID NO: 35690 - DNA, 22 bp, synthetic construct
  misc_feature 1..22: note = chemically synthesized
  source 1..22: mol_type = other DNA
aaaacatagaaagatttcaaat

SEQ ID NO: 35691 - DNA, 22 bp, synthetic construct
  misc_feature 1..22: note = chemically synthesized
  source 1..22: mol_type = other DNA
caaatatataatctaatcatgt

SEQ ID NO: 35692 - DNA, 22 bp, synthetic construct
  misc_feature 1..22: note = chemically synthesized
  source 1..22: mol_type = other DNA
aaatatataatctaatcatgta

SEQ ID NO: 35693 - DNA, 22 bp, synthetic construct
  misc_feature 1..22: note = chemically synthesized
  source 1..22: mol_type = other DNA
atcatgtacctcaacaagctag

SEQ ID NO: 35694 - DNA, 22 bp, synthetic construct
  misc_feature 1..22: note = chemically synthesized
  source 1..22: mol_type = other DNA
aacaagctagaaaagcaagaac

SEQ ID NO: 35695 - DNA, 22 bp, synthetic construct
  misc_feature 1..22: note = chemically synthesized
  source 1..22: mol_type = other DNA
gaaaagcaagaacaaaacccaa

SEQ ID NO: 35696 - DNA, 22 bp, synthetic construct
  misc_feature 1..22: note = chemically synthesized
  source 1..22: mol_type = other DNA
gcagaaggaaagaaaaaatgaa

SEQ ID NO: 35697 - DNA, 22 bp, synthetic construct
  misc_feature 1..22: note = chemically synthesized
  source 1..22: mol_type = other DNA
aatgaaatagagaaaaacaaca

SEQ ID NO: 35698 - DNA, 22 bp, synthetic construct
  misc_feature 1..22: note = chemically synthesized
  source 1..22: mol_type = other DNA
atgaaatagagaaaaacaacaa

SEQ ID NO: 35699 - DNA, 22 bp, synthetic construct
  misc_feature 1..22: note = chemically synthesized
  source 1..22: mol_type = other DNA
gcaaaatgaaaagttgttattt

SEQ ID NO: 35700 - DNA, 22 bp, synthetic construct
  misc_feature 1..22: note = chemically synthesized
  source 1..22: mol_type = other DNA
ttatttaaaaaagataaaatgg

SEQ ID NO: 35701 - DNA, 22 bp, synthetic construct
  misc_feature 1..22: note = chemically synthesized
  source 1..22: mol_type = other DNA
tttaaaaaagataaaatggata

SEQ ID NO: 35702 - DNA, 22 bp, synthetic construct
  misc_feature 1..22: note = chemically synthesized
  source 1..22: mol_type = other DNA
aaaaaagataaaatggatatag

SEQ ID NO: 35703 - DNA, 22 bp, synthetic construct
  misc_feature 1..22: note = chemically synthesized
  source 1..22: mol_type = other DNA
aaaaagataaaatggatatagc

SEQ ID NO: 35704 - DNA, 22 bp, synthetic construct
  misc_feature 1..22: note = chemically synthesized
  source 1..22: mol_type = other DNA
tagctagactaaccaagaaaaa

SEQ ID NO: 35705 - DNA, 22 bp, synthetic construct
  misc_feature 1..22: note = chemically synthesized
  source 1..22: mol_type = other DNA
gctagactaaccaagaaaaaga

SEQ ID NO: 35706 - DNA, 22 bp, synthetic construct
  misc_feature 1..22: note = chemically synthesized
  source 1..22: mol_type = other DNA
gactaaccaagaaaaagagaag

SEQ ID NO: 35707 - DNA, 22 bp, synthetic construct
  misc_feature 1..22: note = chemically synthesized
  source 1..22: mol_type = other DNA
accaagaaaaagagaagagact

SEQ ID NO: 35708 - DNA, 22 bp, synthetic construct
  misc_feature 1..22: note = chemically synthesized
  source 1..22: mol_type = other DNA
aaataaagaaaatcagaaataa

SEQ ID NO: 35709 - DNA, 22 bp, synthetic construct
  misc_feature 1..22: note = chemically synthesized
  source 1..22: mol_type = other DNA
caaccgataccacagaaataga

SEQ ID NO: 35710 - DNA, 22 bp, synthetic construct
  misc_feature 1..22: note = chemically synthesized
  source 1..22: mol_type = other DNA
tcagagactattatgaacaacc

SEQ ID NO: 35711 - DNA, 22 bp, synthetic construct
  misc_feature 1..22: note = chemically synthesized
  source 1..22: mol_type = other DNA
ttatgaacaaccatacactaaa

SEQ ID NO: 35712 - DNA, 22 bp, synthetic construct
  misc_feature 1..22: note = chemically synthesized
  source 1..22: mol_type = other DNA
tgaacaaccatacactaaaaaa

SEQ ID NO: 35713 - DNA, 22 bp, synthetic construct
  misc_feature 1..22: note = chemically synthesized
  source 1..22: mol_type = other DNA
aaaaactgaaaaatctagagga

SEQ ID NO: 35714 - DNA, 22 bp, synthetic construct
  misc_feature 1..22: note = chemically synthesized
  source 1..22: mol_type = other DNA
aaaaatctagaggaaattaata

SEQ ID NO: 35715 - DNA, 22 bp, synthetic construct
  misc_feature 1..22: note = chemically synthesized
  source 1..22: mol_type = other DNA
gaggaaattaataaatttctgg

SEQ ID NO: 35716 - DNA, 22 bp, synthetic construct
  misc_feature 1..22: note = chemically synthesized
  source 1..22: mol_type = other DNA
ataaatttctggacacatacca

SEQ ID NO: 35717 - DNA, 22 bp, synthetic construct
  misc_feature 1..22: note = chemically synthesized
  source 1..22: mol_type = other DNA
ctggacacataccacctaccaa

SEQ ID NO: 35718 - DNA, 22 bp, synthetic construct
  misc_feature 1..22: note = chemically synthesized
  source 1..22: mol_type = other DNA
tggacacataccacctaccaag

SEQ ID NO: 35719 - DNA, 22 bp, synthetic construct
  misc_feature 1..22: note = chemically synthesized
  source 1..22: mol_type = other DNA
gacacataccacctaccaagat

SEQ ID NO: 35720 - DNA, 22 bp, synthetic construct
  misc_feature 1..22: note = chemically synthesized
  source 1..22: mol_type = other DNA
ccaagattgaattaagaaagaa

SEQ ID NO: 35721 - DNA, 22 bp, synthetic construct
  misc_feature 1..22: note = chemically synthesized
  source 1..22: mol_type = other DNA
aattaagaaagaatagaaaacc

SEQ ID NO: 35722 - DNA, 22 bp, synthetic construct
  misc_feature 1..22: note = chemically synthesized
  source 1..22: mol_type = other DNA
agaaagaatagaaaacctgaac

SEQ ID NO: 35723 - DNA, 22 bp, synthetic construct
  misc_feature 1..22: note = chemically synthesized
  source 1..22: mol_type = other DNA
aacagaccagtaatgaataatg

SEQ ID NO: 35724 - DNA, 22 bp, synthetic construct
  misc_feature 1..22: note = chemically synthesized
  source 1..22: mol_type = other DNA
aatcagtagtaaaaagtctccc

SEQ ID NO: 35725 - DNA, 22 bp, synthetic construct
  misc_feature 1..22: note = chemically synthesized
  source 1..22: mol_type = other DNA
ccaaaaaagaaaatttcaagac

SEQ ID NO: 35726 - DNA, 22 bp, synthetic construct
  misc_feature 1..22: note = chemically synthesized
  source 1..22: mol_type = other DNA
caagaccagatggctttactgt

SEQ ID NO: 35727 - DNA, 22 bp, synthetic construct
  misc_feature 1..22: note = chemically synthesized
  source 1..22: mol_type = other DNA
aagaccagatggctttactgtc

SEQ ID NO: 35728 - DNA, 22 bp, synthetic construct
  misc_feature 1..22: note = chemically synthesized
  source 1..22: mol_type = other DNA
tactgtcaaattttaccaaact

SEQ ID NO: 35729 - DNA, 22 bp, synthetic construct
  misc_feature 1..22: note = chemically synthesized
  source 1..22: mol_type = other DNA
actgtcaaattttaccaaactt

SEQ ID NO: 35730 - DNA, 22 bp, synthetic construct
  misc_feature 1..22: note = chemically synthesized
  source 1..22: mol_type = other DNA
ctgtcaaattttaccaaacttt

SEQ ID NO: 35731 - DNA, 22 bp, synthetic construct
  misc_feature 1..22: note = chemically synthesized
  source 1..22: mol_type = other DNA
tcaaattttaccaaactttcaa

SEQ ID NO: 35732 - DNA, 22 bp, synthetic construct
  misc_feature 1..22: note = chemically synthesized
  source 1..22: mol_type = other DNA
taccaaactttcaaagaaaact

SEQ ID NO: 35733 - DNA, 22 bp, synthetic construct
  misc_feature 1..22: note = chemically synthesized
  source 1..22: mol_type = other DNA
accaaactttcaaagaaaacta

SEQ ID NO: 35734 - DNA, 22 bp, synthetic construct
  misc_feature 1..22: note = chemically synthesized
  source 1..22: mol_type = other DNA
ccaaactttcaaagaaaactaa

SEQ ID NO: 35735 - DNA, 22 bp, synthetic construct
  misc_feature 1..22: note = chemically synthesized
  source 1..22: mol_type = other DNA
tcaaagaaaactaacaagtctc

SEQ ID NO: 35736 - DNA, 22 bp, synthetic construct
  misc_feature 1..22: note = chemically synthesized
  source 1..22: mol_type = other DNA
caaagaaaactaacaagtctcc

SEQ ID NO: 35737 - DNA, 22 bp, synthetic construct
  misc_feature 1..22: note = chemically synthesized
  source 1..22: mol_type = other DNA
aaagaaaactaacaagtctcct

SEQ ID NO: 35738 - DNA, 22 bp, synthetic construct
  misc_feature 1..22: note = chemically synthesized
  source 1..22: mol_type = other DNA
acaagtctccttaaattctttt

SEQ ID NO: 35739 - DNA, 22 bp, synthetic construct
  misc_feature 1..22: note = chemically synthesized
  source 1..22: mol_type = other DNA
cttaaattcttttaaaaattaa

SEQ ID NO: 35740 - DNA, 22 bp, synthetic construct
  misc_feature 1..22: note = chemically synthesized
  source 1..22: mol_type = other DNA
aaattcttttaaaaattaaaca

SEQ ID NO: 35741 - DNA, 22 bp, synthetic construct
  misc_feature 1..22: note = chemically synthesized
  source 1..22: mol_type = other DNA
aattcttttaaaaattaaacag

SEQ ID NO: 35742 - DNA, 22 bp, synthetic construct
  misc_feature 1..22: note = chemically synthesized
  source 1..22: mol_type = other DNA
ttttaaaaattaaacaggaagg

SEQ ID NO: 35743 - DNA, 22 bp, synthetic construct
  misc_feature 1..22: note = chemically synthesized
  source 1..22: mol_type = other DNA
ttaaaaattaaacaggaaggaa

SEQ ID NO: 35744 - DNA, 22 bp, synthetic construct
  misc_feature 1..22: note = chemically synthesized
  source 1..22: mol_type = other DNA
taaaaattaaacaggaaggaat

SEQ ID NO: 35745 - DNA, 22 bp, synthetic construct
  misc_feature 1..22: note = chemically synthesized
  source 1..22: mol_type = other DNA
aaaaattaaacaggaaggaatt

SEQ ID NO: 35746 - DNA, 22 bp, synthetic construct
  misc_feature 1..22: note = chemically synthesized
  source 1..22: mol_type = other DNA
aaaattaaacaggaaggaattc

SEQ ID NO: 35747 - DNA, 22 bp, synthetic construct
  misc_feature 1..22: note = chemically synthesized
  source 1..22: mol_type = other DNA
aacaggaaggaattctccctaa

SEQ ID NO: 35748 - DNA, 22 bp, synthetic construct
  misc_feature 1..22: note = chemically synthesized
  source 1..22: mol_type = other DNA
tccctaactcattctctgaggc

SEQ ID NO: 35749 - DNA, 22 bp, synthetic construct
  misc_feature 1..22: note = chemically synthesized
  source 1..22: mol_type = other DNA
cctaactcattctctgaggcca

SEQ ID NO: 35750 - DNA, 22 bp, synthetic construct
  misc_feature 1..22: note = chemically synthesized
  source 1..22: mol_type = other DNA
actcattctctgaggccagtat

SEQ ID NO: 35751 - DNA, 22 bp, synthetic construct
  misc_feature 1..22: note = chemically synthesized
  source 1..22: mol_type = other DNA
attctctgaggccagtattatc

SEQ ID NO: 35752 - DNA, 22 bp, synthetic construct
  misc_feature 1..22: note = chemically synthesized
  source 1..22: mol_type = other DNA
tctgaggccagtattatcctga

SEQ ID NO: 35753 - DNA, 22 bp, synthetic construct
  misc_feature 1..22: note = chemically synthesized
  source 1..22: mol_type = other DNA
tgaggccagtattatcctgatt

SEQ ID NO: 35754 - DNA, 22 bp, synthetic construct
  misc_feature 1..22: note = chemically synthesized
  source 1..22: mol_type = other DNA
aggccagtattatcctgattcc

SEQ ID NO: 35755 - DNA, 22 bp, synthetic construct
  misc_feature 1..22: note = chemically synthesized
  source 1..22: mol_type = other DNA
tcctgattccataaccagacaa

SEQ ID NO: 35756 - DNA, 22 bp, synthetic construct
  misc_feature 1..22: note = chemically synthesized
  source 1..22: mol_type = other DNA
attccataaccagacaaggatg

SEQ ID NO: 35757 - DNA, 22 bp, synthetic construct
  misc_feature 1..22: note = chemically synthesized
  source 1..22: mol_type = other DNA
cataaccagacaaggatgcaag

SEQ ID NO: 35758 - DNA, 22 bp, synthetic construct
  misc_feature 1..22: note = chemically synthesized
  source 1..22: mol_type = other DNA
caggtcaatatccctgatggaa

SEQ ID NO: 35759 - DNA, 22 bp, synthetic construct
  misc_feature 1..22: note = chemically synthesized
  source 1..22: mol_type = other DNA
atggaacataggtgtgaaaatc

SEQ ID NO: 35760 - DNA, 22 bp, synthetic construct
  misc_feature 1..22: note = chemically synthesized
  source 1..22: mol_type = other DNA
aacaaaatactagcaaactgaa

SEQ ID NO: 35761 - DNA, 22 bp, synthetic construct
  misc_feature 1..22: note = chemically synthesized
  source 1..22: mol_type = other DNA
gcaaactgaatccaacagtaca

SEQ ID NO: 35762 - DNA, 22 bp, synthetic construct
  misc_feature 1..22: note = chemically synthesized
  source 1..22: mol_type = other DNA
aatccaacagtacatccaaaag

SEQ ID NO: 35763 - DNA, 22 bp, synthetic construct
  misc_feature 1..22: note = chemically synthesized
  source 1..22: mol_type = other DNA
atactagggttgcaagaacagt

SEQ ID NO: 35764 - DNA, 22 bp, synthetic construct
  misc_feature 1..22: note = chemically synthesized
  source 1..22: mol_type = other DNA
tactagggttgcaagaacagtt

SEQ ID NO: 35765 - DNA, 22 bp, synthetic construct
  misc_feature 1..22: note = chemically synthesized
  source 1..22: mol_type = other DNA
gggttgcaagaacagttcaaat

SEQ ID NO: 35766 - DNA, 22 bp, synthetic construct
  misc_feature 1..22: note = chemically synthesized
  source 1..22: mol_type = other DNA
caagaacagttcaaatcaataa

SEQ ID NO: 35767 - DNA, 22 bp, synthetic construct
  misc_feature 1..22: note = chemically synthesized
  source 1..22: mol_type = other DNA
aaatcaataaatgtgatacatc

SEQ ID NO: 35768 - DNA, 22 bp, synthetic construct
  misc_feature 1..22: note = chemically synthesized
  source 1..22: mol_type = other DNA
aatagatacagaaaaagtattt

SEQ ID NO: 35769 - DNA, 22 bp, synthetic construct
  misc_feature 1..22: note = chemically synthesized
  source 1..22: mol_type = other DNA
gataaaatttaacattccttca

SEQ ID NO: 35770 - DNA, 22 bp, synthetic construct
  misc_feature 1..22: note = chemically synthesized
  source 1..22: mol_type = other DNA
ataaaatttaacattccttcat

SEQ ID NO: 35771 - DNA, 22 bp, synthetic construct
  misc_feature 1..22: note = chemically synthesized
  source 1..22: mol_type = other DNA
aacattccttcatgataaaaac

SEQ ID NO: 35772 - DNA, 22 bp, synthetic construct
  misc_feature 1..22: note = chemically synthesized
  source 1..22: mol_type = other DNA
acattccttcatgataaaaact

SEQ ID NO: 35773 - DNA, 22 bp, synthetic construct
  misc_feature 1..22: note = chemically synthesized
  source 1..22: mol_type = other DNA
cttcatgataaaaactatctgc

SEQ ID NO: 35774 - DNA, 22 bp, synthetic construct
  misc_feature 1..22: note = chemically synthesized
  source 1..22: mol_type = other DNA
catgataaaaactatctgcagc

SEQ ID NO: 35775 - DNA, 22 bp, synthetic construct
  misc_feature 1..22: note = chemically synthesized
  source 1..22: mol_type = other DNA
atgataaaaactatctgcagcc

SEQ ID NO: 35776 - DNA, 22 bp, synthetic construct
  misc_feature 1..22: note = chemically synthesized
  source 1..22: mol_type = other DNA
tctgcagccaatcatagaagga

SEQ ID NO: 35777 - DNA, 22 bp, synthetic construct
  misc_feature 1..22: note = chemically synthesized
  source 1..22: mol_type = other DNA
cagccaatcatagaaggaacat

SEQ ID NO: 35778 - DNA, 22 bp, synthetic construct
  misc_feature 1..22: note = chemically synthesized
  source 1..22: mol_type = other DNA
aatataataaaagtcatatatg

SEQ ID NO: 35779 - DNA, 22 bp, synthetic construct
  misc_feature 1..22: note = chemically synthesized
  source 1..22: mol_type = other DNA
acatcatactgaattgggaaaa

SEQ ID NO: 35780 - DNA, 22 bp, synthetic construct
  misc_feature 1..22: note = chemically synthesized
  source 1..22: mol_type = other DNA
aattgggaaaagctggaagcct

SEQ ID NO: 35781 - DNA, 22 bp, synthetic construct
  misc_feature 1..22: note = chemically synthesized
  source 1..22: mol_type = other DNA
ggaaaagctggaagcctttcct

SEQ ID NO: 35782 - DNA, 22 bp, synthetic construct
  misc_feature 1..22: note = chemically synthesized
  source 1..22: mol_type = other DNA
gaagcctttcctctaagaactg

SEQ ID NO: 35783 - DNA, 22 bp, synthetic construct
  misc_feature 1..22: note = chemically synthesized
  source 1..22: mol_type = other DNA
tcctctaagaactgaaacaaaa

SEQ ID NO: 35784 - DNA, 22 bp, synthetic construct
  misc_feature 1..22: note = chemically synthesized
  source 1..22: mol_type = other DNA
cctctaagaactgaaacaaaat

SEQ ID NO: 35785 - DNA, 22 bp, synthetic construct
  misc_feature 1..22: note = chemically synthesized
  source 1..22: mol_type = other DNA
ctctaagaactgaaacaaaata

SEQ ID NO: 35786 - DNA, 22 bp, synthetic construct
  misc_feature 1..22: note = chemically synthesized
  source 1..22: mol_type = other DNA
taagaactgaaacaaaataagg

SEQ ID NO: 35787 - DNA, 22 bp, synthetic construct
  misc_feature 1..22: note = chemically synthesized
  source 1..22: mol_type = other DNA
agaactgaaacaaaataaggat

SEQ ID NO: 35788 - DNA, 22 bp, synthetic construct
  misc_feature 1..22: note = chemically synthesized
  source 1..22: mol_type = other DNA
aaacaaaataaggatgcccact

SEQ ID NO: 35789 - DNA, 22 bp, synthetic construct
  misc_feature 1..22: note = chemically synthesized
  source 1..22: mol_type = other DNA
ccatcactcctattcaatataa

SEQ ID NO: 35790 - DNA, 22 bp, synthetic construct
  misc_feature 1..22: note = chemically synthesized
  source 1..22: mol_type = other DNA
catcactcctattcaatataat

SEQ ID NO: 35791 - DNA, 22 bp, synthetic construct
  misc_feature 1..22: note = chemically synthesized
  source 1..22: mol_type = other DNA
ctattcaatataatactggaag

SEQ ID NO: 35792 - DNA, 22 bp, synthetic construct
  misc_feature 1..22: note = chemically synthesized
  source 1..22: mol_type = other DNA
ttcaatataatactggaagtcc

SEQ ID NO: 35793 - DNA, 22 bp, synthetic construct
  misc_feature 1..22: note = chemically synthesized
  source 1..22: mol_type = other DNA
aatataatactggaagtcctag

SEQ ID NO: 35794 - DNA, 22 bp, synthetic construct
  misc_feature 1..22: note = chemically synthesized
  source 1..22: mol_type = other DNA
gaagtcctagccacagctttca

SEQ ID NO: 35795 - DNA, 22 bp, synthetic construct
  misc_feature 1..22: note = chemically synthesized
  source 1..22: mol_type = other DNA
gccacagctttcaggtcagaga

SEQ ID NO: 35796 - DNA, 22 bp, synthetic construct
  misc_feature 1..22: note = chemically synthesized
  source 1..22: mol_type = other DNA
tcaggtcagagaaagaaagaaa

SEQ ID NO: 35797 - DNA, 22 bp, synthetic construct
  misc_feature 1..22: note = chemically synthesized
  source 1..22: mol_type = other DNA
caggtcagagaaagaaagaaag

SEQ ID NO: 35798 - DNA, 22 bp, synthetic construct
  misc_feature 1..22: note = chemically synthesized
  source 1..22: mol_type = other DNA
aggtcagagaaagaaagaaaga

SEQ ID NO: 35799 - DNA, 22 bp, synthetic construct
  misc_feature 1..22: note = chemically synthesized
  source 1..22: mol_type = other DNA
tccatctttccagatgacatga

SEQ ID NO: 35800 - DNA, 22 bp, synthetic construct
  misc_feature 1..22: note = chemically synthesized
  source 1..22: mol_type = other DNA
tccagatgacatgattttatac

SEQ ID NO: 35801 - DNA, 22 bp, synthetic construct
  misc_feature 1..22: note = chemically synthesized
  source 1..22: mol_type = other DNA
ccagatgacatgattttatacc

SEQ ID NO: 35802 - DNA, 22 bp, synthetic construct
  misc_feature 1..22: note = chemically synthesized
  source 1..22: mol_type = other DNA
cagatgacatgattttatacct

SEQ ID NO: 35803 - DNA, 22 bp, synthetic construct
  misc_feature 1..22: note = chemically synthesized
  source 1..22: mol_type = other DNA
tatacctagaaaaaccaagact

SEQ ID NO: 35804 - DNA, 22 bp, synthetic construct
  misc_feature 1..22: note = chemically synthesized
  source 1..22: mol_type = other DNA
atacctagaaaaaccaagactc

SEQ ID NO: 35805 - DNA, 22 bp, synthetic construct
  misc_feature 1..22: note = chemically synthesized
  source 1..22: mol_type = other DNA
tacctagaaaaaccaagactcc

SEQ ID NO: 35806 - DNA, 22 bp, synthetic construct
  misc_feature 1..22: note = chemically synthesized
  source 1..22: mol_type = other DNA
gaaaaaccaagactccaccaaa

SEQ ID NO: 35807 - DNA, 22 bp, synthetic construct
  misc_feature 1..22: note = chemically synthesized
  source 1..22: mol_type = other DNA
caccaaagcactcttagcgctg

SEQ ID NO: 35808 - DNA, 22 bp, synthetic construct
  misc_feature 1..22: note = chemically synthesized
  source 1..22: mol_type = other DNA
ttagcgctgaaaaataaattca

SEQ ID NO: 35809 - DNA, 22 bp, synthetic construct
  misc_feature 1..22: note = chemically synthesized
  source 1..22: mol_type = other DNA
agcgctgaaaaataaattcagt

SEQ ID NO: 35810 - DNA, 22 bp, synthetic construct
  misc_feature 1..22: note = chemically synthesized
  source 1..22: mol_type = other DNA
gcgctgaaaaataaattcagta

SEQ ID NO: 35811 - DNA, 22 bp, synthetic construct
  misc_feature 1..22: note = chemically synthesized
  source 1..22: mol_type = other DNA
aaaaataaattcagtaaagtta

SEQ ID NO: 35812 - DNA, 22 bp, synthetic construct
  misc_feature 1..22: note = chemically synthesized
  source 1..22: mol_type = other DNA
agtaaagttacaggagacaaaa

SEQ ID NO: 35813 - DNA, 22 bp, synthetic construct
  misc_feature 1..22: note = chemically synthesized
  source 1..22: mol_type = other DNA
caggagacaaaatcagcatatg

SEQ ID NO: 35814 - DNA, 22 bp, synthetic construct
  misc_feature 1..22: note = chemically synthesized
  source 1..22: mol_type = other DNA
ctacacaccaataataaactag

SEQ ID NO: 35815 - DNA, 22 bp, synthetic construct
  misc_feature 1..22: note = chemically synthesized
  source 1..22: mol_type = other DNA
tacacaccaataataaactagc

SEQ ID NO: 35816 - DNA, 22 bp, synthetic construct
  misc_feature 1..22: note = chemically synthesized
  source 1..22: mol_type = other DNA
cacaccaataataaactagctg

SEQ ID NO: 35817 - DNA, 22 bp, synthetic construct
  misc_feature 1..22: note = chemically synthesized
  source 1..22: mol_type = other DNA
gctgagaaggaaattaagaagg

SEQ ID NO: 35818 - DNA, 22 bp, synthetic construct
  misc_feature 1..22: note = chemically synthesized
  source 1..22: mol_type = other DNA
agaaggaaattaagaaggcaat

SEQ ID NO: 35819 - DNA, 22 bp, synthetic construct
  misc_feature 1..22: note = chemically synthesized
  source 1..22: mol_type = other DNA
agaaggcaatcccatttacaat

SEQ ID NO: 35820 - DNA, 22 bp, synthetic construct
  misc_feature 1..22: note = chemically synthesized
  source 1..22: mol_type = other DNA
acaatagctaaaaaataaaata

SEQ ID NO: 35821 - DNA, 22 bp, synthetic construct
  misc_feature 1..22: note = chemically synthesized
  source 1..22: mol_type = other DNA
caatagctaaaaaataaaatat

SEQ ID NO: 35822 - DNA, 22 bp, synthetic construct
  misc_feature 1..22: note = chemically synthesized
  source 1..22: mol_type = other DNA
aaaaataaaatatttagggata

SEQ ID NO: 35823 - DNA, 22 bp, synthetic construct
  misc_feature 1..22: note = chemically synthesized
  source 1..22: mol_type = other DNA
agggataaatttaaccaaggaa

SEQ ID NO: 35824 - DNA, 22 bp, synthetic construct
  misc_feature 1..22: note = chemically synthesized
  source 1..22: mol_type = other DNA
gggataaatttaaccaaggaac

SEQ ID NO: 35825 - DNA, 22 bp, synthetic construct
  misc_feature 1..22: note = chemically synthesized
  source 1..22: mol_type = other DNA
aaccaaggaaccgaaaaacctc

SEQ ID NO: 35826 - DNA, 22 bp, synthetic construct
  misc_feature 1..22: note = chemically synthesized
  source 1..22: mol_type = other DNA
accaaggaaccgaaaaacctct

SEQ ID NO: 35827 - DNA, 22 bp, synthetic construct
  misc_feature 1..22: note = chemically synthesized
  source 1..22: mol_type = other DNA
tattcggaaaactacaaaacac

SEQ ID NO: 35828 - DNA, 22 bp, synthetic construct
  misc_feature 1..22: note = chemically synthesized
  source 1..22: mol_type = other DNA
ttcggaaaactacaaaacactg

SEQ ID NO: 35829 - DNA, 22 bp, synthetic construct
  misc_feature 1..22: note = chemically synthesized
  source 1..22: mol_type = other DNA
ggaaaactacaaaacactgata

SEQ ID NO: 35830 - DNA, 22 bp, synthetic construct
  misc_feature 1..22: note = chemically synthesized
  source 1..22: mol_type = other DNA
caaaacactgataaaagaattg

SEQ ID NO: 35831 - DNA, 22 bp, synthetic construct
  misc_feature 1..22: note = chemically synthesized
  source 1..22: mol_type = other DNA
ataaaagaattgaaaaggacag

SEQ ID NO: 35832 - DNA, 22 bp, synthetic construct
  misc_feature 1..22: note = chemically synthesized
  source 1..22: mol_type = other DNA
aaaaggacagaaacaaatggag

SEQ ID NO: 35833 - DNA, 22 bp, synthetic construct
  misc_feature 1..22: note = chemically synthesized
  source 1..22: mol_type = other DNA
tgttcatggatcagaaaaatta

SEQ ID NO: 35834 - DNA, 22 bp, synthetic construct
  misc_feature 1..22: note = chemically synthesized
  source 1..22: mol_type = other DNA
atggatcagaaaaattaatatt

SEQ ID NO: 35835 - DNA, 22 bp, synthetic construct
  misc_feature 1..22: note = chemically synthesized
  source 1..22: mol_type = other DNA
atattgttaaaatggccatact

SEQ ID NO: 35836 - DNA, 22 bp, synthetic construct
  misc_feature 1..22: note = chemically synthesized
  source 1..22: mol_type = other DNA
ttaaaatggccatactacccaa

SEQ ID NO: 35837 - DNA, 22 bp, synthetic construct
  misc_feature 1..22: note = chemically synthesized
  source 1..22: mol_type = other DNA
aaatggccatactacccaaagc

SEQ ID NO: 35838 - DNA, 22 bp, synthetic construct
  misc_feature 1..22: note = chemically synthesized
  source 1..22: mol_type = other DNA
cccaaagcaatctacagattct

SEQ ID NO: 35839 - DNA, 22 bp, synthetic construct
  misc_feature 1..22: note = chemically synthesized
  source 1..22: mol_type = other DNA
cagattctatatgaccgctatc

SEQ ID NO: 35840 - DNA, 22 bp, synthetic construct
  misc_feature 1..22: note = chemically synthesized
  source 1..22: mol_type = other DNA
tatatgaccgctatcaaaatag

SEQ ID NO: 35841 - DNA, 22 bp, synthetic construct
  misc_feature 1..22: note = chemically synthesized
  source 1..22: mol_type = other DNA
tatgaccgctatcaaaatagca

SEQ ID NO: 35842 - DNA, 22 bp, synthetic construct
  misc_feature 1..22: note = chemically synthesized
  source 1..22: mol_type = other DNA
tcaaaatagcaatgtcattttt

SEQ ID NO: 35843 - DNA, 22 bp, synthetic construct
  misc_feature 1..22: note = chemically synthesized
  source 1..22: mol_type = other DNA
ttcacagaaatggaaaaaccaa

SEQ ID NO: 35844 - DNA, 22 bp, synthetic construct
  misc_feature 1..22: note = chemically synthesized
  source 1..22: mol_type = other DNA
tcacagaaatggaaaaaccaat

SEQ ID NO: 35845 - DNA, 22 bp, synthetic construct
  misc_feature 1..22: note = chemically synthesized
  source 1..22: mol_type = other DNA
cacagaaatggaaaaaccaatc

SEQ ID NO: 35846 - DNA, 22 bp, synthetic construct
  misc_feature 1..22: note = chemically synthesized
  source 1..22: mol_type = other DNA
acagaaatggaaaaaccaatct

SEQ ID NO: 35847 - DNA, 22 bp, synthetic construct
  misc_feature 1..22: note = chemically synthesized
  source 1..22: mol_type = other DNA
aaatttgtatgaaattaaaaaa

SEQ ID NO: 35848 - DNA, 22 bp, synthetic construct
  misc_feature 1..22: note = chemically synthesized
  source 1..22: mol_type = other DNA
gtatgaaattaaaaaatagctc

SEQ ID NO: 35849 - DNA, 22 bp, synthetic construct
  misc_feature 1..22: note = chemically synthesized
  source 1..22: mol_type = other DNA
tatgaaattaaaaaatagctcc

SEQ ID NO: 35850 - DNA, 22 bp, synthetic construct
  misc_feature 1..22: note = chemically synthesized
  source 1..22: mol_type = other DNA
aaaaatagctccagtagccaaa

SEQ ID NO: 35851 - DNA, 22 bp, synthetic construct
  misc_feature 1..22: note = chemically synthesized
  source 1..22: mol_type = other DNA
cagtagccaaagtcatcctgtg

SEQ ID NO: 35852 - DNA, 22 bp, synthetic construct
  misc_feature 1..22: note = chemically synthesized
  source 1..22: mol_type = other DNA
tgaaaaaagaacaatgctagag

SEQ ID NO: 35853 - DNA, 22 bp, synthetic construct
  misc_feature 1..22: note = chemically synthesized
  source 1..22: mol_type = other DNA
gaggtatcatactacctgattt

SEQ ID NO: 35854 - DNA, 22 bp, synthetic construct
  misc_feature 1..22: note = chemically synthesized
  source 1..22: mol_type = other DNA
cctgatttcaaagtatattaca

SEQ ID NO: 35855 - DNA, 22 bp, synthetic construct
  misc_feature 1..22: note = chemically synthesized
  source 1..22: mol_type = other DNA
atttcaaagtatattacaaaag

SEQ ID NO: 35856 - DNA, 22 bp, synthetic construct
  misc_feature 1..22: note = chemically synthesized
  source 1..22: mol_type = other DNA
caaagtatattacaaaagtata

SEQ ID NO: 35857 - DNA, 22 bp, synthetic construct
  misc_feature 1..22: note = chemically synthesized
  source 1..22: mol_type = other DNA
aaagtatattacaaaagtatag

SEQ ID NO: 35858 - DNA, 22 bp, synthetic construct
  misc_feature 1..22: note = chemically synthesized
  source 1..22: mol_type = other DNA
caaaagtataggaacctaaaca

SEQ ID NO: 35859 - DNA, 22 bp, synthetic construct
  misc_feature 1..22: note = chemically synthesized
  source 1..22: mol_type = other DNA
aacagcatgatactgacattag

SEQ ID NO: 35860 - DNA, 22 bp, synthetic construct
  misc_feature 1..22: note = chemically synthesized
  source 1..22: mol_type = other DNA
acattagaacagacacttagac

SEQ ID NO: 35861 - DNA, 22 bp, synthetic construct
  misc_feature 1..22: note = chemically synthesized
  source 1..22: mol_type = other DNA
gaacagacacttagaccaatgg

SEQ ID NO: 35862 - DNA, 22 bp, synthetic construct
  misc_feature 1..22: note = chemically synthesized
  source 1..22: mol_type = other DNA
agaccaatggaagagaatagag

SEQ ID NO: 35863 - DNA, 22 bp, synthetic construct
  misc_feature 1..22: note = chemically synthesized
  source 1..22: mol_type = other DNA
gaccaatggaagagaatagaga

SEQ ID NO: 35864 - DNA, 22 bp, synthetic construct
  misc_feature 1..22: note = chemically synthesized
  source 1..22: mol_type = other DNA
gaaatgcatccacatatttata

SEQ ID NO: 35865 - DNA, 22 bp, synthetic construct
  misc_feature 1..22: note = chemically synthesized
  source 1..22: mol_type = other DNA
atagccaacagattttcaacaa

SEQ ID NO: 35866 - DNA, 22 bp, synthetic construct
  misc_feature 1..22: note = chemically synthesized
  source 1..22: mol_type = other DNA
tagccaacagattttcaacaaa

SEQ ID NO: 35867 - DNA, 22 bp, synthetic construct
  misc_feature 1..22: note = chemically synthesized
  source 1..22: mol_type = other DNA
tcaacaaaggtgacaagaatat

SEQ ID NO: 35868 - DNA, 22 bp, synthetic construct
  misc_feature 1..22: note = chemically synthesized
  source 1..22: mol_type = other DNA
caacaaaggtgacaagaatata

SEQ ID NO: 35869 - DNA, 22 bp, synthetic construct
  misc_feature 1..22: note = chemically synthesized
  source 1..22: mol_type = other DNA
aacaaaggtgacaagaatatac

SEQ ID NO: 35870 - DNA, 22 bp, synthetic construct
  misc_feature 1..22: note = chemically synthesized
  source 1..22: mol_type = other DNA
aggaaaggacacagtgttcaag

SEQ ID NO: 35871 - DNA, 22 bp, synthetic construct
  misc_feature 1..22: note = chemically synthesized
  source 1..22: mol_type = other DNA
aagaaatggtgctgaaaaaatt

SEQ ID NO: 35872 - DNA, 22 bp, synthetic construct
  misc_feature 1..22: note = chemically synthesized
  source 1..22: mol_type = other DNA
aaaaaattggatatccattgga

SEQ ID NO: 35873 - DNA, 22 bp, synthetic construct
  misc_feature 1..22: note = chemically synthesized
  source 1..22: mol_type = other DNA
gatatccattggatatccatgt

SEQ ID NO: 35874 - DNA, 22 bp, synthetic construct
  misc_feature 1..22: note = chemically synthesized
  source 1..22: mol_type = other DNA
gatatccatgtgcaaaagaata

SEQ ID NO: 35875 - DNA, 22 bp, synthetic construct
  misc_feature 1..22: note = chemically synthesized
  source 1..22: mol_type = other DNA
gactgctgatatggtttggatg

SEQ ID NO: 35876 - DNA, 22 bp, synthetic construct
  misc_feature 1..22: note = chemically synthesized
  source 1..22: mol_type = other DNA
ctgatatggtttggatgtttgt

SEQ ID NO: 35877 - DNA, 22 bp, synthetic construct
  misc_feature 1..22: note = chemically synthesized
  source 1..22: mol_type = other DNA
atatggtttggatgtttgttcc

SEQ ID NO: 35878 - DNA, 22 bp, synthetic construct
  misc_feature 1..22: note = chemically synthesized
  source 1..22: mol_type = other DNA
ggatgtttgttccctccaaatc

SEQ ID NO: 35879 - DNA, 22 bp, synthetic construct
  misc_feature 1..22: note = chemically synthesized
  source 1..22: mol_type = other DNA
gatgtttgttccctccaaatct

SEQ ID NO: 35880 - DNA, 22 bp, synthetic construct
  misc_feature 1..22: note = chemically synthesized
  source 1..22: mol_type = other DNA
gttccctccaaatctcatgttg

SEQ ID NO: 35881 - DNA, 22 bp, synthetic construct
  misc_feature 1..22: note = chemically synthesized
  source 1..22: mol_type = other DNA
ttccctccaaatctcatgttga

SEQ ID NO: 35882 - DNA, 22 bp, synthetic construct
  misc_feature 1..22: note = chemically synthesized
  source 1..22: mol_type = other DNA
cctccaaatctcatgttgaaat

SEQ ID NO: 35883 - DNA, 22 bp, synthetic construct
  misc_feature 1..22: note = chemically synthesized
  source 1..22: mol_type = other DNA
caaatctcatgttgaaatataa

SEQ ID NO: 35884 - DNA, 22 bp, synthetic construct
  misc_feature 1..22: note = chemically synthesized
  source 1..22: mol_type = other DNA
atgttgaaatataatccccaac

SEQ ID NO: 35885 - DNA, 22 bp, synthetic construct
  misc_feature 1..22: note = chemically synthesized
  source 1..22: mol_type = other DNA
aaatataatccccaacttctca

SEQ ID NO: 35886 - DNA, 22 bp, synthetic construct
  misc_feature 1..22: note = chemically synthesized
  source 1..22: mol_type = other DNA
ctcaggatcttggcggatggga

SEQ ID NO: 35887 - DNA, 22 bp, synthetic construct
  misc_feature 1..22: note = chemically synthesized
  source 1..22: mol_type = other DNA
tcaggatcttggcggatgggag

SEQ ID NO: 35888 - DNA, 22 bp, synthetic construct
  misc_feature 1..22: note = chemically synthesized
  source 1..22: mol_type = other DNA
aggatcttggcggatgggaggt

SEQ ID NO: 35889 - DNA, 22 bp, synthetic construct
  misc_feature 1..22: note = chemically synthesized
  source 1..22: mol_type = other DNA
ggcggatgggaggtaggcctag

SEQ ID NO: 35890 - DNA, 22 bp, synthetic construct
  misc_feature 1..22: note = chemically synthesized
  source 1..22: mol_type = other DNA
gcggatgggaggtaggcctaga

SEQ ID NO: 35891 - DNA, 22 bp, synthetic construct
  misc_feature 1..22: note = chemically synthesized
  source 1..22: mol_type = other DNA
gattgcagctccaactcagatg

SEQ ID NO: 35892 - DNA, 22 bp, synthetic construct
  misc_feature 1..22: note = chemically synthesized
  source 1..22: mol_type = other DNA
cagctccaactcagatggacag

SEQ ID NO: 35893 - DNA, 22 bp, synthetic construct
  misc_feature 1..22: note = chemically synthesized
  source 1..22: mol_type = other DNA
caactcagatggacagagcagc

SEQ ID NO: 35894 - DNA, 22 bp, synthetic construct
  misc_feature 1..22: note = chemically synthesized
  source 1..22: mol_type = other DNA
agatggacagagcagcatgtgg

SEQ ID NO: 35895 - DNA, 22 bp, synthetic construct
  misc_feature 1..22: note = chemically synthesized
  source 1..22: mol_type = other DNA
gcattgtgaattttagctgcag

SEQ ID NO: 35896 - DNA, 22 bp, synthetic construct
  misc_feature 1..22: note = chemically synthesized
  source 1..22: mol_type = other DNA
tgaattttagctgcagatagac

SEQ ID NO: 35897 - DNA, 22 bp, synthetic construct
  misc_feature 1..22: note = chemically synthesized
  source 1..22: mol_type = other DNA
tagctgcagatagactgcaaga

SEQ ID NO: 35898 - DNA, 22 bp, synthetic construct
  misc_feature 1..22: note = chemically synthesized
  source 1..22: mol_type = other DNA
agctgcagatagactgcaagaa

SEQ ID NO: 35899 - DNA, 22 bp, synthetic construct
  misc_feature 1..22: note = chemically synthesized
  source 1..22: mol_type = other DNA
gctgcagatagactgcaagaac

SEQ ID NO: 35900 - DNA, 22 bp, synthetic construct
  misc_feature 1..22: note = chemically synthesized
  source 1..22: mol_type = other DNA
cagatagactgcaagaacaaac

SEQ ID NO: 35901 - DNA, 22 bp, synthetic construct
  misc_feature 1..22: note = chemically synthesized
  source 1..22: mol_type = other DNA
caagaacaaaccagcaatcctg

SEQ ID NO: 35902 - DNA, 22 bp, synthetic construct
  misc_feature 1..22: note = chemically synthesized
  source 1..22: mol_type = other DNA
agaggacccacagaccctctga

SEQ ID NO: 35903 - DNA, 22 bp, synthetic construct
  misc_feature 1..22: note = chemically synthesized
  source 1..22: mol_type = other DNA
tgaaggaagtagattgctcctg

SEQ ID NO: 35904 - DNA, 22 bp, synthetic construct
  misc_feature 1..22: note = chemically synthesized
  source 1..22: mol_type = other DNA
aaggaagtagattgctcctgca

SEQ ID NO: 35905 - DNA, 22 bp, synthetic construct
  misc_feature 1..22: note = chemically synthesized
  source 1..22: mol_type = other DNA
ctcctgcaggacccaggagaca

SEQ ID NO: 35906 - DNA, 22 bp, synthetic construct
  misc_feature 1..22: note = chemically synthesized
  source 1..22: mol_type = other DNA
ctgcaggacccaggagacaccc

SEQ ID NO: 35907 - DNA, 22 bp, synthetic construct
  misc_feature 1..22: note = chemically synthesized
  source 1..22: mol_type = other DNA
caggacccaggagacaccccaa

SEQ ID NO: 35908 - DNA, 22 bp, synthetic construct
  misc_feature 1..22: note = chemically synthesized
  source 1..22: mol_type = other DNA
tgagtgccccaactgcggaagt

SEQ ID NO: 35909 - DNA, 22 bp, synthetic construct
  misc_feature 1..22: note = chemically synthesized
  source 1..22: mol_type = other DNA
cggaagtgggaaagggagatcc

SEQ ID NO: 35910 - DNA, 22 bp, synthetic construct
  misc_feature 1..22: note = chemically synthesized
  source 1..22: mol_type = other DNA
ctctcctaaacacacactccca

SEQ ID NO: 35911 - DNA, 22 bp, synthetic construct
  misc_feature 1..22: note = chemically synthesized
  source 1..22: mol_type = other DNA
tcctaaacacacactcccactg

SEQ ID NO: 35912 - DNA, 22 bp, synthetic construct
  misc_feature 1..22: note = chemically synthesized
  source 1..22: mol_type = other DNA
ctaaacacacactcccactgga

SEQ ID NO: 35913 - DNA, 22 bp, synthetic construct
  misc_feature 1..22: note = chemically synthesized
  source 1..22: mol_type = other DNA
aacacacactcccactggagaa

SEQ ID NO: 35914 - DNA, 22 bp, synthetic construct
  misc_feature 1..22: note = chemically synthesized
  source 1..22: mol_type = other DNA
ccactggagaaactgaaggtct

SEQ ID NO: 35915 - DNA, 22 bp, synthetic construct
  misc_feature 1..22: note = chemically synthesized
  source 1..22: mol_type = other DNA
gagaaactgaaggtctgtttgt

SEQ ID NO: 35916 - DNA, 22 bp, synthetic construct
  misc_feature 1..22: note = chemically synthesized
  source 1..22: mol_type = other DNA
aaggtctgtttgtgggagaagt

SEQ ID NO: 35917 - DNA, 22 bp, synthetic construct
  misc_feature 1..22: note = chemically synthesized
  source 1..22: mol_type = other DNA
tttgtgggagaagtttctgacc

SEQ ID NO: 35918 - DNA, 22 bp, synthetic construct
  misc_feature 1..22: note = chemically synthesized
  source 1..22: mol_type = other DNA
gtgggagaagtttctgacctta

SEQ ID NO: 35919 - DNA, 22 bp, synthetic construct
  misc_feature 1..22: note = chemically synthesized
  source 1..22: mol_type = other DNA
tgggagaagtttctgaccttac

SEQ ID NO: 35920 - DNA, 22 bp, synthetic construct
  misc_feature 1..22: note = chemically synthesized
  source 1..22: mol_type = other DNA
ctgaccttacctggagttgagt

SEQ ID NO: 35921 - DNA, 22 bp, synthetic construct
  misc_feature 1..22: note = chemically synthesized
  source 1..22: mol_type = other DNA
tgaccttacctggagttgagtt

SEQ ID NO: 35922 - DNA, 22 bp, synthetic construct
  misc_feature 1..22: note = chemically synthesized
  source 1..22: mol_type = other DNA
accttacctggagttgagttaa

SEQ ID NO: 35923 - DNA, 22 bp, synthetic construct
  misc_feature 1..22: note = chemically synthesized
  source 1..22: mol_type = other DNA
acctggagttgagttaacttag

SEQ ID NO: 35924 - DNA, 22 bp, synthetic construct
  misc_feature 1..22: note = chemically synthesized
  source 1..22: mol_type = other DNA
cctggagttgagttaacttaga

SEQ ID NO: 35925 - DNA, 22 bp, synthetic construct
  misc_feature 1..22: note = chemically synthesized
  source 1..22: mol_type = other DNA
gagttgagttaacttagagagc

SEQ ID NO: 35926 - DNA, 22 bp, synthetic construct
  misc_feature 1..22: note = chemically synthesized
  source 1..22: mol_type = other DNA
agttaacttagagagctgagca

SEQ ID NO: 35927 - DNA, 22 bp, synthetic construct
  misc_feature 1..22: note = chemically synthesized
  source 1..22: mol_type = other DNA
acttagagagctgagcaaaata

SEQ ID NO: 35928 - DNA, 22 bp, synthetic construct
  misc_feature 1..22: note = chemically synthesized
  source 1..22: mol_type = other DNA
agagagctgagcaaaatacagg

SEQ ID NO: 35929 - DNA, 22 bp, synthetic construct
  misc_feature 1..22: note = chemically synthesized
  source 1..22: mol_type = other DNA
gagagctgagcaaaatacaggt

SEQ ID NO: 35930 - DNA, 22 bp, synthetic construct
  misc_feature 1..22: note = chemically synthesized
  source 1..22: mol_type = other DNA
agcaaaatacaggtgtagagga

SEQ ID NO: 35931 - DNA, 22 bp, synthetic construct
  misc_feature 1..22: note = chemically synthesized
  source 1..22: mol_type = other DNA
ggagctcactgggtccctgagc

SEQ ID NO: 35932 - DNA, 22 bp, synthetic construct
  misc_feature 1..22: note = chemically synthesized
  source 1..22: mol_type = other DNA
actgggtccctgagcaggccat

SEQ ID NO: 35933 - DNA, 22 bp, synthetic construct
  misc_feature 1..22: note = chemically synthesized
  source 1..22: mol_type = other DNA
ggtccctgagcaggccattcct

SEQ ID NO: 35934 - DNA, 22 bp, synthetic construct
  misc_feature 1..22: note = chemically synthesized
  source 1..22: mol_type = other DNA
agcaggccattcctgcctggca

SEQ ID NO: 35935 - DNA, 22 bp, synthetic construct
  misc_feature 1..22: note = chemically synthesized
  source 1..22: mol_type = other DNA
ctgcctggcatagccaggcatt

SEQ ID NO: 35936 - DNA, 22 bp, synthetic construct
  misc_feature 1..22: note = chemically synthesized
  source 1..22: mol_type = other DNA
cctggcatagccaggcatttac

SEQ ID NO: 35937 - DNA, 22 bp, synthetic construct
  misc_feature 1..22: note = chemically synthesized
  source 1..22: mol_type = other DNA
gcatagccaggcatttacatta

SEQ ID NO: 35938 - DNA, 22 bp, synthetic construct
  misc_feature 1..22: note = chemically synthesized
  source 1..22: mol_type = other DNA
acattactaacattgaatgtaa

SEQ ID NO: 35939 - DNA, 22 bp, synthetic construct
  misc_feature 1..22: note = chemically synthesized
  source 1..22: mol_type = other DNA
cattactaacattgaatgtaaa

SEQ ID NO: 35940 - DNA, 22 bp, synthetic construct
  misc_feature 1..22: note = chemically synthesized
  source 1..22: mol_type = other DNA
ctaacattgaatgtaaatggcc

SEQ ID NO: 35941 - DNA, 22 bp, synthetic construct
  misc_feature 1..22: note = chemically synthesized
  source 1..22: mol_type = other DNA
acattgaatgtaaatggcctaa

SEQ ID NO: 35942 - DNA, 22 bp, synthetic construct
  misc_feature 1..22: note = chemically synthesized
  source 1..22: mol_type = other DNA
aatgtaaatggcctaaatgctc

SEQ ID NO: 35943 - DNA, 22 bp, synthetic construct
  misc_feature 1..22: note = chemically synthesized
  source 1..22: mol_type = other DNA
aatgctccacttaaaagggtga

SEQ ID NO: 35944 - DNA, 22 bp, synthetic construct
  misc_feature 1..22: note = chemically synthesized
  source 1..22: mol_type = other DNA
cacttaaaagggtgaaaaaggt

SEQ ID NO: 35945 - DNA, 22 bp, synthetic construct
  misc_feature 1..22: note = chemically synthesized
  source 1..22: mol_type = other DNA
aaaagggtgaaaaaggtatttc

SEQ ID NO: 35946 - DNA, 22 bp, synthetic construct
  misc_feature 1..22: note = chemically synthesized
  source 1..22: mol_type = other DNA
aaagggtgaaaaaggtatttca

SEQ ID NO: 35947 - DNA, 22 bp, synthetic construct
  misc_feature 1..22: note = chemically synthesized
  source 1..22: mol_type = other DNA
catgcaaatggccaccaaaagt

SEQ ID NO: 35948 - DNA, 22 bp, synthetic construct
  misc_feature 1..22: note = chemically synthesized
  source 1..22: mol_type = other DNA
atgcaaatggccaccaaaagtg

SEQ ID NO: 35949 - DNA, 22 bp, synthetic construct
  misc_feature 1..22: note = chemically synthesized
  source 1..22: mol_type = other DNA
taaagcaacagcagttaaaaga

SEQ ID NO: 35950 - DNA, 22 bp, synthetic construct
  misc_feature 1..22: note = chemically synthesized
  source 1..22: mol_type = other DNA
aaagcaacagcagttaaaagag

SEQ ID NO: 35951 - DNA, 22 bp, synthetic construct
  misc_feature 1..22: note = chemically synthesized
  source 1..22: mol_type = other DNA
aagcaacagcagttaaaagaga

SEQ ID NO: 35952 - DNA, 22 bp, synthetic construct
  misc_feature 1..22: note = chemically synthesized
  source 1..22: mol_type = other DNA
aaagagacaaagagggacatta

SEQ ID NO: 35953 - DNA, 22 bp, synthetic construct
  misc_feature 1..22: note = chemically synthesized
  source 1..22: mol_type = other DNA
tataatggtaaaaggccttgtc

SEQ ID NO: 35954 - DNA, 22 bp, synthetic construct
  misc_feature 1..22: note = chemically synthesized
  source 1..22: mol_type = other DNA
gtccaacaggaaaatatcacaa

SEQ ID NO: 35955 - DNA, 22 bp, synthetic construct
  misc_feature 1..22: note = chemically synthesized
  source 1..22: mol_type = other DNA
tccaacaggaaaatatcacaat

SEQ ID NO: 35956 - DNA, 22 bp, synthetic construct
  misc_feature 1..22: note = chemically synthesized
  source 1..22: mol_type = other DNA
aaacatatatgcacctaacact

SEQ ID NO: 35957 - DNA, 22 bp, synthetic construct
  misc_feature 1..22: note = chemically synthesized
  source 1..22: mol_type = other DNA
aacatatatgcacctaacactg

SEQ ID NO: 35958 - DNA, 22 bp, synthetic construct
  misc_feature 1..22: note = chemically synthesized
  source 1..22: mol_type = other DNA
acactggagctcccaaatttat

SEQ ID NO: 35959 - DNA, 22 bp, synthetic construct
  misc_feature 1..22: note = chemically synthesized
  source 1..22: mol_type = other DNA
gagctcccaaatttatagaaca

SEQ ID NO: 35960 - DNA, 22 bp, synthetic construct
  misc_feature 1..22: note = chemically synthesized
  source 1..22: mol_type = other DNA
ccaaatttatagaacaattact

SEQ ID NO: 35961 - DNA, 22 bp, synthetic construct
  misc_feature 1..22: note = chemically synthesized
  source 1..22: mol_type = other DNA
atagaacaattactaatagacc

SEQ ID NO: 35962 - DNA, 22 bp, synthetic construct
  misc_feature 1..22: note = chemically synthesized
  source 1..22: mol_type = other DNA
tagaacaattactaatagacct

SEQ ID NO: 35963 - DNA, 22 bp, synthetic construct
  misc_feature 1..22: note = chemically synthesized
  source 1..22: mol_type = other DNA
ctaatagacctaagaaatgaga

SEQ ID NO: 35964 - DNA, 22 bp, synthetic construct
  misc_feature 1..22: note = chemically synthesized
  source 1..22: mol_type = other DNA
atagacctaagaaatgagatag

SEQ ID NO: 35965 - DNA, 22 bp, synthetic construct
  misc_feature 1..22: note = chemically synthesized
  source 1..22: mol_type = other DNA
agaaatgagatagacagcaaca

SEQ ID NO: 35966 - DNA, 22 bp, synthetic construct
  misc_feature 1..22: note = chemically synthesized
  source 1..22: mol_type = other DNA
caatacttcattgacagcacta

SEQ ID NO: 35967 - DNA, 22 bp, synthetic construct
  misc_feature 1..22: note = chemically synthesized
  source 1..22: mol_type = other DNA
aatacttcattgacagcactag

SEQ ID NO: 35968 - DNA, 22 bp, synthetic construct
  misc_feature 1..22: note = chemically synthesized
  source 1..22: mol_type = other DNA
cattgacagcactagacagttc

SEQ ID NO: 35969 - DNA, 22 bp, synthetic construct
  misc_feature 1..22: note = chemically synthesized
  source 1..22: mol_type = other DNA
attgacagcactagacagttca

SEQ ID NO: 35970 - DNA, 22 bp, synthetic construct
  misc_feature 1..22: note = chemically synthesized
  source 1..22: mol_type = other DNA
acagcactagacagttcatcaa

SEQ ID NO: 35971 - DNA, 22 bp, synthetic construct
  misc_feature 1..22: note = chemically synthesized
  source 1..22: mol_type = other DNA
gacagttcatcaagacagaaag

SEQ ID NO: 35972 - DNA, 22 bp, synthetic construct
  misc_feature 1..22: note = chemically synthesized
  source 1..22: mol_type = other DNA
atcaagacagaaagtcaacaaa

SEQ ID NO: 35973 - DNA, 22 bp, synthetic construct
  misc_feature 1..22: note = chemically synthesized
  source 1..22: mol_type = other DNA
aaattataccttagaacaaatg

SEQ ID NO: 35974 - DNA, 22 bp, synthetic construct
  misc_feature 1..22: note = chemically synthesized
  source 1..22: mol_type = other DNA
aattataccttagaacaaatgg

SEQ ID NO: 35975 - DNA, 22 bp, synthetic construct
  misc_feature 1..22: note = chemically synthesized
  source 1..22: mol_type = other DNA
taccttagaacaaatggactta

SEQ ID NO: 35976 - DNA, 22 bp, synthetic construct
  misc_feature 1..22: note = chemically synthesized
  source 1..22: mol_type = other DNA
agaacaaatggacttaacagtt

SEQ ID NO: 35977 - DNA, 22 bp, synthetic construct
  misc_feature 1..22: note = chemically synthesized
  source 1..22: mol_type = other DNA
gaacaaatggacttaacagtta

SEQ ID NO: 35978 - DNA, 22 bp, synthetic construct
  misc_feature 1..22: note = chemically synthesized
  source 1..22: mol_type = other DNA
aacagttatatacagaacattt

SEQ ID NO: 35979 - DNA, 22 bp, synthetic construct
  misc_feature 1..22: note = chemically synthesized
  source 1..22: mol_type = other DNA
acagttatatacagaacatttc

SEQ ID NO: 35980 - DNA, 22 bp, synthetic construct
  misc_feature 1..22: note = chemically synthesized
  source 1..22: mol_type = other DNA
tatacagaacatttcatccaat

SEQ ID NO: 35981 - DNA, 22 bp, synthetic construct
  misc_feature 1..22: note = chemically synthesized
  source 1..22: mol_type = other DNA
catccaataaccacagaacaca

SEQ ID NO: 35982 - DNA, 22 bp, synthetic construct
  misc_feature 1..22: note = chemically synthesized
  source 1..22: mol_type = other DNA
atccaataaccacagaacacac

SEQ ID NO: 35983 - DNA, 22 bp, synthetic construct
  misc_feature 1..22: note = chemically synthesized
  source 1..22: mol_type = other DNA
tattcaacagcgcgtggaaatt

SEQ ID NO: 35984 - DNA, 22 bp, synthetic construct
  misc_feature 1..22: note = chemically synthesized
  source 1..22: mol_type = other DNA
ttcaacagcgcgtggaaatttc

SEQ ID NO: 35985 - DNA, 22 bp, synthetic construct
  misc_feature 1..22: note = chemically synthesized
  source 1..22: mol_type = other DNA
aacagcgcgtggaaatttctcc

SEQ ID NO: 35986 - DNA, 22 bp, synthetic construct
  misc_feature 1..22: note = chemically synthesized
  source 1..22: mol_type = other DNA
ctccaaggtagaccatatgata

SEQ ID NO: 35987 - DNA, 22 bp, synthetic construct
  misc_feature 1..22: note = chemically synthesized
  source 1..22: mol_type = other DNA
tccaaggtagaccatatgatag

SEQ ID NO: 35988 - DNA, 22 bp, synthetic construct
  misc_feature 1..22: note = chemically synthesized
  source 1..22: mol_type = other DNA
caaggtagaccatatgataggc

SEQ ID NO: 35989 - DNA, 22 bp, synthetic construct
  misc_feature 1..22: note = chemically synthesized
  source 1..22: mol_type = other DNA
aataaatttactaacagaccaa

SEQ ID NO: 35990 - DNA, 22 bp, synthetic construct
  misc_feature 1..22: note = chemically synthesized
  source 1..22: mol_type = other DNA
actaacagaccaataacaagca

SEQ ID NO: 35991 - DNA, 22 bp, synthetic construct
  misc_feature 1..22: note = chemically synthesized
  source 1..22: mol_type = other DNA
ctaacagaccaataacaagcag

SEQ ID NO: 35992 - DNA, 22 bp, synthetic construct
  misc_feature 1..22: note = chemically synthesized
  source 1..22: mol_type = other DNA
acagaccaataacaagcagtga

SEQ ID NO: 35993 - DNA, 22 bp, synthetic construct
  misc_feature 1..22: note = chemically synthesized
  source 1..22: mol_type = other DNA
aattggtaattaaaaaattacc

SEQ ID NO: 35994 - DNA, 22 bp, synthetic construct
  misc_feature 1..22: note = chemically synthesized
  source 1..22: mol_type = other DNA
attggtaattaaaaaattacca

SEQ ID NO: 35995 - DNA, 22 bp, synthetic construct
  misc_feature 1..22: note = chemically synthesized
  source 1..22: mol_type = other DNA
gtaattaaaaaattaccaacca

SEQ ID NO: 35996 - DNA, 22 bp, synthetic construct
  misc_feature 1..22: note = chemically synthesized
  source 1..22: mol_type = other DNA
aaaaattaccaaccaaaaaaaa

SEQ ID NO: 35997 - DNA, 22 bp, synthetic construct
  misc_feature 1..22: note = chemically synthesized
  source 1..22: mol_type = other DNA
ccaaccaaaaaaaagttcagga

SEQ ID NO: 35998 - DNA, 22 bp, synthetic construct
  misc_feature 1..22: note = chemically synthesized
  source 1..22: mol_type = other DNA
aggaccagatggattcacaaca

SEQ ID NO: 35999 - DNA, 22 bp, synthetic construct
  misc_feature 1..22: note = chemically synthesized
  source 1..22: mol_type = other DNA
acaacagaattctactagacat

SEQ ID NO: 36000 - DNA, 22 bp, synthetic construct
  misc_feature 1..22: note = chemically synthesized
  source 1..22: mol_type = other DNA
tactagacattcaaagaggaat

SEQ ID NO: 36001 - DNA, 22 bp, synthetic construct
  misc_feature 1..22: note = chemically synthesized
  source 1..22: mol_type = other DNA
ctagacattcaaagaggaattg

SEQ ID NO: 36002 - DNA, 22 bp, synthetic construct
  misc_feature 1..22: note = chemically synthesized
  source 1..22: mol_type = other DNA
gacattcaaagaggaattggtc

SEQ ID NO: 36003 - DNA, 22 bp, synthetic construct
  misc_feature 1..22: note = chemically synthesized
  source 1..22: mol_type = other DNA
aaagaggaattggtccccatct

SEQ ID NO: 36004 - DNA, 22 bp, synthetic construct
  misc_feature 1..22: note = chemically synthesized
  source 1..22: mol_type = other DNA
gtccccatctttttgacactat

SEQ ID NO: 36005 - DNA, 22 bp, synthetic construct
  misc_feature 1..22: note = chemically synthesized
  source 1..22: mol_type = other DNA
tttgacactattctacaagaca

SEQ ID NO: 36006 - DNA, 22 bp, synthetic construct
  misc_feature 1..22: note = chemically synthesized
  source 1..22: mol_type = other DNA
ttgacactattctacaagacag

SEQ ID NO: 36007 - DNA, 22 bp, synthetic construct
  misc_feature 1..22: note = chemically synthesized
  source 1..22: mol_type = other DNA
tgacactattctacaagacaga

SEQ ID NO: 36008 - DNA, 22 bp, synthetic construct
  misc_feature 1..22: note = chemically synthesized
  source 1..22: mol_type = other DNA
gacactattctacaagacagat

SEQ ID NO: 36009 - DNA, 22 bp, synthetic construct
  misc_feature 1..22: note = chemically synthesized
  source 1..22: mol_type = other DNA
acactattctacaagacagata

SEQ ID NO: 36010 - DNA, 22 bp, synthetic construct
  misc_feature 1..22: note = chemically synthesized
  source 1..22: mol_type = other DNA
ttctacaagacagataaagaag

SEQ ID NO: 36011 - DNA, 22 bp, synthetic construct
  misc_feature 1..22: note = chemically synthesized
  source 1..22: mol_type = other DNA
tacaagacagataaagaaggaa

SEQ ID NO: 36012 - DNA, 22 bp, synthetic construct
  misc_feature 1..22: note = chemically synthesized
  source 1..22: mol_type = other DNA
caagacagataaagaaggaacc

SEQ ID NO: 36013 - DNA, 22 bp, synthetic construct
  misc_feature 1..22: note = chemically synthesized
  source 1..22: mol_type = other DNA
ccctaattcattctatgaagcc

SEQ ID NO: 36014 - DNA, 22 bp, synthetic construct
  misc_feature 1..22: note = chemically synthesized
  source 1..22: mol_type = other DNA
attcattctatgaagccagcat

SEQ ID NO: 36015 - DNA, 22 bp, synthetic construct
  misc_feature 1..22: note = chemically synthesized
  source 1..22: mol_type = other DNA
attctatgaagccagcatcaca

SEQ ID NO: 36016 - DNA, 22 bp, synthetic construct
  misc_feature 1..22: note = chemically synthesized
  source 1..22: mol_type = other DNA
tatgaagccagcatcacaccaa

SEQ ID NO: 36017 - DNA, 22 bp, synthetic construct
  misc_feature 1..22: note = chemically synthesized
  source 1..22: mol_type = other DNA
tgaagccagcatcacaccaaaa

SEQ ID NO: 36018 - DNA, 22 bp, synthetic construct
  misc_feature 1..22: note = chemically synthesized
  source 1..22: mol_type = other DNA
cagactgatagccttgatgaac

SEQ ID NO: 36019 - DNA, 22 bp, synthetic construct
  misc_feature 1..22: note = chemically synthesized
  source 1..22: mol_type = other DNA
atagccttgatgaacatagatg

SEQ ID NO: 36020 - DNA, 22 bp, synthetic construct
  misc_feature 1..22: note = chemically synthesized
  source 1..22: mol_type = other DNA
gatgaacatagatgctaaaatc

SEQ ID NO: 36021 - DNA, 22 bp, synthetic construct
  misc_feature 1..22: note = chemically synthesized
  source 1..22: mol_type = other DNA
atgaacatagatgctaaaatcc

SEQ ID NO: 36022 - DNA, 22 bp, synthetic construct
  misc_feature 1..22: note = chemically synthesized
  source 1..22: mol_type = other DNA
aaatccttaacaaaatactaga

SEQ ID NO: 36023 - DNA, 22 bp, synthetic construct
  misc_feature 1..22: note = chemically synthesized
  source 1..22: mol_type = other DNA
aacaaaatactagataaccaaa

SEQ ID NO: 36024 - DNA, 22 bp, synthetic construct
  misc_feature 1..22: note = chemically synthesized
  source 1..22: mol_type = other DNA
acaaaatactagataaccaaat

SEQ ID NO: 36025 - DNA, 22 bp, synthetic construct
  misc_feature 1..22: note = chemically synthesized
  source 1..22: mol_type = other DNA
gataaccaaattcaacaacata

SEQ ID NO: 36026 - DNA, 22 bp, synthetic construct
  misc_feature 1..22: note = chemically synthesized
  source 1..22: mol_type = other DNA
aacaacataacaaaaagataat

SEQ ID NO: 36027 - DNA, 22 bp, synthetic construct
  misc_feature 1..22: note = chemically synthesized
  source 1..22: mol_type = other DNA
catgccagggatgcagggttgg

SEQ ID NO: 36028 - DNA, 22 bp, synthetic construct
  misc_feature 1..22: note = chemically synthesized
  source 1..22: mol_type = other DNA
gtttgacatctgcaagtcaata

SEQ ID NO: 36029 - DNA, 22 bp, synthetic construct
  misc_feature 1..22: note = chemically synthesized
  source 1..22: mol_type = other DNA
gacatctgcaagtcaataagtg

SEQ ID NO: 36030 - DNA, 22 bp, synthetic construct
  misc_feature 1..22: note = chemically synthesized
  source 1..22: mol_type = other DNA
acatctgcaagtcaataagtgt

SEQ ID NO: 36031 - DNA, 22 bp, synthetic construct
  misc_feature 1..22: note = chemically synthesized
  source 1..22: mol_type = other DNA
caagtcaataagtgtgatacac

SEQ ID NO: 36032 - DNA, 22 bp, synthetic construct
  misc_feature 1..22: note = chemically synthesized
  source 1..22: mol_type = other DNA
aaaaacaaaaattacatgatca

SEQ ID NO: 36033 - DNA, 22 bp, synthetic construct
  misc_feature 1..22: note = chemically synthesized
  source 1..22: mol_type = other DNA
aaaacaaaaattacatgatcat

SEQ ID NO: 36034 - DNA, 22 bp, synthetic construct
  misc_feature 1..22: note = chemically synthesized
  source 1..22: mol_type = other DNA
catgatcatctcaatagatgca

SEQ ID NO: 36035 - DNA, 22 bp, synthetic construct
  misc_feature 1..22: note = chemically synthesized
  source 1..22: mol_type = other DNA
aatagatgcagaaaaagcattc

SEQ ID NO: 36036 - DNA, 22 bp, synthetic construct
  misc_feature 1..22: note = chemically synthesized
  source 1..22: mol_type = other DNA
aacaaaatccagcatacattta

SEQ ID NO: 36037 - DNA, 22 bp, synthetic construct
  misc_feature 1..22: note = chemically synthesized
  source 1..22: mol_type = other DNA
atgattaaaatgctcagcaaaa

SEQ ID NO: 36038 - DNA, 22 bp, synthetic construct
  misc_feature 1..22: note = chemically synthesized
  source 1..22: mol_type = other DNA
tgattaaaatgctcagcaaaat

SEQ ID NO: 36039 - DNA, 22 bp, synthetic construct
  misc_feature 1..22: note = chemically synthesized
  source 1..22: mol_type = other DNA
aaatgctcagcaaaatcagcat

SEQ ID NO: 36040 - DNA, 22 bp, synthetic construct
  misc_feature 1..22: note = chemically synthesized
  source 1..22: mol_type = other DNA
agcaaaatcagcatacaagaga

SEQ ID NO: 36041 - DNA, 22 bp, synthetic construct
  misc_feature 1..22: note = chemically synthesized
  source 1..22: mol_type = other DNA
agtgtaataaaagccatctgtg

SEQ ID NO: 36042 - DNA, 22 bp, synthetic construct
  misc_feature 1..22: note = chemically synthesized
  source 1..22: mol_type = other DNA
tgacaaacccacagccaacata

SEQ ID NO: 36043 - DNA, 22 bp, synthetic construct
  misc_feature 1..22: note = chemically synthesized
  source 1..22: mol_type = other DNA
aatggggaaaagttgaaagcat

SEQ ID NO: 36044 - DNA, 22 bp, synthetic construct
  misc_feature 1..22: note = chemically synthesized
  source 1..22: mol_type = other DNA
aaagcattccctctgagaactg

SEQ ID NO: 36045 - DNA, 22 bp, synthetic construct
  misc_feature 1..22: note = chemically synthesized
  source 1..22: mol_type = other DNA
cctctgagaactggaacaagac

SEQ ID NO: 36046 - DNA, 22 bp, synthetic construct
  misc_feature 1..22: note = chemically synthesized
  source 1..22: mol_type = other DNA
tgagaactggaacaagacaagg

SEQ ID NO: 36047 - DNA, 22 bp, synthetic construct
  misc_feature 1..22: note = chemically synthesized
  source 1..22: mol_type = other DNA
agaactggaacaagacaaggat

SEQ ID NO: 36048 - DNA, 22 bp, synthetic construct
  misc_feature 1..22: note = chemically synthesized
  source 1..22: mol_type = other DNA
gaacaagacaaggatgcccact

SEQ ID NO: 36049 - DNA, 22 bp, synthetic construct
  misc_feature 1..22: note = chemically synthesized
  source 1..22: mol_type = other DNA
tcaccactcctcttcaacatag

SEQ ID NO: 36050 - DNA, 22 bp, synthetic construct
  misc_feature 1..22: note = chemically synthesized
  source 1..22: mol_type = other DNA
accactcctcttcaacatagta

SEQ ID NO: 36051 - DNA, 22 bp, synthetic construct
  misc_feature 1..22: note = chemically synthesized
  source 1..22: mol_type = other DNA
ctcttcaacatagtactggaag

SEQ ID NO: 36052 - DNA, 22 bp, synthetic construct
  misc_feature 1..22: note = chemically synthesized
  source 1..22: mol_type = other DNA
ttcaacatagtactggaagtcc

SEQ ID NO: 36053 - DNA, 22 bp, synthetic construct
  misc_feature 1..22: note = chemically synthesized
  source 1..22: mol_type = other DNA
caacatagtactggaagtccta

SEQ ID NO: 36054 - DNA, 22 bp, synthetic construct
  misc_feature 1..22: note = chemically synthesized
  source 1..22: mol_type = other DNA
aacatagtactggaagtcctag

SEQ ID NO: 36055 - DNA, 22 bp, synthetic construct
  misc_feature 1..22: note = chemically synthesized
  source 1..22: mol_type = other DNA
gaagtcctagccagggcaatca

SEQ ID NO: 36056 - DNA, 22 bp, synthetic construct
  misc_feature 1..22: note = chemically synthesized
  source 1..22: mol_type = other DNA
gccagggcaatcagacaaaaca

SEQ ID NO: 36057 - DNA, 22 bp, synthetic construct
  misc_feature 1..22: note = chemically synthesized
  source 1..22: mol_type = other DNA
aaatcagtaaagaggaagtcaa

SEQ ID NO: 36058 - DNA, 22 bp, synthetic construct
  misc_feature 1..22: note = chemically synthesized
  source 1..22: mol_type = other DNA
tcactgtttgctgatgatatga

SEQ ID NO: 36059 - DNA, 22 bp, synthetic construct
  misc_feature 1..22: note = chemically synthesized
  source 1..22: mol_type = other DNA
tttgctgatgatatgatcattt

SEQ ID NO: 36060 - DNA, 22 bp, synthetic construct
  misc_feature 1..22: note = chemically synthesized
  source 1..22: mol_type = other DNA
gctgatgatatgatcatttacc

SEQ ID NO: 36061 - DNA, 22 bp, synthetic construct
  misc_feature 1..22: note = chemically synthesized
  source 1..22: mol_type = other DNA
ctgatgatatgatcatttacct

SEQ ID NO: 36062 - DNA, 22 bp, synthetic construct
  misc_feature 1..22: note = chemically synthesized
  source 1..22: mol_type = other DNA
atgatatgatcatttaccttta

SEQ ID NO: 36063 - DNA, 22 bp, synthetic construct
  misc_feature 1..22: note = chemically synthesized
  source 1..22: mol_type = other DNA
acctttaaaaccctaaagactc

SEQ ID NO: 36064 - DNA, 22 bp, synthetic construct
  misc_feature 1..22: note = chemically synthesized
  source 1..22: mol_type = other DNA
cctttaaaaccctaaagactcc

SEQ ID NO: 36065 - DNA, 22 bp, synthetic construct
  misc_feature 1..22: note = chemically synthesized
  source 1..22: mol_type = other DNA
taaaaccctaaagactcctcca

SEQ ID NO: 36066 - DNA, 22 bp, synthetic construct
  misc_feature 1..22: note = chemically synthesized
  source 1..22: mol_type = other DNA
aaaaccctaaagactcctccag

SEQ ID NO: 36067 - DNA, 22 bp, synthetic construct
  misc_feature 1..22: note = chemically synthesized
  source 1..22: mol_type = other DNA
aaaccctaaagactcctccaga

SEQ ID NO: 36068 - DNA, 22 bp, synthetic construct
  misc_feature 1..22: note = chemically synthesized
  source 1..22: mol_type = other DNA
aagactcctccagaaagctcct

SEQ ID NO: 36069 - DNA, 22 bp, synthetic construct
  misc_feature 1..22: note = chemically synthesized
  source 1..22: mol_type = other DNA
ctccagaaagctcctagaactg

SEQ ID NO: 36070 - DNA, 22 bp, synthetic construct
  misc_feature 1..22: note = chemically synthesized
  source 1..22: mol_type = other DNA
cagaaagctcctagaactgata

SEQ ID NO: 36071 - DNA, 22 bp, synthetic construct
  misc_feature 1..22: note = chemically synthesized
  source 1..22: mol_type = other DNA
ctagaactgataaaataattca

SEQ ID NO: 36072 - DNA, 22 bp, synthetic construct
  misc_feature 1..22: note = chemically synthesized
  source 1..22: mol_type = other DNA
gaactgataaaataattcagca

SEQ ID NO: 36073 - DNA, 22 bp, synthetic construct
  misc_feature 1..22: note = chemically synthesized
  source 1..22: mol_type = other DNA
ataaaataattcagcaaagttt

SEQ ID NO: 36074 - DNA, 22 bp, synthetic construct
  misc_feature 1..22: note = chemically synthesized
  source 1..22: mol_type = other DNA
agcaaagtttccagatacaaga

SEQ ID NO: 36075 - DNA, 22 bp, synthetic construct
  misc_feature 1..22: note = chemically synthesized
  source 1..22: mol_type = other DNA
ccagatacaagatgaatgcaca

SEQ ID NO: 36076 - DNA, 22 bp, synthetic construct
  misc_feature 1..22: note = chemically synthesized
  source 1..22: mol_type = other DNA
cagatacaagatgaatgcacac

SEQ ID NO: 36077 - DNA, 22 bp, synthetic construct
  misc_feature 1..22: note = chemically synthesized
  source 1..22: mol_type = other DNA
ttctatacaccaacagcaacca

SEQ ID NO: 36078 - DNA, 22 bp, synthetic construct
  misc_feature 1..22: note = chemically synthesized
  source 1..22: mol_type = other DNA
ctatacaccaacagcaaccaaa

SEQ ID NO: 36079 - DNA, 22 bp, synthetic construct
  misc_feature 1..22: note = chemically synthesized
  source 1..22: mol_type = other DNA
tatacaccaacagcaaccaaat

SEQ ID NO: 36080 - DNA, 22 bp, synthetic construct
  misc_feature 1..22: note = chemically synthesized
  source 1..22: mol_type = other DNA
tacaccaacagcaaccaaatgg

SEQ ID NO: 36081 - DNA, 22 bp, synthetic construct
  misc_feature 1..22: note = chemically synthesized
  source 1..22: mol_type = other DNA
aaccccttgtacaatagatgca

SEQ ID NO: 36082 - DNA, 22 bp, synthetic construct
  misc_feature 1..22: note = chemically synthesized
  source 1..22: mol_type = other DNA
gtacaatagatgcaaaaatggc

SEQ ID NO: 36083 - DNA, 22 bp, synthetic construct
  misc_feature 1..22: note = chemically synthesized
  source 1..22: mol_type = other DNA
tacaatagatgcaaaaatggcc

SEQ ID NO: 36084 - DNA, 22 bp, synthetic construct
  misc_feature 1..22: note = chemically synthesized
  source 1..22: mol_type = other DNA
atacaacccctatttattgcca

SEQ ID NO: 36085 - DNA, 22 bp, synthetic construct
  misc_feature 1..22: note = chemically synthesized
  source 1..22: mol_type = other DNA
tttattgccatataaaacgtac

SEQ ID NO: 36086 - DNA, 22 bp, synthetic construct
  misc_feature 1..22: note = chemically synthesized
  source 1..22: mol_type = other DNA
attgccatataaaacgtactct

SEQ ID NO: 36087 - DNA, 22 bp, synthetic construct
  misc_feature 1..22: note = chemically synthesized
  source 1..22: mol_type = other DNA
ttgccatataaaacgtactctc

SEQ ID NO: 36088 - DNA, 22 bp, synthetic construct
  misc_feature 1..22: note = chemically synthesized
  source 1..22: mol_type = other DNA
ccatataaaacgtactctcaag

SEQ ID NO: 36089 - DNA, 22 bp, synthetic construct
  misc_feature 1..22: note = chemically synthesized
  source 1..22: mol_type = other DNA
tcaagatggattaaagacttaa

SEQ ID NO: 36090 - DNA, 22 bp, synthetic construct
  misc_feature 1..22: note = chemically synthesized
  source 1..22: mol_type = other DNA
aagatggattaaagacttaaat

SEQ ID NO: 36091 - DNA, 22 bp, synthetic construct
  misc_feature 1..22: note = chemically synthesized
  source 1..22: mol_type = other DNA
aagacttaaatataaaacttaa

SEQ ID NO: 36092 - DNA, 22 bp, synthetic construct
  misc_feature 1..22: note = chemically synthesized
  source 1..22: mol_type = other DNA
aaatataaaacttaaaactata

SEQ ID NO: 36093 - DNA, 22 bp, synthetic construct
  misc_feature 1..22: note = chemically synthesized
  source 1..22: mol_type = other DNA
aatataaaacttaaaactataa

SEQ ID NO: 36094 - DNA, 22 bp, synthetic construct
  misc_feature 1..22: note = chemically synthesized
  source 1..22: mol_type = other DNA
aaaactataaaactactaaaag

SEQ ID NO: 36095 - DNA, 22 bp, synthetic construct
  misc_feature 1..22: note = chemically synthesized
  source 1..22: mol_type = other DNA
aaactataaaactactaaaaga

SEQ ID NO: 36096 - DNA, 22 bp, synthetic construct
  misc_feature 1..22: note = chemically synthesized
  source 1..22: mol_type = other DNA
taaaactactaaaagaaaacat

SEQ ID NO: 36097 - DNA, 22 bp, synthetic construct
  misc_feature 1..22: note = chemically synthesized
  source 1..22: mol_type = other DNA
ctaaaagaaaacataagggaga

SEQ ID NO: 36098 - DNA, 22 bp, synthetic construct
  misc_feature 1..22: note = chemically synthesized
  source 1..22: mol_type = other DNA
aaagaaaacataagggagacac

SEQ ID NO: 36099 - DNA, 22 bp, synthetic construct
  misc_feature 1..22: note = chemically synthesized
  source 1..22: mol_type = other DNA
caagacatggctttgggcaaag

SEQ ID NO: 36100 - DNA, 22 bp, synthetic construct
  misc_feature 1..22: note = chemically synthesized
  source 1..22: mol_type = other DNA
aagacatggctttgggcaaaga

SEQ ID NO: 36101 - DNA, 22 bp, synthetic construct
  misc_feature 1..22: note = chemically synthesized
  source 1..22: mol_type = other DNA
tgggcaaagattttatggccaa

SEQ ID NO: 36102 - DNA, 22 bp, synthetic construct
  misc_feature 1..22: note = chemically synthesized
  source 1..22: mol_type = other DNA
gggcaaagattttatggccaag

SEQ ID NO: 36103 - DNA, 22 bp, synthetic construct
  misc_feature 1..22: note = chemically synthesized
  source 1..22: mol_type = other DNA
ggcaaagattttatggccaaga

SEQ ID NO: 36104 - DNA, 22 bp, synthetic construct
  misc_feature 1..22: note = chemically synthesized
  source 1..22: mol_type = other DNA
tatggccaagacctcaaaagca

SEQ ID NO: 36105 - DNA, 22 bp, synthetic construct
  misc_feature 1..22: note = chemically synthesized
  source 1..22: mol_type = other DNA
atggccaagacctcaaaagcac

SEQ ID NO: 36106 - DNA, 22 bp, synthetic construct
  misc_feature 1..22: note = chemically synthesized
  source 1..22: mol_type = other DNA
tggccaagacctcaaaagcaca

SEQ ID NO: 36107 - DNA, 22 bp, synthetic construct
  misc_feature 1..22: note = chemically synthesized
  source 1..22: mol_type = other DNA
aaaagcacaggcaacaaaagca

SEQ ID NO: 36108 - DNA, 22 bp, synthetic construct
  misc_feature 1..22: note = chemically synthesized
  source 1..22: mol_type = other DNA
tattaagctaaaatacatctgc

SEQ ID NO: 36109 - DNA, 22 bp, synthetic construct
  misc_feature 1..22: note = chemically synthesized
  source 1..22: mol_type = other DNA
agctaaaatacatctgcacagt

SEQ ID NO: 36110 - DNA, 22 bp, synthetic construct
  misc_feature 1..22: note = chemically synthesized
  source 1..22: mol_type = other DNA
aaatacatctgcacagtaaagg

SEQ ID NO: 36111 - DNA, 22 bp, synthetic construct
  misc_feature 1..22: note = chemically synthesized
  source 1..22: mol_type = other DNA
cacagtaaaggaaacaatcaac

SEQ ID NO: 36112 - DNA, 22 bp, synthetic construct
  misc_feature 1..22: note = chemically synthesized
  source 1..22: mol_type = other DNA
ttgaatgcgagaaaatatttgc

SEQ ID NO: 36113 - DNA, 22 bp, synthetic construct
  misc_feature 1..22: note = chemically synthesized
  source 1..22: mol_type = other DNA
aatgcgagaaaatatttgcata

SEQ ID NO: 36114 - DNA, 22 bp, synthetic construct
  misc_feature 1..22: note = chemically synthesized
  source 1..22: mol_type = other DNA
gcatacatttgacaaggaatta

SEQ ID NO: 36115 - DNA, 22 bp, synthetic construct
  misc_feature 1..22: note = chemically synthesized
  source 1..22: mol_type = other DNA
catacatttgacaaggaattaa

SEQ ID NO: 36116 - DNA, 22 bp, synthetic construct
  misc_feature 1..22: note = chemically synthesized
  source 1..22: mol_type = other DNA
gacaaggaattaatctccagaa

SEQ ID NO: 36117 - DNA, 22 bp, synthetic construct
  misc_feature 1..22: note = chemically synthesized
  source 1..22: mol_type = other DNA
acaaggaattaatctccagaat

SEQ ID NO: 36118 - DNA, 22 bp, synthetic construct
  misc_feature 1..22: note = chemically synthesized
  source 1..22: mol_type = other DNA
atctccagaatatataagaaac

SEQ ID NO: 36119 - DNA, 22 bp, synthetic construct
  misc_feature 1..22: note = chemically synthesized
  source 1..22: mol_type = other DNA
cagaatatataagaaactcaaa

SEQ ID NO: 36120 - DNA, 22 bp, synthetic construct
  misc_feature 1..22: note = chemically synthesized
  source 1..22: mol_type = other DNA
aaacaactcaacagtggaaaaa

SEQ ID NO: 36121 - DNA, 22 bp, synthetic construct
  misc_feature 1..22: note = chemically synthesized
  source 1..22: mol_type = other DNA
aacagtggaaaaacaaataatc

SEQ ID NO: 36122 - DNA, 22 bp, synthetic construct
  misc_feature 1..22: note = chemically synthesized
  source 1..22: mol_type = other DNA
attaaaaaattggcaaaggata

SEQ ID NO: 36123 - DNA, 22 bp, synthetic construct
  misc_feature 1..22: note = chemically synthesized
  source 1..22: mol_type = other DNA
aaaaattggcaaaggatatttt

SEQ ID NO: 36124 - DNA, 22 bp, synthetic construct
  misc_feature 1..22: note = chemically synthesized
  source 1..22: mol_type = other DNA
gcaaaggatatttttcaaaaga

SEQ ID NO: 36125 - DNA, 22 bp, synthetic construct
  misc_feature 1..22: note = chemically synthesized
  source 1..22: mol_type = other DNA
ttcaaaagaagacatacaaatg

SEQ ID NO: 36126 - DNA, 22 bp, synthetic construct
  misc_feature 1..22: note = chemically synthesized
  source 1..22: mol_type = other DNA
tcaaaagaagacatacaaatgc

SEQ ID NO: 36127 - DNA, 22 bp, synthetic construct
  misc_feature 1..22: note = chemically synthesized
  source 1..22: mol_type = other DNA
caaaagaagacatacaaatgca

SEQ ID NO: 36128 - DNA, 22 bp, synthetic construct
  misc_feature 1..22: note = chemically synthesized
  source 1..22: mol_type = other DNA
aaaagaagacatacaaatgcac

SEQ ID NO: 36129 - DNA, 22 bp, synthetic construct
  misc_feature 1..22: note = chemically synthesized
  source 1..22: mol_type = other DNA
ctcaacattactaatcatcaga

SEQ ID NO: 36130 - DNA, 22 bp, synthetic construct
  misc_feature 1..22: note = chemically synthesized
  source 1..22: mol_type = other DNA
aacattactaatcatcagagaa

SEQ ID NO: 36131 - DNA, 22 bp, synthetic construct
  misc_feature 1..22: note = chemically synthesized
  source 1..22: mol_type = other DNA
ctaatcatcagagaaatgcaaa

SEQ ID NO: 36132 - DNA, 22 bp, synthetic construct
  misc_feature 1..22: note = chemically synthesized
  source 1..22: mol_type = other DNA
atcatcagagaaatgcaaatca

SEQ ID NO: 36133 - DNA, 22 bp, synthetic construct
  misc_feature 1..22: note = chemically synthesized
  source 1..22: mol_type = other DNA
atgccagttagaatcatcatga

SEQ ID NO: 36134 - DNA, 22 bp, synthetic construct
  misc_feature 1..22: note = chemically synthesized
  source 1..22: mol_type = other DNA
tgccagttagaatcatcatgat

SEQ ID NO: 36135 - DNA, 22 bp, synthetic construct
  misc_feature 1..22: note = chemically synthesized
  source 1..22: mol_type = other DNA
gaatcatcatgatttaaataaa

SEQ ID NO: 36136 - DNA, 22 bp, synthetic construct
  misc_feature 1..22: note = chemically synthesized
  source 1..22: mol_type = other DNA
aaataaattaataaataaataa

SEQ ID NO: 36137 - DNA, 22 bp, synthetic construct
  misc_feature 1..22: note = chemically synthesized
  source 1..22: mol_type = other DNA
aataaattaataaataaataac

SEQ ID NO: 36138 - DNA, 22 bp, synthetic construct
  misc_feature 1..22: note = chemically synthesized
  source 1..22: mol_type = other DNA
ataaataaataacacatgctgg

SEQ ID NO: 36139 - DNA, 22 bp, synthetic construct
  misc_feature 1..22: note = chemically synthesized
  source 1..22: mol_type = other DNA
gcaaggatgtgaaggaaaaggc

SEQ ID NO: 36140 - DNA, 22 bp, synthetic construct
  misc_feature 1..22: note = chemically synthesized
  source 1..22: mol_type = other DNA
gtaggcactattggtaagcatg

SEQ ID NO: 36141 - DNA, 22 bp, synthetic construct
  misc_feature 1..22: note = chemically synthesized
  source 1..22: mol_type = other DNA
ttggtaagcatgcaaattagta

SEQ ID NO: 36142 - DNA, 22 bp, synthetic construct
  misc_feature 1..22: note = chemically synthesized
  source 1..22: mol_type = other DNA
gtaagcatgcaaattagtatag

SEQ ID NO: 36143 - DNA, 22 bp, synthetic construct
  misc_feature 1..22: note = chemically synthesized
  source 1..22: mol_type = other DNA
gtatagccactatggaaaacaa

SEQ ID NO: 36144 - DNA, 22 bp, synthetic construct
  misc_feature 1..22: note = chemically synthesized
  source 1..22: mol_type = other DNA
tggaaaacaatatgtagattta

SEQ ID NO: 36145 - DNA, 22 bp, synthetic construct
  misc_feature 1..22: note = chemically synthesized
  source 1..22: mol_type = other DNA
accaaaaagctaaaaattgaac

SEQ ID NO: 36146 - DNA, 22 bp, synthetic construct
  misc_feature 1..22: note = chemically synthesized
  source 1..22: mol_type = other DNA
ccaaaaagctaaaaattgaact

SEQ ID NO: 36147 - DNA, 22 bp, synthetic construct
  misc_feature 1..22: note = chemically synthesized
  source 1..22: mol_type = other DNA
aaaattgaactatcataagatc

SEQ ID NO: 36148 - DNA, 22 bp, synthetic construct
  misc_feature 1..22: note = chemically synthesized
  source 1..22: mol_type = other DNA
aactatcataagatccagcaat

SEQ ID NO: 36149 - DNA, 22 bp, synthetic construct
  misc_feature 1..22: note = chemically synthesized
  source 1..22: mol_type = other DNA
tcataagatccagcaatcttat

SEQ ID NO: 36150 - DNA, 22 bp, synthetic construct
  misc_feature 1..22: note = chemically synthesized
  source 1..22: mol_type = other DNA
attactgggtatttatccaaag

SEQ ID NO: 36151 - DNA, 22 bp, synthetic construct
  misc_feature 1..22: note = chemically synthesized
  source 1..22: mol_type = other DNA
ttactgggtatttatccaaagg

SEQ ID NO: 36152 - DNA, 22 bp, synthetic construct
  misc_feature 1..22: note = chemically synthesized
  source 1..22: mol_type = other DNA
ctgggtatttatccaaaggaaa

SEQ ID NO: 36153 - DNA, 22 bp, synthetic construct
  misc_feature 1..22: note = chemically synthesized
  source 1..22: mol_type = other DNA
ggtatttatccaaaggaaaaga

SEQ ID NO: 36154 - DNA, 22 bp, synthetic construct
  misc_feature 1..22: note = chemically synthesized
  source 1..22: mol_type = other DNA
atccaaaggaaaagaattcaga

SEQ ID NO: 36155 - DNA, 22 bp, synthetic construct
  misc_feature 1..22: note = chemically synthesized
  source 1..22: mol_type = other DNA
tccaaaggaaaagaattcagaa

SEQ ID NO: 36156 - DNA, 22 bp, synthetic construct
  misc_feature 1..22: note = chemically synthesized
  source 1..22: mol_type = other DNA
agaataataaacagatactggt

SEQ ID NO: 36157 - DNA, 22 bp, synthetic construct
  misc_feature 1..22: note = chemically synthesized
  source 1..22: mol_type = other DNA
gtaccacactgtttattgcagc

SEQ ID NO: 36158 - DNA, 22 bp, synthetic construct
  misc_feature 1..22: note = chemically synthesized
  source 1..22: mol_type = other DNA
tttattgcagcacgattcacat

SEQ ID NO: 36159 - DNA, 22 bp, synthetic construct
  misc_feature 1..22: note = chemically synthesized
  source 1..22: mol_type = other DNA
attgcagcacgattcacattag

SEQ ID NO: 36160 - DNA, 22 bp, synthetic construct
  misc_feature 1..22: note = chemically synthesized
  source 1..22: mol_type = other DNA
ttgcagcacgattcacattagc

SEQ ID NO: 36161 - DNA, 22 bp, synthetic construct
  misc_feature 1..22: note = chemically synthesized
  source 1..22: mol_type = other DNA
cagcacgattcacattagcaaa

SEQ ID NO: 36162 - DNA, 22 bp, synthetic construct
  misc_feature 1..22: note = chemically synthesized
  source 1..22: mol_type = other DNA
acattagcaaagatatggaatc

SEQ ID NO: 36163 - DNA, 22 bp, synthetic construct
  misc_feature 1..22: note = chemically synthesized
  source 1..22: mol_type = other DNA
gcaaagatatggaatcaaccta

SEQ ID NO: 36164 - DNA, 22 bp, synthetic construct
  misc_feature 1..22: note = chemically synthesized
  source 1..22: mol_type = other DNA
agtgtccatcaatggatgaatg

SEQ ID NO: 36165 - DNA, 22 bp, synthetic construct
  misc_feature 1..22: note = chemically synthesized
  source 1..22: mol_type = other DNA
aatattattcaaccatacaaat

SEQ ID NO: 36166 - DNA, 22 bp, synthetic construct
  misc_feature 1..22: note = chemically synthesized
  source 1..22: mol_type = other DNA
ttcaaccatacaaatataaaat

SEQ ID NO: 36167 - DNA, 22 bp, synthetic construct
  misc_feature 1..22: note = chemically synthesized
  source 1..22: mol_type = other DNA
aaccatacaaatataaaatcat

SEQ ID NO: 36168 - DNA, 22 bp, synthetic construct
  misc_feature 1..22: note = chemically synthesized
  source 1..22: mol_type = other DNA
catttgcagcaacatggatgaa

SEQ ID NO: 36169 - DNA, 22 bp, synthetic construct
  misc_feature 1..22: note = chemically synthesized
  source 1..22: mol_type = other DNA
atttgcagcaacatggatgaaa

SEQ ID NO: 36170 - DNA, 22 bp, synthetic construct
  misc_feature 1..22: note = chemically synthesized
  source 1..22: mol_type = other DNA
gcagcaacatggatgaaactgg

SEQ ID NO: 36171 - DNA, 22 bp, synthetic construct
  misc_feature 1..22: note = chemically synthesized
  source 1..22: mol_type = other DNA
cagcaacatggatgaaactgga

SEQ ID NO: 36172 - DNA, 22 bp, synthetic construct
  misc_feature 1..22: note = chemically synthesized
  source 1..22: mol_type = other DNA
gaagtcattatgttaaacgaaa

SEQ ID NO: 36173 - DNA, 22 bp, synthetic construct
  misc_feature 1..22: note = chemically synthesized
  source 1..22: mol_type = other DNA
tgttaaacgaaataagccaggc

SEQ ID NO: 36174 - DNA, 22 bp, synthetic construct
  misc_feature 1..22: note = chemically synthesized
  source 1..22: mol_type = other DNA
aacgaaataagccaggcataga

SEQ ID NO: 36175 - DNA, 22 bp, synthetic construct
  misc_feature 1..22: note = chemically synthesized
  source 1..22: mol_type = other DNA
tgcatgttctcactgatatgtg

SEQ ID NO: 36176 - DNA, 22 bp, synthetic construct
  misc_feature 1..22: note = chemically synthesized
  source 1..22: mol_type = other DNA
gcatgttctcactgatatgtgg

SEQ ID NO: 36177 - DNA, 22 bp, synthetic construct
  misc_feature 1..22: note = chemically synthesized
  source 1..22: mol_type = other DNA
catgttctcactgatatgtggg

SEQ ID NO: 36178 - DNA, 22 bp, synthetic construct
  misc_feature 1..22: note = chemically synthesized
  source 1..22: mol_type = other DNA
tcactgatatgtgggagctaaa

SEQ ID NO: 36179 - DNA, 22 bp, synthetic construct
  misc_feature 1..22: note = chemically synthesized
  source 1..22: mol_type = other DNA
actgatatgtgggagctaaaaa

SEQ ID NO: 36180 - DNA, 22 bp, synthetic construct
  misc_feature 1..22: note = chemically synthesized
  source 1..22: mol_type = other DNA
atatgtgggagctaaaaaagtt

SEQ ID NO: 36181 - DNA, 22 bp, synthetic construct
  misc_feature 1..22: note = chemically synthesized
  source 1..22: mol_type = other DNA
aaaaagttaatatcatgtaggt

SEQ ID NO: 36182 - DNA, 22 bp, synthetic construct
  misc_feature 1..22: note = chemically synthesized
  source 1..22: mol_type = other DNA
atatcatgtaggtagagagtag

SEQ ID NO: 36183 - DNA, 22 bp, synthetic construct
  misc_feature 1..22: note = chemically synthesized
  source 1..22: mol_type = other DNA
tgggaggaagggagacgaagag

SEQ ID NO: 36184 - DNA, 22 bp, synthetic construct
  misc_feature 1..22: note = chemically synthesized
  source 1..22: mol_type = other DNA
gttaatggaaacaggcagttag

SEQ ID NO: 36185 - DNA, 22 bp, synthetic construct
  misc_feature 1..22: note = chemically synthesized
  source 1..22: mol_type = other DNA
atggaaacaggcagttagatag

SEQ ID NO: 36186 - DNA, 22 bp, synthetic construct
  misc_feature 1..22: note = chemically synthesized
  source 1..22: mol_type = other DNA
gatagaaggaatatgttctgat

SEQ ID NO: 36187 - DNA, 22 bp, synthetic construct
  misc_feature 1..22: note = chemically synthesized
  source 1..22: mol_type = other DNA
tgatgttcaatagcaaagtagg

SEQ ID NO: 36188 - DNA, 22 bp, synthetic construct
  misc_feature 1..22: note = chemically synthesized
  source 1..22: mol_type = other DNA
atgttcaatagcaaagtagggt

SEQ ID NO: 36189 - DNA, 22 bp, synthetic construct
  misc_feature 1..22: note = chemically synthesized
  source 1..22: mol_type = other DNA
aatagcaaagtagggtgattat

SEQ ID NO: 36190 - DNA, 22 bp, synthetic construct
  misc_feature 1..22: note = chemically synthesized
  source 1..22: mol_type = other DNA
tagttaaaaacaatatattgta

SEQ ID NO: 36191 - DNA, 22 bp, synthetic construct
  misc_feature 1..22: note = chemically synthesized
  source 1..22: mol_type = other DNA
aaaacaatatattgtatatttc

SEQ ID NO: 36192 - DNA, 22 bp, synthetic construct
  misc_feature 1..22: note = chemically synthesized
  source 1..22: mol_type = other DNA
tatatttcaaaatagtagaaga

SEQ ID NO: 36193 - DNA, 22 bp, synthetic construct
  misc_feature 1..22: note = chemically synthesized
  source 1..22: mol_type = other DNA
caaaatagtagaagaaaggtct

SEQ ID NO: 36194 - DNA, 22 bp, synthetic construct
  misc_feature 1..22: note = chemically synthesized
  source 1..22: mol_type = other DNA
aaaatagtagaagaaaggtctt

SEQ ID NO: 36195 - DNA, 22 bp, synthetic construct
  misc_feature 1..22: note = chemically synthesized
  source 1..22: mol_type = other DNA
gaaatgttcctaacacatagaa

SEQ ID NO: 36196 - DNA, 22 bp, synthetic construct
  misc_feature 1..22: note = chemically synthesized
  source 1..22: mol_type = other DNA
aaatgttcctaacacatagaaa

SEQ ID NO: 36197 - DNA, 22 bp, synthetic construct
  misc_feature 1..22: note = chemically synthesized
  source 1..22: mol_type = other DNA
ctaacacatagaaacgataaat

SEQ ID NO: 36198 - DNA, 22 bp, synthetic construct
  misc_feature 1..22: note = chemically synthesized
  source 1..22: mol_type = other DNA
acacatagaaacgataaatact

SEQ ID NO: 36199 - DNA, 22 bp, synthetic construct
  misc_feature 1..22: note = chemically synthesized
  source 1..22: mol_type = other DNA
gaggtgatgaataccccaaata

SEQ ID NO: 36200 - DNA, 22 bp, synthetic construct
  misc_feature 1..22: note = chemically synthesized
  source 1..22: mol_type = other DNA
aggtgatgaataccccaaatac

SEQ ID NO: 36201 - DNA, 22 bp, synthetic construct
  misc_feature 1..22: note = chemically synthesized
  source 1..22: mol_type = other DNA
acttgatcattatacattatat

SEQ ID NO: 36202 - DNA, 22 bp, synthetic construct
  misc_feature 1..22: note = chemically synthesized
  source 1..22: mol_type = other DNA
gatcattatacattatatgcat

SEQ ID NO: 36203 - DNA, 22 bp, synthetic construct
  misc_feature 1..22: note = chemically synthesized
  source 1..22: mol_type = other DNA
atcattatacattatatgcatg

SEQ ID NO: 36204 - DNA, 22 bp, synthetic construct
  misc_feature 1..22: note = chemically synthesized
  source 1..22: mol_type = other DNA
tacattatatgcatgtaacaaa

SEQ ID NO: 36205 - DNA, 22 bp, synthetic construct
  misc_feature 1..22: note = chemically synthesized
  source 1..22: mol_type = other DNA
tatgcatgtaacaaaatgtcac

SEQ ID NO: 36206 - DNA, 22 bp, synthetic construct
  misc_feature 1..22: note = chemically synthesized
  source 1..22: mol_type = other DNA
atacatataaacacgtcatata

SEQ ID NO: 36207 - DNA, 22 bp, synthetic construct
  misc_feature 1..22: note = chemically synthesized
  source 1..22: mol_type = other DNA
atattggttgaggcctgattgt

SEQ ID NO: 36208 - DNA, 22 bp, synthetic construct
  misc_feature 1..22: note = chemically synthesized
  source 1..22: mol_type = other DNA
gttgaggcctgattgtaagtaa

SEQ ID NO: 36209 - DNA, 22 bp, synthetic construct
  misc_feature 1..22: note = chemically synthesized
  source 1..22: mol_type = other DNA
aggcctgattgtaagtaaatct

SEQ ID NO: 36210 - DNA, 22 bp, synthetic construct
  misc_feature 1..22: note = chemically synthesized
  source 1..22: mol_type = other DNA
attgtaagtaaatctttgtccc

SEQ ID NO: 36211 - DNA, 22 bp, synthetic construct
  misc_feature 1..22: note = chemically synthesized
  source 1..22: mol_type = other DNA
taagtaaatctttgtccctcca

SEQ ID NO: 36212 - DNA, 22 bp, synthetic construct
  misc_feature 1..22: note = chemically synthesized
  source 1..22: mol_type = other DNA
tgtccctccagacatttccctg

SEQ ID NO: 36213 - DNA, 22 bp, synthetic construct
  misc_feature 1..22: note = chemically synthesized
  source 1..22: mol_type = other DNA
gtccctccagacatttccctgt

SEQ ID NO: 36214 - DNA, 22 bp, synthetic construct
  misc_feature 1..22: note = chemically synthesized
  source 1..22: mol_type = other DNA
tccctccagacatttccctgta

SEQ ID NO: 36215 - DNA, 22 bp, synthetic construct
  misc_feature 1..22: note = chemically synthesized
  source 1..22: mol_type = other DNA
cagacatttccctgtactgtct

SEQ ID NO: 36216 - DNA, 22 bp, synthetic construct
  misc_feature 1..22: note = chemically synthesized
  source 1..22: mol_type = other DNA
ccctgtactgtcttgctgtgag

SEQ ID NO: 36217 - DNA, 22 bp, synthetic construct
  misc_feature 1..22: note = chemically synthesized
  source 1..22: mol_type = other DNA
cctgtactgtcttgctgtgagg

SEQ ID NO: 36218 - DNA, 22 bp, synthetic construct
  misc_feature 1..22: note = chemically synthesized
  source 1..22: mol_type = other DNA
tactgtcttgctgtgaggagct

SEQ ID NO: 36219 - DNA, 22 bp, synthetic construct
  misc_feature 1..22: note = chemically synthesized
  source 1..22: mol_type = other DNA
tcttgctgtgaggagcttcttt

SEQ ID NO: 36220 - DNA, 22 bp, synthetic construct
  misc_feature 1..22: note = chemically synthesized
  source 1..22: mol_type = other DNA
gctgtgaggagcttcttttact

SEQ ID NO: 36221 - DNA, 22 bp, synthetic construct
  misc_feature 1..22: note = chemically synthesized
  source 1..22: mol_type = other DNA
ctgtgaggagcttcttttactg

SEQ ID NO: 36222 - DNA, 22 bp, synthetic construct
  misc_feature 1..22: note = chemically synthesized
  source 1..22: mol_type = other DNA
tgaggagcttcttttactgcta

SEQ ID NO: 36223 - DNA, 22 bp, synthetic construct
  misc_feature 1..22: note = chemically synthesized
  source 1..22: mol_type = other DNA
cttttactgctatttcttatat

SEQ ID NO: 36224 - DNA, 22 bp, synthetic construct
  misc_feature 1..22: note = chemically synthesized
  source 1..22: mol_type = other DNA
ttttactgctatttcttatatt

SEQ ID NO: 36225 - DNA, 22 bp, synthetic construct
  misc_feature 1..22: note = chemically synthesized
  source 1..22: mol_type = other DNA
ttactgctatttcttatattcc

SEQ ID NO: 36226 - DNA, 22 bp, synthetic construct
  misc_feature 1..22: note = chemically synthesized
  source 1..22: mol_type = other DNA
tactgctatttcttatattcca

SEQ ID NO: 36227 - DNA, 22 bp, synthetic construct
  misc_feature 1..22: note = chemically synthesized
  source 1..22: mol_type = other DNA
actgctatttcttatattccaa

SEQ ID NO: 36228 - DNA, 22 bp, synthetic construct
  misc_feature 1..22: note = chemically synthesized
  source 1..22: mol_type = other DNA
ctgctatttcttatattccaac

SEQ ID NO: 36229 - DNA, 22 bp, synthetic construct
  misc_feature 1..22: note = chemically synthesized
  source 1..22: mol_type = other DNA
ctatttcttatattccaacacc

SEQ ID NO: 36230 - DNA, 22 bp, synthetic construct
  misc_feature 1..22: note = chemically synthesized
  source 1..22: mol_type = other DNA
tttcttatattccaacaccatt

SEQ ID NO: 36231 - DNA, 22 bp, synthetic construct
  misc_feature 1..22: note = chemically synthesized
  source 1..22: mol_type = other DNA
cttatattccaacaccatttta

SEQ ID NO: 36232 - DNA, 22 bp, synthetic construct
  misc_feature 1..22: note = chemically synthesized
  source 1..22: mol_type = other DNA
ttatattccaacaccattttag

SEQ ID NO: 36233 - DNA, 22 bp, synthetic construct
  misc_feature 1..22: note = chemically synthesized
  source 1..22: mol_type = other DNA
atattccaacaccattttagcc

SEQ ID NO: 36234 - DNA, 22 bp, synthetic construct
  misc_feature 1..22: note = chemically synthesized
  source 1..22: mol_type = other DNA
tattccaacaccattttagccc

SEQ ID NO: 36235 - DNA, 22 bp, synthetic construct
  misc_feature 1..22: note = chemically synthesized
  source 1..22: mol_type = other DNA
caacaccattttagcccttttt

SEQ ID NO: 36236 - DNA, 22 bp, synthetic construct
  misc_feature 1..22: note = chemically synthesized
  source 1..22: mol_type = other DNA
tagcccttttttgtcctcccca

SEQ ID NO: 36237 - DNA, 22 bp, synthetic construct
  misc_feature 1..22: note = chemically synthesized
  source 1..22: mol_type = other DNA
agcccttttttgtcctccccat

SEQ ID NO: 36238 - DNA, 22 bp, synthetic construct
  misc_feature 1..22: note = chemically synthesized
  source 1..22: mol_type = other DNA
gcccttttttgtcctccccata

SEQ ID NO: 36239 - DNA, 22 bp, synthetic construct
  misc_feature 1..22: note = chemically synthesized
  source 1..22: mol_type = other DNA
ttttgtcctccccatattttta

SEQ ID NO: 36240 - DNA, 22 bp, synthetic construct
  misc_feature 1..22: note = chemically synthesized
  source 1..22: mol_type = other DNA
tttgtcctccccatatttttac

SEQ ID NO: 36241 - DNA, 22 bp, synthetic construct
  misc_feature 1..22: note = chemically synthesized
  source 1..22: mol_type = other DNA
ttgtcctccccatatttttacc

SEQ ID NO: 36242 - DNA, 22 bp, synthetic construct
  misc_feature 1..22: note = chemically synthesized
  source 1..22: mol_type = other DNA
tgtcctccccatatttttacct

SEQ ID NO: 36243 - DNA, 22 bp, synthetic construct
  misc_feature 1..22: note = chemically synthesized
  source 1..22: mol_type = other DNA
gtcctccccatatttttacctc

SEQ ID NO: 36244 - DNA, 22 bp, synthetic construct
  misc_feature 1..22: note = chemically synthesized
  source 1..22: mol_type = other DNA
tcctccccatatttttacctcg

SEQ ID NO: 36245 - DNA, 22 bp, synthetic construct
  misc_feature 1..22: note = chemically synthesized
  source 1..22: mol_type = other DNA
cccatatttttacctcggtttt

SEQ ID NO: 36246 - DNA, 22 bp, synthetic construct
  misc_feature 1..22: note = chemically synthesized
  source 1..22: mol_type = other DNA
ttacctcggtttttactgttta

SEQ ID NO: 36247 - DNA, 22 bp, synthetic construct
  misc_feature 1..22: note = chemically synthesized
  source 1..22: mol_type = other DNA
tacctcggtttttactgtttat

SEQ ID NO: 36248 - DNA, 22 bp, synthetic construct
  misc_feature 1..22: note = chemically synthesized
  source 1..22: mol_type = other DNA
acctcggtttttactgtttata

SEQ ID NO: 36249 - DNA, 22 bp, synthetic construct
  misc_feature 1..22: note = chemically synthesized
  source 1..22: mol_type = other DNA
cctcggtttttactgtttatat

SEQ ID NO: 36250 - DNA, 22 bp, synthetic construct
  misc_feature 1..22: note = chemically synthesized
  source 1..22: mol_type = other DNA
ggtttttactgtttatatagca

SEQ ID NO: 36251 - DNA, 22 bp, synthetic construct
  misc_feature 1..22: note = chemically synthesized
  source 1..22: mol_type = other DNA
ttactgtttatatagcacactt

SEQ ID NO: 36252 - DNA, 22 bp, synthetic construct
  misc_feature 1..22: note = chemically synthesized
  source 1..22: mol_type = other DNA
tactgtttatatagcacacttt

SEQ ID NO: 36253 - DNA, 22 bp, synthetic construct
  misc_feature 1..22: note = chemically synthesized
  source 1..22: mol_type = other DNA
actgtttatatagcacactttg

SEQ ID NO: 36254 - DNA, 22 bp, synthetic construct
  misc_feature 1..22: note = chemically synthesized
  source 1..22: mol_type = other DNA
ctgtttatatagcacactttgt

SEQ ID NO: 36255 - DNA, 22 bp, synthetic construct
  misc_feature 1..22: note = chemically synthesized
  source 1..22: mol_type = other DNA
tttatatagcacactttgtgct

SEQ ID NO: 36256 - DNA, 22 bp, synthetic construct
  misc_feature 1..22: note = chemically synthesized
  source 1..22: mol_type = other DNA
atatagcacactttgtgctata

SEQ ID NO: 36257 - DNA, 22 bp, synthetic construct
  misc_feature 1..22: note = chemically synthesized
  source 1..22: mol_type = other DNA
tatagcacactttgtgctatag

SEQ ID NO: 36258 - DNA, 22 bp, synthetic construct
  misc_feature 1..22: note = chemically synthesized
  source 1..22: mol_type = other DNA
tgtgctatagtttacctcagtt

SEQ ID NO: 36259 - DNA, 22 bp, synthetic construct
  misc_feature 1..22: note = chemically synthesized
  source 1..22: mol_type = other DNA
gtgctatagtttacctcagttt

SEQ ID NO: 36260 - DNA, 22 bp, synthetic construct
  misc_feature 1..22: note = chemically synthesized
  source 1..22: mol_type = other DNA
tgctatagtttacctcagtttt

SEQ ID NO: 36261 - DNA, 22 bp, synthetic construct
  misc_feature 1..22: note = chemically synthesized
  source 1..22: mol_type = other DNA
tagtttacctcagtttttacta

SEQ ID NO: 36262 - DNA, 22 bp, synthetic construct
  misc_feature 1..22: note = chemically synthesized
  source 1..22: mol_type = other DNA
acctcagtttttactatttata

SEQ ID NO: 36263 - DNA, 22 bp, synthetic construct
  misc_feature 1..22: note = chemically synthesized
  source 1..22: mol_type = other DNA
cctcagtttttactatttataa

SEQ ID NO: 36264 - DNA, 22 bp, synthetic construct
  misc_feature 1..22: note = chemically synthesized
  source 1..22: mol_type = other DNA
agtttttactatttataaagca

SEQ ID NO: 36265 - DNA, 22 bp, synthetic construct
  misc_feature 1..22: note = chemically synthesized
  source 1..22: mol_type = other DNA
ttactatttataaagcacattt

SEQ ID NO: 36266 - DNA, 22 bp, synthetic construct
  misc_feature 1..22: note = chemically synthesized
  source 1..22: mol_type = other DNA
tactatttataaagcacatttt

SEQ ID NO: 36267 - DNA, 22 bp, synthetic construct
  misc_feature 1..22: note = chemically synthesized
  source 1..22: mol_type = other DNA
actatttataaagcacattttg

SEQ ID NO: 36268 - DNA, 22 bp, synthetic construct
  misc_feature 1..22: note = chemically synthesized
  source 1..22: mol_type = other DNA
ctatttataaagcacattttgc

SEQ ID NO: 36269 - DNA, 22 bp, synthetic construct
  misc_feature 1..22: note = chemically synthesized
  source 1..22: mol_type = other DNA
tttataaagcacattttgcccc

SEQ ID NO: 36270 - DNA, 22 bp, synthetic construct
  misc_feature 1..22: note = chemically synthesized
  source 1..22: mol_type = other DNA
ataaagcacattttgccccaaa

SEQ ID NO: 36271 - DNA, 22 bp, synthetic construct
  misc_feature 1..22: note = chemically synthesized
  source 1..22: mol_type = other DNA
taaagcacattttgccccaaac

SEQ ID NO: 36272 - DNA, 22 bp, synthetic construct
  misc_feature 1..22: note = chemically synthesized
  source 1..22: mol_type = other DNA
tgccccaaacttctctcttaac

SEQ ID NO: 36273 - DNA, 22 bp, synthetic construct
  misc_feature 1..22: note = chemically synthesized
  source 1..22: mol_type = other DNA
gccccaaacttctctcttaaca

SEQ ID NO: 36274 - DNA, 22 bp, synthetic construct
  misc_feature 1..22: note = chemically synthesized
  source 1..22: mol_type = other DNA
ccccaaacttctctcttaacaa

SEQ ID NO: 36275 - DNA, 22 bp, synthetic construct
  misc_feature 1..22: note = chemically synthesized
  source 1..22: mol_type = other DNA
ctctcttaacaagctagaatat

SEQ ID NO: 36276 - DNA, 22 bp, synthetic construct
  misc_feature 1..22: note = chemically synthesized
  source 1..22: mol_type = other DNA
tctcttaacaagctagaatata

SEQ ID NO: 36277 - DNA, 22 bp, synthetic construct
  misc_feature 1..22: note = chemically synthesized
  source 1..22: mol_type = other DNA
tcttaacaagctagaatataag

SEQ ID NO: 36278 - DNA, 22 bp, synthetic construct
  misc_feature 1..22: note = chemically synthesized
  source 1..22: mol_type = other DNA
ttaacaagctagaatataagtg

SEQ ID NO: 36279 - DNA, 22 bp, synthetic construct
  misc_feature 1..22: note = chemically synthesized
  source 1..22: mol_type = other DNA
aacaagctagaatataagtgaa

SEQ ID NO: 36280 - DNA, 22 bp, synthetic construct
  misc_feature 1..22: note = chemically synthesized
  source 1..22: mol_type = other DNA
acaagctagaatataagtgaat

SEQ ID NO: 36281 - DNA, 22 bp, synthetic construct
  misc_feature 1..22: note = chemically synthesized
  source 1..22: mol_type = other DNA
gaatataagtgaatgcaagagc

SEQ ID NO: 36282 - DNA, 22 bp, synthetic construct
  misc_feature 1..22: note = chemically synthesized
  source 1..22: mol_type = other DNA
ctattttcatatttgaggtata

SEQ ID NO: 36283 - DNA, 22 bp, synthetic construct
  misc_feature 1..22: note = chemically synthesized
  source 1..22: mol_type = other DNA
ttttcatatttgaggtataaac

SEQ ID NO: 36284 - DNA, 22 bp, synthetic construct
  misc_feature 1..22: note = chemically synthesized
  source 1..22: mol_type = other DNA
tcatatttgaggtataaaccaa

SEQ ID NO: 36285 - DNA, 22 bp, synthetic construct
  misc_feature 1..22: note = chemically synthesized
  source 1..22: mol_type = other DNA
catatttgaggtataaaccaag

SEQ ID NO: 36286 - DNA, 22 bp, synthetic construct
  misc_feature 1..22: note = chemically synthesized
  source 1..22: mol_type = other DNA
atatttgaggtataaaccaagg

SEQ ID NO: 36287 - DNA, 22 bp, synthetic construct
  misc_feature 1..22: note = chemically synthesized
  source 1..22: mol_type = other DNA
gaggtataaaccaaggagattt

SEQ ID NO: 36288 - DNA, 22 bp, synthetic construct
  misc_feature 1..22: note = chemically synthesized
  source 1..22: mol_type = other DNA
aggtataaaccaaggagattta

SEQ ID NO: 36289 - DNA, 22 bp, synthetic construct
  misc_feature 1..22: note = chemically synthesized
  source 1..22: mol_type = other DNA
acatacacatatatatttttaa

SEQ ID NO: 36290 - DNA, 22 bp, synthetic construct
  misc_feature 1..22: note = chemically synthesized
  source 1..22: mol_type = other DNA
catacacatatatatttttaaa

SEQ ID NO: 36291 - DNA, 22 bp, synthetic construct
  misc_feature 1..22: note = chemically synthesized
  source 1..22: mol_type = other DNA
ttaaatctgcaaataaatggtt

SEQ ID NO: 36292 - DNA, 22 bp, synthetic construct
  misc_feature 1..22: note = chemically synthesized
  source 1..22: mol_type = other DNA
taaatctgcaaataaatggttt

SEQ ID NO: 36293 - DNA, 22 bp, synthetic construct
  misc_feature 1..22: note = chemically synthesized
  source 1..22: mol_type = other DNA
aaatctgcaaataaatggtttt

SEQ ID NO: 36294 - DNA, 22 bp, synthetic construct
  misc_feature 1..22: note = chemically synthesized
  source 1..22: mol_type = other DNA
aatctgcaaataaatggtttta

SEQ ID NO: 36295 - DNA, 22 bp, synthetic construct
  misc_feature 1..22: note = chemically synthesized
  source 1..22: mol_type = other DNA
caaataaatggttttattctga

SEQ ID NO: 36296 - DNA, 22 bp, synthetic construct
  misc_feature 1..22: note = chemically synthesized
  source 1..22: mol_type = other DNA
tattctgacattaaaaaagaaa

SEQ ID NO: 36297 - DNA, 22 bp, synthetic construct
  misc_feature 1..22: note = chemically synthesized
  source 1..22: mol_type = other DNA
attctgacattaaaaaagaaaa

SEQ ID NO: 36298 - DNA, 22 bp, synthetic construct
  misc_feature 1..22: note = chemically synthesized
  source 1..22: mol_type = other DNA
ttctgacattaaaaaagaaaat

SEQ ID NO: 36299 - DNA, 22 bp, synthetic construct
  misc_feature 1..22: note = chemically synthesized
  source 1..22: mol_type = other DNA
tgacattaaaaaagaaaatact

SEQ ID NO: 36300 - DNA, 22 bp, synthetic construct
  misc_feature 1..22: note = chemically synthesized
  source 1..22: mol_type = other DNA
acattaaaaaagaaaatactta

SEQ ID NO: 36301 - DNA, 22 bp, synthetic construct
  misc_feature 1..22: note = chemically synthesized
  source 1..22: mol_type = other DNA
aaaaagaaaatacttaatatca

SEQ ID NO: 36302 - DNA, 22 bp, synthetic construct
  misc_feature 1..22: note = chemically synthesized
  source 1..22: mol_type = other DNA
aatatcattaatgaatgatcgt

SEQ ID NO: 36303 - DNA, 22 bp, synthetic construct
  misc_feature 1..22: note = chemically synthesized
  source 1..22: mol_type = other DNA
atatcattaatgaatgatcgtt

SEQ ID NO: 36304 - DNA, 22 bp, synthetic construct
  misc_feature 1..22: note = chemically synthesized
  source 1..22: mol_type = other DNA
atgaatgatcgttttaccacag

SEQ ID NO: 36305 - DNA, 22 bp, synthetic construct
  misc_feature 1..22: note = chemically synthesized
  source 1..22: mol_type = other DNA
taccacagcgtaggtcattgaa

SEQ ID NO: 36306 - DNA, 22 bp, synthetic construct
  misc_feature 1..22: note = chemically synthesized
  source 1..22: mol_type = other DNA
accacagcgtaggtcattgaat

SEQ ID NO: 36307 - DNA, 22 bp, synthetic construct
  misc_feature 1..22: note = chemically synthesized
  source 1..22: mol_type = other DNA
ccacagcgtaggtcattgaatt

SEQ ID NO: 36308 - DNA, 22 bp, synthetic construct
  misc_feature 1..22: note = chemically synthesized
  source 1..22: mol_type = other DNA
aatttgaacttaaccttcactt

SEQ ID NO: 36309 - DNA, 22 bp, synthetic construct
  misc_feature 1..22: note = chemically synthesized
  source 1..22: mol_type = other DNA
gaacttaaccttcactttcaaa

SEQ ID NO: 36310 - DNA, 22 bp, synthetic construct
  misc_feature 1..22: note = chemically synthesized
  source 1..22: mol_type = other DNA
aacttaaccttcactttcaaac

SEQ ID NO: 36311 - DNA, 22 bp, synthetic construct
  misc_feature 1..22: note = chemically synthesized
  source 1..22: mol_type = other DNA
aaccttcactttcaaacaagta

SEQ ID NO: 36312 - DNA, 22 bp, synthetic construct
  misc_feature 1..22: note = chemically synthesized
  source 1..22: mol_type = other DNA
accttcactttcaaacaagtac

SEQ ID NO: 36313 - DNA, 22 bp, synthetic construct
  misc_feature 1..22: note = chemically synthesized
  source 1..22: mol_type = other DNA
cactttcaaacaagtactttgt

SEQ ID NO: 36314 - DNA, 22 bp, synthetic construct
  misc_feature 1..22: note = chemically synthesized
  source 1..22: mol_type = other DNA
actttcaaacaagtactttgta

SEQ ID NO: 36315 - DNA, 22 bp, synthetic construct
  misc_feature 1..22: note = chemically synthesized
  source 1..22: mol_type = other DNA
tcaaacaagtactttgtatttt

SEQ ID NO: 36316 - DNA, 22 bp, synthetic construct
  misc_feature 1..22: note = chemically synthesized
  source 1..22: mol_type = other DNA
caaacaagtactttgtatttta

SEQ ID NO: 36317 - DNA, 22 bp, synthetic construct
  misc_feature 1..22: note = chemically synthesized
  source 1..22: mol_type = other DNA
aaacaagtactttgtattttat

SEQ ID NO: 36318 - DNA, 22 bp, synthetic construct
  misc_feature 1..22: note = chemically synthesized
  source 1..22: mol_type = other DNA
tgtattttattgatctctattt

SEQ ID NO: 36319 - DNA, 22 bp, synthetic construct
  misc_feature 1..22: note = chemically synthesized
  source 1..22: mol_type = other DNA
gtattttattgatctctatttt

SEQ ID NO: 36320 - DNA, 22 bp, synthetic construct
  misc_feature 1..22: note = chemically synthesized
  source 1..22: mol_type = other DNA
tattttattgatctctattttc

SEQ ID NO: 36321 - DNA, 22 bp, synthetic construct
  misc_feature 1..22: note = chemically synthesized
  source 1..22: mol_type = other DNA
tattgatctctattttcctgga

SEQ ID NO: 36322 - DNA, 22 bp, synthetic construct
  misc_feature 1..22: note = chemically synthesized
  source 1..22: mol_type = other DNA
attgatctctattttcctggaa

SEQ ID NO: 36323 - DNA, 22 bp, synthetic construct
  misc_feature 1..22: note = chemically synthesized
  source 1..22: mol_type = other DNA
ttgatctctattttcctggaac

SEQ ID NO: 36324 - DNA, 22 bp, synthetic construct
  misc_feature 1..22: note = chemically synthesized
  source 1..22: mol_type = other DNA
atctctattttcctggaacaac

SEQ ID NO: 36325 - DNA, 22 bp, synthetic construct
  misc_feature 1..22: note = chemically synthesized
  source 1..22: mol_type = other DNA
tattttcctggaacaacatggg

SEQ ID NO: 36326 - DNA, 22 bp, synthetic construct
  misc_feature 1..22: note = chemically synthesized
  source 1..22: mol_type = other DNA
ttttcctggaacaacatggggg

SEQ ID NO: 36327 - DNA, 22 bp, synthetic construct
  misc_feature 1..22: note = chemically synthesized
  source 1..22: mol_type = other DNA
tcctggaacaacatgggggcta

SEQ ID NO: 36328 - DNA, 22 bp, synthetic construct
  misc_feature 1..22: note = chemically synthesized
  source 1..22: mol_type = other DNA
cctggaacaacatgggggctat

SEQ ID NO: 36329 - DNA, 22 bp, synthetic construct
  misc_feature 1..22: note = chemically synthesized
  source 1..22: mol_type = other DNA
ctggaacaacatgggggctatg

SEQ ID NO: 36330 - DNA, 22 bp, synthetic construct
  misc_feature 1..22: note = chemically synthesized
  source 1..22: mol_type = other DNA
gaacaacatgggggctatgttt

SEQ ID NO: 36331 - DNA, 22 bp, synthetic construct
  misc_feature 1..22: note = chemically synthesized
  source 1..22: mol_type = other DNA
tgtttagcgtgaggacaaagta

SEQ ID NO: 36332 - DNA, 22 bp, synthetic construct
  misc_feature 1..22: note = chemically synthesized
  source 1..22: mol_type = other DNA
agcgtgaggacaaagtatcaca

SEQ ID NO: 36333 - DNA, 22 bp, synthetic construct
  misc_feature 1..22: note = chemically synthesized
  source 1..22: mol_type = other DNA
gcgtgaggacaaagtatcacaa

SEQ ID NO: 36334 - DNA, 22 bp, synthetic construct
  misc_feature 1..22: note = chemically synthesized
  source 1..22: mol_type = other DNA
tcacctgaaagaaaagatgagc

SEQ ID NO: 36335 - DNA, 22 bp, synthetic construct
  misc_feature 1..22: note = chemically synthesized
  source 1..22: mol_type = other DNA
cacctgaaagaaaagatgagct

SEQ ID NO: 36336 - DNA, 22 bp, synthetic construct
  misc_feature 1..22: note = chemically synthesized
  source 1..22: mol_type = other DNA
acctgaaagaaaagatgagcta

SEQ ID NO: 36337 - DNA, 22 bp, synthetic construct
  misc_feature 1..22: note = chemically synthesized
  source 1..22: mol_type = other DNA
aaagaaaagatgagctaccatg

SEQ ID NO: 36338 - DNA, 22 bp, synthetic construct
  misc_feature 1..22: note = chemically synthesized
  source 1..22: mol_type = other DNA
ccatggtacatataacaatgag

SEQ ID NO: 36339 - DNA, 22 bp, synthetic construct
  misc_feature 1..22: note = chemically synthesized
  source 1..22: mol_type = other DNA
aaactctaagtcgtcatctggc

SEQ ID NO: 36340 - DNA, 22 bp, synthetic construct
  misc_feature 1..22: note = chemically synthesized
  source 1..22: mol_type = other DNA
taagtcgtcatctggcaacact

SEQ ID NO: 36341 - DNA, 22 bp, synthetic construct
  misc_feature 1..22: note = chemically synthesized
  source 1..22: mol_type = other DNA
agtcgtcatctggcaacactgc

SEQ ID NO: 36342 - DNA, 22 bp, synthetic construct
  misc_feature 1..22: note = chemically synthesized
  source 1..22: mol_type = other DNA
gcaacactgccaatttactaaa

SEQ ID NO: 36343 - DNA, 22 bp, synthetic construct
  misc_feature 1..22: note = chemically synthesized
  source 1..22: mol_type = other DNA
ccaatttactaaaaatcactat

SEQ ID NO: 36344 - DNA, 22 bp, synthetic construct
  misc_feature 1..22: note = chemically synthesized
  source 1..22: mol_type = other DNA
actaaaaatcactatttcaaag

SEQ ID NO: 36345 - DNA, 22 bp, synthetic construct
  misc_feature 1..22: note = chemically synthesized
  source 1..22: mol_type = other DNA
ctaaaaatcactatttcaaaga

SEQ ID NO: 36346 - DNA, 22 bp, synthetic construct
  misc_feature 1..22: note = chemically synthesized
  source 1..22: mol_type = other DNA
aaaatcactatttcaaagaagt

SEQ ID NO: 36347 - DNA, 22 bp, synthetic construct
  misc_feature 1..22: note = chemically synthesized
  source 1..22: mol_type = other DNA
tttcaaagaagtatagaataga

SEQ ID NO: 36348 - DNA, 22 bp, synthetic construct
  misc_feature 1..22: note = chemically synthesized
  source 1..22: mol_type = other DNA
caaagaagtatagaatagatat

SEQ ID NO: 36349 - DNA, 22 bp, synthetic construct
  misc_feature 1..22: note = chemically synthesized
  source 1..22: mol_type = other DNA
aaagaagtatagaatagatatc

SEQ ID NO: 36350 - DNA, 22 bp, synthetic construct
  misc_feature 1..22: note = chemically synthesized
  source 1..22: mol_type = other DNA
tttctctgcctctctctcgctc

SEQ ID NO: 36351 - DNA, 22 bp, synthetic construct
  misc_feature 1..22: note = chemically synthesized
  source 1..22: mol_type = other DNA
tctctgcctctctctcgctctc

SEQ ID NO: 36352 - DNA, 22 bp, synthetic construct
  misc_feature 1..22: note = chemically synthesized
  source 1..22: mol_type = other DNA
ctctgcctctctctcgctctct

SEQ ID NO: 36353 - DNA, 22 bp, synthetic construct
  misc_feature 1..22: note = chemically synthesized
  source 1..22: mol_type = other DNA
tctgcctctctctcgctctctc

SEQ ID NO: 36354 - DNA, 22 bp, synthetic construct
  misc_feature 1..22: note = chemically synthesized
  source 1..22: mol_type = other DNA
tgcctctctctcgctctctctc

SEQ ID NO: 36355 - DNA, 22 bp, synthetic construct
  misc_feature 1..22: note = chemically synthesized
  source 1..22: mol_type = other DNA
cctctctctcgctctctctctc

SEQ ID NO: 36356 - DNA, 22 bp, synthetic construct
  misc_feature 1..22: note = chemically synthesized
  source 1..22: mol_type = other DNA
tctctcgctctctctctctctc

SEQ ID NO: 36357 - DNA, 22 bp, synthetic construct
  misc_feature 1..22: note = chemically synthesized
  source 1..22: mol_type = other DNA
tctcgctctctctctctctctc

SEQ ID NO: 36358 - DNA, 22 bp, synthetic construct
  misc_feature 1..22: note = chemically synthesized
  source 1..22: mol_type = other DNA
tcgctctctctctctctctccc

SEQ ID NO: 36359 - DNA, 22 bp, synthetic construct
  misc_feature 1..22: note = chemically synthesized
  source 1..22: mol_type = other DNA
gctctctctctctctctccccc

SEQ ID NO: 36360 - DNA, 22 bp, synthetic construct
  misc_feature 1..22: note = chemically synthesized
  source 1..22: mol_type = other DNA
tctctctctctctcccccatct

SEQ ID NO: 36361 - DNA, 22 bp, synthetic construct
  misc_feature 1..22: note = chemically synthesized
  source 1..22: mol_type = other DNA
tctctctctctcccccatctct

SEQ ID NO: 36362 - DNA, 22 bp, synthetic construct
  misc_feature 1..22: note = chemically synthesized
  source 1..22: mol_type = other DNA
tctctctctcccccatctctct

SEQ ID NO: 36363 - DNA, 22 bp, synthetic construct
  misc_feature 1..22: note = chemically synthesized
  source 1..22: mol_type = other DNA
tctctctcccccatctctctct

SEQ ID NO: 36364 - DNA, 22 bp, synthetic construct
  misc_feature 1..22: note = chemically synthesized
  source 1..22: mol_type = other DNA
tctctcccccatctctctctgt

SEQ ID NO: 36365 - DNA, 22 bp, synthetic construct
  misc_feature 1..22: note = chemically synthesized
  source 1..22: mol_type = other DNA
tctcccccatctctctctgtct

SEQ ID NO: 36366 - DNA, 22 bp, synthetic construct
  misc_feature 1..22: note = chemically synthesized
  source 1..22: mol_type = other DNA
tcccccatctctctctgtctct

SEQ ID NO: 36367 - DNA, 22 bp, synthetic construct
  misc_feature 1..22: note = chemically synthesized
  source 1..22: mol_type = other DNA
ccccatctctctctgtctctct

SEQ ID NO: 36368 - DNA, 22 bp, synthetic construct
  misc_feature 1..22: note = chemically synthesized
  source 1..22: mol_type = other DNA
tctctgtctctctctctatata

SEQ ID NO: 36369 - DNA, 22 bp, synthetic construct
  misc_feature 1..22: note = chemically synthesized
  source 1..22: mol_type = other DNA
tctgtctctctctctatatata

SEQ ID NO: 36370 - DNA, 22 bp, synthetic construct
  misc_feature 1..22: note = chemically synthesized
  source 1..22: mol_type = other DNA
tgtctctctctctatatatatg

SEQ ID NO: 36371 - DNA, 22 bp, synthetic construct
  misc_feature 1..22: note = chemically synthesized
  source 1..22: mol_type = other DNA
tctctctctctatatatatgta

SEQ ID NO: 36372 - DNA, 22 bp, synthetic construct
  misc_feature 1..22: note = chemically synthesized
  source 1..22: mol_type = other DNA
tctctctatatatatgtataca

SEQ ID NO: 36373 - DNA, 22 bp, synthetic construct
  misc_feature 1..22: note = chemically synthesized
  source 1..22: mol_type = other DNA
tctctatatatatgtatacaca

SEQ ID NO: 36374 - DNA, 22 bp, synthetic construct
  misc_feature 1..22: note = chemically synthesized
  source 1..22: mol_type = other DNA
tctatatatatgtatacacaca

SEQ ID NO: 36375 - DNA, 22 bp, synthetic construct
  misc_feature 1..22: note = chemically synthesized
  source 1..22: mol_type = other DNA
tatatatatgtatacacacata

SEQ ID NO: 36376 - DNA, 22 bp, synthetic construct
  misc_feature 1..22: note = chemically synthesized
  source 1..22: mol_type = other DNA
tatatatgtatacacacatata

SEQ ID NO: 36377 - DNA, 22 bp, synthetic construct
  misc_feature 1..22: note = chemically synthesized
  source 1..22: mol_type = other DNA
tacacatatggagaaatttcac

SEQ ID NO: 36378 - DNA, 22 bp, synthetic construct
  misc_feature 1..22: note = chemically synthesized
  source 1..22: mol_type = other DNA
cactattttgtatatgcttaaa

SEQ ID NO: 36379 - DNA, 22 bp, synthetic construct
  misc_feature 1..22: note = chemically synthesized
  source 1..22: mol_type = other DNA
actattttgtatatgcttaaaa

SEQ ID NO: 36380 - DNA, 22 bp, synthetic construct
  misc_feature 1..22: note = chemically synthesized
  source 1..22: mol_type = other DNA
ttttgtatatgcttaaaaatta

SEQ ID NO: 36381 - DNA, 22 bp, synthetic construct
  misc_feature 1..22: note = chemically synthesized
  source 1..22: mol_type = other DNA
tgtatatgcttaaaaattacag

SEQ ID NO: 36382 - DNA, 22 bp, synthetic construct
  misc_feature 1..22: note = chemically synthesized
  source 1..22: mol_type = other DNA
gtatatgcttaaaaattacaga

SEQ ID NO: 36383 - DNA, 22 bp, synthetic construct
  misc_feature 1..22: note = chemically synthesized
  source 1..22: mol_type = other DNA
tatatgcttaaaaattacagac

SEQ ID NO: 36384 - DNA, 22 bp, synthetic construct
  misc_feature 1..22: note = chemically synthesized
  source 1..22: mol_type = other DNA
aaaaattacagactttggaagt

SEQ ID NO: 36385 - DNA, 22 bp, synthetic construct
  misc_feature 1..22: note = chemically synthesized
  source 1..22: mol_type = other DNA
aaaattacagactttggaagtc

SEQ ID NO: 36386 - DNA, 22 bp, synthetic construct
  misc_feature 1..22: note = chemically synthesized
  source 1..22: mol_type = other DNA
cagactttggaagtcatatgac

SEQ ID NO: 36387 - DNA, 22 bp, synthetic construct
  misc_feature 1..22: note = chemically synthesized
  source 1..22: mol_type = other DNA
tggaagtcatatgactatttca

SEQ ID NO: 36388 - DNA, 22 bp, synthetic construct
  misc_feature 1..22: note = chemically synthesized
  source 1..22: mol_type = other DNA
ggaagtcatatgactatttcag

SEQ ID NO: 36389 - DNA, 22 bp, synthetic construct
  misc_feature 1..22: note = chemically synthesized
  source 1..22: mol_type = other DNA
gaagtcatatgactatttcagt

SEQ ID NO: 36390 - DNA, 22 bp, synthetic construct
  misc_feature 1..22: note = chemically synthesized
  source 1..22: mol_type = other DNA
tttcagtgtgtgtggctactaa

SEQ ID NO: 36391 - DNA, 22 bp, synthetic construct
  misc_feature 1..22: note = chemically synthesized
  source 1..22: mol_type = other DNA
cagtgtgtgtggctactaatct

SEQ ID NO: 36392 - DNA, 22 bp, synthetic construct
  misc_feature 1..22: note = chemically synthesized
  source 1..22: mol_type = other DNA
agtgtgtgtggctactaatctc

SEQ ID NO: 36393 - DNA, 22 bp, synthetic construct
  misc_feature 1..22: note = chemically synthesized
  source 1..22: mol_type = other DNA
ctaatctcaccctcctgttcca

SEQ ID NO: 36394 - DNA, 22 bp, synthetic construct
  misc_feature 1..22: note = chemically synthesized
  source 1..22: mol_type = other DNA
atctcaccctcctgttccaaaa

SEQ ID NO: 36395 - DNA, 22 bp, synthetic construct
  misc_feature 1..22: note = chemically synthesized
  source 1..22: mol_type = other DNA
accctcctgttccaaaacacag

SEQ ID NO: 36396 - DNA, 22 bp, synthetic construct
  misc_feature 1..22: note = chemically synthesized
  source 1..22: mol_type = other DNA
ctgttccaaaacacagttgcag

SEQ ID NO: 36397 - DNA, 22 bp, synthetic construct
  misc_feature 1..22: note = chemically synthesized
  source 1..22: mol_type = other DNA
ttccaaaacacagttgcagaag

SEQ ID NO: 36398 - DNA, 22 bp, synthetic construct
  misc_feature 1..22: note = chemically synthesized
  source 1..22: mol_type = other DNA
caaaacacagttgcagaagcag

SEQ ID NO: 36399 - DNA, 22 bp, synthetic construct
  misc_feature 1..22: note = chemically synthesized
  source 1..22: mol_type = other DNA
cagaagcagaggaagtcattat

SEQ ID NO: 36400 - DNA, 22 bp, synthetic construct
  misc_feature 1..22: note = chemically synthesized
  source 1..22: mol_type = other DNA
tacacttagaacatcattttat

SEQ ID NO: 36401 - DNA, 22 bp, synthetic construct
  misc_feature 1..22: note = chemically synthesized
  source 1..22: mol_type = other DNA
agaacatcattttataaggcag

SEQ ID NO: 36402 - DNA, 22 bp, synthetic construct
  misc_feature 1..22: note = chemically synthesized
  source 1..22: mol_type = other DNA
gaacatcattttataaggcagc

SEQ ID NO: 36403 - DNA, 22 bp, synthetic construct
  misc_feature 1..22: note = chemically synthesized
  source 1..22: mol_type = other DNA
tataaggcagcaggtctggtag

SEQ ID NO: 36404 - DNA, 22 bp, synthetic construct
  misc_feature 1..22: note = chemically synthesized
  source 1..22: mol_type = other DNA
ataaggcagcaggtctggtagg

SEQ ID NO: 36405 - DNA, 22 bp, synthetic construct
  misc_feature 1..22: note = chemically synthesized
  source 1..22: mol_type = other DNA
taaggcagcaggtctggtagga

SEQ ID NO: 36406 - DNA, 22 bp, synthetic construct
  misc_feature 1..22: note = chemically synthesized
  source 1..22: mol_type = other DNA
gtaggaaggagattaggtgcta

SEQ ID NO: 36407 - DNA, 22 bp, synthetic construct
  misc_feature 1..22: note = chemically synthesized
  source 1..22: mol_type = other DNA
ggtgctacttgtgacaaaggtc

SEQ ID NO: 36408 - DNA, 22 bp, synthetic construct
  misc_feature 1..22: note = chemically synthesized
  source 1..22: mol_type = other DNA
cttgtgacaaaggtcagcaaat

SEQ ID NO: 36409 - DNA, 22 bp, synthetic construct
  misc_feature 1..22: note = chemically synthesized
  source 1..22: mol_type = other DNA
gtgacaaaggtcagcaaatatt

SEQ ID NO: 36410 - DNA, 22 bp, synthetic construct
  misc_feature 1..22: note = chemically synthesized
  source 1..22: mol_type = other DNA
tgacaaaggtcagcaaatattt

SEQ ID NO: 36411 - DNA, 22 bp, synthetic construct
  misc_feature 1..22: note = chemically synthesized
  source 1..22: mol_type = other DNA
gtgttcccagcacttttctaga

SEQ ID NO: 36412 - DNA, 22 bp, synthetic construct
  misc_feature 1..22: note = chemically synthesized
  source 1..22: mol_type = other DNA
tgttcccagcacttttctagat

SEQ ID NO: 36413 - DNA, 22 bp, synthetic construct
  misc_feature 1..22: note = chemically synthesized
  source 1..22: mol_type = other DNA
ccagcacttttctagatcctca

SEQ ID NO: 36414 - DNA, 22 bp, synthetic construct
  misc_feature 1..22: note = chemically synthesized
  source 1..22: mol_type = other DNA
ttctagatcctcagttaaaatc

SEQ ID NO: 36415 - DNA, 22 bp, synthetic construct
  misc_feature 1..22: note = chemically synthesized
  source 1..22: mol_type = other DNA
tctagatcctcagttaaaatca

SEQ ID NO: 36416 - DNA, 22 bp, synthetic construct
  misc_feature 1..22: note = chemically synthesized
  source 1..22: mol_type = other DNA
ctagatcctcagttaaaatcaa

SEQ ID NO: 36417 - DNA, 22 bp, synthetic construct
  misc_feature 1..22: note = chemically synthesized
  source 1..22: mol_type = other DNA
tagatcctcagttaaaatcaaa

SEQ ID NO: 36418 - DNA, 22 bp, synthetic construct
  misc_feature 1..22: note = chemically synthesized
  source 1..22: mol_type = other DNA
gatcctcagttaaaatcaaagc

SEQ ID NO: 36419 - DNA, 22 bp, synthetic construct
  misc_feature 1..22: note = chemically synthesized
  source 1..22: mol_type = other DNA
agttaaaatcaaagcagctgca

SEQ ID NO: 36420 - DNA, 22 bp, synthetic construct
  misc_feature 1..22: note = chemically synthesized
  source 1..22: mol_type = other DNA
aaatcaaagcagctgcagtctt

SEQ ID NO: 36421 - DNA, 22 bp, synthetic construct
  misc_feature 1..22: note = chemically synthesized
  source 1..22: mol_type = other DNA
cagtcttggcagtgggaggtga

SEQ ID NO: 36422 - DNA, 22 bp, synthetic construct
  misc_feature 1..22: note = chemically synthesized
  source 1..22: mol_type = other DNA
ggcagtgggaggtgatactcac

SEQ ID NO: 36423 - DNA, 22 bp, synthetic construct
  misc_feature 1..22: note = chemically synthesized
  source 1..22: mol_type = other DNA
gcagtgggaggtgatactcaca

SEQ ID NO: 36424 - DNA, 22 bp, synthetic construct
  misc_feature 1..22: note = chemically synthesized
  source 1..22: mol_type = other DNA
acactttgaacaagaccacctg

SEQ ID NO: 36425 - DNA, 22 bp, synthetic construct
  misc_feature 1..22: note = chemically synthesized
  source 1..22: mol_type = other DNA
tgaacaagaccacctgcactac

SEQ ID NO: 36426 - DNA, 22 bp, synthetic construct
  misc_feature 1..22: note = chemically synthesized
  source 1..22: mol_type = other DNA
gaacaagaccacctgcactacc

SEQ ID NO: 36427 - DNA, 22 bp, synthetic construct
  misc_feature 1..22: note = chemically synthesized
  source 1..22: mol_type = other DNA
aacaagaccacctgcactacct

SEQ ID NO: 36428 - DNA, 22 bp, synthetic construct
  misc_feature 1..22: note = chemically synthesized
  source 1..22: mol_type = other DNA
cactacctacaatggcagctcc

SEQ ID NO: 36429 - DNA, 22 bp, synthetic construct
  misc_feature 1..22: note = chemically synthesized
  source 1..22: mol_type = other DNA
cctacaatggcagctccaaata

SEQ ID NO: 36430 - DNA, 22 bp, synthetic construct
  misc_feature 1..22: note = chemically synthesized
  source 1..22: mol_type = other DNA
caatggcagctccaaatatttt

SEQ ID NO: 36431 - DNA, 22 bp, synthetic construct
  misc_feature 1..22: note = chemically synthesized
  source 1..22: mol_type = other DNA
caaatattttatatgaaagggg

SEQ ID NO: 36432 - DNA, 22 bp, synthetic construct
  misc_feature 1..22: note = chemically synthesized
  source 1..22: mol_type = other DNA
tatatgaaaggggcctagacat

SEQ ID NO: 36433 - DNA, 22 bp, synthetic construct
  misc_feature 1..22: note = chemically synthesized
  source 1..22: mol_type = other DNA
atatgaaaggggcctagacata

SEQ ID NO: 36434 - DNA, 22 bp, synthetic construct
  misc_feature 1..22: note = chemically synthesized
  source 1..22: mol_type = other DNA
tatgaaaggggcctagacatag

SEQ ID NO: 36435 - DNA, 22 bp, synthetic construct
  misc_feature 1..22: note = chemically synthesized
  source 1..22: mol_type = other DNA
gacatagcatgctgaatgaaaa

SEQ ID NO: 36436 - DNA, 22 bp, synthetic construct
  misc_feature 1..22: note = chemically synthesized
  source 1..22: mol_type = other DNA
aatgaaaaggaagtgagtagac

SEQ ID NO: 36437 - DNA, 22 bp, synthetic construct
  misc_feature 1..22: note = chemically synthesized
  source 1..22: mol_type = other DNA
gtgctttccttgaagctgtgca

SEQ ID NO: 36438 - DNA, 22 bp, synthetic construct
  misc_feature 1..22: note = chemically synthesized
  source 1..22: mol_type = other DNA
tccttgaagctgtgcaaccaag

SEQ ID NO: 36439 - DNA, 22 bp, synthetic construct
  misc_feature 1..22: note = chemically synthesized
  source 1..22: mol_type = other DNA
ccttgaagctgtgcaaccaagc

SEQ ID NO: 36440 - DNA, 22 bp, synthetic construct
  misc_feature 1..22: note = chemically synthesized
  source 1..22: mol_type = other DNA
cttgaagctgtgcaaccaagca

SEQ ID NO: 36441 - DNA, 22 bp, synthetic construct
  misc_feature 1..22: note = chemically synthesized
  source 1..22: mol_type = other DNA
gaagctgtgcaaccaagcatag

SEQ ID NO: 36442 - DNA, 22 bp, synthetic construct
  misc_feature 1..22: note = chemically synthesized
  source 1..22: mol_type = other DNA
aagctgtgcaaccaagcatagt

SEQ ID NO: 36443 - DNA, 22 bp, synthetic construct
  misc_feature 1..22: note = chemically synthesized
  source 1..22: mol_type = other DNA
tgcaaccaagcatagtttttac

SEQ ID NO: 36444 - DNA, 22 bp, synthetic construct
  misc_feature 1..22: note = chemically synthesized
  source 1..22: mol_type = other DNA
ttacatagatcgtgtgtttcac

SEQ ID NO: 36445 - DNA, 22 bp, synthetic construct
  misc_feature 1..22: note = chemically synthesized
  source 1..22: mol_type = other DNA
tacatagatcgtgtgtttcaca

SEQ ID NO: 36446 - DNA, 22 bp, synthetic construct
  misc_feature 1..22: note = chemically synthesized
  source 1..22: mol_type = other DNA
acatagatcgtgtgtttcacat

SEQ ID NO: 36447 - DNA, 22 bp, synthetic construct
  misc_feature 1..22: note = chemically synthesized
  source 1..22: mol_type = other DNA
catagatcgtgtgtttcacatg

SEQ ID NO: 36448 - DNA, 22 bp, synthetic construct
  misc_feature 1..22: note = chemically synthesized
  source 1..22: mol_type = other DNA
cacatggtgtgataacagcttg

SEQ ID NO: 36449 - DNA, 22 bp, synthetic construct
  misc_feature 1..22: note = chemically synthesized
  source 1..22: mol_type = other DNA
acatggtgtgataacagcttga

SEQ ID NO: 36450 - DNA, 22 bp, synthetic construct
  misc_feature 1..22: note = chemically synthesized
  source 1..22: mol_type = other DNA
gagatgccattgacatggccca

SEQ ID NO: 36451 - DNA, 22 bp, synthetic construct
  misc_feature 1..22: note = chemically synthesized
  source 1..22: mol_type = other DNA
agatgccattgacatggcccac

SEQ ID NO: 36452 - DNA, 22 bp, synthetic construct
  misc_feature 1..22: note = chemically synthesized
  source 1..22: mol_type = other DNA
acatggcccaccggcttatcca

SEQ ID NO: 36453 - DNA, 22 bp, synthetic construct
  misc_feature 1..22: note = chemically synthesized
  source 1..22: mol_type = other DNA
atccacatcagtaattagggca

SEQ ID NO: 36454 - DNA, 22 bp, synthetic construct
  misc_feature 1..22: note = chemically synthesized
  source 1..22: mol_type = other DNA
tccacatcagtaattagggcaa

SEQ ID NO: 36455 - DNA, 22 bp, synthetic construct
  misc_feature 1..22: note = chemically synthesized
  source 1..22: mol_type = other DNA
gggcaaagaaatcctaattact

SEQ ID NO: 36456 - DNA, 22 bp, synthetic construct
  misc_feature 1..22: note = chemically synthesized
  source 1..22: mol_type = other DNA
attactatgcatcccgtgattg

SEQ ID NO: 36457 - DNA, 22 bp, synthetic construct
  misc_feature 1..22: note = chemically synthesized
  source 1..22: mol_type = other DNA
ctatgcatcccgtgattgaagt

SEQ ID NO: 36458 - DNA, 22 bp, synthetic construct
  misc_feature 1..22: note = chemically synthesized
  source 1..22: mol_type = other DNA
tgcatcccgtgattgaagtaac

SEQ ID NO: 36459 - DNA, 22 bp, synthetic construct
  misc_feature 1..22: note = chemically synthesized
  source 1..22: mol_type = other DNA
aagtaacattgatgtatacata

SEQ ID NO: 36460 - DNA, 22 bp, synthetic construct
  misc_feature 1..22: note = chemically synthesized
  source 1..22: mol_type = other DNA
atgtatacatattttttcctat

SEQ ID NO: 36461 - DNA, 22 bp, synthetic construct
  misc_feature 1..22: note = chemically synthesized
  source 1..22: mol_type = other DNA
tttcctattatttctctttttg

SEQ ID NO: 36462 - DNA, 22 bp, synthetic construct
  misc_feature 1..22: note = chemically synthesized
  source 1..22: mol_type = other DNA
ttcctattatttctctttttgt

SEQ ID NO: 36463 - DNA, 22 bp, synthetic construct
  misc_feature 1..22: note = chemically synthesized
  source 1..22: mol_type = other DNA
tcctattatttctctttttgtg

SEQ ID NO: 36464 - DNA, 22 bp, synthetic construct
  misc_feature 1..22: note = chemically synthesized
  source 1..22: mol_type = other DNA
cctattatttctctttttgtgt

SEQ ID NO: 36465 - DNA, 22 bp, synthetic construct
  misc_feature 1..22: note = chemically synthesized
  source 1..22: mol_type = other DNA
ctattatttctctttttgtgtt

SEQ ID NO: 36466 - DNA, 22 bp, synthetic construct
  misc_feature 1..22: note = chemically synthesized
  source 1..22: mol_type = other DNA
ttatttctctttttgtgtttaa

SEQ ID NO: 36467 - DNA, 22 bp, synthetic construct
  misc_feature 1..22: note = chemically synthesized
  source 1..22: mol_type = other DNA
tttctctttttgtgtttaaaaa

SEQ ID NO: 36468 - DNA, 22 bp, synthetic construct
  misc_feature 1..22: note = chemically synthesized
  source 1..22: mol_type = other DNA
ctctttttgtgtttaaaaatgc

SEQ ID NO: 36469 - DNA, 22 bp, synthetic construct
  misc_feature 1..22: note = chemically synthesized
  source 1..22: mol_type = other DNA
tctttttgtgtttaaaaatgca

SEQ ID NO: 36470 - DNA, 22 bp, synthetic construct
  misc_feature 1..22: note = chemically synthesized
  source 1..22: mol_type = other DNA
tttttgtgtttaaaaatgcaat

SEQ ID NO: 36471 - DNA, 22 bp, synthetic construct
  misc_feature 1..22: note = chemically synthesized
  source 1..22: mol_type = other DNA
tttgtgtttaaaaatgcaatta

SEQ ID NO: 36472 - DNA, 22 bp, synthetic construct
  misc_feature 1..22: note = chemically synthesized
  source 1..22: mol_type = other DNA
ttgtgtttaaaaatgcaattat

SEQ ID NO: 36473 - DNA, 22 bp, synthetic construct
  misc_feature 1..22: note = chemically synthesized
  source 1..22: mol_type = other DNA
tgtgtttaaaaatgcaattatg

SEQ ID NO: 36474 - DNA, 22 bp, synthetic construct
  misc_feature 1..22: note = chemically synthesized
  source 1..22: mol_type = other DNA
gtgtttaaaaatgcaattatgg

SEQ ID NO: 36475 - DNA, 22 bp, synthetic construct
  misc_feature 1..22: note = chemically synthesized
  source 1..22: mol_type = other DNA
tgtttaaaaatgcaattatgga

SEQ ID NO: 36476 - DNA, 22 bp, synthetic construct
  misc_feature 1..22: note = chemically synthesized
  source 1..22: mol_type = other DNA
aaaaatgcaattatggactcat

SEQ ID NO: 36477 - DNA, 22 bp, synthetic construct
  misc_feature 1..22: note = chemically synthesized
  source 1..22: mol_type = other DNA
aaaatgcaattatggactcatt

SEQ ID NO: 36478 - DNA, 22 bp, synthetic construct
  misc_feature 1..22: note = chemically synthesized
  source 1..22: mol_type = other DNA
tggactcattcaaagtgaaagc

SEQ ID NO: 36479 - DNA, 22 bp, synthetic construct
  misc_feature 1..22: note = chemically synthesized
  source 1..22: mol_type = other DNA
attcaaagtgaaagctggtatg

SEQ ID NO: 36480 - DNA, 22 bp, synthetic construct
  misc_feature 1..22: note = chemically synthesized
  source 1..22: mol_type = other DNA
aaagtgaaagctggtatgacaa

SEQ ID NO: 36481 - DNA, 22 bp, synthetic construct
  misc_feature 1..22: note = chemically synthesized
  source 1..22: mol_type = other DNA
gtatgacaatacatgagctaac

SEQ ID NO: 36482 - DNA, 22 bp, synthetic construct
  misc_feature 1..22: note = chemically synthesized
  source 1..22: mol_type = other DNA
acttcctcattttatgaataaa

SEQ ID NO: 36483 - DNA, 22 bp, synthetic construct
  misc_feature 1..22: note = chemically synthesized
  source 1..22: mol_type = other DNA
cctcattttatgaataaatttt

SEQ ID NO: 36484 - DNA, 22 bp, synthetic construct
  misc_feature 1..22: note = chemically synthesized
  source 1..22: mol_type = other DNA
ctcattttatgaataaatttta

SEQ ID NO: 36485 - DNA, 22 bp, synthetic construct
  misc_feature 1..22: note = chemically synthesized
  source 1..22: mol_type = other DNA
attttatgaataaattttataa

SEQ ID NO: 36486 - DNA, 22 bp, synthetic construct
  misc_feature 1..22: note = chemically synthesized
  source 1..22: mol_type = other DNA
tatgaataaattttataaagaa

SEQ ID NO: 36487 - DNA, 22 bp, synthetic construct
  misc_feature 1..22: note = chemically synthesized
  source 1..22: mol_type = other DNA
atgaataaattttataaagaaa

SEQ ID NO: 36488 - DNA, 22 bp, synthetic construct
  misc_feature 1..22: note = chemically synthesized
  source 1..22: mol_type = other DNA
tgaataaattttataaagaaat

SEQ ID NO: 36489 - DNA, 22 bp, synthetic construct
  misc_feature 1..22: note = chemically synthesized
  source 1..22: mol_type = other DNA
tataaagaaataagctaatacc

SEQ ID NO: 36490 - DNA, 22 bp, synthetic construct
  misc_feature 1..22: note = chemically synthesized
  source 1..22: mol_type = other DNA
ataaagaaataagctaatacct

SEQ ID NO: 36491 - DNA, 22 bp, synthetic construct
  misc_feature 1..22: note = chemically synthesized
  source 1..22: mol_type = other DNA
taaagaaataagctaataccta

SEQ ID NO: 36492 - DNA, 22 bp, synthetic construct
  misc_feature 1..22: note = chemically synthesized
  source 1..22: mol_type = other DNA
atacctacagagtgtttattaa

SEQ ID NO: 36493 - DNA, 22 bp, synthetic construct
  misc_feature 1..22: note = chemically synthesized
  source 1..22: mol_type = other DNA
cagagtgtttattaaatgctag

SEQ ID NO: 36494 - DNA, 22 bp, synthetic construct
  misc_feature 1..22: note = chemically synthesized
  source 1..22: mol_type = other DNA
attaaatgctaggcacagttct

SEQ ID NO: 36495 - DNA, 22 bp, synthetic construct
  misc_feature 1..22: note = chemically synthesized
  source 1..22: mol_type = other DNA
ttaaatgctaggcacagttctg

SEQ ID NO: 36496 - DNA, 22 bp, synthetic construct
  misc_feature 1..22: note = chemically synthesized
  source 1..22: mol_type = other DNA
aatgctaggcacagttctgagt

SEQ ID NO: 36497 - DNA, 22 bp, synthetic construct
  misc_feature 1..22: note = chemically synthesized
  source 1..22: mol_type = other DNA
ggcacagttctgagtgatttac

SEQ ID NO: 36498 - DNA, 22 bp, synthetic construct
  misc_feature 1..22: note = chemically synthesized
  source 1..22: mol_type = other DNA
tgagtgatttacaactggtatt

SEQ ID NO: 36499 - DNA, 22 bp, synthetic construct
  misc_feature 1..22: note = chemically synthesized
  source 1..22: mol_type = other DNA
agtgatttacaactggtatttc

SEQ ID NO: 36500 - DNA, 22 bp, synthetic construct
  misc_feature 1..22: note = chemically synthesized
  source 1..22: mol_type = other DNA
acaactggtatttcttttaatt

SEQ ID NO: 36501 - DNA, 22 bp, synthetic construct
  misc_feature 1..22: note = chemically synthesized
  source 1..22: mol_type = other DNA
caactggtatttcttttaattt

SEQ ID NO: 36502 - DNA, 22 bp, synthetic construct
  misc_feature 1..22: note = chemically synthesized
  source 1..22: mol_type = other DNA
gtatttcttttaattttcacaa

SEQ ID NO: 36503 - DNA, 22 bp, synthetic construct
  misc_feature 1..22: note = chemically synthesized
  source 1..22: mol_type = other DNA
cttttaattttcacaacattat

SEQ ID NO: 36504 - DNA, 22 bp, synthetic construct
  misc_feature 1..22: note = chemically synthesized
  source 1..22: mol_type = other DNA
ttttaattttcacaacattatt

SEQ ID NO: 36505 - DNA, 22 bp, synthetic construct
  misc_feature 1..22: note = chemically synthesized
  source 1..22: mol_type = other DNA
ttaattttcacaacattattac

SEQ ID NO: 36506 - DNA, 22 bp, synthetic construct
  misc_feature 1..22: note = chemically synthesized
  source 1..22: mol_type = other DNA
taattttcacaacattattaca

SEQ ID NO: 36507 - DNA, 22 bp, synthetic construct
  misc_feature 1..22: note = chemically synthesized
  source 1..22: mol_type = other DNA
aattttcacaacattattacag

SEQ ID NO: 36508 - DNA, 22 bp, synthetic construct
  misc_feature 1..22: note = chemically synthesized
  source 1..22: mol_type = other DNA
attttcacaacattattacagg

SEQ ID NO: 36509 - DNA, 22 bp, synthetic construct
  misc_feature 1..22: note = chemically synthesized
  source 1..22: mol_type = other DNA
tcacaacattattacaggtaga

SEQ ID NO: 36510 - DNA, 22 bp, synthetic construct
  misc_feature 1..22: note = chemically synthesized
  source 1..22: mol_type = other DNA
cacaacattattacaggtagat

SEQ ID NO: 36511 - DNA, 22 bp, synthetic construct
  misc_feature 1..22: note = chemically synthesized
  source 1..22: mol_type = other DNA
acaacattattacaggtagatt

SEQ ID NO: 36512 - DNA, 22 bp, synthetic construct
  misc_feature 1..22: note = chemically synthesized
  source 1..22: mol_type = other DNA
ttacaggtagattttatatatg

SEQ ID NO: 36513 - DNA, 22 bp, synthetic construct
  misc_feature 1..22: note = chemically synthesized
  source 1..22: mol_type = other DNA
caggtagattttatatatggag

SEQ ID NO: 36514 - DNA, 22 bp, synthetic construct
  misc_feature 1..22: note = chemically synthesized
  source 1..22: mol_type = other DNA
tatatatggagaaactgaggca

SEQ ID NO: 36515 - DNA, 22 bp, synthetic construct
  misc_feature 1..22: note = chemically synthesized
  source 1..22: mol_type = other DNA
atatatggagaaactgaggcac

SEQ ID NO: 36516 - DNA, 22 bp, synthetic construct
  misc_feature 1..22: note = chemically synthesized
  source 1..22: mol_type = other DNA
tatatggagaaactgaggcaca

SEQ ID NO: 36517 - DNA, 22 bp, synthetic construct
  misc_feature 1..22: note = chemically synthesized
  source 1..22: mol_type = other DNA
aggcacagagatgctatgtaat

SEQ ID NO: 36518 - DNA, 22 bp, synthetic construct
  misc_feature 1..22: note = chemically synthesized
  source 1..22: mol_type = other DNA
tgtaataaatctcaacattacc

SEQ ID NO: 36519 - DNA, 22 bp, synthetic construct
  misc_feature 1..22: note = chemically synthesized
  source 1..22: mol_type = other DNA
aacattacccaggtgatggtgg

SEQ ID NO: 36520 - DNA, 22 bp, synthetic construct
  misc_feature 1..22: note = chemically synthesized
  source 1..22: mol_type = other DNA
cccaggtgatggtggagttgga

SEQ ID NO: 36521 - DNA, 22 bp, synthetic construct
  misc_feature 1..22: note = chemically synthesized
  source 1..22: mol_type = other DNA
gaattccaaatcatgcagtctg

SEQ ID NO: 36522 - DNA, 22 bp, synthetic construct
  misc_feature 1..22: note = chemically synthesized
  source 1..22: mol_type = other DNA
caaatcatgcagtctgacttta

SEQ ID NO: 36523 - DNA, 22 bp, synthetic construct
  misc_feature 1..22: note = chemically synthesized
  source 1..22: mol_type = other DNA
actttagctgtagacagcaaga

SEQ ID NO: 36524 - DNA, 22 bp, synthetic construct
  misc_feature 1..22: note = chemically synthesized
  source 1..22: mol_type = other DNA
tagctgtagacagcaagatagt

SEQ ID NO: 36525 - DNA, 22 bp, synthetic construct
  misc_feature 1..22: note = chemically synthesized
  source 1..22: mol_type = other DNA
agctgtagacagcaagatagta

SEQ ID NO: 36526 - DNA, 22 bp, synthetic construct
  misc_feature 1..22: note = chemically synthesized
  source 1..22: mol_type = other DNA
gctgtagacagcaagatagtaa

SEQ ID NO: 36527 - DNA, 22 bp, synthetic construct
  misc_feature 1..22: note = chemically synthesized
  source 1..22: mol_type = other DNA
tagacagcaagatagtaagtaa

SEQ ID NO: 36528 - DNA, 22 bp, synthetic construct
  misc_feature 1..22: note = chemically synthesized
  source 1..22: mol_type = other DNA
atggatctttttgcttttgctt

SEQ ID NO: 36529 - DNA, 22 bp, synthetic construct
  misc_feature 1..22: note = chemically synthesized
  source 1..22: mol_type = other DNA
tttgcttttgcttgtttgtttg

SEQ ID NO: 36530 - DNA, 22 bp, synthetic construct
  misc_feature 1..22: note = chemically synthesized
  source 1..22: mol_type = other DNA
ttgcttttgcttgtttgtttga

SEQ ID NO: 36531 - DNA, 22 bp, synthetic construct
  misc_feature 1..22: note = chemically synthesized
  source 1..22: mol_type = other DNA
tgcttttgcttgtttgtttgaa

SEQ ID NO: 36532 - DNA, 22 bp, synthetic construct
  misc_feature 1..22: note = chemically synthesized
  source 1..22: mol_type = other DNA
gcttttgcttgtttgtttgaaa

SEQ ID NO: 36533 - DNA, 22 bp, synthetic construct
  misc_feature 1..22: note = chemically synthesized
  source 1..22: mol_type = other DNA
cttttgcttgtttgtttgaaac

SEQ ID NO: 36534 - DNA, 22 bp, synthetic construct
  misc_feature 1..22: note = chemically synthesized
  source 1..22: mol_type = other DNA
ttgcttgtttgtttgaaacagg

SEQ ID NO: 36535 - DNA, 22 bp, synthetic construct
  misc_feature 1..22: note = chemically synthesized
  source 1..22: mol_type = other DNA
tgcttgtttgtttgaaacaggg

SEQ ID NO: 36536 - DNA, 22 bp, synthetic construct
  misc_feature 1..22: note = chemically synthesized
  source 1..22: mol_type = other DNA
gcttgtttgtttgaaacagggt

SEQ ID NO: 36537 - DNA, 22 bp, synthetic construct
  misc_feature 1..22: note = chemically synthesized
  source 1..22: mol_type = other DNA
cttgtttgtttgaaacagggtc

SEQ ID NO: 36538 - DNA, 22 bp, synthetic construct
  misc_feature 1..22: note = chemically synthesized
  source 1..22: mol_type = other DNA
gtttgtttgaaacagggtctca

SEQ ID NO: 36539 - DNA, 22 bp, synthetic construct
  misc_feature 1..22: note = chemically synthesized
  source 1..22: mol_type = other DNA
tttgtttgaaacagggtctcac

SEQ ID NO: 36540 - DNA, 22 bp, synthetic construct
  misc_feature 1..22: note = chemically synthesized
  source 1..22: mol_type = other DNA
gtttgaaacagggtctcactct

SEQ ID NO: 36541 - DNA, 22 bp, synthetic construct
  misc_feature 1..22: note = chemically synthesized
  source 1..22: mol_type = other DNA
tttgaaacagggtctcactctg

SEQ ID NO: 36542 - DNA, 22 bp, synthetic construct
  misc_feature 1..22: note = chemically synthesized
  source 1..22: mol_type = other DNA
gaaacagggtctcactctgtca

SEQ ID NO: 36543 - DNA, 22 bp, synthetic construct
  misc_feature 1..22: note = chemically synthesized
  source 1..22: mol_type = other DNA
aaacagggtctcactctgtcac

SEQ ID NO: 36544 - DNA, 22 bp, synthetic construct
  misc_feature 1..22: note = chemically synthesized
  source 1..22: mol_type = other DNA
actctgtcaccccggctggagt

SEQ ID NO: 36545 - DNA, 22 bp, synthetic construct
  misc_feature 1..22: note = chemically synthesized
  source 1..22: mol_type = other DNA
tgtcaccccggctggagtgcaa

SEQ ID NO: 36546 - DNA, 22 bp, synthetic construct
  misc_feature 1..22: note = chemically synthesized
  source 1..22: mol_type = other DNA
tcaccccggctggagtgcaatg

SEQ ID NO: 36547 - DNA, 22 bp, synthetic construct
  misc_feature 1..22: note = chemically synthesized
  source 1..22: mol_type = other DNA
gagtgcaatggtgcaatcttgc

SEQ ID NO: 36548 - DNA, 22 bp, synthetic construct
  misc_feature 1..22: note = chemically synthesized
  source 1..22: mol_type = other DNA
gctcactgaagcctcactagaa

SEQ ID NO: 36549 - DNA, 22 bp, synthetic construct
  misc_feature 1..22: note = chemically synthesized
  source 1..22: mol_type = other DNA
ctcactgaagcctcactagaac

SEQ ID NO: 36550 - DNA, 22 bp, synthetic construct
  misc_feature 1..22: note = chemically synthesized
  source 1..22: mol_type = other DNA
actgaagcctcactagaacgcc

SEQ ID NO: 36551 - DNA, 22 bp, synthetic construct
  misc_feature 1..22: note = chemically synthesized
  source 1..22: mol_type = other DNA
aagcctcactagaacgcctgga

SEQ ID NO: 36552 - DNA, 22 bp, synthetic construct
  misc_feature 1..22: note = chemically synthesized
  source 1..22: mol_type = other DNA
actagaacgcctggattcaatt

SEQ ID NO: 36553 - DNA, 22 bp, synthetic construct
  misc_feature 1..22: note = chemically synthesized
  source 1..22: mol_type = other DNA
gaacgcctggattcaattgatc

SEQ ID NO: 36554 - DNA, 22 bp, synthetic construct
  misc_feature 1..22: note = chemically synthesized
  source 1..22: mol_type = other DNA
gattcaattgatcctcctgctt

SEQ ID NO: 36555 - DNA, 22 bp, synthetic construct
  misc_feature 1..22: note = chemically synthesized
  source 1..22: mol_type = other DNA
aattgatcctcctgctttagcc

SEQ ID NO: 36556 - DNA, 22 bp, synthetic construct
  misc_feature 1..22: note = chemically synthesized
  source 1..22: mol_type = other DNA
atcctcctgctttagcctctca

SEQ ID NO: 36557 - DNA, 22 bp, synthetic construct
  misc_feature 1..22: note = chemically synthesized
  source 1..22: mol_type = other DNA
ctgctttagcctctcaggtagc

SEQ ID NO: 36558 - DNA, 22 bp, synthetic construct
  misc_feature 1..22: note = chemically synthesized
  source 1..22: mol_type = other DNA
ctttagcctctcaggtagctag

SEQ ID NO: 36559 - DNA, 22 bp, synthetic construct
  misc_feature 1..22: note = chemically synthesized
  source 1..22: mol_type = other DNA
tagcctctcaggtagctaggac

SEQ ID NO: 36560 - DNA, 22 bp, synthetic construct
  misc_feature 1..22: note = chemically synthesized
  source 1..22: mol_type = other DNA
agcctctcaggtagctaggact

SEQ ID NO: 36561 - DNA, 22 bp, synthetic construct
  misc_feature 1..22: note = chemically synthesized
  source 1..22: mol_type = other DNA
gcctctcaggtagctaggacta

SEQ ID NO: 36562 - DNA, 22 bp, synthetic construct
  misc_feature 1..22: note = chemically synthesized
  source 1..22: mol_type = other DNA
tcaggtagctaggactacaggt

SEQ ID NO: 36563 - DNA, 22 bp, synthetic construct
  misc_feature 1..22: note = chemically synthesized
  source 1..22: mol_type = other DNA
aggtagctaggactacaggtgt

SEQ ID NO: 36564 - DNA, 22 bp, synthetic construct
  misc_feature 1..22: note = chemically synthesized
  source 1..22: mol_type = other DNA
ggactacaggtgtgagcctcca

SEQ ID NO: 36565 - DNA, 22 bp, synthetic construct
  misc_feature 1..22: note = chemically synthesized
  source 1..22: mol_type = other DNA
caggtgtgagcctccatggcca

SEQ ID NO: 36566 - DNA, 22 bp, synthetic construct
  misc_feature 1..22: note = chemically synthesized
  source 1..22: mol_type = other DNA
catggccagctagagaaatttt

SEQ ID NO: 36567 - DNA, 22 bp, synthetic construct
  misc_feature 1..22: note = chemically synthesized
  source 1..22: mol_type = other DNA
gagaaattttttaaatttctgt

SEQ ID NO: 36568 - DNA, 22 bp, synthetic construct
  misc_feature 1..22: note = chemically synthesized
  source 1..22: mol_type = other DNA
tttaaatttctgtagaaacagg

SEQ ID NO: 36569 - DNA, 22 bp, synthetic construct
  misc_feature 1..22: note = chemically synthesized
  source 1..22: mol_type = other DNA
ttaaatttctgtagaaacaggg

SEQ ID NO: 36570 - DNA, 22 bp, synthetic construct
  misc_feature 1..22: note = chemically synthesized
  source 1..22: mol_type = other DNA
taaatttctgtagaaacagggt

SEQ ID NO: 36571 - DNA, 22 bp, synthetic construct
  misc_feature 1..22: note = chemically synthesized
  source 1..22: mol_type = other DNA
aaatttctgtagaaacagggtc

SEQ ID NO: 36572 - DNA, 22 bp, synthetic construct
  misc_feature 1..22: note = chemically synthesized
  source 1..22: mol_type = other DNA
aatttctgtagaaacagggtct

SEQ ID NO: 36573 - DNA, 22 bp, synthetic construct
  misc_feature 1..22: note = chemically synthesized
  source 1..22: mol_type = other DNA
ctgtagaaacagggtctcccta

SEQ ID NO: 36574 - DNA, 22 bp, synthetic construct
  misc_feature 1..22: note = chemically synthesized
  source 1..22: mol_type = other DNA
tgtagaaacagggtctccctat

SEQ ID NO: 36575 - DNA, 22 bp, synthetic construct
  misc_feature 1..22: note = chemically synthesized
  source 1..22: mol_type = other DNA
tagaaacagggtctccctatgt

SEQ ID NO: 36576 - DNA, 22 bp, synthetic construct
  misc_feature 1..22: note = chemically synthesized
  source 1..22: mol_type = other DNA
cctatgttccccaggctggtat

SEQ ID NO: 36577 - DNA, 22 bp, synthetic construct
  misc_feature 1..22: note = chemically synthesized
  source 1..22: mol_type = other DNA
tgttccccaggctggtatccaa

SEQ ID NO: 36578 - DNA, 22 bp, synthetic construct
  misc_feature 1..22: note = chemically synthesized
  source 1..22: mol_type = other DNA
cccaggctggtatccaactctt

SEQ ID NO: 36579 - DNA, 22 bp, synthetic construct
  misc_feature 1..22: note = chemically synthesized
  source 1..22: mol_type = other DNA
gtatccaactcttggtctcaaa

SEQ ID NO: 36580 - DNA, 22 bp, synthetic construct
  misc_feature 1..22: note = chemically synthesized
  source 1..22: mol_type = other DNA
ttggtctcaaacaattctccca

SEQ ID NO: 36581 - DNA, 22 bp, synthetic construct
  misc_feature 1..22: note = chemically synthesized
  source 1..22: mol_type = other DNA
ggtctcaaacaattctcccacc

SEQ ID NO: 36582 - DNA, 22 bp, synthetic construct
  misc_feature 1..22: note = chemically synthesized
  source 1..22: mol_type = other DNA
gtctcaaacaattctcccacct

SEQ ID NO: 36583 - DNA, 22 bp, synthetic construct
  misc_feature 1..22: note = chemically synthesized
  source 1..22: mol_type = other DNA
aaacaattctcccacctcagcc

SEQ ID NO: 36584 - DNA, 22 bp, synthetic construct
  misc_feature 1..22: note = chemically synthesized
  source 1..22: mol_type = other DNA
tcccacctcagccttgaaaagt

SEQ ID NO: 36585 - DNA, 22 bp, synthetic construct
  misc_feature 1..22: note = chemically synthesized
  source 1..22: mol_type = other DNA
ccacctcagccttgaaaagtgt

SEQ ID NO: 36586 - DNA, 22 bp, synthetic construct
  misc_feature 1..22: note = chemically synthesized
  source 1..22: mol_type = other DNA
agccttgaaaagtgttgagatt

SEQ ID NO: 36587 - DNA, 22 bp, synthetic construct
  misc_feature 1..22: note = chemically synthesized
  source 1..22: mol_type = other DNA
gaaaagtgttgagattacaggt

SEQ ID NO: 36588 - DNA, 22 bp, synthetic construct
  misc_feature 1..22: note = chemically synthesized
  source 1..22: mol_type = other DNA
aaaagtgttgagattacaggtg

SEQ ID NO: 36589 - DNA, 22 bp, synthetic construct
  misc_feature 1..22: note = chemically synthesized
  source 1..22: mol_type = other DNA
agattacaggtgtgaatcacca

SEQ ID NO: 36590 - DNA, 22 bp, synthetic construct
  misc_feature 1..22: note = chemically synthesized
  source 1..22: mol_type = other DNA
caggtgtgaatcaccatgctgg

SEQ ID NO: 36591 - DNA, 22 bp, synthetic construct
  misc_feature 1..22: note = chemically synthesized
  source 1..22: mol_type = other DNA
ggccttgatggatctttaaaag

SEQ ID NO: 36592 - DNA, 22 bp, synthetic construct
  misc_feature 1..22: note = chemically synthesized
  source 1..22: mol_type = other DNA
gatggatctttaaaagtggtgg

SEQ ID NO: 36593 - DNA, 22 bp, synthetic construct
  misc_feature 1..22: note = chemically synthesized
  source 1..22: mol_type = other DNA
atggatctttaaaagtggtggg

SEQ ID NO: 36594 - DNA, 22 bp, synthetic construct
  misc_feature 1..22: note = chemically synthesized
  source 1..22: mol_type = other DNA
taaaagtggtggggggtaggag

SEQ ID NO: 36595 - DNA, 22 bp, synthetic construct
  misc_feature 1..22: note = chemically synthesized
  source 1..22: mol_type = other DNA
aaaagtggtggggggtaggaga

SEQ ID NO: 36596 - DNA, 22 bp, synthetic construct
  misc_feature 1..22: note = chemically synthesized
  source 1..22: mol_type = other DNA
aaagtggtggggggtaggagaa

SEQ ID NO: 36597 - DNA, 22 bp, synthetic construct
  misc_feature 1..22: note = chemically synthesized
  source 1..22: mol_type = other DNA
ggtctcgggaaggatgggatcc

SEQ ID NO: 36598 - DNA, 22 bp, synthetic construct
  misc_feature 1..22: note = chemically synthesized
  source 1..22: mol_type = other DNA
gggaaggatgggatccttttca

SEQ ID NO: 36599 - DNA, 22 bp, synthetic construct
  misc_feature 1..22: note = chemically synthesized
  source 1..22: mol_type = other DNA
ttcattttgctctagagaaaag

SEQ ID NO: 36600 - DNA, 22 bp, synthetic construct
  misc_feature 1..22: note = chemically synthesized
  source 1..22: mol_type = other DNA
tcattttgctctagagaaaagc

SEQ ID NO: 36601 - DNA, 22 bp, synthetic construct
  misc_feature 1..22: note = chemically synthesized
  source 1..22: mol_type = other DNA
cattttgctctagagaaaagcc

SEQ ID NO: 36602 - DNA, 22 bp, synthetic construct
  misc_feature 1..22: note = chemically synthesized
  source 1..22: mol_type = other DNA
attttgctctagagaaaagcca

SEQ ID NO: 36603 - DNA, 22 bp, synthetic construct
  misc_feature 1..22: note = chemically synthesized
  source 1..22: mol_type = other DNA
tgctctagagaaaagccatttg

SEQ ID NO: 36604 - DNA, 22 bp, synthetic construct
  misc_feature 1..22: note = chemically synthesized
  source 1..22: mol_type = other DNA
gctctagagaaaagccatttgg

SEQ ID NO: 36605 - DNA, 22 bp, synthetic construct
  misc_feature 1..22: note = chemically synthesized
  source 1..22: mol_type = other DNA
ctctagagaaaagccatttgga

SEQ ID NO: 36606 - DNA, 22 bp, synthetic construct
  misc_feature 1..22: note = chemically synthesized
  source 1..22: mol_type = other DNA
tagagaaaagccatttggaaaa

SEQ ID NO: 36607 - DNA, 22 bp, synthetic construct
  misc_feature 1..22: note = chemically synthesized
  source 1..22: mol_type = other DNA
gagaaaagccatttggaaaact

SEQ ID NO: 36608 - DNA, 22 bp, synthetic construct
  misc_feature 1..22: note = chemically synthesized
  source 1..22: mol_type = other DNA
ggaaaacttctgtgttaacaaa

SEQ ID NO: 36609 - DNA, 22 bp, synthetic construct
  misc_feature 1..22: note = chemically synthesized
  source 1..22: mol_type = other DNA
gaaaacttctgtgttaacaaaa

SEQ ID NO: 36610 - DNA, 22 bp, synthetic construct
  misc_feature 1..22: note = chemically synthesized
  source 1..22: mol_type = other DNA
ctgtgttaacaaaaaacagccg

SEQ ID NO: 36611 - DNA, 22 bp, synthetic construct
  misc_feature 1..22: note = chemically synthesized
  source 1..22: mol_type = other DNA
tgtgttaacaaaaaacagccga

SEQ ID NO: 36612 - DNA, 22 bp, synthetic construct
  misc_feature 1..22: note = chemically synthesized
  source 1..22: mol_type = other DNA
tgttaacaaaaaacagccgagt

SEQ ID NO: 36613 - DNA, 22 bp, synthetic construct
  misc_feature 1..22: note = chemically synthesized
  source 1..22: mol_type = other DNA
acaaaaaacagccgagtagcct

SEQ ID NO: 36614 - DNA, 22 bp, synthetic construct
  misc_feature 1..22: note = chemically synthesized
  source 1..22: mol_type = other DNA
gtattaaactttagagcagttg

SEQ ID NO: 36615 - DNA, 22 bp, synthetic construct
  misc_feature 1..22: note = chemically synthesized
  source 1..22: mol_type = other DNA
aactttagagcagttgttcttt

SEQ ID NO: 36616 - DNA, 22 bp, synthetic construct
  misc_feature 1..22: note = chemically synthesized
  source 1..22: mol_type = other DNA
tagagcagttgttctttacggc

SEQ ID NO: 36617 - DNA, 22 bp, synthetic construct
  misc_feature 1..22: note = chemically synthesized
  source 1..22: mol_type = other DNA
agagcagttgttctttacggca

SEQ ID NO: 36618 - DNA, 22 bp, synthetic construct
  misc_feature 1..22: note = chemically synthesized
  source 1..22: mol_type = other DNA
gagcagttgttctttacggcaa

SEQ ID NO: 36619 - DNA, 22 bp, synthetic construct
  misc_feature 1..22: note = chemically synthesized
  source 1..22: mol_type = other DNA
ttctttacggcaattacagggg

SEQ ID NO: 36620 - DNA, 22 bp, synthetic construct
  misc_feature 1..22: note = chemically synthesized
  source 1..22: mol_type = other DNA
tttacggcaattacaggggcct

SEQ ID NO: 36621 - DNA, 22 bp, synthetic construct
  misc_feature 1..22: note = chemically synthesized
  source 1..22: mol_type = other DNA
tacggcaattacaggggccttc

SEQ ID NO: 36622 - DNA, 22 bp, synthetic construct
  misc_feature 1..22: note = chemically synthesized
  source 1..22: mol_type = other DNA
acggcaattacaggggccttca

SEQ ID NO: 36623 - DNA, 22 bp, synthetic construct
  misc_feature 1..22: note = chemically synthesized
  source 1..22: mol_type = other DNA
cggcaattacaggggccttcag

SEQ ID NO: 36624 - DNA, 22 bp, synthetic construct
  misc_feature 1..22: note = chemically synthesized
  source 1..22: mol_type = other DNA
caggggccttcaggaagctgat

SEQ ID NO: 36625 - DNA, 22 bp, synthetic construct
  misc_feature 1..22: note = chemically synthesized
  source 1..22: mol_type = other DNA
caggaagctgatggaagtgtga

SEQ ID NO: 36626 - DNA, 22 bp, synthetic construct
  misc_feature 1..22: note = chemically synthesized
  source 1..22: mol_type = other DNA
aggaagctgatggaagtgtgaa

SEQ ID NO: 36627 - DNA, 22 bp, synthetic construct
  misc_feature 1..22: note = chemically synthesized
  source 1..22: mol_type = other DNA
atggaagtgtgaagtcctcttc

SEQ ID NO: 36628 - DNA, 22 bp, synthetic construct
  misc_feature 1..22: note = chemically synthesized
  source 1..22: mol_type = other DNA
ttctcagagaaaagtacttcta

SEQ ID NO: 36629 - DNA, 22 bp, synthetic construct
  misc_feature 1..22: note = chemically synthesized
  source 1..22: mol_type = other DNA
ctcagagaaaagtacttctata

SEQ ID NO: 36630 - DNA, 22 bp, synthetic construct
  misc_feature 1..22: note = chemically synthesized
  source 1..22: mol_type = other DNA
tcagagaaaagtacttctatat

SEQ ID NO: 36631 - DNA, 22 bp, synthetic construct
  misc_feature 1..22: note = chemically synthesized
  source 1..22: mol_type = other DNA
agagaaaagtacttctatatac

SEQ ID NO: 36632 - DNA, 22 bp, synthetic construct
  misc_feature 1..22: note = chemically synthesized
  source 1..22: mol_type = other DNA
ctatatacgtgcacctaatttt

SEQ ID NO: 36633 - DNA, 22 bp, synthetic construct
  misc_feature 1..22: note = chemically synthesized
  source 1..22: mol_type = other DNA
tatatacgtgcacctaattttt

SEQ ID NO: 36634 - DNA, 22 bp, synthetic construct
  misc_feature 1..22: note = chemically synthesized
  source 1..22: mol_type = other DNA
tatacgtgcacctaatttttag

SEQ ID NO: 36635 - DNA, 22 bp, synthetic construct
  misc_feature 1..22: note = chemically synthesized
  source 1..22: mol_type = other DNA
atttttagatataatttctgaa

SEQ ID NO: 36636 - DNA, 22 bp, synthetic construct
  misc_feature 1..22: note = chemically synthesized
  source 1..22: mol_type = other DNA
ttagatataatttctgaaggtt

SEQ ID NO: 36637 - DNA, 22 bp, synthetic construct
  misc_feature 1..22: note = chemically synthesized
  source 1..22: mol_type = other DNA
tagatataatttctgaaggttt

SEQ ID NO: 36638 - DNA, 22 bp, synthetic construct
  misc_feature 1..22: note = chemically synthesized
  source 1..22: mol_type = other DNA
agatataatttctgaaggttta

SEQ ID NO: 36639 - DNA, 22 bp, synthetic construct
  misc_feature 1..22: note = chemically synthesized
  source 1..22: mol_type = other DNA
gatataatttctgaaggtttag

SEQ ID NO: 36640 - DNA, 22 bp, synthetic construct
  misc_feature 1..22: note = chemically synthesized
  source 1..22: mol_type = other DNA
ctgaaggtttagaaactccttg

SEQ ID NO: 36641 - DNA, 22 bp, synthetic construct
  misc_feature 1..22: note = chemically synthesized
  source 1..22: mol_type = other DNA
tgaaggtttagaaactccttga

SEQ ID NO: 36642 - DNA, 22 bp, synthetic construct
  misc_feature 1..22: note = chemically synthesized
  source 1..22: mol_type = other DNA
aaggtttagaaactccttgagt

SEQ ID NO: 36643 - DNA, 22 bp, synthetic construct
  misc_feature 1..22: note = chemically synthesized
  source 1..22: mol_type = other DNA
agaaactccttgagttcactta

SEQ ID NO: 36644 - DNA, 22 bp, synthetic construct
  misc_feature 1..22: note = chemically synthesized
  source 1..22: mol_type = other DNA
gaaactccttgagttcacttat

SEQ ID NO: 36645 - DNA, 22 bp, synthetic construct
  misc_feature 1..22: note = chemically synthesized
  source 1..22: mol_type = other DNA
cttgagttcacttatatcaaag

SEQ ID NO: 36646 - DNA, 22 bp, synthetic construct
  misc_feature 1..22: note = chemically synthesized
  source 1..22: mol_type = other DNA
gagttcacttatatcaaagtcc

SEQ ID NO: 36647 - DNA, 22 bp, synthetic construct
  misc_feature 1..22: note = chemically synthesized
  source 1..22: mol_type = other DNA
agttcacttatatcaaagtcct

SEQ ID NO: 36648 - DNA, 22 bp, synthetic construct
  misc_feature 1..22: note = chemically synthesized
  source 1..22: mol_type = other DNA
acttatatcaaagtcctcacct

SEQ ID NO: 36649 - DNA, 22 bp, synthetic construct
  misc_feature 1..22: note = chemically synthesized
  source 1..22: mol_type = other DNA
atatcaaagtcctcacctttag

SEQ ID NO: 36650 - DNA, 22 bp, synthetic construct
  misc_feature 1..22: note = chemically synthesized
  source 1..22: mol_type = other DNA
tatcaaagtcctcacctttaga

SEQ ID NO: 36651 - DNA, 22 bp, synthetic construct
  misc_feature 1..22: note = chemically synthesized
  source 1..22: mol_type = other DNA
acctttagaactcctgtcctag

SEQ ID NO: 36652 - DNA, 22 bp, synthetic construct
  misc_feature 1..22: note = chemically synthesized
  source 1..22: mol_type = other DNA
tagaactcctgtcctagaagag

SEQ ID NO: 36653 - DNA, 22 bp, synthetic construct
  misc_feature 1..22: note = chemically synthesized
  source 1..22: mol_type = other DNA
agaactcctgtcctagaagagt

SEQ ID NO: 36654 - DNA, 22 bp, synthetic construct
  misc_feature 1..22: note = chemically synthesized
  source 1..22: mol_type = other DNA
gaactcctgtcctagaagagtg

SEQ ID NO: 36655 - DNA, 22 bp, synthetic construct
  misc_feature 1..22: note = chemically synthesized
  source 1..22: mol_type = other DNA
ctgtcctagaagagtggactca

SEQ ID NO: 36656 - DNA, 22 bp, synthetic construct
  misc_feature 1..22: note = chemically synthesized
  source 1..22: mol_type = other DNA
tcctagaagagtggactcatta

SEQ ID NO: 36657 - DNA, 22 bp, synthetic construct
  misc_feature 1..22: note = chemically synthesized
  source 1..22: mol_type = other DNA
gaagagtggactcattattata

SEQ ID NO: 36658 - DNA, 22 bp, synthetic construct
  misc_feature 1..22: note = chemically synthesized
  source 1..22: mol_type = other DNA
attattataatttcttccataa

SEQ ID NO: 36659 - DNA, 22 bp, synthetic construct
  misc_feature 1..22: note = chemically synthesized
  source 1..22: mol_type = other DNA
ttataatttcttccataaccac

SEQ ID NO: 36660 - DNA, 22 bp, synthetic construct
  misc_feature 1..22: note = chemically synthesized
  source 1..22: mol_type = other DNA
taatttcttccataaccacttt

SEQ ID NO: 36661 - DNA, 22 bp, synthetic construct
  misc_feature 1..22: note = chemically synthesized
  source 1..22: mol_type = other DNA
cttccataaccactttgactct

SEQ ID NO: 36662 - DNA, 22 bp, synthetic construct
  misc_feature 1..22: note = chemically synthesized
  source 1..22: mol_type = other DNA
ttccataaccactttgactcta

SEQ ID NO: 36663 - DNA, 22 bp, synthetic construct
  misc_feature 1..22: note = chemically synthesized
  source 1..22: mol_type = other DNA
ccataaccactttgactctagt

SEQ ID NO: 36664 - DNA, 22 bp, synthetic construct
  misc_feature 1..22: note = chemically synthesized
  source 1..22: mol_type = other DNA
cataaccactttgactctagtt

SEQ ID NO: 36665 - DNA, 22 bp, synthetic construct
  misc_feature 1..22: note = chemically synthesized
  source 1..22: mol_type = other DNA
tgactctagttttctgaattct

SEQ ID NO: 36666 - DNA, 22 bp, synthetic construct
  misc_feature 1..22: note = chemically synthesized
  source 1..22: mol_type = other DNA
gactctagttttctgaattctt

SEQ ID NO: 36667 - DNA, 22 bp, synthetic construct
  misc_feature 1..22: note = chemically synthesized
  source 1..22: mol_type = other DNA
actctagttttctgaattcttc

SEQ ID NO: 36668 - DNA, 22 bp, synthetic construct
  misc_feature 1..22: note = chemically synthesized
  source 1..22: mol_type = other DNA
tagttttctgaattcttccctg

SEQ ID NO: 36669 - DNA, 22 bp, synthetic construct
  misc_feature 1..22: note = chemically synthesized
  source 1..22: mol_type = other DNA
gttttctgaattcttccctgtg

SEQ ID NO: 36670 - DNA, 22 bp, synthetic construct
  misc_feature 1..22: note = chemically synthesized
  source 1..22: mol_type = other DNA
tctgaattcttccctgtgccac

SEQ ID NO: 36671 - DNA, 22 bp, synthetic construct
  misc_feature 1..22: note = chemically synthesized
  source 1..22: mol_type = other DNA
ctgaattcttccctgtgccact

SEQ ID NO: 36672 - DNA, 22 bp, synthetic construct
  misc_feature 1..22: note = chemically synthesized
  source 1..22: mol_type = other DNA
tgaattcttccctgtgccactt

SEQ ID NO: 36673 - DNA, 22 bp, synthetic construct
  misc_feature 1..22: note = chemically synthesized
  source 1..22: mol_type = other DNA
aattcttccctgtgccacttgt

SEQ ID NO: 36674 - DNA, 22 bp, synthetic construct
  misc_feature 1..22: note = chemically synthesized
  source 1..22: mol_type = other DNA
ttccctgtgccacttgtaccat

SEQ ID NO: 36675 - DNA, 22 bp, synthetic construct
  misc_feature 1..22: note = chemically synthesized
  source 1..22: mol_type = other DNA
ccctgtgccacttgtaccatgt

SEQ ID NO: 36676 - DNA, 22 bp, synthetic construct
  misc_feature 1..22: note = chemically synthesized
  source 1..22: mol_type = other DNA
cctgtgccacttgtaccatgta

SEQ ID NO: 36677 - DNA, 22 bp, synthetic construct
  misc_feature 1..22: note = chemically synthesized
  source 1..22: mol_type = other DNA
tgccacttgtaccatgtaattc

SEQ ID NO: 36678 - DNA, 22 bp, synthetic construct
  misc_feature 1..22: note = chemically synthesized
  source 1..22: mol_type = other DNA
gtaccatgtaattcagaggtgt

SEQ ID NO: 36679 - DNA, 22 bp, synthetic construct
  misc_feature 1..22: note = chemically synthesized
  source 1..22: mol_type = other DNA
taccatgtaattcagaggtgta

SEQ ID NO: 36680 - DNA, 22 bp, synthetic construct
  misc_feature 1..22: note = chemically synthesized
  source 1..22: mol_type = other DNA
agaggtgtagtgtcaagactga

SEQ ID NO: 36681 - DNA, 22 bp, synthetic construct
  misc_feature 1..22: note = chemically synthesized
  source 1..22: mol_type = other DNA
aggaggaagcaggtaaattatg

SEQ ID NO: 36682 - DNA, 22 bp, synthetic construct
  misc_feature 1..22: note = chemically synthesized
  source 1..22: mol_type = other DNA
tgtccagcaatacgttggctta

SEQ ID NO: 36683 - DNA, 22 bp, synthetic construct
  misc_feature 1..22: note = chemically synthesized
  source 1..22: mol_type = other DNA
gcttaggcaaaaacaaattgtt

SEQ ID NO: 36684 - DNA, 22 bp, synthetic construct
  misc_feature 1..22: note = chemically synthesized
  source 1..22: mol_type = other DNA
aggcaaaaacaaattgtttcta

SEQ ID NO: 36685 - DNA, 22 bp, synthetic construct
  misc_feature 1..22: note = chemically synthesized
  source 1..22: mol_type = other DNA
ggcaaaaacaaattgtttctag

SEQ ID NO: 36686 - DNA, 22 bp, synthetic construct
  misc_feature 1..22: note = chemically synthesized
  source 1..22: mol_type = other DNA
tttctagtccattttaagaggg

SEQ ID NO: 36687 - DNA, 22 bp, synthetic construct
  misc_feature 1..22: note = chemically synthesized
  source 1..22: mol_type = other DNA
ctagtccattttaagagggaag

SEQ ID NO: 36688 - DNA, 22 bp, synthetic construct
  misc_feature 1..22: note = chemically synthesized
  source 1..22: mol_type = other DNA
tagtccattttaagagggaagc

SEQ ID NO: 36689 - DNA, 22 bp, synthetic construct
  misc_feature 1..22: note = chemically synthesized
  source 1..22: mol_type = other DNA
gtccattttaagagggaagcat

SEQ ID NO: 36690 - DNA, 22 bp, synthetic construct
  misc_feature 1..22: note = chemically synthesized
  source 1..22: mol_type = other DNA
taagagggaagcatttatttag

SEQ ID NO: 36691 - DNA, 22 bp, synthetic construct
  misc_feature 1..22: note = chemically synthesized
  source 1..22: mol_type = other DNA
aagagggaagcatttatttagg

SEQ ID NO: 36692 - DNA, 22 bp, synthetic construct
  misc_feature 1..22: note = chemically synthesized
  source 1..22: mol_type = other DNA
agagggaagcatttatttaggg

SEQ ID NO: 36693 - DNA, 22 bp, synthetic construct
  misc_feature 1..22: note = chemically synthesized
  source 1..22: mol_type = other DNA
atttagggactacatcgctcaa

SEQ ID NO: 36694 - DNA, 22 bp, synthetic construct
  misc_feature 1..22: note = chemically synthesized
  source 1..22: mol_type = other DNA
tttagggactacatcgctcaag

SEQ ID NO: 36695 - DNA, 22 bp, synthetic construct
  misc_feature 1..22: note = chemically synthesized
  source 1..22: mol_type = other DNA
agggactacatcgctcaagtct

SEQ ID NO: 36696 - DNA, 22 bp, synthetic construct
  misc_feature 1..22: note = chemically synthesized
  source 1..22: mol_type = other DNA
gggactacatcgctcaagtctt

SEQ ID NO: 36697 - DNA, 22 bp, synthetic construct
  misc_feature 1..22: note = chemically synthesized
  source 1..22: mol_type = other DNA
catcgctcaagtctttacaatt

SEQ ID NO: 36698 - DNA, 22 bp, synthetic construct
  misc_feature 1..22: note = chemically synthesized
  source 1..22: mol_type = other DNA
aagtctttacaattcttaaatt

SEQ ID NO: 36699 - DNA, 22 bp, synthetic construct
  misc_feature 1..22: note = chemically synthesized
  source 1..22: mol_type = other DNA
tacaattcttaaattaactttc

SEQ ID NO: 36700 - DNA, 22 bp, synthetic construct
  misc_feature 1..22: note = chemically synthesized
  source 1..22: mol_type = other DNA
acaattcttaaattaactttca

SEQ ID NO: 36701 - DNA, 22 bp, synthetic construct
  misc_feature 1..22: note = chemically synthesized
  source 1..22: mol_type = other DNA
caattcttaaattaactttcat

SEQ ID NO: 36702 - DNA, 22 bp, synthetic construct
  misc_feature 1..22: note = chemically synthesized
  source 1..22: mol_type = other DNA
ttaaattaactttcattatgtg

SEQ ID NO: 36703 - DNA, 22 bp, synthetic construct
  misc_feature 1..22: note = chemically synthesized
  source 1..22: mol_type = other DNA
aaattaactttcattatgtgtg

SEQ ID NO: 36704 - DNA, 22 bp, synthetic construct
  misc_feature 1..22: note = chemically synthesized
  source 1..22: mol_type = other DNA
aattaactttcattatgtgtga

SEQ ID NO: 36705 - DNA, 22 bp, synthetic construct
  misc_feature 1..22: note = chemically synthesized
  source 1..22: mol_type = other DNA
actttcattatgtgtgacaaca

SEQ ID NO: 36706 - DNA, 22 bp, synthetic construct
  misc_feature 1..22: note = chemically synthesized
  source 1..22: mol_type = other DNA
tcattatgtgtgacaacattta

SEQ ID NO: 36707 - DNA, 22 bp, synthetic construct
  misc_feature 1..22: note = chemically synthesized
  source 1..22: mol_type = other DNA
cattatgtgtgacaacatttat

SEQ ID NO: 36708 - DNA, 22 bp, synthetic construct
  misc_feature 1..22: note = chemically synthesized
  source 1..22: mol_type = other DNA
attatgtgtgacaacatttatt

SEQ ID NO: 36709 - DNA, 22 bp, synthetic construct
  misc_feature 1..22: note = chemically synthesized
  source 1..22: mol_type = other DNA
tgtgtgacaacatttattaaac

SEQ ID NO: 36710 - DNA, 22 bp, synthetic construct
  misc_feature 1..22: note = chemically synthesized
  source 1..22: mol_type = other DNA
attaaacttttttaatgatcct

SEQ ID NO: 36711 - DNA, 22 bp, synthetic construct
  misc_feature 1..22: note = chemically synthesized
  source 1..22: mol_type = other DNA
ttaaacttttttaatgatccta

SEQ ID NO: 36712 - DNA, 22 bp, synthetic construct
  misc_feature 1..22: note = chemically synthesized
  source 1..22: mol_type = other DNA
aacttttttaatgatcctaaat

SEQ ID NO: 36713 - DNA, 22 bp, synthetic construct
  misc_feature 1..22: note = chemically synthesized
  source 1..22: mol_type = other DNA
ttttaatgatcctaaatatcct

SEQ ID NO: 36714 - DNA, 22 bp, synthetic construct
  misc_feature 1..22: note = chemically synthesized
  source 1..22: mol_type = other DNA
tttaatgatcctaaatatcctt

SEQ ID NO: 36715 - DNA, 22 bp, synthetic construct
  misc_feature 1..22: note = chemically synthesized
  source 1..22: mol_type = other DNA
ttaatgatcctaaatatcctta

SEQ ID NO: 36716 - DNA, 22 bp, synthetic construct
  misc_feature 1..22: note = chemically synthesized
  source 1..22: mol_type = other DNA
taatgatcctaaatatccttaa

SEQ ID NO: 36717 - DNA, 22 bp, synthetic construct
  misc_feature 1..22: note = chemically synthesized
  source 1..22: mol_type = other DNA
aatgatcctaaatatccttaac

SEQ ID NO: 36718 - DNA, 22 bp, synthetic construct
  misc_feature 1..22: note = chemically synthesized
  source 1..22: mol_type = other DNA
atgatcctaaatatccttaaca

SEQ ID NO: 36719 - DNA, 22 bp, synthetic construct
  misc_feature 1..22: note = chemically synthesized
  source 1..22: mol_type = other DNA
aatatccttaacatgttaattt

SEQ ID NO: 36720 - DNA, 22 bp, synthetic construct
  misc_feature 1..22: note = chemically synthesized
  source 1..22: mol_type = other DNA
aacatgttaatttctccagagt

SEQ ID NO: 36721 - DNA, 22 bp, synthetic construct
  misc_feature 1..22: note = chemically synthesized
  source 1..22: mol_type = other DNA
acatgttaatttctccagagtt

SEQ ID NO: 36722 - DNA, 22 bp, synthetic construct
  misc_feature 1..22: note = chemically synthesized
  source 1..22: mol_type = other DNA
atttctccagagtttgtaatgt

SEQ ID NO: 36723 - DNA, 22 bp, synthetic construct
  misc_feature 1..22: note = chemically synthesized
  source 1..22: mol_type = other DNA
ctccagagtttgtaatgttctg

SEQ ID NO: 36724 - DNA, 22 bp, synthetic construct
  misc_feature 1..22: note = chemically synthesized
  source 1..22: mol_type = other DNA
tccagagtttgtaatgttctga

SEQ ID NO: 36725 - DNA, 22 bp, synthetic construct
  misc_feature 1..22: note = chemically synthesized
  source 1..22: mol_type = other DNA
cagagtttgtaatgttctgagc

SEQ ID NO: 36726 - DNA, 22 bp, synthetic construct
  misc_feature 1..22: note = chemically synthesized
  source 1..22: mol_type = other DNA
gtaatgttctgagcaagtgtgt

SEQ ID NO: 36727 - DNA, 22 bp, synthetic construct
  misc_feature 1..22: note = chemically synthesized
  source 1..22: mol_type = other DNA
taatgttctgagcaagtgtgtg

SEQ ID NO: 36728 - DNA, 22 bp, synthetic construct
  misc_feature 1..22: note = chemically synthesized
  source 1..22: mol_type = other DNA
tgagcaagtgtgtgcagaagaa

SEQ ID NO: 36729 - DNA, 22 bp, synthetic construct
  misc_feature 1..22: note = chemically synthesized
  source 1..22: mol_type = other DNA
agcaagtgtgtgcagaagaaat

SEQ ID NO: 36730 - DNA, 22 bp, synthetic construct
  misc_feature 1..22: note = chemically synthesized
  source 1..22: mol_type = other DNA
tagtaagacctgggcaaaggag

SEQ ID NO: 36731 - DNA, 22 bp, synthetic construct
  misc_feature 1..22: note = chemically synthesized
  source 1..22: mol_type = other DNA
ggcaaaggagagagtaaacatt

SEQ ID NO: 36732 - DNA, 22 bp, synthetic construct
  misc_feature 1..22: note = chemically synthesized
  source 1..22: mol_type = other DNA
ttcccccacatttgggcaaaac

SEQ ID NO: 36733 - DNA, 22 bp, synthetic construct
  misc_feature 1..22: note = chemically synthesized
  source 1..22: mol_type = other DNA
tcccccacatttgggcaaaact

SEQ ID NO: 36734 - DNA, 22 bp, synthetic construct
  misc_feature 1..22: note = chemically synthesized
  source 1..22: mol_type = other DNA
cccccacatttgggcaaaactt

SEQ ID NO: 36735 - DNA, 22 bp, synthetic construct
  misc_feature 1..22: note = chemically synthesized
  source 1..22: mol_type = other DNA
ccccacatttgggcaaaacttt

SEQ ID NO: 36736 - DNA, 22 bp, synthetic construct
  misc_feature 1..22: note = chemically synthesized
  source 1..22: mol_type = other DNA
gggcaaaactttccatcctggg

SEQ ID NO: 36737 - DNA, 22 bp, synthetic construct
  misc_feature 1..22: note = chemically synthesized
  source 1..22: mol_type = other DNA
ggcaaaactttccatcctgggt

SEQ ID NO: 36738 - DNA, 22 bp, synthetic construct
  misc_feature 1..22: note = chemically synthesized
  source 1..22: mol_type = other DNA
tccatcctgggtcacaccacag

SEQ ID NO: 36739 - DNA, 22 bp, synthetic construct
  misc_feature 1..22: note = chemically synthesized
  source 1..22: mol_type = other DNA
ccatcctgggtcacaccacagt

SEQ ID NO: 36740 - DNA, 22 bp, synthetic construct
  misc_feature 1..22: note = chemically synthesized
  source 1..22: mol_type = other DNA
catcctgggtcacaccacagtc

SEQ ID NO: 36741 - DNA, 22 bp, synthetic construct
  misc_feature 1..22: note = chemically synthesized
  source 1..22: mol_type = other DNA
ggtcacaccacagtctaatttc

SEQ ID NO: 36742 - DNA, 22 bp, synthetic construct
  misc_feature 1..22: note = chemically synthesized
  source 1..22: mol_type = other DNA
atttccctcctctcctctccct

SEQ ID NO: 36743 - DNA, 22 bp, synthetic construct
  misc_feature 1..22: note = chemically synthesized
  source 1..22: mol_type = other DNA
ccctcctctcctctccctcaac

SEQ ID NO: 36744 - DNA, 22 bp, synthetic construct
  misc_feature 1..22: note = chemically synthesized
  source 1..22: mol_type = other DNA
cctcctctcctctccctcaact

SEQ ID NO: 36745 - DNA, 22 bp, synthetic construct
  misc_feature 1..22: note = chemically synthesized
  source 1..22: mol_type = other DNA
ctctcctctccctcaactggta

SEQ ID NO: 36746 - DNA, 22 bp, synthetic construct
  misc_feature 1..22: note = chemically synthesized
  source 1..22: mol_type = other DNA
tcctctccctcaactggtaaca

SEQ ID NO: 36747 - DNA, 22 bp, synthetic construct
  misc_feature 1..22: note = chemically synthesized
  source 1..22: mol_type = other DNA
ctctccctcaactggtaacagt

SEQ ID NO: 36748 - DNA, 22 bp, synthetic construct
  misc_feature 1..22: note = chemically synthesized
  source 1..22: mol_type = other DNA
tccctcaactggtaacagtgct

SEQ ID NO: 36749 - DNA, 22 bp, synthetic construct
  misc_feature 1..22: note = chemically synthesized
  source 1..22: mol_type = other DNA
cctcaactggtaacagtgcttc

SEQ ID NO: 36750 - DNA, 22 bp, synthetic construct
  misc_feature 1..22: note = chemically synthesized
  source 1..22: mol_type = other DNA
aactggtaacagtgcttcttcc

SEQ ID NO: 36751 - DNA, 22 bp, synthetic construct
  misc_feature 1..22: note = chemically synthesized
  source 1..22: mol_type = other DNA
gtaacagtgcttcttccaaaac

SEQ ID NO: 36752 - DNA, 22 bp, synthetic construct
  misc_feature 1..22: note = chemically synthesized
  source 1..22: mol_type = other DNA
cttccaaaacatacctgactac

SEQ ID NO: 36753 - DNA, 22 bp, synthetic construct
  misc_feature 1..22: note = chemically synthesized
  source 1..22: mol_type = other DNA
ttccaaaacatacctgactact

SEQ ID NO: 36754 - DNA, 22 bp, synthetic construct
  misc_feature 1..22: note = chemically synthesized
  source 1..22: mol_type = other DNA
ccaaaacatacctgactactta

SEQ ID NO: 36755 - DNA, 22 bp, synthetic construct
  misc_feature 1..22: note = chemically synthesized
  source 1..22: mol_type = other DNA
caaaacatacctgactacttag

SEQ ID NO: 36756 - DNA, 22 bp, synthetic construct
  misc_feature 1..22: note = chemically synthesized
  source 1..22: mol_type = other DNA
actacttagtacttcccactac

SEQ ID NO: 36757 - DNA, 22 bp, synthetic construct
  misc_feature 1..22: note = chemically synthesized
  source 1..22: mol_type = other DNA
cttagtacttcccactactgtg

SEQ ID NO: 36758 - DNA, 22 bp, synthetic construct
  misc_feature 1..22: note = chemically synthesized
  source 1..22: mol_type = other DNA
agtacttcccactactgtggat

SEQ ID NO: 36759 - DNA, 22 bp, synthetic construct
  misc_feature 1..22: note = chemically synthesized
  source 1..22: mol_type = other DNA
gtacttcccactactgtggata

SEQ ID NO: 36760 - DNA, 22 bp, synthetic construct
  misc_feature 1..22: note = chemically synthesized
  source 1..22: mol_type = other DNA
cccactactgtggatagaattt

SEQ ID NO: 36761 - DNA, 22 bp, synthetic construct
  misc_feature 1..22: note = chemically synthesized
  source 1..22: mol_type = other DNA
ccactactgtggatagaatttc

SEQ ID NO: 36762 - DNA, 22 bp, synthetic construct
  misc_feature 1..22: note = chemically synthesized
  source 1..22: mol_type = other DNA
ctgtggatagaatttcagtgac

SEQ ID NO: 36763 - DNA, 22 bp, synthetic construct
  misc_feature 1..22: note = chemically synthesized
  source 1..22: mol_type = other DNA
tggatagaatttcagtgactcc

SEQ ID NO: 36764 - DNA, 22 bp, synthetic construct
  misc_feature 1..22: note = chemically synthesized
  source 1..22: mol_type = other DNA
cagtgactcctcattcattgtt

SEQ ID NO: 36765 - DNA, 22 bp, synthetic construct
  misc_feature 1..22: note = chemically synthesized
  source 1..22: mol_type = other DNA
agtgactcctcattcattgttc

SEQ ID NO: 36766 - DNA, 22 bp, synthetic construct
  misc_feature 1..22: note = chemically synthesized
  source 1..22: mol_type = other DNA
ctcattcattgttcataccctg

SEQ ID NO: 36767 - DNA, 22 bp, synthetic construct
  misc_feature 1..22: note = chemically synthesized
  source 1..22: mol_type = other DNA
attcattgttcataccctggag

SEQ ID NO: 36768 - DNA, 22 bp, synthetic construct
  misc_feature 1..22: note = chemically synthesized
  source 1..22: mol_type = other DNA
attgttcataccctggagacaa

SEQ ID NO: 36769 - DNA, 22 bp, synthetic construct
  misc_feature 1..22: note = chemically synthesized
  source 1..22: mol_type = other DNA
ttcataccctggagacaaaact

SEQ ID NO: 36770 - DNA, 22 bp, synthetic construct
  misc_feature 1..22: note = chemically synthesized
  source 1..22: mol_type = other DNA
ataccctggagacaaaactcct

SEQ ID NO: 36771 - DNA, 22 bp, synthetic construct
  misc_feature 1..22: note = chemically synthesized
  source 1..22: mol_type = other DNA
gagacaaaactccttaaggcta

SEQ ID NO: 36772 - DNA, 22 bp, synthetic construct
  misc_feature 1..22: note = chemically synthesized
  source 1..22: mol_type = other DNA
cttaaggctattaactccccct

SEQ ID NO: 36773 - DNA, 22 bp, synthetic construct
  misc_feature 1..22: note = chemically synthesized
  source 1..22: mol_type = other DNA
aaggctattaactccccctgag

SEQ ID NO: 36774 - DNA, 22 bp, synthetic construct
  misc_feature 1..22: note = chemically synthesized
  source 1..22: mol_type = other DNA
aggctattaactccccctgagc

SEQ ID NO: 36775 - DNA, 22 bp, synthetic construct
  misc_feature 1..22: note = chemically synthesized
  source 1..22: mol_type = other DNA
ttaactccccctgagcttcaca

SEQ ID NO: 36776 - DNA, 22 bp, synthetic construct
  misc_feature 1..22: note = chemically synthesized
  source 1..22: mol_type = other DNA
actccccctgagcttcacaatc

SEQ ID NO: 36777 - DNA, 22 bp, synthetic construct
  misc_feature 1..22: note = chemically synthesized
  source 1..22: mol_type = other DNA
cccctgagcttcacaatctagt

SEQ ID NO: 36778 - DNA, 22 bp, synthetic construct
  misc_feature 1..22: note = chemically synthesized
  source 1..22: mol_type = other DNA
agcttcacaatctagtccctgc

SEQ ID NO: 36779 - DNA, 22 bp, synthetic construct
  misc_feature 1..22: note = chemically synthesized
  source 1..22: mol_type = other DNA
cacaatctagtccctgcaggtc

SEQ ID NO: 36780 - DNA, 22 bp, synthetic construct
  misc_feature 1..22: note = chemically synthesized
  source 1..22: mol_type = other DNA
acaatctagtccctgcaggtct

SEQ ID NO: 36781 - DNA, 22 bp, synthetic construct
  misc_feature 1..22: note = chemically synthesized
  source 1..22: mol_type = other DNA
gtccctgcaggtctctcccatc

SEQ ID NO: 36782 - DNA, 22 bp, synthetic construct
  misc_feature 1..22: note = chemically synthesized
  source 1..22: mol_type = other DNA
caggtctctcccatcttctctc

SEQ ID NO: 36783 - DNA, 22 bp, synthetic construct
  misc_feature 1..22: note = chemically synthesized
  source 1..22: mol_type = other DNA
tcccatcttctctcatactcct

SEQ ID NO: 36784 - DNA, 22 bp, synthetic construct
  misc_feature 1..22: note = chemically synthesized
  source 1..22: mol_type = other DNA
ccatcttctctcatactcctct

SEQ ID NO: 36785 - DNA, 22 bp, synthetic construct
  misc_feature 1..22: note = chemically synthesized
  source 1..22: mol_type = other DNA
ctctcatactcctctccttttc

SEQ ID NO: 36786 - DNA, 22 bp, synthetic construct
  misc_feature 1..22: note = chemically synthesized
  source 1..22: mol_type = other DNA
tctcatactcctctccttttcc

SEQ ID NO: 36787 - DNA, 22 bp, synthetic construct
  misc_feature 1..22: note = chemically synthesized
  source 1..22: mol_type = other DNA
tcatactcctctccttttccct

SEQ ID NO: 36788 - DNA, 22 bp, synthetic construct
  misc_feature 1..22: note = chemically synthesized
  source 1..22: mol_type = other DNA
atactcctctccttttccctct

SEQ ID NO: 36789 - DNA, 22 bp, synthetic construct
  misc_feature 1..22: note = chemically synthesized
  source 1..22: mol_type = other DNA
ctctccttttccctctctgagc

SEQ ID NO: 36790 - DNA, 22 bp, synthetic construct
  misc_feature 1..22: note = chemically synthesized
  source 1..22: mol_type = other DNA
tccttttccctctctgagcccc

SEQ ID NO: 36791 - DNA, 22 bp, synthetic construct
  misc_feature 1..22: note = chemically synthesized
  source 1..22: mol_type = other DNA
cttttccctctctgagccccgc

SEQ ID NO: 36792 - DNA, 22 bp, synthetic construct
  misc_feature 1..22: note = chemically synthesized
  source 1..22: mol_type = other DNA
ttccctctctgagccccgctca

SEQ ID NO: 36793 - DNA, 22 bp, synthetic construct
  misc_feature 1..22: note = chemically synthesized
  source 1..22: mol_type = other DNA
tccctctctgagccccgctcag

SEQ ID NO: 36794 - DNA, 22 bp, synthetic construct
  misc_feature 1..22: note = chemically synthesized
  source 1..22: mol_type = other DNA
ccctctctgagccccgctcaga

SEQ ID NO: 36795 - DNA, 22 bp, synthetic construct
  misc_feature 1..22: note = chemically synthesized
  source 1..22: mol_type = other DNA
cctctctgagccccgctcagat

SEQ ID NO: 36796 - DNA, 22 bp, synthetic construct
  misc_feature 1..22: note = chemically synthesized
  source 1..22: mol_type = other DNA
tctgagccccgctcagatcttc

SEQ ID NO: 36797 - DNA, 22 bp, synthetic construct
  misc_feature 1..22: note = chemically synthesized
  source 1..22: mol_type = other DNA
tgagccccgctcagatcttcga

SEQ ID NO: 36798 - DNA, 22 bp, synthetic construct
  misc_feature 1..22: note = chemically synthesized
  source 1..22: mol_type = other DNA
agccccgctcagatcttcgaac

SEQ ID NO: 36799 - DNA, 22 bp, synthetic construct
  misc_feature 1..22: note = chemically synthesized
  source 1..22: mol_type = other DNA
agatcttcgaacagagaacact

SEQ ID NO: 36800 - DNA, 22 bp, synthetic construct
  misc_feature 1..22: note = chemically synthesized
  source 1..22: mol_type = other DNA
cgaacagagaacacttctgcat

SEQ ID NO: 36801 - DNA, 22 bp, synthetic construct
  misc_feature 1..22: note = chemically synthesized
  source 1..22: mol_type = other DNA
gaacagagaacacttctgcatc

SEQ ID NO: 36802 - DNA, 22 bp, synthetic construct
  misc_feature 1..22: note = chemically synthesized
  source 1..22: mol_type = other DNA
ctgcatcttggcatatatagtt

SEQ ID NO: 36803 - DNA, 22 bp, synthetic construct
  misc_feature 1..22: note = chemically synthesized
  source 1..22: mol_type = other DNA
tgcatcttggcatatatagttc

SEQ ID NO: 36804 - DNA, 22 bp, synthetic construct
  misc_feature 1..22: note = chemically synthesized
  source 1..22: mol_type = other DNA
catcttggcatatatagttctc

SEQ ID NO: 36805 - DNA, 22 bp, synthetic construct
  misc_feature 1..22: note = chemically synthesized
  source 1..22: mol_type = other DNA
ggcatatatagttctctcacat

SEQ ID NO: 36806 - DNA, 22 bp, synthetic construct
  misc_feature 1..22: note = chemically synthesized
  source 1..22: mol_type = other DNA
gcatatatagttctctcacata

SEQ ID NO: 36807 - DNA, 22 bp, synthetic construct
  misc_feature 1..22: note = chemically synthesized
  source 1..22: mol_type = other DNA
tctcacatagaacgctttctcc

SEQ ID NO: 36808 - DNA, 22 bp, synthetic construct
  misc_feature 1..22: note = chemically synthesized
  source 1..22: mol_type = other DNA
tcacatagaacgctttctcccc

SEQ ID NO: 36809 - DNA, 22 bp, synthetic construct
  misc_feature 1..22: note = chemically synthesized
  source 1..22: mol_type = other DNA
acatagaacgctttctcccctt

SEQ ID NO: 36810 - DNA, 22 bp, synthetic construct
  misc_feature 1..22: note = chemically synthesized
  source 1..22: mol_type = other DNA
tctcccctttagctatttatcc

SEQ ID NO: 36811 - DNA, 22 bp, synthetic construct
  misc_feature 1..22: note = chemically synthesized
  source 1..22: mol_type = other DNA
ctcccctttagctatttatcct

SEQ ID NO: 36812 - DNA, 22 bp, synthetic construct
  misc_feature 1..22: note = chemically synthesized
  source 1..22: mol_type = other DNA
tcccctttagctatttatcctt

SEQ ID NO: 36813 - DNA, 22 bp, synthetic construct
  misc_feature 1..22: note = chemically synthesized
  source 1..22: mol_type = other DNA
ccctttagctatttatccttca

SEQ ID NO: 36814 - DNA, 22 bp, synthetic construct
  misc_feature 1..22: note = chemically synthesized
  source 1..22: mol_type = other DNA
tagctatttatccttcaagtgt

SEQ ID NO: 36815 - DNA, 22 bp, synthetic construct
  misc_feature 1..22: note = chemically synthesized
  source 1..22: mol_type = other DNA
agctatttatccttcaagtgtc

SEQ ID NO: 36816 - DNA, 22 bp, synthetic construct
  misc_feature 1..22: note = chemically synthesized
  source 1..22: mol_type = other DNA
gctatttatccttcaagtgtca

SEQ ID NO: 36817 - DNA, 22 bp, synthetic construct
  misc_feature 1..22: note = chemically synthesized
  source 1..22: mol_type = other DNA
tttatccttcaagtgtcagctc

SEQ ID NO: 36818 - DNA, 22 bp, synthetic construct
  misc_feature 1..22: note = chemically synthesized
  source 1..22: mol_type = other DNA
atccttcaagtgtcagctcaaa

SEQ ID NO: 36819 - DNA, 22 bp, synthetic construct
  misc_feature 1..22: note = chemically synthesized
  source 1..22: mol_type = other DNA
tccttcaagtgtcagctcaaac

SEQ ID NO: 36820 - DNA, 22 bp, synthetic construct
  misc_feature 1..22: note = chemically synthesized
  source 1..22: mol_type = other DNA
caagtgtcagctcaaacatctc

SEQ ID NO: 36821 - DNA, 22 bp, synthetic construct
  misc_feature 1..22: note = chemically synthesized
  source 1..22: mol_type = other DNA
aagtgtcagctcaaacatctca

SEQ ID NO: 36822 - DNA, 22 bp, synthetic construct
  misc_feature 1..22: note = chemically synthesized
  source 1..22: mol_type = other DNA
aaacatctcatcattagagagg

SEQ ID NO: 36823 - DNA, 22 bp, synthetic construct
  misc_feature 1..22: note = chemically synthesized
  source 1..22: mol_type = other DNA
atcattagagaggtttttccca

SEQ ID NO: 36824 - DNA, 22 bp, synthetic construct
  misc_feature 1..22: note = chemically synthesized
  source 1..22: mol_type = other DNA
gagaggtttttcccaaacctct

SEQ ID NO: 36825 - DNA, 22 bp, synthetic construct
  misc_feature 1..22: note = chemically synthesized
  source 1..22: mol_type = other DNA
ttcccaaacctctaggtaacta

SEQ ID NO: 36826 - DNA, 22 bp, synthetic construct
  misc_feature 1..22: note = chemically synthesized
  source 1..22: mol_type = other DNA
tcccaaacctctaggtaactag

SEQ ID NO: 36827 - DNA, 22 bp, synthetic construct
  misc_feature 1..22: note = chemically synthesized
  source 1..22: mol_type = other DNA
cccaaacctctaggtaactagg

SEQ ID NO: 36828 - DNA, 22 bp, synthetic construct
  misc_feature 1..22: note = chemically synthesized
  source 1..22: mol_type = other DNA
ccaaacctctaggtaactaggt

SEQ ID NO: 36829 - DNA, 22 bp, synthetic construct
  misc_feature 1..22: note = chemically synthesized
  source 1..22: mol_type = other DNA
taggtaactaggttagaaacca

SEQ ID NO: 36830 - DNA, 22 bp, synthetic construct
  misc_feature 1..22: note = chemically synthesized
  source 1..22: mol_type = other DNA
ggtaactaggttagaaaccact

SEQ ID NO: 36831 - DNA, 22 bp, synthetic construct
  misc_feature 1..22: note = chemically synthesized
  source 1..22: mol_type = other DNA
ggttagaaaccactccccattc

SEQ ID NO: 36832 - DNA, 22 bp, synthetic construct
  misc_feature 1..22: note = chemically synthesized
  source 1..22: mol_type = other DNA
gaaaccactccccattccacgg

SEQ ID NO: 36833 - DNA, 22 bp, synthetic construct
  misc_feature 1..22: note = chemically synthesized
  source 1..22: mol_type = other DNA
cccattccacggtacactgtat

SEQ ID NO: 36834 - DNA, 22 bp, synthetic construct
  misc_feature 1..22: note = chemically synthesized
  source 1..22: mol_type = other DNA
cacggtacactgtatagtctta

SEQ ID NO: 36835 - DNA, 22 bp, synthetic construct
  misc_feature 1..22: note = chemically synthesized
  source 1..22: mol_type = other DNA
tatagtcttaggacacctggtt

SEQ ID NO: 36836 - DNA, 22 bp, synthetic construct
  misc_feature 1..22: note = chemically synthesized
  source 1..22: mol_type = other DNA
aggacacctggttcccttagtc

SEQ ID NO: 36837 - DNA, 22 bp, synthetic construct
  misc_feature 1..22: note = chemically synthesized
  source 1..22: mol_type = other DNA
ggacacctggttcccttagtct

SEQ ID NO: 36838 - DNA, 22 bp, synthetic construct
  misc_feature 1..22: note = chemically synthesized
  source 1..22: mol_type = other DNA
gttcccttagtctcacactcat

SEQ ID NO: 36839 - DNA, 22 bp, synthetic construct
  misc_feature 1..22: note = chemically synthesized
  source 1..22: mol_type = other DNA
ccttagtctcacactcatcaca

SEQ ID NO: 36840 - DNA, 22 bp, synthetic construct
  misc_feature 1..22: note = chemically synthesized
  source 1..22: mol_type = other DNA
agtctcacactcatcacatttg

SEQ ID NO: 36841 - DNA, 22 bp, synthetic construct
  misc_feature 1..22: note = chemically synthesized
  source 1..22: mol_type = other DNA
gtctcacactcatcacatttga

SEQ ID NO: 36842 - DNA, 22 bp, synthetic construct
  misc_feature 1..22: note = chemically synthesized
  source 1..22: mol_type = other DNA
acactcatcacatttgactgta

SEQ ID NO: 36843 - DNA, 22 bp, synthetic construct
  misc_feature 1..22: note = chemically synthesized
  source 1..22: mol_type = other DNA
atcacatttgactgtattgtat

SEQ ID NO: 36844 - DNA, 22 bp, synthetic construct
  misc_feature 1..22: note = chemically synthesized
  source 1..22: mol_type = other DNA
gactgtattgtatgttcaatgt

SEQ ID NO: 36845 - DNA, 22 bp, synthetic construct
  misc_feature 1..22: note = chemically synthesized
  source 1..22: mol_type = other DNA
actgtattgtatgttcaatgtc

SEQ ID NO: 36846 - DNA, 22 bp, synthetic construct
  misc_feature 1..22: note = chemically synthesized
  source 1..22: mol_type = other DNA
tattgtatgttcaatgtctacc

SEQ ID NO: 36847 - DNA, 22 bp, synthetic construct
  misc_feature 1..22: note = chemically synthesized
  source 1..22: mol_type = other DNA
tatgttcaatgtctaccttcta

SEQ ID NO: 36848 - DNA, 22 bp, synthetic construct
  misc_feature 1..22: note = chemically synthesized
  source 1..22: mol_type = other DNA
aatgtctaccttctacaaattt

SEQ ID NO: 36849 - DNA, 22 bp, synthetic construct
  misc_feature 1..22: note = chemically synthesized
  source 1..22: mol_type = other DNA
ccttctacaaatttgtcaattc

SEQ ID NO: 36850 - DNA, 22 bp, synthetic construct
  misc_feature 1..22: note = chemically synthesized
  source 1..22: mol_type = other DNA
ctacaaatttgtcaattcttga

SEQ ID NO: 36851 - DNA, 22 bp, synthetic construct
  misc_feature 1..22: note = chemically synthesized
  source 1..22: mol_type = other DNA
tacaaatttgtcaattcttgaa

SEQ ID NO: 36852 - DNA, 22 bp, synthetic construct
  misc_feature 1..22: note = chemically synthesized
  source 1..22: mol_type = other DNA
caaatttgtcaattcttgaaga

SEQ ID NO: 36853 - DNA, 22 bp, synthetic construct
  misc_feature 1..22: note = chemically synthesized
  source 1..22: mol_type = other DNA
gtcaattcttgaagattaagaa

SEQ ID NO: 36854 - DNA, 22 bp, synthetic construct
  misc_feature 1..22: note = chemically synthesized
  source 1..22: mol_type = other DNA
tcaattcttgaagattaagaat

SEQ ID NO: 36855 - DNA, 22 bp, synthetic construct
  misc_feature 1..22: note = chemically synthesized
  source 1..22: mol_type = other DNA
ttgaagattaagaatcagttct

SEQ ID NO: 36856 - DNA, 22 bp, synthetic construct
  misc_feature 1..22: note = chemically synthesized
  source 1..22: mol_type = other DNA
gaagattaagaatcagttctgt

SEQ ID NO: 36857 - DNA, 22 bp, synthetic construct
  misc_feature 1..22: note = chemically synthesized
  source 1..22: mol_type = other DNA
aagattaagaatcagttctgta

SEQ ID NO: 36858 - DNA, 22 bp, synthetic construct
  misc_feature 1..22: note = chemically synthesized
  source 1..22: mol_type = other DNA
agaatcagttctgtattcttaa

SEQ ID NO: 36859 - DNA, 22 bp, synthetic construct
  misc_feature 1..22: note = chemically synthesized
  source 1..22: mol_type = other DNA
tgtattcttaactctatctccc

SEQ ID NO: 36860 - DNA, 22 bp, synthetic construct
  misc_feature 1..22: note = chemically synthesized
  source 1..22: mol_type = other DNA
tattcttaactctatctccctc

SEQ ID NO: 36861 - DNA, 22 bp, synthetic construct
  misc_feature 1..22: note = chemically synthesized
  source 1..22: mol_type = other DNA
ttaactctatctccctcgcctc

SEQ ID NO: 36862 - DNA, 22 bp, synthetic construct
  misc_feature 1..22: note = chemically synthesized
  source 1..22: mol_type = other DNA
aactctatctccctcgcctctc

SEQ ID NO: 36863 - DNA, 22 bp, synthetic construct
  misc_feature 1..22: note = chemically synthesized
  source 1..22: mol_type = other DNA
actctatctccctcgcctctca

SEQ ID NO: 36864 - DNA, 22 bp, synthetic construct
  misc_feature 1..22: note = chemically synthesized
  source 1..22: mol_type = other DNA
tatctccctcgcctctcagtgc

SEQ ID NO: 36865 - DNA, 22 bp, synthetic construct
  misc_feature 1..22: note = chemically synthesized
  source 1..22: mol_type = other DNA
tctccctcgcctctcagtgcct

SEQ ID NO: 36866 - DNA, 22 bp, synthetic construct
  misc_feature 1..22: note = chemically synthesized
  source 1..22: mol_type = other DNA
cctcgcctctcagtgcctgata

SEQ ID NO: 36867 - DNA, 22 bp, synthetic construct
  misc_feature 1..22: note = chemically synthesized
  source 1..22: mol_type = other DNA
gcctctcagtgcctgataccta

SEQ ID NO: 36868 - DNA, 22 bp, synthetic construct
  misc_feature 1..22: note = chemically synthesized
  source 1..22: mol_type = other DNA
tcagtgcctgatacctaataga

SEQ ID NO: 36869 - DNA, 22 bp, synthetic construct
  misc_feature 1..22: note = chemically synthesized
  source 1..22: mol_type = other DNA
agtgcctgatacctaatagaca

SEQ ID NO: 36870 - DNA, 22 bp, synthetic construct
  misc_feature 1..22: note = chemically synthesized
  source 1..22: mol_type = other DNA
atacctaatagacacttgatga

SEQ ID NO: 36871 - DNA, 22 bp, synthetic construct
  misc_feature 1..22: note = chemically synthesized
  source 1..22: mol_type = other DNA
atagacacttgatgaatcctta

SEQ ID NO: 36872 - DNA, 22 bp, synthetic construct
  misc_feature 1..22: note = chemically synthesized
  source 1..22: mol_type = other DNA
gatgaatccttactgaataata

SEQ ID NO: 36873 - DNA, 22 bp, synthetic construct
  misc_feature 1..22: note = chemically synthesized
  source 1..22: mol_type = other DNA
atgaatccttactgaataataa

SEQ ID NO: 36874 - DNA, 22 bp, synthetic construct
  misc_feature 1..22: note = chemically synthesized
  source 1..22: mol_type = other DNA
actgaataataaaatggattaa

SEQ ID NO: 36875 - DNA, 22 bp, synthetic construct
  misc_feature 1..22: note = chemically synthesized
  source 1..22: mol_type = other DNA
ctgaataataaaatggattaat

SEQ ID NO: 36876 - DNA, 22 bp, synthetic construct
  misc_feature 1..22: note = chemically synthesized
  source 1..22: mol_type = other DNA
aataataaaatggattaatgaa

SEQ ID NO: 36877 - DNA, 22 bp, synthetic construct
  misc_feature 1..22: note = chemically synthesized
  source 1..22: mol_type = other DNA
atgaataaaagcaataaatttc

SEQ ID NO: 36878 - DNA, 22 bp, synthetic construct
  misc_feature 1..22: note = chemically synthesized
  source 1..22: mol_type = other DNA
caaggttaatattaataaatta

SEQ ID NO: 36879 - DNA, 22 bp, synthetic construct
  misc_feature 1..22: note = chemically synthesized
  source 1..22: mol_type = other DNA
aaggttaatattaataaattaa

SEQ ID NO: 36880 - DNA, 22 bp, synthetic construct
  misc_feature 1..22: note = chemically synthesized
  source 1..22: mol_type = other DNA
atattaataaattaaaaaggtt

SEQ ID NO: 36881 - DNA, 22 bp, synthetic construct
  misc_feature 1..22: note = chemically synthesized
  source 1..22: mol_type = other DNA
ataaattaaaaaggttattttg

SEQ ID NO: 36882 - DNA, 22 bp, synthetic construct
  misc_feature 1..22: note = chemically synthesized
  source 1..22: mol_type = other DNA
aaaaggttattttgaagtctga

SEQ ID NO: 36883 - DNA, 22 bp, synthetic construct
  misc_feature 1..22: note = chemically synthesized
  source 1..22: mol_type = other DNA
ttttgaagtctgagaattagta

SEQ ID NO: 36884 - DNA, 22 bp, synthetic construct
  misc_feature 1..22: note = chemically synthesized
  source 1..22: mol_type = other DNA
tgaagtctgagaattagtaccc

SEQ ID NO: 36885 - DNA, 22 bp, synthetic construct
  misc_feature 1..22: note = chemically synthesized
  source 1..22: mol_type = other DNA
gaagtctgagaattagtaccca

SEQ ID NO: 36886 - DNA, 22 bp, synthetic construct
  misc_feature 1..22: note = chemically synthesized
  source 1..22: mol_type = other DNA
aagtctgagaattagtacccaa

SEQ ID NO: 36887 - DNA, 22 bp, synthetic construct
  misc_feature 1..22: note = chemically synthesized
  source 1..22: mol_type = other DNA
agaattagtacccaaaactaac

SEQ ID NO: 36888 - DNA, 22 bp, synthetic construct
  misc_feature 1..22: note = chemically synthesized
  source 1..22: mol_type = other DNA
gtacccaaaactaactgtgact

SEQ ID NO: 36889 - DNA, 22 bp, synthetic construct
  misc_feature 1..22: note = chemically synthesized
  source 1..22: mol_type = other DNA
actgtgactctctcatctgtta

SEQ ID NO: 36890 - DNA, 22 bp, synthetic construct
  misc_feature 1..22: note = chemically synthesized
  source 1..22: mol_type = other DNA
tgactctctcatctgttatgtt

SEQ ID NO: 36891 - DNA, 22 bp, synthetic construct
  misc_feature 1..22: note = chemically synthesized
  source 1..22: mol_type = other DNA
tctcatctgttatgtttttcac

SEQ ID NO: 36892 - DNA, 22 bp, synthetic construct
  misc_feature 1..22: note = chemically synthesized
  source 1..22: mol_type = other DNA
tcatctgttatgtttttcacgt

SEQ ID NO: 36893 - DNA, 22 bp, synthetic construct
  misc_feature 1..22: note = chemically synthesized
  source 1..22: mol_type = other DNA
atctgttatgtttttcacgttt

SEQ ID NO: 36894 - DNA, 22 bp, synthetic construct
  misc_feature 1..22: note = chemically synthesized
  source 1..22: mol_type = other DNA
ttatgtttttcacgtttccatt

SEQ ID NO: 36895 - DNA, 22 bp, synthetic construct
  misc_feature 1..22: note = chemically synthesized
  source 1..22: mol_type = other DNA
tgtttttcacgtttccattgtt

SEQ ID NO: 36896 - DNA, 22 bp, synthetic construct
  misc_feature 1..22: note = chemically synthesized
  source 1..22: mol_type = other DNA
ttcacgtttccattgttcatgg

SEQ ID NO: 36897 - DNA, 22 bp, synthetic construct
  misc_feature 1..22: note = chemically synthesized
  source 1..22: mol_type = other DNA
tcacgtttccattgttcatggg

SEQ ID NO: 36898 - DNA, 22 bp, synthetic construct
  misc_feature 1..22: note = chemically synthesized
  source 1..22: mol_type = other DNA
cacgtttccattgttcatgggc

SEQ ID NO: 36899 - DNA, 22 bp, synthetic construct
  misc_feature 1..22: note = chemically synthesized
  source 1..22: mol_type = other DNA
acgtttccattgttcatgggca

SEQ ID NO: 36900 - DNA, 22 bp, synthetic construct
  misc_feature 1..22: note = chemically synthesized
  source 1..22: mol_type = other DNA
ccattgttcatgggcaaaattc

SEQ ID NO: 36901 - DNA, 22 bp, synthetic construct
  misc_feature 1..22: note = chemically synthesized
  source 1..22: mol_type = other DNA
cattgttcatgggcaaaattct

SEQ ID NO: 36902 - DNA, 22 bp, synthetic construct
  misc_feature 1..22: note = chemically synthesized
  source 1..22: mol_type = other DNA
ttcatgggcaaaattctggcag

SEQ ID NO: 36903 - DNA, 22 bp, synthetic construct
  misc_feature 1..22: note = chemically synthesized
  source 1..22: mol_type = other DNA
atgggcaaaattctggcagcaa

SEQ ID NO: 36904 - DNA, 22 bp, synthetic construct
  misc_feature 1..22: note = chemically synthesized
  source 1..22: mol_type = other DNA
tggcagcaagggattcttctcc

SEQ ID NO: 36905 - DNA, 22 bp, synthetic construct
  misc_feature 1..22: note = chemically synthesized
  source 1..22: mol_type = other DNA
gcagcaagggattcttctccta

SEQ ID NO: 36906 - DNA, 22 bp, synthetic construct
  misc_feature 1..22: note = chemically synthesized
  source 1..22: mol_type = other DNA
ttctcctaagaaaccttttgtt

SEQ ID NO: 36907 - DNA, 22 bp, synthetic construct
  misc_feature 1..22: note = chemically synthesized
  source 1..22: mol_type = other DNA
ctcctaagaaaccttttgtttt

SEQ ID NO: 36908 - DNA, 22 bp, synthetic construct
  misc_feature 1..22: note = chemically synthesized
  source 1..22: mol_type = other DNA
tcctaagaaaccttttgttttc

SEQ ID NO: 36909 - DNA, 22 bp, synthetic construct
  misc_feature 1..22: note = chemically synthesized
  source 1..22: mol_type = other DNA
ctaagaaaccttttgttttctt

SEQ ID NO: 36910 - DNA, 22 bp, synthetic construct
  misc_feature 1..22: note = chemically synthesized
  source 1..22: mol_type = other DNA
agaaaccttttgttttcttgga

SEQ ID NO: 36911 - DNA, 22 bp, synthetic construct
  misc_feature 1..22: note = chemically synthesized
  source 1..22: mol_type = other DNA
ttgttttcttggatgtgaatac

SEQ ID NO: 36912 - DNA, 22 bp, synthetic construct
  misc_feature 1..22: note = chemically synthesized
  source 1..22: mol_type = other DNA
tgttttcttggatgtgaataca

SEQ ID NO: 36913 - DNA, 22 bp, synthetic construct
  misc_feature 1..22: note = chemically synthesized
  source 1..22: mol_type = other DNA
gttttcttggatgtgaatacat

SEQ ID NO: 36914 - DNA, 22 bp, synthetic construct
  misc_feature 1..22: note = chemically synthesized
  source 1..22: mol_type = other DNA
ttttcttggatgtgaatacatt

SEQ ID NO: 36915 - DNA, 22 bp, synthetic construct
  misc_feature 1..22: note = chemically synthesized
  source 1..22: mol_type = other DNA
tcttggatgtgaatacatttcc

SEQ ID NO: 36916 - DNA, 22 bp, synthetic construct
  misc_feature 1..22: note = chemically synthesized
  source 1..22: mol_type = other DNA
cttggatgtgaatacatttcct

SEQ ID NO: 36917 - DNA, 22 bp, synthetic construct
  misc_feature 1..22: note = chemically synthesized
  source 1..22: mol_type = other DNA
ttggatgtgaatacatttcctt

SEQ ID NO: 36918 - DNA, 22 bp, synthetic construct
  misc_feature 1..22: note = chemically synthesized
  source 1..22: mol_type = other DNA
ggatgtgaatacatttccttgt

SEQ ID NO: 36919 - DNA, 22 bp, synthetic construct
  misc_feature 1..22: note = chemically synthesized
  source 1..22: mol_type = other DNA
gatgtgaatacatttccttgtt

SEQ ID NO: 36920 - DNA, 22 bp, synthetic construct
  misc_feature 1..22: note = chemically synthesized
  source 1..22: mol_type = other DNA
ccttgtttgccagaaaacatgg

SEQ ID NO: 36921 - DNA, 22 bp, synthetic construct
  misc_feature 1..22: note = chemically synthesized
  source 1..22: mol_type = other DNA
cttgtttgccagaaaacatggt

SEQ ID NO: 36922 - DNA, 22 bp, synthetic construct
  misc_feature 1..22: note = chemically synthesized
  source 1..22: mol_type = other DNA
gtttgccagaaaacatggtaag

SEQ ID NO: 36923 - DNA, 22 bp, synthetic construct
  misc_feature 1..22: note = chemically synthesized
  source 1..22: mol_type = other DNA
tttgccagaaaacatggtaaga

SEQ ID NO: 36924 - DNA, 22 bp, synthetic construct
  misc_feature 1..22: note = chemically synthesized
  source 1..22: mol_type = other DNA
gccagaaaacatggtaagataa

SEQ ID NO: 36925 - DNA, 22 bp, synthetic construct
  misc_feature 1..22: note = chemically synthesized
  source 1..22: mol_type = other DNA
ccagaaaacatggtaagataac

SEQ ID NO: 36926 - DNA, 22 bp, synthetic construct
  misc_feature 1..22: note = chemically synthesized
  source 1..22: mol_type = other DNA
gagagtataacattcattttat

SEQ ID NO: 36927 - DNA, 22 bp, synthetic construct
  misc_feature 1..22: note = chemically synthesized
  source 1..22: mol_type = other DNA
attttattcatgaagaaactgt

SEQ ID NO: 36928 - DNA, 22 bp, synthetic construct
  misc_feature 1..22: note = chemically synthesized
  source 1..22: mol_type = other DNA
tattcatgaagaaactgttatt

SEQ ID NO: 36929 - DNA, 22 bp, synthetic construct
  misc_feature 1..22: note = chemically synthesized
  source 1..22: mol_type = other DNA
attcatgaagaaactgttattc

SEQ ID NO: 36930 - DNA, 22 bp, synthetic construct
  misc_feature 1..22: note = chemically synthesized
  source 1..22: mol_type = other DNA
ttcatgaagaaactgttattca

SEQ ID NO: 36931 - DNA, 22 bp, synthetic construct
  misc_feature 1..22: note = chemically synthesized
  source 1..22: mol_type = other DNA
atgaagaaactgttattcagtt

SEQ ID NO: 36932 - DNA, 22 bp, synthetic construct
  misc_feature 1..22: note = chemically synthesized
  source 1..22: mol_type = other DNA
ttattcagtttaaggggttctt

SEQ ID NO: 36933 - DNA, 22 bp, synthetic construct
  misc_feature 1..22: note = chemically synthesized
  source 1..22: mol_type = other DNA
ttcagtttaaggggttcttttt

SEQ ID NO: 36934 - DNA, 22 bp, synthetic construct
  misc_feature 1..22: note = chemically synthesized
  source 1..22: mol_type = other DNA
agtttaaggggttctttttcag

SEQ ID NO: 36935 - DNA, 22 bp, synthetic construct
  misc_feature 1..22: note = chemically synthesized
  source 1..22: mol_type = other DNA
aaggggttctttttcagaaagt

SEQ ID NO: 36936 - DNA, 22 bp, synthetic construct
  misc_feature 1..22: note = chemically synthesized
  source 1..22: mol_type = other DNA
aggggttctttttcagaaagtt

SEQ ID NO: 36937 - DNA, 22 bp, synthetic construct
  misc_feature 1..22: note = chemically synthesized
  source 1..22: mol_type = other DNA
tttttcagaaagtttcagaaat

SEQ ID NO: 36938 - DNA, 22 bp, synthetic construct
  misc_feature 1..22: note = chemically synthesized
  source 1..22: mol_type = other DNA
tttcagaaagtttcagaaatcc

SEQ ID NO: 36939 - DNA, 22 bp, synthetic construct
  misc_feature 1..22: note = chemically synthesized
  source 1..22: mol_type = other DNA
ttcagaaagtttcagaaatcca

SEQ ID NO: 36940 - DNA, 22 bp, synthetic construct
  misc_feature 1..22: note = chemically synthesized
  source 1..22: mol_type = other DNA
tcagaaagtttcagaaatccaa

SEQ ID NO: 36941 - DNA, 22 bp, synthetic construct
  misc_feature 1..22: note = chemically synthesized
  source 1..22: mol_type = other DNA
cagaaagtttcagaaatccaag

SEQ ID NO: 36942 - DNA, 22 bp, synthetic construct
  misc_feature 1..22: note = chemically synthesized
  source 1..22: mol_type = other DNA
agaaagtttcagaaatccaaga

SEQ ID NO: 36943 - DNA, 22 bp, synthetic construct
  misc_feature 1..22: note = chemically synthesized
  source 1..22: mol_type = other DNA
cagaaatccaagacctttgact

SEQ ID NO: 36944 - DNA, 22 bp, synthetic construct
  misc_feature 1..22: note = chemically synthesized
  source 1..22: mol_type = other DNA
agaaatccaagacctttgactg

SEQ ID NO: 36945 - DNA, 22 bp, synthetic construct
  misc_feature 1..22: note = chemically synthesized
  source 1..22: mol_type = other DNA
tgactgcaagtactgtgttctt

SEQ ID NO: 36946 - DNA, 22 bp, synthetic construct
  misc_feature 1..22: note = chemically synthesized
  source 1..22: mol_type = other DNA
gactgcaagtactgtgttcttt

SEQ ID NO: 36947 - DNA, 22 bp, synthetic construct
  misc_feature 1..22: note = chemically synthesized
  source 1..22: mol_type = other DNA
actgcaagtactgtgttctttc

SEQ ID NO: 36948 - DNA, 22 bp, synthetic construct
  misc_feature 1..22: note = chemically synthesized
  source 1..22: mol_type = other DNA
caagtactgtgttctttcatct

SEQ ID NO: 36949 - DNA, 22 bp, synthetic construct
  misc_feature 1..22: note = chemically synthesized
  source 1..22: mol_type = other DNA
tgttctttcatctataggacat

SEQ ID NO: 36950 - DNA, 22 bp, synthetic construct
  misc_feature 1..22: note = chemically synthesized
  source 1..22: mol_type = other DNA
tttcatctataggacatttcct

SEQ ID NO: 36951 - DNA, 22 bp, synthetic construct
  misc_feature 1..22: note = chemically synthesized
  source 1..22: mol_type = other DNA
tcatctataggacatttccttt

SEQ ID NO: 36952 - DNA, 22 bp, synthetic construct
  misc_feature 1..22: note = chemically synthesized
  source 1..22: mol_type = other DNA
catctataggacatttcctttg

SEQ ID NO: 36953 - DNA, 22 bp, synthetic construct
  misc_feature 1..22: note = chemically synthesized
  source 1..22: mol_type = other DNA
atctataggacatttcctttga

SEQ ID NO: 36954 - DNA, 22 bp, synthetic construct
  misc_feature 1..22: note = chemically synthesized
  source 1..22: mol_type = other DNA
taggacatttcctttgaaaact

SEQ ID NO: 36955 - DNA, 22 bp, synthetic construct
  misc_feature 1..22: note = chemically synthesized
  source 1..22: mol_type = other DNA
cctttgaaaactgaggttttaa

SEQ ID NO: 36956 - DNA, 22 bp, synthetic construct
  misc_feature 1..22: note = chemically synthesized
  source 1..22: mol_type = other DNA
ctttgaaaactgaggttttaat

SEQ ID NO: 36957 - DNA, 22 bp, synthetic construct
  misc_feature 1..22: note = chemically synthesized
  source 1..22: mol_type = other DNA
tgaaaactgaggttttaatatt

SEQ ID NO: 36958 - DNA, 22 bp, synthetic construct
  misc_feature 1..22: note = chemically synthesized
  source 1..22: mol_type = other DNA
gaaaactgaggttttaatattt

SEQ ID NO: 36959 - DNA, 22 bp, synthetic construct
  misc_feature 1..22: note = chemically synthesized
  source 1..22: mol_type = other DNA
aaaactgaggttttaatattta

SEQ ID NO: 36960 - DNA, 22 bp, synthetic construct
  misc_feature 1..22: note = chemically synthesized
  source 1..22: mol_type = other DNA
aggttttaatatttaattctta

SEQ ID NO: 36961 - DNA, 22 bp, synthetic construct
  misc_feature 1..22: note = chemically synthesized
  source 1..22: mol_type = other DNA
taatatttaattcttacataat

SEQ ID NO: 36962 - DNA, 22 bp, synthetic construct
  misc_feature 1..22: note = chemically synthesized
  source 1..22: mol_type = other DNA
aatatttaattcttacataata

SEQ ID NO: 36963 - DNA, 22 bp, synthetic construct
  misc_feature 1..22: note = chemically synthesized
  source 1..22: mol_type = other DNA
atatttaattcttacataatag

SEQ ID NO: 36964 - DNA, 22 bp, synthetic construct
  misc_feature 1..22: note = chemically synthesized
  source 1..22: mol_type = other DNA
aattcttacataatagtaaaaa

SEQ ID NO: 36965 - DNA, 22 bp, synthetic construct
  misc_feature 1..22: note = chemically synthesized
  source 1..22: mol_type = other DNA
attcttacataatagtaaaaaa

SEQ ID NO: 36966 - DNA, 22 bp, synthetic construct
  misc_feature 1..22: note = chemically synthesized
  source 1..22: mol_type = other DNA
ttacataatagtaaaaaagtga

SEQ ID NO: 36967 - DNA, 22 bp, synthetic construct
  misc_feature 1..22: note = chemically synthesized
  source 1..22: mol_type = other DNA
acataatagtaaaaaagtgaat

SEQ ID NO: 36968 - DNA, 22 bp, synthetic construct
  misc_feature 1..22: note = chemically synthesized
  source 1..22: mol_type = other DNA
cataatagtaaaaaagtgaatt

SEQ ID NO: 36969 - DNA, 22 bp, synthetic construct
  misc_feature 1..22: note = chemically synthesized
  source 1..22: mol_type = other DNA
gccttggaaaagacctaaatcc

SEQ ID NO: 36970 - DNA, 22 bp, synthetic construct
  misc_feature 1..22: note = chemically synthesized
  source 1..22: mol_type = other DNA
ggaaaagacctaaatcctggtc

SEQ ID NO: 36971 - DNA, 22 bp, synthetic construct
  misc_feature 1..22: note = chemically synthesized
  source 1..22: mol_type = other DNA
gaaaagacctaaatcctggtcc

SEQ ID NO: 36972 - DNA, 22 bp, synthetic construct
  misc_feature 1..22: note = chemically synthesized
  source 1..22: mol_type = other DNA
aatcctggtcctaactctgcca

SEQ ID NO: 36973 - DNA, 22 bp, synthetic construct
  misc_feature 1..22: note = chemically synthesized
  source 1..22: mol_type = other DNA
gtcctaactctgccatttgctt

SEQ ID NO: 36974 - DNA, 22 bp, synthetic construct
  misc_feature 1..22: note = chemically synthesized
  source 1..22: mol_type = other DNA
actctgccatttgcttgatcat

SEQ ID NO: 36975 - DNA, 22 bp, synthetic construct
  misc_feature 1..22: note = chemically synthesized
  source 1..22: mol_type = other DNA
tgccatttgcttgatcattaaa

SEQ ID NO: 36976 - DNA, 22 bp, synthetic construct
  misc_feature 1..22: note = chemically synthesized
  source 1..22: mol_type = other DNA
ccatttgcttgatcattaaata

SEQ ID NO: 36977 - DNA, 22 bp, synthetic construct
  misc_feature 1..22: note = chemically synthesized
  source 1..22: mol_type = other DNA
gcttgatcattaaatacctcta

SEQ ID NO: 36978 - DNA, 22 bp, synthetic construct
  misc_feature 1..22: note = chemically synthesized
  source 1..22: mol_type = other DNA
cttgatcattaaatacctctac

SEQ ID NO: 36979 - DNA, 22 bp, synthetic construct
  misc_feature 1..22: note = chemically synthesized
  source 1..22: mol_type = other DNA
gatcattaaatacctctacgaa

SEQ ID NO: 36980 - DNA, 22 bp, synthetic construct
  misc_feature 1..22: note = chemically synthesized
  source 1..22: mol_type = other DNA
atcattaaatacctctacgaat

SEQ ID NO: 36981 - DNA, 22 bp, synthetic construct
  misc_feature 1..22: note = chemically synthesized
  source 1..22: mol_type = other DNA
aatacctctacgaatcaatttg

SEQ ID NO: 36982 - DNA, 22 bp, synthetic construct
  misc_feature 1..22: note = chemically synthesized
  source 1..22: mol_type = other DNA
tacgaatcaatttgctctatga

SEQ ID NO: 36983 - DNA, 22 bp, synthetic construct
  misc_feature 1..22: note = chemically synthesized
  source 1..22: mol_type = other DNA
cgaatcaatttgctctatgaac

SEQ ID NO: 36984 - DNA, 22 bp, synthetic construct
  misc_feature 1..22: note = chemically synthesized
  source 1..22: mol_type = other DNA
gctctatgaactggaggagtgg

SEQ ID NO: 36985 - DNA, 22 bp, synthetic construct
  misc_feature 1..22: note = chemically synthesized
  source 1..22: mol_type = other DNA
ctctatgaactggaggagtggg

SEQ ID NO: 36986 - DNA, 22 bp, synthetic construct
  misc_feature 1..22: note = chemically synthesized
  source 1..22: mol_type = other DNA
tatgaactggaggagtgggatt

SEQ ID NO: 36987 - DNA, 22 bp, synthetic construct
  misc_feature 1..22: note = chemically synthesized
  source 1..22: mol_type = other DNA
tgaactggaggagtgggattca

SEQ ID NO: 36988 - DNA, 22 bp, synthetic construct
  misc_feature 1..22: note = chemically synthesized
  source 1..22: mol_type = other DNA
gaggagtgggattcatgatctc

SEQ ID NO: 36989 - DNA, 22 bp, synthetic construct
  misc_feature 1..22: note = chemically synthesized
  source 1..22: mol_type = other DNA
atgatctctaagatacctcata

SEQ ID NO: 36990 - DNA, 22 bp, synthetic construct
  misc_feature 1..22: note = chemically synthesized
  source 1..22: mol_type = other DNA
taagatacctcatatcactact

SEQ ID NO: 36991 - DNA, 22 bp, synthetic construct
  misc_feature 1..22: note = chemically synthesized
  source 1..22: mol_type = other DNA
agatacctcatatcactactat

SEQ ID NO: 36992 - DNA, 22 bp, synthetic construct
  misc_feature 1..22: note = chemically synthesized
  source 1..22: mol_type = other DNA
atatcactactatgaaatgcag

SEQ ID NO: 36993 - DNA, 22 bp, synthetic construct
  misc_feature 1..22: note = chemically synthesized
  source 1..22: mol_type = other DNA
ctatgaaatgcagggaagtaaa

SEQ ID NO: 36994 - DNA, 22 bp, synthetic construct
  misc_feature 1..22: note = chemically synthesized
  source 1..22: mol_type = other DNA
tgaaatgcagggaagtaaaaat

SEQ ID NO: 36995 - DNA, 22 bp, synthetic construct
  misc_feature 1..22: note = chemically synthesized
  source 1..22: mol_type = other DNA
aaatcattaaatttaaagaaac

SEQ ID NO: 36996 - DNA, 22 bp, synthetic construct
  misc_feature 1..22: note = chemically synthesized
  source 1..22: mol_type = other DNA
aatttaaagaaactatagtggc

SEQ ID NO: 36997 - DNA, 22 bp, synthetic construct
  misc_feature 1..22: note = chemically synthesized
  source 1..22: mol_type = other DNA
aaagaaactatagtggcaatgt

SEQ ID NO: 36998 - DNA, 22 bp, synthetic construct
  misc_feature 1..22: note = chemically synthesized
  source 1..22: mol_type = other DNA
aagaaactatagtggcaatgta

SEQ ID NO: 36999 - DNA, 22 bp, synthetic construct
  misc_feature 1..22: note = chemically synthesized
  source 1..22: mol_type = other DNA
tagtggcaatgtattattagga

SEQ ID NO: 37000 - DNA, 22 bp, synthetic construct
  misc_feature 1..22: note = chemically synthesized
  source 1..22: mol_type = other DNA
ttaggaataaacacaataatta

SEQ ID NO: 37001 - DNA, 22 bp, synthetic construct
  misc_feature 1..22: note = chemically synthesized
  source 1..22: mol_type = other DNA
ggaataaacacaataattatcc

SEQ ID NO: 37002 - DNA, 22 bp, synthetic construct
  misc_feature 1..22: note = chemically synthesized
  source 1..22: mol_type = other DNA
tccatctatatgaaaatctcaa

SEQ ID NO: 37003 - DNA, 22 bp, synthetic construct
  misc_feature 1..22: note = chemically synthesized
  source 1..22: mol_type = other DNA
tatgaaaatctcaaaccatacc

SEQ ID NO: 37004 - DNA, 22 bp, synthetic construct
  misc_feature 1..22: note = chemically synthesized
  source 1..22: mol_type = other DNA
aaaccataccaggctatgataa

SEQ ID NO: 37005 - DNA, 22 bp, synthetic construct
  misc_feature 1..22: note = chemically synthesized
  source 1..22: mol_type = other DNA
tgataatattaaaataaagata

SEQ ID NO: 37006 - DNA, 22 bp, synthetic construct
  misc_feature 1..22: note = chemically synthesized
  source 1..22: mol_type = other DNA
aaataaagatacattgaagatg

SEQ ID NO: 37007 - DNA, 22 bp, synthetic construct
  misc_feature 1..22: note = chemically synthesized
  source 1..22: mol_type = other DNA
aagatgatatcaacttgtgtaa

SEQ ID NO: 37008 - DNA, 22 bp, synthetic construct
  misc_feature 1..22: note = chemically synthesized
  source 1..22: mol_type = other DNA
gtgtaaatcacattgtggggac

SEQ ID NO: 37009 - DNA, 22 bp, synthetic construct
  misc_feature 1..22: note = chemically synthesized
  source 1..22: mol_type = other DNA
tgtaaatcacattgtggggacc

SEQ ID NO: 37010 - DNA, 22 bp, synthetic construct
  misc_feature 1..22: note = chemically synthesized
  source 1..22: mol_type = other DNA
tggggacctctccacaaaaaca

SEQ ID NO: 37011 - DNA, 22 bp, synthetic construct
  misc_feature 1..22: note = chemically synthesized
  source 1..22: mol_type = other DNA
tccacaaaaacacttcccttcc

SEQ ID NO: 37012 - DNA, 22 bp, synthetic construct
  misc_feature 1..22: note = chemically synthesized
  source 1..22: mol_type = other DNA
cacaaaaacacttcccttcccc

SEQ ID NO: 37013 - DNA, 22 bp, synthetic construct
  misc_feature 1..22: note = chemically synthesized
  source 1..22: mol_type = other DNA
cccttccccttgaaagggaaat

SEQ ID NO: 37014 - DNA, 22 bp, synthetic construct
  misc_feature 1..22: note = chemically synthesized
  source 1..22: mol_type = other DNA
ccttccccttgaaagggaaatg

SEQ ID NO: 37015 - DNA, 22 bp, synthetic construct
  misc_feature 1..22: note = chemically synthesized
  source 1..22: mol_type = other DNA
ccccttgaaagggaaatgatag

SEQ ID NO: 37016 - DNA, 22 bp, synthetic construct
  misc_feature 1..22: note = chemically synthesized
  source 1..22: mol_type = other DNA
cccttgaaagggaaatgataga

SEQ ID NO: 37017 - DNA, 22 bp, synthetic construct
  misc_feature 1..22: note = chemically synthesized
  source 1..22: mol_type = other DNA
gaaagggaaatgatagaaaata

SEQ ID NO: 37018 - DNA, 22 bp, synthetic construct
  misc_feature 1..22: note = chemically synthesized
  source 1..22: mol_type = other DNA
aaagggaaatgatagaaaataa

SEQ ID NO: 37019 - DNA, 22 bp, synthetic construct
  misc_feature 1..22: note = chemically synthesized
  source 1..22: mol_type = other DNA
aaggcagcttaggggttgaaaa

SEQ ID NO: 37020 - DNA, 22 bp, synthetic construct
  misc_feature 1..22: note = chemically synthesized
  source 1..22: mol_type = other DNA
aggggttgaaaaacaaattttt

SEQ ID NO: 37021 - DNA, 22 bp, synthetic construct
  misc_feature 1..22: note = chemically synthesized
  source 1..22: mol_type = other DNA
ggggttgaaaaacaaatttttt

SEQ ID NO: 37022 - DNA, 22 bp, synthetic construct
  misc_feature 1..22: note = chemically synthesized
  source 1..22: mol_type = other DNA
aaaaacaaattttttcaaaaaa

SEQ ID NO: 37023 - DNA, 22 bp, synthetic construct
  misc_feature 1..22: note = chemically synthesized
  source 1..22: mol_type = other DNA
tttcaaaaaaaaatccattgag

SEQ ID NO: 37024 - DNA, 22 bp, synthetic construct
  misc_feature 1..22: note = chemically synthesized
  source 1..22: mol_type = other DNA
ttcaaaaaaaaatccattgagc

SEQ ID NO: 37025 - DNA, 22 bp, synthetic construct
  misc_feature 1..22: note = chemically synthesized
  source 1..22: mol_type = other DNA
tcaaaaaaaaatccattgagca

SEQ ID NO: 37026 - DNA, 22 bp, synthetic construct
  misc_feature 1..22: note = chemically synthesized
  source 1..22: mol_type = other DNA
caaaaaaaaatccattgagcat

SEQ ID NO: 37027 - DNA, 22 bp, synthetic construct
  misc_feature 1..22: note = chemically synthesized
  source 1..22: mol_type = other DNA
aaaaaaaaatccattgagcatt

SEQ ID NO: 37028 - DNA, 22 bp, synthetic construct
  misc_feature 1..22: note = chemically synthesized
  source 1..22: mol_type = other DNA
agcattttctatgtaccaggca

SEQ ID NO: 37029 - DNA, 22 bp, synthetic construct
  misc_feature 1..22: note = chemically synthesized
  source 1..22: mol_type = other DNA
tctatgtaccaggcactgttct

SEQ ID NO: 37030 - DNA, 22 bp, synthetic construct
  misc_feature 1..22: note = chemically synthesized
  source 1..22: mol_type = other DNA
ctatgtaccaggcactgttcta

SEQ ID NO: 37031 - DNA, 22 bp, synthetic construct
  misc_feature 1..22: note = chemically synthesized
  source 1..22: mol_type = other DNA
tatgtaccaggcactgttctag

SEQ ID NO: 37032 - DNA, 22 bp, synthetic construct
  misc_feature 1..22: note = chemically synthesized
  source 1..22: mol_type = other DNA
tgtaccaggcactgttctagac

SEQ ID NO: 37033 - DNA, 22 bp, synthetic construct
  misc_feature 1..22: note = chemically synthesized
  source 1..22: mol_type = other DNA
ttctagaccctgagatcaacac

SEQ ID NO: 37034 - DNA, 22 bp, synthetic construct
  misc_feature 1..22: note = chemically synthesized
  source 1..22: mol_type = other DNA
tagaccctgagatcaacacaca

SEQ ID NO: 37035 - DNA, 22 bp, synthetic construct
  misc_feature 1..22: note = chemically synthesized
  source 1..22: mol_type = other DNA
gaccctgagatcaacacacatg

SEQ ID NO: 37036 - DNA, 22 bp, synthetic construct
  misc_feature 1..22: note = chemically synthesized
  source 1..22: mol_type = other DNA
agatcaacacacatgctactga

SEQ ID NO: 37037 - DNA, 22 bp, synthetic construct
  misc_feature 1..22: note = chemically synthesized
  source 1..22: mol_type = other DNA
ctgattataagatccataaaat

SEQ ID NO: 37038 - DNA, 22 bp, synthetic construct
  misc_feature 1..22: note = chemically synthesized
  source 1..22: mol_type = other DNA
attataagatccataaaataac

SEQ ID NO: 37039 - DNA, 22 bp, synthetic construct
  misc_feature 1..22: note = chemically synthesized
  source 1..22: mol_type = other DNA
taagatccataaaataacttag

SEQ ID NO: 37040 - DNA, 22 bp, synthetic construct
  misc_feature 1..22: note = chemically synthesized
  source 1..22: mol_type = other DNA
agtttcactggcgtgttcccag

SEQ ID NO: 37041 - DNA, 22 bp, synthetic construct
  misc_feature 1..22: note = chemically synthesized
  source 1..22: mol_type = other DNA
gtttcactggcgtgttcccagt

SEQ ID NO: 37042 - DNA, 22 bp, synthetic construct
  misc_feature 1..22: note = chemically synthesized
  source 1..22: mol_type = other DNA
cactggcgtgttcccagtgccc

SEQ ID NO: 37043 - DNA, 22 bp, synthetic construct
  misc_feature 1..22: note = chemically synthesized
  source 1..22: mol_type = other DNA
actggcgtgttcccagtgccca

SEQ ID NO: 37044 - DNA, 22 bp, synthetic construct
  misc_feature 1..22: note = chemically synthesized
  source 1..22: mol_type = other DNA
gcgtgttcccagtgcccaggta

SEQ ID NO: 37045 - DNA, 22 bp, synthetic construct
  misc_feature 1..22: note = chemically synthesized
  source 1..22: mol_type = other DNA
ccagtgcccaggtaacagtgct

SEQ ID NO: 37046 - DNA, 22 bp, synthetic construct
  misc_feature 1..22: note = chemically synthesized
  source 1..22: mol_type = other DNA
cattaatgtttgttaaatgatg

SEQ ID NO: 37047 - DNA, 22 bp, synthetic construct
  misc_feature 1..22: note = chemically synthesized
  source 1..22: mol_type = other DNA
atgtttgttaaatgatgagaaa

SEQ ID NO: 37048 - DNA, 22 bp, synthetic construct
  misc_feature 1..22: note = chemically synthesized
  source 1..22: mol_type = other DNA
gttaaatgatgagaaaagagga

SEQ ID NO: 37049 - DNA, 22 bp, synthetic construct
  misc_feature 1..22: note = chemically synthesized
  source 1..22: mol_type = other DNA
ttaaatgatgagaaaagaggaa

SEQ ID NO: 37050 - DNA, 22 bp, synthetic construct
  misc_feature 1..22: note = chemically synthesized
  source 1..22: mol_type = other DNA
aatgatgagaaaagaggaaagc

SEQ ID NO: 37051 - DNA, 22 bp, synthetic construct
  misc_feature 1..22: note = chemically synthesized
  source 1..22: mol_type = other DNA
tgctcaggtgcaggaacttgtg

SEQ ID NO: 37052 - DNA, 22 bp, synthetic construct
  misc_feature 1..22: note = chemically synthesized
  source 1..22: mol_type = other DNA
ctcaggtgcaggaacttgtgca

SEQ ID NO: 37053 - DNA, 22 bp, synthetic construct
  misc_feature 1..22: note = chemically synthesized
  source 1..22: mol_type = other DNA
aggtgcaggaacttgtgcagag

SEQ ID NO: 37054 - DNA, 22 bp, synthetic construct
  misc_feature 1..22: note = chemically synthesized
  source 1..22: mol_type = other DNA
gtgcagagatcttctggactga

SEQ ID NO: 37055 - DNA, 22 bp, synthetic construct
  misc_feature 1..22: note = chemically synthesized
  source 1..22: mol_type = other DNA
tgcagagatcttctggactgat

SEQ ID NO: 37056 - DNA, 22 bp, synthetic construct
  misc_feature 1..22: note = chemically synthesized
  source 1..22: mol_type = other DNA
ctggactgattcccagtgctaa

SEQ ID NO: 37057 - DNA, 22 bp, synthetic construct
  misc_feature 1..22: note = chemically synthesized
  source 1..22: mol_type = other DNA
tggactgattcccagtgctaac

SEQ ID NO: 37058 - DNA, 22 bp, synthetic construct
  misc_feature 1..22: note = chemically synthesized
  source 1..22: mol_type = other DNA
gactgattcccagtgctaacaa

SEQ ID NO: 37059 - DNA, 22 bp, synthetic construct
  misc_feature 1..22: note = chemically synthesized
  source 1..22: mol_type = other DNA
attcccagtgctaacaagtccc

SEQ ID NO: 37060 - DNA, 22 bp, synthetic construct
  misc_feature 1..22: note = chemically synthesized
  source 1..22: mol_type = other DNA
ccagtgctaacaagtcccttcc

SEQ ID NO: 37061 - DNA, 22 bp, synthetic construct
  misc_feature 1..22: note = chemically synthesized
  source 1..22: mol_type = other DNA
acaagtcccttccagttttatc

SEQ ID NO: 37062 - DNA, 22 bp, synthetic construct
  misc_feature 1..22: note = chemically synthesized
  source 1..22: mol_type = other DNA
ccagttttatccaccaataagc

SEQ ID NO: 37063 - DNA, 22 bp, synthetic construct
  misc_feature 1..22: note = chemically synthesized
  source 1..22: mol_type = other DNA
cagttttatccaccaataagct

SEQ ID NO: 37064 - DNA, 22 bp, synthetic construct
  misc_feature 1..22: note = chemically synthesized
  source 1..22: mol_type = other DNA
tatccaccaataagctatgtcc

SEQ ID NO: 37065 - DNA, 22 bp, synthetic construct
  misc_feature 1..22: note = chemically synthesized
  source 1..22: mol_type = other DNA
atccaccaataagctatgtcct

SEQ ID NO: 37066 - DNA, 22 bp, synthetic construct
  misc_feature 1..22: note = chemically synthesized
  source 1..22: mol_type = other DNA
tccaccaataagctatgtcctt

SEQ ID NO: 37067 - DNA, 22 bp, synthetic construct
  misc_feature 1..22: note = chemically synthesized
  source 1..22: mol_type = other DNA
tgtccttgagctcctgcccact

SEQ ID NO: 37068 - DNA, 22 bp, synthetic construct
  misc_feature 1..22: note = chemically synthesized
  source 1..22: mol_type = other DNA
gagctcctgcccactctctaga

SEQ ID NO: 37069 - DNA, 22 bp, synthetic construct
  misc_feature 1..22: note = chemically synthesized
  source 1..22: mol_type = other DNA
agctcctgcccactctctagag

SEQ ID NO: 37070 - DNA, 22 bp, synthetic construct
  misc_feature 1..22: note = chemically synthesized
  source 1..22: mol_type = other DNA
ctgcccactctctagagaaaac

SEQ ID NO: 37071 - DNA, 22 bp, synthetic construct
  misc_feature 1..22: note = chemically synthesized
  source 1..22: mol_type = other DNA
cccactctctagagaaaacttt

SEQ ID NO: 37072 - DNA, 22 bp, synthetic construct
  misc_feature 1..22: note = chemically synthesized
  source 1..22: mol_type = other DNA
tctagagaaaacttttatttca

SEQ ID NO: 37073 - DNA, 22 bp, synthetic construct
  misc_feature 1..22: note = chemically synthesized
  source 1..22: mol_type = other DNA
tagagaaaacttttatttcaag

SEQ ID NO: 37074 - DNA, 22 bp, synthetic construct
  misc_feature 1..22: note = chemically synthesized
  source 1..22: mol_type = other DNA
gagaaaacttttatttcaaggc

SEQ ID NO: 37075 - DNA, 22 bp, synthetic construct
  misc_feature 1..22: note = chemically synthesized
  source 1..22: mol_type = other DNA
ttatttcaaggcatactccggg

SEQ ID NO: 37076 - DNA, 22 bp, synthetic construct
  misc_feature 1..22: note = chemically synthesized
  source 1..22: mol_type = other DNA
tatttcaaggcatactccggga

SEQ ID NO: 37077 - DNA, 22 bp, synthetic construct
  misc_feature 1..22: note = chemically synthesized
  source 1..22: mol_type = other DNA
atttcaaggcatactccgggat

SEQ ID NO: 37078 - DNA, 22 bp, synthetic construct
  misc_feature 1..22: note = chemically synthesized
  source 1..22: mol_type = other DNA
tttcaaggcatactccgggatt

SEQ ID NO: 37079 - DNA, 22 bp, synthetic construct
  misc_feature 1..22: note = chemically synthesized
  source 1..22: mol_type = other DNA
caaggcatactccgggattcac

SEQ ID NO: 37080 - DNA, 22 bp, synthetic construct
  misc_feature 1..22: note = chemically synthesized
  source 1..22: mol_type = other DNA
aaggcatactccgggattcaca

SEQ ID NO: 37081 - DNA, 22 bp, synthetic construct
  misc_feature 1..22: note = chemically synthesized
  source 1..22: mol_type = other DNA
cgggattcacatgtgatagaga

SEQ ID NO: 37082 - DNA, 22 bp, synthetic construct
  misc_feature 1..22: note = chemically synthesized
  source 1..22: mol_type = other DNA
acatgtgatagagatggttctg

SEQ ID NO: 37083 - DNA, 22 bp, synthetic construct
  misc_feature 1..22: note = chemically synthesized
  source 1..22: mol_type = other DNA
tgttcccaggaactttgggcat

SEQ ID NO: 37084 - DNA, 22 bp, synthetic construct
  misc_feature 1..22: note = chemically synthesized
  source 1..22: mol_type = other DNA
ttcccaggaactttgggcatat

SEQ ID NO: 37085 - DNA, 22 bp, synthetic construct
  misc_feature 1..22: note = chemically synthesized
  source 1..22: mol_type = other DNA
ccaggaactttgggcatattta

SEQ ID NO: 37086 - DNA, 22 bp, synthetic construct
  misc_feature 1..22: note = chemically synthesized
  source 1..22: mol_type = other DNA
tgggcatatttaaaaactggac

SEQ ID NO: 37087 - DNA, 22 bp, synthetic construct
  misc_feature 1..22: note = chemically synthesized
  source 1..22: mol_type = other DNA
gggcatatttaaaaactggact

SEQ ID NO: 37088 - DNA, 22 bp, synthetic construct
  misc_feature 1..22: note = chemically synthesized
  source 1..22: mol_type = other DNA
ggcatatttaaaaactggactg

SEQ ID NO: 37089 - DNA, 22 bp, synthetic construct
  misc_feature 1..22: note = chemically synthesized
  source 1..22: mol_type = other DNA
aaaaactggactggaaaaattt

SEQ ID NO: 37090 - DNA, 22 bp, synthetic construct
  misc_feature 1..22: note = chemically synthesized
  source 1..22: mol_type = other DNA
aaaactggactggaaaaatttg

SEQ ID NO: 37091 - DNA, 22 bp, synthetic construct
  misc_feature 1..22: note = chemically synthesized
  source 1..22: mol_type = other DNA
gactggaaaaatttgtgactag

SEQ ID NO: 37092 - DNA, 22 bp, synthetic construct
  misc_feature 1..22: note = chemically synthesized
  source 1..22: mol_type = other DNA
gaaaaatttgtgactagaaaaa

SEQ ID NO: 37093 - DNA, 22 bp, synthetic construct
  misc_feature 1..22: note = chemically synthesized
  source 1..22: mol_type = other DNA
gtgactagaaaaaggacattaa

SEQ ID NO: 37094 - DNA, 22 bp, synthetic construct
  misc_feature 1..22: note = chemically synthesized
  source 1..22: mol_type = other DNA
tgactagaaaaaggacattaaa

SEQ ID NO: 37095 - DNA, 22 bp, synthetic construct
  misc_feature 1..22: note = chemically synthesized
  source 1..22: mol_type = other DNA
gaaaaaggacattaaaaacaca

SEQ ID NO: 37096 - DNA, 22 bp, synthetic construct
  misc_feature 1..22: note = chemically synthesized
  source 1..22: mol_type = other DNA
aaaacacatgctcatttcagga

SEQ ID NO: 37097 - DNA, 22 bp, synthetic construct
  misc_feature 1..22: note = chemically synthesized
  source 1..22: mol_type = other DNA
atttcaggataaagatctctga

SEQ ID NO: 37098 - DNA, 22 bp, synthetic construct
  misc_feature 1..22: note = chemically synthesized
  source 1..22: mol_type = other DNA
caggataaagatctctgaggaa

SEQ ID NO: 37099 - DNA, 22 bp, synthetic construct
  misc_feature 1..22: note = chemically synthesized
  source 1..22: mol_type = other DNA
aggataaagatctctgaggaaa

SEQ ID NO: 37100 - DNA, 22 bp, synthetic construct
  misc_feature 1..22: note = chemically synthesized
  source 1..22: mol_type = other DNA
tgaggaaaagaatacaaaataa

SEQ ID NO: 37101 - DNA, 22 bp, synthetic construct
  misc_feature 1..22: note = chemically synthesized
  source 1..22: mol_type = other DNA
aggaaaagaatacaaaataatt

SEQ ID NO: 37102 - DNA, 22 bp, synthetic construct
  misc_feature 1..22: note = chemically synthesized
  source 1..22: mol_type = other DNA
aaaaagaaacaacagaaacagg

SEQ ID NO: 37103 - DNA, 22 bp, synthetic construct
  misc_feature 1..22: note = chemically synthesized
  source 1..22: mol_type = other DNA
aaaagaaacaacagaaacaggt

SEQ ID NO: 37104 - DNA, 22 bp, synthetic construct
  misc_feature 1..22: note = chemically synthesized
  source 1..22: mol_type = other DNA
cacttctctgtaataaggtttc

SEQ ID NO: 37105 - DNA, 22 bp, synthetic construct
  misc_feature 1..22: note = chemically synthesized
  source 1..22: mol_type = other DNA
acttctctgtaataaggtttct

SEQ ID NO: 37106 - DNA, 22 bp, synthetic construct
  misc_feature 1..22: note = chemically synthesized
  source 1..22: mol_type = other DNA
ctctgtaataaggtttctgtcc

SEQ ID NO: 37107 - DNA, 22 bp, synthetic construct
  misc_feature 1..22: note = chemically synthesized
  source 1..22: mol_type = other DNA
tctgtaataaggtttctgtcct

SEQ ID NO: 37108 - DNA, 22 bp, synthetic construct
  misc_feature 1..22: note = chemically synthesized
  source 1..22: mol_type = other DNA
tgtaataaggtttctgtcctcc

SEQ ID NO: 37109 - DNA, 22 bp, synthetic construct
  misc_feature 1..22: note = chemically synthesized
  source 1..22: mol_type = other DNA
taataaggtttctgtcctccta

SEQ ID NO: 37110 - DNA, 22 bp, synthetic construct
  misc_feature 1..22: note = chemically synthesized
  source 1..22: mol_type = other DNA
ctgtcctcctagattctttctc

SEQ ID NO: 37111 - DNA, 22 bp, synthetic construct
  misc_feature 1..22: note = chemically synthesized
  source 1..22: mol_type = other DNA
tgtcctcctagattctttctca

SEQ ID NO: 37112 - DNA, 22 bp, synthetic construct
  misc_feature 1..22: note = chemically synthesized
  source 1..22: mol_type = other DNA
tcctcctagattctttctcact

SEQ ID NO: 37113 - DNA, 22 bp, synthetic construct
  misc_feature 1..22: note = chemically synthesized
  source 1..22: mol_type = other DNA
ctagattctttctcactaaact

SEQ ID NO: 37114 - DNA, 22 bp, synthetic construct
  misc_feature 1..22: note = chemically synthesized
  source 1..22: mol_type = other DNA
gattctttctcactaaactaca

SEQ ID NO: 37115 - DNA, 22 bp, synthetic construct
  misc_feature 1..22: note = chemically synthesized
  source 1..22: mol_type = other DNA
tttctcactaaactacagagaa

SEQ ID NO: 37116 - DNA, 22 bp, synthetic construct
  misc_feature 1..22: note = chemically synthesized
  source 1..22: mol_type = other DNA
tctcactaaactacagagaata

SEQ ID NO: 37117 - DNA, 22 bp, synthetic construct
  misc_feature 1..22: note = chemically synthesized
  source 1..22: mol_type = other DNA
ctcactaaactacagagaataa

SEQ ID NO: 37118 - DNA, 22 bp, synthetic construct
  misc_feature 1..22: note = chemically synthesized
  source 1..22: mol_type = other DNA
tcactaaactacagagaataag

SEQ ID NO: 37119 - DNA, 22 bp, synthetic construct
  misc_feature 1..22: note = chemically synthesized
  source 1..22: mol_type = other DNA
actaaactacagagaataagac

SEQ ID NO: 37120 - DNA, 22 bp, synthetic construct
  misc_feature 1..22: note = chemically synthesized
  source 1..22: mol_type = other DNA
aactacagagaataagaccgtg

SEQ ID NO: 37121 - DNA, 22 bp, synthetic construct
  misc_feature 1..22: note = chemically synthesized
  source 1..22: mol_type = other DNA
cagagaataagaccgtgctttg

SEQ ID NO: 37122 - DNA, 22 bp, synthetic construct
  misc_feature 1..22: note = chemically synthesized
  source 1..22: mol_type = other DNA
tgttctcttatatgcattctgt

SEQ ID NO: 37123 - DNA, 22 bp, synthetic construct
  misc_feature 1..22: note = chemically synthesized
  source 1..22: mol_type = other DNA
gttctcttatatgcattctgtc

SEQ ID NO: 37124 - DNA, 22 bp, synthetic construct
  misc_feature 1..22: note = chemically synthesized
  source 1..22: mol_type = other DNA
ttctcttatatgcattctgtcc

SEQ ID NO: 37125 - DNA, 22 bp, synthetic construct
  misc_feature 1..22: note = chemically synthesized
  source 1..22: mol_type = other DNA
tcttatatgcattctgtccact

SEQ ID NO: 37126 - DNA, 22 bp, synthetic construct
  misc_feature 1..22: note = chemically synthesized
  source 1..22: mol_type = other DNA
ttatatgcattctgtccacttc

SEQ ID NO: 37127 - DNA, 22 bp, synthetic construct
  misc_feature 1..22: note = chemically synthesized
  source 1..22: mol_type = other DNA
atatgcattctgtccacttcta

SEQ ID NO: 37128 - DNA, 22 bp, synthetic construct
  misc_feature 1..22: note = chemically synthesized
  source 1..22: mol_type = other DNA
tatgcattctgtccacttctac

SEQ ID NO: 37129 - DNA, 22 bp, synthetic construct
  misc_feature 1..22: note = chemically synthesized
  source 1..22: mol_type = other DNA
tgtccacttctacataggcaaa

SEQ ID NO: 37130 - DNA, 22 bp, synthetic construct
  misc_feature 1..22: note = chemically synthesized
  source 1..22: mol_type = other DNA
tccacttctacataggcaaaat

SEQ ID NO: 37131 - DNA, 22 bp, synthetic construct
  misc_feature 1..22: note = chemically synthesized
  source 1..22: mol_type = other DNA
ctacataggcaaaattgacttt

SEQ ID NO: 37132 - DNA, 22 bp, synthetic construct
  misc_feature 1..22: note = chemically synthesized
  source 1..22: mol_type = other DNA
tacataggcaaaattgactttt

SEQ ID NO: 37133 - DNA, 22 bp, synthetic construct
  misc_feature 1..22: note = chemically synthesized
  source 1..22: mol_type = other DNA
cataggcaaaattgacttttaa

SEQ ID NO: 37134 - DNA, 22 bp, synthetic construct
  misc_feature 1..22: note = chemically synthesized
  source 1..22: mol_type = other DNA
acttttaattttgattttatga

SEQ ID NO: 37135 - DNA, 22 bp, synthetic construct
  misc_feature 1..22: note = chemically synthesized
  source 1..22: mol_type = other DNA
ttaattttgattttatgaatgc

SEQ ID NO: 37136 - DNA, 22 bp, synthetic construct
  misc_feature 1..22: note = chemically synthesized
  source 1..22: mol_type = other DNA
taattttgattttatgaatgca

SEQ ID NO: 37137 - DNA, 22 bp, synthetic construct
  misc_feature 1..22: note = chemically synthesized
  source 1..22: mol_type = other DNA
aattttgattttatgaatgcat

SEQ ID NO: 37138 - DNA, 22 bp, synthetic construct
  misc_feature 1..22: note = chemically synthesized
  source 1..22: mol_type = other DNA
attttgattttatgaatgcata

SEQ ID NO: 37139 - DNA, 22 bp, synthetic construct
  misc_feature 1..22: note = chemically synthesized
  source 1..22: mol_type = other DNA
tgattttatgaatgcatacaca

SEQ ID NO: 37140 - DNA, 22 bp, synthetic construct
  misc_feature 1..22: note = chemically synthesized
  source 1..22: mol_type = other DNA
gattttatgaatgcatacacac

SEQ ID NO: 37141 - DNA, 22 bp, synthetic construct
  misc_feature 1..22: note = chemically synthesized
  source 1..22: mol_type = other DNA
attttatgaatgcatacacacg

SEQ ID NO: 37142 - DNA, 22 bp, synthetic construct
  misc_feature 1..22: note = chemically synthesized
  source 1..22: mol_type = other DNA
tatgaatgcatacacacgagaa

SEQ ID NO: 37143 - DNA, 22 bp, synthetic construct
  misc_feature 1..22: note = chemically synthesized
  source 1..22: mol_type = other DNA
atgaatgcatacacacgagaac

SEQ ID NO: 37144 - DNA, 22 bp, synthetic construct
  misc_feature 1..22: note = chemically synthesized
  source 1..22: mol_type = other DNA
tgaatgcatacacacgagaact

SEQ ID NO: 37145 - DNA, 22 bp, synthetic construct
  misc_feature 1..22: note = chemically synthesized
  source 1..22: mol_type = other DNA
tgaacagttagtataaggtgaa

SEQ ID NO: 37146 - DNA, 22 bp, synthetic construct
  misc_feature 1..22: note = chemically synthesized
  source 1..22: mol_type = other DNA
gaacagttagtataaggtgaat

SEQ ID NO: 37147 - DNA, 22 bp, synthetic construct
  misc_feature 1..22: note = chemically synthesized
  source 1..22: mol_type = other DNA
aacagttagtataaggtgaatt

SEQ ID NO: 37148 - DNA, 22 bp, synthetic construct
  misc_feature 1..22: note = chemically synthesized
  source 1..22: mol_type = other DNA
gtataaggtgaattctgatttt

SEQ ID NO: 37149 - DNA, 22 bp, synthetic construct
  misc_feature 1..22: note = chemically synthesized
  source 1..22: mol_type = other DNA
tgatttttcagaatgcatgcca

SEQ ID NO: 37150 - DNA, 22 bp, synthetic construct
  misc_feature 1..22: note = chemically synthesized
  source 1..22: mol_type = other DNA
atttttcagaatgcatgccata

SEQ ID NO: 37151 - DNA, 22 bp, synthetic construct
  misc_feature 1..22: note = chemically synthesized
  source 1..22: mol_type = other DNA
ttcagaatgcatgccatatata

SEQ ID NO: 37152 - DNA, 22 bp, synthetic construct
  misc_feature 1..22: note = chemically synthesized
  source 1..22: mol_type = other DNA
tcagaatgcatgccatatataa

SEQ ID NO: 37153 - DNA, 22 bp, synthetic construct
  misc_feature 1..22: note = chemically synthesized
  source 1..22: mol_type = other DNA
cagaatgcatgccatatataat

SEQ ID NO: 37154 - DNA, 22 bp, synthetic construct
  misc_feature 1..22: note = chemically synthesized
  source 1..22: mol_type = other DNA
agaatgcatgccatatataatg

SEQ ID NO: 37155 - DNA, 22 bp, synthetic construct
  misc_feature 1..22: note = chemically synthesized
  source 1..22: mol_type = other DNA
aattttgagattatgctggctc

SEQ ID NO: 37156 - DNA, 22 bp, synthetic construct
  misc_feature 1..22: note = chemically synthesized
  source 1..22: mol_type = other DNA
attttgagattatgctggctct

SEQ ID NO: 37157 - DNA, 22 bp, synthetic construct
  misc_feature 1..22: note = chemically synthesized
  source 1..22: mol_type = other DNA
tgagattatgctggctctgatt

SEQ ID NO: 37158 - DNA, 22 bp, synthetic construct
  misc_feature 1..22: note = chemically synthesized
  source 1..22: mol_type = other DNA
gagattatgctggctctgatta

SEQ ID NO: 37159 - DNA, 22 bp, synthetic construct
  misc_feature 1..22: note = chemically synthesized
  source 1..22: mol_type = other DNA
agattatgctggctctgattag

SEQ ID NO: 37160 - DNA, 22 bp, synthetic construct
  misc_feature 1..22: note = chemically synthesized
  source 1..22: mol_type = other DNA
tgctggctctgattagccaaaa

SEQ ID NO: 37161 - DNA, 22 bp, synthetic construct
  misc_feature 1..22: note = chemically synthesized
  source 1..22: mol_type = other DNA
gctctgattagccaaaagaagg

SEQ ID NO: 37162 - DNA, 22 bp, synthetic construct
  misc_feature 1..22: note = chemically synthesized
  source 1..22: mol_type = other DNA
tgattagccaaaagaaggaagt

SEQ ID NO: 37163 - DNA, 22 bp, synthetic construct
  misc_feature 1..22: note = chemically synthesized
  source 1..22: mol_type = other DNA
attagccaaaagaaggaagtaa

SEQ ID NO: 37164 - DNA, 22 bp, synthetic construct
  misc_feature 1..22: note = chemically synthesized
  source 1..22: mol_type = other DNA
gccaaaagaaggaagtaatata

SEQ ID NO: 37165 - DNA, 22 bp, synthetic construct
  misc_feature 1..22: note = chemically synthesized
  source 1..22: mol_type = other DNA
tggttattatttcagatccttt

SEQ ID NO: 37166 - DNA, 22 bp, synthetic construct
  misc_feature 1..22: note = chemically synthesized
  source 1..22: mol_type = other DNA
gttattatttcagatcctttag

SEQ ID NO: 37167 - DNA, 22 bp, synthetic construct
  misc_feature 1..22: note = chemically synthesized
  source 1..22: mol_type = other DNA
ttatttcagatcctttagatta

SEQ ID NO: 37168 - DNA, 22 bp, synthetic construct
  misc_feature 1..22: note = chemically synthesized
  source 1..22: mol_type = other DNA
tttcagatcctttagattactg

SEQ ID NO: 37169 - DNA, 22 bp, synthetic construct
  misc_feature 1..22: note = chemically synthesized
  source 1..22: mol_type = other DNA
cagatcctttagattactgtaa

SEQ ID NO: 37170 - DNA, 22 bp, synthetic construct
  misc_feature 1..22: note = chemically synthesized
  source 1..22: mol_type = other DNA
agatcctttagattactgtaat

SEQ ID NO: 37171 - DNA, 22 bp, synthetic construct
  misc_feature 1..22: note = chemically synthesized
  source 1..22: mol_type = other DNA
tagattactgtaatagacatga

SEQ ID NO: 37172 - DNA, 22 bp, synthetic construct
  misc_feature 1..22: note = chemically synthesized
  source 1..22: mol_type = other DNA
agattactgtaatagacatgaa

SEQ ID NO: 37173 - DNA, 22 bp, synthetic construct
  misc_feature 1..22: note = chemically synthesized
  source 1..22: mol_type = other DNA
gattactgtaatagacatgaaa

SEQ ID NO: 37174 - DNA, 22 bp, synthetic construct
  misc_feature 1..22: note = chemically synthesized
  source 1..22: mol_type = other DNA
ctgtaatagacatgaaatagta

SEQ ID NO: 37175 - DNA, 22 bp, synthetic construct
  misc_feature 1..22: note = chemically synthesized
  source 1..22: mol_type = other DNA
taatagacatgaaatagtaaac

SEQ ID NO: 37176 - DNA, 22 bp, synthetic construct
  misc_feature 1..22: note = chemically synthesized
  source 1..22: mol_type = other DNA
tatatcacaacacatgacataa

SEQ ID NO: 37177 - DNA, 22 bp, synthetic construct
  misc_feature 1..22: note = chemically synthesized
  source 1..22: mol_type = other DNA
cagatcgtttaaatcacacaag

SEQ ID NO: 37178 - DNA, 22 bp, synthetic construct
  misc_feature 1..22: note = chemically synthesized
  source 1..22: mol_type = other DNA
agatcgtttaaatcacacaagt

SEQ ID NO: 37179 - DNA, 22 bp, synthetic construct
  misc_feature 1..22: note = chemically synthesized
  source 1..22: mol_type = other DNA
aaatcacacaagtcatcactgc

SEQ ID NO: 37180 - DNA, 22 bp, synthetic construct
  misc_feature 1..22: note = chemically synthesized
  source 1..22: mol_type = other DNA
aatcacacaagtcatcactgcc

SEQ ID NO: 37181 - DNA, 22 bp, synthetic construct
  misc_feature 1..22: note = chemically synthesized
  source 1..22: mol_type = other DNA
ccatttacccagcaatcagttg

SEQ ID NO: 37182 - DNA, 22 bp, synthetic construct
  misc_feature 1..22: note = chemically synthesized
  source 1..22: mol_type = other DNA
acccagcaatcagttggcttga

SEQ ID NO: 37183 - DNA, 22 bp, synthetic construct
  misc_feature 1..22: note = chemically synthesized
  source 1..22: mol_type = other DNA
cccagcaatcagttggcttgat

SEQ ID NO: 37184 - DNA, 22 bp, synthetic construct
  misc_feature 1..22: note = chemically synthesized
  source 1..22: mol_type = other DNA
gcttgattcttcaagatcttga

SEQ ID NO: 37185 - DNA, 22 bp, synthetic construct
  misc_feature 1..22: note = chemically synthesized
  source 1..22: mol_type = other DNA
gattcttcaagatcttgaggaa

SEQ ID NO: 37186 - DNA, 22 bp, synthetic construct
  misc_feature 1..22: note = chemically synthesized
  source 1..22: mol_type = other DNA
attcttcaagatcttgaggaac

SEQ ID NO: 37187 - DNA, 22 bp, synthetic construct
  misc_feature 1..22: note = chemically synthesized
  source 1..22: mol_type = other DNA
ttcaagatcttgaggaactcag

SEQ ID NO: 37188 - DNA, 22 bp, synthetic construct
  misc_feature 1..22: note = chemically synthesized
  source 1..22: mol_type = other DNA
caagatcttgaggaactcagcc

SEQ ID NO: 37189 - DNA, 22 bp, synthetic construct
  misc_feature 1..22: note = chemically synthesized
  source 1..22: mol_type = other DNA
aagatcttgaggaactcagcct

SEQ ID NO: 37190 - DNA, 22 bp, synthetic construct
  misc_feature 1..22: note = chemically synthesized
  source 1..22: mol_type = other DNA
gaggaactcagccttcaaaacc

SEQ ID NO: 37191 - DNA, 22 bp, synthetic construct
  misc_feature 1..22: note = chemically synthesized
  source 1..22: mol_type = other DNA
aggaactcagccttcaaaacca

SEQ ID NO: 37192 - DNA, 22 bp, synthetic construct
  misc_feature 1..22: note = chemically synthesized
  source 1..22: mol_type = other DNA
agccttcaaaaccatgactttt

SEQ ID NO: 37193 - DNA, 22 bp, synthetic construct
  misc_feature 1..22: note = chemically synthesized
  source 1..22: mol_type = other DNA
caaaaccatgactttttctttg

SEQ ID NO: 37194 - DNA, 22 bp, synthetic construct
  misc_feature 1..22: note = chemically synthesized
  source 1..22: mol_type = other DNA
aaaaccatgactttttctttgc

SEQ ID NO: 37195 - DNA, 22 bp, synthetic construct
  misc_feature 1..22: note = chemically synthesized
  source 1..22: mol_type = other DNA
tttctttgctaatgttccttca

SEQ ID NO: 37196 - DNA, 22 bp, synthetic construct
  misc_feature 1..22: note = chemically synthesized
  source 1..22: mol_type = other DNA
ttctttgctaatgttccttcaa

SEQ ID NO: 37197 - DNA, 22 bp, synthetic construct
  misc_feature 1..22: note = chemically synthesized
  source 1..22: mol_type = other DNA
tctttgctaatgttccttcaat

SEQ ID NO: 37198 - DNA, 22 bp, synthetic construct
  misc_feature 1..22: note = chemically synthesized
  source 1..22: mol_type = other DNA
ctttgctaatgttccttcaata

SEQ ID NO: 37199 - DNA, 22 bp, synthetic construct
  misc_feature 1..22: note = chemically synthesized
  source 1..22: mol_type = other DNA
tttgctaatgttccttcaatag

SEQ ID NO: 37200 - DNA, 22 bp, synthetic construct
  misc_feature 1..22: note = chemically synthesized
  source 1..22: mol_type = other DNA
tgctaatgttccttcaatagtc

SEQ ID NO: 37201 - DNA, 22 bp, synthetic construct
  misc_feature 1..22: note = chemically synthesized
  source 1..22: mol_type = other DNA
gctaatgttccttcaatagtct

SEQ ID NO: 37202 - DNA, 22 bp, synthetic construct
  misc_feature 1..22: note = chemically synthesized
  source 1..22: mol_type = other DNA
ctaatgttccttcaatagtctt

SEQ ID NO: 37203 - DNA, 22 bp, synthetic construct
  misc_feature 1..22: note = chemically synthesized
  source 1..22: mol_type = other DNA
atgttccttcaatagtcttgac

SEQ ID NO: 37204 - DNA, 22 bp, synthetic construct
  misc_feature 1..22: note = chemically synthesized
  source 1..22: mol_type = other DNA
cttcaatagtcttgacactttt

SEQ ID NO: 37205 - DNA, 22 bp, synthetic construct
  misc_feature 1..22: note = chemically synthesized
  source 1..22: mol_type = other DNA
caatagtcttgacacttttaaa

SEQ ID NO: 37206 - DNA, 22 bp, synthetic construct
  misc_feature 1..22: note = chemically synthesized
  source 1..22: mol_type = other DNA
aatagtcttgacacttttaaac

SEQ ID NO: 37207 - DNA, 22 bp, synthetic construct
  misc_feature 1..22: note = chemically synthesized
  source 1..22: mol_type = other DNA
gacacttttaaactagagagta

SEQ ID NO: 37208 - DNA, 22 bp, synthetic construct
  misc_feature 1..22: note = chemically synthesized
  source 1..22: mol_type = other DNA
acacttttaaactagagagtat

SEQ ID NO: 37209 - DNA, 22 bp, synthetic construct
  misc_feature 1..22: note = chemically synthesized
  source 1..22: mol_type = other DNA
ttaaactagagagtataaaccc

SEQ ID NO: 37210 - DNA, 22 bp, synthetic construct
  misc_feature 1..22: note = chemically synthesized
  source 1..22: mol_type = other DNA
taaactagagagtataaaccca

SEQ ID NO: 37211 - DNA, 22 bp, synthetic construct
  misc_feature 1..22: note = chemically synthesized
  source 1..22: mol_type = other DNA
aaactagagagtataaacccac

SEQ ID NO: 37212 - DNA, 22 bp, synthetic construct
  misc_feature 1..22: note = chemically synthesized
  source 1..22: mol_type = other DNA
aactagagagtataaacccaca

SEQ ID NO: 37213 - DNA, 22 bp, synthetic construct
  misc_feature 1..22: note = chemically synthesized
  source 1..22: mol_type = other DNA
gagagtataaacccacaaggaa

SEQ ID NO: 37214 - DNA, 22 bp, synthetic construct
  misc_feature 1..22: note = chemically synthesized
  source 1..22: mol_type = other DNA
ttttataattttacagatgtct

SEQ ID NO: 37215 - DNA, 22 bp, synthetic construct
  misc_feature 1..22: note = chemically synthesized
  source 1..22: mol_type = other DNA
tataattttacagatgtcttta

SEQ ID NO: 37216 - DNA, 22 bp, synthetic construct
  misc_feature 1..22: note = chemically synthesized
  source 1..22: mol_type = other DNA
ataattttacagatgtctttat

SEQ ID NO: 37217 - DNA, 22 bp, synthetic construct
  misc_feature 1..22: note = chemically synthesized
  source 1..22: mol_type = other DNA
taattttacagatgtctttatt

SEQ ID NO: 37218 - DNA, 22 bp, synthetic construct
  misc_feature 1..22: note = chemically synthesized
  source 1..22: mol_type = other DNA
tacagatgtctttattttcaaa

SEQ ID NO: 37219 - DNA, 22 bp, synthetic construct
  misc_feature 1..22: note = chemically synthesized
  source 1..22: mol_type = other DNA
acagatgtctttattttcaaaa

SEQ ID NO: 37220 - DNA, 22 bp, synthetic construct
  misc_feature 1..22: note = chemically synthesized
  source 1..22: mol_type = other DNA
cagatgtctttattttcaaaat

SEQ ID NO: 37221 - DNA, 22 bp, synthetic construct
  misc_feature 1..22: note = chemically synthesized
  source 1..22: mol_type = other DNA
tattttcaaaatcatttacatt

SEQ ID NO: 37222 - DNA, 22 bp, synthetic construct
  misc_feature 1..22: note = chemically synthesized
  source 1..22: mol_type = other DNA
attttcaaaatcatttacattg

SEQ ID NO: 37223 - DNA, 22 bp, synthetic construct
  misc_feature 1..22: note = chemically synthesized
  source 1..22: mol_type = other DNA
ttttcaaaatcatttacattgt

SEQ ID NO: 37224 - DNA, 22 bp, synthetic construct
  misc_feature 1..22: note = chemically synthesized
  source 1..22: mol_type = other DNA
tcaaaatcatttacattgtggt

SEQ ID NO: 37225 - DNA, 22 bp, synthetic construct
  misc_feature 1..22: note = chemically synthesized
  source 1..22: mol_type = other DNA
caaaatcatttacattgtggtt

SEQ ID NO: 37226 - DNA, 22 bp, synthetic construct
  misc_feature 1..22: note = chemically synthesized
  source 1..22: mol_type = other DNA
aaaatcatttacattgtggttc

SEQ ID NO: 37227 - DNA, 22 bp, synthetic construct
  misc_feature 1..22: note = chemically synthesized
  source 1..22: mol_type = other DNA
acattgtggttctctaccttgc

SEQ ID NO: 37228 - DNA, 22 bp, synthetic construct
  misc_feature 1..22: note = chemically synthesized
  source 1..22: mol_type = other DNA
cattgtggttctctaccttgcc

SEQ ID NO: 37229 - DNA, 22 bp, synthetic construct
  misc_feature 1..22: note = chemically synthesized
  source 1..22: mol_type = other DNA
tggttctctaccttgccttctc

SEQ ID NO: 37230 - DNA, 22 bp, synthetic construct
  misc_feature 1..22: note = chemically synthesized
  source 1..22: mol_type = other DNA
tctaccttgccttctcttaccc

SEQ ID NO: 37231 - DNA, 22 bp, synthetic construct
  misc_feature 1..22: note = chemically synthesized
  source 1..22: mol_type = other DNA
taccttgccttctcttacccag

SEQ ID NO: 37232 - DNA, 22 bp, synthetic construct
  misc_feature 1..22: note = chemically synthesized
  source 1..22: mol_type = other DNA
ccttgccttctcttacccagca

SEQ ID NO: 37233 - DNA, 22 bp, synthetic construct
  misc_feature 1..22: note = chemically synthesized
  source 1..22: mol_type = other DNA
gccttctcttacccagcacaga

SEQ ID NO: 37234 - DNA, 22 bp, synthetic construct
  misc_feature 1..22: note = chemically synthesized
  source 1..22: mol_type = other DNA
ccttctcttacccagcacagat

SEQ ID NO: 37235 - DNA, 22 bp, synthetic construct
  misc_feature 1..22: note = chemically synthesized
  source 1..22: mol_type = other DNA
ctcttacccagcacagatgagg

SEQ ID NO: 37236 - DNA, 22 bp, synthetic construct
  misc_feature 1..22: note = chemically synthesized
  source 1..22: mol_type = other DNA
tcttacccagcacagatgaggt

SEQ ID NO: 37237 - DNA, 22 bp, synthetic construct
  misc_feature 1..22: note = chemically synthesized
  source 1..22: mol_type = other DNA
ttacccagcacagatgaggtta

SEQ ID NO: 37238 - DNA, 22 bp, synthetic construct
  misc_feature 1..22: note = chemically synthesized
  source 1..22: mol_type = other DNA
acccagcacagatgaggttata

SEQ ID NO: 37239 - DNA, 22 bp, synthetic construct
  misc_feature 1..22: note = chemically synthesized
  source 1..22: mol_type = other DNA
cccagcacagatgaggttatac

SEQ ID NO: 37240 - DNA, 22 bp, synthetic construct
  misc_feature 1..22: note = chemically synthesized
  source 1..22: mol_type = other DNA
tacctcactcgcaaattgtttt

SEQ ID NO: 37241 - DNA, 22 bp, synthetic construct
  misc_feature 1..22: note = chemically synthesized
  source 1..22: mol_type = other DNA
actcgcaaattgttttatcaat

SEQ ID NO: 37242 - DNA, 22 bp, synthetic construct
  misc_feature 1..22: note = chemically synthesized
  source 1..22: mol_type = other DNA
gcaaattgttttatcaatttga

SEQ ID NO: 37243 - DNA, 22 bp, synthetic construct
  misc_feature 1..22: note = chemically synthesized
  source 1..22: mol_type = other DNA
ttttatcaatttgattttcttt

SEQ ID NO: 37244 - DNA, 22 bp, synthetic construct
  misc_feature 1..22: note = chemically synthesized
  source 1..22: mol_type = other DNA
tatcaatttgattttctttatt

SEQ ID NO: 37245 - DNA, 22 bp, synthetic construct
  misc_feature 1..22: note = chemically synthesized
  source 1..22: mol_type = other DNA
atcaatttgattttctttattt

SEQ ID NO: 37246 - DNA, 22 bp, synthetic construct
  misc_feature 1..22: note = chemically synthesized
  source 1..22: mol_type = other DNA
tcaatttgattttctttatttt

SEQ ID NO: 37247 - DNA, 22 bp, synthetic construct
  misc_feature 1..22: note = chemically synthesized
  source 1..22: mol_type = other DNA
gattttctttattttataattc

SEQ ID NO: 37248 - DNA, 22 bp, synthetic construct
  misc_feature 1..22: note = chemically synthesized
  source 1..22: mol_type = other DNA
attttctttattttataattcc

SEQ ID NO: 37249 - DNA, 22 bp, synthetic construct
  misc_feature 1..22: note = chemically synthesized
  source 1..22: mol_type = other DNA
tctttattttataattcctaca

SEQ ID NO: 37250 - DNA, 22 bp, synthetic construct
  misc_feature 1..22: note = chemically synthesized
  source 1..22: mol_type = other DNA
ctttattttataattcctacat

SEQ ID NO: 37251 - DNA, 22 bp, synthetic construct
  misc_feature 1..22: note = chemically synthesized
  source 1..22: mol_type = other DNA
tttattttataattcctacata

SEQ ID NO: 37252 - DNA, 22 bp, synthetic construct
  misc_feature 1..22: note = chemically synthesized
  source 1..22: mol_type = other DNA
tattttataattcctacataag

SEQ ID NO: 37253 - DNA, 22 bp, synthetic construct
  misc_feature 1..22: note = chemically synthesized
  source 1..22: mol_type = other DNA
attttataattcctacataagc

SEQ ID NO: 37254 - DNA, 22 bp, synthetic construct
  misc_feature 1..22: note = chemically synthesized
  source 1..22: mol_type = other DNA
ttttataattcctacataagca

SEQ ID NO: 37255 - DNA, 22 bp, synthetic construct
  misc_feature 1..22: note = chemically synthesized
  source 1..22: mol_type = other DNA
tataattcctacataagcatag

SEQ ID NO: 37256 - DNA, 22 bp, synthetic construct
  misc_feature 1..22: note = chemically synthesized
  source 1..22: mol_type = other DNA
ataattcctacataagcatagc

SEQ ID NO: 37257 - DNA, 22 bp, synthetic construct
  misc_feature 1..22: note = chemically synthesized
  source 1..22: mol_type = other DNA
taattcctacataagcatagca

SEQ ID NO: 37258 - DNA, 22 bp, synthetic construct
  misc_feature 1..22: note = chemically synthesized
  source 1..22: mol_type = other DNA
ctacataagcatagcattgaag

SEQ ID NO: 37259 - DNA, 22 bp, synthetic construct
  misc_feature 1..22: note = chemically synthesized
  source 1..22: mol_type = other DNA
cataagcatagcattgaagaaa

SEQ ID NO: 37260 - DNA, 22 bp, synthetic construct
  misc_feature 1..22: note = chemically synthesized
  source 1..22: mol_type = other DNA
aagaaaaaaattactttcattc

SEQ ID NO: 37261 - DNA, 22 bp, synthetic construct
  misc_feature 1..22: note = chemically synthesized
  source 1..22: mol_type = other DNA
ctttcattctgaaaggagcaca

SEQ ID NO: 37262 - DNA, 22 bp, synthetic construct
  misc_feature 1..22: note = chemically synthesized
  source 1..22: mol_type = other DNA
tcattctgaaaggagcacagta

SEQ ID NO: 37263 - DNA, 22 bp, synthetic construct
  misc_feature 1..22: note = chemically synthesized
  source 1..22: mol_type = other DNA
cattctgaaaggagcacagtat

SEQ ID NO: 37264 - DNA, 22 bp, synthetic construct
  misc_feature 1..22: note = chemically synthesized
  source 1..22: mol_type = other DNA
attctgaaaggagcacagtatt

SEQ ID NO: 37265 - DNA, 22 bp, synthetic construct
  misc_feature 1..22: note = chemically synthesized
  source 1..22: mol_type = other DNA
tgaaaggagcacagtattttgc

SEQ ID NO: 37266 - DNA, 22 bp, synthetic construct
  misc_feature 1..22: note = chemically synthesized
  source 1..22: mol_type = other DNA
aaaggagcacagtattttgcct

SEQ ID NO: 37267 - DNA, 22 bp, synthetic construct
  misc_feature 1..22: note = chemically synthesized
  source 1..22: mol_type = other DNA
tgccttttgagaagctcctgaa

SEQ ID NO: 37268 - DNA, 22 bp, synthetic construct
  misc_feature 1..22: note = chemically synthesized
  source 1..22: mol_type = other DNA
gccttttgagaagctcctgaat

SEQ ID NO: 37269 - DNA, 22 bp, synthetic construct
  misc_feature 1..22: note = chemically synthesized
  source 1..22: mol_type = other DNA
ccttttgagaagctcctgaatt

SEQ ID NO: 37270 - DNA, 22 bp, synthetic construct
  misc_feature 1..22: note = chemically synthesized
  source 1..22: mol_type = other DNA
ttgagaagctcctgaattaaaa

SEQ ID NO: 37271 - DNA, 22 bp, synthetic construct
  misc_feature 1..22: note = chemically synthesized
  source 1..22: mol_type = other DNA
tgagaagctcctgaattaaaac

SEQ ID NO: 37272 - DNA, 22 bp, synthetic construct
  misc_feature 1..22: note = chemically synthesized
  source 1..22: mol_type = other DNA
gagaagctcctgaattaaaaca

SEQ ID NO: 37273 - DNA, 22 bp, synthetic construct
  misc_feature 1..22: note = chemically synthesized
  source 1..22: mol_type = other DNA
agaagctcctgaattaaaacat

SEQ ID NO: 37274 - DNA, 22 bp, synthetic construct
  misc_feature 1..22: note = chemically synthesized
  source 1..22: mol_type = other DNA
ctgaattaaaacattaattcca

SEQ ID NO: 37275 - DNA, 22 bp, synthetic construct
  misc_feature 1..22: note = chemically synthesized
  source 1..22: mol_type = other DNA
aattaaaacattaattccaagc

SEQ ID NO: 37276 - DNA, 22 bp, synthetic construct
  misc_feature 1..22: note = chemically synthesized
  source 1..22: mol_type = other DNA
aaacattaattccaagctaatt

SEQ ID NO: 37277 - DNA, 22 bp, synthetic construct
  misc_feature 1..22: note = chemically synthesized
  source 1..22: mol_type = other DNA
attccaagctaattgtgaatat

SEQ ID NO: 37278 - DNA, 22 bp, synthetic construct
  misc_feature 1..22: note = chemically synthesized
  source 1..22: mol_type = other DNA
caagctaattgtgaatatgaaa

SEQ ID NO: 37279 - DNA, 22 bp, synthetic construct
  misc_feature 1..22: note = chemically synthesized
  source 1..22: mol_type = other DNA
attgtgaatatgaaacattctt

SEQ ID NO: 37280 - DNA, 22 bp, synthetic construct
  misc_feature 1..22: note = chemically synthesized
  source 1..22: mol_type = other DNA
tgaatatgaaacattcttaagc

SEQ ID NO: 37281 - DNA, 22 bp, synthetic construct
  misc_feature 1..22: note = chemically synthesized
  source 1..22: mol_type = other DNA
ttaagcatttcatataattact

SEQ ID NO: 37282 - DNA, 22 bp, synthetic construct
  misc_feature 1..22: note = chemically synthesized
  source 1..22: mol_type = other DNA
aagcatttcatataattactaa

SEQ ID NO: 37283 - DNA, 22 bp, synthetic construct
  misc_feature 1..22: note = chemically synthesized
  source 1..22: mol_type = other DNA
agcatttcatataattactaac

SEQ ID NO: 37284 - DNA, 22 bp, synthetic construct
  misc_feature 1..22: note = chemically synthesized
  source 1..22: mol_type = other DNA
catataattactaacagaatgt

SEQ ID NO: 37285 - DNA, 22 bp, synthetic construct
  misc_feature 1..22: note = chemically synthesized
  source 1..22: mol_type = other DNA
atataattactaacagaatgta

SEQ ID NO: 37286 - DNA, 22 bp, synthetic construct
  misc_feature 1..22: note = chemically synthesized
  source 1..22: mol_type = other DNA
ctaacagaatgtagagttgagg

SEQ ID NO: 37287 - DNA, 22 bp, synthetic construct
  misc_feature 1..22: note = chemically synthesized
  source 1..22: mol_type = other DNA
acagaatgtagagttgaggttt

SEQ ID NO: 37288 - DNA, 22 bp, synthetic construct
  misc_feature 1..22: note = chemically synthesized
  source 1..22: mol_type = other DNA
aggtttccaactggttctaatc

SEQ ID NO: 37289 - DNA, 22 bp, synthetic construct
  misc_feature 1..22: note = chemically synthesized
  source 1..22: mol_type = other DNA
ccaactggttctaatcacatat

SEQ ID NO: 37290 - DNA, 22 bp, synthetic construct
  misc_feature 1..22: note = chemically synthesized
  source 1..22: mol_type = other DNA
caactggttctaatcacatata

SEQ ID NO: 37291 - DNA, 22 bp, synthetic construct
  misc_feature 1..22: note = chemically synthesized
  source 1..22: mol_type = other DNA
gttctaatcacatatacatctt

SEQ ID NO: 37292 - DNA, 22 bp, synthetic construct
  misc_feature 1..22: note = chemically synthesized
  source 1..22: mol_type = other DNA
taatcacatatacatcttccta

SEQ ID NO: 37293 - DNA, 22 bp, synthetic construct
  misc_feature 1..22: note = chemically synthesized
  source 1..22: mol_type = other DNA
atcacatatacatcttcctaaa

SEQ ID NO: 37294 - DNA, 22 bp, synthetic construct
  misc_feature 1..22: note = chemically synthesized
  source 1..22: mol_type = other DNA
cctaaaataaaatgtttaatta

SEQ ID NO: 37295 - DNA, 22 bp, synthetic construct
  misc_feature 1..22: note = chemically synthesized
  source 1..22: mol_type = other DNA
ctaaaataaaatgtttaattat

SEQ ID NO: 37296 - DNA, 22 bp, synthetic construct
  misc_feature 1..22: note = chemically synthesized
  source 1..22: mol_type = other DNA
aaataaaatgtttaattatact

SEQ ID NO: 37297 - DNA, 22 bp, synthetic construct
  misc_feature 1..22: note = chemically synthesized
  source 1..22: mol_type = other DNA
aattatactattttgctgagaa

SEQ ID NO: 37298 - DNA, 22 bp, synthetic construct
  misc_feature 1..22: note = chemically synthesized
  source 1..22: mol_type = other DNA
attatactattttgctgagaaa

SEQ ID NO: 37299 - DNA, 22 bp, synthetic construct
  misc_feature 1..22: note = chemically synthesized
  source 1..22: mol_type = other DNA
tactattttgctgagaaaaatt

SEQ ID NO: 37300 - DNA, 22 bp, synthetic construct
  misc_feature 1..22: note = chemically synthesized
  source 1..22: mol_type = other DNA
ttttgctgagaaaaattttaaa

SEQ ID NO: 37301 - DNA, 22 bp, synthetic construct
  misc_feature 1..22: note = chemically synthesized
  source 1..22: mol_type = other DNA
tgctgagaaaaattttaaaaca

SEQ ID NO: 37302 - DNA, 22 bp, synthetic construct
  misc_feature 1..22: note = chemically synthesized
  source 1..22: mol_type = other DNA
gctgagaaaaattttaaaacaa

SEQ ID NO: 37303 - DNA, 22 bp, synthetic construct
  misc_feature 1..22: note = chemically synthesized
  source 1..22: mol_type = other DNA
ctgagaaaaattttaaaacaaa

SEQ ID NO: 37304 - DNA, 22 bp, synthetic construct
  misc_feature 1..22: note = chemically synthesized
  source 1..22: mol_type = other DNA
agaaaaattttaaaacaaaaaa

SEQ ID NO: 37305 - DNA, 22 bp, synthetic construct
  misc_feature 1..22: note = chemically synthesized
  source 1..22: mol_type = other DNA
taaaacaaaaaatgtaaatatt

SEQ ID NO: 37306 - DNA, 22 bp, synthetic construct
  misc_feature 1..22: note = chemically synthesized
  source 1..22: mol_type = other DNA
aaaacaaaaaatgtaaatatta

SEQ ID NO: 37307 - DNA, 22 bp, synthetic construct
  misc_feature 1..22: note = chemically synthesized
  source 1..22: mol_type = other DNA
aaacaaaaaatgtaaatattaa

SEQ ID NO: 37308 - DNA, 22 bp, synthetic construct
  misc_feature 1..22: note = chemically synthesized
  source 1..22: mol_type = other DNA
actttttatttctatgttgtca

SEQ ID NO: 37309 - DNA, 22 bp, synthetic construct
  misc_feature 1..22: note = chemically synthesized
  source 1..22: mol_type = other DNA
tttatttctatgttgtcataat

SEQ ID NO: 37310 - DNA, 22 bp, synthetic construct
  misc_feature 1..22: note = chemically synthesized
  source 1..22: mol_type = other DNA
ttatttctatgttgtcataata

SEQ ID NO: 37311 - DNA, 22 bp, synthetic construct
  misc_feature 1..22: note = chemically synthesized
  source 1..22: mol_type = other DNA
tatttctatgttgtcataatat

SEQ ID NO: 37312 - DNA, 22 bp, synthetic construct
  misc_feature 1..22: note = chemically synthesized
  source 1..22: mol_type = other DNA
atttctatgttgtcataatatg

SEQ ID NO: 37313 - DNA, 22 bp, synthetic construct
  misc_feature 1..22: note = chemically synthesized
  source 1..22: mol_type = other DNA
tttctatgttgtcataatatgg

SEQ ID NO: 37314 - DNA, 22 bp, synthetic construct
  misc_feature 1..22: note = chemically synthesized
  source 1..22: mol_type = other DNA
ctatgttgtcataatatggatt

SEQ ID NO: 37315 - DNA, 22 bp, synthetic construct
  misc_feature 1..22: note = chemically synthesized
  source 1..22: mol_type = other DNA
tatgttgtcataatatggattt

SEQ ID NO: 37316 - DNA, 22 bp, synthetic construct
  misc_feature 1..22: note = chemically synthesized
  source 1..22: mol_type = other DNA
tgttgtcataatatggatttta

SEQ ID NO: 37317 - DNA, 22 bp, synthetic construct
  misc_feature 1..22: note = chemically synthesized
  source 1..22: mol_type = other DNA
tcataatatggattttaaattt

SEQ ID NO: 37318 - DNA, 22 bp, synthetic construct
  misc_feature 1..22: note = chemically synthesized
  source 1..22: mol_type = other DNA
taaattttaatttaaatgcaca

SEQ ID NO: 37319 - DNA, 22 bp, synthetic construct
  misc_feature 1..22: note = chemically synthesized
  source 1..22: mol_type = other DNA
aaattttaatttaaatgcacat

SEQ ID NO: 37320 - DNA, 22 bp, synthetic construct
  misc_feature 1..22: note = chemically synthesized
  source 1..22: mol_type = other DNA
aattttaatttaaatgcacatt

SEQ ID NO: 37321 - DNA, 22 bp, synthetic construct
  misc_feature 1..22: note = chemically synthesized
  source 1..22: mol_type = other DNA
taatttaaatgcacattccatg

SEQ ID NO: 37322 - DNA, 22 bp, synthetic construct
  misc_feature 1..22: note = chemically synthesized
  source 1..22: mol_type = other DNA
aatttaaatgcacattccatgg

SEQ ID NO: 37323 - DNA, 22 bp, synthetic construct
  misc_feature 1..22: note = chemically synthesized
  source 1..22: mol_type = other DNA
atttaaatgcacattccatggc

SEQ ID NO: 37324 - DNA, 22 bp, synthetic construct
  misc_feature 1..22: note = chemically synthesized
  source 1..22: mol_type = other DNA
aaatgcacattccatggcaatg

SEQ ID NO: 37325 - DNA, 22 bp, synthetic construct
  misc_feature 1..22: note = chemically synthesized
  source 1..22: mol_type = other DNA
aatgcacattccatggcaatgg

SEQ ID NO: 37326 - DNA, 22 bp, synthetic construct
  misc_feature 1..22: note = chemically synthesized
  source 1..22: mol_type = other DNA
catggcaatggctaatattttc

SEQ ID NO: 37327 - DNA, 22 bp, synthetic construct
  misc_feature 1..22: note = chemically synthesized
  source 1..22: mol_type = other DNA
atattttcaactttctccctct

SEQ ID NO: 37328 - DNA, 22 bp, synthetic construct
  misc_feature 1..22: note = chemically synthesized
  source 1..22: mol_type = other DNA
tcaactttctccctcttcaaca

SEQ ID NO: 37329 - DNA, 22 bp, synthetic construct
  misc_feature 1..22: note = chemically synthesized
  source 1..22: mol_type = other DNA
caactttctccctcttcaacac

SEQ ID NO: 37330 - DNA, 22 bp, synthetic construct
  misc_feature 1..22: note = chemically synthesized
  source 1..22: mol_type = other DNA
aactttctccctcttcaacaca

SEQ ID NO: 37331 - DNA, 22 bp, synthetic construct
  misc_feature 1..22: note = chemically synthesized
  source 1..22: mol_type = other DNA
tctccctcttcaacacatacac

SEQ ID NO: 37332 - DNA, 22 bp, synthetic construct
  misc_feature 1..22: note = chemically synthesized
  source 1..22: mol_type = other DNA
ctccctcttcaacacatacaca

SEQ ID NO: 37333 - DNA, 22 bp, synthetic construct
  misc_feature 1..22: note = chemically synthesized
  source 1..22: mol_type = other DNA
tccctcttcaacacatacacaa

SEQ ID NO: 37334 - DNA, 22 bp, synthetic construct
  misc_feature 1..22: note = chemically synthesized
  source 1..22: mol_type = other DNA
cctcttcaacacatacacaagt

SEQ ID NO: 37335 - DNA, 22 bp, synthetic construct
  misc_feature 1..22: note = chemically synthesized
  source 1..22: mol_type = other DNA
ttcaacacatacacaagtctgt

SEQ ID NO: 37336 - DNA, 22 bp, synthetic construct
  misc_feature 1..22: note = chemically synthesized
  source 1..22: mol_type = other DNA
caacacatacacaagtctgtat

SEQ ID NO: 37337 - DNA, 22 bp, synthetic construct
  misc_feature 1..22: note = chemically synthesized
  source 1..22: mol_type = other DNA
aacacatacacaagtctgtatt

SEQ ID NO: 37338 - DNA, 22 bp, synthetic construct
  misc_feature 1..22: note = chemically synthesized
  source 1..22: mol_type = other DNA
tattcatagcctgttgtaatag

SEQ ID NO: 37339 - DNA, 22 bp, synthetic construct
  misc_feature 1..22: note = chemically synthesized
  source 1..22: mol_type = other DNA
atagcctgttgtaatagacaag

SEQ ID NO: 37340 - DNA, 22 bp, synthetic construct
  misc_feature 1..22: note = chemically synthesized
  source 1..22: mol_type = other DNA
ttgtaatagacaaggttaaatg

SEQ ID NO: 37341 - DNA, 22 bp, synthetic construct
  misc_feature 1..22: note = chemically synthesized
  source 1..22: mol_type = other DNA
taatagacaaggttaaatgtag

SEQ ID NO: 37342 - DNA, 22 bp, synthetic construct
  misc_feature 1..22: note = chemically synthesized
  source 1..22: mol_type = other DNA
aatgtagcctaaatatatattc

SEQ ID NO: 37343 - DNA, 22 bp, synthetic construct
  misc_feature 1..22: note = chemically synthesized
  source 1..22: mol_type = other DNA
aatatatattccgtttaaatgc

SEQ ID NO: 37344 - DNA, 22 bp, synthetic construct
  misc_feature 1..22: note = chemically synthesized
  source 1..22: mol_type = other DNA
cgtttaaatgctttcctcactc

SEQ ID NO: 37345 - DNA, 22 bp, synthetic construct
  misc_feature 1..22: note = chemically synthesized
  source 1..22: mol_type = other DNA
aaatgctttcctcactcactag

SEQ ID NO: 37346 - DNA, 22 bp, synthetic construct
  misc_feature 1..22: note = chemically synthesized
  source 1..22: mol_type = other DNA
aatgctttcctcactcactagc

SEQ ID NO: 37347 - DNA, 22 bp, synthetic construct
  misc_feature 1..22: note = chemically synthesized
  source 1..22: mol_type = other DNA
tcctcactcactagcaattggt

SEQ ID NO: 37348 - DNA, 22 bp, synthetic construct
  misc_feature 1..22: note = chemically synthesized
  source 1..22: mol_type = other DNA
cctcactcactagcaattggtt

SEQ ID NO: 37349 - DNA, 22 bp, synthetic construct
  misc_feature 1..22: note = chemically synthesized
  source 1..22: mol_type = other DNA
ctcactcactagcaattggtta

SEQ ID NO: 37350 - DNA, 22 bp, synthetic construct
  misc_feature 1..22: note = chemically synthesized
  source 1..22: mol_type = other DNA
actcactagcaattggttatca

SEQ ID NO: 37351 - DNA, 22 bp, synthetic construct
  misc_feature 1..22: note = chemically synthesized
  source 1..22: mol_type = other DNA
actagcaattggttatcactag

SEQ ID NO: 37352 - DNA, 22 bp, synthetic construct
  misc_feature 1..22: note = chemically synthesized
  source 1..22: mol_type = other DNA
gcaattggttatcactagagag

SEQ ID NO: 37353 - DNA, 22 bp, synthetic construct
  misc_feature 1..22: note = chemically synthesized
  source 1..22: mol_type = other DNA
gttatcactagagagttatctg

SEQ ID NO: 37354 - DNA, 22 bp, synthetic construct
  misc_feature 1..22: note = chemically synthesized
  source 1..22: mol_type = other DNA
tcactagagagttatctgtgaa

SEQ ID NO: 37355 - DNA, 22 bp, synthetic construct
  misc_feature 1..22: note = chemically synthesized
  source 1..22: mol_type = other DNA
gagagttatctgtgaaatctta

SEQ ID NO: 37356 - DNA, 22 bp, synthetic construct
  misc_feature 1..22: note = chemically synthesized
  source 1..22: mol_type = other DNA
tctgtgaaatcttactctacat

SEQ ID NO: 37357 - DNA, 22 bp, synthetic construct
  misc_feature 1..22: note = chemically synthesized
  source 1..22: mol_type = other DNA
tgaaatcttactctacattcct

SEQ ID NO: 37358 - DNA, 22 bp, synthetic construct
  misc_feature 1..22: note = chemically synthesized
  source 1..22: mol_type = other DNA
actctacattcctcagtcacct

SEQ ID NO: 37359 - DNA, 22 bp, synthetic construct
  misc_feature 1..22: note = chemically synthesized
  source 1..22: mol_type = other DNA
ctctacattcctcagtcaccta

SEQ ID NO: 37360 - DNA, 22 bp, synthetic construct
  misc_feature 1..22: note = chemically synthesized
  source 1..22: mol_type = other DNA
tacattcctcagtcacctagtg

SEQ ID NO: 37361 - DNA, 22 bp, synthetic construct
  misc_feature 1..22: note = chemically synthesized
  source 1..22: mol_type = other DNA
cattcctcagtcacctagtgaa

SEQ ID NO: 37362 - DNA, 22 bp, synthetic construct
  misc_feature 1..22: note = chemically synthesized
  source 1..22: mol_type = other DNA
ctcagtcacctagtgaaggtgt

SEQ ID NO: 37363 - DNA, 22 bp, synthetic construct
  misc_feature 1..22: note = chemically synthesized
  source 1..22: mol_type = other DNA
agtcacctagtgaaggtgtact

SEQ ID NO: 37364 - DNA, 22 bp, synthetic construct
  misc_feature 1..22: note = chemically synthesized
  source 1..22: mol_type = other DNA
gtgaaggtgtactgatccacct

SEQ ID NO: 37365 - DNA, 22 bp, synthetic construct
  misc_feature 1..22: note = chemically synthesized
  source 1..22: mol_type = other DNA
atccaccttcaggagcagtaca

SEQ ID NO: 37366 - DNA, 22 bp, synthetic construct
  misc_feature 1..22: note = chemically synthesized
  source 1..22: mol_type = other DNA
caggagcagtacaaacctttat

SEQ ID NO: 37367 - DNA, 22 bp, synthetic construct
  misc_feature 1..22: note = chemically synthesized
  source 1..22: mol_type = other DNA
aggagcagtacaaacctttatt

SEQ ID NO: 37368 - DNA, 22 bp, synthetic construct
  misc_feature 1..22: note = chemically synthesized
  source 1..22: mol_type = other DNA
tattggtcacttcccaagcaac

SEQ ID NO: 37369 - DNA, 22 bp, synthetic construct
  misc_feature 1..22: note = chemically synthesized
  source 1..22: mol_type = other DNA
attggtcacttcccaagcaact

SEQ ID NO: 37370 - DNA, 22 bp, synthetic construct
  misc_feature 1..22: note = chemically synthesized
  source 1..22: mol_type = other DNA
ttggtcacttcccaagcaactt

SEQ ID NO: 37371 - DNA, 22 bp, synthetic construct
  misc_feature 1..22: note = chemically synthesized
  source 1..22: mol_type = other DNA
gtcacttcccaagcaacttcaa

SEQ ID NO: 37372 - DNA, 22 bp, synthetic construct
  misc_feature 1..22: note = chemically synthesized
  source 1..22: mol_type = other DNA
cccaagcaacttcaaagagcag

SEQ ID NO: 37373 - DNA, 22 bp, synthetic construct
  misc_feature 1..22: note = chemically synthesized
  source 1..22: mol_type = other DNA
ccaagcaacttcaaagagcagt

SEQ ID NO: 37374 - DNA, 22 bp, synthetic construct
  misc_feature 1..22: note = chemically synthesized
  source 1..22: mol_type = other DNA
caaagagcagtaactcctccac

SEQ ID NO: 37375 - DNA, 22 bp, synthetic construct
  misc_feature 1..22: note = chemically synthesized
  source 1..22: mol_type = other DNA
aaagagcagtaactcctccaca

SEQ ID NO: 37376 - DNA, 22 bp, synthetic construct
  misc_feature 1..22: note = chemically synthesized
  source 1..22: mol_type = other DNA
ctccacaggaagttcttcgact

SEQ ID NO: 37377 - DNA, 22 bp, synthetic construct
  misc_feature 1..22: note = chemically synthesized
  source 1..22: mol_type = other DNA
cacaggaagttcttcgacttcc

SEQ ID NO: 37378 - DNA, 22 bp, synthetic construct
  misc_feature 1..22: note = chemically synthesized
  source 1..22: mol_type = other DNA
ttcgacttcccactggggaagc

SEQ ID NO: 37379 - DNA, 22 bp, synthetic construct
  misc_feature 1..22: note = chemically synthesized
  source 1..22: mol_type = other DNA
cgacttcccactggggaagccc

SEQ ID NO: 37380 - DNA, 22 bp, synthetic construct
  misc_feature 1..22: note = chemically synthesized
  source 1..22: mol_type = other DNA
gacttcccactggggaagccca

SEQ ID NO: 37381 - DNA, 22 bp, synthetic construct
  misc_feature 1..22: note = chemically synthesized
  source 1..22: mol_type = other DNA
cccactggggaagcccacccag

SEQ ID NO: 37382 - DNA, 22 bp, synthetic construct
  misc_feature 1..22: note = chemically synthesized
  source 1..22: mol_type = other DNA
ccactggggaagcccacccagg

SEQ ID NO: 37383 - DNA, 22 bp, synthetic construct
  misc_feature 1..22: note = chemically synthesized
  source 1..22: mol_type = other DNA
gggaagcccacccagggatgtt

SEQ ID NO: 37384 - DNA, 22 bp, synthetic construct
  misc_feature 1..22: note = chemically synthesized
  source 1..22: mol_type = other DNA
cagagagggatcggcctcgaag

SEQ ID NO: 37385 - DNA, 22 bp, synthetic construct
  misc_feature 1..22: note = chemically synthesized
  source 1..22: mol_type = other DNA
gaagcattcttcttacagtcct

SEQ ID NO: 37386 - DNA, 22 bp, synthetic construct
  misc_feature 1..22: note = chemically synthesized
  source 1..22: mol_type = other DNA
ttcttacagtcctccgagactc

SEQ ID NO: 37387 - DNA, 22 bp, synthetic construct
  misc_feature 1..22: note = chemically synthesized
  source 1..22: mol_type = other DNA
cttacagtcctccgagactcct

SEQ ID NO: 37388 - DNA, 22 bp, synthetic construct
  misc_feature 1..22: note = chemically synthesized
  source 1..22: mol_type = other DNA
ttacagtcctccgagactcctt

SEQ ID NO: 37389 - DNA, 22 bp, synthetic construct
  misc_feature 1..22: note = chemically synthesized
  source 1..22: mol_type = other DNA
acagtcctccgagactcctttg

SEQ ID NO: 37390 - DNA, 22 bp, synthetic construct
  misc_feature 1..22: note = chemically synthesized
  source 1..22: mol_type = other DNA
cagtcctccgagactcctttga

SEQ ID NO: 37391 - DNA, 22 bp, synthetic construct
  misc_feature 1..22: note = chemically synthesized
  source 1..22: mol_type = other DNA
cgagactcctttgaattcctgt

SEQ ID NO: 37392 - DNA, 22 bp, synthetic construct
  misc_feature 1..22: note = chemically synthesized
  source 1..22: mol_type = other DNA
ctttgaattcctgtttcaatta

SEQ ID NO: 37393 - DNA, 22 bp, synthetic construct
  misc_feature 1..22: note = chemically synthesized
  source 1..22: mol_type = other DNA
tgaattcctgtttcaattagtt

SEQ ID NO: 37394 - DNA, 22 bp, synthetic construct
  misc_feature 1..22: note = chemically synthesized
  source 1..22: mol_type = other DNA
gaattcctgtttcaattagttg

SEQ ID NO: 37395 - DNA, 22 bp, synthetic construct
  misc_feature 1..22: note = chemically synthesized
  source 1..22: mol_type = other DNA
aattcctgtttcaattagttgt

SEQ ID NO: 37396 - DNA, 22 bp, synthetic construct
  misc_feature 1..22: note = chemically synthesized
  source 1..22: mol_type = other DNA
ctgtttcaattagttgtaatcc

SEQ ID NO: 37397 - DNA, 22 bp, synthetic construct
  misc_feature 1..22: note = chemically synthesized
  source 1..22: mol_type = other DNA
tttcaattagttgtaatcccag

SEQ ID NO: 37398 - DNA, 22 bp, synthetic construct
  misc_feature 1..22: note = chemically synthesized
  source 1..22: mol_type = other DNA
caattagttgtaatcccaggag

SEQ ID NO: 37399 - DNA, 22 bp, synthetic construct
  misc_feature 1..22: note = chemically synthesized
  source 1..22: mol_type = other DNA
aattagttgtaatcccaggaga

SEQ ID NO: 37400 - DNA, 22 bp, synthetic construct
  misc_feature 1..22: note = chemically synthesized
  source 1..22: mol_type = other DNA
gttgtaatcccaggagaagaga

SEQ ID NO: 37401 - DNA, 22 bp, synthetic construct
  misc_feature 1..22: note = chemically synthesized
  source 1..22: mol_type = other DNA
taatcccaggagaagagaactt

SEQ ID NO: 37402 - DNA, 22 bp, synthetic construct
  misc_feature 1..22: note = chemically synthesized
  source 1..22: mol_type = other DNA
acaggcacaaaagttagagttg

SEQ ID NO: 37403 - DNA, 22 bp, synthetic construct
  misc_feature 1..22: note = chemically synthesized
  source 1..22: mol_type = other DNA
caggcacaaaagttagagttgg

SEQ ID NO: 37404 - DNA, 22 bp, synthetic construct
  misc_feature 1..22: note = chemically synthesized
  source 1..22: mol_type = other DNA
gagttggtagagttaccaggct

SEQ ID NO: 37405 - DNA, 22 bp, synthetic construct
  misc_feature 1..22: note = chemically synthesized
  source 1..22: mol_type = other DNA
gtagagttaccaggctttggta

SEQ ID NO: 37406 - DNA, 22 bp, synthetic construct
  misc_feature 1..22: note = chemically synthesized
  source 1..22: mol_type = other DNA
ccaggctttggtagcttctctt

SEQ ID NO: 37407 - DNA, 22 bp, synthetic construct
  misc_feature 1..22: note = chemically synthesized
  source 1..22: mol_type = other DNA
tggtagcttctcttgggaataa

SEQ ID NO: 37408 - DNA, 22 bp, synthetic construct
  misc_feature 1..22: note = chemically synthesized
  source 1..22: mol_type = other DNA
ggtagcttctcttgggaataaa

SEQ ID NO: 37409 - DNA, 22 bp, synthetic construct
  misc_feature 1..22: note = chemically synthesized
  source 1..22: mol_type = other DNA
gtagcttctcttgggaataaac

SEQ ID NO: 37410 - DNA, 22 bp, synthetic construct
  misc_feature 1..22: note = chemically synthesized
  source 1..22: mol_type = other DNA
ctcttgggaataaactagtagc

SEQ ID NO: 37411 - DNA, 22 bp, synthetic construct
  misc_feature 1..22: note = chemically synthesized
  source 1..22: mol_type = other DNA
tcttgggaataaactagtagca

SEQ ID NO: 37412 - DNA, 22 bp, synthetic construct
  misc_feature 1..22: note = chemically synthesized
  source 1..22: mol_type = other DNA
ttgggaataaactagtagcatg

SEQ ID NO: 37413 - DNA, 22 bp, synthetic construct
  misc_feature 1..22: note = chemically synthesized
  source 1..22: mol_type = other DNA
gggaataaactagtagcatgaa

SEQ ID NO: 37414 - DNA, 22 bp, synthetic construct
  misc_feature 1..22: note = chemically synthesized
  source 1..22: mol_type = other DNA
ggaataaactagtagcatgaaa

SEQ ID NO: 37415 - DNA, 22 bp, synthetic construct
  misc_feature 1..22: note = chemically synthesized
  source 1..22: mol_type = other DNA
gtagcatgaaatcttatgtgct

SEQ ID NO: 37416 - DNA, 22 bp, synthetic construct
  misc_feature 1..22: note = chemically synthesized
  source 1..22: mol_type = other DNA
atgtgcttcccacagaattcct

SEQ ID NO: 37417 - DNA, 22 bp, synthetic construct
  misc_feature 1..22: note = chemically synthesized
  source 1..22: mol_type = other DNA
tgtgcttcccacagaattcctg

SEQ ID NO: 37418 - DNA, 22 bp, synthetic construct
  misc_feature 1..22: note = chemically synthesized
  source 1..22: mol_type = other DNA
cccacagaattcctggtggaag

SEQ ID NO: 37419 - DNA, 22 bp, synthetic construct
  misc_feature 1..22: note = chemically synthesized
  source 1..22: mol_type = other DNA
ccacagaattcctggtggaagg

SEQ ID NO: 37420 - DNA, 22 bp, synthetic construct
  misc_feature 1..22: note = chemically synthesized
  source 1..22: mol_type = other DNA
ctggtggaaggaggaattcttc

SEQ ID NO: 37421 - DNA, 22 bp, synthetic construct
  misc_feature 1..22: note = chemically synthesized
  source 1..22: mol_type = other DNA
gtggaaggaggaattcttcctc

SEQ ID NO: 37422 - DNA, 22 bp, synthetic construct
  misc_feature 1..22: note = chemically synthesized
  source 1..22: mol_type = other DNA
ttcctcctctttctcgtctttc

SEQ ID NO: 37423 - DNA, 22 bp, synthetic construct
  misc_feature 1..22: note = chemically synthesized
  source 1..22: mol_type = other DNA
cctcctctttctcgtctttctg

SEQ ID NO: 37424 - DNA, 22 bp, synthetic construct
  misc_feature 1..22: note = chemically synthesized
  source 1..22: mol_type = other DNA
ctcctctttctcgtctttctgg

SEQ ID NO: 37425 - DNA, 22 bp, synthetic construct
  misc_feature 1..22: note = chemically synthesized
  source 1..22: mol_type = other DNA
ctctttctcgtctttctgggca

SEQ ID NO: 37426 - DNA, 22 bp, synthetic construct
  misc_feature 1..22: note = chemically synthesized
  source 1..22: mol_type = other DNA
tttctcgtctttctgggcaggt

SEQ ID NO: 37427 - DNA, 22 bp, synthetic construct
  misc_feature 1..22: note = chemically synthesized
  source 1..22: mol_type = other DNA
tctcgtctttctgggcaggtat

SEQ ID NO: 37428 - DNA, 22 bp, synthetic construct
  misc_feature 1..22: note = chemically synthesized
  source 1..22: mol_type = other DNA
ctcgtctttctgggcaggtatt

SEQ ID NO: 37429 - DNA, 22 bp, synthetic construct
  misc_feature 1..22: note = chemically synthesized
  source 1..22: mol_type = other DNA
tcgtctttctgggcaggtattg

SEQ ID NO: 37430 - DNA, 22 bp, synthetic construct
  misc_feature 1..22: note = chemically synthesized
  source 1..22: mol_type = other DNA
gtctttctgggcaggtattgtg

SEQ ID NO: 37431 - DNA, 22 bp, synthetic construct
  misc_feature 1..22: note = chemically synthesized
  source 1..22: mol_type = other DNA
tctgggcaggtattgtgaggac

SEQ ID NO: 37432 - DNA, 22 bp, synthetic construct
  misc_feature 1..22: note = chemically synthesized
  source 1..22: mol_type = other DNA
ctgggcaggtattgtgaggacg

SEQ ID NO: 37433 - DNA, 22 bp, synthetic construct
  misc_feature 1..22: note = chemically synthesized
  source 1..22: mol_type = other DNA
tgggcaggtattgtgaggacgg

SEQ ID NO: 37434 - DNA, 22 bp, synthetic construct
  misc_feature 1..22: note = chemically synthesized
  source 1..22: mol_type = other DNA
ggcaggtattgtgaggacggta

SEQ ID NO: 37435 - DNA, 22 bp, synthetic construct
  misc_feature 1..22: note = chemically synthesized
  source 1..22: mol_type = other DNA
tgaggacggtatctgccctgtc

SEQ ID NO: 37436 - DNA, 22 bp, synthetic construct
  misc_feature 1..22: note = chemically synthesized
  source 1..22: mol_type = other DNA
acagggcagataccgtcctcac

SEQ ID NO: 37437 - DNA, 22 bp, synthetic construct
  misc_feature 1..22: note = chemically synthesized
  source 1..22: mol_type = other DNA
acaatacctgcccagaaagacg

SEQ ID NO: 37438 - DNA, 22 bp, synthetic construct
  misc_feature 1..22: note = chemically synthesized
  source 1..22: mol_type = other DNA
cccagaaagacgagaaagagga

SEQ ID NO: 37439 - DNA, 22 bp, synthetic construct
  misc_feature 1..22: note = chemically synthesized
  source 1..22: mol_type = other DNA
ctccttccaccaggaattctgt

SEQ ID NO: 37440 - DNA, 22 bp, synthetic construct
  misc_feature 1..22: note = chemically synthesized
  source 1..22: mol_type = other DNA
cttccaccaggaattctgtggg

SEQ ID NO: 37441 - DNA, 22 bp, synthetic construct
  misc_feature 1..22: note = chemically synthesized
  source 1..22: mol_type = other DNA
ccaccaggaattctgtgggaag

SEQ ID NO: 37442 - DNA, 22 bp, synthetic construct
  misc_feature 1..22: note = chemically synthesized
  source 1..22: mol_type = other DNA
caccaggaattctgtgggaagc

SEQ ID NO: 37443 - DNA, 22 bp, synthetic construct
  misc_feature 1..22: note = chemically synthesized
  source 1..22: mol_type = other DNA
tgtgggaagcacataagatttc

SEQ ID NO: 37444 - DNA, 22 bp, synthetic construct
  misc_feature 1..22: note = chemically synthesized
  source 1..22: mol_type = other DNA
tgggaagcacataagatttcat

SEQ ID NO: 37445 - DNA, 22 bp, synthetic construct
  misc_feature 1..22: note = chemically synthesized
  source 1..22: mol_type = other DNA
catgctactagtttattcccaa

SEQ ID NO: 37446 - DNA, 22 bp, synthetic construct
  misc_feature 1..22: note = chemically synthesized
  source 1..22: mol_type = other DNA
atgctactagtttattcccaag

SEQ ID NO: 37447 - DNA, 22 bp, synthetic construct
  misc_feature 1..22: note = chemically synthesized
  source 1..22: mol_type = other DNA
ctagtttattcccaagagaagc

SEQ ID NO: 37448 - DNA, 22 bp, synthetic construct
  misc_feature 1..22: note = chemically synthesized
  source 1..22: mol_type = other DNA
gtttattcccaagagaagctac

SEQ ID NO: 37449 - DNA, 22 bp, synthetic construct
  misc_feature 1..22: note = chemically synthesized
  source 1..22: mol_type = other DNA
attcccaagagaagctaccaaa

SEQ ID NO: 37450 - DNA, 22 bp, synthetic construct
  misc_feature 1..22: note = chemically synthesized
  source 1..22: mol_type = other DNA
ttcccaagagaagctaccaaag

SEQ ID NO: 37451 - DNA, 22 bp, synthetic construct
  misc_feature 1..22: note = chemically synthesized
  source 1..22: mol_type = other DNA
ccaagagaagctaccaaagcct

SEQ ID NO: 37452 - DNA, 22 bp, synthetic construct
  misc_feature 1..22: note = chemically synthesized
  source 1..22: mol_type = other DNA
ccaaagcctggtaactctacca

SEQ ID NO: 37453 - DNA, 22 bp, synthetic construct
  misc_feature 1..22: note = chemically synthesized
  source 1..22: mol_type = other DNA
gtaactctaccaactctaactt

SEQ ID NO: 37454 - DNA, 22 bp, synthetic construct
  misc_feature 1..22: note = chemically synthesized
  source 1..22: mol_type = other DNA
taccaactctaacttttgtgcc

SEQ ID NO: 37455 - DNA, 22 bp, synthetic construct
  misc_feature 1..22: note = chemically synthesized
  source 1..22: mol_type = other DNA
ccaactctaacttttgtgcctg

SEQ ID NO: 37456 - DNA, 22 bp, synthetic construct
  misc_feature 1..22: note = chemically synthesized
  source 1..22: mol_type = other DNA
taacttttgtgcctgtaagttc

SEQ ID NO: 37457 - DNA, 22 bp, synthetic construct
  misc_feature 1..22: note = chemically synthesized
  source 1..22: mol_type = other DNA
acttttgtgcctgtaagttctc

SEQ ID NO: 37458 - DNA, 22 bp, synthetic construct
  misc_feature 1..22: note = chemically synthesized
  source 1..22: mol_type = other DNA
ttgtgcctgtaagttctcttct

SEQ ID NO: 37459 - DNA, 22 bp, synthetic construct
  misc_feature 1..22: note = chemically synthesized
  source 1..22: mol_type = other DNA
tgtgcctgtaagttctcttctc

SEQ ID NO: 37460 - DNA, 22 bp, synthetic construct
  misc_feature 1..22: note = chemically synthesized
  source 1..22: mol_type = other DNA
gtgcctgtaagttctcttctcc

SEQ ID NO: 37461 - DNA, 22 bp, synthetic construct
  misc_feature 1..22: note = chemically synthesized
  source 1..22: mol_type = other DNA
tgcctgtaagttctcttctcct

SEQ ID NO: 37462 - DNA, 22 bp, synthetic construct
  misc_feature 1..22: note = chemically synthesized
  source 1..22: mol_type = other DNA
taagttctcttctcctgggatt

SEQ ID NO: 37463 - DNA, 22 bp, synthetic construct
  misc_feature 1..22: note = chemically synthesized
  source 1..22: mol_type = other DNA
tcttctcctgggattacaacta

SEQ ID NO: 37464 - DNA, 22 bp, synthetic construct
  misc_feature 1..22: note = chemically synthesized
  source 1..22: mol_type = other DNA
ttctcctgggattacaactaat

SEQ ID NO: 37465 - DNA, 22 bp, synthetic construct
  misc_feature 1..22: note = chemically synthesized
  source 1..22: mol_type = other DNA
ctcctgggattacaactaattg

SEQ ID NO: 37466 - DNA, 22 bp, synthetic construct
  misc_feature 1..22: note = chemically synthesized
  source 1..22: mol_type = other DNA
tcctgggattacaactaattga

SEQ ID NO: 37467 - DNA, 22 bp, synthetic construct
  misc_feature 1..22: note = chemically synthesized
  source 1..22: mol_type = other DNA
ctgggattacaactaattgaaa

SEQ ID NO: 37468 - DNA, 22 bp, synthetic construct
  misc_feature 1..22: note = chemically synthesized
  source 1..22: mol_type = other DNA
ggattacaactaattgaaacag

SEQ ID NO: 37469 - DNA, 22 bp, synthetic construct
  misc_feature 1..22: note = chemically synthesized
  source 1..22: mol_type = other DNA
caactaattgaaacaggaattc

SEQ ID NO: 37470 - DNA, 22 bp, synthetic construct
  misc_feature 1..22: note = chemically synthesized
  source 1..22: mol_type = other DNA
attgaaacaggaattcaaagga

SEQ ID NO: 37471 - DNA, 22 bp, synthetic construct
  misc_feature 1..22: note = chemically synthesized
  source 1..22: mol_type = other DNA
aaacaggaattcaaaggagtct

SEQ ID NO: 37472 - DNA, 22 bp, synthetic construct
  misc_feature 1..22: note = chemically synthesized
  source 1..22: mol_type = other DNA
aaaggagtctcggaggactgta

SEQ ID NO: 37473 - DNA, 22 bp, synthetic construct
  misc_feature 1..22: note = chemically synthesized
  source 1..22: mol_type = other DNA
ggaggactgtaagaagaatgct

SEQ ID NO: 37474 - DNA, 22 bp, synthetic construct
  misc_feature 1..22: note = chemically synthesized
  source 1..22: mol_type = other DNA
taagaagaatgcttcgaggccg

SEQ ID NO: 37475 - DNA, 22 bp, synthetic construct
  misc_feature 1..22: note = chemically synthesized
  source 1..22: mol_type = other DNA
cgaggccgatccctctctgtaa

SEQ ID NO: 37476 - DNA, 22 bp, synthetic construct
  misc_feature 1..22: note = chemically synthesized
  source 1..22: mol_type = other DNA
gaggccgatccctctctgtaac

SEQ ID NO: 37477 - DNA, 22 bp, synthetic construct
  misc_feature 1..22: note = chemically synthesized
  source 1..22: mol_type = other DNA
tctgtaacatccctgggtgggc

SEQ ID NO: 37478 - DNA, 22 bp, synthetic construct
  misc_feature 1..22: note = chemically synthesized
  source 1..22: mol_type = other DNA
tgtaacatccctgggtgggctt

SEQ ID NO: 37479 - DNA, 22 bp, synthetic construct
  misc_feature 1..22: note = chemically synthesized
  source 1..22: mol_type = other DNA
taacatccctgggtgggcttcc

SEQ ID NO: 37480 - DNA, 22 bp, synthetic construct
  misc_feature 1..22: note = chemically synthesized
  source 1..22: mol_type = other DNA
ggtgggcttccccagtgggaag

SEQ ID NO: 37481 - DNA, 22 bp, synthetic construct
  misc_feature 1..22: note = chemically synthesized
  source 1..22: mol_type = other DNA
ccccagtgggaagtcgaagaac

SEQ ID NO: 37482 - DNA, 22 bp, synthetic construct
  misc_feature 1..22: note = chemically synthesized
  source 1..22: mol_type = other DNA
cccagtgggaagtcgaagaact

SEQ ID NO: 37483 - DNA, 22 bp, synthetic construct
  misc_feature 1..22: note = chemically synthesized
  source 1..22: mol_type = other DNA
cctgtggaggagttactgctct

SEQ ID NO: 37484 - DNA, 22 bp, synthetic construct
  misc_feature 1..22: note = chemically synthesized
  source 1..22: mol_type = other DNA
ctgtggaggagttactgctctt

SEQ ID NO: 37485 - DNA, 22 bp, synthetic construct
  misc_feature 1..22: note = chemically synthesized
  source 1..22: mol_type = other DNA
tggaggagttactgctctttga

SEQ ID NO: 37486 - DNA, 22 bp, synthetic construct
  misc_feature 1..22: note = chemically synthesized
  source 1..22: mol_type = other DNA
ctgctctttgaagttgcttggg

SEQ ID NO: 37487 - DNA, 22 bp, synthetic construct
  misc_feature 1..22: note = chemically synthesized
  source 1..22: mol_type = other DNA
ctctttgaagttgcttgggaag

SEQ ID NO: 37488 - DNA, 22 bp, synthetic construct
  misc_feature 1..22: note = chemically synthesized
  source 1..22: mol_type = other DNA
tttgaagttgcttgggaagtga

SEQ ID NO: 37489 - DNA, 22 bp, synthetic construct
  misc_feature 1..22: note = chemically synthesized
  source 1..22: mol_type = other DNA
tgaagttgcttgggaagtgacc

SEQ ID NO: 37490 - DNA, 22 bp, synthetic construct
  misc_feature 1..22: note = chemically synthesized
  source 1..22: mol_type = other DNA
gaagttgcttgggaagtgacca

SEQ ID NO: 37491 - DNA, 22 bp, synthetic construct
  misc_feature 1..22: note = chemically synthesized
  source 1..22: mol_type = other DNA
aagttgcttgggaagtgaccaa

SEQ ID NO: 37492 - DNA, 22 bp, synthetic construct
  misc_feature 1..22: note = chemically synthesized
  source 1..22: mol_type = other DNA
cttgggaagtgaccaataaagg

SEQ ID NO: 37493 - DNA, 22 bp, synthetic construct
  misc_feature 1..22: note = chemically synthesized
  source 1..22: mol_type = other DNA
gggaagtgaccaataaaggttt

SEQ ID NO: 37494 - DNA, 22 bp, synthetic construct
  misc_feature 1..22: note = chemically synthesized
  source 1..22: mol_type = other DNA
ggaagtgaccaataaaggtttg

SEQ ID NO: 37495 - DNA, 22 bp, synthetic construct
  misc_feature 1..22: note = chemically synthesized
  source 1..22: mol_type = other DNA
gtactgctcctgaaggtggatc

SEQ ID NO: 37496 - DNA, 22 bp, synthetic construct
  misc_feature 1..22: note = chemically synthesized
  source 1..22: mol_type = other DNA
tactgctcctgaaggtggatca

SEQ ID NO: 37497 - DNA, 22 bp, synthetic construct
  misc_feature 1..22: note = chemically synthesized
  source 1..22: mol_type = other DNA
ctcctgaaggtggatcagtaca

SEQ ID NO: 37498 - DNA, 22 bp, synthetic construct
  misc_feature 1..22: note = chemically synthesized
  source 1..22: mol_type = other DNA
ctgaaggtggatcagtacacct

SEQ ID NO: 37499 - DNA, 22 bp, synthetic construct
  misc_feature 1..22: note = chemically synthesized
  source 1..22: mol_type = other DNA
aaggtggatcagtacaccttca

SEQ ID NO: 37500 - DNA, 22 bp, synthetic construct
  misc_feature 1..22: note = chemically synthesized
  source 1..22: mol_type = other DNA
cactaggtgactgaggaatgta

SEQ ID NO: 37501 - DNA, 22 bp, synthetic construct
  misc_feature 1..22: note = chemically synthesized
  source 1..22: mol_type = other DNA
actaggtgactgaggaatgtag

SEQ ID NO: 37502 - DNA, 22 bp, synthetic construct
  misc_feature 1..22: note = chemically synthesized
  source 1..22: mol_type = other DNA
ggtgactgaggaatgtagagta

SEQ ID NO: 37503 - DNA, 22 bp, synthetic construct
  misc_feature 1..22: note = chemically synthesized
  source 1..22: mol_type = other DNA
aggaatgtagagtaagatttca

SEQ ID NO: 37504 - DNA, 22 bp, synthetic construct
  misc_feature 1..22: note = chemically synthesized
  source 1..22: mol_type = other DNA
cacagataactctctagtgata

SEQ ID NO: 37505 - DNA, 22 bp, synthetic construct
  misc_feature 1..22: note = chemically synthesized
  source 1..22: mol_type = other DNA
acagataactctctagtgataa

SEQ ID NO: 37506 - DNA, 22 bp, synthetic construct
  misc_feature 1..22: note = chemically synthesized
  source 1..22: mol_type = other DNA
tctagtgataaccaattgctag

SEQ ID NO: 37507 - DNA, 22 bp, synthetic construct
  misc_feature 1..22: note = chemically synthesized
  source 1..22: mol_type = other DNA
tagtgataaccaattgctagtg

SEQ ID NO: 37508 - DNA, 22 bp, synthetic construct
  misc_feature 1..22: note = chemically synthesized
  source 1..22: mol_type = other DNA
gtgataaccaattgctagtgag

SEQ ID NO: 37509 - DNA, 22 bp, synthetic construct
  misc_feature 1..22: note = chemically synthesized
  source 1..22: mol_type = other DNA
ctagtgagtgaggaaagcattt

SEQ ID NO: 37510 - DNA, 22 bp, synthetic construct
  misc_feature 1..22: note = chemically synthesized
  source 1..22: mol_type = other DNA
gtgagtgaggaaagcatttaaa

SEQ ID NO: 37511 - DNA, 22 bp, synthetic construct
  misc_feature 1..22: note = chemically synthesized
  source 1..22: mol_type = other DNA
aaacggaatatatatttaggct

SEQ ID NO: 37512 - DNA, 22 bp, synthetic construct
  misc_feature 1..22: note = chemically synthesized
  source 1..22: mol_type = other DNA
aacggaatatatatttaggcta

SEQ ID NO: 37513 - DNA, 22 bp, synthetic construct
  misc_feature 1..22: note = chemically synthesized
  source 1..22: mol_type = other DNA
aggctacatttaaccttgtcta

SEQ ID NO: 37514 - DNA, 22 bp, synthetic construct
  misc_feature 1..22: note = chemically synthesized
  source 1..22: mol_type = other DNA
ggctacatttaaccttgtctat

SEQ ID NO: 37515 - DNA, 22 bp, synthetic construct
  misc_feature 1..22: note = chemically synthesized
  source 1..22: mol_type = other DNA
catttaaccttgtctattacaa

SEQ ID NO: 37516 - DNA, 22 bp, synthetic construct
  misc_feature 1..22: note = chemically synthesized
  source 1..22: mol_type = other DNA
aaccttgtctattacaacaggc

SEQ ID NO: 37517 - DNA, 22 bp, synthetic construct
  misc_feature 1..22: note = chemically synthesized
  source 1..22: mol_type = other DNA
accttgtctattacaacaggct

SEQ ID NO: 37518 - DNA, 22 bp, synthetic construct
  misc_feature 1..22: note = chemically synthesized
  source 1..22: mol_type = other DNA
gtctattacaacaggctatgaa

SEQ ID NO: 37519 - DNA, 22 bp, synthetic construct
  misc_feature 1..22: note = chemically synthesized
  source 1..22: mol_type = other DNA
tctattacaacaggctatgaat

SEQ ID NO: 37520 - DNA, 22 bp, synthetic construct
  misc_feature 1..22: note = chemically synthesized
  source 1..22: mol_type = other DNA
ttacaacaggctatgaatacag

SEQ ID NO: 37521 - DNA, 22 bp, synthetic construct
  misc_feature 1..22: note = chemically synthesized
  source 1..22: mol_type = other DNA
caacaggctatgaatacagact

SEQ ID NO: 37522 - DNA, 22 bp, synthetic construct
  misc_feature 1..22: note = chemically synthesized
  source 1..22: mol_type = other DNA
tgaatacagacttgtgtatgtg

SEQ ID NO: 37523 - DNA, 22 bp, synthetic construct
  misc_feature 1..22: note = chemically synthesized
  source 1..22: mol_type = other DNA
gtgtatgtgttgaagagggaga

SEQ ID NO: 37524 - DNA, 22 bp, synthetic construct
  misc_feature 1..22: note = chemically synthesized
  source 1..22: mol_type = other DNA
tgtatgtgttgaagagggagaa

SEQ ID NO: 37525 - DNA, 22 bp, synthetic construct
  misc_feature 1..22: note = chemically synthesized
  source 1..22: mol_type = other DNA
aagagggagaaagttgaaaata

SEQ ID NO: 37526 - DNA, 22 bp, synthetic construct
  misc_feature 1..22: note = chemically synthesized
  source 1..22: mol_type = other DNA
aaaatattagccattgccatgg

SEQ ID NO: 37527 - DNA, 22 bp, synthetic construct
  misc_feature 1..22: note = chemically synthesized
  source 1..22: mol_type = other DNA
gccattgccatggaatgtgcat

SEQ ID NO: 37528 - DNA, 22 bp, synthetic construct
  misc_feature 1..22: note = chemically synthesized
  source 1..22: mol_type = other DNA
ccatggaatgtgcatttaaatt

SEQ ID NO: 37529 - DNA, 22 bp, synthetic construct
  misc_feature 1..22: note = chemically synthesized
  source 1..22: mol_type = other DNA
aaattaaaatttaaaatccata

SEQ ID NO: 37530 - DNA, 22 bp, synthetic construct
  misc_feature 1..22: note = chemically synthesized
  source 1..22: mol_type = other DNA
aattaaaatttaaaatccatat

SEQ ID NO: 37531 - DNA, 22 bp, synthetic construct
  misc_feature 1..22: note = chemically synthesized
  source 1..22: mol_type = other DNA
aaatttaaaatccatattatga

SEQ ID NO: 37532 - DNA, 22 bp, synthetic construct
  misc_feature 1..22: note = chemically synthesized
  source 1..22: mol_type = other DNA
aaaatccatattatgacaacat

SEQ ID NO: 37533 - DNA, 22 bp, synthetic construct
  misc_feature 1..22: note = chemically synthesized
  source 1..22: mol_type = other DNA
aaatccatattatgacaacata

SEQ ID NO: 37534 - DNA, 22 bp, synthetic construct
  misc_feature 1..22: note = chemically synthesized
  source 1..22: mol_type = other DNA
tgacaacatagaaataaaaagt

SEQ ID NO: 37535 - DNA, 22 bp, synthetic construct
  misc_feature 1..22: note = chemically synthesized
  source 1..22: mol_type = other DNA
atatttacattttttgttttaa

SEQ ID NO: 37536 - DNA, 22 bp, synthetic construct
  misc_feature 1..22: note = chemically synthesized
  source 1..22: mol_type = other DNA
acattttttgttttaaaatttt

SEQ ID NO: 37537 - DNA, 22 bp, synthetic construct
  misc_feature 1..22: note = chemically synthesized
  source 1..22: mol_type = other DNA
cattttttgttttaaaattttt

SEQ ID NO: 37538 - DNA, 22 bp, synthetic construct
  misc_feature 1..22: note = chemically synthesized
  source 1..22: mol_type = other DNA
tttgttttaaaatttttctcag

SEQ ID NO: 37539 - DNA, 22 bp, synthetic construct
  misc_feature 1..22: note = chemically synthesized
  source 1..22: mol_type = other DNA
ttgttttaaaatttttctcagc

SEQ ID NO: 37540 - DNA, 22 bp, synthetic construct
  misc_feature 1..22: note = chemically synthesized
  source 1..22: mol_type = other DNA
tgttttaaaatttttctcagca

SEQ ID NO: 37541 - DNA, 22 bp, synthetic construct
  misc_feature 1..22: note = chemically synthesized
  source 1..22: mol_type = other DNA
gttttaaaatttttctcagcaa

SEQ ID NO: 37542 - DNA, 22 bp, synthetic construct
  misc_feature 1..22: note = chemically synthesized
  source 1..22: mol_type = other DNA
ttttaaaatttttctcagcaaa

SEQ ID NO: 37543 - DNA, 22 bp, synthetic construct
  misc_feature 1..22: note = chemically synthesized
  source 1..22: mol_type = other DNA
taaaatttttctcagcaaaata

SEQ ID NO: 37544 - DNA, 22 bp, synthetic construct
  misc_feature 1..22: note = chemically synthesized
  source 1..22: mol_type = other DNA
aaaatttttctcagcaaaatag

SEQ ID NO: 37545 - DNA, 22 bp, synthetic construct
  misc_feature 1..22: note = chemically synthesized
  source 1..22: mol_type = other DNA
aaatttttctcagcaaaatagt

SEQ ID NO: 37546 - DNA, 22 bp, synthetic construct
  misc_feature 1..22: note = chemically synthesized
  source 1..22: mol_type = other DNA
ttctcagcaaaatagtataatt

SEQ ID NO: 37547 - DNA, 22 bp, synthetic construct
  misc_feature 1..22: note = chemically synthesized
  source 1..22: mol_type = other DNA
tctcagcaaaatagtataatta

SEQ ID NO: 37548 - DNA, 22 bp, synthetic construct
  misc_feature 1..22: note = chemically synthesized
  source 1..22: mol_type = other DNA
ctcagcaaaatagtataattaa

SEQ ID NO: 37549 - DNA, 22 bp, synthetic construct
  misc_feature 1..22: note = chemically synthesized
  source 1..22: mol_type = other DNA
tcagcaaaatagtataattaaa

SEQ ID NO: 37550 - DNA, 22 bp, synthetic construct
  misc_feature 1..22: note = chemically synthesized
  source 1..22: mol_type = other DNA
agcaaaatagtataattaaaca

SEQ ID NO: 37551 - DNA, 22 bp, synthetic construct
  misc_feature 1..22: note = chemically synthesized
  source 1..22: mol_type = other DNA
aacattttattttaggaagatg

SEQ ID NO: 37552 - DNA, 22 bp, synthetic construct
  misc_feature 1..22: note = chemically synthesized
  source 1..22: mol_type = other DNA
tattttaggaagatgtatatgt

SEQ ID NO: 37553 - DNA, 22 bp, synthetic construct
  misc_feature 1..22: note = chemically synthesized
  source 1..22: mol_type = other DNA
attttaggaagatgtatatgtg

SEQ ID NO: 37554 - DNA, 22 bp, synthetic construct
  misc_feature 1..22: note = chemically synthesized
  source 1..22: mol_type = other DNA
ttttaggaagatgtatatgtga

SEQ ID NO: 37555 - DNA, 22 bp, synthetic construct
  misc_feature 1..22: note = chemically synthesized
  source 1..22: mol_type = other DNA
taggaagatgtatatgtgatta

SEQ ID NO: 37556 - DNA, 22 bp, synthetic construct
  misc_feature 1..22: note = chemically synthesized
  source 1..22: mol_type = other DNA
aggaagatgtatatgtgattag

SEQ ID NO: 37557 - DNA, 22 bp, synthetic construct
  misc_feature 1..22: note = chemically synthesized
  source 1..22: mol_type = other DNA
ggaagatgtatatgtgattaga

SEQ ID NO: 37558 - DNA, 22 bp, synthetic construct
  misc_feature 1..22: note = chemically synthesized
  source 1..22: mol_type = other DNA
gaaccagttggaaacctcaact

SEQ ID NO: 37559 - DNA, 22 bp, synthetic construct
  misc_feature 1..22: note = chemically synthesized
  source 1..22: mol_type = other DNA
gaaacctcaactctacattctg

SEQ ID NO: 37560 - DNA, 22 bp, synthetic construct
  misc_feature 1..22: note = chemically synthesized
  source 1..22: mol_type = other DNA
aactctacattctgttagtaat

SEQ ID NO: 37561 - DNA, 22 bp, synthetic construct
  misc_feature 1..22: note = chemically synthesized
  source 1..22: mol_type = other DNA
tacattctgttagtaattatat

SEQ ID NO: 37562 - DNA, 22 bp, synthetic construct
  misc_feature 1..22: note = chemically synthesized
  source 1..22: mol_type = other DNA
cattctgttagtaattatatga

SEQ ID NO: 37563 - DNA, 22 bp, synthetic construct
  misc_feature 1..22: note = chemically synthesized
  source 1..22: mol_type = other DNA
tgttagtaattatatgaaatgc

SEQ ID NO: 37564 - DNA, 22 bp, synthetic construct
  misc_feature 1..22: note = chemically synthesized
  source 1..22: mol_type = other DNA
ttagtaattatatgaaatgctt

SEQ ID NO: 37565 - DNA, 22 bp, synthetic construct
  misc_feature 1..22: note = chemically synthesized
  source 1..22: mol_type = other DNA
gtaattatatgaaatgcttaag

SEQ ID NO: 37566 - DNA, 22 bp, synthetic construct
  misc_feature 1..22: note = chemically synthesized
  source 1..22: mol_type = other DNA
tatgaaatgcttaagaatgttt

SEQ ID NO: 37567 - DNA, 22 bp, synthetic construct
  misc_feature 1..22: note = chemically synthesized
  source 1..22: mol_type = other DNA
aagaatgtttcatattcacaat

SEQ ID NO: 37568 - DNA, 22 bp, synthetic construct
  misc_feature 1..22: note = chemically synthesized
  source 1..22: mol_type = other DNA
agaatgtttcatattcacaatt

SEQ ID NO: 37569 - DNA, 22 bp, synthetic construct
  misc_feature 1..22: note = chemically synthesized
  source 1..22: mol_type = other DNA
catattcacaattagcttggaa

SEQ ID NO: 37570 - DNA, 22 bp, synthetic construct
  misc_feature 1..22: note = chemically synthesized
  source 1..22: mol_type = other DNA
atattcacaattagcttggaat

SEQ ID NO: 37571 - DNA, 22 bp, synthetic construct
  misc_feature 1..22: note = chemically synthesized
  source 1..22: mol_type = other DNA
acaattagcttggaattaatgt

SEQ ID NO: 37572 - DNA, 22 bp, synthetic construct
  misc_feature 1..22: note = chemically synthesized
  source 1..22: mol_type = other DNA
gcttggaattaatgttttaatt

SEQ ID NO: 37573 - DNA, 22 bp, synthetic construct
  misc_feature 1..22: note = chemically synthesized
  source 1..22: mol_type = other DNA
ggaattaatgttttaattcagg

SEQ ID NO: 37574 - DNA, 22 bp, synthetic construct
  misc_feature 1..22: note = chemically synthesized
  source 1..22: mol_type = other DNA
gaattaatgttttaattcagga

SEQ ID NO: 37575 - DNA, 22 bp, synthetic construct
  misc_feature 1..22: note = chemically synthesized
  source 1..22: mol_type = other DNA
atgttttaattcaggagcttct

SEQ ID NO: 37576 - DNA, 22 bp, synthetic construct
  misc_feature 1..22: note = chemically synthesized
  source 1..22: mol_type = other DNA
taattcaggagcttctcaaaag

SEQ ID NO: 37577 - DNA, 22 bp, synthetic construct
  misc_feature 1..22: note = chemically synthesized
  source 1..22: mol_type = other DNA
aattcaggagcttctcaaaagg

SEQ ID NO: 37578 - DNA, 22 bp, synthetic construct
  misc_feature 1..22: note = chemically synthesized
  source 1..22: mol_type = other DNA
attcaggagcttctcaaaaggc

SEQ ID NO: 37579 - DNA, 22 bp, synthetic construct
  misc_feature 1..22: note = chemically synthesized
  source 1..22: mol_type = other DNA
aggagcttctcaaaaggcaaaa

SEQ ID NO: 37580 - DNA, 22 bp, synthetic construct
  misc_feature 1..22: note = chemically synthesized
  source 1..22: mol_type = other DNA
ctcaaaaggcaaaatactgtgc

SEQ ID NO: 37581 - DNA, 22 bp, synthetic construct
  misc_feature 1..22: note = chemically synthesized
  source 1..22: mol_type = other DNA
tcaaaaggcaaaatactgtgct

SEQ ID NO: 37582 - DNA, 22 bp, synthetic construct
  misc_feature 1..22: note = chemically synthesized
  source 1..22: mol_type = other DNA
aaaaggcaaaatactgtgctcc

SEQ ID NO: 37583 - DNA, 22 bp, synthetic construct
  misc_feature 1..22: note = chemically synthesized
  source 1..22: mol_type = other DNA
tgctcctttcagaatgaaagta

SEQ ID NO: 37584 - DNA, 22 bp, synthetic construct
  misc_feature 1..22: note = chemically synthesized
  source 1..22: mol_type = other DNA
ctttcagaatgaaagtaatttt

SEQ ID NO: 37585 - DNA, 22 bp, synthetic construct
  misc_feature 1..22: note = chemically synthesized
  source 1..22: mol_type = other DNA
tcagaatgaaagtaattttttt

SEQ ID NO: 37586 - DNA, 22 bp, synthetic construct
  misc_feature 1..22: note = chemically synthesized
  source 1..22: mol_type = other DNA
cagaatgaaagtaatttttttc

SEQ ID NO: 37587 - DNA, 22 bp, synthetic construct
  misc_feature 1..22: note = chemically synthesized
  source 1..22: mol_type = other DNA
agaatgaaagtaatttttttct

SEQ ID NO: 37588 - DNA, 22 bp, synthetic construct
  misc_feature 1..22: note = chemically synthesized
  source 1..22: mol_type = other DNA
ttttcttcaatgctatgcttat

SEQ ID NO: 37589 - DNA, 22 bp, synthetic construct
  misc_feature 1..22: note = chemically synthesized
  source 1..22: mol_type = other DNA
tttcttcaatgctatgcttatg

SEQ ID NO: 37590 - DNA, 22 bp, synthetic construct
  misc_feature 1..22: note = chemically synthesized
  source 1..22: mol_type = other DNA
ttcttcaatgctatgcttatgt

SEQ ID NO: 37591 - DNA, 22 bp, synthetic construct
  misc_feature 1..22: note = chemically synthesized
  source 1..22: mol_type = other DNA
tcttcaatgctatgcttatgta

SEQ ID NO: 37592 - DNA, 22 bp, synthetic construct
  misc_feature 1..22: note = chemically synthesized
  source 1..22: mol_type = other DNA
cttcaatgctatgcttatgtag

SEQ ID NO: 37593 - DNA, 22 bp, synthetic construct
  misc_feature 1..22: note = chemically synthesized
  source 1..22: mol_type = other DNA
ttcaatgctatgcttatgtagg

SEQ ID NO: 37594 - DNA, 22 bp, synthetic construct
  misc_feature 1..22: note = chemically synthesized
  source 1..22: mol_type = other DNA
caatgctatgcttatgtaggaa

SEQ ID NO: 37595 - DNA, 22 bp, synthetic construct
  misc_feature 1..22: note = chemically synthesized
  source 1..22: mol_type = other DNA
aatgctatgcttatgtaggaat

SEQ ID NO: 37596 - DNA, 22 bp, synthetic construct
  misc_feature 1..22: note = chemically synthesized
  source 1..22: mol_type = other DNA
tgcttatgtaggaattataaaa

SEQ ID NO: 37597 - DNA, 22 bp, synthetic construct
  misc_feature 1..22: note = chemically synthesized
  source 1..22: mol_type = other DNA
atgtaggaattataaaataaag

SEQ ID NO: 37598 - DNA, 22 bp, synthetic construct
  misc_feature 1..22: note = chemically synthesized
  source 1..22: mol_type = other DNA
tgtaggaattataaaataaaga

SEQ ID NO: 37599 - DNA, 22 bp, synthetic construct
  misc_feature 1..22: note = chemically synthesized
  source 1..22: mol_type = other DNA
taaaataaagaaaatcaaattg

SEQ ID NO: 37600 - DNA, 22 bp, synthetic construct
  misc_feature 1..22: note = chemically synthesized
  source 1..22: mol_type = other DNA
ataaaacaatttgcgagtgagg

SEQ ID NO: 37601 - DNA, 22 bp, synthetic construct
  misc_feature 1..22: note = chemically synthesized
  source 1..22: mol_type = other DNA
gcgagtgaggtataacctcatc

SEQ ID NO: 37602 - DNA, 22 bp, synthetic construct
  misc_feature 1..22: note = chemically synthesized
  source 1..22: mol_type = other DNA
cgagtgaggtataacctcatct

SEQ ID NO: 37603 - DNA, 22 bp, synthetic construct
  misc_feature 1..22: note = chemically synthesized
  source 1..22: mol_type = other DNA
atctgtgctgggtaagagaagg

SEQ ID NO: 37604 - DNA, 22 bp, synthetic construct
  misc_feature 1..22: note = chemically synthesized
  source 1..22: mol_type = other DNA
tgctgggtaagagaaggcaagg

SEQ ID NO: 37605 - DNA, 22 bp, synthetic construct
  misc_feature 1..22: note = chemically synthesized
  source 1..22: mol_type = other DNA
ggtaagagaaggcaaggtagag

SEQ ID NO: 37606 - DNA, 22 bp, synthetic construct
  misc_feature 1..22: note = chemically synthesized
  source 1..22: mol_type = other DNA
tgaaaataaagacatctgtaaa

SEQ ID NO: 37607 - DNA, 22 bp, synthetic construct
  misc_feature 1..22: note = chemically synthesized
  source 1..22: mol_type = other DNA
gaaaataaagacatctgtaaaa

SEQ ID NO: 37608 - DNA, 22 bp, synthetic construct
  misc_feature 1..22: note = chemically synthesized
  source 1..22: mol_type = other DNA
aaaataaagacatctgtaaaat

SEQ ID NO: 37609 - DNA, 22 bp, synthetic construct
  misc_feature 1..22: note = chemically synthesized
  source 1..22: mol_type = other DNA
taaaattataaaacaattcctt

SEQ ID NO: 37610 - DNA, 22 bp, synthetic construct
  misc_feature 1..22: note = chemically synthesized
  source 1..22: mol_type = other DNA
taaaacaattccttgtgggttt

SEQ ID NO: 37611 - DNA, 22 bp, synthetic construct
  misc_feature 1..22: note = chemically synthesized
  source 1..22: mol_type = other DNA
cttgtgggtttatactctctag

SEQ ID NO: 37612 - DNA, 22 bp, synthetic construct
  misc_feature 1..22: note = chemically synthesized
  source 1..22: mol_type = other DNA
gtgggtttatactctctagttt

SEQ ID NO: 37613 - DNA, 22 bp, synthetic construct
  misc_feature 1..22: note = chemically synthesized
  source 1..22: mol_type = other DNA
tgggtttatactctctagttta

SEQ ID NO: 37614 - DNA, 22 bp, synthetic construct
  misc_feature 1..22: note = chemically synthesized
  source 1..22: mol_type = other DNA
atactctctagtttaaaagtgt

SEQ ID NO: 37615 - DNA, 22 bp, synthetic construct
  misc_feature 1..22: note = chemically synthesized
  source 1..22: mol_type = other DNA
tactctctagtttaaaagtgtc

SEQ ID NO: 37616 - DNA, 22 bp, synthetic construct
  misc_feature 1..22: note = chemically synthesized
  source 1..22: mol_type = other DNA
tctagtttaaaagtgtcaagac

SEQ ID NO: 37617 - DNA, 22 bp, synthetic construct
  misc_feature 1..22: note = chemically synthesized
  source 1..22: mol_type = other DNA
tagtttaaaagtgtcaagacta

SEQ ID NO: 37618 - DNA, 22 bp, synthetic construct
  misc_feature 1..22: note = chemically synthesized
  source 1..22: mol_type = other DNA
gtttaaaagtgtcaagactatt

SEQ ID NO: 37619 - DNA, 22 bp, synthetic construct
  misc_feature 1..22: note = chemically synthesized
  source 1..22: mol_type = other DNA
aaaagtgtcaagactattgaag

SEQ ID NO: 37620 - DNA, 22 bp, synthetic construct
  misc_feature 1..22: note = chemically synthesized
  source 1..22: mol_type = other DNA
aaagtgtcaagactattgaagg

SEQ ID NO: 37621 - DNA, 22 bp, synthetic construct
  misc_feature 1..22: note = chemically synthesized
  source 1..22: mol_type = other DNA
ttgaaggaacattagcaaagaa

SEQ ID NO: 37622 - DNA, 22 bp, synthetic construct
  misc_feature 1..22: note = chemically synthesized
  source 1..22: mol_type = other DNA
aaggaacattagcaaagaaaaa

SEQ ID NO: 37623 - DNA, 22 bp, synthetic construct
  misc_feature 1..22: note = chemically synthesized
  source 1..22: mol_type = other DNA
gcaaagaaaaagtcatggtttt

SEQ ID NO: 37624 - DNA, 22 bp, synthetic construct
  misc_feature 1..22: note = chemically synthesized
  source 1..22: mol_type = other DNA
tgaaggctgagttcctcaagat

SEQ ID NO: 37625 - DNA, 22 bp, synthetic construct
  misc_feature 1..22: note = chemically synthesized
  source 1..22: mol_type = other DNA
gaaggctgagttcctcaagatc

SEQ ID NO: 37626 - DNA, 22 bp, synthetic construct
  misc_feature 1..22: note = chemically synthesized
  source 1..22: mol_type = other DNA
aaggctgagttcctcaagatct

SEQ ID NO: 37627 - DNA, 22 bp, synthetic construct
  misc_feature 1..22: note = chemically synthesized
  source 1..22: mol_type = other DNA
agttcctcaagatcttgaagaa

SEQ ID NO: 37628 - DNA, 22 bp, synthetic construct
  misc_feature 1..22: note = chemically synthesized
  source 1..22: mol_type = other DNA
ctcaagatcttgaagaatcaag

SEQ ID NO: 37629 - DNA, 22 bp, synthetic construct
  misc_feature 1..22: note = chemically synthesized
  source 1..22: mol_type = other DNA
aagatcttgaagaatcaagcca

SEQ ID NO: 37630 - DNA, 22 bp, synthetic construct
  misc_feature 1..22: note = chemically synthesized
  source 1..22: mol_type = other DNA
gaagaatcaagccaactgattg

SEQ ID NO: 37631 - DNA, 22 bp, synthetic construct
  misc_feature 1..22: note = chemically synthesized
  source 1..22: mol_type = other DNA
aagaatcaagccaactgattgc

SEQ ID NO: 37632 - DNA, 22 bp, synthetic construct
  misc_feature 1..22: note = chemically synthesized
  source 1..22: mol_type = other DNA
attgctgggtaaatggcagtga

SEQ ID NO: 37633 - DNA, 22 bp, synthetic construct
  misc_feature 1..22: note = chemically synthesized
  source 1..22: mol_type = other DNA
ctgggtaaatggcagtgatgac

SEQ ID NO: 37634 - DNA, 22 bp, synthetic construct
  misc_feature 1..22: note = chemically synthesized
  source 1..22: mol_type = other DNA
ggtaaatggcagtgatgacttg

SEQ ID NO: 37635 - DNA, 22 bp, synthetic construct
  misc_feature 1..22: note = chemically synthesized
  source 1..22: mol_type = other DNA
gtgtgatttaaacgatctgaaa

SEQ ID NO: 37636 - DNA, 22 bp, synthetic construct
  misc_feature 1..22: note = chemically synthesized
  source 1..22: mol_type = other DNA
tgtgatttaaacgatctgaaat

SEQ ID NO: 37637 - DNA, 22 bp, synthetic construct
  misc_feature 1..22: note = chemically synthesized
  source 1..22: mol_type = other DNA
aaacgatctgaaattatgtcat

SEQ ID NO: 37638 - DNA, 22 bp, synthetic construct
  misc_feature 1..22: note = chemically synthesized
  source 1..22: mol_type = other DNA
aacgatctgaaattatgtcatg

SEQ ID NO: 37639 - DNA, 22 bp, synthetic construct
  misc_feature 1..22: note = chemically synthesized
  source 1..22: mol_type = other DNA
aaattatgtcatgtgttgtgat

SEQ ID NO: 37640 - DNA, 22 bp, synthetic construct
  misc_feature 1..22: note = chemically synthesized
  source 1..22: mol_type = other DNA
tgtcatgtgttgtgatatataa

SEQ ID NO: 37641 - DNA, 22 bp, synthetic construct
  misc_feature 1..22: note = chemically synthesized
  source 1..22: mol_type = other DNA
tgatatataacacatttatttt

SEQ ID NO: 37642 - DNA, 22 bp, synthetic construct
  misc_feature 1..22: note = chemically synthesized
  source 1..22: mol_type = other DNA
atttttcattttgtgtttacta

SEQ ID NO: 37643 - DNA, 22 bp, synthetic construct
  misc_feature 1..22: note = chemically synthesized
  source 1..22: mol_type = other DNA
tttttcattttgtgtttactat

SEQ ID NO: 37644 - DNA, 22 bp, synthetic construct
  misc_feature 1..22: note = chemically synthesized
  source 1..22: mol_type = other DNA
ttcattttgtgtttactatttc

SEQ ID NO: 37645 - DNA, 22 bp, synthetic construct
  misc_feature 1..22: note = chemically synthesized
  source 1..22: mol_type = other DNA
tcattttgtgtttactatttca

SEQ ID NO: 37646 - DNA, 22 bp, synthetic construct
  misc_feature 1..22: note = chemically synthesized
  source 1..22: mol_type = other DNA
cattttgtgtttactatttcat

SEQ ID NO: 37647 - DNA, 22 bp, synthetic construct
  misc_feature 1..22: note = chemically synthesized
  source 1..22: mol_type = other DNA
attttgtgtttactatttcatg

SEQ ID NO: 37648 - DNA, 22 bp, synthetic construct
  misc_feature 1..22: note = chemically synthesized
  source 1..22: mol_type = other DNA
tgtgtttactatttcatgtcta

SEQ ID NO: 37649 - DNA, 22 bp, synthetic construct
  misc_feature 1..22: note = chemically synthesized
  source 1..22: mol_type = other DNA
gtgtttactatttcatgtctat

SEQ ID NO: 37650 - DNA, 22 bp, synthetic construct
  misc_feature 1..22: note = chemically synthesized
  source 1..22: mol_type = other DNA
tgtttactatttcatgtctatt

SEQ ID NO: 37651 - DNA, 22 bp, synthetic construct
  misc_feature 1..22: note = chemically synthesized
  source 1..22: mol_type = other DNA
actatttcatgtctattacagt

SEQ ID NO: 37652 - DNA, 22 bp, synthetic construct
  misc_feature 1..22: note = chemically synthesized
  source 1..22: mol_type = other DNA
ctatttcatgtctattacagta

SEQ ID NO: 37653 - DNA, 22 bp, synthetic construct
  misc_feature 1..22: note = chemically synthesized
  source 1..22: mol_type = other DNA
tttcatgtctattacagtaatc

SEQ ID NO: 37654 - DNA, 22 bp, synthetic construct
  misc_feature 1..22: note = chemically synthesized
  source 1..22: mol_type = other DNA
catgtctattacagtaatctaa

SEQ ID NO: 37655 - DNA, 22 bp, synthetic construct
  misc_feature 1..22: note = chemically synthesized
  source 1..22: mol_type = other DNA
atgtctattacagtaatctaaa

SEQ ID NO: 37656 - DNA, 22 bp, synthetic construct
  misc_feature 1..22: note = chemically synthesized
  source 1..22: mol_type = other DNA
ttacagtaatctaaaggatctg

SEQ ID NO: 37657 - DNA, 22 bp, synthetic construct
  misc_feature 1..22: note = chemically synthesized
  source 1..22: mol_type = other DNA
cagtaatctaaaggatctgaaa

SEQ ID NO: 37658 - DNA, 22 bp, synthetic construct
  misc_feature 1..22: note = chemically synthesized
  source 1..22: mol_type = other DNA
aaggatctgaaataataaccag

SEQ ID NO: 37659 - DNA, 22 bp, synthetic construct
  misc_feature 1..22: note = chemically synthesized
  source 1..22: mol_type = other DNA
aaataataaccagaatgtgata

SEQ ID NO: 37660 - DNA, 22 bp, synthetic construct
  misc_feature 1..22: note = chemically synthesized
  source 1..22: mol_type = other DNA
cttccttcttttggctaatcag

SEQ ID NO: 37661 - DNA, 22 bp, synthetic construct
  misc_feature 1..22: note = chemically synthesized
  source 1..22: mol_type = other DNA
ccttcttttggctaatcagagc

SEQ ID NO: 37662 - DNA, 22 bp, synthetic construct
  misc_feature 1..22: note = chemically synthesized
  source 1..22: mol_type = other DNA
cttcttttggctaatcagagcc

SEQ ID NO: 37663 - DNA, 22 bp, synthetic construct
  misc_feature 1..22: note = chemically synthesized
  source 1..22: mol_type = other DNA
cttttggctaatcagagccagc

SEQ ID NO: 37664 - DNA, 22 bp, synthetic construct
  misc_feature 1..22: note = chemically synthesized
  source 1..22: mol_type = other DNA
ttttggctaatcagagccagca

SEQ ID NO: 37665 - DNA, 22 bp, synthetic construct
  misc_feature 1..22: note = chemically synthesized
  source 1..22: mol_type = other DNA
ttggctaatcagagccagcata

SEQ ID NO: 37666 - DNA, 22 bp, synthetic construct
  misc_feature 1..22: note = chemically synthesized
  source 1..22: mol_type = other DNA
tggctaatcagagccagcataa

SEQ ID NO: 37667 - DNA, 22 bp, synthetic construct
  misc_feature 1..22: note = chemically synthesized
  source 1..22: mol_type = other DNA
ggctaatcagagccagcataat

SEQ ID NO: 37668 - DNA, 22 bp, synthetic construct
  misc_feature 1..22: note = chemically synthesized
  source 1..22: mol_type = other DNA
gctaatcagagccagcataatc

SEQ ID NO: 37669 - DNA, 22 bp, synthetic construct
  misc_feature 1..22: note = chemically synthesized
  source 1..22: mol_type = other DNA
atcagagccagcataatctcaa

SEQ ID NO: 37670 - DNA, 22 bp, synthetic construct
  misc_feature 1..22: note = chemically synthesized
  source 1..22: mol_type = other DNA
aaaattaaatgcattatatatg

SEQ ID NO: 37671 - DNA, 22 bp, synthetic construct
  misc_feature 1..22: note = chemically synthesized
  source 1..22: mol_type = other DNA
aatgcattatatatggcatgca

SEQ ID NO: 37672 - DNA, 22 bp, synthetic construct
  misc_feature 1..22: note = chemically synthesized
  source 1..22: mol_type = other DNA
tatatggcatgcattctgaaaa

SEQ ID NO: 37673 - DNA, 22 bp, synthetic construct
  misc_feature 1..22: note = chemically synthesized
  source 1..22: mol_type = other DNA
tgaaaaatcagaattcacctta

SEQ ID NO: 37674 - DNA, 22 bp, synthetic construct
  misc_feature 1..22: note = chemically synthesized
  source 1..22: mol_type = other DNA
aaaaatcagaattcaccttata

SEQ ID NO: 37675 - DNA, 22 bp, synthetic construct
  misc_feature 1..22: note = chemically synthesized
  source 1..22: mol_type = other DNA
accttatactaactgttcaaag

SEQ ID NO: 37676 - DNA, 22 bp, synthetic construct
  misc_feature 1..22: note = chemically synthesized
  source 1..22: mol_type = other DNA
atactaactgttcaaagttctc

SEQ ID NO: 37677 - DNA, 22 bp, synthetic construct
  misc_feature 1..22: note = chemically synthesized
  source 1..22: mol_type = other DNA
tactaactgttcaaagttctcg

SEQ ID NO: 37678 - DNA, 22 bp, synthetic construct
  misc_feature 1..22: note = chemically synthesized
  source 1..22: mol_type = other DNA
actgttcaaagttctcgtgtgt

SEQ ID NO: 37679 - DNA, 22 bp, synthetic construct
  misc_feature 1..22: note = chemically synthesized
  source 1..22: mol_type = other DNA
ttcaaagttctcgtgtgtatgc

SEQ ID NO: 37680 - DNA, 22 bp, synthetic construct
  misc_feature 1..22: note = chemically synthesized
  source 1..22: mol_type = other DNA
aaagttctcgtgtgtatgcatt

SEQ ID NO: 37681 - DNA, 22 bp, synthetic construct
  misc_feature 1..22: note = chemically synthesized
  source 1..22: mol_type = other DNA
tcgtgtgtatgcattcataaaa

SEQ ID NO: 37682 - DNA, 22 bp, synthetic construct
  misc_feature 1..22: note = chemically synthesized
  source 1..22: mol_type = other DNA
gtgtgtatgcattcataaaatc

SEQ ID NO: 37683 - DNA, 22 bp, synthetic construct
  misc_feature 1..22: note = chemically synthesized
  source 1..22: mol_type = other DNA
ataaaatcaaaattaaaagtca

SEQ ID NO: 37684 - DNA, 22 bp, synthetic construct
  misc_feature 1..22: note = chemically synthesized
  source 1..22: mol_type = other DNA
aaagtcaattttgcctatgtag

SEQ ID NO: 37685 - DNA, 22 bp, synthetic construct
  misc_feature 1..22: note = chemically synthesized
  source 1..22: mol_type = other DNA
tgcctatgtagaagtggacaga

SEQ ID NO: 37686 - DNA, 22 bp, synthetic construct
  misc_feature 1..22: note = chemically synthesized
  source 1..22: mol_type = other DNA
gcctatgtagaagtggacagaa

SEQ ID NO: 37687 - DNA, 22 bp, synthetic construct
  misc_feature 1..22: note = chemically synthesized
  source 1..22: mol_type = other DNA
cctatgtagaagtggacagaat

SEQ ID NO: 37688 - DNA, 22 bp, synthetic construct
  misc_feature 1..22: note = chemically synthesized
  source 1..22: mol_type = other DNA
tgtagaagtggacagaatgcat

SEQ ID NO: 37689 - DNA, 22 bp, synthetic construct
  misc_feature 1..22: note = chemically synthesized
  source 1..22: mol_type = other DNA
attctctgtagtttagtgagaa

SEQ ID NO: 37690 - DNA, 22 bp, synthetic construct
  misc_feature 1..22: note = chemically synthesized
  source 1..22: mol_type = other DNA
ttctctgtagtttagtgagaaa

SEQ ID NO: 37691 - DNA, 22 bp, synthetic construct
  misc_feature 1..22: note = chemically synthesized
  source 1..22: mol_type = other DNA
tctgtagtttagtgagaaagaa

SEQ ID NO: 37692 - DNA, 22 bp, synthetic construct
  misc_feature 1..22: note = chemically synthesized
  source 1..22: mol_type = other DNA
tgtagtttagtgagaaagaatc

SEQ ID NO: 37693 - DNA, 22 bp, synthetic construct
  misc_feature 1..22: note = chemically synthesized
  source 1..22: mol_type = other DNA
tagtttagtgagaaagaatcta

SEQ ID NO: 37694 - DNA, 22 bp, synthetic construct
  misc_feature 1..22: note = chemically synthesized
  source 1..22: mol_type = other DNA
agtgagaaagaatctaggagga

SEQ ID NO: 37695 - DNA, 22 bp, synthetic construct
  misc_feature 1..22: note = chemically synthesized
  source 1..22: mol_type = other DNA
gtgagaaagaatctaggaggac

SEQ ID NO: 37696 - DNA, 22 bp, synthetic construct
  misc_feature 1..22: note = chemically synthesized
  source 1..22: mol_type = other DNA
ggaggacagaaaccttattaca

SEQ ID NO: 37697 - DNA, 22 bp, synthetic construct
  misc_feature 1..22: note = chemically synthesized
  source 1..22: mol_type = other DNA
attacagagaagtgaagtattt

SEQ ID NO: 37698 - DNA, 22 bp, synthetic construct
  misc_feature 1..22: note = chemically synthesized
  source 1..22: mol_type = other DNA
ttacagagaagtgaagtatttt

SEQ ID NO: 37699 - DNA, 22 bp, synthetic construct
  misc_feature 1..22: note = chemically synthesized
  source 1..22: mol_type = other DNA
cagagaagtgaagtattttatg

SEQ ID NO: 37700 - DNA, 22 bp, synthetic construct
  misc_feature 1..22: note = chemically synthesized
  source 1..22: mol_type = other DNA
tatgtgtacctgtttctgttgt

SEQ ID NO: 37701 - DNA, 22 bp, synthetic construct
  misc_feature 1..22: note = chemically synthesized
  source 1..22: mol_type = other DNA
atgtgtacctgtttctgttgtt

SEQ ID NO: 37702 - DNA, 22 bp, synthetic construct
  misc_feature 1..22: note = chemically synthesized
  source 1..22: mol_type = other DNA
tgtgtacctgtttctgttgttt

SEQ ID NO: 37703 - DNA, 22 bp, synthetic construct
  misc_feature 1..22: note = chemically synthesized
  source 1..22: mol_type = other DNA
tttctgttgtttctttttaaat

SEQ ID NO: 37704 - DNA, 22 bp, synthetic construct
  misc_feature 1..22: note = chemically synthesized
  source 1..22: mol_type = other DNA
ctgttgtttctttttaaattat

SEQ ID NO: 37705 - DNA, 22 bp, synthetic construct
  misc_feature 1..22: note = chemically synthesized
  source 1..22: mol_type = other DNA
tgttgtttctttttaaattatt

SEQ ID NO: 37706 - DNA, 22 bp, synthetic construct
  misc_feature 1..22: note = chemically synthesized
  source 1..22: mol_type = other DNA
ttgtttctttttaaattatttt

SEQ ID NO: 37707 - DNA, 22 bp, synthetic construct
  misc_feature 1..22: note = chemically synthesized
  source 1..22: mol_type = other DNA
tttctttttaaattattttgta

SEQ ID NO: 37708 - DNA, 22 bp, synthetic construct
  misc_feature 1..22: note = chemically synthesized
  source 1..22: mol_type = other DNA
ctttttaaattattttgtattc

SEQ ID NO: 37709 - DNA, 22 bp, synthetic construct
  misc_feature 1..22: note = chemically synthesized
  source 1..22: mol_type = other DNA
tttttaaattattttgtattct

SEQ ID NO: 37710 - DNA, 22 bp, synthetic construct
  misc_feature 1..22: note = chemically synthesized
  source 1..22: mol_type = other DNA
tttaaattattttgtattcttt

SEQ ID NO: 37711 - DNA, 22 bp, synthetic construct
  misc_feature 1..22: note = chemically synthesized
  source 1..22: mol_type = other DNA
ttaaattattttgtattctttt

SEQ ID NO: 37712 - DNA, 22 bp, synthetic construct
  misc_feature 1..22: note = chemically synthesized
  source 1..22: mol_type = other DNA
taaattattttgtattcttttc

SEQ ID NO: 37713 - DNA, 22 bp, synthetic construct
  misc_feature 1..22: note = chemically synthesized
  source 1..22: mol_type = other DNA
aaattattttgtattcttttcc

SEQ ID NO: 37714 - DNA, 22 bp, synthetic construct
  misc_feature 1..22: note = chemically synthesized
  source 1..22: mol_type = other DNA
aattattttgtattcttttcct

SEQ ID NO: 37715 - DNA, 22 bp, synthetic construct
  misc_feature 1..22: note = chemically synthesized
  source 1..22: mol_type = other DNA
ttttgtattcttttcctcagag

SEQ ID NO: 37716 - DNA, 22 bp, synthetic construct
  misc_feature 1..22: note = chemically synthesized
  source 1..22: mol_type = other DNA
tgtattcttttcctcagagatc

SEQ ID NO: 37717 - DNA, 22 bp, synthetic construct
  misc_feature 1..22: note = chemically synthesized
  source 1..22: mol_type = other DNA
gtattcttttcctcagagatct

SEQ ID NO: 37718 - DNA, 22 bp, synthetic construct
  misc_feature 1..22: note = chemically synthesized
  source 1..22: mol_type = other DNA
tattcttttcctcagagatctt

SEQ ID NO: 37719 - DNA, 22 bp, synthetic construct
  misc_feature 1..22: note = chemically synthesized
  source 1..22: mol_type = other DNA
ttttcctcagagatctttatcc

SEQ ID NO: 37720 - DNA, 22 bp, synthetic construct
  misc_feature 1..22: note = chemically synthesized
  source 1..22: mol_type = other DNA
ttcctcagagatctttatcctg

SEQ ID NO: 37721 - DNA, 22 bp, synthetic construct
  misc_feature 1..22: note = chemically synthesized
  source 1..22: mol_type = other DNA
tcctcagagatctttatcctga

SEQ ID NO: 37722 - DNA, 22 bp, synthetic construct
  misc_feature 1..22: note = chemically synthesized
  source 1..22: mol_type = other DNA
cctcagagatctttatcctgaa

SEQ ID NO: 37723 - DNA, 22 bp, synthetic construct
  misc_feature 1..22: note = chemically synthesized
  source 1..22: mol_type = other DNA
ctcagagatctttatcctgaaa

SEQ ID NO: 37724 - DNA, 22 bp, synthetic construct
  misc_feature 1..22: note = chemically synthesized
  source 1..22: mol_type = other DNA
agagatctttatcctgaaatga

SEQ ID NO: 37725 - DNA, 22 bp, synthetic construct
  misc_feature 1..22: note = chemically synthesized
  source 1..22: mol_type = other DNA
tatcctgaaatgagcatgtgtt

SEQ ID NO: 37726 - DNA, 22 bp, synthetic construct
  misc_feature 1..22: note = chemically synthesized
  source 1..22: mol_type = other DNA
atcctgaaatgagcatgtgttt

SEQ ID NO: 37727 - DNA, 22 bp, synthetic construct
  misc_feature 1..22: note = chemically synthesized
  source 1..22: mol_type = other DNA
tcctgaaatgagcatgtgtttt

SEQ ID NO: 37728 - DNA, 22 bp, synthetic construct
  misc_feature 1..22: note = chemically synthesized
  source 1..22: mol_type = other DNA
aaatgagcatgtgtttttaatg

SEQ ID NO: 37729 - DNA, 22 bp, synthetic construct
  misc_feature 1..22: note = chemically synthesized
  source 1..22: mol_type = other DNA
ttaatgtcctttttctagtcac

SEQ ID NO: 37730 - DNA, 22 bp, synthetic construct
  misc_feature 1..22: note = chemically synthesized
  source 1..22: mol_type = other DNA
taatgtcctttttctagtcaca

SEQ ID NO: 37731 - DNA, 22 bp, synthetic construct
  misc_feature 1..22: note = chemically synthesized
  source 1..22: mol_type = other DNA
aatgtcctttttctagtcacaa

SEQ ID NO: 37732 - DNA, 22 bp, synthetic construct
  misc_feature 1..22: note = chemically synthesized
  source 1..22: mol_type = other DNA
atgtcctttttctagtcacaaa

SEQ ID NO: 37733 - DNA, 22 bp, synthetic construct
  misc_feature 1..22: note = chemically synthesized
  source 1..22: mol_type = other DNA
tttctagtcacaaatttttcca

SEQ ID NO: 37734 - DNA, 22 bp, synthetic construct
  misc_feature 1..22: note = chemically synthesized
  source 1..22: mol_type = other DNA
ttctagtcacaaatttttccag

SEQ ID NO: 37735 - DNA, 22 bp, synthetic construct
  misc_feature 1..22: note = chemically synthesized
  source 1..22: mol_type = other DNA
tctagtcacaaatttttccagt

SEQ ID NO: 37736 - DNA, 22 bp, synthetic construct
  misc_feature 1..22: note = chemically synthesized
  source 1..22: mol_type = other DNA
ctagtcacaaatttttccagtc

SEQ ID NO: 37737 - DNA, 22 bp, synthetic construct
  misc_feature 1..22: note = chemically synthesized
  source 1..22: mol_type = other DNA
tagtcacaaatttttccagtcc

SEQ ID NO: 37738 - DNA, 22 bp, synthetic construct
  misc_feature 1..22: note = chemically synthesized
  source 1..22: mol_type = other DNA
gtcacaaatttttccagtccag

SEQ ID NO: 37739 - DNA, 22 bp, synthetic construct
  misc_feature 1..22: note = chemically synthesized
  source 1..22: mol_type = other DNA
ttccagtccagtttttaaatat

SEQ ID NO: 37740 - DNA, 22 bp, synthetic construct
  misc_feature 1..22: note = chemically synthesized
  source 1..22: mol_type = other DNA
tccagtccagtttttaaatatg

SEQ ID NO: 37741 - DNA, 22 bp, synthetic construct
  misc_feature 1..22: note = chemically synthesized
  source 1..22: mol_type = other DNA
ccagtccagtttttaaatatgc

SEQ ID NO: 37742 - DNA, 22 bp, synthetic construct
  misc_feature 1..22: note = chemically synthesized
  source 1..22: mol_type = other DNA
cagtccagtttttaaatatgcc

SEQ ID NO: 37743 - DNA, 22 bp, synthetic construct
  misc_feature 1..22: note = chemically synthesized
  source 1..22: mol_type = other DNA
ttaaatatgcccaaagttcctg

SEQ ID NO: 37744 - DNA, 22 bp, synthetic construct
  misc_feature 1..22: note = chemically synthesized
  source 1..22: mol_type = other DNA
taaatatgcccaaagttcctgg

SEQ ID NO: 37745 - DNA, 22 bp, synthetic construct
  misc_feature 1..22: note = chemically synthesized
  source 1..22: mol_type = other DNA
aaatatgcccaaagttcctggg

SEQ ID NO: 37746 - DNA, 22 bp, synthetic construct
  misc_feature 1..22: note = chemically synthesized
  source 1..22: mol_type = other DNA
aatatgcccaaagttcctggga

SEQ ID NO: 37747 - DNA, 22 bp, synthetic construct
  misc_feature 1..22: note = chemically synthesized
  source 1..22: mol_type = other DNA
ctgggaacagaaccatctctat

SEQ ID NO: 37748 - DNA, 22 bp, synthetic construct
  misc_feature 1..22: note = chemically synthesized
  source 1..22: mol_type = other DNA
ggaacagaaccatctctatcac

SEQ ID NO: 37749 - DNA, 22 bp, synthetic construct
  misc_feature 1..22: note = chemically synthesized
  source 1..22: mol_type = other DNA
tatcacatgtgaatcccggagt

SEQ ID NO: 37750 - DNA, 22 bp, synthetic construct
  misc_feature 1..22: note = chemically synthesized
  source 1..22: mol_type = other DNA
tcacatgtgaatcccggagtat

SEQ ID NO: 37751 - DNA, 22 bp, synthetic construct
  misc_feature 1..22: note = chemically synthesized
  source 1..22: mol_type = other DNA
gaaataaaagttttctctagag

SEQ ID NO: 37752 - DNA, 22 bp, synthetic construct
  misc_feature 1..22: note = chemically synthesized
  source 1..22: mol_type = other DNA
aaataaaagttttctctagaga

SEQ ID NO: 37753 - DNA, 22 bp, synthetic construct
  misc_feature 1..22: note = chemically synthesized
  source 1..22: mol_type = other DNA
tctctagagagtgggcaggagc

SEQ ID NO: 37754 - DNA, 22 bp, synthetic construct
  misc_feature 1..22: note = chemically synthesized
  source 1..22: mol_type = other DNA
ctctagagagtgggcaggagct

SEQ ID NO: 37755 - DNA, 22 bp, synthetic construct
  misc_feature 1..22: note = chemically synthesized
  source 1..22: mol_type = other DNA
tctagagagtgggcaggagctc

SEQ ID NO: 37756 - DNA, 22 bp, synthetic construct
  misc_feature 1..22: note = chemically synthesized
  source 1..22: mol_type = other DNA
tagagagtgggcaggagctcaa

SEQ ID NO: 37757 - DNA, 22 bp, synthetic construct
  misc_feature 1..22: note = chemically synthesized
  source 1..22: mol_type = other DNA
gagagtgggcaggagctcaagg

SEQ ID NO: 37758 - DNA, 22 bp, synthetic construct
  misc_feature 1..22: note = chemically synthesized
  source 1..22: mol_type = other DNA
aaggacatagcttattggtgga

SEQ ID NO: 37759 - DNA, 22 bp, synthetic construct
  misc_feature 1..22: note = chemically synthesized
  source 1..22: mol_type = other DNA
attggtggataaaactggaagg

SEQ ID NO: 37760 - DNA, 22 bp, synthetic construct
  misc_feature 1..22: note = chemically synthesized
  source 1..22: mol_type = other DNA
ttggtggataaaactggaaggg

SEQ ID NO: 37761 - DNA, 22 bp, synthetic construct
  misc_feature 1..22: note = chemically synthesized
  source 1..22: mol_type = other DNA
gtggataaaactggaagggact

SEQ ID NO: 37762 - DNA, 22 bp, synthetic construct
  misc_feature 1..22: note = chemically synthesized
  source 1..22: mol_type = other DNA
gaagggacttgttagcactggg

SEQ ID NO: 37763 - DNA, 22 bp, synthetic construct
  misc_feature 1..22: note = chemically synthesized
  source 1..22: mol_type = other DNA
gttagcactgggaatcagtcca

SEQ ID NO: 37764 - DNA, 22 bp, synthetic construct
  misc_feature 1..22: note = chemically synthesized
  source 1..22: mol_type = other DNA
ttagcactgggaatcagtccag

SEQ ID NO: 37765 - DNA, 22 bp, synthetic construct
  misc_feature 1..22: note = chemically synthesized
  source 1..22: mol_type = other DNA
gcactgggaatcagtccagaag

SEQ ID NO: 37766 - DNA, 22 bp, synthetic construct
  misc_feature 1..22: note = chemically synthesized
  source 1..22: mol_type = other DNA
ggaatcagtccagaagatctct

SEQ ID NO: 37767 - DNA, 22 bp, synthetic construct
  misc_feature 1..22: note = chemically synthesized
  source 1..22: mol_type = other DNA
tgcacaagttcctgcacctgag

SEQ ID NO: 37768 - DNA, 22 bp, synthetic construct
  misc_feature 1..22: note = chemically synthesized
  source 1..22: mol_type = other DNA
cacaagttcctgcacctgagca

SEQ ID NO: 37769 - DNA, 22 bp, synthetic construct
  misc_feature 1..22: note = chemically synthesized
  source 1..22: mol_type = other DNA
ctgcacctgagcagagcccctt

SEQ ID NO: 37770 - DNA, 22 bp, synthetic construct
  misc_feature 1..22: note = chemically synthesized
  source 1..22: mol_type = other DNA
cacctgagcagagccccttctg

SEQ ID NO: 37771 - DNA, 22 bp, synthetic construct
  misc_feature 1..22: note = chemically synthesized
  source 1..22: mol_type = other DNA
agcagagccccttctgctttcc

SEQ ID NO: 37772 - DNA, 22 bp, synthetic construct
  misc_feature 1..22: note = chemically synthesized
  source 1..22: mol_type = other DNA
ctgctttcctcttttctcatca

SEQ ID NO: 37773 - DNA, 22 bp, synthetic construct
  misc_feature 1..22: note = chemically synthesized
  source 1..22: mol_type = other DNA
tgctttcctcttttctcatcat

SEQ ID NO: 37774 - DNA, 22 bp, synthetic construct
  misc_feature 1..22: note = chemically synthesized
  source 1..22: mol_type = other DNA
ctttcctcttttctcatcattt

SEQ ID NO: 37775 - DNA, 22 bp, synthetic construct
  misc_feature 1..22: note = chemically synthesized
  source 1..22: mol_type = other DNA
tcctcttttctcatcatttaac

SEQ ID NO: 37776 - DNA, 22 bp, synthetic construct
  misc_feature 1..22: note = chemically synthesized
  source 1..22: mol_type = other DNA
cctcttttctcatcatttaaca

SEQ ID NO: 37777 - DNA, 22 bp, synthetic construct
  misc_feature 1..22: note = chemically synthesized
  source 1..22: mol_type = other DNA
ctcttttctcatcatttaacaa

SEQ ID NO: 37778 - DNA, 22 bp, synthetic construct
  misc_feature 1..22: note = chemically synthesized
  source 1..22: mol_type = other DNA
ttttctcatcatttaacaaaca

SEQ ID NO: 37779 - DNA, 22 bp, synthetic construct
  misc_feature 1..22: note = chemically synthesized
  source 1..22: mol_type = other DNA
ttctcatcatttaacaaacatt

SEQ ID NO: 37780 - DNA, 22 bp, synthetic construct
  misc_feature 1..22: note = chemically synthesized
  source 1..22: mol_type = other DNA
tctcatcatttaacaaacatta

SEQ ID NO: 37781 - DNA, 22 bp, synthetic construct
  misc_feature 1..22: note = chemically synthesized
  source 1..22: mol_type = other DNA
ctcatcatttaacaaacattaa

SEQ ID NO: 37782 - DNA, 22 bp, synthetic construct
  misc_feature 1..22: note = chemically synthesized
  source 1..22: mol_type = other DNA
tcatcatttaacaaacattaat

SEQ ID NO: 37783 - DNA, 22 bp, synthetic construct
  misc_feature 1..22: note = chemically synthesized
  source 1..22: mol_type = other DNA
atcatttaacaaacattaatgg

SEQ ID NO: 37784 - DNA, 22 bp, synthetic construct
  misc_feature 1..22: note = chemically synthesized
  source 1..22: mol_type = other DNA
aacaaacattaatggagcactg

SEQ ID NO: 37785 - DNA, 22 bp, synthetic construct
  misc_feature 1..22: note = chemically synthesized
  source 1..22: mol_type = other DNA
acaaacattaatggagcactgt

SEQ ID NO: 37786 - DNA, 22 bp, synthetic construct
  misc_feature 1..22: note = chemically synthesized
  source 1..22: mol_type = other DNA
atggagcactgttacctgggca

SEQ ID NO: 37787 - DNA, 22 bp, synthetic construct
  misc_feature 1..22: note = chemically synthesized
  source 1..22: mol_type = other DNA
ttacctgggcactgggaacacg

SEQ ID NO: 37788 - DNA, 22 bp, synthetic construct
  misc_feature 1..22: note = chemically synthesized
  source 1..22: mol_type = other DNA
cctgggcactgggaacacgcca

SEQ ID NO: 37789 - DNA, 22 bp, synthetic construct
  misc_feature 1..22: note = chemically synthesized
  source 1..22: mol_type = other DNA
ggcactgggaacacgccagtga

SEQ ID NO: 37790 - DNA, 22 bp, synthetic construct
  misc_feature 1..22: note = chemically synthesized
  source 1..22: mol_type = other DNA
ggaacacgccagtgaaactaag

SEQ ID NO: 37791 - DNA, 22 bp, synthetic construct
  misc_feature 1..22: note = chemically synthesized
  source 1..22: mol_type = other DNA
agttattttatggatcttataa

SEQ ID NO: 37792 - DNA, 22 bp, synthetic construct
  misc_feature 1..22: note = chemically synthesized
  source 1..22: mol_type = other DNA
ttttatggatcttataatcagt

SEQ ID NO: 37793 - DNA, 22 bp, synthetic construct
  misc_feature 1..22: note = chemically synthesized
  source 1..22: mol_type = other DNA
tatggatcttataatcagtagc

SEQ ID NO: 37794 - DNA, 22 bp, synthetic construct
  misc_feature 1..22: note = chemically synthesized
  source 1..22: mol_type = other DNA
atggatcttataatcagtagca

SEQ ID NO: 37795 - DNA, 22 bp, synthetic construct
  misc_feature 1..22: note = chemically synthesized
  source 1..22: mol_type = other DNA
tggatcttataatcagtagcat

SEQ ID NO: 37796 - DNA, 22 bp, synthetic construct
  misc_feature 1..22: note = chemically synthesized
  source 1..22: mol_type = other DNA
ataatcagtagcatgtgtgttg

SEQ ID NO: 37797 - DNA, 22 bp, synthetic construct
  misc_feature 1..22: note = chemically synthesized
  source 1..22: mol_type = other DNA
taatcagtagcatgtgtgttga

SEQ ID NO: 37798 - DNA, 22 bp, synthetic construct
  misc_feature 1..22: note = chemically synthesized
  source 1..22: mol_type = other DNA
atctcagggtctagaacagtgc

SEQ ID NO: 37799 - DNA, 22 bp, synthetic construct
  misc_feature 1..22: note = chemically synthesized
  source 1..22: mol_type = other DNA
agggtctagaacagtgcctggt

SEQ ID NO: 37800 - DNA, 22 bp, synthetic construct
  misc_feature 1..22: note = chemically synthesized
  source 1..22: mol_type = other DNA
gaacagtgcctggtacatagaa

SEQ ID NO: 37801 - DNA, 22 bp, synthetic construct
  misc_feature 1..22: note = chemically synthesized
  source 1..22: mol_type = other DNA
gtacatagaaaatgctcaatgg

SEQ ID NO: 37802 - DNA, 22 bp, synthetic construct
  misc_feature 1..22: note = chemically synthesized
  source 1..22: mol_type = other DNA
aatggatttttttttgaaaaaa

SEQ ID NO: 37803 - DNA, 22 bp, synthetic construct
  misc_feature 1..22: note = chemically synthesized
  source 1..22: mol_type = other DNA
ttttttgaaaaaatttgttttt

SEQ ID NO: 37804 - DNA, 22 bp, synthetic construct
  misc_feature 1..22: note = chemically synthesized
  source 1..22: mol_type = other DNA
tttttgaaaaaatttgtttttc

SEQ ID NO: 37805 - DNA, 22 bp, synthetic construct
  misc_feature 1..22: note = chemically synthesized
  source 1..22: mol_type = other DNA
ttttgaaaaaatttgtttttca

SEQ ID NO: 37806 - DNA, 22 bp, synthetic construct
  misc_feature 1..22: note = chemically synthesized
  source 1..22: mol_type = other DNA
tttgaaaaaatttgtttttcaa

SEQ ID NO: 37807 - DNA, 22 bp, synthetic construct
  misc_feature 1..22: note = chemically synthesized
  source 1..22: mol_type = other DNA
ttgaaaaaatttgtttttcaac

SEQ ID NO: 37808 - DNA, 22 bp, synthetic construct
  misc_feature 1..22: note = chemically synthesized
  source 1..22: mol_type = other DNA
tgaaaaaatttgtttttcaacc

SEQ ID NO: 37809 - DNA, 22 bp, synthetic construct
  misc_feature 1..22: note = chemically synthesized
  source 1..22: mol_type = other DNA
gaaaaaatttgtttttcaaccc

SEQ ID NO: 37810 - DNA, 22 bp, synthetic construct
  misc_feature 1..22: note = chemically synthesized
  source 1..22: mol_type = other DNA
aaaaaatttgtttttcaacccc

SEQ ID NO: 37811 - DNA, 22 bp, synthetic construct
  misc_feature 1..22: note = chemically synthesized
  source 1..22: mol_type = other DNA
gtttttcaacccctaagctgcc

SEQ ID NO: 37812 - DNA, 22 bp, synthetic construct
  misc_feature 1..22: note = chemically synthesized
  source 1..22: mol_type = other DNA
tttttcaacccctaagctgcct

SEQ ID NO: 37813 - DNA, 22 bp, synthetic construct
  misc_feature 1..22: note = chemically synthesized
  source 1..22: mol_type = other DNA
ttcaacccctaagctgccttta

SEQ ID NO: 37814 - DNA, 22 bp, synthetic construct
  misc_feature 1..22: note = chemically synthesized
  source 1..22: mol_type = other DNA
tcaacccctaagctgcctttaa

SEQ ID NO: 37815 - DNA, 22 bp, synthetic construct
  misc_feature 1..22: note = chemically synthesized
  source 1..22: mol_type = other DNA
caacccctaagctgcctttaat

SEQ ID NO: 37816 - DNA, 22 bp, synthetic construct
  misc_feature 1..22: note = chemically synthesized
  source 1..22: mol_type = other DNA
aacccctaagctgcctttaata

SEQ ID NO: 37817 - DNA, 22 bp, synthetic construct
  misc_feature 1..22: note = chemically synthesized
  source 1..22: mol_type = other DNA
agctgcctttaatacttatttt

SEQ ID NO: 37818 - DNA, 22 bp, synthetic construct
  misc_feature 1..22: note = chemically synthesized
  source 1..22: mol_type = other DNA
cctttaatacttattttctatc

SEQ ID NO: 37819 - DNA, 22 bp, synthetic construct
  misc_feature 1..22: note = chemically synthesized
  source 1..22: mol_type = other DNA
taatacttattttctatcattt

SEQ ID NO: 37820 - DNA, 22 bp, synthetic construct
  misc_feature 1..22: note = chemically synthesized
  source 1..22: mol_type = other DNA
aatacttattttctatcatttc

SEQ ID NO: 37821 - DNA, 22 bp, synthetic construct
  misc_feature 1..22: note = chemically synthesized
  source 1..22: mol_type = other DNA
atacttattttctatcatttcc

SEQ ID NO: 37822 - DNA, 22 bp, synthetic construct
  misc_feature 1..22: note = chemically synthesized
  source 1..22: mol_type = other DNA
attttctatcatttccctttca

SEQ ID NO: 37823 - DNA, 22 bp, synthetic construct
  misc_feature 1..22: note = chemically synthesized
  source 1..22: mol_type = other DNA
ttttctatcatttccctttcaa

SEQ ID NO: 37824 - DNA, 22 bp, synthetic construct
  misc_feature 1..22: note = chemically synthesized
  source 1..22: mol_type = other DNA
tctatcatttccctttcaaggg

SEQ ID NO: 37825 - DNA, 22 bp, synthetic construct
  misc_feature 1..22: note = chemically synthesized
  source 1..22: mol_type = other DNA
ctatcatttccctttcaagggg

SEQ ID NO: 37826 - DNA, 22 bp, synthetic construct
  misc_feature 1..22: note = chemically synthesized
  source 1..22: mol_type = other DNA
tatcatttccctttcaagggga

SEQ ID NO: 37827 - DNA, 22 bp, synthetic construct
  misc_feature 1..22: note = chemically synthesized
  source 1..22: mol_type = other DNA
tcatttccctttcaaggggaag

SEQ ID NO: 37828 - DNA, 22 bp, synthetic construct
  misc_feature 1..22: note = chemically synthesized
  source 1..22: mol_type = other DNA
ccctttcaaggggaagggaagt

SEQ ID NO: 37829 - DNA, 22 bp, synthetic construct
  misc_feature 1..22: note = chemically synthesized
  source 1..22: mol_type = other DNA
cctttcaaggggaagggaagtg

SEQ ID NO: 37830 - DNA, 22 bp, synthetic construct
  misc_feature 1..22: note = chemically synthesized
  source 1..22: mol_type = other DNA
tcaaggggaagggaagtgtttt

SEQ ID NO: 37831 - DNA, 22 bp, synthetic construct
  misc_feature 1..22: note = chemically synthesized
  source 1..22: mol_type = other DNA
caaggggaagggaagtgttttt

SEQ ID NO: 37832 - DNA, 22 bp, synthetic construct
  misc_feature 1..22: note = chemically synthesized
  source 1..22: mol_type = other DNA
aaggggaagggaagtgtttttg

SEQ ID NO: 37833 - DNA, 22 bp, synthetic construct
  misc_feature 1..22: note = chemically synthesized
  source 1..22: mol_type = other DNA
ttgtggagaggtccccacaatg

SEQ ID NO: 37834 - DNA, 22 bp, synthetic construct
  misc_feature 1..22: note = chemically synthesized
  source 1..22: mol_type = other DNA
tgtggagaggtccccacaatgt

SEQ ID NO: 37835 - DNA, 22 bp, synthetic construct
  misc_feature 1..22: note = chemically synthesized
  source 1..22: mol_type = other DNA
gtggagaggtccccacaatgtg

SEQ ID NO: 37836 - DNA, 22 bp, synthetic construct
  misc_feature 1..22: note = chemically synthesized
  source 1..22: mol_type = other DNA
tggagaggtccccacaatgtga

SEQ ID NO: 37837 - DNA, 22 bp, synthetic construct
  misc_feature 1..22: note = chemically synthesized
  source 1..22: mol_type = other DNA
acacaagttgatatcatcttca

SEQ ID NO: 37838 - DNA, 22 bp, synthetic construct
  misc_feature 1..22: note = chemically synthesized
  source 1..22: mol_type = other DNA
cacaagttgatatcatcttcaa

SEQ ID NO: 37839 - DNA, 22 bp, synthetic construct
  misc_feature 1..22: note = chemically synthesized
  source 1..22: mol_type = other DNA
atatcatcttcaatgtatcttt

SEQ ID NO: 37840 - DNA, 22 bp, synthetic construct
  misc_feature 1..22: note = chemically synthesized
  source 1..22: mol_type = other DNA
caatgtatctttattttaatat

SEQ ID NO: 37841 - DNA, 22 bp, synthetic construct
  misc_feature 1..22: note = chemically synthesized
  source 1..22: mol_type = other DNA
aatgtatctttattttaatatt

SEQ ID NO: 37842 - DNA, 22 bp, synthetic construct
  misc_feature 1..22: note = chemically synthesized
  source 1..22: mol_type = other DNA
tattttaatattatcatagcct

SEQ ID NO: 37843 - DNA, 22 bp, synthetic construct
  misc_feature 1..22: note = chemically synthesized
  source 1..22: mol_type = other DNA
attttaatattatcatagcctg

SEQ ID NO: 37844 - DNA, 22 bp, synthetic construct
  misc_feature 1..22: note = chemically synthesized
  source 1..22: mol_type = other DNA
ttttaatattatcatagcctgg

SEQ ID NO: 37845 - DNA, 22 bp, synthetic construct
  misc_feature 1..22: note = chemically synthesized
  source 1..22: mol_type = other DNA
taatattatcatagcctggtat

SEQ ID NO: 37846 - DNA, 22 bp, synthetic construct
  misc_feature 1..22: note = chemically synthesized
  source 1..22: mol_type = other DNA
aatattatcatagcctggtatg

SEQ ID NO: 37847 - DNA, 22 bp, synthetic construct
  misc_feature 1..22: note = chemically synthesized
  source 1..22: mol_type = other DNA
atattatcatagcctggtatgg

SEQ ID NO: 37848 - DNA, 22 bp, synthetic construct
  misc_feature 1..22: note = chemically synthesized
  source 1..22: mol_type = other DNA
tcatagcctggtatggtttgag

SEQ ID NO: 37849 - DNA, 22 bp, synthetic construct
  misc_feature 1..22: note = chemically synthesized
  source 1..22: mol_type = other DNA
gtatggtttgagattttcatat

SEQ ID NO: 37850 - DNA, 22 bp, synthetic construct
  misc_feature 1..22: note = chemically synthesized
  source 1..22: mol_type = other DNA
gagattttcatatagatggata

SEQ ID NO: 37851 - DNA, 22 bp, synthetic construct
  misc_feature 1..22: note = chemically synthesized
  source 1..22: mol_type = other DNA
agattttcatatagatggataa

SEQ ID NO: 37852 - DNA, 22 bp, synthetic construct
  misc_feature 1..22: note = chemically synthesized
  source 1..22: mol_type = other DNA
tcatatagatggataattattg

SEQ ID NO: 37853 - DNA, 22 bp, synthetic construct
  misc_feature 1..22: note = chemically synthesized
  source 1..22: mol_type = other DNA
catatagatggataattattgt

SEQ ID NO: 37854 - DNA, 22 bp, synthetic construct
  misc_feature 1..22: note = chemically synthesized
  source 1..22: mol_type = other DNA
atatagatggataattattgtg

SEQ ID NO: 37855 - DNA, 22 bp, synthetic construct
  misc_feature 1..22: note = chemically synthesized
  source 1..22: mol_type = other DNA
ttgtgtttattcctaataatac

SEQ ID NO: 37856 - DNA, 22 bp, synthetic construct
  misc_feature 1..22: note = chemically synthesized
  source 1..22: mol_type = other DNA
tgtttattcctaataatacatt

SEQ ID NO: 37857 - DNA, 22 bp, synthetic construct
  misc_feature 1..22: note = chemically synthesized
  source 1..22: mol_type = other DNA
attcctaataatacattgccac

SEQ ID NO: 37858 - DNA, 22 bp, synthetic construct
  misc_feature 1..22: note = chemically synthesized
  source 1..22: mol_type = other DNA
ttcctaataatacattgccact

SEQ ID NO: 37859 - DNA, 22 bp, synthetic construct
  misc_feature 1..22: note = chemically synthesized
  source 1..22: mol_type = other DNA
ctaataatacattgccactata

SEQ ID NO: 37860 - DNA, 22 bp, synthetic construct
  misc_feature 1..22: note = chemically synthesized
  source 1..22: mol_type = other DNA
ataatacattgccactatagtt

SEQ ID NO: 37861 - DNA, 22 bp, synthetic construct
  misc_feature 1..22: note = chemically synthesized
  source 1..22: mol_type = other DNA
ccactatagtttctttaaattt

SEQ ID NO: 37862 - DNA, 22 bp, synthetic construct
  misc_feature 1..22: note = chemically synthesized
  source 1..22: mol_type = other DNA
tagtttctttaaatttaatgat

SEQ ID NO: 37863 - DNA, 22 bp, synthetic construct
  misc_feature 1..22: note = chemically synthesized
  source 1..22: mol_type = other DNA
ctttaaatttaatgatttgaat

SEQ ID NO: 37864 - DNA, 22 bp, synthetic construct
  misc_feature 1..22: note = chemically synthesized
  source 1..22: mol_type = other DNA
tttaaatttaatgatttgaatt

SEQ ID NO: 37865 - DNA, 22 bp, synthetic construct
  misc_feature 1..22: note = chemically synthesized
  source 1..22: mol_type = other DNA
taaatttaatgatttgaatttt

SEQ ID NO: 37866 - DNA, 22 bp, synthetic construct
  misc_feature 1..22: note = chemically synthesized
  source 1..22: mol_type = other DNA
aaatttaatgatttgaattttt

SEQ ID NO: 37867 - DNA, 22 bp, synthetic construct
  misc_feature 1..22: note = chemically synthesized
  source 1..22: mol_type = other DNA
aatttaatgatttgaattttta

SEQ ID NO: 37868 - DNA, 22 bp, synthetic construct
  misc_feature 1..22: note = chemically synthesized
  source 1..22: mol_type = other DNA
aatgatttgaatttttacttcc

SEQ ID NO: 37869 - DNA, 22 bp, synthetic construct
  misc_feature 1..22: note = chemically synthesized
  source 1..22: mol_type = other DNA
atgatttgaatttttacttccc

SEQ ID NO: 37870 - DNA, 22 bp, synthetic construct
  misc_feature 1..22: note = chemically synthesized
  source 1..22: mol_type = other DNA
gaatttttacttccctgcattt

SEQ ID NO: 37871 - DNA, 22 bp, synthetic construct
  misc_feature 1..22: note = chemically synthesized
  source 1..22: mol_type = other DNA
aatttttacttccctgcatttc

SEQ ID NO: 37872 - DNA, 22 bp, synthetic construct
  misc_feature 1..22: note = chemically synthesized
  source 1..22: mol_type = other DNA
ttacttccctgcatttcatagt

SEQ ID NO: 37873 - DNA, 22 bp, synthetic construct
  misc_feature 1..22: note = chemically synthesized
  source 1..22: mol_type = other DNA
tacttccctgcatttcatagta

SEQ ID NO: 37874 - DNA, 22 bp, synthetic construct
  misc_feature 1..22: note = chemically synthesized
  source 1..22: mol_type = other DNA
acttccctgcatttcatagtag

SEQ ID NO: 37875 - DNA, 22 bp, synthetic construct
  misc_feature 1..22: note = chemically synthesized
  source 1..22: mol_type = other DNA
cttccctgcatttcatagtagt

SEQ ID NO: 37876 - DNA, 22 bp, synthetic construct
  misc_feature 1..22: note = chemically synthesized
  source 1..22: mol_type = other DNA
ccctgcatttcatagtagtgat

SEQ ID NO: 37877 - DNA, 22 bp, synthetic construct
  misc_feature 1..22: note = chemically synthesized
  source 1..22: mol_type = other DNA
cctgcatttcatagtagtgata

SEQ ID NO: 37878 - DNA, 22 bp, synthetic construct
  misc_feature 1..22: note = chemically synthesized
  source 1..22: mol_type = other DNA
catttcatagtagtgatatgag

SEQ ID NO: 37879 - DNA, 22 bp, synthetic construct
  misc_feature 1..22: note = chemically synthesized
  source 1..22: mol_type = other DNA
catagtagtgatatgaggtatc

SEQ ID NO: 37880 - DNA, 22 bp, synthetic construct
  misc_feature 1..22: note = chemically synthesized
  source 1..22: mol_type = other DNA
atagtagtgatatgaggtatct

SEQ ID NO: 37881 - DNA, 22 bp, synthetic construct
  misc_feature 1..22: note = chemically synthesized
  source 1..22: mol_type = other DNA
agagatcatgaatcccactcct

SEQ ID NO: 37882 - DNA, 22 bp, synthetic construct
  misc_feature 1..22: note = chemically synthesized
  source 1..22: mol_type = other DNA
gagatcatgaatcccactcctc

SEQ ID NO: 37883 - DNA, 22 bp, synthetic construct
  misc_feature 1..22: note = chemically synthesized
  source 1..22: mol_type = other DNA
ctccagttcatagagcaaattg

SEQ ID NO: 37884 - DNA, 22 bp, synthetic construct
  misc_feature 1..22: note = chemically synthesized
  source 1..22: mol_type = other DNA
cagttcatagagcaaattgatt

SEQ ID NO: 37885 - DNA, 22 bp, synthetic construct
  misc_feature 1..22: note = chemically synthesized
  source 1..22: mol_type = other DNA
atagagcaaattgattcgtaga

SEQ ID NO: 37886 - DNA, 22 bp, synthetic construct
  misc_feature 1..22: note = chemically synthesized
  source 1..22: mol_type = other DNA
attcgtagaggtatttaatgat

SEQ ID NO: 37887 - DNA, 22 bp, synthetic construct
  misc_feature 1..22: note = chemically synthesized
  source 1..22: mol_type = other DNA
gtagaggtatttaatgatcaag

SEQ ID NO: 37888 - DNA, 22 bp, synthetic construct
  misc_feature 1..22: note = chemically synthesized
  source 1..22: mol_type = other DNA
aatgatcaagcaaatggcagag

SEQ ID NO: 37889 - DNA, 22 bp, synthetic construct
  misc_feature 1..22: note = chemically synthesized
  source 1..22: mol_type = other DNA
atgatcaagcaaatggcagagt

SEQ ID NO: 37890 - DNA, 22 bp, synthetic construct
  misc_feature 1..22: note = chemically synthesized
  source 1..22: mol_type = other DNA
ggaccaggatttaggtcttttc

SEQ ID NO: 37891 - DNA, 22 bp, synthetic construct
  misc_feature 1..22: note = chemically synthesized
  source 1..22: mol_type = other DNA
aggtcttttccaaggccaattc

SEQ ID NO: 37892 - DNA, 22 bp, synthetic construct
  misc_feature 1..22: note = chemically synthesized
  source 1..22: mol_type = other DNA
ggtcttttccaaggccaattca

SEQ ID NO: 37893 - DNA, 22 bp, synthetic construct
  misc_feature 1..22: note = chemically synthesized
  source 1..22: mol_type = other DNA
ttccaaggccaattcacttttt

SEQ ID NO: 37894 - DNA, 22 bp, synthetic construct
  misc_feature 1..22: note = chemically synthesized
  source 1..22: mol_type = other DNA
tccaaggccaattcactttttt

SEQ ID NO: 37895 - DNA, 22 bp, synthetic construct
  misc_feature 1..22: note = chemically synthesized
  source 1..22: mol_type = other DNA
ccaaggccaattcactttttta

SEQ ID NO: 37896 - DNA, 22 bp, synthetic construct
  misc_feature 1..22: note = chemically synthesized
  source 1..22: mol_type = other DNA
caaggccaattcacttttttac

SEQ ID NO: 37897 - DNA, 22 bp, synthetic construct
  misc_feature 1..22: note = chemically synthesized
  source 1..22: mol_type = other DNA
acttttttactattatgtaaga

SEQ ID NO: 37898 - DNA, 22 bp, synthetic construct
  misc_feature 1..22: note = chemically synthesized
  source 1..22: mol_type = other DNA
ttttactattatgtaagaatta

SEQ ID NO: 37899 - DNA, 22 bp, synthetic construct
  misc_feature 1..22: note = chemically synthesized
  source 1..22: mol_type = other DNA
tttactattatgtaagaattaa

SEQ ID NO: 37900 - DNA, 22 bp, synthetic construct
  misc_feature 1..22: note = chemically synthesized
  source 1..22: mol_type = other DNA
ttactattatgtaagaattaaa

SEQ ID NO: 37901 - DNA, 22 bp, synthetic construct
  misc_feature 1..22: note = chemically synthesized
  source 1..22: mol_type = other DNA
tactattatgtaagaattaaat

SEQ ID NO: 37902 - DNA, 22 bp, synthetic construct
  misc_feature 1..22: note = chemically synthesized
  source 1..22: mol_type = other DNA
actattatgtaagaattaaata

SEQ ID NO: 37903 - DNA, 22 bp, synthetic construct
  misc_feature 1..22: note = chemically synthesized
  source 1..22: mol_type = other DNA
ctattatgtaagaattaaatat

SEQ ID NO: 37904 - DNA, 22 bp, synthetic construct
  misc_feature 1..22: note = chemically synthesized
  source 1..22: mol_type = other DNA
ttatgtaagaattaaatattaa

SEQ ID NO: 37905 - DNA, 22 bp, synthetic construct
  misc_feature 1..22: note = chemically synthesized
  source 1..22: mol_type = other DNA
tgtaagaattaaatattaaaac

SEQ ID NO: 37906 - DNA, 22 bp, synthetic construct
  misc_feature 1..22: note = chemically synthesized
  source 1..22: mol_type = other DNA
aatattaaaacctcagttttca

SEQ ID NO: 37907 - DNA, 22 bp, synthetic construct
  misc_feature 1..22: note = chemically synthesized
  source 1..22: mol_type = other DNA
aaacctcagttttcaaaggaaa

SEQ ID NO: 37908 - DNA, 22 bp, synthetic construct
  misc_feature 1..22: note = chemically synthesized
  source 1..22: mol_type = other DNA
agttttcaaaggaaatgtccta

SEQ ID NO: 37909 - DNA, 22 bp, synthetic construct
  misc_feature 1..22: note = chemically synthesized
  source 1..22: mol_type = other DNA
tcaaaggaaatgtcctatagat

SEQ ID NO: 37910 - DNA, 22 bp, synthetic construct
  misc_feature 1..22: note = chemically synthesized
  source 1..22: mol_type = other DNA
caaaggaaatgtcctatagatg

SEQ ID NO: 37911 - DNA, 22 bp, synthetic construct
  misc_feature 1..22: note = chemically synthesized
  source 1..22: mol_type = other DNA
aaaggaaatgtcctatagatga

SEQ ID NO: 37912 - DNA, 22 bp, synthetic construct
  misc_feature 1..22: note = chemically synthesized
  source 1..22: mol_type = other DNA
tagatgaaagaacacagtactt

SEQ ID NO: 37913 - DNA, 22 bp, synthetic construct
  misc_feature 1..22: note = chemically synthesized
  source 1..22: mol_type = other DNA
gcagtcaaaggtcttggatttc

SEQ ID NO: 37914 - DNA, 22 bp, synthetic construct
  misc_feature 1..22: note = chemically synthesized
  source 1..22: mol_type = other DNA
cagtcaaaggtcttggatttct

SEQ ID NO: 37915 - DNA, 22 bp, synthetic construct
  misc_feature 1..22: note = chemically synthesized
  source 1..22: mol_type = other DNA
ggatttctgaaactttctgaaa

SEQ ID NO: 37916 - DNA, 22 bp, synthetic construct
  misc_feature 1..22: note = chemically synthesized
  source 1..22: mol_type = other DNA
gatttctgaaactttctgaaaa

SEQ ID NO: 37917 - DNA, 22 bp, synthetic construct
  misc_feature 1..22: note = chemically synthesized
  source 1..22: mol_type = other DNA
ctgaaactttctgaaaaagaac

SEQ ID NO: 37918 - DNA, 22 bp, synthetic construct
  misc_feature 1..22: note = chemically synthesized
  source 1..22: mol_type = other DNA
tgaaactttctgaaaaagaacc

SEQ ID NO: 37919 - DNA, 22 bp, synthetic construct
  misc_feature 1..22: note = chemically synthesized
  source 1..22: mol_type = other DNA
aaactttctgaaaaagaacccc

SEQ ID NO: 37920 - DNA, 22 bp, synthetic construct
  misc_feature 1..22: note = chemically synthesized
  source 1..22: mol_type = other DNA
tctgaaaaagaaccccttaaac

SEQ ID NO: 37921 - DNA, 22 bp, synthetic construct
  misc_feature 1..22: note = chemically synthesized
  source 1..22: mol_type = other DNA
ctgaaaaagaaccccttaaact

SEQ ID NO: 37922 - DNA, 22 bp, synthetic construct
  misc_feature 1..22: note = chemically synthesized
  source 1..22: mol_type = other DNA
tgaaaaagaaccccttaaactg

SEQ ID NO: 37923 - DNA, 22 bp, synthetic construct
  misc_feature 1..22: note = chemically synthesized
  source 1..22: mol_type = other DNA
aaaaagaaccccttaaactgaa

SEQ ID NO: 37924 - DNA, 22 bp, synthetic construct
  misc_feature 1..22: note = chemically synthesized
  source 1..22: mol_type = other DNA
aaactgaataacagtttcttca

SEQ ID NO: 37925 - DNA, 22 bp, synthetic construct
  misc_feature 1..22: note = chemically synthesized
  source 1..22: mol_type = other DNA
aactgaataacagtttcttcat

SEQ ID NO: 37926 - DNA, 22 bp, synthetic construct
  misc_feature 1..22: note = chemically synthesized
  source 1..22: mol_type = other DNA
aataacagtttcttcatgaata

SEQ ID NO: 37927 - DNA, 22 bp, synthetic construct
  misc_feature 1..22: note = chemically synthesized
  source 1..22: mol_type = other DNA
cttcatgaataaaatgaatgtt

SEQ ID NO: 37928 - DNA, 22 bp, synthetic construct
  misc_feature 1..22: note = chemically synthesized
  source 1..22: mol_type = other DNA
ttcatgaataaaatgaatgtta

SEQ ID NO: 37929 - DNA, 22 bp, synthetic construct
  misc_feature 1..22: note = chemically synthesized
  source 1..22: mol_type = other DNA
catgaataaaatgaatgttata

SEQ ID NO: 37930 - DNA, 22 bp, synthetic construct
  misc_feature 1..22: note = chemically synthesized
  source 1..22: mol_type = other DNA
atgaataaaatgaatgttatac

SEQ ID NO: 37931 - DNA, 22 bp, synthetic construct
  misc_feature 1..22: note = chemically synthesized
  source 1..22: mol_type = other DNA
tactctccagttatcttaccat

SEQ ID NO: 37932 - DNA, 22 bp, synthetic construct
  misc_feature 1..22: note = chemically synthesized
  source 1..22: mol_type = other DNA
tccagttatcttaccatgtttt

SEQ ID NO: 37933 - DNA, 22 bp, synthetic construct
  misc_feature 1..22: note = chemically synthesized
  source 1..22: mol_type = other DNA
cagttatcttaccatgttttct

SEQ ID NO: 37934 - DNA, 22 bp, synthetic construct
  misc_feature 1..22: note = chemically synthesized
  source 1..22: mol_type = other DNA
tcttaccatgttttctggcaaa

SEQ ID NO: 37935 - DNA, 22 bp, synthetic construct
  misc_feature 1..22: note = chemically synthesized
  source 1..22: mol_type = other DNA
accatgttttctggcaaacaag

SEQ ID NO: 37936 - DNA, 22 bp, synthetic construct
  misc_feature 1..22: note = chemically synthesized
  source 1..22: mol_type = other DNA
ccatgttttctggcaaacaagg

SEQ ID NO: 37937 - DNA, 22 bp, synthetic construct
  misc_feature 1..22: note = chemically synthesized
  source 1..22: mol_type = other DNA
tctggcaaacaaggaaatgtat

SEQ ID NO: 37938 - DNA, 22 bp, synthetic construct
  misc_feature 1..22: note = chemically synthesized
  source 1..22: mol_type = other DNA
ctggcaaacaaggaaatgtatt

SEQ ID NO: 37939 - DNA, 22 bp, synthetic construct
  misc_feature 1..22: note = chemically synthesized
  source 1..22: mol_type = other DNA
tggcaaacaaggaaatgtattc

SEQ ID NO: 37940 - DNA, 22 bp, synthetic construct
  misc_feature 1..22: note = chemically synthesized
  source 1..22: mol_type = other DNA
gcaaacaaggaaatgtattcac

SEQ ID NO: 37941 - DNA, 22 bp, synthetic construct
  misc_feature 1..22: note = chemically synthesized
  source 1..22: mol_type = other DNA
acatccaagaaaacaaaaggtt

SEQ ID NO: 37942 - DNA, 22 bp, synthetic construct
  misc_feature 1..22: note = chemically synthesized
  source 1..22: mol_type = other DNA
cttaggagaagaatcccttgct

SEQ ID NO: 37943 - DNA, 22 bp, synthetic construct
  misc_feature 1..22: note = chemically synthesized
  source 1..22: mol_type = other DNA
ttaggagaagaatcccttgctg

SEQ ID NO: 37944 - DNA, 22 bp, synthetic construct
  misc_feature 1..22: note = chemically synthesized
  source 1..22: mol_type = other DNA
aggagaagaatcccttgctgcc

SEQ ID NO: 37945 - DNA, 22 bp, synthetic construct
  misc_feature 1..22: note = chemically synthesized
  source 1..22: mol_type = other DNA
ggagaagaatcccttgctgcca

SEQ ID NO: 37946 - DNA, 22 bp, synthetic construct
  misc_feature 1..22: note = chemically synthesized
  source 1..22: mol_type = other DNA
gctgccagaattttgcccatga

SEQ ID NO: 37947 - DNA, 22 bp, synthetic construct
  misc_feature 1..22: note = chemically synthesized
  source 1..22: mol_type = other DNA
ctgccagaattttgcccatgaa

SEQ ID NO: 37948 - DNA, 22 bp, synthetic construct
  misc_feature 1..22: note = chemically synthesized
  source 1..22: mol_type = other DNA
ccagaattttgcccatgaacaa

SEQ ID NO: 37949 - DNA, 22 bp, synthetic construct
  misc_feature 1..22: note = chemically synthesized
  source 1..22: mol_type = other DNA
tgcccatgaacaatggaaacgt

SEQ ID NO: 37950 - DNA, 22 bp, synthetic construct
  misc_feature 1..22: note = chemically synthesized
  source 1..22: mol_type = other DNA
gcccatgaacaatggaaacgtg

SEQ ID NO: 37951 - DNA, 22 bp, synthetic construct
  misc_feature 1..22: note = chemically synthesized
  source 1..22: mol_type = other DNA
cccatgaacaatggaaacgtga

SEQ ID NO: 37952 - DNA, 22 bp, synthetic construct
  misc_feature 1..22: note = chemically synthesized
  source 1..22: mol_type = other DNA
gttttgggtactaattctcaga

SEQ ID NO: 37953 - DNA, 22 bp, synthetic construct
  misc_feature 1..22: note = chemically synthesized
  source 1..22: mol_type = other DNA
tgggtactaattctcagacttc

SEQ ID NO: 37954 - DNA, 22 bp, synthetic construct
  misc_feature 1..22: note = chemically synthesized
  source 1..22: mol_type = other DNA
gggtactaattctcagacttca

SEQ ID NO: 37955 - DNA, 22 bp, synthetic construct
  misc_feature 1..22: note = chemically synthesized
  source 1..22: mol_type = other DNA
ggtactaattctcagacttcaa

SEQ ID NO: 37956 - DNA, 22 bp, synthetic construct
  misc_feature 1..22: note = chemically synthesized
  source 1..22: mol_type = other DNA
attctcagacttcaaaataacc

SEQ ID NO: 37957 - DNA, 22 bp, synthetic construct
  misc_feature 1..22: note = chemically synthesized
  source 1..22: mol_type = other DNA
tcagacttcaaaataacctttt

SEQ ID NO: 37958 - DNA, 22 bp, synthetic construct
  misc_feature 1..22: note = chemically synthesized
  source 1..22: mol_type = other DNA
agacttcaaaataaccttttta

SEQ ID NO: 37959 - DNA, 22 bp, synthetic construct
  misc_feature 1..22: note = chemically synthesized
  source 1..22: mol_type = other DNA
caaaataacctttttaatttat

SEQ ID NO: 37960 - DNA, 22 bp, synthetic construct
  misc_feature 1..22: note = chemically synthesized
  source 1..22: mol_type = other DNA
aaaataacctttttaatttatt

SEQ ID NO: 37961 - DNA, 22 bp, synthetic construct
  misc_feature 1..22: note = chemically synthesized
  source 1..22: mol_type = other DNA
tttaatttattaatattaacct

SEQ ID NO: 37962 - DNA, 22 bp, synthetic construct
  misc_feature 1..22: note = chemically synthesized
  source 1..22: mol_type = other DNA
ttaatttattaatattaacctt

SEQ ID NO: 37963 - DNA, 22 bp, synthetic construct
  misc_feature 1..22: note = chemically synthesized
  source 1..22: mol_type = other DNA
taatttattaatattaaccttg

SEQ ID NO: 37964 - DNA, 22 bp, synthetic construct
  misc_feature 1..22: note = chemically synthesized
  source 1..22: mol_type = other DNA
aatttattaatattaaccttga

SEQ ID NO: 37965 - DNA, 22 bp, synthetic construct
  misc_feature 1..22: note = chemically synthesized
  source 1..22: mol_type = other DNA
atttattaatattaaccttgaa

SEQ ID NO: 37966 - DNA, 22 bp, synthetic construct
  misc_feature 1..22: note = chemically synthesized
  source 1..22: mol_type = other DNA
attaatattaaccttgaaattt

SEQ ID NO: 37967 - DNA, 22 bp, synthetic construct
  misc_feature 1..22: note = chemically synthesized
  source 1..22: mol_type = other DNA
ttaatattaaccttgaaattta

SEQ ID NO: 37968 - DNA, 22 bp, synthetic construct
  misc_feature 1..22: note = chemically synthesized
  source 1..22: mol_type = other DNA
atattaaccttgaaatttattg

SEQ ID NO: 37969 - DNA, 22 bp, synthetic construct
  misc_feature 1..22: note = chemically synthesized
  source 1..22: mol_type = other DNA
accttgaaatttattgctttta

SEQ ID NO: 37970 - DNA, 22 bp, synthetic construct
  misc_feature 1..22: note = chemically synthesized
  source 1..22: mol_type = other DNA
gaaatttattgcttttattcat

SEQ ID NO: 37971 - DNA, 22 bp, synthetic construct
  misc_feature 1..22: note = chemically synthesized
  source 1..22: mol_type = other DNA
aaatttattgcttttattcatt

SEQ ID NO: 37972 - DNA, 22 bp, synthetic construct
  misc_feature 1..22: note = chemically synthesized
  source 1..22: mol_type = other DNA
attgcttttattcattaatcca

SEQ ID NO: 37973 - DNA, 22 bp, synthetic construct
  misc_feature 1..22: note = chemically synthesized
  source 1..22: mol_type = other DNA
ttgcttttattcattaatccat

SEQ ID NO: 37974 - DNA, 22 bp, synthetic construct
  misc_feature 1..22: note = chemically synthesized
  source 1..22: mol_type = other DNA
cttttattcattaatccatttt

SEQ ID NO: 37975 - DNA, 22 bp, synthetic construct
  misc_feature 1..22: note = chemically synthesized
  source 1..22: mol_type = other DNA
ttattcattaatccattttatt

SEQ ID NO: 37976 - DNA, 22 bp, synthetic construct
  misc_feature 1..22: note = chemically synthesized
  source 1..22: mol_type = other DNA
tattcattaatccattttatta

SEQ ID NO: 37977 - DNA, 22 bp, synthetic construct
  misc_feature 1..22: note = chemically synthesized
  source 1..22: mol_type = other DNA
attcattaatccattttattat

SEQ ID NO: 37978 - DNA, 22 bp, synthetic construct
  misc_feature 1..22: note = chemically synthesized
  source 1..22: mol_type = other DNA
ttcattaatccattttattatt

SEQ ID NO: 37979 - DNA, 22 bp, synthetic construct
  misc_feature 1..22: note = chemically synthesized
  source 1..22: mol_type = other DNA
attaatccattttattattcag

SEQ ID NO: 37980 - DNA, 22 bp, synthetic construct
  misc_feature 1..22: note = chemically synthesized
  source 1..22: mol_type = other DNA
atccattttattattcagtaag

SEQ ID NO: 37981 - DNA, 22 bp, synthetic construct
  misc_feature 1..22: note = chemically synthesized
  source 1..22: mol_type = other DNA
tattattcagtaaggattcatc

SEQ ID NO: 37982 - DNA, 22 bp, synthetic construct
  misc_feature 1..22: note = chemically synthesized
  source 1..22: mol_type = other DNA
attattcagtaaggattcatca

SEQ ID NO: 37983 - DNA, 22 bp, synthetic construct
  misc_feature 1..22: note = chemically synthesized
  source 1..22: mol_type = other DNA
ttattcagtaaggattcatcaa

SEQ ID NO: 37984 - DNA, 22 bp, synthetic construct
  misc_feature 1..22: note = chemically synthesized
  source 1..22: mol_type = other DNA
ttcagtaaggattcatcaagtg

SEQ ID NO: 37985 - DNA, 22 bp, synthetic construct
  misc_feature 1..22: note = chemically synthesized
  source 1..22: mol_type = other DNA
agtaaggattcatcaagtgtct

SEQ ID NO: 37986 - DNA, 22 bp, synthetic construct
  misc_feature 1..22: note = chemically synthesized
  source 1..22: mol_type = other DNA
atcaagtgtctattaggtatca

SEQ ID NO: 37987 - DNA, 22 bp, synthetic construct
  misc_feature 1..22: note = chemically synthesized
  source 1..22: mol_type = other DNA
ttaggtatcaggcactgagagg

SEQ ID NO: 37988 - DNA, 22 bp, synthetic construct
  misc_feature 1..22: note = chemically synthesized
  source 1..22: mol_type = other DNA
ggtatcaggcactgagaggcga

SEQ ID NO: 37989 - DNA, 22 bp, synthetic construct
  misc_feature 1..22: note = chemically synthesized
  source 1..22: mol_type = other DNA
agaggcgagggagatagagtta

SEQ ID NO: 37990 - DNA, 22 bp, synthetic construct
  misc_feature 1..22: note = chemically synthesized
  source 1..22: mol_type = other DNA
agaatacagaactgattcttaa

SEQ ID NO: 37991 - DNA, 22 bp, synthetic construct
  misc_feature 1..22: note = chemically synthesized
  source 1..22: mol_type = other DNA
attcttaatcttcaagaattga

SEQ ID NO: 37992 - DNA, 22 bp, synthetic construct
  misc_feature 1..22: note = chemically synthesized
  source 1..22: mol_type = other DNA
ttaatcttcaagaattgacaaa

SEQ ID NO: 37993 - DNA, 22 bp, synthetic construct
  misc_feature 1..22: note = chemically synthesized
  source 1..22: mol_type = other DNA
aatcttcaagaattgacaaatt

SEQ ID NO: 37994 - DNA, 22 bp, synthetic construct
  misc_feature 1..22: note = chemically synthesized
  source 1..22: mol_type = other DNA
atcttcaagaattgacaaattt

SEQ ID NO: 37995 - DNA, 22 bp, synthetic construct
  misc_feature 1..22: note = chemically synthesized
  source 1..22: mol_type = other DNA
caagaattgacaaatttgtaga

SEQ ID NO: 37996 - DNA, 22 bp, synthetic construct
  misc_feature 1..22: note = chemically synthesized
  source 1..22: mol_type = other DNA
aagaattgacaaatttgtagaa

SEQ ID NO: 37997 - DNA, 22 bp, synthetic construct
  misc_feature 1..22: note = chemically synthesized
  source 1..22: mol_type = other DNA
acaaatttgtagaaggtagaca

SEQ ID NO: 37998 - DNA, 22 bp, synthetic construct
  misc_feature 1..22: note = chemically synthesized
  source 1..22: mol_type = other DNA
gtagaaggtagacattgaacat

SEQ ID NO: 37999 - DNA, 22 bp, synthetic construct
  misc_feature 1..22: note = chemically synthesized
  source 1..22: mol_type = other DNA
tagaaggtagacattgaacata

SEQ ID NO: 38000 - DNA, 22 bp, synthetic construct
  misc_feature 1..22: note = chemically synthesized
  source 1..22: mol_type = other DNA
aacatacaatacagtcaaatgt

SEQ ID NO: 38001 - DNA, 22 bp, synthetic construct
  misc_feature 1..22: note = chemically synthesized
  source 1..22: mol_type = other DNA
agggaaccaggtgtcctaagac

SEQ ID NO: 38002 - DNA, 22 bp, synthetic construct
  misc_feature 1..22: note = chemically synthesized
  source 1..22: mol_type = other DNA
agactatacagtgtaccgtgga

SEQ ID NO: 38003 - DNA, 22 bp, synthetic construct
  misc_feature 1..22: note = chemically synthesized
  source 1..22: mol_type = other DNA
tacagtgtaccgtggaatgggg

SEQ ID NO: 38004 - DNA, 22 bp, synthetic construct
  misc_feature 1..22: note = chemically synthesized
  source 1..22: mol_type = other DNA
ctaacctagttacctagaggtt

SEQ ID NO: 38005 - DNA, 22 bp, synthetic construct
  misc_feature 1..22: note = chemically synthesized
  source 1..22: mol_type = other DNA
taacctagttacctagaggttt

SEQ ID NO: 38006 - DNA, 22 bp, synthetic construct
  misc_feature 1..22: note = chemically synthesized
  source 1..22: mol_type = other DNA
acctagttacctagaggtttgg

SEQ ID NO: 38007 - DNA, 22 bp, synthetic construct
  misc_feature 1..22: note = chemically synthesized
  source 1..22: mol_type = other DNA
gttacctagaggtttgggaaaa

SEQ ID NO: 38008 - DNA, 22 bp, synthetic construct
  misc_feature 1..22: note = chemically synthesized
  source 1..22: mol_type = other DNA
cctagaggtttgggaaaaacct

SEQ ID NO: 38009 - DNA, 22 bp, synthetic construct
  misc_feature 1..22: note = chemically synthesized
  source 1..22: mol_type = other DNA
gaggtttgggaaaaacctctct

SEQ ID NO: 38010 - DNA, 22 bp, synthetic construct
  misc_feature 1..22: note = chemically synthesized
  source 1..22: mol_type = other DNA
gggaaaaacctctctaatgatg

SEQ ID NO: 38011 - DNA, 22 bp, synthetic construct
  misc_feature 1..22: note = chemically synthesized
  source 1..22: mol_type = other DNA
ggaaaaacctctctaatgatga

SEQ ID NO: 38012 - DNA, 22 bp, synthetic construct
  misc_feature 1..22: note = chemically synthesized
  source 1..22: mol_type = other DNA
tctaatgatgagatgtttgagc

SEQ ID NO: 38013 - DNA, 22 bp, synthetic construct
  misc_feature 1..22: note = chemically synthesized
  source 1..22: mol_type = other DNA
taatgatgagatgtttgagctg

SEQ ID NO: 38014 - DNA, 22 bp, synthetic construct
  misc_feature 1..22: note = chemically synthesized
  source 1..22: mol_type = other DNA
atgatgagatgtttgagctgac

SEQ ID NO: 38015 - DNA, 22 bp, synthetic construct
  misc_feature 1..22: note = chemically synthesized
  source 1..22: mol_type = other DNA
gagctgacacttgaaggataaa

SEQ ID NO: 38016 - DNA, 22 bp, synthetic construct
  misc_feature 1..22: note = chemically synthesized
  source 1..22: mol_type = other DNA
agctgacacttgaaggataaat

SEQ ID NO: 38017 - DNA, 22 bp, synthetic construct
  misc_feature 1..22: note = chemically synthesized
  source 1..22: mol_type = other DNA
acacttgaaggataaatagcta

SEQ ID NO: 38018 - DNA, 22 bp, synthetic construct
  misc_feature 1..22: note = chemically synthesized
  source 1..22: mol_type = other DNA
gaaggataaatagctaaagggg

SEQ ID NO: 38019 - DNA, 22 bp, synthetic construct
  misc_feature 1..22: note = chemically synthesized
  source 1..22: mol_type = other DNA
aaggataaatagctaaagggga

SEQ ID NO: 38020 - DNA, 22 bp, synthetic construct
  misc_feature 1..22: note = chemically synthesized
  source 1..22: mol_type = other DNA
aaggggagaaagcgttctatgt

SEQ ID NO: 38021 - DNA, 22 bp, synthetic construct
  misc_feature 1..22: note = chemically synthesized
  source 1..22: mol_type = other DNA
tatgtgagagaactatatatgc

SEQ ID NO: 38022 - DNA, 22 bp, synthetic construct
  misc_feature 1..22: note = chemically synthesized
  source 1..22: mol_type = other DNA
tgtgagagaactatatatgcca

SEQ ID NO: 38023 - DNA, 22 bp, synthetic construct
  misc_feature 1..22: note = chemically synthesized
  source 1..22: mol_type = other DNA
tatatgccaagatgcagaagtg

SEQ ID NO: 38024 - DNA, 22 bp, synthetic construct
  misc_feature 1..22: note = chemically synthesized
  source 1..22: mol_type = other DNA
tctgttcgaagatctgagcggg

SEQ ID NO: 38025 - DNA, 22 bp, synthetic construct
  misc_feature 1..22: note = chemically synthesized
  source 1..22: mol_type = other DNA
tgttcgaagatctgagcggggc

SEQ ID NO: 38026 - DNA, 22 bp, synthetic construct
  misc_feature 1..22: note = chemically synthesized
  source 1..22: mol_type = other DNA
ttcgaagatctgagcggggctc

SEQ ID NO: 38027 - DNA, 22 bp, synthetic construct
  misc_feature 1..22: note = chemically synthesized
  source 1..22: mol_type = other DNA
gaagatctgagcggggctcaga

SEQ ID NO: 38028 - DNA, 22 bp, synthetic construct
  misc_feature 1..22: note = chemically synthesized
  source 1..22: mol_type = other DNA
agcggggctcagagagggaaaa

SEQ ID NO: 38029 - DNA, 22 bp, synthetic construct
  misc_feature 1..22: note = chemically synthesized
  source 1..22: mol_type = other DNA
agagagggaaaaggagaggagt

SEQ ID NO: 38030 - DNA, 22 bp, synthetic construct
  misc_feature 1..22: note = chemically synthesized
  source 1..22: mol_type = other DNA
cagggactagattgtgaagctc

SEQ ID NO: 38031 - DNA, 22 bp, synthetic construct
  misc_feature 1..22: note = chemically synthesized
  source 1..22: mol_type = other DNA
gattgtgaagctcagggggagt

SEQ ID NO: 38032 - DNA, 22 bp, synthetic construct
  misc_feature 1..22: note = chemically synthesized
  source 1..22: mol_type = other DNA
tgaagctcagggggagttaata

SEQ ID NO: 38033 - DNA, 22 bp, synthetic construct
  misc_feature 1..22: note = chemically synthesized
  source 1..22: mol_type = other DNA
agggggagttaatagccttaag

SEQ ID NO: 38034 - DNA, 22 bp, synthetic construct
  misc_feature 1..22: note = chemically synthesized
  source 1..22: mol_type = other DNA
atagccttaaggagttttgtct

SEQ ID NO: 38035 - DNA, 22 bp, synthetic construct
  misc_feature 1..22: note = chemically synthesized
  source 1..22: mol_type = other DNA
aaggagttttgtctccagggta

SEQ ID NO: 38036 - DNA, 22 bp, synthetic construct
  misc_feature 1..22: note = chemically synthesized
  source 1..22: mol_type = other DNA
aggagttttgtctccagggtat

SEQ ID NO: 38037 - DNA, 22 bp, synthetic construct
  misc_feature 1..22: note = chemically synthesized
  source 1..22: mol_type = other DNA
tgtctccagggtatgaacaatg

SEQ ID NO: 38038 - DNA, 22 bp, synthetic construct
  misc_feature 1..22: note = chemically synthesized
  source 1..22: mol_type = other DNA
gtctccagggtatgaacaatga

SEQ ID NO: 38039 - DNA, 22 bp, synthetic construct
  misc_feature 1..22: note = chemically synthesized
  source 1..22: mol_type = other DNA
tctccagggtatgaacaatgaa

SEQ ID NO: 38040 - DNA, 22 bp, synthetic construct
  misc_feature 1..22: note = chemically synthesized
  source 1..22: mol_type = other DNA
cagggtatgaacaatgaatgag

SEQ ID NO: 38041 - DNA, 22 bp, synthetic construct
  misc_feature 1..22: note = chemically synthesized
  source 1..22: mol_type = other DNA
aaattctatccacagtagtggg

SEQ ID NO: 38042 - DNA, 22 bp, synthetic construct
  misc_feature 1..22: note = chemically synthesized
  source 1..22: mol_type = other DNA
tatccacagtagtgggaagtac

SEQ ID NO: 38043 - DNA, 22 bp, synthetic construct
  misc_feature 1..22: note = chemically synthesized
  source 1..22: mol_type = other DNA
tccacagtagtgggaagtacta

SEQ ID NO: 38044 - DNA, 22 bp, synthetic construct
  misc_feature 1..22: note = chemically synthesized
  source 1..22: mol_type = other DNA
agtagtcaggtatgttttggaa

SEQ ID NO: 38045 - DNA, 22 bp, synthetic construct
  misc_feature 1..22: note = chemically synthesized
  source 1..22: mol_type = other DNA
tggaagaagcactgttaccagt

SEQ ID NO: 38046 - DNA, 22 bp, synthetic construct
  misc_feature 1..22: note = chemically synthesized
  source 1..22: mol_type = other DNA
ggaagaagcactgttaccagtt

SEQ ID NO: 38047 - DNA, 22 bp, synthetic construct
  misc_feature 1..22: note = chemically synthesized
  source 1..22: mol_type = other DNA
gaagaagcactgttaccagttg

SEQ ID NO: 38048 - DNA, 22 bp, synthetic construct
  misc_feature 1..22: note = chemically synthesized
  source 1..22: mol_type = other DNA
ttaccagttgagggagaggaga

SEQ ID NO: 38049 - DNA, 22 bp, synthetic construct
  misc_feature 1..22: note = chemically synthesized
  source 1..22: mol_type = other DNA
ccagttgagggagaggagagga

SEQ ID NO: 38050 - DNA, 22 bp, synthetic construct
  misc_feature 1..22: note = chemically synthesized
  source 1..22: mol_type = other DNA
agggagaggagaggagggaaat

SEQ ID NO: 38051 - DNA, 22 bp, synthetic construct
  misc_feature 1..22: note = chemically synthesized
  source 1..22: mol_type = other DNA
gactgtggtgtgacccaggatg

SEQ ID NO: 38052 - DNA, 22 bp, synthetic construct
  misc_feature 1..22: note = chemically synthesized
  source 1..22: mol_type = other DNA
tggtgtgacccaggatggaaag

SEQ ID NO: 38053 - DNA, 22 bp, synthetic construct
  misc_feature 1..22: note = chemically synthesized
  source 1..22: mol_type = other DNA
tgcccaaatgtgggggaaaaat

SEQ ID NO: 38054 - DNA, 22 bp, synthetic construct
  misc_feature 1..22: note = chemically synthesized
  source 1..22: mol_type = other DNA
gcccaaatgtgggggaaaaatg

SEQ ID NO: 38055 - DNA, 22 bp, synthetic construct
  misc_feature 1..22: note = chemically synthesized
  source 1..22: mol_type = other DNA
cccaaatgtgggggaaaaatgt

SEQ ID NO: 38056 - DNA, 22 bp, synthetic construct
  misc_feature 1..22: note = chemically synthesized
  source 1..22: mol_type = other DNA
actctctcctttgcccaggtct

SEQ ID NO: 38057 - DNA, 22 bp, synthetic construct
  misc_feature 1..22: note = chemically synthesized
  source 1..22: mol_type = other DNA
ctctctcctttgcccaggtctt

SEQ ID NO: 38058 - DNA, 22 bp, synthetic construct
  misc_feature 1..22: note = chemically synthesized
  source 1..22: mol_type = other DNA
tctcctttgcccaggtcttact

SEQ ID NO: 38059 - DNA, 22 bp, synthetic construct
  misc_feature 1..22: note = chemically synthesized
  source 1..22: mol_type = other DNA
tcctttgcccaggtcttactac

SEQ ID NO: 38060 - DNA, 22 bp, synthetic construct
  misc_feature 1..22: note = chemically synthesized
  source 1..22: mol_type = other DNA
ctttgcccaggtcttactacaa

SEQ ID NO: 38061 - DNA, 22 bp, synthetic construct
  misc_feature 1..22: note = chemically synthesized
  source 1..22: mol_type = other DNA
tgcccaggtcttactacaatca

SEQ ID NO: 38062 - DNA, 22 bp, synthetic construct
  misc_feature 1..22: note = chemically synthesized
  source 1..22: mol_type = other DNA
gcccaggtcttactacaatcat

SEQ ID NO: 38063 - DNA, 22 bp, synthetic construct
  misc_feature 1..22: note = chemically synthesized
  source 1..22: mol_type = other DNA
cccaggtcttactacaatcatt

SEQ ID NO: 38064 - DNA, 22 bp, synthetic construct
  misc_feature 1..22: note = chemically synthesized
  source 1..22: mol_type = other DNA
actacaatcatttcttctgcac

SEQ ID NO: 38065 - DNA, 22 bp, synthetic construct
  misc_feature 1..22: note = chemically synthesized
  source 1..22: mol_type = other DNA
ctacaatcatttcttctgcaca

SEQ ID NO: 38066 - DNA, 22 bp, synthetic construct
  misc_feature 1..22: note = chemically synthesized
  source 1..22: mol_type = other DNA
caatcatttcttctgcacacac

SEQ ID NO: 38067 - DNA, 22 bp, synthetic construct
  misc_feature 1..22: note = chemically synthesized
  source 1..22: mol_type = other DNA
cttctgcacacacttgctcaga

SEQ ID NO: 38068 - DNA, 22 bp, synthetic construct
  misc_feature 1..22: note = chemically synthesized
  source 1..22: mol_type = other DNA
ttctgcacacacttgctcagaa

SEQ ID NO: 38069 - DNA, 22 bp, synthetic construct
  misc_feature 1..22: note = chemically synthesized
  source 1..22: mol_type = other DNA
ctgcacacacttgctcagaaca

SEQ ID NO: 38070 - DNA, 22 bp, synthetic construct
  misc_feature 1..22: note = chemically synthesized
  source 1..22: mol_type = other DNA
tgcacacacttgctcagaacat

SEQ ID NO: 38071 - DNA, 22 bp, synthetic construct
  misc_feature 1..22: note = chemically synthesized
  source 1..22: mol_type = other DNA
cacacacttgctcagaacatta

SEQ ID NO: 38072 - DNA, 22 bp, synthetic construct
  misc_feature 1..22: note = chemically synthesized
  source 1..22: mol_type = other DNA
gctcagaacattacaaactctg

SEQ ID NO: 38073 - DNA, 22 bp, synthetic construct
  misc_feature 1..22: note = chemically synthesized
  source 1..22: mol_type = other DNA
ctcagaacattacaaactctgg

SEQ ID NO: 38074 - DNA, 22 bp, synthetic construct
  misc_feature 1..22: note = chemically synthesized
  source 1..22: mol_type = other DNA
agaacattacaaactctggaga

SEQ ID NO: 38075 - DNA, 22 bp, synthetic construct
  misc_feature 1..22: note = chemically synthesized
  source 1..22: mol_type = other DNA
caaactctggagaaattaacat

SEQ ID NO: 38076 - DNA, 22 bp, synthetic construct
  misc_feature 1..22: note = chemically synthesized
  source 1..22: mol_type = other DNA
tggagaaattaacatgttaagg

SEQ ID NO: 38077 - DNA, 22 bp, synthetic construct
  misc_feature 1..22: note = chemically synthesized
  source 1..22: mol_type = other DNA
gagaaattaacatgttaaggat

SEQ ID NO: 38078 - DNA, 22 bp, synthetic construct
  misc_feature 1..22: note = chemically synthesized
  source 1..22: mol_type = other DNA
acatgttaaggatatttaggat

SEQ ID NO: 38079 - DNA, 22 bp, synthetic construct
  misc_feature 1..22: note = chemically synthesized
  source 1..22: mol_type = other DNA
aggatatttaggatcattaaaa

SEQ ID NO: 38080 - DNA, 22 bp, synthetic construct
  misc_feature 1..22: note = chemically synthesized
  source 1..22: mol_type = other DNA
aggatcattaaaaaagtttaat

SEQ ID NO: 38081 - DNA, 22 bp, synthetic construct
  misc_feature 1..22: note = chemically synthesized
  source 1..22: mol_type = other DNA
ggatcattaaaaaagtttaata

SEQ ID NO: 38082 - DNA, 22 bp, synthetic construct
  misc_feature 1..22: note = chemically synthesized
  source 1..22: mol_type = other DNA
aaaaagtttaataaatgttgtc

SEQ ID NO: 38083 - DNA, 22 bp, synthetic construct
  misc_feature 1..22: note = chemically synthesized
  source 1..22: mol_type = other DNA
aataaatgttgtcacacataat

SEQ ID NO: 38084 - DNA, 22 bp, synthetic construct
  misc_feature 1..22: note = chemically synthesized
  source 1..22: mol_type = other DNA
ataaatgttgtcacacataatg

SEQ ID NO: 38085 - DNA, 22 bp, synthetic construct
  misc_feature 1..22: note = chemically synthesized
  source 1..22: mol_type = other DNA
tcacacataatgaaagttaatt

SEQ ID NO: 38086 - DNA, 22 bp, synthetic construct
  misc_feature 1..22: note = chemically synthesized
  source 1..22: mol_type = other DNA
atttaagaattgtaaagacttg

SEQ ID NO: 38087 - DNA, 22 bp, synthetic construct
  misc_feature 1..22: note = chemically synthesized
  source 1..22: mol_type = other DNA
aagaattgtaaagacttgagcg

SEQ ID NO: 38088 - DNA, 22 bp, synthetic construct
  misc_feature 1..22: note = chemically synthesized
  source 1..22: mol_type = other DNA
agaattgtaaagacttgagcga

SEQ ID NO: 38089 - DNA, 22 bp, synthetic construct
  misc_feature 1..22: note = chemically synthesized
  source 1..22: mol_type = other DNA
taaagacttgagcgatgtagtc

SEQ ID NO: 38090 - DNA, 22 bp, synthetic construct
  misc_feature 1..22: note = chemically synthesized
  source 1..22: mol_type = other DNA
gagcgatgtagtccctaaataa

SEQ ID NO: 38091 - DNA, 22 bp, synthetic construct
  misc_feature 1..22: note = chemically synthesized
  source 1..22: mol_type = other DNA
agcgatgtagtccctaaataaa

SEQ ID NO: 38092 - DNA, 22 bp, synthetic construct
  misc_feature 1..22: note = chemically synthesized
  source 1..22: mol_type = other DNA
aataaatgcttccctcttaaaa

SEQ ID NO: 38093 - DNA, 22 bp, synthetic construct
  misc_feature 1..22: note = chemically synthesized
  source 1..22: mol_type = other DNA
ccctcttaaaatggactagaaa

SEQ ID NO: 38094 - DNA, 22 bp, synthetic construct
  misc_feature 1..22: note = chemically synthesized
  source 1..22: mol_type = other DNA
cctcttaaaatggactagaaac

SEQ ID NO: 38095 - DNA, 22 bp, synthetic construct
  misc_feature 1..22: note = chemically synthesized
  source 1..22: mol_type = other DNA
ttaaaatggactagaaacaatt

SEQ ID NO: 38096 - DNA, 22 bp, synthetic construct
  misc_feature 1..22: note = chemically synthesized
  source 1..22: mol_type = other DNA
aaaatggactagaaacaatttg

SEQ ID NO: 38097 - DNA, 22 bp, synthetic construct
  misc_feature 1..22: note = chemically synthesized
  source 1..22: mol_type = other DNA
aaatggactagaaacaatttgt

SEQ ID NO: 38098 - DNA, 22 bp, synthetic construct
  misc_feature 1..22: note = chemically synthesized
  source 1..22: mol_type = other DNA
gaaacaatttgtttttgcctaa

SEQ ID NO: 38099 - DNA, 22 bp, synthetic construct
  misc_feature 1..22: note = chemically synthesized
  source 1..22: mol_type = other DNA
gtttttgcctaagccaacgtat

SEQ ID NO: 38100 - DNA, 22 bp, synthetic construct
  misc_feature 1..22: note = chemically synthesized
  source 1..22: mol_type = other DNA
tttttgcctaagccaacgtatt

SEQ ID NO: 38101 - DNA, 22 bp, synthetic construct
  misc_feature 1..22: note = chemically synthesized
  source 1..22: mol_type = other DNA
ttgcctaagccaacgtattgct

SEQ ID NO: 38102 - DNA, 22 bp, synthetic construct
  misc_feature 1..22: note = chemically synthesized
  source 1..22: mol_type = other DNA
tgcctaagccaacgtattgctg

SEQ ID NO: 38103 - DNA, 22 bp, synthetic construct
  misc_feature 1..22: note = chemically synthesized
  source 1..22: mol_type = other DNA
gcctaagccaacgtattgctgg

SEQ ID NO: 38104 - DNA, 22 bp, synthetic construct
  misc_feature 1..22: note = chemically synthesized
  source 1..22: mol_type = other DNA
cctaagccaacgtattgctgga

SEQ ID NO: 38105 - DNA, 22 bp, synthetic construct
  misc_feature 1..22: note = chemically synthesized
  source 1..22: mol_type = other DNA
agccaacgtattgctggacata

SEQ ID NO: 38106 - DNA, 22 bp, synthetic construct
  misc_feature 1..22: note = chemically synthesized
  source 1..22: mol_type = other DNA
ctggacataatttacctgcttc

SEQ ID NO: 38107 - DNA, 22 bp, synthetic construct
  misc_feature 1..22: note = chemically synthesized
  source 1..22: mol_type = other DNA
gacataatttacctgcttcctc

SEQ ID NO: 38108 - DNA, 22 bp, synthetic construct
  misc_feature 1..22: note = chemically synthesized
  source 1..22: mol_type = other DNA
acctgcttcctcctcagtcttg

SEQ ID NO: 38109 - DNA, 22 bp, synthetic construct
  misc_feature 1..22: note = chemically synthesized
  source 1..22: mol_type = other DNA
cctgcttcctcctcagtcttga

SEQ ID NO: 38110 - DNA, 22 bp, synthetic construct
  misc_feature 1..22: note = chemically synthesized
  source 1..22: mol_type = other DNA
cttcctcctcagtcttgacact

SEQ ID NO: 38111 - DNA, 22 bp, synthetic construct
  misc_feature 1..22: note = chemically synthesized
  source 1..22: mol_type = other DNA
cctcctcagtcttgacactaca

SEQ ID NO: 38112 - DNA, 22 bp, synthetic construct
  misc_feature 1..22: note = chemically synthesized
  source 1..22: mol_type = other DNA
ctcctcagtcttgacactacac

SEQ ID NO: 38113 - DNA, 22 bp, synthetic construct
  misc_feature 1..22: note = chemically synthesized
  source 1..22: mol_type = other DNA
ctcagtcttgacactacacctc

SEQ ID NO: 38114 - DNA, 22 bp, synthetic construct
  misc_feature 1..22: note = chemically synthesized
  source 1..22: mol_type = other DNA
agtcttgacactacacctctga

SEQ ID NO: 38115 - DNA, 22 bp, synthetic construct
  misc_feature 1..22: note = chemically synthesized
  source 1..22: mol_type = other DNA
gacactacacctctgaattaca

SEQ ID NO: 38116 - DNA, 22 bp, synthetic construct
  misc_feature 1..22: note = chemically synthesized
  source 1..22: mol_type = other DNA
acactacacctctgaattacat

SEQ ID NO: 38117 - DNA, 22 bp, synthetic construct
  misc_feature 1..22: note = chemically synthesized
  source 1..22: mol_type = other DNA
cacctctgaattacatggtaca

SEQ ID NO: 38118 - DNA, 22 bp, synthetic construct
  misc_feature 1..22: note = chemically synthesized
  source 1..22: mol_type = other DNA
tgaattacatggtacaagtggc

SEQ ID NO: 38119 - DNA, 22 bp, synthetic construct
  misc_feature 1..22: note = chemically synthesized
  source 1..22: mol_type = other DNA
aattacatggtacaagtggcac

SEQ ID NO: 38120 - DNA, 22 bp, synthetic construct
  misc_feature 1..22: note = chemically synthesized
  source 1..22: mol_type = other DNA
catggtacaagtggcacaggga

SEQ ID NO: 38121 - DNA, 22 bp, synthetic construct
  misc_feature 1..22: note = chemically synthesized
  source 1..22: mol_type = other DNA
agaaaactagagtcaaagtggt

SEQ ID NO: 38122 - DNA, 22 bp, synthetic construct
  misc_feature 1..22: note = chemically synthesized
  source 1..22: mol_type = other DNA
gagtcaaagtggttatggaaga

SEQ ID NO: 38123 - DNA, 22 bp, synthetic construct
  misc_feature 1..22: note = chemically synthesized
  source 1..22: mol_type = other DNA
tggaagaaattataataatgag

SEQ ID NO: 38124 - DNA, 22 bp, synthetic construct
  misc_feature 1..22: note = chemically synthesized
  source 1..22: mol_type = other DNA
taataatgagtccactcttcta

SEQ ID NO: 38125 - DNA, 22 bp, synthetic construct
  misc_feature 1..22: note = chemically synthesized
  source 1..22: mol_type = other DNA
ttctaggacaggagttctaaag

SEQ ID NO: 38126 - DNA, 22 bp, synthetic construct
  misc_feature 1..22: note = chemically synthesized
  source 1..22: mol_type = other DNA
ctaggacaggagttctaaaggt

SEQ ID NO: 38127 - DNA, 22 bp, synthetic construct
  misc_feature 1..22: note = chemically synthesized
  source 1..22: mol_type = other DNA
taggacaggagttctaaaggtg

SEQ ID NO: 38128 - DNA, 22 bp, synthetic construct
  misc_feature 1..22: note = chemically synthesized
  source 1..22: mol_type = other DNA
ggacaggagttctaaaggtgag

SEQ ID NO: 38129 - DNA, 22 bp, synthetic construct
  misc_feature 1..22: note = chemically synthesized
  source 1..22: mol_type = other DNA
taaaggtgaggactttgatata

SEQ ID NO: 38130 - DNA, 22 bp, synthetic construct
  misc_feature 1..22: note = chemically synthesized
  source 1..22: mol_type = other DNA
aaggtgaggactttgatataag

SEQ ID NO: 38131 - DNA, 22 bp, synthetic construct
  misc_feature 1..22: note = chemically synthesized
  source 1..22: mol_type = other DNA
tgatataagtgaactcaaggag

SEQ ID NO: 38132 - DNA, 22 bp, synthetic construct
  misc_feature 1..22: note = chemically synthesized
  source 1..22: mol_type = other DNA
gatataagtgaactcaaggagt

SEQ ID NO: 38133 - DNA, 22 bp, synthetic construct
  misc_feature 1..22: note = chemically synthesized
  source 1..22: mol_type = other DNA
atataagtgaactcaaggagtt

SEQ ID NO: 38134 - DNA, 22 bp, synthetic construct
  misc_feature 1..22: note = chemically synthesized
  source 1..22: mol_type = other DNA
aaggagtttctaaaccttcaga

SEQ ID NO: 38135 - DNA, 22 bp, synthetic construct
  misc_feature 1..22: note = chemically synthesized
  source 1..22: mol_type = other DNA
ctaaaccttcagaaattatatc

SEQ ID NO: 38136 - DNA, 22 bp, synthetic construct
  misc_feature 1..22: note = chemically synthesized
  source 1..22: mol_type = other DNA
taaaccttcagaaattatatct

SEQ ID NO: 38137 - DNA, 22 bp, synthetic construct
  misc_feature 1..22: note = chemically synthesized
  source 1..22: mol_type = other DNA
aaccttcagaaattatatctaa

SEQ ID NO: 38138 - DNA, 22 bp, synthetic construct
  misc_feature 1..22: note = chemically synthesized
  source 1..22: mol_type = other DNA
cagaaattatatctaaaaatta

SEQ ID NO: 38139 - DNA, 22 bp, synthetic construct
  misc_feature 1..22: note = chemically synthesized
  source 1..22: mol_type = other DNA
agaaattatatctaaaaattag

SEQ ID NO: 38140 - DNA, 22 bp, synthetic construct
  misc_feature 1..22: note = chemically synthesized
  source 1..22: mol_type = other DNA
tatctaaaaattaggtgcacgt

SEQ ID NO: 38141 - DNA, 22 bp, synthetic construct
  misc_feature 1..22: note = chemically synthesized
  source 1..22: mol_type = other DNA
aaaattaggtgcacgtatatag

SEQ ID NO: 38142 - DNA, 22 bp, synthetic construct
  misc_feature 1..22: note = chemically synthesized
  source 1..22: mol_type = other DNA
ggtgcacgtatatagaagtact

SEQ ID NO: 38143 - DNA, 22 bp, synthetic construct
  misc_feature 1..22: note = chemically synthesized
  source 1..22: mol_type = other DNA
ttctctgagaagaggacttcac

SEQ ID NO: 38144 - DNA, 22 bp, synthetic construct
  misc_feature 1..22: note = chemically synthesized
  source 1..22: mol_type = other DNA
tctctgagaagaggacttcaca

SEQ ID NO: 38145 - DNA, 22 bp, synthetic construct
  misc_feature 1..22: note = chemically synthesized
  source 1..22: mol_type = other DNA
ctctgagaagaggacttcacac

SEQ ID NO: 38146 - DNA, 22 bp, synthetic construct
  misc_feature 1..22: note = chemically synthesized
  source 1..22: mol_type = other DNA
tctgagaagaggacttcacact

SEQ ID NO: 38147 - DNA, 22 bp, synthetic construct
  misc_feature 1..22: note = chemically synthesized
  source 1..22: mol_type = other DNA
tgagaagaggacttcacacttc

SEQ ID NO: 38148 - DNA, 22 bp, synthetic construct
  misc_feature 1..22: note = chemically synthesized
  source 1..22: mol_type = other DNA
agaagaggacttcacacttcca

SEQ ID NO: 38149 - DNA, 22 bp, synthetic construct
  misc_feature 1..22: note = chemically synthesized
  source 1..22: mol_type = other DNA
cacacttccatcagcttcctga

SEQ ID NO: 38150 - DNA, 22 bp, synthetic construct
  misc_feature 1..22: note = chemically synthesized
  source 1..22: mol_type = other DNA
acacttccatcagcttcctgaa

SEQ ID NO: 38151 - DNA, 22 bp, synthetic construct
  misc_feature 1..22: note = chemically synthesized
  source 1..22: mol_type = other DNA
ccatcagcttcctgaaggcccc

SEQ ID NO: 38152 - DNA, 22 bp, synthetic construct
  misc_feature 1..22: note = chemically synthesized
  source 1..22: mol_type = other DNA
catcagcttcctgaaggcccct

SEQ ID NO: 38153 - DNA, 22 bp, synthetic construct
  misc_feature 1..22: note = chemically synthesized
  source 1..22: mol_type = other DNA
cctgaaggcccctgtaattgcc

SEQ ID NO: 38154 - DNA, 22 bp, synthetic construct
  misc_feature 1..22: note = chemically synthesized
  source 1..22: mol_type = other DNA
ctgaaggcccctgtaattgccg

SEQ ID NO: 38155 - DNA, 22 bp, synthetic construct
  misc_feature 1..22: note = chemically synthesized
  source 1..22: mol_type = other DNA
aaggcccctgtaattgccgtaa

SEQ ID NO: 38156 - DNA, 22 bp, synthetic construct
  misc_feature 1..22: note = chemically synthesized
  source 1..22: mol_type = other DNA
taattgccgtaaagaacaactg

SEQ ID NO: 38157 - DNA, 22 bp, synthetic construct
  misc_feature 1..22: note = chemically synthesized
  source 1..22: mol_type = other DNA
ccgtaaagaacaactgctctaa

SEQ ID NO: 38158 - DNA, 22 bp, synthetic construct
  misc_feature 1..22: note = chemically synthesized
  source 1..22: mol_type = other DNA
ctctaaagtttaatactaggct

SEQ ID NO: 38159 - DNA, 22 bp, synthetic construct
  misc_feature 1..22: note = chemically synthesized
  source 1..22: mol_type = other DNA
taaagtttaatactaggctact

SEQ ID NO: 38160 - DNA, 22 bp, synthetic construct
  misc_feature 1..22: note = chemically synthesized
  source 1..22: mol_type = other DNA
aagtttaatactaggctactcg

SEQ ID NO: 38161 - DNA, 22 bp, synthetic construct
  misc_feature 1..22: note = chemically synthesized
  source 1..22: mol_type = other DNA
aatactaggctactcggctgtt

SEQ ID NO: 38162 - DNA, 22 bp, synthetic construct
  misc_feature 1..22: note = chemically synthesized
  source 1..22: mol_type = other DNA
atactaggctactcggctgttt

SEQ ID NO: 38163 - DNA, 22 bp, synthetic construct
  misc_feature 1..22: note = chemically synthesized
  source 1..22: mol_type = other DNA
ggctactcggctgttttttgtt

SEQ ID NO: 38164 - DNA, 22 bp, synthetic construct
  misc_feature 1..22: note = chemically synthesized
  source 1..22: mol_type = other DNA
ctcggctgttttttgttaacac

SEQ ID NO: 38165 - DNA, 22 bp, synthetic construct
  misc_feature 1..22: note = chemically synthesized
  source 1..22: mol_type = other DNA
ggctgttttttgttaacacaga

SEQ ID NO: 38166 - DNA, 22 bp, synthetic construct
  misc_feature 1..22: note = chemically synthesized
  source 1..22: mol_type = other DNA
ttttttgttaacacagaagttt

SEQ ID NO: 38167 - DNA, 22 bp, synthetic construct
  misc_feature 1..22: note = chemically synthesized
  source 1..22: mol_type = other DNA
tttgttaacacagaagttttcc

SEQ ID NO: 38168 - DNA, 22 bp, synthetic construct
  misc_feature 1..22: note = chemically synthesized
  source 1..22: mol_type = other DNA
ttgttaacacagaagttttcca

SEQ ID NO: 38169 - DNA, 22 bp, synthetic construct
  misc_feature 1..22: note = chemically synthesized
  source 1..22: mol_type = other DNA
tgttaacacagaagttttccaa

SEQ ID NO: 38170 - DNA, 22 bp, synthetic construct
  misc_feature 1..22: note = chemically synthesized
  source 1..22: mol_type = other DNA
gttaacacagaagttttccaaa

SEQ ID NO: 38171 - DNA, 22 bp, synthetic construct
  misc_feature 1..22: note = chemically synthesized
  source 1..22: mol_type = other DNA
ttaacacagaagttttccaaat

SEQ ID NO: 38172 - DNA, 22 bp, synthetic construct
  misc_feature 1..22: note = chemically synthesized
  source 1..22: mol_type = other DNA
acacagaagttttccaaatggc

SEQ ID NO: 38173 - DNA, 22 bp, synthetic construct
  misc_feature 1..22: note = chemically synthesized
  source 1..22: mol_type = other DNA
tccaaatggcttttctctagag

SEQ ID NO: 38174 - DNA, 22 bp, synthetic construct
  misc_feature 1..22: note = chemically synthesized
  source 1..22: mol_type = other DNA
ccaaatggcttttctctagagc

SEQ ID NO: 38175 - DNA, 22 bp, synthetic construct
  misc_feature 1..22: note = chemically synthesized
  source 1..22: mol_type = other DNA
caaatggcttttctctagagca

SEQ ID NO: 38176 - DNA, 22 bp, synthetic construct
  misc_feature 1..22: note = chemically synthesized
  source 1..22: mol_type = other DNA
ttctctagagcaaaatgaaaag

SEQ ID NO: 38177 - DNA, 22 bp, synthetic construct
  misc_feature 1..22: note = chemically synthesized
  source 1..22: mol_type = other DNA
tctctagagcaaaatgaaaagg

SEQ ID NO: 38178 - DNA, 22 bp, synthetic construct
  misc_feature 1..22: note = chemically synthesized
  source 1..22: mol_type = other DNA
ctctagagcaaaatgaaaagga

SEQ ID NO: 38179 - DNA, 22 bp, synthetic construct
  misc_feature 1..22: note = chemically synthesized
  source 1..22: mol_type = other DNA
tctagagcaaaatgaaaaggat

SEQ ID NO: 38180 - DNA, 22 bp, synthetic construct
  misc_feature 1..22: note = chemically synthesized
  source 1..22: mol_type = other DNA
tagagcaaaatgaaaaggatcc

SEQ ID NO: 38181 - DNA, 22 bp, synthetic construct
  misc_feature 1..22: note = chemically synthesized
  source 1..22: mol_type = other DNA
gagcaaaatgaaaaggatccca

SEQ ID NO: 38182 - DNA, 22 bp, synthetic construct
  misc_feature 1..22: note = chemically synthesized
  source 1..22: mol_type = other DNA
cccgagacctaacgatgtttat

SEQ ID NO: 38183 - DNA, 22 bp, synthetic construct
  misc_feature 1..22: note = chemically synthesized
  source 1..22: mol_type = other DNA
ccgagacctaacgatgtttatc

SEQ ID NO: 38184 - DNA, 22 bp, synthetic construct
  misc_feature 1..22: note = chemically synthesized
  source 1..22: mol_type = other DNA
acgatgtttatctttcgtgata

SEQ ID NO: 38185 - DNA, 22 bp, synthetic construct
  misc_feature 1..22: note = chemically synthesized
  source 1..22: mol_type = other DNA
atctttcgtgatactgtttttg

SEQ ID NO: 38186 - DNA, 22 bp, synthetic construct
  misc_feature 1..22: note = chemically synthesized
  source 1..22: mol_type = other DNA
tctttcgtgatactgtttttgt

SEQ ID NO: 38187 - DNA, 22 bp, synthetic construct
  misc_feature 1..22: note = chemically synthesized
  source 1..22: mol_type = other DNA
tcgtgatactgtttttgttctt

SEQ ID NO: 38188 - DNA, 22 bp, synthetic construct
  misc_feature 1..22: note = chemically synthesized
  source 1..22: mol_type = other DNA
cgtgatactgtttttgttcttc

SEQ ID NO: 38189 - DNA, 22 bp, synthetic construct
  misc_feature 1..22: note = chemically synthesized
  source 1..22: mol_type = other DNA
gtgatactgtttttgttcttcc

SEQ ID NO: 38190 - DNA, 22 bp, synthetic construct
  misc_feature 1..22: note = chemically synthesized
  source 1..22: mol_type = other DNA
tttttgttcttcctctttttct

SEQ ID NO: 38191 - DNA, 22 bp, synthetic construct
  misc_feature 1..22: note = chemically synthesized
  source 1..22: mol_type = other DNA
ttgttcttcctctttttctcct

SEQ ID NO: 38192 - DNA, 22 bp, synthetic construct
  misc_feature 1..22: note = chemically synthesized
  source 1..22: mol_type = other DNA
tgttcttcctctttttctccta

SEQ ID NO: 38193 - DNA, 22 bp, synthetic construct
  misc_feature 1..22: note = chemically synthesized
  source 1..22: mol_type = other DNA
gttcttcctctttttctcctac

SEQ ID NO: 38194 - DNA, 22 bp, synthetic construct
  misc_feature 1..22: note = chemically synthesized
  source 1..22: mol_type = other DNA
ttcttcctctttttctcctacc

SEQ ID NO: 38195 - DNA, 22 bp, synthetic construct
  misc_feature 1..22: note = chemically synthesized
  source 1..22: mol_type = other DNA
ttcctctttttctcctaccccc

SEQ ID NO: 38196 - DNA, 22 bp, synthetic construct
  misc_feature 1..22: note = chemically synthesized
  source 1..22: mol_type = other DNA
cctctttttctcctacccccca

SEQ ID NO: 38197 - DNA, 22 bp, synthetic construct
  misc_feature 1..22: note = chemically synthesized
  source 1..22: mol_type = other DNA
ctctttttctcctaccccccac

SEQ ID NO: 38198 - DNA, 22 bp, synthetic construct
  misc_feature 1..22: note = chemically synthesized
  source 1..22: mol_type = other DNA
tttttctcctaccccccaccac

SEQ ID NO: 38199 - DNA, 22 bp, synthetic construct
  misc_feature 1..22: note = chemically synthesized
  source 1..22: mol_type = other DNA
tttctcctaccccccaccactt

SEQ ID NO: 38200 - DNA, 22 bp, synthetic construct
  misc_feature 1..22: note = chemically synthesized
  source 1..22: mol_type = other DNA
ttctcctaccccccaccacttt

SEQ ID NO: 38201 - DNA, 22 bp, synthetic construct
  misc_feature 1..22: note = chemically synthesized
  source 1..22: mol_type = other DNA
tctcctaccccccaccactttt

SEQ ID NO: 38202 - DNA, 22 bp, synthetic construct
  misc_feature 1..22: note = chemically synthesized
  source 1..22: mol_type = other DNA
ctcctaccccccaccactttta

SEQ ID NO: 38203 - DNA, 22 bp, synthetic construct
  misc_feature 1..22: note = chemically synthesized
  source 1..22: mol_type = other DNA
tcctaccccccaccacttttaa

SEQ ID NO: 38204 - DNA, 22 bp, synthetic construct
  misc_feature 1..22: note = chemically synthesized
  source 1..22: mol_type = other DNA
ctaccccccaccacttttaaag

SEQ ID NO: 38205 - DNA, 22 bp, synthetic construct
  misc_feature 1..22: note = chemically synthesized
  source 1..22: mol_type = other DNA
ccccccaccacttttaaagatc

SEQ ID NO: 38206 - DNA, 22 bp, synthetic construct
  misc_feature 1..22: note = chemically synthesized
  source 1..22: mol_type = other DNA
ttaaagatccatcaaggcccag

SEQ ID NO: 38207 - DNA, 22 bp, synthetic construct
  misc_feature 1..22: note = chemically synthesized
  source 1..22: mol_type = other DNA
taaagatccatcaaggcccagc

SEQ ID NO: 38208 - DNA, 22 bp, synthetic construct
  misc_feature 1..22: note = chemically synthesized
  source 1..22: mol_type = other DNA
aaagatccatcaaggcccagca

SEQ ID NO: 38209 - DNA, 22 bp, synthetic construct
  misc_feature 1..22: note = chemically synthesized
  source 1..22: mol_type = other DNA
aagatccatcaaggcccagcat

SEQ ID NO: 38210 - DNA, 22 bp, synthetic construct
  misc_feature 1..22: note = chemically synthesized
  source 1..22: mol_type = other DNA
acacctgtaatctcaacacttt

SEQ ID NO: 38211 - DNA, 22 bp, synthetic construct
  misc_feature 1..22: note = chemically synthesized
  source 1..22: mol_type = other DNA
taatctcaacacttttcaaggc

SEQ ID NO: 38212 - DNA, 22 bp, synthetic construct
  misc_feature 1..22: note = chemically synthesized
  source 1..22: mol_type = other DNA
aacacttttcaaggctgaggtg

SEQ ID NO: 38213 - DNA, 22 bp, synthetic construct
  misc_feature 1..22: note = chemically synthesized
  source 1..22: mol_type = other DNA
ttcaaggctgaggtgggagaat

SEQ ID NO: 38214 - DNA, 22 bp, synthetic construct
  misc_feature 1..22: note = chemically synthesized
  source 1..22: mol_type = other DNA
tcaaggctgaggtgggagaatt

SEQ ID NO: 38215 - DNA, 22 bp, synthetic construct
  misc_feature 1..22: note = chemically synthesized
  source 1..22: mol_type = other DNA
caaggctgaggtgggagaattg

SEQ ID NO: 38216 - DNA, 22 bp, synthetic construct
  misc_feature 1..22: note = chemically synthesized
  source 1..22: mol_type = other DNA
aaggctgaggtgggagaattgt

SEQ ID NO: 38217 - DNA, 22 bp, synthetic construct
  misc_feature 1..22: note = chemically synthesized
  source 1..22: mol_type = other DNA
aggtgggagaattgtttgagac

SEQ ID NO: 38218 - DNA, 22 bp, synthetic construct
  misc_feature 1..22: note = chemically synthesized
  source 1..22: mol_type = other DNA
tttgagaccaagagttggatac

SEQ ID NO: 38219 - DNA, 22 bp, synthetic construct
  misc_feature 1..22: note = chemically synthesized
  source 1..22: mol_type = other DNA
gagaccaagagttggataccag

SEQ ID NO: 38220 - DNA, 22 bp, synthetic construct
  misc_feature 1..22: note = chemically synthesized
  source 1..22: mol_type = other DNA
agaccaagagttggataccagc

SEQ ID NO: 38221 - DNA, 22 bp, synthetic construct
  misc_feature 1..22: note = chemically synthesized
  source 1..22: mol_type = other DNA
gataccagcctggggaacatag

SEQ ID NO: 38222 - DNA, 22 bp, synthetic construct
  misc_feature 1..22: note = chemically synthesized
  source 1..22: mol_type = other DNA
gggaacatagggagaccctgtt

SEQ ID NO: 38223 - DNA, 22 bp, synthetic construct
  misc_feature 1..22: note = chemically synthesized
  source 1..22: mol_type = other DNA
tttctacagaaatttaaaaaat

SEQ ID NO: 38224 - DNA, 22 bp, synthetic construct
  misc_feature 1..22: note = chemically synthesized
  source 1..22: mol_type = other DNA
ctacagaaatttaaaaaatttc

SEQ ID NO: 38225 - DNA, 22 bp, synthetic construct
  misc_feature 1..22: note = chemically synthesized
  source 1..22: mol_type = other DNA
tacagaaatttaaaaaatttct

SEQ ID NO: 38226 - DNA, 22 bp, synthetic construct
  misc_feature 1..22: note = chemically synthesized
  source 1..22: mol_type = other DNA
cagaaatttaaaaaatttctct

SEQ ID NO: 38227 - DNA, 22 bp, synthetic construct
  misc_feature 1..22: note = chemically synthesized
  source 1..22: mol_type = other DNA
aaaaaatttctctagctggcca

SEQ ID NO: 38228 - DNA, 22 bp, synthetic construct
  misc_feature 1..22: note = chemically synthesized
  source 1..22: mol_type = other DNA
aaaaatttctctagctggccat

SEQ ID NO: 38229 - DNA, 22 bp, synthetic construct
  misc_feature 1..22: note = chemically synthesized
  source 1..22: mol_type = other DNA
ctctagctggccatggaggctc

SEQ ID NO: 38230 - DNA, 22 bp, synthetic construct
  misc_feature 1..22: note = chemically synthesized
  source 1..22: mol_type = other DNA
tctagctggccatggaggctca

SEQ ID NO: 38231 - DNA, 22 bp, synthetic construct
  misc_feature 1..22: note = chemically synthesized
  source 1..22: mol_type = other DNA
tagctggccatggaggctcaca

SEQ ID NO: 38232 - DNA, 22 bp, synthetic construct
  misc_feature 1..22: note = chemically synthesized
  source 1..22: mol_type = other DNA
gctggccatggaggctcacacc

SEQ ID NO: 38233 - DNA, 22 bp, synthetic construct
  misc_feature 1..22: note = chemically synthesized
  source 1..22: mol_type = other DNA
gccatggaggctcacacctgta

SEQ ID NO: 38234 - DNA, 22 bp, synthetic construct
  misc_feature 1..22: note = chemically synthesized
  source 1..22: mol_type = other DNA
acacctgtagtcctagctacct

SEQ ID NO: 38235 - DNA, 22 bp, synthetic construct
  misc_feature 1..22: note = chemically synthesized
  source 1..22: mol_type = other DNA
tagtcctagctacctgagaggc

SEQ ID NO: 38236 - DNA, 22 bp, synthetic construct
  misc_feature 1..22: note = chemically synthesized
  source 1..22: mol_type = other DNA
gctacctgagaggctaaagcag

SEQ ID NO: 38237 - DNA, 22 bp, synthetic construct
  misc_feature 1..22: note = chemically synthesized
  source 1..22: mol_type = other DNA
cctgagaggctaaagcaggagg

SEQ ID NO: 38238 - DNA, 22 bp, synthetic construct
  misc_feature 1..22: note = chemically synthesized
  source 1..22: mol_type = other DNA
agaggctaaagcaggaggatca

SEQ ID NO: 38239 - DNA, 22 bp, synthetic construct
  misc_feature 1..22: note = chemically synthesized
  source 1..22: mol_type = other DNA
aagcaggaggatcaattgaatc

SEQ ID NO: 38240 - DNA, 22 bp, synthetic construct
  misc_feature 1..22: note = chemically synthesized
  source 1..22: mol_type = other DNA
aatccaggcgttctagtgaggc

SEQ ID NO: 38241 - DNA, 22 bp, synthetic construct
  misc_feature 1..22: note = chemically synthesized
  source 1..22: mol_type = other DNA
tagtgaggcttcagtgagcaag

SEQ ID NO: 38242 - DNA, 22 bp, synthetic construct
  misc_feature 1..22: note = chemically synthesized
  source 1..22: mol_type = other DNA
gtgaggcttcagtgagcaagat

SEQ ID NO: 38243 - DNA, 22 bp, synthetic construct
  misc_feature 1..22: note = chemically synthesized
  source 1..22: mol_type = other DNA
cagtgagcaagattgcaccatt

SEQ ID NO: 38244 - DNA, 22 bp, synthetic construct
  misc_feature 1..22: note = chemically synthesized
  source 1..22: mol_type = other DNA
agtgagcaagattgcaccattg

SEQ ID NO: 38245 - DNA, 22 bp, synthetic construct
  misc_feature 1..22: note = chemically synthesized
  source 1..22: mol_type = other DNA
caccattgcactccagccgggg

SEQ ID NO: 38246 - DNA, 22 bp, synthetic construct
  misc_feature 1..22: note = chemically synthesized
  source 1..22: mol_type = other DNA
cactccagccggggtgacagag

SEQ ID NO: 38247 - DNA, 22 bp, synthetic construct
  misc_feature 1..22: note = chemically synthesized
  source 1..22: mol_type = other DNA
cagccggggtgacagagtgaga

SEQ ID NO: 38248 - DNA, 22 bp, synthetic construct
  misc_feature 1..22: note = chemically synthesized
  source 1..22: mol_type = other DNA
tttcaaacaaacaagcaaaagc

SEQ ID NO: 38249 - DNA, 22 bp, synthetic construct
  misc_feature 1..22: note = chemically synthesized
  source 1..22: mol_type = other DNA
caaacaaacaagcaaaagcaaa

SEQ ID NO: 38250 - DNA, 22 bp, synthetic construct
  misc_feature 1..22: note = chemically synthesized
  source 1..22: mol_type = other DNA
aaacaaacaagcaaaagcaaaa

SEQ ID NO: 38251 - DNA, 22 bp, synthetic construct
  misc_feature 1..22: note = chemically synthesized
  source 1..22: mol_type = other DNA
gttgctccattcctttacttac

SEQ ID NO: 38252 - DNA, 22 bp, synthetic construct
  misc_feature 1..22: note = chemically synthesized
  source 1..22: mol_type = other DNA
ttgctccattcctttacttact

SEQ ID NO: 38253 - DNA, 22 bp, synthetic construct
  misc_feature 1..22: note = chemically synthesized
  source 1..22: mol_type = other DNA
ctccattcctttacttactatc

SEQ ID NO: 38254 - DNA, 22 bp, synthetic construct
  misc_feature 1..22: note = chemically synthesized
  source 1..22: mol_type = other DNA
cattcctttacttactatcttg

SEQ ID NO: 38255 - DNA, 22 bp, synthetic construct
  misc_feature 1..22: note = chemically synthesized
  source 1..22: mol_type = other DNA
ctttacttactatcttgctgtc

SEQ ID NO: 38256 - DNA, 22 bp, synthetic construct
  misc_feature 1..22: note = chemically synthesized
  source 1..22: mol_type = other DNA
tacttactatcttgctgtctac

SEQ ID NO: 38257 - DNA, 22 bp, synthetic construct
  misc_feature 1..22: note = chemically synthesized
  source 1..22: mol_type = other DNA
acttactatcttgctgtctaca

SEQ ID NO: 38258 - DNA, 22 bp, synthetic construct
  misc_feature 1..22: note = chemically synthesized
  source 1..22: mol_type = other DNA
cttactatcttgctgtctacag

SEQ ID NO: 38259 - DNA, 22 bp, synthetic construct
  misc_feature 1..22: note = chemically synthesized
  source 1..22: mol_type = other DNA
actatcttgctgtctacagcta

SEQ ID NO: 38260 - DNA, 22 bp, synthetic construct
  misc_feature 1..22: note = chemically synthesized
  source 1..22: mol_type = other DNA
ctatcttgctgtctacagctaa

SEQ ID NO: 38261 - DNA, 22 bp, synthetic construct
  misc_feature 1..22: note = chemically synthesized
  source 1..22: mol_type = other DNA
tcttgctgtctacagctaaagt

SEQ ID NO: 38262 - DNA, 22 bp, synthetic construct
  misc_feature 1..22: note = chemically synthesized
  source 1..22: mol_type = other DNA
gctgtctacagctaaagtcaga

SEQ ID NO: 38263 - DNA, 22 bp, synthetic construct
  misc_feature 1..22: note = chemically synthesized
  source 1..22: mol_type = other DNA
ctgtctacagctaaagtcagac

SEQ ID NO: 38264 - DNA, 22 bp, synthetic construct
  misc_feature 1..22: note = chemically synthesized
  source 1..22: mol_type = other DNA
tctacagctaaagtcagactgc

SEQ ID NO: 38265 - DNA, 22 bp, synthetic construct
  misc_feature 1..22: note = chemically synthesized
  source 1..22: mol_type = other DNA
cagctaaagtcagactgcatga

SEQ ID NO: 38266 - DNA, 22 bp, synthetic construct
  misc_feature 1..22: note = chemically synthesized
  source 1..22: mol_type = other DNA
aagtcagactgcatgatttgga

SEQ ID NO: 38267 - DNA, 22 bp, synthetic construct
  misc_feature 1..22: note = chemically synthesized
  source 1..22: mol_type = other DNA
catgatttggaattccaactcc

SEQ ID NO: 38268 - DNA, 22 bp, synthetic construct
  misc_feature 1..22: note = chemically synthesized
  source 1..22: mol_type = other DNA
ggaattccaactccaccatcac

SEQ ID NO: 38269 - DNA, 22 bp, synthetic construct
  misc_feature 1..22: note = chemically synthesized
  source 1..22: mol_type = other DNA
gaattccaactccaccatcacc

SEQ ID NO: 38270 - DNA, 22 bp, synthetic construct
  misc_feature 1..22: note = chemically synthesized
  source 1..22: mol_type = other DNA
caactccaccatcacctgggta

SEQ ID NO: 38271 - DNA, 22 bp, synthetic construct
  misc_feature 1..22: note = chemically synthesized
  source 1..22: mol_type = other DNA
caccatcacctgggtaatgttg

SEQ ID NO: 38272 - DNA, 22 bp, synthetic construct
  misc_feature 1..22: note = chemically synthesized
  source 1..22: mol_type = other DNA
ggtaatgttgagatttattaca

SEQ ID NO: 38273 - DNA, 22 bp, synthetic construct
  misc_feature 1..22: note = chemically synthesized
  source 1..22: mol_type = other DNA
agatttattacatagcatctct

SEQ ID NO: 38274 - DNA, 22 bp, synthetic construct
  misc_feature 1..22: note = chemically synthesized
  source 1..22: mol_type = other DNA
attacatagcatctctgtgcct

SEQ ID NO: 38275 - DNA, 22 bp, synthetic construct
  misc_feature 1..22: note = chemically synthesized
  source 1..22: mol_type = other DNA
ttacatagcatctctgtgcctc

SEQ ID NO: 38276 - DNA, 22 bp, synthetic construct
  misc_feature 1..22: note = chemically synthesized
  source 1..22: mol_type = other DNA
catagcatctctgtgcctcagt

SEQ ID NO: 38277 - DNA, 22 bp, synthetic construct
  misc_feature 1..22: note = chemically synthesized
  source 1..22: mol_type = other DNA
tgtgcctcagtttctccatata

SEQ ID NO: 38278 - DNA, 22 bp, synthetic construct
  misc_feature 1..22: note = chemically synthesized
  source 1..22: mol_type = other DNA
tgcctcagtttctccatatata

SEQ ID NO: 38279 - DNA, 22 bp, synthetic construct
  misc_feature 1..22: note = chemically synthesized
  source 1..22: mol_type = other DNA
agtttctccatatataaaatct

SEQ ID NO: 38280 - DNA, 22 bp, synthetic construct
  misc_feature 1..22: note = chemically synthesized
  source 1..22: mol_type = other DNA
ctccatatataaaatctacctg

SEQ ID NO: 38281 - DNA, 22 bp, synthetic construct
  misc_feature 1..22: note = chemically synthesized
  source 1..22: mol_type = other DNA
tccatatataaaatctacctgt

SEQ ID NO: 38282 - DNA, 22 bp, synthetic construct
  misc_feature 1..22: note = chemically synthesized
  source 1..22: mol_type = other DNA
catatataaaatctacctgtaa

SEQ ID NO: 38283 - DNA, 22 bp, synthetic construct
  misc_feature 1..22: note = chemically synthesized
  source 1..22: mol_type = other DNA
cctgtaataatgttgtgaaaat

SEQ ID NO: 38284 - DNA, 22 bp, synthetic construct
  misc_feature 1..22: note = chemically synthesized
  source 1..22: mol_type = other DNA
taataatgttgtgaaaattaaa

SEQ ID NO: 38285 - DNA, 22 bp, synthetic construct
  misc_feature 1..22: note = chemically synthesized
  source 1..22: mol_type = other DNA
tgaaaattaaaagaaataccag

SEQ ID NO: 38286 - DNA, 22 bp, synthetic construct
  misc_feature 1..22: note = chemically synthesized
  source 1..22: mol_type = other DNA
aaagaaataccagttgtaaatc

SEQ ID NO: 38287 - DNA, 22 bp, synthetic construct
  misc_feature 1..22: note = chemically synthesized
  source 1..22: mol_type = other DNA
taaatcactcagaactgtgcct

SEQ ID NO: 38288 - DNA, 22 bp, synthetic construct
  misc_feature 1..22: note = chemically synthesized
  source 1..22: mol_type = other DNA
agaactgtgcctagcatttaat

SEQ ID NO: 38289 - DNA, 22 bp, synthetic construct
  misc_feature 1..22: note = chemically synthesized
  source 1..22: mol_type = other DNA
tgcctagcatttaataaacact

SEQ ID NO: 38290 - DNA, 22 bp, synthetic construct
  misc_feature 1..22: note = chemically synthesized
  source 1..22: mol_type = other DNA
gcatttaataaacactctgtag

SEQ ID NO: 38291 - DNA, 22 bp, synthetic construct
  misc_feature 1..22: note = chemically synthesized
  source 1..22: mol_type = other DNA
aataaacactctgtaggtatta

SEQ ID NO: 38292 - DNA, 22 bp, synthetic construct
  misc_feature 1..22: note = chemically synthesized
  source 1..22: mol_type = other DNA
ataaacactctgtaggtattag

SEQ ID NO: 38293 - DNA, 22 bp, synthetic construct
  misc_feature 1..22: note = chemically synthesized
  source 1..22: mol_type = other DNA
tgtaggtattagcttatttctt

SEQ ID NO: 38294 - DNA, 22 bp, synthetic construct
  misc_feature 1..22: note = chemically synthesized
  source 1..22: mol_type = other DNA
taggtattagcttatttcttta

SEQ ID NO: 38295 - DNA, 22 bp, synthetic construct
  misc_feature 1..22: note = chemically synthesized
  source 1..22: mol_type = other DNA
gcttatttctttataaaattta

SEQ ID NO: 38296 - DNA, 22 bp, synthetic construct
  misc_feature 1..22: note = chemically synthesized
  source 1..22: mol_type = other DNA
atttctttataaaatttattca

SEQ ID NO: 38297 - DNA, 22 bp, synthetic construct
  misc_feature 1..22: note = chemically synthesized
  source 1..22: mol_type = other DNA
tttctttataaaatttattcat

SEQ ID NO: 38298 - DNA, 22 bp, synthetic construct
  misc_feature 1..22: note = chemically synthesized
  source 1..22: mol_type = other DNA
ctttataaaatttattcataaa

SEQ ID NO: 38299 - DNA, 22 bp, synthetic construct
  misc_feature 1..22: note = chemically synthesized
  source 1..22: mol_type = other DNA
tttataaaatttattcataaaa

SEQ ID NO: 38300 - DNA, 22 bp, synthetic construct
  misc_feature 1..22: note = chemically synthesized
  source 1..22: mol_type = other DNA
tataaaatttattcataaaatg

SEQ ID NO: 38301 - DNA, 22 bp, synthetic construct
  misc_feature 1..22: note = chemically synthesized
  source 1..22: mol_type = other DNA
ataaaatttattcataaaatga

SEQ ID NO: 38302 - DNA, 22 bp, synthetic construct
  misc_feature 1..22: note = chemically synthesized
  source 1..22: mol_type = other DNA
taaaatttattcataaaatgag

SEQ ID NO: 38303 - DNA, 22 bp, synthetic construct
  misc_feature 1..22: note = chemically synthesized
  source 1..22: mol_type = other DNA
attcataaaatgaggaagttag

SEQ ID NO: 38304 - DNA, 22 bp, synthetic construct
  misc_feature 1..22: note = chemically synthesized
  source 1..22: mol_type = other DNA
ttcataaaatgaggaagttagc

SEQ ID NO: 38305 - DNA, 22 bp, synthetic construct
  misc_feature 1..22: note = chemically synthesized
  source 1..22: mol_type = other DNA
ataaaatgaggaagttagctca

SEQ ID NO: 38306 - DNA, 22 bp, synthetic construct
  misc_feature 1..22: note = chemically synthesized
  source 1..22: mol_type = other DNA
gctcatgtattgtcataccagc

SEQ ID NO: 38307 - DNA, 22 bp, synthetic construct
  misc_feature 1..22: note = chemically synthesized
  source 1..22: mol_type = other DNA
atgtattgtcataccagctttc

SEQ ID NO: 38308 - DNA, 22 bp, synthetic construct
  misc_feature 1..22: note = chemically synthesized
  source 1..22: mol_type = other DNA
tcataccagctttcactttgaa

SEQ ID NO: 38309 - DNA, 22 bp, synthetic construct
  misc_feature 1..22: note = chemically synthesized
  source 1..22: mol_type = other DNA
tcactttgaatgagtccataat

SEQ ID NO: 38310 - DNA, 22 bp, synthetic construct
  misc_feature 1..22: note = chemically synthesized
  source 1..22: mol_type = other DNA
cactttgaatgagtccataatt

SEQ ID NO: 38311 - DNA, 22 bp, synthetic construct
  misc_feature 1..22: note = chemically synthesized
  source 1..22: mol_type = other DNA
actttgaatgagtccataattg

SEQ ID NO: 38312 - DNA, 22 bp, synthetic construct
  misc_feature 1..22: note = chemically synthesized
  source 1..22: mol_type = other DNA
tgaatgagtccataattgcatt

SEQ ID NO: 38313 - DNA, 22 bp, synthetic construct
  misc_feature 1..22: note = chemically synthesized
  source 1..22: mol_type = other DNA
gaatgagtccataattgcattt

SEQ ID NO: 38314 - DNA, 22 bp, synthetic construct
  misc_feature 1..22: note = chemically synthesized
  source 1..22: mol_type = other DNA
aatgagtccataattgcatttt

SEQ ID NO: 38315 - DNA, 22 bp, synthetic construct
  misc_feature 1..22: note = chemically synthesized
  source 1..22: mol_type = other DNA
catttttaaacacaaaaagaga

SEQ ID NO: 38316 - DNA, 22 bp, synthetic construct
  misc_feature 1..22: note = chemically synthesized
  source 1..22: mol_type = other DNA
ttaaacacaaaaagagaaataa

SEQ ID NO: 38317 - DNA, 22 bp, synthetic construct
  misc_feature 1..22: note = chemically synthesized
  source 1..22: mol_type = other DNA
taaacacaaaaagagaaataat

SEQ ID NO: 38318 - DNA, 22 bp, synthetic construct
  misc_feature 1..22: note = chemically synthesized
  source 1..22: mol_type = other DNA
aaacacaaaaagagaaataata

SEQ ID NO: 38319 - DNA, 22 bp, synthetic construct
  misc_feature 1..22: note = chemically synthesized
  source 1..22: mol_type = other DNA
aacacaaaaagagaaataatag

SEQ ID NO: 38320 - DNA, 22 bp, synthetic construct
  misc_feature 1..22: note = chemically synthesized
  source 1..22: mol_type = other DNA
cttcaatcacgggatgcatagt

SEQ ID NO: 38321 - DNA, 22 bp, synthetic construct
  misc_feature 1..22: note = chemically synthesized
  source 1..22: mol_type = other DNA
caatcacgggatgcatagtaat

SEQ ID NO: 38322 - DNA, 22 bp, synthetic construct
  misc_feature 1..22: note = chemically synthesized
  source 1..22: mol_type = other DNA
aatcacgggatgcatagtaatt

SEQ ID NO: 38323 - DNA, 22 bp, synthetic construct
  misc_feature 1..22: note = chemically synthesized
  source 1..22: mol_type = other DNA
ggatttctttgccctaattact

SEQ ID NO: 38324 - DNA, 22 bp, synthetic construct
  misc_feature 1..22: note = chemically synthesized
  source 1..22: mol_type = other DNA
ctttgccctaattactgatgtg

SEQ ID NO: 38325 - DNA, 22 bp, synthetic construct
  misc_feature 1..22: note = chemically synthesized
  source 1..22: mol_type = other DNA
tttgccctaattactgatgtgg

SEQ ID NO: 38326 - DNA, 22 bp, synthetic construct
  misc_feature 1..22: note = chemically synthesized
  source 1..22: mol_type = other DNA
tgccctaattactgatgtggat

SEQ ID NO: 38327 - DNA, 22 bp, synthetic construct
  misc_feature 1..22: note = chemically synthesized
  source 1..22: mol_type = other DNA
gccctaattactgatgtggata

SEQ ID NO: 38328 - DNA, 22 bp, synthetic construct
  misc_feature 1..22: note = chemically synthesized
  source 1..22: mol_type = other DNA
ccctaattactgatgtggataa

SEQ ID NO: 38329 - DNA, 22 bp, synthetic construct
  misc_feature 1..22: note = chemically synthesized
  source 1..22: mol_type = other DNA
attactgatgtggataagccgg

SEQ ID NO: 38330 - DNA, 22 bp, synthetic construct
  misc_feature 1..22: note = chemically synthesized
  source 1..22: mol_type = other DNA
ctgatgtggataagccggtggg

SEQ ID NO: 38331 - DNA, 22 bp, synthetic construct
  misc_feature 1..22: note = chemically synthesized
  source 1..22: mol_type = other DNA
atgtggataagccggtgggcca

SEQ ID NO: 38332 - DNA, 22 bp, synthetic construct
  misc_feature 1..22: note = chemically synthesized
  source 1..22: mol_type = other DNA
aagctgttatcacaccatgtga

SEQ ID NO: 38333 - DNA, 22 bp, synthetic construct
  misc_feature 1..22: note = chemically synthesized
  source 1..22: mol_type = other DNA
ttatcacaccatgtgaaacaca

SEQ ID NO: 38334 - DNA, 22 bp, synthetic construct
  misc_feature 1..22: note = chemically synthesized
  source 1..22: mol_type = other DNA
tcacaccatgtgaaacacacga

SEQ ID NO: 38335 - DNA, 22 bp, synthetic construct
  misc_feature 1..22: note = chemically synthesized
  source 1..22: mol_type = other DNA
tgtaaaaactatgcttggttgc

SEQ ID NO: 38336 - DNA, 22 bp, synthetic construct
  misc_feature 1..22: note = chemically synthesized
  source 1..22: mol_type = other DNA
tgcttggttgcacagcttcaag

SEQ ID NO: 38337 - DNA, 22 bp, synthetic construct
  misc_feature 1..22: note = chemically synthesized
  source 1..22: mol_type = other DNA
ggttgcacagcttcaaggaaag

SEQ ID NO: 38338 - DNA, 22 bp, synthetic construct
  misc_feature 1..22: note = chemically synthesized
  source 1..22: mol_type = other DNA
gttgcacagcttcaaggaaagc

SEQ ID NO: 38339 - DNA, 22 bp, synthetic construct
  misc_feature 1..22: note = chemically synthesized
  source 1..22: mol_type = other DNA
cacagcttcaaggaaagcacta

SEQ ID NO: 38340 - DNA, 22 bp, synthetic construct
  misc_feature 1..22: note = chemically synthesized
  source 1..22: mol_type = other DNA
caaggaaagcactagtctactc

SEQ ID NO: 38341 - DNA, 22 bp, synthetic construct
  misc_feature 1..22: note = chemically synthesized
  source 1..22: mol_type = other DNA
aaggaaagcactagtctactca

SEQ ID NO: 38342 - DNA, 22 bp, synthetic construct
  misc_feature 1..22: note = chemically synthesized
  source 1..22: mol_type = other DNA
gtctactcacttccttttcatt

SEQ ID NO: 38343 - DNA, 22 bp, synthetic construct
  misc_feature 1..22: note = chemically synthesized
  source 1..22: mol_type = other DNA
ctcacttccttttcattcagca

SEQ ID NO: 38344 - DNA, 22 bp, synthetic construct
  misc_feature 1..22: note = chemically synthesized
  source 1..22: mol_type = other DNA
acttccttttcattcagcatgc

SEQ ID NO: 38345 - DNA, 22 bp, synthetic construct
  misc_feature 1..22: note = chemically synthesized
  source 1..22: mol_type = other DNA
ccttttcattcagcatgctatg

SEQ ID NO: 38346 - DNA, 22 bp, synthetic construct
  misc_feature 1..22: note = chemically synthesized
  source 1..22: mol_type = other DNA
cttttcattcagcatgctatgt

SEQ ID NO: 38347 - DNA, 22 bp, synthetic construct
  misc_feature 1..22: note = chemically synthesized
  source 1..22: mol_type = other DNA
ttcattcagcatgctatgtcta

SEQ ID NO: 38348 - DNA, 22 bp, synthetic construct
  misc_feature 1..22: note = chemically synthesized
  source 1..22: mol_type = other DNA
tcattcagcatgctatgtctag

SEQ ID NO: 38349 - DNA, 22 bp, synthetic construct
  misc_feature 1..22: note = chemically synthesized
  source 1..22: mol_type = other DNA
cattcagcatgctatgtctagg

SEQ ID NO: 38350 - DNA, 22 bp, synthetic construct
  misc_feature 1..22: note = chemically synthesized
  source 1..22: mol_type = other DNA
attcagcatgctatgtctaggc

SEQ ID NO: 38351 - DNA, 22 bp, synthetic construct
  misc_feature 1..22: note = chemically synthesized
  source 1..22: mol_type = other DNA
agcatgctatgtctaggcccct

SEQ ID NO: 38352 - DNA, 22 bp, synthetic construct
  misc_feature 1..22: note = chemically synthesized
  source 1..22: mol_type = other DNA
tgtctaggcccctttcatataa

SEQ ID NO: 38353 - DNA, 22 bp, synthetic construct
  misc_feature 1..22: note = chemically synthesized
  source 1..22: mol_type = other DNA
ggcccctttcatataaaatatt

SEQ ID NO: 38354 - DNA, 22 bp, synthetic construct
  misc_feature 1..22: note = chemically synthesized
  source 1..22: mol_type = other DNA
tcatataaaatatttggagctg

SEQ ID NO: 38355 - DNA, 22 bp, synthetic construct
  misc_feature 1..22: note = chemically synthesized
  source 1..22: mol_type = other DNA
catataaaatatttggagctgc

SEQ ID NO: 38356 - DNA, 22 bp, synthetic construct
  misc_feature 1..22: note = chemically synthesized
  source 1..22: mol_type = other DNA
atataaaatatttggagctgcc

SEQ ID NO: 38357 - DNA, 22 bp, synthetic construct
  misc_feature 1..22: note = chemically synthesized
  source 1..22: mol_type = other DNA
ggagctgccattgtaggtagtg

SEQ ID NO: 38358 - DNA, 22 bp, synthetic construct
  misc_feature 1..22: note = chemically synthesized
  source 1..22: mol_type = other DNA
gagctgccattgtaggtagtgc

SEQ ID NO: 38359 - DNA, 22 bp, synthetic construct
  misc_feature 1..22: note = chemically synthesized
  source 1..22: mol_type = other DNA
ccattgtaggtagtgcaggtgg

SEQ ID NO: 38360 - DNA, 22 bp, synthetic construct
  misc_feature 1..22: note = chemically synthesized
  source 1..22: mol_type = other DNA
taggtagtgcaggtggtcttgt

SEQ ID NO: 38361 - DNA, 22 bp, synthetic construct
  misc_feature 1..22: note = chemically synthesized
  source 1..22: mol_type = other DNA
gttcaaagtgtgagtatcacct

SEQ ID NO: 38362 - DNA, 22 bp, synthetic construct
  misc_feature 1..22: note = chemically synthesized
  source 1..22: mol_type = other DNA
ttcaaagtgtgagtatcacctc

SEQ ID NO: 38363 - DNA, 22 bp, synthetic construct
  misc_feature 1..22: note = chemically synthesized
  source 1..22: mol_type = other DNA
aaagtgtgagtatcacctccca

SEQ ID NO: 38364 - DNA, 22 bp, synthetic construct
  misc_feature 1..22: note = chemically synthesized
  source 1..22: mol_type = other DNA
ccactgccaagactgcagctgc

SEQ ID NO: 38365 - DNA, 22 bp, synthetic construct
  misc_feature 1..22: note = chemically synthesized
  source 1..22: mol_type = other DNA
ccaagactgcagctgctttgat

SEQ ID NO: 38366 - DNA, 22 bp, synthetic construct
  misc_feature 1..22: note = chemically synthesized
  source 1..22: mol_type = other DNA
cagctgctttgattttaactga

SEQ ID NO: 38367 - DNA, 22 bp, synthetic construct
  misc_feature 1..22: note = chemically synthesized
  source 1..22: mol_type = other DNA
ctttgattttaactgaggatct

SEQ ID NO: 38368 - DNA, 22 bp, synthetic construct
  misc_feature 1..22: note = chemically synthesized
  source 1..22: mol_type = other DNA
tgattttaactgaggatctaga

SEQ ID NO: 38369 - DNA, 22 bp, synthetic construct
  misc_feature 1..22: note = chemically synthesized
  source 1..22: mol_type = other DNA
gattttaactgaggatctagaa

SEQ ID NO: 38370 - DNA, 22 bp, synthetic construct
  misc_feature 1..22: note = chemically synthesized
  source 1..22: mol_type = other DNA
attttaactgaggatctagaaa

SEQ ID NO: 38371 - DNA, 22 bp, synthetic construct
  misc_feature 1..22: note = chemically synthesized
  source 1..22: mol_type = other DNA
taactgaggatctagaaaagtg

SEQ ID NO: 38372 - DNA, 22 bp, synthetic construct
  misc_feature 1..22: note = chemically synthesized
  source 1..22: mol_type = other DNA
aactgaggatctagaaaagtgc

SEQ ID NO: 38373 - DNA, 22 bp, synthetic construct
  misc_feature 1..22: note = chemically synthesized
  source 1..22: mol_type = other DNA
actgaggatctagaaaagtgct

SEQ ID NO: 38374 - DNA, 22 bp, synthetic construct
  misc_feature 1..22: note = chemically synthesized
  source 1..22: mol_type = other DNA
aggatctagaaaagtgctggga

SEQ ID NO: 38375 - DNA, 22 bp, synthetic construct
  misc_feature 1..22: note = chemically synthesized
  source 1..22: mol_type = other DNA
gaaaagtgctgggaacacaaat

SEQ ID NO: 38376 - DNA, 22 bp, synthetic construct
  misc_feature 1..22: note = chemically synthesized
  source 1..22: mol_type = other DNA
ggaacacaaatatttgctgacc

SEQ ID NO: 38377 - DNA, 22 bp, synthetic construct
  misc_feature 1..22: note = chemically synthesized
  source 1..22: mol_type = other DNA
gctgacctttgtcacaagtagc

SEQ ID NO: 38378 - DNA, 22 bp, synthetic construct
  misc_feature 1..22: note = chemically synthesized
  source 1..22: mol_type = other DNA
ctgacctttgtcacaagtagca

SEQ ID NO: 38379 - DNA, 22 bp, synthetic construct
  misc_feature 1..22: note = chemically synthesized
  source 1..22: mol_type = other DNA
acctttgtcacaagtagcacct

SEQ ID NO: 38380 - DNA, 22 bp, synthetic construct
  misc_feature 1..22: note = chemically synthesized
  source 1..22: mol_type = other DNA
tgtcacaagtagcacctaatct

SEQ ID NO: 38381 - DNA, 22 bp, synthetic construct
  misc_feature 1..22: note = chemically synthesized
  source 1..22: mol_type = other DNA
gtcacaagtagcacctaatctc

SEQ ID NO: 38382 - DNA, 22 bp, synthetic construct
  misc_feature 1..22: note = chemically synthesized
  source 1..22: mol_type = other DNA
tcacaagtagcacctaatctcc

SEQ ID NO: 38383 - DNA, 22 bp, synthetic construct
  misc_feature 1..22: note = chemically synthesized
  source 1..22: mol_type = other DNA
atctccttcctaccagacctgc

SEQ ID NO: 38384 - DNA, 22 bp, synthetic construct
  misc_feature 1..22: note = chemically synthesized
  source 1..22: mol_type = other DNA
cttcctaccagacctgctgcct

SEQ ID NO: 38385 - DNA, 22 bp, synthetic construct
  misc_feature 1..22: note = chemically synthesized
  source 1..22: mol_type = other DNA
cctaccagacctgctgccttat

SEQ ID NO: 38386 - DNA, 22 bp, synthetic construct
  misc_feature 1..22: note = chemically synthesized
  source 1..22: mol_type = other DNA
ctaccagacctgctgccttata

SEQ ID NO: 38387 - DNA, 22 bp, synthetic construct
  misc_feature 1..22: note = chemically synthesized
  source 1..22: mol_type = other DNA
ccagacctgctgccttataaaa

SEQ ID NO: 38388 - DNA, 22 bp, synthetic construct
  misc_feature 1..22: note = chemically synthesized
  source 1..22: mol_type = other DNA
ctgccttataaaatgatgttct

SEQ ID NO: 38389 - DNA, 22 bp, synthetic construct
  misc_feature 1..22: note = chemically synthesized
  source 1..22: mol_type = other DNA
ccttataaaatgatgttctaag

SEQ ID NO: 38390 - DNA, 22 bp, synthetic construct
  misc_feature 1..22: note = chemically synthesized
  source 1..22: mol_type = other DNA
ataaaatgatgttctaagtgta

SEQ ID NO: 38391 - DNA, 22 bp, synthetic construct
  misc_feature 1..22: note = chemically synthesized
  source 1..22: mol_type = other DNA
taaaatgatgttctaagtgtat

SEQ ID NO: 38392 - DNA, 22 bp, synthetic construct
  misc_feature 1..22: note = chemically synthesized
  source 1..22: mol_type = other DNA
taagtgtataatgacttcctct

SEQ ID NO: 38393 - DNA, 22 bp, synthetic construct
  misc_feature 1..22: note = chemically synthesized
  source 1..22: mol_type = other DNA
agtgtataatgacttcctctgc

SEQ ID NO: 38394 - DNA, 22 bp, synthetic construct
  misc_feature 1..22: note = chemically synthesized
  source 1..22: mol_type = other DNA
cctctgcttctgcaactgtgtt

SEQ ID NO: 38395 - DNA, 22 bp, synthetic construct
  misc_feature 1..22: note = chemically synthesized
  source 1..22: mol_type = other DNA
ctctgcttctgcaactgtgttt

SEQ ID NO: 38396 - DNA, 22 bp, synthetic construct
  misc_feature 1..22: note = chemically synthesized
  source 1..22: mol_type = other DNA
tgcttctgcaactgtgttttgg

SEQ ID NO: 38397 - DNA, 22 bp, synthetic construct
  misc_feature 1..22: note = chemically synthesized
  source 1..22: mol_type = other DNA
cttctgcaactgtgttttggaa

SEQ ID NO: 38398 - DNA, 22 bp, synthetic construct
  misc_feature 1..22: note = chemically synthesized
  source 1..22: mol_type = other DNA
ctgcaactgtgttttggaacag

SEQ ID NO: 38399 - DNA, 22 bp, synthetic construct
  misc_feature 1..22: note = chemically synthesized
  source 1..22: mol_type = other DNA
tgcaactgtgttttggaacagg

SEQ ID NO: 38400 - DNA, 22 bp, synthetic construct
  misc_feature 1..22: note = chemically synthesized
  source 1..22: mol_type = other DNA
caactgtgttttggaacaggag

SEQ ID NO: 38401 - DNA, 22 bp, synthetic construct
  misc_feature 1..22: note = chemically synthesized
  source 1..22: mol_type = other DNA
tgttttggaacaggagggtgag

SEQ ID NO: 38402 - DNA, 22 bp, synthetic construct
  misc_feature 1..22: note = chemically synthesized
  source 1..22: mol_type = other DNA
tggaacaggagggtgagattag

SEQ ID NO: 38403 - DNA, 22 bp, synthetic construct
  misc_feature 1..22: note = chemically synthesized
  source 1..22: mol_type = other DNA
ggaacaggagggtgagattagt

SEQ ID NO: 38404 - DNA, 22 bp, synthetic construct
  misc_feature 1..22: note = chemically synthesized
  source 1..22: mol_type = other DNA
gaacaggagggtgagattagta

SEQ ID NO: 38405 - DNA, 22 bp, synthetic construct
  misc_feature 1..22: note = chemically synthesized
  source 1..22: mol_type = other DNA
gtagccacacacactgaaatag

SEQ ID NO: 38406 - DNA, 22 bp, synthetic construct
  misc_feature 1..22: note = chemically synthesized
  source 1..22: mol_type = other DNA
aaatagtcatatgacttccaaa

SEQ ID NO: 38407 - DNA, 22 bp, synthetic construct
  misc_feature 1..22: note = chemically synthesized
  source 1..22: mol_type = other DNA
ccaaagtctgtaatttttaagc

SEQ ID NO: 38408 - DNA, 22 bp, synthetic construct
  misc_feature 1..22: note = chemically synthesized
  source 1..22: mol_type = other DNA
caaagtctgtaatttttaagca

SEQ ID NO: 38409 - DNA, 22 bp, synthetic construct
  misc_feature 1..22: note = chemically synthesized
  source 1..22: mol_type = other DNA
taatttttaagcatatacaaaa

SEQ ID NO: 38410 - DNA, 22 bp, synthetic construct
  misc_feature 1..22: note = chemically synthesized
  source 1..22: mol_type = other DNA
ttaagcatatacaaaatagtga

SEQ ID NO: 38411 - DNA, 22 bp, synthetic construct
  misc_feature 1..22: note = chemically synthesized
  source 1..22: mol_type = other DNA
taagcatatacaaaatagtgaa

SEQ ID NO: 38412 - DNA, 22 bp, synthetic construct
  misc_feature 1..22: note = chemically synthesized
  source 1..22: mol_type = other DNA
aagcatatacaaaatagtgaaa

SEQ ID NO: 38413 - DNA, 22 bp, synthetic construct
  misc_feature 1..22: note = chemically synthesized
  source 1..22: mol_type = other DNA
agcatatacaaaatagtgaaat

SEQ ID NO: 38414 - DNA, 22 bp, synthetic construct
  misc_feature 1..22: note = chemically synthesized
  source 1..22: mol_type = other DNA
ctccatatgtgtataatatgta

SEQ ID NO: 38415 - DNA, 22 bp, synthetic construct
  misc_feature 1..22: note = chemically synthesized
  source 1..22: mol_type = other DNA
tccatatgtgtataatatgtat

SEQ ID NO: 38416 - DNA, 22 bp, synthetic construct
  misc_feature 1..22: note = chemically synthesized
  source 1..22: mol_type = other DNA
catatgtgtataatatgtatat

SEQ ID NO: 38417 - DNA, 22 bp, synthetic construct
  misc_feature 1..22: note = chemically synthesized
  source 1..22: mol_type = other DNA
attttggctgatatctattcta

SEQ ID NO: 38418 - DNA, 22 bp, synthetic construct
  misc_feature 1..22: note = chemically synthesized
  source 1..22: mol_type = other DNA
ttttggctgatatctattctat

SEQ ID NO: 38419 - DNA, 22 bp, synthetic construct
  misc_feature 1..22: note = chemically synthesized
  source 1..22: mol_type = other DNA
tggctgatatctattctatact

SEQ ID NO: 38420 - DNA, 22 bp, synthetic construct
  misc_feature 1..22: note = chemically synthesized
  source 1..22: mol_type = other DNA
ggctgatatctattctatactt

SEQ ID NO: 38421 - DNA, 22 bp, synthetic construct
  misc_feature 1..22: note = chemically synthesized
  source 1..22: mol_type = other DNA
gctgatatctattctatacttc

SEQ ID NO: 38422 - DNA, 22 bp, synthetic construct
  misc_feature 1..22: note = chemically synthesized
  source 1..22: mol_type = other DNA
atatctattctatacttctttg

SEQ ID NO: 38423 - DNA, 22 bp, synthetic construct
  misc_feature 1..22: note = chemically synthesized
  source 1..22: mol_type = other DNA
ttctatacttctttgaaatagt

SEQ ID NO: 38424 - DNA, 22 bp, synthetic construct
  misc_feature 1..22: note = chemically synthesized
  source 1..22: mol_type = other DNA
tatacttctttgaaatagtgat

SEQ ID NO: 38425 - DNA, 22 bp, synthetic construct
  misc_feature 1..22: note = chemically synthesized
  source 1..22: mol_type = other DNA
tacttctttgaaatagtgattt

SEQ ID NO: 38426 - DNA, 22 bp, synthetic construct
  misc_feature 1..22: note = chemically synthesized
  source 1..22: mol_type = other DNA
ctttgaaatagtgatttttagt

SEQ ID NO: 38427 - DNA, 22 bp, synthetic construct
  misc_feature 1..22: note = chemically synthesized
  source 1..22: mol_type = other DNA
tttgaaatagtgatttttagta

SEQ ID NO: 38428 - DNA, 22 bp, synthetic construct
  misc_feature 1..22: note = chemically synthesized
  source 1..22: mol_type = other DNA
tgaaatagtgatttttagtaaa

SEQ ID NO: 38429 - DNA, 22 bp, synthetic construct
  misc_feature 1..22: note = chemically synthesized
  source 1..22: mol_type = other DNA
gaaatagtgatttttagtaaat

SEQ ID NO: 38430 - DNA, 22 bp, synthetic construct
  misc_feature 1..22: note = chemically synthesized
  source 1..22: mol_type = other DNA
aaatagtgatttttagtaaatt

SEQ ID NO: 38431 - DNA, 22 bp, synthetic construct
  misc_feature 1..22: note = chemically synthesized
  source 1..22: mol_type = other DNA
ttagtaaattggcagtgttgcc

SEQ ID NO: 38432 - DNA, 22 bp, synthetic construct
  misc_feature 1..22: note = chemically synthesized
  source 1..22: mol_type = other DNA
tagtaaattggcagtgttgcca

SEQ ID NO: 38433 - DNA, 22 bp, synthetic construct
  misc_feature 1..22: note = chemically synthesized
  source 1..22: mol_type = other DNA
agtaaattggcagtgttgccag

SEQ ID NO: 38434 - DNA, 22 bp, synthetic construct
  misc_feature 1..22: note = chemically synthesized
  source 1..22: mol_type = other DNA
gtaaattggcagtgttgccaga

SEQ ID NO: 38435 - DNA, 22 bp, synthetic construct
  misc_feature 1..22: note = chemically synthesized
  source 1..22: mol_type = other DNA
gcagtgttgccagatgacgact

SEQ ID NO: 38436 - DNA, 22 bp, synthetic construct
  misc_feature 1..22: note = chemically synthesized
  source 1..22: mol_type = other DNA
ccagatgacgacttagagtttt

SEQ ID NO: 38437 - DNA, 22 bp, synthetic construct
  misc_feature 1..22: note = chemically synthesized
  source 1..22: mol_type = other DNA
agagttttaaccacctcattgt

SEQ ID NO: 38438 - DNA, 22 bp, synthetic construct
  misc_feature 1..22: note = chemically synthesized
  source 1..22: mol_type = other DNA
gagttttaaccacctcattgtt

SEQ ID NO: 38439 - DNA, 22 bp, synthetic construct
  misc_feature 1..22: note = chemically synthesized
  source 1..22: mol_type = other DNA
taaccacctcattgttatatgt

SEQ ID NO: 38440 - DNA, 22 bp, synthetic construct
  misc_feature 1..22: note = chemically synthesized
  source 1..22: mol_type = other DNA
aaccacctcattgttatatgta

SEQ ID NO: 38441 - DNA, 22 bp, synthetic construct
  misc_feature 1..22: note = chemically synthesized
  source 1..22: mol_type = other DNA
accacctcattgttatatgtac

SEQ ID NO: 38442 - DNA, 22 bp, synthetic construct
  misc_feature 1..22: note = chemically synthesized
  source 1..22: mol_type = other DNA
attgttatatgtaccatggtag

SEQ ID NO: 38443 - DNA, 22 bp, synthetic construct
  misc_feature 1..22: note = chemically synthesized
  source 1..22: mol_type = other DNA
ttatatgtaccatggtagctca

SEQ ID NO: 38444 - DNA, 22 bp, synthetic construct
  misc_feature 1..22: note = chemically synthesized
  source 1..22: mol_type = other DNA
tatgtaccatggtagctcatct

SEQ ID NO: 38445 - DNA, 22 bp, synthetic construct
  misc_feature 1..22: note = chemically synthesized
  source 1..22: mol_type = other DNA
atcttttctttcaggtgaaagt

SEQ ID NO: 38446 - DNA, 22 bp, synthetic construct
  misc_feature 1..22: note = chemically synthesized
  source 1..22: mol_type = other DNA
ttctttcaggtgaaagttgtga

SEQ ID NO: 38447 - DNA, 22 bp, synthetic construct
  misc_feature 1..22: note = chemically synthesized
  source 1..22: mol_type = other DNA
tctttcaggtgaaagttgtgat

SEQ ID NO: 38448 - DNA, 22 bp, synthetic construct
  misc_feature 1..22: note = chemically synthesized
  source 1..22: mol_type = other DNA
ctttcaggtgaaagttgtgata

SEQ ID NO: 38449 - DNA, 22 bp, synthetic construct
  misc_feature 1..22: note = chemically synthesized
  source 1..22: mol_type = other DNA
tttcaggtgaaagttgtgatac

SEQ ID NO: 38450 - DNA, 22 bp, synthetic construct
  misc_feature 1..22: note = chemically synthesized
  source 1..22: mol_type = other DNA
tcaggtgaaagttgtgatactt

SEQ ID NO: 38451 - DNA, 22 bp, synthetic construct
  misc_feature 1..22: note = chemically synthesized
  source 1..22: mol_type = other DNA
caggtgaaagttgtgatacttt

SEQ ID NO: 38452 - DNA, 22 bp, synthetic construct
  misc_feature 1..22: note = chemically synthesized
  source 1..22: mol_type = other DNA
aggtgaaagttgtgatactttg

SEQ ID NO: 38453 - DNA, 22 bp, synthetic construct
  misc_feature 1..22: note = chemically synthesized
  source 1..22: mol_type = other DNA
tgatactttgtcctcacgctaa

SEQ ID NO: 38454 - DNA, 22 bp, synthetic construct
  misc_feature 1..22: note = chemically synthesized
  source 1..22: mol_type = other DNA
tgtcctcacgctaaacatagcc

SEQ ID NO: 38455 - DNA, 22 bp, synthetic construct
  misc_feature 1..22: note = chemically synthesized
  source 1..22: mol_type = other DNA
gtcctcacgctaaacatagccc

SEQ ID NO: 38456 - DNA, 22 bp, synthetic construct
  misc_feature 1..22: note = chemically synthesized
  source 1..22: mol_type = other DNA
tcctcacgctaaacatagcccc

SEQ ID NO: 38457 - DNA, 22 bp, synthetic construct
  misc_feature 1..22: note = chemically synthesized
  source 1..22: mol_type = other DNA
acgctaaacatagcccccatgt

SEQ ID NO: 38458 - DNA, 22 bp, synthetic construct
  misc_feature 1..22: note = chemically synthesized
  source 1..22: mol_type = other DNA
aacatagcccccatgttgttcc

SEQ ID NO: 38459 - DNA, 22 bp, synthetic construct
  misc_feature 1..22: note = chemically synthesized
  source 1..22: mol_type = other DNA
ttccaggaaaatagagatcaat

SEQ ID NO: 38460 - DNA, 22 bp, synthetic construct
  misc_feature 1..22: note = chemically synthesized
  source 1..22: mol_type = other DNA
caggaaaatagagatcaataaa

SEQ ID NO: 38461 - DNA, 22 bp, synthetic construct
  misc_feature 1..22: note = chemically synthesized
  source 1..22: mol_type = other DNA
gtttgaaagtgaaggttaagtt

SEQ ID NO: 38462 - DNA, 22 bp, synthetic construct
  misc_feature 1..22: note = chemically synthesized
  source 1..22: mol_type = other DNA
tttgaaagtgaaggttaagttc

SEQ ID NO: 38463 - DNA, 22 bp, synthetic construct
  misc_feature 1..22: note = chemically synthesized
  source 1..22: mol_type = other DNA
gaaagtgaaggttaagttcaaa

SEQ ID NO: 38464 - DNA, 22 bp, synthetic construct
  misc_feature 1..22: note = chemically synthesized
  source 1..22: mol_type = other DNA
aaagtgaaggttaagttcaaat

SEQ ID NO: 38465 - DNA, 22 bp, synthetic construct
  misc_feature 1..22: note = chemically synthesized
  source 1..22: mol_type = other DNA
agttcaaattcaatgacctacg

SEQ ID NO: 38466 - DNA, 22 bp, synthetic construct
  misc_feature 1..22: note = chemically synthesized
  source 1..22: mol_type = other DNA
aaattcaatgacctacgctgtg

SEQ ID NO: 38467 - DNA, 22 bp, synthetic construct
  misc_feature 1..22: note = chemically synthesized
  source 1..22: mol_type = other DNA
aatgacctacgctgtggtaaaa

SEQ ID NO: 38468 - DNA, 22 bp, synthetic construct
  misc_feature 1..22: note = chemically synthesized
  source 1..22: mol_type = other DNA
cgctgtggtaaaacgatcattc

SEQ ID NO: 38469 - DNA, 22 bp, synthetic construct
  misc_feature 1..22: note = chemically synthesized
  source 1..22: mol_type = other DNA
tggtaaaacgatcattcattaa

SEQ ID NO: 38470 - DNA, 22 bp, synthetic construct
  misc_feature 1..22: note = chemically synthesized
  source 1..22: mol_type = other DNA
attaatgatattaagtattttc

SEQ ID NO: 38471 - DNA, 22 bp, synthetic construct
  misc_feature 1..22: note = chemically synthesized
  source 1..22: mol_type = other DNA
atgatattaagtattttctttt

SEQ ID NO: 38472 - DNA, 22 bp, synthetic construct
  misc_feature 1..22: note = chemically synthesized
  source 1..22: mol_type = other DNA
agtattttcttttttaatgtca

SEQ ID NO: 38473 - DNA, 22 bp, synthetic construct
  misc_feature 1..22: note = chemically synthesized
  source 1..22: mol_type = other DNA
tcttttttaatgtcagaataaa

SEQ ID NO: 38474 - DNA, 22 bp, synthetic construct
  misc_feature 1..22: note = chemically synthesized
  source 1..22: mol_type = other DNA
cttttttaatgtcagaataaaa

SEQ ID NO: 38475 - DNA, 22 bp, synthetic construct
  misc_feature 1..22: note = chemically synthesized
  source 1..22: mol_type = other DNA
ttttttaatgtcagaataaaac

SEQ ID NO: 38476 - DNA, 22 bp, synthetic construct
  misc_feature 1..22: note = chemically synthesized
  source 1..22: mol_type = other DNA
ttttaatgtcagaataaaacca

SEQ ID NO: 38477 - DNA, 22 bp, synthetic construct
  misc_feature 1..22: note = chemically synthesized
  source 1..22: mol_type = other DNA
tttaatgtcagaataaaaccat

SEQ ID NO: 38478 - DNA, 22 bp, synthetic construct
  misc_feature 1..22: note = chemically synthesized
  source 1..22: mol_type = other DNA
ttaatgtcagaataaaaccatt

SEQ ID NO: 38479 - DNA, 22 bp, synthetic construct
  misc_feature 1..22: note = chemically synthesized
  source 1..22: mol_type = other DNA
taatgtcagaataaaaccattt

SEQ ID NO: 38480 - DNA, 22 bp, synthetic construct
  misc_feature 1..22: note = chemically synthesized
  source 1..22: mol_type = other DNA
aatgtcagaataaaaccattta

SEQ ID NO: 38481 - DNA, 22 bp, synthetic construct
  misc_feature 1..22: note = chemically synthesized
  source 1..22: mol_type = other DNA
atgtcagaataaaaccatttat

SEQ ID NO: 38482 - DNA, 22 bp, synthetic construct
  misc_feature 1..22: note = chemically synthesized
  source 1..22: mol_type = other DNA
atttgcagatttaaaaatatat

SEQ ID NO: 38483 - DNA, 22 bp, synthetic construct
  misc_feature 1..22: note = chemically synthesized
  source 1..22: mol_type = other DNA
tttgcagatttaaaaatatata

SEQ ID NO: 38484 - DNA, 22 bp, synthetic construct
  misc_feature 1..22: note = chemically synthesized
  source 1..22: mol_type = other DNA
gcagatttaaaaatatatatgt

SEQ ID NO: 38485 - DNA, 22 bp, synthetic construct
  misc_feature 1..22: note = chemically synthesized
  source 1..22: mol_type = other DNA
cagatttaaaaatatatatgtg

SEQ ID NO: 38486 - DNA, 22 bp, synthetic construct
  misc_feature 1..22: note = chemically synthesized
  source 1..22: mol_type = other DNA
aaaaatatatatgtgtatgtaa

SEQ ID NO: 38487 - DNA, 22 bp, synthetic construct
  misc_feature 1..22: note = chemically synthesized
  source 1..22: mol_type = other DNA
aaaatatatatgtgtatgtaaa

SEQ ID NO: 38488 - DNA, 22 bp, synthetic construct
  misc_feature 1..22: note = chemically synthesized
  source 1..22: mol_type = other DNA
cttggtttatacctcaaatatg

SEQ ID NO: 38489 - DNA, 22 bp, synthetic construct
  misc_feature 1..22: note = chemically synthesized
  source 1..22: mol_type = other DNA
ggtttatacctcaaatatgaaa

SEQ ID NO: 38490 - DNA, 22 bp, synthetic construct
  misc_feature 1..22: note = chemically synthesized
  source 1..22: mol_type = other DNA
gtttatacctcaaatatgaaaa

SEQ ID NO: 38491 - DNA, 22 bp, synthetic construct
  misc_feature 1..22: note = chemically synthesized
  source 1..22: mol_type = other DNA
atacctcaaatatgaaaatagg

SEQ ID NO: 38492 - DNA, 22 bp, synthetic construct
  misc_feature 1..22: note = chemically synthesized
  source 1..22: mol_type = other DNA
tacctcaaatatgaaaatagga

SEQ ID NO: 38493 - DNA, 22 bp, synthetic construct
  misc_feature 1..22: note = chemically synthesized
  source 1..22: mol_type = other DNA
aaatatgaaaataggaatgacc

SEQ ID NO: 38494 - DNA, 22 bp, synthetic construct
  misc_feature 1..22: note = chemically synthesized
  source 1..22: mol_type = other DNA
tctctatgctcttgcattcact

SEQ ID NO: 38495 - DNA, 22 bp, synthetic construct
  misc_feature 1..22: note = chemically synthesized
  source 1..22: mol_type = other DNA
tatgctcttgcattcacttata

SEQ ID NO: 38496 - DNA, 22 bp, synthetic construct
  misc_feature 1..22: note = chemically synthesized
  source 1..22: mol_type = other DNA
tgctcttgcattcacttatatt

SEQ ID NO: 38497 - DNA, 22 bp, synthetic construct
  misc_feature 1..22: note = chemically synthesized
  source 1..22: mol_type = other DNA
ttgcattcacttatattctagc

SEQ ID NO: 38498 - DNA, 22 bp, synthetic construct
  misc_feature 1..22: note = chemically synthesized
  source 1..22: mol_type = other DNA
gcattcacttatattctagctt

SEQ ID NO: 38499 - DNA, 22 bp, synthetic construct
  misc_feature 1..22: note = chemically synthesized
  source 1..22: mol_type = other DNA
cattcacttatattctagcttg

SEQ ID NO: 38500 - DNA, 22 bp, synthetic construct
  misc_feature 1..22: note = chemically synthesized
  source 1..22: mol_type = other DNA
acttatattctagcttgttaag

SEQ ID NO: 38501 - DNA, 22 bp, synthetic construct
  misc_feature 1..22: note = chemically synthesized
  source 1..22: mol_type = other DNA
atattctagcttgttaagagag

SEQ ID NO: 38502 - DNA, 22 bp, synthetic construct
  misc_feature 1..22: note = chemically synthesized
  source 1..22: mol_type = other DNA
tattctagcttgttaagagaga

SEQ ID NO: 38503 - DNA, 22 bp, synthetic construct
  misc_feature 1..22: note = chemically synthesized
  source 1..22: mol_type = other DNA
tagcttgttaagagagaagttt

SEQ ID NO: 38504 - DNA, 22 bp, synthetic construct
  misc_feature 1..22: note = chemically synthesized
  source 1..22: mol_type = other DNA
gcttgttaagagagaagtttgg

SEQ ID NO: 38505 - DNA, 22 bp, synthetic construct
  misc_feature 1..22: note = chemically synthesized
  source 1..22: mol_type = other DNA
gttaagagagaagtttggggca

SEQ ID NO: 38506 - DNA, 22 bp, synthetic construct
  misc_feature 1..22: note = chemically synthesized
  source 1..22: mol_type = other DNA
ttaagagagaagtttggggcaa

SEQ ID NO: 38507 - DNA, 22 bp, synthetic construct
  misc_feature 1..22: note = chemically synthesized
  source 1..22: mol_type = other DNA
agagagaagtttggggcaaaat

SEQ ID NO: 38508 - DNA, 22 bp, synthetic construct
  misc_feature 1..22: note = chemically synthesized
  source 1..22: mol_type = other DNA
ggggcaaaatgtgctttataaa

SEQ ID NO: 38509 - DNA, 22 bp, synthetic construct
  misc_feature 1..22: note = chemically synthesized
  source 1..22: mol_type = other DNA
gggcaaaatgtgctttataaat

SEQ ID NO: 38510 - DNA, 22 bp, synthetic construct
  misc_feature 1..22: note = chemically synthesized
  source 1..22: mol_type = other DNA
tataaatagtaaaaactgaggt

SEQ ID NO: 38511 - DNA, 22 bp, synthetic construct
  misc_feature 1..22: note = chemically synthesized
  source 1..22: mol_type = other DNA
ataaatagtaaaaactgaggta

SEQ ID NO: 38512 - DNA, 22 bp, synthetic construct
  misc_feature 1..22: note = chemically synthesized
  source 1..22: mol_type = other DNA
taaatagtaaaaactgaggtaa

SEQ ID NO: 38513 - DNA, 22 bp, synthetic construct
  misc_feature 1..22: note = chemically synthesized
  source 1..22: mol_type = other DNA
aggtaaactatagcacaaagtg

SEQ ID NO: 38514 - DNA, 22 bp, synthetic construct
  misc_feature 1..22: note = chemically synthesized
  source 1..22: mol_type = other DNA
tagcacaaagtgtgctatataa

SEQ ID NO: 38515 - DNA, 22 bp, synthetic construct
  misc_feature 1..22: note = chemically synthesized
  source 1..22: mol_type = other DNA
tataaacagtaaaaaccgaggt

SEQ ID NO: 38516 - DNA, 22 bp, synthetic construct
  misc_feature 1..22: note = chemically synthesized
  source 1..22: mol_type = other DNA
aaatggtgttggaatataagaa

SEQ ID NO: 38517 - DNA, 22 bp, synthetic construct
  misc_feature 1..22: note = chemically synthesized
  source 1..22: mol_type = other DNA
gaatataagaaatagcagtaaa

SEQ ID NO: 38518 - DNA, 22 bp, synthetic construct
  misc_feature 1..22: note = chemically synthesized
  source 1..22: mol_type = other DNA
ctcacagcaagacagtacaggg

SEQ ID NO: 38519 - DNA, 22 bp, synthetic construct
  misc_feature 1..22: note = chemically synthesized
  source 1..22: mol_type = other DNA
acagcaagacagtacagggaaa

SEQ ID NO: 38520 - DNA, 22 bp, synthetic construct
  misc_feature 1..22: note = chemically synthesized
  source 1..22: mol_type = other DNA
gagggacaaagatttacttaca

SEQ ID NO: 38521 - DNA, 22 bp, synthetic construct
  misc_feature 1..22: note = chemically synthesized
  source 1..22: mol_type = other DNA
acttacaatcaggcctcaacca

SEQ ID NO: 38522 - DNA, 22 bp, synthetic construct
  misc_feature 1..22: note = chemically synthesized
  source 1..22: mol_type = other DNA
cttacaatcaggcctcaaccaa

SEQ ID NO: 38523 - DNA, 22 bp, synthetic construct
  misc_feature 1..22: note = chemically synthesized
  source 1..22: mol_type = other DNA
acaatcaggcctcaaccaatat

SEQ ID NO: 38524 - DNA, 22 bp, synthetic construct
  misc_feature 1..22: note = chemically synthesized
  source 1..22: mol_type = other DNA
caatcaggcctcaaccaatatg

SEQ ID NO: 38525 - DNA, 22 bp, synthetic construct
  misc_feature 1..22: note = chemically synthesized
  source 1..22: mol_type = other DNA
aaccaatatgagatcgactttc

SEQ ID NO: 38526 - DNA, 22 bp, synthetic construct
  misc_feature 1..22: note = chemically synthesized
  source 1..22: mol_type = other DNA
tcttttattgatatatgacgtg

SEQ ID NO: 38527 - DNA, 22 bp, synthetic construct
  misc_feature 1..22: note = chemically synthesized
  source 1..22: mol_type = other DNA
cttttattgatatatgacgtgt

SEQ ID NO: 38528 - DNA, 22 bp, synthetic construct
  misc_feature 1..22: note = chemically synthesized
  source 1..22: mol_type = other DNA
ttttattgatatatgacgtgtt

SEQ ID NO: 38529 - DNA, 22 bp, synthetic construct
  misc_feature 1..22: note = chemically synthesized
  source 1..22: mol_type = other DNA
ttattgatatatgacgtgttta

SEQ ID NO: 38530 - DNA, 22 bp, synthetic construct
  misc_feature 1..22: note = chemically synthesized
  source 1..22: mol_type = other DNA
tattgatatatgacgtgtttat

SEQ ID NO: 38531 - DNA, 22 bp, synthetic construct
  misc_feature 1..22: note = chemically synthesized
  source 1..22: mol_type = other DNA
attgatatatgacgtgtttata

SEQ ID NO: 38532 - DNA, 22 bp, synthetic construct
  misc_feature 1..22: note = chemically synthesized
  source 1..22: mol_type = other DNA
ttgatatatgacgtgtttatat

SEQ ID NO: 38533 - DNA, 22 bp, synthetic construct
  misc_feature 1..22: note = chemically synthesized
  source 1..22: mol_type = other DNA
atatatgacgtgtttatatgta

SEQ ID NO: 38534 - DNA, 22 bp, synthetic construct
  misc_feature 1..22: note = chemically synthesized
  source 1..22: mol_type = other DNA
atatgtatcaggtacatgtgac

SEQ ID NO: 38535 - DNA, 22 bp, synthetic construct
  misc_feature 1..22: note = chemically synthesized
  source 1..22: mol_type = other DNA
tatgtatcaggtacatgtgaca

SEQ ID NO: 38536 - DNA, 22 bp, synthetic construct
  misc_feature 1..22: note = chemically synthesized
  source 1..22: mol_type = other DNA
tgttacatgcatataatgtata

SEQ ID NO: 38537 - DNA, 22 bp, synthetic construct
  misc_feature 1..22: note = chemically synthesized
  source 1..22: mol_type = other DNA
gttacatgcatataatgtataa

SEQ ID NO: 38538 - DNA, 22 bp, synthetic construct
  misc_feature 1..22: note = chemically synthesized
  source 1..22: mol_type = other DNA
ttacatgcatataatgtataat

SEQ ID NO: 38539 - DNA, 22 bp, synthetic construct
  misc_feature 1..22: note = chemically synthesized
  source 1..22: mol_type = other DNA
catgcatataatgtataatgat

SEQ ID NO: 38540 - DNA, 22 bp, synthetic construct
  misc_feature 1..22: note = chemically synthesized
  source 1..22: mol_type = other DNA
ggggtattcatcacctcaagta

SEQ ID NO: 38541 - DNA, 22 bp, synthetic construct
  misc_feature 1..22: note = chemically synthesized
  source 1..22: mol_type = other DNA
gggtattcatcacctcaagtat

SEQ ID NO: 38542 - DNA, 22 bp, synthetic construct
  misc_feature 1..22: note = chemically synthesized
  source 1..22: mol_type = other DNA
atcacctcaagtatttatcgtt

SEQ ID NO: 38543 - DNA, 22 bp, synthetic construct
  misc_feature 1..22: note = chemically synthesized
  source 1..22: mol_type = other DNA
aagtatttatcgtttctatgtg

SEQ ID NO: 38544 - DNA, 22 bp, synthetic construct
  misc_feature 1..22: note = chemically synthesized
  source 1..22: mol_type = other DNA
atcgtttctatgtgttaggaac

SEQ ID NO: 38545 - DNA, 22 bp, synthetic construct
  misc_feature 1..22: note = chemically synthesized
  source 1..22: mol_type = other DNA
tcgtttctatgtgttaggaaca

SEQ ID NO: 38546 - DNA, 22 bp, synthetic construct
  misc_feature 1..22: note = chemically synthesized
  source 1..22: mol_type = other DNA
ctatgtgttaggaacatttcaa

SEQ ID NO: 38547 - DNA, 22 bp, synthetic construct
  misc_feature 1..22: note = chemically synthesized
  source 1..22: mol_type = other DNA
tatgtgttaggaacatttcaag

SEQ ID NO: 38548 - DNA, 22 bp, synthetic construct
  misc_feature 1..22: note = chemically synthesized
  source 1..22: mol_type = other DNA
tgtgttaggaacatttcaagac

SEQ ID NO: 38549 - DNA, 22 bp, synthetic construct
  misc_feature 1..22: note = chemically synthesized
  source 1..22: mol_type = other DNA
ggaacatttcaagacctttctt

SEQ ID NO: 38550 - DNA, 22 bp, synthetic construct
  misc_feature 1..22: note = chemically synthesized
  source 1..22: mol_type = other DNA
caagacctttcttctactattt

SEQ ID NO: 38551 - DNA, 22 bp, synthetic construct
  misc_feature 1..22: note = chemically synthesized
  source 1..22: mol_type = other DNA
aagacctttcttctactatttt

SEQ ID NO: 38552 - DNA, 22 bp, synthetic construct
  misc_feature 1..22: note = chemically synthesized
  source 1..22: mol_type = other DNA
tcttctactattttgaaatata

SEQ ID NO: 38553 - DNA, 22 bp, synthetic construct
  misc_feature 1..22: note = chemically synthesized
  source 1..22: mol_type = other DNA
cttctactattttgaaatatac

SEQ ID NO: 38554 - DNA, 22 bp, synthetic construct
  misc_feature 1..22: note = chemically synthesized
  source 1..22: mol_type = other DNA
ttctactattttgaaatataca

SEQ ID NO: 38555 - DNA, 22 bp, synthetic construct
  misc_feature 1..22: note = chemically synthesized
  source 1..22: mol_type = other DNA
ctactattttgaaatatacaat

SEQ ID NO: 38556 - DNA, 22 bp, synthetic construct
  misc_feature 1..22: note = chemically synthesized
  source 1..22: mol_type = other DNA
tactattttgaaatatacaata

SEQ ID NO: 38557 - DNA, 22 bp, synthetic construct
  misc_feature 1..22: note = chemically synthesized
  source 1..22: mol_type = other DNA
ctattttgaaatatacaatata

SEQ ID NO: 38558 - DNA, 22 bp, synthetic construct
  misc_feature 1..22: note = chemically synthesized
  source 1..22: mol_type = other DNA
ttttgaaatatacaatatattg

SEQ ID NO: 38559 - DNA, 22 bp, synthetic construct
  misc_feature 1..22: note = chemically synthesized
  source 1..22: mol_type = other DNA
tgaaatatacaatatattgttt

SEQ ID NO: 38560 - DNA, 22 bp, synthetic construct
  misc_feature 1..22: note = chemically synthesized
  source 1..22: mol_type = other DNA
gaaatatacaatatattgtttt

SEQ ID NO: 38561 - DNA, 22 bp, synthetic construct
  misc_feature 1..22: note = chemically synthesized
  source 1..22: mol_type = other DNA
aaatatacaatatattgttttt

SEQ ID NO: 38562 - DNA, 22 bp, synthetic construct
  misc_feature 1..22: note = chemically synthesized
  source 1..22: mol_type = other DNA
tttttaactataatcaccctac

SEQ ID NO: 38563 - DNA, 22 bp, synthetic construct
  misc_feature 1..22: note = chemically synthesized
  source 1..22: mol_type = other DNA
ttaactataatcaccctacttt

SEQ ID NO: 38564 - DNA, 22 bp, synthetic construct
  misc_feature 1..22: note = chemically synthesized
  source 1..22: mol_type = other DNA
taactataatcaccctactttg

SEQ ID NO: 38565 - DNA, 22 bp, synthetic construct
  misc_feature 1..22: note = chemically synthesized
  source 1..22: mol_type = other DNA
aactataatcaccctactttgc

SEQ ID NO: 38566 - DNA, 22 bp, synthetic construct
  misc_feature 1..22: note = chemically synthesized
  source 1..22: mol_type = other DNA
actataatcaccctactttgct

SEQ ID NO: 38567 - DNA, 22 bp, synthetic construct
  misc_feature 1..22: note = chemically synthesized
  source 1..22: mol_type = other DNA
taatcaccctactttgctattg

SEQ ID NO: 38568 - DNA, 22 bp, synthetic construct
  misc_feature 1..22: note = chemically synthesized
  source 1..22: mol_type = other DNA
ctttgctattgaacatcagaac

SEQ ID NO: 38569 - DNA, 22 bp, synthetic construct
  misc_feature 1..22: note = chemically synthesized
  source 1..22: mol_type = other DNA
tgctattgaacatcagaacata

SEQ ID NO: 38570 - DNA, 22 bp, synthetic construct
  misc_feature 1..22: note = chemically synthesized
  source 1..22: mol_type = other DNA
gctattgaacatcagaacatat

SEQ ID NO: 38571 - DNA, 22 bp, synthetic construct
  misc_feature 1..22: note = chemically synthesized
  source 1..22: mol_type = other DNA
ctattgaacatcagaacatatt

SEQ ID NO: 38572 - DNA, 22 bp, synthetic construct
  misc_feature 1..22: note = chemically synthesized
  source 1..22: mol_type = other DNA
ttgaacatcagaacatattcct

SEQ ID NO: 38573 - DNA, 22 bp, synthetic construct
  misc_feature 1..22: note = chemically synthesized
  source 1..22: mol_type = other DNA
aacatcagaacatattccttct

SEQ ID NO: 38574 - DNA, 22 bp, synthetic construct
  misc_feature 1..22: note = chemically synthesized
  source 1..22: mol_type = other DNA
cttctatctaactgcctgtttc

SEQ ID NO: 38575 - DNA, 22 bp, synthetic construct
  misc_feature 1..22: note = chemically synthesized
  source 1..22: mol_type = other DNA
ctatctaactgcctgtttccat

SEQ ID NO: 38576 - DNA, 22 bp, synthetic construct
  misc_feature 1..22: note = chemically synthesized
  source 1..22: mol_type = other DNA
tatctaactgcctgtttccatt

SEQ ID NO: 38577 - DNA, 22 bp, synthetic construct
  misc_feature 1..22: note = chemically synthesized
  source 1..22: mol_type = other DNA
tctaactgcctgtttccattaa

SEQ ID NO: 38578 - DNA, 22 bp, synthetic construct
  misc_feature 1..22: note = chemically synthesized
  source 1..22: mol_type = other DNA
actgcctgtttccattaaccaa

SEQ ID NO: 38579 - DNA, 22 bp, synthetic construct
  misc_feature 1..22: note = chemically synthesized
  source 1..22: mol_type = other DNA
cctgtttccattaaccaacttc

SEQ ID NO: 38580 - DNA, 22 bp, synthetic construct
  misc_feature 1..22: note = chemically synthesized
  source 1..22: mol_type = other DNA
tttccattaaccaacttctctt

SEQ ID NO: 38581 - DNA, 22 bp, synthetic construct
  misc_feature 1..22: note = chemically synthesized
  source 1..22: mol_type = other DNA
ccattaaccaacttctcttcgt

SEQ ID NO: 38582 - DNA, 22 bp, synthetic construct
  misc_feature 1..22: note = chemically synthesized
  source 1..22: mol_type = other DNA
cattaaccaacttctcttcgtc

SEQ ID NO: 38583 - DNA, 22 bp, synthetic construct
  misc_feature 1..22: note = chemically synthesized
  source 1..22: mol_type = other DNA
accaacttctcttcgtctccct

SEQ ID NO: 38584 - DNA, 22 bp, synthetic construct
  misc_feature 1..22: note = chemically synthesized
  source 1..22: mol_type = other DNA
ctcttcgtctcccttcctccca

SEQ ID NO: 38585 - DNA, 22 bp, synthetic construct
  misc_feature 1..22: note = chemically synthesized
  source 1..22: mol_type = other DNA
tcttcgtctcccttcctcccat

SEQ ID NO: 38586 - DNA, 22 bp, synthetic construct
  misc_feature 1..22: note = chemically synthesized
  source 1..22: mol_type = other DNA
ttcgtctcccttcctcccataa

SEQ ID NO: 38587 - DNA, 22 bp, synthetic construct
  misc_feature 1..22: note = chemically synthesized
  source 1..22: mol_type = other DNA
cgtctcccttcctcccataacg

SEQ ID NO: 38588 - DNA, 22 bp, synthetic construct
  misc_feature 1..22: note = chemically synthesized
  source 1..22: mol_type = other DNA
gtctcccttcctcccataacgt

SEQ ID NO: 38589 - DNA, 22 bp, synthetic construct
  misc_feature 1..22: note = chemically synthesized
  source 1..22: mol_type = other DNA
ccttcctcccataacgtacaca

SEQ ID NO: 38590 - DNA, 22 bp, synthetic construct
  misc_feature 1..22: note = chemically synthesized
  source 1..22: mol_type = other DNA
cctcccataacgtacacacctt

SEQ ID NO: 38591 - DNA, 22 bp, synthetic construct
  misc_feature 1..22: note = chemically synthesized
  source 1..22: mol_type = other DNA
ctcccataacgtacacaccttt

SEQ ID NO: 38592 - DNA, 22 bp, synthetic construct
  misc_feature 1..22: note = chemically synthesized
  source 1..22: mol_type = other DNA
ccataacgtacacacctttctc

SEQ ID NO: 38593 - DNA, 22 bp, synthetic construct
  misc_feature 1..22: note = chemically synthesized
  source 1..22: mol_type = other DNA
tctctacctctggtttctgtca

SEQ ID NO: 38594 - DNA, 22 bp, synthetic construct
  misc_feature 1..22: note = chemically synthesized
  source 1..22: mol_type = other DNA
ctctacctctggtttctgtcat

SEQ ID NO: 38595 - DNA, 22 bp, synthetic construct
  misc_feature 1..22: note = chemically synthesized
  source 1..22: mol_type = other DNA
tctacctctggtttctgtcatt

SEQ ID NO: 38596 - DNA, 22 bp, synthetic construct
  misc_feature 1..22: note = chemically synthesized
  source 1..22: mol_type = other DNA
tacctctggtttctgtcattct

SEQ ID NO: 38597 - DNA, 22 bp, synthetic construct
  misc_feature 1..22: note = chemically synthesized
  source 1..22: mol_type = other DNA
cctctggtttctgtcattctac

SEQ ID NO: 38598 - DNA, 22 bp, synthetic construct
  misc_feature 1..22: note = chemically synthesized
  source 1..22: mol_type = other DNA
tggtttctgtcattctactctc

SEQ ID NO: 38599 - DNA, 22 bp, synthetic construct
  misc_feature 1..22: note = chemically synthesized
  source 1..22: mol_type = other DNA
gtttctgtcattctactctcta

SEQ ID NO: 38600 - DNA, 22 bp, synthetic construct
  misc_feature 1..22: note = chemically synthesized
  source 1..22: mol_type = other DNA
ctgtcattctactctctaccta

SEQ ID NO: 38601 - DNA, 22 bp, synthetic construct
  misc_feature 1..22: note = chemically synthesized
  source 1..22: mol_type = other DNA
tgtcattctactctctacctac

SEQ ID NO: 38602 - DNA, 22 bp, synthetic construct
  misc_feature 1..22: note = chemically synthesized
  source 1..22: mol_type = other DNA
tcattctactctctacctacat

SEQ ID NO: 38603 - DNA, 22 bp, synthetic construct
  misc_feature 1..22: note = chemically synthesized
  source 1..22: mol_type = other DNA
tactctctacctacatgatatt

SEQ ID NO: 38604 - DNA, 22 bp, synthetic construct
  misc_feature 1..22: note = chemically synthesized
  source 1..22: mol_type = other DNA
ctctctacctacatgatattaa

SEQ ID NO: 38605 - DNA, 22 bp, synthetic construct
  misc_feature 1..22: note = chemically synthesized
  source 1..22: mol_type = other DNA
tctacctacatgatattaactt

SEQ ID NO: 38606 - DNA, 22 bp, synthetic construct
  misc_feature 1..22: note = chemically synthesized
  source 1..22: mol_type = other DNA
tacctacatgatattaactttt

SEQ ID NO: 38607 - DNA, 22 bp, synthetic construct
  misc_feature 1..22: note = chemically synthesized
  source 1..22: mol_type = other DNA
cctacatgatattaactttttt

SEQ ID NO: 38608 - DNA, 22 bp, synthetic construct
  misc_feature 1..22: note = chemically synthesized
  source 1..22: mol_type = other DNA
catgatattaacttttttagct

SEQ ID NO: 38609 - DNA, 22 bp, synthetic construct
  misc_feature 1..22: note = chemically synthesized
  source 1..22: mol_type = other DNA
acttttttagctcccacatatc

SEQ ID NO: 38610 - DNA, 22 bp, synthetic construct
  misc_feature 1..22: note = chemically synthesized
  source 1..22: mol_type = other DNA
ttttagctcccacatatcagtg

SEQ ID NO: 38611 - DNA, 22 bp, synthetic construct
  misc_feature 1..22: note = chemically synthesized
  source 1..22: mol_type = other DNA
tttagctcccacatatcagtga

SEQ ID NO: 38612 - DNA, 22 bp, synthetic construct
  misc_feature 1..22: note = chemically synthesized
  source 1..22: mol_type = other DNA
ttagctcccacatatcagtgag

SEQ ID NO: 38613 - DNA, 22 bp, synthetic construct
  misc_feature 1..22: note = chemically synthesized
  source 1..22: mol_type = other DNA
tagctcccacatatcagtgaga

SEQ ID NO: 38614 - DNA, 22 bp, synthetic construct
  misc_feature 1..22: note = chemically synthesized
  source 1..22: mol_type = other DNA
agctcccacatatcagtgagaa

SEQ ID NO: 38615 - DNA, 22 bp, synthetic construct
  misc_feature 1..22: note = chemically synthesized
  source 1..22: mol_type = other DNA
gctcccacatatcagtgagaac

SEQ ID NO: 38616 - DNA, 22 bp, synthetic construct
  misc_feature 1..22: note = chemically synthesized
  source 1..22: mol_type = other DNA
ccacatatcagtgagaacatgc

SEQ ID NO: 38617 - DNA, 22 bp, synthetic construct
  misc_feature 1..22: note = chemically synthesized
  source 1..22: mol_type = other DNA
gtctttctatgcctggcttatt

SEQ ID NO: 38618 - DNA, 22 bp, synthetic construct
  misc_feature 1..22: note = chemically synthesized
  source 1..22: mol_type = other DNA
tctttctatgcctggcttattt

SEQ ID NO: 38619 - DNA, 22 bp, synthetic construct
  misc_feature 1..22: note = chemically synthesized
  source 1..22: mol_type = other DNA
tctatgcctggcttatttcgtt

SEQ ID NO: 38620 - DNA, 22 bp, synthetic construct
  misc_feature 1..22: note = chemically synthesized
  source 1..22: mol_type = other DNA
ctatgcctggcttatttcgttt

SEQ ID NO: 38621 - DNA, 22 bp, synthetic construct
  misc_feature 1..22: note = chemically synthesized
  source 1..22: mol_type = other DNA
tatgcctggcttatttcgttta

SEQ ID NO: 38622 - DNA, 22 bp, synthetic construct
  misc_feature 1..22: note = chemically synthesized
  source 1..22: mol_type = other DNA
tgcctggcttatttcgtttaac

SEQ ID NO: 38623 - DNA, 22 bp, synthetic construct
  misc_feature 1..22: note = chemically synthesized
  source 1..22: mol_type = other DNA
gcttatttcgtttaacataatg

SEQ ID NO: 38624 - DNA, 22 bp, synthetic construct
  misc_feature 1..22: note = chemically synthesized
  source 1..22: mol_type = other DNA
atttcgtttaacataatgactt

SEQ ID NO: 38625 - DNA, 22 bp, synthetic construct
  misc_feature 1..22: note = chemically synthesized
  source 1..22: mol_type = other DNA
tttcgtttaacataatgacttc

SEQ ID NO: 38626 - DNA, 22 bp, synthetic construct
  misc_feature 1..22: note = chemically synthesized
  source 1..22: mol_type = other DNA
cgtttaacataatgacttccag

SEQ ID NO: 38627 - DNA, 22 bp, synthetic construct
  misc_feature 1..22: note = chemically synthesized
  source 1..22: mol_type = other DNA
gtttaacataatgacttccagt

SEQ ID NO: 38628 - DNA, 22 bp, synthetic construct
  misc_feature 1..22: note = chemically synthesized
  source 1..22: mol_type = other DNA
aacataatgacttccagtttca

SEQ ID NO: 38629 - DNA, 22 bp, synthetic construct
  misc_feature 1..22: note = chemically synthesized
  source 1..22: mol_type = other DNA
acataatgacttccagtttcat

SEQ ID NO: 38630 - DNA, 22 bp, synthetic construct
  misc_feature 1..22: note = chemically synthesized
  source 1..22: mol_type = other DNA
ccagtttcatccatgttgctgc

SEQ ID NO: 38631 - DNA, 22 bp, synthetic construct
  misc_feature 1..22: note = chemically synthesized
  source 1..22: mol_type = other DNA
cagtttcatccatgttgctgca

SEQ ID NO: 38632 - DNA, 22 bp, synthetic construct
  misc_feature 1..22: note = chemically synthesized
  source 1..22: mol_type = other DNA
catccatgttgctgcaaatgaa

SEQ ID NO: 38633 - DNA, 22 bp, synthetic construct
  misc_feature 1..22: note = chemically synthesized
  source 1..22: mol_type = other DNA
atccatgttgctgcaaatgaaa

SEQ ID NO: 38634 - DNA, 22 bp, synthetic construct
  misc_feature 1..22: note = chemically synthesized
  source 1..22: mol_type = other DNA
ctgcaaatgaaatgattttata

SEQ ID NO: 38635 - DNA, 22 bp, synthetic construct
  misc_feature 1..22: note = chemically synthesized
  source 1..22: mol_type = other DNA
caaatgaaatgattttatattt

SEQ ID NO: 38636 - DNA, 22 bp, synthetic construct
  misc_feature 1..22: note = chemically synthesized
  source 1..22: mol_type = other DNA
tatatttgtatggttgaataat

SEQ ID NO: 38637 - DNA, 22 bp, synthetic construct
  misc_feature 1..22: note = chemically synthesized
  source 1..22: mol_type = other DNA
atatttgtatggttgaataata

SEQ ID NO: 38638 - DNA, 22 bp, synthetic construct
  misc_feature 1..22: note = chemically synthesized
  source 1..22: mol_type = other DNA
tatttgtatggttgaataatat

SEQ ID NO: 38639 - DNA, 22 bp, synthetic construct
  misc_feature 1..22: note = chemically synthesized
  source 1..22: mol_type = other DNA
gtatggttgaataatattcaat

SEQ ID NO: 38640 - DNA, 22 bp, synthetic construct
  misc_feature 1..22: note = chemically synthesized
  source 1..22: mol_type = other DNA
tatggttgaataatattcaatt

SEQ ID NO: 38641 - DNA, 22 bp, synthetic construct
  misc_feature 1..22: note = chemically synthesized
  source 1..22: mol_type = other DNA
aataatattcaattgtgtgtat

SEQ ID NO: 38642 - DNA, 22 bp, synthetic construct
  misc_feature 1..22: note = chemically synthesized
  source 1..22: mol_type = other DNA
aattgtgtgtatacaccacatt

SEQ ID NO: 38643 - DNA, 22 bp, synthetic construct
  misc_feature 1..22: note = chemically synthesized
  source 1..22: mol_type = other DNA
tgtgtatacaccacattttctt

SEQ ID NO: 38644 - DNA, 22 bp, synthetic construct
  misc_feature 1..22: note = chemically synthesized
  source 1..22: mol_type = other DNA
tcttcattcatccattgatgga

SEQ ID NO: 38645 - DNA, 22 bp, synthetic construct
  misc_feature 1..22: note = chemically synthesized
  source 1..22: mol_type = other DNA
cttcattcatccattgatggac

SEQ ID NO: 38646 - DNA, 22 bp, synthetic construct
  misc_feature 1..22: note = chemically synthesized
  source 1..22: mol_type = other DNA
ttcattcatccattgatggaca

SEQ ID NO: 38647 - DNA, 22 bp, synthetic construct
  misc_feature 1..22: note = chemically synthesized
  source 1..22: mol_type = other DNA
cattcatccattgatggacact

SEQ ID NO: 38648 - DNA, 22 bp, synthetic construct
  misc_feature 1..22: note = chemically synthesized
  source 1..22: mol_type = other DNA
attcatccattgatggacactt

SEQ ID NO: 38649 - DNA, 22 bp, synthetic construct
  misc_feature 1..22: note = chemically synthesized
  source 1..22: mol_type = other DNA
atccattgatggacacttaggt

SEQ ID NO: 38650 - DNA, 22 bp, synthetic construct
  misc_feature 1..22: note = chemically synthesized
  source 1..22: mol_type = other DNA
atggacacttaggttgattcca

SEQ ID NO: 38651 - DNA, 22 bp, synthetic construct
  misc_feature 1..22: note = chemically synthesized
  source 1..22: mol_type = other DNA
aggttgattccatatctttgct

SEQ ID NO: 38652 - DNA, 22 bp, synthetic construct
  misc_feature 1..22: note = chemically synthesized
  source 1..22: mol_type = other DNA
ggttgattccatatctttgcta

SEQ ID NO: 38653 - DNA, 22 bp, synthetic construct
  misc_feature 1..22: note = chemically synthesized
  source 1..22: mol_type = other DNA
attccatatctttgctaatgtg

SEQ ID NO: 38654 - DNA, 22 bp, synthetic construct
  misc_feature 1..22: note = chemically synthesized
  source 1..22: mol_type = other DNA
catatctttgctaatgtgaatc

SEQ ID NO: 38655 - DNA, 22 bp, synthetic construct
  misc_feature 1..22: note = chemically synthesized
  source 1..22: mol_type = other DNA
tgctaatgtgaatcgtgctgca

SEQ ID NO: 38656 - DNA, 22 bp, synthetic construct
  misc_feature 1..22: note = chemically synthesized
  source 1..22: mol_type = other DNA
gctaatgtgaatcgtgctgcaa

SEQ ID NO: 38657 - DNA, 22 bp, synthetic construct
  misc_feature 1..22: note = chemically synthesized
  source 1..22: mol_type = other DNA
ctaatgtgaatcgtgctgcaat

SEQ ID NO: 38658 - DNA, 22 bp, synthetic construct
  misc_feature 1..22: note = chemically synthesized
  source 1..22: mol_type = other DNA
atgtgaatcgtgctgcaataaa

SEQ ID NO: 38659 - DNA, 22 bp, synthetic construct
  misc_feature 1..22: note = chemically synthesized
  source 1..22: mol_type = other DNA
caataaacagtgtggtaccagt

SEQ ID NO: 38660 - DNA, 22 bp, synthetic construct
  misc_feature 1..22: note = chemically synthesized
  source 1..22: mol_type = other DNA
tttattattctgaattcttttc

SEQ ID NO: 38661 - DNA, 22 bp, synthetic construct
  misc_feature 1..22: note = chemically synthesized
  source 1..22: mol_type = other DNA
attattctgaattcttttcctt

SEQ ID NO: 38662 - DNA, 22 bp, synthetic construct
  misc_feature 1..22: note = chemically synthesized
  source 1..22: mol_type = other DNA
ttattctgaattcttttccttt

SEQ ID NO: 38663 - DNA, 22 bp, synthetic construct
  misc_feature 1..22: note = chemically synthesized
  source 1..22: mol_type = other DNA
ttctgaattcttttcctttgga

SEQ ID NO: 38664 - DNA, 22 bp, synthetic construct
  misc_feature 1..22: note = chemically synthesized
  source 1..22: mol_type = other DNA
tgaattcttttcctttggataa

SEQ ID NO: 38665 - DNA, 22 bp, synthetic construct
  misc_feature 1..22: note = chemically synthesized
  source 1..22: mol_type = other DNA
aattcttttcctttggataaat

SEQ ID NO: 38666 - DNA, 22 bp, synthetic construct
  misc_feature 1..22: note = chemically synthesized
  source 1..22: mol_type = other DNA
ttttcctttggataaataccca

SEQ ID NO: 38667 - DNA, 22 bp, synthetic construct
  misc_feature 1..22: note = chemically synthesized
  source 1..22: mol_type = other DNA
ttcctttggataaatacccagt

SEQ ID NO: 38668 - DNA, 22 bp, synthetic construct
  misc_feature 1..22: note = chemically synthesized
  source 1..22: mol_type = other DNA
tcctttggataaatacccagta

SEQ ID NO: 38669 - DNA, 22 bp, synthetic construct
  misc_feature 1..22: note = chemically synthesized
  source 1..22: mol_type = other DNA
cctttggataaatacccagtaa

SEQ ID NO: 38670 - DNA, 22 bp, synthetic construct
  misc_feature 1..22: note = chemically synthesized
  source 1..22: mol_type = other DNA
ctttggataaatacccagtaat

SEQ ID NO: 38671 - DNA, 22 bp, synthetic construct
  misc_feature 1..22: note = chemically synthesized
  source 1..22: mol_type = other DNA
tggataaatacccagtaataag

SEQ ID NO: 38672 - DNA, 22 bp, synthetic construct
  misc_feature 1..22: note = chemically synthesized
  source 1..22: mol_type = other DNA
ggataaatacccagtaataaga

SEQ ID NO: 38673 - DNA, 22 bp, synthetic construct
  misc_feature 1..22: note = chemically synthesized
  source 1..22: mol_type = other DNA
gataaatacccagtaataagat

SEQ ID NO: 38674 - DNA, 22 bp, synthetic construct
  misc_feature 1..22: note = chemically synthesized
  source 1..22: mol_type = other DNA
ctggatcttatgatagttcaat

SEQ ID NO: 38675 - DNA, 22 bp, synthetic construct
  misc_feature 1..22: note = chemically synthesized
  source 1..22: mol_type = other DNA
gatcttatgatagttcaatttt

SEQ ID NO: 38676 - DNA, 22 bp, synthetic construct
  misc_feature 1..22: note = chemically synthesized
  source 1..22: mol_type = other DNA
atgatagttcaatttttagctt

SEQ ID NO: 38677 - DNA, 22 bp, synthetic construct
  misc_feature 1..22: note = chemically synthesized
  source 1..22: mol_type = other DNA
tgatagttcaatttttagcttt

SEQ ID NO: 38678 - DNA, 22 bp, synthetic construct
  misc_feature 1..22: note = chemically synthesized
  source 1..22: mol_type = other DNA
aatttttagctttttggtaaat

SEQ ID NO: 38679 - DNA, 22 bp, synthetic construct
  misc_feature 1..22: note = chemically synthesized
  source 1..22: mol_type = other DNA
ttagctttttggtaaatctaca

SEQ ID NO: 38680 - DNA, 22 bp, synthetic construct
  misc_feature 1..22: note = chemically synthesized
  source 1..22: mol_type = other DNA
tagctttttggtaaatctacat

SEQ ID NO: 38681 - DNA, 22 bp, synthetic construct
  misc_feature 1..22: note = chemically synthesized
  source 1..22: mol_type = other DNA
agctttttggtaaatctacata

SEQ ID NO: 38682 - DNA, 22 bp, synthetic construct
  misc_feature 1..22: note = chemically synthesized
  source 1..22: mol_type = other DNA
gctttttggtaaatctacatat

SEQ ID NO: 38683 - DNA, 22 bp, synthetic construct
  misc_feature 1..22: note = chemically synthesized
  source 1..22: mol_type = other DNA
tttggtaaatctacatattgtt

SEQ ID NO: 38684 - DNA, 22 bp, synthetic construct
  misc_feature 1..22: note = chemically synthesized
  source 1..22: mol_type = other DNA
ttggtaaatctacatattgttt

SEQ ID NO: 38685 - DNA, 22 bp, synthetic construct
  misc_feature 1..22: note = chemically synthesized
  source 1..22: mol_type = other DNA
tggtaaatctacatattgtttt

SEQ ID NO: 38686 - DNA, 22 bp, synthetic construct
  misc_feature 1..22: note = chemically synthesized
  source 1..22: mol_type = other DNA
ggtaaatctacatattgttttc

SEQ ID NO: 38687 - DNA, 22 bp, synthetic construct
  misc_feature 1..22: note = chemically synthesized
  source 1..22: mol_type = other DNA
gtaaatctacatattgttttcc

SEQ ID NO: 38688 - DNA, 22 bp, synthetic construct
  misc_feature 1..22: note = chemically synthesized
  source 1..22: mol_type = other DNA
catattgttttccatagtggct

SEQ ID NO: 38689 - DNA, 22 bp, synthetic construct
  misc_feature 1..22: note = chemically synthesized
  source 1..22: mol_type = other DNA
ttttccatagtggctatactaa

SEQ ID NO: 38690 - DNA, 22 bp, synthetic construct
  misc_feature 1..22: note = chemically synthesized
  source 1..22: mol_type = other DNA
tccatagtggctatactaattt

SEQ ID NO: 38691 - DNA, 22 bp, synthetic construct
  misc_feature 1..22: note = chemically synthesized
  source 1..22: mol_type = other DNA
ccatagtggctatactaatttg

SEQ ID NO: 38692 - DNA, 22 bp, synthetic construct
  misc_feature 1..22: note = chemically synthesized
  source 1..22: mol_type = other DNA
catagtggctatactaatttgc

SEQ ID NO: 38693 - DNA, 22 bp, synthetic construct
  misc_feature 1..22: note = chemically synthesized
  source 1..22: mol_type = other DNA
tactaatttgcatgcttaccaa

SEQ ID NO: 38694 - DNA, 22 bp, synthetic construct
  misc_feature 1..22: note = chemically synthesized
  source 1..22: mol_type = other DNA
atttgcatgcttaccaatagtg

SEQ ID NO: 38695 - DNA, 22 bp, synthetic construct
  misc_feature 1..22: note = chemically synthesized
  source 1..22: mol_type = other DNA
gcatgcttaccaatagtgccta

SEQ ID NO: 38696 - DNA, 22 bp, synthetic construct
  misc_feature 1..22: note = chemically synthesized
  source 1..22: mol_type = other DNA
catgcttaccaatagtgcctac

SEQ ID NO: 38697 - DNA, 22 bp, synthetic construct
  misc_feature 1..22: note = chemically synthesized
  source 1..22: mol_type = other DNA
accaatagtgcctacgagtgcc

SEQ ID NO: 38698 - DNA, 22 bp, synthetic construct
  misc_feature 1..22: note = chemically synthesized
  source 1..22: mol_type = other DNA
ccaatagtgcctacgagtgcct

SEQ ID NO: 38699 - DNA, 22 bp, synthetic construct
  misc_feature 1..22: note = chemically synthesized
  source 1..22: mol_type = other DNA
cgagtgccttttccttcacatc

SEQ ID NO: 38700 - DNA, 22 bp, synthetic construct
  misc_feature 1..22: note = chemically synthesized
  source 1..22: mol_type = other DNA
ttccttcacatccttgccagca

SEQ ID NO: 38701 - DNA, 22 bp, synthetic construct
  misc_feature 1..22: note = chemically synthesized
  source 1..22: mol_type = other DNA
tccttcacatccttgccagcat

SEQ ID NO: 38702 - DNA, 22 bp, synthetic construct
  misc_feature 1..22: note = chemically synthesized
  source 1..22: mol_type = other DNA
ccttcacatccttgccagcatg

SEQ ID NO: 38703 - DNA, 22 bp, synthetic construct
  misc_feature 1..22: note = chemically synthesized
  source 1..22: mol_type = other DNA
cttcacatccttgccagcatgt

SEQ ID NO: 38704 - DNA, 22 bp, synthetic construct
  misc_feature 1..22: note = chemically synthesized
  source 1..22: mol_type = other DNA
cacatccttgccagcatgtgtt

SEQ ID NO: 38705 - DNA, 22 bp, synthetic construct
  misc_feature 1..22: note = chemically synthesized
  source 1..22: mol_type = other DNA
acatccttgccagcatgtgtta

SEQ ID NO: 38706 - DNA, 22 bp, synthetic construct
  misc_feature 1..22: note = chemically synthesized
  source 1..22: mol_type = other DNA
gccagcatgtgttatttattta

SEQ ID NO: 38707 - DNA, 22 bp, synthetic construct
  misc_feature 1..22: note = chemically synthesized
  source 1..22: mol_type = other DNA
ccagcatgtgttatttatttat

SEQ ID NO: 38708 - DNA, 22 bp, synthetic construct
  misc_feature 1..22: note = chemically synthesized
  source 1..22: mol_type = other DNA
tttatttattaatttatttaaa

SEQ ID NO: 38709 - DNA, 22 bp, synthetic construct
  misc_feature 1..22: note = chemically synthesized
  source 1..22: mol_type = other DNA
atttattaatttatttaaatca

SEQ ID NO: 38710 - DNA, 22 bp, synthetic construct
  misc_feature 1..22: note = chemically synthesized
  source 1..22: mol_type = other DNA
tttattaatttatttaaatcat

SEQ ID NO: 38711 - DNA, 22 bp, synthetic construct
  misc_feature 1..22: note = chemically synthesized
  source 1..22: mol_type = other DNA
attaatttatttaaatcatgat

SEQ ID NO: 38712 - DNA, 22 bp, synthetic construct
  misc_feature 1..22: note = chemically synthesized
  source 1..22: mol_type = other DNA
ttaatttatttaaatcatgatg

SEQ ID NO: 38713 - DNA, 22 bp, synthetic construct
  misc_feature 1..22: note = chemically synthesized
  source 1..22: mol_type = other DNA
atttatttaaatcatgatgatt

SEQ ID NO: 38714 - DNA, 22 bp, synthetic construct
  misc_feature 1..22: note = chemically synthesized
  source 1..22: mol_type = other DNA
atttaaatcatgatgattctaa

SEQ ID NO: 38715 - DNA, 22 bp, synthetic construct
  misc_feature 1..22: note = chemically synthesized
  source 1..22: mol_type = other DNA
tttaaatcatgatgattctaac

SEQ ID NO: 38716 - DNA, 22 bp, synthetic construct
  misc_feature 1..22: note = chemically synthesized
  source 1..22: mol_type = other DNA
aaatcatgatgattctaactgg

SEQ ID NO: 38717 - DNA, 22 bp, synthetic construct
  misc_feature 1..22: note = chemically synthesized
  source 1..22: mol_type = other DNA
aatcatgatgattctaactggc

SEQ ID NO: 38718 - DNA, 22 bp, synthetic construct
  misc_feature 1..22: note = chemically synthesized
  source 1..22: mol_type = other DNA
taactggcataagatgatatct

SEQ ID NO: 38719 - DNA, 22 bp, synthetic construct
  misc_feature 1..22: note = chemically synthesized
  source 1..22: mol_type = other DNA
actggcataagatgatatctca

SEQ ID NO: 38720 - DNA, 22 bp, synthetic construct
  misc_feature 1..22: note = chemically synthesized
  source 1..22: mol_type = other DNA
gcataagatgatatctcattgt

SEQ ID NO: 38721 - DNA, 22 bp, synthetic construct
  misc_feature 1..22: note = chemically synthesized
  source 1..22: mol_type = other DNA
attgtggttttgatttgcattt

SEQ ID NO: 38722 - DNA, 22 bp, synthetic construct
  misc_feature 1..22: note = chemically synthesized
  source 1..22: mol_type = other DNA
tggttttgatttgcatttctct

SEQ ID NO: 38723 - DNA, 22 bp, synthetic construct
  misc_feature 1..22: note = chemically synthesized
  source 1..22: mol_type = other DNA
tgatttgcatttctctgatgat

SEQ ID NO: 38724 - DNA, 22 bp, synthetic construct
  misc_feature 1..22: note = chemically synthesized
  source 1..22: mol_type = other DNA
gatttgcatttctctgatgatt

SEQ ID NO: 38725 - DNA, 22 bp, synthetic construct
  misc_feature 1..22: note = chemically synthesized
  source 1..22: mol_type = other DNA
atttgcatttctctgatgatta

SEQ ID NO: 38726 - DNA, 22 bp, synthetic construct
  misc_feature 1..22: note = chemically synthesized
  source 1..22: mol_type = other DNA
gcatttctctgatgattagtaa

SEQ ID NO: 38727 - DNA, 22 bp, synthetic construct
  misc_feature 1..22: note = chemically synthesized
  source 1..22: mol_type = other DNA
catttctctgatgattagtaat

SEQ ID NO: 38728 - DNA, 22 bp, synthetic construct
  misc_feature 1..22: note = chemically synthesized
  source 1..22: mol_type = other DNA
ctctgatgattagtaatgttga

SEQ ID NO: 38729 - DNA, 22 bp, synthetic construct
  misc_feature 1..22: note = chemically synthesized
  source 1..22: mol_type = other DNA
tctgatgattagtaatgttgag

SEQ ID NO: 38730 - DNA, 22 bp, synthetic construct
  misc_feature 1..22: note = chemically synthesized
  source 1..22: mol_type = other DNA
tgatgattagtaatgttgagca

SEQ ID NO: 38731 - DNA, 22 bp, synthetic construct
  misc_feature 1..22: note = chemically synthesized
  source 1..22: mol_type = other DNA
atgattagtaatgttgagcaat

SEQ ID NO: 38732 - DNA, 22 bp, synthetic construct
  misc_feature 1..22: note = chemically synthesized
  source 1..22: mol_type = other DNA
gtaatgttgagcaatttcccca

SEQ ID NO: 38733 - DNA, 22 bp, synthetic construct
  misc_feature 1..22: note = chemically synthesized
  source 1..22: mol_type = other DNA
agcaatttccccatacccattg

SEQ ID NO: 38734 - DNA, 22 bp, synthetic construct
  misc_feature 1..22: note = chemically synthesized
  source 1..22: mol_type = other DNA
ccccatacccattgtgcatttg

SEQ ID NO: 38735 - DNA, 22 bp, synthetic construct
  misc_feature 1..22: note = chemically synthesized
  source 1..22: mol_type = other DNA
cccatacccattgtgcatttgt

SEQ ID NO: 38736 - DNA, 22 bp, synthetic construct
  misc_feature 1..22: note = chemically synthesized
  source 1..22: mol_type = other DNA
tgcatttgtatgtcttcttttg

SEQ ID NO: 38737 - DNA, 22 bp, synthetic construct
  misc_feature 1..22: note = chemically synthesized
  source 1..22: mol_type = other DNA
gtatgtcttcttttgaaaaata

SEQ ID NO: 38738 - DNA, 22 bp, synthetic construct
  misc_feature 1..22: note = chemically synthesized
  source 1..22: mol_type = other DNA
tatgtcttcttttgaaaaatat

SEQ ID NO: 38739 - DNA, 22 bp, synthetic construct
  misc_feature 1..22: note = chemically synthesized
  source 1..22: mol_type = other DNA
cttttgaaaaatatcctttgcc

SEQ ID NO: 38740 - DNA, 22 bp, synthetic construct
  misc_feature 1..22: note = chemically synthesized
  source 1..22: mol_type = other DNA
ttttgaaaaatatcctttgcca

SEQ ID NO: 38741 - DNA, 22 bp, synthetic construct
  misc_feature 1..22: note = chemically synthesized
  source 1..22: mol_type = other DNA
ttgaaaaatatcctttgccaat

SEQ ID NO: 38742 - DNA, 22 bp, synthetic construct
  misc_feature 1..22: note = chemically synthesized
  source 1..22: mol_type = other DNA
tgaaaaatatcctttgccaatt

SEQ ID NO: 38743 - DNA, 22 bp, synthetic construct
  misc_feature 1..22: note = chemically synthesized
  source 1..22: mol_type = other DNA
gaaaaatatcctttgccaattt

SEQ ID NO: 38744 - DNA, 22 bp, synthetic construct
  misc_feature 1..22: note = chemically synthesized
  source 1..22: mol_type = other DNA
aaaaatatcctttgccaatttt

SEQ ID NO: 38745 - DNA, 22 bp, synthetic construct
  misc_feature 1..22: note = chemically synthesized
  source 1..22: mol_type = other DNA
tgccaattttttaatgagatta

SEQ ID NO: 38746 - DNA, 22 bp, synthetic construct
  misc_feature 1..22: note = chemically synthesized
  source 1..22: mol_type = other DNA
gccaattttttaatgagattat

SEQ ID NO: 38747 - DNA, 22 bp, synthetic construct
  misc_feature 1..22: note = chemically synthesized
  source 1..22: mol_type = other DNA
ccaattttttaatgagattatt

SEQ ID NO: 38748 - DNA, 22 bp, synthetic construct
  misc_feature 1..22: note = chemically synthesized
  source 1..22: mol_type = other DNA
tttaatgagattatttgttttt

SEQ ID NO: 38749 - DNA, 22 bp, synthetic construct
  misc_feature 1..22: note = chemically synthesized
  source 1..22: mol_type = other DNA
ttaatgagattatttgtttttc

SEQ ID NO: 38750 - DNA, 22 bp, synthetic construct
  misc_feature 1..22: note = chemically synthesized
  source 1..22: mol_type = other DNA
taatgagattatttgtttttcc

SEQ ID NO: 38751 - DNA, 22 bp, synthetic construct
  misc_feature 1..22: note = chemically synthesized
  source 1..22: mol_type = other DNA
aatgagattatttgtttttcca

SEQ ID NO: 38752 - DNA, 22 bp, synthetic construct
  misc_feature 1..22: note = chemically synthesized
  source 1..22: mol_type = other DNA
atgagattatttgtttttccac

SEQ ID NO: 38753 - DNA, 22 bp, synthetic construct
  misc_feature 1..22: note = chemically synthesized
  source 1..22: mol_type = other DNA
tttgtttttccactgttgagtt

SEQ ID NO: 38754 - DNA, 22 bp, synthetic construct
  misc_feature 1..22: note = chemically synthesized
  source 1..22: mol_type = other DNA
gtttttccactgttgagttgtt

SEQ ID NO: 38755 - DNA, 22 bp, synthetic construct
  misc_feature 1..22: note = chemically synthesized
  source 1..22: mol_type = other DNA
tttttccactgttgagttgttt

SEQ ID NO: 38756 - DNA, 22 bp, synthetic construct
  misc_feature 1..22: note = chemically synthesized
  source 1..22: mol_type = other DNA
ttccactgttgagttgtttgag

SEQ ID NO: 38757 - DNA, 22 bp, synthetic construct
  misc_feature 1..22: note = chemically synthesized
  source 1..22: mol_type = other DNA
tccactgttgagttgtttgagt

SEQ ID NO: 38758 - DNA, 22 bp, synthetic construct
  misc_feature 1..22: note = chemically synthesized
  source 1..22: mol_type = other DNA
ccactgttgagttgtttgagtt

SEQ ID NO: 38759 - DNA, 22 bp, synthetic construct
  misc_feature 1..22: note = chemically synthesized
  source 1..22: mol_type = other DNA
cactgttgagttgtttgagttt

SEQ ID NO: 38760 - DNA, 22 bp, synthetic construct
  misc_feature 1..22: note = chemically synthesized
  source 1..22: mol_type = other DNA
ttgagttgtttgagtttcttat

SEQ ID NO: 38761 - DNA, 22 bp, synthetic construct
  misc_feature 1..22: note = chemically synthesized
  source 1..22: mol_type = other DNA
agttgtttgagtttcttatata

SEQ ID NO: 38762 - DNA, 22 bp, synthetic construct
  misc_feature 1..22: note = chemically synthesized
  source 1..22: mol_type = other DNA
tttgagtttcttatatattctg

SEQ ID NO: 38763 - DNA, 22 bp, synthetic construct
  misc_feature 1..22: note = chemically synthesized
  source 1..22: mol_type = other DNA
gagtttcttatatattctggag

SEQ ID NO: 38764 - DNA, 22 bp, synthetic construct
  misc_feature 1..22: note = chemically synthesized
  source 1..22: mol_type = other DNA
agtttcttatatattctggaga

SEQ ID NO: 38765 - DNA, 22 bp, synthetic construct
  misc_feature 1..22: note = chemically synthesized
  source 1..22: mol_type = other DNA
cttatatattctggagattaat

SEQ ID NO: 38766 - DNA, 22 bp, synthetic construct
  misc_feature 1..22: note = chemically synthesized
  source 1..22: mol_type = other DNA
ttatatattctggagattaatt

SEQ ID NO: 38767 - DNA, 22 bp, synthetic construct
  misc_feature 1..22: note = chemically synthesized
  source 1..22: mol_type = other DNA
atatattctggagattaattcc

SEQ ID NO: 38768 - DNA, 22 bp, synthetic construct
  misc_feature 1..22: note = chemically synthesized
  source 1..22: mol_type = other DNA
tatattctggagattaattcct

SEQ ID NO: 38769 - DNA, 22 bp, synthetic construct
  misc_feature 1..22: note = chemically synthesized
  source 1..22: mol_type = other DNA
tggagattaattccttgtcaaa

SEQ ID NO: 38770 - DNA, 22 bp, synthetic construct
  misc_feature 1..22: note = chemically synthesized
  source 1..22: mol_type = other DNA
gagattaattccttgtcaaatg

SEQ ID NO: 38771 - DNA, 22 bp, synthetic construct
  misc_feature 1..22: note = chemically synthesized
  source 1..22: mol_type = other DNA
attccttgtcaaatgtatgcaa

SEQ ID NO: 38772 - DNA, 22 bp, synthetic construct
  misc_feature 1..22: note = chemically synthesized
  source 1..22: mol_type = other DNA
cttgtcaaatgtatgcaaatat

SEQ ID NO: 38773 - DNA, 22 bp, synthetic construct
  misc_feature 1..22: note = chemically synthesized
  source 1..22: mol_type = other DNA
gtcaaatgtatgcaaatatttt

SEQ ID NO: 38774 - DNA, 22 bp, synthetic construct
  misc_feature 1..22: note = chemically synthesized
  source 1..22: mol_type = other DNA
tcaaatgtatgcaaatattttc

SEQ ID NO: 38775 - DNA, 22 bp, synthetic construct
  misc_feature 1..22: note = chemically synthesized
  source 1..22: mol_type = other DNA
tctcgcattcaacagcttgtct

SEQ ID NO: 38776 - DNA, 22 bp, synthetic construct
  misc_feature 1..22: note = chemically synthesized
  source 1..22: mol_type = other DNA
ctcgcattcaacagcttgtctc

SEQ ID NO: 38777 - DNA, 22 bp, synthetic construct
  misc_feature 1..22: note = chemically synthesized
  source 1..22: mol_type = other DNA
tcgcattcaacagcttgtctct

SEQ ID NO: 38778 - DNA, 22 bp, synthetic construct
  misc_feature 1..22: note = chemically synthesized
  source 1..22: mol_type = other DNA
gcattcaacagcttgtctcttc

SEQ ID NO: 38779 - DNA, 22 bp, synthetic construct
  misc_feature 1..22: note = chemically synthesized
  source 1..22: mol_type = other DNA
aacagcttgtctcttcactgtg

SEQ ID NO: 38780 - DNA, 22 bp, synthetic construct
  misc_feature 1..22: note = chemically synthesized
  source 1..22: mol_type = other DNA
gtctcttcactgtgttgattgt

SEQ ID NO: 38781 - DNA, 22 bp, synthetic construct
  misc_feature 1..22: note = chemically synthesized
  source 1..22: mol_type = other DNA
tctcttcactgtgttgattgtt

SEQ ID NO: 38782 - DNA, 22 bp, synthetic construct
  misc_feature 1..22: note = chemically synthesized
  source 1..22: mol_type = other DNA
ttcactgtgttgattgtttcct

SEQ ID NO: 38783 - DNA, 22 bp, synthetic construct
  misc_feature 1..22: note = chemically synthesized
  source 1..22: mol_type = other DNA
cactgtgttgattgtttccttt

SEQ ID NO: 38784 - DNA, 22 bp, synthetic construct
  misc_feature 1..22: note = chemically synthesized
  source 1..22: mol_type = other DNA
actgtgttgattgtttccttta

SEQ ID NO: 38785 - DNA, 22 bp, synthetic construct
  misc_feature 1..22: note = chemically synthesized
  source 1..22: mol_type = other DNA
tgttgattgtttcctttactgt

SEQ ID NO: 38786 - DNA, 22 bp, synthetic construct
  misc_feature 1..22: note = chemically synthesized
  source 1..22: mol_type = other DNA
attgtttcctttactgtgcaga

SEQ ID NO: 38787 - DNA, 22 bp, synthetic construct
  misc_feature 1..22: note = chemically synthesized
  source 1..22: mol_type = other DNA
tttcctttactgtgcagatgta

SEQ ID NO: 38788 - DNA, 22 bp, synthetic construct
  misc_feature 1..22: note = chemically synthesized
  source 1..22: mol_type = other DNA
cctttactgtgcagatgtattt

SEQ ID NO: 38789 - DNA, 22 bp, synthetic construct
  misc_feature 1..22: note = chemically synthesized
  source 1..22: mol_type = other DNA
ctttactgtgcagatgtatttt

SEQ ID NO: 38790 - DNA, 22 bp, synthetic construct
  misc_feature 1..22: note = chemically synthesized
  source 1..22: mol_type = other DNA
tactgtgcagatgtattttagc

SEQ ID NO: 38791 - DNA, 22 bp, synthetic construct
  misc_feature 1..22: note = chemically synthesized
  source 1..22: mol_type = other DNA
actgtgcagatgtattttagct

SEQ ID NO: 38792 - DNA, 22 bp, synthetic construct
  misc_feature 1..22: note = chemically synthesized
  source 1..22: mol_type = other DNA
ctgtgcagatgtattttagctt

SEQ ID NO: 38793 - DNA, 22 bp, synthetic construct
  misc_feature 1..22: note = chemically synthesized
  source 1..22: mol_type = other DNA
tgcagatgtattttagcttaat

SEQ ID NO: 38794 - DNA, 22 bp, synthetic construct
  misc_feature 1..22: note = chemically synthesized
  source 1..22: mol_type = other DNA
tagcttaatatagtcccatttg

SEQ ID NO: 38795 - DNA, 22 bp, synthetic construct
  misc_feature 1..22: note = chemically synthesized
  source 1..22: mol_type = other DNA
agcttaatatagtcccatttgt

SEQ ID NO: 38796 - DNA, 22 bp, synthetic construct
  misc_feature 1..22: note = chemically synthesized
  source 1..22: mol_type = other DNA
gcttaatatagtcccatttgtc

SEQ ID NO: 38797 - DNA, 22 bp, synthetic construct
  misc_feature 1..22: note = chemically synthesized
  source 1..22: mol_type = other DNA
aatatagtcccatttgtctatt

SEQ ID NO: 38798 - DNA, 22 bp, synthetic construct
  misc_feature 1..22: note = chemically synthesized
  source 1..22: mol_type = other DNA
atatagtcccatttgtctattt

SEQ ID NO: 38799 - DNA, 22 bp, synthetic construct
  misc_feature 1..22: note = chemically synthesized
  source 1..22: mol_type = other DNA
gtctatttttgcttttgttgcc

SEQ ID NO: 38800 - DNA, 22 bp, synthetic construct
  misc_feature 1..22: note = chemically synthesized
  source 1..22: mol_type = other DNA
tctatttttgcttttgttgcct

SEQ ID NO: 38801 - DNA, 22 bp, synthetic construct
  misc_feature 1..22: note = chemically synthesized
  source 1..22: mol_type = other DNA
tttttgcttttgttgcctgtgc

SEQ ID NO: 38802 - DNA, 22 bp, synthetic construct
  misc_feature 1..22: note = chemically synthesized
  source 1..22: mol_type = other DNA
ttgcttttgttgcctgtgcttt

SEQ ID NO: 38803 - DNA, 22 bp, synthetic construct
  misc_feature 1..22: note = chemically synthesized
  source 1..22: mol_type = other DNA
tgcttttgttgcctgtgctttt

SEQ ID NO: 38804 - DNA, 22 bp, synthetic construct
  misc_feature 1..22: note = chemically synthesized
  source 1..22: mol_type = other DNA
gcttttgttgcctgtgcttttg

SEQ ID NO: 38805 - DNA, 22 bp, synthetic construct
  misc_feature 1..22: note = chemically synthesized
  source 1..22: mol_type = other DNA
cttttgttgcctgtgcttttga

SEQ ID NO: 38806 - DNA, 22 bp, synthetic construct
  misc_feature 1..22: note = chemically synthesized
  source 1..22: mol_type = other DNA
ttgttgcctgtgcttttgaggt

SEQ ID NO: 38807 - DNA, 22 bp, synthetic construct
  misc_feature 1..22: note = chemically synthesized
  source 1..22: mol_type = other DNA
tgttgcctgtgcttttgaggtc

SEQ ID NO: 38808 - DNA, 22 bp, synthetic construct
  misc_feature 1..22: note = chemically synthesized
  source 1..22: mol_type = other DNA
gttgcctgtgcttttgaggtct

SEQ ID NO: 38809 - DNA, 22 bp, synthetic construct
  misc_feature 1..22: note = chemically synthesized
  source 1..22: mol_type = other DNA
ttgcctgtgcttttgaggtctt

SEQ ID NO: 38810 - DNA, 22 bp, synthetic construct
  misc_feature 1..22: note = chemically synthesized
  source 1..22: mol_type = other DNA
cctgtgcttttgaggtcttggc

SEQ ID NO: 38811 - DNA, 22 bp, synthetic construct
  misc_feature 1..22: note = chemically synthesized
  source 1..22: mol_type = other DNA
tgcttttgaggtcttggccata

SEQ ID NO: 38812 - DNA, 22 bp, synthetic construct
  misc_feature 1..22: note = chemically synthesized
  source 1..22: mol_type = other DNA
ttgaggtcttggccataaaatc

SEQ ID NO: 38813 - DNA, 22 bp, synthetic construct
  misc_feature 1..22: note = chemically synthesized
  source 1..22: mol_type = other DNA
tgaggtcttggccataaaatct

SEQ ID NO: 38814 - DNA, 22 bp, synthetic construct
  misc_feature 1..22: note = chemically synthesized
  source 1..22: mol_type = other DNA
gaggtcttggccataaaatctt

SEQ ID NO: 38815 - DNA, 22 bp, synthetic construct
  misc_feature 1..22: note = chemically synthesized
  source 1..22: mol_type = other DNA
aggtcttggccataaaatcttt

SEQ ID NO: 38816 - DNA, 22 bp, synthetic construct
  misc_feature 1..22: note = chemically synthesized
  source 1..22: mol_type = other DNA
ggccataaaatctttgcccaaa

SEQ ID NO: 38817 - DNA, 22 bp, synthetic construct
  misc_feature 1..22: note = chemically synthesized
  source 1..22: mol_type = other DNA
gccataaaatctttgcccaaag

SEQ ID NO: 38818 - DNA, 22 bp, synthetic construct
  misc_feature 1..22: note = chemically synthesized
  source 1..22: mol_type = other DNA
tgcccaaagccatgtcttgaag

SEQ ID NO: 38819 - DNA, 22 bp, synthetic construct
  misc_feature 1..22: note = chemically synthesized
  source 1..22: mol_type = other DNA
gcccaaagccatgtcttgaagt

SEQ ID NO: 38820 - DNA, 22 bp, synthetic construct
  misc_feature 1..22: note = chemically synthesized
  source 1..22: mol_type = other DNA
cccaaagccatgtcttgaagtg

SEQ ID NO: 38821 - DNA, 22 bp, synthetic construct
  misc_feature 1..22: note = chemically synthesized
  source 1..22: mol_type = other DNA
gaagtgtctcccttatgttttc

SEQ ID NO: 38822 - DNA, 22 bp, synthetic construct
  misc_feature 1..22: note = chemically synthesized
  source 1..22: mol_type = other DNA
aagtgtctcccttatgttttct

SEQ ID NO: 38823 - DNA, 22 bp, synthetic construct
  misc_feature 1..22: note = chemically synthesized
  source 1..22: mol_type = other DNA
ccttatgttttcttttagtagt

SEQ ID NO: 38824 - DNA, 22 bp, synthetic construct
  misc_feature 1..22: note = chemically synthesized
  source 1..22: mol_type = other DNA
atgttttcttttagtagtttta

SEQ ID NO: 38825 - DNA, 22 bp, synthetic construct
  misc_feature 1..22: note = chemically synthesized
  source 1..22: mol_type = other DNA
tgttttcttttagtagttttat

SEQ ID NO: 38826 - DNA, 22 bp, synthetic construct
  misc_feature 1..22: note = chemically synthesized
  source 1..22: mol_type = other DNA
tcttttagtagttttatagttt

SEQ ID NO: 38827 - DNA, 22 bp, synthetic construct
  misc_feature 1..22: note = chemically synthesized
  source 1..22: mol_type = other DNA
cttttagtagttttatagtttt

SEQ ID NO: 38828 - DNA, 22 bp, synthetic construct
  misc_feature 1..22: note = chemically synthesized
  source 1..22: mol_type = other DNA
ttttagtagttttatagtttta

SEQ ID NO: 38829 - DNA, 22 bp, synthetic construct
  misc_feature 1..22: note = chemically synthesized
  source 1..22: mol_type = other DNA
ttagtagttttatagttttaag

SEQ ID NO: 38830 - DNA, 22 bp, synthetic construct
  misc_feature 1..22: note = chemically synthesized
  source 1..22: mol_type = other DNA
tagtagttttatagttttaagt

SEQ ID NO: 38831 - DNA, 22 bp, synthetic construct
  misc_feature 1..22: note = chemically synthesized
  source 1..22: mol_type = other DNA
agtagttttatagttttaagtt

SEQ ID NO: 38832 - DNA, 22 bp, synthetic construct
  misc_feature 1..22: note = chemically synthesized
  source 1..22: mol_type = other DNA
gtagttttatagttttaagttt

SEQ ID NO: 38833 - DNA, 22 bp, synthetic construct
  misc_feature 1..22: note = chemically synthesized
  source 1..22: mol_type = other DNA
tatagttttaagttttatattt

SEQ ID NO: 38834 - DNA, 22 bp, synthetic construct
  misc_feature 1..22: note = chemically synthesized
  source 1..22: mol_type = other DNA
atagttttaagttttatattta

SEQ ID NO: 38835 - DNA, 22 bp, synthetic construct
  misc_feature 1..22: note = chemically synthesized
  source 1..22: mol_type = other DNA
tagttttaagttttatatttaa

SEQ ID NO: 38836 - DNA, 22 bp, synthetic construct
  misc_feature 1..22: note = chemically synthesized
  source 1..22: mol_type = other DNA
taagttttatatttaagtcttt

SEQ ID NO: 38837 - DNA, 22 bp, synthetic construct
  misc_feature 1..22: note = chemically synthesized
  source 1..22: mol_type = other DNA
aagttttatatttaagtcttta

SEQ ID NO: 38838 - DNA, 22 bp, synthetic construct
  misc_feature 1..22: note = chemically synthesized
  source 1..22: mol_type = other DNA
agttttatatttaagtctttaa

SEQ ID NO: 38839 - DNA, 22 bp, synthetic construct
  misc_feature 1..22: note = chemically synthesized
  source 1..22: mol_type = other DNA
tatatttaagtctttaatccat

SEQ ID NO: 38840 - DNA, 22 bp, synthetic construct
  misc_feature 1..22: note = chemically synthesized
  source 1..22: mol_type = other DNA
atatttaagtctttaatccatc

SEQ ID NO: 38841 - DNA, 22 bp, synthetic construct
  misc_feature 1..22: note = chemically synthesized
  source 1..22: mol_type = other DNA
tatttaagtctttaatccatct

SEQ ID NO: 38842 - DNA, 22 bp, synthetic construct
  misc_feature 1..22: note = chemically synthesized
  source 1..22: mol_type = other DNA
aagtctttaatccatcttgaga

SEQ ID NO: 38843 - DNA, 22 bp, synthetic construct
  misc_feature 1..22: note = chemically synthesized
  source 1..22: mol_type = other DNA
agtctttaatccatcttgagag

SEQ ID NO: 38844 - DNA, 22 bp, synthetic construct
  misc_feature 1..22: note = chemically synthesized
  source 1..22: mol_type = other DNA
taatccatcttgagagtacgtt

SEQ ID NO: 38845 - DNA, 22 bp, synthetic construct
  misc_feature 1..22: note = chemically synthesized
  source 1..22: mol_type = other DNA
aatccatcttgagagtacgttt

SEQ ID NO: 38846 - DNA, 22 bp, synthetic construct
  misc_feature 1..22: note = chemically synthesized
  source 1..22: mol_type = other DNA
atccatcttgagagtacgtttt

SEQ ID NO: 38847 - DNA, 22 bp, synthetic construct
  misc_feature 1..22: note = chemically synthesized
  source 1..22: mol_type = other DNA
gagagtacgttttatatggcaa

SEQ ID NO: 38848 - DNA, 22 bp, synthetic construct
  misc_feature 1..22: note = chemically synthesized
  source 1..22: mol_type = other DNA
agagtacgttttatatggcaat

SEQ ID NO: 38849 - DNA, 22 bp, synthetic construct
  misc_feature 1..22: note = chemically synthesized
  source 1..22: mol_type = other DNA
tatatggcaataaataggggtt

SEQ ID NO: 38850 - DNA, 22 bp, synthetic construct
  misc_feature 1..22: note = chemically synthesized
  source 1..22: mol_type = other DNA
atatggcaataaataggggttg

SEQ ID NO: 38851 - DNA, 22 bp, synthetic construct
  misc_feature 1..22: note = chemically synthesized
  source 1..22: mol_type = other DNA
tatggcaataaataggggttgt

SEQ ID NO: 38852 - DNA, 22 bp, synthetic construct
  misc_feature 1..22: note = chemically synthesized
  source 1..22: mol_type = other DNA
tattaggccatttttgcatcta

SEQ ID NO: 38853 - DNA, 22 bp, synthetic construct
  misc_feature 1..22: note = chemically synthesized
  source 1..22: mol_type = other DNA
ggccatttttgcatctattgta

SEQ ID NO: 38854 - DNA, 22 bp, synthetic construct
  misc_feature 1..22: note = chemically synthesized
  source 1..22: mol_type = other DNA
ttgcatctattgtacaaggggt

SEQ ID NO: 38855 - DNA, 22 bp, synthetic construct
  misc_feature 1..22: note = chemically synthesized
  source 1..22: mol_type = other DNA
tgcatctattgtacaaggggtt

SEQ ID NO: 38856 - DNA, 22 bp, synthetic construct
  misc_feature 1..22: note = chemically synthesized
  source 1..22: mol_type = other DNA
gcatctattgtacaaggggttg

SEQ ID NO: 38857 - DNA, 22 bp, synthetic construct
  misc_feature 1..22: note = chemically synthesized
  source 1..22: mol_type = other DNA
catctattgtacaaggggttga

SEQ ID NO: 38858 - DNA, 22 bp, synthetic construct
  misc_feature 1..22: note = chemically synthesized
  source 1..22: mol_type = other DNA
ttgtacaaggggttgagttctt

SEQ ID NO: 38859 - DNA, 22 bp, synthetic construct
  misc_feature 1..22: note = chemically synthesized
  source 1..22: mol_type = other DNA
tacaaggggttgagttcttgat

SEQ ID NO: 38860 - DNA, 22 bp, synthetic construct
  misc_feature 1..22: note = chemically synthesized
  source 1..22: mol_type = other DNA
agttcttgatttgattctccat

SEQ ID NO: 38861 - DNA, 22 bp, synthetic construct
  misc_feature 1..22: note = chemically synthesized
  source 1..22: mol_type = other DNA
ttgatttgattctccatttggt

SEQ ID NO: 38862 - DNA, 22 bp, synthetic construct
  misc_feature 1..22: note = chemically synthesized
  source 1..22: mol_type = other DNA
gatttgattctccatttggttg

SEQ ID NO: 38863 - DNA, 22 bp, synthetic construct
  misc_feature 1..22: note = chemically synthesized
  source 1..22: mol_type = other DNA
atttgattctccatttggttgc

SEQ ID NO: 38864 - DNA, 22 bp, synthetic construct
  misc_feature 1..22: note = chemically synthesized
  source 1..22: mol_type = other DNA
gattctccatttggttgctgtt

SEQ ID NO: 38865 - DNA, 22 bp, synthetic construct
  misc_feature 1..22: note = chemically synthesized
  source 1..22: mol_type = other DNA
attctccatttggttgctgttg

SEQ ID NO: 38866 - DNA, 22 bp, synthetic construct
  misc_feature 1..22: note = chemically synthesized
  source 1..22: mol_type = other DNA
tccatttggttgctgttggtgt

SEQ ID NO: 38867 - DNA, 22 bp, synthetic construct
  misc_feature 1..22: note = chemically synthesized
  source 1..22: mol_type = other DNA
catttggttgctgttggtgtat

SEQ ID NO: 38868 - DNA, 22 bp, synthetic construct
  misc_feature 1..22: note = chemically synthesized
  source 1..22: mol_type = other DNA
ggttgctgttggtgtatagaag

SEQ ID NO: 38869 - DNA, 22 bp, synthetic construct
  misc_feature 1..22: note = chemically synthesized
  source 1..22: mol_type = other DNA
gttgctgttggtgtatagaaga

SEQ ID NO: 38870 - DNA, 22 bp, synthetic construct
  misc_feature 1..22: note = chemically synthesized
  source 1..22: mol_type = other DNA
ctgttggtgtatagaagagtta

SEQ ID NO: 38871 - DNA, 22 bp, synthetic construct
  misc_feature 1..22: note = chemically synthesized
  source 1..22: mol_type = other DNA
ttggtgtatagaagagttactg

SEQ ID NO: 38872 - DNA, 22 bp, synthetic construct
  misc_feature 1..22: note = chemically synthesized
  source 1..22: mol_type = other DNA
gtgtatagaagagttactgatt

SEQ ID NO: 38873 - DNA, 22 bp, synthetic construct
  misc_feature 1..22: note = chemically synthesized
  source 1..22: mol_type = other DNA
ctgatttgtgtgcattcatctt

SEQ ID NO: 38874 - DNA, 22 bp, synthetic construct
  misc_feature 1..22: note = chemically synthesized
  source 1..22: mol_type = other DNA
atttgtgtgcattcatcttgta

SEQ ID NO: 38875 - DNA, 22 bp, synthetic construct
  misc_feature 1..22: note = chemically synthesized
  source 1..22: mol_type = other DNA
gtgtgcattcatcttgtatctg

SEQ ID NO: 38876 - DNA, 22 bp, synthetic construct
  misc_feature 1..22: note = chemically synthesized
  source 1..22: mol_type = other DNA
tgtgcattcatcttgtatctgg

SEQ ID NO: 38877 - DNA, 22 bp, synthetic construct
  misc_feature 1..22: note = chemically synthesized
  source 1..22: mol_type = other DNA
atcttgtatctggaaactttgc

SEQ ID NO: 38878 - DNA, 22 bp, synthetic construct
  misc_feature 1..22: note = chemically synthesized
  source 1..22: mol_type = other DNA
gtatctggaaactttgctgaat

SEQ ID NO: 38879 - DNA, 22 bp, synthetic construct
  misc_feature 1..22: note = chemically synthesized
  source 1..22: mol_type = other DNA
tatctggaaactttgctgaatt

SEQ ID NO: 38880 - DNA, 22 bp, synthetic construct
  misc_feature 1..22: note = chemically synthesized
  source 1..22: mol_type = other DNA
gaaactttgctgaattatttta

SEQ ID NO: 38881 - DNA, 22 bp, synthetic construct
  misc_feature 1..22: note = chemically synthesized
  source 1..22: mol_type = other DNA
tgctgaattattttatcagttc

SEQ ID NO: 38882 - DNA, 22 bp, synthetic construct
  misc_feature 1..22: note = chemically synthesized
  source 1..22: mol_type = other DNA
gctgaattattttatcagttct

SEQ ID NO: 38883 - DNA, 22 bp, synthetic construct
  misc_feature 1..22: note = chemically synthesized
  source 1..22: mol_type = other DNA
ctgaattattttatcagttcta

SEQ ID NO: 38884 - DNA, 22 bp, synthetic construct
  misc_feature 1..22: note = chemically synthesized
  source 1..22: mol_type = other DNA
aattattttatcagttctagga

SEQ ID NO: 38885 - DNA, 22 bp, synthetic construct
  misc_feature 1..22: note = chemically synthesized
  source 1..22: mol_type = other DNA
ttttatcagttctaggagcttt

SEQ ID NO: 38886 - DNA, 22 bp, synthetic construct
  misc_feature 1..22: note = chemically synthesized
  source 1..22: mol_type = other DNA
tatcagttctaggagctttctg

SEQ ID NO: 38887 - DNA, 22 bp, synthetic construct
  misc_feature 1..22: note = chemically synthesized
  source 1..22: mol_type = other DNA
atcagttctaggagctttctgg

SEQ ID NO: 38888 - DNA, 22 bp, synthetic construct
  misc_feature 1..22: note = chemically synthesized
  source 1..22: mol_type = other DNA
tcagttctaggagctttctgga

SEQ ID NO: 38889 - DNA, 22 bp, synthetic construct
  misc_feature 1..22: note = chemically synthesized
  source 1..22: mol_type = other DNA
taggagctttctggaggagtct

SEQ ID NO: 38890 - DNA, 22 bp, synthetic construct
  misc_feature 1..22: note = chemically synthesized
  source 1..22: mol_type = other DNA
ggagctttctggaggagtcttt

SEQ ID NO: 38891 - DNA, 22 bp, synthetic construct
  misc_feature 1..22: note = chemically synthesized
  source 1..22: mol_type = other DNA
tctggaggagtctttagggttt

SEQ ID NO: 38892 - DNA, 22 bp, synthetic construct
  misc_feature 1..22: note = chemically synthesized
  source 1..22: mol_type = other DNA
ctggaggagtctttagggtttt

SEQ ID NO: 38893 - DNA, 22 bp, synthetic construct
  misc_feature 1..22: note = chemically synthesized
  source 1..22: mol_type = other DNA
tggaggagtctttagggtttta

SEQ ID NO: 38894 - DNA, 22 bp, synthetic construct
  misc_feature 1..22: note = chemically synthesized
  source 1..22: mol_type = other DNA
gaggagtctttagggttttaaa

SEQ ID NO: 38895 - DNA, 22 bp, synthetic construct
  misc_feature 1..22: note = chemically synthesized
  source 1..22: mol_type = other DNA
tagggttttaaaggtaaatgat

SEQ ID NO: 38896 - DNA, 22 bp, synthetic construct
  misc_feature 1..22: note = chemically synthesized
  source 1..22: mol_type = other DNA
agggttttaaaggtaaatgatc

SEQ ID NO: 38897 - DNA, 22 bp, synthetic construct
  misc_feature 1..22: note = chemically synthesized
  source 1..22: mol_type = other DNA
gggttttaaaggtaaatgatca

SEQ ID NO: 38898 - DNA, 22 bp, synthetic construct
  misc_feature 1..22: note = chemically synthesized
  source 1..22: mol_type = other DNA
taaaggtaaatgatcatatcat

SEQ ID NO: 38899 - DNA, 22 bp, synthetic construct
  misc_feature 1..22: note = chemically synthesized
  source 1..22: mol_type = other DNA
aaaggtaaatgatcatatcatc

SEQ ID NO: 38900 - DNA, 22 bp, synthetic construct
  misc_feature 1..22: note = chemically synthesized
  source 1..22: mol_type = other DNA
aaggtaaatgatcatatcatca

SEQ ID NO: 38901 - DNA, 22 bp, synthetic construct
  misc_feature 1..22: note = chemically synthesized
  source 1..22: mol_type = other DNA
gacttcctctttactgatttga

SEQ ID NO: 38902 - DNA, 22 bp, synthetic construct
  misc_feature 1..22: note = chemically synthesized
  source 1..22: mol_type = other DNA
acttcctctttactgatttgaa

SEQ ID NO: 38903 - DNA, 22 bp, synthetic construct
  misc_feature 1..22: note = chemically synthesized
  source 1..22: mol_type = other DNA
cctctttactgatttgaatgcc

SEQ ID NO: 38904 - DNA, 22 bp, synthetic construct
  misc_feature 1..22: note = chemically synthesized
  source 1..22: mol_type = other DNA
ctctttactgatttgaatgccc

SEQ ID NO: 38905 - DNA, 22 bp, synthetic construct
  misc_feature 1..22: note = chemically synthesized
  source 1..22: mol_type = other DNA
tttactgatttgaatgcccttt

SEQ ID NO: 38906 - DNA, 22 bp, synthetic construct
  misc_feature 1..22: note = chemically synthesized
  source 1..22: mol_type = other DNA
tactgatttgaatgccctttat

SEQ ID NO: 38907 - DNA, 22 bp, synthetic construct
  misc_feature 1..22: note = chemically synthesized
  source 1..22: mol_type = other DNA
actgatttgaatgccctttatt

SEQ ID NO: 38908 - DNA, 22 bp, synthetic construct
  misc_feature 1..22: note = chemically synthesized
  source 1..22: mol_type = other DNA
ctgatttgaatgccctttattt

SEQ ID NO: 38909 - DNA, 22 bp, synthetic construct
  misc_feature 1..22: note = chemically synthesized
  source 1..22: mol_type = other DNA
atttgaatgccctttatttctt

SEQ ID NO: 38910 - DNA, 22 bp, synthetic construct
  misc_feature 1..22: note = chemically synthesized
  source 1..22: mol_type = other DNA
gaatgccctttatttctttgtt

SEQ ID NO: 38911 - DNA, 22 bp, synthetic construct
  misc_feature 1..22: note = chemically synthesized
  source 1..22: mol_type = other DNA
aatgccctttatttctttgttt

SEQ ID NO: 38912 - DNA, 22 bp, synthetic construct
  misc_feature 1..22: note = chemically synthesized
  source 1..22: mol_type = other DNA
tatttctttgttttgtctgatt

SEQ ID NO: 38913 - DNA, 22 bp, synthetic construct
  misc_feature 1..22: note = chemically synthesized
  source 1..22: mol_type = other DNA
atttctttgttttgtctgattg

SEQ ID NO: 38914 - DNA, 22 bp, synthetic construct
  misc_feature 1..22: note = chemically synthesized
  source 1..22: mol_type = other DNA
tttctttgttttgtctgattgc

SEQ ID NO: 38915 - DNA, 22 bp, synthetic construct
  misc_feature 1..22: note = chemically synthesized
  source 1..22: mol_type = other DNA
ctttgttttgtctgattgccct

SEQ ID NO: 38916 - DNA, 22 bp, synthetic construct
  misc_feature 1..22: note = chemically synthesized
  source 1..22: mol_type = other DNA
tttgttttgtctgattgccctg

SEQ ID NO: 38917 - DNA, 22 bp, synthetic construct
  misc_feature 1..22: note = chemically synthesized
  source 1..22: mol_type = other DNA
tgttttgtctgattgccctggc

SEQ ID NO: 38918 - DNA, 22 bp, synthetic construct
  misc_feature 1..22: note = chemically synthesized
  source 1..22: mol_type = other DNA
gttttgtctgattgccctggct

SEQ ID NO: 38919 - DNA, 22 bp, synthetic construct
  misc_feature 1..22: note = chemically synthesized
  source 1..22: mol_type = other DNA
ttttgtctgattgccctggcta

SEQ ID NO: 38920 - DNA, 22 bp, synthetic construct
  misc_feature 1..22: note = chemically synthesized
  source 1..22: mol_type = other DNA
tgtctgattgccctggctagga

SEQ ID NO: 38921 - DNA, 22 bp, synthetic construct
  misc_feature 1..22: note = chemically synthesized
  source 1..22: mol_type = other DNA
gtctgattgccctggctaggac

SEQ ID NO: 38922 - DNA, 22 bp, synthetic construct
  misc_feature 1..22: note = chemically synthesized
  source 1..22: mol_type = other DNA
tctgattgccctggctaggact

SEQ ID NO: 38923 - DNA, 22 bp, synthetic construct
  misc_feature 1..22: note = chemically synthesized
  source 1..22: mol_type = other DNA
attgccctggctaggacttcca

SEQ ID NO: 38924 - DNA, 22 bp, synthetic construct
  misc_feature 1..22: note = chemically synthesized
  source 1..22: mol_type = other DNA
ccctggctaggacttccagtac

SEQ ID NO: 38925 - DNA, 22 bp, synthetic construct
  misc_feature 1..22: note = chemically synthesized
  source 1..22: mol_type = other DNA
gctaggacttccagtactatgt

SEQ ID NO: 38926 - DNA, 22 bp, synthetic construct
  misc_feature 1..22: note = chemically synthesized
  source 1..22: mol_type = other DNA
ggacttccagtactatgttgaa

SEQ ID NO: 38927 - DNA, 22 bp, synthetic construct
  misc_feature 1..22: note = chemically synthesized
  source 1..22: mol_type = other DNA
ccagtactatgttgaagaggag

SEQ ID NO: 38928 - DNA, 22 bp, synthetic construct
  misc_feature 1..22: note = chemically synthesized
  source 1..22: mol_type = other DNA
cagtactatgttgaagaggagt

SEQ ID NO: 38929 - DNA, 22 bp, synthetic construct
  misc_feature 1..22: note = chemically synthesized
  source 1..22: mol_type = other DNA
tgttgaagaggagtggtgagag

SEQ ID NO: 38930 - DNA, 22 bp, synthetic construct
  misc_feature 1..22: note = chemically synthesized
  source 1..22: mol_type = other DNA
aagaggagtggtgagagtgggc

SEQ ID NO: 38931 - DNA, 22 bp, synthetic construct
  misc_feature 1..22: note = chemically synthesized
  source 1..22: mol_type = other DNA
gtcttgttccagttctcagagg

SEQ ID NO: 38932 - DNA, 22 bp, synthetic construct
  misc_feature 1..22: note = chemically synthesized
  source 1..22: mol_type = other DNA
tcttgttccagttctcagaggg

SEQ ID NO: 38933 - DNA, 22 bp, synthetic construct
  misc_feature 1..22: note = chemically synthesized
  source 1..22: mol_type = other DNA
gttccagttctcagagggaatg

SEQ ID NO: 38934 - DNA, 22 bp, synthetic construct
  misc_feature 1..22: note = chemically synthesized
  source 1..22: mol_type = other DNA
ttccagttctcagagggaatgc

SEQ ID NO: 38935 - DNA, 22 bp, synthetic construct
  misc_feature 1..22: note = chemically synthesized
  source 1..22: mol_type = other DNA
cagttctcagagggaatgcttt

SEQ ID NO: 38936 - DNA, 22 bp, synthetic construct
  misc_feature 1..22: note = chemically synthesized
  source 1..22: mol_type = other DNA
tcagagggaatgctttcaactt

SEQ ID NO: 38937 - DNA, 22 bp, synthetic construct
  misc_feature 1..22: note = chemically synthesized
  source 1..22: mol_type = other DNA
agagggaatgctttcaactttt

SEQ ID NO: 38938 - DNA, 22 bp, synthetic construct
  misc_feature 1..22: note = chemically synthesized
  source 1..22: mol_type = other DNA
tcaacttttccccattcaatat

SEQ ID NO: 38939 - DNA, 22 bp, synthetic construct
  misc_feature 1..22: note = chemically synthesized
  source 1..22: mol_type = other DNA
caacttttccccattcaatatt

SEQ ID NO: 38940 - DNA, 22 bp, synthetic construct
  misc_feature 1..22: note = chemically synthesized
  source 1..22: mol_type = other DNA
aacttttccccattcaatatta

SEQ ID NO: 38941 - DNA, 22 bp, synthetic construct
  misc_feature 1..22: note = chemically synthesized
  source 1..22: mol_type = other DNA
ttccccattcaatattatgttg

SEQ ID NO: 38942 - DNA, 22 bp, synthetic construct
  misc_feature 1..22: note = chemically synthesized
  source 1..22: mol_type = other DNA
tccccattcaatattatgttgg

SEQ ID NO: 38943 - DNA, 22 bp, synthetic construct
  misc_feature 1..22: note = chemically synthesized
  source 1..22: mol_type = other DNA
ccccattcaatattatgttggc

SEQ ID NO: 38944 - DNA, 22 bp, synthetic construct
  misc_feature 1..22: note = chemically synthesized
  source 1..22: mol_type = other DNA
cccattcaatattatgttggct

SEQ ID NO: 38945 - DNA, 22 bp, synthetic construct
  misc_feature 1..22: note = chemically synthesized
  source 1..22: mol_type = other DNA
aatattatgttggctgtgggtt

SEQ ID NO: 38946 - DNA, 22 bp, synthetic construct
  misc_feature 1..22: note = chemically synthesized
  source 1..22: mol_type = other DNA
tgttggctgtgggtttgtcaca

SEQ ID NO: 38947 - DNA, 22 bp, synthetic construct
  misc_feature 1..22: note = chemically synthesized
  source 1..22: mol_type = other DNA
gctgtgggtttgtcacagatgg

SEQ ID NO: 38948 - DNA, 22 bp, synthetic construct
  misc_feature 1..22: note = chemically synthesized
  source 1..22: mol_type = other DNA
tgggtttgtcacagatggcttt

SEQ ID NO: 38949 - DNA, 22 bp, synthetic construct
  misc_feature 1..22: note = chemically synthesized
  source 1..22: mol_type = other DNA
gtcacagatggcttttattaca

SEQ ID NO: 38950 - DNA, 22 bp, synthetic construct
  misc_feature 1..22: note = chemically synthesized
  source 1..22: mol_type = other DNA
tcacagatggcttttattacac

SEQ ID NO: 38951 - DNA, 22 bp, synthetic construct
  misc_feature 1..22: note = chemically synthesized
  source 1..22: mol_type = other DNA
ttattacactgaggtatgtctc

SEQ ID NO: 38952 - DNA, 22 bp, synthetic construct
  misc_feature 1..22: note = chemically synthesized
  source 1..22: mol_type = other DNA
tattacactgaggtatgtctct

SEQ ID NO: 38953 - DNA, 22 bp, synthetic construct
  misc_feature 1..22: note = chemically synthesized
  source 1..22: mol_type = other DNA
attacactgaggtatgtctctt

SEQ ID NO: 38954 - DNA, 22 bp, synthetic construct
  misc_feature 1..22: note = chemically synthesized
  source 1..22: mol_type = other DNA
ttacactgaggtatgtctcttg

SEQ ID NO: 38955 - DNA, 22 bp, synthetic construct
  misc_feature 1..22: note = chemically synthesized
  source 1..22: mol_type = other DNA
cactgaggtatgtctcttgtat

SEQ ID NO: 38956 - DNA, 22 bp, synthetic construct
  misc_feature 1..22: note = chemically synthesized
  source 1..22: mol_type = other DNA
aggtatgtctcttgtatgctga

SEQ ID NO: 38957 - DNA, 22 bp, synthetic construct
  misc_feature 1..22: note = chemically synthesized
  source 1..22: mol_type = other DNA
ttgtatgctgattttgctgagc

SEQ ID NO: 38958 - DNA, 22 bp, synthetic construct
  misc_feature 1..22: note = chemically synthesized
  source 1..22: mol_type = other DNA
gtatgctgattttgctgagcat

SEQ ID NO: 38959 - DNA, 22 bp, synthetic construct
  misc_feature 1..22: note = chemically synthesized
  source 1..22: mol_type = other DNA
tatgctgattttgctgagcatt

SEQ ID NO: 38960 - DNA, 22 bp, synthetic construct
  misc_feature 1..22: note = chemically synthesized
  source 1..22: mol_type = other DNA
attttgctgagcattttaatca

SEQ ID NO: 38961 - DNA, 22 bp, synthetic construct
  misc_feature 1..22: note = chemically synthesized
  source 1..22: mol_type = other DNA
tgctgagcattttaatcataaa

SEQ ID NO: 38962 - DNA, 22 bp, synthetic construct
  misc_feature 1..22: note = chemically synthesized
  source 1..22: mol_type = other DNA
gctgagcattttaatcataaat

SEQ ID NO: 38963 - DNA, 22 bp, synthetic construct
  misc_feature 1..22: note = chemically synthesized
  source 1..22: mol_type = other DNA
ctgagcattttaatcataaatg

SEQ ID NO: 38964 - DNA, 22 bp, synthetic construct
  misc_feature 1..22: note = chemically synthesized
  source 1..22: mol_type = other DNA
agcattttaatcataaatgtat

SEQ ID NO: 38965 - DNA, 22 bp, synthetic construct
  misc_feature 1..22: note = chemically synthesized
  source 1..22: mol_type = other DNA
taatcataaatgtatgctggat

SEQ ID NO: 38966 - DNA, 22 bp, synthetic construct
  misc_feature 1..22: note = chemically synthesized
  source 1..22: mol_type = other DNA
aatcataaatgtatgctggatt

SEQ ID NO: 38967 - DNA, 22 bp, synthetic construct
  misc_feature 1..22: note = chemically synthesized
  source 1..22: mol_type = other DNA
atcataaatgtatgctggattt

SEQ ID NO: 38968 - DNA, 22 bp, synthetic construct
  misc_feature 1..22: note = chemically synthesized
  source 1..22: mol_type = other DNA
gattttgttgaatgctttttct

SEQ ID NO: 38969 - DNA, 22 bp, synthetic construct
  misc_feature 1..22: note = chemically synthesized
  source 1..22: mol_type = other DNA
tgttgaatgctttttctgcatc

SEQ ID NO: 38970 - DNA, 22 bp, synthetic construct
  misc_feature 1..22: note = chemically synthesized
  source 1..22: mol_type = other DNA
gttgaatgctttttctgcatct

SEQ ID NO: 38971 - DNA, 22 bp, synthetic construct
  misc_feature 1..22: note = chemically synthesized
  source 1..22: mol_type = other DNA
ttgaatgctttttctgcatcta

SEQ ID NO: 38972 - DNA, 22 bp, synthetic construct
  misc_feature 1..22: note = chemically synthesized
  source 1..22: mol_type = other DNA
aatgctttttctgcatctattg

SEQ ID NO: 38973 - DNA, 22 bp, synthetic construct
  misc_feature 1..22: note = chemically synthesized
  source 1..22: mol_type = other DNA
tttctgcatctattgagatgat

SEQ ID NO: 38974 - DNA, 22 bp, synthetic construct
  misc_feature 1..22: note = chemically synthesized
  source 1..22: mol_type = other DNA
ttctgcatctattgagatgatc

SEQ ID NO: 38975 - DNA, 22 bp, synthetic construct
  misc_feature 1..22: note = chemically synthesized
  source 1..22: mol_type = other DNA
tctgcatctattgagatgatca

SEQ ID NO: 38976 - DNA, 22 bp, synthetic construct
  misc_feature 1..22: note = chemically synthesized
  source 1..22: mol_type = other DNA
ctgcatctattgagatgatcat

SEQ ID NO: 38977 - DNA, 22 bp, synthetic construct
  misc_feature 1..22: note = chemically synthesized
  source 1..22: mol_type = other DNA
tgcatctattgagatgatcatg

SEQ ID NO: 38978 - DNA, 22 bp, synthetic construct
  misc_feature 1..22: note = chemically synthesized
  source 1..22: mol_type = other DNA
catctattgagatgatcatgta

SEQ ID NO: 38979 - DNA, 22 bp, synthetic construct
  misc_feature 1..22: note = chemically synthesized
  source 1..22: mol_type = other DNA
ttgagatgatcatgtaattttt

SEQ ID NO: 38980 - DNA, 22 bp, synthetic construct
  misc_feature 1..22: note = chemically synthesized
  source 1..22: mol_type = other DNA
agatgatcatgtaatttttgtt

SEQ ID NO: 38981 - DNA, 22 bp, synthetic construct
  misc_feature 1..22: note = chemically synthesized
  source 1..22: mol_type = other DNA
ttgtttttaaatctgtttatgt

SEQ ID NO: 38982 - DNA, 22 bp, synthetic construct
  misc_feature 1..22: note = chemically synthesized
  source 1..22: mol_type = other DNA
tgtttttaaatctgtttatgtg

SEQ ID NO: 38983 - DNA, 22 bp, synthetic construct
  misc_feature 1..22: note = chemically synthesized
  source 1..22: mol_type = other DNA
gtttttaaatctgtttatgtgg

SEQ ID NO: 38984 - DNA, 22 bp, synthetic construct
  misc_feature 1..22: note = chemically synthesized
  source 1..22: mol_type = other DNA
tttttaaatctgtttatgtggt

SEQ ID NO: 38985 - DNA, 22 bp, synthetic construct
  misc_feature 1..22: note = chemically synthesized
  source 1..22: mol_type = other DNA
ttaaatctgtttatgtggtgta

SEQ ID NO: 38986 - DNA, 22 bp, synthetic construct
  misc_feature 1..22: note = chemically synthesized
  source 1..22: mol_type = other DNA
taaatctgtttatgtggtgtat

SEQ ID NO: 38987 - DNA, 22 bp, synthetic construct
  misc_feature 1..22: note = chemically synthesized
  source 1..22: mol_type = other DNA
aaatctgtttatgtggtgtatc

SEQ ID NO: 38988 - DNA, 22 bp, synthetic construct
  misc_feature 1..22: note = chemically synthesized
  source 1..22: mol_type = other DNA
aatctgtttatgtggtgtatca

SEQ ID NO: 38989 - DNA, 22 bp, synthetic construct
  misc_feature 1..22: note = chemically synthesized
  source 1..22: mol_type = other DNA
tttatgtggtgtatcacactta

SEQ ID NO: 38990 - DNA, 22 bp, synthetic construct
  misc_feature 1..22: note = chemically synthesized
  source 1..22: mol_type = other DNA
atgtggtgtatcacacttattg

SEQ ID NO: 38991 - DNA, 22 bp, synthetic construct
  misc_feature 1..22: note = chemically synthesized
  source 1..22: mol_type = other DNA
tgtggtgtatcacacttattga

SEQ ID NO: 38992 - DNA, 22 bp, synthetic construct
  misc_feature 1..22: note = chemically synthesized
  source 1..22: mol_type = other DNA
attgacttgcagatgtcaaacc

SEQ ID NO: 38993 - DNA, 22 bp, synthetic construct
  misc_feature 1..22: note = chemically synthesized
  source 1..22: mol_type = other DNA
ttgacttgcagatgtcaaacca

SEQ ID NO: 38994 - DNA, 22 bp, synthetic construct
  misc_feature 1..22: note = chemically synthesized
  source 1..22: mol_type = other DNA
acttgcagatgtcaaaccaacc

SEQ ID NO: 38995 - DNA, 22 bp, synthetic construct
  misc_feature 1..22: note = chemically synthesized
  source 1..22: mol_type = other DNA
gcagatgtcaaaccaaccctgc

SEQ ID NO: 38996 - DNA, 22 bp, synthetic construct
  misc_feature 1..22: note = chemically synthesized
  source 1..22: mol_type = other DNA
cagatgtcaaaccaaccctgca

SEQ ID NO: 38997 - DNA, 22 bp, synthetic construct
  misc_feature 1..22: note = chemically synthesized
  source 1..22: mol_type = other DNA
catccctggcatggaacctgct

SEQ ID NO: 38998 - DNA, 22 bp, synthetic construct
  misc_feature 1..22: note = chemically synthesized
  source 1..22: mol_type = other DNA
gcatggaacctgcttgatcatg

SEQ ID NO: 38999 - DNA, 22 bp, synthetic construct
  misc_feature 1..22: note = chemically synthesized
  source 1..22: mol_type = other DNA
cttgatcatggtggattatctt

SEQ ID NO: 39000 - DNA, 22 bp, synthetic construct
  misc_feature 1..22: note = chemically synthesized
  source 1..22: mol_type = other DNA
gatcatggtggattatcttttt

SEQ ID NO: 39001 - DNA, 22 bp, synthetic construct
  misc_feature 1..22: note = chemically synthesized
  source 1..22: mol_type = other DNA
atcatggtggattatctttttg

SEQ ID NO: 39002 - DNA, 22 bp, synthetic construct
  misc_feature 1..22: note = chemically synthesized
  source 1..22: mol_type = other DNA
tctttttgttatgttgttgaat

SEQ ID NO: 39003 - DNA, 22 bp, synthetic construct
  misc_feature 1..22: note = chemically synthesized
  source 1..22: mol_type = other DNA
tttgttatgttgttgaatttgg

SEQ ID NO: 39004 - DNA, 22 bp, synthetic construct
  misc_feature 1..22: note = chemically synthesized
  source 1..22: mol_type = other DNA
ttgttatgttgttgaatttggt

SEQ ID NO: 39005 - DNA, 22 bp, synthetic construct
  misc_feature 1..22: note = chemically synthesized
  source 1..22: mol_type = other DNA
tgttatgttgttgaatttggtt

SEQ ID NO: 39006 - DNA, 22 bp, synthetic construct
  misc_feature 1..22: note = chemically synthesized
  source 1..22: mol_type = other DNA
gttatgttgttgaatttggtta

SEQ ID NO: 39007 - DNA, 22 bp, synthetic construct
  misc_feature 1..22: note = chemically synthesized
  source 1..22: mol_type = other DNA
ttatgttgttgaatttggttat

SEQ ID NO: 39008 - DNA, 22 bp, synthetic construct
  misc_feature 1..22: note = chemically synthesized
  source 1..22: mol_type = other DNA
tgttgttgaatttggttatcta

SEQ ID NO: 39009 - DNA, 22 bp, synthetic construct
  misc_feature 1..22: note = chemically synthesized
  source 1..22: mol_type = other DNA
ttgaatttggttatctagtatt

SEQ ID NO: 39010 - DNA, 22 bp, synthetic construct
  misc_feature 1..22: note = chemically synthesized
  source 1..22: mol_type = other DNA
aatttggttatctagtattttg

SEQ ID NO: 39011 - DNA, 22 bp, synthetic construct
  misc_feature 1..22: note = chemically synthesized
  source 1..22: mol_type = other DNA
ggttatctagtattttgttaag

SEQ ID NO: 39012 - DNA, 22 bp, synthetic construct
  misc_feature 1..22: note = chemically synthesized
  source 1..22: mol_type = other DNA
gttatctagtattttgttaagg

SEQ ID NO: 39013 - DNA, 22 bp, synthetic construct
  misc_feature 1..22: note = chemically synthesized
  source 1..22: mol_type = other DNA
tctagtattttgttaaggattt

SEQ ID NO: 39014 - DNA, 22 bp, synthetic construct
  misc_feature 1..22: note = chemically synthesized
  source 1..22: mol_type = other DNA
gtattttgttaaggattttagc

SEQ ID NO: 39015 - DNA, 22 bp, synthetic construct
  misc_feature 1..22: note = chemically synthesized
  source 1..22: mol_type = other DNA
tgttaaggattttagcatctat

SEQ ID NO: 39016 - DNA, 22 bp, synthetic construct
  misc_feature 1..22: note = chemically synthesized
  source 1..22: mol_type = other DNA
gttaaggattttagcatctatg

SEQ ID NO: 39017 - DNA, 22 bp, synthetic construct
  misc_feature 1..22: note = chemically synthesized
  source 1..22: mol_type = other DNA
ttaaggattttagcatctatgt

SEQ ID NO: 39018 - DNA, 22 bp, synthetic construct
  misc_feature 1..22: note = chemically synthesized
  source 1..22: mol_type = other DNA
aggattttagcatctatgttca

SEQ ID NO: 39019 - DNA, 22 bp, synthetic construct
  misc_feature 1..22: note = chemically synthesized
  source 1..22: mol_type = other DNA
tagcatctatgttcatcaaggc

SEQ ID NO: 39020 - DNA, 22 bp, synthetic construct
  misc_feature 1..22: note = chemically synthesized
  source 1..22: mol_type = other DNA
agcatctatgttcatcaaggct

SEQ ID NO: 39021 - DNA, 22 bp, synthetic construct
  misc_feature 1..22: note = chemically synthesized
  source 1..22: mol_type = other DNA
gcatctatgttcatcaaggcta

SEQ ID NO: 39022 - DNA, 22 bp, synthetic construct
  misc_feature 1..22: note = chemically synthesized
  source 1..22: mol_type = other DNA
tgttcatcaaggctatcagtct

SEQ ID NO: 39023 - DNA, 22 bp, synthetic construct
  misc_feature 1..22: note = chemically synthesized
  source 1..22: mol_type = other DNA
atcaaggctatcagtctgtagt

SEQ ID NO: 39024 - DNA, 22 bp, synthetic construct
  misc_feature 1..22: note = chemically synthesized
  source 1..22: mol_type = other DNA
tcagtctgtagttttctttttt

SEQ ID NO: 39025 - DNA, 22 bp, synthetic construct
  misc_feature 1..22: note = chemically synthesized
  source 1..22: mol_type = other DNA
tagttttcttttttggttatgt

SEQ ID NO: 39026 - DNA, 22 bp, synthetic construct
  misc_feature 1..22: note = chemically synthesized
  source 1..22: mol_type = other DNA
tcttttttggttatgtccttcc

SEQ ID NO: 39027 - DNA, 22 bp, synthetic construct
  misc_feature 1..22: note = chemically synthesized
  source 1..22: mol_type = other DNA
cttttttggttatgtccttccc

SEQ ID NO: 39028 - DNA, 22 bp, synthetic construct
  misc_feature 1..22: note = chemically synthesized
  source 1..22: mol_type = other DNA
ttttttggttatgtccttccct

SEQ ID NO: 39029 - DNA, 22 bp, synthetic construct
  misc_feature 1..22: note = chemically synthesized
  source 1..22: mol_type = other DNA
ttttggttatgtccttccctgg

SEQ ID NO: 39030 - DNA, 22 bp, synthetic construct
  misc_feature 1..22: note = chemically synthesized
  source 1..22: mol_type = other DNA
tttggttatgtccttccctggt

SEQ ID NO: 39031 - DNA, 22 bp, synthetic construct
  misc_feature 1..22: note = chemically synthesized
  source 1..22: mol_type = other DNA
ttggttatgtccttccctggtt

SEQ ID NO: 39032 - DNA, 22 bp, synthetic construct
  misc_feature 1..22: note = chemically synthesized
  source 1..22: mol_type = other DNA
tggttatgtccttccctggttt

SEQ ID NO: 39033 - DNA, 22 bp, synthetic construct
  misc_feature 1..22: note = chemically synthesized
  source 1..22: mol_type = other DNA
ggttatgtccttccctggtttt

SEQ ID NO: 39034 - DNA, 22 bp, synthetic construct
  misc_feature 1..22: note = chemically synthesized
  source 1..22: mol_type = other DNA
gttatgtccttccctggttttg

SEQ ID NO: 39035 - DNA, 22 bp, synthetic construct
  misc_feature 1..22: note = chemically synthesized
  source 1..22: mol_type = other DNA
tgtccttccctggttttggtgt

SEQ ID NO: 39036 - DNA, 22 bp, synthetic construct
  misc_feature 1..22: note = chemically synthesized
  source 1..22: mol_type = other DNA
ccctggttttggtgtgatgctg

SEQ ID NO: 39037 - DNA, 22 bp, synthetic construct
  misc_feature 1..22: note = chemically synthesized
  source 1..22: mol_type = other DNA
cctggttttggtgtgatgctgg

SEQ ID NO: 39038 - DNA, 22 bp, synthetic construct
  misc_feature 1..22: note = chemically synthesized
  source 1..22: mol_type = other DNA
gttttggtgtgatgctggcttc

SEQ ID NO: 39039 - DNA, 22 bp, synthetic construct
  misc_feature 1..22: note = chemically synthesized
  source 1..22: mol_type = other DNA
tggtgtgatgctggcttcatag

SEQ ID NO: 39040 - DNA, 22 bp, synthetic construct
  misc_feature 1..22: note = chemically synthesized
  source 1..22: mol_type = other DNA
ggtgtgatgctggcttcataga

SEQ ID NO: 39041 - DNA, 22 bp, synthetic construct
  misc_feature 1..22: note = chemically synthesized
  source 1..22: mol_type = other DNA
gtgtgatgctggcttcatagaa

SEQ ID NO: 39042 - DNA, 22 bp, synthetic construct
  misc_feature 1..22: note = chemically synthesized
  source 1..22: mol_type = other DNA
gcttcatagaatgaattagggc

SEQ ID NO: 39043 - DNA, 22 bp, synthetic construct
  misc_feature 1..22: note = chemically synthesized
  source 1..22: mol_type = other DNA
catagaatgaattagggcaggt

SEQ ID NO: 39044 - DNA, 22 bp, synthetic construct
  misc_feature 1..22: note = chemically synthesized
  source 1..22: mol_type = other DNA
atagaatgaattagggcaggtt

SEQ ID NO: 39045 - DNA, 22 bp, synthetic construct
  misc_feature 1..22: note = chemically synthesized
  source 1..22: mol_type = other DNA
gggcaggttccttctttatctg

SEQ ID NO: 39046 - DNA, 22 bp, synthetic construct
  misc_feature 1..22: note = chemically synthesized
  source 1..22: mol_type = other DNA
cttctttatctgtcttgtagaa

SEQ ID NO: 39047 - DNA, 22 bp, synthetic construct
  misc_feature 1..22: note = chemically synthesized
  source 1..22: mol_type = other DNA
ctttatctgtcttgtagaatag

SEQ ID NO: 39048 - DNA, 22 bp, synthetic construct
  misc_feature 1..22: note = chemically synthesized
  source 1..22: mol_type = other DNA
tttatctgtcttgtagaatagt

SEQ ID NO: 39049 - DNA, 22 bp, synthetic construct
  misc_feature 1..22: note = chemically synthesized
  source 1..22: mol_type = other DNA
tatctgtcttgtagaatagtgt

SEQ ID NO: 39050 - DNA, 22 bp, synthetic construct
  misc_feature 1..22: note = chemically synthesized
  source 1..22: mol_type = other DNA
atctgtcttgtagaatagtgtc

SEQ ID NO: 39051 - DNA, 22 bp, synthetic construct
  misc_feature 1..22: note = chemically synthesized
  source 1..22: mol_type = other DNA
tctgtcttgtagaatagtgtca

SEQ ID NO: 39052 - DNA, 22 bp, synthetic construct
  misc_feature 1..22: note = chemically synthesized
  source 1..22: mol_type = other DNA
tcttgtagaatagtgtcaaaaa

SEQ ID NO: 39053 - DNA, 22 bp, synthetic construct
  misc_feature 1..22: note = chemically synthesized
  source 1..22: mol_type = other DNA
gtagaatagtgtcaaaaagatg

SEQ ID NO: 39054 - DNA, 22 bp, synthetic construct
  misc_feature 1..22: note = chemically synthesized
  source 1..22: mol_type = other DNA
tagaatagtgtcaaaaagatgg

SEQ ID NO: 39055 - DNA, 22 bp, synthetic construct
  misc_feature 1..22: note = chemically synthesized
  source 1..22: mol_type = other DNA
ctctttgaatgtctagtagaat

SEQ ID NO: 39056 - DNA, 22 bp, synthetic construct
  misc_feature 1..22: note = chemically synthesized
  source 1..22: mol_type = other DNA
tttgaatgtctagtagaattct

SEQ ID NO: 39057 - DNA, 22 bp, synthetic construct
  misc_feature 1..22: note = chemically synthesized
  source 1..22: mol_type = other DNA
tgaatgtctagtagaattctgt

SEQ ID NO: 39058 - DNA, 22 bp, synthetic construct
  misc_feature 1..22: note = chemically synthesized
  source 1..22: mol_type = other DNA
gaatgtctagtagaattctgtt

SEQ ID NO: 39059 - DNA, 22 bp, synthetic construct
  misc_feature 1..22: note = chemically synthesized
  source 1..22: mol_type = other DNA
aatgtctagtagaattctgttg

SEQ ID NO: 39060 - DNA, 22 bp, synthetic construct
  misc_feature 1..22: note = chemically synthesized
  source 1..22: mol_type = other DNA
gtagaattctgttgtgaatcca

SEQ ID NO: 39061 - DNA, 22 bp, synthetic construct
  misc_feature 1..22: note = chemically synthesized
  source 1..22: mol_type = other DNA
tgttgtgaatccatctggtcct

SEQ ID NO: 39062 - DNA, 22 bp, synthetic construct
  misc_feature 1..22: note = chemically synthesized
  source 1..22: mol_type = other DNA
ttgtgaatccatctggtcctga

SEQ ID NO: 39063 - DNA, 22 bp, synthetic construct
  misc_feature 1..22: note = chemically synthesized
  source 1..22: mol_type = other DNA
tgaatccatctggtcctgaact

SEQ ID NO: 39064 - DNA, 22 bp, synthetic construct
  misc_feature 1..22: note = chemically synthesized
  source 1..22: mol_type = other DNA
gtcctgaacttttttttggttg

SEQ ID NO: 39065 - DNA, 22 bp, synthetic construct
  misc_feature 1..22: note = chemically synthesized
  source 1..22: mol_type = other DNA
aacttttttttggttggtaatt

SEQ ID NO: 39066 - DNA, 22 bp, synthetic construct
  misc_feature 1..22: note = chemically synthesized
  source 1..22: mol_type = other DNA
ttttttggttggtaatttttta

SEQ ID NO: 39067 - DNA, 22 bp, synthetic construct
  misc_feature 1..22: note = chemically synthesized
  source 1..22: mol_type = other DNA
tttttggttggtaattttttaa

SEQ ID NO: 39068 - DNA, 22 bp, synthetic construct
  misc_feature 1..22: note = chemically synthesized
  source 1..22: mol_type = other DNA
ttttggttggtaattttttaat

SEQ ID NO: 39069 - DNA, 22 bp, synthetic construct
  misc_feature 1..22: note = chemically synthesized
  source 1..22: mol_type = other DNA
tttggttggtaattttttaatt

SEQ ID NO: 39070 - DNA, 22 bp, synthetic construct
  misc_feature 1..22: note = chemically synthesized
  source 1..22: mol_type = other DNA
ttggttggtaattttttaatta

SEQ ID NO: 39071 - DNA, 22 bp, synthetic construct
  misc_feature 1..22: note = chemically synthesized
  source 1..22: mol_type = other DNA
tggttggtaattttttaattac

SEQ ID NO: 39072 - DNA, 22 bp, synthetic construct
  misc_feature 1..22: note = chemically synthesized
  source 1..22: mol_type = other DNA
ggttggtaattttttaattacc

SEQ ID NO: 39073 - DNA, 22 bp, synthetic construct
  misc_feature 1..22: note = chemically synthesized
  source 1..22: mol_type = other DNA
gttggtaattttttaattacca

SEQ ID NO: 39074 - DNA, 22 bp, synthetic construct
  misc_feature 1..22: note = chemically synthesized
  source 1..22: mol_type = other DNA
gtaattttttaattaccaatta

SEQ ID NO: 39075 - DNA, 22 bp, synthetic construct
  misc_feature 1..22: note = chemically synthesized
  source 1..22: mol_type = other DNA
tttaattaccaattaaatctca

SEQ ID NO: 39076 - DNA, 22 bp, synthetic construct
  misc_feature 1..22: note = chemically synthesized
  source 1..22: mol_type = other DNA
ttaattaccaattaaatctcac

SEQ ID NO: 39077 - DNA, 22 bp, synthetic construct
  misc_feature 1..22: note = chemically synthesized
  source 1..22: mol_type = other DNA
taattaccaattaaatctcact

SEQ ID NO: 39078 - DNA, 22 bp, synthetic construct
  misc_feature 1..22: note = chemically synthesized
  source 1..22: mol_type = other DNA
aattaccaattaaatctcactg

SEQ ID NO: 39079 - DNA, 22 bp, synthetic construct
  misc_feature 1..22: note = chemically synthesized
  source 1..22: mol_type = other DNA
attaccaattaaatctcactgc

SEQ ID NO: 39080 - DNA, 22 bp, synthetic construct
  misc_feature 1..22: note = chemically synthesized
  source 1..22: mol_type = other DNA
ccaattaaatctcactgcttgt

SEQ ID NO: 39081 - DNA, 22 bp, synthetic construct
  misc_feature 1..22: note = chemically synthesized
  source 1..22: mol_type = other DNA
aatctcactgcttgttattggt

SEQ ID NO: 39082 - DNA, 22 bp, synthetic construct
  misc_feature 1..22: note = chemically synthesized
  source 1..22: mol_type = other DNA
actgcttgttattggtctgtta

SEQ ID NO: 39083 - DNA, 22 bp, synthetic construct
  misc_feature 1..22: note = chemically synthesized
  source 1..22: mol_type = other DNA
cttgttattggtctgttagtaa

SEQ ID NO: 39084 - DNA, 22 bp, synthetic construct
  misc_feature 1..22: note = chemically synthesized
  source 1..22: mol_type = other DNA
gttattggtctgttagtaaatt

SEQ ID NO: 39085 - DNA, 22 bp, synthetic construct
  misc_feature 1..22: note = chemically synthesized
  source 1..22: mol_type = other DNA
ttattggtctgttagtaaattt

SEQ ID NO: 39086 - DNA, 22 bp, synthetic construct
  misc_feature 1..22: note = chemically synthesized
  source 1..22: mol_type = other DNA
ttggtctgttagtaaatttatt

SEQ ID NO: 39087 - DNA, 22 bp, synthetic construct
  misc_feature 1..22: note = chemically synthesized
  source 1..22: mol_type = other DNA
gtctgttagtaaatttattgag

SEQ ID NO: 39088 - DNA, 22 bp, synthetic construct
  misc_feature 1..22: note = chemically synthesized
  source 1..22: mol_type = other DNA
ttagtaaatttattgaggctca

SEQ ID NO: 39089 - DNA, 22 bp, synthetic construct
  misc_feature 1..22: note = chemically synthesized
  source 1..22: mol_type = other DNA
gtaaatttattgaggctcattt

SEQ ID NO: 39090 - DNA, 22 bp, synthetic construct
  misc_feature 1..22: note = chemically synthesized
  source 1..22: mol_type = other DNA
attgaggctcatttcatggcct

SEQ ID NO: 39091 - DNA, 22 bp, synthetic construct
  misc_feature 1..22: note = chemically synthesized
  source 1..22: mol_type = other DNA
ttgaggctcatttcatggccta

SEQ ID NO: 39092 - DNA, 22 bp, synthetic construct
  misc_feature 1..22: note = chemically synthesized
  source 1..22: mol_type = other DNA
aggctcatttcatggcctatca

SEQ ID NO: 39093 - DNA, 22 bp, synthetic construct
  misc_feature 1..22: note = chemically synthesized
  source 1..22: mol_type = other DNA
atttcatggcctatcatatggt

SEQ ID NO: 39094 - DNA, 22 bp, synthetic construct
  misc_feature 1..22: note = chemically synthesized
  source 1..22: mol_type = other DNA
catggcctatcatatggtctac

SEQ ID NO: 39095 - DNA, 22 bp, synthetic construct
  misc_feature 1..22: note = chemically synthesized
  source 1..22: mol_type = other DNA
atggcctatcatatggtctacc

SEQ ID NO: 39096 - DNA, 22 bp, synthetic construct
  misc_feature 1..22: note = chemically synthesized
  source 1..22: mol_type = other DNA
tcatatggtctaccttggagaa

SEQ ID NO: 39097 - DNA, 22 bp, synthetic construct
  misc_feature 1..22: note = chemically synthesized
  source 1..22: mol_type = other DNA
ccttggagaaatttccacgcgc

SEQ ID NO: 39098 - DNA, 22 bp, synthetic construct
  misc_feature 1..22: note = chemically synthesized
  source 1..22: mol_type = other DNA
ggagaaatttccacgcgctgtt

SEQ ID NO: 39099 - DNA, 22 bp, synthetic construct
  misc_feature 1..22: note = chemically synthesized
  source 1..22: mol_type = other DNA
gagaaatttccacgcgctgttg

SEQ ID NO: 39100 - DNA, 22 bp, synthetic construct
  misc_feature 1..22: note = chemically synthesized
  source 1..22: mol_type = other DNA
ccacgcgctgttgaatagaatg

SEQ ID NO: 39101 - DNA, 22 bp, synthetic construct
  misc_feature 1..22: note = chemically synthesized
  source 1..22: mol_type = other DNA
cacgcgctgttgaatagaatgt

SEQ ID NO: 39102 - DNA, 22 bp, synthetic construct
  misc_feature 1..22: note = chemically synthesized
  source 1..22: mol_type = other DNA
ttgaatagaatgtgtgttctgt

SEQ ID NO: 39103 - DNA, 22 bp, synthetic construct
  misc_feature 1..22: note = chemically synthesized
  source 1..22: mol_type = other DNA
aatagaatgtgtgttctgtggt

SEQ ID NO: 39104 - DNA, 22 bp, synthetic construct
  misc_feature 1..22: note = chemically synthesized
  source 1..22: mol_type = other DNA
tgtggttattggatgaaatgtt

SEQ ID NO: 39105 - DNA, 22 bp, synthetic construct
  misc_feature 1..22: note = chemically synthesized
  source 1..22: mol_type = other DNA
tggttattggatgaaatgttct

SEQ ID NO: 39106 - DNA, 22 bp, synthetic construct
  misc_feature 1..22: note = chemically synthesized
  source 1..22: mol_type = other DNA
ttggatgaaatgttctgtatat

SEQ ID NO: 39107 - DNA, 22 bp, synthetic construct
  misc_feature 1..22: note = chemically synthesized
  source 1..22: mol_type = other DNA
gatgaaatgttctgtatataac

SEQ ID NO: 39108 - DNA, 22 bp, synthetic construct
  misc_feature 1..22: note = chemically synthesized
  source 1..22: mol_type = other DNA
tgtatataactgttaagtccat

SEQ ID NO: 39109 - DNA, 22 bp, synthetic construct
  misc_feature 1..22: note = chemically synthesized
  source 1..22: mol_type = other DNA
tatataactgttaagtccattt

SEQ ID NO: 39110 - DNA, 22 bp, synthetic construct
  misc_feature 1..22: note = chemically synthesized
  source 1..22: mol_type = other DNA
ttaagtccatttgttctaaggt

SEQ ID NO: 39111 - DNA, 22 bp, synthetic construct
  misc_feature 1..22: note = chemically synthesized
  source 1..22: mol_type = other DNA
agtccatttgttctaaggtata

SEQ ID NO: 39112 - DNA, 22 bp, synthetic construct
  misc_feature 1..22: note = chemically synthesized
  source 1..22: mol_type = other DNA
gttctaaggtataatttaaatc

SEQ ID NO: 39113 - DNA, 22 bp, synthetic construct
  misc_feature 1..22: note = chemically synthesized
  source 1..22: mol_type = other DNA
ttctaaggtataatttaaatcc

SEQ ID NO: 39114 - DNA, 22 bp, synthetic construct
  misc_feature 1..22: note = chemically synthesized
  source 1..22: mol_type = other DNA
taaggtataatttaaatccatt

SEQ ID NO: 39115 - DNA, 22 bp, synthetic construct
  misc_feature 1..22: note = chemically synthesized
  source 1..22: mol_type = other DNA
aggtataatttaaatccattat

SEQ ID NO: 39116 - DNA, 22 bp, synthetic construct
  misc_feature 1..22: note = chemically synthesized
  source 1..22: mol_type = other DNA
aaatccattatttttttgttga

SEQ ID NO: 39117 - DNA, 22 bp, synthetic construct
  misc_feature 1..22: note = chemically synthesized
  source 1..22: mol_type = other DNA
aatccattatttttttgttgac

SEQ ID NO: 39118 - DNA, 22 bp, synthetic construct
  misc_feature 1..22: note = chemically synthesized
  source 1..22: mol_type = other DNA
tttttttgttgactttctgtct

SEQ ID NO: 39119 - DNA, 22 bp, synthetic construct
  misc_feature 1..22: note = chemically synthesized
  source 1..22: mol_type = other DNA
ttttgttgactttctgtcttga

SEQ ID NO: 39120 - DNA, 22 bp, synthetic construct
  misc_feature 1..22: note = chemically synthesized
  source 1..22: mol_type = other DNA
tttgttgactttctgtcttgat

SEQ ID NO: 39121 - DNA, 22 bp, synthetic construct
  misc_feature 1..22: note = chemically synthesized
  source 1..22: mol_type = other DNA
ttgttgactttctgtcttgatg

SEQ ID NO: 39122 - DNA, 22 bp, synthetic construct
  misc_feature 1..22: note = chemically synthesized
  source 1..22: mol_type = other DNA
tgttgactttctgtcttgatga

SEQ ID NO: 39123 - DNA, 22 bp, synthetic construct
  misc_feature 1..22: note = chemically synthesized
  source 1..22: mol_type = other DNA
gttgactttctgtcttgatgaa

SEQ ID NO: 39124 - DNA, 22 bp, synthetic construct
  misc_feature 1..22: note = chemically synthesized
  source 1..22: mol_type = other DNA
ttgactttctgtcttgatgaac

SEQ ID NO: 39125 - DNA, 22 bp, synthetic construct
  misc_feature 1..22: note = chemically synthesized
  source 1..22: mol_type = other DNA
actttctgtcttgatgaactgt

SEQ ID NO: 39126 - DNA, 22 bp, synthetic construct
  misc_feature 1..22: note = chemically synthesized
  source 1..22: mol_type = other DNA
tctgtcttgatgaactgtctag

SEQ ID NO: 39127 - DNA, 22 bp, synthetic construct
  misc_feature 1..22: note = chemically synthesized
  source 1..22: mol_type = other DNA
ctgtcttgatgaactgtctagt

SEQ ID NO: 39128 - DNA, 22 bp, synthetic construct
  misc_feature 1..22: note = chemically synthesized
  source 1..22: mol_type = other DNA
tgtcttgatgaactgtctagtg

SEQ ID NO: 39129 - DNA, 22 bp, synthetic construct
  misc_feature 1..22: note = chemically synthesized
  source 1..22: mol_type = other DNA
tcttgatgaactgtctagtgct

SEQ ID NO: 39130 - DNA, 22 bp, synthetic construct
  misc_feature 1..22: note = chemically synthesized
  source 1..22: mol_type = other DNA
gatgaactgtctagtgctgtca

SEQ ID NO: 39131 - DNA, 22 bp, synthetic construct
  misc_feature 1..22: note = chemically synthesized
  source 1..22: mol_type = other DNA
atgaactgtctagtgctgtcaa

SEQ ID NO: 39132 - DNA, 22 bp, synthetic construct
  misc_feature 1..22: note = chemically synthesized
  source 1..22: mol_type = other DNA
tctagtgctgtcaatgaagtat

SEQ ID NO: 39133 - DNA, 22 bp, synthetic construct
  misc_feature 1..22: note = chemically synthesized
  source 1..22: mol_type = other DNA
gtgctgtcaatgaagtattgaa

SEQ ID NO: 39134 - DNA, 22 bp, synthetic construct
  misc_feature 1..22: note = chemically synthesized
  source 1..22: mol_type = other DNA
tcaatgaagtattgaagtcccc

SEQ ID NO: 39135 - DNA, 22 bp, synthetic construct
  misc_feature 1..22: note = chemically synthesized
  source 1..22: mol_type = other DNA
aagtcccccactattattgtgt

SEQ ID NO: 39136 - DNA, 22 bp, synthetic construct
  misc_feature 1..22: note = chemically synthesized
  source 1..22: mol_type = other DNA
ttattgtgttgctgtctatctc

SEQ ID NO: 39137 - DNA, 22 bp, synthetic construct
  misc_feature 1..22: note = chemically synthesized
  source 1..22: mol_type = other DNA
ttgtgttgctgtctatctcatt

SEQ ID NO: 39138 - DNA, 22 bp, synthetic construct
  misc_feature 1..22: note = chemically synthesized
  source 1..22: mol_type = other DNA
tgttgctgtctatctcatttct

SEQ ID NO: 39139 - DNA, 22 bp, synthetic construct
  misc_feature 1..22: note = chemically synthesized
  source 1..22: mol_type = other DNA
ctgtctatctcatttcttaggt

SEQ ID NO: 39140 - DNA, 22 bp, synthetic construct
  misc_feature 1..22: note = chemically synthesized
  source 1..22: mol_type = other DNA
tctatctcatttcttaggtcta

SEQ ID NO: 39141 - DNA, 22 bp, synthetic construct
  misc_feature 1..22: note = chemically synthesized
  source 1..22: mol_type = other DNA
tctcatttcttaggtctattag

SEQ ID NO: 39142 - DNA, 22 bp, synthetic construct
  misc_feature 1..22: note = chemically synthesized
  source 1..22: mol_type = other DNA
atttcttaggtctattagtaat

SEQ ID NO: 39143 - DNA, 22 bp, synthetic construct
  misc_feature 1..22: note = chemically synthesized
  source 1..22: mol_type = other DNA
cttaggtctattagtaattgtt

SEQ ID NO: 39144 - DNA, 22 bp, synthetic construct
  misc_feature 1..22: note = chemically synthesized
  source 1..22: mol_type = other DNA
ttaggtctattagtaattgttc

SEQ ID NO: 39145 - DNA, 22 bp, synthetic construct
  misc_feature 1..22: note = chemically synthesized
  source 1..22: mol_type = other DNA
aggtctattagtaattgttcta

SEQ ID NO: 39146 - DNA, 22 bp, synthetic construct
  misc_feature 1..22: note = chemically synthesized
  source 1..22: mol_type = other DNA
ggtctattagtaattgttctat

SEQ ID NO: 39147 - DNA, 22 bp, synthetic construct
  misc_feature 1..22: note = chemically synthesized
  source 1..22: mol_type = other DNA
ttagtaattgttctataaattt

SEQ ID NO: 39148 - DNA, 22 bp, synthetic construct
  misc_feature 1..22: note = chemically synthesized
  source 1..22: mol_type = other DNA
gtaattgttctataaatttggg

SEQ ID NO: 39149 - DNA, 22 bp, synthetic construct
  misc_feature 1..22: note = chemically synthesized
  source 1..22: mol_type = other DNA
ttctataaatttgggagctcca

SEQ ID NO: 39150 - DNA, 22 bp, synthetic construct
  misc_feature 1..22: note = chemically synthesized
  source 1..22: mol_type = other DNA
tataaatttgggagctccagtg

SEQ ID NO: 39151 - DNA, 22 bp, synthetic construct
  misc_feature 1..22: note = chemically synthesized
  source 1..22: mol_type = other DNA
taaatttgggagctccagtgtt

SEQ ID NO: 39152 - DNA, 22 bp, synthetic construct
  misc_feature 1..22: note = chemically synthesized
  source 1..22: mol_type = other DNA
gggagctccagtgttaggtgca

SEQ ID NO: 39153 - DNA, 22 bp, synthetic construct
  misc_feature 1..22: note = chemically synthesized
  source 1..22: mol_type = other DNA
ggagctccagtgttaggtgcat

SEQ ID NO: 39154 - DNA, 22 bp, synthetic construct
  misc_feature 1..22: note = chemically synthesized
  source 1..22: mol_type = other DNA
cagtgttaggtgcatatatgtt

SEQ ID NO: 39155 - DNA, 22 bp, synthetic construct
  misc_feature 1..22: note = chemically synthesized
  source 1..22: mol_type = other DNA
ggtgcatatatgtttaagattg

SEQ ID NO: 39156 - DNA, 22 bp, synthetic construct
  misc_feature 1..22: note = chemically synthesized
  source 1..22: mol_type = other DNA
aagattgtgatattttcctgtt

SEQ ID NO: 39157 - DNA, 22 bp, synthetic construct
  misc_feature 1..22: note = chemically synthesized
  source 1..22: mol_type = other DNA
agattgtgatattttcctgttg

SEQ ID NO: 39158 - DNA, 22 bp, synthetic construct
  misc_feature 1..22: note = chemically synthesized
  source 1..22: mol_type = other DNA
tgatattttcctgttggacaag

SEQ ID NO: 39159 - DNA, 22 bp, synthetic construct
  misc_feature 1..22: note = chemically synthesized
  source 1..22: mol_type = other DNA
tcctgttggacaaggcctttta

SEQ ID NO: 39160 - DNA, 22 bp, synthetic construct
  misc_feature 1..22: note = chemically synthesized
  source 1..22: mol_type = other DNA
cctgttggacaaggccttttac

SEQ ID NO: 39161 - DNA, 22 bp, synthetic construct
  misc_feature 1..22: note = chemically synthesized
  source 1..22: mol_type = other DNA
ctgttggacaaggccttttacc

SEQ ID NO: 39162 - DNA, 22 bp, synthetic construct
  misc_feature 1..22: note = chemically synthesized
  source 1..22: mol_type = other DNA
ttggacaaggccttttaccatt

SEQ ID NO: 39163 - DNA, 22 bp, synthetic construct
  misc_feature 1..22: note = chemically synthesized
  source 1..22: mol_type = other DNA
gacaaggccttttaccattata

SEQ ID NO: 39164 - DNA, 22 bp, synthetic construct
  misc_feature 1..22: note = chemically synthesized
  source 1..22: mol_type = other DNA
ttaccattatataatgtccctc

SEQ ID NO: 39165 - DNA, 22 bp, synthetic construct
  misc_feature 1..22: note = chemically synthesized
  source 1..22: mol_type = other DNA
taccattatataatgtccctct

SEQ ID NO: 39166 - DNA, 22 bp, synthetic construct
  misc_feature 1..22: note = chemically synthesized
  source 1..22: mol_type = other DNA
accattatataatgtccctctt

SEQ ID NO: 39167 - DNA, 22 bp, synthetic construct
  misc_feature 1..22: note = chemically synthesized
  source 1..22: mol_type = other DNA
ccattatataatgtccctcttt

SEQ ID NO: 39168 - DNA, 22 bp, synthetic construct
  misc_feature 1..22: note = chemically synthesized
  source 1..22: mol_type = other DNA
tataatgtccctctttgtctct

SEQ ID NO: 39169 - DNA, 22 bp, synthetic construct
  misc_feature 1..22: note = chemically synthesized
  source 1..22: mol_type = other DNA
tttgtctcttttaactgctgtt

SEQ ID NO: 39170 - DNA, 22 bp, synthetic construct
  misc_feature 1..22: note = chemically synthesized
  source 1..22: mol_type = other DNA
tgtctcttttaactgctgttgc

SEQ ID NO: 39171 - DNA, 22 bp, synthetic construct
  misc_feature 1..22: note = chemically synthesized
  source 1..22: mol_type = other DNA
gtctcttttaactgctgttgct

SEQ ID NO: 39172 - DNA, 22 bp, synthetic construct
  misc_feature 1..22: note = chemically synthesized
  source 1..22: mol_type = other DNA
tctcttttaactgctgttgctt

SEQ ID NO: 39173 - DNA, 22 bp, synthetic construct
  misc_feature 1..22: note = chemically synthesized
  source 1..22: mol_type = other DNA
ttttaactgctgttgctttaaa

SEQ ID NO: 39174 - DNA, 22 bp, synthetic construct
  misc_feature 1..22: note = chemically synthesized
  source 1..22: mol_type = other DNA
ttaactgctgttgctttaaagt

SEQ ID NO: 39175 - DNA, 22 bp, synthetic construct
  misc_feature 1..22: note = chemically synthesized
  source 1..22: mol_type = other DNA
taactgctgttgctttaaagtt

SEQ ID NO: 39176 - DNA, 22 bp, synthetic construct
  misc_feature 1..22: note = chemically synthesized
  source 1..22: mol_type = other DNA
aactgctgttgctttaaagttt

SEQ ID NO: 39177 - DNA, 22 bp, synthetic construct
  misc_feature 1..22: note = chemically synthesized
  source 1..22: mol_type = other DNA
actgctgttgctttaaagtttg

SEQ ID NO: 39178 - DNA, 22 bp, synthetic construct
  misc_feature 1..22: note = chemically synthesized
  source 1..22: mol_type = other DNA
ctgttgctttaaagtttgtttt

SEQ ID NO: 39179 - DNA, 22 bp, synthetic construct
  misc_feature 1..22: note = chemically synthesized
  source 1..22: mol_type = other DNA
ttgctttaaagtttgttttgcc

SEQ ID NO: 39180 - DNA, 22 bp, synthetic construct
  misc_feature 1..22: note = chemically synthesized
  source 1..22: mol_type = other DNA
ctttaaagtttgttttgcctac

SEQ ID NO: 39181 - DNA, 22 bp, synthetic construct
  misc_feature 1..22: note = chemically synthesized
  source 1..22: mol_type = other DNA
taaagtttgttttgcctactca

SEQ ID NO: 39182 - DNA, 22 bp, synthetic construct
  misc_feature 1..22: note = chemically synthesized
  source 1..22: mol_type = other DNA
aaagtttgttttgcctactcac

SEQ ID NO: 39183 - DNA, 22 bp, synthetic construct
  misc_feature 1..22: note = chemically synthesized
  source 1..22: mol_type = other DNA
aagtttgttttgcctactcact

SEQ ID NO: 39184 - DNA, 22 bp, synthetic construct
  misc_feature 1..22: note = chemically synthesized
  source 1..22: mol_type = other DNA
gttttgcctactcacttttggt

SEQ ID NO: 39185 - DNA, 22 bp, synthetic construct
  misc_feature 1..22: note = chemically synthesized
  source 1..22: mol_type = other DNA
ttttgcctactcacttttggtg

SEQ ID NO: 39186 - DNA, 22 bp, synthetic construct
  misc_feature 1..22: note = chemically synthesized
  source 1..22: mol_type = other DNA
tgcctactcacttttggtggcc

SEQ ID NO: 39187 - DNA, 22 bp, synthetic construct
  misc_feature 1..22: note = chemically synthesized
  source 1..22: mol_type = other DNA
gcctactcacttttggtggcca

SEQ ID NO: 39188 - DNA, 22 bp, synthetic construct
  misc_feature 1..22: note = chemically synthesized
  source 1..22: mol_type = other DNA
cctactcacttttggtggccat

SEQ ID NO: 39189 - DNA, 22 bp, synthetic construct
  misc_feature 1..22: note = chemically synthesized
  source 1..22: mol_type = other DNA
ctcacttttggtggccatttgc

SEQ ID NO: 39190 - DNA, 22 bp, synthetic construct
  misc_feature 1..22: note = chemically synthesized
  source 1..22: mol_type = other DNA
acttttggtggccatttgcatg

SEQ ID NO: 39191 - DNA, 22 bp, synthetic construct
  misc_feature 1..22: note = chemically synthesized
  source 1..22: mol_type = other DNA
ttggtggccatttgcatgaaat

SEQ ID NO: 39192 - DNA, 22 bp, synthetic construct
  misc_feature 1..22: note = chemically synthesized
  source 1..22: mol_type = other DNA
tggtggccatttgcatgaaata

SEQ ID NO: 39193 - DNA, 22 bp, synthetic construct
  misc_feature 1..22: note = chemically synthesized
  source 1..22: mol_type = other DNA
ggtggccatttgcatgaaatac

SEQ ID NO: 39194 - DNA, 22 bp, synthetic construct
  misc_feature 1..22: note = chemically synthesized
  source 1..22: mol_type = other DNA
gtggccatttgcatgaaatacc

SEQ ID NO: 39195 - DNA, 22 bp, synthetic construct
  misc_feature 1..22: note = chemically synthesized
  source 1..22: mol_type = other DNA
gcatgaaatacctttttcaccc

SEQ ID NO: 39196 - DNA, 22 bp, synthetic construct
  misc_feature 1..22: note = chemically synthesized
  source 1..22: mol_type = other DNA
catgaaatacctttttcaccct

SEQ ID NO: 39197 - DNA, 22 bp, synthetic construct
  misc_feature 1..22: note = chemically synthesized
  source 1..22: mol_type = other DNA
tttcacccttttaagtggagca

SEQ ID NO: 39198 - DNA, 22 bp, synthetic construct
  misc_feature 1..22: note = chemically synthesized
  source 1..22: mol_type = other DNA
ttcacccttttaagtggagcat

SEQ ID NO: 39199 - DNA, 22 bp, synthetic construct
  misc_feature 1..22: note = chemically synthesized
  source 1..22: mol_type = other DNA
tcacccttttaagtggagcatt

SEQ ID NO: 39200 - DNA, 22 bp, synthetic construct
  misc_feature 1..22: note = chemically synthesized
  source 1..22: mol_type = other DNA
cacccttttaagtggagcattt

SEQ ID NO: 39201 - DNA, 22 bp, synthetic construct
  misc_feature 1..22: note = chemically synthesized
  source 1..22: mol_type = other DNA
acccttttaagtggagcattta

SEQ ID NO: 39202 - DNA, 22 bp, synthetic construct
  misc_feature 1..22: note = chemically synthesized
  source 1..22: mol_type = other DNA
ttaagtggagcatttaggccat

SEQ ID NO: 39203 - DNA, 22 bp, synthetic construct
  misc_feature 1..22: note = chemically synthesized
  source 1..22: mol_type = other DNA
taagtggagcatttaggccatt

SEQ ID NO: 39204 - DNA, 22 bp, synthetic construct
  misc_feature 1..22: note = chemically synthesized
  source 1..22: mol_type = other DNA
aagtggagcatttaggccattt

SEQ ID NO: 39205 - DNA, 22 bp, synthetic construct
  misc_feature 1..22: note = chemically synthesized
  source 1..22: mol_type = other DNA
agtggagcatttaggccattta

SEQ ID NO: 39206 - DNA, 22 bp, synthetic construct
  misc_feature 1..22: note = chemically synthesized
  source 1..22: mol_type = other DNA
aggccatttacattcaatgtta

SEQ ID NO: 39207 - DNA, 22 bp, synthetic construct
  misc_feature 1..22: note = chemically synthesized
  source 1..22: mol_type = other DNA
ggccatttacattcaatgttag

SEQ ID NO: 39208 - DNA, 22 bp, synthetic construct
  misc_feature 1..22: note = chemically synthesized
  source 1..22: mol_type = other DNA
acattcaatgttagtaatgtaa

SEQ ID NO: 39209 - DNA, 22 bp, synthetic construct
  misc_feature 1..22: note = chemically synthesized
  source 1..22: mol_type = other DNA
cattcaatgttagtaatgtaaa

SEQ ID NO: 39210 - DNA, 22 bp, synthetic construct
  misc_feature 1..22: note = chemically synthesized
  source 1..22: mol_type = other DNA
aatgttagtaatgtaaatgcct

SEQ ID NO: 39211 - DNA, 22 bp, synthetic construct
  misc_feature 1..22: note = chemically synthesized
  source 1..22: mol_type = other DNA
gtaatgtaaatgcctggctatg

SEQ ID NO: 39212 - DNA, 22 bp, synthetic construct
  misc_feature 1..22: note = chemically synthesized
  source 1..22: mol_type = other DNA
gctatgccaggcaggaatggcc

SEQ ID NO: 39213 - DNA, 22 bp, synthetic construct
  misc_feature 1..22: note = chemically synthesized
  source 1..22: mol_type = other DNA
tgccaggcaggaatggcctgct

SEQ ID NO: 39214 - DNA, 22 bp, synthetic construct
  misc_feature 1..22: note = chemically synthesized
  source 1..22: mol_type = other DNA
ctcagggacccagtgagctccc

SEQ ID NO: 39215 - DNA, 22 bp, synthetic construct
  misc_feature 1..22: note = chemically synthesized
  source 1..22: mol_type = other DNA
agggacccagtgagctcccagg

SEQ ID NO: 39216 - DNA, 22 bp, synthetic construct
  misc_feature 1..22: note = chemically synthesized
  source 1..22: mol_type = other DNA
ccagggcctttctcactgcttc

SEQ ID NO: 39217 - DNA, 22 bp, synthetic construct
  misc_feature 1..22: note = chemically synthesized
  source 1..22: mol_type = other DNA
tctcactgcttcctctacacct

SEQ ID NO: 39218 - DNA, 22 bp, synthetic construct
  misc_feature 1..22: note = chemically synthesized
  source 1..22: mol_type = other DNA
ctcactgcttcctctacacctg

SEQ ID NO: 39219 - DNA, 22 bp, synthetic construct
  misc_feature 1..22: note = chemically synthesized
  source 1..22: mol_type = other DNA
tcactgcttcctctacacctgt

SEQ ID NO: 39220 - DNA, 22 bp, synthetic construct
  misc_feature 1..22: note = chemically synthesized
  source 1..22: mol_type = other DNA
actgcttcctctacacctgtat

SEQ ID NO: 39221 - DNA, 22 bp, synthetic construct
  misc_feature 1..22: note = chemically synthesized
  source 1..22: mol_type = other DNA
cttcctctacacctgtattttg

SEQ ID NO: 39222 - DNA, 22 bp, synthetic construct
  misc_feature 1..22: note = chemically synthesized
  source 1..22: mol_type = other DNA
cctctacacctgtattttgctc

SEQ ID NO: 39223 - DNA, 22 bp, synthetic construct
  misc_feature 1..22: note = chemically synthesized
  source 1..22: mol_type = other DNA
ctctacacctgtattttgctca

SEQ ID NO: 39224 - DNA, 22 bp, synthetic construct
  misc_feature 1..22: note = chemically synthesized
  source 1..22: mol_type = other DNA
tacacctgtattttgctcagct

SEQ ID NO: 39225 - DNA, 22 bp, synthetic construct
  misc_feature 1..22: note = chemically synthesized
  source 1..22: mol_type = other DNA
cacctgtattttgctcagctct

SEQ ID NO: 39226 - DNA, 22 bp, synthetic construct
  misc_feature 1..22: note = chemically synthesized
  source 1..22: mol_type = other DNA
tattttgctcagctctctaagt

SEQ ID NO: 39227 - DNA, 22 bp, synthetic construct
  misc_feature 1..22: note = chemically synthesized
  source 1..22: mol_type = other DNA
tgctcagctctctaagttaact

SEQ ID NO: 39228 - DNA, 22 bp, synthetic construct
  misc_feature 1..22: note = chemically synthesized
  source 1..22: mol_type = other DNA
gctcagctctctaagttaactc

SEQ ID NO: 39229 - DNA, 22 bp, synthetic construct
  misc_feature 1..22: note = chemically synthesized
  source 1..22: mol_type = other DNA
ctcagctctctaagttaactca

SEQ ID NO: 39230 - DNA, 22 bp, synthetic construct
  misc_feature 1..22: note = chemically synthesized
  source 1..22: mol_type = other DNA
agctctctaagttaactcaact

SEQ ID NO: 39231 - DNA, 22 bp, synthetic construct
  misc_feature 1..22: note = chemically synthesized
  source 1..22: mol_type = other DNA
tctaagttaactcaactccagg

SEQ ID NO: 39232 - DNA, 22 bp, synthetic construct
  misc_feature 1..22: note = chemically synthesized
  source 1..22: mol_type = other DNA
taagttaactcaactccaggta

SEQ ID NO: 39233 - DNA, 22 bp, synthetic construct
  misc_feature 1..22: note = chemically synthesized
  source 1..22: mol_type = other DNA
agttaactcaactccaggtaag

SEQ ID NO: 39234 - DNA, 22 bp, synthetic construct
  misc_feature 1..22: note = chemically synthesized
  source 1..22: mol_type = other DNA
actcaactccaggtaaggtcag

SEQ ID NO: 39235 - DNA, 22 bp, synthetic construct
  misc_feature 1..22: note = chemically synthesized
  source 1..22: mol_type = other DNA
aactccaggtaaggtcagaaac

SEQ ID NO: 39236 - DNA, 22 bp, synthetic construct
  misc_feature 1..22: note = chemically synthesized
  source 1..22: mol_type = other DNA
caggtaaggtcagaaacttctc

SEQ ID NO: 39237 - DNA, 22 bp, synthetic construct
  misc_feature 1..22: note = chemically synthesized
  source 1..22: mol_type = other DNA
ctcccacaaacagaccttcagt

SEQ ID NO: 39238 - DNA, 22 bp, synthetic construct
  misc_feature 1..22: note = chemically synthesized
  source 1..22: mol_type = other DNA
tcccacaaacagaccttcagtt

SEQ ID NO: 39239 - DNA, 22 bp, synthetic construct
  misc_feature 1..22: note = chemically synthesized
  source 1..22: mol_type = other DNA
ccacaaacagaccttcagtttc

SEQ ID NO: 39240 - DNA, 22 bp, synthetic construct
  misc_feature 1..22: note = chemically synthesized
  source 1..22: mol_type = other DNA
cagtttctccagtgggagtgtg

SEQ ID NO: 39241 - DNA, 22 bp, synthetic construct
  misc_feature 1..22: note = chemically synthesized
  source 1..22: mol_type = other DNA
agtttctccagtgggagtgtgt

SEQ ID NO: 39242 - DNA, 22 bp, synthetic construct
  misc_feature 1..22: note = chemically synthesized
  source 1..22: mol_type = other DNA
ctccagtgggagtgtgtgttta

SEQ ID NO: 39243 - DNA, 22 bp, synthetic construct
  misc_feature 1..22: note = chemically synthesized
  source 1..22: mol_type = other DNA
tccagtgggagtgtgtgtttag

SEQ ID NO: 39244 - DNA, 22 bp, synthetic construct
  misc_feature 1..22: note = chemically synthesized
  source 1..22: mol_type = other DNA
cagtgggagtgtgtgtttagga

SEQ ID NO: 39245 - DNA, 22 bp, synthetic construct
  misc_feature 1..22: note = chemically synthesized
  source 1..22: mol_type = other DNA
aggagaggaggatctccctttc

SEQ ID NO: 39246 - DNA, 22 bp, synthetic construct
  misc_feature 1..22: note = chemically synthesized
  source 1..22: mol_type = other DNA
ggagaggaggatctccctttcc

SEQ ID NO: 39247 - DNA, 22 bp, synthetic construct
  misc_feature 1..22: note = chemically synthesized
  source 1..22: mol_type = other DNA
cctttcccacttccgcagttgg

SEQ ID NO: 39248 - DNA, 22 bp, synthetic construct
  misc_feature 1..22: note = chemically synthesized
  source 1..22: mol_type = other DNA
tcccacttccgcagttggggca

SEQ ID NO: 39249 - DNA, 22 bp, synthetic construct
  misc_feature 1..22: note = chemically synthesized
  source 1..22: mol_type = other DNA
cccacttccgcagttggggcac

SEQ ID NO: 39250 - DNA, 22 bp, synthetic construct
  misc_feature 1..22: note = chemically synthesized
  source 1..22: mol_type = other DNA
ccacttccgcagttggggcact

SEQ ID NO: 39251 - DNA, 22 bp, synthetic construct
  misc_feature 1..22: note = chemically synthesized
  source 1..22: mol_type = other DNA
ccgcagttggggcactcacagt

SEQ ID NO: 39252 - DNA, 22 bp, synthetic construct
  misc_feature 1..22: note = chemically synthesized
  source 1..22: mol_type = other DNA
cgcagttggggcactcacagta

SEQ ID NO: 39253 - DNA, 22 bp, synthetic construct
  misc_feature 1..22: note = chemically synthesized
  source 1..22: mol_type = other DNA
gggcactcacagtatttggggt

SEQ ID NO: 39254 - DNA, 22 bp, synthetic construct
  misc_feature 1..22: note = chemically synthesized
  source 1..22: mol_type = other DNA
acagtatttggggtgtctcctg

SEQ ID NO: 39255 - DNA, 22 bp, synthetic construct
  misc_feature 1..22: note = chemically synthesized
  source 1..22: mol_type = other DNA
ggggtgtctcctgggtcctgca

SEQ ID NO: 39256 - DNA, 22 bp, synthetic construct
  misc_feature 1..22: note = chemically synthesized
  source 1..22: mol_type = other DNA
gggtgtctcctgggtcctgcag

SEQ ID NO: 39257 - DNA, 22 bp, synthetic construct
  misc_feature 1..22: note = chemically synthesized
  source 1..22: mol_type = other DNA
ctgggtcctgcaggagcaatct

SEQ ID NO: 39258 - DNA, 22 bp, synthetic construct
  misc_feature 1..22: note = chemically synthesized
  source 1..22: mol_type = other DNA
ggtcctgcaggagcaatctact

SEQ ID NO: 39259 - DNA, 22 bp, synthetic construct
  misc_feature 1..22: note = chemically synthesized
  source 1..22: mol_type = other DNA
caggagcaatctacttccttca

SEQ ID NO: 39260 - DNA, 22 bp, synthetic construct
  misc_feature 1..22: note = chemically synthesized
  source 1..22: mol_type = other DNA
cttccttcagagggtctgtggg

SEQ ID NO: 39261 - DNA, 22 bp, synthetic construct
  misc_feature 1..22: note = chemically synthesized
  source 1..22: mol_type = other DNA
ccttcagagggtctgtgggtcc

SEQ ID NO: 39262 - DNA, 22 bp, synthetic construct
  misc_feature 1..22: note = chemically synthesized
  source 1..22: mol_type = other DNA
cttcagagggtctgtgggtcct

SEQ ID NO: 39263 - DNA, 22 bp, synthetic construct
  misc_feature 1..22: note = chemically synthesized
  source 1..22: mol_type = other DNA
cagagggtctgtgggtcctctc

SEQ ID NO: 39264 - DNA, 22 bp, synthetic construct
  misc_feature 1..22: note = chemically synthesized
  source 1..22: mol_type = other DNA
agagggtctgtgggtcctctca

SEQ ID NO: 39265 - DNA, 22 bp, synthetic construct
  misc_feature 1..22: note = chemically synthesized
  source 1..22: mol_type = other DNA
tgggtcctctcaggattgctgg

SEQ ID NO: 39266 - DNA, 22 bp, synthetic construct
  misc_feature 1..22: note = chemically synthesized
  source 1..22: mol_type = other DNA
tcaggattgctggtttgttctt

SEQ ID NO: 39267 - DNA, 22 bp, synthetic construct
  misc_feature 1..22: note = chemically synthesized
  source 1..22: mol_type = other DNA
aggattgctggtttgttcttgc

SEQ ID NO: 39268 - DNA, 22 bp, synthetic construct
  misc_feature 1..22: note = chemically synthesized
  source 1..22: mol_type = other DNA
ctggtttgttcttgcagtctat

SEQ ID NO: 39269 - DNA, 22 bp, synthetic construct
  misc_feature 1..22: note = chemically synthesized
  source 1..22: mol_type = other DNA
gtttgttcttgcagtctatctg

SEQ ID NO: 39270 - DNA, 22 bp, synthetic construct
  misc_feature 1..22: note = chemically synthesized
  source 1..22: mol_type = other DNA
gttcttgcagtctatctgcagc

SEQ ID NO: 39271 - DNA, 22 bp, synthetic construct
  misc_feature 1..22: note = chemically synthesized
  source 1..22: mol_type = other DNA
ttcttgcagtctatctgcagct

SEQ ID NO: 39272 - DNA, 22 bp, synthetic construct
  misc_feature 1..22: note = chemically synthesized
  source 1..22: mol_type = other DNA
ttgcagtctatctgcagctaaa

SEQ ID NO: 39273 - DNA, 22 bp, synthetic construct
  misc_feature 1..22: note = chemically synthesized
  source 1..22: mol_type = other DNA
gcagtctatctgcagctaaaat

SEQ ID NO: 39274 - DNA, 22 bp, synthetic construct
  misc_feature 1..22: note = chemically synthesized
  source 1..22: mol_type = other DNA
cagtctatctgcagctaaaatt

SEQ ID NO: 39275 - DNA, 22 bp, synthetic construct
  misc_feature 1..22: note = chemically synthesized
  source 1..22: mol_type = other DNA
tctgcagctaaaattcacaatg

SEQ ID NO: 39276 - DNA, 22 bp, synthetic construct
  misc_feature 1..22: note = chemically synthesized
  source 1..22: mol_type = other DNA
cagctaaaattcacaatgcgag

SEQ ID NO: 39277 - DNA, 22 bp, synthetic construct
  misc_feature 1..22: note = chemically synthesized
  source 1..22: mol_type = other DNA
aaattcacaatgcgagcctcca

SEQ ID NO: 39278 - DNA, 22 bp, synthetic construct
  misc_feature 1..22: note = chemically synthesized
  source 1..22: mol_type = other DNA
acaatgcgagcctccacatgct

SEQ ID NO: 39279 - DNA, 22 bp, synthetic construct
  misc_feature 1..22: note = chemically synthesized
  source 1..22: mol_type = other DNA
cacatgctgctctgtccatctg

SEQ ID NO: 39280 - DNA, 22 bp, synthetic construct
  misc_feature 1..22: note = chemically synthesized
  source 1..22: mol_type = other DNA
ctctgtccatctgagttggagc

SEQ ID NO: 39281 - DNA, 22 bp, synthetic construct
  misc_feature 1..22: note = chemically synthesized
  source 1..22: mol_type = other DNA
tgtccatctgagttggagctgc

SEQ ID NO: 39282 - DNA, 22 bp, synthetic construct
  misc_feature 1..22: note = chemically synthesized
  source 1..22: mol_type = other DNA
tccatctgagttggagctgcaa

SEQ ID NO: 39283 - DNA, 22 bp, synthetic construct
  misc_feature 1..22: note = chemically synthesized
  source 1..22: mol_type = other DNA
agttggagctgcaatctaggcc

SEQ ID NO: 39284 - DNA, 22 bp, synthetic construct
  misc_feature 1..22: note = chemically synthesized
  source 1..22: mol_type = other DNA
gagctgcaatctaggcctacct

SEQ ID NO: 39285 - DNA, 22 bp, synthetic construct
  misc_feature 1..22: note = chemically synthesized
  source 1..22: mol_type = other DNA
caatctaggcctacctcccatc

SEQ ID NO: 39286 - DNA, 22 bp, synthetic construct
  misc_feature 1..22: note = chemically synthesized
  source 1..22: mol_type = other DNA
ggcctacctcccatccgccaag

SEQ ID NO: 39287 - DNA, 22 bp, synthetic construct
  misc_feature 1..22: note = chemically synthesized
  source 1..22: mol_type = other DNA
cctcccatccgccaagatcctg

SEQ ID NO: 39288 - DNA, 22 bp, synthetic construct
  misc_feature 1..22: note = chemically synthesized
  source 1..22: mol_type = other DNA
ccatccgccaagatcctgagaa

SEQ ID NO: 39289 - DNA, 22 bp, synthetic construct
  misc_feature 1..22: note = chemically synthesized
  source 1..22: mol_type = other DNA
agaagttggggattatatttca

SEQ ID NO: 39290 - DNA, 22 bp, synthetic construct
  misc_feature 1..22: note = chemically synthesized
  source 1..22: mol_type = other DNA
gggattatatttcaacatgaga

SEQ ID NO: 39291 - DNA, 22 bp, synthetic construct
  misc_feature 1..22: note = chemically synthesized
  source 1..22: mol_type = other DNA
tatttcaacatgagatttggag

SEQ ID NO: 39292 - DNA, 22 bp, synthetic construct
  misc_feature 1..22: note = chemically synthesized
  source 1..22: mol_type = other DNA
caacatgagatttggagggaac

SEQ ID NO: 39293 - DNA, 22 bp, synthetic construct
  misc_feature 1..22: note = chemically synthesized
  source 1..22: mol_type = other DNA
aacatgagatttggagggaaca

SEQ ID NO: 39294 - DNA, 22 bp, synthetic construct
  misc_feature 1..22: note = chemically synthesized
  source 1..22: mol_type = other DNA
ggagggaacaaacatccaaacc

SEQ ID NO: 39295 - DNA, 22 bp, synthetic construct
  misc_feature 1..22: note = chemically synthesized
  source 1..22: mol_type = other DNA
gagggaacaaacatccaaacca

SEQ ID NO: 39296 - DNA, 22 bp, synthetic construct
  misc_feature 1..22: note = chemically synthesized
  source 1..22: mol_type = other DNA
tattcttttgcacatggatatc

SEQ ID NO: 39297 - DNA, 22 bp, synthetic construct
  misc_feature 1..22: note = chemically synthesized
  source 1..22: mol_type = other DNA
attcttttgcacatggatatcc

SEQ ID NO: 39298 - DNA, 22 bp, synthetic construct
  misc_feature 1..22: note = chemically synthesized
  source 1..22: mol_type = other DNA
ttcttttgcacatggatatcca

SEQ ID NO: 39299 - DNA, 22 bp, synthetic construct
  misc_feature 1..22: note = chemically synthesized
  source 1..22: mol_type = other DNA
ttttgcacatggatatccaatg

SEQ ID NO: 39300 - DNA, 22 bp, synthetic construct
  misc_feature 1..22: note = chemically synthesized
  source 1..22: mol_type = other DNA
ttgcacatggatatccaatgga

SEQ ID NO: 39301 - DNA, 22 bp, synthetic construct
  misc_feature 1..22: note = chemically synthesized
  source 1..22: mol_type = other DNA
tgcacatggatatccaatggat

SEQ ID NO: 39302 - DNA, 22 bp, synthetic construct
  misc_feature 1..22: note = chemically synthesized
  source 1..22: mol_type = other DNA
gcacatggatatccaatggata

SEQ ID NO: 39303 - DNA, 22 bp, synthetic construct
  misc_feature 1..22: note = chemically synthesized
  source 1..22: mol_type = other DNA
cacatggatatccaatggatat

SEQ ID NO: 39304 - DNA, 22 bp, synthetic construct
  misc_feature 1..22: note = chemically synthesized
  source 1..22: mol_type = other DNA
tttcagcaccatttcttgaaca

SEQ ID NO: 39305 - DNA, 22 bp, synthetic construct
  misc_feature 1..22: note = chemically synthesized
  source 1..22: mol_type = other DNA
ttcagcaccatttcttgaacac

SEQ ID NO: 39306 - DNA, 22 bp, synthetic construct
  misc_feature 1..22: note = chemically synthesized
  source 1..22: mol_type = other DNA
tcagcaccatttcttgaacact

SEQ ID NO: 39307 - DNA, 22 bp, synthetic construct
  misc_feature 1..22: note = chemically synthesized
  source 1..22: mol_type = other DNA
cagcaccatttcttgaacactg

SEQ ID NO: 39308 - DNA, 22 bp, synthetic construct
  misc_feature 1..22: note = chemically synthesized
  source 1..22: mol_type = other DNA
agcaccatttcttgaacactgt

SEQ ID NO: 39309 - DNA, 22 bp, synthetic construct
  misc_feature 1..22: note = chemically synthesized
  source 1..22: mol_type = other DNA
cttgaacactgtgtcctttcct

SEQ ID NO: 39310 - DNA, 22 bp, synthetic construct
  misc_feature 1..22: note = chemically synthesized
  source 1..22: mol_type = other DNA
ttgaacactgtgtcctttcctc

SEQ ID NO: 39311 - DNA, 22 bp, synthetic construct
  misc_feature 1..22: note = chemically synthesized
  source 1..22: mol_type = other DNA
gaacactgtgtcctttcctcaa

SEQ ID NO: 39312 - DNA, 22 bp, synthetic construct
  misc_feature 1..22: note = chemically synthesized
  source 1..22: mol_type = other DNA
aacactgtgtcctttcctcaat

SEQ ID NO: 39313 - DNA, 22 bp, synthetic construct
  misc_feature 1..22: note = chemically synthesized
  source 1..22: mol_type = other DNA
tgtcctttcctcaatgtatatt

SEQ ID NO: 39314 - DNA, 22 bp, synthetic construct
  misc_feature 1..22: note = chemically synthesized
  source 1..22: mol_type = other DNA
tcctcaatgtatattcttgtca

SEQ ID NO: 39315 - DNA, 22 bp, synthetic construct
  misc_feature 1..22: note = chemically synthesized
  source 1..22: mol_type = other DNA
cctcaatgtatattcttgtcac

SEQ ID NO: 39316 - DNA, 22 bp, synthetic construct
  misc_feature 1..22: note = chemically synthesized
  source 1..22: mol_type = other DNA
ctcaatgtatattcttgtcacc

SEQ ID NO: 39317 - DNA, 22 bp, synthetic construct
  misc_feature 1..22: note = chemically synthesized
  source 1..22: mol_type = other DNA
aatgtatattcttgtcaccttt

SEQ ID NO: 39318 - DNA, 22 bp, synthetic construct
  misc_feature 1..22: note = chemically synthesized
  source 1..22: mol_type = other DNA
ttgtcacctttgttgaaaatct

SEQ ID NO: 39319 - DNA, 22 bp, synthetic construct
  misc_feature 1..22: note = chemically synthesized
  source 1..22: mol_type = other DNA
gtcacctttgttgaaaatctgt

SEQ ID NO: 39320 - DNA, 22 bp, synthetic construct
  misc_feature 1..22: note = chemically synthesized
  source 1..22: mol_type = other DNA
tcacctttgttgaaaatctgtt

SEQ ID NO: 39321 - DNA, 22 bp, synthetic construct
  misc_feature 1..22: note = chemically synthesized
  source 1..22: mol_type = other DNA
tgttgaaaatctgttggctata

SEQ ID NO: 39322 - DNA, 22 bp, synthetic construct
  misc_feature 1..22: note = chemically synthesized
  source 1..22: mol_type = other DNA
gttgaaaatctgttggctataa

SEQ ID NO: 39323 - DNA, 22 bp, synthetic construct
  misc_feature 1..22: note = chemically synthesized
  source 1..22: mol_type = other DNA
ttgaaaatctgttggctataaa

SEQ ID NO: 39324 - DNA, 22 bp, synthetic construct
  misc_feature 1..22: note = chemically synthesized
  source 1..22: mol_type = other DNA
aaaatctgttggctataaatat

SEQ ID NO: 39325 - DNA, 22 bp, synthetic construct
  misc_feature 1..22: note = chemically synthesized
  source 1..22: mol_type = other DNA
ttggctataaatatgtggatgc

SEQ ID NO: 39326 - DNA, 22 bp, synthetic construct
  misc_feature 1..22: note = chemically synthesized
  source 1..22: mol_type = other DNA
gctataaatatgtggatgcatt

SEQ ID NO: 39327 - DNA, 22 bp, synthetic construct
  misc_feature 1..22: note = chemically synthesized
  source 1..22: mol_type = other DNA
taaatatgtggatgcatttcta

SEQ ID NO: 39328 - DNA, 22 bp, synthetic construct
  misc_feature 1..22: note = chemically synthesized
  source 1..22: mol_type = other DNA
ctaggttctctattctcttcca

SEQ ID NO: 39329 - DNA, 22 bp, synthetic construct
  misc_feature 1..22: note = chemically synthesized
  source 1..22: mol_type = other DNA
taggttctctattctcttccat

SEQ ID NO: 39330 - DNA, 22 bp, synthetic construct
  misc_feature 1..22: note = chemically synthesized
  source 1..22: mol_type = other DNA
ggttctctattctcttccattg

SEQ ID NO: 39331 - DNA, 22 bp, synthetic construct
  misc_feature 1..22: note = chemically synthesized
  source 1..22: mol_type = other DNA
tctattctcttccattggtcta

SEQ ID NO: 39332 - DNA, 22 bp, synthetic construct
  misc_feature 1..22: note = chemically synthesized
  source 1..22: mol_type = other DNA
tattctcttccattggtctaag

SEQ ID NO: 39333 - DNA, 22 bp, synthetic construct
  misc_feature 1..22: note = chemically synthesized
  source 1..22: mol_type = other DNA
ttctcttccattggtctaagtg

SEQ ID NO: 39334 - DNA, 22 bp, synthetic construct
  misc_feature 1..22: note = chemically synthesized
  source 1..22: mol_type = other DNA
tcttccattggtctaagtgtct

SEQ ID NO: 39335 - DNA, 22 bp, synthetic construct
  misc_feature 1..22: note = chemically synthesized
  source 1..22: mol_type = other DNA
ttccattggtctaagtgtctgt

SEQ ID NO: 39336 - DNA, 22 bp, synthetic construct
  misc_feature 1..22: note = chemically synthesized
  source 1..22: mol_type = other DNA
ccattggtctaagtgtctgttc

SEQ ID NO: 39337 - DNA, 22 bp, synthetic construct
  misc_feature 1..22: note = chemically synthesized
  source 1..22: mol_type = other DNA
cattggtctaagtgtctgttct

SEQ ID NO: 39338 - DNA, 22 bp, synthetic construct
  misc_feature 1..22: note = chemically synthesized
  source 1..22: mol_type = other DNA
gtctaagtgtctgttctaatgt

SEQ ID NO: 39339 - DNA, 22 bp, synthetic construct
  misc_feature 1..22: note = chemically synthesized
  source 1..22: mol_type = other DNA
agtgtctgttctaatgtcagta

SEQ ID NO: 39340 - DNA, 22 bp, synthetic construct
  misc_feature 1..22: note = chemically synthesized
  source 1..22: mol_type = other DNA
ttctaatgtcagtatcatgctg

SEQ ID NO: 39341 - DNA, 22 bp, synthetic construct
  misc_feature 1..22: note = chemically synthesized
  source 1..22: mol_type = other DNA
taatgtcagtatcatgctgttt

SEQ ID NO: 39342 - DNA, 22 bp, synthetic construct
  misc_feature 1..22: note = chemically synthesized
  source 1..22: mol_type = other DNA
atgtcagtatcatgctgtttag

SEQ ID NO: 39343 - DNA, 22 bp, synthetic construct
  misc_feature 1..22: note = chemically synthesized
  source 1..22: mol_type = other DNA
tttaggttcctatacttttgta

SEQ ID NO: 39344 - DNA, 22 bp, synthetic construct
  misc_feature 1..22: note = chemically synthesized
  source 1..22: mol_type = other DNA
aggttcctatacttttgtaata

SEQ ID NO: 39345 - DNA, 22 bp, synthetic construct
  misc_feature 1..22: note = chemically synthesized
  source 1..22: mol_type = other DNA
ggttcctatacttttgtaatat

SEQ ID NO: 39346 - DNA, 22 bp, synthetic construct
  misc_feature 1..22: note = chemically synthesized
  source 1..22: mol_type = other DNA
ctatacttttgtaatatacttt

SEQ ID NO: 39347 - DNA, 22 bp, synthetic construct
  misc_feature 1..22: note = chemically synthesized
  source 1..22: mol_type = other DNA
tacttttgtaatatactttgaa

SEQ ID NO: 39348 - DNA, 22 bp, synthetic construct
  misc_feature 1..22: note = chemically synthesized
  source 1..22: mol_type = other DNA
ttgtaatatactttgaaatcag

SEQ ID NO: 39349 - DNA, 22 bp, synthetic construct
  misc_feature 1..22: note = chemically synthesized
  source 1..22: mol_type = other DNA
tgtaatatactttgaaatcagg

SEQ ID NO: 39350 - DNA, 22 bp, synthetic construct
  misc_feature 1..22: note = chemically synthesized
  source 1..22: mol_type = other DNA
gtaatatactttgaaatcaggt

SEQ ID NO: 39351 - DNA, 22 bp, synthetic construct
  misc_feature 1..22: note = chemically synthesized
  source 1..22: mol_type = other DNA
taatatactttgaaatcaggta

SEQ ID NO: 39352 - DNA, 22 bp, synthetic construct
  misc_feature 1..22: note = chemically synthesized
  source 1..22: mol_type = other DNA
tgaaatcaggtagtatgatacc

SEQ ID NO: 39353 - DNA, 22 bp, synthetic construct
  misc_feature 1..22: note = chemically synthesized
  source 1..22: mol_type = other DNA
gaaatcaggtagtatgatacct

SEQ ID NO: 39354 - DNA, 22 bp, synthetic construct
  misc_feature 1..22: note = chemically synthesized
  source 1..22: mol_type = other DNA
aaatcaggtagtatgatacctc

SEQ ID NO: 39355 - DNA, 22 bp, synthetic construct
  misc_feature 1..22: note = chemically synthesized
  source 1..22: mol_type = other DNA
tagcattgttcttttttcacag

SEQ ID NO: 39356 - DNA, 22 bp, synthetic construct
  misc_feature 1..22: note = chemically synthesized
  source 1..22: mol_type = other DNA
gcattgttcttttttcacagga

SEQ ID NO: 39357 - DNA, 22 bp, synthetic construct
  misc_feature 1..22: note = chemically synthesized
  source 1..22: mol_type = other DNA
ttcttttttcacaggatgactt

SEQ ID NO: 39358 - DNA, 22 bp, synthetic construct
  misc_feature 1..22: note = chemically synthesized
  source 1..22: mol_type = other DNA
ttttttcacaggatgactttgg

SEQ ID NO: 39359 - DNA, 22 bp, synthetic construct
  misc_feature 1..22: note = chemically synthesized
  source 1..22: mol_type = other DNA
ttttcacaggatgactttggct

SEQ ID NO: 39360 - DNA, 22 bp, synthetic construct
  misc_feature 1..22: note = chemically synthesized
  source 1..22: mol_type = other DNA
tttcacaggatgactttggcta

SEQ ID NO: 39361 - DNA, 22 bp, synthetic construct
  misc_feature 1..22: note = chemically synthesized
  source 1..22: mol_type = other DNA
ttcacaggatgactttggctac

SEQ ID NO: 39362 - DNA, 22 bp, synthetic construct
  misc_feature 1..22: note = chemically synthesized
  source 1..22: mol_type = other DNA
tcacaggatgactttggctact

SEQ ID NO: 39363 - DNA, 22 bp, synthetic construct
  misc_feature 1..22: note = chemically synthesized
  source 1..22: mol_type = other DNA
cacaggatgactttggctactg

SEQ ID NO: 39364 - DNA, 22 bp, synthetic construct
  misc_feature 1..22: note = chemically synthesized
  source 1..22: mol_type = other DNA
acaggatgactttggctactgg

SEQ ID NO: 39365 - DNA, 22 bp, synthetic construct
  misc_feature 1..22: note = chemically synthesized
  source 1..22: mol_type = other DNA
tggctactggagctatttttta

SEQ ID NO: 39366 - DNA, 22 bp, synthetic construct
  misc_feature 1..22: note = chemically synthesized
  source 1..22: mol_type = other DNA
ggctactggagctattttttaa

SEQ ID NO: 39367 - DNA, 22 bp, synthetic construct
  misc_feature 1..22: note = chemically synthesized
  source 1..22: mol_type = other DNA
gctactggagctattttttaat

SEQ ID NO: 39368 - DNA, 22 bp, synthetic construct
  misc_feature 1..22: note = chemically synthesized
  source 1..22: mol_type = other DNA
ctggagctattttttaatttca

SEQ ID NO: 39369 - DNA, 22 bp, synthetic construct
  misc_feature 1..22: note = chemically synthesized
  source 1..22: mol_type = other DNA
gagctattttttaatttcatac

SEQ ID NO: 39370 - DNA, 22 bp, synthetic construct
  misc_feature 1..22: note = chemically synthesized
  source 1..22: mol_type = other DNA
ttttttaatttcatacaaattt

SEQ ID NO: 39371 - DNA, 22 bp, synthetic construct
  misc_feature 1..22: note = chemically synthesized
  source 1..22: mol_type = other DNA
tttaatttcatacaaattttag

SEQ ID NO: 39372 - DNA, 22 bp, synthetic construct
  misc_feature 1..22: note = chemically synthesized
  source 1..22: mol_type = other DNA
ttaatttcatacaaattttaga

SEQ ID NO: 39373 - DNA, 22 bp, synthetic construct
  misc_feature 1..22: note = chemically synthesized
  source 1..22: mol_type = other DNA
taatttcatacaaattttagat

SEQ ID NO: 39374 - DNA, 22 bp, synthetic construct
  misc_feature 1..22: note = chemically synthesized
  source 1..22: mol_type = other DNA
aatttcatacaaattttagatt

SEQ ID NO: 39375 - DNA, 22 bp, synthetic construct
  misc_feature 1..22: note = chemically synthesized
  source 1..22: mol_type = other DNA
atttcatacaaattttagattg

SEQ ID NO: 39376 - DNA, 22 bp, synthetic construct
  misc_feature 1..22: note = chemically synthesized
  source 1..22: mol_type = other DNA
catacaaattttagattggttt

SEQ ID NO: 39377 - DNA, 22 bp, synthetic construct
  misc_feature 1..22: note = chemically synthesized
  source 1..22: mol_type = other DNA
atacaaattttagattggtttt

SEQ ID NO: 39378 - DNA, 22 bp, synthetic construct
  misc_feature 1..22: note = chemically synthesized
  source 1..22: mol_type = other DNA
tagattggtttttccatttctg

SEQ ID NO: 39379 - DNA, 22 bp, synthetic construct
  misc_feature 1..22: note = chemically synthesized
  source 1..22: mol_type = other DNA
agattggtttttccatttctgt

SEQ ID NO: 39380 - DNA, 22 bp, synthetic construct
  misc_feature 1..22: note = chemically synthesized
  source 1..22: mol_type = other DNA
gattggtttttccatttctgtg

SEQ ID NO: 39381 - DNA, 22 bp, synthetic construct
  misc_feature 1..22: note = chemically synthesized
  source 1..22: mol_type = other DNA
gtttttccatttctgtgaaaaa

SEQ ID NO: 39382 - DNA, 22 bp, synthetic construct
  misc_feature 1..22: note = chemically synthesized
  source 1..22: mol_type = other DNA
ttccatttctgtgaaaaatgac

SEQ ID NO: 39383 - DNA, 22 bp, synthetic construct
  misc_feature 1..22: note = chemically synthesized
  source 1..22: mol_type = other DNA
tccatttctgtgaaaaatgaca

SEQ ID NO: 39384 - DNA, 22 bp, synthetic construct
  misc_feature 1..22: note = chemically synthesized
  source 1..22: mol_type = other DNA
ccatttctgtgaaaaatgacat

SEQ ID NO: 39385 - DNA, 22 bp, synthetic construct
  misc_feature 1..22: note = chemically synthesized
  source 1..22: mol_type = other DNA
catttctgtgaaaaatgacatt

SEQ ID NO: 39386 - DNA, 22 bp, synthetic construct
  misc_feature 1..22: note = chemically synthesized
  source 1..22: mol_type = other DNA
ctgtgaaaaatgacattgctat

SEQ ID NO: 39387 - DNA, 22 bp, synthetic construct
  misc_feature 1..22: note = chemically synthesized
  source 1..22: mol_type = other DNA
tgtgaaaaatgacattgctatt

SEQ ID NO: 39388 - DNA, 22 bp, synthetic construct
  misc_feature 1..22: note = chemically synthesized
  source 1..22: mol_type = other DNA
tgaaaaatgacattgctatttt

SEQ ID NO: 39389 - DNA, 22 bp, synthetic construct
  misc_feature 1..22: note = chemically synthesized
  source 1..22: mol_type = other DNA
ctattttgatagcggtcatata

SEQ ID NO: 39390 - DNA, 22 bp, synthetic construct
  misc_feature 1..22: note = chemically synthesized
  source 1..22: mol_type = other DNA
ttttgatagcggtcatatagaa

SEQ ID NO: 39391 - DNA, 22 bp, synthetic construct
  misc_feature 1..22: note = chemically synthesized
  source 1..22: mol_type = other DNA
tgatagcggtcatatagaatct

SEQ ID NO: 39392 - DNA, 22 bp, synthetic construct
  misc_feature 1..22: note = chemically synthesized
  source 1..22: mol_type = other DNA
gatagcggtcatatagaatctg

SEQ ID NO: 39393 - DNA, 22 bp, synthetic construct
  misc_feature 1..22: note = chemically synthesized
  source 1..22: mol_type = other DNA
atagcggtcatatagaatctgt

SEQ ID NO: 39394 - DNA, 22 bp, synthetic construct
  misc_feature 1..22: note = chemically synthesized
  source 1..22: mol_type = other DNA
tagattgctttgggtagtatgg

SEQ ID NO: 39395 - DNA, 22 bp, synthetic construct
  misc_feature 1..22: note = chemically synthesized
  source 1..22: mol_type = other DNA
ctttgggtagtatggccatttt

SEQ ID NO: 39396 - DNA, 22 bp, synthetic construct
  misc_feature 1..22: note = chemically synthesized
  source 1..22: mol_type = other DNA
tgggtagtatggccattttaac

SEQ ID NO: 39397 - DNA, 22 bp, synthetic construct
  misc_feature 1..22: note = chemically synthesized
  source 1..22: mol_type = other DNA
gggtagtatggccattttaaca

SEQ ID NO: 39398 - DNA, 22 bp, synthetic construct
  misc_feature 1..22: note = chemically synthesized
  source 1..22: mol_type = other DNA
ggtagtatggccattttaacaa

SEQ ID NO: 39399 - DNA, 22 bp, synthetic construct
  misc_feature 1..22: note = chemically synthesized
  source 1..22: mol_type = other DNA
taacaatattaatttttctgat

SEQ ID NO: 39400 - DNA, 22 bp, synthetic construct
  misc_feature 1..22: note = chemically synthesized
  source 1..22: mol_type = other DNA
aacaatattaatttttctgatc

SEQ ID NO: 39401 - DNA, 22 bp, synthetic construct
  misc_feature 1..22: note = chemically synthesized
  source 1..22: mol_type = other DNA
acaatattaatttttctgatcc

SEQ ID NO: 39402 - DNA, 22 bp, synthetic construct
  misc_feature 1..22: note = chemically synthesized
  source 1..22: mol_type = other DNA
atttttctgatccatgaacata

SEQ ID NO: 39403 - DNA, 22 bp, synthetic construct
  misc_feature 1..22: note = chemically synthesized
  source 1..22: mol_type = other DNA
ttctgatccatgaacataggat

SEQ ID NO: 39404 - DNA, 22 bp, synthetic construct
  misc_feature 1..22: note = chemically synthesized
  source 1..22: mol_type = other DNA
tctgatccatgaacataggata

SEQ ID NO: 39405 - DNA, 22 bp, synthetic construct
  misc_feature 1..22: note = chemically synthesized
  source 1..22: mol_type = other DNA
ctgatccatgaacataggatat

SEQ ID NO: 39406 - DNA, 22 bp, synthetic construct
  misc_feature 1..22: note = chemically synthesized
  source 1..22: mol_type = other DNA
tgatccatgaacataggatatc

SEQ ID NO: 39407 - DNA, 22 bp, synthetic construct
  misc_feature 1..22: note = chemically synthesized
  source 1..22: mol_type = other DNA
atccatgaacataggatatctc

SEQ ID NO: 39408 - DNA, 22 bp, synthetic construct
  misc_feature 1..22: note = chemically synthesized
  source 1..22: mol_type = other DNA
tccatttgtttctgtccttttc

SEQ ID NO: 39409 - DNA, 22 bp, synthetic construct
  misc_feature 1..22: note = chemically synthesized
  source 1..22: mol_type = other DNA
catttgtttctgtccttttcaa

SEQ ID NO: 39410 - DNA, 22 bp, synthetic construct
  misc_feature 1..22: note = chemically synthesized
  source 1..22: mol_type = other DNA
gtttctgtccttttcaattctt

SEQ ID NO: 39411 - DNA, 22 bp, synthetic construct
  misc_feature 1..22: note = chemically synthesized
  source 1..22: mol_type = other DNA
tttctgtccttttcaattcttt

SEQ ID NO: 39412 - DNA, 22 bp, synthetic construct
  misc_feature 1..22: note = chemically synthesized
  source 1..22: mol_type = other DNA
ctgtccttttcaattcttttat

SEQ ID NO: 39413 - DNA, 22 bp, synthetic construct
  misc_feature 1..22: note = chemically synthesized
  source 1..22: mol_type = other DNA
tgtccttttcaattcttttatc

SEQ ID NO: 39414 - DNA, 22 bp, synthetic construct
  misc_feature 1..22: note = chemically synthesized
  source 1..22: mol_type = other DNA
tccttttcaattcttttatcag

SEQ ID NO: 39415 - DNA, 22 bp, synthetic construct
  misc_feature 1..22: note = chemically synthesized
  source 1..22: mol_type = other DNA
ttcaattcttttatcagtgttt

SEQ ID NO: 39416 - DNA, 22 bp, synthetic construct
  misc_feature 1..22: note = chemically synthesized
  source 1..22: mol_type = other DNA
tcaattcttttatcagtgtttt

SEQ ID NO: 39417 - DNA, 22 bp, synthetic construct
  misc_feature 1..22: note = chemically synthesized
  source 1..22: mol_type = other DNA
caattcttttatcagtgttttg

SEQ ID NO: 39418 - DNA, 22 bp, synthetic construct
  misc_feature 1..22: note = chemically synthesized
  source 1..22: mol_type = other DNA
aattcttttatcagtgttttgt

SEQ ID NO: 39419 - DNA, 22 bp, synthetic construct
  misc_feature 1..22: note = chemically synthesized
  source 1..22: mol_type = other DNA
ttttatcagtgttttgtagttt

SEQ ID NO: 39420 - DNA, 22 bp, synthetic construct
  misc_feature 1..22: note = chemically synthesized
  source 1..22: mol_type = other DNA
ttatcagtgttttgtagttttc

SEQ ID NO: 39421 - DNA, 22 bp, synthetic construct
  misc_feature 1..22: note = chemically synthesized
  source 1..22: mol_type = other DNA
tatcagtgttttgtagttttcc

SEQ ID NO: 39422 - DNA, 22 bp, synthetic construct
  misc_feature 1..22: note = chemically synthesized
  source 1..22: mol_type = other DNA
atcagtgttttgtagttttccg

SEQ ID NO: 39423 - DNA, 22 bp, synthetic construct
  misc_feature 1..22: note = chemically synthesized
  source 1..22: mol_type = other DNA
tcagtgttttgtagttttccga

SEQ ID NO: 39424 - DNA, 22 bp, synthetic construct
  misc_feature 1..22: note = chemically synthesized
  source 1..22: mol_type = other DNA
tgtagttttccgaatagaggtt

SEQ ID NO: 39425 - DNA, 22 bp, synthetic construct
  misc_feature 1..22: note = chemically synthesized
  source 1..22: mol_type = other DNA
gtagttttccgaatagaggttt

SEQ ID NO: 39426 - DNA, 22 bp, synthetic construct
  misc_feature 1..22: note = chemically synthesized
  source 1..22: mol_type = other DNA
tagttttccgaatagaggtttt

SEQ ID NO: 39427 - DNA, 22 bp, synthetic construct
  misc_feature 1..22: note = chemically synthesized
  source 1..22: mol_type = other DNA
tccgaatagaggtttttcggtt

SEQ ID NO: 39428 - DNA, 22 bp, synthetic construct
  misc_feature 1..22: note = chemically synthesized
  source 1..22: mol_type = other DNA
ccgaatagaggtttttcggttc

SEQ ID NO: 39429 - DNA, 22 bp, synthetic construct
  misc_feature 1..22: note = chemically synthesized
  source 1..22: mol_type = other DNA
cgaatagaggtttttcggttcc

SEQ ID NO: 39430 - DNA, 22 bp, synthetic construct
  misc_feature 1..22: note = chemically synthesized
  source 1..22: mol_type = other DNA
ttcggttccttggttaaattta

SEQ ID NO: 39431 - DNA, 22 bp, synthetic construct
  misc_feature 1..22: note = chemically synthesized
  source 1..22: mol_type = other DNA
tcggttccttggttaaatttat

SEQ ID NO: 39432 - DNA, 22 bp, synthetic construct
  misc_feature 1..22: note = chemically synthesized
  source 1..22: mol_type = other DNA
cggttccttggttaaatttatc

SEQ ID NO: 39433 - DNA, 22 bp, synthetic construct
  misc_feature 1..22: note = chemically synthesized
  source 1..22: mol_type = other DNA
ggttccttggttaaatttatcc

SEQ ID NO: 39434 - DNA, 22 bp, synthetic construct
  misc_feature 1..22: note = chemically synthesized
  source 1..22: mol_type = other DNA
cttggttaaatttatccctaaa

SEQ ID NO: 39435 - DNA, 22 bp, synthetic construct
  misc_feature 1..22: note = chemically synthesized
  source 1..22: mol_type = other DNA
ggttaaatttatccctaaatat

SEQ ID NO: 39436 - DNA, 22 bp, synthetic construct
  misc_feature 1..22: note = chemically synthesized
  source 1..22: mol_type = other DNA
gttaaatttatccctaaatatt

SEQ ID NO: 39437 - DNA, 22 bp, synthetic construct
  misc_feature 1..22: note = chemically synthesized
  source 1..22: mol_type = other DNA
aatttatccctaaatattttat

SEQ ID NO: 39438 - DNA, 22 bp, synthetic construct
  misc_feature 1..22: note = chemically synthesized
  source 1..22: mol_type = other DNA
atccctaaatattttatttttt

SEQ ID NO: 39439 - DNA, 22 bp, synthetic construct
  misc_feature 1..22: note = chemically synthesized
  source 1..22: mol_type = other DNA
tccctaaatattttatttttta

SEQ ID NO: 39440 - DNA, 22 bp, synthetic construct
  misc_feature 1..22: note = chemically synthesized
  source 1..22: mol_type = other DNA
aatattttattttttagctatt

SEQ ID NO: 39441 - DNA, 22 bp, synthetic construct
  misc_feature 1..22: note = chemically synthesized
  source 1..22: mol_type = other DNA
tattttttagctattgtaaatg

SEQ ID NO: 39442 - DNA, 22 bp, synthetic construct
  misc_feature 1..22: note = chemically synthesized
  source 1..22: mol_type = other DNA
attttttagctattgtaaatgg

SEQ ID NO: 39443 - DNA, 22 bp, synthetic construct
  misc_feature 1..22: note = chemically synthesized
  source 1..22: mol_type = other DNA
ttttttagctattgtaaatggg

SEQ ID NO: 39444 - DNA, 22 bp, synthetic construct
  misc_feature 1..22: note = chemically synthesized
  source 1..22: mol_type = other DNA
tttagctattgtaaatgggatt

SEQ ID NO: 39445 - DNA, 22 bp, synthetic construct
  misc_feature 1..22: note = chemically synthesized
  source 1..22: mol_type = other DNA
ttagctattgtaaatgggattg

SEQ ID NO: 39446 - DNA, 22 bp, synthetic construct
  misc_feature 1..22: note = chemically synthesized
  source 1..22: mol_type = other DNA
tagctattgtaaatgggattgc

SEQ ID NO: 39447 - DNA, 22 bp, synthetic construct
  misc_feature 1..22: note = chemically synthesized
  source 1..22: mol_type = other DNA
agctattgtaaatgggattgcc

SEQ ID NO: 39448 - DNA, 22 bp, synthetic construct
  misc_feature 1..22: note = chemically synthesized
  source 1..22: mol_type = other DNA
gctattgtaaatgggattgcct

SEQ ID NO: 39449 - DNA, 22 bp, synthetic construct
  misc_feature 1..22: note = chemically synthesized
  source 1..22: mol_type = other DNA
ttgtaaatgggattgccttctt

SEQ ID NO: 39450 - DNA, 22 bp, synthetic construct
  misc_feature 1..22: note = chemically synthesized
  source 1..22: mol_type = other DNA
taaatgggattgccttcttaat

SEQ ID NO: 39451 - DNA, 22 bp, synthetic construct
  misc_feature 1..22: note = chemically synthesized
  source 1..22: mol_type = other DNA
ccttcttaatttccttctcagc

SEQ ID NO: 39452 - DNA, 22 bp, synthetic construct
  misc_feature 1..22: note = chemically synthesized
  source 1..22: mol_type = other DNA
cttaatttccttctcagctagt

SEQ ID NO: 39453 - DNA, 22 bp, synthetic construct
  misc_feature 1..22: note = chemically synthesized
  source 1..22: mol_type = other DNA
ttaatttccttctcagctagtt

SEQ ID NO: 39454 - DNA, 22 bp, synthetic construct
  misc_feature 1..22: note = chemically synthesized
  source 1..22: mol_type = other DNA
aatttccttctcagctagttta

SEQ ID NO: 39455 - DNA, 22 bp, synthetic construct
  misc_feature 1..22: note = chemically synthesized
  source 1..22: mol_type = other DNA
atttccttctcagctagtttat

SEQ ID NO: 39456 - DNA, 22 bp, synthetic construct
  misc_feature 1..22: note = chemically synthesized
  source 1..22: mol_type = other DNA
ccttctcagctagtttattatt

SEQ ID NO: 39457 - DNA, 22 bp, synthetic construct
  misc_feature 1..22: note = chemically synthesized
  source 1..22: mol_type = other DNA
cttctcagctagtttattattg

SEQ ID NO: 39458 - DNA, 22 bp, synthetic construct
  misc_feature 1..22: note = chemically synthesized
  source 1..22: mol_type = other DNA
ctcagctagtttattattggtg

SEQ ID NO: 39459 - DNA, 22 bp, synthetic construct
  misc_feature 1..22: note = chemically synthesized
  source 1..22: mol_type = other DNA
tcagctagtttattattggtgt

SEQ ID NO: 39460 - DNA, 22 bp, synthetic construct
  misc_feature 1..22: note = chemically synthesized
  source 1..22: mol_type = other DNA
agctagtttattattggtgtgt

SEQ ID NO: 39461 - DNA, 22 bp, synthetic construct
  misc_feature 1..22: note = chemically synthesized
  source 1..22: mol_type = other DNA
gtttattattggtgtgtagaaa

SEQ ID NO: 39462 - DNA, 22 bp, synthetic construct
  misc_feature 1..22: note = chemically synthesized
  source 1..22: mol_type = other DNA
attattggtgtgtagaaacatt

SEQ ID NO: 39463 - DNA, 22 bp, synthetic construct
  misc_feature 1..22: note = chemically synthesized
  source 1..22: mol_type = other DNA
ttattggtgtgtagaaacattg

SEQ ID NO: 39464 - DNA, 22 bp, synthetic construct
  misc_feature 1..22: note = chemically synthesized
  source 1..22: mol_type = other DNA
ttggtgtgtagaaacattgctt

SEQ ID NO: 39465 - DNA, 22 bp, synthetic construct
  misc_feature 1..22: note = chemically synthesized
  source 1..22: mol_type = other DNA
gtgtgtagaaacattgcttgtt

SEQ ID NO: 39466 - DNA, 22 bp, synthetic construct
  misc_feature 1..22: note = chemically synthesized
  source 1..22: mol_type = other DNA
cttgtttcatatgctgattttg

SEQ ID NO: 39467 - DNA, 22 bp, synthetic construct
  misc_feature 1..22: note = chemically synthesized
  source 1..22: mol_type = other DNA
gtttcatatgctgattttgtct

SEQ ID NO: 39468 - DNA, 22 bp, synthetic construct
  misc_feature 1..22: note = chemically synthesized
  source 1..22: mol_type = other DNA
tttcatatgctgattttgtctc

SEQ ID NO: 39469 - DNA, 22 bp, synthetic construct
  misc_feature 1..22: note = chemically synthesized
  source 1..22: mol_type = other DNA
catatgctgattttgtctcctg

SEQ ID NO: 39470 - DNA, 22 bp, synthetic construct
  misc_feature 1..22: note = chemically synthesized
  source 1..22: mol_type = other DNA
atatgctgattttgtctcctgt

SEQ ID NO: 39471 - DNA, 22 bp, synthetic construct
  misc_feature 1..22: note = chemically synthesized
  source 1..22: mol_type = other DNA
attttgtctcctgtaactttac

SEQ ID NO: 39472 - DNA, 22 bp, synthetic construct
  misc_feature 1..22: note = chemically synthesized
  source 1..22: mol_type = other DNA
tgtctcctgtaactttactgaa

SEQ ID NO: 39473 - DNA, 22 bp, synthetic construct
  misc_feature 1..22: note = chemically synthesized
  source 1..22: mol_type = other DNA
gtctcctgtaactttactgaat

SEQ ID NO: 39474 - DNA, 22 bp, synthetic construct
  misc_feature 1..22: note = chemically synthesized
  source 1..22: mol_type = other DNA
tctcctgtaactttactgaatt

SEQ ID NO: 39475 - DNA, 22 bp, synthetic construct
  misc_feature 1..22: note = chemically synthesized
  source 1..22: mol_type = other DNA
ctgtaactttactgaatttatt

SEQ ID NO: 39476 - DNA, 22 bp, synthetic construct
  misc_feature 1..22: note = chemically synthesized
  source 1..22: mol_type = other DNA
taactttactgaatttattttt

SEQ ID NO: 39477 - DNA, 22 bp, synthetic construct
  misc_feature 1..22: note = chemically synthesized
  source 1..22: mol_type = other DNA
tactgaatttatttttcagcgc

SEQ ID NO: 39478 - DNA, 22 bp, synthetic construct
  misc_feature 1..22: note = chemically synthesized
  source 1..22: mol_type = other DNA
actgaatttatttttcagcgct

SEQ ID NO: 39479 - DNA, 22 bp, synthetic construct
  misc_feature 1..22: note = chemically synthesized
  source 1..22: mol_type = other DNA
ctgaatttatttttcagcgcta

SEQ ID NO: 39480 - DNA, 22 bp, synthetic construct
  misc_feature 1..22: note = chemically synthesized
  source 1..22: mol_type = other DNA
aatttatttttcagcgctaaga

SEQ ID NO: 39481 - DNA, 22 bp, synthetic construct
  misc_feature 1..22: note = chemically synthesized
  source 1..22: mol_type = other DNA
atttttcagcgctaagagtgct

SEQ ID NO: 39482 - DNA, 22 bp, synthetic construct
  misc_feature 1..22: note = chemically synthesized
  source 1..22: mol_type = other DNA
tttttcagcgctaagagtgctt

SEQ ID NO: 39483 - DNA, 22 bp, synthetic construct
  misc_feature 1..22: note = chemically synthesized
  source 1..22: mol_type = other DNA
ttcagcgctaagagtgctttgg

SEQ ID NO: 39484 - DNA, 22 bp, synthetic construct
  misc_feature 1..22: note = chemically synthesized
  source 1..22: mol_type = other DNA
tcagcgctaagagtgctttggt

SEQ ID NO: 39485 - DNA, 22 bp, synthetic construct
  misc_feature 1..22: note = chemically synthesized
  source 1..22: mol_type = other DNA
cagcgctaagagtgctttggtg

SEQ ID NO: 39486 - DNA, 22 bp, synthetic construct
  misc_feature 1..22: note = chemically synthesized
  source 1..22: mol_type = other DNA
agcgctaagagtgctttggtgg

SEQ ID NO: 39487 - DNA, 22 bp, synthetic construct
  misc_feature 1..22: note = chemically synthesized
  source 1..22: mol_type = other DNA
agagtgctttggtggagtcttg

SEQ ID NO: 39488 - DNA, 22 bp, synthetic construct
  misc_feature 1..22: note = chemically synthesized
  source 1..22: mol_type = other DNA
tggtggagtcttggtttttcta

SEQ ID NO: 39489 - DNA, 22 bp, synthetic construct
  misc_feature 1..22: note = chemically synthesized
  source 1..22: mol_type = other DNA
ggtggagtcttggtttttctag

SEQ ID NO: 39490 - DNA, 22 bp, synthetic construct
  misc_feature 1..22: note = chemically synthesized
  source 1..22: mol_type = other DNA
gtggagtcttggtttttctagg

SEQ ID NO: 39491 - DNA, 22 bp, synthetic construct
  misc_feature 1..22: note = chemically synthesized
  source 1..22: mol_type = other DNA
ggtttttctaggtataaaatca

SEQ ID NO: 39492 - DNA, 22 bp, synthetic construct
  misc_feature 1..22: note = chemically synthesized
  source 1..22: mol_type = other DNA
gtttttctaggtataaaatcat

SEQ ID NO: 39493 - DNA, 22 bp, synthetic construct
  misc_feature 1..22: note = chemically synthesized
  source 1..22: mol_type = other DNA
ttctaggtataaaatcatgtca

SEQ ID NO: 39494 - DNA, 22 bp, synthetic construct
  misc_feature 1..22: note = chemically synthesized
  source 1..22: mol_type = other DNA
tctaggtataaaatcatgtcat

SEQ ID NO: 39495 - DNA, 22 bp, synthetic construct
  misc_feature 1..22: note = chemically synthesized
  source 1..22: mol_type = other DNA
ctaggtataaaatcatgtcatc

SEQ ID NO: 39496 - DNA, 22 bp, synthetic construct
  misc_feature 1..22: note = chemically synthesized
  source 1..22: mol_type = other DNA
taggtataaaatcatgtcatct

SEQ ID NO: 39497 - DNA, 22 bp, synthetic construct
  misc_feature 1..22: note = chemically synthesized
  source 1..22: mol_type = other DNA
ggtataaaatcatgtcatctgg

SEQ ID NO: 39498 - DNA, 22 bp, synthetic construct
  misc_feature 1..22: note = chemically synthesized
  source 1..22: mol_type = other DNA
gaaagatggacagtttgacttc

SEQ ID NO: 39499 - DNA, 22 bp, synthetic construct
  misc_feature 1..22: note = chemically synthesized
  source 1..22: mol_type = other DNA
gacttcatcttttcctatttgc

SEQ ID NO: 39500 - DNA, 22 bp, synthetic construct
  misc_feature 1..22: note = chemically synthesized
  source 1..22: mol_type = other DNA
acttcatcttttcctatttgca

SEQ ID NO: 39501 - DNA, 22 bp, synthetic construct
  misc_feature 1..22: note = chemically synthesized
  source 1..22: mol_type = other DNA
catcttttcctatttgcatgcc

SEQ ID NO: 39502 - DNA, 22 bp, synthetic construct
  misc_feature 1..22: note = chemically synthesized
  source 1..22: mol_type = other DNA
atcttttcctatttgcatgcct

SEQ ID NO: 39503 - DNA, 22 bp, synthetic construct
  misc_feature 1..22: note = chemically synthesized
  source 1..22: mol_type = other DNA
ttcctatttgcatgccttttct

SEQ ID NO: 39504 - DNA, 22 bp, synthetic construct
  misc_feature 1..22: note = chemically synthesized
  source 1..22: mol_type = other DNA
tcctatttgcatgccttttctt

SEQ ID NO: 39505 - DNA, 22 bp, synthetic construct
  misc_feature 1..22: note = chemically synthesized
  source 1..22: mol_type = other DNA
cctatttgcatgccttttcttt

SEQ ID NO: 39506 - DNA, 22 bp, synthetic construct
  misc_feature 1..22: note = chemically synthesized
  source 1..22: mol_type = other DNA
ctatttgcatgccttttctttc

SEQ ID NO: 39507 - DNA, 22 bp, synthetic construct
  misc_feature 1..22: note = chemically synthesized
  source 1..22: mol_type = other DNA
tttgcatgccttttctttcttt

SEQ ID NO: 39508 - DNA, 22 bp, synthetic construct
  misc_feature 1..22: note = chemically synthesized
  source 1..22: mol_type = other DNA
gcatgccttttctttctttctt

SEQ ID NO: 39509 - DNA, 22 bp, synthetic construct
  misc_feature 1..22: note = chemically synthesized
  source 1..22: mol_type = other DNA
catgccttttctttctttcttt

SEQ ID NO: 39510 - DNA, 22 bp, synthetic construct
  misc_feature 1..22: note = chemically synthesized
  source 1..22: mol_type = other DNA
ttctttctttctttctctgacc

SEQ ID NO: 39511 - DNA, 22 bp, synthetic construct
  misc_feature 1..22: note = chemically synthesized
  source 1..22: mol_type = other DNA
tctttctttctttctctgacct

SEQ ID NO: 39512 - DNA, 22 bp, synthetic construct
  misc_feature 1..22: note = chemically synthesized
  source 1..22: mol_type = other DNA
ctttctttctttctctgacctg

SEQ ID NO: 39513 - DNA, 22 bp, synthetic construct
  misc_feature 1..22: note = chemically synthesized
  source 1..22: mol_type = other DNA
tttctttctttctctgacctga

SEQ ID NO: 39514 - DNA, 22 bp, synthetic construct
  misc_feature 1..22: note = chemically synthesized
  source 1..22: mol_type = other DNA
tctttctttctctgacctgaaa

SEQ ID NO: 39515 - DNA, 22 bp, synthetic construct
  misc_feature 1..22: note = chemically synthesized
  source 1..22: mol_type = other DNA
ctttctttctctgacctgaaag

SEQ ID NO: 39516 - DNA, 22 bp, synthetic construct
  misc_feature 1..22: note = chemically synthesized
  source 1..22: mol_type = other DNA
tttctttctctgacctgaaagc

SEQ ID NO: 39517 - DNA, 22 bp, synthetic construct
  misc_feature 1..22: note = chemically synthesized
  source 1..22: mol_type = other DNA
tctttctctgacctgaaagctg

SEQ ID NO: 39518 - DNA, 22 bp, synthetic construct
  misc_feature 1..22: note = chemically synthesized
  source 1..22: mol_type = other DNA
ctttctctgacctgaaagctgt

SEQ ID NO: 39519 - DNA, 22 bp, synthetic construct
  misc_feature 1..22: note = chemically synthesized
  source 1..22: mol_type = other DNA
tttctctgacctgaaagctgtg

SEQ ID NO: 39520 - DNA, 22 bp, synthetic construct
  misc_feature 1..22: note = chemically synthesized
  source 1..22: mol_type = other DNA
tctctgacctgaaagctgtggc

SEQ ID NO: 39521 - DNA, 22 bp, synthetic construct
  misc_feature 1..22: note = chemically synthesized
  source 1..22: mol_type = other DNA
ctctgacctgaaagctgtggct

SEQ ID NO: 39522 - DNA, 22 bp, synthetic construct
  misc_feature 1..22: note = chemically synthesized
  source 1..22: mol_type = other DNA
tctgacctgaaagctgtggcta

SEQ ID NO: 39523 - DNA, 22 bp, synthetic construct
  misc_feature 1..22: note = chemically synthesized
  source 1..22: mol_type = other DNA
tgacctgaaagctgtggctagg

SEQ ID NO: 39524 - DNA, 22 bp, synthetic construct
  misc_feature 1..22: note = chemically synthesized
  source 1..22: mol_type = other DNA
acctgaaagctgtggctaggac

SEQ ID NO: 39525 - DNA, 22 bp, synthetic construct
  misc_feature 1..22: note = chemically synthesized
  source 1..22: mol_type = other DNA
aaagctgtggctaggacttcca

SEQ ID NO: 39526 - DNA, 22 bp, synthetic construct
  misc_feature 1..22: note = chemically synthesized
  source 1..22: mol_type = other DNA
tggctaggacttccagtattat

SEQ ID NO: 39527 - DNA, 22 bp, synthetic construct
  misc_feature 1..22: note = chemically synthesized
  source 1..22: mol_type = other DNA
ggacttccagtattatattgaa

SEQ ID NO: 39528 - DNA, 22 bp, synthetic construct
  misc_feature 1..22: note = chemically synthesized
  source 1..22: mol_type = other DNA
ccagtattatattgaataggag

SEQ ID NO: 39529 - DNA, 22 bp, synthetic construct
  misc_feature 1..22: note = chemically synthesized
  source 1..22: mol_type = other DNA
cagtattatattgaataggagt

SEQ ID NO: 39530 - DNA, 22 bp, synthetic construct
  misc_feature 1..22: note = chemically synthesized
  source 1..22: mol_type = other DNA
tattgaataggagtgatggaag

SEQ ID NO: 39531 - DNA, 22 bp, synthetic construct
  misc_feature 1..22: note = chemically synthesized
  source 1..22: mol_type = other DNA
aataggagtgatggaagtgggc

SEQ ID NO: 39532 - DNA, 22 bp, synthetic construct
  misc_feature 1..22: note = chemically synthesized
  source 1..22: mol_type = other DNA
attttgtttcagttcttagagg

SEQ ID NO: 39533 - DNA, 22 bp, synthetic construct
  misc_feature 1..22: note = chemically synthesized
  source 1..22: mol_type = other DNA
ttttgtttcagttcttagagga

SEQ ID NO: 39534 - DNA, 22 bp, synthetic construct
  misc_feature 1..22: note = chemically synthesized
  source 1..22: mol_type = other DNA
tgtttcagttcttagaggaaag

SEQ ID NO: 39535 - DNA, 22 bp, synthetic construct
  misc_feature 1..22: note = chemically synthesized
  source 1..22: mol_type = other DNA
gtttcagttcttagaggaaagg

SEQ ID NO: 39536 - DNA, 22 bp, synthetic construct
  misc_feature 1..22: note = chemically synthesized
  source 1..22: mol_type = other DNA
tttcagttcttagaggaaaggc

SEQ ID NO: 39537 - DNA, 22 bp, synthetic construct
  misc_feature 1..22: note = chemically synthesized
  source 1..22: mol_type = other DNA
cagttcttagaggaaaggcttc

SEQ ID NO: 39538 - DNA, 22 bp, synthetic construct
  misc_feature 1..22: note = chemically synthesized
  source 1..22: mol_type = other DNA
agttcttagaggaaaggcttcc

SEQ ID NO: 39539 - DNA, 22 bp, synthetic construct
  misc_feature 1..22: note = chemically synthesized
  source 1..22: mol_type = other DNA
ttagaggaaaggcttccagctt

SEQ ID NO: 39540 - DNA, 22 bp, synthetic construct
  misc_feature 1..22: note = chemically synthesized
  source 1..22: mol_type = other DNA
agaggaaaggcttccagctttt

SEQ ID NO: 39541 - DNA, 22 bp, synthetic construct
  misc_feature 1..22: note = chemically synthesized
  source 1..22: mol_type = other DNA
gaggaaaggcttccagcttttc

SEQ ID NO: 39542 - DNA, 22 bp, synthetic construct
  misc_feature 1..22: note = chemically synthesized
  source 1..22: mol_type = other DNA
ccagcttttcccaattcagtat

SEQ ID NO: 39543 - DNA, 22 bp, synthetic construct
  misc_feature 1..22: note = chemically synthesized
  source 1..22: mol_type = other DNA
cagcttttcccaattcagtatg

SEQ ID NO: 39544 - DNA, 22 bp, synthetic construct
  misc_feature 1..22: note = chemically synthesized
  source 1..22: mol_type = other DNA
ttcccaattcagtatgatgtta

SEQ ID NO: 39545 - DNA, 22 bp, synthetic construct
  misc_feature 1..22: note = chemically synthesized
  source 1..22: mol_type = other DNA
tcccaattcagtatgatgttag

SEQ ID NO: 39546 - DNA, 22 bp, synthetic construct
  misc_feature 1..22: note = chemically synthesized
  source 1..22: mol_type = other DNA
cccaattcagtatgatgttagc

SEQ ID NO: 39547 - DNA, 22 bp, synthetic construct
  misc_feature 1..22: note = chemically synthesized
  source 1..22: mol_type = other DNA
ccaattcagtatgatgttagct

SEQ ID NO: 39548 - DNA, 22 bp, synthetic construct
  misc_feature 1..22: note = chemically synthesized
  source 1..22: mol_type = other DNA
agtatgatgttagctgtgggtt

SEQ ID NO: 39549 - DNA, 22 bp, synthetic construct
  misc_feature 1..22: note = chemically synthesized
  source 1..22: mol_type = other DNA
gctgtgggtttgtcatatatga

SEQ ID NO: 39550 - DNA, 22 bp, synthetic construct
  misc_feature 1..22: note = chemically synthesized
  source 1..22: mol_type = other DNA
tgggtttgtcatatatgacttt

SEQ ID NO: 39551 - DNA, 22 bp, synthetic construct
  misc_feature 1..22: note = chemically synthesized
  source 1..22: mol_type = other DNA
gtcatatatgacttttattata

SEQ ID NO: 39552 - DNA, 22 bp, synthetic construct
  misc_feature 1..22: note = chemically synthesized
  source 1..22: mol_type = other DNA
tcatatatgacttttattatat

SEQ ID NO: 39553 - DNA, 22 bp, synthetic construct
  misc_feature 1..22: note = chemically synthesized
  source 1..22: mol_type = other DNA
ttattatattgagatatgttcc

SEQ ID NO: 39554 - DNA, 22 bp, synthetic construct
  misc_feature 1..22: note = chemically synthesized
  source 1..22: mol_type = other DNA
tattatattgagatatgttcct

SEQ ID NO: 39555 - DNA, 22 bp, synthetic construct
  misc_feature 1..22: note = chemically synthesized
  source 1..22: mol_type = other DNA
attatattgagatatgttcctt

SEQ ID NO: 39556 - DNA, 22 bp, synthetic construct
  misc_feature 1..22: note = chemically synthesized
  source 1..22: mol_type = other DNA
ttatattgagatatgttccttc

SEQ ID NO: 39557 - DNA, 22 bp, synthetic construct
  misc_feature 1..22: note = chemically synthesized
  source 1..22: mol_type = other DNA
tattgagatatgttccttctat

SEQ ID NO: 39558 - DNA, 22 bp, synthetic construct
  misc_feature 1..22: note = chemically synthesized
  source 1..22: mol_type = other DNA
agatatgttccttctatgattg

SEQ ID NO: 39559 - DNA, 22 bp, synthetic construct
  misc_feature 1..22: note = chemically synthesized
  source 1..22: mol_type = other DNA
cttctatgattggctgcagata

SEQ ID NO: 39560 - DNA, 22 bp, synthetic construct
  misc_feature 1..22: note = chemically synthesized
  source 1..22: mol_type = other DNA
ctatgattggctgcagatagtt

SEQ ID NO: 39561 - DNA, 22 bp, synthetic construct
  misc_feature 1..22: note = chemically synthesized
  source 1..22: mol_type = other DNA
tatgattggctgcagatagttt

SEQ ID NO: 39562 - DNA, 22 bp, synthetic construct
  misc_feature 1..22: note = chemically synthesized
  source 1..22: mol_type = other DNA
tgattggctgcagatagttttt

SEQ ID NO: 39563 - DNA, 22 bp, synthetic construct
  misc_feature 1..22: note = chemically synthesized
  source 1..22: mol_type = other DNA
gctgcagatagtttttatcatg

SEQ ID NO: 39564 - DNA, 22 bp, synthetic construct
  misc_feature 1..22: note = chemically synthesized
  source 1..22: mol_type = other DNA
cagatagtttttatcatgaagg

SEQ ID NO: 39565 - DNA, 22 bp, synthetic construct
  misc_feature 1..22: note = chemically synthesized
  source 1..22: mol_type = other DNA
ttatcatgaaggaatgttaaat

SEQ ID NO: 39566 - DNA, 22 bp, synthetic construct
  misc_feature 1..22: note = chemically synthesized
  source 1..22: mol_type = other DNA
tatcatgaaggaatgttaaatt

SEQ ID NO: 39567 - DNA, 22 bp, synthetic construct
  misc_feature 1..22: note = chemically synthesized
  source 1..22: mol_type = other DNA
atcatgaaggaatgttaaattt

SEQ ID NO: 39568 - DNA, 22 bp, synthetic construct
  misc_feature 1..22: note = chemically synthesized
  source 1..22: mol_type = other DNA
tcatgaaggaatgttaaatttt

SEQ ID NO: 39569 - DNA, 22 bp, synthetic construct
  misc_feature 1..22: note = chemically synthesized
  source 1..22: mol_type = other DNA
aattttatcaaatactttttct

SEQ ID NO: 39570 - DNA, 22 bp, synthetic construct
  misc_feature 1..22: note = chemically synthesized
  source 1..22: mol_type = other DNA
tatcaaatactttttctgtatc

SEQ ID NO: 39571 - DNA, 22 bp, synthetic construct
  misc_feature 1..22: note = chemically synthesized
  source 1..22: mol_type = other DNA
atcaaatactttttctgtatct

SEQ ID NO: 39572 - DNA, 22 bp, synthetic construct
  misc_feature 1..22: note = chemically synthesized
  source 1..22: mol_type = other DNA
tcaaatactttttctgtatcta

SEQ ID NO: 39573 - DNA, 22 bp, synthetic construct
  misc_feature 1..22: note = chemically synthesized
  source 1..22: mol_type = other DNA
tttctgtatctattgagatgat

SEQ ID NO: 39574 - DNA, 22 bp, synthetic construct
  misc_feature 1..22: note = chemically synthesized
  source 1..22: mol_type = other DNA
ttctgtatctattgagatgatc

SEQ ID NO: 39575 - DNA, 22 bp, synthetic construct
  misc_feature 1..22: note = chemically synthesized
  source 1..22: mol_type = other DNA
tctgtatctattgagatgatca

SEQ ID NO: 39576 - DNA, 22 bp, synthetic construct
  misc_feature 1..22: note = chemically synthesized
  source 1..22: mol_type = other DNA
ctgtatctattgagatgatcat

SEQ ID NO: 39577 - DNA, 22 bp, synthetic construct
  misc_feature 1..22: note = chemically synthesized
  source 1..22: mol_type = other DNA
tgtatctattgagatgatcata

SEQ ID NO: 39578 - DNA, 22 bp, synthetic construct
  misc_feature 1..22: note = chemically synthesized
  source 1..22: mol_type = other DNA
tatctattgagatgatcatatg

SEQ ID NO: 39579 - DNA, 22 bp, synthetic construct
  misc_feature 1..22: note = chemically synthesized
  source 1..22: mol_type = other DNA
ttgagatgatcatatggttttt

SEQ ID NO: 39580 - DNA, 22 bp, synthetic construct
  misc_feature 1..22: note = chemically synthesized
  source 1..22: mol_type = other DNA
agatgatcatatggtttttgtt

SEQ ID NO: 39581 - DNA, 22 bp, synthetic construct
  misc_feature 1..22: note = chemically synthesized
  source 1..22: mol_type = other DNA
ttgttctttttgttgatgtgat

SEQ ID NO: 39582 - DNA, 22 bp, synthetic construct
  misc_feature 1..22: note = chemically synthesized
  source 1..22: mol_type = other DNA
tgttctttttgttgatgtgatg

SEQ ID NO: 39583 - DNA, 22 bp, synthetic construct
  misc_feature 1..22: note = chemically synthesized
  source 1..22: mol_type = other DNA
gttctttttgttgatgtgatgt

SEQ ID NO: 39584 - DNA, 22 bp, synthetic construct
  misc_feature 1..22: note = chemically synthesized
  source 1..22: mol_type = other DNA
ttctttttgttgatgtgatgta

SEQ ID NO: 39585 - DNA, 22 bp, synthetic construct
  misc_feature 1..22: note = chemically synthesized
  source 1..22: mol_type = other DNA
tttttgttgatgtgatgtatca

SEQ ID NO: 39586 - DNA, 22 bp, synthetic construct
  misc_feature 1..22: note = chemically synthesized
  source 1..22: mol_type = other DNA
tttgttgatgtgatgtatcaca

SEQ ID NO: 39587 - DNA, 22 bp, synthetic construct
  misc_feature 1..22: note = chemically synthesized
  source 1..22: mol_type = other DNA
ttgttgatgtgatgtatcacat

SEQ ID NO: 39588 - DNA, 22 bp, synthetic construct
  misc_feature 1..22: note = chemically synthesized
  source 1..22: mol_type = other DNA
tgttgatgtgatgtatcacatt

SEQ ID NO: 39589 - DNA, 22 bp, synthetic construct
  misc_feature 1..22: note = chemically synthesized
  source 1..22: mol_type = other DNA
gttgatgtgatgtatcacattt

SEQ ID NO: 39590 - DNA, 22 bp, synthetic construct
  misc_feature 1..22: note = chemically synthesized
  source 1..22: mol_type = other DNA
ttgatgtgatgtatcacattta

SEQ ID NO: 39591 - DNA, 22 bp, synthetic construct
  misc_feature 1..22: note = chemically synthesized
  source 1..22: mol_type = other DNA
atgtgatgtatcacatttattg

SEQ ID NO: 39592 - DNA, 22 bp, synthetic construct
  misc_feature 1..22: note = chemically synthesized
  source 1..22: mol_type = other DNA
attgatttgaactgttcttgca

SEQ ID NO: 39593 - DNA, 22 bp, synthetic construct
  misc_feature 1..22: note = chemically synthesized
  source 1..22: mol_type = other DNA
ttgatttgaactgttcttgcaa

SEQ ID NO: 39594 - DNA, 22 bp, synthetic construct
  misc_feature 1..22: note = chemically synthesized
  source 1..22: mol_type = other DNA
atttgaactgttcttgcaaccc

SEQ ID NO: 39595 - DNA, 22 bp, synthetic construct
  misc_feature 1..22: note = chemically synthesized
  source 1..22: mol_type = other DNA
gaactgttcttgcaaccctagt

SEQ ID NO: 39596 - DNA, 22 bp, synthetic construct
  misc_feature 1..22: note = chemically synthesized
  source 1..22: mol_type = other DNA
aactgttcttgcaaccctagta

SEQ ID NO: 39597 - DNA, 22 bp, synthetic construct
  misc_feature 1..22: note = chemically synthesized
  source 1..22: mol_type = other DNA
ttcttgcaaccctagtataaat

SEQ ID NO: 39598 - DNA, 22 bp, synthetic construct
  misc_feature 1..22: note = chemically synthesized
  source 1..22: mol_type = other DNA
ttgcaaccctagtataaatccc

SEQ ID NO: 39599 - DNA, 22 bp, synthetic construct
  misc_feature 1..22: note = chemically synthesized
  source 1..22: mol_type = other DNA
gcaaccctagtataaatcccac

SEQ ID NO: 39600 - DNA, 22 bp, synthetic construct
  misc_feature 1..22: note = chemically synthesized
  source 1..22: mol_type = other DNA
caaccctagtataaatcccact

SEQ ID NO: 39601 - DNA, 22 bp, synthetic construct
  misc_feature 1..22: note = chemically synthesized
  source 1..22: mol_type = other DNA
gtataaatcccacttgatcatg

SEQ ID NO: 39602 - DNA, 22 bp, synthetic construct
  misc_feature 1..22: note = chemically synthesized
  source 1..22: mol_type = other DNA
gatcatggtgtattatcttttg

SEQ ID NO: 39603 - DNA, 22 bp, synthetic construct
  misc_feature 1..22: note = chemically synthesized
  source 1..22: mol_type = other DNA
atcatggtgtattatcttttgg

SEQ ID NO: 39604 - DNA, 22 bp, synthetic construct
  misc_feature 1..22: note = chemically synthesized
  source 1..22: mol_type = other DNA
tcttttggatgtactgttggat

SEQ ID NO: 39605 - DNA, 22 bp, synthetic construct
  misc_feature 1..22: note = chemically synthesized
  source 1..22: mol_type = other DNA
ttggatgtactgttggattcag

SEQ ID NO: 39606 - DNA, 22 bp, synthetic construct
  misc_feature 1..22: note = chemically synthesized
  source 1..22: mol_type = other DNA
tggatgtactgttggattcagt

SEQ ID NO: 39607 - DNA, 22 bp, synthetic construct
  misc_feature 1..22: note = chemically synthesized
  source 1..22: mol_type = other DNA
ggatgtactgttggattcagtt

SEQ ID NO: 39608 - DNA, 22 bp, synthetic construct
  misc_feature 1..22: note = chemically synthesized
  source 1..22: mol_type = other DNA
gatgtactgttggattcagttt

SEQ ID NO: 39609 - DNA, 22 bp, synthetic construct
  misc_feature 1..22: note = chemically synthesized
  source 1..22: mol_type = other DNA
ttggattcagtttgctagtatt

SEQ ID NO: 39610 - DNA, 22 bp, synthetic construct
  misc_feature 1..22: note = chemically synthesized
  source 1..22: mol_type = other DNA
gattcagtttgctagtattttg

SEQ ID NO: 39611 - DNA, 22 bp, synthetic construct
  misc_feature 1..22: note = chemically synthesized
  source 1..22: mol_type = other DNA
agtttgctagtattttgttgag

SEQ ID NO: 39612 - DNA, 22 bp, synthetic construct
  misc_feature 1..22: note = chemically synthesized
  source 1..22: mol_type = other DNA
gctagtattttgttgaggattt

SEQ ID NO: 39613 - DNA, 22 bp, synthetic construct
  misc_feature 1..22: note = chemically synthesized
  source 1..22: mol_type = other DNA
ctagtattttgttgaggatttt

SEQ ID NO: 39614 - DNA, 22 bp, synthetic construct
  misc_feature 1..22: note = chemically synthesized
  source 1..22: mol_type = other DNA
gtattttgttgaggattttcac

SEQ ID NO: 39615 - DNA, 22 bp, synthetic construct
  misc_feature 1..22: note = chemically synthesized
  source 1..22: mol_type = other DNA
tgttgaggattttcacacctat

SEQ ID NO: 39616 - DNA, 22 bp, synthetic construct
  misc_feature 1..22: note = chemically synthesized
  source 1..22: mol_type = other DNA
gttgaggattttcacacctatg

SEQ ID NO: 39617 - DNA, 22 bp, synthetic construct
  misc_feature 1..22: note = chemically synthesized
  source 1..22: mol_type = other DNA
ttgaggattttcacacctatgt

SEQ ID NO: 39618 - DNA, 22 bp, synthetic construct
  misc_feature 1..22: note = chemically synthesized
  source 1..22: mol_type = other DNA
aggattttcacacctatgttcc

SEQ ID NO: 39619 - DNA, 22 bp, synthetic construct
  misc_feature 1..22: note = chemically synthesized
  source 1..22: mol_type = other DNA
tcacacctatgttccatcaggg

SEQ ID NO: 39620 - DNA, 22 bp, synthetic construct
  misc_feature 1..22: note = chemically synthesized
  source 1..22: mol_type = other DNA
cacacctatgttccatcaggga

SEQ ID NO: 39621 - DNA, 22 bp, synthetic construct
  misc_feature 1..22: note = chemically synthesized
  source 1..22: mol_type = other DNA
acacctatgttccatcagggat

SEQ ID NO: 39622 - DNA, 22 bp, synthetic construct
  misc_feature 1..22: note = chemically synthesized
  source 1..22: mol_type = other DNA
tgttccatcagggatattgacc

SEQ ID NO: 39623 - DNA, 22 bp, synthetic construct
  misc_feature 1..22: note = chemically synthesized
  source 1..22: mol_type = other DNA
catcagggatattgacctgcag

SEQ ID NO: 39624 - DNA, 22 bp, synthetic construct
  misc_feature 1..22: note = chemically synthesized
  source 1..22: mol_type = other DNA
acctgcagttttatttttactt

SEQ ID NO: 39625 - DNA, 22 bp, synthetic construct
  misc_feature 1..22: note = chemically synthesized
  source 1..22: mol_type = other DNA
cagttttatttttacttgcatc

SEQ ID NO: 39626 - DNA, 22 bp, synthetic construct
  misc_feature 1..22: note = chemically synthesized
  source 1..22: mol_type = other DNA
tatttttacttgcatccttgtc

SEQ ID NO: 39627 - DNA, 22 bp, synthetic construct
  misc_feature 1..22: note = chemically synthesized
  source 1..22: mol_type = other DNA
atttttacttgcatccttgtct

SEQ ID NO: 39628 - DNA, 22 bp, synthetic construct
  misc_feature 1..22: note = chemically synthesized
  source 1..22: mol_type = other DNA
tttttacttgcatccttgtctg

SEQ ID NO: 39629 - DNA, 22 bp, synthetic construct
  misc_feature 1..22: note = chemically synthesized
  source 1..22: mol_type = other DNA
ttacttgcatccttgtctggtt

SEQ ID NO: 39630 - DNA, 22 bp, synthetic construct
  misc_feature 1..22: note = chemically synthesized
  source 1..22: mol_type = other DNA
tacttgcatccttgtctggtta

SEQ ID NO: 39631 - DNA, 22 bp, synthetic construct
  misc_feature 1..22: note = chemically synthesized
  source 1..22: mol_type = other DNA
acttgcatccttgtctggttat

SEQ ID NO: 39632 - DNA, 22 bp, synthetic construct
  misc_feature 1..22: note = chemically synthesized
  source 1..22: mol_type = other DNA
cttgcatccttgtctggttatg

SEQ ID NO: 39633 - DNA, 22 bp, synthetic construct
  misc_feature 1..22: note = chemically synthesized
  source 1..22: mol_type = other DNA
gcatccttgtctggttatggaa

SEQ ID NO: 39634 - DNA, 22 bp, synthetic construct
  misc_feature 1..22: note = chemically synthesized
  source 1..22: mol_type = other DNA
catccttgtctggttatggaat

SEQ ID NO: 39635 - DNA, 22 bp, synthetic construct
  misc_feature 1..22: note = chemically synthesized
  source 1..22: mol_type = other DNA
gtctggttatggaatcaggata

SEQ ID NO: 39636 - DNA, 22 bp, synthetic construct
  misc_feature 1..22: note = chemically synthesized
  source 1..22: mol_type = other DNA
tctggttatggaatcaggataa

SEQ ID NO: 39637 - DNA, 22 bp, synthetic construct
  misc_feature 1..22: note = chemically synthesized
  source 1..22: mol_type = other DNA
gttatggaatcaggataatact

SEQ ID NO: 39638 - DNA, 22 bp, synthetic construct
  misc_feature 1..22: note = chemically synthesized
  source 1..22: mol_type = other DNA
tggaatcaggataatactggcc

SEQ ID NO: 39639 - DNA, 22 bp, synthetic construct
  misc_feature 1..22: note = chemically synthesized
  source 1..22: mol_type = other DNA
gcctcagagaatgagttaggga

SEQ ID NO: 39640 - DNA, 22 bp, synthetic construct
  misc_feature 1..22: note = chemically synthesized
  source 1..22: mol_type = other DNA
agagaatgagttagggagaatt

SEQ ID NO: 39641 - DNA, 22 bp, synthetic construct
  misc_feature 1..22: note = chemically synthesized
  source 1..22: mol_type = other DNA
gggagaattccttcctgtttaa

SEQ ID NO: 39642 - DNA, 22 bp, synthetic construct
  misc_feature 1..22: note = chemically synthesized
  source 1..22: mol_type = other DNA
cttcctgtttaatttttaaaag

SEQ ID NO: 39643 - DNA, 22 bp, synthetic construct
  misc_feature 1..22: note = chemically synthesized
  source 1..22: mol_type = other DNA
cctgtttaatttttaaaagaat

SEQ ID NO: 39644 - DNA, 22 bp, synthetic construct
  misc_feature 1..22: note = chemically synthesized
  source 1..22: mol_type = other DNA
ctgtttaatttttaaaagaatt

SEQ ID NO: 39645 - DNA, 22 bp, synthetic construct
  misc_feature 1..22: note = chemically synthesized
  source 1..22: mol_type = other DNA
tttaatttttaaaagaatttaa

SEQ ID NO: 39646 - DNA, 22 bp, synthetic construct
  misc_feature 1..22: note = chemically synthesized
  source 1..22: mol_type = other DNA
aatttttaaaagaatttaagga

SEQ ID NO: 39647 - DNA, 22 bp, synthetic construct
  misc_feature 1..22: note = chemically synthesized
  source 1..22: mol_type = other DNA
atttttaaaagaatttaaggag

SEQ ID NO: 39648 - DNA, 22 bp, synthetic construct
  misc_feature 1..22: note = chemically synthesized
  source 1..22: mol_type = other DNA
ttaaaagaatttaaggagactt

SEQ ID NO: 39649 - DNA, 22 bp, synthetic construct
  misc_feature 1..22: note = chemically synthesized
  source 1..22: mol_type = other DNA
taaaagaatttaaggagacttg

SEQ ID NO: 39650 - DNA, 22 bp, synthetic construct
  misc_feature 1..22: note = chemically synthesized
  source 1..22: mol_type = other DNA
aaaagaatttaaggagacttgt

SEQ ID NO: 39651 - DNA, 22 bp, synthetic construct
  misc_feature 1..22: note = chemically synthesized
  source 1..22: mol_type = other DNA
aaagaatttaaggagacttgtt

SEQ ID NO: 39652 - DNA, 22 bp, synthetic construct
  misc_feature 1..22: note = chemically synthesized
  source 1..22: mol_type = other DNA
aaggagacttgttagttttctt

SEQ ID NO: 39653 - DNA, 22 bp, synthetic construct
  misc_feature 1..22: note = chemically synthesized
  source 1..22: mol_type = other DNA
aggagacttgttagttttcttt

SEQ ID NO: 39654 - DNA, 22 bp, synthetic construct
  misc_feature 1..22: note = chemically synthesized
  source 1..22: mol_type = other DNA
gttagttttctttgaaagtttg

SEQ ID NO: 39655 - DNA, 22 bp, synthetic construct
  misc_feature 1..22: note = chemically synthesized
  source 1..22: mol_type = other DNA
ttagttttctttgaaagtttgg

SEQ ID NO: 39656 - DNA, 22 bp, synthetic construct
  misc_feature 1..22: note = chemically synthesized
  source 1..22: mol_type = other DNA
gttttctttgaaagtttggtaa

SEQ ID NO: 39657 - DNA, 22 bp, synthetic construct
  misc_feature 1..22: note = chemically synthesized
  source 1..22: mol_type = other DNA
tctttgaaagtttggtaaaatt

SEQ ID NO: 39658 - DNA, 22 bp, synthetic construct
  misc_feature 1..22: note = chemically synthesized
  source 1..22: mol_type = other DNA
ctttgaaagtttggtaaaattt

SEQ ID NO: 39659 - DNA, 22 bp, synthetic construct
  misc_feature 1..22: note = chemically synthesized
  source 1..22: mol_type = other DNA
tttgaaagtttggtaaaatttg

SEQ ID NO: 39660 - DNA, 22 bp, synthetic construct
  misc_feature 1..22: note = chemically synthesized
  source 1..22: mol_type = other DNA
tgaaagtttggtaaaatttgac

SEQ ID NO: 39661 - DNA, 22 bp, synthetic construct
  misc_feature 1..22: note = chemically synthesized
  source 1..22: mol_type = other DNA
gaaagtttggtaaaatttgaca

SEQ ID NO: 39662 - DNA, 22 bp, synthetic construct
  misc_feature 1..22: note = chemically synthesized
  source 1..22: mol_type = other DNA
aaagtttggtaaaatttgacag

SEQ ID NO: 39663 - DNA, 22 bp, synthetic construct
  misc_feature 1..22: note = chemically synthesized
  source 1..22: mol_type = other DNA
ggtaaaatttgacagtaaagcc

SEQ ID NO: 39664 - DNA, 22 bp, synthetic construct
  misc_feature 1..22: note = chemically synthesized
  source 1..22: mol_type = other DNA
gtaaaatttgacagtaaagcca

SEQ ID NO: 39665 - DNA, 22 bp, synthetic construct
  misc_feature 1..22: note = chemically synthesized
  source 1..22: mol_type = other DNA
gacagtaaagccatctggtctt

SEQ ID NO: 39666 - DNA, 22 bp, synthetic construct
  misc_feature 1..22: note = chemically synthesized
  source 1..22: mol_type = other DNA
acagtaaagccatctggtcttg

SEQ ID NO: 39667 - DNA, 22 bp, synthetic construct
  misc_feature 1..22: note = chemically synthesized
  source 1..22: mol_type = other DNA
gtcttgaaattttcttttttgg

SEQ ID NO: 39668 - DNA, 22 bp, synthetic construct
  misc_feature 1..22: note = chemically synthesized
  source 1..22: mol_type = other DNA
gaaattttcttttttgggagac

SEQ ID NO: 39669 - DNA, 22 bp, synthetic construct
  misc_feature 1..22: note = chemically synthesized
  source 1..22: mol_type = other DNA
aaattttcttttttgggagact

SEQ ID NO: 39670 - DNA, 22 bp, synthetic construct
  misc_feature 1..22: note = chemically synthesized
  source 1..22: mol_type = other DNA
tcttttttgggagactttttac

SEQ ID NO: 39671 - DNA, 22 bp, synthetic construct
  misc_feature 1..22: note = chemically synthesized
  source 1..22: mol_type = other DNA
cttttttgggagactttttact

SEQ ID NO: 39672 - DNA, 22 bp, synthetic construct
  misc_feature 1..22: note = chemically synthesized
  source 1..22: mol_type = other DNA
ttttttgggagactttttacta

SEQ ID NO: 39673 - DNA, 22 bp, synthetic construct
  misc_feature 1..22: note = chemically synthesized
  source 1..22: mol_type = other DNA
ttttgggagactttttactact

SEQ ID NO: 39674 - DNA, 22 bp, synthetic construct
  misc_feature 1..22: note = chemically synthesized
  source 1..22: mol_type = other DNA
tttgggagactttttactactg

SEQ ID NO: 39675 - DNA, 22 bp, synthetic construct
  misc_feature 1..22: note = chemically synthesized
  source 1..22: mol_type = other DNA
ttgggagactttttactactga

SEQ ID NO: 39676 - DNA, 22 bp, synthetic construct
  misc_feature 1..22: note = chemically synthesized
  source 1..22: mol_type = other DNA
tgggagactttttactactgat

SEQ ID NO: 39677 - DNA, 22 bp, synthetic construct
  misc_feature 1..22: note = chemically synthesized
  source 1..22: mol_type = other DNA
gggagactttttactactgatt

SEQ ID NO: 39678 - DNA, 22 bp, synthetic construct
  misc_feature 1..22: note = chemically synthesized
  source 1..22: mol_type = other DNA
ggagactttttactactgattc

SEQ ID NO: 39679 - DNA, 22 bp, synthetic construct
  misc_feature 1..22: note = chemically synthesized
  source 1..22: mol_type = other DNA
tttactactgattcaatttcat

SEQ ID NO: 39680 - DNA, 22 bp, synthetic construct
  misc_feature 1..22: note = chemically synthesized
  source 1..22: mol_type = other DNA
ttactactgattcaatttcatt

SEQ ID NO: 39681 - DNA, 22 bp, synthetic construct
  misc_feature 1..22: note = chemically synthesized
  source 1..22: mol_type = other DNA
tactactgattcaatttcatta

SEQ ID NO: 39682 - DNA, 22 bp, synthetic construct
  misc_feature 1..22: note = chemically synthesized
  source 1..22: mol_type = other DNA
actactgattcaatttcattat

SEQ ID NO: 39683 - DNA, 22 bp, synthetic construct
  misc_feature 1..22: note = chemically synthesized
  source 1..22: mol_type = other DNA
ctactgattcaatttcattatt

SEQ ID NO: 39684 - DNA, 22 bp, synthetic construct
  misc_feature 1..22: note = chemically synthesized
  source 1..22: mol_type = other DNA
ctgattcaatttcattattcat

SEQ ID NO: 39685 - DNA, 22 bp, synthetic construct
  misc_feature 1..22: note = chemically synthesized
  source 1..22: mol_type = other DNA
attcaatttcattattcattac

SEQ ID NO: 39686 - DNA, 22 bp, synthetic construct
  misc_feature 1..22: note = chemically synthesized
  source 1..22: mol_type = other DNA
aatttcattattcattactggt

SEQ ID NO: 39687 - DNA, 22 bp, synthetic construct
  misc_feature 1..22: note = chemically synthesized
  source 1..22: mol_type = other DNA
cattattcattactggtctgtt

SEQ ID NO: 39688 - DNA, 22 bp, synthetic construct
  misc_feature 1..22: note = chemically synthesized
  source 1..22: mol_type = other DNA
attattcattactggtctgttc

SEQ ID NO: 39689 - DNA, 22 bp, synthetic construct
  misc_feature 1..22: note = chemically synthesized
  source 1..22: mol_type = other DNA
ttcattactggtctgttcaggt

SEQ ID NO: 39690 - DNA, 22 bp, synthetic construct
  misc_feature 1..22: note = chemically synthesized
  source 1..22: mol_type = other DNA
attactggtctgttcaggtttt

SEQ ID NO: 39691 - DNA, 22 bp, synthetic construct
  misc_feature 1..22: note = chemically synthesized
  source 1..22: mol_type = other DNA
ctggtctgttcaggttttctat

SEQ ID NO: 39692 - DNA, 22 bp, synthetic construct
  misc_feature 1..22: note = chemically synthesized
  source 1..22: mol_type = other DNA
gtctgttcaggttttctattct

SEQ ID NO: 39693 - DNA, 22 bp, synthetic construct
  misc_feature 1..22: note = chemically synthesized
  source 1..22: mol_type = other DNA
ttcaggttttctattctttctt

SEQ ID NO: 39694 - DNA, 22 bp, synthetic construct
  misc_feature 1..22: note = chemically synthesized
  source 1..22: mol_type = other DNA
aggttttctattctttcttaat

SEQ ID NO: 39695 - DNA, 22 bp, synthetic construct
  misc_feature 1..22: note = chemically synthesized
  source 1..22: mol_type = other DNA
tctattctttcttaattcaatc

SEQ ID NO: 39696 - DNA, 22 bp, synthetic construct
  misc_feature 1..22: note = chemically synthesized
  source 1..22: mol_type = other DNA
ctattctttcttaattcaatct

SEQ ID NO: 39697 - DNA, 22 bp, synthetic construct
  misc_feature 1..22: note = chemically synthesized
  source 1..22: mol_type = other DNA
tattctttcttaattcaatctt

SEQ ID NO: 39698 - DNA, 22 bp, synthetic construct
  misc_feature 1..22: note = chemically synthesized
  source 1..22: mol_type = other DNA
ttctttcttaattcaatcttgg

SEQ ID NO: 39699 - DNA, 22 bp, synthetic construct
  misc_feature 1..22: note = chemically synthesized
  source 1..22: mol_type = other DNA
tttcttaattcaatcttggtag

SEQ ID NO: 39700 - DNA, 22 bp, synthetic construct
  misc_feature 1..22: note = chemically synthesized
  source 1..22: mol_type = other DNA
tcttaattcaatcttggtaggt

SEQ ID NO: 39701 - DNA, 22 bp, synthetic construct
  misc_feature 1..22: note = chemically synthesized
  source 1..22: mol_type = other DNA
cttaattcaatcttggtaggtg

SEQ ID NO: 39702 - DNA, 22 bp, synthetic construct
  misc_feature 1..22: note = chemically synthesized
  source 1..22: mol_type = other DNA
ttaattcaatcttggtaggtgg

SEQ ID NO: 39703 - DNA, 22 bp, synthetic construct
  misc_feature 1..22: note = chemically synthesized
  source 1..22: mol_type = other DNA
aattcaatcttggtaggtggta

SEQ ID NO: 39704 - DNA, 22 bp, synthetic construct
  misc_feature 1..22: note = chemically synthesized
  source 1..22: mol_type = other DNA
attcaatcttggtaggtggtat

SEQ ID NO: 39705 - DNA, 22 bp, synthetic construct
  misc_feature 1..22: note = chemically synthesized
  source 1..22: mol_type = other DNA
aatcttggtaggtggtatgtgt

SEQ ID NO: 39706 - DNA, 22 bp, synthetic construct
  misc_feature 1..22: note = chemically synthesized
  source 1..22: mol_type = other DNA
ggtaggtggtatgtgtccagaa

SEQ ID NO: 39707 - DNA, 22 bp, synthetic construct
  misc_feature 1..22: note = chemically synthesized
  source 1..22: mol_type = other DNA
gtaggtggtatgtgtccagaaa

SEQ ID NO: 39708 - DNA, 22 bp, synthetic construct
  misc_feature 1..22: note = chemically synthesized
  source 1..22: mol_type = other DNA
attaatttcctctagatttttc

SEQ ID NO: 39709 - DNA, 22 bp, synthetic construct
  misc_feature 1..22: note = chemically synthesized
  source 1..22: mol_type = other DNA
ttaatttcctctagatttttca

SEQ ID NO: 39710 - DNA, 22 bp, synthetic construct
  misc_feature 1..22: note = chemically synthesized
  source 1..22: mol_type = other DNA
atttcctctagatttttcagtt

SEQ ID NO: 39711 - DNA, 22 bp, synthetic construct
  misc_feature 1..22: note = chemically synthesized
  source 1..22: mol_type = other DNA
cctctagatttttcagtttttt

SEQ ID NO: 39712 - DNA, 22 bp, synthetic construct
  misc_feature 1..22: note = chemically synthesized
  source 1..22: mol_type = other DNA
ctctagatttttcagtttttta

SEQ ID NO: 39713 - DNA, 22 bp, synthetic construct
  misc_feature 1..22: note = chemically synthesized
  source 1..22: mol_type = other DNA
tagatttttcagttttttagtg

SEQ ID NO: 39714 - DNA, 22 bp, synthetic construct
  misc_feature 1..22: note = chemically synthesized
  source 1..22: mol_type = other DNA
gatttttcagttttttagtgta

SEQ ID NO: 39715 - DNA, 22 bp, synthetic construct
  misc_feature 1..22: note = chemically synthesized
  source 1..22: mol_type = other DNA
ttcagttttttagtgtatggtt

SEQ ID NO: 39716 - DNA, 22 bp, synthetic construct
  misc_feature 1..22: note = chemically synthesized
  source 1..22: mol_type = other DNA
tcagttttttagtgtatggttg

SEQ ID NO: 39717 - DNA, 22 bp, synthetic construct
  misc_feature 1..22: note = chemically synthesized
  source 1..22: mol_type = other DNA
cagttttttagtgtatggttgt

SEQ ID NO: 39718 - DNA, 22 bp, synthetic construct
  misc_feature 1..22: note = chemically synthesized
  source 1..22: mol_type = other DNA
agttttttagtgtatggttgtt

SEQ ID NO: 39719 - DNA, 22 bp, synthetic construct
  misc_feature 1..22: note = chemically synthesized
  source 1..22: mol_type = other DNA
tttagtgtatggttgttcataa

SEQ ID NO: 39720 - DNA, 22 bp, synthetic construct
  misc_feature 1..22: note = chemically synthesized
  source 1..22: mol_type = other DNA
ttagtgtatggttgttcataat

SEQ ID NO: 39721 - DNA, 22 bp, synthetic construct
  misc_feature 1..22: note = chemically synthesized
  source 1..22: mol_type = other DNA
tagtgtatggttgttcataata

SEQ ID NO: 39722 - DNA, 22 bp, synthetic construct
  misc_feature 1..22: note = chemically synthesized
  source 1..22: mol_type = other DNA
agtgtatggttgttcataatag

SEQ ID NO: 39723 - DNA, 22 bp, synthetic construct
  misc_feature 1..22: note = chemically synthesized
  source 1..22: mol_type = other DNA
gtgtatggttgttcataatagt

SEQ ID NO: 39724 - DNA, 22 bp, synthetic construct
  misc_feature 1..22: note = chemically synthesized
  source 1..22: mol_type = other DNA
ttcataatagtctctgataatc

SEQ ID NO: 39725 - DNA, 22 bp, synthetic construct
  misc_feature 1..22: note = chemically synthesized
  source 1..22: mol_type = other DNA
ataatagtctctgataatcttt

SEQ ID NO: 39726 - DNA, 22 bp, synthetic construct
  misc_feature 1..22: note = chemically synthesized
  source 1..22: mol_type = other DNA
tgataatcttttctatttctgt

SEQ ID NO: 39727 - DNA, 22 bp, synthetic construct
  misc_feature 1..22: note = chemically synthesized
  source 1..22: mol_type = other DNA
ataatcttttctatttctgtgg

SEQ ID NO: 39728 - DNA, 22 bp, synthetic construct
  misc_feature 1..22: note = chemically synthesized
  source 1..22: mol_type = other DNA
ttctatttctgtggtatcggtt

SEQ ID NO: 39729 - DNA, 22 bp, synthetic construct
  misc_feature 1..22: note = chemically synthesized
  source 1..22: mol_type = other DNA
tctatttctgtggtatcggttg

SEQ ID NO: 39730 - DNA, 22 bp, synthetic construct
  misc_feature 1..22: note = chemically synthesized
  source 1..22: mol_type = other DNA
ctatttctgtggtatcggttgt

SEQ ID NO: 39731 - DNA, 22 bp, synthetic construct
  misc_feature 1..22: note = chemically synthesized
  source 1..22: mol_type = other DNA
tatttctgtggtatcggttgta

SEQ ID NO: 39732 - DNA, 22 bp, synthetic construct
  misc_feature 1..22: note = chemically synthesized
  source 1..22: mol_type = other DNA
tttctgtggtatcggttgtaat

SEQ ID NO: 39733 - DNA, 22 bp, synthetic construct
  misc_feature 1..22: note = chemically synthesized
  source 1..22: mol_type = other DNA
ctgtggtatcggttgtaatata

SEQ ID NO: 39734 - DNA, 22 bp, synthetic construct
  misc_feature 1..22: note = chemically synthesized
  source 1..22: mol_type = other DNA
tgtggtatcggttgtaatatat

SEQ ID NO: 39735 - DNA, 22 bp, synthetic construct
  misc_feature 1..22: note = chemically synthesized
  source 1..22: mol_type = other DNA
tggtatcggttgtaatatattt

SEQ ID NO: 39736 - DNA, 22 bp, synthetic construct
  misc_feature 1..22: note = chemically synthesized
  source 1..22: mol_type = other DNA
taatatattttcttttttattt

SEQ ID NO: 39737 - DNA, 22 bp, synthetic construct
  misc_feature 1..22: note = chemically synthesized
  source 1..22: mol_type = other DNA
tcttttttatttctgattttct

SEQ ID NO: 39738 - DNA, 22 bp, synthetic construct
  misc_feature 1..22: note = chemically synthesized
  source 1..22: mol_type = other DNA
cttttttatttctgattttctt

SEQ ID NO: 39739 - DNA, 22 bp, synthetic construct
  misc_feature 1..22: note = chemically synthesized
  source 1..22: mol_type = other DNA
ttttttatttctgattttcttt

SEQ ID NO: 39740 - DNA, 22 bp, synthetic construct
  misc_feature 1..22: note = chemically synthesized
  source 1..22: mol_type = other DNA
ttttatttctgattttctttat

SEQ ID NO: 39741 - DNA, 22 bp, synthetic construct
  misc_feature 1..22: note = chemically synthesized
  source 1..22: mol_type = other DNA
tttatttctgattttctttatt

SEQ ID NO: 39742 - DNA, 22 bp, synthetic construct
  misc_feature 1..22: note = chemically synthesized
  source 1..22: mol_type = other DNA
ttatttctgattttctttattt

SEQ ID NO: 39743 - DNA, 22 bp, synthetic construct
  misc_feature 1..22: note = chemically synthesized
  source 1..22: mol_type = other DNA
tatttctgattttctttatttc

SEQ ID NO: 39744 - DNA, 22 bp, synthetic construct
  misc_feature 1..22: note = chemically synthesized
  source 1..22: mol_type = other DNA
atttctgattttctttatttca

SEQ ID NO: 39745 - DNA, 22 bp, synthetic construct
  misc_feature 1..22: note = chemically synthesized
  source 1..22: mol_type = other DNA
tttctgattttctttatttcag

SEQ ID NO: 39746 - DNA, 22 bp, synthetic construct
  misc_feature 1..22: note = chemically synthesized
  source 1..22: mol_type = other DNA
ctgattttctttatttcagtct

SEQ ID NO: 39747 - DNA, 22 bp, synthetic construct
  misc_feature 1..22: note = chemically synthesized
  source 1..22: mol_type = other DNA
tgattttctttatttcagtctc

SEQ ID NO: 39748 - DNA, 22 bp, synthetic construct
  misc_feature 1..22: note = chemically synthesized
  source 1..22: mol_type = other DNA
attttctttatttcagtctctt

SEQ ID NO: 39749 - DNA, 22 bp, synthetic construct
  misc_feature 1..22: note = chemically synthesized
  source 1..22: mol_type = other DNA
tctttatttcagtctcttctct

SEQ ID NO: 39750 - DNA, 22 bp, synthetic construct
  misc_feature 1..22: note = chemically synthesized
  source 1..22: mol_type = other DNA
ctttatttcagtctcttctctt

SEQ ID NO: 39751 - DNA, 22 bp, synthetic construct
  misc_feature 1..22: note = chemically synthesized
  source 1..22: mol_type = other DNA
tttatttcagtctcttctcttt

SEQ ID NO: 39752 - DNA, 22 bp, synthetic construct
  misc_feature 1..22: note = chemically synthesized
  source 1..22: mol_type = other DNA
tatttcagtctcttctcttttt

SEQ ID NO: 39753 - DNA, 22 bp, synthetic construct
  misc_feature 1..22: note = chemically synthesized
  source 1..22: mol_type = other DNA
atttcagtctcttctctttttc

SEQ ID NO: 39754 - DNA, 22 bp, synthetic construct
  misc_feature 1..22: note = chemically synthesized
  source 1..22: mol_type = other DNA
tttcagtctcttctctttttct

SEQ ID NO: 39755 - DNA, 22 bp, synthetic construct
  misc_feature 1..22: note = chemically synthesized
  source 1..22: mol_type = other DNA
cagtctcttctctttttcttgg

SEQ ID NO: 39756 - DNA, 22 bp, synthetic construct
  misc_feature 1..22: note = chemically synthesized
  source 1..22: mol_type = other DNA
agtctcttctctttttcttggt

SEQ ID NO: 39757 - DNA, 22 bp, synthetic construct
  misc_feature 1..22: note = chemically synthesized
  source 1..22: mol_type = other DNA
ttctctttttcttggttagtct

SEQ ID NO: 39758 - DNA, 22 bp, synthetic construct
  misc_feature 1..22: note = chemically synthesized
  source 1..22: mol_type = other DNA
ctctttttcttggttagtctag

SEQ ID NO: 39759 - DNA, 22 bp, synthetic construct
  misc_feature 1..22: note = chemically synthesized
  source 1..22: mol_type = other DNA
tctttttcttggttagtctagc

SEQ ID NO: 39760 - DNA, 22 bp, synthetic construct
  misc_feature 1..22: note = chemically synthesized
  source 1..22: mol_type = other DNA
tttttcttggttagtctagcta

SEQ ID NO: 39761 - DNA, 22 bp, synthetic construct
  misc_feature 1..22: note = chemically synthesized
  source 1..22: mol_type = other DNA
tttcttggttagtctagctaga

SEQ ID NO: 39762 - DNA, 22 bp, synthetic construct
  misc_feature 1..22: note = chemically synthesized
  source 1..22: mol_type = other DNA
ttcttggttagtctagctagag

SEQ ID NO: 39763 - DNA, 22 bp, synthetic construct
  misc_feature 1..22: note = chemically synthesized
  source 1..22: mol_type = other DNA
tcttggttagtctagctagagc

SEQ ID NO: 39764 - DNA, 22 bp, synthetic construct
  misc_feature 1..22: note = chemically synthesized
  source 1..22: mol_type = other DNA
cttggttagtctagctagagct

SEQ ID NO: 39765 - DNA, 22 bp, synthetic construct
  misc_feature 1..22: note = chemically synthesized
  source 1..22: mol_type = other DNA
ttggttagtctagctagagcta

SEQ ID NO: 39766 - DNA, 22 bp, synthetic construct
  misc_feature 1..22: note = chemically synthesized
  source 1..22: mol_type = other DNA
ggttagtctagctagagctata

SEQ ID NO: 39767 - DNA, 22 bp, synthetic construct
  misc_feature 1..22: note = chemically synthesized
  source 1..22: mol_type = other DNA
gttagtctagctagagctatat

SEQ ID NO: 39768 - DNA, 22 bp, synthetic construct
  misc_feature 1..22: note = chemically synthesized
  source 1..22: mol_type = other DNA
gtctagctagagctatatccat

SEQ ID NO: 39769 - DNA, 22 bp, synthetic construct
  misc_feature 1..22: note = chemically synthesized
  source 1..22: mol_type = other DNA
gctagagctatatccattttat

SEQ ID NO: 39770 - DNA, 22 bp, synthetic construct
  misc_feature 1..22: note = chemically synthesized
  source 1..22: mol_type = other DNA
gagctatatccattttatcttt

SEQ ID NO: 39771 - DNA, 22 bp, synthetic construct
  misc_feature 1..22: note = chemically synthesized
  source 1..22: mol_type = other DNA
tatccattttatcttttttaaa

SEQ ID NO: 39772 - DNA, 22 bp, synthetic construct
  misc_feature 1..22: note = chemically synthesized
  source 1..22: mol_type = other DNA
tatcttttttaaataacaactt

SEQ ID NO: 39773 - DNA, 22 bp, synthetic construct
  misc_feature 1..22: note = chemically synthesized
  source 1..22: mol_type = other DNA
atcttttttaaataacaacttt

SEQ ID NO: 39774 - DNA, 22 bp, synthetic construct
  misc_feature 1..22: note = chemically synthesized
  source 1..22: mol_type = other DNA
tcttttttaaataacaactttt

SEQ ID NO: 39775 - DNA, 22 bp, synthetic construct
  misc_feature 1..22: note = chemically synthesized
  source 1..22: mol_type = other DNA
ttttaaataacaacttttcatt

SEQ ID NO: 39776 - DNA, 22 bp, synthetic construct
  misc_feature 1..22: note = chemically synthesized
  source 1..22: mol_type = other DNA
tttaaataacaacttttcattt

SEQ ID NO: 39777 - DNA, 22 bp, synthetic construct
  misc_feature 1..22: note = chemically synthesized
  source 1..22: mol_type = other DNA
ttaaataacaacttttcatttt

SEQ ID NO: 39778 - DNA, 22 bp, synthetic construct
  misc_feature 1..22: note = chemically synthesized
  source 1..22: mol_type = other DNA
taaataacaacttttcattttg

SEQ ID NO: 39779 - DNA, 22 bp, synthetic construct
  misc_feature 1..22: note = chemically synthesized
  source 1..22: mol_type = other DNA
aaataacaacttttcattttgc

SEQ ID NO: 39780 - DNA, 22 bp, synthetic construct
  misc_feature 1..22: note = chemically synthesized
  source 1..22: mol_type = other DNA
aataacaacttttcattttgct

SEQ ID NO: 39781 - DNA, 22 bp, synthetic construct
  misc_feature 1..22: note = chemically synthesized
  source 1..22: mol_type = other DNA
ttcattttgctaatcccttgtt

SEQ ID NO: 39782 - DNA, 22 bp, synthetic construct
  misc_feature 1..22: note = chemically synthesized
  source 1..22: mol_type = other DNA
tcattttgctaatcccttgttg

SEQ ID NO: 39783 - DNA, 22 bp, synthetic construct
  misc_feature 1..22: note = chemically synthesized
  source 1..22: mol_type = other DNA
cattttgctaatcccttgttgt

SEQ ID NO: 39784 - DNA, 22 bp, synthetic construct
  misc_feature 1..22: note = chemically synthesized
  source 1..22: mol_type = other DNA
attttgctaatcccttgttgtt

SEQ ID NO: 39785 - DNA, 22 bp, synthetic construct
  misc_feature 1..22: note = chemically synthesized
  source 1..22: mol_type = other DNA
tgctaatcccttgttgttgttt

SEQ ID NO: 39786 - DNA, 22 bp, synthetic construct
  misc_feature 1..22: note = chemically synthesized
  source 1..22: mol_type = other DNA
gctaatcccttgttgttgtttt

SEQ ID NO: 39787 - DNA, 22 bp, synthetic construct
  misc_feature 1..22: note = chemically synthesized
  source 1..22: mol_type = other DNA
ctaatcccttgttgttgttttt

SEQ ID NO: 39788 - DNA, 22 bp, synthetic construct
  misc_feature 1..22: note = chemically synthesized
  source 1..22: mol_type = other DNA
atcccttgttgttgtttttctc

SEQ ID NO: 39789 - DNA, 22 bp, synthetic construct
  misc_feature 1..22: note = chemically synthesized
  source 1..22: mol_type = other DNA
gttgttgtttttctctatttca

SEQ ID NO: 39790 - DNA, 22 bp, synthetic construct
  misc_feature 1..22: note = chemically synthesized
  source 1..22: mol_type = other DNA
ttgttgtttttctctatttcat

SEQ ID NO: 39791 - DNA, 22 bp, synthetic construct
  misc_feature 1..22: note = chemically synthesized
  source 1..22: mol_type = other DNA
ttgtttttctctatttcattaa

SEQ ID NO: 39792 - DNA, 22 bp, synthetic construct
  misc_feature 1..22: note = chemically synthesized
  source 1..22: mol_type = other DNA
tttttctctatttcattaagtt

SEQ ID NO: 39793 - DNA, 22 bp, synthetic construct
  misc_feature 1..22: note = chemically synthesized
  source 1..22: mol_type = other DNA
ttctctatttcattaagttctt

SEQ ID NO: 39794 - DNA, 22 bp, synthetic construct
  misc_feature 1..22: note = chemically synthesized
  source 1..22: mol_type = other DNA
tctctatttcattaagttcttc

SEQ ID NO: 39795 - DNA, 22 bp, synthetic construct
  misc_feature 1..22: note = chemically synthesized
  source 1..22: mol_type = other DNA
ctctatttcattaagttcttct

SEQ ID NO: 39796 - DNA, 22 bp, synthetic construct
  misc_feature 1..22: note = chemically synthesized
  source 1..22: mol_type = other DNA
tctatttcattaagttcttctg

SEQ ID NO: 39797 - DNA, 22 bp, synthetic construct
  misc_feature 1..22: note = chemically synthesized
  source 1..22: mol_type = other DNA
tatttcattaagttcttctgtt

SEQ ID NO: 39798 - DNA, 22 bp, synthetic construct
  misc_feature 1..22: note = chemically synthesized
  source 1..22: mol_type = other DNA
tttcattaagttcttctgttct

SEQ ID NO: 39799 - DNA, 22 bp, synthetic construct
  misc_feature 1..22: note = chemically synthesized
  source 1..22: mol_type = other DNA
cattaagttcttctgttcttca

SEQ ID NO: 39800 - DNA, 22 bp, synthetic construct
  misc_feature 1..22: note = chemically synthesized
  source 1..22: mol_type = other DNA
attaagttcttctgttcttcat

SEQ ID NO: 39801 - DNA, 22 bp, synthetic construct
  misc_feature 1..22: note = chemically synthesized
  source 1..22: mol_type = other DNA
agttcttctgttcttcattttt

SEQ ID NO: 39802 - DNA, 22 bp, synthetic construct
  misc_feature 1..22: note = chemically synthesized
  source 1..22: mol_type = other DNA
ttctgttcttcattttttcttt

SEQ ID NO: 39803 - DNA, 22 bp, synthetic construct
  misc_feature 1..22: note = chemically synthesized
  source 1..22: mol_type = other DNA
ctgttcttcattttttctttcc

SEQ ID NO: 39804 - DNA, 22 bp, synthetic construct
  misc_feature 1..22: note = chemically synthesized
  source 1..22: mol_type = other DNA
tgttcttcattttttctttcct

SEQ ID NO: 39805 - DNA, 22 bp, synthetic construct
  misc_feature 1..22: note = chemically synthesized
  source 1..22: mol_type = other DNA
ttcttcattttttctttccttc

SEQ ID NO: 39806 - DNA, 22 bp, synthetic construct
  misc_feature 1..22: note = chemically synthesized
  source 1..22: mol_type = other DNA
ttcattttttctttccttctgc

SEQ ID NO: 39807 - DNA, 22 bp, synthetic construct
  misc_feature 1..22: note = chemically synthesized
  source 1..22: mol_type = other DNA
cattttttctttccttctgcta

SEQ ID NO: 39808 - DNA, 22 bp, synthetic construct
  misc_feature 1..22: note = chemically synthesized
  source 1..22: mol_type = other DNA
attttttctttccttctgctag

SEQ ID NO: 39809 - DNA, 22 bp, synthetic construct
  misc_feature 1..22: note = chemically synthesized
  source 1..22: mol_type = other DNA
tttctttccttctgctagtttt

SEQ ID NO: 39810 - DNA, 22 bp, synthetic construct
  misc_feature 1..22: note = chemically synthesized
  source 1..22: mol_type = other DNA
ttctttccttctgctagttttg

SEQ ID NO: 39811 - DNA, 22 bp, synthetic construct
  misc_feature 1..22: note = chemically synthesized
  source 1..22: mol_type = other DNA
tctttccttctgctagttttgg

SEQ ID NO: 39812 - DNA, 22 bp, synthetic construct
  misc_feature 1..22: note = chemically synthesized
  source 1..22: mol_type = other DNA
ctttccttctgctagttttggg

SEQ ID NO: 39813 - DNA, 22 bp, synthetic construct
  misc_feature 1..22: note = chemically synthesized
  source 1..22: mol_type = other DNA
tttccttctgctagttttgggt

SEQ ID NO: 39814 - DNA, 22 bp, synthetic construct
  misc_feature 1..22: note = chemically synthesized
  source 1..22: mol_type = other DNA
tccttctgctagttttgggttt

SEQ ID NO: 39815 - DNA, 22 bp, synthetic construct
  misc_feature 1..22: note = chemically synthesized
  source 1..22: mol_type = other DNA
ccttctgctagttttgggtttt

SEQ ID NO: 39816 - DNA, 22 bp, synthetic construct
  misc_feature 1..22: note = chemically synthesized
  source 1..22: mol_type = other DNA
cttctgctagttttgggttttg

SEQ ID NO: 39817 - DNA, 22 bp, synthetic construct
  misc_feature 1..22: note = chemically synthesized
  source 1..22: mol_type = other DNA
ctgctagttttgggttttgttc

SEQ ID NO: 39818 - DNA, 22 bp, synthetic construct
  misc_feature 1..22: note = chemically synthesized
  source 1..22: mol_type = other DNA
tgctagttttgggttttgttct

SEQ ID NO: 39819 - DNA, 22 bp, synthetic construct
  misc_feature 1..22: note = chemically synthesized
  source 1..22: mol_type = other DNA
ctagttttgggttttgttcttg

SEQ ID NO: 39820 - DNA, 22 bp, synthetic construct
  misc_feature 1..22: note = chemically synthesized
  source 1..22: mol_type = other DNA
gttttgggttttgttcttgctt

SEQ ID NO: 39821 - DNA, 22 bp, synthetic construct
  misc_feature 1..22: note = chemically synthesized
  source 1..22: mol_type = other DNA
tgggttttgttcttgcttttct

SEQ ID NO: 39822 - DNA, 22 bp, synthetic construct
  misc_feature 1..22: note = chemically synthesized
  source 1..22: mol_type = other DNA
gggttttgttcttgcttttcta

SEQ ID NO: 39823 - DNA, 22 bp, synthetic construct
  misc_feature 1..22: note = chemically synthesized
  source 1..22: mol_type = other DNA
ggttttgttcttgcttttctag

SEQ ID NO: 39824 - DNA, 22 bp, synthetic construct
  misc_feature 1..22: note = chemically synthesized
  source 1..22: mol_type = other DNA
tgttcttgcttttctagcttgt

SEQ ID NO: 39825 - DNA, 22 bp, synthetic construct
  misc_feature 1..22: note = chemically synthesized
  source 1..22: mol_type = other DNA
gttcttgcttttctagcttgtt

SEQ ID NO: 39826 - DNA, 22 bp, synthetic construct
  misc_feature 1..22: note = chemically synthesized
  source 1..22: mol_type = other DNA
ttcttgcttttctagcttgttg

SEQ ID NO: 39827 - DNA, 22 bp, synthetic construct
  misc_feature 1..22: note = chemically synthesized
  source 1..22: mol_type = other DNA
ttgcttttctagcttgttgagg

SEQ ID NO: 39828 - DNA, 22 bp, synthetic construct
  misc_feature 1..22: note = chemically synthesized
  source 1..22: mol_type = other DNA
gcttttctagcttgttgaggta

SEQ ID NO: 39829 - DNA, 22 bp, synthetic construct
  misc_feature 1..22: note = chemically synthesized
  source 1..22: mol_type = other DNA
cttttctagcttgttgaggtac

SEQ ID NO: 39830 - DNA, 22 bp, synthetic construct
  misc_feature 1..22: note = chemically synthesized
  source 1..22: mol_type = other DNA
ttctagcttgttgaggtacatg

SEQ ID NO: 39831 - DNA, 22 bp, synthetic construct
  misc_feature 1..22: note = chemically synthesized
  source 1..22: mol_type = other DNA
tctagcttgttgaggtacatga

SEQ ID NO: 39832 - DNA, 22 bp, synthetic construct
  misc_feature 1..22: note = chemically synthesized
  source 1..22: mol_type = other DNA
ctagcttgttgaggtacatgat

SEQ ID NO: 39833 - DNA, 22 bp, synthetic construct
  misc_feature 1..22: note = chemically synthesized
  source 1..22: mol_type = other DNA
tagcttgttgaggtacatgatt

SEQ ID NO: 39834 - DNA, 22 bp, synthetic construct
  misc_feature 1..22: note = chemically synthesized
  source 1..22: mol_type = other DNA
gcttgttgaggtacatgattag

SEQ ID NO: 39835 - DNA, 22 bp, synthetic construct
  misc_feature 1..22: note = chemically synthesized
  source 1..22: mol_type = other DNA
gttgaggtacatgattagatta

SEQ ID NO: 39836 - DNA, 22 bp, synthetic construct
  misc_feature 1..22: note = chemically synthesized
  source 1..22: mol_type = other DNA
ttgaggtacatgattagattat

SEQ ID NO: 39837 - DNA, 22 bp, synthetic construct
  misc_feature 1..22: note = chemically synthesized
  source 1..22: mol_type = other DNA
aggtacatgattagattatata

SEQ ID NO: 39838 - DNA, 22 bp, synthetic construct
  misc_feature 1..22: note = chemically synthesized
  source 1..22: mol_type = other DNA
gattatatatttgaaatctttc

SEQ ID NO: 39839 - DNA, 22 bp, synthetic construct
  misc_feature 1..22: note = chemically synthesized
  source 1..22: mol_type = other DNA
tatatttgaaatctttctatgt

SEQ ID NO: 39840 - DNA, 22 bp, synthetic construct
  misc_feature 1..22: note = chemically synthesized
  source 1..22: mol_type = other DNA
gaaatctttctatgtttttaat

SEQ ID NO: 39841 - DNA, 22 bp, synthetic construct
  misc_feature 1..22: note = chemically synthesized
  source 1..22: mol_type = other DNA
aaatctttctatgtttttaatt

SEQ ID NO: 39842 - DNA, 22 bp, synthetic construct
  misc_feature 1..22: note = chemically synthesized
  source 1..22: mol_type = other DNA
tctatgtttttaatttaagtgt

SEQ ID NO: 39843 - DNA, 22 bp, synthetic construct
  misc_feature 1..22: note = chemically synthesized
  source 1..22: mol_type = other DNA
ctatgtttttaatttaagtgtt

SEQ ID NO: 39844 - DNA, 22 bp, synthetic construct
  misc_feature 1..22: note = chemically synthesized
  source 1..22: mol_type = other DNA
tatgtttttaatttaagtgttt

SEQ ID NO: 39845 - DNA, 22 bp, synthetic construct
  misc_feature 1..22: note = chemically synthesized
  source 1..22: mol_type = other DNA
tgtttttaatttaagtgtttat

SEQ ID NO: 39846 - DNA, 22 bp, synthetic construct
  misc_feature 1..22: note = chemically synthesized
  source 1..22: mol_type = other DNA
ttaatttaagtgtttattgata

SEQ ID NO: 39847 - DNA, 22 bp, synthetic construct
  misc_feature 1..22: note = chemically synthesized
  source 1..22: mol_type = other DNA
taatttaagtgtttattgataa

SEQ ID NO: 39848 - DNA, 22 bp, synthetic construct
  misc_feature 1..22: note = chemically synthesized
  source 1..22: mol_type = other DNA
aatttaagtgtttattgataag

SEQ ID NO: 39849 - DNA, 22 bp, synthetic construct
  misc_feature 1..22: note = chemically synthesized
  source 1..22: mol_type = other DNA
atttaagtgtttattgataagc

SEQ ID NO: 39850 - DNA, 22 bp, synthetic construct
  misc_feature 1..22: note = chemically synthesized
  source 1..22: mol_type = other DNA
aagtgtttattgataagcttct

SEQ ID NO: 39851 - DNA, 22 bp, synthetic construct
  misc_feature 1..22: note = chemically synthesized
  source 1..22: mol_type = other DNA
agtgtttattgataagcttctc

SEQ ID NO: 39852 - DNA, 22 bp, synthetic construct
  misc_feature 1..22: note = chemically synthesized
  source 1..22: mol_type = other DNA
attgataagcttctctcttagc

SEQ ID NO: 39853 - DNA, 22 bp, synthetic construct
  misc_feature 1..22: note = chemically synthesized
  source 1..22: mol_type = other DNA
ttgataagcttctctcttagca

SEQ ID NO: 39854 - DNA, 22 bp, synthetic construct
  misc_feature 1..22: note = chemically synthesized
  source 1..22: mol_type = other DNA
ataagcttctctcttagcactg

SEQ ID NO: 39855 - DNA, 22 bp, synthetic construct
  misc_feature 1..22: note = chemically synthesized
  source 1..22: mol_type = other DNA
ctctcttagcactgcttttgct

SEQ ID NO: 39856 - DNA, 22 bp, synthetic construct
  misc_feature 1..22: note = chemically synthesized
  source 1..22: mol_type = other DNA
tctcttagcactgcttttgctg

SEQ ID NO: 39857 - DNA, 22 bp, synthetic construct
  misc_feature 1..22: note = chemically synthesized
  source 1..22: mol_type = other DNA
tcttagcactgcttttgctgta

SEQ ID NO: 39858 - DNA, 22 bp, synthetic construct
  misc_feature 1..22: note = chemically synthesized
  source 1..22: mol_type = other DNA
ttagcactgcttttgctgtatc

SEQ ID NO: 39859 - DNA, 22 bp, synthetic construct
  misc_feature 1..22: note = chemically synthesized
  source 1..22: mol_type = other DNA
agcactgcttttgctgtatccc

SEQ ID NO: 39860 - DNA, 22 bp, synthetic construct
  misc_feature 1..22: note = chemically synthesized
  source 1..22: mol_type = other DNA
gcactgcttttgctgtatccca

SEQ ID NO: 39861 - DNA, 22 bp, synthetic construct
  misc_feature 1..22: note = chemically synthesized
  source 1..22: mol_type = other DNA
cttttgctgtatcccatggctt

SEQ ID NO: 39862 - DNA, 22 bp, synthetic construct
  misc_feature 1..22: note = chemically synthesized
  source 1..22: mol_type = other DNA
ttgctgtatcccatggcttttc

SEQ ID NO: 39863 - DNA, 22 bp, synthetic construct
  misc_feature 1..22: note = chemically synthesized
  source 1..22: mol_type = other DNA
tgctgtatcccatggcttttcc

SEQ ID NO: 39864 - DNA, 22 bp, synthetic construct
  misc_feature 1..22: note = chemically synthesized
  source 1..22: mol_type = other DNA
gctgtatcccatggcttttcct

SEQ ID NO: 39865 - DNA, 22 bp, synthetic construct
  misc_feature 1..22: note = chemically synthesized
  source 1..22: mol_type = other DNA
ctgtatcccatggcttttccta

SEQ ID NO: 39866 - DNA, 22 bp, synthetic construct
  misc_feature 1..22: note = chemically synthesized
  source 1..22: mol_type = other DNA
tatcccatggcttttcctatgt

SEQ ID NO: 39867 - DNA, 22 bp, synthetic construct
  misc_feature 1..22: note = chemically synthesized
  source 1..22: mol_type = other DNA
ttcctatgttgtatttcaattt

SEQ ID NO: 39868 - DNA, 22 bp, synthetic construct
  misc_feature 1..22: note = chemically synthesized
  source 1..22: mol_type = other DNA
tcctatgttgtatttcaatttt

SEQ ID NO: 39869 - DNA, 22 bp, synthetic construct
  misc_feature 1..22: note = chemically synthesized
  source 1..22: mol_type = other DNA
cctatgttgtatttcaattttc

SEQ ID NO: 39870 - DNA, 22 bp, synthetic construct
  misc_feature 1..22: note = chemically synthesized
  source 1..22: mol_type = other DNA
ctatgttgtatttcaattttca

SEQ ID NO: 39871 - DNA, 22 bp, synthetic construct
  misc_feature 1..22: note = chemically synthesized
  source 1..22: mol_type = other DNA
tgttgtatttcaattttcattt

SEQ ID NO: 39872 - DNA, 22 bp, synthetic construct
  misc_feature 1..22: note = chemically synthesized
  source 1..22: mol_type = other DNA
tatttcaattttcatttgtttc

SEQ ID NO: 39873 - DNA, 22 bp, synthetic construct
  misc_feature 1..22: note = chemically synthesized
  source 1..22: mol_type = other DNA
caattttcatttgtttcaaaaa

SEQ ID NO: 39874 - DNA, 22 bp, synthetic construct
  misc_feature 1..22: note = chemically synthesized
  source 1..22: mol_type = other DNA
aattttcatttgtttcaaaaaa

SEQ ID NO: 39875 - DNA, 22 bp, synthetic construct
  misc_feature 1..22: note = chemically synthesized
  source 1..22: mol_type = other DNA
tcatttgtttcaaaaaattttt

SEQ ID NO: 39876 - DNA, 22 bp, synthetic construct
  misc_feature 1..22: note = chemically synthesized
  source 1..22: mol_type = other DNA
catttgtttcaaaaaatttttg

SEQ ID NO: 39877 - DNA, 22 bp, synthetic construct
  misc_feature 1..22: note = chemically synthesized
  source 1..22: mol_type = other DNA
atttgtttcaaaaaatttttga

SEQ ID NO: 39878 - DNA, 22 bp, synthetic construct
  misc_feature 1..22: note = chemically synthesized
  source 1..22: mol_type = other DNA
gtttcaaaaaatttttgatttc

SEQ ID NO: 39879 - DNA, 22 bp, synthetic construct
  misc_feature 1..22: note = chemically synthesized
  source 1..22: mol_type = other DNA
tttcaaaaaatttttgatttcc

SEQ ID NO: 39880 - DNA, 22 bp, synthetic construct
  misc_feature 1..22: note = chemically synthesized
  source 1..22: mol_type = other DNA
caaaaaatttttgatttccttc

SEQ ID NO: 39881 - DNA, 22 bp, synthetic construct
  misc_feature 1..22: note = chemically synthesized
  source 1..22: mol_type = other DNA
aaaaaatttttgatttccttct

SEQ ID NO: 39882 - DNA, 22 bp, synthetic construct
  misc_feature 1..22: note = chemically synthesized
  source 1..22: mol_type = other DNA
ttgatttccttcttaattttct

SEQ ID NO: 39883 - DNA, 22 bp, synthetic construct
  misc_feature 1..22: note = chemically synthesized
  source 1..22: mol_type = other DNA
tgatttccttcttaattttctt

SEQ ID NO: 39884 - DNA, 22 bp, synthetic construct
  misc_feature 1..22: note = chemically synthesized
  source 1..22: mol_type = other DNA
gatttccttcttaattttcttc

SEQ ID NO: 39885 - DNA, 22 bp, synthetic construct
  misc_feature 1..22: note = chemically synthesized
  source 1..22: mol_type = other DNA
atttccttcttaattttcttct

SEQ ID NO: 39886 - DNA, 22 bp, synthetic construct
  misc_feature 1..22: note = chemically synthesized
  source 1..22: mol_type = other DNA
ccttcttaattttcttcttgac

SEQ ID NO: 39887 - DNA, 22 bp, synthetic construct
  misc_feature 1..22: note = chemically synthesized
  source 1..22: mol_type = other DNA
cttcttaattttcttcttgaca

SEQ ID NO: 39888 - DNA, 22 bp, synthetic construct
  misc_feature 1..22: note = chemically synthesized
  source 1..22: mol_type = other DNA
cttaattttcttcttgacataa

SEQ ID NO: 39889 - DNA, 22 bp, synthetic construct
  misc_feature 1..22: note = chemically synthesized
  source 1..22: mol_type = other DNA
ttaattttcttcttgacataac

SEQ ID NO: 39890 - DNA, 22 bp, synthetic construct
  misc_feature 1..22: note = chemically synthesized
  source 1..22: mol_type = other DNA
aattttcttcttgacataacgt

SEQ ID NO: 39891 - DNA, 22 bp, synthetic construct
  misc_feature 1..22: note = chemically synthesized
  source 1..22: mol_type = other DNA
attttcttcttgacataacgtt

SEQ ID NO: 39892 - DNA, 22 bp, synthetic construct
  misc_feature 1..22: note = chemically synthesized
  source 1..22: mol_type = other DNA
tcttcttgacataacgttcatt

SEQ ID NO: 39893 - DNA, 22 bp, synthetic construct
  misc_feature 1..22: note = chemically synthesized
  source 1..22: mol_type = other DNA
cttcttgacataacgttcattc

SEQ ID NO: 39894 - DNA, 22 bp, synthetic construct
  misc_feature 1..22: note = chemically synthesized
  source 1..22: mol_type = other DNA
ttcttgacataacgttcattca

SEQ ID NO: 39895 - DNA, 22 bp, synthetic construct
  misc_feature 1..22: note = chemically synthesized
  source 1..22: mol_type = other DNA
cttgacataacgttcattcagg

SEQ ID NO: 39896 - DNA, 22 bp, synthetic construct
  misc_feature 1..22: note = chemically synthesized
  source 1..22: mol_type = other DNA
ttgacataacgttcattcagga

SEQ ID NO: 39897 - DNA, 22 bp, synthetic construct
  misc_feature 1..22: note = chemically synthesized
  source 1..22: mol_type = other DNA
gacataacgttcattcaggagc

SEQ ID NO: 39898 - DNA, 22 bp, synthetic construct
  misc_feature 1..22: note = chemically synthesized
  source 1..22: mol_type = other DNA
acataacgttcattcaggagca

SEQ ID NO: 39899 - DNA, 22 bp, synthetic construct
  misc_feature 1..22: note = chemically synthesized
  source 1..22: mol_type = other DNA
attcaggagcatgttgtttaat

SEQ ID NO: 39900 - DNA, 22 bp, synthetic construct
  misc_feature 1..22: note = chemically synthesized
  source 1..22: mol_type = other DNA
aggagcatgttgtttaatttcc

SEQ ID NO: 39901 - DNA, 22 bp, synthetic construct
  misc_feature 1..22: note = chemically synthesized
  source 1..22: mol_type = other DNA
tttaatttccatgtatttgtat

SEQ ID NO: 39902 - DNA, 22 bp, synthetic construct
  misc_feature 1..22: note = chemically synthesized
  source 1..22: mol_type = other DNA
aatttccatgtatttgtatagg

SEQ ID NO: 39903 - DNA, 22 bp, synthetic construct
  misc_feature 1..22: note = chemically synthesized
  source 1..22: mol_type = other DNA
atttccatgtatttgtataggt

SEQ ID NO: 39904 - DNA, 22 bp, synthetic construct
  misc_feature 1..22: note = chemically synthesized
  source 1..22: mol_type = other DNA
ccatgtatttgtataggtttta

SEQ ID NO: 39905 - DNA, 22 bp, synthetic construct
  misc_feature 1..22: note = chemically synthesized
  source 1..22: mol_type = other DNA
catgtatttgtataggttttaa

SEQ ID NO: 39906 - DNA, 22 bp, synthetic construct
  misc_feature 1..22: note = chemically synthesized
  source 1..22: mol_type = other DNA
gtataggttttaaagtttttct

SEQ ID NO: 39907 - DNA, 22 bp, synthetic construct
  misc_feature 1..22: note = chemically synthesized
  source 1..22: mol_type = other DNA
tataggttttaaagtttttctt

SEQ ID NO: 39908 - DNA, 22 bp, synthetic construct
  misc_feature 1..22: note = chemically synthesized
  source 1..22: mol_type = other DNA
taaagtttttcttgttattgat

SEQ ID NO: 39909 - DNA, 22 bp, synthetic construct
  misc_feature 1..22: note = chemically synthesized
  source 1..22: mol_type = other DNA
aaagtttttcttgttattgatt

SEQ ID NO: 39910 - DNA, 22 bp, synthetic construct
  misc_feature 1..22: note = chemically synthesized
  source 1..22: mol_type = other DNA
aagtttttcttgttattgattt

SEQ ID NO: 39911 - DNA, 22 bp, synthetic construct
  misc_feature 1..22: note = chemically synthesized
  source 1..22: mol_type = other DNA
ttcttgttattgatttctagtt

SEQ ID NO: 39912 - DNA, 22 bp, synthetic construct
  misc_feature 1..22: note = chemically synthesized
  source 1..22: mol_type = other DNA
tcttgttattgatttctagttt

SEQ ID NO: 39913 - DNA, 22 bp, synthetic construct
  misc_feature 1..22: note = chemically synthesized
  source 1..22: mol_type = other DNA
cttgttattgatttctagtttt

SEQ ID NO: 39914 - DNA, 22 bp, synthetic construct
  misc_feature 1..22: note = chemically synthesized
  source 1..22: mol_type = other DNA
ttgttattgatttctagtttta

SEQ ID NO: 39915 - DNA, 22 bp, synthetic construct
  misc_feature 1..22: note = chemically synthesized
  source 1..22: mol_type = other DNA
gttattgatttctagttttatt

SEQ ID NO: 39916 - DNA, 22 bp, synthetic construct
  misc_feature 1..22: note = chemically synthesized
  source 1..22: mol_type = other DNA
ttattgatttctagttttattc

SEQ ID NO: 39917 - DNA, 22 bp, synthetic construct
  misc_feature 1..22: note = chemically synthesized
  source 1..22: mol_type = other DNA
ttgatttctagttttattccat

SEQ ID NO: 39918 - DNA, 22 bp, synthetic construct
  misc_feature 1..22: note = chemically synthesized
  source 1..22: mol_type = other DNA
atttctagttttattccattgt

SEQ ID NO: 39919 - DNA, 22 bp, synthetic construct
  misc_feature 1..22: note = chemically synthesized
  source 1..22: mol_type = other DNA
ctagttttattccattgtggtc

SEQ ID NO: 39920 - DNA, 22 bp, synthetic construct
  misc_feature 1..22: note = chemically synthesized
  source 1..22: mol_type = other DNA
tagttttattccattgtggtct

SEQ ID NO: 39921 - DNA, 22 bp, synthetic construct
  misc_feature 1..22: note = chemically synthesized
  source 1..22: mol_type = other DNA
gttttattccattgtggtctga

SEQ ID NO: 39922 - DNA, 22 bp, synthetic construct
  misc_feature 1..22: note = chemically synthesized
  source 1..22: mol_type = other DNA
tattccattgtggtctgagaag

SEQ ID NO: 39923 - DNA, 22 bp, synthetic construct
  misc_feature 1..22: note = chemically synthesized
  source 1..22: mol_type = other DNA
attccattgtggtctgagaaga

SEQ ID NO: 39924 - DNA, 22 bp, synthetic construct
  misc_feature 1..22: note = chemically synthesized
  source 1..22: mol_type = other DNA
ttccattgtggtctgagaagat

SEQ ID NO: 39925 - DNA, 22 bp, synthetic construct
  misc_feature 1..22: note = chemically synthesized
  source 1..22: mol_type = other DNA
cattgtggtctgagaagatgct

SEQ ID NO: 39926 - DNA, 22 bp, synthetic construct
  misc_feature 1..22: note = chemically synthesized
  source 1..22: mol_type = other DNA
tggtctgagaagatgcttaata

SEQ ID NO: 39927 - DNA, 22 bp, synthetic construct
  misc_feature 1..22: note = chemically synthesized
  source 1..22: mol_type = other DNA
agaagatgcttaatatgatttc

SEQ ID NO: 39928 - DNA, 22 bp, synthetic construct
  misc_feature 1..22: note = chemically synthesized
  source 1..22: mol_type = other DNA
aatatgatttcaaatatttcaa

SEQ ID NO: 39929 - DNA, 22 bp, synthetic construct
  misc_feature 1..22: note = chemically synthesized
  source 1..22: mol_type = other DNA
atatgatttcaaatatttcaaa

SEQ ID NO: 39930 - DNA, 22 bp, synthetic construct
  misc_feature 1..22: note = chemically synthesized
  source 1..22: mol_type = other DNA
caaatatttcaaattagttgag

SEQ ID NO: 39931 - DNA, 22 bp, synthetic construct
  misc_feature 1..22: note = chemically synthesized
  source 1..22: mol_type = other DNA
aaatatttcaaattagttgaga

SEQ ID NO: 39932 - DNA, 22 bp, synthetic construct
  misc_feature 1..22: note = chemically synthesized
  source 1..22: mol_type = other DNA
caaattagttgagacttctttt

SEQ ID NO: 39933 - DNA, 22 bp, synthetic construct
  misc_feature 1..22: note = chemically synthesized
  source 1..22: mol_type = other DNA
aaattagttgagacttcttttg

SEQ ID NO: 39934 - DNA, 22 bp, synthetic construct
  misc_feature 1..22: note = chemically synthesized
  source 1..22: mol_type = other DNA
gttgagacttcttttgtgttct

SEQ ID NO: 39935 - DNA, 22 bp, synthetic construct
  misc_feature 1..22: note = chemically synthesized
  source 1..22: mol_type = other DNA
agacttcttttgtgttctaaca

SEQ ID NO: 39936 - DNA, 22 bp, synthetic construct
  misc_feature 1..22: note = chemically synthesized
  source 1..22: mol_type = other DNA
cttttgtgttctaacatatggt

SEQ ID NO: 39937 - DNA, 22 bp, synthetic construct
  misc_feature 1..22: note = chemically synthesized
  source 1..22: mol_type = other DNA
ttttgtgttctaacatatggtg

SEQ ID NO: 39938 - DNA, 22 bp, synthetic construct
  misc_feature 1..22: note = chemically synthesized
  source 1..22: mol_type = other DNA
ttgtgttctaacatatggtgta

SEQ ID NO: 39939 - DNA, 22 bp, synthetic construct
  misc_feature 1..22: note = chemically synthesized
  source 1..22: mol_type = other DNA
tgtgttctaacatatggtgtat

SEQ ID NO: 39940 - DNA, 22 bp, synthetic construct
  misc_feature 1..22: note = chemically synthesized
  source 1..22: mol_type = other DNA
gtgttctaacatatggtgtatc

SEQ ID NO: 39941 - DNA, 22 bp, synthetic construct
  misc_feature 1..22: note = chemically synthesized
  source 1..22: mol_type = other DNA
tgttctaacatatggtgtatcc

SEQ ID NO: 39942 - DNA, 22 bp, synthetic construct
  misc_feature 1..22: note = chemically synthesized
  source 1..22: mol_type = other DNA
taacatatggtgtatcctgggg

SEQ ID NO: 39943 - DNA, 22 bp, synthetic construct
  misc_feature 1..22: note = chemically synthesized
  source 1..22: mol_type = other DNA
acatatggtgtatcctggggaa

SEQ ID NO: 39944 - DNA, 22 bp, synthetic construct
  misc_feature 1..22: note = chemically synthesized
  source 1..22: mol_type = other DNA
gggaatgcgtcatgtgctgatg

SEQ ID NO: 39945 - DNA, 22 bp, synthetic construct
  misc_feature 1..22: note = chemically synthesized
  source 1..22: mol_type = other DNA
atgagataaatatattctgtag

SEQ ID NO: 39946 - DNA, 22 bp, synthetic construct
  misc_feature 1..22: note = chemically synthesized
  source 1..22: mol_type = other DNA
tgtagctgttggatgaaatatt

SEQ ID NO: 39947 - DNA, 22 bp, synthetic construct
  misc_feature 1..22: note = chemically synthesized
  source 1..22: mol_type = other DNA
tagctgttggatgaaatattgt

SEQ ID NO: 39948 - DNA, 22 bp, synthetic construct
  misc_feature 1..22: note = chemically synthesized
  source 1..22: mol_type = other DNA
ttggatgaaatattgtgtaaat

SEQ ID NO: 39949 - DNA, 22 bp, synthetic construct
  misc_feature 1..22: note = chemically synthesized
  source 1..22: mol_type = other DNA
gatgaaatattgtgtaaatgtt

SEQ ID NO: 39950 - DNA, 22 bp, synthetic construct
  misc_feature 1..22: note = chemically synthesized
  source 1..22: mol_type = other DNA
tgtaaatgttagatccatttgg

SEQ ID NO: 39951 - DNA, 22 bp, synthetic construct
  misc_feature 1..22: note = chemically synthesized
  source 1..22: mol_type = other DNA
gatccatttggtctaaagtcaa

SEQ ID NO: 39952 - DNA, 22 bp, synthetic construct
  misc_feature 1..22: note = chemically synthesized
  source 1..22: mol_type = other DNA
ggtctaaagtcaagtttaaatc

SEQ ID NO: 39953 - DNA, 22 bp, synthetic construct
  misc_feature 1..22: note = chemically synthesized
  source 1..22: mol_type = other DNA
gtctaaagtcaagtttaaatcc

SEQ ID NO: 39954 - DNA, 22 bp, synthetic construct
  misc_feature 1..22: note = chemically synthesized
  source 1..22: mol_type = other DNA
aagtcaagtttaaatccaatgt

SEQ ID NO: 39955 - DNA, 22 bp, synthetic construct
  misc_feature 1..22: note = chemically synthesized
  source 1..22: mol_type = other DNA
aaatccaatgtttctttgttaa

SEQ ID NO: 39956 - DNA, 22 bp, synthetic construct
  misc_feature 1..22: note = chemically synthesized
  source 1..22: mol_type = other DNA
aatccaatgtttctttgttaat

SEQ ID NO: 39957 - DNA, 22 bp, synthetic construct
  misc_feature 1..22: note = chemically synthesized
  source 1..22: mol_type = other DNA
ctttgttaattttctgtctaga

SEQ ID NO: 39958 - DNA, 22 bp, synthetic construct
  misc_feature 1..22: note = chemically synthesized
  source 1..22: mol_type = other DNA
tttgttaattttctgtctagat

SEQ ID NO: 39959 - DNA, 22 bp, synthetic construct
  misc_feature 1..22: note = chemically synthesized
  source 1..22: mol_type = other DNA
tgttaattttctgtctagatga

SEQ ID NO: 39960 - DNA, 22 bp, synthetic construct
  misc_feature 1..22: note = chemically synthesized
  source 1..22: mol_type = other DNA
gttaattttctgtctagatgat

SEQ ID NO: 39961 - DNA, 22 bp, synthetic construct
  misc_feature 1..22: note = chemically synthesized
  source 1..22: mol_type = other DNA
ttaattttctgtctagatgatc

SEQ ID NO: 39962 - DNA, 22 bp, synthetic construct
  misc_feature 1..22: note = chemically synthesized
  source 1..22: mol_type = other DNA
attttctgtctagatgatctat

SEQ ID NO: 39963 - DNA, 22 bp, synthetic construct
  misc_feature 1..22: note = chemically synthesized
  source 1..22: mol_type = other DNA
tctgtctagatgatctatctga

SEQ ID NO: 39964 - DNA, 22 bp, synthetic construct
  misc_feature 1..22: note = chemically synthesized
  source 1..22: mol_type = other DNA
ctgtctagatgatctatctgat

SEQ ID NO: 39965 - DNA, 22 bp, synthetic construct
  misc_feature 1..22: note = chemically synthesized
  source 1..22: mol_type = other DNA
tgtctagatgatctatctgatg

SEQ ID NO: 39966 - DNA, 22 bp, synthetic construct
  misc_feature 1..22: note = chemically synthesized
  source 1..22: mol_type = other DNA
tctagatgatctatctgatgct

SEQ ID NO: 39967 - DNA, 22 bp, synthetic construct
  misc_feature 1..22: note = chemically synthesized
  source 1..22: mol_type = other DNA
gatgatctatctgatgctgaga

SEQ ID NO: 39968 - DNA, 22 bp, synthetic construct
  misc_feature 1..22: note = chemically synthesized
  source 1..22: mol_type = other DNA
tctgatgctgagattagaatgt

SEQ ID NO: 39969 - DNA, 22 bp, synthetic construct
  misc_feature 1..22: note = chemically synthesized
  source 1..22: mol_type = other DNA
atgctgagattagaatgttgaa

SEQ ID NO: 39970 - DNA, 22 bp, synthetic construct
  misc_feature 1..22: note = chemically synthesized
  source 1..22: mol_type = other DNA
agattagaatgttgaaatcccc

SEQ ID NO: 39971 - DNA, 22 bp, synthetic construct
  misc_feature 1..22: note = chemically synthesized
  source 1..22: mol_type = other DNA
gaatgttgaaatccccaactat

SEQ ID NO: 39972 - DNA, 22 bp, synthetic construct
  misc_feature 1..22: note = chemically synthesized
  source 1..22: mol_type = other DNA
aaatccccaactattattgtat

SEQ ID NO: 39973 - DNA, 22 bp, synthetic construct
  misc_feature 1..22: note = chemically synthesized
  source 1..22: mol_type = other DNA
ttattgtattggattctatttc

SEQ ID NO: 39974 - DNA, 22 bp, synthetic construct
  misc_feature 1..22: note = chemically synthesized
  source 1..22: mol_type = other DNA
ttgtattggattctatttcacc

SEQ ID NO: 39975 - DNA, 22 bp, synthetic construct
  misc_feature 1..22: note = chemically synthesized
  source 1..22: mol_type = other DNA
tattggattctatttcaccctt

SEQ ID NO: 39976 - DNA, 22 bp, synthetic construct
  misc_feature 1..22: note = chemically synthesized
  source 1..22: mol_type = other DNA
gattctatttcaccctttatat

SEQ ID NO: 39977 - DNA, 22 bp, synthetic construct
  misc_feature 1..22: note = chemically synthesized
  source 1..22: mol_type = other DNA
tatttcaccctttatatctaat

SEQ ID NO: 39978 - DNA, 22 bp, synthetic construct
  misc_feature 1..22: note = chemically synthesized
  source 1..22: mol_type = other DNA
tttcaccctttatatctaataa

SEQ ID NO: 39979 - DNA, 22 bp, synthetic construct
  misc_feature 1..22: note = chemically synthesized
  source 1..22: mol_type = other DNA
caccctttatatctaataacat

SEQ ID NO: 39980 - DNA, 22 bp, synthetic construct
  misc_feature 1..22: note = chemically synthesized
  source 1..22: mol_type = other DNA
accctttatatctaataacatt

SEQ ID NO: 39981 - DNA, 22 bp, synthetic construct
  misc_feature 1..22: note = chemically synthesized
  source 1..22: mol_type = other DNA
tatatctaataacatttgcttt

SEQ ID NO: 39982 - DNA, 22 bp, synthetic construct
  misc_feature 1..22: note = chemically synthesized
  source 1..22: mol_type = other DNA
atatctaataacatttgcttta

SEQ ID NO: 39983 - DNA, 22 bp, synthetic construct
  misc_feature 1..22: note = chemically synthesized
  source 1..22: mol_type = other DNA
tatctaataacatttgctttac

SEQ ID NO: 39984 - DNA, 22 bp, synthetic construct
  misc_feature 1..22: note = chemically synthesized
  source 1..22: mol_type = other DNA
ataacatttgctttacatatct

SEQ ID NO: 39985 - DNA, 22 bp, synthetic construct
  misc_feature 1..22: note = chemically synthesized
  source 1..22: mol_type = other DNA
gctttacatatctggatgctct

SEQ ID NO: 39986 - DNA, 22 bp, synthetic construct
  misc_feature 1..22: note = chemically synthesized
  source 1..22: mol_type = other DNA
ctttacatatctggatgctctg

SEQ ID NO: 39987 - DNA, 22 bp, synthetic construct
  misc_feature 1..22: note = chemically synthesized
  source 1..22: mol_type = other DNA
tacatatctggatgctctggtg

SEQ ID NO: 39988 - DNA, 22 bp, synthetic construct
  misc_feature 1..22: note = chemically synthesized
  source 1..22: mol_type = other DNA
acatatctggatgctctggtgt

SEQ ID NO: 39989 - DNA, 22 bp, synthetic construct
  misc_feature 1..22: note = chemically synthesized
  source 1..22: mol_type = other DNA
catatctggatgctctggtgtt

SEQ ID NO: 39990 - DNA, 22 bp, synthetic construct
  misc_feature 1..22: note = chemically synthesized
  source 1..22: mol_type = other DNA
gatgctctggtgttgagtgtga

SEQ ID NO: 39991 - DNA, 22 bp, synthetic construct
  misc_feature 1..22: note = chemically synthesized
  source 1..22: mol_type = other DNA
tggtgttgagtgtgaatgttta

SEQ ID NO: 39992 - DNA, 22 bp, synthetic construct
  misc_feature 1..22: note = chemically synthesized
  source 1..22: mol_type = other DNA
gtgttgagtgtgaatgtttaga

SEQ ID NO: 39993 - DNA, 22 bp, synthetic construct
  misc_feature 1..22: note = chemically synthesized
  source 1..22: mol_type = other DNA
agtgtgaatgtttagaattgtt

SEQ ID NO: 39994 - DNA, 22 bp, synthetic construct
  misc_feature 1..22: note = chemically synthesized
  source 1..22: mol_type = other DNA
agaattgttatatactcttgct

SEQ ID NO: 39995 - DNA, 22 bp, synthetic construct
  misc_feature 1..22: note = chemically synthesized
  source 1..22: mol_type = other DNA
gaattgttatatactcttgctg

SEQ ID NO: 39996 - DNA, 22 bp, synthetic construct
  misc_feature 1..22: note = chemically synthesized
  source 1..22: mol_type = other DNA
ttatatactcttgctgaattgt

SEQ ID NO: 39997 - DNA, 22 bp, synthetic construct
  misc_feature 1..22: note = chemically synthesized
  source 1..22: mol_type = other DNA
tatactcttgctgaattgttcc

SEQ ID NO: 39998 - DNA, 22 bp, synthetic construct
  misc_feature 1..22: note = chemically synthesized
  source 1..22: mol_type = other DNA
ttgctgaattgttccttttatc

SEQ ID NO: 39999 - DNA, 22 bp, synthetic construct
  misc_feature 1..22: note = chemically synthesized
  source 1..22: mol_type = other DNA
gctgaattgttccttttatcat

SEQ ID NO: 40000 - DNA, 22 bp, synthetic construct
  misc_feature 1..22: note = chemically synthesized
  source 1..22: mol_type = other DNA
ctgaattgttccttttatcatt

SEQ ID NO: 40001 - DNA, 22 bp, synthetic construct
  misc_feature 1..22: note = chemically synthesized
  source 1..22: mol_type = other DNA
aattgttccttttatcattatg

SEQ ID NO: 40002 - DNA, 22 bp, synthetic construct
  misc_feature 1..22: note = chemically synthesized
  source 1..22: mol_type = other DNA
ttccttttatcattatgtaatg

SEQ ID NO: 40003 - DNA, 22 bp, synthetic construct
  misc_feature 1..22: note = chemically synthesized
  source 1..22: mol_type = other DNA
cttttatcattatgtaatgact

SEQ ID NO: 40004 - DNA, 22 bp, synthetic construct
  misc_feature 1..22: note = chemically synthesized
  source 1..22: mol_type = other DNA
ttatcattatgtaatgactttt

SEQ ID NO: 40005 - DNA, 22 bp, synthetic construct
  misc_feature 1..22: note = chemically synthesized
  source 1..22: mol_type = other DNA
tatcattatgtaatgacttttg

SEQ ID NO: 40006 - DNA, 22 bp, synthetic construct
  misc_feature 1..22: note = chemically synthesized
  source 1..22: mol_type = other DNA
atcattatgtaatgacttttgt

SEQ ID NO: 40007 - DNA, 22 bp, synthetic construct
  misc_feature 1..22: note = chemically synthesized
  source 1..22: mol_type = other DNA
tcattatgtaatgacttttgtc

SEQ ID NO: 40008 - DNA, 22 bp, synthetic construct
  misc_feature 1..22: note = chemically synthesized
  source 1..22: mol_type = other DNA
tgtaatgacttttgtctcttag

SEQ ID NO: 40009 - DNA, 22 bp, synthetic construct
  misc_feature 1..22: note = chemically synthesized
  source 1..22: mol_type = other DNA
ttgtctcttagtgttttttatt

SEQ ID NO: 40010 - DNA, 22 bp, synthetic construct
  misc_feature 1..22: note = chemically synthesized
  source 1..22: mol_type = other DNA
tgtctcttagtgttttttattt

SEQ ID NO: 40011 - DNA, 22 bp, synthetic construct
  misc_feature 1..22: note = chemically synthesized
  source 1..22: mol_type = other DNA
gtctcttagtgttttttattta

SEQ ID NO: 40012 - DNA, 22 bp, synthetic construct
  misc_feature 1..22: note = chemically synthesized
  source 1..22: mol_type = other DNA
tctcttagtgttttttatttaa

SEQ ID NO: 40013 - DNA, 22 bp, synthetic construct
  misc_feature 1..22: note = chemically synthesized
  source 1..22: mol_type = other DNA
ttagtgttttttatttaaagtc

SEQ ID NO: 40014 - DNA, 22 bp, synthetic construct
  misc_feature 1..22: note = chemically synthesized
  source 1..22: mol_type = other DNA
agtgttttttatttaaagtcaa

SEQ ID NO: 40015 - DNA, 22 bp, synthetic construct
  misc_feature 1..22: note = chemically synthesized
  source 1..22: mol_type = other DNA
gtgttttttatttaaagtcaat

SEQ ID NO: 40016 - DNA, 22 bp, synthetic construct
  misc_feature 1..22: note = chemically synthesized
  source 1..22: mol_type = other DNA
tttatttaaagtcaattttatc

SEQ ID NO: 40017 - DNA, 22 bp, synthetic construct
  misc_feature 1..22: note = chemically synthesized
  source 1..22: mol_type = other DNA
ttatttaaagtcaattttatct

SEQ ID NO: 40018 - DNA, 22 bp, synthetic construct
  misc_feature 1..22: note = chemically synthesized
  source 1..22: mol_type = other DNA
tatttaaagtcaattttatctg

SEQ ID NO: 40019 - DNA, 22 bp, synthetic construct
  misc_feature 1..22: note = chemically synthesized
  source 1..22: mol_type = other DNA
atttaaagtcaattttatctgt

SEQ ID NO: 40020 - DNA, 22 bp, synthetic construct
  misc_feature 1..22: note = chemically synthesized
  source 1..22: mol_type = other DNA
tttaaagtcaattttatctgtt

SEQ ID NO: 40021 - DNA, 22 bp, synthetic construct
  misc_feature 1..22: note = chemically synthesized
  source 1..22: mol_type = other DNA
aaagtcaattttatctgttata

SEQ ID NO: 40022 - DNA, 22 bp, synthetic construct
  misc_feature 1..22: note = chemically synthesized
  source 1..22: mol_type = other DNA
aagtcaattttatctgttatag

SEQ ID NO: 40023 - DNA, 22 bp, synthetic construct
  misc_feature 1..22: note = chemically synthesized
  source 1..22: mol_type = other DNA
tatctgttataggtataactac

SEQ ID NO: 40024 - DNA, 22 bp, synthetic construct
  misc_feature 1..22: note = chemically synthesized
  source 1..22: mol_type = other DNA
atctgttataggtataactact

SEQ ID NO: 40025 - DNA, 22 bp, synthetic construct
  misc_feature 1..22: note = chemically synthesized
  source 1..22: mol_type = other DNA
tctgttataggtataactactt

SEQ ID NO: 40026 - DNA, 22 bp, synthetic construct
  misc_feature 1..22: note = chemically synthesized
  source 1..22: mol_type = other DNA
ttataggtataactacttttgc

SEQ ID NO: 40027 - DNA, 22 bp, synthetic construct
  misc_feature 1..22: note = chemically synthesized
  source 1..22: mol_type = other DNA
taggtataactacttttgctca

SEQ ID NO: 40028 - DNA, 22 bp, synthetic construct
  misc_feature 1..22: note = chemically synthesized
  source 1..22: mol_type = other DNA
cttttgctcatttttggtttct

SEQ ID NO: 40029 - DNA, 22 bp, synthetic construct
  misc_feature 1..22: note = chemically synthesized
  source 1..22: mol_type = other DNA
ttgctcatttttggtttctctt

SEQ ID NO: 40030 - DNA, 22 bp, synthetic construct
  misc_feature 1..22: note = chemically synthesized
  source 1..22: mol_type = other DNA
tgctcatttttggtttctcttt

SEQ ID NO: 40031 - DNA, 22 bp, synthetic construct
  misc_feature 1..22: note = chemically synthesized
  source 1..22: mol_type = other DNA
gctcatttttggtttctctttg

SEQ ID NO: 40032 - DNA, 22 bp, synthetic construct
  misc_feature 1..22: note = chemically synthesized
  source 1..22: mol_type = other DNA
ctcatttttggtttctctttgt

SEQ ID NO: 40033 - DNA, 22 bp, synthetic construct
  misc_feature 1..22: note = chemically synthesized
  source 1..22: mol_type = other DNA
atttttggtttctctttgtatg

SEQ ID NO: 40034 - DNA, 22 bp, synthetic construct
  misc_feature 1..22: note = chemically synthesized
  source 1..22: mol_type = other DNA
ttggtttctctttgtatggaag

SEQ ID NO: 40035 - DNA, 22 bp, synthetic construct
  misc_feature 1..22: note = chemically synthesized
  source 1..22: mol_type = other DNA
tggtttctctttgtatggaaga

SEQ ID NO: 40036 - DNA, 22 bp, synthetic construct
  misc_feature 1..22: note = chemically synthesized
  source 1..22: mol_type = other DNA
ggtttctctttgtatggaagat

SEQ ID NO: 40037 - DNA, 22 bp, synthetic construct
  misc_feature 1..22: note = chemically synthesized
  source 1..22: mol_type = other DNA
gtttctctttgtatggaagatc

SEQ ID NO: 40038 - DNA, 22 bp, synthetic construct
  misc_feature 1..22: note = chemically synthesized
  source 1..22: mol_type = other DNA
ctctttgtatggaagatctttc

SEQ ID NO: 40039 - DNA, 22 bp, synthetic construct
  misc_feature 1..22: note = chemically synthesized
  source 1..22: mol_type = other DNA
tctttgtatggaagatctttca

SEQ ID NO: 40040 - DNA, 22 bp, synthetic construct
  misc_feature 1..22: note = chemically synthesized
  source 1..22: mol_type = other DNA
tttgtatggaagatctttcatc

SEQ ID NO: 40041 - DNA, 22 bp, synthetic construct
  misc_feature 1..22: note = chemically synthesized
  source 1..22: mol_type = other DNA
tgtatggaagatctttcatctt

SEQ ID NO: 40042 - DNA, 22 bp, synthetic construct
  misc_feature 1..22: note = chemically synthesized
  source 1..22: mol_type = other DNA
gtatggaagatctttcatcttt

SEQ ID NO: 40043 - DNA, 22 bp, synthetic construct
  misc_feature 1..22: note = chemically synthesized
  source 1..22: mol_type = other DNA
tatggaagatctttcatctttt

SEQ ID NO: 40044 - DNA, 22 bp, synthetic construct
  misc_feature 1..22: note = chemically synthesized
  source 1..22: mol_type = other DNA
tcatctttttactttcagtcta

SEQ ID NO: 40045 - DNA, 22 bp, synthetic construct
  misc_feature 1..22: note = chemically synthesized
  source 1..22: mol_type = other DNA
catctttttactttcagtctat

SEQ ID NO: 40046 - DNA, 22 bp, synthetic construct
  misc_feature 1..22: note = chemically synthesized
  source 1..22: mol_type = other DNA
atctttttactttcagtctata

SEQ ID NO: 40047 - DNA, 22 bp, synthetic construct
  misc_feature 1..22: note = chemically synthesized
  source 1..22: mol_type = other DNA
tttactttcagtctatatttat

SEQ ID NO: 40048 - DNA, 22 bp, synthetic construct
  misc_feature 1..22: note = chemically synthesized
  source 1..22: mol_type = other DNA
ttactttcagtctatatttatc

SEQ ID NO: 40049 - DNA, 22 bp, synthetic construct
  misc_feature 1..22: note = chemically synthesized
  source 1..22: mol_type = other DNA
tactttcagtctatatttatct

SEQ ID NO: 40050 - DNA, 22 bp, synthetic construct
  misc_feature 1..22: note = chemically synthesized
  source 1..22: mol_type = other DNA
actttcagtctatatttatctt

SEQ ID NO: 40051 - DNA, 22 bp, synthetic construct
  misc_feature 1..22: note = chemically synthesized
  source 1..22: mol_type = other DNA
ctttcagtctatatttatcttt

SEQ ID NO: 40052 - DNA, 22 bp, synthetic construct
  misc_feature 1..22: note = chemically synthesized
  source 1..22: mol_type = other DNA
tcagtctatatttatctttaca

SEQ ID NO: 40053 - DNA, 22 bp, synthetic construct
  misc_feature 1..22: note = chemically synthesized
  source 1..22: mol_type = other DNA
cagtctatatttatctttacaa

SEQ ID NO: 40054 - DNA, 22 bp, synthetic construct
  misc_feature 1..22: note = chemically synthesized
  source 1..22: mol_type = other DNA
agtctatatttatctttacaag

SEQ ID NO: 40055 - DNA, 22 bp, synthetic construct
  misc_feature 1..22: note = chemically synthesized
  source 1..22: mol_type = other DNA
tatttatctttacaagtgagat

SEQ ID NO: 40056 - DNA, 22 bp, synthetic construct
  misc_feature 1..22: note = chemically synthesized
  source 1..22: mol_type = other DNA
atctttacaagtgagataagtt

SEQ ID NO: 40057 - DNA, 22 bp, synthetic construct
  misc_feature 1..22: note = chemically synthesized
  source 1..22: mol_type = other DNA
tctttacaagtgagataagttt

SEQ ID NO: 40058 - DNA, 22 bp, synthetic construct
  misc_feature 1..22: note = chemically synthesized
  source 1..22: mol_type = other DNA
tacaagtgagataagtttctta

SEQ ID NO: 40059 - DNA, 22 bp, synthetic construct
  misc_feature 1..22: note = chemically synthesized
  source 1..22: mol_type = other DNA
acaagtgagataagtttcttat

SEQ ID NO: 40060 - DNA, 22 bp, synthetic construct
  misc_feature 1..22: note = chemically synthesized
  source 1..22: mol_type = other DNA
caagtgagataagtttcttata

SEQ ID NO: 40061 - DNA, 22 bp, synthetic construct
  misc_feature 1..22: note = chemically synthesized
  source 1..22: mol_type = other DNA
cttataggcagcttacaactgg

SEQ ID NO: 40062 - DNA, 22 bp, synthetic construct
  misc_feature 1..22: note = chemically synthesized
  source 1..22: mol_type = other DNA
ttataggcagcttacaactggg

SEQ ID NO: 40063 - DNA, 22 bp, synthetic construct
  misc_feature 1..22: note = chemically synthesized
  source 1..22: mol_type = other DNA
ataggcagcttacaactgggtc

SEQ ID NO: 40064 - DNA, 22 bp, synthetic construct
  misc_feature 1..22: note = chemically synthesized
  source 1..22: mol_type = other DNA
taggcagcttacaactgggtca

SEQ ID NO: 40065 - DNA, 22 bp, synthetic construct
  misc_feature 1..22: note = chemically synthesized
  source 1..22: mol_type = other DNA
acaactgggtcatatttttgtt

SEQ ID NO: 40066 - DNA, 22 bp, synthetic construct
  misc_feature 1..22: note = chemically synthesized
  source 1..22: mol_type = other DNA
caactgggtcatatttttgttt

SEQ ID NO: 40067 - DNA, 22 bp, synthetic construct
  misc_feature 1..22: note = chemically synthesized
  source 1..22: mol_type = other DNA
ggtcatatttttgttttaaatc

SEQ ID NO: 40068 - DNA, 22 bp, synthetic construct
  misc_feature 1..22: note = chemically synthesized
  source 1..22: mol_type = other DNA
ttgttttaaatctatttagcca

SEQ ID NO: 40069 - DNA, 22 bp, synthetic construct
  misc_feature 1..22: note = chemically synthesized
  source 1..22: mol_type = other DNA
tgttttaaatctatttagccag

SEQ ID NO: 40070 - DNA, 22 bp, synthetic construct
  misc_feature 1..22: note = chemically synthesized
  source 1..22: mol_type = other DNA
gttttaaatctatttagccagt

SEQ ID NO: 40071 - DNA, 22 bp, synthetic construct
  misc_feature 1..22: note = chemically synthesized
  source 1..22: mol_type = other DNA
ttttaaatctatttagccagtc

SEQ ID NO: 40072 - DNA, 22 bp, synthetic construct
  misc_feature 1..22: note = chemically synthesized
  source 1..22: mol_type = other DNA
taaatctatttagccagtctat

SEQ ID NO: 40073 - DNA, 22 bp, synthetic construct
  misc_feature 1..22: note = chemically synthesized
  source 1..22: mol_type = other DNA
aaatctatttagccagtctata

SEQ ID NO: 40074 - DNA, 22 bp, synthetic construct
  misc_feature 1..22: note = chemically synthesized
  source 1..22: mol_type = other DNA
aatctatttagccagtctatat

SEQ ID NO: 40075 - DNA, 22 bp, synthetic construct
  misc_feature 1..22: note = chemically synthesized
  source 1..22: mol_type = other DNA
tttagccagtctatatctttca

SEQ ID NO: 40076 - DNA, 22 bp, synthetic construct
  misc_feature 1..22: note = chemically synthesized
  source 1..22: mol_type = other DNA
agccagtctatatctttcaagt

SEQ ID NO: 40077 - DNA, 22 bp, synthetic construct
  misc_feature 1..22: note = chemically synthesized
  source 1..22: mol_type = other DNA
gccagtctatatctttcaagta

SEQ ID NO: 40078 - DNA, 22 bp, synthetic construct
  misc_feature 1..22: note = chemically synthesized
  source 1..22: mol_type = other DNA
tatctttcaagtaacaatttaa

SEQ ID NO: 40079 - DNA, 22 bp, synthetic construct
  misc_feature 1..22: note = chemically synthesized
  source 1..22: mol_type = other DNA
tcaagtaacaatttaatccatt

SEQ ID NO: 40080 - DNA, 22 bp, synthetic construct
  misc_feature 1..22: note = chemically synthesized
  source 1..22: mol_type = other DNA
caagtaacaatttaatccattt

SEQ ID NO: 40081 - DNA, 22 bp, synthetic construct
  misc_feature 1..22: note = chemically synthesized
  source 1..22: mol_type = other DNA
aagtaacaatttaatccattta

SEQ ID NO: 40082 - DNA, 22 bp, synthetic construct
  misc_feature 1..22: note = chemically synthesized
  source 1..22: mol_type = other DNA
aatccatttacatgcaaggcta

SEQ ID NO: 40083 - DNA, 22 bp, synthetic construct
  misc_feature 1..22: note = chemically synthesized
  source 1..22: mol_type = other DNA
atccatttacatgcaaggctat

SEQ ID NO: 40084 - DNA, 22 bp, synthetic construct
  misc_feature 1..22: note = chemically synthesized
  source 1..22: mol_type = other DNA
acatgcaaggctattattgaca

SEQ ID NO: 40085 - DNA, 22 bp, synthetic construct
  misc_feature 1..22: note = chemically synthesized
  source 1..22: mol_type = other DNA
catgcaaggctattattgacat

SEQ ID NO: 40086 - DNA, 22 bp, synthetic construct
  misc_feature 1..22: note = chemically synthesized
  source 1..22: mol_type = other DNA
ttattgacatgtgagagcttat

SEQ ID NO: 40087 - DNA, 22 bp, synthetic construct
  misc_feature 1..22: note = chemically synthesized
  source 1..22: mol_type = other DNA
ttgacatgtgagagcttattcc

SEQ ID NO: 40088 - DNA, 22 bp, synthetic construct
  misc_feature 1..22: note = chemically synthesized
  source 1..22: mol_type = other DNA
acatgtgagagcttattcctgc

SEQ ID NO: 40089 - DNA, 22 bp, synthetic construct
  misc_feature 1..22: note = chemically synthesized
  source 1..22: mol_type = other DNA
attcctgccattttgttaattg

SEQ ID NO: 40090 - DNA, 22 bp, synthetic construct
  misc_feature 1..22: note = chemically synthesized
  source 1..22: mol_type = other DNA
ttcctgccattttgttaattga

SEQ ID NO: 40091 - DNA, 22 bp, synthetic construct
  misc_feature 1..22: note = chemically synthesized
  source 1..22: mol_type = other DNA
ctgccattttgttaattgattc

SEQ ID NO: 40092 - DNA, 22 bp, synthetic construct
  misc_feature 1..22: note = chemically synthesized
  source 1..22: mol_type = other DNA
ccattttgttaattgattcctg

SEQ ID NO: 40093 - DNA, 22 bp, synthetic construct
  misc_feature 1..22: note = chemically synthesized
  source 1..22: mol_type = other DNA
tgttaattgattcctggttgtt

SEQ ID NO: 40094 - DNA, 22 bp, synthetic construct
  misc_feature 1..22: note = chemically synthesized
  source 1..22: mol_type = other DNA
gttaattgattcctggttgttt

SEQ ID NO: 40095 - DNA, 22 bp, synthetic construct
  misc_feature 1..22: note = chemically synthesized
  source 1..22: mol_type = other DNA
ttaattgattcctggttgtttt

SEQ ID NO: 40096 - DNA, 22 bp, synthetic construct
  misc_feature 1..22: note = chemically synthesized
  source 1..22: mol_type = other DNA
attgattcctggttgttttgtt

SEQ ID NO: 40097 - DNA, 22 bp, synthetic construct
  misc_feature 1..22: note = chemically synthesized
  source 1..22: mol_type = other DNA
attcctggttgttttgtttttt

SEQ ID NO: 40098 - DNA, 22 bp, synthetic construct
  misc_feature 1..22: note = chemically synthesized
  source 1..22: mol_type = other DNA
ctggttgttttgtttttttttt

SEQ ID NO: 40099 - DNA, 22 bp, synthetic construct
  misc_feature 1..22: note = chemically synthesized
  source 1..22: mol_type = other DNA
gttgttttgttttttttttagt

SEQ ID NO: 40100 - DNA, 22 bp, synthetic construct
  misc_feature 1..22: note = chemically synthesized
  source 1..22: mol_type = other DNA
ttttgttttttttttagtttgt

SEQ ID NO: 40101 - DNA, 22 bp, synthetic construct
  misc_feature 1..22: note = chemically synthesized
  source 1..22: mol_type = other DNA
tgttttttttttagtttgtttg

SEQ ID NO: 40102 - DNA, 22 bp, synthetic construct
  misc_feature 1..22: note = chemically synthesized
  source 1..22: mol_type = other DNA
gttttttttttagtttgtttgt

SEQ ID NO: 40103 - DNA, 22 bp, synthetic construct
  misc_feature 1..22: note = chemically synthesized
  source 1..22: mol_type = other DNA
ttttttttttagtttgtttgtt

SEQ ID NO: 40104 - DNA, 22 bp, synthetic construct
  misc_feature 1..22: note = chemically synthesized
  source 1..22: mol_type = other DNA
tttttttagtttgtttgttttg

SEQ ID NO: 40105 - DNA, 22 bp, synthetic construct
  misc_feature 1..22: note = chemically synthesized
  source 1..22: mol_type = other DNA
ttttttagtttgtttgttttgt

SEQ ID NO: 40106 - DNA, 22 bp, synthetic construct
  misc_feature 1..22: note = chemically synthesized
  source 1..22: mol_type = other DNA
tttttagtttgtttgttttgtg

SEQ ID NO: 40107 - DNA, 22 bp, synthetic construct
  misc_feature 1..22: note = chemically synthesized
  source 1..22: mol_type = other DNA
ttttagtttgtttgttttgtgt

SEQ ID NO: 40108 - DNA, 22 bp, synthetic construct
  misc_feature 1..22: note = chemically synthesized
  source 1..22: mol_type = other DNA
tttagtttgtttgttttgtgtt

SEQ ID NO: 40109 - DNA, 22 bp, synthetic construct
  misc_feature 1..22: note = chemically synthesized
  source 1..22: mol_type = other DNA
ttagtttgtttgttttgtgttt

SEQ ID NO: 40110 - DNA, 22 bp, synthetic construct
  misc_feature 1..22: note = chemically synthesized
  source 1..22: mol_type = other DNA
tagtttgtttgttttgtgtttt

SEQ ID NO: 40111 - DNA, 22 bp, synthetic construct
  misc_feature 1..22: note = chemically synthesized
  source 1..22: mol_type = other DNA
agtttgtttgttttgtgttttt

SEQ ID NO: 40112 - DNA, 22 bp, synthetic construct
  misc_feature 1..22: note = chemically synthesized
  source 1..22: mol_type = other DNA
gtttgtttgttttgtgtttttt

SEQ ID NO: 40113 - DNA, 22 bp, synthetic construct
  misc_feature 1..22: note = chemically synthesized
  source 1..22: mol_type = other DNA
gtttgttttgtgtttttttctt

SEQ ID NO: 40114 - DNA, 22 bp, synthetic construct
  misc_feature 1..22: note = chemically synthesized
  source 1..22: mol_type = other DNA
tttgttttgtgtttttttcttc

SEQ ID NO: 40115 - DNA, 22 bp, synthetic construct
  misc_feature 1..22: note = chemically synthesized
  source 1..22: mol_type = other DNA
gttttgtgtttttttcttcctt

SEQ ID NO: 40116 - DNA, 22 bp, synthetic construct
  misc_feature 1..22: note = chemically synthesized
  source 1..22: mol_type = other DNA
ttttgtgtttttttcttccttc

SEQ ID NO: 40117 - DNA, 22 bp, synthetic construct
  misc_feature 1..22: note = chemically synthesized
  source 1..22: mol_type = other DNA
tgtgtttttttcttccttcctt

SEQ ID NO: 40118 - DNA, 22 bp, synthetic construct
  misc_feature 1..22: note = chemically synthesized
  source 1..22: mol_type = other DNA
gtgtttttttcttccttccttc

SEQ ID NO: 40119 - DNA, 22 bp, synthetic construct
  misc_feature 1..22: note = chemically synthesized
  source 1..22: mol_type = other DNA
tgtttttttcttccttccttcc

SEQ ID NO: 40120 - DNA, 22 bp, synthetic construct
  misc_feature 1..22: note = chemically synthesized
  source 1..22: mol_type = other DNA
ttttcttccttccttccttttc

SEQ ID NO: 40121 - DNA, 22 bp, synthetic construct
  misc_feature 1..22: note = chemically synthesized
  source 1..22: mol_type = other DNA
tttcttccttccttccttttct

SEQ ID NO: 40122 - DNA, 22 bp, synthetic construct
  misc_feature 1..22: note = chemically synthesized
  source 1..22: mol_type = other DNA
ttcttccttccttccttttctt

SEQ ID NO: 40123 - DNA, 22 bp, synthetic construct
  misc_feature 1..22: note = chemically synthesized
  source 1..22: mol_type = other DNA
tcttccttccttccttttcttt

SEQ ID NO: 40124 - DNA, 22 bp, synthetic construct
  misc_feature 1..22: note = chemically synthesized
  source 1..22: mol_type = other DNA
cttccttccttccttttctttc

SEQ ID NO: 40125 - DNA, 22 bp, synthetic construct
  misc_feature 1..22: note = chemically synthesized
  source 1..22: mol_type = other DNA
ttccttccttccttttctttct

SEQ ID NO: 40126 - DNA, 22 bp, synthetic construct
  misc_feature 1..22: note = chemically synthesized
  source 1..22: mol_type = other DNA
ccttccttccttttctttcttt

SEQ ID NO: 40127 - DNA, 22 bp, synthetic construct
  misc_feature 1..22: note = chemically synthesized
  source 1..22: mol_type = other DNA
cttccttccttttctttctttc

SEQ ID NO: 40128 - DNA, 22 bp, synthetic construct
  misc_feature 1..22: note = chemically synthesized
  source 1..22: mol_type = other DNA
ccttccttttctttctttcatt

SEQ ID NO: 40129 - DNA, 22 bp, synthetic construct
  misc_feature 1..22: note = chemically synthesized
  source 1..22: mol_type = other DNA
cttccttttctttctttcattc

SEQ ID NO: 40130 - DNA, 22 bp, synthetic construct
  misc_feature 1..22: note = chemically synthesized
  source 1..22: mol_type = other DNA
ccttttctttctttcattctct

SEQ ID NO: 40131 - DNA, 22 bp, synthetic construct
  misc_feature 1..22: note = chemically synthesized
  source 1..22: mol_type = other DNA
cttttctttctttcattctctc

SEQ ID NO: 40132 - DNA, 22 bp, synthetic construct
  misc_feature 1..22: note = chemically synthesized
  source 1..22: mol_type = other DNA
ttctttctttcattctctctct

SEQ ID NO: 40133 - DNA, 22 bp, synthetic construct
  misc_feature 1..22: note = chemically synthesized
  source 1..22: mol_type = other DNA
tctttctttcattctctctctc

SEQ ID NO: 40134 - DNA, 22 bp, synthetic construct
  misc_feature 1..22: note = chemically synthesized
  source 1..22: mol_type = other DNA
ctttctttcattctctctctct

SEQ ID NO: 40135 - DNA, 22 bp, synthetic construct
  misc_feature 1..22: note = chemically synthesized
  source 1..22: mol_type = other DNA
tttctttcattctctctctctc

SEQ ID NO: 40136 - DNA, 22 bp, synthetic construct
  misc_feature 1..22: note = chemically synthesized
  source 1..22: mol_type = other DNA
tctttcattctctctctctctc

SEQ ID NO: 40137 - DNA, 22 bp, synthetic construct
  misc_feature 1..22: note = chemically synthesized
  source 1..22: mol_type = other DNA
ctttcattctctctctctctct

SEQ ID NO: 40138 - DNA, 22 bp, synthetic construct
  misc_feature 1..22: note = chemically synthesized
  source 1..22: mol_type = other DNA
tttcattctctctctctctctc

SEQ ID NO: 40139 - DNA, 22 bp, synthetic construct
  misc_feature 1..22: note = chemically synthesized
  source 1..22: mol_type = other DNA
tcattctctctctctctctctt

SEQ ID NO: 40140 - DNA, 22 bp, synthetic construct
  misc_feature 1..22: note = chemically synthesized
  source 1..22: mol_type = other DNA
cattctctctctctctctcttt

SEQ ID NO: 40141 - DNA, 22 bp, synthetic construct
  misc_feature 1..22: note = chemically synthesized
  source 1..22: mol_type = other DNA
attctctctctctctctctttc

SEQ ID NO: 40142 - DNA, 22 bp, synthetic construct
  misc_feature 1..22: note = chemically synthesized
  source 1..22: mol_type = other DNA
tctctctctctctctttctttc

SEQ ID NO: 40143 - DNA, 22 bp, synthetic construct
  misc_feature 1..22: note = chemically synthesized
  source 1..22: mol_type = other DNA
tctctctctctctttctttctt

SEQ ID NO: 40144 - DNA, 22 bp, synthetic construct
  misc_feature 1..22: note = chemically synthesized
  source 1..22: mol_type = other DNA
tctctctctctttctttctttc

SEQ ID NO: 40145 - DNA, 22 bp, synthetic construct
  misc_feature 1..22: note = chemically synthesized
  source 1..22: mol_type = other DNA
tctctctctttctttctttctt

SEQ ID NO: 40146 - DNA, 22 bp, synthetic construct
  misc_feature 1..22: note = chemically synthesized
  source 1..22: mol_type = other DNA
tctctctttctttctttctttc

SEQ ID NO: 40147 - DNA, 22 bp, synthetic construct
  misc_feature 1..22: note = chemically synthesized
  source 1..22: mol_type = other DNA
tctctttctttctttctttctt

SEQ ID NO: 40148 - DNA, 22 bp, synthetic construct
  misc_feature 1..22: note = chemically synthesized
  source 1..22: mol_type = other DNA
tctttctttctttctttctttc

SEQ ID NO: 40149 - DNA, 22 bp, synthetic construct
  misc_feature 1..22: note = chemically synthesized
  source 1..22: mol_type = other DNA
tttctttctttctttctttctt

SEQ ID NO: 40150 - DNA, 22 bp, synthetic construct
  misc_feature 1..22: note = chemically synthesized
  source 1..22: mol_type = other DNA
tctttctttctttctttcttat

SEQ ID NO: 40151 - DNA, 22 bp, synthetic construct
  misc_feature 1..22: note = chemically synthesized
  source 1..22: mol_type = other DNA
ctttctttctttctttcttatt

SEQ ID NO: 40152 - DNA, 22 bp, synthetic construct
  misc_feature 1..22: note = chemically synthesized
  source 1..22: mol_type = other DNA
tttctttctttctttcttatta

SEQ ID NO: 40153 - DNA, 22 bp, synthetic construct
  misc_feature 1..22: note = chemically synthesized
  source 1..22: mol_type = other DNA
tctttctttctttcttattatt

SEQ ID NO: 40154 - DNA, 22 bp, synthetic construct
  misc_feature 1..22: note = chemically synthesized
  source 1..22: mol_type = other DNA
ctttctttctttcttattattt

SEQ ID NO: 40155 - DNA, 22 bp, synthetic construct
  misc_feature 1..22: note = chemically synthesized
  source 1..22: mol_type = other DNA
tttctttctttcttattattta

SEQ ID NO: 40156 - DNA, 22 bp, synthetic construct
  misc_feature 1..22: note = chemically synthesized
  source 1..22: mol_type = other DNA
tctttctttcttattatttatg

SEQ ID NO: 40157 - DNA, 22 bp, synthetic construct
  misc_feature 1..22: note = chemically synthesized
  source 1..22: mol_type = other DNA
ctttctttcttattatttatga

SEQ ID NO: 40158 - DNA, 22 bp, synthetic construct
  misc_feature 1..22: note = chemically synthesized
  source 1..22: mol_type = other DNA
tttctttcttattatttatgat

SEQ ID NO: 40159 - DNA, 22 bp, synthetic construct
  misc_feature 1..22: note = chemically synthesized
  source 1..22: mol_type = other DNA
tctttcttattatttatgattg

SEQ ID NO: 40160 - DNA, 22 bp, synthetic construct
  misc_feature 1..22: note = chemically synthesized
  source 1..22: mol_type = other DNA
ctttcttattatttatgattgt

SEQ ID NO: 40161 - DNA, 22 bp, synthetic construct
  misc_feature 1..22: note = chemically synthesized
  source 1..22: mol_type = other DNA
tttcttattatttatgattgtg

SEQ ID NO: 40162 - DNA, 22 bp, synthetic construct
  misc_feature 1..22: note = chemically synthesized
  source 1..22: mol_type = other DNA
tcttattatttatgattgtggt

SEQ ID NO: 40163 - DNA, 22 bp, synthetic construct
  misc_feature 1..22: note = chemically synthesized
  source 1..22: mol_type = other DNA
cttattatttatgattgtggtt

SEQ ID NO: 40164 - DNA, 22 bp, synthetic construct
  misc_feature 1..22: note = chemically synthesized
  source 1..22: mol_type = other DNA
ttattatttatgattgtggttt

SEQ ID NO: 40165 - DNA, 22 bp, synthetic construct
  misc_feature 1..22: note = chemically synthesized
  source 1..22: mol_type = other DNA
attatttatgattgtggtttgg

SEQ ID NO: 40166 - DNA, 22 bp, synthetic construct
  misc_feature 1..22: note = chemically synthesized
  source 1..22: mol_type = other DNA
ttatttatgattgtggtttggt

SEQ ID NO: 40167 - DNA, 22 bp, synthetic construct
  misc_feature 1..22: note = chemically synthesized
  source 1..22: mol_type = other DNA
tttatgattgtggtttggtgat

SEQ ID NO: 40168 - DNA, 22 bp, synthetic construct
  misc_feature 1..22: note = chemically synthesized
  source 1..22: mol_type = other DNA
atgattgtggtttggtgatttt

SEQ ID NO: 40169 - DNA, 22 bp, synthetic construct
  misc_feature 1..22: note = chemically synthesized
  source 1..22: mol_type = other DNA
tgattgtggtttggtgattttc

SEQ ID NO: 40170 - DNA, 22 bp, synthetic construct
  misc_feature 1..22: note = chemically synthesized
  source 1..22: mol_type = other DNA
tggtttggtgattttctgtagt

SEQ ID NO: 40171 - DNA, 22 bp, synthetic construct
  misc_feature 1..22: note = chemically synthesized
  source 1..22: mol_type = other DNA
ggtgattttctgtagtggtaac

SEQ ID NO: 40172 - DNA, 22 bp, synthetic construct
  misc_feature 1..22: note = chemically synthesized
  source 1..22: mol_type = other DNA
gtgattttctgtagtggtaacg

SEQ ID NO: 40173 - DNA, 22 bp, synthetic construct
  misc_feature 1..22: note = chemically synthesized
  source 1..22: mol_type = other DNA
tctgtagtggtaacgtttgagt

SEQ ID NO: 40174 - DNA, 22 bp, synthetic construct
  misc_feature 1..22: note = chemically synthesized
  source 1..22: mol_type = other DNA
ctgtagtggtaacgtttgagtt

SEQ ID NO: 40175 - DNA, 22 bp, synthetic construct
  misc_feature 1..22: note = chemically synthesized
  source 1..22: mol_type = other DNA
tgtagtggtaacgtttgagttc

SEQ ID NO: 40176 - DNA, 22 bp, synthetic construct
  misc_feature 1..22: note = chemically synthesized
  source 1..22: mol_type = other DNA
tagtggtaacgtttgagttctt

SEQ ID NO: 40177 - DNA, 22 bp, synthetic construct
  misc_feature 1..22: note = chemically synthesized
  source 1..22: mol_type = other DNA
gagttctttctcttctttattt

SEQ ID NO: 40178 - DNA, 22 bp, synthetic construct
  misc_feature 1..22: note = chemically synthesized
  source 1..22: mol_type = other DNA
agttctttctcttctttatttg

SEQ ID NO: 40179 - DNA, 22 bp, synthetic construct
  misc_feature 1..22: note = chemically synthesized
  source 1..22: mol_type = other DNA
tttctcttctttatttgtgttt

SEQ ID NO: 40180 - DNA, 22 bp, synthetic construct
  misc_feature 1..22: note = chemically synthesized
  source 1..22: mol_type = other DNA
tctcttctttatttgtgttttg

SEQ ID NO: 40181 - DNA, 22 bp, synthetic construct
  misc_feature 1..22: note = chemically synthesized
  source 1..22: mol_type = other DNA
ctcttctttatttgtgttttgc

SEQ ID NO: 40182 - DNA, 22 bp, synthetic construct
  misc_feature 1..22: note = chemically synthesized
  source 1..22: mol_type = other DNA
tcttctttatttgtgttttgct

SEQ ID NO: 40183 - DNA, 22 bp, synthetic construct
  misc_feature 1..22: note = chemically synthesized
  source 1..22: mol_type = other DNA
ttctttatttgtgttttgctct

SEQ ID NO: 40184 - DNA, 22 bp, synthetic construct
  misc_feature 1..22: note = chemically synthesized
  source 1..22: mol_type = other DNA
ctttatttgtgttttgctctac

SEQ ID NO: 40185 - DNA, 22 bp, synthetic construct
  misc_feature 1..22: note = chemically synthesized
  source 1..22: mol_type = other DNA
tttatttgtgttttgctctacc

SEQ ID NO: 40186 - DNA, 22 bp, synthetic construct
  misc_feature 1..22: note = chemically synthesized
  source 1..22: mol_type = other DNA
tatttgtgttttgctctaccag

SEQ ID NO: 40187 - DNA, 22 bp, synthetic construct
  misc_feature 1..22: note = chemically synthesized
  source 1..22: mol_type = other DNA
atttgtgttttgctctaccagt

SEQ ID NO: 40188 - DNA, 22 bp, synthetic construct
  misc_feature 1..22: note = chemically synthesized
  source 1..22: mol_type = other DNA
tttgtgttttgctctaccagtt

SEQ ID NO: 40189 - DNA, 22 bp, synthetic construct
  misc_feature 1..22: note = chemically synthesized
  source 1..22: mol_type = other DNA
gtgttttgctctaccagttagt

SEQ ID NO: 40190 - DNA, 22 bp, synthetic construct
  misc_feature 1..22: note = chemically synthesized
  source 1..22: mol_type = other DNA
tgttttgctctaccagttagtt

SEQ ID NO: 40191 - DNA, 22 bp, synthetic construct
  misc_feature 1..22: note = chemically synthesized
  source 1..22: mol_type = other DNA
tgctctaccagttagttgtata

SEQ ID NO: 40192 - DNA, 22 bp, synthetic construct
  misc_feature 1..22: note = chemically synthesized
  source 1..22: mol_type = other DNA
gctctaccagttagttgtatac

SEQ ID NO: 40193 - DNA, 22 bp, synthetic construct
  misc_feature 1..22: note = chemically synthesized
  source 1..22: mol_type = other DNA
ctctaccagttagttgtatacc

SEQ ID NO: 40194 - DNA, 22 bp, synthetic construct
  misc_feature 1..22: note = chemically synthesized
  source 1..22: mol_type = other DNA
taccagttagttgtataccttt

SEQ ID NO: 40195 - DNA, 22 bp, synthetic construct
  misc_feature 1..22: note = chemically synthesized
  source 1..22: mol_type = other DNA
ccagttagttgtatacctttgt

SEQ ID NO: 40196 - DNA, 22 bp, synthetic construct
  misc_feature 1..22: note = chemically synthesized
  source 1..22: mol_type = other DNA
gttgtatacctttgtgtgtctt

SEQ ID NO: 40197 - DNA, 22 bp, synthetic construct
  misc_feature 1..22: note = chemically synthesized
  source 1..22: mol_type = other DNA
tatacctttgtgtgtcttcata

SEQ ID NO: 40198 - DNA, 22 bp, synthetic construct
  misc_feature 1..22: note = chemically synthesized
  source 1..22: mol_type = other DNA
tgtgtgtcttcataatggcagt

SEQ ID NO: 40199 - DNA, 22 bp, synthetic construct
  misc_feature 1..22: note = chemically synthesized
  source 1..22: mol_type = other DNA
gtgtgtcttcataatggcagtg

SEQ ID NO: 40200 - DNA, 22 bp, synthetic construct
  misc_feature 1..22: note = chemically synthesized
  source 1..22: mol_type = other DNA
tgtgtcttcataatggcagtgt

SEQ ID NO: 40201 - DNA, 22 bp, synthetic construct
  misc_feature 1..22: note = chemically synthesized
  source 1..22: mol_type = other DNA
cataatggcagtgtcctgtcac

SEQ ID NO: 40202 - DNA, 22 bp, synthetic construct
  misc_feature 1..22: note = chemically synthesized
  source 1..22: mol_type = other DNA
ataatggcagtgtcctgtcact

SEQ ID NO: 40203 - DNA, 22 bp, synthetic construct
  misc_feature 1..22: note = chemically synthesized
  source 1..22: mol_type = other DNA
tcactttcatgtgtaggactcc

SEQ ID NO: 40204 - DNA, 22 bp, synthetic construct
  misc_feature 1..22: note = chemically synthesized
  source 1..22: mol_type = other DNA
tcatgtgtaggactcccttaaa

SEQ ID NO: 40205 - DNA, 22 bp, synthetic construct
  misc_feature 1..22: note = chemically synthesized
  source 1..22: mol_type = other DNA
catgtgtaggactcccttaaat

SEQ ID NO: 40206 - DNA, 22 bp, synthetic construct
  misc_feature 1..22: note = chemically synthesized
  source 1..22: mol_type = other DNA
atgtgtaggactcccttaaata

SEQ ID NO: 40207 - DNA, 22 bp, synthetic construct
  misc_feature 1..22: note = chemically synthesized
  source 1..22: mol_type = other DNA
ccttaaatatttcttgtaaagc

SEQ ID NO: 40208 - DNA, 22 bp, synthetic construct
  misc_feature 1..22: note = chemically synthesized
  source 1..22: mol_type = other DNA
aaatatttcttgtaaagccagt

SEQ ID NO: 40209 - DNA, 22 bp, synthetic construct
  misc_feature 1..22: note = chemically synthesized
  source 1..22: mol_type = other DNA
aatatttcttgtaaagccagtc

SEQ ID NO: 40210 - DNA, 22 bp, synthetic construct
  misc_feature 1..22: note = chemically synthesized
  source 1..22: mol_type = other DNA
cttgtaaagccagtctagtgat

SEQ ID NO: 40211 - DNA, 22 bp, synthetic construct
  misc_feature 1..22: note = chemically synthesized
  source 1..22: mol_type = other DNA
ttgtaaagccagtctagtgata

SEQ ID NO: 40212 - DNA, 22 bp, synthetic construct
  misc_feature 1..22: note = chemically synthesized
  source 1..22: mol_type = other DNA
gtaaagccagtctagtgatagt

SEQ ID NO: 40213 - DNA, 22 bp, synthetic construct
  misc_feature 1..22: note = chemically synthesized
  source 1..22: mol_type = other DNA
taaagccagtctagtgatagtg

SEQ ID NO: 40214 - DNA, 22 bp, synthetic construct
  misc_feature 1..22: note = chemically synthesized
  source 1..22: mol_type = other DNA
gtgatagtgaattccttcaaat

SEQ ID NO: 40215 - DNA, 22 bp, synthetic construct
  misc_feature 1..22: note = chemically synthesized
  source 1..22: mol_type = other DNA
cttcaaatttttcttgcccaga

SEQ ID NO: 40216 - DNA, 22 bp, synthetic construct
  misc_feature 1..22: note = chemically synthesized
  source 1..22: mol_type = other DNA
caaatttttcttgcccagaaaa

SEQ ID NO: 40217 - DNA, 22 bp, synthetic construct
  misc_feature 1..22: note = chemically synthesized
  source 1..22: mol_type = other DNA
aaatttttcttgcccagaaaag

SEQ ID NO: 40218 - DNA, 22 bp, synthetic construct
  misc_feature 1..22: note = chemically synthesized
  source 1..22: mol_type = other DNA
ttcttgcccagaaaagatttta

SEQ ID NO: 40219 - DNA, 22 bp, synthetic construct
  misc_feature 1..22: note = chemically synthesized
  source 1..22: mol_type = other DNA
tcttgcccagaaaagattttat

SEQ ID NO: 40220 - DNA, 22 bp, synthetic construct
  misc_feature 1..22: note = chemically synthesized
  source 1..22: mol_type = other DNA
cttgcccagaaaagattttatt

SEQ ID NO: 40221 - DNA, 22 bp, synthetic construct
  misc_feature 1..22: note = chemically synthesized
  source 1..22: mol_type = other DNA
ttgcccagaaaagattttattt

SEQ ID NO: 40222 - DNA, 22 bp, synthetic construct
  misc_feature 1..22: note = chemically synthesized
  source 1..22: mol_type = other DNA
gcccagaaaagattttatttat

SEQ ID NO: 40223 - DNA, 22 bp, synthetic construct
  misc_feature 1..22: note = chemically synthesized
  source 1..22: mol_type = other DNA
cccagaaaagattttatttatc

SEQ ID NO: 40224 - DNA, 22 bp, synthetic construct
  misc_feature 1..22: note = chemically synthesized
  source 1..22: mol_type = other DNA
tatttatccttcatttttgaag

SEQ ID NO: 40225 - DNA, 22 bp, synthetic construct
  misc_feature 1..22: note = chemically synthesized
  source 1..22: mol_type = other DNA
atttatccttcatttttgaaga

SEQ ID NO: 40226 - DNA, 22 bp, synthetic construct
  misc_feature 1..22: note = chemically synthesized
  source 1..22: mol_type = other DNA
tttatccttcatttttgaagaa

SEQ ID NO: 40227 - DNA, 22 bp, synthetic construct
  misc_feature 1..22: note = chemically synthesized
  source 1..22: mol_type = other DNA
atccttcatttttgaagaacaa

SEQ ID NO: 40228 - DNA, 22 bp, synthetic construct
  misc_feature 1..22: note = chemically synthesized
  source 1..22: mol_type = other DNA
tccttcatttttgaagaacaat

SEQ ID NO: 40229 - DNA, 22 bp, synthetic construct
  misc_feature 1..22: note = chemically synthesized
  source 1..22: mol_type = other DNA
catttttgaagaacaatgttgc

SEQ ID NO: 40230 - DNA, 22 bp, synthetic construct
  misc_feature 1..22: note = chemically synthesized
  source 1..22: mol_type = other DNA
atttttgaagaacaatgttgct

SEQ ID NO: 40231 - DNA, 22 bp, synthetic construct
  misc_feature 1..22: note = chemically synthesized
  source 1..22: mol_type = other DNA
ttgaagaacaatgttgctgggt

SEQ ID NO: 40232 - DNA, 22 bp, synthetic construct
  misc_feature 1..22: note = chemically synthesized
  source 1..22: mol_type = other DNA
tgaagaacaatgttgctgggta

SEQ ID NO: 40233 - DNA, 22 bp, synthetic construct
  misc_feature 1..22: note = chemically synthesized
  source 1..22: mol_type = other DNA
gaagaacaatgttgctgggtat

SEQ ID NO: 40234 - DNA, 22 bp, synthetic construct
  misc_feature 1..22: note = chemically synthesized
  source 1..22: mol_type = other DNA
aagaacaatgttgctgggtata

SEQ ID NO: 40235 - DNA, 22 bp, synthetic construct
  misc_feature 1..22: note = chemically synthesized
  source 1..22: mol_type = other DNA
ctgggtataacatccttggtgt

SEQ ID NO: 40236 - DNA, 22 bp, synthetic construct
  misc_feature 1..22: note = chemically synthesized
  source 1..22: mol_type = other DNA
ggtataacatccttggtgtcat

SEQ ID NO: 40237 - DNA, 22 bp, synthetic construct
  misc_feature 1..22: note = chemically synthesized
  source 1..22: mol_type = other DNA
ggtgtcatttttttctttcact

SEQ ID NO: 40238 - DNA, 22 bp, synthetic construct
  misc_feature 1..22: note = chemically synthesized
  source 1..22: mol_type = other DNA
gtgtcatttttttctttcacta

SEQ ID NO: 40239 - DNA, 22 bp, synthetic construct
  misc_feature 1..22: note = chemically synthesized
  source 1..22: mol_type = other DNA
ttttctttcactattttgaata

SEQ ID NO: 40240 - DNA, 22 bp, synthetic construct
  misc_feature 1..22: note = chemically synthesized
  source 1..22: mol_type = other DNA
tttctttcactattttgaatat

SEQ ID NO: 40241 - DNA, 22 bp, synthetic construct
  misc_feature 1..22: note = chemically synthesized
  source 1..22: mol_type = other DNA
ttctttcactattttgaatata

SEQ ID NO: 40242 - DNA, 22 bp, synthetic construct
  misc_feature 1..22: note = chemically synthesized
  source 1..22: mol_type = other DNA
tctttcactattttgaatatat

SEQ ID NO: 40243 - DNA, 22 bp, synthetic construct
  misc_feature 1..22: note = chemically synthesized
  source 1..22: mol_type = other DNA
ctttcactattttgaatatatc

SEQ ID NO: 40244 - DNA, 22 bp, synthetic construct
  misc_feature 1..22: note = chemically synthesized
  source 1..22: mol_type = other DNA
tttcactattttgaatatatca

SEQ ID NO: 40245 - DNA, 22 bp, synthetic construct
  misc_feature 1..22: note = chemically synthesized
  source 1..22: mol_type = other DNA
tcactattttgaatatatcatc

SEQ ID NO: 40246 - DNA, 22 bp, synthetic construct
  misc_feature 1..22: note = chemically synthesized
  source 1..22: mol_type = other DNA
cactattttgaatatatcatcc

SEQ ID NO: 40247 - DNA, 22 bp, synthetic construct
  misc_feature 1..22: note = chemically synthesized
  source 1..22: mol_type = other DNA
actattttgaatatatcatccc

SEQ ID NO: 40248 - DNA, 22 bp, synthetic construct
  misc_feature 1..22: note = chemically synthesized
  source 1..22: mol_type = other DNA
ttttgaatatatcatcccatct

SEQ ID NO: 40249 - DNA, 22 bp, synthetic construct
  misc_feature 1..22: note = chemically synthesized
  source 1..22: mol_type = other DNA
tgaatatatcatcccatcttct

SEQ ID NO: 40250 - DNA, 22 bp, synthetic construct
  misc_feature 1..22: note = chemically synthesized
  source 1..22: mol_type = other DNA
gaatatatcatcccatcttctc

SEQ ID NO: 40251 - DNA, 22 bp, synthetic construct
  misc_feature 1..22: note = chemically synthesized
  source 1..22: mol_type = other DNA
aatatatcatcccatcttctcc

SEQ ID NO: 40252 - DNA, 22 bp, synthetic construct
  misc_feature 1..22: note = chemically synthesized
  source 1..22: mol_type = other DNA
ctcctggcctgtgaggtttctg

SEQ ID NO: 40253 - DNA, 22 bp, synthetic construct
  misc_feature 1..22: note = chemically synthesized
  source 1..22: mol_type = other DNA
tcctggcctgtgaggtttctgc

SEQ ID NO: 40254 - DNA, 22 bp, synthetic construct
  misc_feature 1..22: note = chemically synthesized
  source 1..22: mol_type = other DNA
ctggcctgtgaggtttctgctg

SEQ ID NO: 40255 - DNA, 22 bp, synthetic construct
  misc_feature 1..22: note = chemically synthesized
  source 1..22: mol_type = other DNA
gcctgtgaggtttctgctgaga

SEQ ID NO: 40256 - DNA, 22 bp, synthetic construct
  misc_feature 1..22: note = chemically synthesized
  source 1..22: mol_type = other DNA
tgaggtttctgctgagaaatct

SEQ ID NO: 40257 - DNA, 22 bp, synthetic construct
  misc_feature 1..22: note = chemically synthesized
  source 1..22: mol_type = other DNA
ctgctgagaaatctgctgttaa

SEQ ID NO: 40258 - DNA, 22 bp, synthetic construct
  misc_feature 1..22: note = chemically synthesized
  source 1..22: mol_type = other DNA
tgctgagaaatctgctgttaat

SEQ ID NO: 40259 - DNA, 22 bp, synthetic construct
  misc_feature 1..22: note = chemically synthesized
  source 1..22: mol_type = other DNA
ctgagaaatctgctgttaatct

SEQ ID NO: 40260 - DNA, 22 bp, synthetic construct
  misc_feature 1..22: note = chemically synthesized
  source 1..22: mol_type = other DNA
agaaatctgctgttaatctgtt

SEQ ID NO: 40261 - DNA, 22 bp, synthetic construct
  misc_feature 1..22: note = chemically synthesized
  source 1..22: mol_type = other DNA
ctgttaatctgttaatcttgtg

SEQ ID NO: 40262 - DNA, 22 bp, synthetic construct
  misc_feature 1..22: note = chemically synthesized
  source 1..22: mol_type = other DNA
ttaatctgttaatcttgtggaa

SEQ ID NO: 40263 - DNA, 22 bp, synthetic construct
  misc_feature 1..22: note = chemically synthesized
  source 1..22: mol_type = other DNA
atctgttaatcttgtggaagtt

SEQ ID NO: 40264 - DNA, 22 bp, synthetic construct
  misc_feature 1..22: note = chemically synthesized
  source 1..22: mol_type = other DNA
ttaatcttgtggaagttccctt

SEQ ID NO: 40265 - DNA, 22 bp, synthetic construct
  misc_feature 1..22: note = chemically synthesized
  source 1..22: mol_type = other DNA
atcttgtggaagttcccttata

SEQ ID NO: 40266 - DNA, 22 bp, synthetic construct
  misc_feature 1..22: note = chemically synthesized
  source 1..22: mol_type = other DNA
gtggaagttcccttataagtga

SEQ ID NO: 40267 - DNA, 22 bp, synthetic construct
  misc_feature 1..22: note = chemically synthesized
  source 1..22: mol_type = other DNA
tggaagttcccttataagtgac

SEQ ID NO: 40268 - DNA, 22 bp, synthetic construct
  misc_feature 1..22: note = chemically synthesized
  source 1..22: mol_type = other DNA
ccttataagtgactagacattt

SEQ ID NO: 40269 - DNA, 22 bp, synthetic construct
  misc_feature 1..22: note = chemically synthesized
  source 1..22: mol_type = other DNA
ataagtgactagacattttgct

SEQ ID NO: 40270 - DNA, 22 bp, synthetic construct
  misc_feature 1..22: note = chemically synthesized
  source 1..22: mol_type = other DNA
taagtgactagacattttgctt

SEQ ID NO: 40271 - DNA, 22 bp, synthetic construct
  misc_feature 1..22: note = chemically synthesized
  source 1..22: mol_type = other DNA
gacattttgcttgctgttttag

SEQ ID NO: 40272 - DNA, 22 bp, synthetic construct
  misc_feature 1..22: note = chemically synthesized
  source 1..22: mol_type = other DNA
tgcttgctgttttagagttctt

SEQ ID NO: 40273 - DNA, 22 bp, synthetic construct
  misc_feature 1..22: note = chemically synthesized
  source 1..22: mol_type = other DNA
gcttgctgttttagagttctta

SEQ ID NO: 40274 - DNA, 22 bp, synthetic construct
  misc_feature 1..22: note = chemically synthesized
  source 1..22: mol_type = other DNA
cttgctgttttagagttcttac

SEQ ID NO: 40275 - DNA, 22 bp, synthetic construct
  misc_feature 1..22: note = chemically synthesized
  source 1..22: mol_type = other DNA
gctgttttagagttcttactct

SEQ ID NO: 40276 - DNA, 22 bp, synthetic construct
  misc_feature 1..22: note = chemically synthesized
  source 1..22: mol_type = other DNA
ctgttttagagttcttactctt

SEQ ID NO: 40277 - DNA, 22 bp, synthetic construct
  misc_feature 1..22: note = chemically synthesized
  source 1..22: mol_type = other DNA
ttttagagttcttactctttgg

SEQ ID NO: 40278 - DNA, 22 bp, synthetic construct
  misc_feature 1..22: note = chemically synthesized
  source 1..22: mol_type = other DNA
tagagttcttactctttggctt

SEQ ID NO: 40279 - DNA, 22 bp, synthetic construct
  misc_feature 1..22: note = chemically synthesized
  source 1..22: mol_type = other DNA
agagttcttactctttggcttt

SEQ ID NO: 40280 - DNA, 22 bp, synthetic construct
  misc_feature 1..22: note = chemically synthesized
  source 1..22: mol_type = other DNA
gagttcttactctttggctttt

SEQ ID NO: 40281 - DNA, 22 bp, synthetic construct
  misc_feature 1..22: note = chemically synthesized
  source 1..22: mol_type = other DNA
ttactctttggcttttgacagt

SEQ ID NO: 40282 - DNA, 22 bp, synthetic construct
  misc_feature 1..22: note = chemically synthesized
  source 1..22: mol_type = other DNA
actctttggcttttgacagttt

SEQ ID NO: 40283 - DNA, 22 bp, synthetic construct
  misc_feature 1..22: note = chemically synthesized
  source 1..22: mol_type = other DNA
ctctttggcttttgacagtttg

SEQ ID NO: 40284 - DNA, 22 bp, synthetic construct
  misc_feature 1..22: note = chemically synthesized
  source 1..22: mol_type = other DNA
tttggcttttgacagtttgact

SEQ ID NO: 40285 - DNA, 22 bp, synthetic construct
  misc_feature 1..22: note = chemically synthesized
  source 1..22: mol_type = other DNA
tggcttttgacagtttgactat

SEQ ID NO: 40286 - DNA, 22 bp, synthetic construct
  misc_feature 1..22: note = chemically synthesized
  source 1..22: mol_type = other DNA
ggcttttgacagtttgactata

SEQ ID NO: 40287 - DNA, 22 bp, synthetic construct
  misc_feature 1..22: note = chemically synthesized
  source 1..22: mol_type = other DNA
gcttttgacagtttgactataa

SEQ ID NO: 40288 - DNA, 22 bp, synthetic construct
  misc_feature 1..22: note = chemically synthesized
  source 1..22: mol_type = other DNA
ttgacagtttgactataatgtg

SEQ ID NO: 40289 - DNA, 22 bp, synthetic construct
  misc_feature 1..22: note = chemically synthesized
  source 1..22: mol_type = other DNA
tgacagtttgactataatgtgc

SEQ ID NO: 40290 - DNA, 22 bp, synthetic construct
  misc_feature 1..22: note = chemically synthesized
  source 1..22: mol_type = other DNA
gacagtttgactataatgtgct

SEQ ID NO: 40291 - DNA, 22 bp, synthetic construct
  misc_feature 1..22: note = chemically synthesized
  source 1..22: mol_type = other DNA
acagtttgactataatgtgctg

SEQ ID NO: 40292 - DNA, 22 bp, synthetic construct
  misc_feature 1..22: note = chemically synthesized
  source 1..22: mol_type = other DNA
gactataatgtgctgtggagaa

SEQ ID NO: 40293 - DNA, 22 bp, synthetic construct
  misc_feature 1..22: note = chemically synthesized
  source 1..22: mol_type = other DNA
actataatgtgctgtggagaag

SEQ ID NO: 40294 - DNA, 22 bp, synthetic construct
  misc_feature 1..22: note = chemically synthesized
  source 1..22: mol_type = other DNA
taatgtgctgtggagaagagct

SEQ ID NO: 40295 - DNA, 22 bp, synthetic construct
  misc_feature 1..22: note = chemically synthesized
  source 1..22: mol_type = other DNA
tggagaagagctttttgcatta

SEQ ID NO: 40296 - DNA, 22 bp, synthetic construct
  misc_feature 1..22: note = chemically synthesized
  source 1..22: mol_type = other DNA
tttgcattatattatttgggaa

SEQ ID NO: 40297 - DNA, 22 bp, synthetic construct
  misc_feature 1..22: note = chemically synthesized
  source 1..22: mol_type = other DNA
ttgcattatattatttgggaat

SEQ ID NO: 40298 - DNA, 22 bp, synthetic construct
  misc_feature 1..22: note = chemically synthesized
  source 1..22: mol_type = other DNA
tgcattatattatttgggaatt

SEQ ID NO: 40299 - DNA, 22 bp, synthetic construct
  misc_feature 1..22: note = chemically synthesized
  source 1..22: mol_type = other DNA
gcattatattatttgggaattt

SEQ ID NO: 40300 - DNA, 22 bp, synthetic construct
  misc_feature 1..22: note = chemically synthesized
  source 1..22: mol_type = other DNA
cattatattatttgggaatttc

SEQ ID NO: 40301 - DNA, 22 bp, synthetic construct
  misc_feature 1..22: note = chemically synthesized
  source 1..22: mol_type = other DNA
tattatttgggaatttctgatt

SEQ ID NO: 40302 - DNA, 22 bp, synthetic construct
  misc_feature 1..22: note = chemically synthesized
  source 1..22: mol_type = other DNA
tttgggaatttctgattttcat

SEQ ID NO: 40303 - DNA, 22 bp, synthetic construct
  misc_feature 1..22: note = chemically synthesized
  source 1..22: mol_type = other DNA
gggaatttctgattttcatttg

SEQ ID NO: 40304 - DNA, 22 bp, synthetic construct
  misc_feature 1..22: note = chemically synthesized
  source 1..22: mol_type = other DNA
ggaatttctgattttcatttgt

SEQ ID NO: 40305 - DNA, 22 bp, synthetic construct
  misc_feature 1..22: note = chemically synthesized
  source 1..22: mol_type = other DNA
ctgattttcatttgtctggatg

SEQ ID NO: 40306 - DNA, 22 bp, synthetic construct
  misc_feature 1..22: note = chemically synthesized
  source 1..22: mol_type = other DNA
tgattttcatttgtctggatgt

SEQ ID NO: 40307 - DNA, 22 bp, synthetic construct
  misc_feature 1..22: note = chemically synthesized
  source 1..22: mol_type = other DNA
attttcatttgtctggatgtct

SEQ ID NO: 40308 - DNA, 22 bp, synthetic construct
  misc_feature 1..22: note = chemically synthesized
  source 1..22: mol_type = other DNA
tcatttgtctggatgtctacat

SEQ ID NO: 40309 - DNA, 22 bp, synthetic construct
  misc_feature 1..22: note = chemically synthesized
  source 1..22: mol_type = other DNA
catttgtctggatgtctacatt

SEQ ID NO: 40310 - DNA, 22 bp, synthetic construct
  misc_feature 1..22: note = chemically synthesized
  source 1..22: mol_type = other DNA
atttgtctggatgtctacattt

SEQ ID NO: 40311 - DNA, 22 bp, synthetic construct
  misc_feature 1..22: note = chemically synthesized
  source 1..22: mol_type = other DNA
gtctggatgtctacatttcttg

SEQ ID NO: 40312 - DNA, 22 bp, synthetic construct
  misc_feature 1..22: note = chemically synthesized
  source 1..22: mol_type = other DNA
tctggatgtctacatttcttgc

SEQ ID NO: 40313 - DNA, 22 bp, synthetic construct
  misc_feature 1..22: note = chemically synthesized
  source 1..22: mol_type = other DNA
gatgtctacatttcttgctaga

SEQ ID NO: 40314 - DNA, 22 bp, synthetic construct
  misc_feature 1..22: note = chemically synthesized
  source 1..22: mol_type = other DNA
catttcttgctagacttgacaa

SEQ ID NO: 40315 - DNA, 22 bp, synthetic construct
  misc_feature 1..22: note = chemically synthesized
  source 1..22: mol_type = other DNA
cttgctagacttgacaagtttt

SEQ ID NO: 40316 - DNA, 22 bp, synthetic construct
  misc_feature 1..22: note = chemically synthesized
  source 1..22: mol_type = other DNA
ttgctagacttgacaagttttc

SEQ ID NO: 40317 - DNA, 22 bp, synthetic construct
  misc_feature 1..22: note = chemically synthesized
  source 1..22: mol_type = other DNA
gctagacttgacaagttttcag

SEQ ID NO: 40318 - DNA, 22 bp, synthetic construct
  misc_feature 1..22: note = chemically synthesized
  source 1..22: mol_type = other DNA
ctagacttgacaagttttcagc

SEQ ID NO: 40319 - DNA, 22 bp, synthetic construct
  misc_feature 1..22: note = chemically synthesized
  source 1..22: mol_type = other DNA
gacttgacaagttttcagctat

SEQ ID NO: 40320 - DNA, 22 bp, synthetic construct
  misc_feature 1..22: note = chemically synthesized
  source 1..22: mol_type = other DNA
gacaagttttcagctattgtgt

SEQ ID NO: 40321 - DNA, 22 bp, synthetic construct
  misc_feature 1..22: note = chemically synthesized
  source 1..22: mol_type = other DNA
acaagttttcagctattgtgtt

SEQ ID NO: 40322 - DNA, 22 bp, synthetic construct
  misc_feature 1..22: note = chemically synthesized
  source 1..22: mol_type = other DNA
tcagctattgtgttgttacgta

SEQ ID NO: 40323 - DNA, 22 bp, synthetic construct
  misc_feature 1..22: note = chemically synthesized
  source 1..22: mol_type = other DNA
cagctattgtgttgttacgtag

SEQ ID NO: 40324 - DNA, 22 bp, synthetic construct
  misc_feature 1..22: note = chemically synthesized
  source 1..22: mol_type = other DNA
agctattgtgttgttacgtagg

SEQ ID NO: 40325 - DNA, 22 bp, synthetic construct
  misc_feature 1..22: note = chemically synthesized
  source 1..22: mol_type = other DNA
ttgtgttgttacgtaggtttcc

SEQ ID NO: 40326 - DNA, 22 bp, synthetic construct
  misc_feature 1..22: note = chemically synthesized
  source 1..22: mol_type = other DNA
tgttgttacgtaggtttcctac

SEQ ID NO: 40327 - DNA, 22 bp, synthetic construct
  misc_feature 1..22: note = chemically synthesized
  source 1..22: mol_type = other DNA
ttacgtaggtttcctacacctt

SEQ ID NO: 40328 - DNA, 22 bp, synthetic construct
  misc_feature 1..22: note = chemically synthesized
  source 1..22: mol_type = other DNA
cgtaggtttcctacacctttca

SEQ ID NO: 40329 - DNA, 22 bp, synthetic construct
  misc_feature 1..22: note = chemically synthesized
  source 1..22: mol_type = other DNA
cctacacctttcatgttctctt

SEQ ID NO: 40330 - DNA, 22 bp, synthetic construct
  misc_feature 1..22: note = chemically synthesized
  source 1..22: mol_type = other DNA
ctacacctttcatgttctcttt

SEQ ID NO: 40331 - DNA, 22 bp, synthetic construct
  misc_feature 1..22: note = chemically synthesized
  source 1..22: mol_type = other DNA
cacctttcatgttctctttacc

SEQ ID NO: 40332 - DNA, 22 bp, synthetic construct
  misc_feature 1..22: note = chemically synthesized
  source 1..22: mol_type = other DNA
tcatgttctctttaccttctgg

SEQ ID NO: 40333 - DNA, 22 bp, synthetic construct
  misc_feature 1..22: note = chemically synthesized
  source 1..22: mol_type = other DNA
catgttctctttaccttctggg

SEQ ID NO: 40334 - DNA, 22 bp, synthetic construct
  misc_feature 1..22: note = chemically synthesized
  source 1..22: mol_type = other DNA
atgttctctttaccttctggga

SEQ ID NO: 40335 - DNA, 22 bp, synthetic construct
  misc_feature 1..22: note = chemically synthesized
  source 1..22: mol_type = other DNA
tctttaccttctgggaaactgc

SEQ ID NO: 40336 - DNA, 22 bp, synthetic construct
  misc_feature 1..22: note = chemically synthesized
  source 1..22: mol_type = other DNA
tttaccttctgggaaactgcaa

SEQ ID NO: 40337 - DNA, 22 bp, synthetic construct
  misc_feature 1..22: note = chemically synthesized
  source 1..22: mol_type = other DNA
taccttctgggaaactgcaaat

SEQ ID NO: 40338 - DNA, 22 bp, synthetic construct
  misc_feature 1..22: note = chemically synthesized
  source 1..22: mol_type = other DNA
accttctgggaaactgcaaatt

SEQ ID NO: 40339 - DNA, 22 bp, synthetic construct
  misc_feature 1..22: note = chemically synthesized
  source 1..22: mol_type = other DNA
ccttctgggaaactgcaaattt

SEQ ID NO: 40340 - DNA, 22 bp, synthetic construct
  misc_feature 1..22: note = chemically synthesized
  source 1..22: mol_type = other DNA
ctgggaaactgcaaatttgaat

SEQ ID NO: 40341 - DNA, 22 bp, synthetic construct
  misc_feature 1..22: note = chemically synthesized
  source 1..22: mol_type = other DNA
tgggaaactgcaaatttgaata

SEQ ID NO: 40342 - DNA, 22 bp, synthetic construct
  misc_feature 1..22: note = chemically synthesized
  source 1..22: mol_type = other DNA
ggaaactgcaaatttgaatatt

SEQ ID NO: 40343 - DNA, 22 bp, synthetic construct
  misc_feature 1..22: note = chemically synthesized
  source 1..22: mol_type = other DNA
caaatttgaatatttgttcact

SEQ ID NO: 40344 - DNA, 22 bp, synthetic construct
  misc_feature 1..22: note = chemically synthesized
  source 1..22: mol_type = other DNA
gaatatttgttcactttatagt

SEQ ID NO: 40345 - DNA, 22 bp, synthetic construct
  misc_feature 1..22: note = chemically synthesized
  source 1..22: mol_type = other DNA
aatatttgttcactttatagtg

SEQ ID NO: 40346 - DNA, 22 bp, synthetic construct
  misc_feature 1..22: note = chemically synthesized
  source 1..22: mol_type = other DNA
gttcactttatagtgcctcata

SEQ ID NO: 40347 - DNA, 22 bp, synthetic construct
  misc_feature 1..22: note = chemically synthesized
  source 1..22: mol_type = other DNA
ttcactttatagtgcctcatat

SEQ ID NO: 40348 - DNA, 22 bp, synthetic construct
  misc_feature 1..22: note = chemically synthesized
  source 1..22: mol_type = other DNA
actttatagtgcctcatatgtc

SEQ ID NO: 40349 - DNA, 22 bp, synthetic construct
  misc_feature 1..22: note = chemically synthesized
  source 1..22: mol_type = other DNA
tatagtgcctcatatgtcacat

SEQ ID NO: 40350 - DNA, 22 bp, synthetic construct
  misc_feature 1..22: note = chemically synthesized
  source 1..22: mol_type = other DNA
atagtgcctcatatgtcacata

SEQ ID NO: 40351 - DNA, 22 bp, synthetic construct
  misc_feature 1..22: note = chemically synthesized
  source 1..22: mol_type = other DNA
tagtgcctcatatgtcacatac

SEQ ID NO: 40352 - DNA, 22 bp, synthetic construct
  misc_feature 1..22: note = chemically synthesized
  source 1..22: mol_type = other DNA
atatgtcacatacactttgttc

SEQ ID NO: 40353 - DNA, 22 bp, synthetic construct
  misc_feature 1..22: note = chemically synthesized
  source 1..22: mol_type = other DNA
tgttcattctttttttttcctt

SEQ ID NO: 40354 - DNA, 22 bp, synthetic construct
  misc_feature 1..22: note = chemically synthesized
  source 1..22: mol_type = other DNA
gttcattctttttttttccttt

SEQ ID NO: 40355 - DNA, 22 bp, synthetic construct
  misc_feature 1..22: note = chemically synthesized
  source 1..22: mol_type = other DNA
ttcattctttttttttcctttc

SEQ ID NO: 40356 - DNA, 22 bp, synthetic construct
  misc_feature 1..22: note = chemically synthesized
  source 1..22: mol_type = other DNA
attctttttttttcctttctat

SEQ ID NO: 40357 - DNA, 22 bp, synthetic construct
  misc_feature 1..22: note = chemically synthesized
  source 1..22: mol_type = other DNA
tttttttttcctttctatcatt

SEQ ID NO: 40358 - DNA, 22 bp, synthetic construct
  misc_feature 1..22: note = chemically synthesized
  source 1..22: mol_type = other DNA
tttttttcctttctatcatttg

SEQ ID NO: 40359 - DNA, 22 bp, synthetic construct
  misc_feature 1..22: note = chemically synthesized
  source 1..22: mol_type = other DNA
ttttttcctttctatcatttga

SEQ ID NO: 40360 - DNA, 22 bp, synthetic construct
  misc_feature 1..22: note = chemically synthesized
  source 1..22: mol_type = other DNA
tttttcctttctatcatttgac

SEQ ID NO: 40361 - DNA, 22 bp, synthetic construct
  misc_feature 1..22: note = chemically synthesized
  source 1..22: mol_type = other DNA
ttttcctttctatcatttgacc

SEQ ID NO: 40362 - DNA, 22 bp, synthetic construct
  misc_feature 1..22: note = chemically synthesized
  source 1..22: mol_type = other DNA
tttcctttctatcatttgacca

SEQ ID NO: 40363 - DNA, 22 bp, synthetic construct
  misc_feature 1..22: note = chemically synthesized
  source 1..22: mol_type = other DNA
ttcctttctatcatttgaccag

SEQ ID NO: 40364 - DNA, 22 bp, synthetic construct
  misc_feature 1..22: note = chemically synthesized
  source 1..22: mol_type = other DNA
tcctttctatcatttgaccagc

SEQ ID NO: 40365 - DNA, 22 bp, synthetic construct
  misc_feature 1..22: note = chemically synthesized
  source 1..22: mol_type = other DNA
cctttctatcatttgaccagct

SEQ ID NO: 40366 - DNA, 22 bp, synthetic construct
  misc_feature 1..22: note = chemically synthesized
  source 1..22: mol_type = other DNA
ctttctatcatttgaccagcta

SEQ ID NO: 40367 - DNA, 22 bp, synthetic construct
  misc_feature 1..22: note = chemically synthesized
  source 1..22: mol_type = other DNA
tctatcatttgaccagctaatt

SEQ ID NO: 40368 - DNA, 22 bp, synthetic construct
  misc_feature 1..22: note = chemically synthesized
  source 1..22: mol_type = other DNA
ctatcatttgaccagctaattt

SEQ ID NO: 40369 - DNA, 22 bp, synthetic construct
  misc_feature 1..22: note = chemically synthesized
  source 1..22: mol_type = other DNA
tatcatttgaccagctaatttt

SEQ ID NO: 40370 - DNA, 22 bp, synthetic construct
  misc_feature 1..22: note = chemically synthesized
  source 1..22: mol_type = other DNA
tcatttgaccagctaattttaa

SEQ ID NO: 40371 - DNA, 22 bp, synthetic construct
  misc_feature 1..22: note = chemically synthesized
  source 1..22: mol_type = other DNA
gaccagctaattttaaaagacc

SEQ ID NO: 40372 - DNA, 22 bp, synthetic construct
  misc_feature 1..22: note = chemically synthesized
  source 1..22: mol_type = other DNA
accagctaattttaaaagacct

SEQ ID NO: 40373 - DNA, 22 bp, synthetic construct
  misc_feature 1..22: note = chemically synthesized
  source 1..22: mol_type = other DNA
attttaaaagacctgtcttcaa

SEQ ID NO: 40374 - DNA, 22 bp, synthetic construct
  misc_feature 1..22: note = chemically synthesized
  source 1..22: mol_type = other DNA
taaaagacctgtcttcaagttc

SEQ ID NO: 40375 - DNA, 22 bp, synthetic construct
  misc_feature 1..22: note = chemically synthesized
  source 1..22: mol_type = other DNA
aaaagacctgtcttcaagttct

SEQ ID NO: 40376 - DNA, 22 bp, synthetic construct
  misc_feature 1..22: note = chemically synthesized
  source 1..22: mol_type = other DNA
aaagacctgtcttcaagttctg

SEQ ID NO: 40377 - DNA, 22 bp, synthetic construct
  misc_feature 1..22: note = chemically synthesized
  source 1..22: mol_type = other DNA
tcttcaagttctgaaatttttc

SEQ ID NO: 40378 - DNA, 22 bp, synthetic construct
  misc_feature 1..22: note = chemically synthesized
  source 1..22: mol_type = other DNA
caagttctgaaatttttcttct

SEQ ID NO: 40379 - DNA, 22 bp, synthetic construct
  misc_feature 1..22: note = chemically synthesized
  source 1..22: mol_type = other DNA
aagttctgaaatttttcttctg

SEQ ID NO: 40380 - DNA, 22 bp, synthetic construct
  misc_feature 1..22: note = chemically synthesized
  source 1..22: mol_type = other DNA
tgaaatttttcttctgcttgat

SEQ ID NO: 40381 - DNA, 22 bp, synthetic construct
  misc_feature 1..22: note = chemically synthesized
  source 1..22: mol_type = other DNA
aaatttttcttctgcttgatct

SEQ ID NO: 40382 - DNA, 22 bp, synthetic construct
  misc_feature 1..22: note = chemically synthesized
  source 1..22: mol_type = other DNA
ttcttctgcttgatctgatcta

SEQ ID NO: 40383 - DNA, 22 bp, synthetic construct
  misc_feature 1..22: note = chemically synthesized
  source 1..22: mol_type = other DNA
tcttctgcttgatctgatctat

SEQ ID NO: 40384 - DNA, 22 bp, synthetic construct
  misc_feature 1..22: note = chemically synthesized
  source 1..22: mol_type = other DNA
cttctgcttgatctgatctatt

SEQ ID NO: 40385 - DNA, 22 bp, synthetic construct
  misc_feature 1..22: note = chemically synthesized
  source 1..22: mol_type = other DNA
ttctgcttgatctgatctattg

SEQ ID NO: 40386 - DNA, 22 bp, synthetic construct
  misc_feature 1..22: note = chemically synthesized
  source 1..22: mol_type = other DNA
ctgcttgatctgatctattgtt

SEQ ID NO: 40387 - DNA, 22 bp, synthetic construct
  misc_feature 1..22: note = chemically synthesized
  source 1..22: mol_type = other DNA
tgcttgatctgatctattgttg

SEQ ID NO: 40388 - DNA, 22 bp, synthetic construct
  misc_feature 1..22: note = chemically synthesized
  source 1..22: mol_type = other DNA
cttgatctgatctattgttgaa

SEQ ID NO: 40389 - DNA, 22 bp, synthetic construct
  misc_feature 1..22: note = chemically synthesized
  source 1..22: mol_type = other DNA
gatctgatctattgttgaagtt

SEQ ID NO: 40390 - DNA, 22 bp, synthetic construct
  misc_feature 1..22: note = chemically synthesized
  source 1..22: mol_type = other DNA
atctgatctattgttgaagttt

SEQ ID NO: 40391 - DNA, 22 bp, synthetic construct
  misc_feature 1..22: note = chemically synthesized
  source 1..22: mol_type = other DNA
atctattgttgaagtttttgaa

SEQ ID NO: 40392 - DNA, 22 bp, synthetic construct
  misc_feature 1..22: note = chemically synthesized
  source 1..22: mol_type = other DNA
ttgttgaagtttttgaatgtat

SEQ ID NO: 40393 - DNA, 22 bp, synthetic construct
  misc_feature 1..22: note = chemically synthesized
  source 1..22: mol_type = other DNA
ttgaagtttttgaatgtatttt

SEQ ID NO: 40394 - DNA, 22 bp, synthetic construct
  misc_feature 1..22: note = chemically synthesized
  source 1..22: mol_type = other DNA
aagtttttgaatgtattttgta

SEQ ID NO: 40395 - DNA, 22 bp, synthetic construct
  misc_feature 1..22: note = chemically synthesized
  source 1..22: mol_type = other DNA
ttgaatgtattttgtatttctt

SEQ ID NO: 40396 - DNA, 22 bp, synthetic construct
  misc_feature 1..22: note = chemically synthesized
  source 1..22: mol_type = other DNA
tgaatgtattttgtatttcttt

SEQ ID NO: 40397 - DNA, 22 bp, synthetic construct
  misc_feature 1..22: note = chemically synthesized
  source 1..22: mol_type = other DNA
gaatgtattttgtatttctttc

SEQ ID NO: 40398 - DNA, 22 bp, synthetic construct
  misc_feature 1..22: note = chemically synthesized
  source 1..22: mol_type = other DNA
aatgtattttgtatttctttca

SEQ ID NO: 40399 - DNA, 22 bp, synthetic construct
  misc_feature 1..22: note = chemically synthesized
  source 1..22: mol_type = other DNA
tgtatttctttcaataaactct

SEQ ID NO: 40400 - DNA, 22 bp, synthetic construct
  misc_feature 1..22: note = chemically synthesized
  source 1..22: mol_type = other DNA
gtatttctttcaataaactctt

SEQ ID NO: 40401 - DNA, 22 bp, synthetic construct
  misc_feature 1..22: note = chemically synthesized
  source 1..22: mol_type = other DNA
tatttctttcaataaactcttc

SEQ ID NO: 40402 - DNA, 22 bp, synthetic construct
  misc_feature 1..22: note = chemically synthesized
  source 1..22: mol_type = other DNA
ctttcaataaactcttcagtta

SEQ ID NO: 40403 - DNA, 22 bp, synthetic construct
  misc_feature 1..22: note = chemically synthesized
  source 1..22: mol_type = other DNA
tttcaataaactcttcagttac

SEQ ID NO: 40404 - DNA, 22 bp, synthetic construct
  misc_feature 1..22: note = chemically synthesized
  source 1..22: mol_type = other DNA
tcaataaactcttcagttacag

SEQ ID NO: 40405 - DNA, 22 bp, synthetic construct
  misc_feature 1..22: note = chemically synthesized
  source 1..22: mol_type = other DNA
caataaactcttcagttacaga

SEQ ID NO: 40406 - DNA, 22 bp, synthetic construct
  misc_feature 1..22: note = chemically synthesized
  source 1..22: mol_type = other DNA
aataaactcttcagttacagaa

SEQ ID NO: 40407 - DNA, 22 bp, synthetic construct
  misc_feature 1..22: note = chemically synthesized
  source 1..22: mol_type = other DNA
ttcagttacagaatttctgttt

SEQ ID NO: 40408 - DNA, 22 bp, synthetic construct
  misc_feature 1..22: note = chemically synthesized
  source 1..22: mol_type = other DNA
cagttacagaatttctgtttgg

SEQ ID NO: 40409 - DNA, 22 bp, synthetic construct
  misc_feature 1..22: note = chemically synthesized
  source 1..22: mol_type = other DNA
agttacagaatttctgtttggt

SEQ ID NO: 40410 - DNA, 22 bp, synthetic construct
  misc_feature 1..22: note = chemically synthesized
  source 1..22: mol_type = other DNA
cagaatttctgtttggttcatt

SEQ ID NO: 40411 - DNA, 22 bp, synthetic construct
  misc_feature 1..22: note = chemically synthesized
  source 1..22: mol_type = other DNA
ctgtttggttcattcttgttgt

SEQ ID NO: 40412 - DNA, 22 bp, synthetic construct
  misc_feature 1..22: note = chemically synthesized
  source 1..22: mol_type = other DNA
tgtttggttcattcttgttgta

SEQ ID NO: 40413 - DNA, 22 bp, synthetic construct
  misc_feature 1..22: note = chemically synthesized
  source 1..22: mol_type = other DNA
tttggttcattcttgttgtatc

SEQ ID NO: 40414 - DNA, 22 bp, synthetic construct
  misc_feature 1..22: note = chemically synthesized
  source 1..22: mol_type = other DNA
ggttcattcttgttgtatctat

SEQ ID NO: 40415 - DNA, 22 bp, synthetic construct
  misc_feature 1..22: note = chemically synthesized
  source 1..22: mol_type = other DNA
gttcattcttgttgtatctatc

SEQ ID NO: 40416 - DNA, 22 bp, synthetic construct
  misc_feature 1..22: note = chemically synthesized
  source 1..22: mol_type = other DNA
attcttgttgtatctatctctt

SEQ ID NO: 40417 - DNA, 22 bp, synthetic construct
  misc_feature 1..22: note = chemically synthesized
  source 1..22: mol_type = other DNA
ttgttgtatctatctcttgggt

SEQ ID NO: 40418 - DNA, 22 bp, synthetic construct
  misc_feature 1..22: note = chemically synthesized
  source 1..22: mol_type = other DNA
gttgtatctatctcttgggtaa

SEQ ID NO: 40419 - DNA, 22 bp, synthetic construct
  misc_feature 1..22: note = chemically synthesized
  source 1..22: mol_type = other DNA
ttgtatctatctcttgggtaaa

SEQ ID NO: 40420 - DNA, 22 bp, synthetic construct
  misc_feature 1..22: note = chemically synthesized
  source 1..22: mol_type = other DNA
tatctatctcttgggtaaattt

SEQ ID NO: 40421 - DNA, 22 bp, synthetic construct
  misc_feature 1..22: note = chemically synthesized
  source 1..22: mol_type = other DNA
tctcttgggtaaatttctcatt

SEQ ID NO: 40422 - DNA, 22 bp, synthetic construct
  misc_feature 1..22: note = chemically synthesized
  source 1..22: mol_type = other DNA
ttgggtaaatttctcattcata

SEQ ID NO: 40423 - DNA, 22 bp, synthetic construct
  misc_feature 1..22: note = chemically synthesized
  source 1..22: mol_type = other DNA
gggtaaatttctcattcatatc

SEQ ID NO: 40424 - DNA, 22 bp, synthetic construct
  misc_feature 1..22: note = chemically synthesized
  source 1..22: mol_type = other DNA
ggtaaatttctcattcatatcc

SEQ ID NO: 40425 - DNA, 22 bp, synthetic construct
  misc_feature 1..22: note = chemically synthesized
  source 1..22: mol_type = other DNA
ctcattcatatcctgaattgtt

SEQ ID NO: 40426 - DNA, 22 bp, synthetic construct
  misc_feature 1..22: note = chemically synthesized
  source 1..22: mol_type = other DNA
tcattcatatcctgaattgttt

SEQ ID NO: 40427 - DNA, 22 bp, synthetic construct
  misc_feature 1..22: note = chemically synthesized
  source 1..22: mol_type = other DNA
attcatatcctgaattgttttt

SEQ ID NO: 40428 - DNA, 22 bp, synthetic construct
  misc_feature 1..22: note = chemically synthesized
  source 1..22: mol_type = other DNA
atatcctgaattgtttttctga

SEQ ID NO: 40429 - DNA, 22 bp, synthetic construct
  misc_feature 1..22: note = chemically synthesized
  source 1..22: mol_type = other DNA
aattgtttttctgatttctttt

SEQ ID NO: 40430 - DNA, 22 bp, synthetic construct
  misc_feature 1..22: note = chemically synthesized
  source 1..22: mol_type = other DNA
tttttctgatttctttttattg

SEQ ID NO: 40431 - DNA, 22 bp, synthetic construct
  misc_feature 1..22: note = chemically synthesized
  source 1..22: mol_type = other DNA
ttctgatttctttttattgttt

SEQ ID NO: 40432 - DNA, 22 bp, synthetic construct
  misc_feature 1..22: note = chemically synthesized
  source 1..22: mol_type = other DNA
tctgatttctttttattgttta

SEQ ID NO: 40433 - DNA, 22 bp, synthetic construct
  misc_feature 1..22: note = chemically synthesized
  source 1..22: mol_type = other DNA
ctgatttctttttattgtttat

SEQ ID NO: 40434 - DNA, 22 bp, synthetic construct
  misc_feature 1..22: note = chemically synthesized
  source 1..22: mol_type = other DNA
tgatttctttttattgtttatc

SEQ ID NO: 40435 - DNA, 22 bp, synthetic construct
  misc_feature 1..22: note = chemically synthesized
  source 1..22: mol_type = other DNA
atttctttttattgtttatctg

SEQ ID NO: 40436 - DNA, 22 bp, synthetic construct
  misc_feature 1..22: note = chemically synthesized
  source 1..22: mol_type = other DNA
ctttttattgtttatctgagtt

SEQ ID NO: 40437 - DNA, 22 bp, synthetic construct
  misc_feature 1..22: note = chemically synthesized
  source 1..22: mol_type = other DNA
tttttattgtttatctgagttc

SEQ ID NO: 40438 - DNA, 22 bp, synthetic construct
  misc_feature 1..22: note = chemically synthesized
  source 1..22: mol_type = other DNA
tttattgtttatctgagttctc

SEQ ID NO: 40439 - DNA, 22 bp, synthetic construct
  misc_feature 1..22: note = chemically synthesized
  source 1..22: mol_type = other DNA
ttattgtttatctgagttctct

SEQ ID NO: 40440 - DNA, 22 bp, synthetic construct
  misc_feature 1..22: note = chemically synthesized
  source 1..22: mol_type = other DNA
tattgtttatctgagttctctt

SEQ ID NO: 40441 - DNA, 22 bp, synthetic construct
  misc_feature 1..22: note = chemically synthesized
  source 1..22: mol_type = other DNA
attgtttatctgagttctcttg

SEQ ID NO: 40442 - DNA, 22 bp, synthetic construct
  misc_feature 1..22: note = chemically synthesized
  source 1..22: mol_type = other DNA
ttgtttatctgagttctcttgt

SEQ ID NO: 40443 - DNA, 22 bp, synthetic construct
  misc_feature 1..22: note = chemically synthesized
  source 1..22: mol_type = other DNA
tttatctgagttctcttgtgtc

SEQ ID NO: 40444 - DNA, 22 bp, synthetic construct
  misc_feature 1..22: note = chemically synthesized
  source 1..22: mol_type = other DNA
atctgagttctcttgtgtctca

SEQ ID NO: 40445 - DNA, 22 bp, synthetic construct
  misc_feature 1..22: note = chemically synthesized
  source 1..22: mol_type = other DNA
tctgagttctcttgtgtctcac

SEQ ID NO: 40446 - DNA, 22 bp, synthetic construct
  misc_feature 1..22: note = chemically synthesized
  source 1..22: mol_type = other DNA
agttctcttgtgtctcactgag

SEQ ID NO: 40447 - DNA, 22 bp, synthetic construct
  misc_feature 1..22: note = chemically synthesized
  source 1..22: mol_type = other DNA
tcttgtgtctcactgagcttcc

SEQ ID NO: 40448 - DNA, 22 bp, synthetic construct
  misc_feature 1..22: note = chemically synthesized
  source 1..22: mol_type = other DNA
ttgtgtctcactgagcttcctt

SEQ ID NO: 40449 - DNA, 22 bp, synthetic construct
  misc_feature 1..22: note = chemically synthesized
  source 1..22: mol_type = other DNA
gtgtctcactgagcttccttaa

SEQ ID NO: 40450 - DNA, 22 bp, synthetic construct
  misc_feature 1..22: note = chemically synthesized
  source 1..22: mol_type = other DNA
tgtctcactgagcttccttaat

SEQ ID NO: 40451 - DNA, 22 bp, synthetic construct
  misc_feature 1..22: note = chemically synthesized
  source 1..22: mol_type = other DNA
actgagcttccttaatatcaac

SEQ ID NO: 40452 - DNA, 22 bp, synthetic construct
  misc_feature 1..22: note = chemically synthesized
  source 1..22: mol_type = other DNA
agcttccttaatatcaacattt

SEQ ID NO: 40453 - DNA, 22 bp, synthetic construct
  misc_feature 1..22: note = chemically synthesized
  source 1..22: mol_type = other DNA
ccttaatatcaacattttggat

SEQ ID NO: 40454 - DNA, 22 bp, synthetic construct
  misc_feature 1..22: note = chemically synthesized
  source 1..22: mol_type = other DNA
cttaatatcaacattttggatt

SEQ ID NO: 40455 - DNA, 22 bp, synthetic construct
  misc_feature 1..22: note = chemically synthesized
  source 1..22: mol_type = other DNA
aatatcaacattttggattctt

SEQ ID NO: 40456 - DNA, 22 bp, synthetic construct
  misc_feature 1..22: note = chemically synthesized
  source 1..22: mol_type = other DNA
atatcaacattttggattcttt

SEQ ID NO: 40457 - DNA, 22 bp, synthetic construct
  misc_feature 1..22: note = chemically synthesized
  source 1..22: mol_type = other DNA
tggattcttttttccagaattt

SEQ ID NO: 40458 - DNA, 22 bp, synthetic construct
  misc_feature 1..22: note = chemically synthesized
  source 1..22: mol_type = other DNA
ggattcttttttccagaatttt

SEQ ID NO: 40459 - DNA, 22 bp, synthetic construct
  misc_feature 1..22: note = chemically synthesized
  source 1..22: mol_type = other DNA
gattcttttttccagaatttta

SEQ ID NO: 40460 - DNA, 22 bp, synthetic construct
  misc_feature 1..22: note = chemically synthesized
  source 1..22: mol_type = other DNA
ttttttccagaattttataaat

SEQ ID NO: 40461 - DNA, 22 bp, synthetic construct
  misc_feature 1..22: note = chemically synthesized
  source 1..22: mol_type = other DNA
ttttccagaattttataaatgt

SEQ ID NO: 40462 - DNA, 22 bp, synthetic construct
  misc_feature 1..22: note = chemically synthesized
  source 1..22: mol_type = other DNA
tttccagaattttataaatgtc

SEQ ID NO: 40463 - DNA, 22 bp, synthetic construct
  misc_feature 1..22: note = chemically synthesized
  source 1..22: mol_type = other DNA
ttccagaattttataaatgtct

SEQ ID NO: 40464 - DNA, 22 bp, synthetic construct
  misc_feature 1..22: note = chemically synthesized
  source 1..22: mol_type = other DNA
tccagaattttataaatgtctt

SEQ ID NO: 40465 - DNA, 22 bp, synthetic construct
  misc_feature 1..22: note = chemically synthesized
  source 1..22: mol_type = other DNA
ccagaattttataaatgtcttt

SEQ ID NO: 40466 - DNA, 22 bp, synthetic construct
  misc_feature 1..22: note = chemically synthesized
  source 1..22: mol_type = other DNA
cagaattttataaatgtctttt

SEQ ID NO: 40467 - DNA, 22 bp, synthetic construct
  misc_feature 1..22: note = chemically synthesized
  source 1..22: mol_type = other DNA
tataaatgtcttttttttccac

SEQ ID NO: 40468 - DNA, 22 bp, synthetic construct
  misc_feature 1..22: note = chemically synthesized
  source 1..22: mol_type = other DNA
ataaatgtcttttttttccact

SEQ ID NO: 40469 - DNA, 22 bp, synthetic construct
  misc_feature 1..22: note = chemically synthesized
  source 1..22: mol_type = other DNA
taaatgtcttttttttccactg

SEQ ID NO: 40470 - DNA, 22 bp, synthetic construct
  misc_feature 1..22: note = chemically synthesized
  source 1..22: mol_type = other DNA
ttttttccactggcttatgttg

SEQ ID NO: 40471 - DNA, 22 bp, synthetic construct
  misc_feature 1..22: note = chemically synthesized
  source 1..22: mol_type = other DNA
tttttccactggcttatgttgc

SEQ ID NO: 40472 - DNA, 22 bp, synthetic construct
  misc_feature 1..22: note = chemically synthesized
  source 1..22: mol_type = other DNA
ttttccactggcttatgttgct

SEQ ID NO: 40473 - DNA, 22 bp, synthetic construct
  misc_feature 1..22: note = chemically synthesized
  source 1..22: mol_type = other DNA
tttccactggcttatgttgctg

SEQ ID NO: 40474 - DNA, 22 bp, synthetic construct
  misc_feature 1..22: note = chemically synthesized
  source 1..22: mol_type = other DNA
ttccactggcttatgttgctga

SEQ ID NO: 40475 - DNA, 22 bp, synthetic construct
  misc_feature 1..22: note = chemically synthesized
  source 1..22: mol_type = other DNA
tccactggcttatgttgctgaa

SEQ ID NO: 40476 - DNA, 22 bp, synthetic construct
  misc_feature 1..22: note = chemically synthesized
  source 1..22: mol_type = other DNA
ccactggcttatgttgctgaag

SEQ ID NO: 40477 - DNA, 22 bp, synthetic construct
  misc_feature 1..22: note = chemically synthesized
  source 1..22: mol_type = other DNA
cactggcttatgttgctgaaga

SEQ ID NO: 40478 - DNA, 22 bp, synthetic construct
  misc_feature 1..22: note = chemically synthesized
  source 1..22: mol_type = other DNA
gcttatgttgctgaagaattat

SEQ ID NO: 40479 - DNA, 22 bp, synthetic construct
  misc_feature 1..22: note = chemically synthesized
  source 1..22: mol_type = other DNA
atgttgctgaagaattattaaa

SEQ ID NO: 40480 - DNA, 22 bp, synthetic construct
  misc_feature 1..22: note = chemically synthesized
  source 1..22: mol_type = other DNA
tgttgctgaagaattattaaat

SEQ ID NO: 40481 - DNA, 22 bp, synthetic construct
  misc_feature 1..22: note = chemically synthesized
  source 1..22: mol_type = other DNA
ctgaagaattattaaattcctt

SEQ ID NO: 40482 - DNA, 22 bp, synthetic construct
  misc_feature 1..22: note = chemically synthesized
  source 1..22: mol_type = other DNA
aagaattattaaattcctttgg

SEQ ID NO: 40483 - DNA, 22 bp, synthetic construct
  misc_feature 1..22: note = chemically synthesized
  source 1..22: mol_type = other DNA
ttaaattcctttggaagtgtca

SEQ ID NO: 40484 - DNA, 22 bp, synthetic construct
  misc_feature 1..22: note = chemically synthesized
  source 1..22: mol_type = other DNA
aattcctttggaagtgtcatat

SEQ ID NO: 40485 - DNA, 22 bp, synthetic construct
  misc_feature 1..22: note = chemically synthesized
  source 1..22: mol_type = other DNA
ctttggaagtgtcatatttctt

SEQ ID NO: 40486 - DNA, 22 bp, synthetic construct
  misc_feature 1..22: note = chemically synthesized
  source 1..22: mol_type = other DNA
tggaagtgtcatatttcttcac

SEQ ID NO: 40487 - DNA, 22 bp, synthetic construct
  misc_feature 1..22: note = chemically synthesized
  source 1..22: mol_type = other DNA
ggaagtgtcatatttcttcacc

SEQ ID NO: 40488 - DNA, 22 bp, synthetic construct
  misc_feature 1..22: note = chemically synthesized
  source 1..22: mol_type = other DNA
gaagtgtcatatttcttcacct

SEQ ID NO: 40489 - DNA, 22 bp, synthetic construct
  misc_feature 1..22: note = chemically synthesized
  source 1..22: mol_type = other DNA
cttcacctttttatgtttattt

SEQ ID NO: 40490 - DNA, 22 bp, synthetic construct
  misc_feature 1..22: note = chemically synthesized
  source 1..22: mol_type = other DNA
ttcacctttttatgtttatttt

SEQ ID NO: 40491 - DNA, 22 bp, synthetic construct
  misc_feature 1..22: note = chemically synthesized
  source 1..22: mol_type = other DNA
cacctttttatgtttattttgt

SEQ ID NO: 40492 - DNA, 22 bp, synthetic construct
  misc_feature 1..22: note = chemically synthesized
  source 1..22: mol_type = other DNA
acctttttatgtttattttgtt

SEQ ID NO: 40493 - DNA, 22 bp, synthetic construct
  misc_feature 1..22: note = chemically synthesized
  source 1..22: mol_type = other DNA
tttatgtttattttgttcttgc

SEQ ID NO: 40494 - DNA, 22 bp, synthetic construct
  misc_feature 1..22: note = chemically synthesized
  source 1..22: mol_type = other DNA
ttatgtttattttgttcttgca

SEQ ID NO: 40495 - DNA, 22 bp, synthetic construct
  misc_feature 1..22: note = chemically synthesized
  source 1..22: mol_type = other DNA
tatgtttattttgttcttgcat

SEQ ID NO: 40496 - DNA, 22 bp, synthetic construct
  misc_feature 1..22: note = chemically synthesized
  source 1..22: mol_type = other DNA
atgtttattttgttcttgcatt

SEQ ID NO: 40497 - DNA, 22 bp, synthetic construct
  misc_feature 1..22: note = chemically synthesized
  source 1..22: mol_type = other DNA
tgtttattttgttcttgcattg

SEQ ID NO: 40498 - DNA, 22 bp, synthetic construct
  misc_feature 1..22: note = chemically synthesized
  source 1..22: mol_type = other DNA
attttgttcttgcattgatatc

SEQ ID NO: 40499 - DNA, 22 bp, synthetic construct
  misc_feature 1..22: note = chemically synthesized
  source 1..22: mol_type = other DNA
ttttgttcttgcattgatatct

SEQ ID NO: 40500 - DNA, 22 bp, synthetic construct
  misc_feature 1..22: note = chemically synthesized
  source 1..22: mol_type = other DNA
tgttcttgcattgatatctctg

SEQ ID NO: 40501 - DNA, 22 bp, synthetic construct
  misc_feature 1..22: note = chemically synthesized
  source 1..22: mol_type = other DNA
gttcttgcattgatatctctgc

SEQ ID NO: 40502 - DNA, 22 bp, synthetic construct
  misc_feature 1..22: note = chemically synthesized
  source 1..22: mol_type = other DNA
ttcttgcattgatatctctgca

SEQ ID NO: 40503 - DNA, 22 bp, synthetic construct
  misc_feature 1..22: note = chemically synthesized
  source 1..22: mol_type = other DNA
ttgcattgatatctctgcatct

SEQ ID NO: 40504 - DNA, 22 bp, synthetic construct
  misc_feature 1..22: note = chemically synthesized
  source 1..22: mol_type = other DNA
gcattgatatctctgcatctgg

SEQ ID NO: 40505 - DNA, 22 bp, synthetic construct
  misc_feature 1..22: note = chemically synthesized
  source 1..22: mol_type = other DNA
cattgatatctctgcatctggt

SEQ ID NO: 40506 - DNA, 22 bp, synthetic construct
  misc_feature 1..22: note = chemically synthesized
  source 1..22: mol_type = other DNA
atatctctgcatctggtgtaat

SEQ ID NO: 40507 - DNA, 22 bp, synthetic construct
  misc_feature 1..22: note = chemically synthesized
  source 1..22: mol_type = other DNA
tgcatctggtgtaatgattgct

SEQ ID NO: 40508 - DNA, 22 bp, synthetic construct
  misc_feature 1..22: note = chemically synthesized
  source 1..22: mol_type = other DNA
catctggtgtaatgattgctgc

SEQ ID NO: 40509 - DNA, 22 bp, synthetic construct
  misc_feature 1..22: note = chemically synthesized
  source 1..22: mol_type = other DNA
gtgtaatgattgctgcttccag

SEQ ID NO: 40510 - DNA, 22 bp, synthetic construct
  misc_feature 1..22: note = chemically synthesized
  source 1..22: mol_type = other DNA
ctgcttccagttttgtaaattt

SEQ ID NO: 40511 - DNA, 22 bp, synthetic construct
  misc_feature 1..22: note = chemically synthesized
  source 1..22: mol_type = other DNA
cttccagttttgtaaatttgtt

SEQ ID NO: 40512 - DNA, 22 bp, synthetic construct
  misc_feature 1..22: note = chemically synthesized
  source 1..22: mol_type = other DNA
ccagttttgtaaatttgttttt

SEQ ID NO: 40513 - DNA, 22 bp, synthetic construct
  misc_feature 1..22: note = chemically synthesized
  source 1..22: mol_type = other DNA
cagttttgtaaatttgtttttg

SEQ ID NO: 40514 - DNA, 22 bp, synthetic construct
  misc_feature 1..22: note = chemically synthesized
  source 1..22: mol_type = other DNA
tgtaaatttgtttttgtagggg

SEQ ID NO: 40515 - DNA, 22 bp, synthetic construct
  misc_feature 1..22: note = chemically synthesized
  source 1..22: mol_type = other DNA
gtaaatttgtttttgtagggga

SEQ ID NO: 40516 - DNA, 22 bp, synthetic construct
  misc_feature 1..22: note = chemically synthesized
  source 1..22: mol_type = other DNA
taaatttgtttttgtaggggaa

SEQ ID NO: 40517 - DNA, 22 bp, synthetic construct
  misc_feature 1..22: note = chemically synthesized
  source 1..22: mol_type = other DNA
gtttttgtaggggaagactttt

SEQ ID NO: 40518 - DNA, 22 bp, synthetic construct
  misc_feature 1..22: note = chemically synthesized
  source 1..22: mol_type = other DNA
tttttgtaggggaagacttttt

SEQ ID NO: 40519 - DNA, 22 bp, synthetic construct
  misc_feature 1..22: note = chemically synthesized
  source 1..22: mol_type = other DNA
ttgtaggggaagacttttttct

SEQ ID NO: 40520 - DNA, 22 bp, synthetic construct
  misc_feature 1..22: note = chemically synthesized
  source 1..22: mol_type = other DNA
tgtaggggaagacttttttctg

SEQ ID NO: 40521 - DNA, 22 bp, synthetic construct
  misc_feature 1..22: note = chemically synthesized
  source 1..22: mol_type = other DNA
gtaggggaagacttttttctga

SEQ ID NO: 40522 - DNA, 22 bp, synthetic construct
  misc_feature 1..22: note = chemically synthesized
  source 1..22: mol_type = other DNA
taggggaagacttttttctgaa

SEQ ID NO: 40523 - DNA, 22 bp, synthetic construct
  misc_feature 1..22: note = chemically synthesized
  source 1..22: mol_type = other DNA
ttttctgaagatgtatcttggt

SEQ ID NO: 40524 - DNA, 22 bp, synthetic construct
  misc_feature 1..22: note = chemically synthesized
  source 1..22: mol_type = other DNA
tttctgaagatgtatcttggtg

SEQ ID NO: 40525 - DNA, 22 bp, synthetic construct
  misc_feature 1..22: note = chemically synthesized
  source 1..22: mol_type = other DNA
ttctgaagatgtatcttggtgt

SEQ ID NO: 40526 - DNA, 22 bp, synthetic construct
  misc_feature 1..22: note = chemically synthesized
  source 1..22: mol_type = other DNA
tctgaagatgtatcttggtgtt

SEQ ID NO: 40527 - DNA, 22 bp, synthetic construct
  misc_feature 1..22: note = chemically synthesized
  source 1..22: mol_type = other DNA
ctgaagatgtatcttggtgttg

SEQ ID NO: 40528 - DNA, 22 bp, synthetic construct
  misc_feature 1..22: note = chemically synthesized
  source 1..22: mol_type = other DNA
tgaagatgtatcttggtgttga

SEQ ID NO: 40529 - DNA, 22 bp, synthetic construct
  misc_feature 1..22: note = chemically synthesized
  source 1..22: mol_type = other DNA
aagatgtatcttggtgttgatt

SEQ ID NO: 40530 - DNA, 22 bp, synthetic construct
  misc_feature 1..22: note = chemically synthesized
  source 1..22: mol_type = other DNA
ggtgttgattgagtagggcact

SEQ ID NO: 40531 - DNA, 22 bp, synthetic construct
  misc_feature 1..22: note = chemically synthesized
  source 1..22: mol_type = other DNA
gtgttgattgagtagggcactt

SEQ ID NO: 40532 - DNA, 22 bp, synthetic construct
  misc_feature 1..22: note = chemically synthesized
  source 1..22: mol_type = other DNA
attgagtagggcactttgattt

SEQ ID NO: 40533 - DNA, 22 bp, synthetic construct
  misc_feature 1..22: note = chemically synthesized
  source 1..22: mol_type = other DNA
agtagggcactttgattttgat

SEQ ID NO: 40534 - DNA, 22 bp, synthetic construct
  misc_feature 1..22: note = chemically synthesized
  source 1..22: mol_type = other DNA
tgattttgatttctaggtgcat

SEQ ID NO: 40535 - DNA, 22 bp, synthetic construct
  misc_feature 1..22: note = chemically synthesized
  source 1..22: mol_type = other DNA
gattttgatttctaggtgcata

SEQ ID NO: 40536 - DNA, 22 bp, synthetic construct
  misc_feature 1..22: note = chemically synthesized
  source 1..22: mol_type = other DNA
attttgatttctaggtgcatac

SEQ ID NO: 40537 - DNA, 22 bp, synthetic construct
  misc_feature 1..22: note = chemically synthesized
  source 1..22: mol_type = other DNA
tgatttctaggtgcatacagca

SEQ ID NO: 40538 - DNA, 22 bp, synthetic construct
  misc_feature 1..22: note = chemically synthesized
  source 1..22: mol_type = other DNA
gatttctaggtgcatacagcag

SEQ ID NO: 40539 - DNA, 22 bp, synthetic construct
  misc_feature 1..22: note = chemically synthesized
  source 1..22: mol_type = other DNA
atttctaggtgcatacagcagc

SEQ ID NO: 40540 - DNA, 22 bp, synthetic construct
  misc_feature 1..22: note = chemically synthesized
  source 1..22: mol_type = other DNA
ctaggtgcatacagcagcatag

SEQ ID NO: 40541 - DNA, 22 bp, synthetic construct
  misc_feature 1..22: note = chemically synthesized
  source 1..22: mol_type = other DNA
taggtgcatacagcagcatagt

SEQ ID NO: 40542 - DNA, 22 bp, synthetic construct
  misc_feature 1..22: note = chemically synthesized
  source 1..22: mol_type = other DNA
ggtgcatacagcagcatagtct

SEQ ID NO: 40543 - DNA, 22 bp, synthetic construct
  misc_feature 1..22: note = chemically synthesized
  source 1..22: mol_type = other DNA
catattattttttttcagctgc

SEQ ID NO: 40544 - DNA, 22 bp, synthetic construct
  misc_feature 1..22: note = chemically synthesized
  source 1..22: mol_type = other DNA
atattattttttttcagctgcc

SEQ ID NO: 40545 - DNA, 22 bp, synthetic construct
  misc_feature 1..22: note = chemically synthesized
  source 1..22: mol_type = other DNA
ttttttttcagctgccaacagt

SEQ ID NO: 40546 - DNA, 22 bp, synthetic construct
  misc_feature 1..22: note = chemically synthesized
  source 1..22: mol_type = other DNA
tttttcagctgccaacagtatc

SEQ ID NO: 40547 - DNA, 22 bp, synthetic construct
  misc_feature 1..22: note = chemically synthesized
  source 1..22: mol_type = other DNA
ttttcagctgccaacagtatca

SEQ ID NO: 40548 - DNA, 22 bp, synthetic construct
  misc_feature 1..22: note = chemically synthesized
  source 1..22: mol_type = other DNA
tttcagctgccaacagtatcat

SEQ ID NO: 40549 - DNA, 22 bp, synthetic construct
  misc_feature 1..22: note = chemically synthesized
  source 1..22: mol_type = other DNA
ttcagctgccaacagtatcatc

SEQ ID NO: 40550 - DNA, 22 bp, synthetic construct
  misc_feature 1..22: note = chemically synthesized
  source 1..22: mol_type = other DNA
tcagctgccaacagtatcatca

SEQ ID NO: 40551 - DNA, 22 bp, synthetic construct
  misc_feature 1..22: note = chemically synthesized
  source 1..22: mol_type = other DNA
cagctgccaacagtatcatcag

SEQ ID NO: 40552 - DNA, 22 bp, synthetic construct
  misc_feature 1..22: note = chemically synthesized
  source 1..22: mol_type = other DNA
agctgccaacagtatcatcagt

SEQ ID NO: 40553 - DNA, 22 bp, synthetic construct
  misc_feature 1..22: note = chemically synthesized
  source 1..22: mol_type = other DNA
ccaacagtatcatcagtgtctg

SEQ ID NO: 40554 - DNA, 22 bp, synthetic construct
  misc_feature 1..22: note = chemically synthesized
  source 1..22: mol_type = other DNA
tgattttttcagtggcttaggg

SEQ ID NO: 40555 - DNA, 22 bp, synthetic construct
  misc_feature 1..22: note = chemically synthesized
  source 1..22: mol_type = other DNA
tttcagtggcttagggtgcatt

SEQ ID NO: 40556 - DNA, 22 bp, synthetic construct
  misc_feature 1..22: note = chemically synthesized
  source 1..22: mol_type = other DNA
ttcagtggcttagggtgcattt

SEQ ID NO: 40557 - DNA, 22 bp, synthetic construct
  misc_feature 1..22: note = chemically synthesized
  source 1..22: mol_type = other DNA
tcagtggcttagggtgcatttg

SEQ ID NO: 40558 - DNA, 22 bp, synthetic construct
  misc_feature 1..22: note = chemically synthesized
  source 1..22: mol_type = other DNA
cagtggcttagggtgcatttgt

SEQ ID NO: 40559 - DNA, 22 bp, synthetic construct
  misc_feature 1..22: note = chemically synthesized
  source 1..22: mol_type = other DNA
agtggcttagggtgcatttgtt

SEQ ID NO: 40560 - DNA, 22 bp, synthetic construct
  misc_feature 1..22: note = chemically synthesized
  source 1..22: mol_type = other DNA
agggtgcatttgttagtgaagg

SEQ ID NO: 40561 - DNA, 22 bp, synthetic construct
  misc_feature 1..22: note = chemically synthesized
  source 1..22: mol_type = other DNA
gggtgcatttgttagtgaaggt

SEQ ID NO: 40562 - DNA, 22 bp, synthetic construct
  misc_feature 1..22: note = chemically synthesized
  source 1..22: mol_type = other DNA
gttagtgaaggtggtgatgagg

SEQ ID NO: 40563 - DNA, 22 bp, synthetic construct
  misc_feature 1..22: note = chemically synthesized
  source 1..22: mol_type = other DNA
ttagtgaaggtggtgatgaggt

SEQ ID NO: 40564 - DNA, 22 bp, synthetic construct
  misc_feature 1..22: note = chemically synthesized
  source 1..22: mol_type = other DNA
gtgaaggtggtgatgaggttgt

SEQ ID NO: 40565 - DNA, 22 bp, synthetic construct
  misc_feature 1..22: note = chemically synthesized
  source 1..22: mol_type = other DNA
tgctggagacaagaatatcaag

SEQ ID NO: 40566 - DNA, 22 bp, synthetic construct
  misc_feature 1..22: note = chemically synthesized
  source 1..22: mol_type = other DNA
gagacaagaatatcaagtgggc

SEQ ID NO: 40567 - DNA, 22 bp, synthetic construct
  misc_feature 1..22: note = chemically synthesized
  source 1..22: mol_type = other DNA
ggccccagtggtggtggtgggc

SEQ ID NO: 40568 - DNA, 22 bp, synthetic construct
  misc_feature 1..22: note = chemically synthesized
  source 1..22: mol_type = other DNA
gccccagtggtggtggtgggcc

SEQ ID NO: 40569 - DNA, 22 bp, synthetic construct
  misc_feature 1..22: note = chemically synthesized
  source 1..22: mol_type = other DNA
gcattcctgtccttgggcccca

SEQ ID NO: 40570 - DNA, 22 bp, synthetic construct
  misc_feature 1..22: note = chemically synthesized
  source 1..22: mol_type = other DNA
ctgtccttgggccccatggctg

SEQ ID NO: 40571 - DNA, 22 bp, synthetic construct
  misc_feature 1..22: note = chemically synthesized
  source 1..22: mol_type = other DNA
tccttgggccccatggctgtgt

SEQ ID NO: 40572 - DNA, 22 bp, synthetic construct
  misc_feature 1..22: note = chemically synthesized
  source 1..22: mol_type = other DNA
gggccccatggctgtgtacatt

SEQ ID NO: 40573 - DNA, 22 bp, synthetic construct
  misc_feature 1..22: note = chemically synthesized
  source 1..22: mol_type = other DNA
ggccccatggctgtgtacattg

SEQ ID NO: 40574 - DNA, 22 bp, synthetic construct
  misc_feature 1..22: note = chemically synthesized
  source 1..22: mol_type = other DNA
tgtacattggcactgatggtaa

SEQ ID NO: 40575 - DNA, 22 bp, synthetic construct
  misc_feature 1..22: note = chemically synthesized
  source 1..22: mol_type = other DNA
gcactgatggtaatgagtctag

SEQ ID NO: 40576 - DNA, 22 bp, synthetic construct
  misc_feature 1..22: note = chemically synthesized
  source 1..22: mol_type = other DNA
atggtaatgagtctagttgggt

SEQ ID NO: 40577 - DNA, 22 bp, synthetic construct
  misc_feature 1..22: note = chemically synthesized
  source 1..22: mol_type = other DNA
gttgggttgattctttggcctt

SEQ ID NO: 40578 - DNA, 22 bp, synthetic construct
  misc_feature 1..22: note = chemically synthesized
  source 1..22: mol_type = other DNA
ggttgattctttggccttcagg

SEQ ID NO: 40579 - DNA, 22 bp, synthetic construct
  misc_feature 1..22: note = chemically synthesized
  source 1..22: mol_type = other DNA
attctttggccttcaggcagtt

SEQ ID NO: 40580 - DNA, 22 bp, synthetic construct
  misc_feature 1..22: note = chemically synthesized
  source 1..22: mol_type = other DNA
tttggccttcaggcagtttgct

SEQ ID NO: 40581 - DNA, 22 bp, synthetic construct
  misc_feature 1..22: note = chemically synthesized
  source 1..22: mol_type = other DNA
tggccttcaggcagtttgcttg

SEQ ID NO: 40582 - DNA, 22 bp, synthetic construct
  misc_feature 1..22: note = chemically synthesized
  source 1..22: mol_type = other DNA
ggccttcaggcagtttgcttgg

SEQ ID NO: 40583 - DNA, 22 bp, synthetic construct
  misc_feature 1..22: note = chemically synthesized
  source 1..22: mol_type = other DNA
gccttcaggcagtttgcttggg

SEQ ID NO: 40584 - DNA, 22 bp, synthetic construct
  misc_feature 1..22: note = chemically synthesized
  source 1..22: mol_type = other DNA
caggcagtttgcttgggtgtca

SEQ ID NO: 40585 - DNA, 22 bp, synthetic construct
  misc_feature 1..22: note = chemically synthesized
  source 1..22: mol_type = other DNA
aggcagtttgcttgggtgtcag

SEQ ID NO: 40586 - DNA, 22 bp, synthetic construct
  misc_feature 1..22: note = chemically synthesized
  source 1..22: mol_type = other DNA
gcttgggtgtcagtagtggcca

SEQ ID NO: 40587 - DNA, 22 bp, synthetic construct
  misc_feature 1..22: note = chemically synthesized
  source 1..22: mol_type = other DNA
cttgggtgtcagtagtggccat

SEQ ID NO: 40588 - DNA, 22 bp, synthetic construct
  misc_feature 1..22: note = chemically synthesized
  source 1..22: mol_type = other DNA
gggtgtcagtagtggccatagt

SEQ ID NO: 40589 - DNA, 22 bp, synthetic construct
  misc_feature 1..22: note = chemically synthesized
  source 1..22: mol_type = other DNA
ggtgtcagtagtggccatagta

SEQ ID NO: 40590 - DNA, 22 bp, synthetic construct
  misc_feature 1..22: note = chemically synthesized
  source 1..22: mol_type = other DNA
ggctggtgtgtgggtcctcagg

SEQ ID NO: 40591 - DNA, 22 bp, synthetic construct
  misc_feature 1..22: note = chemically synthesized
  source 1..22: mol_type = other DNA
gtgtgtgggtcctcaggcttct

SEQ ID NO: 40592 - DNA, 22 bp, synthetic construct
  misc_feature 1..22: note = chemically synthesized
  source 1..22: mol_type = other DNA
aggcttctggacagtgggtgtg

SEQ ID NO: 40593 - DNA, 22 bp, synthetic construct
  misc_feature 1..22: note = chemically synthesized
  source 1..22: mol_type = other DNA
ctggacagtgggtgtggtgtgg

SEQ ID NO: 40594 - DNA, 22 bp, synthetic construct
  misc_feature 1..22: note = chemically synthesized
  source 1..22: mol_type = other DNA
tggacagtgggtgtggtgtggg

SEQ ID NO: 40595 - DNA, 22 bp, synthetic construct
  misc_feature 1..22: note = chemically synthesized
  source 1..22: mol_type = other DNA
gacagtgggtgtggtgtgggtg

SEQ ID NO: 40596 - DNA, 22 bp, synthetic construct
  misc_feature 1..22: note = chemically synthesized
  source 1..22: mol_type = other DNA
tagcaactgcaggacaaccctc

SEQ ID NO: 40597 - DNA, 22 bp, synthetic construct
  misc_feature 1..22: note = chemically synthesized
  source 1..22: mol_type = other DNA
caggacaaccctctggctccca

SEQ ID NO: 40598 - DNA, 22 bp, synthetic construct
  misc_feature 1..22: note = chemically synthesized
  source 1..22: mol_type = other DNA
tggctcccaagcagtctgcact

SEQ ID NO: 40599 - DNA, 22 bp, synthetic construct
  misc_feature 1..22: note = chemically synthesized
  source 1..22: mol_type = other DNA
gctcccaagcagtctgcactgg

SEQ ID NO: 40600 - DNA, 22 bp, synthetic construct
  misc_feature 1..22: note = chemically synthesized
  source 1..22: mol_type = other DNA
ccaagcagtctgcactggtgtt

SEQ ID NO: 40601 - DNA, 22 bp, synthetic construct
  misc_feature 1..22: note = chemically synthesized
  source 1..22: mol_type = other DNA
cactggtgttggtggtggctgc

SEQ ID NO: 40602 - DNA, 22 bp, synthetic construct
  misc_feature 1..22: note = chemically synthesized
  source 1..22: mol_type = other DNA
gtgttggtggtggctgcaaggg

SEQ ID NO: 40603 - DNA, 22 bp, synthetic construct
  misc_feature 1..22: note = chemically synthesized
  source 1..22: mol_type = other DNA
gtggtggctgcaagggctgaat

SEQ ID NO: 40604 - DNA, 22 bp, synthetic construct
  misc_feature 1..22: note = chemically synthesized
  source 1..22: mol_type = other DNA
caagggctgaatgagccagtct

SEQ ID NO: 40605 - DNA, 22 bp, synthetic construct
  misc_feature 1..22: note = chemically synthesized
  source 1..22: mol_type = other DNA
aatgagccagtcttcagaccca

SEQ ID NO: 40606 - DNA, 22 bp, synthetic construct
  misc_feature 1..22: note = chemically synthesized
  source 1..22: mol_type = other DNA
cagacccacaggtggcacatgc

SEQ ID NO: 40607 - DNA, 22 bp, synthetic construct
  misc_feature 1..22: note = chemically synthesized
  source 1..22: mol_type = other DNA
agacccacaggtggcacatgca

SEQ ID NO: 40608 - DNA, 22 bp, synthetic construct
  misc_feature 1..22: note = chemically synthesized
  source 1..22: mol_type = other DNA
tgatggcagtggcagattgggt

SEQ ID NO: 40609 - DNA, 22 bp, synthetic construct
  misc_feature 1..22: note = chemically synthesized
  source 1..22: mol_type = other DNA
ggtaggcccatcatcaggcttc

SEQ ID NO: 40610 - DNA, 22 bp, synthetic construct
  misc_feature 1..22: note = chemically synthesized
  source 1..22: mol_type = other DNA
ctgggagggttgcttaggtacc

SEQ ID NO: 40611 - DNA, 22 bp, synthetic construct
  misc_feature 1..22: note = chemically synthesized
  source 1..22: mol_type = other DNA
tgggagggttgcttaggtacca

SEQ ID NO: 40612 - DNA, 22 bp, synthetic construct
  misc_feature 1..22: note = chemically synthesized
  source 1..22: mol_type = other DNA
ggagggttgcttaggtaccagt

SEQ ID NO: 40613 - DNA, 22 bp, synthetic construct
  misc_feature 1..22: note = chemically synthesized
  source 1..22: mol_type = other DNA
cttaggtaccagtcatggtgga

SEQ ID NO: 40614 - DNA, 22 bp, synthetic construct
  misc_feature 1..22: note = chemically synthesized
  source 1..22: mol_type = other DNA
aggtaccagtcatggtggatgg

SEQ ID NO: 40615 - DNA, 22 bp, synthetic construct
  misc_feature 1..22: note = chemically synthesized
  source 1..22: mol_type = other DNA
ggtaccagtcatggtggatggc

SEQ ID NO: 40616 - DNA, 22 bp, synthetic construct
  misc_feature 1..22: note = chemically synthesized
  source 1..22: mol_type = other DNA
tctctgggttcccagacaactt

SEQ ID NO: 40617 - DNA, 22 bp, synthetic construct
  misc_feature 1..22: note = chemically synthesized
  source 1..22: mol_type = other DNA
tgggttcccagacaacttgctt

SEQ ID NO: 40618 - DNA, 22 bp, synthetic construct
  misc_feature 1..22: note = chemically synthesized
  source 1..22: mol_type = other DNA
ggttcccagacaacttgcttag

SEQ ID NO: 40619 - DNA, 22 bp, synthetic construct
  misc_feature 1..22: note = chemically synthesized
  source 1..22: mol_type = other DNA
ccagacaacttgcttaggcatt

SEQ ID NO: 40620 - DNA, 22 bp, synthetic construct
  misc_feature 1..22: note = chemically synthesized
  source 1..22: mol_type = other DNA
gcttaggcattgaggaaggcaa

SEQ ID NO: 40621 - DNA, 22 bp, synthetic construct
  misc_feature 1..22: note = chemically synthesized
  source 1..22: mol_type = other DNA
cttaggcattgaggaaggcaaa

SEQ ID NO: 40622 - DNA, 22 bp, synthetic construct
  misc_feature 1..22: note = chemically synthesized
  source 1..22: mol_type = other DNA
aggcattgaggaaggcaaagcc

SEQ ID NO: 40623 - DNA, 22 bp, synthetic construct
  misc_feature 1..22: note = chemically synthesized
  source 1..22: mol_type = other DNA
ggcattgaggaaggcaaagcca

SEQ ID NO: 40624 - DNA, 22 bp, synthetic construct
  misc_feature 1..22: note = chemically synthesized
  source 1..22: mol_type = other DNA
aggaaggcaaagccaggctggg

SEQ ID NO: 40625 - DNA, 22 bp, synthetic construct
  misc_feature 1..22: note = chemically synthesized
  source 1..22: mol_type = other DNA
ggtgttcctgacctcaggccac

SEQ ID NO: 40626 - DNA, 22 bp, synthetic construct
  misc_feature 1..22: note = chemically synthesized
  source 1..22: mol_type = other DNA
ctgacctcaggccactcagtgg

SEQ ID NO: 40627 - DNA, 22 bp, synthetic construct
  misc_feature 1..22: note = chemically synthesized
  source 1..22: mol_type = other DNA
acctcaggccactcagtggtgt

SEQ ID NO: 40628 - DNA, 22 bp, synthetic construct
  misc_feature 1..22: note = chemically synthesized
  source 1..22: mol_type = other DNA
aggccactcagtggtgtgtgtg

SEQ ID NO: 40629 - DNA, 22 bp, synthetic construct
  misc_feature 1..22: note = chemically synthesized
  source 1..22: mol_type = other DNA
agtggtgtgtgtggacaccggc

SEQ ID NO: 40630 - DNA, 22 bp, synthetic construct
  misc_feature 1..22: note = chemically synthesized
  source 1..22: mol_type = other DNA
tcataggctggagtggagtgat

SEQ ID NO: 40631 - DNA, 22 bp, synthetic construct
  misc_feature 1..22: note = chemically synthesized
  source 1..22: mol_type = other DNA
gagtggagtgatcctcaggccc

SEQ ID NO: 40632 - DNA, 22 bp, synthetic construct
  misc_feature 1..22: note = chemically synthesized
  source 1..22: mol_type = other DNA
aggcccccagcagaatgcctga

SEQ ID NO: 40633 - DNA, 22 bp, synthetic construct
  misc_feature 1..22: note = chemically synthesized
  source 1..22: mol_type = other DNA
agtgaattagcagctactgcat

SEQ ID NO: 40634 - DNA, 22 bp, synthetic construct
  misc_feature 1..22: note = chemically synthesized
  source 1..22: mol_type = other DNA
gcagctactgcattgttgccct

SEQ ID NO: 40635 - DNA, 22 bp, synthetic construct
  misc_feature 1..22: note = chemically synthesized
  source 1..22: mol_type = other DNA
ctgcattgttgccctgctcttg

SEQ ID NO: 40636 - DNA, 22 bp, synthetic construct
  misc_feature 1..22: note = chemically synthesized
  source 1..22: mol_type = other DNA
cattgttgccctgctcttgaag

SEQ ID NO: 40637 - DNA, 22 bp, synthetic construct
  misc_feature 1..22: note = chemically synthesized
  source 1..22: mol_type = other DNA
ttgccctgctcttgaaggggtg

SEQ ID NO: 40638 - DNA, 22 bp, synthetic construct
  misc_feature 1..22: note = chemically synthesized
  source 1..22: mol_type = other DNA
ccctgctcttgaaggggtgcgg

SEQ ID NO: 40639 - DNA, 22 bp, synthetic construct
  misc_feature 1..22: note = chemically synthesized
  source 1..22: mol_type = other DNA
ctcttgaaggggtgcggggtgt

SEQ ID NO: 40640 - DNA, 22 bp, synthetic construct
  misc_feature 1..22: note = chemically synthesized
  source 1..22: mol_type = other DNA
ttgaaggggtgcggggtgtgtt

SEQ ID NO: 40641 - DNA, 22 bp, synthetic construct
  misc_feature 1..22: note = chemically synthesized
  source 1..22: mol_type = other DNA
gaaggggtgcggggtgtgttgc

SEQ ID NO: 40642 - DNA, 22 bp, synthetic construct
  misc_feature 1..22: note = chemically synthesized
  source 1..22: mol_type = other DNA
aaggggtgcggggtgtgttgct

SEQ ID NO: 40643 - DNA, 22 bp, synthetic construct
  misc_feature 1..22: note = chemically synthesized
  source 1..22: mol_type = other DNA
ctttcagtggcagcagctataa

SEQ ID NO: 40644 - DNA, 22 bp, synthetic construct
  misc_feature 1..22: note = chemically synthesized
  source 1..22: mol_type = other DNA
tcagtggcagcagctataaatg

SEQ ID NO: 40645 - DNA, 22 bp, synthetic construct
  misc_feature 1..22: note = chemically synthesized
  source 1..22: mol_type = other DNA
cagtggcagcagctataaatgg

SEQ ID NO: 40646 - DNA, 22 bp, synthetic construct
  misc_feature 1..22: note = chemically synthesized
  source 1..22: mol_type = other DNA
agtggcagcagctataaatggg

SEQ ID NO: 40647 - DNA, 22 bp, synthetic construct
  misc_feature 1..22: note = chemically synthesized
  source 1..22: mol_type = other DNA
taaatgggttgctggtgggcat

SEQ ID NO: 40648 - DNA, 22 bp, synthetic construct
  misc_feature 1..22: note = chemically synthesized
  source 1..22: mol_type = other DNA
ctggtgggcatgtgtttcagcc

SEQ ID NO: 40649 - DNA, 22 bp, synthetic construct
  misc_feature 1..22: note = chemically synthesized
  source 1..22: mol_type = other DNA
gtgggcatgtgtttcagcccca

SEQ ID NO: 40650 - DNA, 22 bp, synthetic construct
  misc_feature 1..22: note = chemically synthesized
  source 1..22: mol_type = other DNA
cagccccagatggtggctgcaa

SEQ ID NO: 40651 - DNA, 22 bp, synthetic construct
  misc_feature 1..22: note = chemically synthesized
  source 1..22: mol_type = other DNA
agccccagatggtggctgcaag

SEQ ID NO: 40652 - DNA, 22 bp, synthetic construct
  misc_feature 1..22: note = chemically synthesized
  source 1..22: mol_type = other DNA
caagtggggtagcattttctta

SEQ ID NO: 40653 - DNA, 22 bp, synthetic construct
  misc_feature 1..22: note = chemically synthesized
  source 1..22: mol_type = other DNA
tcttagggagcttataaatgtg

SEQ ID NO: 40654 - DNA, 22 bp, synthetic construct
  misc_feature 1..22: note = chemically synthesized
  source 1..22: mol_type = other DNA
cttagggagcttataaatgtgt

SEQ ID NO: 40655 - DNA, 22 bp, synthetic construct
  misc_feature 1..22: note = chemically synthesized
  source 1..22: mol_type = other DNA
ttagggagcttataaatgtgta

SEQ ID NO: 40656 - DNA, 22 bp, synthetic construct
  misc_feature 1..22: note = chemically synthesized
  source 1..22: mol_type = other DNA
agggagcttataaatgtgtagc

SEQ ID NO: 40657 - DNA, 22 bp, synthetic construct
  misc_feature 1..22: note = chemically synthesized
  source 1..22: mol_type = other DNA
gggagcttataaatgtgtagca

SEQ ID NO: 40658 - DNA, 22 bp, synthetic construct
  misc_feature 1..22: note = chemically synthesized
  source 1..22: mol_type = other DNA
ataaatgtgtagcagccctgct

SEQ ID NO: 40659 - DNA, 22 bp, synthetic construct
  misc_feature 1..22: note = chemically synthesized
  source 1..22: mol_type = other DNA
taaatgtgtagcagccctgcta

SEQ ID NO: 40660 - DNA, 22 bp, synthetic construct
  misc_feature 1..22: note = chemically synthesized
  source 1..22: mol_type = other DNA
ctactgggggtgggggagtcca

SEQ ID NO: 40661 - DNA, 22 bp, synthetic construct
  misc_feature 1..22: note = chemically synthesized
  source 1..22: mol_type = other DNA
ctgggggtgggggagtccactt

SEQ ID NO: 40662 - DNA, 22 bp, synthetic construct
  misc_feature 1..22: note = chemically synthesized
  source 1..22: mol_type = other DNA
ggggtgggggagtccacttcta

SEQ ID NO: 40663 - DNA, 22 bp, synthetic construct
  misc_feature 1..22: note = chemically synthesized
  source 1..22: mol_type = other DNA
ctaatgacacactttatccctg

SEQ ID NO: 40664 - DNA, 22 bp, synthetic construct
  misc_feature 1..22: note = chemically synthesized
  source 1..22: mol_type = other DNA
taatgacacactttatccctgg

SEQ ID NO: 40665 - DNA, 22 bp, synthetic construct
  misc_feature 1..22: note = chemically synthesized
  source 1..22: mol_type = other DNA
atgacacactttatccctggtg

SEQ ID NO: 40666 - DNA, 22 bp, synthetic construct
  misc_feature 1..22: note = chemically synthesized
  source 1..22: mol_type = other DNA
tatccctggtgacagcagccag

SEQ ID NO: 40667 - DNA, 22 bp, synthetic construct
  misc_feature 1..22: note = chemically synthesized
  source 1..22: mol_type = other DNA
atccctggtgacagcagccagc

SEQ ID NO: 40668 - DNA, 22 bp, synthetic construct
  misc_feature 1..22: note = chemically synthesized
  source 1..22: mol_type = other DNA
tccctggtgacagcagccagca

SEQ ID NO: 40669 - DNA, 22 bp, synthetic construct
  misc_feature 1..22: note = chemically synthesized
  source 1..22: mol_type = other DNA
gtgacagcagccagcagtagca

SEQ ID NO: 40670 - DNA, 22 bp, synthetic construct
  misc_feature 1..22: note = chemically synthesized
  source 1..22: mol_type = other DNA
agctgtgggtgggggatgtcag

SEQ ID NO: 40671 - DNA, 22 bp, synthetic construct
  misc_feature 1..22: note = chemically synthesized
  source 1..22: mol_type = other DNA
tgggtgggggatgtcagcagag

SEQ ID NO: 40672 - DNA, 22 bp, synthetic construct
  misc_feature 1..22: note = chemically synthesized
  source 1..22: mol_type = other DNA
cagggatgtagagatgcagatg

SEQ ID NO: 40673 - DNA, 22 bp, synthetic construct
  misc_feature 1..22: note = chemically synthesized
  source 1..22: mol_type = other DNA
agggatgtagagatgcagatga

SEQ ID NO: 40674 - DNA, 22 bp, synthetic construct
  misc_feature 1..22: note = chemically synthesized
  source 1..22: mol_type = other DNA
gggtctgaggaacgatgtcatc

SEQ ID NO: 40675 - DNA, 22 bp, synthetic construct
  misc_feature 1..22: note = chemically synthesized
  source 1..22: mol_type = other DNA
aggaacgatgtcatctggtggg

SEQ ID NO: 40676 - DNA, 22 bp, synthetic construct
  misc_feature 1..22: note = chemically synthesized
  source 1..22: mol_type = other DNA
gtgggtgttgggctctcaaaat

SEQ ID NO: 40677 - DNA, 22 bp, synthetic construct
  misc_feature 1..22: note = chemically synthesized
  source 1..22: mol_type = other DNA
ggctctcaaaatggcaccttgc

SEQ ID NO: 40678 - DNA, 22 bp, synthetic construct
  misc_feature 1..22: note = chemically synthesized
  source 1..22: mol_type = other DNA
tcaaaatggcaccttgctgctc

SEQ ID NO: 40679 - DNA, 22 bp, synthetic construct
  misc_feature 1..22: note = chemically synthesized
  source 1..22: mol_type = other DNA
aaaatggcaccttgctgctcag

SEQ ID NO: 40680 - DNA, 22 bp, synthetic construct
  misc_feature 1..22: note = chemically synthesized
  source 1..22: mol_type = other DNA
gctgctcagtaatggggatggc

SEQ ID NO: 40681 - DNA, 22 bp, synthetic construct
  misc_feature 1..22: note = chemically synthesized
  source 1..22: mol_type = other DNA
ctgctcagtaatggggatggca

SEQ ID NO: 40682 - DNA, 22 bp, synthetic construct
  misc_feature 1..22: note = chemically synthesized
  source 1..22: mol_type = other DNA
ctcagtaatggggatggcaggg

SEQ ID NO: 40683 - DNA, 22 bp, synthetic construct
  misc_feature 1..22: note = chemically synthesized
  source 1..22: mol_type = other DNA
agtaatggggatggcaggggtg

SEQ ID NO: 40684 - DNA, 22 bp, synthetic construct
  misc_feature 1..22: note = chemically synthesized
  source 1..22: mol_type = other DNA
cttctctggagcaatgcctttg

SEQ ID NO: 40685 - DNA, 22 bp, synthetic construct
  misc_feature 1..22: note = chemically synthesized
  source 1..22: mol_type = other DNA
ctctggagcaatgcctttgtgc

SEQ ID NO: 40686 - DNA, 22 bp, synthetic construct
  misc_feature 1..22: note = chemically synthesized
  source 1..22: mol_type = other DNA
tctggagcaatgcctttgtgcg

SEQ ID NO: 40687 - DNA, 22 bp, synthetic construct
  misc_feature 1..22: note = chemically synthesized
  source 1..22: mol_type = other DNA
tggagcaatgcctttgtgcgat

SEQ ID NO: 40688 - DNA, 22 bp, synthetic construct
  misc_feature 1..22: note = chemically synthesized
  source 1..22: mol_type = other DNA
gagcaatgcctttgtgcgattg

SEQ ID NO: 40689 - DNA, 22 bp, synthetic construct
  misc_feature 1..22: note = chemically synthesized
  source 1..22: mol_type = other DNA
tgtgcgattgctgggcagttcc

SEQ ID NO: 40690 - DNA, 22 bp, synthetic construct
  misc_feature 1..22: note = chemically synthesized
  source 1..22: mol_type = other DNA
gtgcgattgctgggcagttcct

SEQ ID NO: 40691 - DNA, 22 bp, synthetic construct
  misc_feature 1..22: note = chemically synthesized
  source 1..22: mol_type = other DNA
tgcgattgctgggcagttcctt

SEQ ID NO: 40692 - DNA, 22 bp, synthetic construct
  misc_feature 1..22: note = chemically synthesized
  source 1..22: mol_type = other DNA
ctgggcagttccttatgatagt

SEQ ID NO: 40693 - DNA, 22 bp, synthetic construct
  misc_feature 1..22: note = chemically synthesized
  source 1..22: mol_type = other DNA
ggcagttccttatgatagtctc

SEQ ID NO: 40694 - DNA, 22 bp, synthetic construct
  misc_feature 1..22: note = chemically synthesized
  source 1..22: mol_type = other DNA
cttatgatagtctcaaggcctg

SEQ ID NO: 40695 - DNA, 22 bp, synthetic construct
  misc_feature 1..22: note = chemically synthesized
  source 1..22: mol_type = other DNA
atgatagtctcaaggcctgcat

SEQ ID NO: 40696 - DNA, 22 bp, synthetic construct
  misc_feature 1..22: note = chemically synthesized
  source 1..22: mol_type = other DNA
tgatagtctcaaggcctgcatg

SEQ ID NO: 40697 - DNA, 22 bp, synthetic construct
  misc_feature 1..22: note = chemically synthesized
  source 1..22: mol_type = other DNA
aaggcctgcatggtcaagggac

SEQ ID NO: 40698 - DNA, 22 bp, synthetic construct
  misc_feature 1..22: note = chemically synthesized
  source 1..22: mol_type = other DNA
catggtcaagggactctcctgt

SEQ ID NO: 40699 - DNA, 22 bp, synthetic construct
  misc_feature 1..22: note = chemically synthesized
  source 1..22: mol_type = other DNA
tcctgtggctaggattcctgga

SEQ ID NO: 40700 - DNA, 22 bp, synthetic construct
  misc_feature 1..22: note = chemically synthesized
  source 1..22: mol_type = other DNA
ctgtggctaggattcctggagt

SEQ ID NO: 40701 - DNA, 22 bp, synthetic construct
  misc_feature 1..22: note = chemically synthesized
  source 1..22: mol_type = other DNA
tggctaggattcctggagtcca

SEQ ID NO: 40702 - DNA, 22 bp, synthetic construct
  misc_feature 1..22: note = chemically synthesized
  source 1..22: mol_type = other DNA
ggattcctggagtccataatgc

SEQ ID NO: 40703 - DNA, 22 bp, synthetic construct
  misc_feature 1..22: note = chemically synthesized
  source 1..22: mol_type = other DNA
ctggagtccataatgcagatgt

SEQ ID NO: 40704 - DNA, 22 bp, synthetic construct
  misc_feature 1..22: note = chemically synthesized
  source 1..22: mol_type = other DNA
gagtccataatgcagatgtgga

SEQ ID NO: 40705 - DNA, 22 bp, synthetic construct
  misc_feature 1..22: note = chemically synthesized
  source 1..22: mol_type = other DNA
ggagtcagtcacttaactttcg

SEQ ID NO: 40706 - DNA, 22 bp, synthetic construct
  misc_feature 1..22: note = chemically synthesized
  source 1..22: mol_type = other DNA
aactttcgatgcactggggagc

SEQ ID NO: 40707 - DNA, 22 bp, synthetic construct
  misc_feature 1..22: note = chemically synthesized
  source 1..22: mol_type = other DNA
actttcgatgcactggggagcc

SEQ ID NO: 40708 - DNA, 22 bp, synthetic construct
  misc_feature 1..22: note = chemically synthesized
  source 1..22: mol_type = other DNA
tcgatgcactggggagcctctc

SEQ ID NO: 40709 - DNA, 22 bp, synthetic construct
  misc_feature 1..22: note = chemically synthesized
  source 1..22: mol_type = other DNA
cgatgcactggggagcctctct

SEQ ID NO: 40710 - DNA, 22 bp, synthetic construct
  misc_feature 1..22: note = chemically synthesized
  source 1..22: mol_type = other DNA
gatgcactggggagcctctctg

SEQ ID NO: 40711 - DNA, 22 bp, synthetic construct
  misc_feature 1..22: note = chemically synthesized
  source 1..22: mol_type = other DNA
gggagcctctctggcctcacag

SEQ ID NO: 40712 - DNA, 22 bp, synthetic construct
  misc_feature 1..22: note = chemically synthesized
  source 1..22: mol_type = other DNA
tctggcctcacagaggatccct

SEQ ID NO: 40713 - DNA, 22 bp, synthetic construct
  misc_feature 1..22: note = chemically synthesized
  source 1..22: mol_type = other DNA
tggcctcacagaggatccctac

SEQ ID NO: 40714 - DNA, 22 bp, synthetic construct
  misc_feature 1..22: note = chemically synthesized
  source 1..22: mol_type = other DNA
gcctcacagaggatccctactg

SEQ ID NO: 40715 - DNA, 22 bp, synthetic construct
  misc_feature 1..22: note = chemically synthesized
  source 1..22: mol_type = other DNA
acagaggatccctactgggtag

SEQ ID NO: 40716 - DNA, 22 bp, synthetic construct
  misc_feature 1..22: note = chemically synthesized
  source 1..22: mol_type = other DNA
ctgggtaggcttccttgcttcc

SEQ ID NO: 40717 - DNA, 22 bp, synthetic construct
  misc_feature 1..22: note = chemically synthesized
  source 1..22: mol_type = other DNA
ggtaggcttccttgcttccctc

SEQ ID NO: 40718 - DNA, 22 bp, synthetic construct
  misc_feature 1..22: note = chemically synthesized
  source 1..22: mol_type = other DNA
ccttgcttccctccccttcatt

SEQ ID NO: 40719 - DNA, 22 bp, synthetic construct
  misc_feature 1..22: note = chemically synthesized
  source 1..22: mol_type = other DNA
cttgcttccctccccttcattg

SEQ ID NO: 40720 - DNA, 22 bp, synthetic construct
  misc_feature 1..22: note = chemically synthesized
  source 1..22: mol_type = other DNA
gcttccctccccttcattgcct

SEQ ID NO: 40721 - DNA, 22 bp, synthetic construct
  misc_feature 1..22: note = chemically synthesized
  source 1..22: mol_type = other DNA
cttccctccccttcattgcctt

SEQ ID NO: 40722 - DNA, 22 bp, synthetic construct
  misc_feature 1..22: note = chemically synthesized
  source 1..22: mol_type = other DNA
ccctccccttcattgccttaga

SEQ ID NO: 40723 - DNA, 22 bp, synthetic construct
  misc_feature 1..22: note = chemically synthesized
  source 1..22: mol_type = other DNA
cctccccttcattgccttagat

SEQ ID NO: 40724 - DNA, 22 bp, synthetic construct
  misc_feature 1..22: note = chemically synthesized
  source 1..22: mol_type = other DNA
cccttcattgccttagatgctt

SEQ ID NO: 40725 - DNA, 22 bp, synthetic construct
  misc_feature 1..22: note = chemically synthesized
  source 1..22: mol_type = other DNA
cattgccttagatgcttcctgt

SEQ ID NO: 40726 - DNA, 22 bp, synthetic construct
  misc_feature 1..22: note = chemically synthesized
  source 1..22: mol_type = other DNA
attgccttagatgcttcctgtc

SEQ ID NO: 40727 - DNA, 22 bp, synthetic construct
  misc_feature 1..22: note = chemically synthesized
  source 1..22: mol_type = other DNA
ccttagatgcttcctgtcactt

SEQ ID NO: 40728 - DNA, 22 bp, synthetic construct
  misc_feature 1..22: note = chemically synthesized
  source 1..22: mol_type = other DNA
agatgcttcctgtcacttctct

SEQ ID NO: 40729 - DNA, 22 bp, synthetic construct
  misc_feature 1..22: note = chemically synthesized
  source 1..22: mol_type = other DNA
gatgcttcctgtcacttctctg

SEQ ID NO: 40730 - DNA, 22 bp, synthetic construct
  misc_feature 1..22: note = chemically synthesized
  source 1..22: mol_type = other DNA
cctgtcacttctctgttgaatt

SEQ ID NO: 40731 - DNA, 22 bp, synthetic construct
  misc_feature 1..22: note = chemically synthesized
  source 1..22: mol_type = other DNA
ctgtcacttctctgttgaattc

SEQ ID NO: 40732 - DNA, 22 bp, synthetic construct
  misc_feature 1..22: note = chemically synthesized
  source 1..22: mol_type = other DNA
tcacttctctgttgaattccag

SEQ ID NO: 40733 - DNA, 22 bp, synthetic construct
  misc_feature 1..22: note = chemically synthesized
  source 1..22: mol_type = other DNA
ctctgttgaattccagaattct

SEQ ID NO: 40734 - DNA, 22 bp, synthetic construct
  misc_feature 1..22: note = chemically synthesized
  source 1..22: mol_type = other DNA
tctgttgaattccagaattctc

SEQ ID NO: 40735 - DNA, 22 bp, synthetic construct
  misc_feature 1..22: note = chemically synthesized
  source 1..22: mol_type = other DNA
tgttgaattccagaattctctc

SEQ ID NO: 40736 - DNA, 22 bp, synthetic construct
  misc_feature 1..22: note = chemically synthesized
  source 1..22: mol_type = other DNA
ttgaattccagaattctctctt

SEQ ID NO: 40737 - DNA, 22 bp, synthetic construct
  misc_feature 1..22: note = chemically synthesized
  source 1..22: mol_type = other DNA
aattccagaattctctcttatg

SEQ ID NO: 40738 - DNA, 22 bp, synthetic construct
  misc_feature 1..22: note = chemically synthesized
  source 1..22: mol_type = other DNA
cagaattctctcttatgtggga

SEQ ID NO: 40739 - DNA, 22 bp, synthetic construct
  misc_feature 1..22: note = chemically synthesized
  source 1..22: mol_type = other DNA
tctcttatgtgggattttctac

SEQ ID NO: 40740 - DNA, 22 bp, synthetic construct
  misc_feature 1..22: note = chemically synthesized
  source 1..22: mol_type = other DNA
tcttatgtgggattttctactt

SEQ ID NO: 40741 - DNA, 22 bp, synthetic construct
  misc_feature 1..22: note = chemically synthesized
  source 1..22: mol_type = other DNA
ttatgtgggattttctacttac

SEQ ID NO: 40742 - DNA, 22 bp, synthetic construct
  misc_feature 1..22: note = chemically synthesized
  source 1..22: mol_type = other DNA
atgtgggattttctacttacta

SEQ ID NO: 40743 - DNA, 22 bp, synthetic construct
  misc_feature 1..22: note = chemically synthesized
  source 1..22: mol_type = other DNA
tgtgggattttctacttactat

SEQ ID NO: 40744 - DNA, 22 bp, synthetic construct
  misc_feature 1..22: note = chemically synthesized
  source 1..22: mol_type = other DNA
tctacttactattttggttctt

SEQ ID NO: 40745 - DNA, 22 bp, synthetic construct
  misc_feature 1..22: note = chemically synthesized
  source 1..22: mol_type = other DNA
ctacttactattttggttcttt

SEQ ID NO: 40746 - DNA, 22 bp, synthetic construct
  misc_feature 1..22: note = chemically synthesized
  source 1..22: mol_type = other DNA
tacttactattttggttctttg

SEQ ID NO: 40747 - DNA, 22 bp, synthetic construct
  misc_feature 1..22: note = chemically synthesized
  source 1..22: mol_type = other DNA
cttactattttggttctttgtg

SEQ ID NO: 40748 - DNA, 22 bp, synthetic construct
  misc_feature 1..22: note = chemically synthesized
  source 1..22: mol_type = other DNA
actattttggttctttgtggag

SEQ ID NO: 40749 - DNA, 22 bp, synthetic construct
  misc_feature 1..22: note = chemically synthesized
  source 1..22: mol_type = other DNA
ctattttggttctttgtggagg

SEQ ID NO: 40750 - DNA, 22 bp, synthetic construct
  misc_feature 1..22: note = chemically synthesized
  source 1..22: mol_type = other DNA
ttttggttctttgtggaggagg

SEQ ID NO: 40751 - DNA, 22 bp, synthetic construct
  misc_feature 1..22: note = chemically synthesized
  source 1..22: mol_type = other DNA
tggttctttgtggaggaggtga

SEQ ID NO: 40752 - DNA, 22 bp, synthetic construct
  misc_feature 1..22: note = chemically synthesized
  source 1..22: mol_type = other DNA
ggttctttgtggaggaggtgag

SEQ ID NO: 40753 - DNA, 22 bp, synthetic construct
  misc_feature 1..22: note = chemically synthesized
  source 1..22: mol_type = other DNA
gttctttgtggaggaggtgagt

SEQ ID NO: 40754 - DNA, 22 bp, synthetic construct
  misc_feature 1..22: note = chemically synthesized
  source 1..22: mol_type = other DNA
tttgtggaggaggtgagtgtca

SEQ ID NO: 40755 - DNA, 22 bp, synthetic construct
  misc_feature 1..22: note = chemically synthesized
  source 1..22: mol_type = other DNA
tgtggaggaggtgagtgtcagc

SEQ ID NO: 40756 - DNA, 22 bp, synthetic construct
  misc_feature 1..22: note = chemically synthesized
  source 1..22: mol_type = other DNA
gtggaggaggtgagtgtcagct

SEQ ID NO: 40757 - DNA, 22 bp, synthetic construct
  misc_feature 1..22: note = chemically synthesized
  source 1..22: mol_type = other DNA
tggaggaggtgagtgtcagctg

SEQ ID NO: 40758 - DNA, 22 bp, synthetic construct
  misc_feature 1..22: note = chemically synthesized
  source 1..22: mol_type = other DNA
cccttagtcagtaatcttcaag

SEQ ID NO: 40759 - DNA, 22 bp, synthetic construct
  misc_feature 1..22: note = chemically synthesized
  source 1..22: mol_type = other DNA
agtcagtaatcttcaagcccct

SEQ ID NO: 40760 - DNA, 22 bp, synthetic construct
  misc_feature 1..22: note = chemically synthesized
  source 1..22: mol_type = other DNA
gtcagtaatcttcaagcccctt

SEQ ID NO: 40761 - DNA, 22 bp, synthetic construct
  misc_feature 1..22: note = chemically synthesized
  source 1..22: mol_type = other DNA
caagccccttcccttgaaattt

SEQ ID NO: 40762 - DNA, 22 bp, synthetic construct
  misc_feature 1..22: note = chemically synthesized
  source 1..22: mol_type = other DNA
aagccccttcccttgaaatttt

SEQ ID NO: 40763 - DNA, 22 bp, synthetic construct
  misc_feature 1..22: note = chemically synthesized
  source 1..22: mol_type = other DNA
cccttgaaattttttaagcttt

SEQ ID NO: 40764 - DNA, 22 bp, synthetic construct
  misc_feature 1..22: note = chemically synthesized
  source 1..22: mol_type = other DNA
ccttgaaattttttaagcttta

SEQ ID NO: 40765 - DNA, 22 bp, synthetic construct
  misc_feature 1..22: note = chemically synthesized
  source 1..22: mol_type = other DNA
gaaattttttaagctttatgtt

SEQ ID NO: 40766 - DNA, 22 bp, synthetic construct
  misc_feature 1..22: note = chemically synthesized
  source 1..22: mol_type = other DNA
aaattttttaagctttatgttt

SEQ ID NO: 40767 - DNA, 22 bp, synthetic construct
  misc_feature 1..22: note = chemically synthesized
  source 1..22: mol_type = other DNA
tttaagctttatgtttttattt

SEQ ID NO: 40768 - DNA, 22 bp, synthetic construct
  misc_feature 1..22: note = chemically synthesized
  source 1..22: mol_type = other DNA
ttaagctttatgtttttatttc

SEQ ID NO: 40769 - DNA, 22 bp, synthetic construct
  misc_feature 1..22: note = chemically synthesized
  source 1..22: mol_type = other DNA
taagctttatgtttttatttct

SEQ ID NO: 40770 - DNA, 22 bp, synthetic construct
  misc_feature 1..22: note = chemically synthesized
  source 1..22: mol_type = other DNA
aagctttatgtttttatttcta

SEQ ID NO: 40771 - DNA, 22 bp, synthetic construct
  misc_feature 1..22: note = chemically synthesized
  source 1..22: mol_type = other DNA
agctttatgtttttatttctaa

SEQ ID NO: 40772 - DNA, 22 bp, synthetic construct
  misc_feature 1..22: note = chemically synthesized
  source 1..22: mol_type = other DNA
tatgtttttatttctaatagac

SEQ ID NO: 40773 - DNA, 22 bp, synthetic construct
  misc_feature 1..22: note = chemically synthesized
  source 1..22: mol_type = other DNA
atgtttttatttctaatagact

SEQ ID NO: 40774 - DNA, 22 bp, synthetic construct
  misc_feature 1..22: note = chemically synthesized
  source 1..22: mol_type = other DNA
tgtttttatttctaatagactg

SEQ ID NO: 40775 - DNA, 22 bp, synthetic construct
  misc_feature 1..22: note = chemically synthesized
  source 1..22: mol_type = other DNA
ttatttctaatagactgaaaga

SEQ ID NO: 40776 - DNA, 22 bp, synthetic construct
  misc_feature 1..22: note = chemically synthesized
  source 1..22: mol_type = other DNA
tatttctaatagactgaaagag

SEQ ID NO: 40777 - DNA, 22 bp, synthetic construct
  misc_feature 1..22: note = chemically synthesized
  source 1..22: mol_type = other DNA
atttctaatagactgaaagagc

SEQ ID NO: 40778 - DNA, 22 bp, synthetic construct
  misc_feature 1..22: note = chemically synthesized
  source 1..22: mol_type = other DNA
tttctaatagactgaaagagca

SEQ ID NO: 40779 - DNA, 22 bp, synthetic construct
  misc_feature 1..22: note = chemically synthesized
  source 1..22: mol_type = other DNA
ctaatagactgaaagagcataa

SEQ ID NO: 40780 - DNA, 22 bp, synthetic construct
  misc_feature 1..22: note = chemically synthesized
  source 1..22: mol_type = other DNA
taatagactgaaagagcataat

SEQ ID NO: 40781 - DNA, 22 bp, synthetic construct
  misc_feature 1..22: note = chemically synthesized
  source 1..22: mol_type = other DNA
atagactgaaagagcataatca

SEQ ID NO: 40782 - DNA, 22 bp, synthetic construct
  misc_feature 1..22: note = chemically synthesized
  source 1..22: mol_type = other DNA
aaagagcataatcatattttaa

SEQ ID NO: 40783 - DNA, 22 bp, synthetic construct
  misc_feature 1..22: note = chemically synthesized
  source 1..22: mol_type = other DNA
taaacactctaaggctatatgg

SEQ ID NO: 40784 - DNA, 22 bp, synthetic construct
  misc_feature 1..22: note = chemically synthesized
  source 1..22: mol_type = other DNA
aaacactctaaggctatatggg

SEQ ID NO: 40785 - DNA, 22 bp, synthetic construct
  misc_feature 1..22: note = chemically synthesized
  source 1..22: mol_type = other DNA
aacactctaaggctatatgggg

SEQ ID NO: 40786 - DNA, 22 bp, synthetic construct
  misc_feature 1..22: note = chemically synthesized
  source 1..22: mol_type = other DNA
taaggctatatgggggactatc

SEQ ID NO: 40787 - DNA, 22 bp, synthetic construct
  misc_feature 1..22: note = chemically synthesized
  source 1..22: mol_type = other DNA
aggctatatgggggactatctg

SEQ ID NO: 40788 - DNA, 22 bp, synthetic construct
  misc_feature 1..22: note = chemically synthesized
  source 1..22: mol_type = other DNA
tatgggggactatctgaaggcc

SEQ ID NO: 40789 - DNA, 22 bp, synthetic construct
  misc_feature 1..22: note = chemically synthesized
  source 1..22: mol_type = other DNA
tctgaaggcctcagatgagtaa

SEQ ID NO: 40790 - DNA, 22 bp, synthetic construct
  misc_feature 1..22: note = chemically synthesized
  source 1..22: mol_type = other DNA
aaggcctcagatgagtaaaaga

SEQ ID NO: 40791 - DNA, 22 bp, synthetic construct
  misc_feature 1..22: note = chemically synthesized
  source 1..22: mol_type = other DNA
agatgagtaaaagaagtagcga

SEQ ID NO: 40792 - DNA, 22 bp, synthetic construct
  misc_feature 1..22: note = chemically synthesized
  source 1..22: mol_type = other DNA
gttaactatgtttttcttttca

SEQ ID NO: 40793 - DNA, 22 bp, synthetic construct
  misc_feature 1..22: note = chemically synthesized
  source 1..22: mol_type = other DNA
actatgtttttcttttcatttc

SEQ ID NO: 40794 - DNA, 22 bp, synthetic construct
  misc_feature 1..22: note = chemically synthesized
  source 1..22: mol_type = other DNA
tgtttttcttttcatttcattt

SEQ ID NO: 40795 - DNA, 22 bp, synthetic construct
  misc_feature 1..22: note = chemically synthesized
  source 1..22: mol_type = other DNA
ttcttttcatttcatttcccaa

SEQ ID NO: 40796 - DNA, 22 bp, synthetic construct
  misc_feature 1..22: note = chemically synthesized
  source 1..22: mol_type = other DNA
tcttttcatttcatttcccaaa

SEQ ID NO: 40797 - DNA, 22 bp, synthetic construct
  misc_feature 1..22: note = chemically synthesized
  source 1..22: mol_type = other DNA
cttttcatttcatttcccaaat

SEQ ID NO: 40798 - DNA, 22 bp, synthetic construct
  misc_feature 1..22: note = chemically synthesized
  source 1..22: mol_type = other DNA
ttttcatttcatttcccaaatc

SEQ ID NO: 40799 - DNA, 22 bp, synthetic construct
  misc_feature 1..22: note = chemically synthesized
  source 1..22: mol_type = other DNA
ttcatttcatttcccaaatcaa

SEQ ID NO: 40800 - DNA, 22 bp, synthetic construct
  misc_feature 1..22: note = chemically synthesized
  source 1..22: mol_type = other DNA
tcatttcatttcccaaatcaaa

SEQ ID NO: 40801 - DNA, 22 bp, synthetic construct
  misc_feature 1..22: note = chemically synthesized
  source 1..22: mol_type = other DNA
catttcatttcccaaatcaaat

SEQ ID NO: 40802 - DNA, 22 bp, synthetic construct
  misc_feature 1..22: note = chemically synthesized
  source 1..22: mol_type = other DNA
atttcatttcccaaatcaaatc

SEQ ID NO: 40803 - DNA, 22 bp, synthetic construct
  misc_feature 1..22: note = chemically synthesized
  source 1..22: mol_type = other DNA
catttcccaaatcaaatcattt

SEQ ID NO: 40804 - DNA, 22 bp, synthetic construct
  misc_feature 1..22: note = chemically synthesized
  source 1..22: mol_type = other DNA
atttcccaaatcaaatcatttg

SEQ ID NO: 40805 - DNA, 22 bp, synthetic construct
  misc_feature 1..22: note = chemically synthesized
  source 1..22: mol_type = other DNA
cccaaatcaaatcatttgtttc

SEQ ID NO: 40806 - DNA, 22 bp, synthetic construct
  misc_feature 1..22: note = chemically synthesized
  source 1..22: mol_type = other DNA
ccaaatcaaatcatttgtttct

SEQ ID NO: 40807 - DNA, 22 bp, synthetic construct
  misc_feature 1..22: note = chemically synthesized
  source 1..22: mol_type = other DNA
gtttcttcaaataaagaatctc

SEQ ID NO: 40808 - DNA, 22 bp, synthetic construct
  misc_feature 1..22: note = chemically synthesized
  source 1..22: mol_type = other DNA
tttcttcaaataaagaatctct

SEQ ID NO: 40809 - DNA, 22 bp, synthetic construct
  misc_feature 1..22: note = chemically synthesized
  source 1..22: mol_type = other DNA
cttcaaataaagaatctctatt

SEQ ID NO: 40810 - DNA, 22 bp, synthetic construct
  misc_feature 1..22: note = chemically synthesized
  source 1..22: mol_type = other DNA
ttcaaataaagaatctctattt

SEQ ID NO: 40811 - DNA, 22 bp, synthetic construct
  misc_feature 1..22: note = chemically synthesized
  source 1..22: mol_type = other DNA
caaataaagaatctctatttcc

SEQ ID NO: 40812 - DNA, 22 bp, synthetic construct
  misc_feature 1..22: note = chemically synthesized
  source 1..22: mol_type = other DNA
aaataaagaatctctatttccc

SEQ ID NO: 40813 - DNA, 22 bp, synthetic construct
  misc_feature 1..22: note = chemically synthesized
  source 1..22: mol_type = other DNA
tatttcccccttatgttcttca

SEQ ID NO: 40814 - DNA, 22 bp, synthetic construct
  misc_feature 1..22: note = chemically synthesized
  source 1..22: mol_type = other DNA
tttcccccttatgttcttcagc

SEQ ID NO: 40815 - DNA, 22 bp, synthetic construct
  misc_feature 1..22: note = chemically synthesized
  source 1..22: mol_type = other DNA
cccccttatgttcttcagcaaa

SEQ ID NO: 40816 - DNA, 22 bp, synthetic construct
  misc_feature 1..22: note = chemically synthesized
  source 1..22: mol_type = other DNA
ccccttatgttcttcagcaaat

SEQ ID NO: 40817 - DNA, 22 bp, synthetic construct
  misc_feature 1..22: note = chemically synthesized
  source 1..22: mol_type = other DNA
atgttcttcagcaaataaaaat

SEQ ID NO: 40818 - DNA, 22 bp, synthetic construct
  misc_feature 1..22: note = chemically synthesized
  source 1..22: mol_type = other DNA
tgttcttcagcaaataaaaatg

SEQ ID NO: 40819 - DNA, 22 bp, synthetic construct
  misc_feature 1..22: note = chemically synthesized
  source 1..22: mol_type = other DNA
ttcagcaaataaaaatgtttgc

SEQ ID NO: 40820 - DNA, 22 bp, synthetic construct
  misc_feature 1..22: note = chemically synthesized
  source 1..22: mol_type = other DNA
cagcaaataaaaatgtttgcat

SEQ ID NO: 40821 - DNA, 22 bp, synthetic construct
  misc_feature 1..22: note = chemically synthesized
  source 1..22: mol_type = other DNA
agcaaataaaaatgtttgcatc

SEQ ID NO: 40822 - DNA, 22 bp, synthetic construct
  misc_feature 1..22: note = chemically synthesized
  source 1..22: mol_type = other DNA
gcatctaccaaagtgtatatga

SEQ ID NO: 40823 - DNA, 22 bp, synthetic construct
  misc_feature 1..22: note = chemically synthesized
  source 1..22: mol_type = other DNA
catctaccaaagtgtatatgaa

SEQ ID NO: 40824 - DNA, 22 bp, synthetic construct
  misc_feature 1..22: note = chemically synthesized
  source 1..22: mol_type = other DNA
ccaaagtgtatatgaatttgaa

SEQ ID NO: 40825 - DNA, 22 bp, synthetic construct
  misc_feature 1..22: note = chemically synthesized
  source 1..22: mol_type = other DNA
gaaatacgtaatctaacaaaca

SEQ ID NO: 40826 - DNA, 22 bp, synthetic construct
  misc_feature 1..22: note = chemically synthesized
  source 1..22: mol_type = other DNA
aaatacgtaatctaacaaacaa

SEQ ID NO: 40827 - DNA, 22 bp, synthetic construct
  misc_feature 1..22: note = chemically synthesized
  source 1..22: mol_type = other DNA
acaaacaaggatgttttaagat

SEQ ID NO: 40828 - DNA, 22 bp, synthetic construct
  misc_feature 1..22: note = chemically synthesized
  source 1..22: mol_type = other DNA
taagatctctgagtaagatgca

SEQ ID NO: 40829 - DNA, 22 bp, synthetic construct
  misc_feature 1..22: note = chemically synthesized
  source 1..22: mol_type = other DNA
aagatctctgagtaagatgcat

SEQ ID NO: 40830 - DNA, 22 bp, synthetic construct
  misc_feature 1..22: note = chemically synthesized
  source 1..22: mol_type = other DNA
agatctctgagtaagatgcata

SEQ ID NO: 40831 - DNA, 22 bp, synthetic construct
  misc_feature 1..22: note = chemically synthesized
  source 1..22: mol_type = other DNA
tgagtaagatgcatagttgcaa

SEQ ID NO: 40832 - DNA, 22 bp, synthetic construct
  misc_feature 1..22: note = chemically synthesized
  source 1..22: mol_type = other DNA
agtaagatgcatagttgcaaat

SEQ ID NO: 40833 - DNA, 22 bp, synthetic construct
  misc_feature 1..22: note = chemically synthesized
  source 1..22: mol_type = other DNA
caaataaaaggagttttcaagg

SEQ ID NO: 40834 - DNA, 22 bp, synthetic construct
  misc_feature 1..22: note = chemically synthesized
  source 1..22: mol_type = other DNA
tcaaggataaaaaatgtaaata

SEQ ID NO: 40835 - DNA, 22 bp, synthetic construct
  misc_feature 1..22: note = chemically synthesized
  source 1..22: mol_type = other DNA
caaggataaaaaatgtaaataa

SEQ ID NO: 40836 - DNA, 22 bp, synthetic construct
  misc_feature 1..22: note = chemically synthesized
  source 1..22: mol_type = other DNA
aaggataaaaaatgtaaataaa

SEQ ID NO: 40837 - DNA, 22 bp, synthetic construct
  misc_feature 1..22: note = chemically synthesized
  source 1..22: mol_type = other DNA
ataaatgtgtaccatcagaaac

SEQ ID NO: 40838 - DNA, 22 bp, synthetic construct
  misc_feature 1..22: note = chemically synthesized
  source 1..22: mol_type = other DNA
atggtatattctcctggaaaag

SEQ ID NO: 40839 - DNA, 22 bp, synthetic construct
  misc_feature 1..22: note = chemically synthesized
  source 1..22: mol_type = other DNA
tggtatattctcctggaaaaga

SEQ ID NO: 40840 - DNA, 22 bp, synthetic construct
  misc_feature 1..22: note = chemically synthesized
  source 1..22: mol_type = other DNA
tcctggaaaagatgaagatgaa

SEQ ID NO: 40841 - DNA, 22 bp, synthetic construct
  misc_feature 1..22: note = chemically synthesized
  source 1..22: mol_type = other DNA
ctggaaaagatgaagatgaaga

SEQ ID NO: 40842 - DNA, 22 bp, synthetic construct
  misc_feature 1..22: note = chemically synthesized
  source 1..22: mol_type = other DNA
gaaaagatgaagatgaagaaaa

SEQ ID NO: 40843 - DNA, 22 bp, synthetic construct
  misc_feature 1..22: note = chemically synthesized
  source 1..22: mol_type = other DNA
cagaagaggagaaattctttgg

SEQ ID NO: 40844 - DNA, 22 bp, synthetic construct
  misc_feature 1..22: note = chemically synthesized
  source 1..22: mol_type = other DNA
tttggaaattttgcatttttgt

SEQ ID NO: 40845 - DNA, 22 bp, synthetic construct
  misc_feature 1..22: note = chemically synthesized
  source 1..22: mol_type = other DNA
tggaaattttgcatttttgtgg

SEQ ID NO: 40846 - DNA, 22 bp, synthetic construct
  misc_feature 1..22: note = chemically synthesized
  source 1..22: mol_type = other DNA
ggaaattttgcatttttgtgga

SEQ ID NO: 40847 - DNA, 22 bp, synthetic construct
  misc_feature 1..22: note = chemically synthesized
  source 1..22: mol_type = other DNA
gaaattttgcatttttgtggat

SEQ ID NO: 40848 - DNA, 22 bp, synthetic construct
  misc_feature 1..22: note = chemically synthesized
  source 1..22: mol_type = other DNA
tgcatttttgtggatagtggtt

SEQ ID NO: 40849 - DNA, 22 bp, synthetic construct
  misc_feature 1..22: note = chemically synthesized
  source 1..22: mol_type = other DNA
gcatttttgtggatagtggttt

SEQ ID NO: 40850 - DNA, 22 bp, synthetic construct
  misc_feature 1..22: note = chemically synthesized
  source 1..22: mol_type = other DNA
catttttgtggatagtggtttt

SEQ ID NO: 40851 - DNA, 22 bp, synthetic construct
  misc_feature 1..22: note = chemically synthesized
  source 1..22: mol_type = other DNA
ttgtggatagtggttttgaaga

SEQ ID NO: 40852 - DNA, 22 bp, synthetic construct
  misc_feature 1..22: note = chemically synthesized
  source 1..22: mol_type = other DNA
tgtggatagtggttttgaagaa

SEQ ID NO: 40853 - DNA, 22 bp, synthetic construct
  misc_feature 1..22: note = chemically synthesized
  source 1..22: mol_type = other DNA
gtggatagtggttttgaagaaa

SEQ ID NO: 40854 - DNA, 22 bp, synthetic construct
  misc_feature 1..22: note = chemically synthesized
  source 1..22: mol_type = other DNA
tggatagtggttttgaagaaag

SEQ ID NO: 40855 - DNA, 22 bp, synthetic construct
  misc_feature 1..22: note = chemically synthesized
  source 1..22: mol_type = other DNA
tgaagaaagcttagatatattt

SEQ ID NO: 40856 - DNA, 22 bp, synthetic construct
  misc_feature 1..22: note = chemically synthesized
  source 1..22: mol_type = other DNA
gaagaaagcttagatatattta

SEQ ID NO: 40857 - DNA, 22 bp, synthetic construct
  misc_feature 1..22: note = chemically synthesized
  source 1..22: mol_type = other DNA
aagaaagcttagatatatttaa

SEQ ID NO: 40858 - DNA, 22 bp, synthetic construct
  misc_feature 1..22: note = chemically synthesized
  source 1..22: mol_type = other DNA
agatatatttaaatatgttgct

SEQ ID NO: 40859 - DNA, 22 bp, synthetic construct
  misc_feature 1..22: note = chemically synthesized
  source 1..22: mol_type = other DNA
gatatatttaaatatgttgcta

SEQ ID NO: 40860 - DNA, 22 bp, synthetic construct
  misc_feature 1..22: note = chemically synthesized
  source 1..22: mol_type = other DNA
aaatatgttgctaagatgtgac

SEQ ID NO: 40861 - DNA, 22 bp, synthetic construct
  misc_feature 1..22: note = chemically synthesized
  source 1..22: mol_type = other DNA
aatatgttgctaagatgtgact

SEQ ID NO: 40862 - DNA, 22 bp, synthetic construct
  misc_feature 1..22: note = chemically synthesized
  source 1..22: mol_type = other DNA
ctaagatgtgactcccacactt

SEQ ID NO: 40863 - DNA, 22 bp, synthetic construct
  misc_feature 1..22: note = chemically synthesized
  source 1..22: mol_type = other DNA
agatgtgactcccacactttaa

SEQ ID NO: 40864 - DNA, 22 bp, synthetic construct
  misc_feature 1..22: note = chemically synthesized
  source 1..22: mol_type = other DNA
ccacactttaaagaaaagttct

SEQ ID NO: 40865 - DNA, 22 bp, synthetic construct
  misc_feature 1..22: note = chemically synthesized
  source 1..22: mol_type = other DNA
taaagaaaagttcttcatttta

SEQ ID NO: 40866 - DNA, 22 bp, synthetic construct
  misc_feature 1..22: note = chemically synthesized
  source 1..22: mol_type = other DNA
aaagaaaagttcttcattttag

SEQ ID NO: 40867 - DNA, 22 bp, synthetic construct
  misc_feature 1..22: note = chemically synthesized
  source 1..22: mol_type = other DNA
aagaaaagttcttcattttagt

SEQ ID NO: 40868 - DNA, 22 bp, synthetic construct
  misc_feature 1..22: note = chemically synthesized
  source 1..22: mol_type = other DNA
ttcattttagttgcccttgcaa

SEQ ID NO: 40869 - DNA, 22 bp, synthetic construct
  misc_feature 1..22: note = chemically synthesized
  source 1..22: mol_type = other DNA
cattttagttgcccttgcaaat

SEQ ID NO: 40870 - DNA, 22 bp, synthetic construct
  misc_feature 1..22: note = chemically synthesized
  source 1..22: mol_type = other DNA
attttagttgcccttgcaaatt

SEQ ID NO: 40871 - DNA, 22 bp, synthetic construct
  misc_feature 1..22: note = chemically synthesized
  source 1..22: mol_type = other DNA
tagttgcccttgcaaattggct

SEQ ID NO: 40872 - DNA, 22 bp, synthetic construct
  misc_feature 1..22: note = chemically synthesized
  source 1..22: mol_type = other DNA
agttgcccttgcaaattggcta

SEQ ID NO: 40873 - DNA, 22 bp, synthetic construct
  misc_feature 1..22: note = chemically synthesized
  source 1..22: mol_type = other DNA
gttgcccttgcaaattggctaa

SEQ ID NO: 40874 - DNA, 22 bp, synthetic construct
  misc_feature 1..22: note = chemically synthesized
  source 1..22: mol_type = other DNA
cccttgcaaattggctaagttt

SEQ ID NO: 40875 - DNA, 22 bp, synthetic construct
  misc_feature 1..22: note = chemically synthesized
  source 1..22: mol_type = other DNA
gcaaattggctaagtttatttt

SEQ ID NO: 40876 - DNA, 22 bp, synthetic construct
  misc_feature 1..22: note = chemically synthesized
  source 1..22: mol_type = other DNA
caaattggctaagtttattttt

SEQ ID NO: 40877 - DNA, 22 bp, synthetic construct
  misc_feature 1..22: note = chemically synthesized
  source 1..22: mol_type = other DNA
gctaagtttatttttcctcaac

SEQ ID NO: 40878 - DNA, 22 bp, synthetic construct
  misc_feature 1..22: note = chemically synthesized
  source 1..22: mol_type = other DNA
agtttatttttcctcaacaaat

SEQ ID NO: 40879 - DNA, 22 bp, synthetic construct
  misc_feature 1..22: note = chemically synthesized
  source 1..22: mol_type = other DNA
atttttcctcaacaaataattt

SEQ ID NO: 40880 - DNA, 22 bp, synthetic construct
  misc_feature 1..22: note = chemically synthesized
  source 1..22: mol_type = other DNA
tttttcctcaacaaataatttt

SEQ ID NO: 40881 - DNA, 22 bp, synthetic construct
  misc_feature 1..22: note = chemically synthesized
  source 1..22: mol_type = other DNA
ttcctcaacaaataattttgat

SEQ ID NO: 40882 - DNA, 22 bp, synthetic construct
  misc_feature 1..22: note = chemically synthesized
  source 1..22: mol_type = other DNA
tcctcaacaaataattttgatg

SEQ ID NO: 40883 - DNA, 22 bp, synthetic construct
  misc_feature 1..22: note = chemically synthesized
  source 1..22: mol_type = other DNA
cctcaacaaataattttgatgg

SEQ ID NO: 40884 - DNA, 22 bp, synthetic construct
  misc_feature 1..22: note = chemically synthesized
  source 1..22: mol_type = other DNA
ctcaacaaataattttgatggt

SEQ ID NO: 40885 - DNA, 22 bp, synthetic construct
  misc_feature 1..22: note = chemically synthesized
  source 1..22: mol_type = other DNA
aacaaataattttgatggtttc

SEQ ID NO: 40886 - DNA, 22 bp, synthetic construct
  misc_feature 1..22: note = chemically synthesized
  source 1..22: mol_type = other DNA
tgatggtttctaaaattgtcca

SEQ ID NO: 40887 - DNA, 22 bp, synthetic construct
  misc_feature 1..22: note = chemically synthesized
  source 1..22: mol_type = other DNA
gatggtttctaaaattgtccag

SEQ ID NO: 40888 - DNA, 22 bp, synthetic construct
  misc_feature 1..22: note = chemically synthesized
  source 1..22: mol_type = other DNA
atggtttctaaaattgtccaga

SEQ ID NO: 40889 - DNA, 22 bp, synthetic construct
  misc_feature 1..22: note = chemically synthesized
  source 1..22: mol_type = other DNA
ctaaaattgtccagaatttgag

SEQ ID NO: 40890 - DNA, 22 bp, synthetic construct
  misc_feature 1..22: note = chemically synthesized
  source 1..22: mol_type = other DNA
taaaattgtccagaatttgagg

SEQ ID NO: 40891 - DNA, 22 bp, synthetic construct
  misc_feature 1..22: note = chemically synthesized
  source 1..22: mol_type = other DNA
aaattgtccagaatttgaggaa

SEQ ID NO: 40892 - DNA, 22 bp, synthetic construct
  misc_feature 1..22: note = chemically synthesized
  source 1..22: mol_type = other DNA
tccagaatttgaggaaatactt

SEQ ID NO: 40893 - DNA, 22 bp, synthetic construct
  misc_feature 1..22: note = chemically synthesized
  source 1..22: mol_type = other DNA
gaggaaatacttagatgtagta

SEQ ID NO: 40894 - DNA, 22 bp, synthetic construct
  misc_feature 1..22: note = chemically synthesized
  source 1..22: mol_type = other DNA
aggaaatacttagatgtagtag

SEQ ID NO: 40895 - DNA, 22 bp, synthetic construct
  misc_feature 1..22: note = chemically synthesized
  source 1..22: mol_type = other DNA
agatgtagtagatgacatcaat

SEQ ID NO: 40896 - DNA, 22 bp, synthetic construct
  misc_feature 1..22: note = chemically synthesized
  source 1..22: mol_type = other DNA
gatgtagtagatgacatcaatt

SEQ ID NO: 40897 - DNA, 22 bp, synthetic construct
  misc_feature 1..22: note = chemically synthesized
  source 1..22: mol_type = other DNA
atgttaacttagatttattgtt

SEQ ID NO: 40898 - DNA, 22 bp, synthetic construct
  misc_feature 1..22: note = chemically synthesized
  source 1..22: mol_type = other DNA
tgttaacttagatttattgttg

SEQ ID NO: 40899 - DNA, 22 bp, synthetic construct
  misc_feature 1..22: note = chemically synthesized
  source 1..22: mol_type = other DNA
acttagatttattgttggatgg

SEQ ID NO: 40900 - DNA, 22 bp, synthetic construct
  misc_feature 1..22: note = chemically synthesized
  source 1..22: mol_type = other DNA
agatttattgttggatggttaa

SEQ ID NO: 40901 - DNA, 22 bp, synthetic construct
  misc_feature 1..22: note = chemically synthesized
  source 1..22: mol_type = other DNA
gatttattgttggatggttaag

SEQ ID NO: 40902 - DNA, 22 bp, synthetic construct
  misc_feature 1..22: note = chemically synthesized
  source 1..22: mol_type = other DNA
attgttggatggttaagttaat

SEQ ID NO: 40903 - DNA, 22 bp, synthetic construct
  misc_feature 1..22: note = chemically synthesized
  source 1..22: mol_type = other DNA
ttgttggatggttaagttaatc

SEQ ID NO: 40904 - DNA, 22 bp, synthetic construct
  misc_feature 1..22: note = chemically synthesized
  source 1..22: mol_type = other DNA
ttggatggttaagttaatcatg

SEQ ID NO: 40905 - DNA, 22 bp, synthetic construct
  misc_feature 1..22: note = chemically synthesized
  source 1..22: mol_type = other DNA
gatggttaagttaatcatgtct

SEQ ID NO: 40906 - DNA, 22 bp, synthetic construct
  misc_feature 1..22: note = chemically synthesized
  source 1..22: mol_type = other DNA
agttaatcatgtctgttcttgt

SEQ ID NO: 40907 - DNA, 22 bp, synthetic construct
  misc_feature 1..22: note = chemically synthesized
  source 1..22: mol_type = other DNA
atcatgtctgttcttgtccagt

SEQ ID NO: 40908 - DNA, 22 bp, synthetic construct
  misc_feature 1..22: note = chemically synthesized
  source 1..22: mol_type = other DNA
ttcttgtccagtctagaagttt

SEQ ID NO: 40909 - DNA, 22 bp, synthetic construct
  misc_feature 1..22: note = chemically synthesized
  source 1..22: mol_type = other DNA
ttgtccagtctagaagtttctg

SEQ ID NO: 40910 - DNA, 22 bp, synthetic construct
  misc_feature 1..22: note = chemically synthesized
  source 1..22: mol_type = other DNA
gtccagtctagaagtttctgct

SEQ ID NO: 40911 - DNA, 22 bp, synthetic construct
  misc_feature 1..22: note = chemically synthesized
  source 1..22: mol_type = other DNA
tccagtctagaagtttctgctt

SEQ ID NO: 40912 - DNA, 22 bp, synthetic construct
  misc_feature 1..22: note = chemically synthesized
  source 1..22: mol_type = other DNA
gaagtttctgcttcctcctcat

SEQ ID NO: 40913 - DNA, 22 bp, synthetic construct
  misc_feature 1..22: note = chemically synthesized
  source 1..22: mol_type = other DNA
ctgcttcctcctcatgtgttct

SEQ ID NO: 40914 - DNA, 22 bp, synthetic construct
  misc_feature 1..22: note = chemically synthesized
  source 1..22: mol_type = other DNA
tgcttcctcctcatgtgttcta

SEQ ID NO: 40915 - DNA, 22 bp, synthetic construct
  misc_feature 1..22: note = chemically synthesized
  source 1..22: mol_type = other DNA
cttcctcctcatgtgttctatt

SEQ ID NO: 40916 - DNA, 22 bp, synthetic construct
  misc_feature 1..22: note = chemically synthesized
  source 1..22: mol_type = other DNA
cctcctcatgtgttctattctg

SEQ ID NO: 40917 - DNA, 22 bp, synthetic construct
  misc_feature 1..22: note = chemically synthesized
  source 1..22: mol_type = other DNA
ctcctcatgtgttctattctgt

SEQ ID NO: 40918 - DNA, 22 bp, synthetic construct
  misc_feature 1..22: note = chemically synthesized
  source 1..22: mol_type = other DNA
ctcatgtgttctattctgtcct

SEQ ID NO: 40919 - DNA, 22 bp, synthetic construct
  misc_feature 1..22: note = chemically synthesized
  source 1..22: mol_type = other DNA
atgtgttctattctgtcctcat

SEQ ID NO: 40920 - DNA, 22 bp, synthetic construct
  misc_feature 1..22: note = chemically synthesized
  source 1..22: mol_type = other DNA
tattctgtcctcatcacataac

SEQ ID NO: 40921 - DNA, 22 bp, synthetic construct
  misc_feature 1..22: note = chemically synthesized
  source 1..22: mol_type = other DNA
ttctgtcctcatcacataacat

SEQ ID NO: 40922 - DNA, 22 bp, synthetic construct
  misc_feature 1..22: note = chemically synthesized
  source 1..22: mol_type = other DNA
tgtcctcatcacataacatctg

SEQ ID NO: 40923 - DNA, 22 bp, synthetic construct
  misc_feature 1..22: note = chemically synthesized
  source 1..22: mol_type = other DNA
tcctcatcacataacatctgaa

SEQ ID NO: 40924 - DNA, 22 bp, synthetic construct
  misc_feature 1..22: note = chemically synthesized
  source 1..22: mol_type = other DNA
atcacataacatctgaactgtg

SEQ ID NO: 40925 - DNA, 22 bp, synthetic construct
  misc_feature 1..22: note = chemically synthesized
  source 1..22: mol_type = other DNA
aactgtgatttgacagtgtcct

SEQ ID NO: 40926 - DNA, 22 bp, synthetic construct
  misc_feature 1..22: note = chemically synthesized
  source 1..22: mol_type = other DNA
tgatttgacagtgtccttatta

SEQ ID NO: 40927 - DNA, 22 bp, synthetic construct
  misc_feature 1..22: note = chemically synthesized
  source 1..22: mol_type = other DNA
gacagtgtccttattatcagac

SEQ ID NO: 40928 - DNA, 22 bp, synthetic construct
  misc_feature 1..22: note = chemically synthesized
  source 1..22: mol_type = other DNA
acagtgtccttattatcagact

SEQ ID NO: 40929 - DNA, 22 bp, synthetic construct
  misc_feature 1..22: note = chemically synthesized
  source 1..22: mol_type = other DNA
attatcagactctgctcaatga

SEQ ID NO: 40930 - DNA, 22 bp, synthetic construct
  misc_feature 1..22: note = chemically synthesized
  source 1..22: mol_type = other DNA
ttatcagactctgctcaatgac

SEQ ID NO: 40931 - DNA, 22 bp, synthetic construct
  misc_feature 1..22: note = chemically synthesized
  source 1..22: mol_type = other DNA
tcagactctgctcaatgacagt

SEQ ID NO: 40932 - DNA, 22 bp, synthetic construct
  misc_feature 1..22: note = chemically synthesized
  source 1..22: mol_type = other DNA
tgctcaatgacagtttaaactt

SEQ ID NO: 40933 - DNA, 22 bp, synthetic construct
  misc_feature 1..22: note = chemically synthesized
  source 1..22: mol_type = other DNA
ctcaatgacagtttaaacttct

SEQ ID NO: 40934 - DNA, 22 bp, synthetic construct
  misc_feature 1..22: note = chemically synthesized
  source 1..22: mol_type = other DNA
aatgacagtttaaacttctttt

SEQ ID NO: 40935 - DNA, 22 bp, synthetic construct
  misc_feature 1..22: note = chemically synthesized
  source 1..22: mol_type = other DNA
aaacttctttttgatacagtaa

SEQ ID NO: 40936 - DNA, 22 bp, synthetic construct
  misc_feature 1..22: note = chemically synthesized
  source 1..22: mol_type = other DNA
aacttctttttgatacagtaaa

SEQ ID NO: 40937 - DNA, 22 bp, synthetic construct
  misc_feature 1..22: note = chemically synthesized
  source 1..22: mol_type = other DNA
ctttttgatacagtaaaaaact

SEQ ID NO: 40938 - DNA, 22 bp, synthetic construct
  misc_feature 1..22: note = chemically synthesized
  source 1..22: mol_type = other DNA
tttttgatacagtaaaaaactt

SEQ ID NO: 40939 - DNA, 22 bp, synthetic construct
  misc_feature 1..22: note = chemically synthesized
  source 1..22: mol_type = other DNA
tttgatacagtaaaaaactttt

SEQ ID NO: 40940 - DNA, 22 bp, synthetic construct
  misc_feature 1..22: note = chemically synthesized
  source 1..22: mol_type = other DNA
ttgatacagtaaaaaacttttc

SEQ ID NO: 40941 - DNA, 22 bp, synthetic construct
  misc_feature 1..22: note = chemically synthesized
  source 1..22: mol_type = other DNA
tgatacagtaaaaaacttttcc

SEQ ID NO: 40942 - DNA, 22 bp, synthetic construct
  misc_feature 1..22: note = chemically synthesized
  source 1..22: mol_type = other DNA
gatacagtaaaaaacttttcct

SEQ ID NO: 40943 - DNA, 22 bp, synthetic construct
  misc_feature 1..22: note = chemically synthesized
  source 1..22: mol_type = other DNA
atacagtaaaaaacttttcctt

SEQ ID NO: 40944 - DNA, 22 bp, synthetic construct
  misc_feature 1..22: note = chemically synthesized
  source 1..22: mol_type = other DNA
ttccttaaagatgaaattctta

SEQ ID NO: 40945 - DNA, 22 bp, synthetic construct
  misc_feature 1..22: note = chemically synthesized
  source 1..22: mol_type = other DNA
tccttaaagatgaaattcttaa

SEQ ID NO: 40946 - DNA, 22 bp, synthetic construct
  misc_feature 1..22: note = chemically synthesized
  source 1..22: mol_type = other DNA
ccttaaagatgaaattcttaag

SEQ ID NO: 40947 - DNA, 22 bp, synthetic construct
  misc_feature 1..22: note = chemically synthesized
  source 1..22: mol_type = other DNA
cttaaagatgaaattcttaagg

SEQ ID NO: 40948 - DNA, 22 bp, synthetic construct
  misc_feature 1..22: note = chemically synthesized
  source 1..22: mol_type = other DNA
aaagatgaaattcttaaggaca

SEQ ID NO: 40949 - DNA, 22 bp, synthetic construct
  misc_feature 1..22: note = chemically synthesized
  source 1..22: mol_type = other DNA
aagatgaaattcttaaggacaa

SEQ ID NO: 40950 - DNA, 22 bp, synthetic construct
  misc_feature 1..22: note = chemically synthesized
  source 1..22: mol_type = other DNA
ttaaggacaattagcttgtgta

SEQ ID NO: 40951 - DNA, 22 bp, synthetic construct
  misc_feature 1..22: note = chemically synthesized
  source 1..22: mol_type = other DNA
aaggacaattagcttgtgtaga

SEQ ID NO: 40952 - DNA, 22 bp, synthetic construct
  misc_feature 1..22: note = chemically synthesized
  source 1..22: mol_type = other DNA
aggacaattagcttgtgtagac

SEQ ID NO: 40953 - DNA, 22 bp, synthetic construct
  misc_feature 1..22: note = chemically synthesized
  source 1..22: mol_type = other DNA
gcttgtgtagactcatatgaaa

SEQ ID NO: 40954 - DNA, 22 bp, synthetic construct
  misc_feature 1..22: note = chemically synthesized
  source 1..22: mol_type = other DNA
gtgtagactcatatgaaaattg

SEQ ID NO: 40955 - DNA, 22 bp, synthetic construct
  misc_feature 1..22: note = chemically synthesized
  source 1..22: mol_type = other DNA
tgtagactcatatgaaaattgc

SEQ ID NO: 40956 - DNA, 22 bp, synthetic construct
  misc_feature 1..22: note = chemically synthesized
  source 1..22: mol_type = other DNA
atatgaaaattgcttgcatttt

SEQ ID NO: 40957 - DNA, 22 bp, synthetic construct
  misc_feature 1..22: note = chemically synthesized
  source 1..22: mol_type = other DNA
cttgcattttggagttacatta

SEQ ID NO: 40958 - DNA, 22 bp, synthetic construct
  misc_feature 1..22: note = chemically synthesized
  source 1..22: mol_type = other DNA
gcattttggagttacattagct

SEQ ID NO: 40959 - DNA, 22 bp, synthetic construct
  misc_feature 1..22: note = chemically synthesized
  source 1..22: mol_type = other DNA
cattttggagttacattagctc

SEQ ID NO: 40960 - DNA, 22 bp, synthetic construct
  misc_feature 1..22: note = chemically synthesized
  source 1..22: mol_type = other DNA
tggagttacattagctcttctc

SEQ ID NO: 40961 - DNA, 22 bp, synthetic construct
  misc_feature 1..22: note = chemically synthesized
  source 1..22: mol_type = other DNA
ggagttacattagctcttctcc

SEQ ID NO: 40962 - DNA, 22 bp, synthetic construct
  misc_feature 1..22: note = chemically synthesized
  source 1..22: mol_type = other DNA
gagttacattagctcttctcct

SEQ ID NO: 40963 - DNA, 22 bp, synthetic construct
  misc_feature 1..22: note = chemically synthesized
  source 1..22: mol_type = other DNA
cattagctcttctcctttataa

SEQ ID NO: 40964 - DNA, 22 bp, synthetic construct
  misc_feature 1..22: note = chemically synthesized
  source 1..22: mol_type = other DNA
gctcttctcctttataaattaa

SEQ ID NO: 40965 - DNA, 22 bp, synthetic construct
  misc_feature 1..22: note = chemically synthesized
  source 1..22: mol_type = other DNA
ttctcctttataaattaatgaa

SEQ ID NO: 40966 - DNA, 22 bp, synthetic construct
  misc_feature 1..22: note = chemically synthesized
  source 1..22: mol_type = other DNA
ctcctttataaattaatgaatc

SEQ ID NO: 40967 - DNA, 22 bp, synthetic construct
  misc_feature 1..22: note = chemically synthesized
  source 1..22: mol_type = other DNA
tcctttataaattaatgaatcc

SEQ ID NO: 40968 - DNA, 22 bp, synthetic construct
  misc_feature 1..22: note = chemically synthesized
  source 1..22: mol_type = other DNA
ctttataaattaatgaatccta

SEQ ID NO: 40969 - DNA, 22 bp, synthetic construct
  misc_feature 1..22: note = chemically synthesized
  source 1..22: mol_type = other DNA
tataaattaatgaatcctattg

SEQ ID NO: 40970 - DNA, 22 bp, synthetic construct
  misc_feature 1..22: note = chemically synthesized
  source 1..22: mol_type = other DNA
ataaattaatgaatcctattgg

SEQ ID NO: 40971 - DNA, 22 bp, synthetic construct
  misc_feature 1..22: note = chemically synthesized
  source 1..22: mol_type = other DNA
taaattaatgaatcctattggt

SEQ ID NO: 40972 - DNA, 22 bp, synthetic construct
  misc_feature 1..22: note = chemically synthesized
  source 1..22: mol_type = other DNA
atgaatcctattggtaccatat

SEQ ID NO: 40973 - DNA, 22 bp, synthetic construct
  misc_feature 1..22: note = chemically synthesized
  source 1..22: mol_type = other DNA
ttggtaccatataatagcatca

SEQ ID NO: 40974 - DNA, 22 bp, synthetic construct
  misc_feature 1..22: note = chemically synthesized
  source 1..22: mol_type = other DNA
gtaccatataatagcatcaaca

SEQ ID NO: 40975 - DNA, 22 bp, synthetic construct
  misc_feature 1..22: note = chemically synthesized
  source 1..22: mol_type = other DNA
gccttttgtgtctcgcctttca

SEQ ID NO: 40976 - DNA, 22 bp, synthetic construct
  misc_feature 1..22: note = chemically synthesized
  source 1..22: mol_type = other DNA
ccttttgtgtctcgcctttcaa

SEQ ID NO: 40977 - DNA, 22 bp, synthetic construct
  misc_feature 1..22: note = chemically synthesized
  source 1..22: mol_type = other DNA
ttgtgtctcgcctttcaaaggg

SEQ ID NO: 40978 - DNA, 22 bp, synthetic construct
  misc_feature 1..22: note = chemically synthesized
  source 1..22: mol_type = other DNA
tgtgtctcgcctttcaaagggc

SEQ ID NO: 40979 - DNA, 22 bp, synthetic construct
  misc_feature 1..22: note = chemically synthesized
  source 1..22: mol_type = other DNA
gtgtctcgcctttcaaagggca

SEQ ID NO: 40980 - DNA, 22 bp, synthetic construct
  misc_feature 1..22: note = chemically synthesized
  source 1..22: mol_type = other DNA
tgtctcgcctttcaaagggcaa

SEQ ID NO: 40981 - DNA, 22 bp, synthetic construct
  misc_feature 1..22: note = chemically synthesized
  source 1..22: mol_type = other DNA
gcctttcaaagggcaattttcc

SEQ ID NO: 40982 - DNA, 22 bp, synthetic construct
  misc_feature 1..22: note = chemically synthesized
  source 1..22: mol_type = other DNA
tcaaagggcaattttccaaaaa

SEQ ID NO: 40983 - DNA, 22 bp, synthetic construct
  misc_feature 1..22: note = chemically synthesized
  source 1..22: mol_type = other DNA
caaagggcaattttccaaaaag

SEQ ID NO: 40984 - DNA, 22 bp, synthetic construct
  misc_feature 1..22: note = chemically synthesized
  source 1..22: mol_type = other DNA
aaagggcaattttccaaaaagt

SEQ ID NO: 40985 - DNA, 22 bp, synthetic construct
  misc_feature 1..22: note = chemically synthesized
  source 1..22: mol_type = other DNA
tccaaaaagtatattttgcatg

SEQ ID NO: 40986 - DNA, 22 bp, synthetic construct
  misc_feature 1..22: note = chemically synthesized
  source 1..22: mol_type = other DNA
ccaaaaagtatattttgcatgg

SEQ ID NO: 40987 - DNA, 22 bp, synthetic construct
  misc_feature 1..22: note = chemically synthesized
  source 1..22: mol_type = other DNA
caaaaagtatattttgcatggc

SEQ ID NO: 40988 - DNA, 22 bp, synthetic construct
  misc_feature 1..22: note = chemically synthesized
  source 1..22: mol_type = other DNA
tgcatggctcaggctaaaagta

SEQ ID NO: 40989 - DNA, 22 bp, synthetic construct
  misc_feature 1..22: note = chemically synthesized
  source 1..22: mol_type = other DNA
gcatggctcaggctaaaagtaa

SEQ ID NO: 40990 - DNA, 22 bp, synthetic construct
  misc_feature 1..22: note = chemically synthesized
  source 1..22: mol_type = other DNA
catggctcaggctaaaagtaat

SEQ ID NO: 40991 - DNA, 22 bp, synthetic construct
  misc_feature 1..22: note = chemically synthesized
  source 1..22: mol_type = other DNA
aggctaaaagtaatgtctccag

SEQ ID NO: 40992 - DNA, 22 bp, synthetic construct
  misc_feature 1..22: note = chemically synthesized
  source 1..22: mol_type = other DNA
aaagtaatgtctccagatgaag

SEQ ID NO: 40993 - DNA, 22 bp, synthetic construct
  misc_feature 1..22: note = chemically synthesized
  source 1..22: mol_type = other DNA
cagatgaagttctactttgtga

SEQ ID NO: 40994 - DNA, 22 bp, synthetic construct
  misc_feature 1..22: note = chemically synthesized
  source 1..22: mol_type = other DNA
tactttgtgaccattgattgtg

SEQ ID NO: 40995 - DNA, 22 bp, synthetic construct
  misc_feature 1..22: note = chemically synthesized
  source 1..22: mol_type = other DNA
ctttgtgaccattgattgtgac

SEQ ID NO: 40996 - DNA, 22 bp, synthetic construct
  misc_feature 1..22: note = chemically synthesized
  source 1..22: mol_type = other DNA
tgtgaccattgattgtgactat

SEQ ID NO: 40997 - DNA, 22 bp, synthetic construct
  misc_feature 1..22: note = chemically synthesized
  source 1..22: mol_type = other DNA
gtgaccattgattgtgactatt

SEQ ID NO: 40998 - DNA, 22 bp, synthetic construct
  misc_feature 1..22: note = chemically synthesized
  source 1..22: mol_type = other DNA
tgaccattgattgtgactattg

SEQ ID NO: 40999 - DNA, 22 bp, synthetic construct
  misc_feature 1..22: note = chemically synthesized
  source 1..22: mol_type = other DNA
attgtgactattgataagattt

SEQ ID NO: 41000 - DNA, 22 bp, synthetic construct
  misc_feature 1..22: note = chemically synthesized
  source 1..22: mol_type = other DNA
tgactattgataagatttacta

SEQ ID NO: 41001 - DNA, 22 bp, synthetic construct
  misc_feature 1..22: note = chemically synthesized
  source 1..22: mol_type = other DNA
ttgataagatttactatgtaaa

SEQ ID NO: 41002 - DNA, 22 bp, synthetic construct
  misc_feature 1..22: note = chemically synthesized
  source 1..22: mol_type = other DNA
ataagatttactatgtaaagta

SEQ ID NO: 41003 - DNA, 22 bp, synthetic construct
  misc_feature 1..22: note = chemically synthesized
  source 1..22: mol_type = other DNA
actatgtaaagtataagttact

SEQ ID NO: 41004 - DNA, 22 bp, synthetic construct
  misc_feature 1..22: note = chemically synthesized
  source 1..22: mol_type = other DNA
ctatgtaaagtataagttactg

SEQ ID NO: 41005 - DNA, 22 bp, synthetic construct
  misc_feature 1..22: note = chemically synthesized
  source 1..22: mol_type = other DNA
tgtaaagtataagttactggaa

SEQ ID NO: 41006 - DNA, 22 bp, synthetic construct
  misc_feature 1..22: note = chemically synthesized
  source 1..22: mol_type = other DNA
ctggaataatacatttaagaaa

SEQ ID NO: 41007 - DNA, 22 bp, synthetic construct
  misc_feature 1..22: note = chemically synthesized
  source 1..22: mol_type = other DNA
gaataatacatttaagaaatat

SEQ ID NO: 41008 - DNA, 22 bp, synthetic construct
  misc_feature 1..22: note = chemically synthesized
  source 1..22: mol_type = other DNA
aagaaatatagtagctattaaa

SEQ ID NO: 41009 - DNA, 22 bp, synthetic construct
  misc_feature 1..22: note = chemically synthesized
  source 1..22: mol_type = other DNA
agaaatatagtagctattaaaa

SEQ ID NO: 41010 - DNA, 22 bp, synthetic construct
  misc_feature 1..22: note = chemically synthesized
  source 1..22: mol_type = other DNA
ttaaaacctgtagtctgatgaa

SEQ ID NO: 41011 - DNA, 22 bp, synthetic construct
  misc_feature 1..22: note = chemically synthesized
  source 1..22: mol_type = other DNA
aaacctgtagtctgatgaaatg

SEQ ID NO: 41012 - DNA, 22 bp, synthetic construct
  misc_feature 1..22: note = chemically synthesized
  source 1..22: mol_type = other DNA
tagtctgatgaaatggaatatg

SEQ ID NO: 41013 - DNA, 22 bp, synthetic construct
  misc_feature 1..22: note = chemically synthesized
  source 1..22: mol_type = other DNA
atgaaatggaatatgttttgaa

SEQ ID NO: 41014 - DNA, 22 bp, synthetic construct
  misc_feature 1..22: note = chemically synthesized
  source 1..22: mol_type = other DNA
tgaaagacagcagtgaaaaatg

SEQ ID NO: 41015 - DNA, 22 bp, synthetic construct
  misc_feature 1..22: note = chemically synthesized
  source 1..22: mol_type = other DNA
gaaagacagcagtgaaaaatga

SEQ ID NO: 41016 - DNA, 22 bp, synthetic construct
  misc_feature 1..22: note = chemically synthesized
  source 1..22: mol_type = other DNA
aaagacagcagtgaaaaatgag

SEQ ID NO: 41017 - DNA, 22 bp, synthetic construct
  misc_feature 1..22: note = chemically synthesized
  source 1..22: mol_type = other DNA
ctttttgcaattgagttgaaga

SEQ ID NO: 41018 - DNA, 22 bp, synthetic construct
  misc_feature 1..22: note = chemically synthesized
  source 1..22: mol_type = other DNA
tttgcaattgagttgaagattg

SEQ ID NO: 41019 - DNA, 22 bp, synthetic construct
  misc_feature 1..22: note = chemically synthesized
  source 1..22: mol_type = other DNA
ttgcaattgagttgaagattga

SEQ ID NO: 41020 - DNA, 22 bp, synthetic construct
  misc_feature 1..22: note = chemically synthesized
  source 1..22: mol_type = other DNA
tgcaattgagttgaagattgat

SEQ ID NO: 41021 - DNA, 22 bp, synthetic construct
  misc_feature 1..22: note = chemically synthesized
  source 1..22: mol_type = other DNA
gcaattgagttgaagattgatg

SEQ ID NO: 41022 - DNA, 22 bp, synthetic construct
  misc_feature 1..22: note = chemically synthesized
  source 1..22: mol_type = other DNA
caattgagttgaagattgatgc

SEQ ID NO: 41023 - DNA, 22 bp, synthetic construct
  misc_feature 1..22: note = chemically synthesized
  source 1..22: mol_type = other DNA
agttgaagattgatgccaggat

SEQ ID NO: 41024 - DNA, 22 bp, synthetic construct
  misc_feature 1..22: note = chemically synthesized
  source 1..22: mol_type = other DNA
aagattgatgccaggatcttat

SEQ ID NO: 41025 - DNA, 22 bp, synthetic construct
  misc_feature 1..22: note = chemically synthesized
  source 1..22: mol_type = other DNA
atgccaggatcttattacctcc

SEQ ID NO: 41026 - DNA, 22 bp, synthetic construct
  misc_feature 1..22: note = chemically synthesized
  source 1..22: mol_type = other DNA
attacctccaggatttcacaaa

SEQ ID NO: 41027 - DNA, 22 bp, synthetic construct
  misc_feature 1..22: note = chemically synthesized
  source 1..22: mol_type = other DNA
ttacctccaggatttcacaaag

SEQ ID NO: 41028 - DNA, 22 bp, synthetic construct
  misc_feature 1..22: note = chemically synthesized
  source 1..22: mol_type = other DNA
cctccaggatttcacaaaggat

SEQ ID NO: 41029 - DNA, 22 bp, synthetic construct
  misc_feature 1..22: note = chemically synthesized
  source 1..22: mol_type = other DNA
caggatttcacaaaggatttct

SEQ ID NO: 41030 - DNA, 22 bp, synthetic construct
  misc_feature 1..22: note = chemically synthesized
  source 1..22: mol_type = other DNA
cacaaaggatttcttgagtcat

SEQ ID NO: 41031 - DNA, 22 bp, synthetic construct
  misc_feature 1..22: note = chemically synthesized
  source 1..22: mol_type = other DNA
acaaaggatttcttgagtcatc

SEQ ID NO: 41032 - DNA, 22 bp, synthetic construct
  misc_feature 1..22: note = chemically synthesized
  source 1..22: mol_type = other DNA
cttgagtcatccccttgctcta

SEQ ID NO: 41033 - DNA, 22 bp, synthetic construct
  misc_feature 1..22: note = chemically synthesized
  source 1..22: mol_type = other DNA
ttgagtcatccccttgctctag

SEQ ID NO: 41034 - DNA, 22 bp, synthetic construct
  misc_feature 1..22: note = chemically synthesized
  source 1..22: mol_type = other DNA
gagtcatccccttgctctagct

SEQ ID NO: 41035 - DNA, 22 bp, synthetic construct
  misc_feature 1..22: note = chemically synthesized
  source 1..22: mol_type = other DNA
agtcatccccttgctctagctc

SEQ ID NO: 41036 - DNA, 22 bp, synthetic construct
  misc_feature 1..22: note = chemically synthesized
  source 1..22: mol_type = other DNA
gctctagctcatgaacaaagta

SEQ ID NO: 41037 - DNA, 22 bp, synthetic construct
  misc_feature 1..22: note = chemically synthesized
  source 1..22: mol_type = other DNA
ctctagctcatgaacaaagtat

SEQ ID NO: 41038 - DNA, 22 bp, synthetic construct
  misc_feature 1..22: note = chemically synthesized
  source 1..22: mol_type = other DNA
tagctcatgaacaaagtattgc

SEQ ID NO: 41039 - DNA, 22 bp, synthetic construct
  misc_feature 1..22: note = chemically synthesized
  source 1..22: mol_type = other DNA
gctcatgaacaaagtattgctc

SEQ ID NO: 41040 - DNA, 22 bp, synthetic construct
  misc_feature 1..22: note = chemically synthesized
  source 1..22: mol_type = other DNA
atgaacaaagtattgctcaagt

SEQ ID NO: 41041 - DNA, 22 bp, synthetic construct
  misc_feature 1..22: note = chemically synthesized
  source 1..22: mol_type = other DNA
ctcaagtaatcgacagattatt

SEQ ID NO: 41042 - DNA, 22 bp, synthetic construct
  misc_feature 1..22: note = chemically synthesized
  source 1..22: mol_type = other DNA
aagtaatcgacagattatttgt

SEQ ID NO: 41043 - DNA, 22 bp, synthetic construct
  misc_feature 1..22: note = chemically synthesized
  source 1..22: mol_type = other DNA
tttgtgtattctcacatgtgat

SEQ ID NO: 41044 - DNA, 22 bp, synthetic construct
  misc_feature 1..22: note = chemically synthesized
  source 1..22: mol_type = other DNA
gtgtattctcacatgtgattat

SEQ ID NO: 41045 - DNA, 22 bp, synthetic construct
  misc_feature 1..22: note = chemically synthesized
  source 1..22: mol_type = other DNA
tgtattctcacatgtgattatt

SEQ ID NO: 41046 - DNA, 22 bp, synthetic construct
  misc_feature 1..22: note = chemically synthesized
  source 1..22: mol_type = other DNA
tcacatgtgattattatttagt

SEQ ID NO: 41047 - DNA, 22 bp, synthetic construct
  misc_feature 1..22: note = chemically synthesized
  source 1..22: mol_type = other DNA
acatgtgattattatttagtgc

SEQ ID NO: 41048 - DNA, 22 bp, synthetic construct
  misc_feature 1..22: note = chemically synthesized
  source 1..22: mol_type = other DNA
ttatttagtgctgtcacgggaa

SEQ ID NO: 41049 - DNA, 22 bp, synthetic construct
  misc_feature 1..22: note = chemically synthesized
  source 1..22: mol_type = other DNA
tttagtgctgtcacgggaaata

SEQ ID NO: 41050 - DNA, 22 bp, synthetic construct
  misc_feature 1..22: note = chemically synthesized
  source 1..22: mol_type = other DNA
agtgctgtcacgggaaatatcc

SEQ ID NO: 41051 - DNA, 22 bp, synthetic construct
  misc_feature 1..22: note = chemically synthesized
  source 1..22: mol_type = other DNA
gtgctgtcacgggaaatatcct

SEQ ID NO: 41052 - DNA, 22 bp, synthetic construct
  misc_feature 1..22: note = chemically synthesized
  source 1..22: mol_type = other DNA
tcacgggaaatatcctgcctaa

SEQ ID NO: 41053 - DNA, 22 bp, synthetic construct
  misc_feature 1..22: note = chemically synthesized
  source 1..22: mol_type = other DNA
cctaagtttactggaggtcttc

SEQ ID NO: 41054 - DNA, 22 bp, synthetic construct
  misc_feature 1..22: note = chemically synthesized
  source 1..22: mol_type = other DNA
agtttactggaggtcttcctcc

SEQ ID NO: 41055 - DNA, 22 bp, synthetic construct
  misc_feature 1..22: note = chemically synthesized
  source 1..22: mol_type = other DNA
actggaggtcttcctcccctta

SEQ ID NO: 41056 - DNA, 22 bp, synthetic construct
  misc_feature 1..22: note = chemically synthesized
  source 1..22: mol_type = other DNA
ctggaggtcttcctccccttac

SEQ ID NO: 41057 - DNA, 22 bp, synthetic construct
  misc_feature 1..22: note = chemically synthesized
  source 1..22: mol_type = other DNA
gaggtcttcctccccttacccc

SEQ ID NO: 41058 - DNA, 22 bp, synthetic construct
  misc_feature 1..22: note = chemically synthesized
  source 1..22: mol_type = other DNA
cctccccttacccctccctatg

SEQ ID NO: 41059 - DNA, 22 bp, synthetic construct
  misc_feature 1..22: note = chemically synthesized
  source 1..22: mol_type = other DNA
ctccccttacccctccctatgt

SEQ ID NO: 41060 - DNA, 22 bp, synthetic construct
  misc_feature 1..22: note = chemically synthesized
  source 1..22: mol_type = other DNA
cccttacccctccctatgtcct

SEQ ID NO: 41061 - DNA, 22 bp, synthetic construct
  misc_feature 1..22: note = chemically synthesized
  source 1..22: mol_type = other DNA
acccctccctatgtcctcctac

SEQ ID NO: 41062 - DNA, 22 bp, synthetic construct
  misc_feature 1..22: note = chemically synthesized
  source 1..22: mol_type = other DNA
cccctccctatgtcctcctacc

SEQ ID NO: 41063 - DNA, 22 bp, synthetic construct
  misc_feature 1..22: note = chemically synthesized
  source 1..22: mol_type = other DNA
cctatgtcctcctacctggtta

SEQ ID NO: 41064 - DNA, 22 bp, synthetic construct
  misc_feature 1..22: note = chemically synthesized
  source 1..22: mol_type = other DNA
tgtcctcctacctggttatcct

SEQ ID NO: 41065 - DNA, 22 bp, synthetic construct
  misc_feature 1..22: note = chemically synthesized
  source 1..22: mol_type = other DNA
ctacctggttatccttttcaat

SEQ ID NO: 41066 - DNA, 22 bp, synthetic construct
  misc_feature 1..22: note = chemically synthesized
  source 1..22: mol_type = other DNA
cctggttatccttttcaatcct

SEQ ID NO: 41067 - DNA, 22 bp, synthetic construct
  misc_feature 1..22: note = chemically synthesized
  source 1..22: mol_type = other DNA
gttatccttttcaatcctatta

SEQ ID NO: 41068 - DNA, 22 bp, synthetic construct
  misc_feature 1..22: note = chemically synthesized
  source 1..22: mol_type = other DNA
tccttttcaatcctattactct

SEQ ID NO: 41069 - DNA, 22 bp, synthetic construct
  misc_feature 1..22: note = chemically synthesized
  source 1..22: mol_type = other DNA
ttcaatcctattactctttcct

SEQ ID NO: 41070 - DNA, 22 bp, synthetic construct
  misc_feature 1..22: note = chemically synthesized
  source 1..22: mol_type = other DNA
tcaatcctattactctttcctt

SEQ ID NO: 41071 - DNA, 22 bp, synthetic construct
  misc_feature 1..22: note = chemically synthesized
  source 1..22: mol_type = other DNA
caatcctattactctttccttg

SEQ ID NO: 41072 - DNA, 22 bp, synthetic construct
  misc_feature 1..22: note = chemically synthesized
  source 1..22: mol_type = other DNA
aatcctattactctttccttgc

SEQ ID NO: 41073 - DNA, 22 bp, synthetic construct
  misc_feature 1..22: note = chemically synthesized
  source 1..22: mol_type = other DNA
ttactctttccttgcacactct

SEQ ID NO: 41074 - DNA, 22 bp, synthetic construct
  misc_feature 1..22: note = chemically synthesized
  source 1..22: mol_type = other DNA
ctctttccttgcacactctact

SEQ ID NO: 41075 - DNA, 22 bp, synthetic construct
  misc_feature 1..22: note = chemically synthesized
  source 1..22: mol_type = other DNA
tttccttgcacactctactcca

SEQ ID NO: 41076 - DNA, 22 bp, synthetic construct
  misc_feature 1..22: note = chemically synthesized
  source 1..22: mol_type = other DNA
tccttgcacactctactccagc

SEQ ID NO: 41077 - DNA, 22 bp, synthetic construct
  misc_feature 1..22: note = chemically synthesized
  source 1..22: mol_type = other DNA
ccttgcacactctactccagct

SEQ ID NO: 41078 - DNA, 22 bp, synthetic construct
  misc_feature 1..22: note = chemically synthesized
  source 1..22: mol_type = other DNA
cttgcacactctactccagctt

SEQ ID NO: 41079 - DNA, 22 bp, synthetic construct
  misc_feature 1..22: note = chemically synthesized
  source 1..22: mol_type = other DNA
gcacactctactccagcttagg

SEQ ID NO: 41080 - DNA, 22 bp, synthetic construct
  misc_feature 1..22: note = chemically synthesized
  source 1..22: mol_type = other DNA
cacactctactccagcttaggg

SEQ ID NO: 41081 - DNA, 22 bp, synthetic construct
  misc_feature 1..22: note = chemically synthesized
  source 1..22: mol_type = other DNA
tactccagcttagggcctgggc

SEQ ID NO: 41082 - DNA, 22 bp, synthetic construct
  misc_feature 1..22: note = chemically synthesized
  source 1..22: mol_type = other DNA
ctccagcttagggcctgggctc

SEQ ID NO: 41083 - DNA, 22 bp, synthetic construct
  misc_feature 1..22: note = chemically synthesized
  source 1..22: mol_type = other DNA
cagcttagggcctgggctctga

SEQ ID NO: 41084 - DNA, 22 bp, synthetic construct
  misc_feature 1..22: note = chemically synthesized
  source 1..22: mol_type = other DNA
agggcctgggctctgaccatta

SEQ ID NO: 41085 - DNA, 22 bp, synthetic construct
  misc_feature 1..22: note = chemically synthesized
  source 1..22: mol_type = other DNA
gggcctgggctctgaccattac

SEQ ID NO: 41086 - DNA, 22 bp, synthetic construct
  misc_feature 1..22: note = chemically synthesized
  source 1..22: mol_type = other DNA
ggctctgaccattacctctgcc

SEQ ID NO: 41087 - DNA, 22 bp, synthetic construct
  misc_feature 1..22: note = chemically synthesized
  source 1..22: mol_type = other DNA
tgaccattacctctgcctaaaa

SEQ ID NO: 41088 - DNA, 22 bp, synthetic construct
  misc_feature 1..22: note = chemically synthesized
  source 1..22: mol_type = other DNA
accattacctctgcctaaaaat

SEQ ID NO: 41089 - DNA, 22 bp, synthetic construct
  misc_feature 1..22: note = chemically synthesized
  source 1..22: mol_type = other DNA
cctctgcctaaaaattcctcct

SEQ ID NO: 41090 - DNA, 22 bp, synthetic construct
  misc_feature 1..22: note = chemically synthesized
  source 1..22: mol_type = other DNA
tgcctaaaaattcctcctcatg

SEQ ID NO: 41091 - DNA, 22 bp, synthetic construct
  misc_feature 1..22: note = chemically synthesized
  source 1..22: mol_type = other DNA
cctaaaaattcctcctcatgac

SEQ ID NO: 41092 - DNA, 22 bp, synthetic construct
  misc_feature 1..22: note = chemically synthesized
  source 1..22: mol_type = other DNA
aaaattcctcctcatgacatcc

SEQ ID NO: 41093 - DNA, 22 bp, synthetic construct
  misc_feature 1..22: note = chemically synthesized
  source 1..22: mol_type = other DNA
ctcctcatgacatccatttgcc

SEQ ID NO: 41094 - DNA, 22 bp, synthetic construct
  misc_feature 1..22: note = chemically synthesized
  source 1..22: mol_type = other DNA
ctcatgacatccatttgcccaa

SEQ ID NO: 41095 - DNA, 22 bp, synthetic construct
  misc_feature 1..22: note = chemically synthesized
  source 1..22: mol_type = other DNA
atgacatccatttgcccaattt

SEQ ID NO: 41096 - DNA, 22 bp, synthetic construct
  misc_feature 1..22: note = chemically synthesized
  source 1..22: mol_type = other DNA
gcccaatttcttcaccctttta

SEQ ID NO: 41097 - DNA, 22 bp, synthetic construct
  misc_feature 1..22: note = chemically synthesized
  source 1..22: mol_type = other DNA
cccaatttcttcacccttttaa

SEQ ID NO: 41098 - DNA, 22 bp, synthetic construct
  misc_feature 1..22: note = chemically synthesized
  source 1..22: mol_type = other DNA
cttcacccttttaattacccca

SEQ ID NO: 41099 - DNA, 22 bp, synthetic construct
  misc_feature 1..22: note = chemically synthesized
  source 1..22: mol_type = other DNA
ttcacccttttaattaccccat

SEQ ID NO: 41100 - DNA, 22 bp, synthetic construct
  misc_feature 1..22: note = chemically synthesized
  source 1..22: mol_type = other DNA
cacccttttaattaccccatta

SEQ ID NO: 41101 - DNA, 22 bp, synthetic construct
  misc_feature 1..22: note = chemically synthesized
  source 1..22: mol_type = other DNA
acccttttaattaccccattaa

SEQ ID NO: 41102 - DNA, 22 bp, synthetic construct
  misc_feature 1..22: note = chemically synthesized
  source 1..22: mol_type = other DNA
ttaattaccccattaagtgata

SEQ ID NO: 41103 - DNA, 22 bp, synthetic construct
  misc_feature 1..22: note = chemically synthesized
  source 1..22: mol_type = other DNA
taattaccccattaagtgatat

SEQ ID NO: 41104 - DNA, 22 bp, synthetic construct
  misc_feature 1..22: note = chemically synthesized
  source 1..22: mol_type = other DNA
aattaccccattaagtgatatt

SEQ ID NO: 41105 - DNA, 22 bp, synthetic construct
  misc_feature 1..22: note = chemically synthesized
  source 1..22: mol_type = other DNA
attaccccattaagtgatattt

SEQ ID NO: 41106 - DNA, 22 bp, synthetic construct
  misc_feature 1..22: note = chemically synthesized
  source 1..22: mol_type = other DNA
ccccattaagtgatattttgct

SEQ ID NO: 41107 - DNA, 22 bp, synthetic construct
  misc_feature 1..22: note = chemically synthesized
  source 1..22: mol_type = other DNA
agtgatattttgcttgctcaat

SEQ ID NO: 41108 - DNA, 22 bp, synthetic construct
  misc_feature 1..22: note = chemically synthesized
  source 1..22: mol_type = other DNA
tgcttgctcaatttttgccttt

SEQ ID NO: 41109 - DNA, 22 bp, synthetic construct
  misc_feature 1..22: note = chemically synthesized
  source 1..22: mol_type = other DNA
gcttgctcaatttttgcctttt

SEQ ID NO: 41110 - DNA, 22 bp, synthetic construct
  misc_feature 1..22: note = chemically synthesized
  source 1..22: mol_type = other DNA
cttgctcaatttttgccttttc

SEQ ID NO: 41111 - DNA, 22 bp, synthetic construct
  misc_feature 1..22: note = chemically synthesized
  source 1..22: mol_type = other DNA
gctcaatttttgccttttcaat

SEQ ID NO: 41112 - DNA, 22 bp, synthetic construct
  misc_feature 1..22: note = chemically synthesized
  source 1..22: mol_type = other DNA
ctcaatttttgccttttcaatc

SEQ ID NO: 41113 - DNA, 22 bp, synthetic construct
  misc_feature 1..22: note = chemically synthesized
  source 1..22: mol_type = other DNA
aatttttgccttttcaatcaga

SEQ ID NO: 41114 - DNA, 22 bp, synthetic construct
  misc_feature 1..22: note = chemically synthesized
  source 1..22: mol_type = other DNA
ttgccttttcaatcagatctaa

SEQ ID NO: 41115 - DNA, 22 bp, synthetic construct
  misc_feature 1..22: note = chemically synthesized
  source 1..22: mol_type = other DNA
tgccttttcaatcagatctaat

SEQ ID NO: 41116 - DNA, 22 bp, synthetic construct
  misc_feature 1..22: note = chemically synthesized
  source 1..22: mol_type = other DNA
gccttttcaatcagatctaatt

SEQ ID NO: 41117 - DNA, 22 bp, synthetic construct
  misc_feature 1..22: note = chemically synthesized
  source 1..22: mol_type = other DNA
ccttttcaatcagatctaattt

SEQ ID NO: 41118 - DNA, 22 bp, synthetic construct
  misc_feature 1..22: note = chemically synthesized
  source 1..22: mol_type = other DNA
ttcaatcagatctaatttattt

SEQ ID NO: 41119 - DNA, 22 bp, synthetic construct
  misc_feature 1..22: note = chemically synthesized
  source 1..22: mol_type = other DNA
tcaatcagatctaatttatttt

SEQ ID NO: 41120 - DNA, 22 bp, synthetic construct
  misc_feature 1..22: note = chemically synthesized
  source 1..22: mol_type = other DNA
caatcagatctaatttatttta

SEQ ID NO: 41121 - DNA, 22 bp, synthetic construct
  misc_feature 1..22: note = chemically synthesized
  source 1..22: mol_type = other DNA
aatcagatctaatttattttat

SEQ ID NO: 41122 - DNA, 22 bp, synthetic construct
  misc_feature 1..22: note = chemically synthesized
  source 1..22: mol_type = other DNA
atttattttatatttttaaaat

SEQ ID NO: 41123 - DNA, 22 bp, synthetic construct
  misc_feature 1..22: note = chemically synthesized
  source 1..22: mol_type = other DNA
attttatatttttaaaatttat

SEQ ID NO: 41124 - DNA, 22 bp, synthetic construct
  misc_feature 1..22: note = chemically synthesized
  source 1..22: mol_type = other DNA
ttttatatttttaaaatttatt

SEQ ID NO: 41125 - DNA, 22 bp, synthetic construct
  misc_feature 1..22: note = chemically synthesized
  source 1..22: mol_type = other DNA
tatatttttaaaatttatttat

SEQ ID NO: 41126 - DNA, 22 bp, synthetic construct
  misc_feature 1..22: note = chemically synthesized
  source 1..22: mol_type = other DNA
atatttttaaaatttatttata

SEQ ID NO: 41127 - DNA, 22 bp, synthetic construct
  misc_feature 1..22: note = chemically synthesized
  source 1..22: mol_type = other DNA
tatttttaaaatttatttatat

SEQ ID NO: 41128 - DNA, 22 bp, synthetic construct
  misc_feature 1..22: note = chemically synthesized
  source 1..22: mol_type = other DNA
ttaaaatttatttatatatatt

SEQ ID NO: 41129 - DNA, 22 bp, synthetic construct
  misc_feature 1..22: note = chemically synthesized
  source 1..22: mol_type = other DNA
taaaatttatttatatatattt

SEQ ID NO: 41130 - DNA, 22 bp, synthetic construct
  misc_feature 1..22: note = chemically synthesized
  source 1..22: mol_type = other DNA
aaaatttatttatatatattta

SEQ ID NO: 41131 - DNA, 22 bp, synthetic construct
  misc_feature 1..22: note = chemically synthesized
  source 1..22: mol_type = other DNA
aaatttatttatatatatttag

SEQ ID NO: 41132 - DNA, 22 bp, synthetic construct
  misc_feature 1..22: note = chemically synthesized
  source 1..22: mol_type = other DNA
atttatatatatttagaaggta

SEQ ID NO: 41133 - DNA, 22 bp, synthetic construct
  misc_feature 1..22: note = chemically synthesized
  source 1..22: mol_type = other DNA
tttatatatatttagaaggtat

SEQ ID NO: 41134 - DNA, 22 bp, synthetic construct
  misc_feature 1..22: note = chemically synthesized
  source 1..22: mol_type = other DNA
atatatatttagaaggtatgta

SEQ ID NO: 41135 - DNA, 22 bp, synthetic construct
  misc_feature 1..22: note = chemically synthesized
  source 1..22: mol_type = other DNA
tatatatttagaaggtatgtac

SEQ ID NO: 41136 - DNA, 22 bp, synthetic construct
  misc_feature 1..22: note = chemically synthesized
  source 1..22: mol_type = other DNA
agaaggtatgtactagttcgtt

SEQ ID NO: 41137 - DNA, 22 bp, synthetic construct
  misc_feature 1..22: note = chemically synthesized
  source 1..22: mol_type = other DNA
gaaggtatgtactagttcgtta

SEQ ID NO: 41138 - DNA, 22 bp, synthetic construct
  misc_feature 1..22: note = chemically synthesized
  source 1..22: mol_type = other DNA
gttcgttatcatgctgcttata

SEQ ID NO: 41139 - DNA, 22 bp, synthetic construct
  misc_feature 1..22: note = chemically synthesized
  source 1..22: mol_type = other DNA
gttatcatgctgcttataaaga

SEQ ID NO: 41140 - DNA, 22 bp, synthetic construct
  misc_feature 1..22: note = chemically synthesized
  source 1..22: mol_type = other DNA
tcatgctgcttataaagacata

SEQ ID NO: 41141 - DNA, 22 bp, synthetic construct
  misc_feature 1..22: note = chemically synthesized
  source 1..22: mol_type = other DNA
cttataaagacatacctgagac

SEQ ID NO: 41142 - DNA, 22 bp, synthetic construct
  misc_feature 1..22: note = chemically synthesized
  source 1..22: mol_type = other DNA
ataaagacatacctgagactgg

SEQ ID NO: 41143 - DNA, 22 bp, synthetic construct
  misc_feature 1..22: note = chemically synthesized
  source 1..22: mol_type = other DNA
taaagacatacctgagactggg

SEQ ID NO: 41144 - DNA, 22 bp, synthetic construct
  misc_feature 1..22: note = chemically synthesized
  source 1..22: mol_type = other DNA
agactgggtaatttataaggaa

SEQ ID NO: 41145 - DNA, 22 bp, synthetic construct
  misc_feature 1..22: note = chemically synthesized
  source 1..22: mol_type = other DNA
ggtaatttataaggaaaaaacg

SEQ ID NO: 41146 - DNA, 22 bp, synthetic construct
  misc_feature 1..22: note = chemically synthesized
  source 1..22: mol_type = other DNA
ataaggaaaaaacgtttaattg

SEQ ID NO: 41147 - DNA, 22 bp, synthetic construct
  misc_feature 1..22: note = chemically synthesized
  source 1..22: mol_type = other DNA
taaggaaaaaacgtttaattgt

SEQ ID NO: 41148 - DNA, 22 bp, synthetic construct
  misc_feature 1..22: note = chemically synthesized
  source 1..22: mol_type = other DNA
aattgtctcacagttccacagg

SEQ ID NO: 41149 - DNA, 22 bp, synthetic construct
  misc_feature 1..22: note = chemically synthesized
  source 1..22: mol_type = other DNA
attgtctcacagttccacaggg

SEQ ID NO: 41150 - DNA, 22 bp, synthetic construct
  misc_feature 1..22: note = chemically synthesized
  source 1..22: mol_type = other DNA
tctcacagttccacagggctgg

SEQ ID NO: 41151 - DNA, 22 bp, synthetic construct
  misc_feature 1..22: note = chemically synthesized
  source 1..22: mol_type = other DNA
acagttccacagggctggggag

SEQ ID NO: 41152 - DNA, 22 bp, synthetic construct
  misc_feature 1..22: note = chemically synthesized
  source 1..22: mol_type = other DNA
cacagggctggggaggcctcgg

SEQ ID NO: 41153 - DNA, 22 bp, synthetic construct
  misc_feature 1..22: note = chemically synthesized
  source 1..22: mol_type = other DNA
gggaggcctcgggaaacttaca

SEQ ID NO: 41154 - DNA, 22 bp, synthetic construct
  misc_feature 1..22: note = chemically synthesized
  source 1..22: mol_type = other DNA
gggaaacttacaatcatggcag

SEQ ID NO: 41155 - DNA, 22 bp, synthetic construct
  misc_feature 1..22: note = chemically synthesized
  source 1..22: mol_type = other DNA
acaatcatggcagaagaagaaa

SEQ ID NO: 41156 - DNA, 22 bp, synthetic construct
  misc_feature 1..22: note = chemically synthesized
  source 1..22: mol_type = other DNA
caatcatggcagaagaagaaac

SEQ ID NO: 41157 - DNA, 22 bp, synthetic construct
  misc_feature 1..22: note = chemically synthesized
  source 1..22: mol_type = other DNA
cttcacatggcagcagcaagta

SEQ ID NO: 41158 - DNA, 22 bp, synthetic construct
  misc_feature 1..22: note = chemically synthesized
  source 1..22: mol_type = other DNA
ttcacatggcagcagcaagtag

SEQ ID NO: 41159 - DNA, 22 bp, synthetic construct
  misc_feature 1..22: note = chemically synthesized
  source 1..22: mol_type = other DNA
cacatggcagcagcaagtagaa

SEQ ID NO: 41160 - DNA, 22 bp, synthetic construct
  misc_feature 1..22: note = chemically synthesized
  source 1..22: mol_type = other DNA
acatggcagcagcaagtagaag

SEQ ID NO: 41161 - DNA, 22 bp, synthetic construct
  misc_feature 1..22: note = chemically synthesized
  source 1..22: mol_type = other DNA
ataaaaccatcagatcttgtaa

SEQ ID NO: 41162 - DNA, 22 bp, synthetic construct
  misc_feature 1..22: note = chemically synthesized
  source 1..22: mol_type = other DNA
taaaaccatcagatcttgtaag

SEQ ID NO: 41163 - DNA, 22 bp, synthetic construct
  misc_feature 1..22: note = chemically synthesized
  source 1..22: mol_type = other DNA
gtaagaactcactatcacgaga

SEQ ID NO: 41164 - DNA, 22 bp, synthetic construct
  misc_feature 1..22: note = chemically synthesized
  source 1..22: mol_type = other DNA
taagaactcactatcacgagaa

SEQ ID NO: 41165 - DNA, 22 bp, synthetic construct
  misc_feature 1..22: note = chemically synthesized
  source 1..22: mol_type = other DNA
actatcacgagaagagcatgag

SEQ ID NO: 41166 - DNA, 22 bp, synthetic construct
  misc_feature 1..22: note = chemically synthesized
  source 1..22: mol_type = other DNA
tcacgagaagagcatgagagta

SEQ ID NO: 41167 - DNA, 22 bp, synthetic construct
  misc_feature 1..22: note = chemically synthesized
  source 1..22: mol_type = other DNA
ctctatgattcaattacctccc

SEQ ID NO: 41168 - DNA, 22 bp, synthetic construct
  misc_feature 1..22: note = chemically synthesized
  source 1..22: mol_type = other DNA
tatgattcaattacctccctcc

SEQ ID NO: 41169 - DNA, 22 bp, synthetic construct
  misc_feature 1..22: note = chemically synthesized
  source 1..22: mol_type = other DNA
tgattcaattacctccctccaa

SEQ ID NO: 41170 - DNA, 22 bp, synthetic construct
  misc_feature 1..22: note = chemically synthesized
  source 1..22: mol_type = other DNA
aattacctccctccaaatccct

SEQ ID NO: 41171 - DNA, 22 bp, synthetic construct
  misc_feature 1..22: note = chemically synthesized
  source 1..22: mol_type = other DNA
cctccctccaaatccctcccac

SEQ ID NO: 41172 - DNA, 22 bp, synthetic construct
  misc_feature 1..22: note = chemically synthesized
  source 1..22: mol_type = other DNA
cctccaaatccctcccacaaca

SEQ ID NO: 41173 - DNA, 22 bp, synthetic construct
  misc_feature 1..22: note = chemically synthesized
  source 1..22: mol_type = other DNA
caaatccctcccacaacacgtg

SEQ ID NO: 41174 - DNA, 22 bp, synthetic construct
  misc_feature 1..22: note = chemically synthesized
  source 1..22: mol_type = other DNA
ccacaacacgtgaggattatgg

SEQ ID NO: 41175 - DNA, 22 bp, synthetic construct
  misc_feature 1..22: note = chemically synthesized
  source 1..22: mol_type = other DNA
tgggaactacaattcaagatga

SEQ ID NO: 41176 - DNA, 22 bp, synthetic construct
  misc_feature 1..22: note = chemically synthesized
  source 1..22: mol_type = other DNA
caattcaagatgagatttgggt

SEQ ID NO: 41177 - DNA, 22 bp, synthetic construct
  misc_feature 1..22: note = chemically synthesized
  source 1..22: mol_type = other DNA
aagatgagatttgggtggggac

SEQ ID NO: 41178 - DNA, 22 bp, synthetic construct
  misc_feature 1..22: note = chemically synthesized
  source 1..22: mol_type = other DNA
gggtggggacacagtcaagctg

SEQ ID NO: 41179 - DNA, 22 bp, synthetic construct
  misc_feature 1..22: note = chemically synthesized
  source 1..22: mol_type = other DNA
ggtggggacacagtcaagctgt

SEQ ID NO: 41180 - DNA, 22 bp, synthetic construct
  misc_feature 1..22: note = chemically synthesized
  source 1..22: mol_type = other DNA
tatcagggtacaagctcgggtt

SEQ ID NO: 41181 - DNA, 22 bp, synthetic construct
  misc_feature 1..22: note = chemically synthesized
  source 1..22: mol_type = other DNA
gggttccttacatatgtatgtt

SEQ ID NO: 41182 - DNA, 22 bp, synthetic construct
  misc_feature 1..22: note = chemically synthesized
  source 1..22: mol_type = other DNA
cttacatatgtatgttgcatag

SEQ ID NO: 41183 - DNA, 22 bp, synthetic construct
  misc_feature 1..22: note = chemically synthesized
  source 1..22: mol_type = other DNA
acatatgtatgttgcatagtgg

SEQ ID NO: 41184 - DNA, 22 bp, synthetic construct
  misc_feature 1..22: note = chemically synthesized
  source 1..22: mol_type = other DNA
catatgtatgttgcatagtggt

SEQ ID NO: 41185 - DNA, 22 bp, synthetic construct
  misc_feature 1..22: note = chemically synthesized
  source 1..22: mol_type = other DNA
catagtggtgaagtctgagctt

SEQ ID NO: 41186 - DNA, 22 bp, synthetic construct
  misc_feature 1..22: note = chemically synthesized
  source 1..22: mol_type = other DNA
agcttttagtggaccatcacct

SEQ ID NO: 41187 - DNA, 22 bp, synthetic construct
  misc_feature 1..22: note = chemically synthesized
  source 1..22: mol_type = other DNA
ttagtggaccatcacctgaaaa

SEQ ID NO: 41188 - DNA, 22 bp, synthetic construct
  misc_feature 1..22: note = chemically synthesized
  source 1..22: mol_type = other DNA
tagtggaccatcacctgaaaag

SEQ ID NO: 41189 - DNA, 22 bp, synthetic construct
  misc_feature 1..22: note = chemically synthesized
  source 1..22: mol_type = other DNA
agtggaccatcacctgaaaagt

SEQ ID NO: 41190 - DNA, 22 bp, synthetic construct
  misc_feature 1..22: note = chemically synthesized
  source 1..22: mol_type = other DNA
gtggaccatcacctgaaaagtg

SEQ ID NO: 41191 - DNA, 22 bp, synthetic construct
  misc_feature 1..22: note = chemically synthesized
  source 1..22: mol_type = other DNA
aaaagtgaatgttgtatccaat

SEQ ID NO: 41192 - DNA, 22 bp, synthetic construct
  misc_feature 1..22: note = chemically synthesized
  source 1..22: mol_type = other DNA
tatccaatccgtagtttttcag

SEQ ID NO: 41193 - DNA, 22 bp, synthetic construct
  misc_feature 1..22: note = chemically synthesized
  source 1..22: mol_type = other DNA
ttcagtcctcaccatactccta

SEQ ID NO: 41194 - DNA, 22 bp, synthetic construct
  misc_feature 1..22: note = chemically synthesized
  source 1..22: mol_type = other DNA
tcagtcctcaccatactcctat

SEQ ID NO: 41195 - DNA, 22 bp, synthetic construct
  misc_feature 1..22: note = chemically synthesized
  source 1..22: mol_type = other DNA
cagtcctcaccatactcctatc

SEQ ID NO: 41196 - DNA, 22 bp, synthetic construct
  misc_feature 1..22: note = chemically synthesized
  source 1..22: mol_type = other DNA
agtcctcaccatactcctatcc

SEQ ID NO: 41197 - DNA, 22 bp, synthetic construct
  misc_feature 1..22: note = chemically synthesized
  source 1..22: mol_type = other DNA
accatactcctatcctcccacc

SEQ ID NO: 41198 - DNA, 22 bp, synthetic construct
  misc_feature 1..22: note = chemically synthesized
  source 1..22: mol_type = other DNA
ctatcctcccacctttctctag

SEQ ID NO: 41199 - DNA, 22 bp, synthetic construct
  misc_feature 1..22: note = chemically synthesized
  source 1..22: mol_type = other DNA
tcctcccacctttctctagtct

SEQ ID NO: 41200 - DNA, 22 bp, synthetic construct
  misc_feature 1..22: note = chemically synthesized
  source 1..22: mol_type = other DNA
ccacctttctctagtctcaagt

SEQ ID NO: 41201 - DNA, 22 bp, synthetic construct
  misc_feature 1..22: note = chemically synthesized
  source 1..22: mol_type = other DNA
tctctagtctcaagtgtctatt

SEQ ID NO: 41202 - DNA, 22 bp, synthetic construct
  misc_feature 1..22: note = chemically synthesized
  source 1..22: mol_type = other DNA
ctctagtctcaagtgtctatta

SEQ ID NO: 41203 - DNA, 22 bp, synthetic construct
  misc_feature 1..22: note = chemically synthesized
  source 1..22: mol_type = other DNA
tctagtctcaagtgtctattat

SEQ ID NO: 41204 - DNA, 22 bp, synthetic construct
  misc_feature 1..22: note = chemically synthesized
  source 1..22: mol_type = other DNA
tagtctcaagtgtctattattt

SEQ ID NO: 41205 - DNA, 22 bp, synthetic construct
  misc_feature 1..22: note = chemically synthesized
  source 1..22: mol_type = other DNA
gtctcaagtgtctattatttca

SEQ ID NO: 41206 - DNA, 22 bp, synthetic construct
  misc_feature 1..22: note = chemically synthesized
  source 1..22: mol_type = other DNA
aagtgtctattatttcattcta

SEQ ID NO: 41207 - DNA, 22 bp, synthetic construct
  misc_feature 1..22: note = chemically synthesized
  source 1..22: mol_type = other DNA
ttatttcattctatatgtctat

SEQ ID NO: 41208 - DNA, 22 bp, synthetic construct
  misc_feature 1..22: note = chemically synthesized
  source 1..22: mol_type = other DNA
tttcattctatatgtctatgct

SEQ ID NO: 41209 - DNA, 22 bp, synthetic construct
  misc_feature 1..22: note = chemically synthesized
  source 1..22: mol_type = other DNA
cattctatatgtctatgcttac

SEQ ID NO: 41210 - DNA, 22 bp, synthetic construct
  misc_feature 1..22: note = chemically synthesized
  source 1..22: mol_type = other DNA
attctatatgtctatgcttact

SEQ ID NO: 41211 - DNA, 22 bp, synthetic construct
  misc_feature 1..22: note = chemically synthesized
  source 1..22: mol_type = other DNA
tatatgtctatgcttactcatc

SEQ ID NO: 41212 - DNA, 22 bp, synthetic construct
  misc_feature 1..22: note = chemically synthesized
  source 1..22: mol_type = other DNA
tatgtctatgcttactcatcgt

SEQ ID NO: 41213 - DNA, 22 bp, synthetic construct
  misc_feature 1..22: note = chemically synthesized
  source 1..22: mol_type = other DNA
tgcttactcatcgtttagctcc

SEQ ID NO: 41214 - DNA, 22 bp, synthetic construct
  misc_feature 1..22: note = chemically synthesized
  source 1..22: mol_type = other DNA
actcatcgtttagctcccactt

SEQ ID NO: 41215 - DNA, 22 bp, synthetic construct
  misc_feature 1..22: note = chemically synthesized
  source 1..22: mol_type = other DNA
ctcatcgtttagctcccacttg

SEQ ID NO: 41216 - DNA, 22 bp, synthetic construct
  misc_feature 1..22: note = chemically synthesized
  source 1..22: mol_type = other DNA
atcgtttagctcccacttggct

SEQ ID NO: 41217 - DNA, 22 bp, synthetic construct
  misc_feature 1..22: note = chemically synthesized
  source 1..22: mol_type = other DNA
agctcccacttggctctcacta

SEQ ID NO: 41218 - DNA, 22 bp, synthetic construct
  misc_feature 1..22: note = chemically synthesized
  source 1..22: mol_type = other DNA
gctcccacttggctctcactaa

SEQ ID NO: 41219 - DNA, 22 bp, synthetic construct
  misc_feature 1..22: note = chemically synthesized
  source 1..22: mol_type = other DNA
ccacttggctctcactaaatga

SEQ ID NO: 41220 - DNA, 22 bp, synthetic construct
  misc_feature 1..22: note = chemically synthesized
  source 1..22: mol_type = other DNA
ggctctcactaaatgagaacat

SEQ ID NO: 41221 - DNA, 22 bp, synthetic construct
  misc_feature 1..22: note = chemically synthesized
  source 1..22: mol_type = other DNA
gctctcactaaatgagaacata

SEQ ID NO: 41222 - DNA, 22 bp, synthetic construct
  misc_feature 1..22: note = chemically synthesized
  source 1..22: mol_type = other DNA
tcactaaatgagaacatactgt

SEQ ID NO: 41223 - DNA, 22 bp, synthetic construct
  misc_feature 1..22: note = chemically synthesized
  source 1..22: mol_type = other DNA
actaaatgagaacatactgtgt

SEQ ID NO: 41224 - DNA, 22 bp, synthetic construct
  misc_feature 1..22: note = chemically synthesized
  source 1..22: mol_type = other DNA
aatgagaacatactgtgtttga

SEQ ID NO: 41225 - DNA, 22 bp, synthetic construct
  misc_feature 1..22: note = chemically synthesized
  source 1..22: mol_type = other DNA
tgtttgactttctgtttctgag

SEQ ID NO: 41226 - DNA, 22 bp, synthetic construct
  misc_feature 1..22: note = chemically synthesized
  source 1..22: mol_type = other DNA
gactttctgtttctgagttatt

SEQ ID NO: 41227 - DNA, 22 bp, synthetic construct
  misc_feature 1..22: note = chemically synthesized
  source 1..22: mol_type = other DNA
actttctgtttctgagttattt

SEQ ID NO: 41228 - DNA, 22 bp, synthetic construct
  misc_feature 1..22: note = chemically synthesized
  source 1..22: mol_type = other DNA
tctgtttctgagttatttcact

SEQ ID NO: 41229 - DNA, 22 bp, synthetic construct
  misc_feature 1..22: note = chemically synthesized
  source 1..22: mol_type = other DNA
ctgtttctgagttatttcactg

SEQ ID NO: 41230 - DNA, 22 bp, synthetic construct
  misc_feature 1..22: note = chemically synthesized
  source 1..22: mol_type = other DNA
tgtttctgagttatttcactga

SEQ ID NO: 41231 - DNA, 22 bp, synthetic construct
  misc_feature 1..22: note = chemically synthesized
  source 1..22: mol_type = other DNA
tttctgagttatttcactgagg

SEQ ID NO: 41232 - DNA, 22 bp, synthetic construct
  misc_feature 1..22: note = chemically synthesized
  source 1..22: mol_type = other DNA
ctgagttatttcactgaggata

SEQ ID NO: 41233 - DNA, 22 bp, synthetic construct
  misc_feature 1..22: note = chemically synthesized
  source 1..22: mol_type = other DNA
tgagttatttcactgaggataa

SEQ ID NO: 41234 - DNA, 22 bp, synthetic construct
  misc_feature 1..22: note = chemically synthesized
  source 1..22: mol_type = other DNA
agttatttcactgaggataatg

SEQ ID NO: 41235 - DNA, 22 bp, synthetic construct
  misc_feature 1..22: note = chemically synthesized
  source 1..22: mol_type = other DNA
tttcactgaggataatgtcctc

SEQ ID NO: 41236 - DNA, 22 bp, synthetic construct
  misc_feature 1..22: note = chemically synthesized
  source 1..22: mol_type = other DNA
cactgaggataatgtcctccag

SEQ ID NO: 41237 - DNA, 22 bp, synthetic construct
  misc_feature 1..22: note = chemically synthesized
  source 1..22: mol_type = other DNA
actgaggataatgtcctccagt

SEQ ID NO: 41238 - DNA, 22 bp, synthetic construct
  misc_feature 1..22: note = chemically synthesized
  source 1..22: mol_type = other DNA
aggataatgtcctccagttcta

SEQ ID NO: 41239 - DNA, 22 bp, synthetic construct
  misc_feature 1..22: note = chemically synthesized
  source 1..22: mol_type = other DNA
cagttctaaccatgtttctaga

SEQ ID NO: 41240 - DNA, 22 bp, synthetic construct
  misc_feature 1..22: note = chemically synthesized
  source 1..22: mol_type = other DNA
taaccatgtttctagagaagac

SEQ ID NO: 41241 - DNA, 22 bp, synthetic construct
  misc_feature 1..22: note = chemically synthesized
  source 1..22: mol_type = other DNA
accatgtttctagagaagacat

SEQ ID NO: 41242 - DNA, 22 bp, synthetic construct
  misc_feature 1..22: note = chemically synthesized
  source 1..22: mol_type = other DNA
ctagagaagacatgatttcatt

SEQ ID NO: 41243 - DNA, 22 bp, synthetic construct
  misc_feature 1..22: note = chemically synthesized
  source 1..22: mol_type = other DNA
tagagaagacatgatttcattc

SEQ ID NO: 41244 - DNA, 22 bp, synthetic construct
  misc_feature 1..22: note = chemically synthesized
  source 1..22: mol_type = other DNA
gagaagacatgatttcattctt

SEQ ID NO: 41245 - DNA, 22 bp, synthetic construct
  misc_feature 1..22: note = chemically synthesized
  source 1..22: mol_type = other DNA
cattcttttttatggctgagta

SEQ ID NO: 41246 - DNA, 22 bp, synthetic construct
  misc_feature 1..22: note = chemically synthesized
  source 1..22: mol_type = other DNA
attcttttttatggctgagtaa

SEQ ID NO: 41247 - DNA, 22 bp, synthetic construct
  misc_feature 1..22: note = chemically synthesized
  source 1..22: mol_type = other DNA
ttttttatggctgagtaatata

SEQ ID NO: 41248 - DNA, 22 bp, synthetic construct
  misc_feature 1..22: note = chemically synthesized
  source 1..22: mol_type = other DNA
ttttatggctgagtaatatata

SEQ ID NO: 41249 - DNA, 22 bp, synthetic construct
  misc_feature 1..22: note = chemically synthesized
  source 1..22: mol_type = other DNA
tttatggctgagtaatatatat

SEQ ID NO: 41250 - DNA, 22 bp, synthetic construct
  misc_feature 1..22: note = chemically synthesized
  source 1..22: mol_type = other DNA
ttatggctgagtaatatatatg

SEQ ID NO: 41251 - DNA, 22 bp, synthetic construct
  misc_feature 1..22: note = chemically synthesized
  source 1..22: mol_type = other DNA
tatggctgagtaatatatatgt

SEQ ID NO: 41252 - DNA, 22 bp, synthetic construct
  misc_feature 1..22: note = chemically synthesized
  source 1..22: mol_type = other DNA
atggctgagtaatatatatgta

SEQ ID NO: 41253 - DNA, 22 bp, synthetic construct
  misc_feature 1..22: note = chemically synthesized
  source 1..22: mol_type = other DNA
tggctgagtaatatatatgtat

SEQ ID NO: 41254 - DNA, 22 bp, synthetic construct
  misc_feature 1..22: note = chemically synthesized
  source 1..22: mol_type = other DNA
agtaatatatatgtatataaat

SEQ ID NO: 41255 - DNA, 22 bp, synthetic construct
  misc_feature 1..22: note = chemically synthesized
  source 1..22: mol_type = other DNA
tctttatccaatcgtccattgg

SEQ ID NO: 41256 - DNA, 22 bp, synthetic construct
  misc_feature 1..22: note = chemically synthesized
  source 1..22: mol_type = other DNA
ctttatccaatcgtccattggt

SEQ ID NO: 41257 - DNA, 22 bp, synthetic construct
  misc_feature 1..22: note = chemically synthesized
  source 1..22: mol_type = other DNA
tttatccaatcgtccattggta

SEQ ID NO: 41258 - DNA, 22 bp, synthetic construct
  misc_feature 1..22: note = chemically synthesized
  source 1..22: mol_type = other DNA
tatccaatcgtccattggtaga

SEQ ID NO: 41259 - DNA, 22 bp, synthetic construct
  misc_feature 1..22: note = chemically synthesized
  source 1..22: mol_type = other DNA
atccaatcgtccattggtagac

SEQ ID NO: 41260 - DNA, 22 bp, synthetic construct
  misc_feature 1..22: note = chemically synthesized
  source 1..22: mol_type = other DNA
tccaatcgtccattggtagaca

SEQ ID NO: 41261 - DNA, 22 bp, synthetic construct
  misc_feature 1..22: note = chemically synthesized
  source 1..22: mol_type = other DNA
gtagacatttaggttgattcca

SEQ ID NO: 41262 - DNA, 22 bp, synthetic construct
  misc_feature 1..22: note = chemically synthesized
  source 1..22: mol_type = other DNA
aggttgattccatatctttgct

SEQ ID NO: 41263 - DNA, 22 bp, synthetic construct
  misc_feature 1..22: note = chemically synthesized
  source 1..22: mol_type = other DNA
ggttgattccatatctttgcta

SEQ ID NO: 41264 - DNA, 22 bp, synthetic construct
  misc_feature 1..22: note = chemically synthesized
  source 1..22: mol_type = other DNA
attccatatctttgctattggg

SEQ ID NO: 41265 - DNA, 22 bp, synthetic construct
  misc_feature 1..22: note = chemically synthesized
  source 1..22: mol_type = other DNA
catatctttgctattgggaaca

SEQ ID NO: 41266 - DNA, 22 bp, synthetic construct
  misc_feature 1..22: note = chemically synthesized
  source 1..22: mol_type = other DNA
tgctattgggaacagtgctact

SEQ ID NO: 41267 - DNA, 22 bp, synthetic construct
  misc_feature 1..22: note = chemically synthesized
  source 1..22: mol_type = other DNA
gctattgggaacagtgctactt

SEQ ID NO: 41268 - DNA, 22 bp, synthetic construct
  misc_feature 1..22: note = chemically synthesized
  source 1..22: mol_type = other DNA
ctattgggaacagtgctacttt

SEQ ID NO: 41269 - DNA, 22 bp, synthetic construct
  misc_feature 1..22: note = chemically synthesized
  source 1..22: mol_type = other DNA
ttgggaacagtgctactttgaa

SEQ ID NO: 41270 - DNA, 22 bp, synthetic construct
  misc_feature 1..22: note = chemically synthesized
  source 1..22: mol_type = other DNA
ggaacagtgctactttgaacat

SEQ ID NO: 41271 - DNA, 22 bp, synthetic construct
  misc_feature 1..22: note = chemically synthesized
  source 1..22: mol_type = other DNA
ctttgaacatactaatgcagat

SEQ ID NO: 41272 - DNA, 22 bp, synthetic construct
  misc_feature 1..22: note = chemically synthesized
  source 1..22: mol_type = other DNA
tgaacatactaatgcagatatc

SEQ ID NO: 41273 - DNA, 22 bp, synthetic construct
  misc_feature 1..22: note = chemically synthesized
  source 1..22: mol_type = other DNA
gaacatactaatgcagatatct

SEQ ID NO: 41274 - DNA, 22 bp, synthetic construct
  misc_feature 1..22: note = chemically synthesized
  source 1..22: mol_type = other DNA
aacatactaatgcagatatctt

SEQ ID NO: 41275 - DNA, 22 bp, synthetic construct
  misc_feature 1..22: note = chemically synthesized
  source 1..22: mol_type = other DNA
atgcagatatcttttttaatat

SEQ ID NO: 41276 - DNA, 22 bp, synthetic construct
  misc_feature 1..22: note = chemically synthesized
  source 1..22: mol_type = other DNA
ttttaatatgatctctttcact

SEQ ID NO: 41277 - DNA, 22 bp, synthetic construct
  misc_feature 1..22: note = chemically synthesized
  source 1..22: mol_type = other DNA
tttaatatgatctctttcactt

SEQ ID NO: 41278 - DNA, 22 bp, synthetic construct
  misc_feature 1..22: note = chemically synthesized
  source 1..22: mol_type = other DNA
ttaatatgatctctttcacttt

SEQ ID NO: 41279 - DNA, 22 bp, synthetic construct
  misc_feature 1..22: note = chemically synthesized
  source 1..22: mol_type = other DNA
taatatgatctctttcactttg

SEQ ID NO: 41280 - DNA, 22 bp, synthetic construct
  misc_feature 1..22: note = chemically synthesized
  source 1..22: mol_type = other DNA
aatatgatctctttcactttgg

SEQ ID NO: 41281 - DNA, 22 bp, synthetic construct
  misc_feature 1..22: note = chemically synthesized
  source 1..22: mol_type = other DNA
atatgatctctttcactttggg

SEQ ID NO: 41282 - DNA, 22 bp, synthetic construct
  misc_feature 1..22: note = chemically synthesized
  source 1..22: mol_type = other DNA
tttcactttgggtccataccca

SEQ ID NO: 41283 - DNA, 22 bp, synthetic construct
  misc_feature 1..22: note = chemically synthesized
  source 1..22: mol_type = other DNA
tcactttgggtccatacccagt

SEQ ID NO: 41284 - DNA, 22 bp, synthetic construct
  misc_feature 1..22: note = chemically synthesized
  source 1..22: mol_type = other DNA
cactttgggtccatacccagta

SEQ ID NO: 41285 - DNA, 22 bp, synthetic construct
  misc_feature 1..22: note = chemically synthesized
  source 1..22: mol_type = other DNA
actttgggtccatacccagtag

SEQ ID NO: 41286 - DNA, 22 bp, synthetic construct
  misc_feature 1..22: note = chemically synthesized
  source 1..22: mol_type = other DNA
tgggtccatacccagtagtggg

SEQ ID NO: 41287 - DNA, 22 bp, synthetic construct
  misc_feature 1..22: note = chemically synthesized
  source 1..22: mol_type = other DNA
gggtccatacccagtagtggga

SEQ ID NO: 41288 - DNA, 22 bp, synthetic construct
  misc_feature 1..22: note = chemically synthesized
  source 1..22: mol_type = other DNA
ggtccatacccagtagtgggat

SEQ ID NO: 41289 - DNA, 22 bp, synthetic construct
  misc_feature 1..22: note = chemically synthesized
  source 1..22: mol_type = other DNA
caggattgaatggtagttctgt

SEQ ID NO: 41290 - DNA, 22 bp, synthetic construct
  misc_feature 1..22: note = chemically synthesized
  source 1..22: mol_type = other DNA
aatggtagttctgtttctagtt

SEQ ID NO: 41291 - DNA, 22 bp, synthetic construct
  misc_feature 1..22: note = chemically synthesized
  source 1..22: mol_type = other DNA
tgtttctagttctttaagaaat

SEQ ID NO: 41292 - DNA, 22 bp, synthetic construct
  misc_feature 1..22: note = chemically synthesized
  source 1..22: mol_type = other DNA
tttctagttctttaagaaatct

SEQ ID NO: 41293 - DNA, 22 bp, synthetic construct
  misc_feature 1..22: note = chemically synthesized
  source 1..22: mol_type = other DNA
ctagttctttaagaaatcttca

SEQ ID NO: 41294 - DNA, 22 bp, synthetic construct
  misc_feature 1..22: note = chemically synthesized
  source 1..22: mol_type = other DNA
tagttctttaagaaatcttcat

SEQ ID NO: 41295 - DNA, 22 bp, synthetic construct
  misc_feature 1..22: note = chemically synthesized
  source 1..22: mol_type = other DNA
gttctttaagaaatcttcatgc

SEQ ID NO: 41296 - DNA, 22 bp, synthetic construct
  misc_feature 1..22: note = chemically synthesized
  source 1..22: mol_type = other DNA
tttaagaaatcttcatgctgtc

SEQ ID NO: 41297 - DNA, 22 bp, synthetic construct
  misc_feature 1..22: note = chemically synthesized
  source 1..22: mol_type = other DNA
taagaaatcttcatgctgtctt

SEQ ID NO: 41298 - DNA, 22 bp, synthetic construct
  misc_feature 1..22: note = chemically synthesized
  source 1..22: mol_type = other DNA
aagaaatcttcatgctgtcttc

SEQ ID NO: 41299 - DNA, 22 bp, synthetic construct
  misc_feature 1..22: note = chemically synthesized
  source 1..22: mol_type = other DNA
agaaatcttcatgctgtcttcc

SEQ ID NO: 41300 - DNA, 22 bp, synthetic construct
  misc_feature 1..22: note = chemically synthesized
  source 1..22: mol_type = other DNA
catgctgtcttccataaagttt

SEQ ID NO: 41301 - DNA, 22 bp, synthetic construct
  misc_feature 1..22: note = chemically synthesized
  source 1..22: mol_type = other DNA
atgctgtcttccataaagtttg

SEQ ID NO: 41302 - DNA, 22 bp, synthetic construct
  misc_feature 1..22: note = chemically synthesized
  source 1..22: mol_type = other DNA
tcttccataaagtttgtactaa

SEQ ID NO: 41303 - DNA, 22 bp, synthetic construct
  misc_feature 1..22: note = chemically synthesized
  source 1..22: mol_type = other DNA
ccataaagtttgtactaattta

SEQ ID NO: 41304 - DNA, 22 bp, synthetic construct
  misc_feature 1..22: note = chemically synthesized
  source 1..22: mol_type = other DNA
cataaagtttgtactaatttac

SEQ ID NO: 41305 - DNA, 22 bp, synthetic construct
  misc_feature 1..22: note = chemically synthesized
  source 1..22: mol_type = other DNA
gtactaatttacattcttacca

SEQ ID NO: 41306 - DNA, 22 bp, synthetic construct
  misc_feature 1..22: note = chemically synthesized
  source 1..22: mol_type = other DNA
tactaatttacattcttaccaa

SEQ ID NO: 41307 - DNA, 22 bp, synthetic construct
  misc_feature 1..22: note = chemically synthesized
  source 1..22: mol_type = other DNA
atttacattcttaccaacagtg

SEQ ID NO: 41308 - DNA, 22 bp, synthetic construct
  misc_feature 1..22: note = chemically synthesized
  source 1..22: mol_type = other DNA
acattcttaccaacagtgtata

SEQ ID NO: 41309 - DNA, 22 bp, synthetic construct
  misc_feature 1..22: note = chemically synthesized
  source 1..22: mol_type = other DNA
cattcttaccaacagtgtataa

SEQ ID NO: 41310 - DNA, 22 bp, synthetic construct
  misc_feature 1..22: note = chemically synthesized
  source 1..22: mol_type = other DNA
ttaccaacagtgtataagcatt

SEQ ID NO: 41311 - DNA, 22 bp, synthetic construct
  misc_feature 1..22: note = chemically synthesized
  source 1..22: mol_type = other DNA
accaacagtgtataagcatttt

SEQ ID NO: 41312 - DNA, 22 bp, synthetic construct
  misc_feature 1..22: note = chemically synthesized
  source 1..22: mol_type = other DNA
ccaacagtgtataagcattttc

SEQ ID NO: 41313 - DNA, 22 bp, synthetic construct
  misc_feature 1..22: note = chemically synthesized
  source 1..22: mol_type = other DNA
tcttgtctccacatcctcacca

SEQ ID NO: 41314 - DNA, 22 bp, synthetic construct
  misc_feature 1..22: note = chemically synthesized
  source 1..22: mol_type = other DNA
cttgtctccacatcctcaccaa

SEQ ID NO: 41315 - DNA, 22 bp, synthetic construct
  misc_feature 1..22: note = chemically synthesized
  source 1..22: mol_type = other DNA
ttgtctccacatcctcaccaac

SEQ ID NO: 41316 - DNA, 22 bp, synthetic construct
  misc_feature 1..22: note = chemically synthesized
  source 1..22: mol_type = other DNA
gtctccacatcctcaccaacat

SEQ ID NO: 41317 - DNA, 22 bp, synthetic construct
  misc_feature 1..22: note = chemically synthesized
  source 1..22: mol_type = other DNA
tctccacatcctcaccaacatc

SEQ ID NO: 41318 - DNA, 22 bp, synthetic construct
  misc_feature 1..22: note = chemically synthesized
  source 1..22: mol_type = other DNA
cacatcctcaccaacatctgct

SEQ ID NO: 41319 - DNA, 22 bp, synthetic construct
  misc_feature 1..22: note = chemically synthesized
  source 1..22: mol_type = other DNA
accaacatctgctgtttttgaa

SEQ ID NO: 41320 - DNA, 22 bp, synthetic construct
  misc_feature 1..22: note = chemically synthesized
  source 1..22: mol_type = other DNA
ctgtttttgaactttataatga

SEQ ID NO: 41321 - DNA, 22 bp, synthetic construct
  misc_feature 1..22: note = chemically synthesized
  source 1..22: mol_type = other DNA
tttttgaactttataatgatag

SEQ ID NO: 41322 - DNA, 22 bp, synthetic construct
  misc_feature 1..22: note = chemically synthesized
  source 1..22: mol_type = other DNA
ttgaactttataatgatagcca

SEQ ID NO: 41323 - DNA, 22 bp, synthetic construct
  misc_feature 1..22: note = chemically synthesized
  source 1..22: mol_type = other DNA
tgaactttataatgatagccat

SEQ ID NO: 41324 - DNA, 22 bp, synthetic construct
  misc_feature 1..22: note = chemically synthesized
  source 1..22: mol_type = other DNA
gaactttataatgatagccatt

SEQ ID NO: 41325 - DNA, 22 bp, synthetic construct
  misc_feature 1..22: note = chemically synthesized
  source 1..22: mol_type = other DNA
aactttataatgatagccattc

SEQ ID NO: 41326 - DNA, 22 bp, synthetic construct
  misc_feature 1..22: note = chemically synthesized
  source 1..22: mol_type = other DNA
tataatgatagccattctgact

SEQ ID NO: 41327 - DNA, 22 bp, synthetic construct
  misc_feature 1..22: note = chemically synthesized
  source 1..22: mol_type = other DNA
ataatgatagccattctgactg

SEQ ID NO: 41328 - DNA, 22 bp, synthetic construct
  misc_feature 1..22: note = chemically synthesized
  source 1..22: mol_type = other DNA
taatgatagccattctgactgg

SEQ ID NO: 41329 - DNA, 22 bp, synthetic construct
  misc_feature 1..22: note = chemically synthesized
  source 1..22: mol_type = other DNA
tgactggcataaggaggtatca

SEQ ID NO: 41330 - DNA, 22 bp, synthetic construct
  misc_feature 1..22: note = chemically synthesized
  source 1..22: mol_type = other DNA
actggcataaggaggtatcata

SEQ ID NO: 41331 - DNA, 22 bp, synthetic construct
  misc_feature 1..22: note = chemically synthesized
  source 1..22: mol_type = other DNA
gcataaggaggtatcatatggt

SEQ ID NO: 41332 - DNA, 22 bp, synthetic construct
  misc_feature 1..22: note = chemically synthesized
  source 1..22: mol_type = other DNA
taatttgcattctctgattatt

SEQ ID NO: 41333 - DNA, 22 bp, synthetic construct
  misc_feature 1..22: note = chemically synthesized
  source 1..22: mol_type = other DNA
aatttgcattctctgattatta

SEQ ID NO: 41334 - DNA, 22 bp, synthetic construct
  misc_feature 1..22: note = chemically synthesized
  source 1..22: mol_type = other DNA
atttgcattctctgattattag

SEQ ID NO: 41335 - DNA, 22 bp, synthetic construct
  misc_feature 1..22: note = chemically synthesized
  source 1..22: mol_type = other DNA
gcattctctgattattagtgat

SEQ ID NO: 41336 - DNA, 22 bp, synthetic construct
  misc_feature 1..22: note = chemically synthesized
  source 1..22: mol_type = other DNA
cattctctgattattagtgatg

SEQ ID NO: 41337 - DNA, 22 bp, synthetic construct
  misc_feature 1..22: note = chemically synthesized
  source 1..22: mol_type = other DNA
tctgattattagtgatgttgaa

SEQ ID NO: 41338 - DNA, 22 bp, synthetic construct
  misc_feature 1..22: note = chemically synthesized
  source 1..22: mol_type = other DNA
tgattattagtgatgttgaact

SEQ ID NO: 41339 - DNA, 22 bp, synthetic construct
  misc_feature 1..22: note = chemically synthesized
  source 1..22: mol_type = other DNA
attattagtgatgttgaacttt

SEQ ID NO: 41340 - DNA, 22 bp, synthetic construct
  misc_feature 1..22: note = chemically synthesized
  source 1..22: mol_type = other DNA
ttagtgatgttgaacttttttt

SEQ ID NO: 41341 - DNA, 22 bp, synthetic construct
  misc_feature 1..22: note = chemically synthesized
  source 1..22: mol_type = other DNA
gtgatgttgaacttttttttga

SEQ ID NO: 41342 - DNA, 22 bp, synthetic construct
  misc_feature 1..22: note = chemically synthesized
  source 1..22: mol_type = other DNA
aacttttttttgacgtttattg

SEQ ID NO: 41343 - DNA, 22 bp, synthetic construct
  misc_feature 1..22: note = chemically synthesized
  source 1..22: mol_type = other DNA
ttttttgacgtttattggccac

SEQ ID NO: 41344 - DNA, 22 bp, synthetic construct
  misc_feature 1..22: note = chemically synthesized
  source 1..22: mol_type = other DNA
tttttgacgtttattggccact

SEQ ID NO: 41345 - DNA, 22 bp, synthetic construct
  misc_feature 1..22: note = chemically synthesized
  source 1..22: mol_type = other DNA
ttttgacgtttattggccactt

SEQ ID NO: 41346 - DNA, 22 bp, synthetic construct
  misc_feature 1..22: note = chemically synthesized
  source 1..22: mol_type = other DNA
tttgacgtttattggccacttg

SEQ ID NO: 41347 - DNA, 22 bp, synthetic construct
  misc_feature 1..22: note = chemically synthesized
  source 1..22: mol_type = other DNA
ttgacgtttattggccacttgt

SEQ ID NO: 41348 - DNA, 22 bp, synthetic construct
  misc_feature 1..22: note = chemically synthesized
  source 1..22: mol_type = other DNA
tgacgtttattggccacttgta

SEQ ID NO: 41349 - DNA, 22 bp, synthetic construct
  misc_feature 1..22: note = chemically synthesized
  source 1..22: mol_type = other DNA
gacgtttattggccacttgtat

SEQ ID NO: 41350 - DNA, 22 bp, synthetic construct
  misc_feature 1..22: note = chemically synthesized
  source 1..22: mol_type = other DNA
acgtttattggccacttgtatg

SEQ ID NO: 41351 - DNA, 22 bp, synthetic construct
  misc_feature 1..22: note = chemically synthesized
  source 1..22: mol_type = other DNA
attggccacttgtatgtcttct

SEQ ID NO: 41352 - DNA, 22 bp, synthetic construct
  misc_feature 1..22: note = chemically synthesized
  source 1..22: mol_type = other DNA
ttggccacttgtatgtcttctt

SEQ ID NO: 41353 - DNA, 22 bp, synthetic construct
  misc_feature 1..22: note = chemically synthesized
  source 1..22: mol_type = other DNA
gccacttgtatgtcttcttttg

SEQ ID NO: 41354 - DNA, 22 bp, synthetic construct
  misc_feature 1..22: note = chemically synthesized
  source 1..22: mol_type = other DNA
gtatgtcttcttttggaaaatg

SEQ ID NO: 41355 - DNA, 22 bp, synthetic construct
  misc_feature 1..22: note = chemically synthesized
  source 1..22: mol_type = other DNA
tatgtcttcttttggaaaatgt

SEQ ID NO: 41356 - DNA, 22 bp, synthetic construct
  misc_feature 1..22: note = chemically synthesized
  source 1..22: mol_type = other DNA
cttttggaaaatgtctgctcag

SEQ ID NO: 41357 - DNA, 22 bp, synthetic construct
  misc_feature 1..22: note = chemically synthesized
  source 1..22: mol_type = other DNA
ttttggaaaatgtctgctcagg

SEQ ID NO: 41358 - DNA, 22 bp, synthetic construct
  misc_feature 1..22: note = chemically synthesized
  source 1..22: mol_type = other DNA
ttggaaaatgtctgctcaggac

SEQ ID NO: 41359 - DNA, 22 bp, synthetic construct
  misc_feature 1..22: note = chemically synthesized
  source 1..22: mol_type = other DNA
tggaaaatgtctgctcaggacc

SEQ ID NO: 41360 - DNA, 22 bp, synthetic construct
  misc_feature 1..22: note = chemically synthesized
  source 1..22: mol_type = other DNA
ggaaaatgtctgctcaggacct

SEQ ID NO: 41361 - DNA, 22 bp, synthetic construct
  misc_feature 1..22: note = chemically synthesized
  source 1..22: mol_type = other DNA
gaaaatgtctgctcaggacctg

SEQ ID NO: 41362 - DNA, 22 bp, synthetic construct
  misc_feature 1..22: note = chemically synthesized
  source 1..22: mol_type = other DNA
ctcaggacctgagctcactgta

SEQ ID NO: 41363 - DNA, 22 bp, synthetic construct
  misc_feature 1..22: note = chemically synthesized
  source 1..22: mol_type = other DNA
aggacctgagctcactgtattt

SEQ ID NO: 41364 - DNA, 22 bp, synthetic construct
  misc_feature 1..22: note = chemically synthesized
  source 1..22: mol_type = other DNA
agctcactgtatttgtcagggt

SEQ ID NO: 41365 - DNA, 22 bp, synthetic construct
  misc_feature 1..22: note = chemically synthesized
  source 1..22: mol_type = other DNA
actgtatttgtcagggttccct

SEQ ID NO: 41366 - DNA, 22 bp, synthetic construct
  misc_feature 1..22: note = chemically synthesized
  source 1..22: mol_type = other DNA
tatttgtcagggttccctagag

SEQ ID NO: 41367 - DNA, 22 bp, synthetic construct
  misc_feature 1..22: note = chemically synthesized
  source 1..22: mol_type = other DNA
gtcagggttccctagagagaca

SEQ ID NO: 41368 - DNA, 22 bp, synthetic construct
  misc_feature 1..22: note = chemically synthesized
  source 1..22: mol_type = other DNA
tcagggttccctagagagacag

SEQ ID NO: 41369 - DNA, 22 bp, synthetic construct
  misc_feature 1..22: note = chemically synthesized
  source 1..22: mol_type = other DNA
cctagagagacagaactaatag

SEQ ID NO: 41370 - DNA, 22 bp, synthetic construct
  misc_feature 1..22: note = chemically synthesized
  source 1..22: mol_type = other DNA
gagagacagaactaataggaga

SEQ ID NO: 41371 - DNA, 22 bp, synthetic construct
  misc_feature 1..22: note = chemically synthesized
  source 1..22: mol_type = other DNA
ataggagatagatagatagata

SEQ ID NO: 41372 - DNA, 22 bp, synthetic construct
  misc_feature 1..22: note = chemically synthesized
  source 1..22: mol_type = other DNA
agatataaaagggagtttatta

SEQ ID NO: 41373 - DNA, 22 bp, synthetic construct
  misc_feature 1..22: note = chemically synthesized
  source 1..22: mol_type = other DNA
gatataaaagggagtttattaa

SEQ ID NO: 41374 - DNA, 22 bp, synthetic construct
  misc_feature 1..22: note = chemically synthesized
  source 1..22: mol_type = other DNA
attaagtagtgttaacttacac

SEQ ID NO: 41375 - DNA, 22 bp, synthetic construct
  misc_feature 1..22: note = chemically synthesized
  source 1..22: mol_type = other DNA
ttaagtagtgttaacttacaca

SEQ ID NO: 41376 - DNA, 22 bp, synthetic construct
  misc_feature 1..22: note = chemically synthesized
  source 1..22: mol_type = other DNA
agtagtgttaacttacacaatc

SEQ ID NO: 41377 - DNA, 22 bp, synthetic construct
  misc_feature 1..22: note = chemically synthesized
  source 1..22: mol_type = other DNA
acttacacaatcacaaggtccc

SEQ ID NO: 41378 - DNA, 22 bp, synthetic construct
  misc_feature 1..22: note = chemically synthesized
  source 1..22: mol_type = other DNA
acacaatcacaaggtcccacaa

SEQ ID NO: 41379 - DNA, 22 bp, synthetic construct
  misc_feature 1..22: note = chemically synthesized
  source 1..22: mol_type = other DNA
cacaatcacaaggtcccacaat

SEQ ID NO: 41380 - DNA, 22 bp, synthetic construct
  misc_feature 1..22: note = chemically synthesized
  source 1..22: mol_type = other DNA
caagcagaggagcaaggaagcc

SEQ ID NO: 41381 - DNA, 22 bp, synthetic construct
  misc_feature 1..22: note = chemically synthesized
  source 1..22: mol_type = other DNA
aaggacttggagtccaatgttt

SEQ ID NO: 41382 - DNA, 22 bp, synthetic construct
  misc_feature 1..22: note = chemically synthesized
  source 1..22: mol_type = other DNA
ggagtccaatgtttgagggcag

SEQ ID NO: 41383 - DNA, 22 bp, synthetic construct
  misc_feature 1..22: note = chemically synthesized
  source 1..22: mol_type = other DNA
gagtccaatgtttgagggcagg

SEQ ID NO: 41384 - DNA, 22 bp, synthetic construct
  misc_feature 1..22: note = chemically synthesized
  source 1..22: mol_type = other DNA
gagggcaggaagcatccagcat

SEQ ID NO: 41385 - DNA, 22 bp, synthetic construct
  misc_feature 1..22: note = chemically synthesized
  source 1..22: mol_type = other DNA
agggcaggaagcatccagcatg

SEQ ID NO: 41386 - DNA, 22 bp, synthetic construct
  misc_feature 1..22: note = chemically synthesized
  source 1..22: mol_type = other DNA
ggaggctaagccagtccaggat

SEQ ID NO: 41387 - DNA, 22 bp, synthetic construct
  misc_feature 1..22: note = chemically synthesized
  source 1..22: mol_type = other DNA
gaggctaagccagtccaggatt

SEQ ID NO: 41388 - DNA, 22 bp, synthetic construct
  misc_feature 1..22: note = chemically synthesized
  source 1..22: mol_type = other DNA
agccagtccaggattttcacat

SEQ ID NO: 41389 - DNA, 22 bp, synthetic construct
  misc_feature 1..22: note = chemically synthesized
  source 1..22: mol_type = other DNA
tcacatgttttttttctgcctg

SEQ ID NO: 41390 - DNA, 22 bp, synthetic construct
  misc_feature 1..22: note = chemically synthesized
  source 1..22: mol_type = other DNA
cacatgttttttttctgcctgc

SEQ ID NO: 41391 - DNA, 22 bp, synthetic construct
  misc_feature 1..22: note = chemically synthesized
  source 1..22: mol_type = other DNA
acatgttttttttctgcctgct

SEQ ID NO: 41392 - DNA, 22 bp, synthetic construct
  misc_feature 1..22: note = chemically synthesized
  source 1..22: mol_type = other DNA
tttttctgcctgctttatatcc

SEQ ID NO: 41393 - DNA, 22 bp, synthetic construct
  misc_feature 1..22: note = chemically synthesized
  source 1..22: mol_type = other DNA
ttttctgcctgctttatatcct

SEQ ID NO: 41394 - DNA, 22 bp, synthetic construct
  misc_feature 1..22: note = chemically synthesized
  source 1..22: mol_type = other DNA
tttctgcctgctttatatcctg

SEQ ID NO: 41395 - DNA, 22 bp, synthetic construct
  misc_feature 1..22: note = chemically synthesized
  source 1..22: mol_type = other DNA
ttctgcctgctttatatcctgg

SEQ ID NO: 41396 - DNA, 22 bp, synthetic construct
  misc_feature 1..22: note = chemically synthesized
  source 1..22: mol_type = other DNA
tctgcctgctttatatcctggc

SEQ ID NO: 41397 - DNA, 22 bp, synthetic construct
  misc_feature 1..22: note = chemically synthesized
  source 1..22: mol_type = other DNA
ctgcctgctttatatcctggcc

SEQ ID NO: 41398 - DNA, 22 bp, synthetic construct
  misc_feature 1..22: note = chemically synthesized
  source 1..22: mol_type = other DNA
tgcctgctttatatcctggcca

SEQ ID NO: 41399 - DNA, 22 bp, synthetic construct
  misc_feature 1..22: note = chemically synthesized
  source 1..22: mol_type = other DNA
cctgctttatatcctggccaca

SEQ ID NO: 41400 - DNA, 22 bp, synthetic construct
  misc_feature 1..22: note = chemically synthesized
  source 1..22: mol_type = other DNA
ctttatatcctggccacactgg

SEQ ID NO: 41401 - DNA, 22 bp, synthetic construct
  misc_feature 1..22: note = chemically synthesized
  source 1..22: mol_type = other DNA
tatatcctggccacactggcaa

SEQ ID NO: 41402 - DNA, 22 bp, synthetic construct
  misc_feature 1..22: note = chemically synthesized
  source 1..22: mol_type = other DNA
atatcctggccacactggcaac

SEQ ID NO: 41403 - DNA, 22 bp, synthetic construct
  misc_feature 1..22: note = chemically synthesized
  source 1..22: mol_type = other DNA
tatcctggccacactggcaact

SEQ ID NO: 41404 - DNA, 22 bp, synthetic construct
  misc_feature 1..22: note = chemically synthesized
  source 1..22: mol_type = other DNA
gccacactggcaactgattaga

SEQ ID NO: 41405 - DNA, 22 bp, synthetic construct
  misc_feature 1..22: note = chemically synthesized
  source 1..22: mol_type = other DNA
gcaactgattagatggtgccca

SEQ ID NO: 41406 - DNA, 22 bp, synthetic construct
  misc_feature 1..22: note = chemically synthesized
  source 1..22: mol_type = other DNA
attagatggtgcccacccagat

SEQ ID NO: 41407 - DNA, 22 bp, synthetic construct
  misc_feature 1..22: note = chemically synthesized
  source 1..22: mol_type = other DNA
gatggtgcccacccagattaag

SEQ ID NO: 41408 - DNA, 22 bp, synthetic construct
  misc_feature 1..22: note = chemically synthesized
  source 1..22: mol_type = other DNA
agggtgggtctgcctttcccag

SEQ ID NO: 41409 - DNA, 22 bp, synthetic construct
  misc_feature 1..22: note = chemically synthesized
  source 1..22: mol_type = other DNA
cctttcccagcccactgactaa

SEQ ID NO: 41410 - DNA, 22 bp, synthetic construct
  misc_feature 1..22: note = chemically synthesized
  source 1..22: mol_type = other DNA
tcccagcccactgactaaaatg

SEQ ID NO: 41411 - DNA, 22 bp, synthetic construct
  misc_feature 1..22: note = chemically synthesized
  source 1..22: mol_type = other DNA
cccagcccactgactaaaatgt

SEQ ID NO: 41412 - DNA, 22 bp, synthetic construct
  misc_feature 1..22: note = chemically synthesized
  source 1..22: mol_type = other DNA
ccagcccactgactaaaatgtt

SEQ ID NO: 41413 - DNA, 22 bp, synthetic construct
  misc_feature 1..22: note = chemically synthesized
  source 1..22: mol_type = other DNA
actaaaatgttaatctcctttg

SEQ ID NO: 41414 - DNA, 22 bp, synthetic construct
  misc_feature 1..22: note = chemically synthesized
  source 1..22: mol_type = other DNA
aaatgttaatctcctttggcaa

SEQ ID NO: 41415 - DNA, 22 bp, synthetic construct
  misc_feature 1..22: note = chemically synthesized
  source 1..22: mol_type = other DNA
atctcctttggcaataccctca

SEQ ID NO: 41416 - DNA, 22 bp, synthetic construct
  misc_feature 1..22: note = chemically synthesized
  source 1..22: mol_type = other DNA
ctttggcaataccctcacagac

SEQ ID NO: 41417 - DNA, 22 bp, synthetic construct
  misc_feature 1..22: note = chemically synthesized
  source 1..22: mol_type = other DNA
tggcaataccctcacagacaca

SEQ ID NO: 41418 - DNA, 22 bp, synthetic construct
  misc_feature 1..22: note = chemically synthesized
  source 1..22: mol_type = other DNA
ggcaataccctcacagacacac

SEQ ID NO: 41419 - DNA, 22 bp, synthetic construct
  misc_feature 1..22: note = chemically synthesized
  source 1..22: mol_type = other DNA
gcaataccctcacagacacact

SEQ ID NO: 41420 - DNA, 22 bp, synthetic construct
  misc_feature 1..22: note = chemically synthesized
  source 1..22: mol_type = other DNA
acagacacactcaggatcaata

SEQ ID NO: 41421 - DNA, 22 bp, synthetic construct
  misc_feature 1..22: note = chemically synthesized
  source 1..22: mol_type = other DNA
aggatcaatactttgcacactt

SEQ ID NO: 41422 - DNA, 22 bp, synthetic construct
  misc_feature 1..22: note = chemically synthesized
  source 1..22: mol_type = other DNA
tgcacacttcaatccaatcaag

SEQ ID NO: 41423 - DNA, 22 bp, synthetic construct
  misc_feature 1..22: note = chemically synthesized
  source 1..22: mol_type = other DNA
gcacacttcaatccaatcaagt

SEQ ID NO: 41424 - DNA, 22 bp, synthetic construct
  misc_feature 1..22: note = chemically synthesized
  source 1..22: mol_type = other DNA
cacacttcaatccaatcaagtt

SEQ ID NO: 41425 - DNA, 22 bp, synthetic construct
  misc_feature 1..22: note = chemically synthesized
  source 1..22: mol_type = other DNA
caatccaatcaagttgacactc

SEQ ID NO: 41426 - DNA, 22 bp, synthetic construct
  misc_feature 1..22: note = chemically synthesized
  source 1..22: mol_type = other DNA
aatccaatcaagttgacactca

SEQ ID NO: 41427 - DNA, 22 bp, synthetic construct
  misc_feature 1..22: note = chemically synthesized
  source 1..22: mol_type = other DNA
acactcagtattaaccatcaca

SEQ ID NO: 41428 - DNA, 22 bp, synthetic construct
  misc_feature 1..22: note = chemically synthesized
  source 1..22: mol_type = other DNA
agtattaaccatcacaagtcca

SEQ ID NO: 41429 - DNA, 22 bp, synthetic construct
  misc_feature 1..22: note = chemically synthesized
  source 1..22: mol_type = other DNA
accatcacaagtccatcgcttg

SEQ ID NO: 41430 - DNA, 22 bp, synthetic construct
  misc_feature 1..22: note = chemically synthesized
  source 1..22: mol_type = other DNA
gtcaacttgagcctatacacat

SEQ ID NO: 41431 - DNA, 22 bp, synthetic construct
  misc_feature 1..22: note = chemically synthesized
  source 1..22: mol_type = other DNA
tcaacttgagcctatacacatc

SEQ ID NO: 41432 - DNA, 22 bp, synthetic construct
  misc_feature 1..22: note = chemically synthesized
  source 1..22: mol_type = other DNA
gagcctatacacatcccctgag

SEQ ID NO: 41433 - DNA, 22 bp, synthetic construct
  misc_feature 1..22: note = chemically synthesized
  source 1..22: mol_type = other DNA
agcctatacacatcccctgagg

SEQ ID NO: 41434 - DNA, 22 bp, synthetic construct
  misc_feature 1..22: note = chemically synthesized
  source 1..22: mol_type = other DNA
tacacatcccctgaggtcatac

SEQ ID NO: 41435 - DNA, 22 bp, synthetic construct
  misc_feature 1..22: note = chemically synthesized
  source 1..22: mol_type = other DNA
aggtcatacattatcttcaaat

SEQ ID NO: 41436 - DNA, 22 bp, synthetic construct
  misc_feature 1..22: note = chemically synthesized
  source 1..22: mol_type = other DNA
tcttcaaataaagacaacaata

SEQ ID NO: 41437 - DNA, 22 bp, synthetic construct
  misc_feature 1..22: note = chemically synthesized
  source 1..22: mol_type = other DNA
caaataaagacaacaataagtc

SEQ ID NO: 41438 - DNA, 22 bp, synthetic construct
  misc_feature 1..22: note = chemically synthesized
  source 1..22: mol_type = other DNA
aaataaagacaacaataagtca

SEQ ID NO: 41439 - DNA, 22 bp, synthetic construct
  misc_feature 1..22: note = chemically synthesized
  source 1..22: mol_type = other DNA
tgcctaacatactaaaactatc

SEQ ID NO: 41440 - DNA, 22 bp, synthetic construct
  misc_feature 1..22: note = chemically synthesized
  source 1..22: mol_type = other DNA
acatactaaaactatccttcgt

SEQ ID NO: 41441 - DNA, 22 bp, synthetic construct
  misc_feature 1..22: note = chemically synthesized
  source 1..22: mol_type = other DNA
aaactatccttcgtgcaattga

SEQ ID NO: 41442 - DNA, 22 bp, synthetic construct
  misc_feature 1..22: note = chemically synthesized
  source 1..22: mol_type = other DNA
tccttcgtgcaattgaaaatgc

SEQ ID NO: 41443 - DNA, 22 bp, synthetic construct
  misc_feature 1..22: note = chemically synthesized
  source 1..22: mol_type = other DNA
cgtgcaattgaaaatgcaccaa

SEQ ID NO: 41444 - DNA, 22 bp, synthetic construct
  misc_feature 1..22: note = chemically synthesized
  source 1..22: mol_type = other DNA
gtgcaattgaaaatgcaccaat

SEQ ID NO: 41445 - DNA, 22 bp, synthetic construct
  misc_feature 1..22: note = chemically synthesized
  source 1..22: mol_type = other DNA
aaaatgcaccaatccccattgc

SEQ ID NO: 41446 - DNA, 22 bp, synthetic construct
  misc_feature 1..22: note = chemically synthesized
  source 1..22: mol_type = other DNA
caaatgctattacataaactta

SEQ ID NO: 41447 - DNA, 22 bp, synthetic construct
  misc_feature 1..22: note = chemically synthesized
  source 1..22: mol_type = other DNA
ttacataaacttaacaatactt

SEQ ID NO: 41448 - DNA, 22 bp, synthetic construct
  misc_feature 1..22: note = chemically synthesized
  source 1..22: mol_type = other DNA
cataaacttaacaatacttaaa

SEQ ID NO: 41449 - DNA, 22 bp, synthetic construct
  misc_feature 1..22: note = chemically synthesized
  source 1..22: mol_type = other DNA
aacaatacttaaatgctgatat

SEQ ID NO: 41450 - DNA, 22 bp, synthetic construct
  misc_feature 1..22: note = chemically synthesized
  source 1..22: mol_type = other DNA
acaatacttaaatgctgatatg

SEQ ID NO: 41451 - DNA, 22 bp, synthetic construct
  misc_feature 1..22: note = chemically synthesized
  source 1..22: mol_type = other DNA
aaatgctgatatgaagtcaata

SEQ ID NO: 41452 - DNA, 22 bp, synthetic construct
  misc_feature 1..22: note = chemically synthesized
  source 1..22: mol_type = other DNA
aatgctgatatgaagtcaataa

SEQ ID NO: 41453 - DNA, 22 bp, synthetic construct
  misc_feature 1..22: note = chemically synthesized
  source 1..22: mol_type = other DNA
atatgaagtcaataaatcttat

SEQ ID NO: 41454 - DNA, 22 bp, synthetic construct
  misc_feature 1..22: note = chemically synthesized
  source 1..22: mol_type = other DNA
atgtcacatgataaaggaaaaa

SEQ ID NO: 41455 - DNA, 22 bp, synthetic construct
  misc_feature 1..22: note = chemically synthesized
  source 1..22: mol_type = other DNA
tgtcacatgataaaggaaaaag

SEQ ID NO: 41456 - DNA, 22 bp, synthetic construct
  misc_feature 1..22: note = chemically synthesized
  source 1..22: mol_type = other DNA
tcttagtacaagtgtatacaga

SEQ ID NO: 41457 - DNA, 22 bp, synthetic construct
  misc_feature 1..22: note = chemically synthesized
  source 1..22: mol_type = other DNA
cttagtacaagtgtatacagac

SEQ ID NO: 41458 - DNA, 22 bp, synthetic construct
  misc_feature 1..22: note = chemically synthesized
  source 1..22: mol_type = other DNA
ttagtacaagtgtatacagaca

SEQ ID NO: 41459 - DNA, 22 bp, synthetic construct
  misc_feature 1..22: note = chemically synthesized
  source 1..22: mol_type = other DNA
agtacaagtgtatacagacacg

SEQ ID NO: 41460 - DNA, 22 bp, synthetic construct
  misc_feature 1..22: note = chemically synthesized
  source 1..22: mol_type = other DNA
gtacaagtgtatacagacacga

SEQ ID NO: 41461 - DNA, 22 bp, synthetic construct
  misc_feature 1..22: note = chemically synthesized
  source 1..22: mol_type = other DNA
ttaacaaaagaaggaggaaata

SEQ ID NO: 41462 - DNA, 22 bp, synthetic construct
  misc_feature 1..22: note = chemically synthesized
  source 1..22: mol_type = other DNA
taacaaaagaaggaggaaatac

SEQ ID NO: 41463 - DNA, 22 bp, synthetic construct
  misc_feature 1..22: note = chemically synthesized
  source 1..22: mol_type = other DNA
aacaaaagaaggaggaaatact

SEQ ID NO: 41464 - DNA, 22 bp, synthetic construct
  misc_feature 1..22: note = chemically synthesized
  source 1..22: mol_type = other DNA
acaaaagaaggaggaaatactc

SEQ ID NO: 41465 - DNA, 22 bp, synthetic construct
  misc_feature 1..22: note = chemically synthesized
  source 1..22: mol_type = other DNA
atgacaattacagtccttgtat

SEQ ID NO: 41466 - DNA, 22 bp, synthetic construct
  misc_feature 1..22: note = chemically synthesized
  source 1..22: mol_type = other DNA
cagtccttgtatctgcaattgg

SEQ ID NO: 41467 - DNA, 22 bp, synthetic construct
  misc_feature 1..22: note = chemically synthesized
  source 1..22: mol_type = other DNA
gtatctgcaattggtcacgtga

SEQ ID NO: 41468 - DNA, 22 bp, synthetic construct
  misc_feature 1..22: note = chemically synthesized
  source 1..22: mol_type = other DNA
tatctgcaattggtcacgtgat

SEQ ID NO: 41469 - DNA, 22 bp, synthetic construct
  misc_feature 1..22: note = chemically synthesized
  source 1..22: mol_type = other DNA
caattggtcacgtgatcgtagc

SEQ ID NO: 41470 - DNA, 22 bp, synthetic construct
  misc_feature 1..22: note = chemically synthesized
  source 1..22: mol_type = other DNA
gtcacgtgatcgtagctggtat

SEQ ID NO: 41471 - DNA, 22 bp, synthetic construct
  misc_feature 1..22: note = chemically synthesized
  source 1..22: mol_type = other DNA
gtattgatgactaccttcttct

SEQ ID NO: 41472 - DNA, 22 bp, synthetic construct
  misc_feature 1..22: note = chemically synthesized
  source 1..22: mol_type = other DNA
atgactaccttcttctgctaca

SEQ ID NO: 41473 - DNA, 22 bp, synthetic construct
  misc_feature 1..22: note = chemically synthesized
  source 1..22: mol_type = other DNA
ccttcttctgctacatattctg

SEQ ID NO: 41474 - DNA, 22 bp, synthetic construct
  misc_feature 1..22: note = chemically synthesized
  source 1..22: mol_type = other DNA
cttctgctacatattctgtatt

SEQ ID NO: 41475 - DNA, 22 bp, synthetic construct
  misc_feature 1..22: note = chemically synthesized
  source 1..22: mol_type = other DNA
ttctgctacatattctgtattc

SEQ ID NO: 41476 - DNA, 22 bp, synthetic construct
  misc_feature 1..22: note = chemically synthesized
  source 1..22: mol_type = other DNA
ctgctacatattctgtattccc

SEQ ID NO: 41477 - DNA, 22 bp, synthetic construct
  misc_feature 1..22: note = chemically synthesized
  source 1..22: mol_type = other DNA
tgctacatattctgtattccct

SEQ ID NO: 41478 - DNA, 22 bp, synthetic construct
  misc_feature 1..22: note = chemically synthesized
  source 1..22: mol_type = other DNA
ctacatattctgtattcccttt

SEQ ID NO: 41479 - DNA, 22 bp, synthetic construct
  misc_feature 1..22: note = chemically synthesized
  source 1..22: mol_type = other DNA
catattctgtattccctttgcc

SEQ ID NO: 41480 - DNA, 22 bp, synthetic construct
  misc_feature 1..22: note = chemically synthesized
  source 1..22: mol_type = other DNA
tgtattccctttgccctcagca

SEQ ID NO: 41481 - DNA, 22 bp, synthetic construct
  misc_feature 1..22: note = chemically synthesized
  source 1..22: mol_type = other DNA
tattccctttgccctcagcaag

SEQ ID NO: 41482 - DNA, 22 bp, synthetic construct
  misc_feature 1..22: note = chemically synthesized
  source 1..22: mol_type = other DNA
cctttgccctcagcaagcacct

SEQ ID NO: 41483 - DNA, 22 bp, synthetic construct
  misc_feature 1..22: note = chemically synthesized
  source 1..22: mol_type = other DNA
tgccctcagcaagcacctcagc

SEQ ID NO: 41484 - DNA, 22 bp, synthetic construct
  misc_feature 1..22: note = chemically synthesized
  source 1..22: mol_type = other DNA
gccctcagcaagcacctcagca

SEQ ID NO: 41485 - DNA, 22 bp, synthetic construct
  misc_feature 1..22: note = chemically synthesized
  source 1..22: mol_type = other DNA
ccctcagcaagcacctcagcag

SEQ ID NO: 41486 - DNA, 22 bp, synthetic construct
  misc_feature 1..22: note = chemically synthesized
  source 1..22: mol_type = other DNA
agcaagcacctcagcaggtctt

SEQ ID NO: 41487 - DNA, 22 bp, synthetic construct
  misc_feature 1..22: note = chemically synthesized
  source 1..22: mol_type = other DNA
agcaggtcttgtcttttttttt

SEQ ID NO: 41488 - DNA, 22 bp, synthetic construct
  misc_feature 1..22: note = chemically synthesized
  source 1..22: mol_type = other DNA
gtcttttttttttttttttttc

SEQ ID NO: 41489 - DNA, 22 bp, synthetic construct
  misc_feature 1..22: note = chemically synthesized
  source 1..22: mol_type = other DNA
tcttttttttttttttttttcc

SEQ ID NO: 41490 - DNA, 22 bp, synthetic construct
  misc_feature 1..22: note = chemically synthesized
  source 1..22: mol_type = other DNA
ttttttttttttttttcctggt

SEQ ID NO: 41491 - DNA, 22 bp, synthetic construct
  misc_feature 1..22: note = chemically synthesized
  source 1..22: mol_type = other DNA
tttttttttttttttcctggtg

SEQ ID NO: 41492 - DNA, 22 bp, synthetic construct
  misc_feature 1..22: note = chemically synthesized
  source 1..22: mol_type = other DNA
ttttttttttttttcctggtgg

SEQ ID NO: 41493 - DNA, 22 bp, synthetic construct
  misc_feature 1..22: note = chemically synthesized
  source 1..22: mol_type = other DNA
tttttttttttttcctggtgga

SEQ ID NO: 41494 - DNA, 22 bp, synthetic construct
  misc_feature 1..22: note = chemically synthesized
  source 1..22: mol_type = other DNA
ttttttttttttcctggtggag

SEQ ID NO: 41495 - DNA, 22 bp, synthetic construct
  misc_feature 1..22: note = chemically synthesized
  source 1..22: mol_type = other DNA
tttttttttttcctggtggagt

SEQ ID NO: 41496 - DNA, 22 bp, synthetic construct
  misc_feature 1..22: note = chemically synthesized
  source 1..22: mol_type = other DNA
ttttttttttcctggtggagtg

SEQ ID NO: 41497 - DNA, 22 bp, synthetic construct
  misc_feature 1..22: note = chemically synthesized
  source 1..22: mol_type = other DNA
tttttttttcctggtggagtga

SEQ ID NO: 41498 - DNA, 22 bp, synthetic construct
  misc_feature 1..22: note = chemically synthesized
  source 1..22: mol_type = other DNA
ttttttttcctggtggagtgac

SEQ ID NO: 41499 - DNA, 22 bp, synthetic construct
  misc_feature 1..22: note = chemically synthesized
  source 1..22: mol_type = other DNA
tttttttcctggtggagtgacc

SEQ ID NO: 41500 - DNA, 22 bp, synthetic construct
  misc_feature 1..22: note = chemically synthesized
  source 1..22: mol_type = other DNA
ttttttcctggtggagtgaccc

SEQ ID NO: 41501 - DNA, 22 bp, synthetic construct
  misc_feature 1..22: note = chemically synthesized
  source 1..22: mol_type = other DNA
tttttcctggtggagtgaccca

SEQ ID NO: 41502 - DNA, 22 bp, synthetic construct
  misc_feature 1..22: note = chemically synthesized
  source 1..22: mol_type = other DNA
ttttcctggtggagtgacccaa

SEQ ID NO: 41503 - DNA, 22 bp, synthetic construct
  misc_feature 1..22: note = chemically synthesized
  source 1..22: mol_type = other DNA
tttcctggtggagtgacccaaa

SEQ ID NO: 41504 - DNA, 22 bp, synthetic construct
  misc_feature 1..22: note = chemically synthesized
  source 1..22: mol_type = other DNA
ttcctggtggagtgacccaaac

SEQ ID NO: 41505 - DNA, 22 bp, synthetic construct
  misc_feature 1..22: note = chemically synthesized
  source 1..22: mol_type = other DNA
tcctggtggagtgacccaaacc

SEQ ID NO: 41506 - DNA, 22 bp, synthetic construct
  misc_feature 1..22: note = chemically synthesized
  source 1..22: mol_type = other DNA
cctggtggagtgacccaaacct

SEQ ID NO: 41507 - DNA, 22 bp, synthetic construct
  misc_feature 1..22: note = chemically synthesized
  source 1..22: mol_type = other DNA
ctggtggagtgacccaaacctt

SEQ ID NO: 41508 - DNA, 22 bp, synthetic construct
  misc_feature 1..22: note = chemically synthesized
  source 1..22: mol_type = other DNA
gtggagtgacccaaacctttat

SEQ ID NO: 41509 - DNA, 22 bp, synthetic construct
  misc_feature 1..22: note = chemically synthesized
  source 1..22: mol_type = other DNA
tatttgtagtcctgcctggaat

SEQ ID NO: 41510 - DNA, 22 bp, synthetic construct
  misc_feature 1..22: note = chemically synthesized
  source 1..22: mol_type = other DNA
atttgtagtcctgcctggaatg

SEQ ID NO: 41511 - DNA, 22 bp, synthetic construct
  misc_feature 1..22: note = chemically synthesized
  source 1..22: mol_type = other DNA
tttgtagtcctgcctggaatgg

SEQ ID NO: 41512 - DNA, 22 bp, synthetic construct
  misc_feature 1..22: note = chemically synthesized
  source 1..22: mol_type = other DNA
gtagtcctgcctggaatggcct

SEQ ID NO: 41513 - DNA, 22 bp, synthetic construct
  misc_feature 1..22: note = chemically synthesized
  source 1..22: mol_type = other DNA
tagtcctgcctggaatggcctg

SEQ ID NO: 41514 - DNA, 22 bp, synthetic construct
  misc_feature 1..22: note = chemically synthesized
  source 1..22: mol_type = other DNA
cctggaatggcctgtagtagtt

SEQ ID NO: 41515 - DNA, 22 bp, synthetic construct
  misc_feature 1..22: note = chemically synthesized
  source 1..22: mol_type = other DNA
gaatggcctgtagtagtttccc

SEQ ID NO: 41516 - DNA, 22 bp, synthetic construct
  misc_feature 1..22: note = chemically synthesized
  source 1..22: mol_type = other DNA
tagtagtttcccactgacctta

SEQ ID NO: 41517 - DNA, 22 bp, synthetic construct
  misc_feature 1..22: note = chemically synthesized
  source 1..22: mol_type = other DNA
cccactgaccttaattccagga

SEQ ID NO: 41518 - DNA, 22 bp, synthetic construct
  misc_feature 1..22: note = chemically synthesized
  source 1..22: mol_type = other DNA
ccactgaccttaattccaggac

SEQ ID NO: 41519 - DNA, 22 bp, synthetic construct
  misc_feature 1..22: note = chemically synthesized
  source 1..22: mol_type = other DNA
accttaattccaggacatggta

SEQ ID NO: 41520 - DNA, 22 bp, synthetic construct
  misc_feature 1..22: note = chemically synthesized
  source 1..22: mol_type = other DNA
aattccaggacatggtaaaact

SEQ ID NO: 41521 - DNA, 22 bp, synthetic construct
  misc_feature 1..22: note = chemically synthesized
  source 1..22: mol_type = other DNA
attccaggacatggtaaaacta

SEQ ID NO: 41522 - DNA, 22 bp, synthetic construct
  misc_feature 1..22: note = chemically synthesized
  source 1..22: mol_type = other DNA
caggacatggtaaaactaagag

SEQ ID NO: 41523 - DNA, 22 bp, synthetic construct
  misc_feature 1..22: note = chemically synthesized
  source 1..22: mol_type = other DNA
agagacaccctaatggatctcc

SEQ ID NO: 41524 - DNA, 22 bp, synthetic construct
  misc_feature 1..22: note = chemically synthesized
  source 1..22: mol_type = other DNA
atggatctcctatattccatgc

SEQ ID NO: 41525 - DNA, 22 bp, synthetic construct
  misc_feature 1..22: note = chemically synthesized
  source 1..22: mol_type = other DNA
ctatattccatgcatacgcttc

SEQ ID NO: 41526 - DNA, 22 bp, synthetic construct
  misc_feature 1..22: note = chemically synthesized
  source 1..22: mol_type = other DNA
tattccatgcatacgcttcctt

SEQ ID NO: 41527 - DNA, 22 bp, synthetic construct
  misc_feature 1..22: note = chemically synthesized
  source 1..22: mol_type = other DNA
catgcatacgcttccttacctc

SEQ ID NO: 41528 - DNA, 22 bp, synthetic construct
  misc_feature 1..22: note = chemically synthesized
  source 1..22: mol_type = other DNA
ccttacctccattgtggagttg

SEQ ID NO: 41529 - DNA, 22 bp, synthetic construct
  misc_feature 1..22: note = chemically synthesized
  source 1..22: mol_type = other DNA
cttacctccattgtggagttgt

SEQ ID NO: 41530 - DNA, 22 bp, synthetic construct
  misc_feature 1..22: note = chemically synthesized
  source 1..22: mol_type = other DNA
acctccattgtggagttgtaga

SEQ ID NO: 41531 - DNA, 22 bp, synthetic construct
  misc_feature 1..22: note = chemically synthesized
  source 1..22: mol_type = other DNA
cctccattgtggagttgtagac

SEQ ID NO: 41532 - DNA, 22 bp, synthetic construct
  misc_feature 1..22: note = chemically synthesized
  source 1..22: mol_type = other DNA
cattgtggagttgtagactgat

SEQ ID NO: 41533 - DNA, 22 bp, synthetic construct
  misc_feature 1..22: note = chemically synthesized
  source 1..22: mol_type = other DNA
tggagttgtagactgatttcat

SEQ ID NO: 41534 - DNA, 22 bp, synthetic construct
  misc_feature 1..22: note = chemically synthesized
  source 1..22: mol_type = other DNA
tagactgatttcatcttgatag

SEQ ID NO: 41535 - DNA, 22 bp, synthetic construct
  misc_feature 1..22: note = chemically synthesized
  source 1..22: mol_type = other DNA
atttcatcttgatagtctgggt

SEQ ID NO: 41536 - DNA, 22 bp, synthetic construct
  misc_feature 1..22: note = chemically synthesized
  source 1..22: mol_type = other DNA
catcttgatagtctgggttaat

SEQ ID NO: 41537 - DNA, 22 bp, synthetic construct
  misc_feature 1..22: note = chemically synthesized
  source 1..22: mol_type = other DNA
atcttgatagtctgggttaatc

SEQ ID NO: 41538 - DNA, 22 bp, synthetic construct
  misc_feature 1..22: note = chemically synthesized
  source 1..22: mol_type = other DNA
gatagtctgggttaatcaccgc

SEQ ID NO: 41539 - DNA, 22 bp, synthetic construct
  misc_feature 1..22: note = chemically synthesized
  source 1..22: mol_type = other DNA
atagtctgggttaatcaccgca

SEQ ID NO: 41540 - DNA, 22 bp, synthetic construct
  misc_feature 1..22: note = chemically synthesized
  source 1..22: mol_type = other DNA
ggttaatcaccgcagccaacac

SEQ ID NO: 41541 - DNA, 22 bp, synthetic construct
  misc_feature 1..22: note = chemically synthesized
  source 1..22: mol_type = other DNA
atcaccgcagccaacactgtaa

SEQ ID NO: 41542 - DNA, 22 bp, synthetic construct
  misc_feature 1..22: note = chemically synthesized
  source 1..22: mol_type = other DNA
taactctcttcttagcctgttg

SEQ ID NO: 41543 - DNA, 22 bp, synthetic construct
  misc_feature 1..22: note = chemically synthesized
  source 1..22: mol_type = other DNA
tcttcttagcctgttgacttaa

SEQ ID NO: 41544 - DNA, 22 bp, synthetic construct
  misc_feature 1..22: note = chemically synthesized
  source 1..22: mol_type = other DNA
ttcttagcctgttgacttaaag

SEQ ID NO: 41545 - DNA, 22 bp, synthetic construct
  misc_feature 1..22: note = chemically synthesized
  source 1..22: mol_type = other DNA
cttagcctgttgacttaaaggt

SEQ ID NO: 41546 - DNA, 22 bp, synthetic construct
  misc_feature 1..22: note = chemically synthesized
  source 1..22: mol_type = other DNA
ttagcctgttgacttaaaggtg

SEQ ID NO: 41547 - DNA, 22 bp, synthetic construct
  misc_feature 1..22: note = chemically synthesized
  source 1..22: mol_type = other DNA
agcctgttgacttaaaggtggg

SEQ ID NO: 41548 - DNA, 22 bp, synthetic construct
  misc_feature 1..22: note = chemically synthesized
  source 1..22: mol_type = other DNA
gcctgttgacttaaaggtggga

SEQ ID NO: 41549 - DNA, 22 bp, synthetic construct
  misc_feature 1..22: note = chemically synthesized
  source 1..22: mol_type = other DNA
ttgacttaaaggtgggaggagc

SEQ ID NO: 41550 - DNA, 22 bp, synthetic construct
  misc_feature 1..22: note = chemically synthesized
  source 1..22: mol_type = other DNA
acttaaaggtgggaggagccca

SEQ ID NO: 41551 - DNA, 22 bp, synthetic construct
  misc_feature 1..22: note = chemically synthesized
  source 1..22: mol_type = other DNA
aaaggtgggaggagcccaaagt

SEQ ID NO: 41552 - DNA, 22 bp, synthetic construct
  misc_feature 1..22: note = chemically synthesized
  source 1..22: mol_type = other DNA
aaggtgggaggagcccaaagtg

SEQ ID NO: 41553 - DNA, 22 bp, synthetic construct
  misc_feature 1..22: note = chemically synthesized
  source 1..22: mol_type = other DNA
aatttgcagtttaatggaatca

SEQ ID NO: 41554 - DNA, 22 bp, synthetic construct
  misc_feature 1..22: note = chemically synthesized
  source 1..22: mol_type = other DNA
atttgcagtttaatggaatcat

SEQ ID NO: 41555 - DNA, 22 bp, synthetic construct
  misc_feature 1..22: note = chemically synthesized
  source 1..22: mol_type = other DNA
gcagtttaatggaatcattatt

SEQ ID NO: 41556 - DNA, 22 bp, synthetic construct
  misc_feature 1..22: note = chemically synthesized
  source 1..22: mol_type = other DNA
cagtttaatggaatcattattg

SEQ ID NO: 41557 - DNA, 22 bp, synthetic construct
  misc_feature 1..22: note = chemically synthesized
  source 1..22: mol_type = other DNA
aatggaatcattattgtgtcac

SEQ ID NO: 41558 - DNA, 22 bp, synthetic construct
  misc_feature 1..22: note = chemically synthesized
  source 1..22: mol_type = other DNA
atggaatcattattgtgtcacc

SEQ ID NO: 41559 - DNA, 22 bp, synthetic construct
  misc_feature 1..22: note = chemically synthesized
  source 1..22: mol_type = other DNA
ttgtgtcacctggcggcagtgt

SEQ ID NO: 41560 - DNA, 22 bp, synthetic construct
  misc_feature 1..22: note = chemically synthesized
  source 1..22: mol_type = other DNA
tgtcacctggcggcagtgttcc

SEQ ID NO: 41561 - DNA, 22 bp, synthetic construct
  misc_feature 1..22: note = chemically synthesized
  source 1..22: mol_type = other DNA
gcggcagtgttcctccctctgg

SEQ ID NO: 41562 - DNA, 22 bp, synthetic construct
  misc_feature 1..22: note = chemically synthesized
  source 1..22: mol_type = other DNA
ctccctctggaactaagacctc

SEQ ID NO: 41563 - DNA, 22 bp, synthetic construct
  misc_feature 1..22: note = chemically synthesized
  source 1..22: mol_type = other DNA
cctctggaactaagacctctaa

SEQ ID NO: 41564 - DNA, 22 bp, synthetic construct
  misc_feature 1..22: note = chemically synthesized
  source 1..22: mol_type = other DNA
tggaactaagacctctaagcca

SEQ ID NO: 41565 - DNA, 22 bp, synthetic construct
  misc_feature 1..22: note = chemically synthesized
  source 1..22: mol_type = other DNA
gaactaagacctctaagccagc

SEQ ID NO: 41566 - DNA, 22 bp, synthetic construct
  misc_feature 1..22: note = chemically synthesized
  source 1..22: mol_type = other DNA
agacctctaagccagcagaaca

SEQ ID NO: 41567 - DNA, 22 bp, synthetic construct
  misc_feature 1..22: note = chemically synthesized
  source 1..22: mol_type = other DNA
taagccagcagaacataatgcc

SEQ ID NO: 41568 - DNA, 22 bp, synthetic construct
  misc_feature 1..22: note = chemically synthesized
  source 1..22: mol_type = other DNA
agccagcagaacataatgccat

SEQ ID NO: 41569 - DNA, 22 bp, synthetic construct
  misc_feature 1..22: note = chemically synthesized
  source 1..22: mol_type = other DNA
tgctagtggaacactaggggtg

SEQ ID NO: 41570 - DNA, 22 bp, synthetic construct
  misc_feature 1..22: note = chemically synthesized
  source 1..22: mol_type = other DNA
gctagtggaacactaggggtga

SEQ ID NO: 41571 - DNA, 22 bp, synthetic construct
  misc_feature 1..22: note = chemically synthesized
  source 1..22: mol_type = other DNA
ctagtggaacactaggggtgat

SEQ ID NO: 41572 - DNA, 22 bp, synthetic construct
  misc_feature 1..22: note = chemically synthesized
  source 1..22: mol_type = other DNA
gtggaacactaggggtgatggt

SEQ ID NO: 41573 - DNA, 22 bp, synthetic construct
  misc_feature 1..22: note = chemically synthesized
  source 1..22: mol_type = other DNA
ggggtgatggtgagtggtgcca

SEQ ID NO: 41574 - DNA, 22 bp, synthetic construct
  misc_feature 1..22: note = chemically synthesized
  source 1..22: mol_type = other DNA
ccacttccacttccaccctttg

SEQ ID NO: 41575 - DNA, 22 bp, synthetic construct
  misc_feature 1..22: note = chemically synthesized
  source 1..22: mol_type = other DNA
cacttccacttccaccctttga

SEQ ID NO: 41576 - DNA, 22 bp, synthetic construct
  misc_feature 1..22: note = chemically synthesized
  source 1..22: mol_type = other DNA
ccacttccaccctttgattcct

SEQ ID NO: 41577 - DNA, 22 bp, synthetic construct
  misc_feature 1..22: note = chemically synthesized
  source 1..22: mol_type = other DNA
cacttccaccctttgattcctg

SEQ ID NO: 41578 - DNA, 22 bp, synthetic construct
  misc_feature 1..22: note = chemically synthesized
  source 1..22: mol_type = other DNA
ccaccctttgattcctggaccc

SEQ ID NO: 41579 - DNA, 22 bp, synthetic construct
  misc_feature 1..22: note = chemically synthesized
  source 1..22: mol_type = other DNA
caccctttgattcctggacccg

SEQ ID NO: 41580 - DNA, 22 bp, synthetic construct
  misc_feature 1..22: note = chemically synthesized
  source 1..22: mol_type = other DNA
tgattcctggacccgtgaatcc

SEQ ID NO: 41581 - DNA, 22 bp, synthetic construct
  misc_feature 1..22: note = chemically synthesized
  source 1..22: mol_type = other DNA
gattcctggacccgtgaatcct

SEQ ID NO: 41582 - DNA, 22 bp, synthetic construct
  misc_feature 1..22: note = chemically synthesized
  source 1..22: mol_type = other DNA
attcctggacccgtgaatcctg

SEQ ID NO: 41583 - DNA, 22 bp, synthetic construct
  misc_feature 1..22: note = chemically synthesized
  source 1..22: mol_type = other DNA
ctggacccgtgaatcctgtcta

SEQ ID NO: 41584 - DNA, 22 bp, synthetic construct
  misc_feature 1..22: note = chemically synthesized
  source 1..22: mol_type = other DNA
gacccgtgaatcctgtctatgg

SEQ ID NO: 41585 - DNA, 22 bp, synthetic construct
  misc_feature 1..22: note = chemically synthesized
  source 1..22: mol_type = other DNA
tctatgggagaaacagtaccat

SEQ ID NO: 41586 - DNA, 22 bp, synthetic construct
  misc_feature 1..22: note = chemically synthesized
  source 1..22: mol_type = other DNA
tgggagaaacagtaccatatat

SEQ ID NO: 41587 - DNA, 22 bp, synthetic construct
  misc_feature 1..22: note = chemically synthesized
  source 1..22: mol_type = other DNA
gacactgattcagagcatacac

SEQ ID NO: 41588 - DNA, 22 bp, synthetic construct
  misc_feature 1..22: note = chemically synthesized
  source 1..22: mol_type = other DNA
attcagagcatacacagccttc

SEQ ID NO: 41589 - DNA, 22 bp, synthetic construct
  misc_feature 1..22: note = chemically synthesized
  source 1..22: mol_type = other DNA
agagcatacacagccttctgga

SEQ ID NO: 41590 - DNA, 22 bp, synthetic construct
  misc_feature 1..22: note = chemically synthesized
  source 1..22: mol_type = other DNA
ctggagaactttgccccaggcc

SEQ ID NO: 41591 - DNA, 22 bp, synthetic construct
  misc_feature 1..22: note = chemically synthesized
  source 1..22: mol_type = other DNA
tggagaactttgccccaggcct

SEQ ID NO: 41592 - DNA, 22 bp, synthetic construct
  misc_feature 1..22: note = chemically synthesized
  source 1..22: mol_type = other DNA
gagaactttgccccaggcctgc

SEQ ID NO: 41593 - DNA, 22 bp, synthetic construct
  misc_feature 1..22: note = chemically synthesized
  source 1..22: mol_type = other DNA
tgccccaggcctgcaaagtatt

SEQ ID NO: 41594 - DNA, 22 bp, synthetic construct
  misc_feature 1..22: note = chemically synthesized
  source 1..22: mol_type = other DNA
gccccaggcctgcaaagtattg

SEQ ID NO: 41595 - DNA, 22 bp, synthetic construct
  misc_feature 1..22: note = chemically synthesized
  source 1..22: mol_type = other DNA
ccccaggcctgcaaagtattgt

SEQ ID NO: 41596 - DNA, 22 bp, synthetic construct
  misc_feature 1..22: note = chemically synthesized
  source 1..22: mol_type = other DNA
caaagtattgtcacctagttgg

SEQ ID NO: 41597 - DNA, 22 bp, synthetic construct
  misc_feature 1..22: note = chemically synthesized
  source 1..22: mol_type = other DNA
tcacctagttggcattgtaatc

SEQ ID NO: 41598 - DNA, 22 bp, synthetic construct
  misc_feature 1..22: note = chemically synthesized
  source 1..22: mol_type = other DNA
gttggcattgtaatcgtgactt

SEQ ID NO: 41599 - DNA, 22 bp, synthetic construct
  misc_feature 1..22: note = chemically synthesized
  source 1..22: mol_type = other DNA
gcattgtaatcgtgacttcaaa

SEQ ID NO: 41600 - DNA, 22 bp, synthetic construct
  misc_feature 1..22: note = chemically synthesized
  source 1..22: mol_type = other DNA
taatcgtgacttcaaaaggcca

SEQ ID NO: 41601 - DNA, 22 bp, synthetic construct
  misc_feature 1..22: note = chemically synthesized
  source 1..22: mol_type = other DNA
caaaaggccattcaaaagctgc

SEQ ID NO: 41602 - DNA, 22 bp, synthetic construct
  misc_feature 1..22: note = chemically synthesized
  source 1..22: mol_type = other DNA
aaaaggccattcaaaagctgct

SEQ ID NO: 41603 - DNA, 22 bp, synthetic construct
  misc_feature 1..22: note = chemically synthesized
  source 1..22: mol_type = other DNA
aaaagctgcttcaggatgatag

SEQ ID NO: 41604 - DNA, 22 bp, synthetic construct
  misc_feature 1..22: note = chemically synthesized
  source 1..22: mol_type = other DNA
cttcaggatgatagggatcatg

SEQ ID NO: 41605 - DNA, 22 bp, synthetic construct
  misc_feature 1..22: note = chemically synthesized
  source 1..22: mol_type = other DNA
caggatgatagggatcatggta

SEQ ID NO: 41606 - DNA, 22 bp, synthetic construct
  misc_feature 1..22: note = chemically synthesized
  source 1..22: mol_type = other DNA
aggatgatagggatcatggtaa

SEQ ID NO: 41607 - DNA, 22 bp, synthetic construct
  misc_feature 1..22: note = chemically synthesized
  source 1..22: mol_type = other DNA
catgagcatgagcccactgtca

SEQ ID NO: 41608 - DNA, 22 bp, synthetic construct
  misc_feature 1..22: note = chemically synthesized
  source 1..22: mol_type = other DNA
tcacacttctttagccataaag

SEQ ID NO: 41609 - DNA, 22 bp, synthetic construct
  misc_feature 1..22: note = chemically synthesized
  source 1..22: mol_type = other DNA
ctttagccataaagtgagtggc

SEQ ID NO: 41610 - DNA, 22 bp, synthetic construct
  misc_feature 1..22: note = chemically synthesized
  source 1..22: mol_type = other DNA
tttagccataaagtgagtggct

SEQ ID NO: 41611 - DNA, 22 bp, synthetic construct
  misc_feature 1..22: note = chemically synthesized
  source 1..22: mol_type = other DNA
tagccataaagtgagtggcttg

SEQ ID NO: 41612 - DNA, 22 bp, synthetic construct
  misc_feature 1..22: note = chemically synthesized
  source 1..22: mol_type = other DNA
agccataaagtgagtggcttgg

SEQ ID NO: 41613 - DNA, 22 bp, synthetic construct
  misc_feature 1..22: note = chemically synthesized
  source 1..22: mol_type = other DNA
gccataaagtgagtggcttggt

SEQ ID NO: 41614 - DNA, 22 bp, synthetic construct
  misc_feature 1..22: note = chemically synthesized
  source 1..22: mol_type = other DNA
ggtcagaagcaatgctgtgtgg

SEQ ID NO: 41615 - DNA, 22 bp, synthetic construct
  misc_feature 1..22: note = chemically synthesized
  source 1..22: mol_type = other DNA
gtcagaagcaatgctgtgtgga

SEQ ID NO: 41616 - DNA, 22 bp, synthetic construct
  misc_feature 1..22: note = chemically synthesized
  source 1..22: mol_type = other DNA
tgtggaataccatgacagtgga

SEQ ID NO: 41617 - DNA, 22 bp, synthetic construct
  misc_feature 1..22: note = chemically synthesized
  source 1..22: mol_type = other DNA
tgtgattccatggatggtagtc

SEQ ID NO: 41618 - DNA, 22 bp, synthetic construct
  misc_feature 1..22: note = chemically synthesized
  source 1..22: mol_type = other DNA
tgattccatggatggtagtctt

SEQ ID NO: 41619 - DNA, 22 bp, synthetic construct
  misc_feature 1..22: note = chemically synthesized
  source 1..22: mol_type = other DNA
catggatggtagtcttggcata

SEQ ID NO: 41620 - DNA, 22 bp, synthetic construct
  misc_feature 1..22: note = chemically synthesized
  source 1..22: mol_type = other DNA
ggcataagcattgagttcagga

SEQ ID NO: 41621 - DNA, 22 bp, synthetic construct
  misc_feature 1..22: note = chemically synthesized
  source 1..22: mol_type = other DNA
gcataagcattgagttcaggat

SEQ ID NO: 41622 - DNA, 22 bp, synthetic construct
  misc_feature 1..22: note = chemically synthesized
  source 1..22: mol_type = other DNA
agttcaggattgggaaacccat

SEQ ID NO: 41623 - DNA, 22 bp, synthetic construct
  misc_feature 1..22: note = chemically synthesized
  source 1..22: mol_type = other DNA
aggattgggaaacccatatcca

SEQ ID NO: 41624 - DNA, 22 bp, synthetic construct
  misc_feature 1..22: note = chemically synthesized
  source 1..22: mol_type = other DNA
ggaaacccatatccagagtaag

SEQ ID NO: 41625 - DNA, 22 bp, synthetic construct
  misc_feature 1..22: note = chemically synthesized
  source 1..22: mol_type = other DNA
ttccagtgaggacaagcctctg

SEQ ID NO: 41626 - DNA, 22 bp, synthetic construct
  misc_feature 1..22: note = chemically synthesized
  source 1..22: mol_type = other DNA
cagtgaggacaagcctctgccc

SEQ ID NO: 41627 - DNA, 22 bp, synthetic construct
  misc_feature 1..22: note = chemically synthesized
  source 1..22: mol_type = other DNA
tgccctttccatgatggaagag

SEQ ID NO: 41628 - DNA, 22 bp, synthetic construct
  misc_feature 1..22: note = chemically synthesized
  source 1..22: mol_type = other DNA
ccctttccatgatggaagaggt

SEQ ID NO: 41629 - DNA, 22 bp, synthetic construct
  misc_feature 1..22: note = chemically synthesized
  source 1..22: mol_type = other DNA
tccatgatggaagaggtccaat

SEQ ID NO: 41630 - DNA, 22 bp, synthetic construct
  misc_feature 1..22: note = chemically synthesized
  source 1..22: mol_type = other DNA
ccatgatggaagaggtccaata

SEQ ID NO: 41631 - DNA, 22 bp, synthetic construct
  misc_feature 1..22: note = chemically synthesized
  source 1..22: mol_type = other DNA
catgatggaagaggtccaatat

SEQ ID NO: 41632 - DNA, 22 bp, synthetic construct
  misc_feature 1..22: note = chemically synthesized
  source 1..22: mol_type = other DNA
ccaccaggtagctggctgatca

SEQ ID NO: 41633 - DNA, 22 bp, synthetic construct
  misc_feature 1..22: note = chemically synthesized
  source 1..22: mol_type = other DNA
gctgatcaccccgaggaatggt

SEQ ID NO: 41634 - DNA, 22 bp, synthetic construct
  misc_feature 1..22: note = chemically synthesized
  source 1..22: mol_type = other DNA
atcaccccgaggaatggtgcca

SEQ ID NO: 41635 - DNA, 22 bp, synthetic construct
  misc_feature 1..22: note = chemically synthesized
  source 1..22: mol_type = other DNA
agtgttggtctctgatgctggc

SEQ ID NO: 41636 - DNA, 22 bp, synthetic construct
  misc_feature 1..22: note = chemically synthesized
  source 1..22: mol_type = other DNA
gtgttggtctctgatgctggca

SEQ ID NO: 41637 - DNA, 22 bp, synthetic construct
  misc_feature 1..22: note = chemically synthesized
  source 1..22: mol_type = other DNA
gtctctgatgctggcaagcagt

SEQ ID NO: 41638 - DNA, 22 bp, synthetic construct
  misc_feature 1..22: note = chemically synthesized
  source 1..22: mol_type = other DNA
tgatgctggcaagcagtggctg

SEQ ID NO: 41639 - DNA, 22 bp, synthetic construct
  misc_feature 1..22: note = chemically synthesized
  source 1..22: mol_type = other DNA
atgctggcaagcagtggctgtg

SEQ ID NO: 41640 - DNA, 22 bp, synthetic construct
  misc_feature 1..22: note = chemically synthesized
  source 1..22: mol_type = other DNA
gcaagcagtggctgtggccagg

SEQ ID NO: 41641 - DNA, 22 bp, synthetic construct
  misc_feature 1..22: note = chemically synthesized
  source 1..22: mol_type = other DNA
tggccaggtcagctttggtgag

SEQ ID NO: 41642 - DNA, 22 bp, synthetic construct
  misc_feature 1..22: note = chemically synthesized
  source 1..22: mol_type = other DNA
tggtgagtggaagtccatgttg

SEQ ID NO: 41643 - DNA, 22 bp, synthetic construct
  misc_feature 1..22: note = chemically synthesized
  source 1..22: mol_type = other DNA
ggtgagtggaagtccatgttgc

SEQ ID NO: 41644 - DNA, 22 bp, synthetic construct
  misc_feature 1..22: note = chemically synthesized
  source 1..22: mol_type = other DNA
gtgagtggaagtccatgttgct

SEQ ID NO: 41645 - DNA, 22 bp, synthetic construct
  misc_feature 1..22: note = chemically synthesized
  source 1..22: mol_type = other DNA
ctgagcccaagcataacttcca

SEQ ID NO: 41646 - DNA, 22 bp, synthetic construct
  misc_feature 1..22: note = chemically synthesized
  source 1..22: mol_type = other DNA
agcccaagcataacttccatcc

SEQ ID NO: 41647 - DNA, 22 bp, synthetic construct
  misc_feature 1..22: note = chemically synthesized
  source 1..22: mol_type = other DNA
ccatccctgcaactgtggccac

SEQ ID NO: 41648 - DNA, 22 bp, synthetic construct
  misc_feature 1..22: note = chemically synthesized
  source 1..22: mol_type = other DNA
catccctgcaactgtggccact

SEQ ID NO: 41649 - DNA, 22 bp, synthetic construct
  misc_feature 1..22: note = chemically synthesized
  source 1..22: mol_type = other DNA
caactgtggccactttgttcat

SEQ ID NO: 41650 - DNA, 22 bp, synthetic construct
  misc_feature 1..22: note = chemically synthesized
  source 1..22: mol_type = other DNA
tggccactttgttcatgggtcc

SEQ ID NO: 41651 - DNA, 22 bp, synthetic construct
  misc_feature 1..22: note = chemically synthesized
  source 1..22: mol_type = other DNA
tgttcatgggtccattggacga

SEQ ID NO: 41652 - DNA, 22 bp, synthetic construct
  misc_feature 1..22: note = chemically synthesized
  source 1..22: mol_type = other DNA
gttcatgggtccattggacgat

SEQ ID NO: 41653 - DNA, 22 bp, synthetic construct
  misc_feature 1..22: note = chemically synthesized
  source 1..22: mol_type = other DNA
ttcatgggtccattggacgatg

SEQ ID NO: 41654 - DNA, 22 bp, synthetic construct
  misc_feature 1..22: note = chemically synthesized
  source 1..22: mol_type = other DNA
atgggtccattggacgatgaca

SEQ ID NO: 41655 - DNA, 22 bp, synthetic construct
  misc_feature 1..22: note = chemically synthesized
  source 1..22: mol_type = other DNA
gacgatgacatgagtggcctgg

SEQ ID NO: 41656 - DNA, 22 bp, synthetic construct
  misc_feature 1..22: note = chemically synthesized
  source 1..22: mol_type = other DNA
ggaaaaggctgagtggtgtcca

SEQ ID NO: 41657 - DNA, 22 bp, synthetic construct
  misc_feature 1..22: note = chemically synthesized
  source 1..22: mol_type = other DNA
agtggtgtccacagaattgatc

SEQ ID NO: 41658 - DNA, 22 bp, synthetic construct
  misc_feature 1..22: note = chemically synthesized
  source 1..22: mol_type = other DNA
atcatcctatccacttgattat

SEQ ID NO: 41659 - DNA, 22 bp, synthetic construct
  misc_feature 1..22: note = chemically synthesized
  source 1..22: mol_type = other DNA
tccacttgattattaaaatcct

SEQ ID NO: 41660 - DNA, 22 bp, synthetic construct
  misc_feature 1..22: note = chemically synthesized
  source 1..22: mol_type = other DNA
gattattaaaatcctcttctgc

SEQ ID NO: 41661 - DNA, 22 bp, synthetic construct
  misc_feature 1..22: note = chemically synthesized
  source 1..22: mol_type = other DNA
attattaaaatcctcttctgct

SEQ ID NO: 41662 - DNA, 22 bp, synthetic construct
  misc_feature 1..22: note = chemically synthesized
  source 1..22: mol_type = other DNA
ttaaaatcctcttctgctgagg

SEQ ID NO: 41663 - DNA, 22 bp, synthetic construct
  misc_feature 1..22: note = chemically synthesized
  source 1..22: mol_type = other DNA
aaatcctcttctgctgaggtca

SEQ ID NO: 41664 - DNA, 22 bp, synthetic construct
  misc_feature 1..22: note = chemically synthesized
  source 1..22: mol_type = other DNA
ttctgctgaggtcacccattgg

SEQ ID NO: 41665 - DNA, 22 bp, synthetic construct
  misc_feature 1..22: note = chemically synthesized
  source 1..22: mol_type = other DNA
ctgctgaggtcacccattggtg

SEQ ID NO: 41666 - DNA, 22 bp, synthetic construct
  misc_feature 1..22: note = chemically synthesized
  source 1..22: mol_type = other DNA
tgctgaggtcacccattggtga

SEQ ID NO: 41667 - DNA, 22 bp, synthetic construct
  misc_feature 1..22: note = chemically synthesized
  source 1..22: mol_type = other DNA
ctgaggtcacccattggtgagc

SEQ ID NO: 41668 - DNA, 22 bp, synthetic construct
  misc_feature 1..22: note = chemically synthesized
  source 1..22: mol_type = other DNA
aggtcacccattggtgagcact

SEQ ID NO: 41669 - DNA, 22 bp, synthetic construct
  misc_feature 1..22: note = chemically synthesized
  source 1..22: mol_type = other DNA
gtgagcactcacatgggatgaa

SEQ ID NO: 41670 - DNA, 22 bp, synthetic construct
  misc_feature 1..22: note = chemically synthesized
  source 1..22: mol_type = other DNA
acatgggatgaaaatatctttg

SEQ ID NO: 41671 - DNA, 22 bp, synthetic construct
  misc_feature 1..22: note = chemically synthesized
  source 1..22: mol_type = other DNA
tgtagtttttgactaatcatag

SEQ ID NO: 41672 - DNA, 22 bp, synthetic construct
  misc_feature 1..22: note = chemically synthesized
  source 1..22: mol_type = other DNA
gtagtttttgactaatcataga

SEQ ID NO: 41673 - DNA, 22 bp, synthetic construct
  misc_feature 1..22: note = chemically synthesized
  source 1..22: mol_type = other DNA
tagtttttgactaatcatagag

SEQ ID NO: 41674 - DNA, 22 bp, synthetic construct
  misc_feature 1..22: note = chemically synthesized
  source 1..22: mol_type = other DNA
ttgactaatcatagaggtccat

SEQ ID NO: 41675 - DNA, 22 bp, synthetic construct
  misc_feature 1..22: note = chemically synthesized
  source 1..22: mol_type = other DNA
tgactaatcatagaggtccatc

SEQ ID NO: 41676 - DNA, 22 bp, synthetic construct
  misc_feature 1..22: note = chemically synthesized
  source 1..22: mol_type = other DNA
gactaatcatagaggtccatcc

SEQ ID NO: 41677 - DNA, 22 bp, synthetic construct
  misc_feature 1..22: note = chemically synthesized
  source 1..22: mol_type = other DNA
actaatcatagaggtccatcca

SEQ ID NO: 41678 - DNA, 22 bp, synthetic construct
  misc_feature 1..22: note = chemically synthesized
  source 1..22: mol_type = other DNA
atcatagaggtccatccacata

SEQ ID NO: 41679 - DNA, 22 bp, synthetic construct
  misc_feature 1..22: note = chemically synthesized
  source 1..22: mol_type = other DNA
ttccccaaatttctttgtcatc

SEQ ID NO: 41680 - DNA, 22 bp, synthetic construct
  misc_feature 1..22: note = chemically synthesized
  source 1..22: mol_type = other DNA
ccccaaatttctttgtcatcaa

SEQ ID NO: 41681 - DNA, 22 bp, synthetic construct
  misc_feature 1..22: note = chemically synthesized
  source 1..22: mol_type = other DNA
cccaaatttctttgtcatcaat

SEQ ID NO: 41682 - DNA, 22 bp, synthetic construct
  misc_feature 1..22: note = chemically synthesized
  source 1..22: mol_type = other DNA
ctttgtcatcaattttccagtc

SEQ ID NO: 41683 - DNA, 22 bp, synthetic construct
  misc_feature 1..22: note = chemically synthesized
  source 1..22: mol_type = other DNA
tttgtcatcaattttccagtca

SEQ ID NO: 41684 - DNA, 22 bp, synthetic construct
  misc_feature 1..22: note = chemically synthesized
  source 1..22: mol_type = other DNA
tgtcatcaattttccagtcatg

SEQ ID NO: 41685 - DNA, 22 bp, synthetic construct
  misc_feature 1..22: note = chemically synthesized
  source 1..22: mol_type = other DNA
gtcatcaattttccagtcatgc

SEQ ID NO: 41686 - DNA, 22 bp, synthetic construct
  misc_feature 1..22: note = chemically synthesized
  source 1..22: mol_type = other DNA
tcatcaattttccagtcatgct

SEQ ID NO: 41687 - DNA, 22 bp, synthetic construct
  misc_feature 1..22: note = chemically synthesized
  source 1..22: mol_type = other DNA
tccagtcatgctttttccaagt

SEQ ID NO: 41688 - DNA, 22 bp, synthetic construct
  misc_feature 1..22: note = chemically synthesized
  source 1..22: mol_type = other DNA
ccagtcatgctttttccaagtc

SEQ ID NO: 41689 - DNA, 22 bp, synthetic construct
  misc_feature 1..22: note = chemically synthesized
  source 1..22: mol_type = other DNA
cagtcatgctttttccaagtcc

SEQ ID NO: 41690 - DNA, 22 bp, synthetic construct
  misc_feature 1..22: note = chemically synthesized
  source 1..22: mol_type = other DNA
tttccaagtccctgaccatcta

SEQ ID NO: 41691 - DNA, 22 bp, synthetic construct
  misc_feature 1..22: note = chemically synthesized
  source 1..22: mol_type = other DNA
ttccaagtccctgaccatctag

SEQ ID NO: 41692 - DNA, 22 bp, synthetic construct
  misc_feature 1..22: note = chemically synthesized
  source 1..22: mol_type = other DNA
tccaagtccctgaccatctagc

SEQ ID NO: 41693 - DNA, 22 bp, synthetic construct
  misc_feature 1..22: note = chemically synthesized
  source 1..22: mol_type = other DNA
ccaagtccctgaccatctagcc

SEQ ID NO: 41694 - DNA, 22 bp, synthetic construct
  misc_feature 1..22: note = chemically synthesized
  source 1..22: mol_type = other DNA
caagtccctgaccatctagcca

SEQ ID NO: 41695 - DNA, 22 bp, synthetic construct
  misc_feature 1..22: note = chemically synthesized
  source 1..22: mol_type = other DNA
accatctagccaaacctttggc

SEQ ID NO: 41696 - DNA, 22 bp, synthetic construct
  misc_feature 1..22: note = chemically synthesized
  source 1..22: mol_type = other DNA
gccaaacctttggctacagccc

SEQ ID NO: 41697 - DNA, 22 bp, synthetic construct
  misc_feature 1..22: note = chemically synthesized
  source 1..22: mol_type = other DNA
tggctacagcccatgaataagt

SEQ ID NO: 41698 - DNA, 22 bp, synthetic construct
  misc_feature 1..22: note = chemically synthesized
  source 1..22: mol_type = other DNA
ggctacagcccatgaataagta

SEQ ID NO: 41699 - DNA, 22 bp, synthetic construct
  misc_feature 1..22: note = chemically synthesized
  source 1..22: mol_type = other DNA
gctacagcccatgaataagtat

SEQ ID NO: 41700 - DNA, 22 bp, synthetic construct
  misc_feature 1..22: note = chemically synthesized
  source 1..22: mol_type = other DNA
cagcccatgaataagtatataa

SEQ ID NO: 41701 - DNA, 22 bp, synthetic construct
  misc_feature 1..22: note = chemically synthesized
  source 1..22: mol_type = other DNA
gccatttctccttctgtgcaaa

SEQ ID NO: 41702 - DNA, 22 bp, synthetic construct
  misc_feature 1..22: note = chemically synthesized
  source 1..22: mol_type = other DNA
ctccttctgtgcaaagtgcaca

SEQ ID NO: 41703 - DNA, 22 bp, synthetic construct
  misc_feature 1..22: note = chemically synthesized
  source 1..22: mol_type = other DNA
tccttctgtgcaaagtgcacaa

SEQ ID NO: 41704 - DNA, 22 bp, synthetic construct
  misc_feature 1..22: note = chemically synthesized
  source 1..22: mol_type = other DNA
cttctgtgcaaagtgcacaacc

SEQ ID NO: 41705 - DNA, 22 bp, synthetic construct
  misc_feature 1..22: note = chemically synthesized
  source 1..22: mol_type = other DNA
ctgtgcaaagtgcacaaccagg

SEQ ID NO: 41706 - DNA, 22 bp, synthetic construct
  misc_feature 1..22: note = chemically synthesized
  source 1..22: mol_type = other DNA
tgtgcaaagtgcacaaccaggc

SEQ ID NO: 41707 - DNA, 22 bp, synthetic construct
  misc_feature 1..22: note = chemically synthesized
  source 1..22: mol_type = other DNA
tgcaaagtgcacaaccaggcac

SEQ ID NO: 41708 - DNA, 22 bp, synthetic construct
  misc_feature 1..22: note = chemically synthesized
  source 1..22: mol_type = other DNA
ctcaaagttctgccaactagga

SEQ ID NO: 41709 - DNA, 22 bp, synthetic construct
  misc_feature 1..22: note = chemically synthesized
  source 1..22: mol_type = other DNA
aaagttctgccaactaggaaga

SEQ ID NO: 41710 - DNA, 22 bp, synthetic construct
  misc_feature 1..22: note = chemically synthesized
  source 1..22: mol_type = other DNA
tgccaactaggaagatttccct

SEQ ID NO: 41711 - DNA, 22 bp, synthetic construct
  misc_feature 1..22: note = chemically synthesized
  source 1..22: mol_type = other DNA
ccaactaggaagatttcccttc

SEQ ID NO: 41712 - DNA, 22 bp, synthetic construct
  misc_feature 1..22: note = chemically synthesized
  source 1..22: mol_type = other DNA
ggaagatttcccttcaccgttg

SEQ ID NO: 41713 - DNA, 22 bp, synthetic construct
  misc_feature 1..22: note = chemically synthesized
  source 1..22: mol_type = other DNA
cccttcaccgttgtccttcagg

SEQ ID NO: 41714 - DNA, 22 bp, synthetic construct
  misc_feature 1..22: note = chemically synthesized
  source 1..22: mol_type = other DNA
ccttcaccgttgtccttcaggg

SEQ ID NO: 41715 - DNA, 22 bp, synthetic construct
  misc_feature 1..22: note = chemically synthesized
  source 1..22: mol_type = other DNA
caccgttgtccttcagggatgt

SEQ ID NO: 41716 - DNA, 22 bp, synthetic construct
  misc_feature 1..22: note = chemically synthesized
  source 1..22: mol_type = other DNA
accgttgtccttcagggatgtc

SEQ ID NO: 41717 - DNA, 22 bp, synthetic construct
  misc_feature 1..22: note = chemically synthesized
  source 1..22: mol_type = other DNA
tccttcagggatgtcctagaaa

SEQ ID NO: 41718 - DNA, 22 bp, synthetic construct
  misc_feature 1..22: note = chemically synthesized
  source 1..22: mol_type = other DNA
cagggatgtcctagaaaggggc

SEQ ID NO: 41719 - DNA, 22 bp, synthetic construct
  misc_feature 1..22: note = chemically synthesized
  source 1..22: mol_type = other DNA
agggatgtcctagaaaggggct

SEQ ID NO: 41720 - DNA, 22 bp, synthetic construct
  misc_feature 1..22: note = chemically synthesized
  source 1..22: mol_type = other DNA
gaaaggggctgtagtgctgcgg

SEQ ID NO: 41721 - DNA, 22 bp, synthetic construct
  misc_feature 1..22: note = chemically synthesized
  source 1..22: mol_type = other DNA
tagtgctgcggctgtccacttt

SEQ ID NO: 41722 - DNA, 22 bp, synthetic construct
  misc_feature 1..22: note = chemically synthesized
  source 1..22: mol_type = other DNA
cggctgtccacttttgggtggt

SEQ ID NO: 41723 - DNA, 22 bp, synthetic construct
  misc_feature 1..22: note = chemically synthesized
  source 1..22: mol_type = other DNA
tccacttttgggtggtgcctgc

SEQ ID NO: 41724 - DNA, 22 bp, synthetic construct
  misc_feature 1..22: note = chemically synthesized
  source 1..22: mol_type = other DNA
ttgggtggtgcctgcatatcgt

SEQ ID NO: 41725 - DNA, 22 bp, synthetic construct
  misc_feature 1..22: note = chemically synthesized
  source 1..22: mol_type = other DNA
tgggtggtgcctgcatatcgtg

SEQ ID NO: 41726 - DNA, 22 bp, synthetic construct
  misc_feature 1..22: note = chemically synthesized
  source 1..22: mol_type = other DNA
gggtggtgcctgcatatcgtgc

SEQ ID NO: 41727 - DNA, 22 bp, synthetic construct
  misc_feature 1..22: note = chemically synthesized
  source 1..22: mol_type = other DNA
ggtggtgcctgcatatcgtgca

SEQ ID NO: 41728 - DNA, 22 bp, synthetic construct
  misc_feature 1..22: note = chemically synthesized
  source 1..22: mol_type = other DNA
catatcgtgcagaactatctgt

SEQ ID NO: 41729 - DNA, 22 bp, synthetic construct
  misc_feature 1..22: note = chemically synthesized
  source 1..22: mol_type = other DNA
tctgtgaaccaggacctagtct

SEQ ID NO: 41730 - DNA, 22 bp, synthetic construct
  misc_feature 1..22: note = chemically synthesized
  source 1..22: mol_type = other DNA
tgaaccaggacctagtcttctc

SEQ ID NO: 41731 - DNA, 22 bp, synthetic construct
  misc_feature 1..22: note = chemically synthesized
  source 1..22: mol_type = other DNA
gtcttctcttcctctgtcagct

SEQ ID NO: 41732 - DNA, 22 bp, synthetic construct
  misc_feature 1..22: note = chemically synthesized
  source 1..22: mol_type = other DNA
ctcttcctctgtcagctgatca

SEQ ID NO: 41733 - DNA, 22 bp, synthetic construct
  misc_feature 1..22: note = chemically synthesized
  source 1..22: mol_type = other DNA
tcttcctctgtcagctgatcat

SEQ ID NO: 41734 - DNA, 22 bp, synthetic construct
  misc_feature 1..22: note = chemically synthesized
  source 1..22: mol_type = other DNA
ttcctctgtcagctgatcatag

SEQ ID NO: 41735 - DNA, 22 bp, synthetic construct
  misc_feature 1..22: note = chemically synthesized
  source 1..22: mol_type = other DNA
cctctgtcagctgatcataggg

SEQ ID NO: 41736 - DNA, 22 bp, synthetic construct
  misc_feature 1..22: note = chemically synthesized
  source 1..22: mol_type = other DNA
ctctgtcagctgatcataggga

SEQ ID NO: 41737 - DNA, 22 bp, synthetic construct
  misc_feature 1..22: note = chemically synthesized
  source 1..22: mol_type = other DNA
tgtcagctgatcatagggaact

SEQ ID NO: 41738 - DNA, 22 bp, synthetic construct
  misc_feature 1..22: note = chemically synthesized
  source 1..22: mol_type = other DNA
tcagctgatcatagggaactcc

SEQ ID NO: 41739 - DNA, 22 bp, synthetic construct
  misc_feature 1..22: note = chemically synthesized
  source 1..22: mol_type = other DNA
atcatagggaactccccatgag

SEQ ID NO: 41740 - DNA, 22 bp, synthetic construct
  misc_feature 1..22: note = chemically synthesized
  source 1..22: mol_type = other DNA
cccatgagaccatcggtgcagt

SEQ ID NO: 41741 - DNA, 22 bp, synthetic construct
  misc_feature 1..22: note = chemically synthesized
  source 1..22: mol_type = other DNA
agggagagaaagcagtgtgtca

SEQ ID NO: 41742 - DNA, 22 bp, synthetic construct
  misc_feature 1..22: note = chemically synthesized
  source 1..22: mol_type = other DNA
gagcccctttctcatgtaactt

SEQ ID NO: 41743 - DNA, 22 bp, synthetic construct
  misc_feature 1..22: note = chemically synthesized
  source 1..22: mol_type = other DNA
agcccctttctcatgtaactta

SEQ ID NO: 41744 - DNA, 22 bp, synthetic construct
  misc_feature 1..22: note = chemically synthesized
  source 1..22: mol_type = other DNA
tctcatgtaacttactagtgcc

SEQ ID NO: 41745 - DNA, 22 bp, synthetic construct
  misc_feature 1..22: note = chemically synthesized
  source 1..22: mol_type = other DNA
ctcatgtaacttactagtgcct

SEQ ID NO: 41746 - DNA, 22 bp, synthetic construct
  misc_feature 1..22: note = chemically synthesized
  source 1..22: mol_type = other DNA
tcatgtaacttactagtgcctt

SEQ ID NO: 41747 - DNA, 22 bp, synthetic construct
  misc_feature 1..22: note = chemically synthesized
  source 1..22: mol_type = other DNA
atgtaacttactagtgccttca

SEQ ID NO: 41748 - DNA, 22 bp, synthetic construct
  misc_feature 1..22: note = chemically synthesized
  source 1..22: mol_type = other DNA
actagtgccttcaggatctgct

SEQ ID NO: 41749 - DNA, 22 bp, synthetic construct
  misc_feature 1..22: note = chemically synthesized
  source 1..22: mol_type = other DNA
ctagtgccttcaggatctgctc

SEQ ID NO: 41750 - DNA, 22 bp, synthetic construct
  misc_feature 1..22: note = chemically synthesized
  source 1..22: mol_type = other DNA
gtgccttcaggatctgctcaag

SEQ ID NO: 41751 - DNA, 22 bp, synthetic construct
  misc_feature 1..22: note = chemically synthesized
  source 1..22: mol_type = other DNA
caggatctgctcaagcccaatc

SEQ ID NO: 41752 - DNA, 22 bp, synthetic construct
  misc_feature 1..22: note = chemically synthesized
  source 1..22: mol_type = other DNA
aggatctgctcaagcccaatcg

SEQ ID NO: 41753 - DNA, 22 bp, synthetic construct
  misc_feature 1..22: note = chemically synthesized
  source 1..22: mol_type = other DNA
ctcaagcccaatcgcatatata

SEQ ID NO: 41754 - DNA, 22 bp, synthetic construct
  misc_feature 1..22: note = chemically synthesized
  source 1..22: mol_type = other DNA
aagcccaatcgcatatatacca

SEQ ID NO: 41755 - DNA, 22 bp, synthetic construct
  misc_feature 1..22: note = chemically synthesized
  source 1..22: mol_type = other DNA
ccatttgctgatgcaatgctgc

SEQ ID NO: 41756 - DNA, 22 bp, synthetic construct
  misc_feature 1..22: note = chemically synthesized
  source 1..22: mol_type = other DNA
catttgctgatgcaatgctgct

SEQ ID NO: 41757 - DNA, 22 bp, synthetic construct
  misc_feature 1..22: note = chemically synthesized
  source 1..22: mol_type = other DNA
gctgatgcaatgctgctgtgca

SEQ ID NO: 41758 - DNA, 22 bp, synthetic construct
  misc_feature 1..22: note = chemically synthesized
  source 1..22: mol_type = other DNA
ctgatgcaatgctgctgtgcac

SEQ ID NO: 41759 - DNA, 22 bp, synthetic construct
  misc_feature 1..22: note = chemically synthesized
  source 1..22: mol_type = other DNA
atgcaatgctgctgtgcacagc

SEQ ID NO: 41760 - DNA, 22 bp, synthetic construct
  misc_feature 1..22: note = chemically synthesized
  source 1..22: mol_type = other DNA
ctgtgcacagcccactttatgg

SEQ ID NO: 41761 - DNA, 22 bp, synthetic construct
  misc_feature 1..22: note = chemically synthesized
  source 1..22: mol_type = other DNA
tgcacagcccactttatggcta

SEQ ID NO: 41762 - DNA, 22 bp, synthetic construct
  misc_feature 1..22: note = chemically synthesized
  source 1..22: mol_type = other DNA
tatggctagatggatcagaaag

SEQ ID NO: 41763 - DNA, 22 bp, synthetic construct
  misc_feature 1..22: note = chemically synthesized
  source 1..22: mol_type = other DNA
atggctagatggatcagaaagc

SEQ ID NO: 41764 - DNA, 22 bp, synthetic construct
  misc_feature 1..22: note = chemically synthesized
  source 1..22: mol_type = other DNA
tggctagatggatcagaaagca

SEQ ID NO: 41765 - DNA, 22 bp, synthetic construct
  misc_feature 1..22: note = chemically synthesized
  source 1..22: mol_type = other DNA
gatggatcagaaagcacccagt

SEQ ID NO: 41766 - DNA, 22 bp, synthetic construct
  misc_feature 1..22: note = chemically synthesized
  source 1..22: mol_type = other DNA
atgataggcagttcaggtcaca

SEQ ID NO: 41767 - DNA, 22 bp, synthetic construct
  misc_feature 1..22: note = chemically synthesized
  source 1..22: mol_type = other DNA
aggtcacatggtgacttgatga

SEQ ID NO: 41768 - DNA, 22 bp, synthetic construct
  misc_feature 1..22: note = chemically synthesized
  source 1..22: mol_type = other DNA
gatgactcatagtcaaatattt

SEQ ID NO: 41769 - DNA, 22 bp, synthetic construct
  misc_feature 1..22: note = chemically synthesized
  source 1..22: mol_type = other DNA
atgactcatagtcaaatatttc

SEQ ID NO: 41770 - DNA, 22 bp, synthetic construct
  misc_feature 1..22: note = chemically synthesized
  source 1..22: mol_type = other DNA
atagtcaaatatttcgtttcca

SEQ ID NO: 41771 - DNA, 22 bp, synthetic construct
  misc_feature 1..22: note = chemically synthesized
  source 1..22: mol_type = other DNA
cgtttccaccaaagcccagtaa

SEQ ID NO: 41772 - DNA, 22 bp, synthetic construct
  misc_feature 1..22: note = chemically synthesized
  source 1..22: mol_type = other DNA
gtttccaccaaagcccagtaac

SEQ ID NO: 41773 - DNA, 22 bp, synthetic construct
  misc_feature 1..22: note = chemically synthesized
  source 1..22: mol_type = other DNA
ccaccaaagcccagtaacaggc

SEQ ID NO: 41774 - DNA, 22 bp, synthetic construct
  misc_feature 1..22: note = chemically synthesized
  source 1..22: mol_type = other DNA
caccaaagcccagtaacaggcc

SEQ ID NO: 41775 - DNA, 22 bp, synthetic construct
  misc_feature 1..22: note = chemically synthesized
  source 1..22: mol_type = other DNA
tctccctaaaagagagtagtta

SEQ ID NO: 41776 - DNA, 22 bp, synthetic construct
  misc_feature 1..22: note = chemically synthesized
  source 1..22: mol_type = other DNA
ctccctaaaagagagtagttat

SEQ ID NO: 41777 - DNA, 22 bp, synthetic construct
  misc_feature 1..22: note = chemically synthesized
  source 1..22: mol_type = other DNA
tccctaaaagagagtagttatc

SEQ ID NO: 41778 - DNA, 22 bp, synthetic construct
  misc_feature 1..22: note = chemically synthesized
  source 1..22: mol_type = other DNA
cctaaaagagagtagttatctg

SEQ ID NO: 41779 - DNA, 22 bp, synthetic construct
  misc_feature 1..22: note = chemically synthesized
  source 1..22: mol_type = other DNA
aaagagagtagttatctgcaga

SEQ ID NO: 41780 - DNA, 22 bp, synthetic construct
  misc_feature 1..22: note = chemically synthesized
  source 1..22: mol_type = other DNA
tctgcagaagatggcagggcct

SEQ ID NO: 41781 - DNA, 22 bp, synthetic construct
  misc_feature 1..22: note = chemically synthesized
  source 1..22: mol_type = other DNA
cagaagatggcagggccttgct

SEQ ID NO: 41782 - DNA, 22 bp, synthetic construct
  misc_feature 1..22: note = chemically synthesized
  source 1..22: mol_type = other DNA
gctccaaaatcctagaggcctc

SEQ ID NO: 41783 - DNA, 22 bp, synthetic construct
  misc_feature 1..22: note = chemically synthesized
  source 1..22: mol_type = other DNA
ctccaaaatcctagaggcctcc

SEQ ID NO: 41784 - DNA, 22 bp, synthetic construct
  misc_feature 1..22: note = chemically synthesized
  source 1..22: mol_type = other DNA
caaaatcctagaggcctccgct

SEQ ID NO: 41785 - DNA, 22 bp, synthetic construct
  misc_feature 1..22: note = chemically synthesized
  source 1..22: mol_type = other DNA
gaggcctccgctgtgattcagc

SEQ ID NO: 41786 - DNA, 22 bp, synthetic construct
  misc_feature 1..22: note = chemically synthesized
  source 1..22: mol_type = other DNA
cgctgtgattcagcctgccaaa

SEQ ID NO: 41787 - DNA, 22 bp, synthetic construct
  misc_feature 1..22: note = chemically synthesized
  source 1..22: mol_type = other DNA
tgattcagcctgccaaatgctc

SEQ ID NO: 41788 - DNA, 22 bp, synthetic construct
  misc_feature 1..22: note = chemically synthesized
  source 1..22: mol_type = other DNA
agcctgccaaatgctccaaaca

SEQ ID NO: 41789 - DNA, 22 bp, synthetic construct
  misc_feature 1..22: note = chemically synthesized
  source 1..22: mol_type = other DNA
ccaaatgctccaaacagcatcc

SEQ ID NO: 41790 - DNA, 22 bp, synthetic construct
  misc_feature 1..22: note = chemically synthesized
  source 1..22: mol_type = other DNA
caaacagcatccctatctggca

SEQ ID NO: 41791 - DNA, 22 bp, synthetic construct
  misc_feature 1..22: note = chemically synthesized
  source 1..22: mol_type = other DNA
tctggcactgacacctcaagca

SEQ ID NO: 41792 - DNA, 22 bp, synthetic construct
  misc_feature 1..22: note = chemically synthesized
  source 1..22: mol_type = other DNA
gcactgacacctcaagcatcat

SEQ ID NO: 41793 - DNA, 22 bp, synthetic construct
  misc_feature 1..22: note = chemically synthesized
  source 1..22: mol_type = other DNA
acacctcaagcatcattggatc

SEQ ID NO: 41794 - DNA, 22 bp, synthetic construct
  misc_feature 1..22: note = chemically synthesized
  source 1..22: mol_type = other DNA
aagcatcattggatctgctagg

SEQ ID NO: 41795 - DNA, 22 bp, synthetic construct
  misc_feature 1..22: note = chemically synthesized
  source 1..22: mol_type = other DNA
gatctgctaggtcatatggccc

SEQ ID NO: 41796 - DNA, 22 bp, synthetic construct
  misc_feature 1..22: note = chemically synthesized
  source 1..22: mol_type = other DNA
ctaggtcatatggcccaagtgg

SEQ ID NO: 41797 - DNA, 22 bp, synthetic construct
  misc_feature 1..22: note = chemically synthesized
  source 1..22: mol_type = other DNA
ggtcatatggcccaagtggcat

SEQ ID NO: 41798 - DNA, 22 bp, synthetic construct
  misc_feature 1..22: note = chemically synthesized
  source 1..22: mol_type = other DNA
gcacagcagcctggacctgtgg

SEQ ID NO: 41799 - DNA, 22 bp, synthetic construct
  misc_feature 1..22: note = chemically synthesized
  source 1..22: mol_type = other DNA
cacagcagcctggacctgtggc

SEQ ID NO: 41800 - DNA, 22 bp, synthetic construct
  misc_feature 1..22: note = chemically synthesized
  source 1..22: mol_type = other DNA
gacctgtggcagagccttctgt

SEQ ID NO: 41801 - DNA, 22 bp, synthetic construct
  misc_feature 1..22: note = chemically synthesized
  source 1..22: mol_type = other DNA
tggcagagccttctgttctgga

SEQ ID NO: 41802 - DNA, 22 bp, synthetic construct
  misc_feature 1..22: note = chemically synthesized
  source 1..22: mol_type = other DNA
ctgttctggactccactcaaaa

SEQ ID NO: 41803 - DNA, 22 bp, synthetic construct
  misc_feature 1..22: note = chemically synthesized
  source 1..22: mol_type = other DNA
tgttctggactccactcaaaac

SEQ ID NO: 41804 - DNA, 22 bp, synthetic construct
  misc_feature 1..22: note = chemically synthesized
  source 1..22: mol_type = other DNA
ttctggactccactcaaaactg

SEQ ID NO: 41805 - DNA, 22 bp, synthetic construct
  misc_feature 1..22: note = chemically synthesized
  source 1..22: mol_type = other DNA
tggactccactcaaaactggca

SEQ ID NO: 41806 - DNA, 22 bp, synthetic construct
  misc_feature 1..22: note = chemically synthesized
  source 1..22: mol_type = other DNA
gactccactcaaaactggcagc

SEQ ID NO: 41807 - DNA, 22 bp, synthetic construct
  misc_feature 1..22: note = chemically synthesized
  source 1..22: mol_type = other DNA
cactcaaaactggcagcctttt

SEQ ID NO: 41808 - DNA, 22 bp, synthetic construct
  misc_feature 1..22: note = chemically synthesized
  source 1..22: mol_type = other DNA
aaaactggcagccttttggatc

SEQ ID NO: 41809 - DNA, 22 bp, synthetic construct
  misc_feature 1..22: note = chemically synthesized
  source 1..22: mol_type = other DNA
gcagccttttggatcactcgat

SEQ ID NO: 41810 - DNA, 22 bp, synthetic construct
  misc_feature 1..22: note = chemically synthesized
  source 1..22: mol_type = other DNA
ttggatcactcgataaatgggc

SEQ ID NO: 41811 - DNA, 22 bp, synthetic construct
  misc_feature 1..22: note = chemically synthesized
  source 1..22: mol_type = other DNA
tggatcactcgataaatgggcc

SEQ ID NO: 41812 - DNA, 22 bp, synthetic construct
  misc_feature 1..22: note = chemically synthesized
  source 1..22: mol_type = other DNA
ggatcactcgataaatgggcca

SEQ ID NO: 41813 - DNA, 22 bp, synthetic construct
  misc_feature 1..22: note = chemically synthesized
  source 1..22: mol_type = other DNA
gatcactcgataaatgggccag

SEQ ID NO: 41814 - DNA, 22 bp, synthetic construct
  misc_feature 1..22: note = chemically synthesized
  source 1..22: mol_type = other DNA
gataaatgggccagagtaacac

SEQ ID NO: 41815 - DNA, 22 bp, synthetic construct
  misc_feature 1..22: note = chemically synthesized
  source 1..22: mol_type = other DNA
cctccaaaatccaaataggccc

SEQ ID NO: 41816 - DNA, 22 bp, synthetic construct
  misc_feature 1..22: note = chemically synthesized
  source 1..22: mol_type = other DNA
caaaatccaaataggcccacta

SEQ ID NO: 41817 - DNA, 22 bp, synthetic construct
  misc_feature 1..22: note = chemically synthesized
  source 1..22: mol_type = other DNA
ggcgttgtgcctatttcttggt

SEQ ID NO: 41818 - DNA, 22 bp, synthetic construct
  misc_feature 1..22: note = chemically synthesized
  source 1..22: mol_type = other DNA
tgcctatttcttggttgtaaga

SEQ ID NO: 41819 - DNA, 22 bp, synthetic construct
  misc_feature 1..22: note = chemically synthesized
  source 1..22: mol_type = other DNA
tttcttggttgtaagagtggcc

SEQ ID NO: 41820 - DNA, 22 bp, synthetic construct
  misc_feature 1..22: note = chemically synthesized
  source 1..22: mol_type = other DNA
cttggttgtaagagtggccaaa

SEQ ID NO: 41821 - DNA, 22 bp, synthetic construct
  misc_feature 1..22: note = chemically synthesized
  source 1..22: mol_type = other DNA
ttggttgtaagagtggccaaat

SEQ ID NO: 41822 - DNA, 22 bp, synthetic construct
  misc_feature 1..22: note = chemically synthesized
  source 1..22: mol_type = other DNA
ggttgtaagagtggccaaatgc

SEQ ID NO: 41823 - DNA, 22 bp, synthetic construct
  misc_feature 1..22: note = chemically synthesized
  source 1..22: mol_type = other DNA
gttgtaagagtggccaaatgca

SEQ ID NO: 41824 - DNA, 22 bp, synthetic construct
  misc_feature 1..22: note = chemically synthesized
  source 1..22: mol_type = other DNA
taagagtggccaaatgcagcaa

SEQ ID NO: 41825 - DNA, 22 bp, synthetic construct
  misc_feature 1..22: note = chemically synthesized
  source 1..22: mol_type = other DNA
tccttcactttagaaggaatat

SEQ ID NO: 41826 - DNA, 22 bp, synthetic construct
  misc_feature 1..22: note = chemically synthesized
  source 1..22: mol_type = other DNA
cactttagaaggaatatctcaa

SEQ ID NO: 41827 - DNA, 22 bp, synthetic construct
  misc_feature 1..22: note = chemically synthesized
  source 1..22: mol_type = other DNA
actttagaaggaatatctcaaa

SEQ ID NO: 41828 - DNA, 22 bp, synthetic construct
  misc_feature 1..22: note = chemically synthesized
  source 1..22: mol_type = other DNA
tagaaggaatatctcaaagagc

SEQ ID NO: 41829 - DNA, 22 bp, synthetic construct
  misc_feature 1..22: note = chemically synthesized
  source 1..22: mol_type = other DNA
agaaggaatatctcaaagagcc

SEQ ID NO: 41830 - DNA, 22 bp, synthetic construct
  misc_feature 1..22: note = chemically synthesized
  source 1..22: mol_type = other DNA
gaaggaatatctcaaagagccc

SEQ ID NO: 41831 - DNA, 22 bp, synthetic construct
  misc_feature 1..22: note = chemically synthesized
  source 1..22: mol_type = other DNA
aaagagccccaaaccattggac

SEQ ID NO: 41832 - DNA, 22 bp, synthetic construct
  misc_feature 1..22: note = chemically synthesized
  source 1..22: mol_type = other DNA
gacccctataaattttactgag

SEQ ID NO: 41833 - DNA, 22 bp, synthetic construct
  misc_feature 1..22: note = chemically synthesized
  source 1..22: mol_type = other DNA
taaattttactgaggtagaagg

SEQ ID NO: 41834 - DNA, 22 bp, synthetic construct
  misc_feature 1..22: note = chemically synthesized
  source 1..22: mol_type = other DNA
tactgaggtagaaggtccctga

SEQ ID NO: 41835 - DNA, 22 bp, synthetic construct
  misc_feature 1..22: note = chemically synthesized
  source 1..22: mol_type = other DNA
actgaggtagaaggtccctgaa

SEQ ID NO: 41836 - DNA, 22 bp, synthetic construct
  misc_feature 1..22: note = chemically synthesized
  source 1..22: mol_type = other DNA
ctgaggtagaaggtccctgaat

SEQ ID NO: 41837 - DNA, 22 bp, synthetic construct
  misc_feature 1..22: note = chemically synthesized
  source 1..22: mol_type = other DNA
aggtagaaggtccctgaattta

SEQ ID NO: 41838 - DNA, 22 bp, synthetic construct
  misc_feature 1..22: note = chemically synthesized
  source 1..22: mol_type = other DNA
aatttaatcagatttatttccc

SEQ ID NO: 41839 - DNA, 22 bp, synthetic construct
  misc_feature 1..22: note = chemically synthesized
  source 1..22: mol_type = other DNA
aatcagatttatttcccatcct

SEQ ID NO: 41840 - DNA, 22 bp, synthetic construct
  misc_feature 1..22: note = chemically synthesized
  source 1..22: mol_type = other DNA
atcagatttatttcccatcctc

SEQ ID NO: 41841 - DNA, 22 bp, synthetic construct
  misc_feature 1..22: note = chemically synthesized
  source 1..22: mol_type = other DNA
atttcccatcctctgtcccaca

SEQ ID NO: 41842 - DNA, 22 bp, synthetic construct
  misc_feature 1..22: note = chemically synthesized
  source 1..22: mol_type = other DNA
tttcccatcctctgtcccacaa

SEQ ID NO: 41843 - DNA, 22 bp, synthetic construct
  misc_feature 1..22: note = chemically synthesized
  source 1..22: mol_type = other DNA
cccatcctctgtcccacaaatg

SEQ ID NO: 41844 - DNA, 22 bp, synthetic construct
  misc_feature 1..22: note = chemically synthesized
  source 1..22: mol_type = other DNA
ccatcctctgtcccacaaatgt

SEQ ID NO: 41845 - DNA, 22 bp, synthetic construct
  misc_feature 1..22: note = chemically synthesized
  source 1..22: mol_type = other DNA
tgtcccacaaatgtctcatcaa

SEQ ID NO: 41846 - DNA, 22 bp, synthetic construct
  misc_feature 1..22: note = chemically synthesized
  source 1..22: mol_type = other DNA
tcccacaaatgtctcatcaata

SEQ ID NO: 41847 - DNA, 22 bp, synthetic construct
  misc_feature 1..22: note = chemically synthesized
  source 1..22: mol_type = other DNA
atcaataaatccagtgtgtttg

SEQ ID NO: 41848 - DNA, 22 bp, synthetic construct
  misc_feature 1..22: note = chemically synthesized
  source 1..22: mol_type = other DNA
gctacttcttgctcactagttc

SEQ ID NO: 41849 - DNA, 22 bp, synthetic construct
  misc_feature 1..22: note = chemically synthesized
  source 1..22: mol_type = other DNA
ctacttcttgctcactagttcc

SEQ ID NO: 41850 - DNA, 22 bp, synthetic construct
  misc_feature 1..22: note = chemically synthesized
  source 1..22: mol_type = other DNA
cttcttgctcactagttccagt

SEQ ID NO: 41851 - DNA, 22 bp, synthetic construct
  misc_feature 1..22: note = chemically synthesized
  source 1..22: mol_type = other DNA
cttgctcactagttccagtcag

SEQ ID NO: 41852 - DNA, 22 bp, synthetic construct
  misc_feature 1..22: note = chemically synthesized
  source 1..22: mol_type = other DNA
ttgctcactagttccagtcagc

SEQ ID NO: 41853 - DNA, 22 bp, synthetic construct
  misc_feature 1..22: note = chemically synthesized
  source 1..22: mol_type = other DNA
gctcactagttccagtcagcat

SEQ ID NO: 41854 - DNA, 22 bp, synthetic construct
  misc_feature 1..22: note = chemically synthesized
  source 1..22: mol_type = other DNA
ctcactagttccagtcagcatg

SEQ ID NO: 41855 - DNA, 22 bp, synthetic construct
  misc_feature 1..22: note = chemically synthesized
  source 1..22: mol_type = other DNA
actagttccagtcagcatgtca

SEQ ID NO: 41856 - DNA, 22 bp, synthetic construct
  misc_feature 1..22: note = chemically synthesized
  source 1..22: mol_type = other DNA
gttccagtcagcatgtcatcaa

SEQ ID NO: 41857 - DNA, 22 bp, synthetic construct
  misc_feature 1..22: note = chemically synthesized
  source 1..22: mol_type = other DNA
cagtcagcatgtcatcaatgta

SEQ ID NO: 41858 - DNA, 22 bp, synthetic construct
  misc_feature 1..22: note = chemically synthesized
  source 1..22: mol_type = other DNA
tgatatcttgtggaagtgaaag

SEQ ID NO: 41859 - DNA, 22 bp, synthetic construct
  misc_feature 1..22: note = chemically synthesized
  source 1..22: mol_type = other DNA
gtggaagtgaaaggtgagcaag

SEQ ID NO: 41860 - DNA, 22 bp, synthetic construct
  misc_feature 1..22: note = chemically synthesized
  source 1..22: mol_type = other DNA
tggaagtgaaaggtgagcaagt

SEQ ID NO: 41861 - DNA, 22 bp, synthetic construct
  misc_feature 1..22: note = chemically synthesized
  source 1..22: mol_type = other DNA
tctccaaataagattatggcac

SEQ ID NO: 41862 - DNA, 22 bp, synthetic construct
  misc_feature 1..22: note = chemically synthesized
  source 1..22: mol_type = other DNA
tccaaataagattatggcacaa

SEQ ID NO: 41863 - DNA, 22 bp, synthetic construct
  misc_feature 1..22: note = chemically synthesized
  source 1..22: mol_type = other DNA
caaataagattatggcacaaag

SEQ ID NO: 41864 - DNA, 22 bp, synthetic construct
  misc_feature 1..22: note = chemically synthesized
  source 1..22: mol_type = other DNA
tggcacaaagctggagagttga

SEQ ID NO: 41865 - DNA, 22 bp, synthetic construct
  misc_feature 1..22: note = chemically synthesized
  source 1..22: mol_type = other DNA
gagagttgatatactcctgagt

SEQ ID NO: 41866 - DNA, 22 bp, synthetic construct
  misc_feature 1..22: note = chemically synthesized
  source 1..22: mol_type = other DNA
atatactcctgagttcatcatt

SEQ ID NO: 41867 - DNA, 22 bp, synthetic construct
  misc_feature 1..22: note = chemically synthesized
  source 1..22: mol_type = other DNA
ctgagttcatcattttctttca

SEQ ID NO: 41868 - DNA, 22 bp, synthetic construct
  misc_feature 1..22: note = chemically synthesized
  source 1..22: mol_type = other DNA
agttcatcattttctttcatca

SEQ ID NO: 41869 - DNA, 22 bp, synthetic construct
  misc_feature 1..22: note = chemically synthesized
  source 1..22: mol_type = other DNA
atcattttctttcatcactttg

SEQ ID NO: 41870 - DNA, 22 bp, synthetic construct
  misc_feature 1..22: note = chemically synthesized
  source 1..22: mol_type = other DNA
tctttcatcactttgtccagcg

SEQ ID NO: 41871 - DNA, 22 bp, synthetic construct
  misc_feature 1..22: note = chemically synthesized
  source 1..22: mol_type = other DNA
ctttcatcactttgtccagcga

SEQ ID NO: 41872 - DNA, 22 bp, synthetic construct
  misc_feature 1..22: note = chemically synthesized
  source 1..22: mol_type = other DNA
tttcatcactttgtccagcgaa

SEQ ID NO: 41873 - DNA, 22 bp, synthetic construct
  misc_feature 1..22: note = chemically synthesized
  source 1..22: mol_type = other DNA
tcatcactttgtccagcgaact

SEQ ID NO: 41874 - DNA, 22 bp, synthetic construct
  misc_feature 1..22: note = chemically synthesized
  source 1..22: mol_type = other DNA
catcactttgtccagcgaactt

SEQ ID NO: 41875 - DNA, 22 bp, synthetic construct
  misc_feature 1..22: note = chemically synthesized
  source 1..22: mol_type = other DNA
atcactttgtccagcgaactta

SEQ ID NO: 41876 - DNA, 22 bp, synthetic construct
  misc_feature 1..22: note = chemically synthesized
  source 1..22: mol_type = other DNA
tgtccagcgaacttacaagcaa

SEQ ID NO: 41877 - DNA, 22 bp, synthetic construct
  misc_feature 1..22: note = chemically synthesized
  source 1..22: mol_type = other DNA
gtccagcgaacttacaagcaac

SEQ ID NO: 41878 - DNA, 22 bp, synthetic construct
  misc_feature 1..22: note = chemically synthesized
  source 1..22: mol_type = other DNA
tccagcgaacttacaagcaacc

SEQ ID NO: 41879 - DNA, 22 bp, synthetic construct
  misc_feature 1..22: note = chemically synthesized
  source 1..22: mol_type = other DNA
acaagcaaccaaccaacttcac

SEQ ID NO: 41880 - DNA, 22 bp, synthetic construct
  misc_feature 1..22: note = chemically synthesized
  source 1..22: mol_type = other DNA
caagcaaccaaccaacttcact

SEQ ID NO: 41881 - DNA, 22 bp, synthetic construct
  misc_feature 1..22: note = chemically synthesized
  source 1..22: mol_type = other DNA
cactatgttccttgattctcca

SEQ ID NO: 41882 - DNA, 22 bp, synthetic construct
  misc_feature 1..22: note = chemically synthesized
  source 1..22: mol_type = other DNA
actatgttccttgattctccac

SEQ ID NO: 41883 - DNA, 22 bp, synthetic construct
  misc_feature 1..22: note = chemically synthesized
  source 1..22: mol_type = other DNA
tgttccttgattctccacatat

SEQ ID NO: 41884 - DNA, 22 bp, synthetic construct
  misc_feature 1..22: note = chemically synthesized
  source 1..22: mol_type = other DNA
cttgattctccacatatagtca

SEQ ID NO: 41885 - DNA, 22 bp, synthetic construct
  misc_feature 1..22: note = chemically synthesized
  source 1..22: mol_type = other DNA
gattctccacatatagtcaaaa

SEQ ID NO: 41886 - DNA, 22 bp, synthetic construct
  misc_feature 1..22: note = chemically synthesized
  source 1..22: mol_type = other DNA
attctccacatatagtcaaaag

SEQ ID NO: 41887 - DNA, 22 bp, synthetic construct
  misc_feature 1..22: note = chemically synthesized
  source 1..22: mol_type = other DNA
tccacatatagtcaaaagtatt

SEQ ID NO: 41888 - DNA, 22 bp, synthetic construct
  misc_feature 1..22: note = chemically synthesized
  source 1..22: mol_type = other DNA
cacatatagtcaaaagtattat

SEQ ID NO: 41889 - DNA, 22 bp, synthetic construct
  misc_feature 1..22: note = chemically synthesized
  source 1..22: mol_type = other DNA
tgtatacagtagctaaattcct

SEQ ID NO: 41890 - DNA, 22 bp, synthetic construct
  misc_feature 1..22: note = chemically synthesized
  source 1..22: mol_type = other DNA
aattccttgcctctcacaagcg

SEQ ID NO: 41891 - DNA, 22 bp, synthetic construct
  misc_feature 1..22: note = chemically synthesized
  source 1..22: mol_type = other DNA
cttgcctctcacaagcgttgaa

SEQ ID NO: 41892 - DNA, 22 bp, synthetic construct
  misc_feature 1..22: note = chemically synthesized
  source 1..22: mol_type = other DNA
gcctctcacaagcgttgaatca

SEQ ID NO: 41893 - DNA, 22 bp, synthetic construct
  misc_feature 1..22: note = chemically synthesized
  source 1..22: mol_type = other DNA
cctctcacaagcgttgaatcaa

SEQ ID NO: 41894 - DNA, 22 bp, synthetic construct
  misc_feature 1..22: note = chemically synthesized
  source 1..22: mol_type = other DNA
tcacaagcgttgaatcaagagt

SEQ ID NO: 41895 - DNA, 22 bp, synthetic construct
  misc_feature 1..22: note = chemically synthesized
  source 1..22: mol_type = other DNA
acaagcgttgaatcaagagtgt

SEQ ID NO: 41896 - DNA, 22 bp, synthetic construct
  misc_feature 1..22: note = chemically synthesized
  source 1..22: mol_type = other DNA
aatcaagagtgtcaaatgcatt

SEQ ID NO: 41897 - DNA, 22 bp, synthetic construct
  misc_feature 1..22: note = chemically synthesized
  source 1..22: mol_type = other DNA
attttgcataactctctaaaca

SEQ ID NO: 41898 - DNA, 22 bp, synthetic construct
  misc_feature 1..22: note = chemically synthesized
  source 1..22: mol_type = other DNA
ttttgcataactctctaaacaa

SEQ ID NO: 41899 - DNA, 22 bp, synthetic construct
  misc_feature 1..22: note = chemically synthesized
  source 1..22: mol_type = other DNA
tgcataactctctaaacaattg

SEQ ID NO: 41900 - DNA, 22 bp, synthetic construct
  misc_feature 1..22: note = chemically synthesized
  source 1..22: mol_type = other DNA
gcataactctctaaacaattga

SEQ ID NO: 41901 - DNA, 22 bp, synthetic construct
  misc_feature 1..22: note = chemically synthesized
  source 1..22: mol_type = other DNA
cataactctctaaacaattgat

SEQ ID NO: 41902 - DNA, 22 bp, synthetic construct
  misc_feature 1..22: note = chemically synthesized
  source 1..22: mol_type = other DNA
tctaaacaattgatgccaagga

SEQ ID NO: 41903 - DNA, 22 bp, synthetic construct
  misc_feature 1..22: note = chemically synthesized
  source 1..22: mol_type = other DNA
taaacaattgatgccaaggatt

SEQ ID NO: 41904 - DNA, 22 bp, synthetic construct
  misc_feature 1..22: note = chemically synthesized
  source 1..22: mol_type = other DNA
aacaattgatgccaaggattat

SEQ ID NO: 41905 - DNA, 22 bp, synthetic construct
  misc_feature 1..22: note = chemically synthesized
  source 1..22: mol_type = other DNA
atgccaaggattatcagtgttc

SEQ ID NO: 41906 - DNA, 22 bp, synthetic construct
  misc_feature 1..22: note = chemically synthesized
  source 1..22: mol_type = other DNA
tcagtgttctccataccattag

SEQ ID NO: 41907 - DNA, 22 bp, synthetic construct
  misc_feature 1..22: note = chemically synthesized
  source 1..22: mol_type = other DNA
tccataccattagaagaagagt

SEQ ID NO: 41908 - DNA, 22 bp, synthetic construct
  misc_feature 1..22: note = chemically synthesized
  source 1..22: mol_type = other DNA
cataccattagaagaagagtcc

SEQ ID NO: 41909 - DNA, 22 bp, synthetic construct
  misc_feature 1..22: note = chemically synthesized
  source 1..22: mol_type = other DNA
gaagaagagtccttagcatatt

SEQ ID NO: 41910 - DNA, 22 bp, synthetic construct
  misc_feature 1..22: note = chemically synthesized
  source 1..22: mol_type = other DNA
agcatatttgggtctaatcata

SEQ ID NO: 41911 - DNA, 22 bp, synthetic construct
  misc_feature 1..22: note = chemically synthesized
  source 1..22: mol_type = other DNA
gcatatttgggtctaatcatat

SEQ ID NO: 41912 - DNA, 22 bp, synthetic construct
  misc_feature 1..22: note = chemically synthesized
  source 1..22: mol_type = other DNA
gggtctaatcatattaagcagc

SEQ ID NO: 41913 - DNA, 22 bp, synthetic construct
  misc_feature 1..22: note = chemically synthesized
  source 1..22: mol_type = other DNA
ggtctaatcatattaagcagcc

SEQ ID NO: 41914 - DNA, 22 bp, synthetic construct
  misc_feature 1..22: note = chemically synthesized
  source 1..22: mol_type = other DNA
atcatattaagcagccaactcc

SEQ ID NO: 41915 - DNA, 22 bp, synthetic construct
  misc_feature 1..22: note = chemically synthesized
  source 1..22: mol_type = other DNA
agcagccaactccagaaacccc

SEQ ID NO: 41916 - DNA, 22 bp, synthetic construct
  misc_feature 1..22: note = chemically synthesized
  source 1..22: mol_type = other DNA
cagaaaccccaaaaccaatgaa

SEQ ID NO: 41917 - DNA, 22 bp, synthetic construct
  misc_feature 1..22: note = chemically synthesized
  source 1..22: mol_type = other DNA
catccttaatattctgttcctc

SEQ ID NO: 41918 - DNA, 22 bp, synthetic construct
  misc_feature 1..22: note = chemically synthesized
  source 1..22: mol_type = other DNA
aatattctgttcctctagaacc

SEQ ID NO: 41919 - DNA, 22 bp, synthetic construct
  misc_feature 1..22: note = chemically synthesized
  source 1..22: mol_type = other DNA
atattctgttcctctagaacca

SEQ ID NO: 41920 - DNA, 22 bp, synthetic construct
  misc_feature 1..22: note = chemically synthesized
  source 1..22: mol_type = other DNA
tgttcctctagaaccactcctg

SEQ ID NO: 41921 - DNA, 22 bp, synthetic construct
  misc_feature 1..22: note = chemically synthesized
  source 1..22: mol_type = other DNA
ttcctctagaaccactcctggt

SEQ ID NO: 41922 - DNA, 22 bp, synthetic construct
  misc_feature 1..22: note = chemically synthesized
  source 1..22: mol_type = other DNA
ctctagaaccactcctggtacc

SEQ ID NO: 41923 - DNA, 22 bp, synthetic construct
  misc_feature 1..22: note = chemically synthesized
  source 1..22: mol_type = other DNA
tagaaccactcctggtaccaaa

SEQ ID NO: 41924 - DNA, 22 bp, synthetic construct
  misc_feature 1..22: note = chemically synthesized
  source 1..22: mol_type = other DNA
gaaccactcctggtaccaaaat

SEQ ID NO: 41925 - DNA, 22 bp, synthetic construct
  misc_feature 1..22: note = chemically synthesized
  source 1..22: mol_type = other DNA
ctggtaccaaaatctgtattag

SEQ ID NO: 41926 - DNA, 22 bp, synthetic construct
  misc_feature 1..22: note = chemically synthesized
  source 1..22: mol_type = other DNA
gtaccaaaatctgtattagggt

SEQ ID NO: 41927 - DNA, 22 bp, synthetic construct
  misc_feature 1..22: note = chemically synthesized
  source 1..22: mol_type = other DNA
tattagggttctacagagaaac

SEQ ID NO: 41928 - DNA, 22 bp, synthetic construct
  misc_feature 1..22: note = chemically synthesized
  source 1..22: mol_type = other DNA
gggttctacagagaaacagaat

SEQ ID NO: 41929 - DNA, 22 bp, synthetic construct
  misc_feature 1..22: note = chemically synthesized
  source 1..22: mol_type = other DNA
tacagagaaacagaattaatag

SEQ ID NO: 41930 - DNA, 22 bp, synthetic construct
  misc_feature 1..22: note = chemically synthesized
  source 1..22: mol_type = other DNA
cagagaaacagaattaatagga

SEQ ID NO: 41931 - DNA, 22 bp, synthetic construct
  misc_feature 1..22: note = chemically synthesized
  source 1..22: mol_type = other DNA
ataggagatatatatctatatc

SEQ ID NO: 41932 - DNA, 22 bp, synthetic construct
  misc_feature 1..22: note = chemically synthesized
  source 1..22: mol_type = other DNA
tatctatatctatatctatatc

SEQ ID NO: 41933 - DNA, 22 bp, synthetic construct
  misc_feature 1..22: note = chemically synthesized
  source 1..22: mol_type = other DNA
tatctatatctatatctatatc

SEQ ID NO: 41934 - DNA, 22 bp, synthetic construct
  misc_feature 1..22: note = chemically synthesized
  source 1..22: mol_type = other DNA
tatctatatctatatctatatc

SEQ ID NO: 41935 - DNA, 22 bp, synthetic construct
  misc_feature 1..22: note = chemically synthesized
  source 1..22: mol_type = other DNA
tatctatatctatatctatctc

SEQ ID NO: 41936 - DNA, 22 bp, synthetic construct
  misc_feature 1..22: note = chemically synthesized
  source 1..22: mol_type = other DNA
tatctatatctatctctatatc

SEQ ID NO: 41937 - DNA, 22 bp, synthetic construct
  misc_feature 1..22: note = chemically synthesized
  source 1..22: mol_type = other DNA
tatctatctctatatctatctc

SEQ ID NO: 41938 - DNA, 22 bp, synthetic construct
  misc_feature 1..22: note = chemically synthesized
  source 1..22: mol_type = other DNA
tctctatatctatctctatatc

SEQ ID NO: 41939 - DNA, 22 bp, synthetic construct
  misc_feature 1..22: note = chemically synthesized
  source 1..22: mol_type = other DNA
tatatctatctctatatctata

SEQ ID NO: 41940 - DNA, 22 bp, synthetic construct
  misc_feature 1..22: note = chemically synthesized
  source 1..22: mol_type = other DNA
tatctatctctatatctatatc

SEQ ID NO: 41941 - DNA, 22 bp, synthetic construct
  misc_feature 1..22: note = chemically synthesized
  source 1..22: mol_type = other DNA
tctctatatctatatctatatg

SEQ ID NO: 41942 - DNA, 22 bp, synthetic construct
  misc_feature 1..22: note = chemically synthesized
  source 1..22: mol_type = other DNA
tatatctatatctatatgagag

SEQ ID NO: 41943 - DNA, 22 bp, synthetic construct
  misc_feature 1..22: note = chemically synthesized
  source 1..22: mol_type = other DNA
tatctatatctatatgagagtt

SEQ ID NO: 41944 - DNA, 22 bp, synthetic construct
  misc_feature 1..22: note = chemically synthesized
  source 1..22: mol_type = other DNA
tatctatatgagagtttattat

SEQ ID NO: 41945 - DNA, 22 bp, synthetic construct
  misc_feature 1..22: note = chemically synthesized
  source 1..22: mol_type = other DNA
tatgagagtttattatgtagta

SEQ ID NO: 41946 - DNA, 22 bp, synthetic construct
  misc_feature 1..22: note = chemically synthesized
  source 1..22: mol_type = other DNA
attatgtagtattgactcacat

SEQ ID NO: 41947 - DNA, 22 bp, synthetic construct
  misc_feature 1..22: note = chemically synthesized
  source 1..22: mol_type = other DNA
ttatgtagtattgactcacatg

SEQ ID NO: 41948 - DNA, 22 bp, synthetic construct
  misc_feature 1..22: note = chemically synthesized
  source 1..22: mol_type = other DNA
tgtagtattgactcacatgttc

SEQ ID NO: 41949 - DNA, 22 bp, synthetic construct
  misc_feature 1..22: note = chemically synthesized
  source 1..22: mol_type = other DNA
actcacatgttcacaaggtccc

SEQ ID NO: 41950 - DNA, 22 bp, synthetic construct
  misc_feature 1..22: note = chemically synthesized
  source 1..22: mol_type = other DNA
acatgttcacaaggtcccaaaa

SEQ ID NO: 41951 - DNA, 22 bp, synthetic construct
  misc_feature 1..22: note = chemically synthesized
  source 1..22: mol_type = other DNA
acaaggtcccaaaacaggccat

SEQ ID NO: 41952 - DNA, 22 bp, synthetic construct
  misc_feature 1..22: note = chemically synthesized
  source 1..22: mol_type = other DNA
ccagctgaggaacaaggaagct

SEQ ID NO: 41953 - DNA, 22 bp, synthetic construct
  misc_feature 1..22: note = chemically synthesized
  source 1..22: mol_type = other DNA
aggaacaaggaagctagtcgga

SEQ ID NO: 41954 - DNA, 22 bp, synthetic construct
  misc_feature 1..22: note = chemically synthesized
  source 1..22: mol_type = other DNA
gtcggagtcccaaagctgaaga

SEQ ID NO: 41955 - DNA, 22 bp, synthetic construct
  misc_feature 1..22: note = chemically synthesized
  source 1..22: mol_type = other DNA
aagaacctggagttcaatgttc

SEQ ID NO: 41956 - DNA, 22 bp, synthetic construct
  misc_feature 1..22: note = chemically synthesized
  source 1..22: mol_type = other DNA
gagttcaatgttccagggcagg

SEQ ID NO: 41957 - DNA, 22 bp, synthetic construct
  misc_feature 1..22: note = chemically synthesized
  source 1..22: mol_type = other DNA
aatgttccagggcaggaagaat

SEQ ID NO: 41958 - DNA, 22 bp, synthetic construct
  misc_feature 1..22: note = chemically synthesized
  source 1..22: mol_type = other DNA
cagggcaggaagaatccagcat

SEQ ID NO: 41959 - DNA, 22 bp, synthetic construct
  misc_feature 1..22: note = chemically synthesized
  source 1..22: mol_type = other DNA
ggatgccaagccaatctagcct

SEQ ID NO: 41960 - DNA, 22 bp, synthetic construct
  misc_feature 1..22: note = chemically synthesized
  source 1..22: mol_type = other DNA
gccttttcacatttttctgcct

SEQ ID NO: 41961 - DNA, 22 bp, synthetic construct
  misc_feature 1..22: note = chemically synthesized
  source 1..22: mol_type = other DNA
ttcacatttttctgcctgcttt

SEQ ID NO: 41962 - DNA, 22 bp, synthetic construct
  misc_feature 1..22: note = chemically synthesized
  source 1..22: mol_type = other DNA
tcacatttttctgcctgcttta

SEQ ID NO: 41963 - DNA, 22 bp, synthetic construct
  misc_feature 1..22: note = chemically synthesized
  source 1..22: mol_type = other DNA
cacatttttctgcctgctttat

SEQ ID NO: 41964 - DNA, 22 bp, synthetic construct
  misc_feature 1..22: note = chemically synthesized
  source 1..22: mol_type = other DNA
acatttttctgcctgctttata

SEQ ID NO: 41965 - DNA, 22 bp, synthetic construct
  misc_feature 1..22: note = chemically synthesized
  source 1..22: mol_type = other DNA
ttctgcctgctttatatcctgg

SEQ ID NO: 41966 - DNA, 22 bp, synthetic construct
  misc_feature 1..22: note = chemically synthesized
  source 1..22: mol_type = other DNA
tctgcctgctttatatcctggc

SEQ ID NO: 41967 - DNA, 22 bp, synthetic construct
  misc_feature 1..22: note = chemically synthesized
  source 1..22: mol_type = other DNA
ctgcctgctttatatcctggct

SEQ ID NO: 41968 - DNA, 22 bp, synthetic construct
  misc_feature 1..22: note = chemically synthesized
  source 1..22: mol_type = other DNA
tgcctgctttatatcctggctg

SEQ ID NO: 41969 - DNA, 22 bp, synthetic construct
  misc_feature 1..22: note = chemically synthesized
  source 1..22: mol_type = other DNA
cctgctttatatcctggctgtg

SEQ ID NO: 41970 - DNA, 22 bp, synthetic construct
  misc_feature 1..22: note = chemically synthesized
  source 1..22: mol_type = other DNA
ctttatatcctggctgtgctgg

SEQ ID NO: 41971 - DNA, 22 bp, synthetic construct
  misc_feature 1..22: note = chemically synthesized
  source 1..22: mol_type = other DNA
tatatcctggctgtgctggcaa

SEQ ID NO: 41972 - DNA, 22 bp, synthetic construct
  misc_feature 1..22: note = chemically synthesized
  source 1..22: mol_type = other DNA
atatcctggctgtgctggcaac

SEQ ID NO: 41973 - DNA, 22 bp, synthetic construct
  misc_feature 1..22: note = chemically synthesized
  source 1..22: mol_type = other DNA
tatcctggctgtgctggcaact

SEQ ID NO: 41974 - DNA, 22 bp, synthetic construct
  misc_feature 1..22: note = chemically synthesized
  source 1..22: mol_type = other DNA
gctgtgctggcaactgattaga

SEQ ID NO: 41975 - DNA, 22 bp, synthetic construct
  misc_feature 1..22: note = chemically synthesized
  source 1..22: mol_type = other DNA
tgctggcaactgattagatggt

SEQ ID NO: 41976 - DNA, 22 bp, synthetic construct
  misc_feature 1..22: note = chemically synthesized
  source 1..22: mol_type = other DNA
gcaactgattagatggtgccca

SEQ ID NO: 41977 - DNA, 22 bp, synthetic construct
  misc_feature 1..22: note = chemically synthesized
  source 1..22: mol_type = other DNA
attagatggtgcccacccagat

SEQ ID NO: 41978 - DNA, 22 bp, synthetic construct
  misc_feature 1..22: note = chemically synthesized
  source 1..22: mol_type = other DNA
gatggtgcccacccagattaag

SEQ ID NO: 41979 - DNA, 22 bp, synthetic construct
  misc_feature 1..22: note = chemically synthesized
  source 1..22: mol_type = other DNA
agggtgggtctgccttccccag

SEQ ID NO: 41980 - DNA, 22 bp, synthetic construct
  misc_feature 1..22: note = chemically synthesized
  source 1..22: mol_type = other DNA
ccttccccagcccactgactga

SEQ ID NO: 41981 - DNA, 22 bp, synthetic construct
  misc_feature 1..22: note = chemically synthesized
  source 1..22: mol_type = other DNA
ccccagcccactgactgaaata

SEQ ID NO: 41982 - DNA, 22 bp, synthetic construct
  misc_feature 1..22: note = chemically synthesized
  source 1..22: mol_type = other DNA
cccagcccactgactgaaatat

SEQ ID NO: 41983 - DNA, 22 bp, synthetic construct
  misc_feature 1..22: note = chemically synthesized
  source 1..22: mol_type = other DNA
actgaaatattaatctcctttg

SEQ ID NO: 41984 - DNA, 22 bp, synthetic construct
  misc_feature 1..22: note = chemically synthesized
  source 1..22: mol_type = other DNA
aaatattaatctcctttggtaa

SEQ ID NO: 41985 - DNA, 22 bp, synthetic construct
  misc_feature 1..22: note = chemically synthesized
  source 1..22: mol_type = other DNA
atctcctttggtaacaccctca

SEQ ID NO: 41986 - DNA, 22 bp, synthetic construct
  misc_feature 1..22: note = chemically synthesized
  source 1..22: mol_type = other DNA
ctttggtaacaccctcacagac

SEQ ID NO: 41987 - DNA, 22 bp, synthetic construct
  misc_feature 1..22: note = chemically synthesized
  source 1..22: mol_type = other DNA
tggtaacaccctcacagacaca

SEQ ID NO: 41988 - DNA, 22 bp, synthetic construct
  misc_feature 1..22: note = chemically synthesized
  source 1..22: mol_type = other DNA
ggtaacaccctcacagacacac

SEQ ID NO: 41989 - DNA, 22 bp, synthetic construct
  misc_feature 1..22: note = chemically synthesized
  source 1..22: mol_type = other DNA
gtaacaccctcacagacacacc

SEQ ID NO: 41990 - DNA, 22 bp, synthetic construct
  misc_feature 1..22: note = chemically synthesized
  source 1..22: mol_type = other DNA
acagacacacccaagatcatta

SEQ ID NO: 41991 - DNA, 22 bp, synthetic construct
  misc_feature 1..22: note = chemically synthesized
  source 1..22: mol_type = other DNA
ctttgcatccttcagtccaatc

SEQ ID NO: 41992 - DNA, 22 bp, synthetic construct
  misc_feature 1..22: note = chemically synthesized
  source 1..22: mol_type = other DNA
tgcatccttcagtccaatcaag

SEQ ID NO: 41993 - DNA, 22 bp, synthetic construct
  misc_feature 1..22: note = chemically synthesized
  source 1..22: mol_type = other DNA
gcatccttcagtccaatcaagt

SEQ ID NO: 41994 - DNA, 22 bp, synthetic construct
  misc_feature 1..22: note = chemically synthesized
  source 1..22: mol_type = other DNA
catccttcagtccaatcaagtt

SEQ ID NO: 41995 - DNA, 22 bp, synthetic construct
  misc_feature 1..22: note = chemically synthesized
  source 1..22: mol_type = other DNA
cagtccaatcaagttgacactc

SEQ ID NO: 41996 - DNA, 22 bp, synthetic construct
  misc_feature 1..22: note = chemically synthesized
  source 1..22: mol_type = other DNA
agtccaatcaagttgacactca

SEQ ID NO: 41997 - DNA, 22 bp, synthetic construct
  misc_feature 1..22: note = chemically synthesized
  source 1..22: mol_type = other DNA
acactcagtattaaccatcaca

SEQ ID NO: 41998 - DNA, 22 bp, synthetic construct
  misc_feature 1..22: note = chemically synthesized
  source 1..22: mol_type = other DNA
agtattaaccatcacagtcact

SEQ ID NO: 41999 - DNA, 22 bp, synthetic construct
  misc_feature 1..22: note = chemically synthesized
  source 1..22: mol_type = other DNA
accatcacagtcactttctaat

SEQ ID NO: 42000 - DNA, 22 bp, synthetic construct
  misc_feature 1..22: note = chemically synthesized
  source 1..22: mol_type = other DNA
tctaatgaggttggtttttttg

SEQ ID NO: 42001 - DNA, 22 bp, synthetic construct
  misc_feature 1..22: note = chemically synthesized
  source 1..22: mol_type = other DNA
ctaatgaggttggtttttttgt

SEQ ID NO: 42002 - DNA, 22 bp, synthetic construct
  misc_feature 1..22: note = chemically synthesized
  source 1..22: mol_type = other DNA
taatgaggttggtttttttgtt

SEQ ID NO: 42003 - DNA, 22 bp, synthetic construct
  misc_feature 1..22: note = chemically synthesized
  source 1..22: mol_type = other DNA
atgaggttggtttttttgttgt

SEQ ID NO: 42004 - DNA, 22 bp, synthetic construct
  misc_feature 1..22: note = chemically synthesized
  source 1..22: mol_type = other DNA
gtttttttgttgttgagttcct

SEQ ID NO: 42005 - DNA, 22 bp, synthetic construct
  misc_feature 1..22: note = chemically synthesized
  source 1..22: mol_type = other DNA
ttttgttgttgagttccttgta

SEQ ID NO: 42006 - DNA, 22 bp, synthetic construct
  misc_feature 1..22: note = chemically synthesized
  source 1..22: mol_type = other DNA
tttgttgttgagttccttgtag

SEQ ID NO: 42007 - DNA, 22 bp, synthetic construct
  misc_feature 1..22: note = chemically synthesized
  source 1..22: mol_type = other DNA
ttgttgttgagttccttgtaga

SEQ ID NO: 42008 - DNA, 22 bp, synthetic construct
  misc_feature 1..22: note = chemically synthesized
  source 1..22: mol_type = other DNA
tgttgttgagttccttgtagat

SEQ ID NO: 42009 - DNA, 22 bp, synthetic construct
  misc_feature 1..22: note = chemically synthesized
  source 1..22: mol_type = other DNA
gttgttgagttccttgtagatt

SEQ ID NO: 42010 - DNA, 22 bp, synthetic construct
  misc_feature 1..22: note = chemically synthesized
  source 1..22: mol_type = other DNA
ttgttgagttccttgtagattc

SEQ ID NO: 42011 - DNA, 22 bp, synthetic construct
  misc_feature 1..22: note = chemically synthesized
  source 1..22: mol_type = other DNA
ttgagttccttgtagattctgt

SEQ ID NO: 42012 - DNA, 22 bp, synthetic construct
  misc_feature 1..22: note = chemically synthesized
  source 1..22: mol_type = other DNA
agttccttgtagattctgtata

SEQ ID NO: 42013 - DNA, 22 bp, synthetic construct
  misc_feature 1..22: note = chemically synthesized
  source 1..22: mol_type = other DNA
cttgtagattctgtatattagc

SEQ ID NO: 42014 - DNA, 22 bp, synthetic construct
  misc_feature 1..22: note = chemically synthesized
  source 1..22: mol_type = other DNA
gtagattctgtatattagcctt

SEQ ID NO: 42015 - DNA, 22 bp, synthetic construct
  misc_feature 1..22: note = chemically synthesized
  source 1..22: mol_type = other DNA
tagattctgtatattagccttt

SEQ ID NO: 42016 - DNA, 22 bp, synthetic construct
  misc_feature 1..22: note = chemically synthesized
  source 1..22: mol_type = other DNA
tgtatattagccttttgttgca

SEQ ID NO: 42017 - DNA, 22 bp, synthetic construct
  misc_feature 1..22: note = chemically synthesized
  source 1..22: mol_type = other DNA
tatattagccttttgttgcatt

SEQ ID NO: 42018 - DNA, 22 bp, synthetic construct
  misc_feature 1..22: note = chemically synthesized
  source 1..22: mol_type = other DNA
gccttttgttgcattcatagtt

SEQ ID NO: 42019 - DNA, 22 bp, synthetic construct
  misc_feature 1..22: note = chemically synthesized
  source 1..22: mol_type = other DNA
ttgttgcattcatagtttgcaa

SEQ ID NO: 42020 - DNA, 22 bp, synthetic construct
  misc_feature 1..22: note = chemically synthesized
  source 1..22: mol_type = other DNA
tgttgcattcatagtttgcaat

SEQ ID NO: 42021 - DNA, 22 bp, synthetic construct
  misc_feature 1..22: note = chemically synthesized
  source 1..22: mol_type = other DNA
gttgcattcatagtttgcaatt

SEQ ID NO: 42022 - DNA, 22 bp, synthetic construct
  misc_feature 1..22: note = chemically synthesized
  source 1..22: mol_type = other DNA
ttgcattcatagtttgcaattt

SEQ ID NO: 42023 - DNA, 22 bp, synthetic construct
  misc_feature 1..22: note = chemically synthesized
  source 1..22: mol_type = other DNA
cattcatagtttgcaatttttt

SEQ ID NO: 42024 - DNA, 22 bp, synthetic construct
  misc_feature 1..22: note = chemically synthesized
  source 1..22: mol_type = other DNA
atagtttgcaatttttttttct

SEQ ID NO: 42025 - DNA, 22 bp, synthetic construct
  misc_feature 1..22: note = chemically synthesized
  source 1..22: mol_type = other DNA
gcaatttttttttctcattctg

SEQ ID NO: 42026 - DNA, 22 bp, synthetic construct
  misc_feature 1..22: note = chemically synthesized
  source 1..22: mol_type = other DNA
caatttttttttctcattctgt

SEQ ID NO: 42027 - DNA, 22 bp, synthetic construct
  misc_feature 1..22: note = chemically synthesized
  source 1..22: mol_type = other DNA
ttttttctcattctgtaggtta

SEQ ID NO: 42028 - DNA, 22 bp, synthetic construct
  misc_feature 1..22: note = chemically synthesized
  source 1..22: mol_type = other DNA
tttttctcattctgtaggttat

SEQ ID NO: 42029 - DNA, 22 bp, synthetic construct
  misc_feature 1..22: note = chemically synthesized
  source 1..22: mol_type = other DNA
ttttctcattctgtaggttatc

SEQ ID NO: 42030 - DNA, 22 bp, synthetic construct
  misc_feature 1..22: note = chemically synthesized
  source 1..22: mol_type = other DNA
tttctcattctgtaggttatcc

SEQ ID NO: 42031 - DNA, 22 bp, synthetic construct
  misc_feature 1..22: note = chemically synthesized
  source 1..22: mol_type = other DNA
ttctcattctgtaggttatccg

SEQ ID NO: 42032 - DNA, 22 bp, synthetic construct
  misc_feature 1..22: note = chemically synthesized
  source 1..22: mol_type = other DNA
tctcattctgtaggttatccgt

SEQ ID NO: 42033 - DNA, 22 bp, synthetic construct
  misc_feature 1..22: note = chemically synthesized
  source 1..22: mol_type = other DNA
ctcattctgtaggttatccgtt

SEQ ID NO: 42034 - DNA, 22 bp, synthetic construct
  misc_feature 1..22: note = chemically synthesized
  source 1..22: mol_type = other DNA
tcattctgtaggttatccgttt

SEQ ID NO: 42035 - DNA, 22 bp, synthetic construct
  misc_feature 1..22: note = chemically synthesized
  source 1..22: mol_type = other DNA
attctgtaggttatccgtttac

SEQ ID NO: 42036 - DNA, 22 bp, synthetic construct
  misc_feature 1..22: note = chemically synthesized
  source 1..22: mol_type = other DNA
tgtaggttatccgtttactctg

SEQ ID NO: 42037 - DNA, 22 bp, synthetic construct
  misc_feature 1..22: note = chemically synthesized
  source 1..22: mol_type = other DNA
taggttatccgtttactctgtt

SEQ ID NO: 42038 - DNA, 22 bp, synthetic construct
  misc_feature 1..22: note = chemically synthesized
  source 1..22: mol_type = other DNA
tccgtttactctgttgattcgg

SEQ ID NO: 42039 - DNA, 22 bp, synthetic construct
  misc_feature 1..22: note = chemically synthesized
  source 1..22: mol_type = other DNA
actctgttgattcggtcttttg

SEQ ID NO: 42040 - DNA, 22 bp, synthetic construct
  misc_feature 1..22: note = chemically synthesized
  source 1..22: mol_type = other DNA
ctctgttgattcggtcttttgc

SEQ ID NO: 42041 - DNA, 22 bp, synthetic construct
  misc_feature 1..22: note = chemically synthesized
  source 1..22: mol_type = other DNA
tgttgattcggtcttttgcggt

SEQ ID NO: 42042 - DNA, 22 bp, synthetic construct
  misc_feature 1..22: note = chemically synthesized
  source 1..22: mol_type = other DNA
ttgattcggtcttttgcggtgc

SEQ ID NO: 42043 - DNA, 22 bp, synthetic construct
  misc_feature 1..22: note = chemically synthesized
  source 1..22: mol_type = other DNA
attcggtcttttgcggtgcaga

SEQ ID NO: 42044 - DNA, 22 bp, synthetic construct
  misc_feature 1..22: note = chemically synthesized
  source 1..22: mol_type = other DNA
ggtcttttgcggtgcagaagca

SEQ ID NO: 42045 - DNA, 22 bp, synthetic construct
  misc_feature 1..22: note = chemically synthesized
  source 1..22: mol_type = other DNA
ttgcggtgcagaagcattttag

SEQ ID NO: 42046 - DNA, 22 bp, synthetic construct
  misc_feature 1..22: note = chemically synthesized
  source 1..22: mol_type = other DNA
tgcggtgcagaagcattttagt

SEQ ID NO: 42047 - DNA, 22 bp, synthetic construct
  misc_feature 1..22: note = chemically synthesized
  source 1..22: mol_type = other DNA
gcggtgcagaagcattttagtt

SEQ ID NO: 42048 - DNA, 22 bp, synthetic construct
  misc_feature 1..22: note = chemically synthesized
  source 1..22: mol_type = other DNA
cggtgcagaagcattttagttt

SEQ ID NO: 42049 - DNA, 22 bp, synthetic construct
  misc_feature 1..22: note = chemically synthesized
  source 1..22: mol_type = other DNA
tagtttaattaagtcccatttg

SEQ ID NO: 42050 - DNA, 22 bp, synthetic construct
  misc_feature 1..22: note = chemically synthesized
  source 1..22: mol_type = other DNA
agtttaattaagtcccatttgt

SEQ ID NO: 42051 - DNA, 22 bp, synthetic construct
  misc_feature 1..22: note = chemically synthesized
  source 1..22: mol_type = other DNA
gtttaattaagtcccatttgtc

SEQ ID NO: 42052 - DNA, 22 bp, synthetic construct
  misc_feature 1..22: note = chemically synthesized
  source 1..22: mol_type = other DNA
aattaagtcccatttgtctgtt

SEQ ID NO: 42053 - DNA, 22 bp, synthetic construct
  misc_feature 1..22: note = chemically synthesized
  source 1..22: mol_type = other DNA
attaagtcccatttgtctgttt

SEQ ID NO: 42054 - DNA, 22 bp, synthetic construct
  misc_feature 1..22: note = chemically synthesized
  source 1..22: mol_type = other DNA
agtcccatttgtctgtttttgt

SEQ ID NO: 42055 - DNA, 22 bp, synthetic construct
  misc_feature 1..22: note = chemically synthesized
  source 1..22: mol_type = other DNA
gtctgtttttgtttttgttgtg

SEQ ID NO: 42056 - DNA, 22 bp, synthetic construct
  misc_feature 1..22: note = chemically synthesized
  source 1..22: mol_type = other DNA
tctgtttttgtttttgttgtgt

SEQ ID NO: 42057 - DNA, 22 bp, synthetic construct
  misc_feature 1..22: note = chemically synthesized
  source 1..22: mol_type = other DNA
tttttgtttttgttgtgtttag

SEQ ID NO: 42058 - DNA, 22 bp, synthetic construct
  misc_feature 1..22: note = chemically synthesized
  source 1..22: mol_type = other DNA
ttgtttttgttgtgtttagttt

SEQ ID NO: 42059 - DNA, 22 bp, synthetic construct
  misc_feature 1..22: note = chemically synthesized
  source 1..22: mol_type = other DNA
tgtttttgttgtgtttagtttt

SEQ ID NO: 42060 - DNA, 22 bp, synthetic construct
  misc_feature 1..22: note = chemically synthesized
  source 1..22: mol_type = other DNA
gtttttgttgtgtttagttttg

SEQ ID NO: 42061 - DNA, 22 bp, synthetic construct
  misc_feature 1..22: note = chemically synthesized
  source 1..22: mol_type = other DNA
tttttgttgtgtttagttttga

SEQ ID NO: 42062 - DNA, 22 bp, synthetic construct
  misc_feature 1..22: note = chemically synthesized
  source 1..22: mol_type = other DNA
ttgttgtgtttagttttgagga

SEQ ID NO: 42063 - DNA, 22 bp, synthetic construct
  misc_feature 1..22: note = chemically synthesized
  source 1..22: mol_type = other DNA
tgttgtgtttagttttgaggac

SEQ ID NO: 42064 - DNA, 22 bp, synthetic construct
  misc_feature 1..22: note = chemically synthesized
  source 1..22: mol_type = other DNA
gttgtgtttagttttgaggact

SEQ ID NO: 42065 - DNA, 22 bp, synthetic construct
  misc_feature 1..22: note = chemically synthesized
  source 1..22: mol_type = other DNA
ttgtgtttagttttgaggactt

SEQ ID NO: 42066 - DNA, 22 bp, synthetic construct
  misc_feature 1..22: note = chemically synthesized
  source 1..22: mol_type = other DNA
tgtttagttttgaggacttggt

SEQ ID NO: 42067 - DNA, 22 bp, synthetic construct
  misc_feature 1..22: note = chemically synthesized
  source 1..22: mol_type = other DNA
agttttgaggacttggtcataa

SEQ ID NO: 42068 - DNA, 22 bp, synthetic construct
  misc_feature 1..22: note = chemically synthesized
  source 1..22: mol_type = other DNA
gttttgaggacttggtcataaa

SEQ ID NO: 42069 - DNA, 22 bp, synthetic construct
  misc_feature 1..22: note = chemically synthesized
  source 1..22: mol_type = other DNA
tgaggacttggtcataaattct

SEQ ID NO: 42070 - DNA, 22 bp, synthetic construct
  misc_feature 1..22: note = chemically synthesized
  source 1..22: mol_type = other DNA
gaggacttggtcataaattctt

SEQ ID NO: 42071 - DNA, 22 bp, synthetic construct
  misc_feature 1..22: note = chemically synthesized
  source 1..22: mol_type = other DNA
aggacttggtcataaattcttt

SEQ ID NO: 42072 - DNA, 22 bp, synthetic construct
  misc_feature 1..22: note = chemically synthesized
  source 1..22: mol_type = other DNA
ggtcataaattctttgcctagg

SEQ ID NO: 42073 - DNA, 22 bp, synthetic construct
  misc_feature 1..22: note = chemically synthesized
  source 1..22: mol_type = other DNA
gtcataaattctttgcctaggc

SEQ ID NO: 42074 - DNA, 22 bp, synthetic construct
  misc_feature 1..22: note = chemically synthesized
  source 1..22: mol_type = other DNA
tttgcctaggccacatctaatt

SEQ ID NO: 42075 - DNA, 22 bp, synthetic construct
  misc_feature 1..22: note = chemically synthesized
  source 1..22: mol_type = other DNA
tgcctaggccacatctaatttt

SEQ ID NO: 42076 - DNA, 22 bp, synthetic construct
  misc_feature 1..22: note = chemically synthesized
  source 1..22: mol_type = other DNA
gcctaggccacatctaattttt

SEQ ID NO: 42077 - DNA, 22 bp, synthetic construct
  misc_feature 1..22: note = chemically synthesized
  source 1..22: mol_type = other DNA
cctaggccacatctaattttta

SEQ ID NO: 42078 - DNA, 22 bp, synthetic construct
  misc_feature 1..22: note = chemically synthesized
  source 1..22: mol_type = other DNA
ggccacatctaatttttaatcc

SEQ ID NO: 42079 - DNA, 22 bp, synthetic construct
  misc_feature 1..22: note = chemically synthesized
  source 1..22: mol_type = other DNA
atttttaatcctcttttagagc

SEQ ID NO: 42080 - DNA, 22 bp, synthetic construct
  misc_feature 1..22: note = chemically synthesized
  source 1..22: mol_type = other DNA
ttaatcctcttttagagcctgt

SEQ ID NO: 42081 - DNA, 22 bp, synthetic construct
  misc_feature 1..22: note = chemically synthesized
  source 1..22: mol_type = other DNA
taatcctcttttagagcctgtc

SEQ ID NO: 42082 - DNA, 22 bp, synthetic construct
  misc_feature 1..22: note = chemically synthesized
  source 1..22: mol_type = other DNA
aatcctcttttagagcctgtct

SEQ ID NO: 42083 - DNA, 22 bp, synthetic construct
  misc_feature 1..22: note = chemically synthesized
  source 1..22: mol_type = other DNA
atcctcttttagagcctgtctt

SEQ ID NO: 42084 - DNA, 22 bp, synthetic construct
  misc_feature 1..22: note = chemically synthesized
  source 1..22: mol_type = other DNA
ttttagagcctgtctttccctc

SEQ ID NO: 42085 - DNA, 22 bp, synthetic construct
  misc_feature 1..22: note = chemically synthesized
  source 1..22: mol_type = other DNA
ttagagcctgtctttccctcca

SEQ ID NO: 42086 - DNA, 22 bp, synthetic construct
  misc_feature 1..22: note = chemically synthesized
  source 1..22: mol_type = other DNA
tagagcctgtctttccctccaa

SEQ ID NO: 42087 - DNA, 22 bp, synthetic construct
  misc_feature 1..22: note = chemically synthesized
  source 1..22: mol_type = other DNA
agagcctgtctttccctccaaa

SEQ ID NO: 42088 - DNA, 22 bp, synthetic construct
  misc_feature 1..22: note = chemically synthesized
  source 1..22: mol_type = other DNA
gagcctgtctttccctccaaac

SEQ ID NO: 42089 - DNA, 22 bp, synthetic construct
  misc_feature 1..22: note = chemically synthesized
  source 1..22: mol_type = other DNA
tctttccctccaaactaaatat

SEQ ID NO: 42090 - DNA, 22 bp, synthetic construct
  misc_feature 1..22: note = chemically synthesized
  source 1..22: mol_type = other DNA
tccctccaaactaaatattatt

SEQ ID NO: 42091 - DNA, 22 bp, synthetic construct
  misc_feature 1..22: note = chemically synthesized
  source 1..22: mol_type = other DNA
ccctccaaactaaatattattt

SEQ ID NO: 42092 - DNA, 22 bp, synthetic construct
  misc_feature 1..22: note = chemically synthesized
  source 1..22: mol_type = other DNA
cctccaaactaaatattatttt

SEQ ID NO: 42093 - DNA, 22 bp, synthetic construct
  misc_feature 1..22: note = chemically synthesized
  source 1..22: mol_type = other DNA
caaactaaatattattttaccc

SEQ ID NO: 42094 - DNA, 22 bp, synthetic construct
  misc_feature 1..22: note = chemically synthesized
  source 1..22: mol_type = other DNA
aatattattttacccccatttg

SEQ ID NO: 42095 - DNA, 22 bp, synthetic construct
  misc_feature 1..22: note = chemically synthesized
  source 1..22: mol_type = other DNA
ttttacccccatttgacacatg

SEQ ID NO: 42096 - DNA, 22 bp, synthetic construct
  misc_feature 1..22: note = chemically synthesized
  source 1..22: mol_type = other DNA
tacccccatttgacacatgagc

SEQ ID NO: 42097 - DNA, 22 bp, synthetic construct
  misc_feature 1..22: note = chemically synthesized
  source 1..22: mol_type = other DNA
acccccatttgacacatgagct

SEQ ID NO: 42098 - DNA, 22 bp, synthetic construct
  misc_feature 1..22: note = chemically synthesized
  source 1..22: mol_type = other DNA
cccccatttgacacatgagcta

SEQ ID NO: 42099 - DNA, 22 bp, synthetic construct
  misc_feature 1..22: note = chemically synthesized
  source 1..22: mol_type = other DNA
gacacatgagctaattgagcct

SEQ ID NO: 42100 - DNA, 22 bp, synthetic construct
  misc_feature 1..22: note = chemically synthesized
  source 1..22: mol_type = other DNA
acacatgagctaattgagcctt

SEQ ID NO: 42101 - DNA, 22 bp, synthetic construct
  misc_feature 1..22: note = chemically synthesized
  source 1..22: mol_type = other DNA
attgagccttctgtctgttaag

SEQ ID NO: 42102 - DNA, 22 bp, synthetic construct
  misc_feature 1..22: note = chemically synthesized
  source 1..22: mol_type = other DNA
agccttctgtctgttaagtaag

SEQ ID NO: 42103 - DNA, 22 bp, synthetic construct
  misc_feature 1..22: note = chemically synthesized
  source 1..22: mol_type = other DNA
ctgtctgttaagtaagttgact

SEQ ID NO: 42104 - DNA, 22 bp, synthetic construct
  misc_feature 1..22: note = chemically synthesized
  source 1..22: mol_type = other DNA
tgtctgttaagtaagttgacta

SEQ ID NO: 42105 - DNA, 22 bp, synthetic construct
  misc_feature 1..22: note = chemically synthesized
  source 1..22: mol_type = other DNA
tctgttaagtaagttgactagt

SEQ ID NO: 42106 - DNA, 22 bp, synthetic construct
  misc_feature 1..22: note = chemically synthesized
  source 1..22: mol_type = other DNA
ttaagtaagttgactagttcag

SEQ ID NO: 42107 - DNA, 22 bp, synthetic construct
  misc_feature 1..22: note = chemically synthesized
  source 1..22: mol_type = other DNA
agtaagttgactagttcagtgt

SEQ ID NO: 42108 - DNA, 22 bp, synthetic construct
  misc_feature 1..22: note = chemically synthesized
  source 1..22: mol_type = other DNA
actagttcagtgtaagttgttt

SEQ ID NO: 42109 - DNA, 22 bp, synthetic construct
  misc_feature 1..22: note = chemically synthesized
  source 1..22: mol_type = other DNA
gttcagtgtaagttgtttctaa

SEQ ID NO: 42110 - DNA, 22 bp, synthetic construct
  misc_feature 1..22: note = chemically synthesized
  source 1..22: mol_type = other DNA
agtgtaagttgtttctaatttt

SEQ ID NO: 42111 - DNA, 22 bp, synthetic construct
  misc_feature 1..22: note = chemically synthesized
  source 1..22: mol_type = other DNA
tttctaattttttgccatcata

SEQ ID NO: 42112 - DNA, 22 bp, synthetic construct
  misc_feature 1..22: note = chemically synthesized
  source 1..22: mol_type = other DNA
ctaattttttgccatcataatg

SEQ ID NO: 42113 - DNA, 22 bp, synthetic construct
  misc_feature 1..22: note = chemically synthesized
  source 1..22: mol_type = other DNA
taattttttgccatcataatgc

SEQ ID NO: 42114 - DNA, 22 bp, synthetic construct
  misc_feature 1..22: note = chemically synthesized
  source 1..22: mol_type = other DNA
attttttgccatcataatgctt

SEQ ID NO: 42115 - DNA, 22 bp, synthetic construct
  misc_feature 1..22: note = chemically synthesized
  source 1..22: mol_type = other DNA
tttgccatcataatgctttagt

SEQ ID NO: 42116 - DNA, 22 bp, synthetic construct
  misc_feature 1..22: note = chemically synthesized
  source 1..22: mol_type = other DNA
ttgccatcataatgctttagta

SEQ ID NO: 42117 - DNA, 22 bp, synthetic construct
  misc_feature 1..22: note = chemically synthesized
  source 1..22: mol_type = other DNA
tgccatcataatgctttagtaa

SEQ ID NO: 42118 - DNA, 22 bp, synthetic construct
  misc_feature 1..22: note = chemically synthesized
  source 1..22: mol_type = other DNA
gccatcataatgctttagtaaa

SEQ ID NO: 42119 - DNA, 22 bp, synthetic construct
  misc_feature 1..22: note = chemically synthesized
  source 1..22: mol_type = other DNA
ccatcataatgctttagtaaac

SEQ ID NO: 42120 - DNA, 22 bp, synthetic construct
  misc_feature 1..22: note = chemically synthesized
  source 1..22: mol_type = other DNA
tagtaaacatccttttcatact

SEQ ID NO: 42121 - DNA, 22 bp, synthetic construct
  misc_feature 1..22: note = chemically synthesized
  source 1..22: mol_type = other DNA
agtaaacatccttttcatactc

SEQ ID NO: 42122 - DNA, 22 bp, synthetic construct
  misc_feature 1..22: note = chemically synthesized
  source 1..22: mol_type = other DNA
gtaaacatccttttcatactct

SEQ ID NO: 42123 - DNA, 22 bp, synthetic construct
  misc_feature 1..22: note = chemically synthesized
  source 1..22: mol_type = other DNA
ttcatactctccttaattttcc

SEQ ID NO: 42124 - DNA, 22 bp, synthetic construct
  misc_feature 1..22: note = chemically synthesized
  source 1..22: mol_type = other DNA
tcatactctccttaattttccc

SEQ ID NO: 42125 - DNA, 22 bp, synthetic construct
  misc_feature 1..22: note = chemically synthesized
  source 1..22: mol_type = other DNA
catactctccttaattttcccc

SEQ ID NO: 42126 - DNA, 22 bp, synthetic construct
  misc_feature 1..22: note = chemically synthesized
  source 1..22: mol_type = other DNA
atactctccttaattttccccc

SEQ ID NO: 42127 - DNA, 22 bp, synthetic construct
  misc_feature 1..22: note = chemically synthesized
  source 1..22: mol_type = other DNA
tccttaattttcccccaggatg

SEQ ID NO: 42128 - DNA, 22 bp, synthetic construct
  misc_feature 1..22: note = chemically synthesized
  source 1..22: mol_type = other DNA
cttaattttcccccaggatggt

SEQ ID NO: 42129 - DNA, 22 bp, synthetic construct
  misc_feature 1..22: note = chemically synthesized
  source 1..22: mol_type = other DNA
aattttcccccaggatggtttt

SEQ ID NO: 42130 - DNA, 22 bp, synthetic construct
  misc_feature 1..22: note = chemically synthesized
  source 1..22: mol_type = other DNA
attttcccccaggatggttttc

SEQ ID NO: 42131 - DNA, 22 bp, synthetic construct
  misc_feature 1..22: note = chemically synthesized
  source 1..22: mol_type = other DNA
tcccccaggatggttttctaga

SEQ ID NO: 42132 - DNA, 22 bp, synthetic construct
  misc_feature 1..22: note = chemically synthesized
  source 1..22: mol_type = other DNA
cccccaggatggttttctagat

SEQ ID NO: 42133 - DNA, 22 bp, synthetic construct
  misc_feature 1..22: note = chemically synthesized
  source 1..22: mol_type = other DNA
ccccaggatggttttctagatg

SEQ ID NO: 42134 - DNA, 22 bp, synthetic construct
  misc_feature 1..22: note = chemically synthesized
  source 1..22: mol_type = other DNA
tctagatgtggacttgctggat

SEQ ID NO: 42135 - DNA, 22 bp, synthetic construct
  misc_feature 1..22: note = chemically synthesized
  source 1..22: mol_type = other DNA
ctagatgtggacttgctggatc

SEQ ID NO: 42136 - DNA, 22 bp, synthetic construct
  misc_feature 1..22: note = chemically synthesized
  source 1..22: mol_type = other DNA
tagatgtggacttgctggatcc

SEQ ID NO: 42137 - DNA, 22 bp, synthetic construct
  misc_feature 1..22: note = chemically synthesized
  source 1..22: mol_type = other DNA
gatgtggacttgctggatccaa

SEQ ID NO: 42138 - DNA, 22 bp, synthetic construct
  misc_feature 1..22: note = chemically synthesized
  source 1..22: mol_type = other DNA
gctggatccaaagtgtgcatat

SEQ ID NO: 42139 - DNA, 22 bp, synthetic construct
  misc_feature 1..22: note = chemically synthesized
  source 1..22: mol_type = other DNA
ctggatccaaagtgtgcatatt

SEQ ID NO: 42140 - DNA, 22 bp, synthetic construct
  misc_feature 1..22: note = chemically synthesized
  source 1..22: mol_type = other DNA
gatccaaagtgtgcatattttc

SEQ ID NO: 42141 - DNA, 22 bp, synthetic construct
  misc_feature 1..22: note = chemically synthesized
  source 1..22: mol_type = other DNA
tccaaatgtatccatatattgt

SEQ ID NO: 42142 - DNA, 22 bp, synthetic construct
  misc_feature 1..22: note = chemically synthesized
  source 1..22: mol_type = other DNA
ccaaatgtatccatatattgtg

SEQ ID NO: 42143 - DNA, 22 bp, synthetic construct
  misc_feature 1..22: note = chemically synthesized
  source 1..22: mol_type = other DNA
caaatgtatccatatattgtgg

SEQ ID NO: 42144 - DNA, 22 bp, synthetic construct
  misc_feature 1..22: note = chemically synthesized
  source 1..22: mol_type = other DNA
tggctttgtgttttaatagagg

SEQ ID NO: 42145 - DNA, 22 bp, synthetic construct
  misc_feature 1..22: note = chemically synthesized
  source 1..22: mol_type = other DNA
tgtgttttaatagaggtagcag

SEQ ID NO: 42146 - DNA, 22 bp, synthetic construct
  misc_feature 1..22: note = chemically synthesized
  source 1..22: mol_type = other DNA
gtgttttaatagaggtagcagc

SEQ ID NO: 42147 - DNA, 22 bp, synthetic construct
  misc_feature 1..22: note = chemically synthesized
  source 1..22: mol_type = other DNA
tgttttaatagaggtagcagca

SEQ ID NO: 42148 - DNA, 22 bp, synthetic construct
  misc_feature 1..22: note = chemically synthesized
  source 1..22: mol_type = other DNA
taatagaggtagcagcaatatt

SEQ ID NO: 42149 - DNA, 22 bp, synthetic construct
  misc_feature 1..22: note = chemically synthesized
  source 1..22: mol_type = other DNA
aatagaggtagcagcaatatta

SEQ ID NO: 42150 - DNA, 22 bp, synthetic construct
  misc_feature 1..22: note = chemically synthesized
  source 1..22: mol_type = other DNA
atagaggtagcagcaatattag

SEQ ID NO: 42151 - DNA, 22 bp, synthetic construct
  misc_feature 1..22: note = chemically synthesized
  source 1..22: mol_type = other DNA
gaggagagaattaaggaacgat

SEQ ID NO: 42152 - DNA, 22 bp, synthetic construct
  misc_feature 1..22: note = chemically synthesized
  source 1..22: mol_type = other DNA
aggaacgattctagtgtagcag

SEQ ID NO: 42153 - DNA, 22 bp, synthetic construct
  misc_feature 1..22: note = chemically synthesized
  source 1..22: mol_type = other DNA
tagtgtagcaggacaagctgca

SEQ ID NO: 42154 - DNA, 22 bp, synthetic construct
  misc_feature 1..22: note = chemically synthesized
  source 1..22: mol_type = other DNA
gtgtagcaggacaagctgcata

SEQ ID NO: 42155 - DNA, 22 bp, synthetic construct
  misc_feature 1..22: note = chemically synthesized
  source 1..22: mol_type = other DNA
catacaaaacccctcagacacc

SEQ ID NO: 42156 - DNA, 22 bp, synthetic construct
  misc_feature 1..22: note = chemically synthesized
  source 1..22: mol_type = other DNA
agacaccgagttaaagaaggaa

SEQ ID NO: 42157 - DNA, 22 bp, synthetic construct
  misc_feature 1..22: note = chemically synthesized
  source 1..22: mol_type = other DNA
aagaaggaagggctttattcgg

SEQ ID NO: 42158 - DNA, 22 bp, synthetic construct
  misc_feature 1..22: note = chemically synthesized
  source 1..22: mol_type = other DNA
tattcggctgggagcttgggca

SEQ ID NO: 42159 - DNA, 22 bp, synthetic construct
  misc_feature 1..22: note = chemically synthesized
  source 1..22: mol_type = other DNA
attcggctgggagcttgggcaa

SEQ ID NO: 42160 - DNA, 22 bp, synthetic construct
  misc_feature 1..22: note = chemically synthesized
  source 1..22: mol_type = other DNA
ttcggctgggagcttgggcaag

SEQ ID NO: 42161 - DNA, 22 bp, synthetic construct
  misc_feature 1..22: note = chemically synthesized
  source 1..22: mol_type = other DNA
ggctgggagcttgggcaagact

SEQ ID NO: 42162 - DNA, 22 bp, synthetic construct
  misc_feature 1..22: note = chemically synthesized
  source 1..22: mol_type = other DNA
ggagcttgggcaagactcacat

SEQ ID NO: 42163 - DNA, 22 bp, synthetic construct
  misc_feature 1..22: note = chemically synthesized
  source 1..22: mol_type = other DNA
gggcaagactcacatctccaac

SEQ ID NO: 42164 - DNA, 22 bp, synthetic construct
  misc_feature 1..22: note = chemically synthesized
  source 1..22: mol_type = other DNA
ggcaagactcacatctccaaca

SEQ ID NO: 42165 - DNA, 22 bp, synthetic construct
  misc_feature 1..22: note = chemically synthesized
  source 1..22: mol_type = other DNA
acatctccaacaaccaagctct

SEQ ID NO: 42166 - DNA, 22 bp, synthetic construct
  misc_feature 1..22: note = chemically synthesized
  source 1..22: mol_type = other DNA
caacaaccaagctctcagagtg

SEQ ID NO: 42167 - DNA, 22 bp, synthetic construct
  misc_feature 1..22: note = chemically synthesized
  source 1..22: mol_type = other DNA
tcagagtgagcaattcctgtcc

SEQ ID NO: 42168 - DNA, 22 bp, synthetic construct
  misc_feature 1..22: note = chemically synthesized
  source 1..22: mol_type = other DNA
agagtgagcaattcctgtccct

SEQ ID NO: 42169 - DNA, 22 bp, synthetic construct
  misc_feature 1..22: note = chemically synthesized
  source 1..22: mol_type = other DNA
ctgtcccttttaagggcttaca

SEQ ID NO: 42170 - DNA, 22 bp, synthetic construct
  misc_feature 1..22: note = chemically synthesized
  source 1..22: mol_type = other DNA
tcccttttaagggcttacaact

SEQ ID NO: 42171 - DNA, 22 bp, synthetic construct
  misc_feature 1..22: note = chemically synthesized
  source 1..22: mol_type = other DNA
ttaagggcttacaactctaagg

SEQ ID NO: 42172 - DNA, 22 bp, synthetic construct
  misc_feature 1..22: note = chemically synthesized
  source 1..22: mol_type = other DNA
taagggcttacaactctaaggg

SEQ ID NO: 42173 - DNA, 22 bp, synthetic construct
  misc_feature 1..22: note = chemically synthesized
  source 1..22: mol_type = other DNA
aagggcttacaactctaagggg

SEQ ID NO: 42174 - DNA, 22 bp, synthetic construct
  misc_feature 1..22: note = chemically synthesized
  source 1..22: mol_type = other DNA
agggcttacaactctaaggggg

SEQ ID NO: 42175 - DNA, 22 bp, synthetic construct
  misc_feature 1..22: note = chemically synthesized
  source 1..22: mol_type = other DNA
acaactctaagggggtacatga

SEQ ID NO: 42176 - DNA, 22 bp, synthetic construct
  misc_feature 1..22: note = chemically synthesized
  source 1..22: mol_type = other DNA
caactctaagggggtacatgac

SEQ ID NO: 42177 - DNA, 22 bp, synthetic construct
  misc_feature 1..22: note = chemically synthesized
  source 1..22: mol_type = other DNA
taagggggtacatgactggggg

SEQ ID NO: 42178 - DNA, 22 bp, synthetic construct
  misc_feature 1..22: note = chemically synthesized
  source 1..22: mol_type = other DNA
agggggtacatgactgggggct

SEQ ID NO: 42179 - DNA, 22 bp, synthetic construct
  misc_feature 1..22: note = chemically synthesized
  source 1..22: mol_type = other DNA
ggggctgcatgcactggtcatc

SEQ ID NO: 42180 - DNA, 22 bp, synthetic construct
  misc_feature 1..22: note = chemically synthesized
  source 1..22: mol_type = other DNA
catgcactggtcatcagaatgg

SEQ ID NO: 42181 - DNA, 22 bp, synthetic construct
  misc_feature 1..22: note = chemically synthesized
  source 1..22: mol_type = other DNA
gtcatcagaatggaacagaaca

SEQ ID NO: 42182 - DNA, 22 bp, synthetic construct
  misc_feature 1..22: note = chemically synthesized
  source 1..22: mol_type = other DNA
tcacactgcttttccatacagt

SEQ ID NO: 42183 - DNA, 22 bp, synthetic construct
  misc_feature 1..22: note = chemically synthesized
  source 1..22: mol_type = other DNA
cacactgcttttccatacagtg

SEQ ID NO: 42184 - DNA, 22 bp, synthetic construct
  misc_feature 1..22: note = chemically synthesized
  source 1..22: mol_type = other DNA
acactgcttttccatacagtgt

SEQ ID NO: 42185 - DNA, 22 bp, synthetic construct
  misc_feature 1..22: note = chemically synthesized
  source 1..22: mol_type = other DNA
cttttccatacagtgtctggaa

SEQ ID NO: 42186 - DNA, 22 bp, synthetic construct
  misc_feature 1..22: note = chemically synthesized
  source 1..22: mol_type = other DNA
ttccatacagtgtctggaatct

SEQ ID NO: 42187 - DNA, 22 bp, synthetic construct
  misc_feature 1..22: note = chemically synthesized
  source 1..22: mol_type = other DNA
tccatacagtgtctggaatcta

SEQ ID NO: 42188 - DNA, 22 bp, synthetic construct
  misc_feature 1..22: note = chemically synthesized
  source 1..22: mol_type = other DNA
ccatacagtgtctggaatctat

SEQ ID NO: 42189 - DNA, 22 bp, synthetic construct
  misc_feature 1..22: note = chemically synthesized
  source 1..22: mol_type = other DNA
catacagtgtctggaatctata

SEQ ID NO: 42190 - DNA, 22 bp, synthetic construct
  misc_feature 1..22: note = chemically synthesized
  source 1..22: mol_type = other DNA
gaatctatagataacataactg

SEQ ID NO: 42191 - DNA, 22 bp, synthetic construct
  misc_feature 1..22: note = chemically synthesized
  source 1..22: mol_type = other DNA
tagataacataactggccaggt

SEQ ID NO: 42192 - DNA, 22 bp, synthetic construct
  misc_feature 1..22: note = chemically synthesized
  source 1..22: mol_type = other DNA
gccaggtcaggggtctatcttt

SEQ ID NO: 42193 - DNA, 22 bp, synthetic construct
  misc_feature 1..22: note = chemically synthesized
  source 1..22: mol_type = other DNA
tctttaaccaggcccaggatgt

SEQ ID NO: 42194 - DNA, 22 bp, synthetic construct
  misc_feature 1..22: note = chemically synthesized
  source 1..22: mol_type = other DNA
taaccaggcccaggatgtggtc

SEQ ID NO: 42195 - DNA, 22 bp, synthetic construct
  misc_feature 1..22: note = chemically synthesized
  source 1..22: mol_type = other DNA
aaccaggcccaggatgtggtct

SEQ ID NO: 42196 - DNA, 22 bp, synthetic construct
  misc_feature 1..22: note = chemically synthesized
  source 1..22: mol_type = other DNA
accaggcccaggatgtggtctc

SEQ ID NO: 42197 - DNA, 22 bp, synthetic construct
  misc_feature 1..22: note = chemically synthesized
  source 1..22: mol_type = other DNA
aggctgtttgcctgtggatttc

SEQ ID NO: 42198 - DNA, 22 bp, synthetic construct
  misc_feature 1..22: note = chemically synthesized
  source 1..22: mol_type = other DNA
tttgcctgtggatttcatttct

SEQ ID NO: 42199 - DNA, 22 bp, synthetic construct
  misc_feature 1..22: note = chemically synthesized
  source 1..22: mol_type = other DNA
gcctgtggatttcatttctgcc

SEQ ID NO: 42200 - DNA, 22 bp, synthetic construct
  misc_feature 1..22: note = chemically synthesized
  source 1..22: mol_type = other DNA
cctgtggatttcatttctgcct

SEQ ID NO: 42201 - DNA, 22 bp, synthetic construct
  misc_feature 1..22: note = chemically synthesized
  source 1..22: mol_type = other DNA
tggatttcatttctgcctttta

SEQ ID NO: 42202 - DNA, 22 bp, synthetic construct
  misc_feature 1..22: note = chemically synthesized
  source 1..22: mol_type = other DNA
catttctgccttttagttttta

SEQ ID NO: 42203 - DNA, 22 bp, synthetic construct
  misc_feature 1..22: note = chemically synthesized
  source 1..22: mol_type = other DNA
atttctgccttttagtttttac

SEQ ID NO: 42204 - DNA, 22 bp, synthetic construct
  misc_feature 1..22: note = chemically synthesized
  source 1..22: mol_type = other DNA
ctgccttttagtttttacttct

SEQ ID NO: 42205 - DNA, 22 bp, synthetic construct
  misc_feature 1..22: note = chemically synthesized
  source 1..22: mol_type = other DNA
tgccttttagtttttacttctt

SEQ ID NO: 42206 - DNA, 22 bp, synthetic construct
  misc_feature 1..22: note = chemically synthesized
  source 1..22: mol_type = other DNA
ccttttagtttttacttcttct

SEQ ID NO: 42207 - DNA, 22 bp, synthetic construct
  misc_feature 1..22: note = chemically synthesized
  source 1..22: mol_type = other DNA
ttagtttttacttcttctttct

SEQ ID NO: 42208 - DNA, 22 bp, synthetic construct
  misc_feature 1..22: note = chemically synthesized
  source 1..22: mol_type = other DNA
tagtttttacttcttctttctt

SEQ ID NO: 42209 - DNA, 22 bp, synthetic construct
  misc_feature 1..22: note = chemically synthesized
  source 1..22: mol_type = other DNA
agtttttacttcttctttcttt

SEQ ID NO: 42210 - DNA, 22 bp, synthetic construct
  misc_feature 1..22: note = chemically synthesized
  source 1..22: mol_type = other DNA
gtttttacttcttctttctttg

SEQ ID NO: 42211 - DNA, 22 bp, synthetic construct
  misc_feature 1..22: note = chemically synthesized
  source 1..22: mol_type = other DNA
ttacttcttctttctttggagg

SEQ ID NO: 42212 - DNA, 22 bp, synthetic construct
  misc_feature 1..22: note = chemically synthesized
  source 1..22: mol_type = other DNA
tacttcttctttctttggaggc

SEQ ID NO: 42213 - DNA, 22 bp, synthetic construct
  misc_feature 1..22: note = chemically synthesized
  source 1..22: mol_type = other DNA
acttcttctttctttggaggca

SEQ ID NO: 42214 - DNA, 22 bp, synthetic construct
  misc_feature 1..22: note = chemically synthesized
  source 1..22: mol_type = other DNA
cttcttctttctttggaggcag

SEQ ID NO: 42215 - DNA, 22 bp, synthetic construct
  misc_feature 1..22: note = chemically synthesized
  source 1..22: mol_type = other DNA
cttctttctttggaggcagaaa

SEQ ID NO: 42216 - DNA, 22 bp, synthetic construct
  misc_feature 1..22: note = chemically synthesized
  source 1..22: mol_type = other DNA
ttctttctttggaggcagaaat

SEQ ID NO: 42217 - DNA, 22 bp, synthetic construct
  misc_feature 1..22: note = chemically synthesized
  source 1..22: mol_type = other DNA
ctttctttggaggcagaaattg

SEQ ID NO: 42218 - DNA, 22 bp, synthetic construct
  misc_feature 1..22: note = chemically synthesized
  source 1..22: mol_type = other DNA
tttctttggaggcagaaattgg

SEQ ID NO: 42219 - DNA, 22 bp, synthetic construct
  misc_feature 1..22: note = chemically synthesized
  source 1..22: mol_type = other DNA
tctttggaggcagaaattgggc

SEQ ID NO: 42220 - DNA, 22 bp, synthetic construct
  misc_feature 1..22: note = chemically synthesized
  source 1..22: mol_type = other DNA
ctttggaggcagaaattgggca

SEQ ID NO: 42221 - DNA, 22 bp, synthetic construct
  misc_feature 1..22: note = chemically synthesized
  source 1..22: mol_type = other DNA
tttggaggcagaaattgggcat

SEQ ID NO: 42222 - DNA, 22 bp, synthetic construct
  misc_feature 1..22: note = chemically synthesized
  source 1..22: mol_type = other DNA
tggaggcagaaattgggcataa

SEQ ID NO: 42223 - DNA, 22 bp, synthetic construct
  misc_feature 1..22: note = chemically synthesized
  source 1..22: mol_type = other DNA
ggaggcagaaattgggcataaa

SEQ ID NO: 42224 - DNA, 22 bp, synthetic construct
  misc_feature 1..22: note = chemically synthesized
  source 1..22: mol_type = other DNA
gaggcagaaattgggcataaaa

SEQ ID NO: 42225 - DNA, 22 bp, synthetic construct
  misc_feature 1..22: note = chemically synthesized
  source 1..22: mol_type = other DNA
ggcataaaacaatatgaagggt

SEQ ID NO: 42226 - DNA, 22 bp, synthetic construct
  misc_feature 1..22: note = chemically synthesized
  source 1..22: mol_type = other DNA
ctcccttactaggaagagagaa

SEQ ID NO: 42227 - DNA, 22 bp, synthetic construct
  misc_feature 1..22: note = chemically synthesized
  source 1..22: mol_type = other DNA
ccttactaggaagagagaaata

SEQ ID NO: 42228 - DNA, 22 bp, synthetic construct
  misc_feature 1..22: note = chemically synthesized
  source 1..22: mol_type = other DNA
actaggaagagagaaataccat

SEQ ID NO: 42229 - DNA, 22 bp, synthetic construct
  misc_feature 1..22: note = chemically synthesized
  source 1..22: mol_type = other DNA
ctaggaagagagaaataccatg

SEQ ID NO: 42230 - DNA, 22 bp, synthetic construct
  misc_feature 1..22: note = chemically synthesized
  source 1..22: mol_type = other DNA
ggaagagagaaataccatgtga

SEQ ID NO: 42231 - DNA, 22 bp, synthetic construct
  misc_feature 1..22: note = chemically synthesized
  source 1..22: mol_type = other DNA
gtgttattggatttgacatcgg

SEQ ID NO: 42232 - DNA, 22 bp, synthetic construct
  misc_feature 1..22: note = chemically synthesized
  source 1..22: mol_type = other DNA
tgttattggatttgacatcggg

SEQ ID NO: 42233 - DNA, 22 bp, synthetic construct
  misc_feature 1..22: note = chemically synthesized
  source 1..22: mol_type = other DNA
ttggatttgacatcggggttgg

SEQ ID NO: 42234 - DNA, 22 bp, synthetic construct
  misc_feature 1..22: note = chemically synthesized
  source 1..22: mol_type = other DNA
gatttgacatcggggttggacc

SEQ ID NO: 42235 - DNA, 22 bp, synthetic construct
  misc_feature 1..22: note = chemically synthesized
  source 1..22: mol_type = other DNA
gacatcggggttggaccaagca

SEQ ID NO: 42236 - DNA, 22 bp, synthetic construct
  misc_feature 1..22: note = chemically synthesized
  source 1..22: mol_type = other DNA
acatcggggttggaccaagcat

SEQ ID NO: 42237 - DNA, 22 bp, synthetic construct
  misc_feature 1..22: note = chemically synthesized
  source 1..22: mol_type = other DNA
gaccaagcatcttctatgaaca

SEQ ID NO: 42238 - DNA, 22 bp, synthetic construct
  misc_feature 1..22: note = chemically synthesized
  source 1..22: mol_type = other DNA
ctatgaacatctataagcacgt

SEQ ID NO: 42239 - DNA, 22 bp, synthetic construct
  misc_feature 1..22: note = chemically synthesized
  source 1..22: mol_type = other DNA
tatgaacatctataagcacgtt

SEQ ID NO: 42240 - DNA, 22 bp, synthetic construct
  misc_feature 1..22: note = chemically synthesized
  source 1..22: mol_type = other DNA
tgaacatctataagcacgttct

SEQ ID NO: 42241 - DNA, 22 bp, synthetic construct
  misc_feature 1..22: note = chemically synthesized
  source 1..22: mol_type = other DNA
taagcacgttctccttatcaaa

SEQ ID NO: 42242 - DNA, 22 bp, synthetic construct
  misc_feature 1..22: note = chemically synthesized
  source 1..22: mol_type = other DNA
tccttatcaaaaggtactttgc

SEQ ID NO: 42243 - DNA, 22 bp, synthetic construct
  misc_feature 1..22: note = chemically synthesized
  source 1..22: mol_type = other DNA
cttatcaaaaggtactttgctt

SEQ ID NO: 42244 - DNA, 22 bp, synthetic construct
  misc_feature 1..22: note = chemically synthesized
  source 1..22: mol_type = other DNA
atcaaaaggtactttgcttggt

SEQ ID NO: 42245 - DNA, 22 bp, synthetic construct
  misc_feature 1..22: note = chemically synthesized
  source 1..22: mol_type = other DNA
tcaaaaggtactttgcttggtg

SEQ ID NO: 42246 - DNA, 22 bp, synthetic construct
  misc_feature 1..22: note = chemically synthesized
  source 1..22: mol_type = other DNA
tgcttggtgctttaaaagataa

SEQ ID NO: 42247 - DNA, 22 bp, synthetic construct
  misc_feature 1..22: note = chemically synthesized
  source 1..22: mol_type = other DNA
gcttggtgctttaaaagataaa

SEQ ID NO: 42248 - DNA, 22 bp, synthetic construct
  misc_feature 1..22: note = chemically synthesized
  source 1..22: mol_type = other DNA
cttggtgctttaaaagataaat

SEQ ID NO: 42249 - DNA, 22 bp, synthetic construct
  misc_feature 1..22: note = chemically synthesized
  source 1..22: mol_type = other DNA
ggtgctttaaaagataaatgac

SEQ ID NO: 42250 - DNA, 22 bp, synthetic construct
  misc_feature 1..22: note = chemically synthesized
  source 1..22: mol_type = other DNA
gtgctttaaaagataaatgact

SEQ ID NO: 42251 - DNA, 22 bp, synthetic construct
  misc_feature 1..22: note = chemically synthesized
  source 1..22: mol_type = other DNA
taaaagataaatgactatgtag

SEQ ID NO: 42252 - DNA, 22 bp, synthetic construct
  misc_feature 1..22: note = chemically synthesized
  source 1..22: mol_type = other DNA
aaaagataaatgactatgtagc

SEQ ID NO: 42253 - DNA, 22 bp, synthetic construct
  misc_feature 1..22: note = chemically synthesized
  source 1..22: mol_type = other DNA
aaagataaatgactatgtagct

SEQ ID NO: 42254 - DNA, 22 bp, synthetic construct
  misc_feature 1..22: note = chemically synthesized
  source 1..22: mol_type = other DNA
tgtagcttaggagatttcttca

SEQ ID NO: 42255 - DNA, 22 bp, synthetic construct
  misc_feature 1..22: note = chemically synthesized
  source 1..22: mol_type = other DNA
aggagatttcttcataattgaa

SEQ ID NO: 42256 - DNA, 22 bp, synthetic construct
  misc_feature 1..22: note = chemically synthesized
  source 1..22: mol_type = other DNA
ggagatttcttcataattgaaa

SEQ ID NO: 42257 - DNA, 22 bp, synthetic construct
  misc_feature 1..22: note = chemically synthesized
  source 1..22: mol_type = other DNA
cttcataattgaaaaccacagc

SEQ ID NO: 42258 - DNA, 22 bp, synthetic construct
  misc_feature 1..22: note = chemically synthesized
  source 1..22: mol_type = other DNA
ttcataattgaaaaccacagca

SEQ ID NO: 42259 - DNA, 22 bp, synthetic construct
  misc_feature 1..22: note = chemically synthesized
  source 1..22: mol_type = other DNA
cataattgaaaaccacagcagc

SEQ ID NO: 42260 - DNA, 22 bp, synthetic construct
  misc_feature 1..22: note = chemically synthesized
  source 1..22: mol_type = other DNA
ataattgaaaaccacagcagct

SEQ ID NO: 42261 - DNA, 22 bp, synthetic construct
  misc_feature 1..22: note = chemically synthesized
  source 1..22: mol_type = other DNA
aaaaccacagcagctgttattt

SEQ ID NO: 42262 - DNA, 22 bp, synthetic construct
  misc_feature 1..22: note = chemically synthesized
  source 1..22: mol_type = other DNA
ttatttgaacatacctgagccc

SEQ ID NO: 42263 - DNA, 22 bp, synthetic construct
  misc_feature 1..22: note = chemically synthesized
  source 1..22: mol_type = other DNA
tttgaacatacctgagcccctt

SEQ ID NO: 42264 - DNA, 22 bp, synthetic construct
  misc_feature 1..22: note = chemically synthesized
  source 1..22: mol_type = other DNA
gaacatacctgagccccttctg

SEQ ID NO: 42265 - DNA, 22 bp, synthetic construct
  misc_feature 1..22: note = chemically synthesized
  source 1..22: mol_type = other DNA
aacatacctgagccccttctgg

SEQ ID NO: 42266 - DNA, 22 bp, synthetic construct
  misc_feature 1..22: note = chemically synthesized
  source 1..22: mol_type = other DNA
agccccttctggaccactgtag

SEQ ID NO: 42267 - DNA, 22 bp, synthetic construct
  misc_feature 1..22: note = chemically synthesized
  source 1..22: mol_type = other DNA
ctggaccactgtaggagaagga

SEQ ID NO: 42268 - DNA, 22 bp, synthetic construct
  misc_feature 1..22: note = chemically synthesized
  source 1..22: mol_type = other DNA
tggaccactgtaggagaaggag

SEQ ID NO: 42269 - DNA, 22 bp, synthetic construct
  misc_feature 1..22: note = chemically synthesized
  source 1..22: mol_type = other DNA
gaccactgtaggagaaggagga

SEQ ID NO: 42270 - DNA, 22 bp, synthetic construct
  misc_feature 1..22: note = chemically synthesized
  source 1..22: mol_type = other DNA
taggagaaggaggaagagaggt

SEQ ID NO: 42271 - DNA, 22 bp, synthetic construct
  misc_feature 1..22: note = chemically synthesized
  source 1..22: mol_type = other DNA
ctgctgctgagggcatgtatga

SEQ ID NO: 42272 - DNA, 22 bp, synthetic construct
  misc_feature 1..22: note = chemically synthesized
  source 1..22: mol_type = other DNA
tgctgctgagggcatgtatgat

SEQ ID NO: 42273 - DNA, 22 bp, synthetic construct
  misc_feature 1..22: note = chemically synthesized
  source 1..22: mol_type = other DNA
ctgctgagggcatgtatgatga

SEQ ID NO: 42274 - DNA, 22 bp, synthetic construct
  misc_feature 1..22: note = chemically synthesized
  source 1..22: mol_type = other DNA
ctgagggcatgtatgatgacaa

SEQ ID NO: 42275 - DNA, 22 bp, synthetic construct
  misc_feature 1..22: note = chemically synthesized
  source 1..22: mol_type = other DNA
agggcatgtatgatgacaatgg

SEQ ID NO: 42276 - DNA, 22 bp, synthetic construct
  misc_feature 1..22: note = chemically synthesized
  source 1..22: mol_type = other DNA
gtcctaactttgacactacaaa

SEQ ID NO: 42277 - DNA, 22 bp, synthetic construct
  misc_feature 1..22: note = chemically synthesized
  source 1..22: mol_type = other DNA
tcctaactttgacactacaaag

SEQ ID NO: 42278 - DNA, 22 bp, synthetic construct
  misc_feature 1..22: note = chemically synthesized
  source 1..22: mol_type = other DNA
actttgacactacaaagtgact

SEQ ID NO: 42279 - DNA, 22 bp, synthetic construct
  misc_feature 1..22: note = chemically synthesized
  source 1..22: mol_type = other DNA
tgacactacaaagtgactggag

SEQ ID NO: 42280 - DNA, 22 bp, synthetic construct
  misc_feature 1..22: note = chemically synthesized
  source 1..22: mol_type = other DNA
gacactacaaagtgactggagc

SEQ ID NO: 42281 - DNA, 22 bp, synthetic construct
  misc_feature 1..22: note = chemically synthesized
  source 1..22: mol_type = other DNA
acactacaaagtgactggagct

SEQ ID NO: 42282 - DNA, 22 bp, synthetic construct
  misc_feature 1..22: note = chemically synthesized
  source 1..22: mol_type = other DNA
caaagtgactggagctttaggc

SEQ ID NO: 42283 - DNA, 22 bp, synthetic construct
  misc_feature 1..22: note = chemically synthesized
  source 1..22: mol_type = other DNA
gagctttaggcaagtagttact

SEQ ID NO: 42284 - DNA, 22 bp, synthetic construct
  misc_feature 1..22: note = chemically synthesized
  source 1..22: mol_type = other DNA
taggcaagtagttactccaatt

SEQ ID NO: 42285 - DNA, 22 bp, synthetic construct
  misc_feature 1..22: note = chemically synthesized
  source 1..22: mol_type = other DNA
aggcaagtagttactccaattg

SEQ ID NO: 42286 - DNA, 22 bp, synthetic construct
  misc_feature 1..22: note = chemically synthesized
  source 1..22: mol_type = other DNA
ggcaagtagttactccaattgt

SEQ ID NO: 42287 - DNA, 22 bp, synthetic construct
  misc_feature 1..22: note = chemically synthesized
  source 1..22: mol_type = other DNA
ctccaattgtcttttcagactc

SEQ ID NO: 42288 - DNA, 22 bp, synthetic construct
  misc_feature 1..22: note = chemically synthesized
  source 1..22: mol_type = other DNA
caattgtcttttcagactcttt

SEQ ID NO: 42289 - DNA, 22 bp, synthetic construct
  misc_feature 1..22: note = chemically synthesized
  source 1..22: mol_type = other DNA
tcttttcagactctttcttttt

SEQ ID NO: 42290 - DNA, 22 bp, synthetic construct
  misc_feature 1..22: note = chemically synthesized
  source 1..22: mol_type = other DNA
ttcagactctttctttttgagg

SEQ ID NO: 42291 - DNA, 22 bp, synthetic construct
  misc_feature 1..22: note = chemically synthesized
  source 1..22: mol_type = other DNA
tcagactctttctttttgaggt

SEQ ID NO: 42292 - DNA, 22 bp, synthetic construct
  misc_feature 1..22: note = chemically synthesized
  source 1..22: mol_type = other DNA
cagactctttctttttgaggta

SEQ ID NO: 42293 - DNA, 22 bp, synthetic construct
  misc_feature 1..22: note = chemically synthesized
  source 1..22: mol_type = other DNA
agactctttctttttgaggtat

SEQ ID NO: 42294 - DNA, 22 bp, synthetic construct
  misc_feature 1..22: note = chemically synthesized
  source 1..22: mol_type = other DNA
tttctttttgaggtatttgacc

SEQ ID NO: 42295 - DNA, 22 bp, synthetic construct
  misc_feature 1..22: note = chemically synthesized
  source 1..22: mol_type = other DNA
tctttttgaggtatttgacctc

SEQ ID NO: 42296 - DNA, 22 bp, synthetic construct
  misc_feature 1..22: note = chemically synthesized
  source 1..22: mol_type = other DNA
ctttttgaggtatttgacctct

SEQ ID NO: 42297 - DNA, 22 bp, synthetic construct
  misc_feature 1..22: note = chemically synthesized
  source 1..22: mol_type = other DNA
tttttgaggtatttgacctctt

SEQ ID NO: 42298 - DNA, 22 bp, synthetic construct
  misc_feature 1..22: note = chemically synthesized
  source 1..22: mol_type = other DNA
tttgaggtatttgacctctttg

SEQ ID NO: 42299 - DNA, 22 bp, synthetic construct
  misc_feature 1..22: note = chemically synthesized
  source 1..22: mol_type = other DNA
ttgaggtatttgacctctttgc

SEQ ID NO: 42300 - DNA, 22 bp, synthetic construct
  misc_feature 1..22: note = chemically synthesized
  source 1..22: mol_type = other DNA
tgaggtatttgacctctttgcg

SEQ ID NO: 42301 - DNA, 22 bp, synthetic construct
  misc_feature 1..22: note = chemically synthesized
  source 1..22: mol_type = other DNA
gaggtatttgacctctttgcgg

SEQ ID NO: 42302 - DNA, 22 bp, synthetic construct
  misc_feature 1..22: note = chemically synthesized
  source 1..22: mol_type = other DNA
aggtatttgacctctttgcggc

SEQ ID NO: 42303 - DNA, 22 bp, synthetic construct
  misc_feature 1..22: note = chemically synthesized
  source 1..22: mol_type = other DNA
gacctctttgcggcatcagcct

SEQ ID NO: 42304 - DNA, 22 bp, synthetic construct
  misc_feature 1..22: note = chemically synthesized
  source 1..22: mol_type = other DNA
acctctttgcggcatcagcctg

SEQ ID NO: 42305 - DNA, 22 bp, synthetic construct
  misc_feature 1..22: note = chemically synthesized
  source 1..22: mol_type = other DNA
tttgcggcatcagcctgctgct

SEQ ID NO: 42306 - DNA, 22 bp, synthetic construct
  misc_feature 1..22: note = chemically synthesized
  source 1..22: mol_type = other DNA
tgcggcatcagcctgctgctat

SEQ ID NO: 42307 - DNA, 22 bp, synthetic construct
  misc_feature 1..22: note = chemically synthesized
  source 1..22: mol_type = other DNA
gcggcatcagcctgctgctatt

SEQ ID NO: 42308 - DNA, 22 bp, synthetic construct
  misc_feature 1..22: note = chemically synthesized
  source 1..22: mol_type = other DNA
cggcatcagcctgctgctattt

SEQ ID NO: 42309 - DNA, 22 bp, synthetic construct
  misc_feature 1..22: note = chemically synthesized
  source 1..22: mol_type = other DNA
ctgctatttcacatgcacctag

SEQ ID NO: 42310 - DNA, 22 bp, synthetic construct
  misc_feature 1..22: note = chemically synthesized
  source 1..22: mol_type = other DNA
ctatttcacatgcacctagaag

SEQ ID NO: 42311 - DNA, 22 bp, synthetic construct
  misc_feature 1..22: note = chemically synthesized
  source 1..22: mol_type = other DNA
tttcacatgcacctagaaggga

SEQ ID NO: 42312 - DNA, 22 bp, synthetic construct
  misc_feature 1..22: note = chemically synthesized
  source 1..22: mol_type = other DNA
cacatgcacctagaagggactt

SEQ ID NO: 42313 - DNA, 22 bp, synthetic construct
  misc_feature 1..22: note = chemically synthesized
  source 1..22: mol_type = other DNA
acatgcacctagaagggacttt

SEQ ID NO: 42314 - DNA, 22 bp, synthetic construct
  misc_feature 1..22: note = chemically synthesized
  source 1..22: mol_type = other DNA
gaagggactttaaaacatgcac

SEQ ID NO: 42315 - DNA, 22 bp, synthetic construct
  misc_feature 1..22: note = chemically synthesized
  source 1..22: mol_type = other DNA
taaaacatgcacagaattgaac

SEQ ID NO: 42316 - DNA, 22 bp, synthetic construct
  misc_feature 1..22: note = chemically synthesized
  source 1..22: mol_type = other DNA
aaaacatgcacagaattgaaca

SEQ ID NO: 42317 - DNA, 22 bp, synthetic construct
  misc_feature 1..22: note = chemically synthesized
  source 1..22: mol_type = other DNA
aaacatgcacagaattgaacaa

SEQ ID NO: 42318 - DNA, 22 bp, synthetic construct
  misc_feature 1..22: note = chemically synthesized
  source 1..22: mol_type = other DNA
aacaaagcagtaaccattcgtt

SEQ ID NO: 42319 - DNA, 22 bp, synthetic construct
  misc_feature 1..22: note = chemically synthesized
  source 1..22: mol_type = other DNA
gttggtgtcccttaacaatatg

SEQ ID NO: 42320 - DNA, 22 bp, synthetic construct
  misc_feature 1..22: note = chemically synthesized
  source 1..22: mol_type = other DNA
gtgtcccttaacaatatgtcaa

SEQ ID NO: 42321 - DNA, 22 bp, synthetic construct
  misc_feature 1..22: note = chemically synthesized
  source 1..22: mol_type = other DNA
aacaatatgtcaaatactatta

SEQ ID NO: 42322 - DNA, 22 bp, synthetic construct
  misc_feature 1..22: note = chemically synthesized
  source 1..22: mol_type = other DNA
acaatatgtcaaatactattat

SEQ ID NO: 42323 - DNA, 22 bp, synthetic construct
  misc_feature 1..22: note = chemically synthesized
  source 1..22: mol_type = other DNA
ttatttttgaaaggtaaataaa

SEQ ID NO: 42324 - DNA, 22 bp, synthetic construct
  misc_feature 1..22: note = chemically synthesized
  source 1..22: mol_type = other DNA
tttttgaaaggtaaataaatcc

SEQ ID NO: 42325 - DNA, 22 bp, synthetic construct
  misc_feature 1..22: note = chemically synthesized
  source 1..22: mol_type = other DNA
ttgaaaggtaaataaatccttg

SEQ ID NO: 42326 - DNA, 22 bp, synthetic construct
  misc_feature 1..22: note = chemically synthesized
  source 1..22: mol_type = other DNA
tgaaaggtaaataaatccttgg

SEQ ID NO: 42327 - DNA, 22 bp, synthetic construct
  misc_feature 1..22: note = chemically synthesized
  source 1..22: mol_type = other DNA
gaaaggtaaataaatccttggg

SEQ ID NO: 42328 - DNA, 22 bp, synthetic construct
  misc_feature 1..22: note = chemically synthesized
  source 1..22: mol_type = other DNA
aaaggtaaataaatccttgggc

SEQ ID NO: 42329 - DNA, 22 bp, synthetic construct
  misc_feature 1..22: note = chemically synthesized
  source 1..22: mol_type = other DNA
gggcttagtggatcctaaatgc

SEQ ID NO: 42330 - DNA, 22 bp, synthetic construct
  misc_feature 1..22: note = chemically synthesized
  source 1..22: mol_type = other DNA
ggcttagtggatcctaaatgct

SEQ ID NO: 42331 - DNA, 22 bp, synthetic construct
  misc_feature 1..22: note = chemically synthesized
  source 1..22: mol_type = other DNA
agtggatcctaaatgctaattt

SEQ ID NO: 42332 - DNA, 22 bp, synthetic construct
  misc_feature 1..22: note = chemically synthesized
  source 1..22: mol_type = other DNA
gtggatcctaaatgctaattta

SEQ ID NO: 42333 - DNA, 22 bp, synthetic construct
  misc_feature 1..22: note = chemically synthesized
  source 1..22: mol_type = other DNA
aatgctaatttaaaaatctgaa

SEQ ID NO: 42334 - DNA, 22 bp, synthetic construct
  misc_feature 1..22: note = chemically synthesized
  source 1..22: mol_type = other DNA
atttaaaaatctgaactcattt

SEQ ID NO: 42335 - DNA, 22 bp, synthetic construct
  misc_feature 1..22: note = chemically synthesized
  source 1..22: mol_type = other DNA
aaaaatctgaactcatttccat

SEQ ID NO: 42336 - DNA, 22 bp, synthetic construct
  misc_feature 1..22: note = chemically synthesized
  source 1..22: mol_type = other DNA
aaaatctgaactcatttccatc

SEQ ID NO: 42337 - DNA, 22 bp, synthetic construct
  misc_feature 1..22: note = chemically synthesized
  source 1..22: mol_type = other DNA
aactcatttccatcccttatta

SEQ ID NO: 42338 - DNA, 22 bp, synthetic construct
  misc_feature 1..22: note = chemically synthesized
  source 1..22: mol_type = other DNA
atttccatcccttattacttta

SEQ ID NO: 42339 - DNA, 22 bp, synthetic construct
  misc_feature 1..22: note = chemically synthesized
  source 1..22: mol_type = other DNA
ccatcccttattactttaaaca

SEQ ID NO: 42340 - DNA, 22 bp, synthetic construct
  misc_feature 1..22: note = chemically synthesized
  source 1..22: mol_type = other DNA
catcccttattactttaaacaa

SEQ ID NO: 42341 - DNA, 22 bp, synthetic construct
  misc_feature 1..22: note = chemically synthesized
  source 1..22: mol_type = other DNA
attactttaaacaaattgctaa

SEQ ID NO: 42342 - DNA, 22 bp, synthetic construct
  misc_feature 1..22: note = chemically synthesized
  source 1..22: mol_type = other DNA
ttactttaaacaaattgctaac

SEQ ID NO: 42343 - DNA, 22 bp, synthetic construct
  misc_feature 1..22: note = chemically synthesized
  source 1..22: mol_type = other DNA
ctttaaacaaattgctaacctg

SEQ ID NO: 42344 - DNA, 22 bp, synthetic construct
  misc_feature 1..22: note = chemically synthesized
  source 1..22: mol_type = other DNA
taaacaaattgctaacctgaat

SEQ ID NO: 42345 - DNA, 22 bp, synthetic construct
  misc_feature 1..22: note = chemically synthesized
  source 1..22: mol_type = other DNA
aaacaaattgctaacctgaatg

SEQ ID NO: 42346 - DNA, 22 bp, synthetic construct
  misc_feature 1..22: note = chemically synthesized
  source 1..22: mol_type = other DNA
aacaaattgctaacctgaatga

SEQ ID NO: 42347 - DNA, 22 bp, synthetic construct
  misc_feature 1..22: note = chemically synthesized
  source 1..22: mol_type = other DNA
ctaacctgaatgataatagaaa

SEQ ID NO: 42348 - DNA, 22 bp, synthetic construct
  misc_feature 1..22: note = chemically synthesized
  source 1..22: mol_type = other DNA
acctgaatgataatagaaactt

SEQ ID NO: 42349 - DNA, 22 bp, synthetic construct
  misc_feature 1..22: note = chemically synthesized
  source 1..22: mol_type = other DNA
aatgataatagaaacttttttc

SEQ ID NO: 42350 - DNA, 22 bp, synthetic construct
  misc_feature 1..22: note = chemically synthesized
  source 1..22: mol_type = other DNA
ttttccttttaacagttggagg

SEQ ID NO: 42351 - DNA, 22 bp, synthetic construct
  misc_feature 1..22: note = chemically synthesized
  source 1..22: mol_type = other DNA
tttccttttaacagttggaggc

SEQ ID NO: 42352 - DNA, 22 bp, synthetic construct
  misc_feature 1..22: note = chemically synthesized
  source 1..22: mol_type = other DNA
ttccttttaacagttggaggca

SEQ ID NO: 42353 - DNA, 22 bp, synthetic construct
  misc_feature 1..22: note = chemically synthesized
  source 1..22: mol_type = other DNA
tccttttaacagttggaggcat

SEQ ID NO: 42354 - DNA, 22 bp, synthetic construct
  misc_feature 1..22: note = chemically synthesized
  source 1..22: mol_type = other DNA
ccttttaacagttggaggcatc

SEQ ID NO: 42355 - DNA, 22 bp, synthetic construct
  misc_feature 1..22: note = chemically synthesized
  source 1..22: mol_type = other DNA
cttttaacagttggaggcatct

SEQ ID NO: 42356 - DNA, 22 bp, synthetic construct
  misc_feature 1..22: note = chemically synthesized
  source 1..22: mol_type = other DNA
ttaacagttggaggcatctata

SEQ ID NO: 42357 - DNA, 22 bp, synthetic construct
  misc_feature 1..22: note = chemically synthesized
  source 1..22: mol_type = other DNA
taacagttggaggcatctatac

SEQ ID NO: 42358 - DNA, 22 bp, synthetic construct
  misc_feature 1..22: note = chemically synthesized
  source 1..22: mol_type = other DNA
aacagttggaggcatctatact

SEQ ID NO: 42359 - DNA, 22 bp, synthetic construct
  misc_feature 1..22: note = chemically synthesized
  source 1..22: mol_type = other DNA
acagttggaggcatctatactg

SEQ ID NO: 42360 - DNA, 22 bp, synthetic construct
  misc_feature 1..22: note = chemically synthesized
  source 1..22: mol_type = other DNA
gaggcatctatactgtgattca

SEQ ID NO: 42361 - DNA, 22 bp, synthetic construct
  misc_feature 1..22: note = chemically synthesized
  source 1..22: mol_type = other DNA
tactgtgattcagacaaaggcc

SEQ ID NO: 42362 - DNA, 22 bp, synthetic construct
  misc_feature 1..22: note = chemically synthesized
  source 1..22: mol_type = other DNA
tgattcagacaaaggccaaaac

SEQ ID NO: 42363 - DNA, 22 bp, synthetic construct
  misc_feature 1..22: note = chemically synthesized
  source 1..22: mol_type = other DNA
agacaaaggccaaaacaacagc

SEQ ID NO: 42364 - DNA, 22 bp, synthetic construct
  misc_feature 1..22: note = chemically synthesized
  source 1..22: mol_type = other DNA
ttttctgataggtccatatttt

SEQ ID NO: 42365 - DNA, 22 bp, synthetic construct
  misc_feature 1..22: note = chemically synthesized
  source 1..22: mol_type = other DNA
tctgataggtccatattttgag

SEQ ID NO: 42366 - DNA, 22 bp, synthetic construct
  misc_feature 1..22: note = chemically synthesized
  source 1..22: mol_type = other DNA
ctgataggtccatattttgagc

SEQ ID NO: 42367 - DNA, 22 bp, synthetic construct
  misc_feature 1..22: note = chemically synthesized
  source 1..22: mol_type = other DNA
tgataggtccatattttgagca

SEQ ID NO: 42368 - DNA, 22 bp, synthetic construct
  misc_feature 1..22: note = chemically synthesized
  source 1..22: mol_type = other DNA
ataggtccatattttgagcata

SEQ ID NO: 42369 - DNA, 22 bp, synthetic construct
  misc_feature 1..22: note = chemically synthesized
  source 1..22: mol_type = other DNA
tgagcataatatgaagactcag

SEQ ID NO: 42370 - DNA, 22 bp, synthetic construct
  misc_feature 1..22: note = chemically synthesized
  source 1..22: mol_type = other DNA
gagcataatatgaagactcagg

SEQ ID NO: 42371 - DNA, 22 bp, synthetic construct
  misc_feature 1..22: note = chemically synthesized
  source 1..22: mol_type = other DNA
agcataatatgaagactcaggt

SEQ ID NO: 42372 - DNA, 22 bp, synthetic construct
  misc_feature 1..22: note = chemically synthesized
  source 1..22: mol_type = other DNA
aggtggaacagtgtgaacctgt

SEQ ID NO: 42373 - DNA, 22 bp, synthetic construct
  misc_feature 1..22: note = chemically synthesized
  source 1..22: mol_type = other DNA
taaatgatgctgtcagaagagc

SEQ ID NO: 42374 - DNA, 22 bp, synthetic construct
  misc_feature 1..22: note = chemically synthesized
  source 1..22: mol_type = other DNA
tcagaagagcagtggacgcaat

SEQ ID NO: 42375 - DNA, 20 bp, synthetic construct
  misc_feature 1..20: note = chemically synthesized
  source 1..20: mol_type = other DNA
tgtccttctggcagggaacc

SEQ ID NO: 42376 - DNA, 20 bp, synthetic construct
  misc_feature 1..20: note = chemically synthesized
  source 1..20: mol_type = other DNA
gtccttctggcagggaacct

SEQ ID NO: 42377 - DNA, 20 bp, synthetic construct
  misc_feature 1..20: note = chemically synthesized
  source 1..20: mol_type = other DNA
cttctggcagggaacctggg

SEQ ID NO: 42378 - DNA, 20 bp, synthetic construct
  misc_feature 1..20: note = chemically synthesized
  source 1..20: mol_type = other DNA
tggcagggaacctgggcagc

SEQ ID NO: 42379 - DNA, 20 bp, synthetic construct
  misc_feature 1..20: note = chemically synthesized
  source 1..20: mol_type = other DNA
ggcagggaacctgggcagcg

SEQ ID NO: 42380 - DNA, 20 bp, synthetic construct
  misc_feature 1..20: note = chemically synthesized
  source 1..20: mol_type = other DNA
tgggcagcgaggatcctctg

SEQ ID NO: 42381 - DNA, 20 bp, synthetic construct
  misc_feature 1..20: note = chemically synthesized
  source 1..20: mol_type = other DNA
agaacactcattcccaaatc

SEQ ID NO: 42382 - DNA, 20 bp, synthetic construct
  misc_feature 1..20: note = chemically synthesized
  source 1..20: mol_type = other DNA
ccaaatccagaaatgtactg

SEQ ID NO: 42383 - DNA, 20 bp, synthetic construct
  misc_feature 1..20: note = chemically synthesized
  source 1..20: mol_type = other DNA
caaatccagaaatgtactgt

SEQ ID NO: 42384 - DNA, 20 bp, synthetic construct
  misc_feature 1..20: note = chemically synthesized
  source 1..20: mol_type = other DNA
gaaatgtactgtaggtgaca

SEQ ID NO: 42385 - DNA, 20 bp, synthetic construct
  misc_feature 1..20: note = chemically synthesized
  source 1..20: mol_type = other DNA
aaagacacaaatgccaccat

SEQ ID NO: 42386 - DNA, 20 bp, synthetic construct
  misc_feature 1..20: note = chemically synthesized
  source 1..20: mol_type = other DNA
gacacaaatgccaccattag

SEQ ID NO: 42387 - DNA, 20 bp, synthetic construct
  misc_feature 1..20: note = chemically synthesized
  source 1..20: mol_type = other DNA
acacaaatgccaccattagc

SEQ ID NO: 42388 - DNA, 20 bp, synthetic construct
  misc_feature 1..20: note = chemically synthesized
  source 1..20: mol_type = other DNA
gccaccattagcaggattta

SEQ ID NO: 42389 - DNA, 20 bp, synthetic construct
  misc_feature 1..20: note = chemically synthesized
  source 1..20: mol_type = other DNA
caccattagcaggatttaaa

SEQ ID NO: 42390 - DNA, 20 bp, synthetic construct
  misc_feature 1..20: note = chemically synthesized
  source 1..20: mol_type = other DNA
gcaggatttaaagagcattt

SEQ ID NO: 42391 - DNA, 20 bp, synthetic construct
  misc_feature 1..20: note = chemically synthesized
  source 1..20: mol_type = other DNA
taaagagcatttcagaaaat

SEQ ID NO: 42392 - DNA, 20 bp, synthetic construct
  misc_feature 1..20: note = chemically synthesized
  source 1..20: mol_type = other DNA
agagcatttcagaaaattgg

SEQ ID NO: 42393 - DNA, 20 bp, synthetic construct
  misc_feature 1..20: note = chemically synthesized
  source 1..20: mol_type = other DNA
cagaaaattggcagtttact

SEQ ID NO: 42394 - DNA, 20 bp, synthetic construct
  misc_feature 1..20: note = chemically synthesized
  source 1..20: mol_type = other DNA
agaaaattggcagtttacta

SEQ ID NO: 42395 - DNA, 20 bp, synthetic construct
  misc_feature 1..20: note = chemically synthesized
  source 1..20: mol_type = other DNA
aattggcagtttactaaggt

SEQ ID NO: 42396 - DNA, 20 bp, synthetic construct
  misc_feature 1..20: note = chemically synthesized
  source 1..20: mol_type = other DNA
ctaaggtaagaatttctata

SEQ ID NO: 42397 - DNA, 20 bp, synthetic construct
  misc_feature 1..20: note = chemically synthesized
  source 1..20: mol_type = other DNA
gtcttgacatatgaatcatt

SEQ ID NO: 42398 - DNA, 20 bp, synthetic construct
  misc_feature 1..20: note = chemically synthesized
  source 1..20: mol_type = other DNA
tcttgacatatgaatcattt

SEQ ID NO: 42399 - DNA, 20 bp, synthetic construct
  misc_feature 1..20: note = chemically synthesized
  source 1..20: mol_type = other DNA
cttgacatatgaatcattta

SEQ ID NO: 42400 - DNA, 20 bp, synthetic construct
  misc_feature 1..20: note = chemically synthesized
  source 1..20: mol_type = other DNA
gacatatgaatcatttaggg

SEQ ID NO: 42401 - DNA, 20 bp, synthetic construct
  misc_feature 1..20: note = chemically synthesized
  source 1..20: mol_type = other DNA
atcatttagggaagacaata

SEQ ID NO: 42402 - DNA, 20 bp, synthetic construct
  misc_feature 1..20: note = chemically synthesized
  source 1..20: mol_type = other DNA
tatggtttctgtgaatttta

SEQ ID NO: 42403 - DNA, 20 bp, synthetic construct
  misc_feature 1..20: note = chemically synthesized
  source 1..20: mol_type = other DNA
tttaaagacttctaattaat

SEQ ID NO: 42404 - DNA, 20 bp, synthetic construct
  misc_feature 1..20: note = chemically synthesized
  source 1..20: mol_type = other DNA
aaagacttctaattaatcag

SEQ ID NO: 42405 - DNA, 20 bp, synthetic construct
  misc_feature 1..20: note = chemically synthesized
  source 1..20: mol_type = other DNA
agacttctaattaatcagaa

SEQ ID NO: 42406 - DNA, 20 bp, synthetic construct
  misc_feature 1..20: note = chemically synthesized
  source 1..20: mol_type = other DNA
ctaattaatcagaagagtgc

SEQ ID NO: 42407 - DNA, 20 bp, synthetic construct
  misc_feature 1..20: note = chemically synthesized
  source 1..20: mol_type = other DNA
gaagagtgctggatattgca

SEQ ID NO: 42408 - DNA, 20 bp, synthetic construct
  misc_feature 1..20: note = chemically synthesized
  source 1..20: mol_type = other DNA
tgcatagacttctccaccct

SEQ ID NO: 42409 - DNA, 20 bp, synthetic construct
  misc_feature 1..20: note = chemically synthesized
  source 1..20: mol_type = other DNA
tctccacccttagctgtact

SEQ ID NO: 42410 - DNA, 20 bp, synthetic construct
  misc_feature 1..20: note = chemically synthesized
  source 1..20: mol_type = other DNA
agctgtacttagctgatttg

SEQ ID NO: 42411 - DNA, 20 bp, synthetic construct
  misc_feature 1..20: note = chemically synthesized
  source 1..20: mol_type = other DNA
gctgtacttagctgatttgt

SEQ ID NO: 42412 - DNA, 20 bp, synthetic construct
  misc_feature 1..20: note = chemically synthesized
  source 1..20: mol_type = other DNA
actgtaacctccctgaactt

SEQ ID NO: 42413 - DNA, 20 bp, synthetic construct
  misc_feature 1..20: note = chemically synthesized
  source 1..20: mol_type = other DNA
tccatttccctttcaaactc

SEQ ID NO: 42414 - DNA, 20 bp, synthetic construct
  misc_feature 1..20: note = chemically synthesized
  source 1..20: mol_type = other DNA
ccatttccctttcaaactct

SEQ ID NO: 42415 - DNA, 20 bp, synthetic construct
  misc_feature 1..20: note = chemically synthesized
  source 1..20: mol_type = other DNA
tttcaaactctgggaaaaaa

SEQ ID NO: 42416 - DNA, 20 bp, synthetic construct
  misc_feature 1..20: note = chemically synthesized
  source 1..20: mol_type = other DNA
actctgggaaaaaaaagaaa

SEQ ID NO: 42417 - DNA, 20 bp, synthetic construct
  misc_feature 1..20: note = chemically synthesized
  source 1..20: mol_type = other DNA
aaaaagaaaaagcatctatg

SEQ ID NO: 42418 - DNA, 20 bp, synthetic construct
  misc_feature 1..20: note = chemically synthesized
  source 1..20: mol_type = other DNA
aaagaaaaagcatctatgaa

SEQ ID NO: 42419 - DNA, 20 bp, synthetic construct
  misc_feature 1..20: note = chemically synthesized
  source 1..20: mol_type = other DNA
aagaaaaagcatctatgaag

SEQ ID NO: 42420 - DNA, 20 bp, synthetic construct
  misc_feature 1..20: note = chemically synthesized
  source 1..20: mol_type = other DNA
agcatctatgaagaggtgtg

SEQ ID NO: 42421 - DNA, 20 bp, synthetic construct
  misc_feature 1..20: note = chemically synthesized
  source 1..20: mol_type = other DNA
gcatctatgaagaggtgtgt

SEQ ID NO: 42422 - DNA, 20 bp, synthetic construct
  misc_feature 1..20: note = chemically synthesized
  source 1..20: mol_type = other DNA
gtgtgtgggtccaaccctga

SEQ ID NO: 42423 - DNA, 20 bp, synthetic construct
  misc_feature 1..20: note = chemically synthesized
  source 1..20: mol_type = other DNA
cagcaaaaccctctccaaac

SEQ ID NO: 42424 - DNA, 20 bp, synthetic construct
  misc_feature 1..20: note = chemically synthesized
  source 1..20: mol_type = other DNA
tctccaaactagccttgctg

SEQ ID NO: 42425 - DNA, 20 bp, synthetic construct
  misc_feature 1..20: note = chemically synthesized
  source 1..20: mol_type = other DNA
ctccaaactagccttgctgt

SEQ ID NO: 42426 - DNA, 20 bp, synthetic construct
  misc_feature 1..20: note = chemically synthesized
  source 1..20: mol_type = other DNA
caaactagccttgctgtagg

SEQ ID NO: 42427 - DNA, 20 bp, synthetic construct
  misc_feature 1..20: note = chemically synthesized
  source 1..20: mol_type = other DNA
actagccttgctgtaggcag

SEQ ID NO: 42428 - DNA, 20 bp, synthetic construct
  misc_feature 1..20: note = chemically synthesized
  source 1..20: mol_type = other DNA
tctgctatctgcctcatcta

SEQ ID NO: 42429 - DNA, 20 bp, synthetic construct
  misc_feature 1..20: note = chemically synthesized
  source 1..20: mol_type = other DNA
tgtgcgaatgcatgaaaata

SEQ ID NO: 42430 - DNA, 20 bp, synthetic construct
  misc_feature 1..20: note = chemically synthesized
  source 1..20: mol_type = other DNA
atgcatgaaaataaagttta

SEQ ID NO: 42431 - DNA, 20 bp, synthetic construct
  misc_feature 1..20: note = chemically synthesized
  source 1..20: mol_type = other DNA
gaaaataaagtttaaagata

SEQ ID NO: 42432 - DNA, 20 bp, synthetic construct
  misc_feature 1..20: note = chemically synthesized
  source 1..20: mol_type = other DNA
aaaataaagtttaaagatat

SEQ ID NO: 42433 - DNA, 20 bp, synthetic construct
  misc_feature 1..20: note = chemically synthesized
  source 1..20: mol_type = other DNA
ataaagtttaaagatatggg

SEQ ID NO: 42434 - DNA, 20 bp, synthetic construct
  misc_feature 1..20: note = chemically synthesized
  source 1..20: mol_type = other DNA
ttaaagatatgggtggcctt

SEQ ID NO: 42435 - DNA, 20 bp, synthetic construct
  misc_feature 1..20: note = chemically synthesized
  source 1..20: mol_type = other DNA
taaagatatgggtggccttc

SEQ ID NO: 42436 - DNA, 20 bp, synthetic construct
  misc_feature 1..20: note = chemically synthesized
  source 1..20: mol_type = other DNA
aagatatgggtggccttcag

SEQ ID NO: 42437 - DNA, 20 bp, synthetic construct
  misc_feature 1..20: note = chemically synthesized
  source 1..20: mol_type = other DNA
gtggccttcaggagacacgc

SEQ ID NO: 42438 - DNA, 20 bp, synthetic construct
  misc_feature 1..20: note = chemically synthesized
  source 1..20: mol_type = other DNA
cttcaggagacacgccagcc

SEQ ID NO: 42439 - DNA, 20 bp, synthetic construct
  misc_feature 1..20: note = chemically synthesized
  source 1..20: mol_type = other DNA
atcttttcacaatgacacaa

SEQ ID NO: 42440 - DNA, 20 bp, synthetic construct
  misc_feature 1..20: note = chemically synthesized
  source 1..20: mol_type = other DNA
ccatctcttcactttacacc

SEQ ID NO: 42441 - DNA, 20 bp, synthetic construct
  misc_feature 1..20: note = chemically synthesized
  source 1..20: mol_type = other DNA
atctcttcactttacaccca

SEQ ID NO: 42442 - DNA, 20 bp, synthetic construct
  misc_feature 1..20: note = chemically synthesized
  source 1..20: mol_type = other DNA
tctcttcactttacacccag

SEQ ID NO: 42443 - DNA, 20 bp, synthetic construct
  misc_feature 1..20: note = chemically synthesized
  source 1..20: mol_type = other DNA
ttacacccagaggaaaaaaa

SEQ ID NO: 42444 - DNA, 20 bp, synthetic construct
  misc_feature 1..20: note = chemically synthesized
  source 1..20: mol_type = other DNA
ccagaggaaaaaaaaagtta

SEQ ID NO: 42445 - DNA, 20 bp, synthetic construct
  misc_feature 1..20: note = chemically synthesized
  source 1..20: mol_type = other DNA
cagaggaaaaaaaaagttaa

SEQ ID NO: 42446 - DNA, 20 bp, synthetic construct
  misc_feature 1..20: note = chemically synthesized
  source 1..20: mol_type = other DNA
agaggaaaaaaaaagttaaa

SEQ ID NO: 42447 - DNA, 20 bp, synthetic construct
  misc_feature 1..20: note = chemically synthesized
  source 1..20: mol_type = other DNA
aagttaaagggtttctcaac

SEQ ID NO: 42448 - DNA, 20 bp, synthetic construct
  misc_feature 1..20: note = chemically synthesized
  source 1..20: mol_type = other DNA
agttaaagggtttctcaacc

SEQ ID NO: 42449 - DNA, 20 bp, synthetic construct
  misc_feature 1..20: note = chemically synthesized
  source 1..20: mol_type = other DNA
aaagggtttctcaaccaggt

SEQ ID NO: 42450 - DNA, 20 bp, synthetic construct
  misc_feature 1..20: note = chemically synthesized
  source 1..20: mol_type = other DNA
tttctcaaccaggtaagtca

SEQ ID NO: 42451 - DNA, 20 bp, synthetic construct
  misc_feature 1..20: note = chemically synthesized
  source 1..20: mol_type = other DNA
tctcaaccaggtaagtcatg

SEQ ID NO: 42452 - DNA, 20 bp, synthetic construct
  misc_feature 1..20: note = chemically synthesized
  source 1..20: mol_type = other DNA
tcaaccaggtaagtcatgga

SEQ ID NO: 42453 - DNA, 20 bp, synthetic construct
  misc_feature 1..20: note = chemically synthesized
  source 1..20: mol_type = other DNA
gcaacactcaacacacttgt

SEQ ID NO: 42454 - DNA, 20 bp, synthetic construct
  misc_feature 1..20: note = chemically synthesized
  source 1..20: mol_type = other DNA
gtgagttcttgtgcactgtc

SEQ ID NO: 42455 - DNA, 20 bp, synthetic construct
  misc_feature 1..20: note = chemically synthesized
  source 1..20: mol_type = other DNA
gcactgtctggcttttttgc

SEQ ID NO: 42456 - DNA, 20 bp, synthetic construct
  misc_feature 1..20: note = chemically synthesized
  source 1..20: mol_type = other DNA
tggcttttttgctagcctat

SEQ ID NO: 42457 - DNA, 20 bp, synthetic construct
  misc_feature 1..20: note = chemically synthesized
  source 1..20: mol_type = other DNA
gctagcctataagctgcatg

SEQ ID NO: 42458 - DNA, 20 bp, synthetic construct
  misc_feature 1..20: note = chemically synthesized
  source 1..20: mol_type = other DNA
ctagcctataagctgcatga

SEQ ID NO: 42459 - DNA, 20 bp, synthetic construct
  misc_feature 1..20: note = chemically synthesized
  source 1..20: mol_type = other DNA
ctataagctgcatgaaggct

SEQ ID NO: 42460 - DNA, 20 bp, synthetic construct
  misc_feature 1..20: note = chemically synthesized
  source 1..20: mol_type = other DNA
ctgcatgaaggctgagacta

SEQ ID NO: 42461 - DNA, 20 bp, synthetic construct
  misc_feature 1..20: note = chemically synthesized
  source 1..20: mol_type = other DNA
catgaaggctgagactatgg

SEQ ID NO: 42462 - DNA, 20 bp, synthetic construct
  misc_feature 1..20: note = chemically synthesized
  source 1..20: mol_type = other DNA
ggctgagactatggcagtct

SEQ ID NO: 42463 - DNA, 20 bp, synthetic construct
  misc_feature 1..20: note = chemically synthesized
  source 1..20: mol_type = other DNA
actatggcagtcttggctca

SEQ ID NO: 42464 - DNA, 20 bp, synthetic construct
  misc_feature 1..20: note = chemically synthesized
  source 1..20: mol_type = other DNA
atggcagtcttggctcatag

SEQ ID NO: 42465 - DNA, 20 bp, synthetic construct
  misc_feature 1..20: note = chemically synthesized
  source 1..20: mol_type = other DNA
tggcagtcttggctcataga

SEQ ID NO: 42466 - DNA, 20 bp, synthetic construct
  misc_feature 1..20: note = chemically synthesized
  source 1..20: mol_type = other DNA
cttggctcatagaaggtaat

SEQ ID NO: 42467 - DNA, 20 bp, synthetic construct
  misc_feature 1..20: note = chemically synthesized
  source 1..20: mol_type = other DNA
ggctcatagaaggtaatcag

SEQ ID NO: 42468 - DNA, 20 bp, synthetic construct
  misc_feature 1..20: note = chemically synthesized
  source 1..20: mol_type = other DNA
ttgattgaatttttccctta

SEQ ID NO: 42469 - DNA, 20 bp, synthetic construct
  misc_feature 1..20: note = chemically synthesized
  source 1..20: mol_type = other DNA
cttaaagccaattctaatgt

SEQ ID NO: 42470 - DNA, 20 bp, synthetic construct
  misc_feature 1..20: note = chemically synthesized
  source 1..20: mol_type = other DNA
tgtatgtgtgctgctgtaaa

SEQ ID NO: 42471 - DNA, 20 bp, synthetic construct
  misc_feature 1..20: note = chemically synthesized
  source 1..20: mol_type = other DNA
gtatgtgtgctgctgtaaat

SEQ ID NO: 42472 - DNA, 20 bp, synthetic construct
  misc_feature 1..20: note = chemically synthesized
  source 1..20: mol_type = other DNA
tatgtgtgctgctgtaaata

SEQ ID NO: 42473 - DNA, 20 bp, synthetic construct
  misc_feature 1..20: note = chemically synthesized
  source 1..20: mol_type = other DNA
tgtgctgctgtaaatagggt

SEQ ID NO: 42474 - DNA, 20 bp, synthetic construct
  misc_feature 1..20: note = chemically synthesized
  source 1..20: mol_type = other DNA
acttaaataccaattgattt

SEQ ID NO: 42475 - DNA, 20 bp, synthetic construct
  misc_feature 1..20: note = chemically synthesized
  source 1..20: mol_type = other DNA
aataccaattgattttagcc

SEQ ID NO: 42476 - DNA, 20 bp, synthetic construct
  misc_feature 1..20: note = chemically synthesized
  source 1..20: mol_type = other DNA
ataccaattgattttagccc

SEQ ID NO: 42477 - DNA, 20 bp, synthetic construct
  misc_feature 1..20: note = chemically synthesized
  source 1..20: mol_type = other DNA
agcccaggataatgaaaatg

SEQ ID NO: 42478 - DNA, 20 bp, synthetic construct
  misc_feature 1..20: note = chemically synthesized
  source 1..20: mol_type = other DNA
aatgaaaatgcagtcttgct

SEQ ID NO: 42479 - DNA, 20 bp, synthetic construct
  misc_feature 1..20: note = chemically synthesized
  source 1..20: mol_type = other DNA
aaaatgcagtcttgctcagc

SEQ ID NO: 42480 - DNA, 20 bp, synthetic construct
  misc_feature 1..20: note = chemically synthesized
  source 1..20: mol_type = other DNA
gaaatgtaaccatctgaaca

SEQ ID NO: 42481 - DNA, 20 bp, synthetic construct
  misc_feature 1..20: note = chemically synthesized
  source 1..20: mol_type = other DNA
ccatctgaacacagctcctt

SEQ ID NO: 42482 - DNA, 20 bp, synthetic construct
  misc_feature 1..20: note = chemically synthesized
  source 1..20: mol_type = other DNA
atctgaacacagctccttaa

SEQ ID NO: 42483 - DNA, 20 bp, synthetic construct
  misc_feature 1..20: note = chemically synthesized
  source 1..20: mol_type = other DNA
cacagctccttaagagatat

SEQ ID NO: 42484 - DNA, 20 bp, synthetic construct
  misc_feature 1..20: note = chemically synthesized
  source 1..20: mol_type = other DNA
agctccttaagagatataag

SEQ ID NO: 42485 - DNA, 20 bp, synthetic construct
  misc_feature 1..20: note = chemically synthesized
  source 1..20: mol_type = other DNA
gctccttaagagatataaga

SEQ ID NO: 42486 - DNA, 20 bp, synthetic construct
  misc_feature 1..20: note = chemically synthesized
  source 1..20: mol_type = other DNA
ctccttaagagatataagaa

SEQ ID NO: 42487 - DNA, 20 bp, synthetic construct
  misc_feature 1..20: note = chemically synthesized
  source 1..20: mol_type = other DNA
cttaagagatataagaaggg

SEQ ID NO: 42488 - DNA, 20 bp, synthetic construct
  misc_feature 1..20: note = chemically synthesized
  source 1..20: mol_type = other DNA
aagagatataagaagggtgg

SEQ ID NO: 42489 - DNA, 20 bp, synthetic construct
  misc_feature 1..20: note = chemically synthesized
  source 1..20: mol_type = other DNA
agatataagaagggtggaag

SEQ ID NO: 42490 - DNA, 20 bp, synthetic construct
  misc_feature 1..20: note = chemically synthesized
  source 1..20: mol_type = other DNA
gatataagaagggtggaagt

SEQ ID NO: 42491 - DNA, 20 bp, synthetic construct
  misc_feature 1..20: note = chemically synthesized
  source 1..20: mol_type = other DNA
aagaagggtggaagtgggtg

SEQ ID NO: 42492 - DNA, 20 bp, synthetic construct
  misc_feature 1..20: note = chemically synthesized
  source 1..20: mol_type = other DNA
agaagggtggaagtgggtga

SEQ ID NO: 42493 - DNA, 20 bp, synthetic construct
  misc_feature 1..20: note = chemically synthesized
  source 1..20: mol_type = other DNA
gaagggtggaagtgggtgaa

SEQ ID NO: 42494 - DNA, 20 bp, synthetic construct
  misc_feature 1..20: note = chemically synthesized
  source 1..20: mol_type = other DNA
gggtggaagtgggtgaaggg

SEQ ID NO: 42495 - DNA, 20 bp, synthetic construct
  misc_feature 1..20: note = chemically synthesized
  source 1..20: mol_type = other DNA
ggtggaagtgggtgaagggt

SEQ ID NO: 42496 - DNA, 20 bp, synthetic construct
  misc_feature 1..20: note = chemically synthesized
  source 1..20: mol_type = other DNA
tgggtgaagggtaggccctc

SEQ ID NO: 42497 - DNA, 20 bp, synthetic construct
  misc_feature 1..20: note = chemically synthesized
  source 1..20: mol_type = other DNA
ggtgaagggtaggccctcca

SEQ ID NO: 42498 - DNA, 20 bp, synthetic construct
  misc_feature 1..20: note = chemically synthesized
  source 1..20: mol_type = other DNA
ggtaggccctccagagttct

SEQ ID NO: 42499 - DNA, 20 bp, synthetic construct
  misc_feature 1..20: note = chemically synthesized
  source 1..20: mol_type = other DNA
tccagagttctcagttgttg

SEQ ID NO: 42500 - DNA, 20 bp, synthetic construct
  misc_feature 1..20: note = chemically synthesized
  source 1..20: mol_type = other DNA
ccagagttctcagttgttgc

SEQ ID NO: 42501 - DNA, 20 bp, synthetic construct
  misc_feature 1..20: note = chemically synthesized
  source 1..20: mol_type = other DNA
gagttctcagttgttgcggg

SEQ ID NO: 42502 - DNA, 20 bp, synthetic construct
  misc_feature 1..20: note = chemically synthesized
  source 1..20: mol_type = other DNA
ctcagttgttgcgggaagtc

SEQ ID NO: 42503 - DNA, 20 bp, synthetic construct
  misc_feature 1..20: note = chemically synthesized
  source 1..20: mol_type = other DNA
tcagttgttgcgggaagtct

SEQ ID NO: 42504 - DNA, 20 bp, synthetic construct
  misc_feature 1..20: note = chemically synthesized
  source 1..20: mol_type = other DNA
gggaagtctgggactccaaa

SEQ ID NO: 42505 - DNA, 20 bp, synthetic construct
  misc_feature 1..20: note = chemically synthesized
  source 1..20: mol_type = other DNA
gaagtctgggactccaaacg

SEQ ID NO: 42506 - DNA, 20 bp, synthetic construct
  misc_feature 1..20: note = chemically synthesized
  source 1..20: mol_type = other DNA
aagtctgggactccaaacgg

SEQ ID NO: 42507 - DNA, 20 bp, synthetic construct
  misc_feature 1..20: note = chemically synthesized
  source 1..20: mol_type = other DNA
agtctgggactccaaacgga

SEQ ID NO: 42508 - DNA, 20 bp, synthetic construct
  misc_feature 1..20: note = chemically synthesized
  source 1..20: mol_type = other DNA
gggactccaaacggagggat

SEQ ID NO: 42509 - DNA, 20 bp, synthetic construct
  misc_feature 1..20: note = chemically synthesized
  source 1..20: mol_type = other DNA
ccaaacggagggatcagctg

SEQ ID NO: 42510 - DNA, 20 bp, synthetic construct
  misc_feature 1..20: note = chemically synthesized
  source 1..20: mol_type = other DNA
ggagggatcagctgaagcca

SEQ ID NO: 42511 - DNA, 20 bp, synthetic construct
  misc_feature 1..20: note = chemically synthesized
  source 1..20: mol_type = other DNA
gggatcagctgaagccatgg

SEQ ID NO: 42512 - DNA, 20 bp, synthetic construct
  misc_feature 1..20: note = chemically synthesized
  source 1..20: mol_type = other DNA
atcagctgaagccatggcag

SEQ ID NO: 42513 - DNA, 20 bp, synthetic construct
  misc_feature 1..20: note = chemically synthesized
  source 1..20: mol_type = other DNA
gaagccatggcagaagttcg

SEQ ID NO: 42514 - DNA, 20 bp, synthetic construct
  misc_feature 1..20: note = chemically synthesized
  source 1..20: mol_type = other DNA
gcagaagttcgtggattgtg

SEQ ID NO: 42515 - DNA, 20 bp, synthetic construct
  misc_feature 1..20: note = chemically synthesized
  source 1..20: mol_type = other DNA
cgtggattgtgaagatttca

SEQ ID NO: 42516 - DNA, 20 bp, synthetic construct
  misc_feature 1..20: note = chemically synthesized
  source 1..20: mol_type = other DNA
aagatttcatggacatttat

SEQ ID NO: 42517 - DNA, 20 bp, synthetic construct
  misc_feature 1..20: note = chemically synthesized
  source 1..20: mol_type = other DNA
atctctaaacataaattgta

SEQ ID NO: 42518 - DNA, 20 bp, synthetic construct
  misc_feature 1..20: note = chemically synthesized
  source 1..20: mol_type = other DNA
cataaattgtaaagatttca

SEQ ID NO: 42519 - DNA, 20 bp, synthetic construct
  misc_feature 1..20: note = chemically synthesized
  source 1..20: mol_type = other DNA
atggacacttatcacttccc

SEQ ID NO: 42520 - DNA, 20 bp, synthetic construct
  misc_feature 1..20: note = chemically synthesized
  source 1..20: mol_type = other DNA
ctttaatctcttaatcctgt

SEQ ID NO: 42521 - DNA, 20 bp, synthetic construct
  misc_feature 1..20: note = chemically synthesized
  source 1..20: mol_type = other DNA
atctcttaatcctgtcagct

SEQ ID NO: 42522 - DNA, 20 bp, synthetic construct
  misc_feature 1..20: note = chemically synthesized
  source 1..20: mol_type = other DNA
tctcttaatcctgtcagctg

SEQ ID NO: 42523 - DNA, 20 bp, synthetic construct
  misc_feature 1..20: note = chemically synthesized
  source 1..20: mol_type = other DNA
tcttaatcctgtcagctgag

SEQ ID NO: 42524 - DNA, 20 bp, synthetic construct
  misc_feature 1..20: note = chemically synthesized
  source 1..20: mol_type = other DNA
cttaatcctgtcagctgagg

SEQ ID NO: 42525 - DNA, 20 bp, synthetic construct
  misc_feature 1..20: note = chemically synthesized
  source 1..20: mol_type = other DNA
gaggaggatgtatattgcct

SEQ ID NO: 42526 - DNA, 20 bp, synthetic construct
  misc_feature 1..20: note = chemically synthesized
  source 1..20: mol_type = other DNA
aggaggatgtatattgcctc

SEQ ID NO: 42527 - DNA, 20 bp, synthetic construct
  misc_feature 1..20: note = chemically synthesized
  source 1..20: mol_type = other DNA
cattaactgcacaaattgta

SEQ ID NO: 42528 - DNA, 20 bp, synthetic construct
  misc_feature 1..20: note = chemically synthesized
  source 1..20: mol_type = other DNA
attgtacagcatgtgtgttt

SEQ ID NO: 42529 - DNA, 20 bp, synthetic construct
  misc_feature 1..20: note = chemically synthesized
  source 1..20: mol_type = other DNA
tgtttgagcaacatgaaatg

SEQ ID NO: 42530 - DNA, 20 bp, synthetic construct
  misc_feature 1..20: note = chemically synthesized
  source 1..20: mol_type = other DNA
aaatgtggacaccttgaaaa

SEQ ID NO: 42531 - DNA, 20 bp, synthetic construct
  misc_feature 1..20: note = chemically synthesized
  source 1..20: mol_type = other DNA
tggacaccttgaaaaaagaa

SEQ ID NO: 42532 - DNA, 20 bp, synthetic construct
  misc_feature 1..20: note = chemically synthesized
  source 1..20: mol_type = other DNA
ggacaccttgaaaaaagaac

SEQ ID NO: 42533 - DNA, 20 bp, synthetic construct
  misc_feature 1..20: note = chemically synthesized
  source 1..20: mol_type = other DNA
ttgaaaaaagaacaggataa

SEQ ID NO: 42534 - DNA, 20 bp, synthetic construct
  misc_feature 1..20: note = chemically synthesized
  source 1..20: mol_type = other DNA
acaggataacagcaattgtt

SEQ ID NO: 42535 - DNA, 20 bp, synthetic construct
  misc_feature 1..20: note = chemically synthesized
  source 1..20: mol_type = other DNA
caggataacagcaattgttc

SEQ ID NO: 42536 - DNA, 20 bp, synthetic construct
  misc_feature 1..20: note = chemically synthesized
  source 1..20: mol_type = other DNA
aggataacagcaattgttca

SEQ ID NO: 42537 - DNA, 20 bp, synthetic construct
  misc_feature 1..20: note = chemically synthesized
  source 1..20: mol_type = other DNA
acagcaattgttcagggaat

SEQ ID NO: 42538 - DNA, 20 bp, synthetic construct
  misc_feature 1..20: note = chemically synthesized
  source 1..20: mol_type = other DNA
agcaattgttcagggaataa

SEQ ID NO: 42539 - DNA, 20 bp, synthetic construct
  misc_feature 1..20: note = chemically synthesized
  source 1..20: mol_type = other DNA
caattgttcagggaataaga

SEQ ID NO: 42540 - DNA, 20 bp, synthetic construct
  misc_feature 1..20: note = chemically synthesized
  source 1..20: mol_type = other DNA
taaccttaaactctgactgc

SEQ ID NO: 42541 - DNA, 20 bp, synthetic construct
  misc_feature 1..20: note = chemically synthesized
  source 1..20: mol_type = other DNA
cttaaactctgactgctggt

SEQ ID NO: 42542 - DNA, 20 bp, synthetic construct
  misc_feature 1..20: note = chemically synthesized
  source 1..20: mol_type = other DNA
aactctgactgctggtgagc

SEQ ID NO: 42543 - DNA, 20 bp, synthetic construct
  misc_feature 1..20: note = chemically synthesized
  source 1..20: mol_type = other DNA
actctgactgctggtgagcc

SEQ ID NO: 42544 - DNA, 20 bp, synthetic construct
  misc_feature 1..20: note = chemically synthesized
  source 1..20: mol_type = other DNA
ctgactgctggtgagccagg

SEQ ID NO: 42545 - DNA, 20 bp, synthetic construct
  misc_feature 1..20: note = chemically synthesized
  source 1..20: mol_type = other DNA
tgctggtgagccaggcagaa

SEQ ID NO: 42546 - DNA, 20 bp, synthetic construct
  misc_feature 1..20: note = chemically synthesized
  source 1..20: mol_type = other DNA
ctggtgagccaggcagaaca

SEQ ID NO: 42547 - DNA, 20 bp, synthetic construct
  misc_feature 1..20: note = chemically synthesized
  source 1..20: mol_type = other DNA
ccatatttctcttctttcaa

SEQ ID NO: 42548 - DNA, 20 bp, synthetic construct
  misc_feature 1..20: note = chemically synthesized
  source 1..20: mol_type = other DNA
tctcttctttcaaaagcaaa

SEQ ID NO: 42549 - DNA, 20 bp, synthetic construct
  misc_feature 1..20: note = chemically synthesized
  source 1..20: mol_type = other DNA
ctcttctttcaaaagcaaat

SEQ ID NO: 42550 - DNA, 20 bp, synthetic construct
  misc_feature 1..20: note = chemically synthesized
  source 1..20: mol_type = other DNA
cttctttcaaaagcaaatgg

SEQ ID NO: 42551 - DNA, 20 bp, synthetic construct
  misc_feature 1..20: note = chemically synthesized
  source 1..20: mol_type = other DNA
tatcgctgaattctttttct

SEQ ID NO: 42552 - DNA, 20 bp, synthetic construct
  misc_feature 1..20: note = chemically synthesized
  source 1..20: mol_type = other DNA
ctgaattctttttctcagca

SEQ ID NO: 42553 - DNA, 20 bp, synthetic construct
  misc_feature 1..20: note = chemically synthesized
  source 1..20: mol_type = other DNA
tctcagcatggaacatccct

SEQ ID NO: 42554 - DNA, 20 bp, synthetic construct
  misc_feature 1..20: note = chemically synthesized
  source 1..20: mol_type = other DNA
agcatggaacatccctgaga

SEQ ID NO: 42555 - DNA, 20 bp, synthetic construct
  misc_feature 1..20: note = chemically synthesized
  source 1..20: mol_type = other DNA
catggaacatccctgagaaa

SEQ ID NO: 42556 - DNA, 20 bp, synthetic construct
  misc_feature 1..20: note = chemically synthesized
  source 1..20: mol_type = other DNA
atccctgagaaagagaatac

SEQ ID NO: 42557 - DNA, 20 bp, synthetic construct
  misc_feature 1..20: note = chemically synthesized
  source 1..20: mol_type = other DNA
ctgagaaagagaatacgagc

SEQ ID NO: 42558 - DNA, 20 bp, synthetic construct
  misc_feature 1..20: note = chemically synthesized
  source 1..20: mol_type = other DNA
tgagaaagagaatacgagcc

SEQ ID NO: 42559 - DNA, 20 bp, synthetic construct
  misc_feature 1..20: note = chemically synthesized
  source 1..20: mol_type = other DNA
agaaagagaatacgagccag

SEQ ID NO: 42560 - DNA, 20 bp, synthetic construct
  misc_feature 1..20: note = chemically synthesized
  source 1..20: mol_type = other DNA
gaaagagaatacgagccagg

SEQ ID NO: 42561 - DNA, 20 bp, synthetic construct
  misc_feature 1..20: note = chemically synthesized
  source 1..20: mol_type = other DNA
agaatacgagccaggaggta

SEQ ID NO: 42562 - DNA, 20 bp, synthetic construct
  misc_feature 1..20: note = chemically synthesized
  source 1..20: mol_type = other DNA
gaatacgagccaggaggtat

SEQ ID NO: 42563 - DNA, 20 bp, synthetic construct
  misc_feature 1..20: note = chemically synthesized
  source 1..20: mol_type = other DNA
aggaggtataggcttataaa

SEQ ID NO: 42564 - DNA, 20 bp, synthetic construct
  misc_feature 1..20: note = chemically synthesized
  source 1..20: mol_type = other DNA
gcttataaacagcccccctc

SEQ ID NO: 42565 - DNA, 20 bp, synthetic construct
  misc_feature 1..20: note = chemically synthesized
  source 1..20: mol_type = other DNA
cttataaacagcccccctcc

SEQ ID NO: 42566 - DNA, 20 bp, synthetic construct
  misc_feature 1..20: note = chemically synthesized
  source 1..20: mol_type = other DNA
ccaggtgcgcctgtctctta

SEQ ID NO: 42567 - DNA, 20 bp, synthetic construct
  misc_feature 1..20: note = chemically synthesized
  source 1..20: mol_type = other DNA
tgcgcctgtctcttatggtc

SEQ ID NO: 42568 - DNA, 20 bp, synthetic construct
  misc_feature 1..20: note = chemically synthesized
  source 1..20: mol_type = other DNA
gtctcttatggtcgagactg

SEQ ID NO: 42569 - DNA, 20 bp, synthetic construct
  misc_feature 1..20: note = chemically synthesized
  source 1..20: mol_type = other DNA
tctcttatggtcgagactgc

SEQ ID NO: 42570 - DNA, 20 bp, synthetic construct
  misc_feature 1..20: note = chemically synthesized
  source 1..20: mol_type = other DNA
ctcttatggtcgagactgca

SEQ ID NO: 42571 - DNA, 20 bp, synthetic construct
  misc_feature 1..20: note = chemically synthesized
  source 1..20: mol_type = other DNA
tcttatggtcgagactgcag

SEQ ID NO: 42572 - DNA, 20 bp, synthetic construct
  misc_feature 1..20: note = chemically synthesized
  source 1..20: mol_type = other DNA
tcgagactgcaggggtgaaa

SEQ ID NO: 42573 - DNA, 20 bp, synthetic construct
  misc_feature 1..20: note = chemically synthesized
  source 1..20: mol_type = other DNA
tgcaggggtgaaatagaccc

SEQ ID NO: 42574 - DNA, 20 bp, synthetic construct
  misc_feature 1..20: note = chemically synthesized
  source 1..20: mol_type = other DNA
aaatagaccccagtctccca

SEQ ID NO: 42575 - DNA, 20 bp, synthetic construct
  misc_feature 1..20: note = chemically synthesized
  source 1..20: mol_type = other DNA
ccagtctcccacagcgctcc

SEQ ID NO: 42576 - DNA, 20 bp, synthetic construct
  misc_feature 1..20: note = chemically synthesized
  source 1..20: mol_type = other DNA
cagtctcccacagcgctccc

SEQ ID NO: 42577 - DNA, 20 bp, synthetic construct
  misc_feature 1..20: note = chemically synthesized
  source 1..20: mol_type = other DNA
cacagcgctcccaggcttat

SEQ ID NO: 42578 - DNA, 20 bp, synthetic construct
  misc_feature 1..20: note = chemically synthesized
  source 1..20: mol_type = other DNA
acagcgctcccaggcttatt

SEQ ID NO: 42579 - DNA, 20 bp, synthetic construct
  misc_feature 1..20: note = chemically synthesized
  source 1..20: mol_type = other DNA
gcgctcccaggcttattagg

SEQ ID NO: 42580 - DNA, 20 bp, synthetic construct
  misc_feature 1..20: note = chemically synthesized
  source 1..20: mol_type = other DNA
gctcccaggcttattaggaa

SEQ ID NO: 42581 - DNA, 20 bp, synthetic construct
  misc_feature 1..20: note = chemically synthesized
  source 1..20: mol_type = other DNA
ctcccaggcttattaggaag

SEQ ID NO: 42582 - DNA, 20 bp, synthetic construct
  misc_feature 1..20: note = chemically synthesized
  source 1..20: mol_type = other DNA
aattcccgcctaataaattt

SEQ ID NO: 42583 - DNA, 20 bp, synthetic construct
  misc_feature 1..20: note = chemically synthesized
  source 1..20: mol_type = other DNA
cccgcctaataaattttggt

SEQ ID NO: 42584 - DNA, 20 bp, synthetic construct
  misc_feature 1..20: note = chemically synthesized
  source 1..20: mol_type = other DNA
ctaataaattttggtcagac

SEQ ID NO: 42585 - DNA, 20 bp, synthetic construct
  misc_feature 1..20: note = chemically synthesized
  source 1..20: mol_type = other DNA
taaaaaccctgtctcctgat

SEQ ID NO: 42586 - DNA, 20 bp, synthetic construct
  misc_feature 1..20: note = chemically synthesized
  source 1..20: mol_type = other DNA
taagatgttatcaatgacaa

SEQ ID NO: 42587 - DNA, 20 bp, synthetic construct
  misc_feature 1..20: note = chemically synthesized
  source 1..20: mol_type = other DNA
aatggtgcccgaaacttcat

SEQ ID NO: 42588 - DNA, 20 bp, synthetic construct
  misc_feature 1..20: note = chemically synthesized
  source 1..20: mol_type = other DNA
tagcaattttaatttcgcct

SEQ ID NO: 42589 - DNA, 20 bp, synthetic construct
  misc_feature 1..20: note = chemically synthesized
  source 1..20: mol_type = other DNA
ttaatttcgcctcggtcctg

SEQ ID NO: 42590 - DNA, 20 bp, synthetic construct
  misc_feature 1..20: note = chemically synthesized
  source 1..20: mol_type = other DNA
tgatattctattaccttgta

SEQ ID NO: 42591 - DNA, 20 bp, synthetic construct
  misc_feature 1..20: note = chemically synthesized
  source 1..20: mol_type = other DNA
aatccctaatacaaacttgc

SEQ ID NO: 42592 - DNA, 20 bp, synthetic construct
  misc_feature 1..20: note = chemically synthesized
  source 1..20: mol_type = other DNA
tacaaacttgctggtttttg

SEQ ID NO: 42593 - DNA, 20 bp, synthetic construct
  misc_feature 1..20: note = chemically synthesized
  source 1..20: mol_type = other DNA
ttgctggtttttgtggcttg

SEQ ID NO: 42594 - DNA, 20 bp, synthetic construct
  misc_feature 1..20: note = chemically synthesized
  source 1..20: mol_type = other DNA
tgctggtttttgtggcttgt

SEQ ID NO: 42595 - DNA, 20 bp, synthetic construct
  misc_feature 1..20: note = chemically synthesized
  source 1..20: mol_type = other DNA
gctggtttttgtggcttgtg

SEQ ID NO: 42596 - DNA, 20 bp, synthetic construct
  misc_feature 1..20: note = chemically synthesized
  source 1..20: mol_type = other DNA
ttgtggcttgtggggcatca

SEQ ID NO: 42597 - DNA, 20 bp, synthetic construct
  misc_feature 1..20: note = chemically synthesized
  source 1..20: mol_type = other DNA
ccgaaatgtgatgcctcccc

SEQ ID NO: 42598 - DNA, 20 bp, synthetic construct
  misc_feature 1..20: note = chemically synthesized
  source 1..20: mol_type = other DNA
tgatgcctcccccggatgcc

SEQ ID NO: 42599 - DNA, 20 bp, synthetic construct
  misc_feature 1..20: note = chemically synthesized
  source 1..20: mol_type = other DNA
actctgtccctttatttcta

SEQ ID NO: 42600 - DNA, 20 bp, synthetic construct
  misc_feature 1..20: note = chemically synthesized
  source 1..20: mol_type = other DNA
tgtccctttatttctaaagt

SEQ ID NO: 42601 - DNA, 20 bp, synthetic construct
  misc_feature 1..20: note = chemically synthesized
  source 1..20: mol_type = other DNA
ttctaaagttggccgacgct

SEQ ID NO: 42602 - DNA, 20 bp, synthetic construct
  misc_feature 1..20: note = chemically synthesized
  source 1..20: mol_type = other DNA
tctaaagttggccgacgctt

SEQ ID NO: 42603 - DNA, 20 bp, synthetic construct
  misc_feature 1..20: note = chemically synthesized
  source 1..20: mol_type = other DNA
ctaaagttggccgacgctta

SEQ ID NO: 42604 - DNA, 20 bp, synthetic construct
  misc_feature 1..20: note = chemically synthesized
  source 1..20: mol_type = other DNA
tggccgacgcttagggaaaa

SEQ ID NO: 42605 - DNA, 20 bp, synthetic construct
  misc_feature 1..20: note = chemically synthesized
  source 1..20: mol_type = other DNA
gacgcttagggaaaatagaa

SEQ ID NO: 42606 - DNA, 20 bp, synthetic construct
  misc_feature 1..20: note = chemically synthesized
  source 1..20: mol_type = other DNA
aaaagaacctacgtgaatat

SEQ ID NO: 42607 - DNA, 20 bp, synthetic construct
  misc_feature 1..20: note = chemically synthesized
  source 1..20: mol_type = other DNA
aaagaacctacgtgaatatt

SEQ ID NO: 42608 - DNA, 20 bp, synthetic construct
  misc_feature 1..20: note = chemically synthesized
  source 1..20: mol_type = other DNA
aagaacctacgtgaatattg

SEQ ID NO: 42609 - DNA, 20 bp, synthetic construct
  misc_feature 1..20: note = chemically synthesized
  source 1..20: mol_type = other DNA
aacctacgtgaatattgggg

SEQ ID NO: 42610 - DNA, 20 bp, synthetic construct
  misc_feature 1..20: note = chemically synthesized
  source 1..20: mol_type = other DNA
acctacgtgaatattggggc

SEQ ID NO: 42611 - DNA, 20 bp, synthetic construct
  misc_feature 1..20: note = chemically synthesized
  source 1..20: mol_type = other DNA
ggggcaggttccctgatact

SEQ ID NO: 42612 - DNA, 20 bp, synthetic construct
  misc_feature 1..20: note = chemically synthesized
  source 1..20: mol_type = other DNA
gcaggttccctgatactcag

SEQ ID NO: 42613 - DNA, 20 bp, synthetic construct
  misc_feature 1..20: note = chemically synthesized
  source 1..20: mol_type = other DNA
ttccctgatactcagtggcg

SEQ ID NO: 42614 - DNA, 20 bp, synthetic construct
  misc_feature 1..20: note = chemically synthesized
  source 1..20: mol_type = other DNA
ccctgatactcagtggcgtg

SEQ ID NO: 42615 - DNA, 20 bp, synthetic construct
  misc_feature 1..20: note = chemically synthesized
  source 1..20: mol_type = other DNA
cagtggcgtggagatgtaac

SEQ ID NO: 42616 - DNA, 20 bp, synthetic construct
  misc_feature 1..20: note = chemically synthesized
  source 1..20: mol_type = other DNA
gcgtggagatgtaacaagcc

SEQ ID NO: 42617 - DNA, 20 bp, synthetic construct
  misc_feature 1..20: note = chemically synthesized
  source 1..20: mol_type = other DNA
tgtaacaagcctggatgtgt

SEQ ID NO: 42618 - DNA, 20 bp, synthetic construct
  misc_feature 1..20: note = chemically synthesized
  source 1..20: mol_type = other DNA
ctggatgtgtgagtgatgat

SEQ ID NO: 42619 - DNA, 20 bp, synthetic construct
  misc_feature 1..20: note = chemically synthesized
  source 1..20: mol_type = other DNA
tggatgtgtgagtgatgatc

SEQ ID NO: 42620 - DNA, 20 bp, synthetic construct
  misc_feature 1..20: note = chemically synthesized
  source 1..20: mol_type = other DNA
agtgatgatcaggccaacaa

SEQ ID NO: 42621 - DNA, 20 bp, synthetic construct
  misc_feature 1..20: note = chemically synthesized
  source 1..20: mol_type = other DNA
ggccaacaacagtctgtatt

SEQ ID NO: 42622 - DNA, 20 bp, synthetic construct
  misc_feature 1..20: note = chemically synthesized
  source 1..20: mol_type = other DNA
caacaacagtctgtatttgg

SEQ ID NO: 42623 - DNA, 20 bp, synthetic construct
  misc_feature 1..20: note = chemically synthesized
  source 1..20: mol_type = other DNA
tctgtatttggaagaaatat

SEQ ID NO: 42624 - DNA, 20 bp, synthetic construct
  misc_feature 1..20: note = chemically synthesized
  source 1..20: mol_type = other DNA
cagatgtgaatgttatgacc

SEQ ID NO: 42625 - DNA, 20 bp, synthetic construct
  misc_feature 1..20: note = chemically synthesized
  source 1..20: mol_type = other DNA
agatgtgaatgttatgacct

SEQ ID NO: 42626 - DNA, 20 bp, synthetic construct
  misc_feature 1..20: note = chemically synthesized
  source 1..20: mol_type = other DNA
tgtgaatgttatgacctagg

SEQ ID NO: 42627 - DNA, 20 bp, synthetic construct
  misc_feature 1..20: note = chemically synthesized
  source 1..20: mol_type = other DNA
tgttatgacctaggaagcaa

SEQ ID NO: 42628 - DNA, 20 bp, synthetic construct
  misc_feature 1..20: note = chemically synthesized
  source 1..20: mol_type = other DNA
tatgacctaggaagcaatgg

SEQ ID NO: 42629 - DNA, 20 bp, synthetic construct
  misc_feature 1..20: note = chemically synthesized
  source 1..20: mol_type = other DNA
aaaattattctttttgcctt

SEQ ID NO: 42630 - DNA, 20 bp, synthetic construct
  misc_feature 1..20: note = chemically synthesized
  source 1..20: mol_type = other DNA
ttgtcaacacaaaaaatact

SEQ ID NO: 42631 - DNA, 20 bp, synthetic construct
  misc_feature 1..20: note = chemically synthesized
  source 1..20: mol_type = other DNA
gttgtatactgatttgttaa

SEQ ID NO: 42632 - DNA, 20 bp, synthetic construct
  misc_feature 1..20: note = chemically synthesized
  source 1..20: mol_type = other DNA
gtatactgatttgttaaaag

SEQ ID NO: 42633 - DNA, 20 bp, synthetic construct
  misc_feature 1..20: note = chemically synthesized
  source 1..20: mol_type = other DNA
tactgatttgttaaaagcag

SEQ ID NO: 42634 - DNA, 20 bp, synthetic construct
  misc_feature 1..20: note = chemically synthesized
  source 1..20: mol_type = other DNA
ttgttaaaagcagcagcatg

SEQ ID NO: 42635 - DNA, 20 bp, synthetic construct
  misc_feature 1..20: note = chemically synthesized
  source 1..20: mol_type = other DNA
taaaagcagcagcatgcagt

SEQ ID NO: 42636 - DNA, 20 bp, synthetic construct
  misc_feature 1..20: note = chemically synthesized
  source 1..20: mol_type = other DNA
aaaagcagcagcatgcagtt

SEQ ID NO: 42637 - DNA, 20 bp, synthetic construct
  misc_feature 1..20: note = chemically synthesized
  source 1..20: mol_type = other DNA
tgcagttaggatgatatctt

SEQ ID NO: 42638 - DNA, 20 bp, synthetic construct
  misc_feature 1..20: note = chemically synthesized
  source 1..20: mol_type = other DNA
gcagttaggatgatatcttt

SEQ ID NO: 42639 - DNA, 20 bp, synthetic construct
  misc_feature 1..20: note = chemically synthesized
  source 1..20: mol_type = other DNA
cagttaggatgatatctttg

SEQ ID NO: 42640 - DNA, 20 bp, synthetic construct
  misc_feature 1..20: note = chemically synthesized
  source 1..20: mol_type = other DNA
ggatgatatctttggggaaa

SEQ ID NO: 42641 - DNA, 20 bp, synthetic construct
  misc_feature 1..20: note = chemically synthesized
  source 1..20: mol_type = other DNA
tgatatctttggggaaatgg

SEQ ID NO: 42642 - DNA, 20 bp, synthetic construct
  misc_feature 1..20: note = chemically synthesized
  source 1..20: mol_type = other DNA
atatctttggggaaatggca

SEQ ID NO: 42643 - DNA, 20 bp, synthetic construct
  misc_feature 1..20: note = chemically synthesized
  source 1..20: mol_type = other DNA
aaccccatgctcaccatcaa

SEQ ID NO: 42644 - DNA, 20 bp, synthetic construct
  misc_feature 1..20: note = chemically synthesized
  source 1..20: mol_type = other DNA
accccatgctcaccatcaac

SEQ ID NO: 42645 - DNA, 20 bp, synthetic construct
  misc_feature 1..20: note = chemically synthesized
  source 1..20: mol_type = other DNA
ccatcaacgggattgaattt

SEQ ID NO: 42646 - DNA, 20 bp, synthetic construct
  misc_feature 1..20: note = chemically synthesized
  source 1..20: mol_type = other DNA
gggattgaatttgagctgct

SEQ ID NO: 42647 - DNA, 20 bp, synthetic construct
  misc_feature 1..20: note = chemically synthesized
  source 1..20: mol_type = other DNA
gaatttgagctgctgagaat

SEQ ID NO: 42648 - DNA, 20 bp, synthetic construct
  misc_feature 1..20: note = chemically synthesized
  source 1..20: mol_type = other DNA
ttatcttcaattctgtgaaa

SEQ ID NO: 42649 - DNA, 20 bp, synthetic construct
  misc_feature 1..20: note = chemically synthesized
  source 1..20: mol_type = other DNA
aattctgtgaaatggaattt

SEQ ID NO: 42650 - DNA, 20 bp, synthetic construct
  misc_feature 1..20: note = chemically synthesized
  source 1..20: mol_type = other DNA
tgtgaaatggaattttagac

SEQ ID NO: 42651 - DNA, 20 bp, synthetic construct
  misc_feature 1..20: note = chemically synthesized
  source 1..20: mol_type = other DNA
tttagaccagcctgtgactg

SEQ ID NO: 42652 - DNA, 20 bp, synthetic construct
  misc_feature 1..20: note = chemically synthesized
  source 1..20: mol_type = other DNA
cagcctgtgactgaagccac

SEQ ID NO: 42653 - DNA, 20 bp, synthetic construct
  misc_feature 1..20: note = chemically synthesized
  source 1..20: mol_type = other DNA
agcctgtgactgaagccact

SEQ ID NO: 42654 - DNA, 20 bp, synthetic construct
  misc_feature 1..20: note = chemically synthesized
  source 1..20: mol_type = other DNA
actgaagccactgggcatta

SEQ ID NO: 42655 - DNA, 20 bp, synthetic construct
  misc_feature 1..20: note = chemically synthesized
  source 1..20: mol_type = other DNA
gccgcattgtttctctctgc

SEQ ID NO: 42656 - DNA, 20 bp, synthetic construct
  misc_feature 1..20: note = chemically synthesized
  source 1..20: mol_type = other DNA
cgcattgtttctctctgcaa

SEQ ID NO: 42657 - DNA, 20 bp, synthetic construct
  misc_feature 1..20: note = chemically synthesized
  source 1..20: mol_type = other DNA
cattgtttctctctgcaaga

SEQ ID NO: 42658 - DNA, 20 bp, synthetic construct
  misc_feature 1..20: note = chemically synthesized
  source 1..20: mol_type = other DNA
attgtttctctctgcaagag

SEQ ID NO: 42659 - DNA, 20 bp, synthetic construct
  misc_feature 1..20: note = chemically synthesized
  source 1..20: mol_type = other DNA
gtttctctctgcaagagagg

SEQ ID NO: 42660 - DNA, 20 bp, synthetic construct
  misc_feature 1..20: note = chemically synthesized
  source 1..20: mol_type = other DNA
tttctctctgcaagagagga

SEQ ID NO: 42661 - DNA, 20 bp, synthetic construct
  misc_feature 1..20: note = chemically synthesized
  source 1..20: mol_type = other DNA
ctctctgcaagagaggaagg

SEQ ID NO: 42662 - DNA, 20 bp, synthetic construct
  misc_feature 1..20: note = chemically synthesized
  source 1..20: mol_type = other DNA
tctctgcaagagaggaagga

SEQ ID NO: 42663 - DNA, 20 bp, synthetic construct
  misc_feature 1..20: note = chemically synthesized
  source 1..20: mol_type = other DNA
tgcaagagaggaaggaaggc

SEQ ID NO: 42664 - DNA, 20 bp, synthetic construct
  misc_feature 1..20: note = chemically synthesized
  source 1..20: mol_type = other DNA
caagagaggaaggaaggctg

SEQ ID NO: 42665 - DNA, 20 bp, synthetic construct
  misc_feature 1..20: note = chemically synthesized
  source 1..20: mol_type = other DNA
gaggaaggaaggctggagta

SEQ ID NO: 42666 - DNA, 20 bp, synthetic construct
  misc_feature 1..20: note = chemically synthesized
  source 1..20: mol_type = other DNA
aggaaggctggagtacagct

SEQ ID NO: 42667 - DNA, 20 bp, synthetic construct
  misc_feature 1..20: note = chemically synthesized
  source 1..20: mol_type = other DNA
tggagtacagctgagctttc

SEQ ID NO: 42668 - DNA, 20 bp, synthetic construct
  misc_feature 1..20: note = chemically synthesized
  source 1..20: mol_type = other DNA
agtacagctgagctttctgg

SEQ ID NO: 42669 - DNA, 20 bp, synthetic construct
  misc_feature 1..20: note = chemically synthesized
  source 1..20: mol_type = other DNA
gtacagctgagctttctggc

SEQ ID NO: 42670 - DNA, 20 bp, synthetic construct
  misc_feature 1..20: note = chemically synthesized
  source 1..20: mol_type = other DNA
ctgagctttctggcaggcac

SEQ ID NO: 42671 - DNA, 20 bp, synthetic construct
  misc_feature 1..20: note = chemically synthesized
  source 1..20: mol_type = other DNA
agctttctggcaggcactgg

SEQ ID NO: 42672 - DNA, 20 bp, synthetic construct
  misc_feature 1..20: note = chemically synthesized
  source 1..20: mol_type = other DNA
ctttctggcaggcactggtg

SEQ ID NO: 42673 - DNA, 20 bp, synthetic construct
  misc_feature 1..20: note = chemically synthesized
  source 1..20: mol_type = other DNA
ccttccccattctttgtaac

SEQ ID NO: 42674 - DNA, 20 bp, synthetic construct
  misc_feature 1..20: note = chemically synthesized
  source 1..20: mol_type = other DNA
tccccattctttgtaactgg

SEQ ID NO: 42675 - DNA, 20 bp, synthetic construct
  misc_feature 1..20: note = chemically synthesized
  source 1..20: mol_type = other DNA
ttctttgtaactggtggcct

SEQ ID NO: 42676 - DNA, 20 bp, synthetic construct
  misc_feature 1..20: note = chemically synthesized
  source 1..20: mol_type = other DNA
tttgtaactggtggccttag

SEQ ID NO: 42677 - DNA, 20 bp, synthetic construct
  misc_feature 1..20: note = chemically synthesized
  source 1..20: mol_type = other DNA
tgtaactggtggccttagaa

SEQ ID NO: 42678 - DNA, 20 bp, synthetic construct
  misc_feature 1..20: note = chemically synthesized
  source 1..20: mol_type = other DNA
gtaactggtggccttagaag

SEQ ID NO: 42679 - DNA, 20 bp, synthetic construct
  misc_feature 1..20: note = chemically synthesized
  source 1..20: mol_type = other DNA
taactggtggccttagaaga

SEQ ID NO: 42680 - DNA, 20 bp, synthetic construct
  misc_feature 1..20: note = chemically synthesized
  source 1..20: mol_type = other DNA
ggtggccttagaagagggtt

SEQ ID NO: 42681 - DNA, 20 bp, synthetic construct
  misc_feature 1..20: note = chemically synthesized
  source 1..20: mol_type = other DNA
gtggccttagaagagggttc

SEQ ID NO: 42682 - DNA, 20 bp, synthetic construct
  misc_feature 1..20: note = chemically synthesized
  source 1..20: mol_type = other DNA
tggccttagaagagggttca

SEQ ID NO: 42683 - DNA, 20 bp, synthetic construct
  misc_feature 1..20: note = chemically synthesized
  source 1..20: mol_type = other DNA
agggttcagggttatgtgtt

SEQ ID NO: 42684 - DNA, 20 bp, synthetic construct
  misc_feature 1..20: note = chemically synthesized
  source 1..20: mol_type = other DNA
gggttatgtgtttggaacac

SEQ ID NO: 42685 - DNA, 20 bp, synthetic construct
  misc_feature 1..20: note = chemically synthesized
  source 1..20: mol_type = other DNA
tatgtgtttggaacacgagt

SEQ ID NO: 42686 - DNA, 20 bp, synthetic construct
  misc_feature 1..20: note = chemically synthesized
  source 1..20: mol_type = other DNA
ggaacacgagttagtataaa

SEQ ID NO: 42687 - DNA, 20 bp, synthetic construct
  misc_feature 1..20: note = chemically synthesized
  source 1..20: mol_type = other DNA
agttagtataaatggttctg

SEQ ID NO: 42688 - DNA, 20 bp, synthetic construct
  misc_feature 1..20: note = chemically synthesized
  source 1..20: mol_type = other DNA
tggttctgaagcacttgatt

SEQ ID NO: 42689 - DNA, 20 bp, synthetic construct
  misc_feature 1..20: note = chemically synthesized
  source 1..20: mol_type = other DNA
tcagactgtgctttaaaaaa

SEQ ID NO: 42690 - DNA, 20 bp, synthetic construct
  misc_feature 1..20: note = chemically synthesized
  source 1..20: mol_type = other DNA
cagactgtgctttaaaaaat

SEQ ID NO: 42691 - DNA, 20 bp, synthetic construct
  misc_feature 1..20: note = chemically synthesized
  source 1..20: mol_type = other DNA
ctgtgctttaaaaaatagga

SEQ ID NO: 42692 - DNA, 20 bp, synthetic construct
  misc_feature 1..20: note = chemically synthesized
  source 1..20: mol_type = other DNA
gctttaaaaaataggaaaga

SEQ ID NO: 42693 - DNA, 20 bp, synthetic construct
  misc_feature 1..20: note = chemically synthesized
  source 1..20: mol_type = other DNA
ttaaaaaataggaaagaaag

SEQ ID NO: 42694 - DNA, 20 bp, synthetic construct
  misc_feature 1..20: note = chemically synthesized
  source 1..20: mol_type = other DNA
aaaataggaaagaaagtaga

SEQ ID NO: 42695 - DNA, 20 bp, synthetic construct
  misc_feature 1..20: note = chemically synthesized
  source 1..20: mol_type = other DNA
aggaaagaaagtagaaagaa

SEQ ID NO: 42696 - DNA, 20 bp, synthetic construct
  misc_feature 1..20: note = chemically synthesized
  source 1..20: mol_type = other DNA
aaagtagaaagaacagctga

SEQ ID NO: 42697 - DNA, 20 bp, synthetic construct
  misc_feature 1..20: note = chemically synthesized
  source 1..20: mol_type = other DNA
agaaagaacagctgatggtt

SEQ ID NO: 42698 - DNA, 20 bp, synthetic construct
  misc_feature 1..20: note = chemically synthesized
  source 1..20: mol_type = other DNA
aagaacagctgatggtttgg

SEQ ID NO: 42699 - DNA, 20 bp, synthetic construct
  misc_feature 1..20: note = chemically synthesized
  source 1..20: mol_type = other DNA
agaacagctgatggtttgga

SEQ ID NO: 42700 - DNA, 20 bp, synthetic construct
  misc_feature 1..20: note = chemically synthesized
  source 1..20: mol_type = other DNA
gaacagctgatggtttggaa

SEQ ID NO: 42701 - DNA, 20 bp, synthetic construct
  misc_feature 1..20: note = chemically synthesized
  source 1..20: mol_type = other DNA
acagctgatggtttggaagg

SEQ ID NO: 42702 - DNA, 20 bp, synthetic construct
  misc_feature 1..20: note = chemically synthesized
  source 1..20: mol_type = other DNA
tggtttggaagggagccacc

SEQ ID NO: 42703 - DNA, 20 bp, synthetic construct
  misc_feature 1..20: note = chemically synthesized
  source 1..20: mol_type = other DNA
gaagggagccaccaagcacc

SEQ ID NO: 42704 - DNA, 20 bp, synthetic construct
  misc_feature 1..20: note = chemically synthesized
  source 1..20: mol_type = other DNA
agggagccaccaagcaccaa

SEQ ID NO: 42705 - DNA, 20 bp, synthetic construct
  misc_feature 1..20: note = chemically synthesized
  source 1..20: mol_type = other DNA
gggagccaccaagcaccaag

SEQ ID NO: 42706 - DNA, 20 bp, synthetic construct
  misc_feature 1..20: note = chemically synthesized
  source 1..20: mol_type = other DNA
caccaagcaccaagaggtgt

SEQ ID NO: 42707 - DNA, 20 bp, synthetic construct
  misc_feature 1..20: note = chemically synthesized
  source 1..20: mol_type = other DNA
ctgaatccgtttctcaatct

SEQ ID NO: 42708 - DNA, 20 bp, synthetic construct
  misc_feature 1..20: note = chemically synthesized
  source 1..20: mol_type = other DNA
ccgtttctcaatcttagctg

SEQ ID NO: 42709 - DNA, 20 bp, synthetic construct
  misc_feature 1..20: note = chemically synthesized
  source 1..20: mol_type = other DNA
cgtttctcaatcttagctgc

SEQ ID NO: 42710 - DNA, 20 bp, synthetic construct
  misc_feature 1..20: note = chemically synthesized
  source 1..20: mol_type = other DNA
gtttctcaatcttagctgca

SEQ ID NO: 42711 - DNA, 20 bp, synthetic construct
  misc_feature 1..20: note = chemically synthesized
  source 1..20: mol_type = other DNA
caatcttagctgcagggcat

SEQ ID NO: 42712 - DNA, 20 bp, synthetic construct
  misc_feature 1..20: note = chemically synthesized
  source 1..20: mol_type = other DNA
tagctgcagggcattggcta

SEQ ID NO: 42713 - DNA, 20 bp, synthetic construct
  misc_feature 1..20: note = chemically synthesized
  source 1..20: mol_type = other DNA
gctgcagggcattggctaaa

SEQ ID NO: 42714 - DNA, 20 bp, synthetic construct
  misc_feature 1..20: note = chemically synthesized
  source 1..20: mol_type = other DNA
ctgcagggcattggctaaag

SEQ ID NO: 42715 - DNA, 20 bp, synthetic construct
  misc_feature 1..20: note = chemically synthesized
  source 1..20: mol_type = other DNA
cagggcattggctaaagagg

SEQ ID NO: 42716 - DNA, 20 bp, synthetic construct
  misc_feature 1..20: note = chemically synthesized
  source 1..20: mol_type = other DNA
agggcattggctaaagagga

SEQ ID NO: 42717 - DNA, 20 bp, synthetic construct
  misc_feature 1..20: note = chemically synthesized
  source 1..20: mol_type = other DNA
agaggaaggtgaaaactgct

SEQ ID NO: 42718 - DNA, 20 bp, synthetic construct
  misc_feature 1..20: note = chemically synthesized
  source 1..20: mol_type = other DNA
tgagtcactatcaaatcaat

SEQ ID NO: 42719 - DNA, 20 bp, synthetic construct
  misc_feature 1..20: note = chemically synthesized
  source 1..20: mol_type = other DNA
attggtttttctaatcccct

SEQ ID NO: 42720 - DNA, 20 bp, synthetic construct
  misc_feature 1..20: note = chemically synthesized
  source 1..20: mol_type = other DNA
tggtttttctaatcccctga

SEQ ID NO: 42721 - DNA, 20 bp, synthetic construct
  misc_feature 1..20: note = chemically synthesized
  source 1..20: mol_type = other DNA
ttctaatcccctgagagaaa

SEQ ID NO: 42722 - DNA, 20 bp, synthetic construct
  misc_feature 1..20: note = chemically synthesized
  source 1..20: mol_type = other DNA
atcccctgagagaaaaagta

SEQ ID NO: 42723 - DNA, 20 bp, synthetic construct
  misc_feature 1..20: note = chemically synthesized
  source 1..20: mol_type = other DNA
cccctgagagaaaaagtaca

SEQ ID NO: 42724 - DNA, 20 bp, synthetic construct
  misc_feature 1..20: note = chemically synthesized
  source 1..20: mol_type = other DNA
aaaaagtacagagtttattg

SEQ ID NO: 42725 - DNA, 20 bp, synthetic construct
  misc_feature 1..20: note = chemically synthesized
  source 1..20: mol_type = other DNA
ttaaaatgccatgcccctca

SEQ ID NO: 42726 - DNA, 20 bp, synthetic construct
  misc_feature 1..20: note = chemically synthesized
  source 1..20: mol_type = other DNA
tgccatgcccctcacggcca

SEQ ID NO: 42727 - DNA, 20 bp, synthetic construct
  misc_feature 1..20: note = chemically synthesized
  source 1..20: mol_type = other DNA
gccatgcccctcacggccaa

SEQ ID NO: 42728 - DNA, 20 bp, synthetic construct
  misc_feature 1..20: note = chemically synthesized
  source 1..20: mol_type = other DNA
cggccaaaggcatctgaatt

SEQ ID NO: 42729 - DNA, 20 bp, synthetic construct
  misc_feature 1..20: note = chemically synthesized
  source 1..20: mol_type = other DNA
ggccaaaggcatctgaatta

SEQ ID NO: 42730 - DNA, 20 bp, synthetic construct
  misc_feature 1..20: note = chemically synthesized
  source 1..20: mol_type = other DNA
caaaggcatctgaattaagg

SEQ ID NO: 42731 - DNA, 20 bp, synthetic construct
  misc_feature 1..20: note = chemically synthesized
  source 1..20: mol_type = other DNA
aggcatctgaattaaggaag

SEQ ID NO: 42732 - DNA, 20 bp, synthetic construct
  misc_feature 1..20: note = chemically synthesized
  source 1..20: mol_type = other DNA
aattaaggaagcagtattca

SEQ ID NO: 42733 - DNA, 20 bp, synthetic construct
  misc_feature 1..20: note = chemically synthesized
  source 1..20: mol_type = other DNA
gtattcacagctgctttctc

SEQ ID NO: 42734 - DNA, 20 bp, synthetic construct
  misc_feature 1..20: note = chemically synthesized
  source 1..20: mol_type = other DNA
agctgctttctccagacatt

SEQ ID NO: 42735 - DNA, 20 bp, synthetic construct
  misc_feature 1..20: note = chemically synthesized
  source 1..20: mol_type = other DNA
tttctccagacattgagctc

SEQ ID NO: 42736 - DNA, 20 bp, synthetic construct
  misc_feature 1..20: note = chemically synthesized
  source 1..20: mol_type = other DNA
ttctccagacattgagctca

SEQ ID NO: 42737 - DNA, 20 bp, synthetic construct
  misc_feature 1..20: note = chemically synthesized
  source 1..20: mol_type = other DNA
ccagacattgagctcaagga

SEQ ID NO: 42738 - DNA, 20 bp, synthetic construct
  misc_feature 1..20: note = chemically synthesized
  source 1..20: mol_type = other DNA
aatctgaactctgcttttat

SEQ ID NO: 42739 - DNA, 20 bp, synthetic construct
  misc_feature 1..20: note = chemically synthesized
  source 1..20: mol_type = other DNA
tttatcagctgcgaaaatcc

SEQ ID NO: 42740 - DNA, 20 bp, synthetic construct
  misc_feature 1..20: note = chemically synthesized
  source 1..20: mol_type = other DNA
aaaatccaagcattcatttc

SEQ ID NO: 42741 - DNA, 20 bp, synthetic construct
  misc_feature 1..20: note = chemically synthesized
  source 1..20: mol_type = other DNA
tccaagcattcatttccagc

SEQ ID NO: 42742 - DNA, 20 bp, synthetic construct
  misc_feature 1..20: note = chemically synthesized
  source 1..20: mol_type = other DNA
gcattcatttccagctggtt

SEQ ID NO: 42743 - DNA, 20 bp, synthetic construct
  misc_feature 1..20: note = chemically synthesized
  source 1..20: mol_type = other DNA
ctggttcagtgcctatgtaa

SEQ ID NO: 42744 - DNA, 20 bp, synthetic construct
  misc_feature 1..20: note = chemically synthesized
  source 1..20: mol_type = other DNA
agtatactgtgtacaaaaat

SEQ ID NO: 42745 - DNA, 20 bp, synthetic construct
  misc_feature 1..20: note = chemically synthesized
  source 1..20: mol_type = other DNA
tgtacaaaaataagattaaa

SEQ ID NO: 42746 - DNA, 20 bp, synthetic construct
  misc_feature 1..20: note = chemically synthesized
  source 1..20: mol_type = other DNA
aagattaaaaagctaacatt

SEQ ID NO: 42747 - DNA, 20 bp, synthetic construct
  misc_feature 1..20: note = chemically synthesized
  source 1..20: mol_type = other DNA
ttaaaaagctaacattaagc

SEQ ID NO: 42748 - DNA, 20 bp, synthetic construct
  misc_feature 1..20: note = chemically synthesized
  source 1..20: mol_type = other DNA
gtgtgtttgtatgttttcta

SEQ ID NO: 42749 - DNA, 20 bp, synthetic construct
  misc_feature 1..20: note = chemically synthesized
  source 1..20: mol_type = other DNA
tttgtatgttttctacagtt

SEQ ID NO: 42750 - DNA, 20 bp, synthetic construct
  misc_feature 1..20: note = chemically synthesized
  source 1..20: mol_type = other DNA
ttctgaataatttgatccga

SEQ ID NO: 42751 - DNA, 20 bp, synthetic construct
  misc_feature 1..20: note = chemically synthesized
  source 1..20: mol_type = other DNA
atatgatttcatttcttttc

SEQ ID NO: 42752 - DNA, 20 bp, synthetic construct
  misc_feature 1..20: note = chemically synthesized
  source 1..20: mol_type = other DNA
atgatttcatttcttttcga

SEQ ID NO: 42753 - DNA, 20 bp, synthetic construct
  misc_feature 1..20: note = chemically synthesized
  source 1..20: mol_type = other DNA
tatgcatactttctaaatgc

SEQ ID NO: 42754 - DNA, 20 bp, synthetic construct
  misc_feature 1..20: note = chemically synthesized
  source 1..20: mol_type = other DNA
aaatgcaagaataaattcct

SEQ ID NO: 42755 - DNA, 20 bp, synthetic construct
  misc_feature 1..20: note = chemically synthesized
  source 1..20: mol_type = other DNA
tcctgagctccatgtgactt

SEQ ID NO: 42756 - DNA, 20 bp, synthetic construct
  misc_feature 1..20: note = chemically synthesized
  source 1..20: mol_type = other DNA
ccatgtgacttcagtaccat

SEQ ID NO: 42757 - DNA, 20 bp, synthetic construct
  misc_feature 1..20: note = chemically synthesized
  source 1..20: mol_type = other DNA
cttcagtaccatcagctctt

SEQ ID NO: 42758 - DNA, 20 bp, synthetic construct
  misc_feature 1..20: note = chemically synthesized
  source 1..20: mol_type = other DNA
cagtaccatcagctctttgg

SEQ ID NO: 42759 - DNA, 20 bp, synthetic construct
  misc_feature 1..20: note = chemically synthesized
  source 1..20: mol_type = other DNA
tcagctctttggcagcttat

SEQ ID NO: 42760 - DNA, 20 bp, synthetic construct
  misc_feature 1..20: note = chemically synthesized
  source 1..20: mol_type = other DNA
tttggcagcttatgagtata

SEQ ID NO: 42761 - DNA, 20 bp, synthetic construct
  misc_feature 1..20: note = chemically synthesized
  source 1..20: mol_type = other DNA
acagctttttaattctcacc

SEQ ID NO: 42762 - DNA, 20 bp, synthetic construct
  misc_feature 1..20: note = chemically synthesized
  source 1..20: mol_type = other DNA
tttaattctcacctggtccc

SEQ ID NO: 42763 - DNA, 20 bp, synthetic construct
  misc_feature 1..20: note = chemically synthesized
  source 1..20: mol_type = other DNA
ttaattctcacctggtcccc

SEQ ID NO: 42764 - DNA, 20 bp, synthetic construct
  misc_feature 1..20: note = chemically synthesized
  source 1..20: mol_type = other DNA
ctcacctggtccccaggata

SEQ ID NO: 42765 - DNA, 20 bp, synthetic construct
  misc_feature 1..20: note = chemically synthesized
  source 1..20: mol_type = other DNA
ccaggatatggtttacttgt

SEQ ID NO: 42766 - DNA, 20 bp, synthetic construct
  misc_feature 1..20: note = chemically synthesized
  source 1..20: mol_type = other DNA
aggatatggtttacttgtca

SEQ ID NO: 42767 - DNA, 20 bp, synthetic construct
  misc_feature 1..20: note = chemically synthesized
  source 1..20: mol_type = other DNA
atatggtttacttgtcagag

SEQ ID NO: 42768 - DNA, 20 bp, synthetic construct
  misc_feature 1..20: note = chemically synthesized
  source 1..20: mol_type = other DNA
acttgtcagagtagttttat

SEQ ID NO: 42769 - DNA, 20 bp, synthetic construct
  misc_feature 1..20: note = chemically synthesized
  source 1..20: mol_type = other DNA
cttgtcagagtagttttatg

SEQ ID NO: 42770 - DNA, 20 bp, synthetic construct
  misc_feature 1..20: note = chemically synthesized
  source 1..20: mol_type = other DNA
ctttctcctgactctgattc

SEQ ID NO: 42771 - DNA, 20 bp, synthetic construct
  misc_feature 1..20: note = chemically synthesized
  source 1..20: mol_type = other DNA
tttctcctgactctgattct

SEQ ID NO: 42772 - DNA, 20 bp, synthetic construct
  misc_feature 1..20: note = chemically synthesized
  source 1..20: mol_type = other DNA
gattctaggtaacacctgat

SEQ ID NO: 42773 - DNA, 20 bp, synthetic construct
  misc_feature 1..20: note = chemically synthesized
  source 1..20: mol_type = other DNA
gtaacacctgatgagatgaa

SEQ ID NO: 42774 - DNA, 20 bp, synthetic construct
  misc_feature 1..20: note = chemically synthesized
  source 1..20: mol_type = other DNA
cacctgatgagatgaacaga

SEQ ID NO: 42775 - DNA, 20 bp, synthetic construct
  misc_feature 1..20: note = chemically synthesized
  source 1..20: mol_type = other DNA
tgcacctcacttcctcttac

SEQ ID NO: 42776 - DNA, 20 bp, synthetic construct
  misc_feature 1..20: note = chemically synthesized
  source 1..20: mol_type = other DNA
gcacctcacttcctcttact

SEQ ID NO: 42777 - DNA, 20 bp, synthetic construct
  misc_feature 1..20: note = chemically synthesized
  source 1..20: mol_type = other DNA
acttcctcttactgggcatg

SEQ ID NO: 42778 - DNA, 20 bp, synthetic construct
  misc_feature 1..20: note = chemically synthesized
  source 1..20: mol_type = other DNA
cttcctcttactgggcatga

SEQ ID NO: 42779 - DNA, 20 bp, synthetic construct
  misc_feature 1..20: note = chemically synthesized
  source 1..20: mol_type = other DNA
ctcttactgggcatgaagga

SEQ ID NO: 42780 - DNA, 20 bp, synthetic construct
  misc_feature 1..20: note = chemically synthesized
  source 1..20: mol_type = other DNA
cttactgggcatgaaggaaa

SEQ ID NO: 42781 - DNA, 20 bp, synthetic construct
  misc_feature 1..20: note = chemically synthesized
  source 1..20: mol_type = other DNA
tactgggcatgaaggaaaga

SEQ ID NO: 42782 - DNA, 20 bp, synthetic construct
  misc_feature 1..20: note = chemically synthesized
  source 1..20: mol_type = other DNA
ctgggcatgaaggaaagaga

SEQ ID NO: 42783 - DNA, 20 bp, synthetic construct
  misc_feature 1..20: note = chemically synthesized
  source 1..20: mol_type = other DNA
ggcatgaaggaaagagagag

SEQ ID NO: 42784 - DNA, 20 bp, synthetic construct
  misc_feature 1..20: note = chemically synthesized
  source 1..20: mol_type = other DNA
tgaaggaaagagagagaagt

SEQ ID NO: 42785 - DNA, 20 bp, synthetic construct
  misc_feature 1..20: note = chemically synthesized
  source 1..20: mol_type = other DNA
gaaggaaagagagagaagtc

SEQ ID NO: 42786 - DNA, 20 bp, synthetic construct
  misc_feature 1..20: note = chemically synthesized
  source 1..20: mol_type = other DNA
aaggaaagagagagaagtca

SEQ ID NO: 42787 - DNA, 20 bp, synthetic construct
  misc_feature 1..20: note = chemically synthesized
  source 1..20: mol_type = other DNA
gaaagagagagaagtcaggg

SEQ ID NO: 42788 - DNA, 20 bp, synthetic construct
  misc_feature 1..20: note = chemically synthesized
  source 1..20: mol_type = other DNA
aagagagagaagtcagggta

SEQ ID NO: 42789 - DNA, 20 bp, synthetic construct
  misc_feature 1..20: note = chemically synthesized
  source 1..20: mol_type = other DNA
tgctacattttttttttctg

SEQ ID NO: 42790 - DNA, 20 bp, synthetic construct
  misc_feature 1..20: note = chemically synthesized
  source 1..20: mol_type = other DNA
attttttttttctgtggaaa

SEQ ID NO: 42791 - DNA, 20 bp, synthetic construct
  misc_feature 1..20: note = chemically synthesized
  source 1..20: mol_type = other DNA
tttttttttctgtggaaaaa

SEQ ID NO: 42792 - DNA, 20 bp, synthetic construct
  misc_feature 1..20: note = chemically synthesized
  source 1..20: mol_type = other DNA
atatttctaattaaccttga

SEQ ID NO: 42793 - DNA, 20 bp, synthetic construct
  misc_feature 1..20: note = chemically synthesized
  source 1..20: mol_type = other DNA
tatttctaattaaccttgat

SEQ ID NO: 42794 - DNA, 20 bp, synthetic construct
  misc_feature 1..20: note = chemically synthesized
  source 1..20: mol_type = other DNA
aattaaccttgatgggaaca

SEQ ID NO: 42795 - DNA, 20 bp, synthetic construct
  misc_feature 1..20: note = chemically synthesized
  source 1..20: mol_type = other DNA
cttgatgggaacatagaaca

SEQ ID NO: 42796 - DNA, 20 bp, synthetic construct
  misc_feature 1..20: note = chemically synthesized
  source 1..20: mol_type = other DNA
aacatagaacatagattgta

SEQ ID NO: 42797 - DNA, 20 bp, synthetic construct
  misc_feature 1..20: note = chemically synthesized
  source 1..20: mol_type = other DNA
acatagaacatagattgtaa

SEQ ID NO: 42798 - DNA, 20 bp, synthetic construct
  misc_feature 1..20: note = chemically synthesized
  source 1..20: mol_type = other DNA
catagaacatagattgtaaa

SEQ ID NO: 42799 - DNA, 20 bp, synthetic construct
  misc_feature 1..20: note = chemically synthesized
  source 1..20: mol_type = other DNA
agggaacttgcacattatcg

SEQ ID NO: 42800 - DNA, 20 bp, synthetic construct
  misc_feature 1..20: note = chemically synthesized
  source 1..20: mol_type = other DNA
gaacttgcacattatcgcag

SEQ ID NO: 42801 - DNA, 20 bp, synthetic construct
  misc_feature 1..20: note = chemically synthesized
  source 1..20: mol_type = other DNA
aacttgcacattatcgcagt

SEQ ID NO: 42802 - DNA, 20 bp, synthetic construct
  misc_feature 1..20: note = chemically synthesized
  source 1..20: mol_type = other DNA
tatcgcagtaggctgaataa

SEQ ID NO: 42803 - DNA, 20 bp, synthetic construct
  misc_feature 1..20: note = chemically synthesized
  source 1..20: mol_type = other DNA
gtaggctgaataatggctaa

SEQ ID NO: 42804 - DNA, 20 bp, synthetic construct
  misc_feature 1..20: note = chemically synthesized
  source 1..20: mol_type = other DNA
tggctaatggctcactctga

SEQ ID NO: 42805 - DNA, 20 bp, synthetic construct
  misc_feature 1..20: note = chemically synthesized
  source 1..20: mol_type = other DNA
ctcactctgaaagatatgta

SEQ ID NO: 42806 - DNA, 20 bp, synthetic construct
  misc_feature 1..20: note = chemically synthesized
  source 1..20: mol_type = other DNA
gcttaacccctgaaacctgt

SEQ ID NO: 42807 - DNA, 20 bp, synthetic construct
  misc_feature 1..20: note = chemically synthesized
  source 1..20: mol_type = other DNA
cctgtgagtattatcttttc

SEQ ID NO: 42808 - DNA, 20 bp, synthetic construct
  misc_feature 1..20: note = chemically synthesized
  source 1..20: mol_type = other DNA
tattatcttttctagccaaa

SEQ ID NO: 42809 - DNA, 20 bp, synthetic construct
  misc_feature 1..20: note = chemically synthesized
  source 1..20: mol_type = other DNA
agacttttgcatatataatt

SEQ ID NO: 42810 - DNA, 20 bp, synthetic construct
  misc_feature 1..20: note = chemically synthesized
  source 1..20: mol_type = other DNA
gacttttgcatatataatta

SEQ ID NO: 42811 - DNA, 20 bp, synthetic construct
  misc_feature 1..20: note = chemically synthesized
  source 1..20: mol_type = other DNA
gcatatataattaaggatct

SEQ ID NO: 42812 - DNA, 20 bp, synthetic construct
  misc_feature 1..20: note = chemically synthesized
  source 1..20: mol_type = other DNA
catatataattaaggatctt

SEQ ID NO: 42813 - DNA, 20 bp, synthetic construct
  misc_feature 1..20: note = chemically synthesized
  source 1..20: mol_type = other DNA
tataattaaggatcttggga

SEQ ID NO: 42814 - DNA, 20 bp, synthetic construct
  misc_feature 1..20: note = chemically synthesized
  source 1..20: mol_type = other DNA
ataattaaggatcttgggat

SEQ ID NO: 42815 - DNA, 20 bp, synthetic construct
  misc_feature 1..20: note = chemically synthesized
  source 1..20: mol_type = other DNA
taattaaggatcttgggatg

SEQ ID NO: 42816 - DNA, 20 bp, synthetic construct
  misc_feature 1..20: note = chemically synthesized
  source 1..20: mol_type = other DNA
attaaggatcttgggatggg

SEQ ID NO: 42817 - DNA, 20 bp, synthetic construct
  misc_feature 1..20: note = chemically synthesized
  source 1..20: mol_type = other DNA
ggggagatatcctaattatt

SEQ ID NO: 42818 - DNA, 20 bp, synthetic construct
  misc_feature 1..20: note = chemically synthesized
  source 1..20: mol_type = other DNA
gggagatatcctaattattt

SEQ ID NO: 42819 - DNA, 20 bp, synthetic construct
  misc_feature 1..20: note = chemically synthesized
  source 1..20: mol_type = other DNA
tgtatcctaaatgtaatcac

SEQ ID NO: 42820 - DNA, 20 bp, synthetic construct
  misc_feature 1..20: note = chemically synthesized
  source 1..20: mol_type = other DNA
gtaatcacaagtgtcattat

SEQ ID NO: 42821 - DNA, 20 bp, synthetic construct
  misc_feature 1..20: note = chemically synthesized
  source 1..20: mol_type = other DNA
aatcacaagtgtcattataa

SEQ ID NO: 42822 - DNA, 20 bp, synthetic construct
  misc_feature 1..20: note = chemically synthesized
  source 1..20: mol_type = other DNA
atcacaagtgtcattataag

SEQ ID NO: 42823 - DNA, 20 bp, synthetic construct
  misc_feature 1..20: note = chemically synthesized
  source 1..20: mol_type = other DNA
tcacaagtgtcattataaga

SEQ ID NO: 42824 - DNA, 20 bp, synthetic construct
  misc_feature 1..20: note = chemically synthesized
  source 1..20: mol_type = other DNA
acaagtgtcattataagagg

SEQ ID NO: 42825 - DNA, 20 bp, synthetic construct
  misc_feature 1..20: note = chemically synthesized
  source 1..20: mol_type = other DNA
caagtgtcattataagaggg

SEQ ID NO: 42826 - DNA, 20 bp, synthetic construct
  misc_feature 1..20: note = chemically synthesized
  source 1..20: mol_type = other DNA
gtcattataagagggaggca

SEQ ID NO: 42827 - DNA, 20 bp, synthetic construct
  misc_feature 1..20: note = chemically synthesized
  source 1..20: mol_type = other DNA
tcattataagagggaggcaa

SEQ ID NO: 42828 - DNA, 20 bp, synthetic construct
  misc_feature 1..20: note = chemically synthesized
  source 1..20: mol_type = other DNA
cattataagagggaggcaaa

SEQ ID NO: 42829 - DNA, 20 bp, synthetic construct
  misc_feature 1..20: note = chemically synthesized
  source 1..20: mol_type = other DNA
ttataagagggaggcaaagg

SEQ ID NO: 42830 - DNA, 20 bp, synthetic construct
  misc_feature 1..20: note = chemically synthesized
  source 1..20: mol_type = other DNA
caaagggagatttgacttat

SEQ ID NO: 42831 - DNA, 20 bp, synthetic construct
  misc_feature 1..20: note = chemically synthesized
  source 1..20: mol_type = other DNA
aagggagatttgacttataa

SEQ ID NO: 42832 - DNA, 20 bp, synthetic construct
  misc_feature 1..20: note = chemically synthesized
  source 1..20: mol_type = other DNA
agggagatttgacttataag

SEQ ID NO: 42833 - DNA, 20 bp, synthetic construct
  misc_feature 1..20: note = chemically synthesized
  source 1..20: mol_type = other DNA
ggagatttgacttataagag

SEQ ID NO: 42834 - DNA, 20 bp, synthetic construct
  misc_feature 1..20: note = chemically synthesized
  source 1..20: mol_type = other DNA
aaaatgtgacgtgattacaa

SEQ ID NO: 42835 - DNA, 20 bp, synthetic construct
  misc_feature 1..20: note = chemically synthesized
  source 1..20: mol_type = other DNA
atgtgacgtgattacaaaag

SEQ ID NO: 42836 - DNA, 20 bp, synthetic construct
  misc_feature 1..20: note = chemically synthesized
  source 1..20: mol_type = other DNA
gtgacgtgattacaaaagca

SEQ ID NO: 42837 - DNA, 20 bp, synthetic construct
  misc_feature 1..20: note = chemically synthesized
  source 1..20: mol_type = other DNA
agcagagatacatttttttg

SEQ ID NO: 42838 - DNA, 20 bp, synthetic construct
  misc_feature 1..20: note = chemically synthesized
  source 1..20: mol_type = other DNA
gatacatttttttgaagatc

SEQ ID NO: 42839 - DNA, 20 bp, synthetic construct
  misc_feature 1..20: note = chemically synthesized
  source 1..20: mol_type = other DNA
atacatttttttgaagatcg

SEQ ID NO: 42840 - DNA, 20 bp, synthetic construct
  misc_feature 1..20: note = chemically synthesized
  source 1..20: mol_type = other DNA
catttttttgaagatcgagg

SEQ ID NO: 42841 - DNA, 20 bp, synthetic construct
  misc_feature 1..20: note = chemically synthesized
  source 1..20: mol_type = other DNA
tttttttgaagatcgaggaa

SEQ ID NO: 42842 - DNA, 20 bp, synthetic construct
  misc_feature 1..20: note = chemically synthesized
  source 1..20: mol_type = other DNA
ttttttgaagatcgaggaag

SEQ ID NO: 42843 - DNA, 20 bp, synthetic construct
  misc_feature 1..20: note = chemically synthesized
  source 1..20: mol_type = other DNA
cgaggaagaggctacaaacc

SEQ ID NO: 42844 - DNA, 20 bp, synthetic construct
  misc_feature 1..20: note = chemically synthesized
  source 1..20: mol_type = other DNA
gaggaagaggctacaaacca

SEQ ID NO: 42845 - DNA, 20 bp, synthetic construct
  misc_feature 1..20: note = chemically synthesized
  source 1..20: mol_type = other DNA
aggctacaaaccaaggaatg

SEQ ID NO: 42846 - DNA, 20 bp, synthetic construct
  misc_feature 1..20: note = chemically synthesized
  source 1..20: mol_type = other DNA
ggctacaaaccaaggaatgt

SEQ ID NO: 42847 - DNA, 20 bp, synthetic construct
  misc_feature 1..20: note = chemically synthesized
  source 1..20: mol_type = other DNA
tacaaaccaaggaatgtggg

SEQ ID NO: 42848 - DNA, 20 bp, synthetic construct
  misc_feature 1..20: note = chemically synthesized
  source 1..20: mol_type = other DNA
caaggaatgtgggtagcctc

SEQ ID NO: 42849 - DNA, 20 bp, synthetic construct
  misc_feature 1..20: note = chemically synthesized
  source 1..20: mol_type = other DNA
ggaatgtgggtagcctctag

SEQ ID NO: 42850 - DNA, 20 bp, synthetic construct
  misc_feature 1..20: note = chemically synthesized
  source 1..20: mol_type = other DNA
aatgtgggtagcctctagaa

SEQ ID NO: 42851 - DNA, 20 bp, synthetic construct
  misc_feature 1..20: note = chemically synthesized
  source 1..20: mol_type = other DNA
atgtgggtagcctctagaag

SEQ ID NO: 42852 - DNA, 20 bp, synthetic construct
  misc_feature 1..20: note = chemically synthesized
  source 1..20: mol_type = other DNA
gtagcctctagaagaggaaa

SEQ ID NO: 42853 - DNA, 20 bp, synthetic construct
  misc_feature 1..20: note = chemically synthesized
  source 1..20: mol_type = other DNA
agaagaggaaacagaatcca

SEQ ID NO: 42854 - DNA, 20 bp, synthetic construct
  misc_feature 1..20: note = chemically synthesized
  source 1..20: mol_type = other DNA
aggaaacagaatccatggaa

SEQ ID NO: 42855 - DNA, 20 bp, synthetic construct
  misc_feature 1..20: note = chemically synthesized
  source 1..20: mol_type = other DNA
ggaaacagaatccatggaaa

SEQ ID NO: 42856 - DNA, 20 bp, synthetic construct
  misc_feature 1..20: note = chemically synthesized
  source 1..20: mol_type = other DNA
aacagaatccatggaaaagg

SEQ ID NO: 42857 - DNA, 20 bp, synthetic construct
  misc_feature 1..20: note = chemically synthesized
  source 1..20: mol_type = other DNA
acagaatccatggaaaaggc

SEQ ID NO: 42858 - DNA, 20 bp, synthetic construct
  misc_feature 1..20: note = chemically synthesized
  source 1..20: mol_type = other DNA
caggaaaacacaatctctca

SEQ ID NO: 42859 - DNA, 20 bp, synthetic construct
  misc_feature 1..20: note = chemically synthesized
  source 1..20: mol_type = other DNA
ggaaaacacaatctctcata

SEQ ID NO: 42860 - DNA, 20 bp, synthetic construct
  misc_feature 1..20: note = chemically synthesized
  source 1..20: mol_type = other DNA
acaatctctcatagagtctc

SEQ ID NO: 42861 - DNA, 20 bp, synthetic construct
  misc_feature 1..20: note = chemically synthesized
  source 1..20: mol_type = other DNA
atctctcatagagtctccag

SEQ ID NO: 42862 - DNA, 20 bp, synthetic construct
  misc_feature 1..20: note = chemically synthesized
  source 1..20: mol_type = other DNA
catagagtctccagaagaaa

SEQ ID NO: 42863 - DNA, 20 bp, synthetic construct
  misc_feature 1..20: note = chemically synthesized
  source 1..20: mol_type = other DNA
ccacactgacacctcgactt

SEQ ID NO: 42864 - DNA, 20 bp, synthetic construct
  misc_feature 1..20: note = chemically synthesized
  source 1..20: mol_type = other DNA
ctgacacctcgactttagcc

SEQ ID NO: 42865 - DNA, 20 bp, synthetic construct
  misc_feature 1..20: note = chemically synthesized
  source 1..20: mol_type = other DNA
tagcccagtgaaaccgattt

SEQ ID NO: 42866 - DNA, 20 bp, synthetic construct
  misc_feature 1..20: note = chemically synthesized
  source 1..20: mol_type = other DNA
cttctgacctccacaacttc

SEQ ID NO: 42867 - DNA, 20 bp, synthetic construct
  misc_feature 1..20: note = chemically synthesized
  source 1..20: mol_type = other DNA
taatacatttgtgttgtttt

SEQ ID NO: 42868 - DNA, 20 bp, synthetic construct
  misc_feature 1..20: note = chemically synthesized
  source 1..20: mol_type = other DNA
gttttaagccaataaatttg

SEQ ID NO: 42869 - DNA, 20 bp, synthetic construct
  misc_feature 1..20: note = chemically synthesized
  source 1..20: mol_type = other DNA
aaatttgtggtaatttttta

SEQ ID NO: 42870 - DNA, 20 bp, synthetic construct
  misc_feature 1..20: note = chemically synthesized
  source 1..20: mol_type = other DNA
tttgtggtaattttttacag

SEQ ID NO: 42871 - DNA, 20 bp, synthetic construct
  misc_feature 1..20: note = chemically synthesized
  source 1..20: mol_type = other DNA
tggtaattttttacagcagc

SEQ ID NO: 42872 - DNA, 20 bp, synthetic construct
  misc_feature 1..20: note = chemically synthesized
  source 1..20: mol_type = other DNA
gtaattttttacagcagcaa

SEQ ID NO: 42873 - DNA, 20 bp, synthetic construct
  misc_feature 1..20: note = chemically synthesized
  source 1..20: mol_type = other DNA
taattttttacagcagcaag

SEQ ID NO: 42874 - DNA, 20 bp, synthetic construct
  misc_feature 1..20: note = chemically synthesized
  source 1..20: mol_type = other DNA
ttacagcagcaagaggaaat

SEQ ID NO: 42875 - DNA, 20 bp, synthetic construct
  misc_feature 1..20: note = chemically synthesized
  source 1..20: mol_type = other DNA
gcaagaggaaatcagttacg

SEQ ID NO: 42876 - DNA, 20 bp, synthetic construct
  misc_feature 1..20: note = chemically synthesized
  source 1..20: mol_type = other DNA
aggaaatcagttacgtagaa

SEQ ID NO: 42877 - DNA, 20 bp, synthetic construct
  misc_feature 1..20: note = chemically synthesized
  source 1..20: mol_type = other DNA
aaatcagttacgtagaatag

SEQ ID NO: 42878 - DNA, 20 bp, synthetic construct
  misc_feature 1..20: note = chemically synthesized
  source 1..20: mol_type = other DNA
aatcagttacgtagaatagt

SEQ ID NO: 42879 - DNA, 20 bp, synthetic construct
  misc_feature 1..20: note = chemically synthesized
  source 1..20: mol_type = other DNA
agaatagtaggtcctgtctc

SEQ ID NO: 42880 - DNA, 20 bp, synthetic construct
  misc_feature 1..20: note = chemically synthesized
  source 1..20: mol_type = other DNA
tcctgtctctggctaatcat

SEQ ID NO: 42881 - DNA, 20 bp, synthetic construct
  misc_feature 1..20: note = chemically synthesized
  source 1..20: mol_type = other DNA
gctaatcattagaatcactc

SEQ ID NO: 42882 - DNA, 20 bp, synthetic construct
  misc_feature 1..20: note = chemically synthesized
  source 1..20: mol_type = other DNA
aatcattagaatcactccag

SEQ ID NO: 42883 - DNA, 20 bp, synthetic construct
  misc_feature 1..20: note = chemically synthesized
  source 1..20: mol_type = other DNA
ctccagaagcttgttacata

SEQ ID NO: 42884 - DNA, 20 bp, synthetic construct
  misc_feature 1..20: note = chemically synthesized
  source 1..20: mol_type = other DNA
aagcttgttacatacagacc

SEQ ID NO: 42885 - DNA, 20 bp, synthetic construct
  misc_feature 1..20: note = chemically synthesized
  source 1..20: mol_type = other DNA
gcttgttacatacagaccca

SEQ ID NO: 42886 - DNA, 20 bp, synthetic construct
  misc_feature 1..20: note = chemically synthesized
  source 1..20: mol_type = other DNA
gttacatacagacccagagc

SEQ ID NO: 42887 - DNA, 20 bp, synthetic construct
  misc_feature 1..20: note = chemically synthesized
  source 1..20: mol_type = other DNA
agacccagagccagtgaatc

SEQ ID NO: 42888 - DNA, 20 bp, synthetic construct
  misc_feature 1..20: note = chemically synthesized
  source 1..20: mol_type = other DNA
gacccagagccagtgaatca

SEQ ID NO: 42889 - DNA, 20 bp, synthetic construct
  misc_feature 1..20: note = chemically synthesized
  source 1..20: mol_type = other DNA
gagccagtgaatcaaggatt

SEQ ID NO: 42890 - DNA, 20 bp, synthetic construct
  misc_feature 1..20: note = chemically synthesized
  source 1..20: mol_type = other DNA
ccagtgaatcaaggatttgg

SEQ ID NO: 42891 - DNA, 20 bp, synthetic construct
  misc_feature 1..20: note = chemically synthesized
  source 1..20: mol_type = other DNA
gtgaatcaaggatttggtgg

SEQ ID NO: 42892 - DNA, 20 bp, synthetic construct
  misc_feature 1..20: note = chemically synthesized
  source 1..20: mol_type = other DNA
tgaatcaaggatttggtggt

SEQ ID NO: 42893 - DNA, 20 bp, synthetic construct
  misc_feature 1..20: note = chemically synthesized
  source 1..20: mol_type = other DNA
gaatcaaggatttggtggtg

SEQ ID NO: 42894 - DNA, 20 bp, synthetic construct
  misc_feature 1..20: note = chemically synthesized
  source 1..20: mol_type = other DNA
aaggatttggtggtggggcc

SEQ ID NO: 42895 - DNA, 20 bp, synthetic construct
  misc_feature 1..20: note = chemically synthesized
  source 1..20: mol_type = other DNA
ggatttggtggtggggccca

SEQ ID NO: 42896 - DNA, 20 bp, synthetic construct
  misc_feature 1..20: note = chemically synthesized
  source 1..20: mol_type = other DNA
gggcccagagcctgaatatt

SEQ ID NO: 42897 - DNA, 20 bp, synthetic construct
  misc_feature 1..20: note = chemically synthesized
  source 1..20: mol_type = other DNA
ccagagcctgaatattaagc

SEQ ID NO: 42898 - DNA, 20 bp, synthetic construct
  misc_feature 1..20: note = chemically synthesized
  source 1..20: mol_type = other DNA
attaagcaagttcttcgttt

SEQ ID NO: 42899 - DNA, 20 bp, synthetic construct
  misc_feature 1..20: note = chemically synthesized
  source 1..20: mol_type = other DNA
aagttcttcgttttagaaat

SEQ ID NO: 42900 - DNA, 20 bp, synthetic construct
  misc_feature 1..20: note = chemically synthesized
  source 1..20: mol_type = other DNA
agttcttcgttttagaaatg

SEQ ID NO: 42901 - DNA, 20 bp, synthetic construct
  misc_feature 1..20: note = chemically synthesized
  source 1..20: mol_type = other DNA
gttttagaaatgaggaaacc

SEQ ID NO: 42902 - DNA, 20 bp, synthetic construct
  misc_feature 1..20: note = chemically synthesized
  source 1..20: mol_type = other DNA
ttttagaaatgaggaaacca

SEQ ID NO: 42903 - DNA, 20 bp, synthetic construct
  misc_feature 1..20: note = chemically synthesized
  source 1..20: mol_type = other DNA
agaaatgaggaaaccaaggt

SEQ ID NO: 42904 - DNA, 20 bp, synthetic construct
  misc_feature 1..20: note = chemically synthesized
  source 1..20: mol_type = other DNA
gaaatgaggaaaccaaggtt

SEQ ID NO: 42905 - DNA, 20 bp, synthetic construct
  misc_feature 1..20: note = chemically synthesized
  source 1..20: mol_type = other DNA
aatgaggaaaccaaggttgg

SEQ ID NO: 42906 - DNA, 20 bp, synthetic construct
  misc_feature 1..20: note = chemically synthesized
  source 1..20: mol_type = other DNA
gaggaaaccaaggttgggag

SEQ ID NO: 42907 - DNA, 20 bp, synthetic construct
  misc_feature 1..20: note = chemically synthesized
  source 1..20: mol_type = other DNA
aaccaaggttgggagaagct

SEQ ID NO: 42908 - DNA, 20 bp, synthetic construct
  misc_feature 1..20: note = chemically synthesized
  source 1..20: mol_type = other DNA
aagcaacttactcaaataca

SEQ ID NO: 42909 - DNA, 20 bp, synthetic construct
  misc_feature 1..20: note = chemically synthesized
  source 1..20: mol_type = other DNA
agcaacttactcaaatacat

SEQ ID NO: 42910 - DNA, 20 bp, synthetic construct
  misc_feature 1..20: note = chemically synthesized
  source 1..20: mol_type = other DNA
gcaacttactcaaatacata

SEQ ID NO: 42911 - DNA, 20 bp, synthetic construct
  misc_feature 1..20: note = chemically synthesized
  source 1..20: mol_type = other DNA
tcttttgaattttcttaccc

SEQ ID NO: 42912 - DNA, 20 bp, synthetic construct
  misc_feature 1..20: note = chemically synthesized
  source 1..20: mol_type = other DNA
tgtaaatgtgatttcattta

SEQ ID NO: 42913 - DNA, 20 bp, synthetic construct
  misc_feature 1..20: note = chemically synthesized
  source 1..20: mol_type = other DNA
ttgacatattcattaaaatg

SEQ ID NO: 42914 - DNA, 20 bp, synthetic construct
  misc_feature 1..20: note = chemically synthesized
  source 1..20: mol_type = other DNA
tcattaaaatgaagaaataa

SEQ ID NO: 42915 - DNA, 20 bp, synthetic construct
  misc_feature 1..20: note = chemically synthesized
  source 1..20: mol_type = other DNA
aaaatgaagaaataaaagat

SEQ ID NO: 42916 - DNA, 20 bp, synthetic construct
  misc_feature 1..20: note = chemically synthesized
  source 1..20: mol_type = other DNA
aagaaataaaagatgagaaa

SEQ ID NO: 42917 - DNA, 20 bp, synthetic construct
  misc_feature 1..20: note = chemically synthesized
  source 1..20: mol_type = other DNA
attatataatgtttattgat

SEQ ID NO: 42918 - DNA, 20 bp, synthetic construct
  misc_feature 1..20: note = chemically synthesized
  source 1..20: mol_type = other DNA
agaatgaatatgatgcaatc

SEQ ID NO: 42919 - DNA, 20 bp, synthetic construct
  misc_feature 1..20: note = chemically synthesized
  source 1..20: mol_type = other DNA
gcaatctggttttctgtgtt

SEQ ID NO: 42920 - DNA, 20 bp, synthetic construct
  misc_feature 1..20: note = chemically synthesized
  source 1..20: mol_type = other DNA
gtgttcagattcctgacctc

SEQ ID NO: 42921 - DNA, 20 bp, synthetic construct
  misc_feature 1..20: note = chemically synthesized
  source 1..20: mol_type = other DNA
gttcagattcctgacctctg

SEQ ID NO: 42922 - DNA, 20 bp, synthetic construct
  misc_feature 1..20: note = chemically synthesized
  source 1..20: mol_type = other DNA
ggagttaacctttctttgta

SEQ ID NO: 42923 - DNA, 20 bp, synthetic construct
  misc_feature 1..20: note = chemically synthesized
  source 1..20: mol_type = other DNA
taacctttctttgtaaagat

SEQ ID NO: 42924 - DNA, 20 bp, synthetic construct
  misc_feature 1..20: note = chemically synthesized
  source 1..20: mol_type = other DNA
ctttctttgtaaagattaga

SEQ ID NO: 42925 - DNA, 20 bp, synthetic construct
  misc_feature 1..20: note = chemically synthesized
  source 1..20: mol_type = other DNA
tctttgtaaagattagacag

SEQ ID NO: 42926 - DNA, 20 bp, synthetic construct
  misc_feature 1..20: note = chemically synthesized
  source 1..20: mol_type = other DNA
ctttgtaaagattagacagc

SEQ ID NO: 42927 - DNA, 20 bp, synthetic construct
  misc_feature 1..20: note = chemically synthesized
  source 1..20: mol_type = other DNA
tgtaaagattagacagcagg

SEQ ID NO: 42928 - DNA, 20 bp, synthetic construct
  misc_feature 1..20: note = chemically synthesized
  source 1..20: mol_type = other DNA
gtaaagattagacagcaggc

SEQ ID NO: 42929 - DNA, 20 bp, synthetic construct
  misc_feature 1..20: note = chemically synthesized
  source 1..20: mol_type = other DNA
taaagattagacagcaggca

SEQ ID NO: 42930 - DNA, 20 bp, synthetic construct
  misc_feature 1..20: note = chemically synthesized
  source 1..20: mol_type = other DNA
agattagacagcaggcaggg

SEQ ID NO: 42931 - DNA, 20 bp, synthetic construct
  misc_feature 1..20: note = chemically synthesized
  source 1..20: mol_type = other DNA
ggaagaatgcctttgaaact

SEQ ID NO: 42932 - DNA, 20 bp, synthetic construct
  misc_feature 1..20: note = chemically synthesized
  source 1..20: mol_type = other DNA
aagaatgcctttgaaactga

SEQ ID NO: 42933 - DNA, 20 bp, synthetic construct
  misc_feature 1..20: note = chemically synthesized
  source 1..20: mol_type = other DNA
tgcctttgaaactgagagca

SEQ ID NO: 42934 - DNA, 20 bp, synthetic construct
  misc_feature 1..20: note = chemically synthesized
  source 1..20: mol_type = other DNA
ttgaaactgagagcaaagac

SEQ ID NO: 42935 - DNA, 20 bp, synthetic construct
  misc_feature 1..20: note = chemically synthesized
  source 1..20: mol_type = other DNA
tgcaatttacattgatgtcc

SEQ ID NO: 42936 - DNA, 20 bp, synthetic construct
  misc_feature 1..20: note = chemically synthesized
  source 1..20: mol_type = other DNA
gtcctggtgctgtgcataat

SEQ ID NO: 42937 - DNA, 20 bp, synthetic construct
  misc_feature 1..20: note = chemically synthesized
  source 1..20: mol_type = other DNA
aataagttgcttaaacatga

SEQ ID NO: 42938 - DNA, 20 bp, synthetic construct
  misc_feature 1..20: note = chemically synthesized
  source 1..20: mol_type = other DNA
aagttgcttaaacatgacag

SEQ ID NO: 42939 - DNA, 20 bp, synthetic construct
  misc_feature 1..20: note = chemically synthesized
  source 1..20: mol_type = other DNA
agttgcttaaacatgacagc

SEQ ID NO: 42940 - DNA, 20 bp, synthetic construct
  misc_feature 1..20: note = chemically synthesized
  source 1..20: mol_type = other DNA
gcttaaacatgacagcagga

SEQ ID NO: 42941 - DNA, 20 bp, synthetic construct
  misc_feature 1..20: note = chemically synthesized
  source 1..20: mol_type = other DNA
cttaaacatgacagcaggat

SEQ ID NO: 42942 - DNA, 20 bp, synthetic construct
  misc_feature 1..20: note = chemically synthesized
  source 1..20: mol_type = other DNA
acataaaatttatttataaa

SEQ ID NO: 42943 - DNA, 20 bp, synthetic construct
  misc_feature 1..20: note = chemically synthesized
  source 1..20: mol_type = other DNA
aaatttatttataaatggta

SEQ ID NO: 42944 - DNA, 20 bp, synthetic construct
  misc_feature 1..20: note = chemically synthesized
  source 1..20: mol_type = other DNA
acctctgctgaacttcctca

SEQ ID NO: 42945 - DNA, 20 bp, synthetic construct
  misc_feature 1..20: note = chemically synthesized
  source 1..20: mol_type = other DNA
cttcctcatagaatgttcat

SEQ ID NO: 42946 - DNA, 20 bp, synthetic construct
  misc_feature 1..20: note = chemically synthesized
  source 1..20: mol_type = other DNA
agaatgttcatcagaaaaca

SEQ ID NO: 42947 - DNA, 20 bp, synthetic construct
  misc_feature 1..20: note = chemically synthesized
  source 1..20: mol_type = other DNA
ttctatctactctttcttcc

SEQ ID NO: 42948 - DNA, 20 bp, synthetic construct
  misc_feature 1..20: note = chemically synthesized
  source 1..20: mol_type = other DNA
accactgacatcatgaccct

SEQ ID NO: 42949 - DNA, 20 bp, synthetic construct
  misc_feature 1..20: note = chemically synthesized
  source 1..20: mol_type = other DNA
gaccctcagttctattcccc

SEQ ID NO: 42950 - DNA, 20 bp, synthetic construct
  misc_feature 1..20: note = chemically synthesized
  source 1..20: mol_type = other DNA
ctgcccactcccctgaaatc

SEQ ID NO: 42951 - DNA, 20 bp, synthetic construct
  misc_feature 1..20: note = chemically synthesized
  source 1..20: mol_type = other DNA
ccataaatccaaccaccgcc

SEQ ID NO: 42952 - DNA, 20 bp, synthetic construct
  misc_feature 1..20: note = chemically synthesized
  source 1..20: mol_type = other DNA
cataaatccaaccaccgcct

SEQ ID NO: 42953 - DNA, 20 bp, synthetic construct
  misc_feature 1..20: note = chemically synthesized
  source 1..20: mol_type = other DNA
caaccaccgcctgggtatct

SEQ ID NO: 42954 - DNA, 20 bp, synthetic construct
  misc_feature 1..20: note = chemically synthesized
  source 1..20: mol_type = other DNA
accgcctgggtatctcagtt

SEQ ID NO: 42955 - DNA, 20 bp, synthetic construct
  misc_feature 1..20: note = chemically synthesized
  source 1..20: mol_type = other DNA
tccctccatcaactcaaatt

SEQ ID NO: 42956 - DNA, 20 bp, synthetic construct
  misc_feature 1..20: note = chemically synthesized
  source 1..20: mol_type = other DNA
caactcaaatttggctgaca

SEQ ID NO: 42957 - DNA, 20 bp, synthetic construct
  misc_feature 1..20: note = chemically synthesized
  source 1..20: mol_type = other DNA
aaatttggctgacacagttt

SEQ ID NO: 42958 - DNA, 20 bp, synthetic construct
  misc_feature 1..20: note = chemically synthesized
  source 1..20: mol_type = other DNA
gctgacacagttttggattc

SEQ ID NO: 42959 - DNA, 20 bp, synthetic construct
  misc_feature 1..20: note = chemically synthesized
  source 1..20: mol_type = other DNA
tgacacagttttggattcta

SEQ ID NO: 42960 - DNA, 20 bp, synthetic construct
  misc_feature 1..20: note = chemically synthesized
  source 1..20: mol_type = other DNA
gttttggattctagagcatg

SEQ ID NO: 42961 - DNA, 20 bp, synthetic construct
  misc_feature 1..20: note = chemically synthesized
  source 1..20: mol_type = other DNA
ttttggattctagagcatgc

SEQ ID NO: 42962 - DNA, 20 bp, synthetic construct
  misc_feature 1..20: note = chemically synthesized
  source 1..20: mol_type = other DNA
tttgcactcactcttccctc

SEQ ID NO: 42963 - DNA, 20 bp, synthetic construct
  misc_feature 1..20: note = chemically synthesized
  source 1..20: mol_type = other DNA
cccgtccttcctcactttgc

SEQ ID NO: 42964 - DNA, 20 bp, synthetic construct
  misc_feature 1..20: note = chemically synthesized
  source 1..20: mol_type = other DNA
ccagttccaacttctctctg

SEQ ID NO: 42965 - DNA, 20 bp, synthetic construct
  misc_feature 1..20: note = chemically synthesized
  source 1..20: mol_type = other DNA
ccaacttctctctgaagact

SEQ ID NO: 42966 - DNA, 20 bp, synthetic construct
  misc_feature 1..20: note = chemically synthesized
  source 1..20: mol_type = other DNA
ttctctctgaagactcagtt

SEQ ID NO: 42967 - DNA, 20 bp, synthetic construct
  misc_feature 1..20: note = chemically synthesized
  source 1..20: mol_type = other DNA
tctctctgaagactcagttt

SEQ ID NO: 42968 - DNA, 20 bp, synthetic construct
  misc_feature 1..20: note = chemically synthesized
  source 1..20: mol_type = other DNA
ctgaagactcagtttaggta

SEQ ID NO: 42969 - DNA, 20 bp, synthetic construct
  misc_feature 1..20: note = chemically synthesized
  source 1..20: mol_type = other DNA
tgaagactcagtttaggtac

SEQ ID NO: 42970 - DNA, 20 bp, synthetic construct
  misc_feature 1..20: note = chemically synthesized
  source 1..20: mol_type = other DNA
agtttaggtacaggctcctt

SEQ ID NO: 42971 - DNA, 20 bp, synthetic construct
  misc_feature 1..20: note = chemically synthesized
  source 1..20: mol_type = other DNA
gtttaggtacaggctccttt

SEQ ID NO: 42972 - DNA, 20 bp, synthetic construct
  misc_feature 1..20: note = chemically synthesized
  source 1..20: mol_type = other DNA
aatttttttttgactctacc

SEQ ID NO: 42973 - DNA, 20 bp, synthetic construct
  misc_feature 1..20: note = chemically synthesized
  source 1..20: mol_type = other DNA
ttttttgactctacctagcc

SEQ ID NO: 42974 - DNA, 20 bp, synthetic construct
  misc_feature 1..20: note = chemically synthesized
  source 1..20: mol_type = other DNA
gactctacctagcccagact

SEQ ID NO: 42975 - DNA, 20 bp, synthetic construct
  misc_feature 1..20: note = chemically synthesized
  source 1..20: mol_type = other DNA
tcatctacgatattaatctg

SEQ ID NO: 42976 - DNA, 20 bp, synthetic construct
  misc_feature 1..20: note = chemically synthesized
  source 1..20: mol_type = other DNA
taatctgcagtgtcatgcac

SEQ ID NO: 42977 - DNA, 20 bp, synthetic construct
  misc_feature 1..20: note = chemically synthesized
  source 1..20: mol_type = other DNA
acaaaatatttgctgaatga

SEQ ID NO: 42978 - DNA, 20 bp, synthetic construct
  misc_feature 1..20: note = chemically synthesized
  source 1..20: mol_type = other DNA
tatttgctgaatgaaagaat

SEQ ID NO: 42979 - DNA, 20 bp, synthetic construct
  misc_feature 1..20: note = chemically synthesized
  source 1..20: mol_type = other DNA
tttgctgaatgaaagaatga

SEQ ID NO: 42980 - DNA, 20 bp, synthetic construct
  misc_feature 1..20: note = chemically synthesized
  source 1..20: mol_type = other DNA
aaagaatgagagttaacttt

SEQ ID NO: 42981 - DNA, 20 bp, synthetic construct
  misc_feature 1..20: note = chemically synthesized
  source 1..20: mol_type = other DNA
aatgagagttaacttttagt

SEQ ID NO: 42982 - DNA, 20 bp, synthetic construct
  misc_feature 1..20: note = chemically synthesized
  source 1..20: mol_type = other DNA
atgagagttaacttttagtc

SEQ ID NO: 42983 - DNA, 20 bp, synthetic construct
  misc_feature 1..20: note = chemically synthesized
  source 1..20: mol_type = other DNA
ttaacttttagtcaggcata

SEQ ID NO: 42984 - DNA, 20 bp, synthetic construct
  misc_feature 1..20: note = chemically synthesized
  source 1..20: mol_type = other DNA
ggcataaagataaaaaacca

SEQ ID NO: 42985 - DNA, 20 bp, synthetic construct
  misc_feature 1..20: note = chemically synthesized
  source 1..20: mol_type = other DNA
aaaaccaaagtcttttactc

SEQ ID NO: 42986 - DNA, 20 bp, synthetic construct
  misc_feature 1..20: note = chemically synthesized
  source 1..20: mol_type = other DNA
caaagtcttttactccggtg

SEQ ID NO: 42987 - DNA, 20 bp, synthetic construct
  misc_feature 1..20: note = chemically synthesized
  source 1..20: mol_type = other DNA
aagtcttttactccggtgtg

SEQ ID NO: 42988 - DNA, 20 bp, synthetic construct
  misc_feature 1..20: note = chemically synthesized
  source 1..20: mol_type = other DNA
actccggtgtggagtgtttt

SEQ ID NO: 42989 - DNA, 20 bp, synthetic construct
  misc_feature 1..20: note = chemically synthesized
  source 1..20: mol_type = other DNA
ctccggtgtggagtgttttc

SEQ ID NO: 42990 - DNA, 20 bp, synthetic construct
  misc_feature 1..20: note = chemically synthesized
  source 1..20: mol_type = other DNA
ttttcaggattcctaccaat

SEQ ID NO: 42991 - DNA, 20 bp, synthetic construct
  misc_feature 1..20: note = chemically synthesized
  source 1..20: mol_type = other DNA
tttcaggattcctaccaatt

SEQ ID NO: 42992 - DNA, 20 bp, synthetic construct
  misc_feature 1..20: note = chemically synthesized
  source 1..20: mol_type = other DNA
caggattcctaccaattagg

SEQ ID NO: 42993 - DNA, 20 bp, synthetic construct
  misc_feature 1..20: note = chemically synthesized
  source 1..20: mol_type = other DNA
aggattcctaccaattagga

SEQ ID NO: 42994 - DNA, 20 bp, synthetic construct
  misc_feature 1..20: note = chemically synthesized
  source 1..20: mol_type = other DNA
ggtgtttgattcttcaaact

SEQ ID NO: 42995 - DNA, 20 bp, synthetic construct
  misc_feature 1..20: note = chemically synthesized
  source 1..20: mol_type = other DNA
aaacacctccccttaactga

SEQ ID NO: 42996 - DNA, 20 bp, synthetic construct
  misc_feature 1..20: note = chemically synthesized
  source 1..20: mol_type = other DNA
actgatggattcttcaaact

SEQ ID NO: 42997 - DNA, 20 bp, synthetic construct
  misc_feature 1..20: note = chemically synthesized
  source 1..20: mol_type = other DNA
ggattcttcaaactcagcat

SEQ ID NO: 42998 - DNA, 20 bp, synthetic construct
  misc_feature 1..20: note = chemically synthesized
  source 1..20: mol_type = other DNA
tcttcaaactcagcatcagt

SEQ ID NO: 42999 - DNA, 20 bp, synthetic construct
  misc_feature 1..20: note = chemically synthesized
  source 1..20: mol_type = other DNA
ttcaaactcagcatcagtta

SEQ ID NO: 43000 - DNA, 20 bp, synthetic construct
  misc_feature 1..20: note = chemically synthesized
  source 1..20: mol_type = other DNA
tcaaactcagcatcagttag

SEQ ID NO: 43001 - DNA, 20 bp, synthetic construct
  misc_feature 1..20: note = chemically synthesized
  source 1..20: mol_type = other DNA
caaactcagcatcagttaga

SEQ ID NO: 43002 - DNA, 20 bp, synthetic construct
  misc_feature 1..20: note = chemically synthesized
  source 1..20: mol_type = other DNA
cagcatcagttagagggcat

SEQ ID NO: 43003 - DNA, 20 bp, synthetic construct
  misc_feature 1..20: note = chemically synthesized
  source 1..20: mol_type = other DNA
agcatcagttagagggcatt

SEQ ID NO: 43004 - DNA, 20 bp, synthetic construct
  misc_feature 1..20: note = chemically synthesized
  source 1..20: mol_type = other DNA
gcatcagttagagggcatta

SEQ ID NO: 43005 - DNA, 20 bp, synthetic construct
  misc_feature 1..20: note = chemically synthesized
  source 1..20: mol_type = other DNA
cacttctcaaaccctgcatt

SEQ ID NO: 43006 - DNA, 20 bp, synthetic construct
  misc_feature 1..20: note = chemically synthesized
  source 1..20: mol_type = other DNA
acttctcaaaccctgcattc

SEQ ID NO: 43007 - DNA, 20 bp, synthetic construct
  misc_feature 1..20: note = chemically synthesized
  source 1..20: mol_type = other DNA
cttctcaaaccctgcattca

SEQ ID NO: 43008 - DNA, 20 bp, synthetic construct
  misc_feature 1..20: note = chemically synthesized
  source 1..20: mol_type = other DNA
ctcaaaccctgcattcaggg

SEQ ID NO: 43009 - DNA, 20 bp, synthetic construct
  misc_feature 1..20: note = chemically synthesized
  source 1..20: mol_type = other DNA
ttcagggaagatgtctgttg

SEQ ID NO: 43010 - DNA, 20 bp, synthetic construct
  misc_feature 1..20: note = chemically synthesized
  source 1..20: mol_type = other DNA
tcagggaagatgtctgttgt

SEQ ID NO: 43011 - DNA, 20 bp, synthetic construct
  misc_feature 1..20: note = chemically synthesized
  source 1..20: mol_type = other DNA
cagggaagatgtctgttgtg

SEQ ID NO: 43012 - DNA, 20 bp, synthetic construct
  misc_feature 1..20: note = chemically synthesized
  source 1..20: mol_type = other DNA
ggaagatgtctgttgtgggg

SEQ ID NO: 43013 - DNA, 20 bp, synthetic construct
  misc_feature 1..20: note = chemically synthesized
  source 1..20: mol_type = other DNA
atgtctgttgtggggtggtc

SEQ ID NO: 43014 - DNA, 20 bp, synthetic construct
  misc_feature 1..20: note = chemically synthesized
  source 1..20: mol_type = other DNA
gtggggtggtctggcctact

SEQ ID NO: 43015 - DNA, 20 bp, synthetic construct
  misc_feature 1..20: note = chemically synthesized
  source 1..20: mol_type = other DNA
tggtctggcctacttggcct

SEQ ID NO: 43016 - DNA, 20 bp, synthetic construct
  misc_feature 1..20: note = chemically synthesized
  source 1..20: mol_type = other DNA
tggcctacttggcctgagcc

SEQ ID NO: 43017 - DNA, 20 bp, synthetic construct
  misc_feature 1..20: note = chemically synthesized
  source 1..20: mol_type = other DNA
ggcctacttggcctgagcca

SEQ ID NO: 43018 - DNA, 20 bp, synthetic construct
  misc_feature 1..20: note = chemically synthesized
  source 1..20: mol_type = other DNA
cttggcctgagccaaggttc

SEQ ID NO: 43019 - DNA, 20 bp, synthetic construct
  misc_feature 1..20: note = chemically synthesized
  source 1..20: mol_type = other DNA
ttggcctgagccaaggttct

SEQ ID NO: 43020 - DNA, 20 bp, synthetic construct
  misc_feature 1..20: note = chemically synthesized
  source 1..20: mol_type = other DNA
gcctgagccaaggttctggg

SEQ ID NO: 43021 - DNA, 20 bp, synthetic construct
  misc_feature 1..20: note = chemically synthesized
  source 1..20: mol_type = other DNA
aggttctgggcagttctgtt

SEQ ID NO: 43022 - DNA, 20 bp, synthetic construct
  misc_feature 1..20: note = chemically synthesized
  source 1..20: mol_type = other DNA
cagttacacatgcatgcgtt

SEQ ID NO: 43023 - DNA, 20 bp, synthetic construct
  misc_feature 1..20: note = chemically synthesized
  source 1..20: mol_type = other DNA
catgcgttgagcattgattc

SEQ ID NO: 43024 - DNA, 20 bp, synthetic construct
  misc_feature 1..20: note = chemically synthesized
  source 1..20: mol_type = other DNA
gttgagcattgattcaagcc

SEQ ID NO: 43025 - DNA, 20 bp, synthetic construct
  misc_feature 1..20: note = chemically synthesized
  source 1..20: mol_type = other DNA
gcattgattcaagcctggcc

SEQ ID NO: 43026 - DNA, 20 bp, synthetic construct
  misc_feature 1..20: note = chemically synthesized
  source 1..20: mol_type = other DNA
cattgattcaagcctggcct

SEQ ID NO: 43027 - DNA, 20 bp, synthetic construct
  misc_feature 1..20: note = chemically synthesized
  source 1..20: mol_type = other DNA
ttcaagcctggcctgggcac

SEQ ID NO: 43028 - DNA, 20 bp, synthetic construct
  misc_feature 1..20: note = chemically synthesized
  source 1..20: mol_type = other DNA
tcaagcctggcctgggcact

SEQ ID NO: 43029 - DNA, 20 bp, synthetic construct
  misc_feature 1..20: note = chemically synthesized
  source 1..20: mol_type = other DNA
cctggcctgggcactaggca

SEQ ID NO: 43030 - DNA, 20 bp, synthetic construct
  misc_feature 1..20: note = chemically synthesized
  source 1..20: mol_type = other DNA
ctgggcactaggcatggttt

SEQ ID NO: 43031 - DNA, 20 bp, synthetic construct
  misc_feature 1..20: note = chemically synthesized
  source 1..20: mol_type = other DNA
ctaggcatggttttagatat

SEQ ID NO: 43032 - DNA, 20 bp, synthetic construct
  misc_feature 1..20: note = chemically synthesized
  source 1..20: mol_type = other DNA
taggcatggttttagatatt

SEQ ID NO: 43033 - DNA, 20 bp, synthetic construct
  misc_feature 1..20: note = chemically synthesized
  source 1..20: mol_type = other DNA
aggcatggttttagatatta

SEQ ID NO: 43034 - DNA, 20 bp, synthetic construct
  misc_feature 1..20: note = chemically synthesized
  source 1..20: mol_type = other DNA
tattctgttttccttgcctt

SEQ ID NO: 43035 - DNA, 20 bp, synthetic construct
  misc_feature 1..20: note = chemically synthesized
  source 1..20: mol_type = other DNA
ttttccttgccttaagatac

SEQ ID NO: 43036 - DNA, 20 bp, synthetic construct
  misc_feature 1..20: note = chemically synthesized
  source 1..20: mol_type = other DNA
cttgccttaagataccagtc

SEQ ID NO: 43037 - DNA, 20 bp, synthetic construct
  misc_feature 1..20: note = chemically synthesized
  source 1..20: mol_type = other DNA
gccttaagataccagtctag

SEQ ID NO: 43038 - DNA, 20 bp, synthetic construct
  misc_feature 1..20: note = chemically synthesized
  source 1..20: mol_type = other DNA
ccttaagataccagtctagt

SEQ ID NO: 43039 - DNA, 20 bp, synthetic construct
  misc_feature 1..20: note = chemically synthesized
  source 1..20: mol_type = other DNA
ttaagataccagtctagtag

SEQ ID NO: 43040 - DNA, 20 bp, synthetic construct
  misc_feature 1..20: note = chemically synthesized
  source 1..20: mol_type = other DNA
ccagtctagtaggagccact

SEQ ID NO: 43041 - DNA, 20 bp, synthetic construct
  misc_feature 1..20: note = chemically synthesized
  source 1..20: mol_type = other DNA
cagtctagtaggagccacta

SEQ ID NO: 43042 - DNA, 20 bp, synthetic construct
  misc_feature 1..20: note = chemically synthesized
  source 1..20: mol_type = other DNA
agccactaaggccccttttt

SEQ ID NO: 43043 - DNA, 20 bp, synthetic construct
  misc_feature 1..20: note = chemically synthesized
  source 1..20: mol_type = other DNA
ctaaggcccctttttgagcc

SEQ ID NO: 43044 - DNA, 20 bp, synthetic construct
  misc_feature 1..20: note = chemically synthesized
  source 1..20: mol_type = other DNA
aacataccctgcttctaatc

SEQ ID NO: 43045 - DNA, 20 bp, synthetic construct
  misc_feature 1..20: note = chemically synthesized
  source 1..20: mol_type = other DNA
cttctaatcaagtcatctat

SEQ ID NO: 43046 - DNA, 20 bp, synthetic construct
  misc_feature 1..20: note = chemically synthesized
  source 1..20: mol_type = other DNA
ctaatcaagtcatctattgg

SEQ ID NO: 43047 - DNA, 20 bp, synthetic construct
  misc_feature 1..20: note = chemically synthesized
  source 1..20: mol_type = other DNA
tcatctattggcagtgacct

SEQ ID NO: 43048 - DNA, 20 bp, synthetic construct
  misc_feature 1..20: note = chemically synthesized
  source 1..20: mol_type = other DNA
catctattggcagtgacctt

SEQ ID NO: 43049 - DNA, 20 bp, synthetic construct
  misc_feature 1..20: note = chemically synthesized
  source 1..20: mol_type = other DNA
cagtgaccttgggcaaatca

SEQ ID NO: 43050 - DNA, 20 bp, synthetic construct
  misc_feature 1..20: note = chemically synthesized
  source 1..20: mol_type = other DNA
gggcaaatcatagtctctcc

SEQ ID NO: 43051 - DNA, 20 bp, synthetic construct
  misc_feature 1..20: note = chemically synthesized
  source 1..20: mol_type = other DNA
attacttttctaattgaaac

SEQ ID NO: 43052 - DNA, 20 bp, synthetic construct
  misc_feature 1..20: note = chemically synthesized
  source 1..20: mol_type = other DNA
aagaacctctctctataccc

SEQ ID NO: 43053 - DNA, 20 bp, synthetic construct
  misc_feature 1..20: note = chemically synthesized
  source 1..20: mol_type = other DNA
ctataccccagatttatttt

SEQ ID NO: 43054 - DNA, 20 bp, synthetic construct
  misc_feature 1..20: note = chemically synthesized
  source 1..20: mol_type = other DNA
tataccccagatttattttg

SEQ ID NO: 43055 - DNA, 20 bp, synthetic construct
  misc_feature 1..20: note = chemically synthesized
  source 1..20: mol_type = other DNA
agatttattttgaggattat

SEQ ID NO: 43056 - DNA, 20 bp, synthetic construct
  misc_feature 1..20: note = chemically synthesized
  source 1..20: mol_type = other DNA
gaggattatgagttaattca

SEQ ID NO: 43057 - DNA, 20 bp, synthetic construct
  misc_feature 1..20: note = chemically synthesized
  source 1..20: mol_type = other DNA
taattcatagctaaaatgct

SEQ ID NO: 43058 - DNA, 20 bp, synthetic construct
  misc_feature 1..20: note = chemically synthesized
  source 1..20: mol_type = other DNA
ctaaaatgcttagcacctaa

SEQ ID NO: 43059 - DNA, 20 bp, synthetic construct
  misc_feature 1..20: note = chemically synthesized
  source 1..20: mol_type = other DNA
ttcaattgcgtattactaaa

SEQ ID NO: 43060 - DNA, 20 bp, synthetic construct
  misc_feature 1..20: note = chemically synthesized
  source 1..20: mol_type = other DNA
aattgcgtattactaaaaag

SEQ ID NO: 43061 - DNA, 20 bp, synthetic construct
  misc_feature 1..20: note = chemically synthesized
  source 1..20: mol_type = other DNA
attgcgtattactaaaaaga

SEQ ID NO: 43062 - DNA, 20 bp, synthetic construct
  misc_feature 1..20: note = chemically synthesized
  source 1..20: mol_type = other DNA
aaaaagaaggaatgatttcc

SEQ ID NO: 43063 - DNA, 20 bp, synthetic construct
  misc_feature 1..20: note = chemically synthesized
  source 1..20: mol_type = other DNA
aaagaaggaatgatttccta

SEQ ID NO: 43064 - DNA, 20 bp, synthetic construct
  misc_feature 1..20: note = chemically synthesized
  source 1..20: mol_type = other DNA
aagaaggaatgatttcctag

SEQ ID NO: 43065 - DNA, 20 bp, synthetic construct
  misc_feature 1..20: note = chemically synthesized
  source 1..20: mol_type = other DNA
gaaggaatgatttcctagag

SEQ ID NO: 43066 - DNA, 20 bp, synthetic construct
  misc_feature 1..20: note = chemically synthesized
  source 1..20: mol_type = other DNA
aaggaatgatttcctagagg

SEQ ID NO: 43067 - DNA, 20 bp, synthetic construct
  misc_feature 1..20: note = chemically synthesized
  source 1..20: mol_type = other DNA
cctagaggaggtgcttcttc

SEQ ID NO: 43068 - DNA, 20 bp, synthetic construct
  misc_feature 1..20: note = chemically synthesized
  source 1..20: mol_type = other DNA
aggaggtgcttcttctggcc

SEQ ID NO: 43069 - DNA, 20 bp, synthetic construct
  misc_feature 1..20: note = chemically synthesized
  source 1..20: mol_type = other DNA
ggaggtgcttcttctggcca

SEQ ID NO: 43070 - DNA, 20 bp, synthetic construct
  misc_feature 1..20: note = chemically synthesized
  source 1..20: mol_type = other DNA
gaggtgcttcttctggccaa

SEQ ID NO: 43071 - DNA, 20 bp, synthetic construct
  misc_feature 1..20: note = chemically synthesized
  source 1..20: mol_type = other DNA
cttctggccaagggctgatt

SEQ ID NO: 43072 - DNA, 20 bp, synthetic construct
  misc_feature 1..20: note = chemically synthesized
  source 1..20: mol_type = other DNA
tctggccaagggctgattca

SEQ ID NO: 43073 - DNA, 20 bp, synthetic construct
  misc_feature 1..20: note = chemically synthesized
  source 1..20: mol_type = other DNA
cagagccttaattaactaaa

SEQ ID NO: 43074 - DNA, 20 bp, synthetic construct
  misc_feature 1..20: note = chemically synthesized
  source 1..20: mol_type = other DNA
cttaattaactaaatagatc

SEQ ID NO: 43075 - DNA, 20 bp, synthetic construct
  misc_feature 1..20: note = chemically synthesized
  source 1..20: mol_type = other DNA
atagatcaagcatatctaac

SEQ ID NO: 43076 - DNA, 20 bp, synthetic construct
  misc_feature 1..20: note = chemically synthesized
  source 1..20: mol_type = other DNA
aagcatatctaactggtcac

SEQ ID NO: 43077 - DNA, 20 bp, synthetic construct
  misc_feature 1..20: note = chemically synthesized
  source 1..20: mol_type = other DNA
catatctaactggtcaccgg

SEQ ID NO: 43078 - DNA, 20 bp, synthetic construct
  misc_feature 1..20: note = chemically synthesized
  source 1..20: mol_type = other DNA
atctaactggtcaccggaag

SEQ ID NO: 43079 - DNA, 20 bp, synthetic construct
  misc_feature 1..20: note = chemically synthesized
  source 1..20: mol_type = other DNA
ggtcaccggaagtggtccat

SEQ ID NO: 43080 - DNA, 20 bp, synthetic construct
  misc_feature 1..20: note = chemically synthesized
  source 1..20: mol_type = other DNA
gtcaccggaagtggtccatg

SEQ ID NO: 43081 - DNA, 20 bp, synthetic construct
  misc_feature 1..20: note = chemically synthesized
  source 1..20: mol_type = other DNA
ggaagtggtccatgaggctg

SEQ ID NO: 43082 - DNA, 20 bp, synthetic construct
  misc_feature 1..20: note = chemically synthesized
  source 1..20: mol_type = other DNA
ggtccatgaggctgcagcaa

SEQ ID NO: 43083 - DNA, 20 bp, synthetic construct
  misc_feature 1..20: note = chemically synthesized
  source 1..20: mol_type = other DNA
gtccatgaggctgcagcaat

SEQ ID NO: 43084 - DNA, 20 bp, synthetic construct
  misc_feature 1..20: note = chemically synthesized
  source 1..20: mol_type = other DNA
catgaggctgcagcaatggg

SEQ ID NO: 43085 - DNA, 20 bp, synthetic construct
  misc_feature 1..20: note = chemically synthesized
  source 1..20: mol_type = other DNA
atgaggctgcagcaatggga

SEQ ID NO: 43086 - DNA, 20 bp, synthetic construct
  misc_feature 1..20: note = chemically synthesized
  source 1..20: mol_type = other DNA
ctgcagcaatgggaaggtgt

SEQ ID NO: 43087 - DNA, 20 bp, synthetic construct
  misc_feature 1..20: note = chemically synthesized
  source 1..20: mol_type = other DNA
gcagcaatgggaaggtgtca

SEQ ID NO: 43088 - DNA, 20 bp, synthetic construct
  misc_feature 1..20: note = chemically synthesized
  source 1..20: mol_type = other DNA
gcaatgggaaggtgtcagag

SEQ ID NO: 43089 - DNA, 20 bp, synthetic construct
  misc_feature 1..20: note = chemically synthesized
  source 1..20: mol_type = other DNA
caatgggaaggtgtcagagc

SEQ ID NO: 43090 - DNA, 20 bp, synthetic construct
  misc_feature 1..20: note = chemically synthesized
  source 1..20: mol_type = other DNA
aatgggaaggtgtcagagca

SEQ ID NO: 43091 - DNA, 20 bp, synthetic construct
  misc_feature 1..20: note = chemically synthesized
  source 1..20: mol_type = other DNA
atgggaaggtgtcagagcag

SEQ ID NO: 43092 - DNA, 20 bp, synthetic construct
  misc_feature 1..20: note = chemically synthesized
  source 1..20: mol_type = other DNA
gaaggtgtcagagcaggggt

SEQ ID NO: 43093 - DNA, 20 bp, synthetic construct
  misc_feature 1..20: note = chemically synthesized
  source 1..20: mol_type = other DNA
aaggtgtcagagcaggggtt

SEQ ID NO: 43094 - DNA, 20 bp, synthetic construct
  misc_feature 1..20: note = chemically synthesized
  source 1..20: mol_type = other DNA
tcagagcaggggttgggaaa

SEQ ID NO: 43095 - DNA, 20 bp, synthetic construct
  misc_feature 1..20: note = chemically synthesized
  source 1..20: mol_type = other DNA
caggggttgggaaaaagaca

SEQ ID NO: 43096 - DNA, 20 bp, synthetic construct
  misc_feature 1..20: note = chemically synthesized
  source 1..20: mol_type = other DNA
ggggttgggaaaaagacata

SEQ ID NO: 43097 - DNA, 20 bp, synthetic construct
  misc_feature 1..20: note = chemically synthesized
  source 1..20: mol_type = other DNA
ggttgggaaaaagacataga

SEQ ID NO: 43098 - DNA, 20 bp, synthetic construct
  misc_feature 1..20: note = chemically synthesized
  source 1..20: mol_type = other DNA
gagagaaacgtgcatgtccg

SEQ ID NO: 43099 - DNA, 20 bp, synthetic construct
  misc_feature 1..20: note = chemically synthesized
  source 1..20: mol_type = other DNA
agaaacgtgcatgtccgtag

SEQ ID NO: 43100 - DNA, 20 bp, synthetic construct
  misc_feature 1..20: note = chemically synthesized
  source 1..20: mol_type = other DNA
aaacgtgcatgtccgtagtg

SEQ ID NO: 43101 - DNA, 20 bp, synthetic construct
  misc_feature 1..20: note = chemically synthesized
  source 1..20: mol_type = other DNA
aacgtgcatgtccgtagtgg

SEQ ID NO: 43102 - DNA, 20 bp, synthetic construct
  misc_feature 1..20: note = chemically synthesized
  source 1..20: mol_type = other DNA
acgtgcatgtccgtagtgga

SEQ ID NO: 43103 - DNA, 20 bp, synthetic construct
  misc_feature 1..20: note = chemically synthesized
  source 1..20: mol_type = other DNA
cgtgcatgtccgtagtggag

SEQ ID NO: 43104 - DNA, 20 bp, synthetic construct
  misc_feature 1..20: note = chemically synthesized
  source 1..20: mol_type = other DNA
tgcatgtccgtagtggaggg

SEQ ID NO: 43105 - DNA, 20 bp, synthetic construct
  misc_feature 1..20: note = chemically synthesized
  source 1..20: mol_type = other DNA
ccgtagtggaggggagctct

SEQ ID NO: 43106 - DNA, 20 bp, synthetic construct
  misc_feature 1..20: note = chemically synthesized
  source 1..20: mol_type = other DNA
cgtagtggaggggagctctt

SEQ ID NO: 43107 - DNA, 20 bp, synthetic construct
  misc_feature 1..20: note = chemically synthesized
  source 1..20: mol_type = other DNA
gggagctcttaggatgtcta

SEQ ID NO: 43108 - DNA, 20 bp, synthetic construct
  misc_feature 1..20: note = chemically synthesized
  source 1..20: mol_type = other DNA
taggatgtctacagatttcc

SEQ ID NO: 43109 - DNA, 20 bp, synthetic construct
  misc_feature 1..20: note = chemically synthesized
  source 1..20: mol_type = other DNA
gacaataattgaaatgaaca

SEQ ID NO: 43110 - DNA, 20 bp, synthetic construct
  misc_feature 1..20: note = chemically synthesized
  source 1..20: mol_type = other DNA
acaataattgaaatgaacaa

SEQ ID NO: 43111 - DNA, 20 bp, synthetic construct
  misc_feature 1..20: note = chemically synthesized
  source 1..20: mol_type = other DNA
taattgaaatgaacaaaggc

SEQ ID NO: 43112 - DNA, 20 bp, synthetic construct
  misc_feature 1..20: note = chemically synthesized
  source 1..20: mol_type = other DNA
aattgaaatgaacaaaggca

SEQ ID NO: 43113 - DNA, 20 bp, synthetic construct
  misc_feature 1..20: note = chemically synthesized
  source 1..20: mol_type = other DNA
attgaaatgaacaaaggcaa

SEQ ID NO: 43114 - DNA, 20 bp, synthetic construct
  misc_feature 1..20: note = chemically synthesized
  source 1..20: mol_type = other DNA
aaaggcaagggatgaccaat

SEQ ID NO: 43115 - DNA, 20 bp, synthetic construct
  misc_feature 1..20: note = chemically synthesized
  source 1..20: mol_type = other DNA
aggcaagggatgaccaataa

SEQ ID NO: 43116 - DNA, 20 bp, synthetic construct
  misc_feature 1..20: note = chemically synthesized
  source 1..20: mol_type = other DNA
atcacctttcccttgttctt

SEQ ID NO: 43117 - DNA, 20 bp, synthetic construct
  misc_feature 1..20: note = chemically synthesized
  source 1..20: mol_type = other DNA
tttcccttgttcttcagctc

SEQ ID NO: 43118 - DNA, 20 bp, synthetic construct
  misc_feature 1..20: note = chemically synthesized
  source 1..20: mol_type = other DNA
ttcagctccagctgtgccca

SEQ ID NO: 43119 - DNA, 20 bp, synthetic construct
  misc_feature 1..20: note = chemically synthesized
  source 1..20: mol_type = other DNA
agctgtgcccacagacacca

SEQ ID NO: 43120 - DNA, 20 bp, synthetic construct
  misc_feature 1..20: note = chemically synthesized
  source 1..20: mol_type = other DNA
gctgtgcccacagacaccac

SEQ ID NO: 43121 - DNA, 20 bp, synthetic construct
  misc_feature 1..20: note = chemically synthesized
  source 1..20: mol_type = other DNA
ctgtgcccacagacaccaca

SEQ ID NO: 43122 - DNA, 20 bp, synthetic construct
  misc_feature 1..20: note = chemically synthesized
  source 1..20: mol_type = other DNA
tgcccacagacaccacaggg

SEQ ID NO: 43123 - DNA, 20 bp, synthetic construct
  misc_feature 1..20: note = chemically synthesized
  source 1..20: mol_type = other DNA
cacagggaagcctctgaaca

SEQ ID NO: 43124 - DNA, 20 bp, synthetic construct
  misc_feature 1..20: note = chemically synthesized
  source 1..20: mol_type = other DNA
acagggaagcctctgaacac

SEQ ID NO: 43125 - DNA, 20 bp, synthetic construct
  misc_feature 1..20: note = chemically synthesized
  source 1..20: mol_type = other DNA
cagggaagcctctgaacaca

SEQ ID NO: 43126 - DNA, 20 bp, synthetic construct
  misc_feature 1..20: note = chemically synthesized
  source 1..20: mol_type = other DNA
agggaagcctctgaacacag

SEQ ID NO: 43127 - DNA, 20 bp, synthetic construct
  misc_feature 1..20: note = chemically synthesized
  source 1..20: mol_type = other DNA
ctgaacacaggggtttgaac

SEQ ID NO: 43128 - DNA, 20 bp, synthetic construct
  misc_feature 1..20: note = chemically synthesized
  source 1..20: mol_type = other DNA
tgaacacaggggtttgaacc

SEQ ID NO: 43129 - DNA, 20 bp, synthetic construct
  misc_feature 1..20: note = chemically synthesized
  source 1..20: mol_type = other DNA
gaacacaggggtttgaacca

SEQ ID NO: 43130 - DNA, 20 bp, synthetic construct
  misc_feature 1..20: note = chemically synthesized
  source 1..20: mol_type = other DNA
gtttgaaccagggcctctct

SEQ ID NO: 43131 - DNA, 20 bp, synthetic construct
  misc_feature 1..20: note = chemically synthesized
  source 1..20: mol_type = other DNA
tttccaactctgataccctg

SEQ ID NO: 43132 - DNA, 20 bp, synthetic construct
  misc_feature 1..20: note = chemically synthesized
  source 1..20: mol_type = other DNA
ctctgataccctgaagttct

SEQ ID NO: 43133 - DNA, 20 bp, synthetic construct
  misc_feature 1..20: note = chemically synthesized
  source 1..20: mol_type = other DNA
tcagaaacttccataaattt

SEQ ID NO: 43134 - DNA, 20 bp, synthetic construct
  misc_feature 1..20: note = chemically synthesized
  source 1..20: mol_type = other DNA
acttccataaattttggctg

SEQ ID NO: 43135 - DNA, 20 bp, synthetic construct
  misc_feature 1..20: note = chemically synthesized
  source 1..20: mol_type = other DNA
tccataaattttggctgaag

SEQ ID NO: 43136 - DNA, 20 bp, synthetic construct
  misc_feature 1..20: note = chemically synthesized
  source 1..20: mol_type = other DNA
aattttggctgaagaagcca

SEQ ID NO: 43137 - DNA, 20 bp, synthetic construct
  misc_feature 1..20: note = chemically synthesized
  source 1..20: mol_type = other DNA
agaagccatagcaaacttgt

SEQ ID NO: 43138 - DNA, 20 bp, synthetic construct
  misc_feature 1..20: note = chemically synthesized
  source 1..20: mol_type = other DNA
gccatagcaaacttgtcaga

SEQ ID NO: 43139 - DNA, 20 bp, synthetic construct
  misc_feature 1..20: note = chemically synthesized
  source 1..20: mol_type = other DNA
atggtttcttacctttaact

SEQ ID NO: 43140 - DNA, 20 bp, synthetic construct
  misc_feature 1..20: note = chemically synthesized
  source 1..20: mol_type = other DNA
ttttctctctcctctatgtg

SEQ ID NO: 43141 - DNA, 20 bp, synthetic construct
  misc_feature 1..20: note = chemically synthesized
  source 1..20: mol_type = other DNA
tcctctatgtgtggtgactt

SEQ ID NO: 43142 - DNA, 20 bp, synthetic construct
  misc_feature 1..20: note = chemically synthesized
  source 1..20: mol_type = other DNA
cctctatgtgtggtgacttc

SEQ ID NO: 43143 - DNA, 20 bp, synthetic construct
  misc_feature 1..20: note = chemically synthesized
  source 1..20: mol_type = other DNA
tgtggtgacttcaggaaacc

SEQ ID NO: 43144 - DNA, 20 bp, synthetic construct
  misc_feature 1..20: note = chemically synthesized
  source 1..20: mol_type = other DNA
gtggtgacttcaggaaaccc

SEQ ID NO: 43145 - DNA, 20 bp, synthetic construct
  misc_feature 1..20: note = chemically synthesized
  source 1..20: mol_type = other DNA
gacttcaggaaacccaggcc

SEQ ID NO: 43146 - DNA, 20 bp, synthetic construct
  misc_feature 1..20: note = chemically synthesized
  source 1..20: mol_type = other DNA
cttcaggaaacccaggccca

SEQ ID NO: 43147 - DNA, 20 bp, synthetic construct
  misc_feature 1..20: note = chemically synthesized
  source 1..20: mol_type = other DNA
ttcaggaaacccaggcccag

SEQ ID NO: 43148 - DNA, 20 bp, synthetic construct
  misc_feature 1..20: note = chemically synthesized
  source 1..20: mol_type = other DNA
acccaggcccagaggatata

SEQ ID NO: 43149 - DNA, 20 bp, synthetic construct
  misc_feature 1..20: note = chemically synthesized
  source 1..20: mol_type = other DNA
ttctccttcaaaccactctt

SEQ ID NO: 43150 - DNA, 20 bp, synthetic construct
  misc_feature 1..20: note = chemically synthesized
  source 1..20: mol_type = other DNA
aaaccactctttggatattc

SEQ ID NO: 43151 - DNA, 20 bp, synthetic construct
  misc_feature 1..20: note = chemically synthesized
  source 1..20: mol_type = other DNA
actgcttcactgcgcttcac

SEQ ID NO: 43152 - DNA, 20 bp, synthetic construct
  misc_feature 1..20: note = chemically synthesized
  source 1..20: mol_type = other DNA
cttcactgcgcttcactggt

SEQ ID NO: 43153 - DNA, 20 bp, synthetic construct
  misc_feature 1..20: note = chemically synthesized
  source 1..20: mol_type = other DNA
ggtcagtgcgtcactcaaac

SEQ ID NO: 43154 - DNA, 20 bp, synthetic construct
  misc_feature 1..20: note = chemically synthesized
  source 1..20: mol_type = other DNA
gcgtcactcaaactagctga

SEQ ID NO: 43155 - DNA, 20 bp, synthetic construct
  misc_feature 1..20: note = chemically synthesized
  source 1..20: mol_type = other DNA
agaattgtctaactcataca

SEQ ID NO: 43156 - DNA, 20 bp, synthetic construct
  misc_feature 1..20: note = chemically synthesized
  source 1..20: mol_type = other DNA
gaattgtctaactcatacac

SEQ ID NO: 43157 - DNA, 20 bp, synthetic construct
  misc_feature 1..20: note = chemically synthesized
  source 1..20: mol_type = other DNA
aattgtctaactcatacaca

SEQ ID NO: 43158 - DNA, 20 bp, synthetic construct
  misc_feature 1..20: note = chemically synthesized
  source 1..20: mol_type = other DNA
ctaactcatacacagggaca

SEQ ID NO: 43159 - DNA, 20 bp, synthetic construct
  misc_feature 1..20: note = chemically synthesized
  source 1..20: mol_type = other DNA
tcatacacagggacaaagtc

SEQ ID NO: 43160 - DNA, 20 bp, synthetic construct
  misc_feature 1..20: note = chemically synthesized
  source 1..20: mol_type = other DNA
acacagggacaaagtccagc

SEQ ID NO: 43161 - DNA, 20 bp, synthetic construct
  misc_feature 1..20: note = chemically synthesized
  source 1..20: mol_type = other DNA
gtccagcaagcttatttaac

SEQ ID NO: 43162 - DNA, 20 bp, synthetic construct
  misc_feature 1..20: note = chemically synthesized
  source 1..20: mol_type = other DNA
accggttacacaattgcctt

SEQ ID NO: 43163 - DNA, 20 bp, synthetic construct
  misc_feature 1..20: note = chemically synthesized
  source 1..20: mol_type = other DNA
acaattgcctttggttttta

SEQ ID NO: 43164 - DNA, 20 bp, synthetic construct
  misc_feature 1..20: note = chemically synthesized
  source 1..20: mol_type = other DNA
ggtttttacagtttgttcct

SEQ ID NO: 43165 - DNA, 20 bp, synthetic construct
  misc_feature 1..20: note = chemically synthesized
  source 1..20: mol_type = other DNA
agtttgttcctaagtgtttc

SEQ ID NO: 43166 - DNA, 20 bp, synthetic construct
  misc_feature 1..20: note = chemically synthesized
  source 1..20: mol_type = other DNA
tttgttcctaagtgtttcca

SEQ ID NO: 43167 - DNA, 20 bp, synthetic construct
  misc_feature 1..20: note = chemically synthesized
  source 1..20: mol_type = other DNA
ttgttcctaagtgtttccag

SEQ ID NO: 43168 - DNA, 20 bp, synthetic construct
  misc_feature 1..20: note = chemically synthesized
  source 1..20: mol_type = other DNA
cctaagtgtttccagaggct

SEQ ID NO: 43169 - DNA, 20 bp, synthetic construct
  misc_feature 1..20: note = chemically synthesized
  source 1..20: mol_type = other DNA
ggcttggttcctcttcacct

SEQ ID NO: 43170 - DNA, 20 bp, synthetic construct
  misc_feature 1..20: note = chemically synthesized
  source 1..20: mol_type = other DNA
gcttggttcctcttcacctg

SEQ ID NO: 43171 - DNA, 20 bp, synthetic construct
  misc_feature 1..20: note = chemically synthesized
  source 1..20: mol_type = other DNA
tggttcctcttcacctgagg

SEQ ID NO: 43172 - DNA, 20 bp, synthetic construct
  misc_feature 1..20: note = chemically synthesized
  source 1..20: mol_type = other DNA
gttcctcttcacctgaggta

SEQ ID NO: 43173 - DNA, 20 bp, synthetic construct
  misc_feature 1..20: note = chemically synthesized
  source 1..20: mol_type = other DNA
gattgaccaattatttattc

SEQ ID NO: 43174 - DNA, 20 bp, synthetic construct
  misc_feature 1..20: note = chemically synthesized
  source 1..20: mol_type = other DNA
caattatttattccagttaa

SEQ ID NO: 43175 - DNA, 20 bp, synthetic construct
  misc_feature 1..20: note = chemically synthesized
  source 1..20: mol_type = other DNA
ttatttattccagttaaaag

SEQ ID NO: 43176 - DNA, 20 bp, synthetic construct
  misc_feature 1..20: note = chemically synthesized
  source 1..20: mol_type = other DNA
tatttattccagttaaaagt

SEQ ID NO: 43177 - DNA, 20 bp, synthetic construct
  misc_feature 1..20: note = chemically synthesized
  source 1..20: mol_type = other DNA
taaaagtaggcttatttcaa

SEQ ID NO: 43178 - DNA, 20 bp, synthetic construct
  misc_feature 1..20: note = chemically synthesized
  source 1..20: mol_type = other DNA
aaaagtaggcttatttcaaa

SEQ ID NO: 43179 - DNA, 20 bp, synthetic construct
  misc_feature 1..20: note = chemically synthesized
  source 1..20: mol_type = other DNA
agtaggcttatttcaaaagg

SEQ ID NO: 43180 - DNA, 20 bp, synthetic construct
  misc_feature 1..20: note = chemically synthesized
  source 1..20: mol_type = other DNA
taggcttatttcaaaaggca

SEQ ID NO: 43181 - DNA, 20 bp, synthetic construct
  misc_feature 1..20: note = chemically synthesized
  source 1..20: mol_type = other DNA
ttcaaaaggcagagaatttg

SEQ ID NO: 43182 - DNA, 20 bp, synthetic construct
  misc_feature 1..20: note = chemically synthesized
  source 1..20: mol_type = other DNA
ggcagagaatttgaagctat

SEQ ID NO: 43183 - DNA, 20 bp, synthetic construct
  misc_feature 1..20: note = chemically synthesized
  source 1..20: mol_type = other DNA
gcagagaatttgaagctatc

SEQ ID NO: 43184 - DNA, 20 bp, synthetic construct
  misc_feature 1..20: note = chemically synthesized
  source 1..20: mol_type = other DNA
cagagaatttgaagctatcg

SEQ ID NO: 43185 - DNA, 20 bp, synthetic construct
  misc_feature 1..20: note = chemically synthesized
  source 1..20: mol_type = other DNA
gaatttgaagctatcgggga

SEQ ID NO: 43186 - DNA, 20 bp, synthetic construct
  misc_feature 1..20: note = chemically synthesized
  source 1..20: mol_type = other DNA
aatttgaagctatcggggaa

SEQ ID NO: 43187 - DNA, 20 bp, synthetic construct
  misc_feature 1..20: note = chemically synthesized
  source 1..20: mol_type = other DNA
gctatcggggaaaggaactg

SEQ ID NO: 43188 - DNA, 20 bp, synthetic construct
  misc_feature 1..20: note = chemically synthesized
  source 1..20: mol_type = other DNA
atcggggaaaggaactgtgg

SEQ ID NO: 43189 - DNA, 20 bp, synthetic construct
  misc_feature 1..20: note = chemically synthesized
  source 1..20: mol_type = other DNA
gggaaaggaactgtggcaga

SEQ ID NO: 43190 - DNA, 20 bp, synthetic construct
  misc_feature 1..20: note = chemically synthesized
  source 1..20: mol_type = other DNA
cagatagtgcctgctgtgtg

SEQ ID NO: 43191 - DNA, 20 bp, synthetic construct
  misc_feature 1..20: note = chemically synthesized
  source 1..20: mol_type = other DNA
atagtgcctgctgtgtgtgg

SEQ ID NO: 43192 - DNA, 20 bp, synthetic construct
  misc_feature 1..20: note = chemically synthesized
  source 1..20: mol_type = other DNA
agtgcctgctgtgtgtggtg

SEQ ID NO: 43193 - DNA, 20 bp, synthetic construct
  misc_feature 1..20: note = chemically synthesized
  source 1..20: mol_type = other DNA
gtgcctgctgtgtgtggtgg

SEQ ID NO: 43194 - DNA, 20 bp, synthetic construct
  misc_feature 1..20: note = chemically synthesized
  source 1..20: mol_type = other DNA
gtggtggaggattctctgct

SEQ ID NO: 43195 - DNA, 20 bp, synthetic construct
  misc_feature 1..20: note = chemically synthesized
  source 1..20: mol_type = other DNA
ttctctgctcagtcctgact

SEQ ID NO: 43196 - DNA, 20 bp, synthetic construct
  misc_feature 1..20: note = chemically synthesized
  source 1..20: mol_type = other DNA
tctctgctcagtcctgactc

SEQ ID NO: 43197 - DNA, 20 bp, synthetic construct
  misc_feature 1..20: note = chemically synthesized
  source 1..20: mol_type = other DNA
tgctcagtcctgactcaggc

SEQ ID NO: 43198 - DNA, 20 bp, synthetic construct
  misc_feature 1..20: note = chemically synthesized
  source 1..20: mol_type = other DNA
gctcagtcctgactcaggct

SEQ ID NO: 43199 - DNA, 20 bp, synthetic construct
  misc_feature 1..20: note = chemically synthesized
  source 1..20: mol_type = other DNA
cagtcctgactcaggctagg

SEQ ID NO: 43200 - DNA, 20 bp, synthetic construct
  misc_feature 1..20: note = chemically synthesized
  source 1..20: mol_type = other DNA
agtcctgactcaggctagga

SEQ ID NO: 43201 - DNA, 20 bp, synthetic construct
  misc_feature 1..20: note = chemically synthesized
  source 1..20: mol_type = other DNA
tgactcaggctaggaaggaa

SEQ ID NO: 43202 - DNA, 20 bp, synthetic construct
  misc_feature 1..20: note = chemically synthesized
  source 1..20: mol_type = other DNA
gactcaggctaggaaggaac

SEQ ID NO: 43203 - DNA, 20 bp, synthetic construct
  misc_feature 1..20: note = chemically synthesized
  source 1..20: mol_type = other DNA
actcaggctaggaaggaaca

SEQ ID NO: 43204 - DNA, 20 bp, synthetic construct
  misc_feature 1..20: note = chemically synthesized
  source 1..20: mol_type = other DNA
caggctaggaaggaacaggg

SEQ ID NO: 43205 - DNA, 20 bp, synthetic construct
  misc_feature 1..20: note = chemically synthesized
  source 1..20: mol_type = other DNA
ggaaggaacagggcagtgct

SEQ ID NO: 43206 - DNA, 20 bp, synthetic construct
  misc_feature 1..20: note = chemically synthesized
  source 1..20: mol_type = other DNA
cagggcagtgctgagtctcc

SEQ ID NO: 43207 - DNA, 20 bp, synthetic construct
  misc_feature 1..20: note = chemically synthesized
  source 1..20: mol_type = other DNA
gggcagtgctgagtctcctg

SEQ ID NO: 43208 - DNA, 20 bp, synthetic construct
  misc_feature 1..20: note = chemically synthesized
  source 1..20: mol_type = other DNA
agcactgccctgttccttcc

SEQ ID NO: 43209 - DNA, 20 bp, synthetic construct
  misc_feature 1..20: note = chemically synthesized
  source 1..20: mol_type = other DNA
gccctgttccttcctagcct

SEQ ID NO: 43210 - DNA, 20 bp, synthetic construct
  misc_feature 1..20: note = chemically synthesized
  source 1..20: mol_type = other DNA
tgttccttcctagcctgagt

SEQ ID NO: 43211 - DNA, 20 bp, synthetic construct
  misc_feature 1..20: note = chemically synthesized
  source 1..20: mol_type = other DNA
gttccttcctagcctgagtc

SEQ ID NO: 43212 - DNA, 20 bp, synthetic construct
  misc_feature 1..20: note = chemically synthesized
  source 1..20: mol_type = other DNA
tcctagcctgagtcaggact

SEQ ID NO: 43213 - DNA, 20 bp, synthetic construct
  misc_feature 1..20: note = chemically synthesized
  source 1..20: mol_type = other DNA
tagcctgagtcaggactgag

SEQ ID NO: 43214 - DNA, 20 bp, synthetic construct
  misc_feature 1..20: note = chemically synthesized
  source 1..20: mol_type = other DNA
gcctgagtcaggactgagca

SEQ ID NO: 43215 - DNA, 20 bp, synthetic construct
  misc_feature 1..20: note = chemically synthesized
  source 1..20: mol_type = other DNA
agagaatcctccaccacaca

SEQ ID NO: 43216 - DNA, 20 bp, synthetic construct
  misc_feature 1..20: note = chemically synthesized
  source 1..20: mol_type = other DNA
gaatcctccaccacacacag

SEQ ID NO: 43217 - DNA, 20 bp, synthetic construct
  misc_feature 1..20: note = chemically synthesized
  source 1..20: mol_type = other DNA
aatcctccaccacacacagc

SEQ ID NO: 43218 - DNA, 20 bp, synthetic construct
  misc_feature 1..20: note = chemically synthesized
  source 1..20: mol_type = other DNA
acagcaggcactatctgcca

SEQ ID NO: 43219 - DNA, 20 bp, synthetic construct
  misc_feature 1..20: note = chemically synthesized
  source 1..20: mol_type = other DNA
gccacagttcctttccccga

SEQ ID NO: 43220 - DNA, 20 bp, synthetic construct
  misc_feature 1..20: note = chemically synthesized
  source 1..20: mol_type = other DNA
aattctctgccttttgaaat

SEQ ID NO: 43221 - DNA, 20 bp, synthetic construct
  misc_feature 1..20: note = chemically synthesized
  source 1..20: mol_type = other DNA
gaaataagcctacttttaac

SEQ ID NO: 43222 - DNA, 20 bp, synthetic construct
  misc_feature 1..20: note = chemically synthesized
  source 1..20: mol_type = other DNA
ttttaactggaataaataat

SEQ ID NO: 43223 - DNA, 20 bp, synthetic construct
  misc_feature 1..20: note = chemically synthesized
  source 1..20: mol_type = other DNA
taattggtcaatctctacct

SEQ ID NO: 43224 - DNA, 20 bp, synthetic construct
  misc_feature 1..20: note = chemically synthesized
  source 1..20: mol_type = other DNA
aattggtcaatctctacctc

SEQ ID NO: 43225 - DNA, 20 bp, synthetic construct
  misc_feature 1..20: note = chemically synthesized
  source 1..20: mol_type = other DNA
gtcaatctctacctcaggtg

SEQ ID NO: 43226 - DNA, 20 bp, synthetic construct
  misc_feature 1..20: note = chemically synthesized
  source 1..20: mol_type = other DNA
caatctctacctcaggtgaa

SEQ ID NO: 43227 - DNA, 20 bp, synthetic construct
  misc_feature 1..20: note = chemically synthesized
  source 1..20: mol_type = other DNA
aatctctacctcaggtgaag

SEQ ID NO: 43228 - DNA, 20 bp, synthetic construct
  misc_feature 1..20: note = chemically synthesized
  source 1..20: mol_type = other DNA
acctcaggtgaagaggaacc

SEQ ID NO: 43229 - DNA, 20 bp, synthetic construct
  misc_feature 1..20: note = chemically synthesized
  source 1..20: mol_type = other DNA
gtgaagaggaaccaagcctc

SEQ ID NO: 43230 - DNA, 20 bp, synthetic construct
  misc_feature 1..20: note = chemically synthesized
  source 1..20: mol_type = other DNA
accaagcctctggaaacact

SEQ ID NO: 43231 - DNA, 20 bp, synthetic construct
  misc_feature 1..20: note = chemically synthesized
  source 1..20: mol_type = other DNA
ccaagcctctggaaacactt

SEQ ID NO: 43232 - DNA, 20 bp, synthetic construct
  misc_feature 1..20: note = chemically synthesized
  source 1..20: mol_type = other DNA
ggaacaaactgtaaaaacca

SEQ ID NO: 43233 - DNA, 20 bp, synthetic construct
  misc_feature 1..20: note = chemically synthesized
  source 1..20: mol_type = other DNA
gaacaaactgtaaaaaccaa

SEQ ID NO: 43234 - DNA, 20 bp, synthetic construct
  misc_feature 1..20: note = chemically synthesized
  source 1..20: mol_type = other DNA
accaaaggcaattgtgtaac

SEQ ID NO: 43235 - DNA, 20 bp, synthetic construct
  misc_feature 1..20: note = chemically synthesized
  source 1..20: mol_type = other DNA
aattgtgtaaccggttaaat

SEQ ID NO: 43236 - DNA, 20 bp, synthetic construct
  misc_feature 1..20: note = chemically synthesized
  source 1..20: mol_type = other DNA
aaccggttaaataagcttgc

SEQ ID NO: 43237 - DNA, 20 bp, synthetic construct
  misc_feature 1..20: note = chemically synthesized
  source 1..20: mol_type = other DNA
tggactttgtccctgtgtat

SEQ ID NO: 43238 - DNA, 20 bp, synthetic construct
  misc_feature 1..20: note = chemically synthesized
  source 1..20: mol_type = other DNA
ctttgtccctgtgtatgagt

SEQ ID NO: 43239 - DNA, 20 bp, synthetic construct
  misc_feature 1..20: note = chemically synthesized
  source 1..20: mol_type = other DNA
tatgagttagacaattcttt

SEQ ID NO: 43240 - DNA, 20 bp, synthetic construct
  misc_feature 1..20: note = chemically synthesized
  source 1..20: mol_type = other DNA
agttagacaattctttcagc

SEQ ID NO: 43241 - DNA, 20 bp, synthetic construct
  misc_feature 1..20: note = chemically synthesized
  source 1..20: mol_type = other DNA
acaattctttcagctagttt

SEQ ID NO: 43242 - DNA, 20 bp, synthetic construct
  misc_feature 1..20: note = chemically synthesized
  source 1..20: mol_type = other DNA
agtttgagtgacgcactgac

SEQ ID NO: 43243 - DNA, 20 bp, synthetic construct
  misc_feature 1..20: note = chemically synthesized
  source 1..20: mol_type = other DNA
gagtgacgcactgaccagtg

SEQ ID NO: 43244 - DNA, 20 bp, synthetic construct
  misc_feature 1..20: note = chemically synthesized
  source 1..20: mol_type = other DNA
acgcactgaccagtgaagcg

SEQ ID NO: 43245 - DNA, 20 bp, synthetic construct
  misc_feature 1..20: note = chemically synthesized
  source 1..20: mol_type = other DNA
ctgaccagtgaagcgcagtg

SEQ ID NO: 43246 - DNA, 20 bp, synthetic construct
  misc_feature 1..20: note = chemically synthesized
  source 1..20: mol_type = other DNA
accagtgaagcgcagtgaag

SEQ ID NO: 43247 - DNA, 20 bp, synthetic construct
  misc_feature 1..20: note = chemically synthesized
  source 1..20: mol_type = other DNA
agtgaagcgcagtgaagcag

SEQ ID NO: 43248 - DNA, 20 bp, synthetic construct
  misc_feature 1..20: note = chemically synthesized
  source 1..20: mol_type = other DNA
gtgaagcgcagtgaagcagt

SEQ ID NO: 43249 - DNA, 20 bp, synthetic construct
  misc_feature 1..20: note = chemically synthesized
  source 1..20: mol_type = other DNA
cgcagtgaagcagtgggaac

SEQ ID NO: 43250 - DNA, 20 bp, synthetic construct
  misc_feature 1..20: note = chemically synthesized
  source 1..20: mol_type = other DNA
agtgggaaccggaatatcca

SEQ ID NO: 43251 - DNA, 20 bp, synthetic construct
  misc_feature 1..20: note = chemically synthesized
  source 1..20: mol_type = other DNA
tgggaaccggaatatccaaa

SEQ ID NO: 43252 - DNA, 20 bp, synthetic construct
  misc_feature 1..20: note = chemically synthesized
  source 1..20: mol_type = other DNA
gaaccggaatatccaaagag

SEQ ID NO: 43253 - DNA, 20 bp, synthetic construct
  misc_feature 1..20: note = chemically synthesized
  source 1..20: mol_type = other DNA
aatatccaaagagtggtttg

SEQ ID NO: 43254 - DNA, 20 bp, synthetic construct
  misc_feature 1..20: note = chemically synthesized
  source 1..20: mol_type = other DNA
atatccaaagagtggtttga

SEQ ID NO: 43255 - DNA, 20 bp, synthetic construct
  misc_feature 1..20: note = chemically synthesized
  source 1..20: mol_type = other DNA
atccaaagagtggtttgaag

SEQ ID NO: 43256 - DNA, 20 bp, synthetic construct
  misc_feature 1..20: note = chemically synthesized
  source 1..20: mol_type = other DNA
aaagagtggtttgaaggaga

SEQ ID NO: 43257 - DNA, 20 bp, synthetic construct
  misc_feature 1..20: note = chemically synthesized
  source 1..20: mol_type = other DNA
gagtggtttgaaggagaaag

SEQ ID NO: 43258 - DNA, 20 bp, synthetic construct
  misc_feature 1..20: note = chemically synthesized
  source 1..20: mol_type = other DNA
tgaaggagaaagaagcattg

SEQ ID NO: 43259 - DNA, 20 bp, synthetic construct
  misc_feature 1..20: note = chemically synthesized
  source 1..20: mol_type = other DNA
cattgtggctttatatcctc

SEQ ID NO: 43260 - DNA, 20 bp, synthetic construct
  misc_feature 1..20: note = chemically synthesized
  source 1..20: mol_type = other DNA
attgtggctttatatcctct

SEQ ID NO: 43261 - DNA, 20 bp, synthetic construct
  misc_feature 1..20: note = chemically synthesized
  source 1..20: mol_type = other DNA
ggctttatatcctctgggcc

SEQ ID NO: 43262 - DNA, 20 bp, synthetic construct
  misc_feature 1..20: note = chemically synthesized
  source 1..20: mol_type = other DNA
gctttatatcctctgggcct

SEQ ID NO: 43263 - DNA, 20 bp, synthetic construct
  misc_feature 1..20: note = chemically synthesized
  source 1..20: mol_type = other DNA
ctctgggcctgggtttcctg

SEQ ID NO: 43264 - DNA, 20 bp, synthetic construct
  misc_feature 1..20: note = chemically synthesized
  source 1..20: mol_type = other DNA
tttcctgaagtcaccacaca

SEQ ID NO: 43265 - DNA, 20 bp, synthetic construct
  misc_feature 1..20: note = chemically synthesized
  source 1..20: mol_type = other DNA
tcctgaagtcaccacacata

SEQ ID NO: 43266 - DNA, 20 bp, synthetic construct
  misc_feature 1..20: note = chemically synthesized
  source 1..20: mol_type = other DNA
cctgaagtcaccacacatag

SEQ ID NO: 43267 - DNA, 20 bp, synthetic construct
  misc_feature 1..20: note = chemically synthesized
  source 1..20: mol_type = other DNA
tgaagtcaccacacatagag

SEQ ID NO: 43268 - DNA, 20 bp, synthetic construct
  misc_feature 1..20: note = chemically synthesized
  source 1..20: mol_type = other DNA
aagtcaccacacatagagga

SEQ ID NO: 43269 - DNA, 20 bp, synthetic construct
  misc_feature 1..20: note = chemically synthesized
  source 1..20: mol_type = other DNA
gtcaccacacatagaggaga

SEQ ID NO: 43270 - DNA, 20 bp, synthetic construct
  misc_feature 1..20: note = chemically synthesized
  source 1..20: mol_type = other DNA
cacatagaggagagagaaaa

SEQ ID NO: 43271 - DNA, 20 bp, synthetic construct
  misc_feature 1..20: note = chemically synthesized
  source 1..20: mol_type = other DNA
agaggagagagaaaatggct

SEQ ID NO: 43272 - DNA, 20 bp, synthetic construct
  misc_feature 1..20: note = chemically synthesized
  source 1..20: mol_type = other DNA
gagagaaaatggctgagtta

SEQ ID NO: 43273 - DNA, 20 bp, synthetic construct
  misc_feature 1..20: note = chemically synthesized
  source 1..20: mol_type = other DNA
agagaaaatggctgagttaa

SEQ ID NO: 43274 - DNA, 20 bp, synthetic construct
  misc_feature 1..20: note = chemically synthesized
  source 1..20: mol_type = other DNA
aaaatggctgagttaaaggt

SEQ ID NO: 43275 - DNA, 20 bp, synthetic construct
  misc_feature 1..20: note = chemically synthesized
  source 1..20: mol_type = other DNA
aaggtaagaaaccatctgac

SEQ ID NO: 43276 - DNA, 20 bp, synthetic construct
  misc_feature 1..20: note = chemically synthesized
  source 1..20: mol_type = other DNA
accatctgacaagtttgcta

SEQ ID NO: 43277 - DNA, 20 bp, synthetic construct
  misc_feature 1..20: note = chemically synthesized
  source 1..20: mol_type = other DNA
caagtttgctatggcttctt

SEQ ID NO: 43278 - DNA, 20 bp, synthetic construct
  misc_feature 1..20: note = chemically synthesized
  source 1..20: mol_type = other DNA
gcttcttcagccaaaattta

SEQ ID NO: 43279 - DNA, 20 bp, synthetic construct
  misc_feature 1..20: note = chemically synthesized
  source 1..20: mol_type = other DNA
tcttcagccaaaatttatgg

SEQ ID NO: 43280 - DNA, 20 bp, synthetic construct
  misc_feature 1..20: note = chemically synthesized
  source 1..20: mol_type = other DNA
caaaatttatggaagtttct

SEQ ID NO: 43281 - DNA, 20 bp, synthetic construct
  misc_feature 1..20: note = chemically synthesized
  source 1..20: mol_type = other DNA
atggaagtttctgagaactt

SEQ ID NO: 43282 - DNA, 20 bp, synthetic construct
  misc_feature 1..20: note = chemically synthesized
  source 1..20: mol_type = other DNA
tggaagtttctgagaacttc

SEQ ID NO: 43283 - DNA, 20 bp, synthetic construct
  misc_feature 1..20: note = chemically synthesized
  source 1..20: mol_type = other DNA
ggaagtttctgagaacttca

SEQ ID NO: 43284 - DNA, 20 bp, synthetic construct
  misc_feature 1..20: note = chemically synthesized
  source 1..20: mol_type = other DNA
ttctgagaacttcagggtat

SEQ ID NO: 43285 - DNA, 20 bp, synthetic construct
  misc_feature 1..20: note = chemically synthesized
  source 1..20: mol_type = other DNA
ctgagaacttcagggtatca

SEQ ID NO: 43286 - DNA, 20 bp, synthetic construct
  misc_feature 1..20: note = chemically synthesized
  source 1..20: mol_type = other DNA
gaacttcagggtatcagagt

SEQ ID NO: 43287 - DNA, 20 bp, synthetic construct
  misc_feature 1..20: note = chemically synthesized
  source 1..20: mol_type = other DNA
tcagggtatcagagttggaa

SEQ ID NO: 43288 - DNA, 20 bp, synthetic construct
  misc_feature 1..20: note = chemically synthesized
  source 1..20: mol_type = other DNA
tatcagagttggaaaagact

SEQ ID NO: 43289 - DNA, 20 bp, synthetic construct
  misc_feature 1..20: note = chemically synthesized
  source 1..20: mol_type = other DNA
tcagagttggaaaagactta

SEQ ID NO: 43290 - DNA, 20 bp, synthetic construct
  misc_feature 1..20: note = chemically synthesized
  source 1..20: mol_type = other DNA
agagttggaaaagacttaga

SEQ ID NO: 43291 - DNA, 20 bp, synthetic construct
  misc_feature 1..20: note = chemically synthesized
  source 1..20: mol_type = other DNA
gagttggaaaagacttagag

SEQ ID NO: 43292 - DNA, 20 bp, synthetic construct
  misc_feature 1..20: note = chemically synthesized
  source 1..20: mol_type = other DNA
gaaaagacttagagaggccc

SEQ ID NO: 43293 - DNA, 20 bp, synthetic construct
  misc_feature 1..20: note = chemically synthesized
  source 1..20: mol_type = other DNA
ctggttcaaacccctgtgtt

SEQ ID NO: 43294 - DNA, 20 bp, synthetic construct
  misc_feature 1..20: note = chemically synthesized
  source 1..20: mol_type = other DNA
ggttcaaacccctgtgttca

SEQ ID NO: 43295 - DNA, 20 bp, synthetic construct
  misc_feature 1..20: note = chemically synthesized
  source 1..20: mol_type = other DNA
gttcaaacccctgtgttcag

SEQ ID NO: 43296 - DNA, 20 bp, synthetic construct
  misc_feature 1..20: note = chemically synthesized
  source 1..20: mol_type = other DNA
tgtgttcagaggcttccctg

SEQ ID NO: 43297 - DNA, 20 bp, synthetic construct
  misc_feature 1..20: note = chemically synthesized
  source 1..20: mol_type = other DNA
aggcttccctgtggtgtctg

SEQ ID NO: 43298 - DNA, 20 bp, synthetic construct
  misc_feature 1..20: note = chemically synthesized
  source 1..20: mol_type = other DNA
ggcttccctgtggtgtctgt

SEQ ID NO: 43299 - DNA, 20 bp, synthetic construct
  misc_feature 1..20: note = chemically synthesized
  source 1..20: mol_type = other DNA
ccctgtggtgtctgtgggca

SEQ ID NO: 43300 - DNA, 20 bp, synthetic construct
  misc_feature 1..20: note = chemically synthesized
  source 1..20: mol_type = other DNA
gtggtgtctgtgggcacagc

SEQ ID NO: 43301 - DNA, 20 bp, synthetic construct
  misc_feature 1..20: note = chemically synthesized
  source 1..20: mol_type = other DNA
ggtgtctgtgggcacagctg

SEQ ID NO: 43302 - DNA, 20 bp, synthetic construct
  misc_feature 1..20: note = chemically synthesized
  source 1..20: mol_type = other DNA
tgtgggcacagctggagctg

SEQ ID NO: 43303 - DNA, 20 bp, synthetic construct
  misc_feature 1..20: note = chemically synthesized
  source 1..20: mol_type = other DNA
cacagctggagctgaagaac

SEQ ID NO: 43304 - DNA, 20 bp, synthetic construct
  misc_feature 1..20: note = chemically synthesized
  source 1..20: mol_type = other DNA
acagctggagctgaagaaca

SEQ ID NO: 43305 - DNA, 20 bp, synthetic construct
  misc_feature 1..20: note = chemically synthesized
  source 1..20: mol_type = other DNA
cagctggagctgaagaacaa

SEQ ID NO: 43306 - DNA, 20 bp, synthetic construct
  misc_feature 1..20: note = chemically synthesized
  source 1..20: mol_type = other DNA
tggagctgaagaacaaggga

SEQ ID NO: 43307 - DNA, 20 bp, synthetic construct
  misc_feature 1..20: note = chemically synthesized
  source 1..20: mol_type = other DNA
ggagctgaagaacaagggaa

SEQ ID NO: 43308 - DNA, 20 bp, synthetic construct
  misc_feature 1..20: note = chemically synthesized
  source 1..20: mol_type = other DNA
agaacaagggaaaggtgata

SEQ ID NO: 43309 - DNA, 20 bp, synthetic construct
  misc_feature 1..20: note = chemically synthesized
  source 1..20: mol_type = other DNA
gaacaagggaaaggtgataa

SEQ ID NO: 43310 - DNA, 20 bp, synthetic construct
  misc_feature 1..20: note = chemically synthesized
  source 1..20: mol_type = other DNA
aagggaaaggtgataaagga

SEQ ID NO: 43311 - DNA, 20 bp, synthetic construct
  misc_feature 1..20: note = chemically synthesized
  source 1..20: mol_type = other DNA
ggtgataaaggaaagaaatg

SEQ ID NO: 43312 - DNA, 20 bp, synthetic construct
  misc_feature 1..20: note = chemically synthesized
  source 1..20: mol_type = other DNA
gaaagaaatgaagctcttat

SEQ ID NO: 43313 - DNA, 20 bp, synthetic construct
  misc_feature 1..20: note = chemically synthesized
  source 1..20: mol_type = other DNA
gttcatttcaattattgtct

SEQ ID NO: 43314 - DNA, 20 bp, synthetic construct
  misc_feature 1..20: note = chemically synthesized
  source 1..20: mol_type = other DNA
attattgtcttggaaatctg

SEQ ID NO: 43315 - DNA, 20 bp, synthetic construct
  misc_feature 1..20: note = chemically synthesized
  source 1..20: mol_type = other DNA
tggaaatctgtagacatcct

SEQ ID NO: 43316 - DNA, 20 bp, synthetic construct
  misc_feature 1..20: note = chemically synthesized
  source 1..20: mol_type = other DNA
gaaatctgtagacatcctaa

SEQ ID NO: 43317 - DNA, 20 bp, synthetic construct
  misc_feature 1..20: note = chemically synthesized
  source 1..20: mol_type = other DNA
ctaagagctcccctccacta

SEQ ID NO: 43318 - DNA, 20 bp, synthetic construct
  misc_feature 1..20: note = chemically synthesized
  source 1..20: mol_type = other DNA
ctgacaccttcccattgctg

SEQ ID NO: 43319 - DNA, 20 bp, synthetic construct
  misc_feature 1..20: note = chemically synthesized
  source 1..20: mol_type = other DNA
ttcccattgctgcagcctca

SEQ ID NO: 43320 - DNA, 20 bp, synthetic construct
  misc_feature 1..20: note = chemically synthesized
  source 1..20: mol_type = other DNA
gcagcctcatggaccacttc

SEQ ID NO: 43321 - DNA, 20 bp, synthetic construct
  misc_feature 1..20: note = chemically synthesized
  source 1..20: mol_type = other DNA
catggaccacttccggtgac

SEQ ID NO: 43322 - DNA, 20 bp, synthetic construct
  misc_feature 1..20: note = chemically synthesized
  source 1..20: mol_type = other DNA
gaccacttccggtgaccagt

SEQ ID NO: 43323 - DNA, 20 bp, synthetic construct
  misc_feature 1..20: note = chemically synthesized
  source 1..20: mol_type = other DNA
ttagatatgcttgatctatt

SEQ ID NO: 43324 - DNA, 20 bp, synthetic construct
  misc_feature 1..20: note = chemically synthesized
  source 1..20: mol_type = other DNA
cttgatctatttagttaatt

SEQ ID NO: 43325 - DNA, 20 bp, synthetic construct
  misc_feature 1..20: note = chemically synthesized
  source 1..20: mol_type = other DNA
ttgatctatttagttaatta

SEQ ID NO: 43326 - DNA, 20 bp, synthetic construct
  misc_feature 1..20: note = chemically synthesized
  source 1..20: mol_type = other DNA
agttaattaaggctctgaat

SEQ ID NO: 43327 - DNA, 20 bp, synthetic construct
  misc_feature 1..20: note = chemically synthesized
  source 1..20: mol_type = other DNA
taaggctctgaatcagccct

SEQ ID NO: 43328 - DNA, 20 bp, synthetic construct
  misc_feature 1..20: note = chemically synthesized
  source 1..20: mol_type = other DNA
gctctgaatcagcccttggc

SEQ ID NO: 43329 - DNA, 20 bp, synthetic construct
  misc_feature 1..20: note = chemically synthesized
  source 1..20: mol_type = other DNA
ctgaatcagcccttggccag

SEQ ID NO: 43330 - DNA, 20 bp, synthetic construct
  misc_feature 1..20: note = chemically synthesized
  source 1..20: mol_type = other DNA
aatcagcccttggccagaag

SEQ ID NO: 43331 - DNA, 20 bp, synthetic construct
  misc_feature 1..20: note = chemically synthesized
  source 1..20: mol_type = other DNA
gccagaagaagcacctcctc

SEQ ID NO: 43332 - DNA, 20 bp, synthetic construct
  misc_feature 1..20: note = chemically synthesized
  source 1..20: mol_type = other DNA
ccagaagaagcacctcctct

SEQ ID NO: 43333 - DNA, 20 bp, synthetic construct
  misc_feature 1..20: note = chemically synthesized
  source 1..20: mol_type = other DNA
aggaaatcattccttctttt

SEQ ID NO: 43334 - DNA, 20 bp, synthetic construct
  misc_feature 1..20: note = chemically synthesized
  source 1..20: mol_type = other DNA
tttagtaatacgcaattgaa

SEQ ID NO: 43335 - DNA, 20 bp, synthetic construct
  misc_feature 1..20: note = chemically synthesized
  source 1..20: mol_type = other DNA
acgcaattgaaaagtatgtg

SEQ ID NO: 43336 - DNA, 20 bp, synthetic construct
  misc_feature 1..20: note = chemically synthesized
  source 1..20: mol_type = other DNA
cgcaattgaaaagtatgtgt

SEQ ID NO: 43337 - DNA, 20 bp, synthetic construct
  misc_feature 1..20: note = chemically synthesized
  source 1..20: mol_type = other DNA
atgtgtgggttatgtgctgt

SEQ ID NO: 43338 - DNA, 20 bp, synthetic construct
  misc_feature 1..20: note = chemically synthesized
  source 1..20: mol_type = other DNA
tgtgtgggttatgtgctgtt

SEQ ID NO: 43339 - DNA, 20 bp, synthetic construct
  misc_feature 1..20: note = chemically synthesized
  source 1..20: mol_type = other DNA
gttatgtgctgttaggtgct

SEQ ID NO: 43340 - DNA, 20 bp, synthetic construct
  misc_feature 1..20: note = chemically synthesized
  source 1..20: mol_type = other DNA
ctgttaggtgctaagcattt

SEQ ID NO: 43341 - DNA, 20 bp, synthetic construct
  misc_feature 1..20: note = chemically synthesized
  source 1..20: mol_type = other DNA
cataatcctcaaaataaatc

SEQ ID NO: 43342 - DNA, 20 bp, synthetic construct
  misc_feature 1..20: note = chemically synthesized
  source 1..20: mol_type = other DNA
ataatcctcaaaataaatct

SEQ ID NO: 43343 - DNA, 20 bp, synthetic construct
  misc_feature 1..20: note = chemically synthesized
  source 1..20: mol_type = other DNA
taatcctcaaaataaatctg

SEQ ID NO: 43344 - DNA, 20 bp, synthetic construct
  misc_feature 1..20: note = chemically synthesized
  source 1..20: mol_type = other DNA
ctcaaaataaatctggggta

SEQ ID NO: 43345 - DNA, 20 bp, synthetic construct
  misc_feature 1..20: note = chemically synthesized
  source 1..20: mol_type = other DNA
caaaataaatctggggtata

SEQ ID NO: 43346 - DNA, 20 bp, synthetic construct
  misc_feature 1..20: note = chemically synthesized
  source 1..20: mol_type = other DNA
aaataaatctggggtataga

SEQ ID NO: 43347 - DNA, 20 bp, synthetic construct
  misc_feature 1..20: note = chemically synthesized
  source 1..20: mol_type = other DNA
ataaatctggggtatagaga

SEQ ID NO: 43348 - DNA, 20 bp, synthetic construct
  misc_feature 1..20: note = chemically synthesized
  source 1..20: mol_type = other DNA
taaatctggggtatagagag

SEQ ID NO: 43349 - DNA, 20 bp, synthetic construct
  misc_feature 1..20: note = chemically synthesized
  source 1..20: mol_type = other DNA
agagaggttcttgtttcaat

SEQ ID NO: 43350 - DNA, 20 bp, synthetic construct
  misc_feature 1..20: note = chemically synthesized
  source 1..20: mol_type = other DNA
ggttcttgtttcaattagaa

SEQ ID NO: 43351 - DNA, 20 bp, synthetic construct
  misc_feature 1..20: note = chemically synthesized
  source 1..20: mol_type = other DNA
tcaattagaaaagtaatgct

SEQ ID NO: 43352 - DNA, 20 bp, synthetic construct
  misc_feature 1..20: note = chemically synthesized
  source 1..20: mol_type = other DNA
aattagaaaagtaatgcttg

SEQ ID NO: 43353 - DNA, 20 bp, synthetic construct
  misc_feature 1..20: note = chemically synthesized
  source 1..20: mol_type = other DNA
ttagaaaagtaatgcttgga

SEQ ID NO: 43354 - DNA, 20 bp, synthetic construct
  misc_feature 1..20: note = chemically synthesized
  source 1..20: mol_type = other DNA
ggagagactatgatttgccc

SEQ ID NO: 43355 - DNA, 20 bp, synthetic construct
  misc_feature 1..20: note = chemically synthesized
  source 1..20: mol_type = other DNA
gagagactatgatttgccca

SEQ ID NO: 43356 - DNA, 20 bp, synthetic construct
  misc_feature 1..20: note = chemically synthesized
  source 1..20: mol_type = other DNA
ttgcccaaggtcactgccaa

SEQ ID NO: 43357 - DNA, 20 bp, synthetic construct
  misc_feature 1..20: note = chemically synthesized
  source 1..20: mol_type = other DNA
ctgccaatagatgacttgat

SEQ ID NO: 43358 - DNA, 20 bp, synthetic construct
  misc_feature 1..20: note = chemically synthesized
  source 1..20: mol_type = other DNA
ccaatagatgacttgattag

SEQ ID NO: 43359 - DNA, 20 bp, synthetic construct
  misc_feature 1..20: note = chemically synthesized
  source 1..20: mol_type = other DNA
atagatgacttgattagaag

SEQ ID NO: 43360 - DNA, 20 bp, synthetic construct
  misc_feature 1..20: note = chemically synthesized
  source 1..20: mol_type = other DNA
tagatgacttgattagaagc

SEQ ID NO: 43361 - DNA, 20 bp, synthetic construct
  misc_feature 1..20: note = chemically synthesized
  source 1..20: mol_type = other DNA
agatgacttgattagaagca

SEQ ID NO: 43362 - DNA, 20 bp, synthetic construct
  misc_feature 1..20: note = chemically synthesized
  source 1..20: mol_type = other DNA
gcagggtatgtttgaatgcg

SEQ ID NO: 43363 - DNA, 20 bp, synthetic construct
  misc_feature 1..20: note = chemically synthesized
  source 1..20: mol_type = other DNA
gtatgtttgaatgcgaagtc

SEQ ID NO: 43364 - DNA, 20 bp, synthetic construct
  misc_feature 1..20: note = chemically synthesized
  source 1..20: mol_type = other DNA
tatgtttgaatgcgaagtcc

SEQ ID NO: 43365 - DNA, 20 bp, synthetic construct
  misc_feature 1..20: note = chemically synthesized
  source 1..20: mol_type = other DNA
atgcgaagtccaggctcaaa

SEQ ID NO: 43366 - DNA, 20 bp, synthetic construct
  misc_feature 1..20: note = chemically synthesized
  source 1..20: mol_type = other DNA
tgcgaagtccaggctcaaaa

SEQ ID NO: 43367 - DNA, 20 bp, synthetic construct
  misc_feature 1..20: note = chemically synthesized
  source 1..20: mol_type = other DNA
gcgaagtccaggctcaaaaa

SEQ ID NO: 43368 - DNA, 20 bp, synthetic construct
  misc_feature 1..20: note = chemically synthesized
  source 1..20: mol_type = other DNA
cgaagtccaggctcaaaaag

SEQ ID NO: 43369 - DNA, 20 bp, synthetic construct
  misc_feature 1..20: note = chemically synthesized
  source 1..20: mol_type = other DNA
ccaggctcaaaaaggggcct

SEQ ID NO: 43370 - DNA, 20 bp, synthetic construct
  misc_feature 1..20: note = chemically synthesized
  source 1..20: mol_type = other DNA
ggctcaaaaaggggccttag

SEQ ID NO: 43371 - DNA, 20 bp, synthetic construct
  misc_feature 1..20: note = chemically synthesized
  source 1..20: mol_type = other DNA
ggggccttagtggctcctac

SEQ ID NO: 43372 - DNA, 20 bp, synthetic construct
  misc_feature 1..20: note = chemically synthesized
  source 1..20: mol_type = other DNA
cttagtggctcctactagac

SEQ ID NO: 43373 - DNA, 20 bp, synthetic construct
  misc_feature 1..20: note = chemically synthesized
  source 1..20: mol_type = other DNA
tcctactagactggtatctt

SEQ ID NO: 43374 - DNA, 20 bp, synthetic construct
  misc_feature 1..20: note = chemically synthesized
  source 1..20: mol_type = other DNA
cctactagactggtatctta

SEQ ID NO: 43375 - DNA, 20 bp, synthetic construct
  misc_feature 1..20: note = chemically synthesized
  source 1..20: mol_type = other DNA
ctagactggtatcttaaggc

SEQ ID NO: 43376 - DNA, 20 bp, synthetic construct
  misc_feature 1..20: note = chemically synthesized
  source 1..20: mol_type = other DNA
tagactggtatcttaaggca

SEQ ID NO: 43377 - DNA, 20 bp, synthetic construct
  misc_feature 1..20: note = chemically synthesized
  source 1..20: mol_type = other DNA
gtatcttaaggcaaggaaaa

SEQ ID NO: 43378 - DNA, 20 bp, synthetic construct
  misc_feature 1..20: note = chemically synthesized
  source 1..20: mol_type = other DNA
ctaatatctaaaaccatgcc

SEQ ID NO: 43379 - DNA, 20 bp, synthetic construct
  misc_feature 1..20: note = chemically synthesized
  source 1..20: mol_type = other DNA
ctaaaaccatgcctagtgcc

SEQ ID NO: 43380 - DNA, 20 bp, synthetic construct
  misc_feature 1..20: note = chemically synthesized
  source 1..20: mol_type = other DNA
taaaaccatgcctagtgccc

SEQ ID NO: 43381 - DNA, 20 bp, synthetic construct
  misc_feature 1..20: note = chemically synthesized
  source 1..20: mol_type = other DNA
accatgcctagtgcccaggc

SEQ ID NO: 43382 - DNA, 20 bp, synthetic construct
  misc_feature 1..20: note = chemically synthesized
  source 1..20: mol_type = other DNA
ccatgcctagtgcccaggcc

SEQ ID NO: 43383 - DNA, 20 bp, synthetic construct
  misc_feature 1..20: note = chemically synthesized
  source 1..20: mol_type = other DNA
cgcatgcatgtgtaactgaa

SEQ ID NO: 43384 - DNA, 20 bp, synthetic construct
  misc_feature 1..20: note = chemically synthesized
  source 1..20: mol_type = other DNA
tgtaactgaacagaactgcc

SEQ ID NO: 43385 - DNA, 20 bp, synthetic construct
  misc_feature 1..20: note = chemically synthesized
  source 1..20: mol_type = other DNA
aacagaactgcccagaacct

SEQ ID NO: 43386 - DNA, 20 bp, synthetic construct
  misc_feature 1..20: note = chemically synthesized
  source 1..20: mol_type = other DNA
aactgcccagaaccttggct

SEQ ID NO: 43387 - DNA, 20 bp, synthetic construct
  misc_feature 1..20: note = chemically synthesized
  source 1..20: mol_type = other DNA
actgcccagaaccttggctc

SEQ ID NO: 43388 - DNA, 20 bp, synthetic construct
  misc_feature 1..20: note = chemically synthesized
  source 1..20: mol_type = other DNA
ccagaaccttggctcaggcc

SEQ ID NO: 43389 - DNA, 20 bp, synthetic construct
  misc_feature 1..20: note = chemically synthesized
  source 1..20: mol_type = other DNA
gaaccttggctcaggccaag

SEQ ID NO: 43390 - DNA, 20 bp, synthetic construct
  misc_feature 1..20: note = chemically synthesized
  source 1..20: mol_type = other DNA
aaccttggctcaggccaagt

SEQ ID NO: 43391 - DNA, 20 bp, synthetic construct
  misc_feature 1..20: note = chemically synthesized
  source 1..20: mol_type = other DNA
ttggctcaggccaagtaggc

SEQ ID NO: 43392 - DNA, 20 bp, synthetic construct
  misc_feature 1..20: note = chemically synthesized
  source 1..20: mol_type = other DNA
taggccagaccaccccacaa

SEQ ID NO: 43393 - DNA, 20 bp, synthetic construct
  misc_feature 1..20: note = chemically synthesized
  source 1..20: mol_type = other DNA
acagacatcttccctgaatg

SEQ ID NO: 43394 - DNA, 20 bp, synthetic construct
  misc_feature 1..20: note = chemically synthesized
  source 1..20: mol_type = other DNA
cagacatcttccctgaatgc

SEQ ID NO: 43395 - DNA, 20 bp, synthetic construct
  misc_feature 1..20: note = chemically synthesized
  source 1..20: mol_type = other DNA
agacatcttccctgaatgca

SEQ ID NO: 43396 - DNA, 20 bp, synthetic construct
  misc_feature 1..20: note = chemically synthesized
  source 1..20: mol_type = other DNA
cttccctgaatgcagggttt

SEQ ID NO: 43397 - DNA, 20 bp, synthetic construct
  misc_feature 1..20: note = chemically synthesized
  source 1..20: mol_type = other DNA
ccctgaatgcagggtttgag

SEQ ID NO: 43398 - DNA, 20 bp, synthetic construct
  misc_feature 1..20: note = chemically synthesized
  source 1..20: mol_type = other DNA
aatgccctctaactgatgct

SEQ ID NO: 43399 - DNA, 20 bp, synthetic construct
  misc_feature 1..20: note = chemically synthesized
  source 1..20: mol_type = other DNA
tctaactgatgctgagtttg

SEQ ID NO: 43400 - DNA, 20 bp, synthetic construct
  misc_feature 1..20: note = chemically synthesized
  source 1..20: mol_type = other DNA
gctgagtttgaagaatccat

SEQ ID NO: 43401 - DNA, 20 bp, synthetic construct
  misc_feature 1..20: note = chemically synthesized
  source 1..20: mol_type = other DNA
gtttgaagaatccatcagtt

SEQ ID NO: 43402 - DNA, 20 bp, synthetic construct
  misc_feature 1..20: note = chemically synthesized
  source 1..20: mol_type = other DNA
tttgaagaatccatcagtta

SEQ ID NO: 43403 - DNA, 20 bp, synthetic construct
  misc_feature 1..20: note = chemically synthesized
  source 1..20: mol_type = other DNA
ttgaagaatccatcagttaa

SEQ ID NO: 43404 - DNA, 20 bp, synthetic construct
  misc_feature 1..20: note = chemically synthesized
  source 1..20: mol_type = other DNA
tgaagaatccatcagttaag

SEQ ID NO: 43405 - DNA, 20 bp, synthetic construct
  misc_feature 1..20: note = chemically synthesized
  source 1..20: mol_type = other DNA
aagaatccatcagttaaggg

SEQ ID NO: 43406 - DNA, 20 bp, synthetic construct
  misc_feature 1..20: note = chemically synthesized
  source 1..20: mol_type = other DNA
agaatccatcagttaagggg

SEQ ID NO: 43407 - DNA, 20 bp, synthetic construct
  misc_feature 1..20: note = chemically synthesized
  source 1..20: mol_type = other DNA
agttaaggggaggtgtttct

SEQ ID NO: 43408 - DNA, 20 bp, synthetic construct
  misc_feature 1..20: note = chemically synthesized
  source 1..20: mol_type = other DNA
gggaggtgtttctgagtttg

SEQ ID NO: 43409 - DNA, 20 bp, synthetic construct
  misc_feature 1..20: note = chemically synthesized
  source 1..20: mol_type = other DNA
gaatcaaacaccttcctaat

SEQ ID NO: 43410 - DNA, 20 bp, synthetic construct
  misc_feature 1..20: note = chemically synthesized
  source 1..20: mol_type = other DNA
tcaaacaccttcctaattgg

SEQ ID NO: 43411 - DNA, 20 bp, synthetic construct
  misc_feature 1..20: note = chemically synthesized
  source 1..20: mol_type = other DNA
caaacaccttcctaattggt

SEQ ID NO: 43412 - DNA, 20 bp, synthetic construct
  misc_feature 1..20: note = chemically synthesized
  source 1..20: mol_type = other DNA
atcctgaaaacactccacac

SEQ ID NO: 43413 - DNA, 20 bp, synthetic construct
  misc_feature 1..20: note = chemically synthesized
  source 1..20: mol_type = other DNA
cctgaaaacactccacaccg

SEQ ID NO: 43414 - DNA, 20 bp, synthetic construct
  misc_feature 1..20: note = chemically synthesized
  source 1..20: mol_type = other DNA
aacactccacaccggagtaa

SEQ ID NO: 43415 - DNA, 20 bp, synthetic construct
  misc_feature 1..20: note = chemically synthesized
  source 1..20: mol_type = other DNA
cacaccggagtaaaagactt

SEQ ID NO: 43416 - DNA, 20 bp, synthetic construct
  misc_feature 1..20: note = chemically synthesized
  source 1..20: mol_type = other DNA
ttatctttatgcctgactaa

SEQ ID NO: 43417 - DNA, 20 bp, synthetic construct
  misc_feature 1..20: note = chemically synthesized
  source 1..20: mol_type = other DNA
ttaactctcattctttcatt

SEQ ID NO: 43418 - DNA, 20 bp, synthetic construct
  misc_feature 1..20: note = chemically synthesized
  source 1..20: mol_type = other DNA
attcagcaaatattttgtgc

SEQ ID NO: 43419 - DNA, 20 bp, synthetic construct
  misc_feature 1..20: note = chemically synthesized
  source 1..20: mol_type = other DNA
tgtgctagtgcatgacactg

SEQ ID NO: 43420 - DNA, 20 bp, synthetic construct
  misc_feature 1..20: note = chemically synthesized
  source 1..20: mol_type = other DNA
gacactgcagattaatatcg

SEQ ID NO: 43421 - DNA, 20 bp, synthetic construct
  misc_feature 1..20: note = chemically synthesized
  source 1..20: mol_type = other DNA
attaatatcgtagatgaact

SEQ ID NO: 43422 - DNA, 20 bp, synthetic construct
  misc_feature 1..20: note = chemically synthesized
  source 1..20: mol_type = other DNA
tatcgtagatgaactgagtc

SEQ ID NO: 43423 - DNA, 20 bp, synthetic construct
  misc_feature 1..20: note = chemically synthesized
  source 1..20: mol_type = other DNA
atcgtagatgaactgagtct

SEQ ID NO: 43424 - DNA, 20 bp, synthetic construct
  misc_feature 1..20: note = chemically synthesized
  source 1..20: mol_type = other DNA
tagatgaactgagtctgggc

SEQ ID NO: 43425 - DNA, 20 bp, synthetic construct
  misc_feature 1..20: note = chemically synthesized
  source 1..20: mol_type = other DNA
agatgaactgagtctgggct

SEQ ID NO: 43426 - DNA, 20 bp, synthetic construct
  misc_feature 1..20: note = chemically synthesized
  source 1..20: mol_type = other DNA
tgaactgagtctgggctagg

SEQ ID NO: 43427 - DNA, 20 bp, synthetic construct
  misc_feature 1..20: note = chemically synthesized
  source 1..20: mol_type = other DNA
aactgagtctgggctaggta

SEQ ID NO: 43428 - DNA, 20 bp, synthetic construct
  misc_feature 1..20: note = chemically synthesized
  source 1..20: mol_type = other DNA
agtcaaaaaaaaatttccta

SEQ ID NO: 43429 - DNA, 20 bp, synthetic construct
  misc_feature 1..20: note = chemically synthesized
  source 1..20: mol_type = other DNA
gtcaaaaaaaaatttcctaa

SEQ ID NO: 43430 - DNA, 20 bp, synthetic construct
  misc_feature 1..20: note = chemically synthesized
  source 1..20: mol_type = other DNA
caaaaaaaaatttcctaaag

SEQ ID NO: 43431 - DNA, 20 bp, synthetic construct
  misc_feature 1..20: note = chemically synthesized
  source 1..20: mol_type = other DNA
aaggagcctgtacctaaact

SEQ ID NO: 43432 - DNA, 20 bp, synthetic construct
  misc_feature 1..20: note = chemically synthesized
  source 1..20: mol_type = other DNA
ctgtacctaaactgagtctt

SEQ ID NO: 43433 - DNA, 20 bp, synthetic construct
  misc_feature 1..20: note = chemically synthesized
  source 1..20: mol_type = other DNA
gtacctaaactgagtcttca

SEQ ID NO: 43434 - DNA, 20 bp, synthetic construct
  misc_feature 1..20: note = chemically synthesized
  source 1..20: mol_type = other DNA
acctaaactgagtcttcaga

SEQ ID NO: 43435 - DNA, 20 bp, synthetic construct
  misc_feature 1..20: note = chemically synthesized
  source 1..20: mol_type = other DNA
taaactgagtcttcagagag

SEQ ID NO: 43436 - DNA, 20 bp, synthetic construct
  misc_feature 1..20: note = chemically synthesized
  source 1..20: mol_type = other DNA
ctgagtcttcagagagaagt

SEQ ID NO: 43437 - DNA, 20 bp, synthetic construct
  misc_feature 1..20: note = chemically synthesized
  source 1..20: mol_type = other DNA
cttcagagagaagttggaac

SEQ ID NO: 43438 - DNA, 20 bp, synthetic construct
  misc_feature 1..20: note = chemically synthesized
  source 1..20: mol_type = other DNA
gagagaagttggaactggca

SEQ ID NO: 43439 - DNA, 20 bp, synthetic construct
  misc_feature 1..20: note = chemically synthesized
  source 1..20: mol_type = other DNA
gaagttggaactggcaaagt

SEQ ID NO: 43440 - DNA, 20 bp, synthetic construct
  misc_feature 1..20: note = chemically synthesized
  source 1..20: mol_type = other DNA
aagttggaactggcaaagtg

SEQ ID NO: 43441 - DNA, 20 bp, synthetic construct
  misc_feature 1..20: note = chemically synthesized
  source 1..20: mol_type = other DNA
ttggaactggcaaagtgagg

SEQ ID NO: 43442 - DNA, 20 bp, synthetic construct
  misc_feature 1..20: note = chemically synthesized
  source 1..20: mol_type = other DNA
tggaactggcaaagtgagga

SEQ ID NO: 43443 - DNA, 20 bp, synthetic construct
  misc_feature 1..20: note = chemically synthesized
  source 1..20: mol_type = other DNA
actggcaaagtgaggaagga

SEQ ID NO: 43444 - DNA, 20 bp, synthetic construct
  misc_feature 1..20: note = chemically synthesized
  source 1..20: mol_type = other DNA
ctggcaaagtgaggaaggac

SEQ ID NO: 43445 - DNA, 20 bp, synthetic construct
  misc_feature 1..20: note = chemically synthesized
  source 1..20: mol_type = other DNA
tggcaaagtgaggaaggacg

SEQ ID NO: 43446 - DNA, 20 bp, synthetic construct
  misc_feature 1..20: note = chemically synthesized
  source 1..20: mol_type = other DNA
aagtgaggaaggacggggtc

SEQ ID NO: 43447 - DNA, 20 bp, synthetic construct
  misc_feature 1..20: note = chemically synthesized
  source 1..20: mol_type = other DNA
gtgaggaaggacggggtctg

SEQ ID NO: 43448 - DNA, 20 bp, synthetic construct
  misc_feature 1..20: note = chemically synthesized
  source 1..20: mol_type = other DNA
tgaggaaggacggggtctgg

SEQ ID NO: 43449 - DNA, 20 bp, synthetic construct
  misc_feature 1..20: note = chemically synthesized
  source 1..20: mol_type = other DNA
gaggaaggacggggtctgga

SEQ ID NO: 43450 - DNA, 20 bp, synthetic construct
  misc_feature 1..20: note = chemically synthesized
  source 1..20: mol_type = other DNA
gaaggacggggtctggaggg

SEQ ID NO: 43451 - DNA, 20 bp, synthetic construct
  misc_feature 1..20: note = chemically synthesized
  source 1..20: mol_type = other DNA
aggacggggtctggagggaa

SEQ ID NO: 43452 - DNA, 20 bp, synthetic construct
  misc_feature 1..20: note = chemically synthesized
  source 1..20: mol_type = other DNA
cggggtctggagggaagagt

SEQ ID NO: 43453 - DNA, 20 bp, synthetic construct
  misc_feature 1..20: note = chemically synthesized
  source 1..20: mol_type = other DNA
tggagggaagagtgagtgca

SEQ ID NO: 43454 - DNA, 20 bp, synthetic construct
  misc_feature 1..20: note = chemically synthesized
  source 1..20: mol_type = other DNA
ggagggaagagtgagtgcaa

SEQ ID NO: 43455 - DNA, 20 bp, synthetic construct
  misc_feature 1..20: note = chemically synthesized
  source 1..20: mol_type = other DNA
gaagagtgagtgcaaaggca

SEQ ID NO: 43456 - DNA, 20 bp, synthetic construct
  misc_feature 1..20: note = chemically synthesized
  source 1..20: mol_type = other DNA
gtgcaaaggcacagcacata

SEQ ID NO: 43457 - DNA, 20 bp, synthetic construct
  misc_feature 1..20: note = chemically synthesized
  source 1..20: mol_type = other DNA
tacagaatgcctgcatgctc

SEQ ID NO: 43458 - DNA, 20 bp, synthetic construct
  misc_feature 1..20: note = chemically synthesized
  source 1..20: mol_type = other DNA
tctagaatccaaaactgtgt

SEQ ID NO: 43459 - DNA, 20 bp, synthetic construct
  misc_feature 1..20: note = chemically synthesized
  source 1..20: mol_type = other DNA
aaactgtgtcagccaaattt

SEQ ID NO: 43460 - DNA, 20 bp, synthetic construct
  misc_feature 1..20: note = chemically synthesized
  source 1..20: mol_type = other DNA
gtcagccaaatttgagttga

SEQ ID NO: 43461 - DNA, 20 bp, synthetic construct
  misc_feature 1..20: note = chemically synthesized
  source 1..20: mol_type = other DNA
cagccaaatttgagttgatg

SEQ ID NO: 43462 - DNA, 20 bp, synthetic construct
  misc_feature 1..20: note = chemically synthesized
  source 1..20: mol_type = other DNA
agccaaatttgagttgatgg

SEQ ID NO: 43463 - DNA, 20 bp, synthetic construct
  misc_feature 1..20: note = chemically synthesized
  source 1..20: mol_type = other DNA
gccaaatttgagttgatgga

SEQ ID NO: 43464 - DNA, 20 bp, synthetic construct
  misc_feature 1..20: note = chemically synthesized
  source 1..20: mol_type = other DNA
aatttgagttgatggaggga

SEQ ID NO: 43465 - DNA, 20 bp, synthetic construct
  misc_feature 1..20: note = chemically synthesized
  source 1..20: mol_type = other DNA
gatggagggacagccaaact

SEQ ID NO: 43466 - DNA, 20 bp, synthetic construct
  misc_feature 1..20: note = chemically synthesized
  source 1..20: mol_type = other DNA
gacagccaaactgagatacc

SEQ ID NO: 43467 - DNA, 20 bp, synthetic construct
  misc_feature 1..20: note = chemically synthesized
  source 1..20: mol_type = other DNA
acagccaaactgagataccc

SEQ ID NO: 43468 - DNA, 20 bp, synthetic construct
  misc_feature 1..20: note = chemically synthesized
  source 1..20: mol_type = other DNA
gccaaactgagatacccagg

SEQ ID NO: 43469 - DNA, 20 bp, synthetic construct
  misc_feature 1..20: note = chemically synthesized
  source 1..20: mol_type = other DNA
aaactgagatacccaggcgg

SEQ ID NO: 43470 - DNA, 20 bp, synthetic construct
  misc_feature 1..20: note = chemically synthesized
  source 1..20: mol_type = other DNA
tgagatacccaggcggtggt

SEQ ID NO: 43471 - DNA, 20 bp, synthetic construct
  misc_feature 1..20: note = chemically synthesized
  source 1..20: mol_type = other DNA
ccaggcggtggttggattta

SEQ ID NO: 43472 - DNA, 20 bp, synthetic construct
  misc_feature 1..20: note = chemically synthesized
  source 1..20: mol_type = other DNA
ggtggttggatttatggatc

SEQ ID NO: 43473 - DNA, 20 bp, synthetic construct
  misc_feature 1..20: note = chemically synthesized
  source 1..20: mol_type = other DNA
ggatttatggatctggattt

SEQ ID NO: 43474 - DNA, 20 bp, synthetic construct
  misc_feature 1..20: note = chemically synthesized
  source 1..20: mol_type = other DNA
gatttatggatctggatttc

SEQ ID NO: 43475 - DNA, 20 bp, synthetic construct
  misc_feature 1..20: note = chemically synthesized
  source 1..20: mol_type = other DNA
atttatggatctggatttca

SEQ ID NO: 43476 - DNA, 20 bp, synthetic construct
  misc_feature 1..20: note = chemically synthesized
  source 1..20: mol_type = other DNA
tttatggatctggatttcag

SEQ ID NO: 43477 - DNA, 20 bp, synthetic construct
  misc_feature 1..20: note = chemically synthesized
  source 1..20: mol_type = other DNA
tatggatctggatttcaggg

SEQ ID NO: 43478 - DNA, 20 bp, synthetic construct
  misc_feature 1..20: note = chemically synthesized
  source 1..20: mol_type = other DNA
ggatctggatttcaggggag

SEQ ID NO: 43479 - DNA, 20 bp, synthetic construct
  misc_feature 1..20: note = chemically synthesized
  source 1..20: mol_type = other DNA
gatctggatttcaggggagt

SEQ ID NO: 43480 - DNA, 20 bp, synthetic construct
  misc_feature 1..20: note = chemically synthesized
  source 1..20: mol_type = other DNA
ctggatttcaggggagtggg

SEQ ID NO: 43481 - DNA, 20 bp, synthetic construct
  misc_feature 1..20: note = chemically synthesized
  source 1..20: mol_type = other DNA
tggatttcaggggagtgggc

SEQ ID NO: 43482 - DNA, 20 bp, synthetic construct
  misc_feature 1..20: note = chemically synthesized
  source 1..20: mol_type = other DNA
ggatttcaggggagtgggca

SEQ ID NO: 43483 - DNA, 20 bp, synthetic construct
  misc_feature 1..20: note = chemically synthesized
  source 1..20: mol_type = other DNA
ttcaggggagtgggcagggc

SEQ ID NO: 43484 - DNA, 20 bp, synthetic construct
  misc_feature 1..20: note = chemically synthesized
  source 1..20: mol_type = other DNA
tcaggggagtgggcagggct

SEQ ID NO: 43485 - DNA, 20 bp, synthetic construct
  misc_feature 1..20: note = chemically synthesized
  source 1..20: mol_type = other DNA
caggggagtgggcagggcta

SEQ ID NO: 43486 - DNA, 20 bp, synthetic construct
  misc_feature 1..20: note = chemically synthesized
  source 1..20: mol_type = other DNA
aggggagtgggcagggctag

SEQ ID NO: 43487 - DNA, 20 bp, synthetic construct
  misc_feature 1..20: note = chemically synthesized
  source 1..20: mol_type = other DNA
agtgggcagggctaggggaa

SEQ ID NO: 43488 - DNA, 20 bp, synthetic construct
  misc_feature 1..20: note = chemically synthesized
  source 1..20: mol_type = other DNA
agggctaggggaatagaact

SEQ ID NO: 43489 - DNA, 20 bp, synthetic construct
  misc_feature 1..20: note = chemically synthesized
  source 1..20: mol_type = other DNA
gggctaggggaatagaactg

SEQ ID NO: 43490 - DNA, 20 bp, synthetic construct
  misc_feature 1..20: note = chemically synthesized
  source 1..20: mol_type = other DNA
ggctaggggaatagaactga

SEQ ID NO: 43491 - DNA, 20 bp, synthetic construct
  misc_feature 1..20: note = chemically synthesized
  source 1..20: mol_type = other DNA
agaactgagggtcatgatgt

SEQ ID NO: 43492 - DNA, 20 bp, synthetic construct
  misc_feature 1..20: note = chemically synthesized
  source 1..20: mol_type = other DNA
actgagggtcatgatgtcag

SEQ ID NO: 43493 - DNA, 20 bp, synthetic construct
  misc_feature 1..20: note = chemically synthesized
  source 1..20: mol_type = other DNA
gagggtcatgatgtcagtgg

SEQ ID NO: 43494 - DNA, 20 bp, synthetic construct
  misc_feature 1..20: note = chemically synthesized
  source 1..20: mol_type = other DNA
agggtcatgatgtcagtggt

SEQ ID NO: 43495 - DNA, 20 bp, synthetic construct
  misc_feature 1..20: note = chemically synthesized
  source 1..20: mol_type = other DNA
ggtcatgatgtcagtggtag

SEQ ID NO: 43496 - DNA, 20 bp, synthetic construct
  misc_feature 1..20: note = chemically synthesized
  source 1..20: mol_type = other DNA
gatgtcagtggtaggagttg

SEQ ID NO: 43497 - DNA, 20 bp, synthetic construct
  misc_feature 1..20: note = chemically synthesized
  source 1..20: mol_type = other DNA
agtggtaggagttgaagtct

SEQ ID NO: 43498 - DNA, 20 bp, synthetic construct
  misc_feature 1..20: note = chemically synthesized
  source 1..20: mol_type = other DNA
ggtaggagttgaagtcttgg

SEQ ID NO: 43499 - DNA, 20 bp, synthetic construct
  misc_feature 1..20: note = chemically synthesized
  source 1..20: mol_type = other DNA
ggagttgaagtcttggaaga

SEQ ID NO: 43500 - DNA, 20 bp, synthetic construct
  misc_feature 1..20: note = chemically synthesized
  source 1..20: mol_type = other DNA
agttgaagtcttggaagaaa

SEQ ID NO: 43501 - DNA, 20 bp, synthetic construct
  misc_feature 1..20: note = chemically synthesized
  source 1..20: mol_type = other DNA
tgaagtcttggaagaaagag

SEQ ID NO: 43502 - DNA, 20 bp, synthetic construct
  misc_feature 1..20: note = chemically synthesized
  source 1..20: mol_type = other DNA
gtcttggaagaaagagtaga

SEQ ID NO: 43503 - DNA, 20 bp, synthetic construct
  misc_feature 1..20: note = chemically synthesized
  source 1..20: mol_type = other DNA
ttttctgatgaacattctat

SEQ ID NO: 43504 - DNA, 20 bp, synthetic construct
  misc_feature 1..20: note = chemically synthesized
  source 1..20: mol_type = other DNA
tttctgatgaacattctatg

SEQ ID NO: 43505 - DNA, 20 bp, synthetic construct
  misc_feature 1..20: note = chemically synthesized
  source 1..20: mol_type = other DNA
ctgatgaacattctatgagg

SEQ ID NO: 43506 - DNA, 20 bp, synthetic construct
  misc_feature 1..20: note = chemically synthesized
  source 1..20: mol_type = other DNA
gaacattctatgaggaagtt

SEQ ID NO: 43507 - DNA, 20 bp, synthetic construct
  misc_feature 1..20: note = chemically synthesized
  source 1..20: mol_type = other DNA
cattctatgaggaagttcag

SEQ ID NO: 43508 - DNA, 20 bp, synthetic construct
  misc_feature 1..20: note = chemically synthesized
  source 1..20: mol_type = other DNA
ttctatgaggaagttcagca

SEQ ID NO: 43509 - DNA, 20 bp, synthetic construct
  misc_feature 1..20: note = chemically synthesized
  source 1..20: mol_type = other DNA
tctatgaggaagttcagcag

SEQ ID NO: 43510 - DNA, 20 bp, synthetic construct
  misc_feature 1..20: note = chemically synthesized
  source 1..20: mol_type = other DNA
tgaggaagttcagcagaggt

SEQ ID NO: 43511 - DNA, 20 bp, synthetic construct
  misc_feature 1..20: note = chemically synthesized
  source 1..20: mol_type = other DNA
cctatcctgctgtcatgttt

SEQ ID NO: 43512 - DNA, 20 bp, synthetic construct
  misc_feature 1..20: note = chemically synthesized
  source 1..20: mol_type = other DNA
tttaagcaacttattatgca

SEQ ID NO: 43513 - DNA, 20 bp, synthetic construct
  misc_feature 1..20: note = chemically synthesized
  source 1..20: mol_type = other DNA
caacttattatgcacagcac

SEQ ID NO: 43514 - DNA, 20 bp, synthetic construct
  misc_feature 1..20: note = chemically synthesized
  source 1..20: mol_type = other DNA
aacttattatgcacagcacc

SEQ ID NO: 43515 - DNA, 20 bp, synthetic construct
  misc_feature 1..20: note = chemically synthesized
  source 1..20: mol_type = other DNA
catcaatgtaaattgcatgc

SEQ ID NO: 43516 - DNA, 20 bp, synthetic construct
  misc_feature 1..20: note = chemically synthesized
  source 1..20: mol_type = other DNA
tgcatgccagtctttgctct

SEQ ID NO: 43517 - DNA, 20 bp, synthetic construct
  misc_feature 1..20: note = chemically synthesized
  source 1..20: mol_type = other DNA
agtctttgctctcagtttca

SEQ ID NO: 43518 - DNA, 20 bp, synthetic construct
  misc_feature 1..20: note = chemically synthesized
  source 1..20: mol_type = other DNA
gtctttgctctcagtttcaa

SEQ ID NO: 43519 - DNA, 20 bp, synthetic construct
  misc_feature 1..20: note = chemically synthesized
  source 1..20: mol_type = other DNA
cctgctgtctaatctttaca

SEQ ID NO: 43520 - DNA, 20 bp, synthetic construct
  misc_feature 1..20: note = chemically synthesized
  source 1..20: mol_type = other DNA
ctgtctaatctttacaaaga

SEQ ID NO: 43521 - DNA, 20 bp, synthetic construct
  misc_feature 1..20: note = chemically synthesized
  source 1..20: mol_type = other DNA
tgtctaatctttacaaagaa

SEQ ID NO: 43522 - DNA, 20 bp, synthetic construct
  misc_feature 1..20: note = chemically synthesized
  source 1..20: mol_type = other DNA
ttacaaagaaaggttaactc

SEQ ID NO: 43523 - DNA, 20 bp, synthetic construct
  misc_feature 1..20: note = chemically synthesized
  source 1..20: mol_type = other DNA
acaaagaaaggttaactcca

SEQ ID NO: 43524 - DNA, 20 bp, synthetic construct
  misc_feature 1..20: note = chemically synthesized
  source 1..20: mol_type = other DNA
caaagaaaggttaactccag

SEQ ID NO: 43525 - DNA, 20 bp, synthetic construct
  misc_feature 1..20: note = chemically synthesized
  source 1..20: mol_type = other DNA
gaaaggttaactccagaggt

SEQ ID NO: 43526 - DNA, 20 bp, synthetic construct
  misc_feature 1..20: note = chemically synthesized
  source 1..20: mol_type = other DNA
aaaggttaactccagaggtc

SEQ ID NO: 43527 - DNA, 20 bp, synthetic construct
  misc_feature 1..20: note = chemically synthesized
  source 1..20: mol_type = other DNA
agaggtcaggaatctgaaca

SEQ ID NO: 43528 - DNA, 20 bp, synthetic construct
  misc_feature 1..20: note = chemically synthesized
  source 1..20: mol_type = other DNA
ggaatctgaacacagaaaac

SEQ ID NO: 43529 - DNA, 20 bp, synthetic construct
  misc_feature 1..20: note = chemically synthesized
  source 1..20: mol_type = other DNA
ttaatgaatatgtcaacaca

SEQ ID NO: 43530 - DNA, 20 bp, synthetic construct
  misc_feature 1..20: note = chemically synthesized
  source 1..20: mol_type = other DNA
atgaaatcacatttacacaa

SEQ ID NO: 43531 - DNA, 20 bp, synthetic construct
  misc_feature 1..20: note = chemically synthesized
  source 1..20: mol_type = other DNA
catttacacaaaagtacaac

SEQ ID NO: 43532 - DNA, 20 bp, synthetic construct
  misc_feature 1..20: note = chemically synthesized
  source 1..20: mol_type = other DNA
atttacacaaaagtacaact

SEQ ID NO: 43533 - DNA, 20 bp, synthetic construct
  misc_feature 1..20: note = chemically synthesized
  source 1..20: mol_type = other DNA
tttacacaaaagtacaactg

SEQ ID NO: 43534 - DNA, 20 bp, synthetic construct
  misc_feature 1..20: note = chemically synthesized
  source 1..20: mol_type = other DNA
cacaaaagtacaactggggt

SEQ ID NO: 43535 - DNA, 20 bp, synthetic construct
  misc_feature 1..20: note = chemically synthesized
  source 1..20: mol_type = other DNA
actggggtaagaaaattcaa

SEQ ID NO: 43536 - DNA, 20 bp, synthetic construct
  misc_feature 1..20: note = chemically synthesized
  source 1..20: mol_type = other DNA
gtaagaaaattcaaaagata

SEQ ID NO: 43537 - DNA, 20 bp, synthetic construct
  misc_feature 1..20: note = chemically synthesized
  source 1..20: mol_type = other DNA
atgaaataccctatgtattt

SEQ ID NO: 43538 - DNA, 20 bp, synthetic construct
  misc_feature 1..20: note = chemically synthesized
  source 1..20: mol_type = other DNA
aataccctatgtatttgagt

SEQ ID NO: 43539 - DNA, 20 bp, synthetic construct
  misc_feature 1..20: note = chemically synthesized
  source 1..20: mol_type = other DNA
atgtatttgagtaagttgct

SEQ ID NO: 43540 - DNA, 20 bp, synthetic construct
  misc_feature 1..20: note = chemically synthesized
  source 1..20: mol_type = other DNA
tgcttagcttctcccaacct

SEQ ID NO: 43541 - DNA, 20 bp, synthetic construct
  misc_feature 1..20: note = chemically synthesized
  source 1..20: mol_type = other DNA
gtttcctcatttctaaaacg

SEQ ID NO: 43542 - DNA, 20 bp, synthetic construct
  misc_feature 1..20: note = chemically synthesized
  source 1..20: mol_type = other DNA
cgaagaacttgcttaatatt

SEQ ID NO: 43543 - DNA, 20 bp, synthetic construct
  misc_feature 1..20: note = chemically synthesized
  source 1..20: mol_type = other DNA
gaagaacttgcttaatattc

SEQ ID NO: 43544 - DNA, 20 bp, synthetic construct
  misc_feature 1..20: note = chemically synthesized
  source 1..20: mol_type = other DNA
cttgcttaatattcaggctc

SEQ ID NO: 43545 - DNA, 20 bp, synthetic construct
  misc_feature 1..20: note = chemically synthesized
  source 1..20: mol_type = other DNA
ttgcttaatattcaggctct

SEQ ID NO: 43546 - DNA, 20 bp, synthetic construct
  misc_feature 1..20: note = chemically synthesized
  source 1..20: mol_type = other DNA
ccaccaaatccttgattcac

SEQ ID NO: 43547 - DNA, 20 bp, synthetic construct
  misc_feature 1..20: note = chemically synthesized
  source 1..20: mol_type = other DNA
aatccttgattcactggctc

SEQ ID NO: 43548 - DNA, 20 bp, synthetic construct
  misc_feature 1..20: note = chemically synthesized
  source 1..20: mol_type = other DNA
atccttgattcactggctct

SEQ ID NO: 43549 - DNA, 20 bp, synthetic construct
  misc_feature 1..20: note = chemically synthesized
  source 1..20: mol_type = other DNA
gctctgggtctgtatgtaac

SEQ ID NO: 43550 - DNA, 20 bp, synthetic construct
  misc_feature 1..20: note = chemically synthesized
  source 1..20: mol_type = other DNA
gtctgtatgtaacaagcttc

SEQ ID NO: 43551 - DNA, 20 bp, synthetic construct
  misc_feature 1..20: note = chemically synthesized
  source 1..20: mol_type = other DNA
ctgtatgtaacaagcttctg

SEQ ID NO: 43552 - DNA, 20 bp, synthetic construct
  misc_feature 1..20: note = chemically synthesized
  source 1..20: mol_type = other DNA
tctggagtgattctaatgat

SEQ ID NO: 43553 - DNA, 20 bp, synthetic construct
  misc_feature 1..20: note = chemically synthesized
  source 1..20: mol_type = other DNA
gagtgattctaatgattagc

SEQ ID NO: 43554 - DNA, 20 bp, synthetic construct
  misc_feature 1..20: note = chemically synthesized
  source 1..20: mol_type = other DNA
gtgattctaatgattagcca

SEQ ID NO: 43555 - DNA, 20 bp, synthetic construct
  misc_feature 1..20: note = chemically synthesized
  source 1..20: mol_type = other DNA
ttctaatgattagccagaga

SEQ ID NO: 43556 - DNA, 20 bp, synthetic construct
  misc_feature 1..20: note = chemically synthesized
  source 1..20: mol_type = other DNA
tctaatgattagccagagac

SEQ ID NO: 43557 - DNA, 20 bp, synthetic construct
  misc_feature 1..20: note = chemically synthesized
  source 1..20: mol_type = other DNA
aaaaattaccacaaatttat

SEQ ID NO: 43558 - DNA, 20 bp, synthetic construct
  misc_feature 1..20: note = chemically synthesized
  source 1..20: mol_type = other DNA
aacacaaatgtattatcttg

SEQ ID NO: 43559 - DNA, 20 bp, synthetic construct
  misc_feature 1..20: note = chemically synthesized
  source 1..20: mol_type = other DNA
aatgtattatcttgaagttg

SEQ ID NO: 43560 - DNA, 20 bp, synthetic construct
  misc_feature 1..20: note = chemically synthesized
  source 1..20: mol_type = other DNA
tgtattatcttgaagttgtg

SEQ ID NO: 43561 - DNA, 20 bp, synthetic construct
  misc_feature 1..20: note = chemically synthesized
  source 1..20: mol_type = other DNA
gtattatcttgaagttgtgg

SEQ ID NO: 43562 - DNA, 20 bp, synthetic construct
  misc_feature 1..20: note = chemically synthesized
  source 1..20: mol_type = other DNA
tatcttgaagttgtggaggt

SEQ ID NO: 43563 - DNA, 20 bp, synthetic construct
  misc_feature 1..20: note = chemically synthesized
  source 1..20: mol_type = other DNA
cttgaagttgtggaggtcag

SEQ ID NO: 43564 - DNA, 20 bp, synthetic construct
  misc_feature 1..20: note = chemically synthesized
  source 1..20: mol_type = other DNA
ggaggtcagaagtctgaaat

SEQ ID NO: 43565 - DNA, 20 bp, synthetic construct
  misc_feature 1..20: note = chemically synthesized
  source 1..20: mol_type = other DNA
aagtctgaaatcggtttcac

SEQ ID NO: 43566 - DNA, 20 bp, synthetic construct
  misc_feature 1..20: note = chemically synthesized
  source 1..20: mol_type = other DNA
agtctgaaatcggtttcact

SEQ ID NO: 43567 - DNA, 20 bp, synthetic construct
  misc_feature 1..20: note = chemically synthesized
  source 1..20: mol_type = other DNA
aaatcggtttcactgggcta

SEQ ID NO: 43568 - DNA, 20 bp, synthetic construct
  misc_feature 1..20: note = chemically synthesized
  source 1..20: mol_type = other DNA
ggtttcactgggctaaagtc

SEQ ID NO: 43569 - DNA, 20 bp, synthetic construct
  misc_feature 1..20: note = chemically synthesized
  source 1..20: mol_type = other DNA
gtttcactgggctaaagtcg

SEQ ID NO: 43570 - DNA, 20 bp, synthetic construct
  misc_feature 1..20: note = chemically synthesized
  source 1..20: mol_type = other DNA
ctgggctaaagtcgaggtgt

SEQ ID NO: 43571 - DNA, 20 bp, synthetic construct
  misc_feature 1..20: note = chemically synthesized
  source 1..20: mol_type = other DNA
ctaaagtcgaggtgtcagtg

SEQ ID NO: 43572 - DNA, 20 bp, synthetic construct
  misc_feature 1..20: note = chemically synthesized
  source 1..20: mol_type = other DNA
gtcagtgtggctgtttcttc

SEQ ID NO: 43573 - DNA, 20 bp, synthetic construct
  misc_feature 1..20: note = chemically synthesized
  source 1..20: mol_type = other DNA
cagtgtggctgtttcttctg

SEQ ID NO: 43574 - DNA, 20 bp, synthetic construct
  misc_feature 1..20: note = chemically synthesized
  source 1..20: mol_type = other DNA
gtttcttctggagactctat

SEQ ID NO: 43575 - DNA, 20 bp, synthetic construct
  misc_feature 1..20: note = chemically synthesized
  source 1..20: mol_type = other DNA
ttcttctggagactctatga

SEQ ID NO: 43576 - DNA, 20 bp, synthetic construct
  misc_feature 1..20: note = chemically synthesized
  source 1..20: mol_type = other DNA
gtgttttcctgccttttcca

SEQ ID NO: 43577 - DNA, 20 bp, synthetic construct
  misc_feature 1..20: note = chemically synthesized
  source 1..20: mol_type = other DNA
atggattctgtttcctcttc

SEQ ID NO: 43578 - DNA, 20 bp, synthetic construct
  misc_feature 1..20: note = chemically synthesized
  source 1..20: mol_type = other DNA
ggattctgtttcctcttcta

SEQ ID NO: 43579 - DNA, 20 bp, synthetic construct
  misc_feature 1..20: note = chemically synthesized
  source 1..20: mol_type = other DNA
gattctgtttcctcttctag

SEQ ID NO: 43580 - DNA, 20 bp, synthetic construct
  misc_feature 1..20: note = chemically synthesized
  source 1..20: mol_type = other DNA
tagaggctacccacattcct

SEQ ID NO: 43581 - DNA, 20 bp, synthetic construct
  misc_feature 1..20: note = chemically synthesized
  source 1..20: mol_type = other DNA
tacccacattccttggtttg

SEQ ID NO: 43582 - DNA, 20 bp, synthetic construct
  misc_feature 1..20: note = chemically synthesized
  source 1..20: mol_type = other DNA
gtcacattttctcctcttat

SEQ ID NO: 43583 - DNA, 20 bp, synthetic construct
  misc_feature 1..20: note = chemically synthesized
  source 1..20: mol_type = other DNA
atgacacttgtgattacatt

SEQ ID NO: 43584 - DNA, 20 bp, synthetic construct
  misc_feature 1..20: note = chemically synthesized
  source 1..20: mol_type = other DNA
tgacacttgtgattacattt

SEQ ID NO: 43585 - DNA, 20 bp, synthetic construct
  misc_feature 1..20: note = chemically synthesized
  source 1..20: mol_type = other DNA
ttaggatacacccaaataat

SEQ ID NO: 43586 - DNA, 20 bp, synthetic construct
  misc_feature 1..20: note = chemically synthesized
  source 1..20: mol_type = other DNA
taggatacacccaaataatt

SEQ ID NO: 43587 - DNA, 20 bp, synthetic construct
  misc_feature 1..20: note = chemically synthesized
  source 1..20: mol_type = other DNA
ttaggatatctccccatccc

SEQ ID NO: 43588 - DNA, 20 bp, synthetic construct
  misc_feature 1..20: note = chemically synthesized
  source 1..20: mol_type = other DNA
atccttaattatatatgcaa

SEQ ID NO: 43589 - DNA, 20 bp, synthetic construct
  misc_feature 1..20: note = chemically synthesized
  source 1..20: mol_type = other DNA
tatatatgcaaaagtctgtt

SEQ ID NO: 43590 - DNA, 20 bp, synthetic construct
  misc_feature 1..20: note = chemically synthesized
  source 1..20: mol_type = other DNA
tatgcaaaagtctgtttggc

SEQ ID NO: 43591 - DNA, 20 bp, synthetic construct
  misc_feature 1..20: note = chemically synthesized
  source 1..20: mol_type = other DNA
aaaagtctgtttggctagaa

SEQ ID NO: 43592 - DNA, 20 bp, synthetic construct
  misc_feature 1..20: note = chemically synthesized
  source 1..20: mol_type = other DNA
gctagaaaagataatactca

SEQ ID NO: 43593 - DNA, 20 bp, synthetic construct
  misc_feature 1..20: note = chemically synthesized
  source 1..20: mol_type = other DNA
ctagaaaagataatactcac

SEQ ID NO: 43594 - DNA, 20 bp, synthetic construct
  misc_feature 1..20: note = chemically synthesized
  source 1..20: mol_type = other DNA
aagataatactcacaggttt

SEQ ID NO: 43595 - DNA, 20 bp, synthetic construct
  misc_feature 1..20: note = chemically synthesized
  source 1..20: mol_type = other DNA
agataatactcacaggtttc

SEQ ID NO: 43596 - DNA, 20 bp, synthetic construct
  misc_feature 1..20: note = chemically synthesized
  source 1..20: mol_type = other DNA
gataatactcacaggtttca

SEQ ID NO: 43597 - DNA, 20 bp, synthetic construct
  misc_feature 1..20: note = chemically synthesized
  source 1..20: mol_type = other DNA
ataatactcacaggtttcag

SEQ ID NO: 43598 - DNA, 20 bp, synthetic construct
  misc_feature 1..20: note = chemically synthesized
  source 1..20: mol_type = other DNA
actcacaggtttcaggggtt

SEQ ID NO: 43599 - DNA, 20 bp, synthetic construct
  misc_feature 1..20: note = chemically synthesized
  source 1..20: mol_type = other DNA
gttaagccatacatatcttt

SEQ ID NO: 43600 - DNA, 20 bp, synthetic construct
  misc_feature 1..20: note = chemically synthesized
  source 1..20: mol_type = other DNA
taagccatacatatctttca

SEQ ID NO: 43601 - DNA, 20 bp, synthetic construct
  misc_feature 1..20: note = chemically synthesized
  source 1..20: mol_type = other DNA
ccatacatatctttcagagt

SEQ ID NO: 43602 - DNA, 20 bp, synthetic construct
  misc_feature 1..20: note = chemically synthesized
  source 1..20: mol_type = other DNA
tatctttcagagtgagccat

SEQ ID NO: 43603 - DNA, 20 bp, synthetic construct
  misc_feature 1..20: note = chemically synthesized
  source 1..20: mol_type = other DNA
gtgagccattagccattatt

SEQ ID NO: 43604 - DNA, 20 bp, synthetic construct
  misc_feature 1..20: note = chemically synthesized
  source 1..20: mol_type = other DNA
agcctactgcgataatgtgc

SEQ ID NO: 43605 - DNA, 20 bp, synthetic construct
  misc_feature 1..20: note = chemically synthesized
  source 1..20: mol_type = other DNA
ctatgttctatgttcccatc

SEQ ID NO: 43606 - DNA, 20 bp, synthetic construct
  misc_feature 1..20: note = chemically synthesized
  source 1..20: mol_type = other DNA
tatgttctatgttcccatca

SEQ ID NO: 43607 - DNA, 20 bp, synthetic construct
  misc_feature 1..20: note = chemically synthesized
  source 1..20: mol_type = other DNA
atgttcccatcaaggttaat

SEQ ID NO: 43608 - DNA, 20 bp, synthetic construct
  misc_feature 1..20: note = chemically synthesized
  source 1..20: mol_type = other DNA
tcaaggttaattagaaatat

SEQ ID NO: 43609 - DNA, 20 bp, synthetic construct
  misc_feature 1..20: note = chemically synthesized
  source 1..20: mol_type = other DNA
aatattagactctttttcca

SEQ ID NO: 43610 - DNA, 20 bp, synthetic construct
  misc_feature 1..20: note = chemically synthesized
  source 1..20: mol_type = other DNA
ttccacagaaaaaaaaaatg

SEQ ID NO: 43611 - DNA, 20 bp, synthetic construct
  misc_feature 1..20: note = chemically synthesized
  source 1..20: mol_type = other DNA
cacagaaaaaaaaaatgtag

SEQ ID NO: 43612 - DNA, 20 bp, synthetic construct
  misc_feature 1..20: note = chemically synthesized
  source 1..20: mol_type = other DNA
agaaaaaaaaaatgtagcag

SEQ ID NO: 43613 - DNA, 20 bp, synthetic construct
  misc_feature 1..20: note = chemically synthesized
  source 1..20: mol_type = other DNA
ctctctctttccttcatgcc

SEQ ID NO: 43614 - DNA, 20 bp, synthetic construct
  misc_feature 1..20: note = chemically synthesized
  source 1..20: mol_type = other DNA
ctctttccttcatgcccagt

SEQ ID NO: 43615 - DNA, 20 bp, synthetic construct
  misc_feature 1..20: note = chemically synthesized
  source 1..20: mol_type = other DNA
ctttccttcatgcccagtaa

SEQ ID NO: 43616 - DNA, 20 bp, synthetic construct
  misc_feature 1..20: note = chemically synthesized
  source 1..20: mol_type = other DNA
tttccttcatgcccagtaag

SEQ ID NO: 43617 - DNA, 20 bp, synthetic construct
  misc_feature 1..20: note = chemically synthesized
  source 1..20: mol_type = other DNA
ccttcatgcccagtaagagg

SEQ ID NO: 43618 - DNA, 20 bp, synthetic construct
  misc_feature 1..20: note = chemically synthesized
  source 1..20: mol_type = other DNA
catgcccagtaagaggaagt

SEQ ID NO: 43619 - DNA, 20 bp, synthetic construct
  misc_feature 1..20: note = chemically synthesized
  source 1..20: mol_type = other DNA
atgcccagtaagaggaagtg

SEQ ID NO: 43620 - DNA, 20 bp, synthetic construct
  misc_feature 1..20: note = chemically synthesized
  source 1..20: mol_type = other DNA
gcaccatctgttcatctcat

SEQ ID NO: 43621 - DNA, 20 bp, synthetic construct
  misc_feature 1..20: note = chemically synthesized
  source 1..20: mol_type = other DNA
caccatctgttcatctcatc

SEQ ID NO: 43622 - DNA, 20 bp, synthetic construct
  misc_feature 1..20: note = chemically synthesized
  source 1..20: mol_type = other DNA
tcatctcatcaggtgttacc

SEQ ID NO: 43623 - DNA, 20 bp, synthetic construct
  misc_feature 1..20: note = chemically synthesized
  source 1..20: mol_type = other DNA
catcaggtgttacctagaat

SEQ ID NO: 43624 - DNA, 20 bp, synthetic construct
  misc_feature 1..20: note = chemically synthesized
  source 1..20: mol_type = other DNA
tcaggtgttacctagaatca

SEQ ID NO: 43625 - DNA, 20 bp, synthetic construct
  misc_feature 1..20: note = chemically synthesized
  source 1..20: mol_type = other DNA
gtgttacctagaatcagagt

SEQ ID NO: 43626 - DNA, 20 bp, synthetic construct
  misc_feature 1..20: note = chemically synthesized
  source 1..20: mol_type = other DNA
tgttacctagaatcagagtc

SEQ ID NO: 43627 - DNA, 20 bp, synthetic construct
  misc_feature 1..20: note = chemically synthesized
  source 1..20: mol_type = other DNA
ttacctagaatcagagtcag

SEQ ID NO: 43628 - DNA, 20 bp, synthetic construct
  misc_feature 1..20: note = chemically synthesized
  source 1..20: mol_type = other DNA
ctagaatcagagtcaggaga

SEQ ID NO: 43629 - DNA, 20 bp, synthetic construct
  misc_feature 1..20: note = chemically synthesized
  source 1..20: mol_type = other DNA
cctcataaaactactctgac

SEQ ID NO: 43630 - DNA, 20 bp, synthetic construct
  misc_feature 1..20: note = chemically synthesized
  source 1..20: mol_type = other DNA
ctgacaagtaaaccatatcc

SEQ ID NO: 43631 - DNA, 20 bp, synthetic construct
  misc_feature 1..20: note = chemically synthesized
  source 1..20: mol_type = other DNA
tgacaagtaaaccatatcct

SEQ ID NO: 43632 - DNA, 20 bp, synthetic construct
  misc_feature 1..20: note = chemically synthesized
  source 1..20: mol_type = other DNA
gacaagtaaaccatatcctg

SEQ ID NO: 43633 - DNA, 20 bp, synthetic construct
  misc_feature 1..20: note = chemically synthesized
  source 1..20: mol_type = other DNA
gtaaaccatatcctggggac

SEQ ID NO: 43634 - DNA, 20 bp, synthetic construct
  misc_feature 1..20: note = chemically synthesized
  source 1..20: mol_type = other DNA
taaaccatatcctggggacc

SEQ ID NO: 43635 - DNA, 20 bp, synthetic construct
  misc_feature 1..20: note = chemically synthesized
  source 1..20: mol_type = other DNA
ccatatcctggggaccaggt

SEQ ID NO: 43636 - DNA, 20 bp, synthetic construct
  misc_feature 1..20: note = chemically synthesized
  source 1..20: mol_type = other DNA
gggaccaggtgagaattaaa

SEQ ID NO: 43637 - DNA, 20 bp, synthetic construct
  misc_feature 1..20: note = chemically synthesized
  source 1..20: mol_type = other DNA
ttaaaaagctgtatactcat

SEQ ID NO: 43638 - DNA, 20 bp, synthetic construct
  misc_feature 1..20: note = chemically synthesized
  source 1..20: mol_type = other DNA
tgtatactcataagctgcca

SEQ ID NO: 43639 - DNA, 20 bp, synthetic construct
  misc_feature 1..20: note = chemically synthesized
  source 1..20: mol_type = other DNA
tatactcataagctgccaaa

SEQ ID NO: 43640 - DNA, 20 bp, synthetic construct
  misc_feature 1..20: note = chemically synthesized
  source 1..20: mol_type = other DNA
ataagctgccaaagagctga

SEQ ID NO: 43641 - DNA, 20 bp, synthetic construct
  misc_feature 1..20: note = chemically synthesized
  source 1..20: mol_type = other DNA
ccaaagagctgatggtactg

SEQ ID NO: 43642 - DNA, 20 bp, synthetic construct
  misc_feature 1..20: note = chemically synthesized
  source 1..20: mol_type = other DNA
ctgatggtactgaagtcaca

SEQ ID NO: 43643 - DNA, 20 bp, synthetic construct
  misc_feature 1..20: note = chemically synthesized
  source 1..20: mol_type = other DNA
gatggtactgaagtcacatg

SEQ ID NO: 43644 - DNA, 20 bp, synthetic construct
  misc_feature 1..20: note = chemically synthesized
  source 1..20: mol_type = other DNA
tactgaagtcacatggagct

SEQ ID NO: 43645 - DNA, 20 bp, synthetic construct
  misc_feature 1..20: note = chemically synthesized
  source 1..20: mol_type = other DNA
actgaagtcacatggagctc

SEQ ID NO: 43646 - DNA, 20 bp, synthetic construct
  misc_feature 1..20: note = chemically synthesized
  source 1..20: mol_type = other DNA
caggaatttattcttgcatt

SEQ ID NO: 43647 - DNA, 20 bp, synthetic construct
  misc_feature 1..20: note = chemically synthesized
  source 1..20: mol_type = other DNA
aatttattcttgcatttaga

SEQ ID NO: 43648 - DNA, 20 bp, synthetic construct
  misc_feature 1..20: note = chemically synthesized
  source 1..20: mol_type = other DNA
atgcatataattctctcgaa

SEQ ID NO: 43649 - DNA, 20 bp, synthetic construct
  misc_feature 1..20: note = chemically synthesized
  source 1..20: mol_type = other DNA
atgaaatcatatttttctgt

SEQ ID NO: 43650 - DNA, 20 bp, synthetic construct
  misc_feature 1..20: note = chemically synthesized
  source 1..20: mol_type = other DNA
ttctgtcggatcaaattatt

SEQ ID NO: 43651 - DNA, 20 bp, synthetic construct
  misc_feature 1..20: note = chemically synthesized
  source 1..20: mol_type = other DNA
ttattcagaaatccgaactg

SEQ ID NO: 43652 - DNA, 20 bp, synthetic construct
  misc_feature 1..20: note = chemically synthesized
  source 1..20: mol_type = other DNA
caaacacacttgcttaatgt

SEQ ID NO: 43653 - DNA, 20 bp, synthetic construct
  misc_feature 1..20: note = chemically synthesized
  source 1..20: mol_type = other DNA
tttaatcttatttttgtaca

SEQ ID NO: 43654 - DNA, 20 bp, synthetic construct
  misc_feature 1..20: note = chemically synthesized
  source 1..20: mol_type = other DNA
gtacacagtatacttttaca

SEQ ID NO: 43655 - DNA, 20 bp, synthetic construct
  misc_feature 1..20: note = chemically synthesized
  source 1..20: mol_type = other DNA
tacacagtatacttttacat

SEQ ID NO: 43656 - DNA, 20 bp, synthetic construct
  misc_feature 1..20: note = chemically synthesized
  source 1..20: mol_type = other DNA
cttttacataggcactgaac

SEQ ID NO: 43657 - DNA, 20 bp, synthetic construct
  misc_feature 1..20: note = chemically synthesized
  source 1..20: mol_type = other DNA
tacataggcactgaaccagc

SEQ ID NO: 43658 - DNA, 20 bp, synthetic construct
  misc_feature 1..20: note = chemically synthesized
  source 1..20: mol_type = other DNA
accagctggaaatgaatgct

SEQ ID NO: 43659 - DNA, 20 bp, synthetic construct
  misc_feature 1..20: note = chemically synthesized
  source 1..20: mol_type = other DNA
aatgaatgcttggattttcg

SEQ ID NO: 43660 - DNA, 20 bp, synthetic construct
  misc_feature 1..20: note = chemically synthesized
  source 1..20: mol_type = other DNA
tggattttcgcagctgataa

SEQ ID NO: 43661 - DNA, 20 bp, synthetic construct
  misc_feature 1..20: note = chemically synthesized
  source 1..20: mol_type = other DNA
attttcgcagctgataaaag

SEQ ID NO: 43662 - DNA, 20 bp, synthetic construct
  misc_feature 1..20: note = chemically synthesized
  source 1..20: mol_type = other DNA
tttcgcagctgataaaagca

SEQ ID NO: 43663 - DNA, 20 bp, synthetic construct
  misc_feature 1..20: note = chemically synthesized
  source 1..20: mol_type = other DNA
cagctgataaaagcagagtt

SEQ ID NO: 43664 - DNA, 20 bp, synthetic construct
  misc_feature 1..20: note = chemically synthesized
  source 1..20: mol_type = other DNA
agagttcagattctgtcctt

SEQ ID NO: 43665 - DNA, 20 bp, synthetic construct
  misc_feature 1..20: note = chemically synthesized
  source 1..20: mol_type = other DNA
ctgtccttgagctcaatgtc

SEQ ID NO: 43666 - DNA, 20 bp, synthetic construct
  misc_feature 1..20: note = chemically synthesized
  source 1..20: mol_type = other DNA
gtccttgagctcaatgtctg

SEQ ID NO: 43667 - DNA, 20 bp, synthetic construct
  misc_feature 1..20: note = chemically synthesized
  source 1..20: mol_type = other DNA
ttgagctcaatgtctggaga

SEQ ID NO: 43668 - DNA, 20 bp, synthetic construct
  misc_feature 1..20: note = chemically synthesized
  source 1..20: mol_type = other DNA
agctcaatgtctggagaaag

SEQ ID NO: 43669 - DNA, 20 bp, synthetic construct
  misc_feature 1..20: note = chemically synthesized
  source 1..20: mol_type = other DNA
tgaatactgcttccttaatt

SEQ ID NO: 43670 - DNA, 20 bp, synthetic construct
  misc_feature 1..20: note = chemically synthesized
  source 1..20: mol_type = other DNA
ttccttaattcagatgcctt

SEQ ID NO: 43671 - DNA, 20 bp, synthetic construct
  misc_feature 1..20: note = chemically synthesized
  source 1..20: mol_type = other DNA
attcagatgcctttggccgt

SEQ ID NO: 43672 - DNA, 20 bp, synthetic construct
  misc_feature 1..20: note = chemically synthesized
  source 1..20: mol_type = other DNA
ttcagatgcctttggccgtg

SEQ ID NO: 43673 - DNA, 20 bp, synthetic construct
  misc_feature 1..20: note = chemically synthesized
  source 1..20: mol_type = other DNA
tcagatgcctttggccgtga

SEQ ID NO: 43674 - DNA, 20 bp, synthetic construct
  misc_feature 1..20: note = chemically synthesized
  source 1..20: mol_type = other DNA
cagatgcctttggccgtgag

SEQ ID NO: 43675 - DNA, 20 bp, synthetic construct
  misc_feature 1..20: note = chemically synthesized
  source 1..20: mol_type = other DNA
gcctttggccgtgaggggca

SEQ ID NO: 43676 - DNA, 20 bp, synthetic construct
  misc_feature 1..20: note = chemically synthesized
  source 1..20: mol_type = other DNA
gtgaggggcatggcatttta

SEQ ID NO: 43677 - DNA, 20 bp, synthetic construct
  misc_feature 1..20: note = chemically synthesized
  source 1..20: mol_type = other DNA
aaactctgtactttttctct

SEQ ID NO: 43678 - DNA, 20 bp, synthetic construct
  misc_feature 1..20: note = chemically synthesized
  source 1..20: mol_type = other DNA
aactctgtactttttctctc

SEQ ID NO: 43679 - DNA, 20 bp, synthetic construct
  misc_feature 1..20: note = chemically synthesized
  source 1..20: mol_type = other DNA
actctgtactttttctctca

SEQ ID NO: 43680 - DNA, 20 bp, synthetic construct
  misc_feature 1..20: note = chemically synthesized
  source 1..20: mol_type = other DNA
ctctgtactttttctctcag

SEQ ID NO: 43681 - DNA, 20 bp, synthetic construct
  misc_feature 1..20: note = chemically synthesized
  source 1..20: mol_type = other DNA
tactttttctctcaggggat

SEQ ID NO: 43682 - DNA, 20 bp, synthetic construct
  misc_feature 1..20: note = chemically synthesized
  source 1..20: mol_type = other DNA
agaaaaaccaattgatttga

SEQ ID NO: 43683 - DNA, 20 bp, synthetic construct
  misc_feature 1..20: note = chemically synthesized
  source 1..20: mol_type = other DNA
caattgatttgatagtgact

SEQ ID NO: 43684 - DNA, 20 bp, synthetic construct
  misc_feature 1..20: note = chemically synthesized
  source 1..20: mol_type = other DNA
ttgatttgatagtgactcag

SEQ ID NO: 43685 - DNA, 20 bp, synthetic construct
  misc_feature 1..20: note = chemically synthesized
  source 1..20: mol_type = other DNA
gcagttttcaccttcctctt

SEQ ID NO: 43686 - DNA, 20 bp, synthetic construct
  misc_feature 1..20: note = chemically synthesized
  source 1..20: mol_type = other DNA
cctctttagccaatgccctg

SEQ ID NO: 43687 - DNA, 20 bp, synthetic construct
  misc_feature 1..20: note = chemically synthesized
  source 1..20: mol_type = other DNA
ttagccaatgccctgcagct

SEQ ID NO: 43688 - DNA, 20 bp, synthetic construct
  misc_feature 1..20: note = chemically synthesized
  source 1..20: mol_type = other DNA
aatgccctgcagctaagatt

SEQ ID NO: 43689 - DNA, 20 bp, synthetic construct
  misc_feature 1..20: note = chemically synthesized
  source 1..20: mol_type = other DNA
ctgcagctaagattgagaaa

SEQ ID NO: 43690 - DNA, 20 bp, synthetic construct
  misc_feature 1..20: note = chemically synthesized
  source 1..20: mol_type = other DNA
ctaagattgagaaacggatt

SEQ ID NO: 43691 - DNA, 20 bp, synthetic construct
  misc_feature 1..20: note = chemically synthesized
  source 1..20: mol_type = other DNA
gattcagaactcacacctct

SEQ ID NO: 43692 - DNA, 20 bp, synthetic construct
  misc_feature 1..20: note = chemically synthesized
  source 1..20: mol_type = other DNA
aactcacacctcttggtgct

SEQ ID NO: 43693 - DNA, 20 bp, synthetic construct
  misc_feature 1..20: note = chemically synthesized
  source 1..20: mol_type = other DNA
tcacacctcttggtgcttgg

SEQ ID NO: 43694 - DNA, 20 bp, synthetic construct
  misc_feature 1..20: note = chemically synthesized
  source 1..20: mol_type = other DNA
gtggctcccttccaaaccat

SEQ ID NO: 43695 - DNA, 20 bp, synthetic construct
  misc_feature 1..20: note = chemically synthesized
  source 1..20: mol_type = other DNA
actttctttcctatttttta

SEQ ID NO: 43696 - DNA, 20 bp, synthetic construct
  misc_feature 1..20: note = chemically synthesized
  source 1..20: mol_type = other DNA
ctttcctattttttaaagca

SEQ ID NO: 43697 - DNA, 20 bp, synthetic construct
  misc_feature 1..20: note = chemically synthesized
  source 1..20: mol_type = other DNA
tttaaagcacagtctgaatc

SEQ ID NO: 43698 - DNA, 20 bp, synthetic construct
  misc_feature 1..20: note = chemically synthesized
  source 1..20: mol_type = other DNA
acagtctgaatcaagtgctt

SEQ ID NO: 43699 - DNA, 20 bp, synthetic construct
  misc_feature 1..20: note = chemically synthesized
  source 1..20: mol_type = other DNA
ataaccctgaaccctcttct

SEQ ID NO: 43700 - DNA, 20 bp, synthetic construct
  misc_feature 1..20: note = chemically synthesized
  source 1..20: mol_type = other DNA
taaccctgaaccctcttcta

SEQ ID NO: 43701 - DNA, 20 bp, synthetic construct
  misc_feature 1..20: note = chemically synthesized
  source 1..20: mol_type = other DNA
gaaccctcttctaaggccac

SEQ ID NO: 43702 - DNA, 20 bp, synthetic construct
  misc_feature 1..20: note = chemically synthesized
  source 1..20: mol_type = other DNA
ttctaaggccaccagttaca

SEQ ID NO: 43703 - DNA, 20 bp, synthetic construct
  misc_feature 1..20: note = chemically synthesized
  source 1..20: mol_type = other DNA
aggccaccagttacaaagaa

SEQ ID NO: 43704 - DNA, 20 bp, synthetic construct
  misc_feature 1..20: note = chemically synthesized
  source 1..20: mol_type = other DNA
ggccaccagttacaaagaat

SEQ ID NO: 43705 - DNA, 20 bp, synthetic construct
  misc_feature 1..20: note = chemically synthesized
  source 1..20: mol_type = other DNA
gccaccagttacaaagaatg

SEQ ID NO: 43706 - DNA, 20 bp, synthetic construct
  misc_feature 1..20: note = chemically synthesized
  source 1..20: mol_type = other DNA
accagttacaaagaatgggg

SEQ ID NO: 43707 - DNA, 20 bp, synthetic construct
  misc_feature 1..20: note = chemically synthesized
  source 1..20: mol_type = other DNA
ccagttacaaagaatgggga

SEQ ID NO: 43708 - DNA, 20 bp, synthetic construct
  misc_feature 1..20: note = chemically synthesized
  source 1..20: mol_type = other DNA
aaagaatggggaaggttaat

SEQ ID NO: 43709 - DNA, 20 bp, synthetic construct
  misc_feature 1..20: note = chemically synthesized
  source 1..20: mol_type = other DNA
aggttaatgagtaactccac

SEQ ID NO: 43710 - DNA, 20 bp, synthetic construct
  misc_feature 1..20: note = chemically synthesized
  source 1..20: mol_type = other DNA
gtaactccaccagtgcctgc

SEQ ID NO: 43711 - DNA, 20 bp, synthetic construct
  misc_feature 1..20: note = chemically synthesized
  source 1..20: mol_type = other DNA
ctccaccagtgcctgccaga

SEQ ID NO: 43712 - DNA, 20 bp, synthetic construct
  misc_feature 1..20: note = chemically synthesized
  source 1..20: mol_type = other DNA
ccagtgcctgccagaaagct

SEQ ID NO: 43713 - DNA, 20 bp, synthetic construct
  misc_feature 1..20: note = chemically synthesized
  source 1..20: mol_type = other DNA
cagaaagctcagctgtactc

SEQ ID NO: 43714 - DNA, 20 bp, synthetic construct
  misc_feature 1..20: note = chemically synthesized
  source 1..20: mol_type = other DNA
cagccttccttcctctcttg

SEQ ID NO: 43715 - DNA, 20 bp, synthetic construct
  misc_feature 1..20: note = chemically synthesized
  source 1..20: mol_type = other DNA
gccttccttcctctcttgca

SEQ ID NO: 43716 - DNA, 20 bp, synthetic construct
  misc_feature 1..20: note = chemically synthesized
  source 1..20: mol_type = other DNA
cttccttcctctcttgcaga

SEQ ID NO: 43717 - DNA, 20 bp, synthetic construct
  misc_feature 1..20: note = chemically synthesized
  source 1..20: mol_type = other DNA
tcttgcagagagaaacaatg

SEQ ID NO: 43718 - DNA, 20 bp, synthetic construct
  misc_feature 1..20: note = chemically synthesized
  source 1..20: mol_type = other DNA
tgcagagagaaacaatgcgg

SEQ ID NO: 43719 - DNA, 20 bp, synthetic construct
  misc_feature 1..20: note = chemically synthesized
  source 1..20: mol_type = other DNA
aacaatgcggcagttgaaca

SEQ ID NO: 43720 - DNA, 20 bp, synthetic construct
  misc_feature 1..20: note = chemically synthesized
  source 1..20: mol_type = other DNA
tgcggcagttgaacaaagcg

SEQ ID NO: 43721 - DNA, 20 bp, synthetic construct
  misc_feature 1..20: note = chemically synthesized
  source 1..20: mol_type = other DNA
gcggcagttgaacaaagcga

SEQ ID NO: 43722 - DNA, 20 bp, synthetic construct
  misc_feature 1..20: note = chemically synthesized
  source 1..20: mol_type = other DNA
agcgaaggcactgtaatgcc

SEQ ID NO: 43723 - DNA, 20 bp, synthetic construct
  misc_feature 1..20: note = chemically synthesized
  source 1..20: mol_type = other DNA
gaaggcactgtaatgcccag

SEQ ID NO: 43724 - DNA, 20 bp, synthetic construct
  misc_feature 1..20: note = chemically synthesized
  source 1..20: mol_type = other DNA
actgtaatgcccagtggctt

SEQ ID NO: 43725 - DNA, 20 bp, synthetic construct
  misc_feature 1..20: note = chemically synthesized
  source 1..20: mol_type = other DNA
atgcccagtggcttcagtca

SEQ ID NO: 43726 - DNA, 20 bp, synthetic construct
  misc_feature 1..20: note = chemically synthesized
  source 1..20: mol_type = other DNA
tgcccagtggcttcagtcac

SEQ ID NO: 43727 - DNA, 20 bp, synthetic construct
  misc_feature 1..20: note = chemically synthesized
  source 1..20: mol_type = other DNA
cagtggcttcagtcacaggc

SEQ ID NO: 43728 - DNA, 20 bp, synthetic construct
  misc_feature 1..20: note = chemically synthesized
  source 1..20: mol_type = other DNA
tggtctaaaattccatttca

SEQ ID NO: 43729 - DNA, 20 bp, synthetic construct
  misc_feature 1..20: note = chemically synthesized
  source 1..20: mol_type = other DNA
aattccatttcacagaattg

SEQ ID NO: 43730 - DNA, 20 bp, synthetic construct
  misc_feature 1..20: note = chemically synthesized
  source 1..20: mol_type = other DNA
tcacagaattgaagataatt

SEQ ID NO: 43731 - DNA, 20 bp, synthetic construct
  misc_feature 1..20: note = chemically synthesized
  source 1..20: mol_type = other DNA
cacagaattgaagataattt

SEQ ID NO: 43732 - DNA, 20 bp, synthetic construct
  misc_feature 1..20: note = chemically synthesized
  source 1..20: mol_type = other DNA
acagaattgaagataatttg

SEQ ID NO: 43733 - DNA, 20 bp, synthetic construct
  misc_feature 1..20: note = chemically synthesized
  source 1..20: mol_type = other DNA
ttggggttattaccaattct

SEQ ID NO: 43734 - DNA, 20 bp, synthetic construct
  misc_feature 1..20: note = chemically synthesized
  source 1..20: mol_type = other DNA
gggttattaccaattctcag

SEQ ID NO: 43735 - DNA, 20 bp, synthetic construct
  misc_feature 1..20: note = chemically synthesized
  source 1..20: mol_type = other DNA
ctcaaattcaatcccgttga

SEQ ID NO: 43736 - DNA, 20 bp, synthetic construct
  misc_feature 1..20: note = chemically synthesized
  source 1..20: mol_type = other DNA
aattcaatcccgttgatggt

SEQ ID NO: 43737 - DNA, 20 bp, synthetic construct
  misc_feature 1..20: note = chemically synthesized
  source 1..20: mol_type = other DNA
aatcccgttgatggtgagca

SEQ ID NO: 43738 - DNA, 20 bp, synthetic construct
  misc_feature 1..20: note = chemically synthesized
  source 1..20: mol_type = other DNA
atcccgttgatggtgagcat

SEQ ID NO: 43739 - DNA, 20 bp, synthetic construct
  misc_feature 1..20: note = chemically synthesized
  source 1..20: mol_type = other DNA
tcccgttgatggtgagcatg

SEQ ID NO: 43740 - DNA, 20 bp, synthetic construct
  misc_feature 1..20: note = chemically synthesized
  source 1..20: mol_type = other DNA
gtgagcatggggttcatttt

SEQ ID NO: 43741 - DNA, 20 bp, synthetic construct
  misc_feature 1..20: note = chemically synthesized
  source 1..20: mol_type = other DNA
gagcatggggttcattttga

SEQ ID NO: 43742 - DNA, 20 bp, synthetic construct
  misc_feature 1..20: note = chemically synthesized
  source 1..20: mol_type = other DNA
catggggttcattttgagag

SEQ ID NO: 43743 - DNA, 20 bp, synthetic construct
  misc_feature 1..20: note = chemically synthesized
  source 1..20: mol_type = other DNA
tcattttgagagtagaaaat

SEQ ID NO: 43744 - DNA, 20 bp, synthetic construct
  misc_feature 1..20: note = chemically synthesized
  source 1..20: mol_type = other DNA
tgagagtagaaaattggatg

SEQ ID NO: 43745 - DNA, 20 bp, synthetic construct
  misc_feature 1..20: note = chemically synthesized
  source 1..20: mol_type = other DNA
gagtagaaaattggatgcag

SEQ ID NO: 43746 - DNA, 20 bp, synthetic construct
  misc_feature 1..20: note = chemically synthesized
  source 1..20: mol_type = other DNA
gtagaaaattggatgcagtg

SEQ ID NO: 43747 - DNA, 20 bp, synthetic construct
  misc_feature 1..20: note = chemically synthesized
  source 1..20: mol_type = other DNA
aattggatgcagtggagaat

SEQ ID NO: 43748 - DNA, 20 bp, synthetic construct
  misc_feature 1..20: note = chemically synthesized
  source 1..20: mol_type = other DNA
gcagtggagaatcagaatgt

SEQ ID NO: 43749 - DNA, 20 bp, synthetic construct
  misc_feature 1..20: note = chemically synthesized
  source 1..20: mol_type = other DNA
tggagaatcagaatgttgga

SEQ ID NO: 43750 - DNA, 20 bp, synthetic construct
  misc_feature 1..20: note = chemically synthesized
  source 1..20: mol_type = other DNA
tggtctctgccatttcccca

SEQ ID NO: 43751 - DNA, 20 bp, synthetic construct
  misc_feature 1..20: note = chemically synthesized
  source 1..20: mol_type = other DNA
tgctgctgcttttaacaaat

SEQ ID NO: 43752 - DNA, 20 bp, synthetic construct
  misc_feature 1..20: note = chemically synthesized
  source 1..20: mol_type = other DNA
taacaaatcagtatacaact

SEQ ID NO: 43753 - DNA, 20 bp, synthetic construct
  misc_feature 1..20: note = chemically synthesized
  source 1..20: mol_type = other DNA
tttcaaatatacaaaatatt

SEQ ID NO: 43754 - DNA, 20 bp, synthetic construct
  misc_feature 1..20: note = chemically synthesized
  source 1..20: mol_type = other DNA
tatacaaaatattgagtctg

SEQ ID NO: 43755 - DNA, 20 bp, synthetic construct
  misc_feature 1..20: note = chemically synthesized
  source 1..20: mol_type = other DNA
atacaaaatattgagtctga

SEQ ID NO: 43756 - DNA, 20 bp, synthetic construct
  misc_feature 1..20: note = chemically synthesized
  source 1..20: mol_type = other DNA
atattgagtctgaaggcaaa

SEQ ID NO: 43757 - DNA, 20 bp, synthetic construct
  misc_feature 1..20: note = chemically synthesized
  source 1..20: mol_type = other DNA
ttttcacttccattgcttcc

SEQ ID NO: 43758 - DNA, 20 bp, synthetic construct
  misc_feature 1..20: note = chemically synthesized
  source 1..20: mol_type = other DNA
tttcacttccattgcttcct

SEQ ID NO: 43759 - DNA, 20 bp, synthetic construct
  misc_feature 1..20: note = chemically synthesized
  source 1..20: mol_type = other DNA
tctgatatttcttccaaata

SEQ ID NO: 43760 - DNA, 20 bp, synthetic construct
  misc_feature 1..20: note = chemically synthesized
  source 1..20: mol_type = other DNA
ttccaaatacagactgttgt

SEQ ID NO: 43761 - DNA, 20 bp, synthetic construct
  misc_feature 1..20: note = chemically synthesized
  source 1..20: mol_type = other DNA
ctgatcatcactcacacatc

SEQ ID NO: 43762 - DNA, 20 bp, synthetic construct
  misc_feature 1..20: note = chemically synthesized
  source 1..20: mol_type = other DNA
tgatcatcactcacacatcc

SEQ ID NO: 43763 - DNA, 20 bp, synthetic construct
  misc_feature 1..20: note = chemically synthesized
  source 1..20: mol_type = other DNA
tgttacatctccacgccact

SEQ ID NO: 43764 - DNA, 20 bp, synthetic construct
  misc_feature 1..20: note = chemically synthesized
  source 1..20: mol_type = other DNA
atctccacgccactgagtat

SEQ ID NO: 43765 - DNA, 20 bp, synthetic construct
  misc_feature 1..20: note = chemically synthesized
  source 1..20: mol_type = other DNA
tctccacgccactgagtatc

SEQ ID NO: 43766 - DNA, 20 bp, synthetic construct
  misc_feature 1..20: note = chemically synthesized
  source 1..20: mol_type = other DNA
ctccacgccactgagtatca

SEQ ID NO: 43767 - DNA, 20 bp, synthetic construct
  misc_feature 1..20: note = chemically synthesized
  source 1..20: mol_type = other DNA
aacctgccccaatattcacg

SEQ ID NO: 43768 - DNA, 20 bp, synthetic construct
  misc_feature 1..20: note = chemically synthesized
  source 1..20: mol_type = other DNA
acctgccccaatattcacgt

SEQ ID NO: 43769 - DNA, 20 bp, synthetic construct
  misc_feature 1..20: note = chemically synthesized
  source 1..20: mol_type = other DNA
ggttcttttctattttccct

SEQ ID NO: 43770 - DNA, 20 bp, synthetic construct
  misc_feature 1..20: note = chemically synthesized
  source 1..20: mol_type = other DNA
tttctattttccctaagcgt

SEQ ID NO: 43771 - DNA, 20 bp, synthetic construct
  misc_feature 1..20: note = chemically synthesized
  source 1..20: mol_type = other DNA
ccctaagcgtcggccaactt

SEQ ID NO: 43772 - DNA, 20 bp, synthetic construct
  misc_feature 1..20: note = chemically synthesized
  source 1..20: mol_type = other DNA
gtcggccaactttagaaata

SEQ ID NO: 43773 - DNA, 20 bp, synthetic construct
  misc_feature 1..20: note = chemically synthesized
  source 1..20: mol_type = other DNA
tcggccaactttagaaataa

SEQ ID NO: 43774 - DNA, 20 bp, synthetic construct
  misc_feature 1..20: note = chemically synthesized
  source 1..20: mol_type = other DNA
cggccaactttagaaataaa

SEQ ID NO: 43775 - DNA, 20 bp, synthetic construct
  misc_feature 1..20: note = chemically synthesized
  source 1..20: mol_type = other DNA
caactttagaaataaaggga

SEQ ID NO: 43776 - DNA, 20 bp, synthetic construct
  misc_feature 1..20: note = chemically synthesized
  source 1..20: mol_type = other DNA
actttagaaataaagggaca

SEQ ID NO: 43777 - DNA, 20 bp, synthetic construct
  misc_feature 1..20: note = chemically synthesized
  source 1..20: mol_type = other DNA
aataaagggacagagtacaa

SEQ ID NO: 43778 - DNA, 20 bp, synthetic construct
  misc_feature 1..20: note = chemically synthesized
  source 1..20: mol_type = other DNA
taaagggacagagtacaaaa

SEQ ID NO: 43779 - DNA, 20 bp, synthetic construct
  misc_feature 1..20: note = chemically synthesized
  source 1..20: mol_type = other DNA
aagggacagagtacaaaaga

SEQ ID NO: 43780 - DNA, 20 bp, synthetic construct
  misc_feature 1..20: note = chemically synthesized
  source 1..20: mol_type = other DNA
tacaaaagagagaaatttta

SEQ ID NO: 43781 - DNA, 20 bp, synthetic construct
  misc_feature 1..20: note = chemically synthesized
  source 1..20: mol_type = other DNA
aaagagagaaattttaaagc

SEQ ID NO: 43782 - DNA, 20 bp, synthetic construct
  misc_feature 1..20: note = chemically synthesized
  source 1..20: mol_type = other DNA
aagagagaaattttaaagcc

SEQ ID NO: 43783 - DNA, 20 bp, synthetic construct
  misc_feature 1..20: note = chemically synthesized
  source 1..20: mol_type = other DNA
aaattttaaagccgggcatc

SEQ ID NO: 43784 - DNA, 20 bp, synthetic construct
  misc_feature 1..20: note = chemically synthesized
  source 1..20: mol_type = other DNA
aattttaaagccgggcatcc

SEQ ID NO: 43785 - DNA, 20 bp, synthetic construct
  misc_feature 1..20: note = chemically synthesized
  source 1..20: mol_type = other DNA
attttaaagccgggcatccg

SEQ ID NO: 43786 - DNA, 20 bp, synthetic construct
  misc_feature 1..20: note = chemically synthesized
  source 1..20: mol_type = other DNA
ttttaaagccgggcatccgg

SEQ ID NO: 43787 - DNA, 20 bp, synthetic construct
  misc_feature 1..20: note = chemically synthesized
  source 1..20: mol_type = other DNA
ttaaagccgggcatccgggg

SEQ ID NO: 43788 - DNA, 20 bp, synthetic construct
  misc_feature 1..20: note = chemically synthesized
  source 1..20: mol_type = other DNA
taaagccgggcatccggggg

SEQ ID NO: 43789 - DNA, 20 bp, synthetic construct
  misc_feature 1..20: note = chemically synthesized
  source 1..20: mol_type = other DNA
ccgggggaggcatcacattt

SEQ ID NO: 43790 - DNA, 20 bp, synthetic construct
  misc_feature 1..20: note = chemically synthesized
  source 1..20: mol_type = other DNA
ggggaggcatcacatttcgg

SEQ ID NO: 43791 - DNA, 20 bp, synthetic construct
  misc_feature 1..20: note = chemically synthesized
  source 1..20: mol_type = other DNA
gggaggcatcacatttcggt

SEQ ID NO: 43792 - DNA, 20 bp, synthetic construct
  misc_feature 1..20: note = chemically synthesized
  source 1..20: mol_type = other DNA
taggttccgtgatgccccac

SEQ ID NO: 43793 - DNA, 20 bp, synthetic construct
  misc_feature 1..20: note = chemically synthesized
  source 1..20: mol_type = other DNA
gccccacaagccacaaaaac

SEQ ID NO: 43794 - DNA, 20 bp, synthetic construct
  misc_feature 1..20: note = chemically synthesized
  source 1..20: mol_type = other DNA
cacaagccacaaaaaccagc

SEQ ID NO: 43795 - DNA, 20 bp, synthetic construct
  misc_feature 1..20: note = chemically synthesized
  source 1..20: mol_type = other DNA
aaaaaccagcaagtttgtat

SEQ ID NO: 43796 - DNA, 20 bp, synthetic construct
  misc_feature 1..20: note = chemically synthesized
  source 1..20: mol_type = other DNA
aaaaccagcaagtttgtatt

SEQ ID NO: 43797 - DNA, 20 bp, synthetic construct
  misc_feature 1..20: note = chemically synthesized
  source 1..20: mol_type = other DNA
aaaccagcaagtttgtatta

SEQ ID NO: 43798 - DNA, 20 bp, synthetic construct
  misc_feature 1..20: note = chemically synthesized
  source 1..20: mol_type = other DNA
ttgtattagggattttcaaa

SEQ ID NO: 43799 - DNA, 20 bp, synthetic construct
  misc_feature 1..20: note = chemically synthesized
  source 1..20: mol_type = other DNA
tgtattagggattttcaaat

SEQ ID NO: 43800 - DNA, 20 bp, synthetic construct
  misc_feature 1..20: note = chemically synthesized
  source 1..20: mol_type = other DNA
gtattagggattttcaaatg

SEQ ID NO: 43801 - DNA, 20 bp, synthetic construct
  misc_feature 1..20: note = chemically synthesized
  source 1..20: mol_type = other DNA
attagggattttcaaatggg

SEQ ID NO: 43802 - DNA, 20 bp, synthetic construct
  misc_feature 1..20: note = chemically synthesized
  source 1..20: mol_type = other DNA
ttagggattttcaaatgggg

SEQ ID NO: 43803 - DNA, 20 bp, synthetic construct
  misc_feature 1..20: note = chemically synthesized
  source 1..20: mol_type = other DNA
gggattttcaaatggggagg

SEQ ID NO: 43804 - DNA, 20 bp, synthetic construct
  misc_feature 1..20: note = chemically synthesized
  source 1..20: mol_type = other DNA
atggggaggcagtgtgcaaa

SEQ ID NO: 43805 - DNA, 20 bp, synthetic construct
  misc_feature 1..20: note = chemically synthesized
  source 1..20: mol_type = other DNA
tggggaggcagtgtgcaaat

SEQ ID NO: 43806 - DNA, 20 bp, synthetic construct
  misc_feature 1..20: note = chemically synthesized
  source 1..20: mol_type = other DNA
aggcagtgtgcaaataggtg

SEQ ID NO: 43807 - DNA, 20 bp, synthetic construct
  misc_feature 1..20: note = chemically synthesized
  source 1..20: mol_type = other DNA
ggcagtgtgcaaataggtgt

SEQ ID NO: 43808 - DNA, 20 bp, synthetic construct
  misc_feature 1..20: note = chemically synthesized
  source 1..20: mol_type = other DNA
gtgcaaataggtgtgggtca

SEQ ID NO: 43809 - DNA, 20 bp, synthetic construct
  misc_feature 1..20: note = chemically synthesized
  source 1..20: mol_type = other DNA
aggtgtgggtcacagacatc

SEQ ID NO: 43810 - DNA, 20 bp, synthetic construct
  misc_feature 1..20: note = chemically synthesized
  source 1..20: mol_type = other DNA
acagacatcaagtactttac

SEQ ID NO: 43811 - DNA, 20 bp, synthetic construct
  misc_feature 1..20: note = chemically synthesized
  source 1..20: mol_type = other DNA
cagacatcaagtactttaca

SEQ ID NO: 43812 - DNA, 20 bp, synthetic construct
  misc_feature 1..20: note = chemically synthesized
  source 1..20: mol_type = other DNA
tcaagtactttacaaggtaa

SEQ ID NO: 43813 - DNA, 20 bp, synthetic construct
  misc_feature 1..20: note = chemically synthesized
  source 1..20: mol_type = other DNA
acaaggtaatagaatatcac

SEQ ID NO: 43814 - DNA, 20 bp, synthetic construct
  misc_feature 1..20: note = chemically synthesized
  source 1..20: mol_type = other DNA
caaggtaatagaatatcaca

SEQ ID NO: 43815 - DNA, 20 bp, synthetic construct
  misc_feature 1..20: note = chemically synthesized
  source 1..20: mol_type = other DNA
gtaatagaatatcacaaggc

SEQ ID NO: 43816 - DNA, 20 bp, synthetic construct
  misc_feature 1..20: note = chemically synthesized
  source 1..20: mol_type = other DNA
atagaatatcacaaggcaag

SEQ ID NO: 43817 - DNA, 20 bp, synthetic construct
  misc_feature 1..20: note = chemically synthesized
  source 1..20: mol_type = other DNA
agaatatcacaaggcaagtg

SEQ ID NO: 43818 - DNA, 20 bp, synthetic construct
  misc_feature 1..20: note = chemically synthesized
  source 1..20: mol_type = other DNA
gaatatcacaaggcaagtgg

SEQ ID NO: 43819 - DNA, 20 bp, synthetic construct
  misc_feature 1..20: note = chemically synthesized
  source 1..20: mol_type = other DNA
tatcacaaggcaagtggagg

SEQ ID NO: 43820 - DNA, 20 bp, synthetic construct
  misc_feature 1..20: note = chemically synthesized
  source 1..20: mol_type = other DNA
atcacaaggcaagtggaggc

SEQ ID NO: 43821 - DNA, 20 bp, synthetic construct
  misc_feature 1..20: note = chemically synthesized
  source 1..20: mol_type = other DNA
tcacaaggcaagtggaggca

SEQ ID NO: 43822 - DNA, 20 bp, synthetic construct
  misc_feature 1..20: note = chemically synthesized
  source 1..20: mol_type = other DNA
aaggcaagtggaggcagggt

SEQ ID NO: 43823 - DNA, 20 bp, synthetic construct
  misc_feature 1..20: note = chemically synthesized
  source 1..20: mol_type = other DNA
gtggaggcagggtgagatca

SEQ ID NO: 43824 - DNA, 20 bp, synthetic construct
  misc_feature 1..20: note = chemically synthesized
  source 1..20: mol_type = other DNA
tggaggcagggtgagatcac

SEQ ID NO: 43825 - DNA, 20 bp, synthetic construct
  misc_feature 1..20: note = chemically synthesized
  source 1..20: mol_type = other DNA
agggtgagatcacaggacca

SEQ ID NO: 43826 - DNA, 20 bp, synthetic construct
  misc_feature 1..20: note = chemically synthesized
  source 1..20: mol_type = other DNA
gggtgagatcacaggaccac

SEQ ID NO: 43827 - DNA, 20 bp, synthetic construct
  misc_feature 1..20: note = chemically synthesized
  source 1..20: mol_type = other DNA
gatcacaggaccacaggacc

SEQ ID NO: 43828 - DNA, 20 bp, synthetic construct
  misc_feature 1..20: note = chemically synthesized
  source 1..20: mol_type = other DNA
atcacaggaccacaggaccg

SEQ ID NO: 43829 - DNA, 20 bp, synthetic construct
  misc_feature 1..20: note = chemically synthesized
  source 1..20: mol_type = other DNA
cgaaattaaaattgctaatg

SEQ ID NO: 43830 - DNA, 20 bp, synthetic construct
  misc_feature 1..20: note = chemically synthesized
  source 1..20: mol_type = other DNA
taaaattgctaatgaagttt

SEQ ID NO: 43831 - DNA, 20 bp, synthetic construct
  misc_feature 1..20: note = chemically synthesized
  source 1..20: mol_type = other DNA
aaaattgctaatgaagtttc

SEQ ID NO: 43832 - DNA, 20 bp, synthetic construct
  misc_feature 1..20: note = chemically synthesized
  source 1..20: mol_type = other DNA
tgtcattgataacatcttat

SEQ ID NO: 43833 - DNA, 20 bp, synthetic construct
  misc_feature 1..20: note = chemically synthesized
  source 1..20: mol_type = other DNA
gtcattgataacatcttatc

SEQ ID NO: 43834 - DNA, 20 bp, synthetic construct
  misc_feature 1..20: note = chemically synthesized
  source 1..20: mol_type = other DNA
cattgataacatcttatcag

SEQ ID NO: 43835 - DNA, 20 bp, synthetic construct
  misc_feature 1..20: note = chemically synthesized
  source 1..20: mol_type = other DNA
gataacatcttatcaggaga

SEQ ID NO: 43836 - DNA, 20 bp, synthetic construct
  misc_feature 1..20: note = chemically synthesized
  source 1..20: mol_type = other DNA
ataacatcttatcaggagac

SEQ ID NO: 43837 - DNA, 20 bp, synthetic construct
  misc_feature 1..20: note = chemically synthesized
  source 1..20: mol_type = other DNA
taacatcttatcaggagaca

SEQ ID NO: 43838 - DNA, 20 bp, synthetic construct
  misc_feature 1..20: note = chemically synthesized
  source 1..20: mol_type = other DNA
ttatcaggagacagggtttt

SEQ ID NO: 43839 - DNA, 20 bp, synthetic construct
  misc_feature 1..20: note = chemically synthesized
  source 1..20: mol_type = other DNA
tatcaggagacagggttttt

SEQ ID NO: 43840 - DNA, 20 bp, synthetic construct
  misc_feature 1..20: note = chemically synthesized
  source 1..20: mol_type = other DNA
acagggtttttaggatcaac

SEQ ID NO: 43841 - DNA, 20 bp, synthetic construct
  misc_feature 1..20: note = chemically synthesized
  source 1..20: mol_type = other DNA
ctggtctgaccaaaatttat

SEQ ID NO: 43842 - DNA, 20 bp, synthetic construct
  misc_feature 1..20: note = chemically synthesized
  source 1..20: mol_type = other DNA
tggtctgaccaaaatttatt

SEQ ID NO: 43843 - DNA, 20 bp, synthetic construct
  misc_feature 1..20: note = chemically synthesized
  source 1..20: mol_type = other DNA
tctgaccaaaatttattagg

SEQ ID NO: 43844 - DNA, 20 bp, synthetic construct
  misc_feature 1..20: note = chemically synthesized
  source 1..20: mol_type = other DNA
ctgaccaaaatttattaggc

SEQ ID NO: 43845 - DNA, 20 bp, synthetic construct
  misc_feature 1..20: note = chemically synthesized
  source 1..20: mol_type = other DNA
gggaatttcctcttcctaat

SEQ ID NO: 43846 - DNA, 20 bp, synthetic construct
  misc_feature 1..20: note = chemically synthesized
  source 1..20: mol_type = other DNA
tttcctcttcctaataagcc

SEQ ID NO: 43847 - DNA, 20 bp, synthetic construct
  misc_feature 1..20: note = chemically synthesized
  source 1..20: mol_type = other DNA
ttcctcttcctaataagcct

SEQ ID NO: 43848 - DNA, 20 bp, synthetic construct
  misc_feature 1..20: note = chemically synthesized
  source 1..20: mol_type = other DNA
cctcttcctaataagcctgg

SEQ ID NO: 43849 - DNA, 20 bp, synthetic construct
  misc_feature 1..20: note = chemically synthesized
  source 1..20: mol_type = other DNA
taataagcctgggagcgctg

SEQ ID NO: 43850 - DNA, 20 bp, synthetic construct
  misc_feature 1..20: note = chemically synthesized
  source 1..20: mol_type = other DNA
aataagcctgggagcgctgt

SEQ ID NO: 43851 - DNA, 20 bp, synthetic construct
  misc_feature 1..20: note = chemically synthesized
  source 1..20: mol_type = other DNA
taagcctgggagcgctgtgg

SEQ ID NO: 43852 - DNA, 20 bp, synthetic construct
  misc_feature 1..20: note = chemically synthesized
  source 1..20: mol_type = other DNA
ctgggagcgctgtgggagac

SEQ ID NO: 43853 - DNA, 20 bp, synthetic construct
  misc_feature 1..20: note = chemically synthesized
  source 1..20: mol_type = other DNA
tgggagcgctgtgggagact

SEQ ID NO: 43854 - DNA, 20 bp, synthetic construct
  misc_feature 1..20: note = chemically synthesized
  source 1..20: mol_type = other DNA
gggagcgctgtgggagactg

SEQ ID NO: 43855 - DNA, 20 bp, synthetic construct
  misc_feature 1..20: note = chemically synthesized
  source 1..20: mol_type = other DNA
tggggtctatttcacccctg

SEQ ID NO: 43856 - DNA, 20 bp, synthetic construct
  misc_feature 1..20: note = chemically synthesized
  source 1..20: mol_type = other DNA
acccctgcagtctcgaccat

SEQ ID NO: 43857 - DNA, 20 bp, synthetic construct
  misc_feature 1..20: note = chemically synthesized
  source 1..20: mol_type = other DNA
ccctgcagtctcgaccataa

SEQ ID NO: 43858 - DNA, 20 bp, synthetic construct
  misc_feature 1..20: note = chemically synthesized
  source 1..20: mol_type = other DNA
gcagtctcgaccataagaga

SEQ ID NO: 43859 - DNA, 20 bp, synthetic construct
  misc_feature 1..20: note = chemically synthesized
  source 1..20: mol_type = other DNA
cagtctcgaccataagagac

SEQ ID NO: 43860 - DNA, 20 bp, synthetic construct
  misc_feature 1..20: note = chemically synthesized
  source 1..20: mol_type = other DNA
ccataagagacaggcgcacc

SEQ ID NO: 43861 - DNA, 20 bp, synthetic construct
  misc_feature 1..20: note = chemically synthesized
  source 1..20: mol_type = other DNA
ataagagacaggcgcacctg

SEQ ID NO: 43862 - DNA, 20 bp, synthetic construct
  misc_feature 1..20: note = chemically synthesized
  source 1..20: mol_type = other DNA
taagagacaggcgcacctgg

SEQ ID NO: 43863 - DNA, 20 bp, synthetic construct
  misc_feature 1..20: note = chemically synthesized
  source 1..20: mol_type = other DNA
aagagacaggcgcacctgga

SEQ ID NO: 43864 - DNA, 20 bp, synthetic construct
  misc_feature 1..20: note = chemically synthesized
  source 1..20: mol_type = other DNA
agagacaggcgcacctggag

SEQ ID NO: 43865 - DNA, 20 bp, synthetic construct
  misc_feature 1..20: note = chemically synthesized
  source 1..20: mol_type = other DNA
gagacaggcgcacctggagg

SEQ ID NO: 43866 - DNA, 20 bp, synthetic construct
  misc_feature 1..20: note = chemically synthesized
  source 1..20: mol_type = other DNA
agacaggcgcacctggaggg

SEQ ID NO: 43867 - DNA, 20 bp, synthetic construct
  misc_feature 1..20: note = chemically synthesized
  source 1..20: mol_type = other DNA
cctggaggggggctgtttat

SEQ ID NO: 43868 - DNA, 20 bp, synthetic construct
  misc_feature 1..20: note = chemically synthesized
  source 1..20: mol_type = other DNA
gtttataagcctatacctcc

SEQ ID NO: 43869 - DNA, 20 bp, synthetic construct
  misc_feature 1..20: note = chemically synthesized
  source 1..20: mol_type = other DNA
ctggctcgtattctctttct

SEQ ID NO: 43870 - DNA, 20 bp, synthetic construct
  misc_feature 1..20: note = chemically synthesized
  source 1..20: mol_type = other DNA
tggctcgtattctctttctc

SEQ ID NO: 43871 - DNA, 20 bp, synthetic construct
  misc_feature 1..20: note = chemically synthesized
  source 1..20: mol_type = other DNA
ggctcgtattctctttctca

SEQ ID NO: 43872 - DNA, 20 bp, synthetic construct
  misc_feature 1..20: note = chemically synthesized
  source 1..20: mol_type = other DNA
tctcagggatgttccatgct

SEQ ID NO: 43873 - DNA, 20 bp, synthetic construct
  misc_feature 1..20: note = chemically synthesized
  source 1..20: mol_type = other DNA
ggatgttccatgctgagaaa

SEQ ID NO: 43874 - DNA, 20 bp, synthetic construct
  misc_feature 1..20: note = chemically synthesized
  source 1..20: mol_type = other DNA
ccatgctgagaaaaagaatt

SEQ ID NO: 43875 - DNA, 20 bp, synthetic construct
  misc_feature 1..20: note = chemically synthesized
  source 1..20: mol_type = other DNA
tttctcccatttgcttttga

SEQ ID NO: 43876 - DNA, 20 bp, synthetic construct
  misc_feature 1..20: note = chemically synthesized
  source 1..20: mol_type = other DNA
ctcccatttgcttttgaaag

SEQ ID NO: 43877 - DNA, 20 bp, synthetic construct
  misc_feature 1..20: note = chemically synthesized
  source 1..20: mol_type = other DNA
cccatttgcttttgaaagaa

SEQ ID NO: 43878 - DNA, 20 bp, synthetic construct
  misc_feature 1..20: note = chemically synthesized
  source 1..20: mol_type = other DNA
cttttgaaagaagagaaata

SEQ ID NO: 43879 - DNA, 20 bp, synthetic construct
  misc_feature 1..20: note = chemically synthesized
  source 1..20: mol_type = other DNA
aaatatggctctgttctgcc

SEQ ID NO: 43880 - DNA, 20 bp, synthetic construct
  misc_feature 1..20: note = chemically synthesized
  source 1..20: mol_type = other DNA
ctctgttctgcctggctcac

SEQ ID NO: 43881 - DNA, 20 bp, synthetic construct
  misc_feature 1..20: note = chemically synthesized
  source 1..20: mol_type = other DNA
tgttctgcctggctcaccag

SEQ ID NO: 43882 - DNA, 20 bp, synthetic construct
  misc_feature 1..20: note = chemically synthesized
  source 1..20: mol_type = other DNA
ctgcctggctcaccagcagt

SEQ ID NO: 43883 - DNA, 20 bp, synthetic construct
  misc_feature 1..20: note = chemically synthesized
  source 1..20: mol_type = other DNA
gcctggctcaccagcagtca

SEQ ID NO: 43884 - DNA, 20 bp, synthetic construct
  misc_feature 1..20: note = chemically synthesized
  source 1..20: mol_type = other DNA
ctcaccagcagtcagagttt

SEQ ID NO: 43885 - DNA, 20 bp, synthetic construct
  misc_feature 1..20: note = chemically synthesized
  source 1..20: mol_type = other DNA
tcaccagcagtcagagttta

SEQ ID NO: 43886 - DNA, 20 bp, synthetic construct
  misc_feature 1..20: note = chemically synthesized
  source 1..20: mol_type = other DNA
tgttatcctgttcttttttc

SEQ ID NO: 43887 - DNA, 20 bp, synthetic construct
  misc_feature 1..20: note = chemically synthesized
  source 1..20: mol_type = other DNA
gttatcctgttcttttttca

SEQ ID NO: 43888 - DNA, 20 bp, synthetic construct
  misc_feature 1..20: note = chemically synthesized
  source 1..20: mol_type = other DNA
cacatgctgtacaatttgtg

SEQ ID NO: 43889 - DNA, 20 bp, synthetic construct
  misc_feature 1..20: note = chemically synthesized
  source 1..20: mol_type = other DNA
tgcagttaatgcaattatta

SEQ ID NO: 43890 - DNA, 20 bp, synthetic construct
  misc_feature 1..20: note = chemically synthesized
  source 1..20: mol_type = other DNA
gcagttaatgcaattattac

SEQ ID NO: 43891 - DNA, 20 bp, synthetic construct
  misc_feature 1..20: note = chemically synthesized
  source 1..20: mol_type = other DNA
cagttaatgcaattattaca

SEQ ID NO: 43892 - DNA, 20 bp, synthetic construct
  misc_feature 1..20: note = chemically synthesized
  source 1..20: mol_type = other DNA
tgcaattattacagggtcct

SEQ ID NO: 43893 - DNA, 20 bp, synthetic construct
  misc_feature 1..20: note = chemically synthesized
  source 1..20: mol_type = other DNA
gcaattattacagggtcctg

SEQ ID NO: 43894 - DNA, 20 bp, synthetic construct
  misc_feature 1..20: note = chemically synthesized
  source 1..20: mol_type = other DNA
gaggcaatatacatcctcct

SEQ ID NO: 43895 - DNA, 20 bp, synthetic construct
  misc_feature 1..20: note = chemically synthesized
  source 1..20: mol_type = other DNA
tatacatcctcctcagctga

SEQ ID NO: 43896 - DNA, 20 bp, synthetic construct
  misc_feature 1..20: note = chemically synthesized
  source 1..20: mol_type = other DNA
atacatcctcctcagctgac

SEQ ID NO: 43897 - DNA, 20 bp, synthetic construct
  misc_feature 1..20: note = chemically synthesized
  source 1..20: mol_type = other DNA
cctcctcagctgacaggatt

SEQ ID NO: 43898 - DNA, 20 bp, synthetic construct
  misc_feature 1..20: note = chemically synthesized
  source 1..20: mol_type = other DNA
tcctcagctgacaggattaa

SEQ ID NO: 43899 - DNA, 20 bp, synthetic construct
  misc_feature 1..20: note = chemically synthesized
  source 1..20: mol_type = other DNA
ctgacaggattaagagatta

SEQ ID NO: 43900 - DNA, 20 bp, synthetic construct
  misc_feature 1..20: note = chemically synthesized
  source 1..20: mol_type = other DNA
aggattaagagattaaagta

SEQ ID NO: 43901 - DNA, 20 bp, synthetic construct
  misc_feature 1..20: note = chemically synthesized
  source 1..20: mol_type = other DNA
ttaagagattaaagtaaaga

SEQ ID NO: 43902 - DNA, 20 bp, synthetic construct
  misc_feature 1..20: note = chemically synthesized
  source 1..20: mol_type = other DNA
taagagattaaagtaaagac

SEQ ID NO: 43903 - DNA, 20 bp, synthetic construct
  misc_feature 1..20: note = chemically synthesized
  source 1..20: mol_type = other DNA
taaagacaggcataaatcac

SEQ ID NO: 43904 - DNA, 20 bp, synthetic construct
  misc_feature 1..20: note = chemically synthesized
  source 1..20: mol_type = other DNA
aaagacaggcataaatcaca

SEQ ID NO: 43905 - DNA, 20 bp, synthetic construct
  misc_feature 1..20: note = chemically synthesized
  source 1..20: mol_type = other DNA
taaatcacaaggatattgac

SEQ ID NO: 43906 - DNA, 20 bp, synthetic construct
  misc_feature 1..20: note = chemically synthesized
  source 1..20: mol_type = other DNA
aaatcacaaggatattgact

SEQ ID NO: 43907 - DNA, 20 bp, synthetic construct
  misc_feature 1..20: note = chemically synthesized
  source 1..20: mol_type = other DNA
aatcacaaggatattgactg

SEQ ID NO: 43908 - DNA, 20 bp, synthetic construct
  misc_feature 1..20: note = chemically synthesized
  source 1..20: mol_type = other DNA
cacaaggatattgactgggg

SEQ ID NO: 43909 - DNA, 20 bp, synthetic construct
  misc_feature 1..20: note = chemically synthesized
  source 1..20: mol_type = other DNA
atattgactggggaagtgat

SEQ ID NO: 43910 - DNA, 20 bp, synthetic construct
  misc_feature 1..20: note = chemically synthesized
  source 1..20: mol_type = other DNA
aaatctttacaatttatgtt

SEQ ID NO: 43911 - DNA, 20 bp, synthetic construct
  misc_feature 1..20: note = chemically synthesized
  source 1..20: mol_type = other DNA
atctttacaatttatgttta

SEQ ID NO: 43912 - DNA, 20 bp, synthetic construct
  misc_feature 1..20: note = chemically synthesized
  source 1..20: mol_type = other DNA
caatttatgtttagagattg

SEQ ID NO: 43913 - DNA, 20 bp, synthetic construct
  misc_feature 1..20: note = chemically synthesized
  source 1..20: mol_type = other DNA
tatgtttagagattgcagta

SEQ ID NO: 43914 - DNA, 20 bp, synthetic construct
  misc_feature 1..20: note = chemically synthesized
  source 1..20: mol_type = other DNA
tttagagattgcagtaaaga

SEQ ID NO: 43915 - DNA, 20 bp, synthetic construct
  misc_feature 1..20: note = chemically synthesized
  source 1..20: mol_type = other DNA
ttagagattgcagtaaagac

SEQ ID NO: 43916 - DNA, 20 bp, synthetic construct
  misc_feature 1..20: note = chemically synthesized
  source 1..20: mol_type = other DNA
attgcagtaaagacaggcat

SEQ ID NO: 43917 - DNA, 20 bp, synthetic construct
  misc_feature 1..20: note = chemically synthesized
  source 1..20: mol_type = other DNA
acaggcataagaaattacaa

SEQ ID NO: 43918 - DNA, 20 bp, synthetic construct
  misc_feature 1..20: note = chemically synthesized
  source 1..20: mol_type = other DNA
aaattacaaaagtattaatt

SEQ ID NO: 43919 - DNA, 20 bp, synthetic construct
  misc_feature 1..20: note = chemically synthesized
  source 1..20: mol_type = other DNA
aattacaaaagtattaattt

SEQ ID NO: 43920 - DNA, 20 bp, synthetic construct
  misc_feature 1..20: note = chemically synthesized
  source 1..20: mol_type = other DNA
attacaaaagtattaatttg

SEQ ID NO: 43921 - DNA, 20 bp, synthetic construct
  misc_feature 1..20: note = chemically synthesized
  source 1..20: mol_type = other DNA
caatccacgaacttctgcca

SEQ ID NO: 43922 - DNA, 20 bp, synthetic construct
  misc_feature 1..20: note = chemically synthesized
  source 1..20: mol_type = other DNA
acgaacttctgccatggctt

SEQ ID NO: 43923 - DNA, 20 bp, synthetic construct
  misc_feature 1..20: note = chemically synthesized
  source 1..20: mol_type = other DNA
cttcagctgatccctccgtt

SEQ ID NO: 43924 - DNA, 20 bp, synthetic construct
  misc_feature 1..20: note = chemically synthesized
  source 1..20: mol_type = other DNA
tcagctgatccctccgtttg

SEQ ID NO: 43925 - DNA, 20 bp, synthetic construct
  misc_feature 1..20: note = chemically synthesized
  source 1..20: mol_type = other DNA
gatccctccgtttggagtcc

SEQ ID NO: 43926 - DNA, 20 bp, synthetic construct
  misc_feature 1..20: note = chemically synthesized
  source 1..20: mol_type = other DNA
ccagacttcccgcaacaact

SEQ ID NO: 43927 - DNA, 20 bp, synthetic construct
  misc_feature 1..20: note = chemically synthesized
  source 1..20: mol_type = other DNA
cccgcaacaactgagaactc

SEQ ID NO: 43928 - DNA, 20 bp, synthetic construct
  misc_feature 1..20: note = chemically synthesized
  source 1..20: mol_type = other DNA
cgcaacaactgagaactctg

SEQ ID NO: 43929 - DNA, 20 bp, synthetic construct
  misc_feature 1..20: note = chemically synthesized
  source 1..20: mol_type = other DNA
gcaacaactgagaactctgg

SEQ ID NO: 43930 - DNA, 20 bp, synthetic construct
  misc_feature 1..20: note = chemically synthesized
  source 1..20: mol_type = other DNA
caacaactgagaactctgga

SEQ ID NO: 43931 - DNA, 20 bp, synthetic construct
  misc_feature 1..20: note = chemically synthesized
  source 1..20: mol_type = other DNA
ccacccttcttatatctctt

SEQ ID NO: 43932 - DNA, 20 bp, synthetic construct
  misc_feature 1..20: note = chemically synthesized
  source 1..20: mol_type = other DNA
cacccttcttatatctctta

SEQ ID NO: 43933 - DNA, 20 bp, synthetic construct
  misc_feature 1..20: note = chemically synthesized
  source 1..20: mol_type = other DNA
cccttcttatatctcttaag

SEQ ID NO: 43934 - DNA, 20 bp, synthetic construct
  misc_feature 1..20: note = chemically synthesized
  source 1..20: mol_type = other DNA
atctcttaaggagctgtgtt

SEQ ID NO: 43935 - DNA, 20 bp, synthetic construct
  misc_feature 1..20: note = chemically synthesized
  source 1..20: mol_type = other DNA
cttaaggagctgtgttcaga

SEQ ID NO: 43936 - DNA, 20 bp, synthetic construct
  misc_feature 1..20: note = chemically synthesized
  source 1..20: mol_type = other DNA
atggttacatttcgcttgct

SEQ ID NO: 43937 - DNA, 20 bp, synthetic construct
  misc_feature 1..20: note = chemically synthesized
  source 1..20: mol_type = other DNA
ttacatttcgcttgctgagc

SEQ ID NO: 43938 - DNA, 20 bp, synthetic construct
  misc_feature 1..20: note = chemically synthesized
  source 1..20: mol_type = other DNA
agactgcattttcattatcc

SEQ ID NO: 43939 - DNA, 20 bp, synthetic construct
  misc_feature 1..20: note = chemically synthesized
  source 1..20: mol_type = other DNA
gactgcattttcattatcct

SEQ ID NO: 43940 - DNA, 20 bp, synthetic construct
  misc_feature 1..20: note = chemically synthesized
  source 1..20: mol_type = other DNA
tatcctgggctaaaatcaat

SEQ ID NO: 43941 - DNA, 20 bp, synthetic construct
  misc_feature 1..20: note = chemically synthesized
  source 1..20: mol_type = other DNA
gctaaaatcaattggtattt

SEQ ID NO: 43942 - DNA, 20 bp, synthetic construct
  misc_feature 1..20: note = chemically synthesized
  source 1..20: mol_type = other DNA
aaatcaattggtatttaagt

SEQ ID NO: 43943 - DNA, 20 bp, synthetic construct
  misc_feature 1..20: note = chemically synthesized
  source 1..20: mol_type = other DNA
atcaattggtatttaagtta

SEQ ID NO: 43944 - DNA, 20 bp, synthetic construct
  misc_feature 1..20: note = chemically synthesized
  source 1..20: mol_type = other DNA
ggtatttaagttagagcaaa

SEQ ID NO: 43945 - DNA, 20 bp, synthetic construct
  misc_feature 1..20: note = chemically synthesized
  source 1..20: mol_type = other DNA
gtatttaagttagagcaaaa

SEQ ID NO: 43946 - DNA, 20 bp, synthetic construct
  misc_feature 1..20: note = chemically synthesized
  source 1..20: mol_type = other DNA
tatttaagttagagcaaaaa

SEQ ID NO: 43947 - DNA, 20 bp, synthetic construct
  misc_feature 1..20: note = chemically synthesized
  source 1..20: mol_type = other DNA
aagggttctaaccctattta

SEQ ID NO: 43948 - DNA, 20 bp, synthetic construct
  misc_feature 1..20: note = chemically synthesized
  source 1..20: mol_type = other DNA
ggttctaaccctatttacag

SEQ ID NO: 43949 - DNA, 20 bp, synthetic construct
  misc_feature 1..20: note = chemically synthesized
  source 1..20: mol_type = other DNA
cagcacacatacacttacat

SEQ ID NO: 43950 - DNA, 20 bp, synthetic construct
  misc_feature 1..20: note = chemically synthesized
  source 1..20: mol_type = other DNA
acatacacttacattagaat

SEQ ID NO: 43951 - DNA, 20 bp, synthetic construct
  misc_feature 1..20: note = chemically synthesized
  source 1..20: mol_type = other DNA
cttacattagaattggcttt

SEQ ID NO: 43952 - DNA, 20 bp, synthetic construct
  misc_feature 1..20: note = chemically synthesized
  source 1..20: mol_type = other DNA
ttacattagaattggcttta

SEQ ID NO: 43953 - DNA, 20 bp, synthetic construct
  misc_feature 1..20: note = chemically synthesized
  source 1..20: mol_type = other DNA
tacattagaattggctttaa

SEQ ID NO: 43954 - DNA, 20 bp, synthetic construct
  misc_feature 1..20: note = chemically synthesized
  source 1..20: mol_type = other DNA
ttccactgattaccttctat

SEQ ID NO: 43955 - DNA, 20 bp, synthetic construct
  misc_feature 1..20: note = chemically synthesized
  source 1..20: mol_type = other DNA
ctgattaccttctatgagcc

SEQ ID NO: 43956 - DNA, 20 bp, synthetic construct
  misc_feature 1..20: note = chemically synthesized
  source 1..20: mol_type = other DNA
tctatgagccaagactgcca

SEQ ID NO: 43957 - DNA, 20 bp, synthetic construct
  misc_feature 1..20: note = chemically synthesized
  source 1..20: mol_type = other DNA
agccaagactgccatagtct

SEQ ID NO: 43958 - DNA, 20 bp, synthetic construct
  misc_feature 1..20: note = chemically synthesized
  source 1..20: mol_type = other DNA
ccatagtctcagccttcatg

SEQ ID NO: 43959 - DNA, 20 bp, synthetic construct
  misc_feature 1..20: note = chemically synthesized
  source 1..20: mol_type = other DNA
ctcagccttcatgcagctta

SEQ ID NO: 43960 - DNA, 20 bp, synthetic construct
  misc_feature 1..20: note = chemically synthesized
  source 1..20: mol_type = other DNA
tcagccttcatgcagcttat

SEQ ID NO: 43961 - DNA, 20 bp, synthetic construct
  misc_feature 1..20: note = chemically synthesized
  source 1..20: mol_type = other DNA
ccttcatgcagcttataggc

SEQ ID NO: 43962 - DNA, 20 bp, synthetic construct
  misc_feature 1..20: note = chemically synthesized
  source 1..20: mol_type = other DNA
cagcttataggctagcaaaa

SEQ ID NO: 43963 - DNA, 20 bp, synthetic construct
  misc_feature 1..20: note = chemically synthesized
  source 1..20: mol_type = other DNA
ttataggctagcaaaaaagc

SEQ ID NO: 43964 - DNA, 20 bp, synthetic construct
  misc_feature 1..20: note = chemically synthesized
  source 1..20: mol_type = other DNA
aggctagcaaaaaagccaga

SEQ ID NO: 43965 - DNA, 20 bp, synthetic construct
  misc_feature 1..20: note = chemically synthesized
  source 1..20: mol_type = other DNA
aaaaaagccagacagtgcac

SEQ ID NO: 43966 - DNA, 20 bp, synthetic construct
  misc_feature 1..20: note = chemically synthesized
  source 1..20: mol_type = other DNA
gacagtgcacaagaactcac

SEQ ID NO: 43967 - DNA, 20 bp, synthetic construct
  misc_feature 1..20: note = chemically synthesized
  source 1..20: mol_type = other DNA
caagaactcacaagtgtgtt

SEQ ID NO: 43968 - DNA, 20 bp, synthetic construct
  misc_feature 1..20: note = chemically synthesized
  source 1..20: mol_type = other DNA
acaagtgtgttgagtgttgc

SEQ ID NO: 43969 - DNA, 20 bp, synthetic construct
  misc_feature 1..20: note = chemically synthesized
  source 1..20: mol_type = other DNA
aagtgtgttgagtgttgcaa

SEQ ID NO: 43970 - DNA, 20 bp, synthetic construct
  misc_feature 1..20: note = chemically synthesized
  source 1..20: mol_type = other DNA
gtgttgagtgttgcaagagt

SEQ ID NO: 43971 - DNA, 20 bp, synthetic construct
  misc_feature 1..20: note = chemically synthesized
  source 1..20: mol_type = other DNA
agtgttgcaagagtaagttt

SEQ ID NO: 43972 - DNA, 20 bp, synthetic construct
  misc_feature 1..20: note = chemically synthesized
  source 1..20: mol_type = other DNA
gtgttgcaagagtaagtttc

SEQ ID NO: 43973 - DNA, 20 bp, synthetic construct
  misc_feature 1..20: note = chemically synthesized
  source 1..20: mol_type = other DNA
tgttgcaagagtaagtttca

SEQ ID NO: 43974 - DNA, 20 bp, synthetic construct
  misc_feature 1..20: note = chemically synthesized
  source 1..20: mol_type = other DNA
gttgcaagagtaagtttcag

SEQ ID NO: 43975 - DNA, 20 bp, synthetic construct
  misc_feature 1..20: note = chemically synthesized
  source 1..20: mol_type = other DNA
ggggctctccatgacttacc

SEQ ID NO: 43976 - DNA, 20 bp, synthetic construct
  misc_feature 1..20: note = chemically synthesized
  source 1..20: mol_type = other DNA
tctccatgacttacctggtt

SEQ ID NO: 43977 - DNA, 20 bp, synthetic construct
  misc_feature 1..20: note = chemically synthesized
  source 1..20: mol_type = other DNA
ctttaactttttttttcctc

SEQ ID NO: 43978 - DNA, 20 bp, synthetic construct
  misc_feature 1..20: note = chemically synthesized
  source 1..20: mol_type = other DNA
tttaactttttttttcctct

SEQ ID NO: 43979 - DNA, 20 bp, synthetic construct
  misc_feature 1..20: note = chemically synthesized
  source 1..20: mol_type = other DNA
ttttttttcctctgggtgta

SEQ ID NO: 43980 - DNA, 20 bp, synthetic construct
  misc_feature 1..20: note = chemically synthesized
  source 1..20: mol_type = other DNA
tttcctctgggtgtaaagtg

SEQ ID NO: 43981 - DNA, 20 bp, synthetic construct
  misc_feature 1..20: note = chemically synthesized
  source 1..20: mol_type = other DNA
tcctctgggtgtaaagtgaa

SEQ ID NO: 43982 - DNA, 20 bp, synthetic construct
  misc_feature 1..20: note = chemically synthesized
  source 1..20: mol_type = other DNA
ctgggtgtaaagtgaagaga

SEQ ID NO: 43983 - DNA, 20 bp, synthetic construct
  misc_feature 1..20: note = chemically synthesized
  source 1..20: mol_type = other DNA
taaagtgaagagatggcaat

SEQ ID NO: 43984 - DNA, 20 bp, synthetic construct
  misc_feature 1..20: note = chemically synthesized
  source 1..20: mol_type = other DNA
aagtgaagagatggcaatca

SEQ ID NO: 43985 - DNA, 20 bp, synthetic construct
  misc_feature 1..20: note = chemically synthesized
  source 1..20: mol_type = other DNA
tgaagagatggcaatcagag

SEQ ID NO: 43986 - DNA, 20 bp, synthetic construct
  misc_feature 1..20: note = chemically synthesized
  source 1..20: mol_type = other DNA
gaagagatggcaatcagagt

SEQ ID NO: 43987 - DNA, 20 bp, synthetic construct
  misc_feature 1..20: note = chemically synthesized
  source 1..20: mol_type = other DNA
ttccattgtgtcattgtgaa

SEQ ID NO: 43988 - DNA, 20 bp, synthetic construct
  misc_feature 1..20: note = chemically synthesized
  source 1..20: mol_type = other DNA
gtgtcattgtgaaaagatgc

SEQ ID NO: 43989 - DNA, 20 bp, synthetic construct
  misc_feature 1..20: note = chemically synthesized
  source 1..20: mol_type = other DNA
tgtcattgtgaaaagatgct

SEQ ID NO: 43990 - DNA, 20 bp, synthetic construct
  misc_feature 1..20: note = chemically synthesized
  source 1..20: mol_type = other DNA
attgtgaaaagatgctgggc

SEQ ID NO: 43991 - DNA, 20 bp, synthetic construct
  misc_feature 1..20: note = chemically synthesized
  source 1..20: mol_type = other DNA
ctgggctggcgtgtctcctg

SEQ ID NO: 43992 - DNA, 20 bp, synthetic construct
  misc_feature 1..20: note = chemically synthesized
  source 1..20: mol_type = other DNA
tgggctggcgtgtctcctga

SEQ ID NO: 43993 - DNA, 20 bp, synthetic construct
  misc_feature 1..20: note = chemically synthesized
  source 1..20: mol_type = other DNA
ttcatgcattcgcacaaata

SEQ ID NO: 43994 - DNA, 20 bp, synthetic construct
  misc_feature 1..20: note = chemically synthesized
  source 1..20: mol_type = other DNA
acaaatatagatgtgttcca

SEQ ID NO: 43995 - DNA, 20 bp, synthetic construct
  misc_feature 1..20: note = chemically synthesized
  source 1..20: mol_type = other DNA
tatagatgtgttccatagat

SEQ ID NO: 43996 - DNA, 20 bp, synthetic construct
  misc_feature 1..20: note = chemically synthesized
  source 1..20: mol_type = other DNA
atagatgtgttccatagatg

SEQ ID NO: 43997 - DNA, 20 bp, synthetic construct
  misc_feature 1..20: note = chemically synthesized
  source 1..20: mol_type = other DNA
gatgtgttccatagatgagg

SEQ ID NO: 43998 - DNA, 20 bp, synthetic construct
  misc_feature 1..20: note = chemically synthesized
  source 1..20: mol_type = other DNA
tgttccatagatgaggcaga

SEQ ID NO: 43999 - DNA, 20 bp, synthetic construct
  misc_feature 1..20: note = chemically synthesized
  source 1..20: mol_type = other DNA
tccatagatgaggcagatag

SEQ ID NO: 44000 - DNA, 20 bp, synthetic construct
  misc_feature 1..20: note = chemically synthesized
  source 1..20: mol_type = other DNA
catagatgaggcagatagca

SEQ ID NO: 44001 - DNA, 20 bp, synthetic construct
  misc_feature 1..20: note = chemically synthesized
  source 1..20: mol_type = other DNA
atagatgaggcagatagcag

SEQ ID NO: 44002 - DNA, 20 bp, synthetic construct
  misc_feature 1..20: note = chemically synthesized
  source 1..20: mol_type = other DNA
atagcagaggcttctgccta

SEQ ID NO: 44003 - DNA, 20 bp, synthetic construct
  misc_feature 1..20: note = chemically synthesized
  source 1..20: mol_type = other DNA
cagaggcttctgcctacagc

SEQ ID NO: 44004 - DNA, 20 bp, synthetic construct
  misc_feature 1..20: note = chemically synthesized
  source 1..20: mol_type = other DNA
agaggcttctgcctacagca

SEQ ID NO: 44005 - DNA, 20 bp, synthetic construct
  misc_feature 1..20: note = chemically synthesized
  source 1..20: mol_type = other DNA
gcttctgcctacagcaaggc

SEQ ID NO: 44006 - DNA, 20 bp, synthetic construct
  misc_feature 1..20: note = chemically synthesized
  source 1..20: mol_type = other DNA
tgcctacagcaaggctagtt

SEQ ID NO: 44007 - DNA, 20 bp, synthetic construct
  misc_feature 1..20: note = chemically synthesized
  source 1..20: mol_type = other DNA
cctacagcaaggctagtttg

SEQ ID NO: 44008 - DNA, 20 bp, synthetic construct
  misc_feature 1..20: note = chemically synthesized
  source 1..20: mol_type = other DNA
tacagcaaggctagtttgga

SEQ ID NO: 44009 - DNA, 20 bp, synthetic construct
  misc_feature 1..20: note = chemically synthesized
  source 1..20: mol_type = other DNA
acagcaaggctagtttggag

SEQ ID NO: 44010 - DNA, 20 bp, synthetic construct
  misc_feature 1..20: note = chemically synthesized
  source 1..20: mol_type = other DNA
cagcaaggctagtttggaga

SEQ ID NO: 44011 - DNA, 20 bp, synthetic construct
  misc_feature 1..20: note = chemically synthesized
  source 1..20: mol_type = other DNA
tttggagagggttttgctgt

SEQ ID NO: 44012 - DNA, 20 bp, synthetic construct
  misc_feature 1..20: note = chemically synthesized
  source 1..20: mol_type = other DNA
ttggagagggttttgctgtc

SEQ ID NO: 44013 - DNA, 20 bp, synthetic construct
  misc_feature 1..20: note = chemically synthesized
  source 1..20: mol_type = other DNA
tggagagggttttgctgtca

SEQ ID NO: 44014 - DNA, 20 bp, synthetic construct
  misc_feature 1..20: note = chemically synthesized
  source 1..20: mol_type = other DNA
gagggttttgctgtcagggt

SEQ ID NO: 44015 - DNA, 20 bp, synthetic construct
  misc_feature 1..20: note = chemically synthesized
  source 1..20: mol_type = other DNA
tggacccacacacctcttca

SEQ ID NO: 44016 - DNA, 20 bp, synthetic construct
  misc_feature 1..20: note = chemically synthesized
  source 1..20: mol_type = other DNA
atgctttttcttttttttcc

SEQ ID NO: 44017 - DNA, 20 bp, synthetic construct
  misc_feature 1..20: note = chemically synthesized
  source 1..20: mol_type = other DNA
gctttttcttttttttccca

SEQ ID NO: 44018 - DNA, 20 bp, synthetic construct
  misc_feature 1..20: note = chemically synthesized
  source 1..20: mol_type = other DNA
ttttttttcccagagtttga

SEQ ID NO: 44019 - DNA, 20 bp, synthetic construct
  misc_feature 1..20: note = chemically synthesized
  source 1..20: mol_type = other DNA
tttttttcccagagtttgaa

SEQ ID NO: 44020 - DNA, 20 bp, synthetic construct
  misc_feature 1..20: note = chemically synthesized
  source 1..20: mol_type = other DNA
ttttttcccagagtttgaaa

SEQ ID NO: 44021 - DNA, 20 bp, synthetic construct
  misc_feature 1..20: note = chemically synthesized
  source 1..20: mol_type = other DNA
cccagagtttgaaagggaaa

SEQ ID NO: 44022 - DNA, 20 bp, synthetic construct
  misc_feature 1..20: note = chemically synthesized
  source 1..20: mol_type = other DNA
cagagtttgaaagggaaatg

SEQ ID NO: 44023 - DNA, 20 bp, synthetic construct
  misc_feature 1..20: note = chemically synthesized
  source 1..20: mol_type = other DNA
tgaaagggaaatggagtctc

SEQ ID NO: 44024 - DNA, 20 bp, synthetic construct
  misc_feature 1..20: note = chemically synthesized
  source 1..20: mol_type = other DNA
gggaaatggagtctcaagtt

SEQ ID NO: 44025 - DNA, 20 bp, synthetic construct
  misc_feature 1..20: note = chemically synthesized
  source 1..20: mol_type = other DNA
ggaaatggagtctcaagttc

SEQ ID NO: 44026 - DNA, 20 bp, synthetic construct
  misc_feature 1..20: note = chemically synthesized
  source 1..20: mol_type = other DNA
gaaatggagtctcaagttca

SEQ ID NO: 44027 - DNA, 20 bp, synthetic construct
  misc_feature 1..20: note = chemically synthesized
  source 1..20: mol_type = other DNA
aatggagtctcaagttcagg

SEQ ID NO: 44028 - DNA, 20 bp, synthetic construct
  misc_feature 1..20: note = chemically synthesized
  source 1..20: mol_type = other DNA
atggagtctcaagttcaggg

SEQ ID NO: 44029 - DNA, 20 bp, synthetic construct
  misc_feature 1..20: note = chemically synthesized
  source 1..20: mol_type = other DNA
tctcaagttcagggaggtta

SEQ ID NO: 44030 - DNA, 20 bp, synthetic construct
  misc_feature 1..20: note = chemically synthesized
  source 1..20: mol_type = other DNA
agttcagggaggttacagtg

SEQ ID NO: 44031 - DNA, 20 bp, synthetic construct
  misc_feature 1..20: note = chemically synthesized
  source 1..20: mol_type = other DNA
tacagtgtagacccacaaat

SEQ ID NO: 44032 - DNA, 20 bp, synthetic construct
  misc_feature 1..20: note = chemically synthesized
  source 1..20: mol_type = other DNA
tgtagacccacaaatcagct

SEQ ID NO: 44033 - DNA, 20 bp, synthetic construct
  misc_feature 1..20: note = chemically synthesized
  source 1..20: mol_type = other DNA
acccacaaatcagctaagta

SEQ ID NO: 44034 - DNA, 20 bp, synthetic construct
  misc_feature 1..20: note = chemically synthesized
  source 1..20: mol_type = other DNA
caaatcagctaagtacagct

SEQ ID NO: 44035 - DNA, 20 bp, synthetic construct
  misc_feature 1..20: note = chemically synthesized
  source 1..20: mol_type = other DNA
aaatcagctaagtacagcta

SEQ ID NO: 44036 - DNA, 20 bp, synthetic construct
  misc_feature 1..20: note = chemically synthesized
  source 1..20: mol_type = other DNA
aatcagctaagtacagctaa

SEQ ID NO: 44037 - DNA, 20 bp, synthetic construct
  misc_feature 1..20: note = chemically synthesized
  source 1..20: mol_type = other DNA
cagctaagtacagctaaggg

SEQ ID NO: 44038 - DNA, 20 bp, synthetic construct
  misc_feature 1..20: note = chemically synthesized
  source 1..20: mol_type = other DNA
gctaagtacagctaagggtg

SEQ ID NO: 44039 - DNA, 20 bp, synthetic construct
  misc_feature 1..20: note = chemically synthesized
  source 1..20: mol_type = other DNA
aagtacagctaagggtggag

SEQ ID NO: 44040 - DNA, 20 bp, synthetic construct
  misc_feature 1..20: note = chemically synthesized
  source 1..20: mol_type = other DNA
ggagaagtctatgcaatatc

SEQ ID NO: 44041 - DNA, 20 bp, synthetic construct
  misc_feature 1..20: note = chemically synthesized
  source 1..20: mol_type = other DNA
ccagcactcttctgattaat

SEQ ID NO: 44042 - DNA, 20 bp, synthetic construct
  misc_feature 1..20: note = chemically synthesized
  source 1..20: mol_type = other DNA
gcactcttctgattaattag

SEQ ID NO: 44043 - DNA, 20 bp, synthetic construct
  misc_feature 1..20: note = chemically synthesized
  source 1..20: mol_type = other DNA
ttagaagtctttaaaattca

SEQ ID NO: 44044 - DNA, 20 bp, synthetic construct
  misc_feature 1..20: note = chemically synthesized
  source 1..20: mol_type = other DNA
ccctaaatgattcatatgtc

SEQ ID NO: 44045 - DNA, 20 bp, synthetic construct
  misc_feature 1..20: note = chemically synthesized
  source 1..20: mol_type = other DNA
atgattcatatgtcaagaca

SEQ ID NO: 44046 - DNA, 20 bp, synthetic construct
  misc_feature 1..20: note = chemically synthesized
  source 1..20: mol_type = other DNA
tcatatgtcaagacacagta

SEQ ID NO: 44047 - DNA, 20 bp, synthetic construct
  misc_feature 1..20: note = chemically synthesized
  source 1..20: mol_type = other DNA
cacagtaaagatattatatg

SEQ ID NO: 44048 - DNA, 20 bp, synthetic construct
  misc_feature 1..20: note = chemically synthesized
  source 1..20: mol_type = other DNA
tggaacatcatacacaaaca

SEQ ID NO: 44049 - DNA, 20 bp, synthetic construct
  misc_feature 1..20: note = chemically synthesized
  source 1..20: mol_type = other DNA
ggaacatcatacacaaacat

SEQ ID NO: 44050 - DNA, 20 bp, synthetic construct
  misc_feature 1..20: note = chemically synthesized
  source 1..20: mol_type = other DNA
tacacaaacataggtccata

SEQ ID NO: 44051 - DNA, 20 bp, synthetic construct
  misc_feature 1..20: note = chemically synthesized
  source 1..20: mol_type = other DNA
ccatatagaaattcttacct

SEQ ID NO: 44052 - DNA, 20 bp, synthetic construct
  misc_feature 1..20: note = chemically synthesized
  source 1..20: mol_type = other DNA
tgctctttaaatcctgctaa

SEQ ID NO: 44053 - DNA, 20 bp, synthetic construct
  misc_feature 1..20: note = chemically synthesized
  source 1..20: mol_type = other DNA
tctttaaatcctgctaatgg

SEQ ID NO: 44054 - DNA, 20 bp, synthetic construct
  misc_feature 1..20: note = chemically synthesized
  source 1..20: mol_type = other DNA
atttgtgtctttgtcaccta

SEQ ID NO: 44055 - DNA, 20 bp, synthetic construct
  misc_feature 1..20: note = chemically synthesized
  source 1..20: mol_type = other DNA
tgtcacctacagtacatttc

SEQ ID NO: 44056 - DNA, 20 bp, synthetic construct
  misc_feature 1..20: note = chemically synthesized
  source 1..20: mol_type = other DNA
ctacagtacatttctggatt

SEQ ID NO: 44057 - DNA, 20 bp, synthetic construct
  misc_feature 1..20: note = chemically synthesized
  source 1..20: mol_type = other DNA
tacagtacatttctggattt

SEQ ID NO: 44058 - DNA, 20 bp, synthetic construct
  misc_feature 1..20: note = chemically synthesized
  source 1..20: mol_type = other DNA
acatttctggatttgggaat

SEQ ID NO: 44059 - DNA, 20 bp, synthetic construct
  misc_feature 1..20: note = chemically synthesized
  source 1..20: mol_type = other DNA
atttgggaatgagtgttctt

SEQ ID NO: 44060 - DNA, 20 bp, synthetic construct
  misc_feature 1..20: note = chemically synthesized
  source 1..20: mol_type = other DNA
ttgggaatgagtgttcttca

SEQ ID NO: 44061 - DNA, 20 bp, synthetic construct
  misc_feature 1..20: note = chemically synthesized
  source 1..20: mol_type = other DNA
tgggaatgagtgttcttcag

SEQ ID NO: 44062 - DNA, 20 bp, synthetic construct
  misc_feature 1..20: note = chemically synthesized
  source 1..20: mol_type = other DNA
ttcagaggatcctcgctgcc

SEQ ID NO: 44063 - DNA, 20 bp, synthetic construct
  misc_feature 1..20: note = chemically synthesized
  source 1..20: mol_type = other DNA
tcagaggatcctcgctgccc

SEQ ID NO: 44064 - DNA, 20 bp, synthetic construct
  misc_feature 1..20: note = chemically synthesized
  source 1..20: mol_type = other DNA
tcgctgcccaggttccctgc

SEQ ID NO: 44065 - DNA, 20 bp, synthetic construct
  misc_feature 1..20: note = chemically synthesized
  source 1..20: mol_type = other DNA
ctgcccaggttccctgccag

SEQ ID NO: 44066 - DNA, 20 bp, synthetic construct
  misc_feature 1..20: note = chemically synthesized
  source 1..20: mol_type = other DNA
tgcccaggttccctgccaga

SEQ ID NO: 44067 - DNA, 20 bp, synthetic construct
  misc_feature 1..20: note = chemically synthesized
  source 1..20: mol_type = other DNA
caggttccctgccagaagga

SEQ ID NO: 44068 - DNA, 20 bp, synthetic construct
  misc_feature 1..20: note = chemically synthesized
  source 1..20: mol_type = other DNA
tggcagggaacctgggcagc

SEQ ID NO: 44069 - DNA, 20 bp, synthetic construct
  misc_feature 1..20: note = chemically synthesized
  source 1..20: mol_type = other DNA
gacacaaatgccaccattag

SEQ ID NO: 44070 - DNA, 20 bp, synthetic construct
  misc_feature 1..20: note = chemically synthesized
  source 1..20: mol_type = other DNA
aattggcagtttactaaggt

SEQ ID NO: 44071 - DNA, 20 bp, synthetic construct
  misc_feature 1..20: note = chemically synthesized
  source 1..20: mol_type = other DNA
tctttactgtgtcttgacat

SEQ ID NO: 44072 - DNA, 20 bp, synthetic construct
  misc_feature 1..20: note = chemically synthesized
  source 1..20: mol_type = other DNA
gggaagacaatatggtttct

SEQ ID NO: 44073 - DNA, 20 bp, synthetic construct
  misc_feature 1..20: note = chemically synthesized
  source 1..20: mol_type = other DNA
aaagacttctaattaatcag

SEQ ID NO: 44074 - DNA, 20 bp, synthetic construct
  misc_feature 1..20: note = chemically synthesized
  source 1..20: mol_type = other DNA
tctaattaatcagaagagtg

SEQ ID NO: 44075 - DNA, 20 bp, synthetic construct
  misc_feature 1..20: note = chemically synthesized
  source 1..20: mol_type = other DNA
tagctgtacttagctgattt

SEQ ID NO: 44076 - DNA, 20 bp, synthetic construct
  misc_feature 1..20: note = chemically synthesized
  source 1..20: mol_type = other DNA
aagcatctatgaagaggtgt

SEQ ID NO: 44077 - DNA, 20 bp, synthetic construct
  misc_feature 1..20: note = chemically synthesized
  source 1..20: mol_type = other DNA
tggaacacatctatatttgt

SEQ ID NO: 44078 - DNA, 20 bp, synthetic construct
  misc_feature 1..20: note = chemically synthesized
  source 1..20: mol_type = other DNA
tgaaaataaagtttaaagat

SEQ ID NO: 44079 - DNA, 20 bp, synthetic construct
  misc_feature 1..20: note = chemically synthesized
  source 1..20: mol_type = other DNA
ccagaggaaaaaaaaagtta

SEQ ID NO: 44080 - DNA, 20 bp, synthetic construct
  misc_feature 1..20: note = chemically synthesized
  source 1..20: mol_type = other DNA
ttgcaacactcaacacactt

SEQ ID NO: 44081 - DNA, 20 bp, synthetic construct
  misc_feature 1..20: note = chemically synthesized
  source 1..20: mol_type = other DNA
agtggaaatttgtcgattga

SEQ ID NO: 44082 - DNA, 20 bp, synthetic construct
  misc_feature 1..20: note = chemically synthesized
  source 1..20: mol_type = other DNA
tgtatgtgtgctgctgtaaa

SEQ ID NO: 44083 - DNA, 20 bp, synthetic construct
  misc_feature 1..20: note = chemically synthesized
  source 1..20: mol_type = other DNA
aataccaattgattttagcc

SEQ ID NO: 44084 - DNA, 20 bp, synthetic construct
  misc_feature 1..20: note = chemically synthesized
  source 1..20: mol_type = other DNA
agctccttaagagatataag

SEQ ID NO: 44085 - DNA, 20 bp, synthetic construct
  misc_feature 1..20: note = chemically synthesized
  source 1..20: mol_type = other DNA
gagatataagaagggtggaa

SEQ ID NO: 44086 - DNA, 20 bp, synthetic construct
  misc_feature 1..20: note = chemically synthesized
  source 1..20: mol_type = other DNA
aagaagggtggaagtgggtg

SEQ ID NO: 44087 - DNA, 20 bp, synthetic construct
  misc_feature 1..20: note = chemically synthesized
  source 1..20: mol_type = other DNA
tgggtgaagggtaggccctc

SEQ ID NO: 44088 - DNA, 20 bp, synthetic construct
  misc_feature 1..20: note = chemically synthesized
  source 1..20: mol_type = other DNA
aagtctgggactccaaacgg

SEQ ID NO: 44089 - DNA, 20 bp, synthetic construct
  misc_feature 1..20: note = chemically synthesized
  source 1..20: mol_type = other DNA
tgaagccatggcagaagttc

SEQ ID NO: 44090 - DNA, 20 bp, synthetic construct
  misc_feature 1..20: note = chemically synthesized
  source 1..20: mol_type = other DNA
tcttaatcctgtcagctgag

SEQ ID NO: 44091 - DNA, 20 bp, synthetic construct
  misc_feature 1..20: note = chemically synthesized
  source 1..20: mol_type = other DNA
tggacaccttgaaaaaagaa

SEQ ID NO: 44092 - DNA, 20 bp, synthetic construct
  misc_feature 1..20: note = chemically synthesized
  source 1..20: mol_type = other DNA
aggataacagcaattgttca

SEQ ID NO: 44093 - DNA, 20 bp, synthetic construct
  misc_feature 1..20: note = chemically synthesized
  source 1..20: mol_type = other DNA
agcaaatgggagaaatatcg

SEQ ID NO: 44094 - DNA, 20 bp, synthetic construct
  misc_feature 1..20: note = chemically synthesized
  source 1..20: mol_type = other DNA
catggaacatccctgagaaa

SEQ ID NO: 44095 - DNA, 20 bp, synthetic construct
  misc_feature 1..20: note = chemically synthesized
  source 1..20: mol_type = other DNA
tctcttatggtcgagactgc

SEQ ID NO: 44096 - DNA, 20 bp, synthetic construct
  misc_feature 1..20: note = chemically synthesized
  source 1..20: mol_type = other DNA
accgaaatgtgatgcctccc

SEQ ID NO: 44097 - DNA, 20 bp, synthetic construct
  misc_feature 1..20: note = chemically synthesized
  source 1..20: mol_type = other DNA
gaaaatagaaaagaacctac

SEQ ID NO: 44098 - DNA, 20 bp, synthetic construct
  misc_feature 1..20: note = chemically synthesized
  source 1..20: mol_type = other DNA
ggcgtggagatgtaacaagc

SEQ ID NO: 44099 - DNA, 20 bp, synthetic construct
  misc_feature 1..20: note = chemically synthesized
  source 1..20: mol_type = other DNA
gatgtaacaagcctggatgt

SEQ ID NO: 44100 - DNA, 20 bp, synthetic construct
  misc_feature 1..20: note = chemically synthesized
  source 1..20: mol_type = other DNA
atttggaagaaatatcagat

SEQ ID NO: 44101 - DNA, 20 bp, synthetic construct
  misc_feature 1..20: note = chemically synthesized
  source 1..20: mol_type = other DNA
taaaagcagcagcatgcagt

SEQ ID NO: 44102 - DNA, 20 bp, synthetic construct
  misc_feature 1..20: note = chemically synthesized
  source 1..20: mol_type = other DNA
aaccccatgctcaccatcaa

SEQ ID NO: 44103 - DNA, 20 bp, synthetic construct
  misc_feature 1..20: note = chemically synthesized
  source 1..20: mol_type = other DNA
catgctcaccatcaacggga

SEQ ID NO: 44104 - DNA, 20 bp, synthetic construct
  misc_feature 1..20: note = chemically synthesized
  source 1..20: mol_type = other DNA
gggattgaatttgagctgct

SEQ ID NO: 44105 - DNA, 20 bp, synthetic construct
  misc_feature 1..20: note = chemically synthesized
  source 1..20: mol_type = other DNA
ttatcttcaattctgtgaaa

SEQ ID NO: 44106 - DNA, 20 bp, synthetic construct
  misc_feature 1..20: note = chemically synthesized
  source 1..20: mol_type = other DNA
tgcaagagaggaaggaaggc

SEQ ID NO: 44107 - DNA, 20 bp, synthetic construct
  misc_feature 1..20: note = chemically synthesized
  source 1..20: mol_type = other DNA
agctttctggcaggcactgg

SEQ ID NO: 44108 - DNA, 20 bp, synthetic construct
  misc_feature 1..20: note = chemically synthesized
  source 1..20: mol_type = other DNA
tgtaactggtggccttagaa

SEQ ID NO: 44109 - DNA, 20 bp, synthetic construct
  misc_feature 1..20: note = chemically synthesized
  source 1..20: mol_type = other DNA
ggtggccttagaagagggtt

SEQ ID NO: 44110 - DNA, 20 bp, synthetic construct
  misc_feature 1..20: note = chemically synthesized
  source 1..20: mol_type = other DNA
cagggttatgtgtttggaac

SEQ ID NO: 44111 - DNA, 20 bp, synthetic construct
  misc_feature 1..20: note = chemically synthesized
  source 1..20: mol_type = other DNA
gccaccaagcaccaagaggt

SEQ ID NO: 44112 - DNA, 20 bp, synthetic construct
  misc_feature 1..20: note = chemically synthesized
  source 1..20: mol_type = other DNA
agcaccaagaggtgtgagtt

SEQ ID NO: 44113 - DNA, 20 bp, synthetic construct
  misc_feature 1..20: note = chemically synthesized
  source 1..20: mol_type = other DNA
aaagaggaaggtgaaaactg

SEQ ID NO: 44114 - DNA, 20 bp, synthetic construct
  misc_feature 1..20: note = chemically synthesized
  source 1..20: mol_type = other DNA
atcccctgagagaaaaagta

SEQ ID NO: 44115 - DNA, 20 bp, synthetic construct
  misc_feature 1..20: note = chemically synthesized
  source 1..20: mol_type = other DNA
cccctcacggccaaaggcat

SEQ ID NO: 44116 - DNA, 20 bp, synthetic construct
  misc_feature 1..20: note = chemically synthesized
  source 1..20: mol_type = other DNA
ccagacattgagctcaagga

SEQ ID NO: 44117 - DNA, 20 bp, synthetic construct
  misc_feature 1..20: note = chemically synthesized
  source 1..20: mol_type = other DNA
gtttgtatgttttctacagt

SEQ ID NO: 44118 - DNA, 20 bp, synthetic construct
  misc_feature 1..20: note = chemically synthesized
  source 1..20: mol_type = other DNA
gttttctacagttcggattt

SEQ ID NO: 44119 - DNA, 20 bp, synthetic construct
  misc_feature 1..20: note = chemically synthesized
  source 1..20: mol_type = other DNA
atgatttcatttcttttcga

SEQ ID NO: 44120 - DNA, 20 bp, synthetic construct
  misc_feature 1..20: note = chemically synthesized
  source 1..20: mol_type = other DNA
tatgcatactttctaaatgc

SEQ ID NO: 44121 - DNA, 20 bp, synthetic construct
  misc_feature 1..20: note = chemically synthesized
  source 1..20: mol_type = other DNA
catcagctctttggcagctt

SEQ ID NO: 44122 - DNA, 20 bp, synthetic construct
  misc_feature 1..20: note = chemically synthesized
  source 1..20: mol_type = other DNA
tttaattctcacctggtccc

SEQ ID NO: 44123 - DNA, 20 bp, synthetic construct
  misc_feature 1..20: note = chemically synthesized
  source 1..20: mol_type = other DNA
ccaggatatggtttacttgt

SEQ ID NO: 44124 - DNA, 20 bp, synthetic construct
  misc_feature 1..20: note = chemically synthesized
  source 1..20: mol_type = other DNA
tgaaggaaagagagagaagt

SEQ ID NO: 44125 - DNA, 20 bp, synthetic construct
  misc_feature 1..20: note = chemically synthesized
  source 1..20: mol_type = other DNA
attttttttttctgtggaaa

SEQ ID NO: 44126 - DNA, 20 bp, synthetic construct
  misc_feature 1..20: note = chemically synthesized
  source 1..20: mol_type = other DNA
ttgcacattatcgcagtagg

SEQ ID NO: 44127 - DNA, 20 bp, synthetic construct
  misc_feature 1..20: note = chemically synthesized
  source 1..20: mol_type = other DNA
tggcttaacccctgaaacct

SEQ ID NO: 44128 - DNA, 20 bp, synthetic construct
  misc_feature 1..20: note = chemically synthesized
  source 1..20: mol_type = other DNA
agacttttgcatatataatt

SEQ ID NO: 44129 - DNA, 20 bp, synthetic construct
  misc_feature 1..20: note = chemically synthesized
  source 1..20: mol_type = other DNA
gcatatataattaaggatct

SEQ ID NO: 44130 - DNA, 20 bp, synthetic construct
  misc_feature 1..20: note = chemically synthesized
  source 1..20: mol_type = other DNA
tggggagatatcctaattat

SEQ ID NO: 44131 - DNA, 20 bp, synthetic construct
  misc_feature 1..20: note = chemically synthesized
  source 1..20: mol_type = other DNA
gaggaagaggctacaaacca

SEQ ID NO: 44132 - DNA, 20 bp, synthetic construct
  misc_feature 1..20: note = chemically synthesized
  source 1..20: mol_type = other DNA
gaggctacaaaccaaggaat

SEQ ID NO: 44133 - DNA, 20 bp, synthetic construct
  misc_feature 1..20: note = chemically synthesized
  source 1..20: mol_type = other DNA
gtagcctctagaagaggaaa

SEQ ID NO: 44134 - DNA, 20 bp, synthetic construct
  misc_feature 1..20: note = chemically synthesized
  source 1..20: mol_type = other DNA
caggaaaacacaatctctca

SEQ ID NO: 44135 - DNA, 20 bp, synthetic construct
  misc_feature 1..20: note = chemically synthesized
  source 1..20: mol_type = other DNA
gcaagaggaaatcagttacg

SEQ ID NO: 44136 - DNA, 20 bp, synthetic construct
  misc_feature 1..20: note = chemically synthesized
  source 1..20: mol_type = other DNA
tcctgtctctggctaatcat

SEQ ID NO: 44137 - DNA, 20 bp, synthetic construct
  misc_feature 1..20: note = chemically synthesized
  source 1..20: mol_type = other DNA
tacatacagacccagagcca

SEQ ID NO: 44138 - DNA, 20 bp, synthetic construct
  misc_feature 1..20: note = chemically synthesized
  source 1..20: mol_type = other DNA
agacccagagccagtgaatc

SEQ ID NO: 44139 - DNA, 20 bp, synthetic construct
  misc_feature 1..20: note = chemically synthesized
  source 1..20: mol_type = other DNA
ttggtggtggggcccagagc

SEQ ID NO: 44140 - DNA, 20 bp, synthetic construct
  misc_feature 1..20: note = chemically synthesized
  source 1..20: mol_type = other DNA
aagcaacttactcaaataca

SEQ ID NO: 44141 - DNA, 20 bp, synthetic construct
  misc_feature 1..20: note = chemically synthesized
  source 1..20: mol_type = other DNA
taattttattactttatctt

SEQ ID NO: 44142 - DNA, 20 bp, synthetic construct
  misc_feature 1..20: note = chemically synthesized
  source 1..20: mol_type = other DNA
attatataatgtttattgat

SEQ ID NO: 44143 - DNA, 20 bp, synthetic construct
  misc_feature 1..20: note = chemically synthesized
  source 1..20: mol_type = other DNA
tataatgtttattgattaga

SEQ ID NO: 44144 - DNA, 20 bp, synthetic construct
  misc_feature 1..20: note = chemically synthesized
  source 1..20: mol_type = other DNA
gtgttcagattcctgacctc

SEQ ID NO: 44145 - DNA, 20 bp, synthetic construct
  misc_feature 1..20: note = chemically synthesized
  source 1..20: mol_type = other DNA
agattagacagcaggcaggg

SEQ ID NO: 44146 - DNA, 20 bp, synthetic construct
  misc_feature 1..20: note = chemically synthesized
  source 1..20: mol_type = other DNA
aagttgcttaaacatgacag

SEQ ID NO: 44147 - DNA, 20 bp, synthetic construct
  misc_feature 1..20: note = chemically synthesized
  source 1..20: mol_type = other DNA
gcttaaacatgacagcagga

SEQ ID NO: 44148 - DNA, 20 bp, synthetic construct
  misc_feature 1..20: note = chemically synthesized
  source 1..20: mol_type = other DNA
acctctgctgaacttcctca

SEQ ID NO: 44149 - DNA, 20 bp, synthetic construct
  misc_feature 1..20: note = chemically synthesized
  source 1..20: mol_type = other DNA
tccataaatccaaccaccgc

SEQ ID NO: 44150 - DNA, 20 bp, synthetic construct
  misc_feature 1..20: note = chemically synthesized
  source 1..20: mol_type = other DNA
caaatttggctgacacagtt

SEQ ID NO: 44151 - DNA, 20 bp, synthetic construct
  misc_feature 1..20: note = chemically synthesized
  source 1..20: mol_type = other DNA
gcactagcacaaaatatttg

SEQ ID NO: 44152 - DNA, 20 bp, synthetic construct
  misc_feature 1..20: note = chemically synthesized
  source 1..20: mol_type = other DNA
acaaaatatttgctgaatga

SEQ ID NO: 44153 - DNA, 20 bp, synthetic construct
  misc_feature 1..20: note = chemically synthesized
  source 1..20: mol_type = other DNA
tatttgctgaatgaaagaat

SEQ ID NO: 44154 - DNA, 20 bp, synthetic construct
  misc_feature 1..20: note = chemically synthesized
  source 1..20: mol_type = other DNA
caaagtcttttactccggtg

SEQ ID NO: 44155 - DNA, 20 bp, synthetic construct
  misc_feature 1..20: note = chemically synthesized
  source 1..20: mol_type = other DNA
actccggtgtggagtgtttt

SEQ ID NO: 44156 - DNA, 20 bp, synthetic construct
  misc_feature 1..20: note = chemically synthesized
  source 1..20: mol_type = other DNA
gaaacacctccccttaactg

SEQ ID NO: 44157 - DNA, 20 bp, synthetic construct
  misc_feature 1..20: note = chemically synthesized
  source 1..20: mol_type = other DNA
ttcagggaagatgtctgttg

SEQ ID NO: 44158 - DNA, 20 bp, synthetic construct
  misc_feature 1..20: note = chemically synthesized
  source 1..20: mol_type = other DNA
ctataccccagatttatttt

SEQ ID NO: 44159 - DNA, 20 bp, synthetic construct
  misc_feature 1..20: note = chemically synthesized
  source 1..20: mol_type = other DNA
ccagatttattttgaggatt

SEQ ID NO: 44160 - DNA, 20 bp, synthetic construct
  misc_feature 1..20: note = chemically synthesized
  source 1..20: mol_type = other DNA
attgcgtattactaaaaaga

SEQ ID NO: 44161 - DNA, 20 bp, synthetic construct
  misc_feature 1..20: note = chemically synthesized
  source 1..20: mol_type = other DNA
caatgggaaggtgtcagagc

SEQ ID NO: 44162 - DNA, 20 bp, synthetic construct
  misc_feature 1..20: note = chemically synthesized
  source 1..20: mol_type = other DNA
ccgtagtggaggggagctct

SEQ ID NO: 44163 - DNA, 20 bp, synthetic construct
  misc_feature 1..20: note = chemically synthesized
  source 1..20: mol_type = other DNA
aattgaaatgaacaaaggca

SEQ ID NO: 44164 - DNA, 20 bp, synthetic construct
  misc_feature 1..20: note = chemically synthesized
  source 1..20: mol_type = other DNA
acagggaagcctctgaacac

SEQ ID NO: 44165 - DNA, 20 bp, synthetic construct
  misc_feature 1..20: note = chemically synthesized
  source 1..20: mol_type = other DNA
cttcaggaaacccaggccca

SEQ ID NO: 44166 - DNA, 20 bp, synthetic construct
  misc_feature 1..20: note = chemically synthesized
  source 1..20: mol_type = other DNA
tttctccttcaaaccactct

SEQ ID NO: 44167 - DNA, 20 bp, synthetic construct
  misc_feature 1..20: note = chemically synthesized
  source 1..20: mol_type = other DNA
gcgtcactcaaactagctga

SEQ ID NO: 44168 - DNA, 20 bp, synthetic construct
  misc_feature 1..20: note = chemically synthesized
  source 1..20: mol_type = other DNA
taggcttatttcaaaaggca

SEQ ID NO: 44169 - DNA, 20 bp, synthetic construct
  misc_feature 1..20: note = chemically synthesized
  source 1..20: mol_type = other DNA
agtgcctgctgtgtgtggtg

SEQ ID NO: 44170 - DNA, 20 bp, synthetic construct
  misc_feature 1..20: note = chemically synthesized
  source 1..20: mol_type = other DNA
taggaaggaacagggcagtg

SEQ ID NO: 44171 - DNA, 20 bp, synthetic construct
  misc_feature 1..20: note = chemically synthesized
  source 1..20: mol_type = other DNA
ctgccctgttccttcctagc

SEQ ID NO: 44172 - DNA, 20 bp, synthetic construct
  misc_feature 1..20: note = chemically synthesized
  source 1..20: mol_type = other DNA
gcctgagtcaggactgagca

SEQ ID NO: 44173 - DNA, 20 bp, synthetic construct
  misc_feature 1..20: note = chemically synthesized
  source 1..20: mol_type = other DNA
gaaataagcctacttttaac

SEQ ID NO: 44174 - DNA, 20 bp, synthetic construct
  misc_feature 1..20: note = chemically synthesized
  source 1..20: mol_type = other DNA
gctggactttgtccctgtgt

SEQ ID NO: 44175 - DNA, 20 bp, synthetic construct
  misc_feature 1..20: note = chemically synthesized
  source 1..20: mol_type = other DNA
agacaattctttcagctagt

SEQ ID NO: 44176 - DNA, 20 bp, synthetic construct
  misc_feature 1..20: note = chemically synthesized
  source 1..20: mol_type = other DNA
cgcagtgaagcagtgggaac

SEQ ID NO: 44177 - DNA, 20 bp, synthetic construct
  misc_feature 1..20: note = chemically synthesized
  source 1..20: mol_type = other DNA
agtgggaaccggaatatcca

SEQ ID NO: 44178 - DNA, 20 bp, synthetic construct
  misc_feature 1..20: note = chemically synthesized
  source 1..20: mol_type = other DNA
tggctttatatcctctgggc

SEQ ID NO: 44179 - DNA, 20 bp, synthetic construct
  misc_feature 1..20: note = chemically synthesized
  source 1..20: mol_type = other DNA
atagaggagagagaaaatgg

SEQ ID NO: 44180 - DNA, 20 bp, synthetic construct
  misc_feature 1..20: note = chemically synthesized
  source 1..20: mol_type = other DNA
atggaagtttctgagaactt

SEQ ID NO: 44181 - DNA, 20 bp, synthetic construct
  misc_feature 1..20: note = chemically synthesized
  source 1..20: mol_type = other DNA
ttctgagaacttcagggtat

SEQ ID NO: 44182 - DNA, 20 bp, synthetic construct
  misc_feature 1..20: note = chemically synthesized
  source 1..20: mol_type = other DNA
ctatttagttaattaaggct

SEQ ID NO: 44183 - DNA, 20 bp, synthetic construct
  misc_feature 1..20: note = chemically synthesized
  source 1..20: mol_type = other DNA
tacgcaattgaaaagtatgt

SEQ ID NO: 44184 - DNA, 20 bp, synthetic construct
  misc_feature 1..20: note = chemically synthesized
  source 1..20: mol_type = other DNA
aggtgctaagcattttagct

SEQ ID NO: 44185 - DNA, 20 bp, synthetic construct
  misc_feature 1..20: note = chemically synthesized
  source 1..20: mol_type = other DNA
cataatcctcaaaataaatc

SEQ ID NO: 44186 - DNA, 20 bp, synthetic construct
  misc_feature 1..20: note = chemically synthesized
  source 1..20: mol_type = other DNA
atagatgacttgattagaag

SEQ ID NO: 44187 - DNA, 20 bp, synthetic construct
  misc_feature 1..20: note = chemically synthesized
  source 1..20: mol_type = other DNA
tgattagaagcagggtatgt

SEQ ID NO: 44188 - DNA, 20 bp, synthetic construct
  misc_feature 1..20: note = chemically synthesized
  source 1..20: mol_type = other DNA
gtatcttaaggcaaggaaaa

SEQ ID NO: 44189 - DNA, 20 bp, synthetic construct
  misc_feature 1..20: note = chemically synthesized
  source 1..20: mol_type = other DNA
gcctagtgcccaggccaggc

SEQ ID NO: 44190 - DNA, 20 bp, synthetic construct
  misc_feature 1..20: note = chemically synthesized
  source 1..20: mol_type = other DNA
ccccacaacagacatcttcc

SEQ ID NO: 44191 - DNA, 20 bp, synthetic construct
  misc_feature 1..20: note = chemically synthesized
  source 1..20: mol_type = other DNA
acagacatcttccctgaatg

SEQ ID NO: 44192 - DNA, 20 bp, synthetic construct
  misc_feature 1..20: note = chemically synthesized
  source 1..20: mol_type = other DNA
ctaatgccctctaactgatg

SEQ ID NO: 44193 - DNA, 20 bp, synthetic construct
  misc_feature 1..20: note = chemically synthesized
  source 1..20: mol_type = other DNA
tctaactgatgctgagtttg

SEQ ID NO: 44194 - DNA, 20 bp, synthetic construct
  misc_feature 1..20: note = chemically synthesized
  source 1..20: mol_type = other DNA
tcagttaaggggaggtgttt

SEQ ID NO: 44195 - DNA, 20 bp, synthetic construct
  misc_feature 1..20: note = chemically synthesized
  source 1..20: mol_type = other DNA
gggaggtgtttctgagtttg

SEQ ID NO: 44196 - DNA, 20 bp, synthetic construct
  misc_feature 1..20: note = chemically synthesized
  source 1..20: mol_type = other DNA
caaacaccttcctaattggt

SEQ ID NO: 44197 - DNA, 20 bp, synthetic construct
  misc_feature 1..20: note = chemically synthesized
  source 1..20: mol_type = other DNA
atcctgaaaacactccacac

SEQ ID NO: 44198 - DNA, 20 bp, synthetic construct
  misc_feature 1..20: note = chemically synthesized
  source 1..20: mol_type = other DNA
agattaatatcgtagatgaa

SEQ ID NO: 44199 - DNA, 20 bp, synthetic construct
  misc_feature 1..20: note = chemically synthesized
  source 1..20: mol_type = other DNA
tgaactgagtctgggctagg

SEQ ID NO: 44200 - DNA, 20 bp, synthetic construct
  misc_feature 1..20: note = chemically synthesized
  source 1..20: mol_type = other DNA
taaaggagcctgtacctaaa

SEQ ID NO: 44201 - DNA, 20 bp, synthetic construct
  misc_feature 1..20: note = chemically synthesized
  source 1..20: mol_type = other DNA
actggcaaagtgaggaagga

SEQ ID NO: 44202 - DNA, 20 bp, synthetic construct
  misc_feature 1..20: note = chemically synthesized
  source 1..20: mol_type = other DNA
gaaggacggggtctggaggg

SEQ ID NO: 44203 - DNA, 20 bp, synthetic construct
  misc_feature 1..20: note = chemically synthesized
  source 1..20: mol_type = other DNA
gacggggtctggagggaaga

SEQ ID NO: 44204 - DNA, 20 bp, synthetic construct
  misc_feature 1..20: note = chemically synthesized
  source 1..20: mol_type = other DNA
gtgcaaaggcacagcacata

SEQ ID NO: 44205 - DNA, 20 bp, synthetic construct
  misc_feature 1..20: note = chemically synthesized
  source 1..20: mol_type = other DNA
tacagaatgcctgcatgctc

SEQ ID NO: 44206 - DNA, 20 bp, synthetic construct
  misc_feature 1..20: note = chemically synthesized
  source 1..20: mol_type = other DNA
caaaactgtgtcagccaaat

SEQ ID NO: 44207 - DNA, 20 bp, synthetic construct
  misc_feature 1..20: note = chemically synthesized
  source 1..20: mol_type = other DNA
ctgagatacccaggcggtgg

SEQ ID NO: 44208 - DNA, 20 bp, synthetic construct
  misc_feature 1..20: note = chemically synthesized
  source 1..20: mol_type = other DNA
cccaggcggtggttggattt

SEQ ID NO: 44209 - DNA, 20 bp, synthetic construct
  misc_feature 1..20: note = chemically synthesized
  source 1..20: mol_type = other DNA
cggtggttggatttatggat

SEQ ID NO: 44210 - DNA, 20 bp, synthetic construct
  misc_feature 1..20: note = chemically synthesized
  source 1..20: mol_type = other DNA
tttatggatctggatttcag

SEQ ID NO: 44211 - DNA, 20 bp, synthetic construct
  misc_feature 1..20: note = chemically synthesized
  source 1..20: mol_type = other DNA
aggggagtgggcagggctag

SEQ ID NO: 44212 - DNA, 20 bp, synthetic construct
  misc_feature 1..20: note = chemically synthesized
  source 1..20: mol_type = other DNA
agggctaggggaatagaact

SEQ ID NO: 44213 - DNA, 20 bp, synthetic construct
  misc_feature 1..20: note = chemically synthesized
  source 1..20: mol_type = other DNA
agggtcatgatgtcagtggt

SEQ ID NO: 44214 - DNA, 20 bp, synthetic construct
  misc_feature 1..20: note = chemically synthesized
  source 1..20: mol_type = other DNA
ggagttgaagtcttggaaga

SEQ ID NO: 44215 - DNA, 20 bp, synthetic construct
  misc_feature 1..20: note = chemically synthesized
  source 1..20: mol_type = other DNA
aaaggttaactccagaggtc

SEQ ID NO: 44216 - DNA, 20 bp, synthetic construct
  misc_feature 1..20: note = chemically synthesized
  source 1..20: mol_type = other DNA
tcttttatttcttcatttta

SEQ ID NO: 44217 - DNA, 20 bp, synthetic construct
  misc_feature 1..20: note = chemically synthesized
  source 1..20: mol_type = other DNA
catttacacaaaagtacaac

SEQ ID NO: 44218 - DNA, 20 bp, synthetic construct
  misc_feature 1..20: note = chemically synthesized
  source 1..20: mol_type = other DNA
aaatgaaataccctatgtat

SEQ ID NO: 44219 - DNA, 20 bp, synthetic construct
  misc_feature 1..20: note = chemically synthesized
  source 1..20: mol_type = other DNA
aaatccttgattcactggct

SEQ ID NO: 44220 - DNA, 20 bp, synthetic construct
  misc_feature 1..20: note = chemically synthesized
  source 1..20: mol_type = other DNA
gtctgtatgtaacaagcttc

SEQ ID NO: 44221 - DNA, 20 bp, synthetic construct
  misc_feature 1..20: note = chemically synthesized
  source 1..20: mol_type = other DNA
tgtgttttcctgccttttcc

SEQ ID NO: 44222 - DNA, 20 bp, synthetic construct
  misc_feature 1..20: note = chemically synthesized
  source 1..20: mol_type = other DNA
atgacacttgtgattacatt

SEQ ID NO: 44223 - DNA, 20 bp, synthetic construct
  misc_feature 1..20: note = chemically synthesized
  source 1..20: mol_type = other DNA
ttaggatacacccaaataat

SEQ ID NO: 44224 - DNA, 20 bp, synthetic construct
  misc_feature 1..20: note = chemically synthesized
  source 1..20: mol_type = other DNA
agataatactcacaggtttc

SEQ ID NO: 44225 - DNA, 20 bp, synthetic construct
  misc_feature 1..20: note = chemically synthesized
  source 1..20: mol_type = other DNA
gttaagccatacatatcttt

SEQ ID NO: 44226 - DNA, 20 bp, synthetic construct
  misc_feature 1..20: note = chemically synthesized
  source 1..20: mol_type = other DNA
tcatctcatcaggtgttacc

SEQ ID NO: 44227 - DNA, 20 bp, synthetic construct
  misc_feature 1..20: note = chemically synthesized
  source 1..20: mol_type = other DNA
catcaggtgttacctagaat

SEQ ID NO: 44228 - DNA, 20 bp, synthetic construct
  misc_feature 1..20: note = chemically synthesized
  source 1..20: mol_type = other DNA
ccatatcctggggaccaggt

SEQ ID NO: 44229 - DNA, 20 bp, synthetic construct
  misc_feature 1..20: note = chemically synthesized
  source 1..20: mol_type = other DNA
actgaagtcacatggagctc

SEQ ID NO: 44230 - DNA, 20 bp, synthetic construct
  misc_feature 1..20: note = chemically synthesized
  source 1..20: mol_type = other DNA
aatgaaatcatatttttctg

SEQ ID NO: 44231 - DNA, 20 bp, synthetic construct
  misc_feature 1..20: note = chemically synthesized
  source 1..20: mol_type = other DNA
aggcactgaaccagctggaa

SEQ ID NO: 44232 - DNA, 20 bp, synthetic construct
  misc_feature 1..20: note = chemically synthesized
  source 1..20: mol_type = other DNA
aaccagctggaaatgaatgc

SEQ ID NO: 44233 - DNA, 20 bp, synthetic construct
  misc_feature 1..20: note = chemically synthesized
  source 1..20: mol_type = other DNA
attttcgcagctgataaaag

SEQ ID NO: 44234 - DNA, 20 bp, synthetic construct
  misc_feature 1..20: note = chemically synthesized
  source 1..20: mol_type = other DNA
aatgtctggagaaagcagct

SEQ ID NO: 44235 - DNA, 20 bp, synthetic construct
  misc_feature 1..20: note = chemically synthesized
  source 1..20: mol_type = other DNA
actctgtactttttctctca

SEQ ID NO: 44236 - DNA, 20 bp, synthetic construct
  misc_feature 1..20: note = chemically synthesized
  source 1..20: mol_type = other DNA
cctgcagctaagattgagaa

SEQ ID NO: 44237 - DNA, 20 bp, synthetic construct
  misc_feature 1..20: note = chemically synthesized
  source 1..20: mol_type = other DNA
cctattttttaaagcacagt

SEQ ID NO: 44238 - DNA, 20 bp, synthetic construct
  misc_feature 1..20: note = chemically synthesized
  source 1..20: mol_type = other DNA
ttctaaggccaccagttaca

SEQ ID NO: 44239 - DNA, 20 bp, synthetic construct
  misc_feature 1..20: note = chemically synthesized
  source 1..20: mol_type = other DNA
acaaagaatggggaaggtta

SEQ ID NO: 44240 - DNA, 20 bp, synthetic construct
  misc_feature 1..20: note = chemically synthesized
  source 1..20: mol_type = other DNA
tggtctaaaattccatttca

SEQ ID NO: 44241 - DNA, 20 bp, synthetic construct
  misc_feature 1..20: note = chemically synthesized
  source 1..20: mol_type = other DNA
tcacagaattgaagataatt

SEQ ID NO: 44242 - DNA, 20 bp, synthetic construct
  misc_feature 1..20: note = chemically synthesized
  source 1..20: mol_type = other DNA
aatcccgttgatggtgagca

SEQ ID NO: 44243 - DNA, 20 bp, synthetic construct
  misc_feature 1..20: note = chemically synthesized
  source 1..20: mol_type = other DNA
gtgagcatggggttcatttt

SEQ ID NO: 44244 - DNA, 20 bp, synthetic construct
  misc_feature 1..20: note = chemically synthesized
  source 1..20: mol_type = other DNA
ttcattttgagagtagaaaa

SEQ ID NO: 44245 - DNA, 20 bp, synthetic construct
  misc_feature 1..20: note = chemically synthesized
  source 1..20: mol_type = other DNA
gtagaaaattggatgcagtg

SEQ ID NO: 44246 - DNA, 20 bp, synthetic construct
  misc_feature 1..20: note = chemically synthesized
  source 1..20: mol_type = other DNA
aattggatgcagtggagaat

SEQ ID NO: 44247 - DNA, 20 bp, synthetic construct
  misc_feature 1..20: note = chemically synthesized
  source 1..20: mol_type = other DNA
tgcagtggagaatcagaatg

SEQ ID NO: 44248 - DNA, 20 bp, synthetic construct
  misc_feature 1..20: note = chemically synthesized
  source 1..20: mol_type = other DNA
attttcaaatatacaaaata

SEQ ID NO: 44249 - DNA, 20 bp, synthetic construct
  misc_feature 1..20: note = chemically synthesized
  source 1..20: mol_type = other DNA
atattgagtctgaaggcaaa

SEQ ID NO: 44250 - DNA, 20 bp, synthetic construct
  misc_feature 1..20: note = chemically synthesized
  source 1..20: mol_type = other DNA
cttgttacatctccacgcca

SEQ ID NO: 44251 - DNA, 20 bp, synthetic construct
  misc_feature 1..20: note = chemically synthesized
  source 1..20: mol_type = other DNA
caactttagaaataaaggga

SEQ ID NO: 44252 - DNA, 20 bp, synthetic construct
  misc_feature 1..20: note = chemically synthesized
  source 1..20: mol_type = other DNA
aaaaccagcaagtttgtatt

SEQ ID NO: 44253 - DNA, 20 bp, synthetic construct
  misc_feature 1..20: note = chemically synthesized
  source 1..20: mol_type = other DNA
gaggcagtgtgcaaataggt

SEQ ID NO: 44254 - DNA, 20 bp, synthetic construct
  misc_feature 1..20: note = chemically synthesized
  source 1..20: mol_type = other DNA
tcaagtactttacaaggtaa

SEQ ID NO: 44255 - DNA, 20 bp, synthetic construct
  misc_feature 1..20: note = chemically synthesized
  source 1..20: mol_type = other DNA
tatcacaaggcaagtggagg

SEQ ID NO: 44256 - DNA, 20 bp, synthetic construct
  misc_feature 1..20: note = chemically synthesized
  source 1..20: mol_type = other DNA
gataacatcttatcaggaga

SEQ ID NO: 44257 - DNA, 20 bp, synthetic construct
  misc_feature 1..20: note = chemically synthesized
  source 1..20: mol_type = other DNA
ttatcaggagacagggtttt

SEQ ID NO: 44258 - DNA, 20 bp, synthetic construct
  misc_feature 1..20: note = chemically synthesized
  source 1..20: mol_type = other DNA
ctgaccaaaatttattaggc

SEQ ID NO: 44259 - DNA, 20 bp, synthetic construct
  misc_feature 1..20: note = chemically synthesized
  source 1..20: mol_type = other DNA
ctgggagcgctgtgggagac

SEQ ID NO: 44260 - DNA, 20 bp, synthetic construct
  misc_feature 1..20: note = chemically synthesized
  source 1..20: mol_type = other DNA
tggctcgtattctctttctc

SEQ ID NO: 44261 - DNA, 20 bp, synthetic construct
  misc_feature 1..20: note = chemically synthesized
  source 1..20: mol_type = other DNA
ggatgttccatgctgagaaa

SEQ ID NO: 44262 - DNA, 20 bp, synthetic construct
  misc_feature 1..20: note = chemically synthesized
  source 1..20: mol_type = other DNA
ctgcctggctcaccagcagt

SEQ ID NO: 44263 - DNA, 20 bp, synthetic construct
  misc_feature 1..20: note = chemically synthesized
  source 1..20: mol_type = other DNA
tgcagttaatgcaattatta

SEQ ID NO: 44264 - DNA, 20 bp, synthetic construct
  misc_feature 1..20: note = chemically synthesized
  source 1..20: mol_type = other DNA
tatacatcctcctcagctga

SEQ ID NO: 44265 - DNA, 20 bp, synthetic construct
  misc_feature 1..20: note = chemically synthesized
  source 1..20: mol_type = other DNA
taaagacaggcataaatcac

SEQ ID NO: 44266 - DNA, 20 bp, synthetic construct
  misc_feature 1..20: note = chemically synthesized
  source 1..20: mol_type = other DNA
cttcagctgatccctccgtt

SEQ ID NO: 44267 - DNA, 20 bp, synthetic construct
  misc_feature 1..20: note = chemically synthesized
  source 1..20: mol_type = other DNA
ggtatttaagttagagcaaa

SEQ ID NO: 44268 - DNA, 20 bp, synthetic construct
  misc_feature 1..20: note = chemically synthesized
  source 1..20: mol_type = other DNA
cagcacacatacacttacat

SEQ ID NO: 44269 - DNA, 20 bp, synthetic construct
  misc_feature 1..20: note = chemically synthesized
  source 1..20: mol_type = other DNA
cacaagaactcacaagtgtg

SEQ ID NO: 44270 - DNA, 20 bp, synthetic construct
  misc_feature 1..20: note = chemically synthesized
  source 1..20: mol_type = other DNA
acaagtgtgttgagtgttgc

SEQ ID NO: 44271 - DNA, 20 bp, synthetic construct
  misc_feature 1..20: note = chemically synthesized
  source 1..20: mol_type = other DNA
cctttaactttttttttcct

SEQ ID NO: 44272 - DNA, 20 bp, synthetic construct
  misc_feature 1..20: note = chemically synthesized
  source 1..20: mol_type = other DNA
taaagtgaagagatggcaat

SEQ ID NO: 44273 - DNA, 20 bp, synthetic construct
  misc_feature 1..20: note = chemically synthesized
  source 1..20: mol_type = other DNA
tacagcaaggctagtttgga

SEQ ID NO: 44274 - DNA, 20 bp, synthetic construct
  misc_feature 1..20: note = chemically synthesized
  source 1..20: mol_type = other DNA
tttggagagggttttgctgt

SEQ ID NO: 44275 - DNA, 20 bp, synthetic construct
  misc_feature 1..20: note = chemically synthesized
  source 1..20: mol_type = other DNA
atgctttttcttttttttcc

SEQ ID NO: 44276 - DNA, 20 bp, synthetic construct
  misc_feature 1..20: note = chemically synthesized
  source 1..20: mol_type = other DNA
cccagagtttgaaagggaaa

SEQ ID NO: 44277 - DNA, 20 bp, synthetic construct
  misc_feature 1..20: note = chemically synthesized
  source 1..20: mol_type = other DNA
caaatcagctaagtacagct

SEQ ID NO: 44278 - DNA, 20 bp, synthetic construct
  misc_feature 1..20: note = chemically synthesized
  source 1..20: mol_type = other DNA
ttgtcacctacagtacattt

SEQ ID NO: 44279 - DNA, 20 bp, synthetic construct
  misc_feature 1..20: note = chemically synthesized
  source 1..20: mol_type = other DNA
tacagtacatttctggattt

SEQ ID NO: 44280 - DNA, 20 bp, synthetic construct
  misc_feature 1..20: note = chemically synthesized
  source 1..20: mol_type = other DNA
gtacatttctggatttggga

SEQ ID NO: 44281 - DNA, 20 bp, synthetic construct
  misc_feature 1..20: note = chemically synthesized
  source 1..20: mol_type = other DNA
ttgggaatgagtgttcttca

SEQ ID NO: 44282 - DNA, 20 bp, synthetic construct
  misc_feature 1..20: note = chemically synthesized
  source 1..20: mol_type = other DNA
aagaacactcattcccaaat

SEQ ID NO: 44283 - DNA, 20 bp, synthetic construct
  misc_feature 1..20: note = chemically synthesized
  source 1..20: mol_type = other DNA
agcaggatttaaagagcatt

SEQ ID NO: 44284 - DNA, 20 bp, synthetic construct
  misc_feature 1..20: note = chemically synthesized
  source 1..20: mol_type = other DNA
aaattggcagtttactaagg

SEQ ID NO: 44285 - DNA, 20 bp, synthetic construct
  misc_feature 1..20: note = chemically synthesized
  source 1..20: mol_type = other DNA
ctttcaaactctgggaaaaa

SEQ ID NO: 44286 - DNA, 20 bp, synthetic construct
  misc_feature 1..20: note = chemically synthesized
  source 1..20: mol_type = other DNA
tcttctttcaaaagcaaatg

SEQ ID NO: 44287 - DNA, 20 bp, synthetic construct
  misc_feature 1..20: note = chemically synthesized
  source 1..20: mol_type = other DNA
ttctcagcatggaacatccc

SEQ ID NO: 44288 - DNA, 20 bp, synthetic construct
  misc_feature 1..20: note = chemically synthesized
  source 1..20: mol_type = other DNA
gcatggaacatccctgagaa

SEQ ID NO: 44289 - DNA, 20 bp, synthetic construct
  misc_feature 1..20: note = chemically synthesized
  source 1..20: mol_type = other DNA
ttggccgacgcttagggaaa

SEQ ID NO: 44290 - DNA, 20 bp, synthetic construct
  misc_feature 1..20: note = chemically synthesized
  source 1..20: mol_type = other DNA
ccaacaacagtctgtatttg

SEQ ID NO: 44291 - DNA, 20 bp, synthetic construct
  misc_feature 1..20: note = chemically synthesized
  source 1..20: mol_type = other DNA
cgggattgaatttgagctgc

SEQ ID NO: 44292 - DNA, 20 bp, synthetic construct
  misc_feature 1..20: note = chemically synthesized
  source 1..20: mol_type = other DNA
actgtgctttaaaaaatagg

SEQ ID NO: 44293 - DNA, 20 bp, synthetic construct
  misc_feature 1..20: note = chemically synthesized
  source 1..20: mol_type = other DNA
tttaaaaaataggaaagaaa

SEQ ID NO: 44294 - DNA, 20 bp, synthetic construct
  misc_feature 1..20: note = chemically synthesized
  source 1..20: mol_type = other DNA
ttggtttttctaatcccctg

SEQ ID NO: 44295 - DNA, 20 bp, synthetic construct
  misc_feature 1..20: note = chemically synthesized
  source 1..20: mol_type = other DNA
tccagacattgagctcaagg

SEQ ID NO: 44296 - DNA, 20 bp, synthetic construct
  misc_feature 1..20: note = chemically synthesized
  source 1..20: mol_type = other DNA
tttctgaataatttgatccg

SEQ ID NO: 44297 - DNA, 20 bp, synthetic construct
  misc_feature 1..20: note = chemically synthesized
  source 1..20: mol_type = other DNA
tatgatttcatttcttttcg

SEQ ID NO: 44298 - DNA, 20 bp, synthetic construct
  misc_feature 1..20: note = chemically synthesized
  source 1..20: mol_type = other DNA
atatgcatactttctaaatg

SEQ ID NO: 44299 - DNA, 20 bp, synthetic construct
  misc_feature 1..20: note = chemically synthesized
  source 1..20: mol_type = other DNA
gggagatttgacttataaga

SEQ ID NO: 44300 - DNA, 20 bp, synthetic construct
  misc_feature 1..20: note = chemically synthesized
  source 1..20: mol_type = other DNA
ggtagcctctagaagaggaa

SEQ ID NO: 44301 - DNA, 20 bp, synthetic construct
  misc_feature 1..20: note = chemically synthesized
  source 1..20: mol_type = other DNA
aatctctcatagagtctcca

SEQ ID NO: 44302 - DNA, 20 bp, synthetic construct
  misc_feature 1..20: note = chemically synthesized
  source 1..20: mol_type = other DNA
agcaagaggaaatcagttac

SEQ ID NO: 44303 - DNA, 20 bp, synthetic construct
  misc_feature 1..20: note = chemically synthesized
  source 1..20: mol_type = other DNA
gtcctgtctctggctaatca

SEQ ID NO: 44304 - DNA, 20 bp, synthetic construct
  misc_feature 1..20: note = chemically synthesized
  source 1..20: mol_type = other DNA
tattaagcaagttcttcgtt

SEQ ID NO: 44305 - DNA, 20 bp, synthetic construct
  misc_feature 1..20: note = chemically synthesized
  source 1..20: mol_type = other DNA
gttgacatattcattaaaat

SEQ ID NO: 44306 - DNA, 20 bp, synthetic construct
  misc_feature 1..20: note = chemically synthesized
  source 1..20: mol_type = other DNA
taaaatgaagaaataaaaga

SEQ ID NO: 44307 - DNA, 20 bp, synthetic construct
  misc_feature 1..20: note = chemically synthesized
  source 1..20: mol_type = other DNA
aattatataatgtttattga

SEQ ID NO: 44308 - DNA, 20 bp, synthetic construct
  misc_feature 1..20: note = chemically synthesized
  source 1..20: mol_type = other DNA
aagattagacagcaggcagg

SEQ ID NO: 44309 - DNA, 20 bp, synthetic construct
  misc_feature 1..20: note = chemically synthesized
  source 1..20: mol_type = other DNA
aacctctgctgaacttcctc

SEQ ID NO: 44310 - DNA, 20 bp, synthetic construct
  misc_feature 1..20: note = chemically synthesized
  source 1..20: mol_type = other DNA
acttcctcatagaatgttca

SEQ ID NO: 44311 - DNA, 20 bp, synthetic construct
  misc_feature 1..20: note = chemically synthesized
  source 1..20: mol_type = other DNA
cacaaaatatttgctgaatg

SEQ ID NO: 44312 - DNA, 20 bp, synthetic construct
  misc_feature 1..20: note = chemically synthesized
  source 1..20: mol_type = other DNA
aggtgtttgattcttcaaac

SEQ ID NO: 44313 - DNA, 20 bp, synthetic construct
  misc_feature 1..20: note = chemically synthesized
  source 1..20: mol_type = other DNA
gggttgggaaaaagacatag

SEQ ID NO: 44314 - DNA, 20 bp, synthetic construct
  misc_feature 1..20: note = chemically synthesized
  source 1..20: mol_type = other DNA
actctgataccctgaagttc

SEQ ID NO: 44315 - DNA, 20 bp, synthetic construct
  misc_feature 1..20: note = chemically synthesized
  source 1..20: mol_type = other DNA
tgcgtcactcaaactagctg

SEQ ID NO: 44316 - DNA, 20 bp, synthetic construct
  misc_feature 1..20: note = chemically synthesized
  source 1..20: mol_type = other DNA
gtaggcttatttcaaaaggc

SEQ ID NO: 44317 - DNA, 20 bp, synthetic construct
  misc_feature 1..20: note = chemically synthesized
  source 1..20: mol_type = other DNA
agcctgagtcaggactgagc

SEQ ID NO: 44318 - DNA, 20 bp, synthetic construct
  misc_feature 1..20: note = chemically synthesized
  source 1..20: mol_type = other DNA
tatccaaagagtggtttgaa

SEQ ID NO: 44319 - DNA, 20 bp, synthetic construct
  misc_feature 1..20: note = chemically synthesized
  source 1..20: mol_type = other DNA
agtcaccacacatagaggag

SEQ ID NO: 44320 - DNA, 20 bp, synthetic construct
  misc_feature 1..20: note = chemically synthesized
  source 1..20: mol_type = other DNA
gaaaatggctgagttaaagg

SEQ ID NO: 44321 - DNA, 20 bp, synthetic construct
  misc_feature 1..20: note = chemically synthesized
  source 1..20: mol_type = other DNA
caagggaaaggtgataaagg

SEQ ID NO: 44322 - DNA, 20 bp, synthetic construct
  misc_feature 1..20: note = chemically synthesized
  source 1..20: mol_type = other DNA
gagagaggttcttgtttcaa

SEQ ID NO: 44323 - DNA, 20 bp, synthetic construct
  misc_feature 1..20: note = chemically synthesized
  source 1..20: mol_type = other DNA
ggtatcttaaggcaaggaaa

SEQ ID NO: 44324 - DNA, 20 bp, synthetic construct
  misc_feature 1..20: note = chemically synthesized
  source 1..20: mol_type = other DNA
ctctaactgatgctgagttt

SEQ ID NO: 44325 - DNA, 20 bp, synthetic construct
  misc_feature 1..20: note = chemically synthesized
  source 1..20: mol_type = other DNA
ggggaggtgtttctgagttt

SEQ ID NO: 44326 - DNA, 20 bp, synthetic construct
  misc_feature 1..20: note = chemically synthesized
  source 1..20: mol_type = other DNA
agtgcaaaggcacagcacat

SEQ ID NO: 44327 - DNA, 20 bp, synthetic construct
  misc_feature 1..20: note = chemically synthesized
  source 1..20: mol_type = other DNA
atacagaatgcctgcatgct

SEQ ID NO: 44328 - DNA, 20 bp, synthetic construct
  misc_feature 1..20: note = chemically synthesized
  source 1..20: mol_type = other DNA
tggtaggagttgaagtcttg

SEQ ID NO: 44329 - DNA, 20 bp, synthetic construct
  misc_feature 1..20: note = chemically synthesized
  source 1..20: mol_type = other DNA
agtcttggaagaaagagtag

SEQ ID NO: 44330 - DNA, 20 bp, synthetic construct
  misc_feature 1..20: note = chemically synthesized
  source 1..20: mol_type = other DNA
gcctgctgtctaatctttac

SEQ ID NO: 44331 - DNA, 20 bp, synthetic construct
  misc_feature 1..20: note = chemically synthesized
  source 1..20: mol_type = other DNA
cagaggtcaggaatctgaac

SEQ ID NO: 44332 - DNA, 20 bp, synthetic construct
  misc_feature 1..20: note = chemically synthesized
  source 1..20: mol_type = other DNA
acacaaaagtacaactgggg

SEQ ID NO: 44333 - DNA, 20 bp, synthetic construct
  misc_feature 1..20: note = chemically synthesized
  source 1..20: mol_type = other DNA
atatgcaaaagtctgtttgg

SEQ ID NO: 44334 - DNA, 20 bp, synthetic construct
  misc_feature 1..20: note = chemically synthesized
  source 1..20: mol_type = other DNA
tatgttcccatcaaggttaa

SEQ ID NO: 44335 - DNA, 20 bp, synthetic construct
  misc_feature 1..20: note = chemically synthesized
  source 1..20: mol_type = other DNA
aaatattagactctttttcc

SEQ ID NO: 44336 - DNA, 20 bp, synthetic construct
  misc_feature 1..20: note = chemically synthesized
  source 1..20: mol_type = other DNA
ttcatctcatcaggtgttac

SEQ ID NO: 44337 - DNA, 20 bp, synthetic construct
  misc_feature 1..20: note = chemically synthesized
  source 1..20: mol_type = other DNA
gttacctagaatcagagtca

SEQ ID NO: 44338 - DNA, 20 bp, synthetic construct
  misc_feature 1..20: note = chemically synthesized
  source 1..20: mol_type = other DNA
accatatcctggggaccagg

SEQ ID NO: 44339 - DNA, 20 bp, synthetic construct
  misc_feature 1..20: note = chemically synthesized
  source 1..20: mol_type = other DNA
tcaggaatttattcttgcat

SEQ ID NO: 44340 - DNA, 20 bp, synthetic construct
  misc_feature 1..20: note = chemically synthesized
  source 1..20: mol_type = other DNA
tatgcatataattctctcga

SEQ ID NO: 44341 - DNA, 20 bp, synthetic construct
  misc_feature 1..20: note = chemically synthesized
  source 1..20: mol_type = other DNA
tttctgtcggatcaaattat

SEQ ID NO: 44342 - DNA, 20 bp, synthetic construct
  misc_feature 1..20: note = chemically synthesized
  source 1..20: mol_type = other DNA
attattcagaaatccgaact

SEQ ID NO: 44343 - DNA, 20 bp, synthetic construct
  misc_feature 1..20: note = chemically synthesized
  source 1..20: mol_type = other DNA
tgtccttgagctcaatgtct

SEQ ID NO: 44344 - DNA, 20 bp, synthetic construct
  misc_feature 1..20: note = chemically synthesized
  source 1..20: mol_type = other DNA
gtactttttctctcagggga

SEQ ID NO: 44345 - DNA, 20 bp, synthetic construct
  misc_feature 1..20: note = chemically synthesized
  source 1..20: mol_type = other DNA
caatgccctgcagctaagat

SEQ ID NO: 44346 - DNA, 20 bp, synthetic construct
  misc_feature 1..20: note = chemically synthesized
  source 1..20: mol_type = other DNA
cttctaaggccaccagttac

SEQ ID NO: 44347 - DNA, 20 bp, synthetic construct
  misc_feature 1..20: note = chemically synthesized
  source 1..20: mol_type = other DNA
agtaactccaccagtgcctg

SEQ ID NO: 44348 - DNA, 20 bp, synthetic construct
  misc_feature 1..20: note = chemically synthesized
  source 1..20: mol_type = other DNA
ccttccttcctctcttgcag

SEQ ID NO: 44349 - DNA, 20 bp, synthetic construct
  misc_feature 1..20: note = chemically synthesized
  source 1..20: mol_type = other DNA
ctggtctaaaattccatttc

SEQ ID NO: 44350 - DNA, 20 bp, synthetic construct
  misc_feature 1..20: note = chemically synthesized
  source 1..20: mol_type = other DNA
gcatggggttcattttgaga

SEQ ID NO: 44351 - DNA, 20 bp, synthetic construct
  misc_feature 1..20: note = chemically synthesized
  source 1..20: mol_type = other DNA
agtagaaaattggatgcagt

SEQ ID NO: 44352 - DNA, 20 bp, synthetic construct
  misc_feature 1..20: note = chemically synthesized
  source 1..20: mol_type = other DNA
aaattggatgcagtggagaa

SEQ ID NO: 44353 - DNA, 20 bp, synthetic construct
  misc_feature 1..20: note = chemically synthesized
  source 1..20: mol_type = other DNA
aatattgagtctgaaggcaa

SEQ ID NO: 44354 - DNA, 20 bp, synthetic construct
  misc_feature 1..20: note = chemically synthesized
  source 1..20: mol_type = other DNA
tccctaagcgtcggccaact

SEQ ID NO: 44355 - DNA, 20 bp, synthetic construct
  misc_feature 1..20: note = chemically synthesized
  source 1..20: mol_type = other DNA
aaagggacagagtacaaaag

SEQ ID NO: 44356 - DNA, 20 bp, synthetic construct
  misc_feature 1..20: note = chemically synthesized
  source 1..20: mol_type = other DNA
atcaagtactttacaaggta

SEQ ID NO: 44357 - DNA, 20 bp, synthetic construct
  misc_feature 1..20: note = chemically synthesized
  source 1..20: mol_type = other DNA
ttctcagggatgttccatgc

SEQ ID NO: 44358 - DNA, 20 bp, synthetic construct
  misc_feature 1..20: note = chemically synthesized
  source 1..20: mol_type = other DNA
gggatgttccatgctgagaa

SEQ ID NO: 44359 - DNA, 20 bp, synthetic construct
  misc_feature 1..20: note = chemically synthesized
  source 1..20: mol_type = other DNA
tcccatttgcttttgaaaga

SEQ ID NO: 44360 - DNA, 20 bp, synthetic construct
  misc_feature 1..20: note = chemically synthesized
  source 1..20: mol_type = other DNA
gattgcagtaaagacaggca

SEQ ID NO: 44361 - DNA, 20 bp, synthetic construct
  misc_feature 1..20: note = chemically synthesized
  source 1..20: mol_type = other DNA
gcagcacacatacacttaca

SEQ ID NO: 44362 - DNA, 20 bp, synthetic construct
  misc_feature 1..20: note = chemically synthesized
  source 1..20: mol_type = other DNA
ctctccatgacttacctggt

SEQ ID NO: 44363 - DNA, 20 bp, synthetic construct
  misc_feature 1..20: note = chemically synthesized
  source 1..20: mol_type = other DNA
attagaagtctttaaaattc

SEQ ID NO: 44364 - DNA, 20 bp, synthetic construct
  misc_feature 1..20: note = chemically synthesized
  source 1..20: mol_type = other DNA
atacacaaacataggtccat

SEQ ID NO: 44365 - DNA, 20 bp, synthetic construct
  misc_feature 1..20: note = chemically synthesized
  source 1..20: mol_type = other DNA
tgtgggtccaaccctgacag

SEQ ID NO: 44366 - DNA, 20 bp, synthetic construct
  misc_feature 1..20: note = chemically synthesized
  source 1..20: mol_type = other DNA
tggtcagaccagttgatcct

SEQ ID NO: 44367 - DNA, 20 bp, synthetic construct
  misc_feature 1..20: note = chemically synthesized
  source 1..20: mol_type = other DNA
cattggctaaagaggaaggt

SEQ ID NO: 44368 - DNA, 20 bp, synthetic construct
  misc_feature 1..20: note = chemically synthesized
  source 1..20: mol_type = other DNA
agaatccatggaaaaggcag

SEQ ID NO: 44369 - DNA, 20 bp, synthetic construct
  misc_feature 1..20: note = chemically synthesized
  source 1..20: mol_type = other DNA
tcctcatagaatgttcatca

SEQ ID NO: 44370 - DNA, 20 bp, synthetic construct
  misc_feature 1..20: note = chemically synthesized
  source 1..20: mol_type = other DNA
tttagtcaggcataaagata

SEQ ID NO: 44371 - DNA, 20 bp, synthetic construct
  misc_feature 1..20: note = chemically synthesized
  source 1..20: mol_type = other DNA
aacacttaggaacaaactgt

SEQ ID NO: 44372 - DNA, 20 bp, synthetic construct
  misc_feature 1..20: note = chemically synthesized
  source 1..20: mol_type = other DNA
gactggtatcttaaggcaag

SEQ ID NO: 44373 - DNA, 20 bp, synthetic construct
  misc_feature 1..20: note = chemically synthesized
  source 1..20: mol_type = other DNA
cagaatatgtccctaatatc

SEQ ID NO: 44374 - DNA, 20 bp, synthetic construct
  misc_feature 1..20: note = chemically synthesized
  source 1..20: mol_type = other DNA
tcctaattggtaggaatcct

SEQ ID NO: 44375 - DNA, 20 bp, synthetic construct
  misc_feature 1..20: note = chemically synthesized
  source 1..20: mol_type = other DNA
tgcctgcatgctctagaatc

SEQ ID NO: 44376 - DNA, 20 bp, synthetic construct
  misc_feature 1..20: note = chemically synthesized
  source 1..20: mol_type = other DNA
aggtcaggaatctgaacaca

SEQ ID NO: 44377 - DNA, 20 bp, synthetic construct
  misc_feature 1..20: note = chemically synthesized
  source 1..20: mol_type = other DNA
aataaacattatataatttt

SEQ ID NO: 44378 - DNA, 20 bp, synthetic construct
  misc_feature 1..20: note = chemically synthesized
  source 1..20: mol_type = other DNA
aaccttggtttcctcatttc

SEQ ID NO: 44379 - DNA, 20 bp, synthetic construct
  misc_feature 1..20: note = chemically synthesized
  source 1..20: mol_type = other DNA
ttaccacaaatttattggct

SEQ ID NO: 44380 - DNA, 20 bp, synthetic construct
  misc_feature 1..20: note = chemically synthesized
  source 1..20: mol_type = other DNA
agtcaggagaaagcacctca

SEQ ID NO: 44381 - DNA, 20 bp, synthetic construct
  misc_feature 1..20: note = chemically synthesized
  source 1..20: mol_type = other DNA
attcagaaatccgaactgta

SEQ ID NO: 44382 - DNA, 20 bp, synthetic construct
  misc_feature 1..20: note = chemically synthesized
  source 1..20: mol_type = other DNA
tttttctctcaggggattag

SEQ ID NO: 44383 - DNA, 20 bp, synthetic construct
  misc_feature 1..20: note = chemically synthesized
  source 1..20: mol_type = other DNA
cgtgatgccccacaagccac

SEQ ID NO: 44384 - DNA, 20 bp, synthetic construct
  misc_feature 1..20: note = chemically synthesized
  source 1..20: mol_type = other DNA
agacacaaatgccaccatta

SEQ ID NO: 44385 - DNA, 20 bp, synthetic construct
  misc_feature 1..20: note = chemically synthesized
  source 1..20: mol_type = other DNA
aaagagcatttcagaaaatt

SEQ ID NO: 44386 - DNA, 20 bp, synthetic construct
  misc_feature 1..20: note = chemically synthesized
  source 1..20: mol_type = other DNA
gtaagaatttctatatggac

SEQ ID NO: 44387 - DNA, 20 bp, synthetic construct
  misc_feature 1..20: note = chemically synthesized
  source 1..20: mol_type = other DNA
gaatcatttagggaagacaa

SEQ ID NO: 44388 - DNA, 20 bp, synthetic construct
  misc_feature 1..20: note = chemically synthesized
  source 1..20: mol_type = other DNA
ctccacccttagctgtactt

SEQ ID NO: 44389 - DNA, 20 bp, synthetic construct
  misc_feature 1..20: note = chemically synthesized
  source 1..20: mol_type = other DNA
tttgtgcgaatgcatgaaaa

SEQ ID NO: 44390 - DNA, 20 bp, synthetic construct
  misc_feature 1..20: note = chemically synthesized
  source 1..20: mol_type = other DNA
caatgacacaatggaaccta

SEQ ID NO: 44391 - DNA, 20 bp, synthetic construct
  misc_feature 1..20: note = chemically synthesized
  source 1..20: mol_type = other DNA
ccagaggaaaaaaaaagtta

SEQ ID NO: 44392 - DNA, 20 bp, synthetic construct
  misc_feature 1..20: note = chemically synthesized
  source 1..20: mol_type = other DNA
ttgtgagttcttgtgcactg

SEQ ID NO: 44393 - DNA, 20 bp, synthetic construct
  misc_feature 1..20: note = chemically synthesized
  source 1..20: mol_type = other DNA
gaaggtaatcagtggaaatt

SEQ ID NO: 44394 - DNA, 20 bp, synthetic construct
  misc_feature 1..20: note = chemically synthesized
  source 1..20: mol_type = other DNA
gtaatcagtggaaatttgtc

SEQ ID NO: 44395 - DNA, 20 bp, synthetic construct
  misc_feature 1..20: note = chemically synthesized
  source 1..20: mol_type = other DNA
tttgctctaacttaaatacc

SEQ ID NO: 44396 - DNA, 20 bp, synthetic construct
  misc_feature 1..20: note = chemically synthesized
  source 1..20: mol_type = other DNA
ctgaagccatggcagaagtt

SEQ ID NO: 44397 - DNA, 20 bp, synthetic construct
  misc_feature 1..20: note = chemically synthesized
  source 1..20: mol_type = other DNA
tggcagaagttcgtggattg

SEQ ID NO: 44398 - DNA, 20 bp, synthetic construct
  misc_feature 1..20: note = chemically synthesized
  source 1..20: mol_type = other DNA
caatctctaaacataaattg

SEQ ID NO: 44399 - DNA, 20 bp, synthetic construct
  misc_feature 1..20: note = chemically synthesized
  source 1..20: mol_type = other DNA
cacttccccagtcaatatcc

SEQ ID NO: 44400 - DNA, 20 bp, synthetic construct
  misc_feature 1..20: note = chemically synthesized
  source 1..20: mol_type = other DNA
ctgcacaaattgtacagcat

SEQ ID NO: 44401 - DNA, 20 bp, synthetic construct
  misc_feature 1..20: note = chemically synthesized
  source 1..20: mol_type = other DNA
gagaatacgagccaggaggt

SEQ ID NO: 44402 - DNA, 20 bp, synthetic construct
  misc_feature 1..20: note = chemically synthesized
  source 1..20: mol_type = other DNA
cccagtctcccacagcgctc

SEQ ID NO: 44403 - DNA, 20 bp, synthetic construct
  misc_feature 1..20: note = chemically synthesized
  source 1..20: mol_type = other DNA
aaaatccctaatacaaactt

SEQ ID NO: 44404 - DNA, 20 bp, synthetic construct
  misc_feature 1..20: note = chemically synthesized
  source 1..20: mol_type = other DNA
aatacaaacttgctggtttt

SEQ ID NO: 44405 - DNA, 20 bp, synthetic construct
  misc_feature 1..20: note = chemically synthesized
  source 1..20: mol_type = other DNA
tgtgatgcctcccccggatg

SEQ ID NO: 44406 - DNA, 20 bp, synthetic construct
  misc_feature 1..20: note = chemically synthesized
  source 1..20: mol_type = other DNA
cctttatttctaaagttggc

SEQ ID NO: 44407 - DNA, 20 bp, synthetic construct
  misc_feature 1..20: note = chemically synthesized
  source 1..20: mol_type = other DNA
acaaaaaatactaagttgta

SEQ ID NO: 44408 - DNA, 20 bp, synthetic construct
  misc_feature 1..20: note = chemically synthesized
  source 1..20: mol_type = other DNA
atggcagagaccatccaaca

SEQ ID NO: 44409 - DNA, 20 bp, synthetic construct
  misc_feature 1..20: note = chemically synthesized
  source 1..20: mol_type = other DNA
gaaccccatgctcaccatca

SEQ ID NO: 44410 - DNA, 20 bp, synthetic construct
  misc_feature 1..20: note = chemically synthesized
  source 1..20: mol_type = other DNA
gccactgggcattacagtgc

SEQ ID NO: 44411 - DNA, 20 bp, synthetic construct
  misc_feature 1..20: note = chemically synthesized
  source 1..20: mol_type = other DNA
ttcgctttgttcaactgccg

SEQ ID NO: 44412 - DNA, 20 bp, synthetic construct
  misc_feature 1..20: note = chemically synthesized
  source 1..20: mol_type = other DNA
gaaggaaggctggagtacag

SEQ ID NO: 44413 - DNA, 20 bp, synthetic construct
  misc_feature 1..20: note = chemically synthesized
  source 1..20: mol_type = other DNA
ttagaagagggttcagggtt

SEQ ID NO: 44414 - DNA, 20 bp, synthetic construct
  misc_feature 1..20: note = chemically synthesized
  source 1..20: mol_type = other DNA
agtataaatggttctgaagc

SEQ ID NO: 44415 - DNA, 20 bp, synthetic construct
  misc_feature 1..20: note = chemically synthesized
  source 1..20: mol_type = other DNA
tctgaagcacttgattcaga

SEQ ID NO: 44416 - DNA, 20 bp, synthetic construct
  misc_feature 1..20: note = chemically synthesized
  source 1..20: mol_type = other DNA
agaaagtagaaagaacagct

SEQ ID NO: 44417 - DNA, 20 bp, synthetic construct
  misc_feature 1..20: note = chemically synthesized
  source 1..20: mol_type = other DNA
ccaagaggtgtgagttctga

SEQ ID NO: 44418 - DNA, 20 bp, synthetic construct
  misc_feature 1..20: note = chemically synthesized
  source 1..20: mol_type = other DNA
gctgagtcactatcaaatca

SEQ ID NO: 44419 - DNA, 20 bp, synthetic construct
  misc_feature 1..20: note = chemically synthesized
  source 1..20: mol_type = other DNA
atcccctgagagaaaaagta

SEQ ID NO: 44420 - DNA, 20 bp, synthetic construct
  misc_feature 1..20: note = chemically synthesized
  source 1..20: mol_type = other DNA
agaaaaagtacagagtttat

SEQ ID NO: 44421 - DNA, 20 bp, synthetic construct
  misc_feature 1..20: note = chemically synthesized
  source 1..20: mol_type = other DNA
attaaggaagcagtattcac

SEQ ID NO: 44422 - DNA, 20 bp, synthetic construct
  misc_feature 1..20: note = chemically synthesized
  source 1..20: mol_type = other DNA
gctcaaggacagaatctgaa

SEQ ID NO: 44423 - DNA, 20 bp, synthetic construct
  misc_feature 1..20: note = chemically synthesized
  source 1..20: mol_type = other DNA
aaagtatactgtgtacaaaa

SEQ ID NO: 44424 - DNA, 20 bp, synthetic construct
  misc_feature 1..20: note = chemically synthesized
  source 1..20: mol_type = other DNA
aaaaagctaacattaagcaa

SEQ ID NO: 44425 - DNA, 20 bp, synthetic construct
  misc_feature 1..20: note = chemically synthesized
  source 1..20: mol_type = other DNA
aacattaagcaagtgtgttt

SEQ ID NO: 44426 - DNA, 20 bp, synthetic construct
  misc_feature 1..20: note = chemically synthesized
  source 1..20: mol_type = other DNA
tgtttgtatgttttctacag

SEQ ID NO: 44427 - DNA, 20 bp, synthetic construct
  misc_feature 1..20: note = chemically synthesized
  source 1..20: mol_type = other DNA
taatttgatccgacagaaaa

SEQ ID NO: 44428 - DNA, 20 bp, synthetic construct
  misc_feature 1..20: note = chemically synthesized
  source 1..20: mol_type = other DNA
ttcagtaccatcagctcttt

SEQ ID NO: 44429 - DNA, 20 bp, synthetic construct
  misc_feature 1..20: note = chemically synthesized
  source 1..20: mol_type = other DNA
tctttggcagcttatgagta

SEQ ID NO: 44430 - DNA, 20 bp, synthetic construct
  misc_feature 1..20: note = chemically synthesized
  source 1..20: mol_type = other DNA
ttctcacctggtccccagga

SEQ ID NO: 44431 - DNA, 20 bp, synthetic construct
  misc_feature 1..20: note = chemically synthesized
  source 1..20: mol_type = other DNA
ggatatggtttacttgtcag

SEQ ID NO: 44432 - DNA, 20 bp, synthetic construct
  misc_feature 1..20: note = chemically synthesized
  source 1..20: mol_type = other DNA
cttgtcagagtagttttatg

SEQ ID NO: 44433 - DNA, 20 bp, synthetic construct
  misc_feature 1..20: note = chemically synthesized
  source 1..20: mol_type = other DNA
tatgaggtgctttctcctga

SEQ ID NO: 44434 - DNA, 20 bp, synthetic construct
  misc_feature 1..20: note = chemically synthesized
  source 1..20: mol_type = other DNA
accttgatgggaacatagaa

SEQ ID NO: 44435 - DNA, 20 bp, synthetic construct
  misc_feature 1..20: note = chemically synthesized
  source 1..20: mol_type = other DNA
ggctcactctgaaagatatg

SEQ ID NO: 44436 - DNA, 20 bp, synthetic construct
  misc_feature 1..20: note = chemically synthesized
  source 1..20: mol_type = other DNA
cattataagagggaggcaaa

SEQ ID NO: 44437 - DNA, 20 bp, synthetic construct
  misc_feature 1..20: note = chemically synthesized
  source 1..20: mol_type = other DNA
ttataagaggagaaaatgtg

SEQ ID NO: 44438 - DNA, 20 bp, synthetic construct
  misc_feature 1..20: note = chemically synthesized
  source 1..20: mol_type = other DNA
cctcgactttagcccagtga

SEQ ID NO: 44439 - DNA, 20 bp, synthetic construct
  misc_feature 1..20: note = chemically synthesized
  source 1..20: mol_type = other DNA
acttcaagataatacatttg

SEQ ID NO: 44440 - DNA, 20 bp, synthetic construct
  misc_feature 1..20: note = chemically synthesized
  source 1..20: mol_type = other DNA
ctaatcattagaatcactcc

SEQ ID NO: 44441 - DNA, 20 bp, synthetic construct
  misc_feature 1..20: note = chemically synthesized
  source 1..20: mol_type = other DNA
cagacccagagccagtgaat

SEQ ID NO: 44442 - DNA, 20 bp, synthetic construct
  misc_feature 1..20: note = chemically synthesized
  source 1..20: mol_type = other DNA
gcctgaatattaagcaagtt

SEQ ID NO: 44443 - DNA, 20 bp, synthetic construct
  misc_feature 1..20: note = chemically synthesized
  source 1..20: mol_type = other DNA
ccagttgtacttttgtgtaa

SEQ ID NO: 44444 - DNA, 20 bp, synthetic construct
  misc_feature 1..20: note = chemically synthesized
  source 1..20: mol_type = other DNA
tgtgtaaatgtgatttcatt

SEQ ID NO: 44445 - DNA, 20 bp, synthetic construct
  misc_feature 1..20: note = chemically synthesized
  source 1..20: mol_type = other DNA
tgaagaaataaaagatgaga

SEQ ID NO: 44446 - DNA, 20 bp, synthetic construct
  misc_feature 1..20: note = chemically synthesized
  source 1..20: mol_type = other DNA
aaacagttttaaaaattata

SEQ ID NO: 44447 - DNA, 20 bp, synthetic construct
  misc_feature 1..20: note = chemically synthesized
  source 1..20: mol_type = other DNA
tttaaaaattatataatgtt

SEQ ID NO: 44448 - DNA, 20 bp, synthetic construct
  misc_feature 1..20: note = chemically synthesized
  source 1..20: mol_type = other DNA
ttagaatgaatatgatgcaa

SEQ ID NO: 44449 - DNA, 20 bp, synthetic construct
  misc_feature 1..20: note = chemically synthesized
  source 1..20: mol_type = other DNA
atgcaatctggttttctgtg

SEQ ID NO: 44450 - DNA, 20 bp, synthetic construct
  misc_feature 1..20: note = chemically synthesized
  source 1..20: mol_type = other DNA
ctggagttaacctttctttg

SEQ ID NO: 44451 - DNA, 20 bp, synthetic construct
  misc_feature 1..20: note = chemically synthesized
  source 1..20: mol_type = other DNA
tcctggtgctgtgcataata

SEQ ID NO: 44452 - DNA, 20 bp, synthetic construct
  misc_feature 1..20: note = chemically synthesized
  source 1..20: mol_type = other DNA
tgcttaaacatgacagcagg

SEQ ID NO: 44453 - DNA, 20 bp, synthetic construct
  misc_feature 1..20: note = chemically synthesized
  source 1..20: mol_type = other DNA
aatttatttataaatggtaa

SEQ ID NO: 44454 - DNA, 20 bp, synthetic construct
  misc_feature 1..20: note = chemically synthesized
  source 1..20: mol_type = other DNA
atagaatgttcatcagaaaa

SEQ ID NO: 44455 - DNA, 20 bp, synthetic construct
  misc_feature 1..20: note = chemically synthesized
  source 1..20: mol_type = other DNA
tccaaccaccgcctgggtat

SEQ ID NO: 44456 - DNA, 20 bp, synthetic construct
  misc_feature 1..20: note = chemically synthesized
  source 1..20: mol_type = other DNA
atcaactcaaatttggctga

SEQ ID NO: 44457 - DNA, 20 bp, synthetic construct
  misc_feature 1..20: note = chemically synthesized
  source 1..20: mol_type = other DNA
tcaaatttggctgacacagt

SEQ ID NO: 44458 - DNA, 20 bp, synthetic construct
  misc_feature 1..20: note = chemically synthesized
  source 1..20: mol_type = other DNA
ttccaacttctctctgaaga

SEQ ID NO: 44459 - DNA, 20 bp, synthetic construct
  misc_feature 1..20: note = chemically synthesized
  source 1..20: mol_type = other DNA
aagtcttttactccggtgtg

SEQ ID NO: 44460 - DNA, 20 bp, synthetic construct
  misc_feature 1..20: note = chemically synthesized
  source 1..20: mol_type = other DNA
tactccggtgtggagtgttt

SEQ ID NO: 44461 - DNA, 20 bp, synthetic construct
  misc_feature 1..20: note = chemically synthesized
  source 1..20: mol_type = other DNA
aggattcctaccaattagga

SEQ ID NO: 44462 - DNA, 20 bp, synthetic construct
  misc_feature 1..20: note = chemically synthesized
  source 1..20: mol_type = other DNA
ttcctaccaattaggaaggt

SEQ ID NO: 44463 - DNA, 20 bp, synthetic construct
  misc_feature 1..20: note = chemically synthesized
  source 1..20: mol_type = other DNA
agaaacacctccccttaact

SEQ ID NO: 44464 - DNA, 20 bp, synthetic construct
  misc_feature 1..20: note = chemically synthesized
  source 1..20: mol_type = other DNA
ttacacatgcatgcgttgag

SEQ ID NO: 44465 - DNA, 20 bp, synthetic construct
  misc_feature 1..20: note = chemically synthesized
  source 1..20: mol_type = other DNA
agcctggcctgggcactagg

SEQ ID NO: 44466 - DNA, 20 bp, synthetic construct
  misc_feature 1..20: note = chemically synthesized
  source 1..20: mol_type = other DNA
ttttagatattagggacata

SEQ ID NO: 44467 - DNA, 20 bp, synthetic construct
  misc_feature 1..20: note = chemically synthesized
  source 1..20: mol_type = other DNA
ggacttcgcattcaaacata

SEQ ID NO: 44468 - DNA, 20 bp, synthetic construct
  misc_feature 1..20: note = chemically synthesized
  source 1..20: mol_type = other DNA
acaagaacctctctctatac

SEQ ID NO: 44469 - DNA, 20 bp, synthetic construct
  misc_feature 1..20: note = chemically synthesized
  source 1..20: mol_type = other DNA
tctataccccagatttattt

SEQ ID NO: 44470 - DNA, 20 bp, synthetic construct
  misc_feature 1..20: note = chemically synthesized
  source 1..20: mol_type = other DNA
tatgagttaattcatagcta

SEQ ID NO: 44471 - DNA, 20 bp, synthetic construct
  misc_feature 1..20: note = chemically synthesized
  source 1..20: mol_type = other DNA
tgcgtattactaaaaagaag

SEQ ID NO: 44472 - DNA, 20 bp, synthetic construct
  misc_feature 1..20: note = chemically synthesized
  source 1..20: mol_type = other DNA
aaggaatgatttcctagagg

SEQ ID NO: 44473 - DNA, 20 bp, synthetic construct
  misc_feature 1..20: note = chemically synthesized
  source 1..20: mol_type = other DNA
aggtgcttcttctggccaag

SEQ ID NO: 44474 - DNA, 20 bp, synthetic construct
  misc_feature 1..20: note = chemically synthesized
  source 1..20: mol_type = other DNA
aggggagctcttaggatgtc

SEQ ID NO: 44475 - DNA, 20 bp, synthetic construct
  misc_feature 1..20: note = chemically synthesized
  source 1..20: mol_type = other DNA
aaaggcaagggatgaccaat

SEQ ID NO: 44476 - DNA, 20 bp, synthetic construct
  misc_feature 1..20: note = chemically synthesized
  source 1..20: mol_type = other DNA
acagggaagcctctgaacac

SEQ ID NO: 44477 - DNA, 20 bp, synthetic construct
  misc_feature 1..20: note = chemically synthesized
  source 1..20: mol_type = other DNA
aagccatagcaaacttgtca

SEQ ID NO: 44478 - DNA, 20 bp, synthetic construct
  misc_feature 1..20: note = chemically synthesized
  source 1..20: mol_type = other DNA
gcccagaggatataaagcca

SEQ ID NO: 44479 - DNA, 20 bp, synthetic construct
  misc_feature 1..20: note = chemically synthesized
  source 1..20: mol_type = other DNA
tctttggatattccggttcc

SEQ ID NO: 44480 - DNA, 20 bp, synthetic construct
  misc_feature 1..20: note = chemically synthesized
  source 1..20: mol_type = other DNA
ttccggttcccactgcttca

SEQ ID NO: 44481 - DNA, 20 bp, synthetic construct
  misc_feature 1..20: note = chemically synthesized
  source 1..20: mol_type = other DNA
atacacagggacaaagtcca

SEQ ID NO: 44482 - DNA, 20 bp, synthetic construct
  misc_feature 1..20: note = chemically synthesized
  source 1..20: mol_type = other DNA
taaccggttacacaattgcc

SEQ ID NO: 44483 - DNA, 20 bp, synthetic construct
  misc_feature 1..20: note = chemically synthesized
  source 1..20: mol_type = other DNA
acacaattgcctttggtttt

SEQ ID NO: 44484 - DNA, 20 bp, synthetic construct
  misc_feature 1..20: note = chemically synthesized
  source 1..20: mol_type = other DNA
ggtttttacagtttgttcct

SEQ ID NO: 44485 - DNA, 20 bp, synthetic construct
  misc_feature 1..20: note = chemically synthesized
  source 1..20: mol_type = other DNA
gtttgttcctaagtgtttcc

SEQ ID NO: 44486 - DNA, 20 bp, synthetic construct
  misc_feature 1..20: note = chemically synthesized
  source 1..20: mol_type = other DNA
tggttcctcttcacctgagg

SEQ ID NO: 44487 - DNA, 20 bp, synthetic construct
  misc_feature 1..20: note = chemically synthesized
  source 1..20: mol_type = other DNA
attatttattccagttaaaa

SEQ ID NO: 44488 - DNA, 20 bp, synthetic construct
  misc_feature 1..20: note = chemically synthesized
  source 1..20: mol_type = other DNA
tagtgcctgctgtgtgtggt

SEQ ID NO: 44489 - DNA, 20 bp, synthetic construct
  misc_feature 1..20: note = chemically synthesized
  source 1..20: mol_type = other DNA
ctgccacagttcctttcccc

SEQ ID NO: 44490 - DNA, 20 bp, synthetic construct
  misc_feature 1..20: note = chemically synthesized
  source 1..20: mol_type = other DNA
gcaattgtgtaaccggttaa

SEQ ID NO: 44491 - DNA, 20 bp, synthetic construct
  misc_feature 1..20: note = chemically synthesized
  source 1..20: mol_type = other DNA
tgagttagacaattctttca

SEQ ID NO: 44492 - DNA, 20 bp, synthetic construct
  misc_feature 1..20: note = chemically synthesized
  source 1..20: mol_type = other DNA
gggaaccggaatatccaaag

SEQ ID NO: 44493 - DNA, 20 bp, synthetic construct
  misc_feature 1..20: note = chemically synthesized
  source 1..20: mol_type = other DNA
tttgaaggagaaagaagcat

SEQ ID NO: 44494 - DNA, 20 bp, synthetic construct
  misc_feature 1..20: note = chemically synthesized
  source 1..20: mol_type = other DNA
tggctttatatcctctgggc

SEQ ID NO: 44495 - DNA, 20 bp, synthetic construct
  misc_feature 1..20: note = chemically synthesized
  source 1..20: mol_type = other DNA
taaaggtaagaaaccatctg

SEQ ID NO: 44496 - DNA, 20 bp, synthetic construct
  misc_feature 1..20: note = chemically synthesized
  source 1..20: mol_type = other DNA
aaaccatctgacaagtttgc

SEQ ID NO: 44497 - DNA, 20 bp, synthetic construct
  misc_feature 1..20: note = chemically synthesized
  source 1..20: mol_type = other DNA
cttcttcagccaaaatttat

SEQ ID NO: 44498 - DNA, 20 bp, synthetic construct
  misc_feature 1..20: note = chemically synthesized
  source 1..20: mol_type = other DNA
tggttcaaacccctgtgttc

SEQ ID NO: 44499 - DNA, 20 bp, synthetic construct
  misc_feature 1..20: note = chemically synthesized
  source 1..20: mol_type = other DNA
ctcccctccactacggacat

SEQ ID NO: 44500 - DNA, 20 bp, synthetic construct
  misc_feature 1..20: note = chemically synthesized
  source 1..20: mol_type = other DNA
cacttccggtgaccagttag

SEQ ID NO: 44501 - DNA, 20 bp, synthetic construct
  misc_feature 1..20: note = chemically synthesized
  source 1..20: mol_type = other DNA
tctggggtatagagagaggt

SEQ ID NO: 44502 - DNA, 20 bp, synthetic construct
  misc_feature 1..20: note = chemically synthesized
  source 1..20: mol_type = other DNA
tcttgtttcaattagaaaag

SEQ ID NO: 44503 - DNA, 20 bp, synthetic construct
  misc_feature 1..20: note = chemically synthesized
  source 1..20: mol_type = other DNA
aaaagtaatgcttggagaga

SEQ ID NO: 44504 - DNA, 20 bp, synthetic construct
  misc_feature 1..20: note = chemically synthesized
  source 1..20: mol_type = other DNA
aaggtcactgccaatagatg

SEQ ID NO: 44505 - DNA, 20 bp, synthetic construct
  misc_feature 1..20: note = chemically synthesized
  source 1..20: mol_type = other DNA
atgacttgattagaagcagg

SEQ ID NO: 44506 - DNA, 20 bp, synthetic construct
  misc_feature 1..20: note = chemically synthesized
  source 1..20: mol_type = other DNA
aaccatgcctagtgcccagg

SEQ ID NO: 44507 - DNA, 20 bp, synthetic construct
  misc_feature 1..20: note = chemically synthesized
  source 1..20: mol_type = other DNA
acagacatcttccctgaatg

SEQ ID NO: 44508 - DNA, 20 bp, synthetic construct
  misc_feature 1..20: note = chemically synthesized
  source 1..20: mol_type = other DNA
ctaatgccctctaactgatg

SEQ ID NO: 44509 - DNA, 20 bp, synthetic construct
  misc_feature 1..20: note = chemically synthesized
  source 1..20: mol_type = other DNA
agaatccatcagttaagggg

SEQ ID NO: 44510 - DNA, 20 bp, synthetic construct
  misc_feature 1..20: note = chemically synthesized
  source 1..20: mol_type = other DNA
tcagttaaggggaggtgttt

SEQ ID NO: 44511 - DNA, 20 bp, synthetic construct
  misc_feature 1..20: note = chemically synthesized
  source 1..20: mol_type = other DNA
tccacaccggagtaaaagac

SEQ ID NO: 44512 - DNA, 20 bp, synthetic construct
  misc_feature 1..20: note = chemically synthesized
  source 1..20: mol_type = other DNA
tttgtgctagtgcatgacac

SEQ ID NO: 44513 - DNA, 20 bp, synthetic construct
  misc_feature 1..20: note = chemically synthesized
  source 1..20: mol_type = other DNA
actgagatacccaggcggtg

SEQ ID NO: 44514 - DNA, 20 bp, synthetic construct
  misc_feature 1..20: note = chemically synthesized
  source 1..20: mol_type = other DNA
gcggtggttggatttatgga

SEQ ID NO: 44515 - DNA, 20 bp, synthetic construct
  misc_feature 1..20: note = chemically synthesized
  source 1..20: mol_type = other DNA
gaagaaagagtagatagaaa

SEQ ID NO: 44516 - DNA, 20 bp, synthetic construct
  misc_feature 1..20: note = chemically synthesized
  source 1..20: mol_type = other DNA
tgtaaaatcctatcctgctg

SEQ ID NO: 44517 - DNA, 20 bp, synthetic construct
  misc_feature 1..20: note = chemically synthesized
  source 1..20: mol_type = other DNA
attgcatgccagtctttgct

SEQ ID NO: 44518 - DNA, 20 bp, synthetic construct
  misc_feature 1..20: note = chemically synthesized
  source 1..20: mol_type = other DNA
caggaatctgaacacagaaa

SEQ ID NO: 44519 - DNA, 20 bp, synthetic construct
  misc_feature 1..20: note = chemically synthesized
  source 1..20: mol_type = other DNA
aaacattatataatttttaa

SEQ ID NO: 44520 - DNA, 20 bp, synthetic construct
  misc_feature 1..20: note = chemically synthesized
  source 1..20: mol_type = other DNA
ataccctatgtatttgagta

SEQ ID NO: 44521 - DNA, 20 bp, synthetic construct
  misc_feature 1..20: note = chemically synthesized
  source 1..20: mol_type = other DNA
ctatgtatttgagtaagttg

SEQ ID NO: 44522 - DNA, 20 bp, synthetic construct
  misc_feature 1..20: note = chemically synthesized
  source 1..20: mol_type = other DNA
gttgcttagcttctcccaac

SEQ ID NO: 44523 - DNA, 20 bp, synthetic construct
  misc_feature 1..20: note = chemically synthesized
  source 1..20: mol_type = other DNA
cctcatttctaaaacgaaga

SEQ ID NO: 44524 - DNA, 20 bp, synthetic construct
  misc_feature 1..20: note = chemically synthesized
  source 1..20: mol_type = other DNA
tctgggccccaccaccaaat

SEQ ID NO: 44525 - DNA, 20 bp, synthetic construct
  misc_feature 1..20: note = chemically synthesized
  source 1..20: mol_type = other DNA
tggctctgggtctgtatgta

SEQ ID NO: 44526 - DNA, 20 bp, synthetic construct
  misc_feature 1..20: note = chemically synthesized
  source 1..20: mol_type = other DNA
ctgtatgtaacaagcttctg

SEQ ID NO: 44527 - DNA, 20 bp, synthetic construct
  misc_feature 1..20: note = chemically synthesized
  source 1..20: mol_type = other DNA
acaagcttctggagtgattc

SEQ ID NO: 44528 - DNA, 20 bp, synthetic construct
  misc_feature 1..20: note = chemically synthesized
  source 1..20: mol_type = other DNA
caggacctactattctacgt

SEQ ID NO: 44529 - DNA, 20 bp, synthetic construct
  misc_feature 1..20: note = chemically synthesized
  source 1..20: mol_type = other DNA
taaaaaattaccacaaattt

SEQ ID NO: 44530 - DNA, 20 bp, synthetic construct
  misc_feature 1..20: note = chemically synthesized
  source 1..20: mol_type = other DNA
gtggaggtcagaagtctgaa

SEQ ID NO: 44531 - DNA, 20 bp, synthetic construct
  misc_feature 1..20: note = chemically synthesized
  source 1..20: mol_type = other DNA
taaagtcgaggtgtcagtgt

SEQ ID NO: 44532 - DNA, 20 bp, synthetic construct
  misc_feature 1..20: note = chemically synthesized
  source 1..20: mol_type = other DNA
gtttcttctggagactctat

SEQ ID NO: 44533 - DNA, 20 bp, synthetic construct
  misc_feature 1..20: note = chemically synthesized
  source 1..20: mol_type = other DNA
tctggagactctatgagaga

SEQ ID NO: 44534 - DNA, 20 bp, synthetic construct
  misc_feature 1..20: note = chemically synthesized
  source 1..20: mol_type = other DNA
ttgtgttttcctgccttttc

SEQ ID NO: 44535 - DNA, 20 bp, synthetic construct
  misc_feature 1..20: note = chemically synthesized
  source 1..20: mol_type = other DNA
tttcctgccttttccatgga

SEQ ID NO: 44536 - DNA, 20 bp, synthetic construct
  misc_feature 1..20: note = chemically synthesized
  source 1..20: mol_type = other DNA
tctagaggctacccacattc

SEQ ID NO: 44537 - DNA, 20 bp, synthetic construct
  misc_feature 1..20: note = chemically synthesized
  source 1..20: mol_type = other DNA
cgatcttcaaaaaaatgtat

SEQ ID NO: 44538 - DNA, 20 bp, synthetic construct
  misc_feature 1..20: note = chemically synthesized
  source 1..20: mol_type = other DNA
cctccctcttataatgacac

SEQ ID NO: 44539 - DNA, 20 bp, synthetic construct
  misc_feature 1..20: note = chemically synthesized
  source 1..20: mol_type = other DNA
ccttaattatatatgcaaaa

SEQ ID NO: 44540 - DNA, 20 bp, synthetic construct
  misc_feature 1..20: note = chemically synthesized
  source 1..20: mol_type = other DNA
ggctagaaaagataatactc

SEQ ID NO: 44541 - DNA, 20 bp, synthetic construct
  misc_feature 1..20: note = chemically synthesized
  source 1..20: mol_type = other DNA
acagaaaaaaaaaatgtagc

SEQ ID NO: 44542 - DNA, 20 bp, synthetic construct
  misc_feature 1..20: note = chemically synthesized
  source 1..20: mol_type = other DNA
tgtagaaaacatacaaacac

SEQ ID NO: 44543 - DNA, 20 bp, synthetic construct
  misc_feature 1..20: note = chemically synthesized
  source 1..20: mol_type = other DNA
tacaaacacacttgcttaat

SEQ ID NO: 44544 - DNA, 20 bp, synthetic construct
  misc_feature 1..20: note = chemically synthesized
  source 1..20: mol_type = other DNA
gcactgaaccagctggaaat

SEQ ID NO: 44545 - DNA, 20 bp, synthetic construct
  misc_feature 1..20: note = chemically synthesized
  source 1..20: mol_type = other DNA
gaaccagctggaaatgaatg

SEQ ID NO: 44546 - DNA, 20 bp, synthetic construct
  misc_feature 1..20: note = chemically synthesized
  source 1..20: mol_type = other DNA
cgcagctgataaaagcagag

SEQ ID NO: 44547 - DNA, 20 bp, synthetic construct
  misc_feature 1..20: note = chemically synthesized
  source 1..20: mol_type = other DNA
ctggagaaagcagctgtgaa

SEQ ID NO: 44548 - DNA, 20 bp, synthetic construct
  misc_feature 1..20: note = chemically synthesized
  source 1..20: mol_type = other DNA
aactctgtactttttctctc

SEQ ID NO: 44549 - DNA, 20 bp, synthetic construct
  misc_feature 1..20: note = chemically synthesized
  source 1..20: mol_type = other DNA
ctcaggggattagaaaaacc

SEQ ID NO: 44550 - DNA, 20 bp, synthetic construct
  misc_feature 1..20: note = chemically synthesized
  source 1..20: mol_type = other DNA
aattgatttgatagtgactc

SEQ ID NO: 44551 - DNA, 20 bp, synthetic construct
  misc_feature 1..20: note = chemically synthesized
  source 1..20: mol_type = other DNA
ctttagccaatgccctgcag

SEQ ID NO: 44552 - DNA, 20 bp, synthetic construct
  misc_feature 1..20: note = chemically synthesized
  source 1..20: mol_type = other DNA
ccctgcagctaagattgaga

SEQ ID NO: 44553 - DNA, 20 bp, synthetic construct
  misc_feature 1..20: note = chemically synthesized
  source 1..20: mol_type = other DNA
gattcagaactcacacctct

SEQ ID NO: 44554 - DNA, 20 bp, synthetic construct
  misc_feature 1..20: note = chemically synthesized
  source 1..20: mol_type = other DNA
tttaaagcacagtctgaatc

SEQ ID NO: 44555 - DNA, 20 bp, synthetic construct
  misc_feature 1..20: note = chemically synthesized
  source 1..20: mol_type = other DNA
gcgaaggcactgtaatgccc

SEQ ID NO: 44556 - DNA, 20 bp, synthetic construct
  misc_feature 1..20: note = chemically synthesized
  source 1..20: mol_type = other DNA
atatcatcctaactgcatgc

SEQ ID NO: 44557 - DNA, 20 bp, synthetic construct
  misc_feature 1..20: note = chemically synthesized
  source 1..20: mol_type = other DNA
aaagaataatttttcacttc

SEQ ID NO: 44558 - DNA, 20 bp, synthetic construct
  misc_feature 1..20: note = chemically synthesized
  source 1..20: mol_type = other DNA
cctgatcatcactcacacat

SEQ ID NO: 44559 - DNA, 20 bp, synthetic construct
  misc_feature 1..20: note = chemically synthesized
  source 1..20: mol_type = other DNA
cccacaagccacaaaaacca

SEQ ID NO: 44560 - DNA, 20 bp, synthetic construct
  misc_feature 1..20: note = chemically synthesized
  source 1..20: mol_type = other DNA
aaaaaccagcaagtttgtat

SEQ ID NO: 44561 - DNA, 20 bp, synthetic construct
  misc_feature 1..20: note = chemically synthesized
  source 1..20: mol_type = other DNA
ggcgaaattaaaattgctaa

SEQ ID NO: 44562 - DNA, 20 bp, synthetic construct
  misc_feature 1..20: note = chemically synthesized
  source 1..20: mol_type = other DNA
gataacatcttatcaggaga

SEQ ID NO: 44563 - DNA, 20 bp, synthetic construct
  misc_feature 1..20: note = chemically synthesized
  source 1..20: mol_type = other DNA
gacaggcgcacctggagggg

SEQ ID NO: 44564 - DNA, 20 bp, synthetic construct
  misc_feature 1..20: note = chemically synthesized
  source 1..20: mol_type = other DNA
aattcagcgatatttctccc

SEQ ID NO: 44565 - DNA, 20 bp, synthetic construct
  misc_feature 1..20: note = chemically synthesized
  source 1..20: mol_type = other DNA
ctgcctggctcaccagcagt

SEQ ID NO: 44566 - DNA, 20 bp, synthetic construct
  misc_feature 1..20: note = chemically synthesized
  source 1..20: mol_type = other DNA
atatacatcctcctcagctg

SEQ ID NO: 44567 - DNA, 20 bp, synthetic construct
  misc_feature 1..20: note = chemically synthesized
  source 1..20: mol_type = other DNA
cctcctcagctgacaggatt

SEQ ID NO: 44568 - DNA, 20 bp, synthetic construct
  misc_feature 1..20: note = chemically synthesized
  source 1..20: mol_type = other DNA
gtccatgaaatctttacaat

SEQ ID NO: 44569 - DNA, 20 bp, synthetic construct
  misc_feature 1..20: note = chemically synthesized
  source 1..20: mol_type = other DNA
aaatctttacaatttatgtt

SEQ ID NO: 44570 - DNA, 20 bp, synthetic construct
  misc_feature 1..20: note = chemically synthesized
  source 1..20: mol_type = other DNA
cacaatccacgaacttctgc

SEQ ID NO: 44571 - DNA, 20 bp, synthetic construct
  misc_feature 1..20: note = chemically synthesized
  source 1..20: mol_type = other DNA
gccatggcttcagctgatcc

SEQ ID NO: 44572 - DNA, 20 bp, synthetic construct
  misc_feature 1..20: note = chemically synthesized
  source 1..20: mol_type = other DNA
gctgtgttcagatggttaca

SEQ ID NO: 44573 - DNA, 20 bp, synthetic construct
  misc_feature 1..20: note = chemically synthesized
  source 1..20: mol_type = other DNA
acacatacacttacattaga

SEQ ID NO: 44574 - DNA, 20 bp, synthetic construct
  misc_feature 1..20: note = chemically synthesized
  source 1..20: mol_type = other DNA
tcaatcaatcgacaaatttc

SEQ ID NO: 44575 - DNA, 20 bp, synthetic construct
  misc_feature 1..20: note = chemically synthesized
  source 1..20: mol_type = other DNA
tgccatagtctcagccttca

SEQ ID NO: 44576 - DNA, 20 bp, synthetic construct
  misc_feature 1..20: note = chemically synthesized
  source 1..20: mol_type = other DNA
gtgtgttgagtgttgcaaga

SEQ ID NO: 44577 - DNA, 20 bp, synthetic construct
  misc_feature 1..20: note = chemically synthesized
  source 1..20: mol_type = other DNA
ccatagatgaggcagatagc

SEQ ID NO: 44578 - DNA, 20 bp, synthetic construct
  misc_feature 1..20: note = chemically synthesized
  source 1..20: mol_type = other DNA
aggcttctgcctacagcaag

SEQ ID NO: 44579 - DNA, 20 bp, synthetic construct
  misc_feature 1..20: note = chemically synthesized
  source 1..20: mol_type = other DNA
tacagcaaggctagtttgga

SEQ ID NO: 44580 - DNA, 20 bp, synthetic construct
  misc_feature 1..20: note = chemically synthesized
  source 1..20: mol_type = other DNA
ggacccacacacctcttcat

SEQ ID NO: 44581 - DNA, 20 bp, synthetic construct
  misc_feature 1..20: note = chemically synthesized
  source 1..20: mol_type = other DNA
atgctttttcttttttttcc

SEQ ID NO: 44582 - DNA, 20 bp, synthetic construct
  misc_feature 1..20: note = chemically synthesized
  source 1..20: mol_type = other DNA
ctatgcaatatccagcactc

SEQ ID NO: 44583 - DNA, 20 bp, synthetic construct
  misc_feature 1..20: note = chemically synthesized
  source 1..20: mol_type = other DNA
gaaaccatattgtcttccct

SEQ ID NO: 44584 - DNA, 20 bp, synthetic construct
  misc_feature 1..20: note = chemically synthesized
  source 1..20: mol_type = other DNA
tttgtcacctacagtacatt

SEQ ID NO: 44585 - DNA, 22 bp, synthetic construct
  misc_feature 1..22: note = chemically synthesized
  source 1..22: mol_type = other DNA
tccttctggcagggaacctggg

SEQ ID NO: 44586 - DNA, 22 bp, synthetic construct
  misc_feature 1..22: note = chemically synthesized
  source 1..22: mol_type = other DNA
ctggcagggaacctgggcagcg

SEQ ID NO: 44587 - DNA, 22 bp, synthetic construct
  misc_feature 1..22: note = chemically synthesized
  source 1..22: mol_type = other DNA
tggcagggaacctgggcagcga

SEQ ID NO: 44588 - DNA, 22 bp, synthetic construct
  misc_feature 1..22: note = chemically synthesized
  source 1..22: mol_type = other DNA
gcagggaacctgggcagcgagg

SEQ ID NO: 44589 - DNA, 22 bp, synthetic construct
  misc_feature 1..22: note = chemically synthesized
  source 1..22: mol_type = other DNA
ggcagcgaggatcctctgaaga

SEQ ID NO: 44590 - DNA, 22 bp, synthetic construct
  misc_feature 1..22: note = chemically synthesized
  source 1..22: mol_type = other DNA
tgaagaacactcattcccaaat

SEQ ID NO: 44591 - DNA, 22 bp, synthetic construct
  misc_feature 1..22: note = chemically synthesized
  source 1..22: mol_type = other DNA
aagaacactcattcccaaatcc

SEQ ID NO: 44592 - DNA, 22 bp, synthetic construct
  misc_feature 1..22: note = chemically synthesized
  source 1..22: mol_type = other DNA
attcccaaatccagaaatgtac

SEQ ID NO: 44593 - DNA, 22 bp, synthetic construct
  misc_feature 1..22: note = chemically synthesized
  source 1..22: mol_type = other DNA
ccaaatccagaaatgtactgta

SEQ ID NO: 44594 - DNA, 22 bp, synthetic construct
  misc_feature 1..22: note = chemically synthesized
  source 1..22: mol_type = other DNA
taggtgacaaagacacaaatgc

SEQ ID NO: 44595 - DNA, 22 bp, synthetic construct
  misc_feature 1..22: note = chemically synthesized
  source 1..22: mol_type = other DNA
gcaggatttaaagagcatttca

SEQ ID NO: 44596 - DNA, 22 bp, synthetic construct
  misc_feature 1..22: note = chemically synthesized
  source 1..22: mol_type = other DNA
aaagagcatttcagaaaattgg

SEQ ID NO: 44597 - DNA, 22 bp, synthetic construct
  misc_feature 1..22: note = chemically synthesized
  source 1..22: mol_type = other DNA
aagagcatttcagaaaattggc

SEQ ID NO: 44598 - DNA, 22 bp, synthetic construct
  misc_feature 1..22: note = chemically synthesized
  source 1..22: mol_type = other DNA
cagaaaattggcagtttactaa

SEQ ID NO: 44599 - DNA, 22 bp, synthetic construct
  misc_feature 1..22: note = chemically synthesized
  source 1..22: mol_type = other DNA
agaaaattggcagtttactaag

SEQ ID NO: 44600 - DNA, 22 bp, synthetic construct
  misc_feature 1..22: note = chemically synthesized
  source 1..22: mol_type = other DNA
gcagtttactaaggtaagaatt

SEQ ID NO: 44601 - DNA, 22 bp, synthetic construct
  misc_feature 1..22: note = chemically synthesized
  source 1..22: mol_type = other DNA
actaaggtaagaatttctatat

SEQ ID NO: 44602 - DNA, 22 bp, synthetic construct
  misc_feature 1..22: note = chemically synthesized
  source 1..22: mol_type = other DNA
ctaaggtaagaatttctatatg

SEQ ID NO: 44603 - DNA, 22 bp, synthetic construct
  misc_feature 1..22: note = chemically synthesized
  source 1..22: mol_type = other DNA
aggtaagaatttctatatggac

SEQ ID NO: 44604 - DNA, 22 bp, synthetic construct
  misc_feature 1..22: note = chemically synthesized
  source 1..22: mol_type = other DNA
ctatatggacctatgtttgtgt

SEQ ID NO: 44605 - DNA, 22 bp, synthetic construct
  misc_feature 1..22: note = chemically synthesized
  source 1..22: mol_type = other DNA
tatatggacctatgtttgtgta

SEQ ID NO: 44606 - DNA, 22 bp, synthetic construct
  misc_feature 1..22: note = chemically synthesized
  source 1..22: mol_type = other DNA
tatggacctatgtttgtgtatg

SEQ ID NO: 44607 - DNA, 22 bp, synthetic construct
  misc_feature 1..22: note = chemically synthesized
  source 1..22: mol_type = other DNA
tgtttgtgtatgatgttccaca

SEQ ID NO: 44608 - DNA, 22 bp, synthetic construct
  misc_feature 1..22: note = chemically synthesized
  source 1..22: mol_type = other DNA
gtgtatgatgttccacatataa

SEQ ID NO: 44609 - DNA, 22 bp, synthetic construct
  misc_feature 1..22: note = chemically synthesized
  source 1..22: mol_type = other DNA
tgtatgatgttccacatataat

SEQ ID NO: 44610 - DNA, 22 bp, synthetic construct
  misc_feature 1..22: note = chemically synthesized
  source 1..22: mol_type = other DNA
cacatataatatctttactgtg

SEQ ID NO: 44611 - DNA, 22 bp, synthetic construct
  misc_feature 1..22: note = chemically synthesized
  source 1..22: mol_type = other DNA
tactgtgtcttgacatatgaat

SEQ ID NO: 44612 - DNA, 22 bp, synthetic construct
  misc_feature 1..22: note = chemically synthesized
  source 1..22: mol_type = other DNA
actgtgtcttgacatatgaatc

SEQ ID NO: 44613 - DNA, 22 bp, synthetic construct
  misc_feature 1..22: note = chemically synthesized
  source 1..22: mol_type = other DNA
ctgtgtcttgacatatgaatca

SEQ ID NO: 44614 - DNA, 22 bp, synthetic construct
  misc_feature 1..22: note = chemically synthesized
  source 1..22: mol_type = other DNA
tgtcttgacatatgaatcattt

SEQ ID NO: 44615 - DNA, 22 bp, synthetic construct
  misc_feature 1..22: note = chemically synthesized
  source 1..22: mol_type = other DNA
gacatatgaatcatttagggaa

SEQ ID NO: 44616 - DNA, 22 bp, synthetic construct
  misc_feature 1..22: note = chemically synthesized
  source 1..22: mol_type = other DNA
acatatgaatcatttagggaag

SEQ ID NO: 44617 - DNA, 22 bp, synthetic construct
  misc_feature 1..22: note = chemically synthesized
  source 1..22: mol_type = other DNA
agggaagacaatatggtttctg

SEQ ID NO: 44618 - DNA, 22 bp, synthetic construct
  misc_feature 1..22: note = chemically synthesized
  source 1..22: mol_type = other DNA
gggaagacaatatggtttctgt

SEQ ID NO: 44619 - DNA, 22 bp, synthetic construct
  misc_feature 1..22: note = chemically synthesized
  source 1..22: mol_type = other DNA
ctgtgaattttaaagacttcta

SEQ ID NO: 44620 - DNA, 22 bp, synthetic construct
  misc_feature 1..22: note = chemically synthesized
  source 1..22: mol_type = other DNA
tgtgaattttaaagacttctaa

SEQ ID NO: 44621 - DNA, 22 bp, synthetic construct
  misc_feature 1..22: note = chemically synthesized
  source 1..22: mol_type = other DNA
tgaattttaaagacttctaatt

SEQ ID NO: 44622 - DNA, 22 bp, synthetic construct
  misc_feature 1..22: note = chemically synthesized
  source 1..22: mol_type = other DNA
taaagacttctaattaatcaga

SEQ ID NO: 44623 - DNA, 22 bp, synthetic construct
  misc_feature 1..22: note = chemically synthesized
  source 1..22: mol_type = other DNA
aaagacttctaattaatcagaa

SEQ ID NO: 44624 - DNA, 22 bp, synthetic construct
  misc_feature 1..22: note = chemically synthesized
  source 1..22: mol_type = other DNA
aagacttctaattaatcagaag

SEQ ID NO: 44625 - DNA, 22 bp, synthetic construct
  misc_feature 1..22: note = chemically synthesized
  source 1..22: mol_type = other DNA
ctaattaatcagaagagtgctg

SEQ ID NO: 44626 - DNA, 22 bp, synthetic construct
  misc_feature 1..22: note = chemically synthesized
  source 1..22: mol_type = other DNA
taattaatcagaagagtgctgg

SEQ ID NO: 44627 - DNA, 22 bp, synthetic construct
  misc_feature 1..22: note = chemically synthesized
  source 1..22: mol_type = other DNA
attaatcagaagagtgctggat

SEQ ID NO: 44628 - DNA, 22 bp, synthetic construct
  misc_feature 1..22: note = chemically synthesized
  source 1..22: mol_type = other DNA
atcagaagagtgctggatattg

SEQ ID NO: 44629 - DNA, 22 bp, synthetic construct
  misc_feature 1..22: note = chemically synthesized
  source 1..22: mol_type = other DNA
gatattgcatagacttctccac

SEQ ID NO: 44630 - DNA, 22 bp, synthetic construct
  misc_feature 1..22: note = chemically synthesized
  source 1..22: mol_type = other DNA
catagacttctccacccttagc

SEQ ID NO: 44631 - DNA, 22 bp, synthetic construct
  misc_feature 1..22: note = chemically synthesized
  source 1..22: mol_type = other DNA
ctccacccttagctgtacttag

SEQ ID NO: 44632 - DNA, 22 bp, synthetic construct
  misc_feature 1..22: note = chemically synthesized
  source 1..22: mol_type = other DNA
tccacccttagctgtacttagc

SEQ ID NO: 44633 - DNA, 22 bp, synthetic construct
  misc_feature 1..22: note = chemically synthesized
  source 1..22: mol_type = other DNA
cacccttagctgtacttagctg

SEQ ID NO: 44634 - DNA, 22 bp, synthetic construct
  misc_feature 1..22: note = chemically synthesized
  source 1..22: mol_type = other DNA
agctgtacttagctgatttgtg

SEQ ID NO: 44635 - DNA, 22 bp, synthetic construct
  misc_feature 1..22: note = chemically synthesized
  source 1..22: mol_type = other DNA
gctgtacttagctgatttgtgg

SEQ ID NO: 44636 - DNA, 22 bp, synthetic construct
  misc_feature 1..22: note = chemically synthesized
  source 1..22: mol_type = other DNA
tacttagctgatttgtgggtct

SEQ ID NO: 44637 - DNA, 22 bp, synthetic construct
  misc_feature 1..22: note = chemically synthesized
  source 1..22: mol_type = other DNA
agctgatttgtgggtctacact

SEQ ID NO: 44638 - DNA, 22 bp, synthetic construct
  misc_feature 1..22: note = chemically synthesized
  source 1..22: mol_type = other DNA
gctgatttgtgggtctacactg

SEQ ID NO: 44639 - DNA, 22 bp, synthetic construct
  misc_feature 1..22: note = chemically synthesized
  source 1..22: mol_type = other DNA
atttgtgggtctacactgtaac

SEQ ID NO: 44640 - DNA, 22 bp, synthetic construct
  misc_feature 1..22: note = chemically synthesized
  source 1..22: mol_type = other DNA
gtgggtctacactgtaacctcc

SEQ ID NO: 44641 - DNA, 22 bp, synthetic construct
  misc_feature 1..22: note = chemically synthesized
  source 1..22: mol_type = other DNA
tgggtctacactgtaacctccc

SEQ ID NO: 44642 - DNA, 22 bp, synthetic construct
  misc_feature 1..22: note = chemically synthesized
  source 1..22: mol_type = other DNA
cactgtaacctccctgaacttg

SEQ ID NO: 44643 - DNA, 22 bp, synthetic construct
  misc_feature 1..22: note = chemically synthesized
  source 1..22: mol_type = other DNA
taacctccctgaacttgagact

SEQ ID NO: 44644 - DNA, 22 bp, synthetic construct
  misc_feature 1..22: note = chemically synthesized
  source 1..22: mol_type = other DNA
cctgaacttgagactccatttc
